United States Patent Application Publication US 2006/0046253 A1 - sequence listing, part 9

SEQ ID NO: 82540 - DNA, 1221 bp, Saccharomyces pastorianus
atgattttgcctacttccaaggaagaaggaaaaggtataaagaaaagatatgctgtctttaatgaagacggctcacttgctgaactgaaaggttttgaattgaagaggcgtggtgaattacaactaataaaaaattttcaaagtgatattttcaaggtctttttggaaggtgatacattagaaggatgttacagtgctgtagcaagcgtatgtaaccgttggttagatgttcttgattcacatggtcttatgttagaagatgaagacttggtcagtttgatttgtgaaaatagaagtatgtcaaaaactttaaaggaatatgaagggcaaaaatctacttctattacgacggcaaggagattgggggattttttgggtgaagatatggtaaaagataaaggtctacaatgtaaatatattattagttcaaaacctttcaatgcacctgttactgaacgagccattccagtcgcaatattttcagcggacattcccatcaaaaggtcttttctgaggcgatggacattagatccatctttggaagatctggatatcagaaccataatcgattggggttattatagagaaagacttggatctgctatacaaaagataattactattccagcagcattacaaggggtttccaatcctgttccaagggttgaacatccagattggctaaaaagaaaaatcgctacaaaggaggataagtttaagcagacttcactaaccaaatttttttcgaagacaaagaatgtaccaacaatgggcaagataaaagatatcgaggatttgtttgaaccaactgtagaagaagataacgccaaaattaaaattgcaagaactactaaaaagaaagccgtatccaagaggaaaagaaatcagcttacaaatgaagaagatccactagtattgccctcggagattccttccatggacgaggactatgttgggtggctaaattatcaaaaaattaaatggaaaatccaagcaagagatagaaagcgtcgagaccaattatttggtaatacaaacagctcccgtgaaagaagtgcactaggaagtatgattaggaagcaagctgaatcatatgcgaactccacttgggaggtcttacaatacaaggattccggtgagccaggggttttggaagtatttgtaacaattaatggcaaagtccagaacatcaccttccatataccaaaaactattatatga

SEQ ID NO: 82541 - DNA, 2451 bp, Saccharomyces pastorianus
atgcttattgaaaaatcttctgcatcgttaccaaataatcccaaaacgtctaatccagcaggcggtcagctattcaaaattactctaccggaatctgtctttctggaagaaaaggaaaactgcactagtatcttcaacgatgaaaatgtacttggtgtatttgagggcactatcactcctcatcaaagagcgatcatggatttgggagcttcggtaacgttccgctcaaaagcaatgggtgcgttaggcaagggaatacagcagggttttgaaatgaaggatctttcaatggcggaaaatgaaaggtatctgagtggattttcaatggacattggctatttactacatttcccaacatcaattgggtatgaatttttttcattattcaaatcatggggagatactattactatattagttttgaaaccatccaaccaggctcaggaaataaatgcctcatcattaggacaaatatacaaacaaatgtttgaaaaaaagaaaggtaaaatagaaacatattcttacttggttgatattaaagaagatatcaattttgagtttgtatattttacagatatctcaaaattgtacagaagactatcacaggaaactactaaattaaaagaagaaagaggtctgcagtttttactcttgttacaatctccgtttatcactaagctcttaggcacaatccggcttctaaaccagatgcccattgttaagctttccttgaatgaagttcttctaccccaattgaactggcaaccgacattattgaagaaacttgttaaccacgttttatccagtggttcgtggatttctcacttgatcaagttatcccagtatagtaacattccaatctgtaatttgaggctggatagtatggattatgttattgatgttctttatgcaagaaaactaaaaaaagagaacatcgtgctttggtggaatgagaaagctccacttccagatcatggaggcattcaaaatgattttgatttaaatacatcatggataatgaatgattcagaatttcccaaaattaataactcaggtgtgtatgacaatgtagttctcgatgttggtgttgataatttaacagtgaacacaattttgacatcagcattaatcaatgatgctgaaggcagtgatctagttaacaataatatgggtatagatgacaaagatgccgttattaactcgccatctgaattcgtgcacgacgccttttctaatgacgctttgaatgttttaagaggtatgttaaaggagtggtgggatgaggccctaaaagaaaattcaaccgcagatttgttggtaaattccctggcaagttgggttcaaaacccgaatgcgaaactattcgacggattactaagatatcacgttcataacttaacaaaaaaagccttacttcaattagtaaatgaatttagtgcacttggctcaactattgtatatgcagacaggaatcaaattctaataaagacaaacaagtactcacctgaaaactgttacgcctacagccaatatatgatgaaggcagttagaacaaatccaatgtttagttatctggacttaaatatcaaacgttattgggatctgctaatatggatggataagtttaattttagtggattagcatgtattgaaatagaggaaaaggaaaatcaggattataccgctgtttcgcaatggcaactaaagaagtttctgtcaccaatatatcagcccgaatttgaggattggatgatgatcatattggatagtatgctaaagacaaagcagagctatctaaaattgaattcagggacgcaaagacctacccaaatagttaatgtaaaaaaacaagataaggaagatagtgttgaaaactcgttgaacggattttctcaccttttttccaaaccactaatgaaaagagtcaaaaagctttttaaaaaccagcaagagttcattttagatcctcagtatgaggcagactatgttattcctgttcttcctggttcccatctgaatgtgaaaaatccccttctagaacttgtcaaatcactctgccatgtcatgttactttcaaagagtacaattttagaaatcaggaccctgagaaaagaactgctgaagatatttgaattgcgtgagtttgctaaagtagcggaattcaaagatccaagtttgagtctcgtggtgccggattttttatgtgaatactgttttttcatttctgatattgacttttgtaaggcagctcctgaatctattttttcatgcgtcagatgtcacaaagcctttaatcaagtattgttgcaagaacacctgattcaaaaactacgttctgatatcgaatcctatttaattccagatttgagatgctccagatgtcataaagtgaaacgtgactatatgagtgcccactgtccatgtgccggcgcgtgggaaggactctcccca

SEQ ID NO: 82542 - DNA, 876 bp, Saccharomyces pastorianus
atgatgaataacaacggcaaccaagtgtcgaatctctccaatgcgctccgtcaagtaaacataggaagcaggaacagtaatacaaccaccgatcaaagtaatataaattttgaattttcaacaggtgtaaataataataataataacaatagcagtagtaataacaataatgttcaaaacaataacagcggccgcaatggtagccaaaataatgataacgagaataatatcaagaataccttagaacaacatcgacaacaacaacaggcattttcggatatgagtcacgtggagtattccagaattacaaaattttttcaagaacaaccactggagggatatacccttttctctcacaggtctgcgcctaatggattcaaagttgctatagtactaagtgaacttggatttcattataacacaatcttcctagatttcaatcttggcgaacatagggcccccgaatttgtgtctgtgaaccctaatgcaagagttccagctttaatcgatcatggtatggacaacttgtctatttgggaatcaggggcgattttattacatttggtaaataaatattacaaagagactggtaatccattactctggtccgatgatttagctgaccaatcacaaatcaacgcatggttgttcttccaaacgtcagggcatgcgccaatgattggacaagctttacatttcagatacttccattcacaaaagatagcaagtgctgtagaaagatatacggatgaggttagaagagtttacggtgtagtggagatggccttggctgaacgtagagaagcgctggtgatggaattagacacggaaaatgcggctgcatacttaggggatcctctagagtcgacctgcagc

SEQ ID NO: 82543 - DNA, 171 bp, Saccharomyces pastorianus
atgaattgcaaggcggtaaccattagtttattactgttgttatttttaacaagagtatatattcagccgacattctcgttaatttcagattgcgatgaaacttttaattattgggaaccattaaatttattggtacgtggatttggtaaacaaacctgggaatatcaccga

SEQ ID NO: 82544 - DNA, 375 bp, Saccharomyces pastorianus
atgagcgtaaagagcataagcaacaagagcaatacggcaactcaaacttcggaggtgctcctcaaggtggacacaacaaccatcaccgtcaggacaataacaacaataacggtggatttggcggtccaggcggccctggcggtcaaggtttcggaagacaaggcccacaaggatttggaggtcctggtccacaagagtttggtggtccaggtggccaaggattcggtggtccaaatcctcaagaattcggcgggccaggtggccaaggattcggtggtccaaaccctcaagaattcgggggccaaggtcgtcaaggattcaatggcggttcacgttggtgaatggctcaacggagtgagtgtcatttttagctaa

SEQ ID NO: 82545 - DNA, 231 bp, Saccharomyces pastorianus
atgcattatacaaatcatacgaagactttaaaggctcggttgttcagccaacgattgaaaacattcaacaaaggaatttgccgaatgatatcaagagatcattcgtgcactttaatgagaagttgcatgaaacgccccatttaccctcgccagttttttcttgttttactgggggagatattctccctccagaattcaattagacatcataagaacatatgcttactttaa

SEQ ID NO: 82546 - DNA, 1632 bp, Saccharomyces pastorianus
atgcaaagttcagtttattttgaccaaacagggtcatttgcgtccagtagcgacaacgttgtgtctagtaccaccaacacacacaacatttctcccagtcatcgttccagtttgaatctgaacactacttctcatccccacgaagcgtcgggtagaggaagcgcaagtggggagttgtatttgaatgacacaaactcacccttagcgatatcttctatgctaaacacacttgcccttggaagtatgccccaagacattgcaagcagcaacattagcaatcacgataacaacattaaggggagctacagcctaaaattgtcaaatgtacccaaggatattactctcagagaatgctatgcaatcttcgctcttgctgaaggtgtgaaaagtatagaattacagaaaaaaaactcttcatcaagcatcacttctgcctcattagaagacgagaatgatatttttatcattgccagatttgagttattgaatctagctattaattatgccgttattttgaattcgaaaaatgaactctttggacccagttttcccaataaaacaaccgttgaaataatagatgacacaacaaaaaacttggtttcattcccatcatctgccattttcaatgacacctcaagattgaataaatcgaactcgggaatgaaaaggccaagtctgttatcacaaagatccaggttttcattcagcgatccattttccaatgattctcctttaagccaacagcaatctcaacagcagcagcaacagccacaacagccacaacaacactctacgcaaaaacattcaccacaacaatgtaatcaacaacaagtgaattcttcaataccgttatcttctcaaggccaggttattgggttacattctaaccattcacatcaagatttgtctgtggaatcaacaattcaaacatctgatattggcaaatcttttcttttgagagataacactgaaattaatgaaaagatatggggcacaagcggtataccttccagcatcaacggttacatgagcactccccaaccttctacgccaactttagaatggggaaatacttctgcatcccaacatggttcttcgttctttttaccctctgcagcatcgacagccattgcacctacgaatagcaacaccagtgccaatgcaaacgccagctccaacaatggagccagcaatactggtgctaaccaggcactctctgccagctcgcaacaaccaatgatgcaaattggtaacacgattaacacttccctaacctcttcaaattcattgcctccatacggtttaatgtcttctcaatcgcagcacatctcaaatatggtaaacacctctgatatgaacattacacctcaaaaacagaacagatttatgcaacaaccccaaccagagcatatgtatcctgtgaatcaaagtaacactcctcaaaaagtaccgcccgcaagattaagttcaagtagaaattcacacaagaataactctactacctcattatcctcaaatattactggatctgcctcgatttctcaggctgatttgtcactactagccagaattccacctcctgccaacctgctgatcaaaatccaccttgtaatacctggggatcctctagag

SEQ ID NO: 82547 - DNA, 786 bp, Saccharomyces pastorianus
atgctgggtttgggccaatctgctcaagcatatgcaagtgatgatgctctcaatatgaaccaggcaaaggataaaacgtacagcgttccagggtgtggcagggcaagcgacctcaaatatcctcatcgtgacggacactcttcatctcacgaacagcgctctggaattttaccaactgaatgcccaggccctactttaaacaccggtgccggtagcatcggtatcccgggatgtggcaaagtcacaaatagagtggtcagtgactataacaaaaacgctaggtctacgctagccaattttgatagtagtaaaatgaccgaggcaagaatgaacagcaagaacgtgccgattggttgtcaagacacctctgatccgcacttcaatgggcctatcgaccaacatgttcccggtgcaggttcacctcaaagtcaacctcatcacatcgacgcgtggaacagcgtttcttctcgccgtgccgataataacaaccaagacatgatggacccccaaacggcttcctcagacaggtacaatgagaaaatgatgagagaagaaaatagcggcgtctctgcttcttcttacaccactaaagtgcagggatatcccgcaagtattccatcattcaatcaggaaactgaggaaaaggaaacctacgcctacggtgtgggtgatcggcacaatgtcccaagaaaccaaattatggatgagactaatccttcggctaacgttctaaacgctactgatcatagtatttcgcaccctgagaataaggtcttgcatgagtag

SEQ ID NO: 82548 - DNA, 3360 bp, Saccharomyces pastorianus
atgagtgatcaaaataatcgatcgagaaatgaatatcactcaaaccgggagaatgaaccttcctatgaactccaaaatgcacatagcgggctatttcactcttctaatgaagaattaacaaacaggaaccaaagatataccaatcaaaatgccagcatgggttcattcactccagtccaatctttgcaatttccagaacaatctcagcaaacaaatatgctttataacggtgacgatggcaataataatactatcaatgataacgaacgagacatatatggaggttttgtcaaccactatcgccagcgtcccccaccagcaactgcagagtacaatgacgtttttaatacgaatagtcaacagctaccgtcggaacatcaatacaataacgtaccttcatatccacttccttcgataaatgtgattcaaaccactccagaactcatacataacggctcacagactatggccacccccatcgaaaggcccttctttaacgaaaacgactactattataataacaggaactctaggacgtcaccgagtattgcttctagtagcgatggttatgcagatcaggaagctaggcccattttggagcaacccaacaataacatgaatagcggtaatattcctcaataccatgaccaaccttttggatacaacaatggttaccatggcctacaggcaaaagattactatgacgatccggagggtggttatattgatcagagaggagatgactatcagattaattcatatttgggtagaaacggtgaaatggttgatccttacgattatgaaaacagtttaagacatatgactcctatggagcgtagagaatatcttcatgatgataacagacccgtaaacgatggaaaagaagaattagacagtgtgaaaagcggttactctcatagagacttgggggaatatgacaaggatgatttttcaagggatgacgagtacgatgatctcgacactattgataaattacagtttcaagctaatggtgtacctgcatcatcctcggtgtcttctatcggatctaaagaatccgacataatagtaagcaatgataacttaaccgcaaatagagcactaaagagaagcggtactgaaattaggaaattcaaactttggaatggtaattttgttttcgattctccaatcagtaagacgctattggaccaatacgctactactacagaaaatgcaaacactttaccaaatgagtttaagtttatgaggtatcaagcagttacttgcgaacctaatcaacttgcagagaagaacttcacagtgaggcagttgaagtatttaactccaagggaaacggaattgatgctagtagtcacaatgtataatgaagaccatattctgttaggaagaactttgaaaggtattatggacaatgtcaaatatatggtgaaaaaaaaaaattcaagcacttgggggccggatgcatggaaaaagattgtcgtttgtatcatttcagatggtagatccaaaattaatgaacgctcgctagcattactaagttcgttaggttgttaccaggacgggtttgctaaggatgaaattaatgaaaaaaaagtggcaatgcatgtctacgaacatacgacaatgatcaacatcacaaatatttcggaatcagaggtttcattagaatgcaatcaaggtaccgttccaatacaacttttgttttgtttgaaagagcaaaatcagaaaaaaattaactcacatagatgggcatttgaaggctttgcagaattattgcgtcctaatatcgttacattgttagatgctggtaccatgccaggtaaagattctatttaccagttatggagagagttcaggaatccaaatgttggtggcgcatgtggtgaaataagaactgatttgggtaagagatttgtaaagcttttaaatcctttagttgcatcacagaatttcgaatacaaaatgtccaatattttagacaaaacaaccgagtctaactttggatttattactgttctaccgggggcattctctgcgtataggtttgaagctgtgagaggccaaccgttacagaagtacttttatggtgaaattatggaaaatgaaggttttcattttttttcttccaatatgtatcttgctgaagatcgtattttatgctttgaagtggtcacaaaaaaaaattgcaattggattttgaaatactgcagaagttcttatgcttcaacagatgtaccggagagggtccctgagtttattcttcagaggaggcgttggttgaatggttcattttttgctagtgtatattccttttgtcatttttacagagtctggagcagtggtcacaatattggtagaaaactccttttgacggttgaatttttttaccttttcttaaatacattgatttcatggttttcattgagttcatttttcctagtctttagaattctcactgtttctattgcactggcataccattcagcatttaatgtgttgtccgtcatattcctgtggctttatgggatttgtaccttatcaacattcatactgtcactgggtaataagcctaaaagtactgagaaattttatgttctaacttgcgtcatttttgcggtgatgatgatttacatgatattctgcagtatattcatgagtgtcaaatcattccagaatatattgaaaaacgataccatcagttttgagggtttgattaccacagaagccttcagggatattgttatctctctgggctccacttactgtttgtacctaatcagttcaattatctatttgcagccatggcatatgttgacaagttttattcagtatattttattgagtccttcttacatcaatgttttgaatatctatgcattttgtaatgtccacgacttatcatggggtacaaagggtgcaatggcaaatccgctgggtaaaattaatactacagaagatggtacgttcaaaatggaagttctggtctctagttcagagattcaagcaaactacgataaatatttgaaagttttgaatgacttcgatccaaaatcagaatctcggcctactgagccatcttatgatgaaaaaaagactggctattatgcaaacgttagatctctcgtgattatcttttgggtcatcacaaatttcatcatcgttgctgttgtcttagaaaccggtgggattgcagattatattgctatgaaatccatatcaactgatgacactttagaaactgcaaagaaggcggaaattcccttaatgaccagtaaggcctcaatttattttaatgtaattttatggttagttgcattatcggcattaataaggtcattggttgctcaatatacatga

SEQ ID NO: 82549 - DNA, 306 bp, Saccharomyces pastorianus
caagtttttcctttttttgttctttttgttttacttttcagtttctcggtagcttttcctattttgctgtttaaagtaagtttaaatagtaccctcactaaacacgtacggccgatccacccatggaccaaagcacgatccttgacccatcattgtattcccaagccttggaacattcactttttttttttccggtctattgcacaagacaatatccagaatattgagttggataggaaatacgagacaggtggcacccacaaagcacacgccgaaatatttattaaatacaatatagtatactaa

SEQ ID NO: 82550 - DNA, 738 bp, Saccharomyces pastorianus
atgaacttccacacggcaagaatatctcaggtcggtgtcatttctagggctctactttcttctgtaagtagacgttggattcatgtaacgccaataagtcttaataattcaggaggatcactattcggaagcattacagaaaataaaccaaaggaaggaaaaaacaggggggatgaagatgcaggcagcttctctaataggttagcgattgcttctgattcttctggagaggctcctgaagttaatagggattcgataactatagaaaacgataaactactacagcaacatatcatatctttacagcaaccggaacaattagcatcacagagcttattatctcctttgaaaagggaaatatatgaagctaattgtaaaattaatggtgggttttacaagaaagatactattgtaaagttaccaaattctagcgaacgttacaagctaaagttaacaaaaagagaaattgaagtactagaaccttccgtatatgttcagtcatatagaattaaatcgtcgatgaaaaaggctacacttttgttaaggttattaggaggtctcgacgttatgaaagctatatctcagtgtcacttttctaataagaaaattgctcgcgaagtagcagaactacttcaaaaaggtgtaaaagatggccaaaaattaggtttgaaaccagaggacttatatatctctcagatttggacagggagtgacgggttttgggagaaaacgtgttga

SEQ ID NO: 82551 - DNA, 936 bp, Saccharomyces pastorianus
atgaactccaatagtaccatcggaaggaccacccttggagaatctgatacgatatccctgtcattcagtgaaccaagtagcagtctgaattcacgatcaacggatgttgtcttcgcatctacttcaactttagtaccccaacaaggaagtctgacctcattaccgcccgtgtctagtacagctactcctacatattattctacaagcttaacatatgatgagactttgcatacatccattgatgtatcttcgacaagtactttagtatcatctaccgacagcagttcatcgagcgagcaagatacgtatagttcccaatatgacccagctacctcctcatactcaataattacaccatccatgtccattttctcatcgacgtcaccaatgtcatcatcgtcgtcaataacgtcggaatggtcatcgttaacatcaacaacaccaacgttatcgccatcagctacatcgctgtcatcatcatggtcgtcgttatcatcaccatcttcgttactggtatcgtcctcgttgtcatcttcatcatattcagacactaaattgttttcgttcgacagcagatcttctattttctcaccatcaacacccaccgtaatatcccctagttacacatacttgtcttccatatctacaacttcatttcaaattagtaccacctcagaactctcttttagttggttctcaacaatttctccttctacaacatcaagtaaagataccacattcccaagttccagtcggaatacttccacatcgttttacagttcatcgctttcatcgacgaacgatttttcaaccataagcaaatcatcgaaactcagtccatcagcttcatcttcgacagtttccataagcacgatttctgtgccaacgtcaagttctgttagctcatccagcagtaaagtatcgggatcctctaga

SEQ ID NO: 82552 - DNA, 351 bp, Saccharomyces pastorianus
atgcaatcgagcctacctcaatttacgttcaaatggcccaaaggacccgaagcagttattctgacaggcacgttcgacgactggaaaggtactttgccgatggtgaaggaccccagtggcgccttcgaaataacgctgccagtaacgtttgatagccctagcagcaagttttatttcaagtttattgttgatggccaatggctgccaagcaaagactacaaggtgaacatcgacaagggagtggaaaacaactctattaccgaggaagacgtaataaagcaacgcgcaaatggctatagcacactggtacctgaaagtgccggattagctgtttcaaagtatgcccctctt

SEQ ID NO: 82553 - DNA, 336 bp, Saccharomyces pastorianus
  modified_base (13)..(13): a, c, g, t, unknown, or other
atgcccaggaatnacactttgggtggtgagaacaagttagacgctgaacttgtattagacagagtgtcttccggtaataaggatctagatatacaaccgcaaaccatagttgtaggaggtgacaatgaatacaaccatgagagcagccgtttagctgatcaaacaccccatgacgataattcagaaaattgtcccaatcgctctggaggaagcactcccttagattctcaaactaaaatttttatccctaaaaagaattctaaagaagatggtaccaaacttggtccttttaactggaaaaatgtgcagtttgtttcgaaaaccatcaccgtatga

SEQ ID NO: 82554 - DNA, 843 bp, Saccharomyces pastorianus
atgtcggcggctatcgaaaaagaaaccggaatgttggatgtaggaaagcactgtgcatattgtagacaactagacttcctacctttccattgttcgttttgcaatgaagatttctgcgcgaaccatagacttaaggaagatcaccactgtaggtggttgctagagcatgaagaagttcataaaactgaaaaaagtcctagcaaaagccgggatggctcaagttctaacgatgaagcatatttcaagagtctgttacctgagagggccagtgttagaatccagagagtaagtgaaacaagagagcctttgagaggttctaacactgccaaagtgagctctactttgaactcaaagacattagacaaaatatttaagttcttccaaaggaatgagaaaagaaagagcaataacaaatcaaaaaagaatttcggttcctcgtcgaataagataattcaattggctaatctcaagaaaattgctaaaggtgaccccaagattcctatgcaaaataggatttacatttggtgttacttggtggatggtgatgagacggatatagccaaggaggatacaagaatgccattatacattaacaaaatgtggcctgtgggtagggccatggactatttgtctatccagctaaacgtgaaatctagcacactaactaattcaagttctaatgacaaatttcaactatgcaaattgaaagagggtaaacaagtttcattttataatattggcgcttccttaagagtcactaatgagatcaaagatcttgatactctgtatttagtacacaataacgccgacgaaaaatctaatcaagaaggacactataaataa

SEQ ID NO: 82555 - DNA, 114 bp, Saccharomyces pastorianus
atgaaacagagcaaagttaccgcacagctcgaaaaagacgcagaacgtctcgacaacaaaatagagactttagaggacaagcaaagagacatgattcccgtcttgatgctctga

SEQ ID NO: 82556 - DNA, 228 bp, Saccharomyces pastorianus
atggaactgttaccacagggacaaaggaacaacactcaggtaacgttcgaagatcagcaaaagatcaacgagttttcgaagttgattatgcgtaaggacgccattgcgcaggaattgagtttacagagggaggagaaggagtacctcgatgatgtgtctctagaaattgaattgattgacgaagatgagcccgtgcaatacaaggtgggcgacctcttatcttcatga

SEQ ID NO: 82557 - DNA, 1827 bp, Saccharomyces pastorianus
atgaagcaggagcagtcccacgaaggcgactcatacagcacggaattcataaatctctttggcaaagataccgcaacacaccctagcagcaacaacggtgctaataataatggcatggggagcacgaactcgttggaccagtttgtggcaacagcctcatcgtcatcttctctggtgaccagcagcgagaataggcgccccctaataggtgacgttaccaataggggcaacactaacctatatgaccacgctgtcacgccagaaatactcttagaacagttggcctacgtggataacttcataccatctctggataacgagttctctaatgtggattggaatgtgaataccacccataataatgcaaacaataatggcgcggacactttcagcagcataaatgcaaatccttttgacttggatgaacaactagccattgagttgagtgcgtttgccgacgattctttcatcttcccagacgaggataagccgagcaataacaataacaacagcaataatggtaatgacgaccatagcaaccacgacgtattgcatgaggacccttctaccaataatagacaaagaaatcctcacttcttgactcaaagaaggaatactttcctaacttcccaatacgaccaatcaaagtctcgattttcgtccaaaaacaaaagaaatggcaataacggcgaaacaaacaactttggcgacaatatgcaaaataaccatccttttgagccaaactttatgggaagcccttctcagtttcccgctgacgcaactaatatgacatcaatcgaccatggcggcttcacaaatgttgacattacatcaactgagaacaatactaccggtgacaatggagtggatgcgctatcaaatctactacataggacaacacacacaccgaaccgctcctcccccctaagcaatgtcacttctgctcaaaattcctctttacaacaacgaaaacattcggaaagcaaagtcgatagtaacagcgataataacagctccaacaaagcccccaatataactgttcctgactattcaattataccaacctctgttttagtaactctattaccgagggtcaacgtgcccaacggcgcatataactcgttgaccagcgcgggatttgacaatgatcaaatagatgctatagccgcaataatggcgtatcatcatcaaaaaaagattagggaaaataacagtaataataataaaaacatcaacaccaatgacagtcaagaggcacccattctaaaaaacatcaacgaacttttaagtgtcttaataccaccctctccggctgaaactgctgcgccaactaccatatcaacgtcgccttcgttcaatgagcacggtgtagtagcagaggcttcttttctaagctccattttggaactgggcataaagcatccaaaaagtaataatattcacaatcaacgacaaccttcacgaaacgatcataaaatatcaagagagagtgacggtaacaatggaaacgataatgtccatcataataacgctgttattaagtcaagtacgacgcgtggagacgaaattgccaagatacgatccgagccaactttaaatgcaagttcttctgatcacaaggaaaatagtttaaaaagatcacactccggagatttgaaaaataaaaaagtacccgtcgaccgcaagtattctgataatgaagacgatgaatatgacgatgcagatttacacggctttgaaaagaagcaactgatcaagaaagagttaggggacgacgatgaagatttattgatacagtcgaaaaaatctcatcaaaaaaaaaactaa

SEQ ID NO: 82558 - DNA, 792 bp, Saccharomyces pastorianus
atgtcttctaaaagtgaaaaattagaaaaattgagaaagctgcaagccgctcgaaatggtgcatccatcgatgattacgaaggtgacgaatcagatggtgacagaatatacgacgaaatcgacgaaaaagaatacagggccagaaagcgccaggaattgctgcatgacgattttgttgtagatgacgatggtgtaggctacgtcgatcgtggtgtcgaagaagattggagggaagttgataacagttcaagtgatgaagacactggaaaccttgctagcaaggattctaaaaggaagaagaatataaaaagggagaaagaccaccagattacagatatgctgcgaactcaacattccaaatcaacactgctagcacatgcaaaaaaatcccaaaaaaaaagtatccccatcgataattttgatgacattcttggtgagtttgaatctggtgaagtagaaaaacccaatattttactgccatccaaaataagggaaaatttaaactcttcgccgactagtgaatttagatcgtcaataaagagagttaacggaaacgatgagtcaagtcatgatgccggtatttctaaaaaagtcaagattgatccagattcaagtactgataaatatttagaaatcgaatcatcaccgttaaaattacaaagcaggaaactgcgctacgcaaatgatgtacaggatttattggatgatgtggaaaattccccagtagtagccacaaagagacagaatgtacttcaagatacgttactagcaatccaccatccgctcaagttg

SEQ ID NO: 82559 - DNA, 1836 bp, Saccharomyces pastorianus
atggtgcacattactctgggtcaagcgatatgggtgtcagttaagccgataatcaagatttatttgattataggagtcggctttctgatggctaaaatgggaattcttacggttgaagcaacaagaattatttctgatatcgtgctaacagttttactgccctgtctgtcattcaacaagattgtcgctaatattgaagataaagacatcaaatctgtgggaattatctgtctgtctgccctcctaatatttggttgtgggttcttttttgcatacgttgttaggctattcctgcctgttcctaaacaatggtacggtggtattcttgccggtggtatgtttccaaatataagtgatttaccaattgcatatttacaatctatggaccaagggcttgtattttcggaagaagaaggtaacaaaggtgtggctaacgtcattatatttctgacaatgtttctaatttgcattttcaatttgggggggtttcgactgattgaaagcgatttcgagtacaacgacgatgaaagcgccgttagggtttcagaaacgacaaagacacagcccgcagtaagtgcaaacacaactaatacagatactagcgagcgtttcttctcaaacgaacaacagcttttcaacaataagtacaccgctcgcgatagtctcactgaagctataggtacaaagggtgaaaacgcagacgtaccaccaatttcaaggagatcaacaaatagtatagctcccctgtcactaccagacacttcttcgaattcaaagattacaaaaccagttcaggcaaaggcaagaaatactattgcgtgcattcaaagcgaagagtcacaggcaactcgtggctcaaatccattagatagccaatcatctgcttcaacaatacattcttataatacgtcagagagttatgagagtagcatagatactatgagagcacgtagaaccgcgagccagccgagagcttacaatactaccacactcctagaagagaactgtttagatgaaaaatgcccaaaaaatatgtctatggcggcattggaacctatccgctccattgatatgcgtgcattaccttctcaaaatatacaccatcttatcagagagtactccaatgttgaccagtatggtcatcaaaggaggaattccagtttacgcggcgctgatatgaatgatgtgcattcaattagctcaaattccactttacagactataaaaactgctaacctaaccaggatcttaacatcagatgccactgtaagtaaaaaggatattgaaacatccggcgaatcattaccacagtggatgagaaaattttcattaactccattacttgtgtttttcctaaagaattgtttgagaccgtgctctatggccgtgatcatcgccctaactgttgcatttatcccatgggtcaaggctttgttcgtgactaccgctaatactcctcacataagccaagctcctgacaatgcaccaccattaagctttttcatggattttacaggttatgtcggtgccgcatgtgttccatttgggttgatattattaggagcaactttaggaagattaaagattggcaacctttatcctggattttggaaagccgctgtgacactcgtcattttgagacaatgtgtcatgccaatttttggtgtcctatggtgtgatcggttagtgaaagctggatgggttaattggcaagatgatagaatgctactatttgttatagcaatcagctggaacttgccaacgatgactacccttatatattttcccgccagtattacgccgacagaaacaactgcgccaatccaaatggagtgt

SEQ ID NO: 82560 - DNA, 1479 bp, Saccharomyces pastorianus
  modified_base (1412)..(1413): a, c, g, t, unknown, or other
atgaatagtcaaggttacgatgaaagctcttcctctacggctgctactagcggtcctacttctggagacccacgaatgggtaagaaacaacggtttatgaatctcataagaaccacaaaggatgtttatattcctaacctgacgtcatccatttctcaaaagacaatggatggcatcaggagcactacgaattccttcgaaggttataatgacttgcctatggaattgccacataataccacgataacatattttccaacgtataccacaactaatttggttgaccctgacggtttgagtgcgcctcggaaagattttgaaactactgtcagatgtgctgtttcttatccaggaaatcctacaagcaggagaaataggtggttgctttctctttgtaaacaatatcttagaactggaacggcggaggccgatgttgcacctgttgttccccctcatctcgaagaggattctggagatttaaacgactcccaatcaagtatagaaagttctttgtcttcaaagagcgaaaataggtattcacatatgggcatccaagaggaagatgttctgaatgagagaattcaaggattcctgtccaaaaaagttcctaatactccagtggtggttgacctattgcccaaagataagctcagaggggatacggcttccttttttggtaccacggactcttatggtaatttactaatcaaggcagaaacagattttttaccgtccaagattaatattacattagatacccctatagaaggccatgcagatccaatatctgaaacatttccggccaattatgtctcgccctacggtattggtttaatcagtgatattgacgacaccatcaagcatactggcgttacgggtgacaggagatcgatgtttcgtaatgttttcatccatgatgttcaatcgtgggtaatagatggtgttcctctttggtacaaaactttacatgatgtcgcagacgttgatttcttttatgtttctaattcacccatccaaacttttactcttttgaaacaatatatttgcgccaattttcctccgggtccaatttttttgaaacaatactctggtaatttcttttccactatcatgacttcaagtgcgaatagaaaaattcagccgattgcaaatatcttaaaggattttcccaaaaaaaaatttattttggtcggtgattctggtgaacatgacttagaagcgtataccactacggctttacaatttccgaaccagattctggctatttatataagatgttgctctaattccatgagtgatgtcccatcgcatgatgaagaagttatgaatgaagtgaacaatatcatcgaattacaacaacgggccatgcaaatgaccaagtctaccgtacataccaggagaaagaccacacnnactccattccttcactcaaaagcatcgttgacaaagagcaaacgaagtatagatgtccgcctataa

SEQ ID NO: 82561 - DNA, 1518 bp, Saccharomyces pastorianus
atgttgagagtgtttatcaataaggctgaaaacttgagaaatccagatagcttaggaaagataagtccatacgccaaagtatccgtcaatggtgtggcaagaggtaggacaaatgaaagaatgaagacattgaatcctatctggaaccaatcaatttatgtgtctgtcacatctcccttacaaaaagtctcaattgactgtttcggtatagatacaaatggcgatgatcataatctcgggagccttaatattcaaactcagaatatatatcataaagacaatgacgataaatataccatttttattgacaacgctccaagaactggcaacttaattggaaagaagggtgtaaaggggaccgttacgtattatttatcattttatccagttgttcctgttttaagcttggaagaggcgaaggaagttgacgagattaatgagaaaaaagataagctagaaaagcagaaaagtacactggatgacaaaaacatctcaaaggaggagaaagaaagaattaaaaaggaagagttcaggctcaccgaaaaatatgacatgtatagttacaaaatgaagcttgacctcgatgaattgctgcaatacaatgctggtgtactaggtgttactgtattaggcggggaactacctcagcctgggctctatgttcaaacattttttgattcctgtggttacgcagcgataactagtgcaaaaaatgctattaggaccattaaaacaggctggtcgggcgatttcatgataaaagagctggaatggtccgtgactacatttagggtaacaaagactaaagacgcgaataaggcggaaatttttatttgcgaagtcaacattccaacaattgaattggtgaggaactgttattacaaaccttccgtattaaatctaatagggaaaaagagtgccaaactattagttcaagtgtcatggttccccgtaactgccacggaattgcctcaatcagacttgataactaactctggtgatttgaaaatcaccgctaaaagtgctgaaaatctaattggtgttaataagaatggttattccgatccatatgtcgaattctttttgaatgaaaagagcacatcacccttctttaaaaccgcagttcaaaaaaagacactaaatcctacctggaacgaaagcaaaactatcgaagtttcaaatcgtgtcaatgactacttgacaattaacgtgaaagactacgaatccactaactccaataggagtattggaaaagccgttgttccattatctactattgatccagagagcgataccacctttaatataccgttagtgggaccaaagggagaagatggcggtgtgctacatcttgaatttgagtttgaaccccgctatactaccaatgtagtcaaacgtgaagccgggcttggaaattttgccacgaaaggattaggtacaggcatcaaagctggttctacagttttcgccttaggaaccaatgttgtaagcaccggattaggaacaatgataaagtaa

SEQ ID NO: 82562 - DNA, 1563 bp, Saccharomyces pastorianus
atgtctccaaactcgtcgaaaactcgaacggagcaggtaagctccatgcctggtattaatgaagccacgaaggtggaaagtaagaatgttgtgaaggatgctgttccaataaaatctgaagttgaaaccaatggtacatcaatagtaagagaaaaacaagacccctcgtacgttggttggaaacaagttggtggttgggaggaaaaggacgagttaacttccgaagaccttttagtggacgtaaacaaggacactttcttggggaaccttttaccagataaattctatggtgattggtatcatgaagtcgctattctcatcatcgctggtttatgttcctttgtgctgggctattttaaatcctctctcgcgtccgtccttatcgtgatgctaaccacaggaatgttatatagaacttcgtccaaaaaatatagggaatcgttaagggatttagcccagaaagaacaaactgtagagaaaattactagtgattatgaatctgtcgaatggttaaacacctttttagataaatactggcccattatcgaaccttctctctcccaacaaattgtcgatggtacaaatactgcattatctgaaaatgtggcaattccaaagtttataaaagccatctggctggatcaatttacgttaggtgtgaagcctccaagaattgatgccataaagacattccaaaatacaaaatctgatgtcgtagtcatggacgtatgtctatcattcactccacacgacatgtctgatcttgatgcaaaacaatgcaggaattacgtaaattccaatgtcgtattaaaggcaaagatattcggaatggacatacctgtttcagttgctgatattttttttcaagtttttgttagatttcgtttccaattgatgacgactttgcctcttgttgaaactataaatattcagttattggaagttcctgaagttgattttattagtcgtttattgggtaactccgtctttaattgggaaatcctggctattccaggcttaatgagattgattcaaaaaatggcatttaaatacttgagccctgttttactcccacctttctctttgcaacttaatataccacaacttctttccaagactggcttacctataggtgttttggaattcaaagtcaaaaatgcccatggattaagaaaacttgtgggcatgatcaagaaaacagttgacccatacttgacatttgagctctctggtaaaatagtcggtaaaactaaggtttttaaaaattctgctaatcctgtttggaatgaatccatttacattctgttgcaatcttttactgatccacttacaatagccgtatatgacaaacgcgaaaccttaagtgacaaaaaaatgggtacagtaattttcaacttgaataagttacatgcaaatcactatcacaaaaatgaaaaggtacatttcctaagaaattctaaacctgtcggtgagttgacatttgatttgcgattttcccccactattgaaccaaaaaaattactgaacggagatgaggagcctttaccggatatgaatacaggt

SEQ ID NO: 82563 - DNA, 981 bp, Saccharomyces pastorianus
atgttccaccacatcgaaaacttgttaattgagacagaaaaaaggtgtaagcaaaaggagcagaggtatatccctgtaaaatatttatttaccatgacacaaattcatcagataaacgatatagatgttcatcgaattacatctggacaagttatcaccgacttaacaactgcagtgaaagaactcgttgataatagtatagatgcgaacgcaaaccagatcgaaataatctttaaagattatggtcttgaatctatcgaatgttctgataatggtgatggcatagacccttcaaattatgagtttttagctttaaaacattacacatcaaaaattgcgaaatttcaagacgttgctaaagtacagacgttagggtttagaggggaggccctatcttctttatgtggcatagctaaactaagtgtcataacaacaacttcaccaccaaaagcggataagttggagtatgatatggtcggtcacattacttcaaagacaacgacatcaagaaataaagggacgaccgtgttagtttcgcagttatttcataacttgcctgttagacagaaagaatttagcaaaacttttaagcgccagtttaccaaatgtctcacagttatacaaggttatgcaatcataaatgctgccatcaaattttcagtttggaatatcacaccaaagggtaaaaaaaatctaattctatcaacaatgagaaattcaagtatgagaaagaatatatcctcagtattcggtgcaggtggtatgcgtgggcttgaagaggttgatatagtgcttgatttgaaccccttcaagaatagaatgcttgggatatacaccgatgatcctgatttcttagacctcgattataaaattcgagtgaagggctatatatcacagaattcgtttggttgtggtagaaatagtaaggataggcaattcatttatgtgaataaaaggccagtggatactctacgcttttaa

SEQ ID NO: 82564 - DNA, 663 bp, Saccharomyces pastorianus
atggacaaaatcagagaaaagctaagcaacttgaagttggaagccgaatcatggcaggagaagtacgaggagttgaaagagaagaacaaggacttggagcaagagaacgtcgaaaaggagaatcagatcaagtctttaaccgtcaaaaaccagcaattggaggatgagatcgagaagctggaagcgggactttctgactctaagcaaacagaacaggataacgttgaaaaagaaaatcagatcaagtccttgacggtgaagaaccaccaattggaggaagagatcgagaagttggaagcagaattggctgaatccaagcaattgtccgaggactctcaccacttgcagtccaacaacgacaatttctccaagaagaaccagcaattggaagaagacttggaggaaagcgacaccaagctaaaggaaaccactgagaaattgagagagtccgacttgaaggcagatcaattggaaagaagagtagctgccttggaagaacaaagagaagaatgggatagaaagaacgaggaattgaccgtcaagtacgaagacgcaaagaaggaactggacgaaattgctgcatctctggaaaactgtgatctactttgtttttgttttctttttcttttccccaacacgctggtctttgttccttgttcttga

SEQ ID NO: 82565 - DNA, 93 bp, Saccharomyces pastorianus
atgcggaatcattggcattttttttctttatttactaatttacctagaaaatccaaatggcacagggcgagcgaatttttttccctcttttaa

SEQ ID NO: 82566 - DNA, 93 bp, Saccharomyces pastorianus
atgtgtaaactcatgtggtgcactggtgttgtttccaagactgcactattaactgggaatttttttttttcttctagtgaattttttttttaa

SEQ ID NO: 82567 - DNA, 537 bp, Saccharomyces pastorianus
atgtggacgttaatgctttcctctatttcatccggtttatcagtggcgccatacaactatcatttggtcattattggtgtgtgttatctacccggtggtattggcggtttaatgggttccttcttcacaggtagaattattgacatgtatttcaagagaaagatcaagaaattcgagcaagacaaagctaacgggttgattccacaagacgcagagattaatatgttcaaagtccgtttagtttgtcttctgccccaaaatttcttggccgtcgtagcctatcttttatttggttggagtatagataagggctggaggatcgaatctattttaattacttcatttgtctgttcatactgtgctatgagtacattatcaacatcaactacgttattggtcgatttgtacccaacgaaatcatctacagcaagtagttgtttcaactttgttaggtgcagtttgagtaccatcttcatgggttgctttgccaaaatgaaagctgcgatgactgtaggtggtacttttacatttttatga

SEQ ID NO: 82568 - DNA, 918 bp, Saccharomyces pastorianus
atgtcacgaagtaacagtatatacacagaagatattgagatgtatcctactcacaatgagcagcatctgacgagagaatacacaaaaccagatggtcaaacgaaaagtgaaaaactaaatttcgaaggcgcttatatcaacagtcacgggactctatccaagaccaccacaagggaaatagaaggcgatttagactctgagacttcttctcactccagtgatgataaagttgatccaacccaacagataactgcagagacaaaagcgccatatactttactaagttacggtcagaagtggggaatggttgcaattctaacaatgtgtggcttttggtcttcattgggatcaccgatctattatcccgctttgaggcagttggaaaagcaattcaatgtggatgaaaatatggttaacgttactgtggttgtgtatctgttgtttcaaggtatatctcccacagttagcggtggtctggcggattgctttggacggagacctataattttagcaggtatgctgatatacgttattgcatccatcgggctagcatgtgctccatcatacggtgttattatcttcttgaggtgtattcagagtattggtatttcccccacaattgcaatcagttctggtgttgtcggggacttcactttgaagcatgaaagaggtacatttgttggcgccacctcagggtttgttttactgggtcaatgttttggtagtcttattggtgccgtcctgactgcaaggtgggattggagagctatcttttggtttttgaccattggttgtggaagttgttttctaattgcctttcttattttgccagaaacaaagcgaaccattgcaggtaacctttccattaagcctaaaagattcatcaacagagcgccgattttctactgggcccagtag

SEQ ID NO: 82569 - DNA, 588 bp, Saccharomyces pastorianus
atgcctcgaatatctacatcattgataagaaaagcttcgagaatacgacctggtttgcatcttttgcttccagaatgtaggactctcgagcaagcgaaactcgagtacaaatggctcaccgaagagctgcctccggataaatcaatccgctgggcttgcttacagagatacaaacacgtcccattacagtacatcttaagatcgcaaccgtttggggccttggacatagtttgcaagcctggtgttcttataccaagatgggaaaccgaggaatgggtgatggccataataagagctctaaacaactctatgctttcaaggcatactataccactgcatatttgtgatacgtttacaggaacagggtgtattgctctcgctttgagtcatggtatagcaaattgcacgttcactgccattgacgtgtcaacaagagcaattaagttggttaaagaaaatatgctgaaaaacaaggtgagtggtggtaagctcgtgcaacataatatattgtcctcaaaagctagcgatgaatatccatcccatatagatatattaaccggtaacccccccctacattcgaaagcgtga

SEQ ID NO: 82570 - DNA, 162 bp, Saccharomyces pastorianus
atgacagaagaagatagaaagctcactgtagagacagaaacagttgaggcacctgtggcaaataatcttttattgtcgaataacagtaatgtagtagcacctaatccttctattccctctgcctccacatctacctcttccgctacacagggaaatagttga

SEQ ID NO: 82571 - DNA, 264 bp, Saccharomyces pastorianus
atgttcttgcttccatttgtcattcgtcattccagctctatttacctgcccacacttcgatttcgaggtttacttactgtaatctcaagaaacatacacatttccacccctcataaaatgttgcctctttcaattgagcagagaagaccttcccgctcccccgaatacgatcagtctactttgtcaaattataaggacttcgcagttcttcacaccgatttaaacctgtctgttttcttcgaaaagtcagccatttcagggagc

SEQ ID NO: 82572 - DNA, 633 bp, Saccharomyces pastorianus
atgtcattcagcaacggaaatatggcttcctacatgactagtagtaatggagaggagcaaagtataaacaacaaaaacgatatagacgataacagcgcttacagacgtaataatttcaggaatagtagcaattcaggatcacatacgttccaattatcggacttggacttagatgtggatatgaggatggattccgccaattcatcggagaaaatatcaaagaacctttcctctggcatcccggactcatttgattctaacgtgaacagcttgctgtctccgtcaagcggttcttattctgcagatttgaattaccaaagtctatacaaaccagatcttccacagcaacagttacaacagcaacagttacaacagcaacagcaacagcaacagcaacagcaacaacaacagcaacagcagaagcaaacaccaactttaaaagtcgaacaatctgatacatttcagtgggacgatatcttaacacctgctgataatcaacatcggccatccctcacaaaccagtttttatctccaagatctaattacgatggtaccactaggagctcgggcattgactccaattatagcgataccgaatcaaactatcaacgcttatttgtatcccaggactag

SEQ ID NO: 82573 - DNA, 246 bp, Saccharomyces pastorianus
atgaactcatcatctggtgttgataatgagatttccttagacagcccgatgccaattttcaatgagagtcctactttaaagccaattagggttgcgggtgtagtaacaacagggacagatcatatcgaccctagcgtactacaggcatacttagatgatactattatgaaatccattactttggggcagctagtgaaaaatgcggatgtgtcaaatacgagattgtgccaccccacattgccttga

SEQ ID NO: 82574 - DNA, 546 bp, Saccharomyces pastorianus
atgaatttctacagggatgcaacatgggtgctagaagatattgagaaggaggctgcaaaagaaaggatttccggctctatgcagacgctggtactgaaaagctgtaaaagatataagctgaaaagtaatccaaaacatatttatgcagttctcgattcgtgttggaaatataaaccatatttggagaaagtgatgaaaaaggcacacatattggaagatatacccaagaaaaagggcaaaccactcttttcaaggctaactttgttattgctttgccatgatttgctgttgtctaagcagaaaagaattcaaatgggcaaacaccccatcaaagattatgttttgaagtttaagagcccattgcatagcgaaatggtcaaattgaaactcaaattgaaagtaagagagctatctgagttggtattaagcgaggatatttccaatgaccttcctcctgttagatggattagaatcaatccattaaaatgccatccaaatggtgagactgagccggtgttagccgaattgaggaagagtttactttaa

SEQ ID NO: 82575 - DNA, 99 bp, Saccharomyces pastorianus
atgctaacaagcctcttcgttcacctcccttgtaacggcagtgggaagggtaagcaaaataaatcacattgccaatgcaaaaaaaagaatggtctctag

SEQ ID NO: 82576 - DNA, 201 bp, Saccharomyces pastorianus
  modified_base (182)..(182): a, c, g, t, unknown, or other
atgtcagattcacaacaatcaatcaccgttctagaagagcttttccgaaagttggaaactgctacttcggaaacaagagagggtatttcttcggagctttcctcatttttaaacgggaatatcatcgagcatgacgttcccgaagttttctttgatgaatttcaaaaagctatccagagtanacaaaaggcgctcaacacg

SEQ ID NO: 82577 - DNA, 114 bp, Saccharomyces pastorianus
atgcaaaaactcctctttgtcttttctgtgttattgacagtagtactagcaacagcaccatttcaggtacaatgtcctagctctccacttattagggaggccaaagtaagttaa

SEQ ID NO: 82578 - DNA, 1041 bp, Saccharomyces pastorianus
atgagtgatgatcatggttatgaaagagacaaccatttgtcccggaggtcaggtaattataacggtaggcgtaagttcgcagatacgtacagaggaagcagagatagaggagaatatagaggaggtagagaaaggtctgattacagagaaagagaaaggttcaataacagagataatcctagatctagagaccgttacgatgataggcgcagaggaagagatgtgactggtcgttatgggaacagacgtgatgactatcctagaagctttaggagtagacacaatacacgtgatgacagtaggagaggcggttttggtagtagtggagcaagaggtgattacggtcctttgttggcacgtgaattggatagtacatacgaagaaaaggtcaatagaaactattccaatagtatattcgtgggtaatttaacatatgacagcacccccgaagatctcactgagtttttttcacagataggaaaagtagtccgcgcggatataattacatcaagagggcaccacagaggtatgggtacagtagagttcactaattcggatgatgttgacagggccatccgccagtacgatggggccttcttcatggatcgtaaaatcttcgtcaggcaagataatccaccaccgtcaaacaatatcaaggaaaggaaagcactcgatagaggagagcttagacataaccgaaaaacacatgaagttattgtaaaaaatttacctgcttccgttaattggcaggctttgaaagacatattcaaggaatgtgggaatgtcgcacacgctgatgtggaattggatggcgatggagtatccactggatctggtacggtgtccttttatgatattaaagatctgcatagagcgattgagaaatacaacggttatagtatagagggtaacgtcttggatgtcaagtctaaggaaagcgtacataaccacagtgatggagacgatgttgatatcccaatggatgattctcccgttaacgaagaagctcgaaaatttaccgaaaacgttgtcggtggaggt

SEQ ID NO: 82579 - DNA, 273 bp, Saccharomyces pastorianus
atgttctttatagcccactgctccacgggctacttacagggcattaatgaagttttgaaaaatccactatatgcttcaaagctgcaagatactaaatactccaaagaaatcatggtgatggatgaatttttgttgcatttaaacaaggatgatgataaagcttggtatggtgaaaaagaggtagttaaagcggctgagtatggcgcaattagttatttactgttaacagataaagttttgcattcagactatattgcactaagagaggaatag

SEQ ID NO: 82580 - DNA, 552 bp, Saccharomyces pastorianus
atgaaggatgaatatttgaaatataaaggtgttactgctacagatgaaagtggagctagtaatgttgacatacctgtcggcaaatatttgagctttacccttgactacgtgtatccctttactatcataaaacaaaactttaataaattcatgcaaaagctcttaaatgaagcctgtaatatcgagtataaatcagacaccgcggcggtcgttttacaggaagggatcgcccatgtttgtttagtgacatcctcctctactattttaaaacaaaaaattgaatatagtatgccaaaaaagaaaaggactactgatgtactgaagtttgatgaaaaaactgagaaattttataaagcaatttacagtgcaatgaagaaagatttgaattttgataaattaaagactattattctttgctctccaggtttctacgctaagatattaatggacaaaattttccagtatgccgaagaggaacacataagaaaatactcgataacaaggaatgttctttatagcccactgctccacgggctacttacagggcattaa

SEQ ID NO: 82581 - DNA, 330 bp, Saccharomyces pastorianus
  modified_base (237)..(295): a, c, g, t, unknown, or other
atgtgtgactcgctgcaccaaataaggaaggatccaaacaatctctcaaatcaattggaaaccttaacaggttcgattagacatcgtttgaaactttgtaaatctttgatatcggaaaacgaagataccaaggatttattaagtaaaagtccatcagaatggcaggatatcatccatcaacgtgaacaagaactgcaaattaagagagacgtcttggatgatctttatcgcaagttnnnnnnnnnnnnnnnnnnnnnnnnnnnnnnnnnnnnnnnnnnnnnnnnnnnnnnnnnnnacatacgcataccacatcttcaaacgtgcatataa

SEQ ID NO: 82582 - DNA, 534 bp, Saccharomyces pastorianus
  modified_base (449)..(449): a, c, g, t, unknown, or other
  modified_base (452)..(491): a, c, g, t, unknown, or other
atgaatctacagaacaacgttttaaatcagatacaccagattctgctgcctacgaatcctactctcgataaacctaatgctgaggctacaaaggaagaattttcgtctgcagaaaatagagatgaaaaagactatcttaccaaccagcagccgaaaaatctgagtactccctccaccagttccaacggtgaatttataccgcatattttttactcgctgcaccaaataaggaaggatccaaacaatctctcaaatcaattggaaaccttaacaggttcgattagacatcgtttgaaactttgtaaatctttgatatcggaaaacgaagataccaaggatttattaagtaaaagtccatcagaatggcaggatatcatccatcaacgtgaacaagaactgcaaattaagagagacgtcttggatgatctttatcgcaagttacaacgatnaannnnnnnnnnnnnnnnnnnnnnnnnnnnnnnnnnnnnnnnatatatatacatacgcataccacatcttcaaacgtgcatataa

SEQ ID NO: 82583 - DNA, 216 bp, Saccharomyces pastorianus
atgtcccatcgtatagcaccttccaaagaacgatcttcatcatttatttcaattttagacgatgaaacaagagacacattgaaagctaatgcagtcatggatggtgaagtagatgtcaaaaaaaccaaaggaaaaagctctcggtatatcccaacatggacaattccatatatactaggtatacgtggtgctccggttccggcaagacaagcttga

SEQ ID NO: 82584 - DNA, 6714 bp, Saccharomyces pastorianus
atgagcgaagaaagcttattcgagtcgtctccacagaagatggagtacgaaattacaaactactcagaaagacatacagaacttccaggtcatttcattggccttaatacagtagataaactagaggagtccccgttaagggattttgttaagagtcacggtggtcacacggtcatatccaagatcctgatagcaaataatggtattgccgccgtgaaagaaattagatccgtcagaaaatgggcatacgagacgttcggcgatgacagaaccgtccaattcgtcgccatggccaccccagaagatctggaggccaacgcagaatatatccgtatggccgatcaatacattgaagtgccaggtggtactaataataacaactacgctaacgtagacttgatcgtagacatcgccgaaagagcagacgtagacgccgtatgggctggctggggtcacgcctccgagaatccactattgcctgaaaaattgtcccagtctaagaggaaagtcatctttattgggcctccaggtaacgccatgaggtctttaggtgataaaatctcctctaccattgtcgctcaaagtgctaaagtcccatgtattccatggtctggtaccggtgttgacaccgttcacgtggacgagaaaaccggtctggtctctgtcgacgatgacatctatcaaaagggttgttgtacctctcctgaagatggtttacaaaaggccaagcgtattggttttcctgtcatgattaaggcatccgaaggtggtggtggtaaaggtatcagacaagttgaacgtgaagaagatttcatcgctttataccaccaggcagccaacgaaattccaggctcccccattttcattatgaagttggccggtagagcgcgtcacttggaagttcaactgctagcagatcagtacggtacaaatatttccttgttcggtagagactgttccgttcagagacgtcatcaaaaaattatcgaagaagcaccagttacaattgccaaggctgaaacatttcacgagatggaaaaggctgccgtcagactggggaaactagtcggttatgtctctgccggtaccgtggagtatctatattctcatgatgatggaaaattctactttttagaattgaacccaagattacaagtcgagcatccaacaacggaaatggtctccggtgttaacttacctgcagctcaattacaaatcgctatgggtatccctatgcatagaataagtgacattagaactttatatggtatgaatcctcattctgcctcagaaatcgatttcgaattcaaaactcaagatgccaccaagaaacaaagaagacctattccaaagggtcattgtaccgcttgtcgtatcacatcagaagatccaaacgatggattcaagccatcgggtggtactttgcatgaactaaacttccgttcttcctctaatgtttggggttacttctccgtgggtaacaatggtaatattcactccttttcggactctcagttcggccatatttttgcttttggtgaaaatagacaagcttccaggaaacacatggttgttgccctgaaggaattgtccattaggggtgatttcagaactactgtggaatacttgatcaaacttttggaaactgaagatttcgaggataacactattaccaccggttggttggacgatttgattactcataaaatgaccgctgaaaagcctgatccgactcttgccgtcatttgcggtgccgctacaaaggctttcttagcatctgaagaagcccgccacaagtatatcgaatccttacaaaagggacaagttctatctaaagacctactgcaaactatgttccctgtagattttatccatgagggtaaaagatacaagttcaccgtagctaaatccggtaatgaccgttacacattatttatcaatggttctaaatgtgatatcatactgcgtcaactatctgatggtggtcttttgattgccataggcggtaaatcgcataccatctattggaaagaagaagttgctgctacaagattatccgttgactctatgactactttgttggaagttgaaaacgatccaacccagttgcgtactccatcccctggtaaattggttaaattcttggtggaaaatggtgaacacattatcaagggccaatcatatgcagaaattgaagttatgaaaatgcaaatgcctttggtttctcaagaaaatggtatcgtccagttattaaagcaacctggttctaccattgttgcaggtgatatcatggctattatgactcttgacgatccatccaaggtcaagcacgctctaccatttgaaggtatgctgccagattttggttctccagttatcgaaggaaccaaacctgcctataaattcaagtcattagtgtctactttggaaaacattttgaagggttatgacaaccaagttattatgaacgcttccttgcaacaattgatagaggttttgagaaatccaaaactgccttactcagaatggaaactacacatctctgctttacattcaagattgcctgctaagctagatgaacaaatggaagagttagttgcacgttctttgagacgtggtgctgttttcccagctagacaattaagtaaattgattgatatggccgtgaagaatcctgaatacaaccccgacaaattgctgggcgccgtcgtggaaccattggcggatattgctcataagtactctaacgggttagaagcccatgaacattctatatttgtccatttcttggaagaatattacgaagttgaaaagttattcaatggtccaaatgttcgtgaggaaaatatcattctgaaattgcgtgatgaaaaccctaaagatctagataaagttgtgctaactgttttgtctcattcgaaagtttcagctaagaataacctgatcctagctatcttgaaacattatcaaccattgtgcaagttatcttctaaagtttctgccattttctctactcctctacaacatattgttgaactagaatctaaggctaccgctaaggtcgctctacaagcaagagaaattttgattcaaggcgctttaccttcggtcaaggaaagaactgaacaaattgaacatatcttaaaatcctctgttgtgaaggttgcctatggctcatccaatccaaagcgctctgaaccagatttgaatatcttgaaggacttgatcgattctaattacgttgtgttcgatgttttacttcaattcctaacccatcaagacccagttgtgactgctgcagctgctcaagtctatattcgtcgtgcttatcgtgcttacaccataggagatattagagttcacgaaggtgtcacagttccaattgttgaatggaaattccaactaccttcagctgcgttctccacctttccaactgttaaatctaaaatgggtatgaacagggctgtttctgtttcagatttgtcatatgttgcaaacagtcagtcatctccgttaagagaaggtattttgatggctgtggatcatttagatgatgttgatgaaattttgtcacaaagtttggaagttattcctcgtcaccaatcttcttctaacggacctgctcctgatcgttcaggtagctccgcatcgttgagtaatgttgctaatgtttgtgttgcttctatagaaggtttcgaatctgaagaggaaattttggtaaggttgagagaaattttggatttgaataagcaggaattaatcaacgctgctatccgtcgtatcacatttatgttcggttttaaagatgggtcttatccaaagtattacacttttaacggtccaaattataacgaaaatgaaacaattcgtcacattgagccggctttggccttccaactggaattaggaagattgtccaacttcaacattaaaccaattttcactgataatagaaacatccatgtctacgaagctgttagtaagacttctccattggataagagattctttacaagaggtattattagaacgggtcatatccgtgatgacatttctattcaagaatatctgacttctgaagctaacagattgatgagtgatatattggataatttagaagtcaccgacacttcaaattctgatttgaatcatatcttcatcaacttcattgctgtgtttgatatctctccagaagatgtcgaagccgccttcggtggtttcttagaaagatttggtaagaggttgttgagattgcgtgtttcttctgccgaaattagaatcatcatcaaagatcctcaaacaggtgccccagtaccattgcgtgccttgatcaataacgtttctggttatgttatcaaaacagaaatgtacaccgaagtcaagaacgcaaaaggtgaatgggtatttaagtctttgggtaaacctggatccatgcatttaagacctattgctactccttaccctgttaaggaatggttgcaaccaaaacgttataaggcacacttgatgggtaccacatatgtctatgacttcccagaattattccgccaagcatcgtcatcccaatggaaaaatttctctgcagatgttaagttaacagatgatttctttatttccaacgagttgattgaagatgaaaacggcgaattaactgaggtggaaagagaacctggtgccaacgctattggtatggttgcctttaagattactgtaaagactcctgaatatccaagaggccgtcaatttgttgttgttgctaacgatatcacattcaagatcggttcctttggtccacaagaagacgaattcttcaataaggttactgaatatgctagaaagcgtggtatcccaagaatttacttggctgcaaactcaggtgccagaattggtatggctgaagagattgttccactatttcaagttgcatggaatgatgctgccaatccggacaagggcttccaatacttatacttaacaagtgaaggtatggaaactttaaagaaatttgacaaagaaaattctgttctcactgaacgtactgttataaacggtgaagaaagatttgtcatcaagacaattattggttctgaagatgggttaggtgtcgaatgtctacgtggatctggtttaattgctggtgcaacgtcaagggcttaccacgatatcttcactatcaccttagtcacttgtagatccgtcggtatcggtgcttatttggttcgtttgggtcaaagagctattcaggtcgaaggccagccaattattttaactggtgctcctgcaatcaacaaaatgctgggtagagaagtttatacttctaacttacaattgggtggtactcaaatcatgtataacaacggtgtttcacatttgactgctgttgacgatttagctggtgtagagaagattgttgaatggatgtcttatgttccagccaagcgtaatatgccagttcctatcttggaaactaaagacacatgggatagaccagttgatttcactccaactaatgatgaaacttacgatgtaagatggatgattgaaggtcgtgagactgaaagtggatttgaatatggtttgtttgataaagggtctttctttgaaactttgtcaggatgggccaaaggtgttgtcgttggtagagcccgtcttggtggtattccactgggtgttattggtgttgaaacaagaactgtcgagaacttgattcctgctgatccagctaatccaaatagtgctgaaacattaattcaagaacctggtcaagtttggcatccaaactccgccttcaagactgctcaagctatcaatgactttaacaacggtgaacaattgccaatgatgattttggccaactggagaggtttctctggtggtcaacgtgatatgttcaacgaagtcttgaagtatggttcgtttattgttgacgcattggtggattacaaacaaccaattattatctatatcccacctaccggtgaactaagaggtggttcatgggttgttgtcgatccaactatcaacgctgaccaaatggaaatgtatgccgacgtcaacgctagagctggtgttttggaaccacaaggtatggttggtatcaagttccgtagagaaaaattgctggacaccatgaacagattggatgacaagtacagagaattgagatctcaattagccaacaagagtttggctccagaagtacatcagcaaatatccaagcaattagctgatcgtgagagagaactattgccaatttacggacaaatcagtcttcaatttgctgatttgcacgataggtcttcacgtatggtggccaagggtgttatttctaaggaactggaatggaccgaggcacgtcgtttcttcttctggagattgagaagaagattgaacgaagaatatttgattaaaaggttgagccatcaggtaggcgaagcatcaagattagaaaagatcgcaagaattagatcgtggtaccctgcttcagtggaccatgaagatgataggcaagtcgcaacatggattgaagaaaactacaaaactttggacgataaactaaagggtttgaaattagagtcattcgctcaagacttagctaaaaagatcagaagcgaccatgacaagctattgatggattatctgaagttatcaagatgttatctaccgatgataaagaaaattgttgaagactttgaaatgagccttgtaaagtaa

SEQ ID NO: 82585 - DNA, 690 bp, Saccharomyces pastorianus
atggacaagaagaaggatctactggagaacgaacaatttctccgcatccaaaagctcaacgctgccgatgcgggcaaaagacaatctataacagtggacgacgagggcgaactatatgggttagacacctccggcaactcaccagccaatgaacacacagctaccacaattacacagaatcacagcgtggtggcctcaaacggagacgtcgcattcatcccaggaactgctaccgaaggcaatacagagattgtaactgaagaagtgattgagaccgatgataacatgttcaagacccatgtgaagactttaagctccaaagagaaggcacggtataggcaagggtcctctaactttatatcgtatttcgatgatatgtcatttgaacacaggcccagtatattagatgggtcagttaacgagcccttcaagaccaaattcgtgggacctactttagaaaaggagatcagaagaagggagaaagagctaatggccatgcgcaaaaatttacaccaccgcaagtcctccccagatgctgtcgactcagtagagaaaaatgatggcgccgccccaactactgttccaactgccgccacctcagaaacggtggtcacggttgaaaccaccatactttcatccaatttctccgggttgtacgtggcgttttggatggtattgcattggtgctgt

SEQ ID NO: 82586 - DNA, 675 bp, Saccharomyces pastorianus
atgaagttcgtgacaagtagttataacgtcgggtatcctgcgtacggtgcaaaatttttgaataacgacacattacttgtggcaggcggtggaggagaaggaaacaatggcataccaaacaagctgacggtcttgcgcgtggatcctaccaaagatactgagaaggaacagtttcatatattgagcgagtttgcattggaagacaacgacgactctcctactgcaattgacgcttccaagggtatcattttggttggctgcaatgaaaatagcactaagattgcccaaggtaaaggtaataagcacttgagaaaatttaaatacgataaagtgaatgatcaattggagttcctcactagtgtagactttgacgcatctacaaatgcggatgactacacgaagctggtttatatttcacgagaaggtaccgttgcagctatcgcatcatctaaagtacctgctataatgagaatcattgacccgagcgacttgacagagaagtttgagatcgagactaggggtgaagtaaaggatttacacttttccactgatggtaaggttgttgcttatatcaccggttctagcttggaagtgatttcaacagtgactggaagttgcattgctaggaaaacagattttgataagaattggagtttatctaaaataacttcatag

SEQ ID NO: 82587 - DNA, 930 bp, Saccharomyces pastorianus
atgaccagtacattacatacgacaaaaaaagtgctctccattcaatcacacgtcatacatggctacgtgggaaacaaggccgctacgttcccacttcaatacagaggttgggatgtggacgtattgaacacagttcagttttctaaccactcggggtacgcccacttcacaggcttcaaatgcagcactgaggagttggtagacattgtagagaagggcttgattgggtctcttagaatcaagtatgatgccgtacttagtggctatttacccaatgttcaagccctgcaaaaggtagcaggaatagtgggtcaattatgtgaggggagtgaaaacgtcaagtggattttagatcctgtactgggcgataatggaaggctgtacgtggatcgagaatgtgttgcggtataccaagacattttacaaaacttcaaaatttttttggccacaccaaatcagtttgaaatggaactgttggtggggatgtcaattcgtaccttagacgacgctaagcaggcatttaaactatttcataaaaagtaccctcgagtaagccgaatagttgtcactagtctggaattatctgaattcctgagcaacgacacttacgtagtagcaggatttgattgctcggccagtgaagagatattcttctatgaaatccccaagatcaacgcaaaatttagtggaagtggtgatttaatcagcgccatgctcactgactcgttactaggcgaccgccgctgcacacagctgtcattaagcgcatccttgggccaagtgctgtggctcgtcaccagtatcctacaaaaaacgtatgatttaaacatagctgagcggggcccacaagattccacgatagatatcaaggatttaaagctgattcagtgtagagacatcctaaagcaagatttcataccctaccattga

SEQ ID NO: 82588 - DNA, 1071 bp, Saccharomyces pastorianus
atggaattggacgaatgtttagaaaggctatacaaggcccagttactacctgaagtgactgtaagggcactctgctttaagctgaaggaaatgctagtgaaggagtcaaacgtgattcacattcagacccctgtcacagtcgtgggggatatgcatggacagtttcacgatatgctggagatcttccaaataggcggccctgttcctgatacgaattatctgttcttgggcgactatgtagacagggggttgtacagtgtggaaacaattatgctattgattgtgcttaagcttcgatatcctagtagaattcatcttttgaggggaaaccacgagtcacgtcaaatcacgcagagctatggtttctacacggagtgcttgaacaagtacggtggcaattcaagagtttggcaatatttgacagatatatttgactatctagtgttatgctgtattatcgacgacgaaattttttgtgttcatggtgggctctcgcccaatgttcaaaccatagatcagatcaagattattgatagatttcgagaaattccacacgatggcgccatggcagacttggtttggtctgatccggaagaaaacaataaccccacgttagatcatccagataactctggacaacattttcaggtgtcacctcgtggagcaggttacactttcggaagaagcgtggtggagaaattcttacgtatgaacgatatgaacagaatatacagagcccatcagttatgtaacgaaggttaccagatatattttgacggattggttactactgtatggtcggcgccaaactattgttatcggtgcggcaataaagcatctattctggagctgtatagtaaagatcaattctacttcaacgttttcgaagaggcacctgaaaataaactgttgaaagagaacagtatgaacgacaatgccttagaagatagcatatctaatccggtagccaacaggaaattgattgcagattatttcgaagacgactctgcctccgcagatggctcacggaccctgaaatgtacatatatcagatgtatacaagccagatct

SEQ ID NO: 82589 - DNA, 2037 bp, Saccharomyces pastorianus
atgttaatgacaggttccgttggcgacggtagtgaattcgattgggaagaccaaaaaactttcatctctagagatggcggtttaacgtggagatttgttcataattcttctgggttatatgctactggtgacctgggaaatattattgtgtatatcccatatgatccagaggaagatggcgattttcaatctgaattttattattctttggaccaaggtagaacatggaatgaatatgagctgaccaatgccataagttctgtccatccctacaaattgataaatccaacaccagatggatctggctcaaaatttatttttaaaggaacgtttaccactaccgattccgaaaccaacagtataacttctttaaaaggtgtcgagtatataattgatttttcagcagcattcgactctagaacgtgtgaggaggaagattttgaagattgggatttggcggatgggaaatgtgttaatggcgccaaatacaagtatagaaggaggaaacaagacgcccagtgtttggtaaaaaaagcattcaaagatttgagtttagatgaaacgccttgtaatagttgtggtgaatccgactacgaatgttcgtttgaatttgttagggacgcaaacggcctgtgtataccagattataatctgattgccttttccaacatatgtgacaaatcgaaggataaatctgtgttagtagagccattacaattaatcaaaggtgataaatgtaaaacacccatgaaaattgaacccgtagatattccgtgtgacgaaattccagaggagggttcgagtgacaaggaaatagtgaccactgaaaacaaatttgacttcgaaattaaattttaccaatacttcgatacagttgccgacgaatctttggtcatgctgaattcgataggagacgcctatatatcccacgatggtggacaaacgataaaaaggtttgacactgacggcgaaaaaattgtcgaagttgtgtttaacccatatttcaattcttcagcatatttgtttggctctaaaggtaacatattcttaacacacgatagaggatattctttcatgatagctaaattacctgaagccaggcaattaggcatgccactagattttagtgctagagcacaggatacttttatttactatggtggcaagaattgtgaatcaatcttaagtccagaatgtcatgcagtagcatacctcaccaaagatggaggtgaaacttttacagaaatgcttgataatgcaattcattgtgagtttgcaggcacactctttgaatatccgtcaaatgaggagatggttatgtgccaagtaaaggaaaagttttcgcaaacaagaagtttagtttcttctactgactttttccaagatgataaaaaaactgtgtttgaaaacattatcggctactcgtctactggtggctatatcattgttgccgtgcctcatgaaaataatgaattgagggcgtatgtaactaatgatggtgctgagtttgccgaggcaaaattcccatatgatgaagatattggtaagcaagacgcattcactattttaggatctgagaaaggatcgatatttttacatttagcaacaaacttagaatcaggacacgattttggaaaccttttgaaatccaactcgaatggtacttcttttgtcactttagagcatgccgttaatagaaacacattcggttatgtcgactttgaaaaagttcaaggtcttgaaggtattattattaccaacatcgtttcgaatagggaaaaggttggagagaacaaggaagacgaacaattgaagacgaaaatcacctttaatgacggttcagattggaactttttgaagcctccaaagaaggattcgggagggaaaaagtttccctgtgattctgtatcattagataaatgttctctacatttgcatggttacactgaacgtaaggatatcagggatacatattcctccggttccgcgttaggaatgatgtttggtgtcggaaatgttggcgataagcttctacca

SEQ ID NO: 82590 - DNA, 1395 bp, Saccharomyces pastorianus
atgcaagaatcaaaagaaccacaaaataaatttgaaggttgtcaaagaatatcttcatcttcatccacactctttggaggagcctccttcgaggaaccgagatgtggaacatcccaaggaaaggaagaagacgctttcgcatgcaataatggagatcacggctcgagcataacgaatgttcaggaagatgactttgtccttccagaactattgccgtcattcgagatgtatgaaaatttgctcagcaatatacctcaatctagtttcgatacatactttccggagaatccacctttttatgaggttgcttccggaaatcagagtattccttcggaaggtgagtctgggaatgatatgcggattcttaccggtgatatcgttggcccagataatcatgaagtgactgttgatggccgccggtttgcttccggccctgctgagtctcaaattcgtaattatgatgatactaaaggtatcccagttgagaatatatacgcattgcctaggattaaaacccccatagcgactgaattgtacgtcacaaagacggctccaaaatttggacagcttcctaaacacgagagcatgctaagggaatacacctctggggatataattcatggttatttcactgtagaaaacaaatcaaccaaacctataaaattcgatatgttttatttaactttggaaggtacgacaagttcaaaaacacagtcaccctttggaatccaaaaaacgacaaaaagaattttgagaatggtagatatggcagcgagtcggtcatataatcatgaagacgtgaacacgggggaagacctttgtggattttttgactccattgataaaacaagctttggattaccgaatagcaggatactaaatccaggtgataaacgtaagaaatttttcacttttaaaattccgaaccagttattagacgtaacctgtaagcacggccacttctctcactctcttttgccccctacattagggtttgatagaccatcgagttctcatccagagctttctactctaaaattttcggagagtttaggttatggtcgtttgtcagaaagaggttcctcactatggttaaacgacagttctagtggcagcttaataaattactcaataaatgctatgatagtaggcaaagacgtagcttctgggcgtgtttgtttaatgagtgaaaaaaagtatagcataaggatagttccatttggctttcaaaacaatccaattagtagggagaagtgcctcaaagacttagaggatttcgatattgaaattgcaaacaggcttggaatgatcgaaaaagtcttttctaaaatagagcgagcgattcccattcataaggaggacatacaggaggcgaatcgctctgatcaactataa

SEQ ID NO: 82591 - DNA, 438 bp, Saccharomyces pastorianus
atgcaatcatccactgaaagtgatagagatattcaggatggtcctgatgctgatattcacgtcgcaccacccgtggaaaaagagtggtcagatggatttgatgacaacgaagtcataaacggggataacgttgagccaccaaaaagagggctcataggttatcttgtcatttacttattgtgttatccaatatccttcgggggtttcctgcctggttgggatagtggtatcacagcaggtttcattaacatggacaactttaaaatgaacttcggttcttacaagcatagcactggtgaatattatttgagcaacgtgcgtatgggtcttcttgtggctatgttcagtattggatgtgccataggtggtcttatttttgcccgtcttgctgatactttaggtagaaggctggcaatagcttatcggaattatgaataa

SEQ ID NO: 82592 - DNA, 585 bp, Saccharomyces pastorianus
atgacaattaacacaaagaacatagttgttgttggtgctggtgtgtttggtgtgtctgtggcaaatcacttgtacagggaactgggtgggacatacgcaataaagctcgtcacagcatctaattatgtgtattttctaccctcagctgtccgtttgacggtttcaaaggattataccaagtcgatcctgccgttaaaaaatgttcttgatagtggtattgaagttatcaaagatacggctgccagctttgatgataaggaggtagttttggggtcagacagggccataaagtttgatatcttggttcttgcaactggctcaaagtgggctgatccaattggttcaacttataccttcggggataactataaagagtattttgaaagagaggcttctcgaatctcagatgcagatcacatactttttcttggcggtggctttgttaattgtgaactagctggtgaattgttattcaagtatttggaggagatcaggtctggcaaaaagcgtatttccattattcataattccgataagctattgccagccttctacctaaagtatcagcaagacgggcaaaaataa

SEQ ID NO: 82593 - DNA, 318 bp, Saccharomyces pastorianus
atgacagttttgtatacacaaacaaaggcgaccaagttttgtatggaaaatatagcattcatttgtcttcagagctgcacaagaggtatatacggctgccaattttatagcgctacattggaaaattatcataacatatcatttccaatatttctattgcagaccaccttatttaatcactgtatctctttaaactggtctaaagctgtgtctaatcgtattaagaggcgaaagtacatgatggaactgaaaaagcactgttacaattaccaggtgagtaggataggaaatcggaaaaaaatgggtgcttctttctaa

SEQ ID NO: 82594 - DNA, 93 bp, Saccharomyces pastorianus
atgttcaatcgctttaataaacttcaagccgctttggctttggtcctttactcccaaagtgcattgggccaatattataccaacagttcctga

SEQ ID NO: 82595 - DNA, 1854 bp, Saccharomyces pastorianus
atggttgaattaagagatttgattttagataatggtcttcgctgtattggcgacgcagaatctgaactatatgccgagttaacgaagaaatcgcaggcggctactccttgggcatatcagaaacagtatggtaagtttgtgacttacctgatcgttgtcgtaatctttgtgtgttttatcaagaagctggtaattaggtattacgattcaagcgaagaatttcttccggataagaacaattcagtggtaactcttcctttatttctatctcgaatcgggaaaaagctcgctgcactcaacagatgtatttgctataggagattcccgacgttcattttttctagcttgggtattccaacctctgtaggcactctcatggttgtgctagctgttactttatatacgcttttgtattgcttcgttccacatccgttttacaggccctgtgctggatttagctcaccgcctctttctattcgtgcaggtattatggcagtgtcgtttgtgccatttttatttgctctttccggaaaagtcaacgttataggttggttggttggtctctcctatgagaaaattaacatataccatcaatggacgtccattctatgtttgtttcttggttgggtgcatgtcattccctttttacgtcaagcccatcatgagggcggtgctgaaggaatgcatcaacaatggaaaacagatgaaatgtggagaactggtgttccgcccctcttatttttgaacttgctgtggttattttcgttgtctgttgtcaggagatacgtttatgagctttttttacaagttcattggattttagccgttggattctacattagtcttttctaccacatttatcctgaattgaatgctcatatgtatttggtcgctacgatcgtagtgtggtttgtacaattgctttacagattggttgtaaagggttatctcaggcctggtagaagctttatggcttctagcactgcaaatgtcactgtggttggtgaaggatgtgtggaattgatcgttaaagatgtggacatggcctattcaccagggcaacatatattcgtaagaacaacggataaggacgttatttcaaatcatccattttctatcttccccagtgcaaaatatcctggtggaataaagatgttgatcagggctcaaaaaggcttcaccagaagcctgtacaaaagccaggatgagaccaaaaaaattcttattgatggcccttatggcggaatcgaaagagatgttagaagcttcaccaatttatatctgatctgttccggttcaggtatatctacatgcttgccattcctgcaacgatacggccccttgttgcataagaccaacttggaaaatatcaggttggactggatagtaagacacagagaagatgtatcatggatcgacgacgaaattcgtactcttttggtcgatttacgcacgttgttcttgagtgggaacgttgtatttagaatttacgtgtgttccagctcagacactatcaaaactcttgcacaacctacgaaaattgccggcagtgaatccgatatggctaaaaaagaagaaggtgttgattttaaccaaaatgacactgagtctgtttcaactttaaacaaatctggcaacgagtttggggagcttattaccgttacctattgcaagcctgaattaaatcaggtcatacatgactatcaaatcggatccaagaattgttttatttgttcaggttctgacagcttaagatgtgccgtgggaaattctgtggcaaggttacaagccaaagtcttctctagcaaaagtgttcaagaatgctatttgcatagtgaaagttttggttattga

SEQ ID NO: 82596 - DNA, 1545 bp, Saccharomyces pastorianus
atgattgaagaaagagatttggttttaagcaatggtatccattgtattgctgacatccactccgaactatacgccaggttaaaaaaagaatcgcaggcagcgacaccatgggtgtaccaaaaacaatacggaaaattcgtcacttactttgtcgctgtgataatttttttgtctttgataaaaaagctggcatttatgtattatgtttccagtgaggaatttcttccagaaaagaagaactcgccgactaccccttctgtattccttgctcgaataatgacgaaacttgtcgcattcaacagatacatttgctacaggaaatttcccacgttgatattttcttatttaggtattccgacatctgtgggtacttttttagtagtaatggctaccaccttatacacacttctatactgctttgttcctcatccattctacagaccttgtgcaggatttggttcgccgcctttgtctgttcgtgcaggcataatggcaatatctttggttccgtttgtattctcactttccgggaagatcaacgttataggttggttggttgggctttcgtatgaaaaaatcaacatataccaccaatgggcatccattctttgtttattctttagctgggttcatgtcattcccttcctacgtcaagcacgacatgagggaggatatgaaagaatgcatcaacggtggaaggcatccgacatgtggaggagtggtgtcccacccatcttatttttgaatctgctatggttatcttcgctgcctattgctagaagacatttttatgagatttttttgcaacttcattggattttagctgttggattttacattagtttgttctatcatgtatatcccgaattgaattcccatatgtatctggttgctacaattgtggtttggtttgcacaactgttttacagactagctgtgaagggttatttaagacgtggtagaagtttcatggcctcgaccattgcaaatgtcagcatagtcggcgaaggatgcgtagaattgatcgtcaaagatgtggaaatggcctattccccaggtcaacacatattcgtgagaactattgataagggcatcatttccaaccatccattttctatctttccgagtgcaaagtatcccggaggaataaaaatgctgattagagcccagaaagggttttctaaaaggctatacgaaagtaatgacgacatgaagaaaattcttattgatgggccttatggtggaatcgagagagatattagaagttttaccaatgtctacttgatttgctctggttcaggtatatctacatgcttacctttcctgcaaaaatatggccccatactccataagacaaacttagaagttattacattggactgggtggtaagacatagggaggatatatcatggattagagatgaaatgtgtaccctctcaaataatttgcgccagttatttttagatgggaaaattgtggttagaatttacgtctgctcggacagtaccgtcctggtattattaaaactttccctcaaacaatag

SEQ ID NO: 82597 - DNA, 837 bp, Saccharomyces pastorianus
atgtcagtttttgtttcaggtgctaacgggttcattgcccaacacattgtcgatctcctattgaaggaagactataaggtcatcggttctgctagaagtcaagaaaaggccgagaatttaacggaggcctttggtaacaatccaaacttctccatggaaattgtcccagacatatctaaactggacgcatttgaccatgttttccaaaagcacggcaaggagatcaagatagttctacatacggcctctccattctgctttgatatcactgacagtgaacgcgatttattaattcctgctgtgaacggtgttaagggaattctccactcaattaaaaaatacgccgctgattctgtagaacgtgtagttctgacctcttcttatgcagctgtgttcgacatggcaaaagaaaacgataaatctttaacatttaacgaagaatcctggaacccagcaacctgggagagttgccaaagtgacccggttagcgcctactgtggttctaagaagtttgctgaaaaagcagcttgggaatttctagaggagaatagagacgctgtaaaattcgaattaactgccgttaacccagtttacgtttttggtccgcaaatgtttgataaagatgtgaaaaaacacttgaacacatcttgcgaactcgtcaacagcttgatgcatttatcaccagaggacaggataccggaactatttggtggatacattgatgttcgtgatgttgcaaaggctcatttagttgccttccaaaagagggaaacaattggtcaaagactaatcgtatcagaggccagatttactatgcaggatgtttcatattcttaa

SEQ ID NO: 82598 - DNA, 150 bp, Saccharomyces pastorianus
atgtctacaaatgtatttagttatagtttgccttcagatttaagaatttgtgaagcggtatcgtctatagtttccttcaaatttctgaacttaaatcccagtagtttctttgttttggtattgtcgagagtggcaccaagagtgttataa

SEQ ID NO: 82599 - DNA, 444 bp, Saccharomyces pastorianus
  modified_base (123)..(147): a, c, g, t, unknown, or other
  modified_base (278)..(372): a, c, g, t, unknown, or other
atgacagcaccattgactccacagcaacagctacttcaaagacaacagcaggccttggagcaacaacagaatggtggagccatgaaaaacgcaaataaacggagtggtaacaatgccaccagnnnnnnnnnnnnnnnnnnnnnnnnngataaaccaaaggttaagcgacctagaaaaaatgcaaaaaaaagcgagagcggtacaccagctcctaaaaagaaaagaatgactaagaagaaacagagcgcaagtagcacgccctcttctactacaatgtnnnnnnnnnnnnnnnnnnnnnnnnnnnnnnnnnnnnnnnnnnnnnnnnnnnnnnnnnnnnnnnnnnnnnnnnnnnnnnnnnnnnnnnnnnnnnnncacttgggcatctcacctctgtgctcaagcaaaagaatcttttggctcattttccagaagatattttattag

SEQ ID NO: 82600 - DNA, 1683 bp, Saccharomyces pastorianus
  modified_base (1653)..(1677): a, c, g, t, unknown, or other
atgagtgccaatagcccgacaggaaacgatccccatgtatttggtattcctgtgaacgcaacaccatccaatatgggctcgccaggcagtccagttaatgtaccacctcctatgaacccagcggtagcaaatgtaaatcatcctgttatgaggacaaacagtaatagtaatgccaatgaaggtactaggactttaaccagggagcaaatacagcaattgcagcaaagacaacgattattactgcagcaaagactactcgaacaacagagaaaacagcaagcactccaaaactatgaggctcaattttatcaaatgcttatgaccttaaacaaaagacctaaaagactttacaattttgtggaagatgcagactcaattttgaaaaaatatgagcaatatttacacagttttgaatttcatatttatgagaataattataagatttgcgctcctgcaaatagcaggttacaacagcagcaaaagcaacccgagctgactagtgacggtttaatattaaccaaaaataacgaaactttgaaagaatttttagagtacgtcgcaagaggaaggattcctgatgctattatggaagtcttaagggactgtaatattcaattttacgaaggaaatcttattttacaggtttatgaccatactaatacagttgatgttacccccaaagagaacaagcctaatttgaacagctcttcttccccttcaaataacaatagcacacaggacaattccaagattcaacaaccatccgaacctaatagtggtgtggcaaatacaggcgcaaacacagcaaataagaaggcatccttcaaacgacctagagtatatcgaacattgttgaagcctaatgatttgacgacgtattatgacatgatgtcttatgcagataatgccaggttttctgatagcatttatcaacagtttgaatctgaaattttaacacttaccaagaggaacttgtcactaagtgtgccattaaatccatatgagcaccgagacatgttggaggaaacagctttttcagaacctcattgggatagtgaaaaaaaatccttcattcacgaacatcgtgctgagtctacgagagaaggcacgaagggcgttgtagggcatatcgaagaacgcgatgaatttccgcaacatagttcaaattatgaacagttgatgttgatcatgaatgaacgcacaacaacgataaccaactccacgtttgctgtttcgttaaccaagaatgcgatggagattgctagctccagttccaacggggtacgtggagcttcgtcctcaacttcgaattccgcatcaaatacaaggaataacagtttggctaatggcaatcaagtagctttggcagcagctgcggctgcggctgcagtgggatctaccatgggtaacgataataatcaatttagcaggctgaaatttattgaacaatggagaataaataaagaaaaaagaaaacagcaggctttaagtgcaaacatcaatccaacccccttcaacgctagaatatcgatgacagcaccattgactccacagcaacagctacttcaaagacaacagcaggccttggagcaacaacagaatggtggagccatgaaaaacgcaaataaacggagtggtaacaatgccaccagnnnnnnnnnnnnnnnnnnnnnnnnngattaa

SEQ ID NO: 82601 - DNA, 414 bp, Saccharomyces pastorianus
atgtgcgatagccatcaaaaggaagaagataacgcaaatacgagcgaaagggcgttattttttaattaccatgagttttcgtattcattctacgaagacctcggttccgaagacgctaaacccacagagcacgacgaagaccacaaattgtgtattacacatttcccgaatgtgtatgctgctcggggctctgccgagttccaggtgacccgggtggtacgagtgccccggcggttcgatgagtctcgtagcagccttgaaacgccacaatttagtacacagcttcccggtagcgagccggcggcaatcgtgggcgacgatggcactagctttgtacggtgcgggcgttacgaaattggggatcacgtgtctggctgtcctccgtctcgcctctgtccgaattctaatggcgga

SEQ ID NO: 82602 - DNA, 420 bp, Saccharomyces pastorianus
atgagtaaggataataggttagcaagtattttactgcagcctgtagcatcatcctctggaaattgtactgaattccatgactcaaagctgcatactctgcaagaggaacttaatttcttgccactagaaggagttgcgtcgaatgtttgcccgccgatgcttagaggtcataagaactacgtgtttgtgttatattgtttgaatcaagtcgatctcgttacgaatttgcaggattctacaaaacgttactacccactgcaaatatttaaagattgtcaattgagttctttggttcagaaggatttttcacactatttccaactcagcaggcaaaaggaaggggaagatcggaacgatagtgataccaccttggttaacgtcgtcaattctggagtatcccgccataaaagtcaatactaa

SEQ ID NO: 82603 - DNA, 282 bp, Saccharomyces pastorianus
atgcagtccatgatcagctcatctgagcacgaaaacctaacctgcaagtactggcctgttagcttcctcgcttcttggtgtgagaatgggtctggcacactgatgcaaaaagatggtagtcttttatatgccgtgaaaaatttttcccatatatttgaaaaaaaatttttcataccaatctatagaaatagtgaggtcaggagacatcgcaacactattgttctattgcattatttttttagtgttaaactacaatttcggattctatatcattgtatataa

SEQ ID NO: 82604 - DNA, 804 bp, Saccharomyces pastorianus
atggtcatttttgctcttaatgactcttttatttttacccggattgcaatttttcacatatcgtctttttattcactacgtattttaatcgtcttcgcgatgatatgtactgctaacgaaagaatgccatacaaaaaaaaaaagctaccacatcgctcgacgacctcaattatgcaacttgtaccgctagaattgaatagatccactctaagtgggatatctgggtccatctccatctcctgctggatcattgtgtttgtccctcaaatttacgagaacttttaccggaagtcgtctgatgggctgtctttattgttcgtggtactttggttggccggcgatgtctttaaccttatgggtgccgttatgcaacatcttttgtctaccatgatcattcttgctgcttactatacggtggcagatatcattttactaggtcaatgtctatggtacgataatgaggaaaaaccagcagtagaccctattcatctctcccctgccaatccaataaacgaaaacgttctgcacgatgtgttcaatgaacaacaaccgcttttgaattcccaaggtcagccaaatcgtattgatgaagaaatggctgctccttcatccgacggaaacgttagtgatgatactctccgtgaagtcaattcaagaaatttgataaaagacatatttattgttagtggtgtagtttttgtaggtttcatctctgtggtatgtaacctactgcgtaaactacacgcaacctcctcccgtggaggatccatcactgcctgttcccgaactgcagatcaattgtga

SEQ ID NO: 82605 - DNA, 744 bp, Saccharomyces pastorianus
atgtcccagcccactaagaataagaagaaagaacacgggaccgattccaagtcatcccgcatgactcggacgttggttaaccatattctttttgaaagaattctcccgatccttccggtggagtctaatctaagtacctattcagaagtggaagagtattcctcattcatttcatgcagatctgtgctcattaacgttaccgtttcccgagatgcaaacgctatggtggaaggcactttggagttgatagaatcgcttcttcaagggcacgaaatcatttcagataagggtagcagtgacgttattgaatcaatactgattatactaagattgttaagtgatgcgctagagtataattggcaaaatcaagaaagccttcattacaacgacatttcgactcacgtagaacatgaccaagaacagaagtacagaccaaagcttcacaatattctgcccgactactcgtcgactcattccaatggcaacaaacactttttccaccagagcaaacctaaggcactgataccggaactggcatcgaaattgcttgagagttgcgcgaagttgaagttcaatacaagaactttgcaaattttacaaaatatgatcagtcatgttcatggaaacattctaacgactttgagttcctcgattcttccccgccacaaatcctatttgacaaggcacaaccatccttctcattgtaaaatgacctgcagcatgcagcttgcactgccgtcttta

SEQ ID NO: 82606 - DNA, 5940 bp, Saccharomyces pastorianus
atgttttggataatgactaggcctgcggaatattatgaactcttcaacttattaaaagataataacaatgaacactcgaaatccttaaacacgttaaaccatacacttttggaggagatccattcgacttttaatgtgaatagcatgataaccaccaatcaaaatgctcatcaaggctcatcttccccttcgtcctcctcgccatcgtcaccacctagctcatcatcatcggataacaacaatcaaaacataatagcaaaatccttaagtcgtcagctttctcaccaccagtcatacattcaacagcagtctgaaagaaaactacattcttcatggactacaaactctcaatcctctacttcactgtcatcttcaacgtctaattcaacaacaactgatttctctactcacactcaaccaggagaatacgacccttccttaccagatactcccacgatgtctaacatcactattagtgcatcttcattattatcccaaactccaactccaacaaaacaattgcaacagcggttgaactcagcagctgcagccgccgctgcagctgcttcaccatcgaattccaccccaactggatacacagcagagcaacaaagtcgagcttcatacgatgcacacaaaactggccatactggtaaggattatgatgaacattttttgtctgtcactcgtttggataatgttttggagttatacacgcactttgatgatactgaggtattaccacacacatccgtactgaagtttttaactactttgacaatgttcgatattgacctttttaatgaattaaacgctacatcattcaaatatattcctgattgtactatgcatcgtccaaaagaaagaacgagttctttcaataatactgcacacgagacaggttccgaaaagacttcgggtataaaacatattacgcaaggcttaaagaaattaacttctttaccttcctcaaccaaaaaaactgtaaaatttatgaagatgttgctaagaaatttaattgggaaccaagctgtatcagacgttgccctcttagatacaatgagggccttactatcattctttacaatgacttctgcggtctttctcgtggataggaacttaccctcagtactttttgccaagagactcatccccataatggggacaaatttaagcgtcggtcaagactggaattcaaaaataaataacagtttgatggtttgtttgaaaaaaaactccaccacgtttgttcaattacaattaatattcttctcttcagctattcaattcgatcatgaattattgctggcacgtctgagcatcgatacaatggccaacaatttaaacatgcagaagctatgcctttatactgaaggattcaggatattcttcgacataccaagtaagaaggaattgcggaaggcaattgcggttaaaatttctaaatttttcaaaacattattctccattatagcagatattcttttacaagaatttccgtattttgatgagcaaatcaccgacatagttgcttccattcttgacggtacaattatcaatgagtatggtacgaagaaacatttcaaggggagctcaccctctttatgttcgacaacccggtcaagatcaggatctacatctcaaagttcaatgacaccagtttctccgctgggactggatactgatatatgtccaatgaacaccctgtctttagttggttcaagtacttcaagaaattctgacaacgttaattcattaaacagttcaccaaagaacttgtcttctgatccatacttgtcacatcttgtggccccaagagcacgtcatgctttaggtgggccatctagtattataaggaataaaataccgactacattgacttcacctccaggaacggaaaaatcttcaccagtacaacgtccgcaaacggaaagcatcagtgccacaccaatggccataacaaattctactccattatcgtcggcagcattcggaattcgatcgcctttgcagaaaataagaacgaggcgttattccgatgaaagtttaggaaaattcatgaaatcaacaaataattacattcaagaacatttgataccaaaagatttgaatgaagcaactcttcaagatgctagaagaataatgattaatattttcagtatttttaagagaccgaatagttacttcatcattcctcacaatataaattcgaatttacaatgggtttcgcaggattttagaaatattatgaaaccgattttcgtcgccatcgtaagtccggatgtagatttacagaatactgctcaatcattcatggataccttattatcgaatgttattacttatggtgaatcagatgagaatatcagtattgaagggtatcatcttctttgcagttacactgtaacattatttgcaatgggccttttcgatttgaaaattaataatgaaaagcgtcaaattctcttggatataactgtcaagtttatgaaggttagatcacatttagcagggatcgcggaggcctcacaccacatggaatacataagtgattctgaaaaactcacctttccgctgattatggggactgttggtagggccctatttgtttcattatactctagtcaacaaaaaattgaaaagactttaaagattgcttacacagagtatctttctgcaatcaattttcatgagaggaatattgatgatgctgataaaacttgggttcataatattgagtttgtagaagcgatgtgtcatgacaactacacaacttctggttcaattgctttccaaaggaggacaagaaataatattttacgatttgctactattcctaacgctatcttacttgattctatgaggatgatctataagaagtggcatacttacacacacagtaaaagtttagaaaaacaagaacggaacgacttcagaaatttcgcgggtattttagcctctttgtcgggtatcctattcatcaataaaaagatattgcaagaaatgtatccatacctactcgacaccgtttcagaattgaaaaaaaatatagacttttttatctcaaaacaatgccaatggttaaactatccggatttattaacgagagaaaattcaagagatattctaagtgtagaactgcatcctttgtcttttaacttactttttaataatttgaggctcaagttaaaagaacttgcttgctcagacttatcaataccagaaaatgaaagttcctatgttttgttagaacaaataatcaaaatgctgcggacaatcctaggtcgtgatgatgacaattatgtaatgatgcttttttccacagagattgtagatcttattgatttattgacagatgaaataaaaaaaattccagcctattgcccaaaatatctcaaggcaattattcaaatgaccaaaatgtttagtgccttgcagcactcagaggttaatttaggtgtcaaaaatcattttcacgttaaaaataaatggttgagacaagtcactgattggtttcaagtgagtattgcgagagagtacgatttcgaaaacttgtcaaaacctctaaaagaaatggatttggtaaaaagagacatggatattctatacatagatacggcaatcgaagcttcaaccgctattgcgtacctcacgagacatactttcttagagattccacctgccgcgtcagatcccgaactatctcgatctaggtctgtgatatttgggttttatttcaacatcttaatgaaaggccttgaaaaaagtagtgatcgtgacaattacccagtattcttgaggcacaaaatgagtgtcctcaacgacaatgtaatactttcattaacaaatctttcaaacaccaatgttgatgcgagtttgcagttcaccttaccgatgggctattccggaaatcgaaacattaggaatgcatttttggaggtcttcattaatatcgttacgaactatcggacatacacggctaaaactgaccttggaaaattagaagcagcagacaaatttttgcgatatacgattgaacatccccagctatcgtcctttggagcagcggtttgtcccgctagcgatattgatgcttatgctgctggcttaataaatgcatttgaaacgagaaatgccacccacattgtagtgtcacagttgattaaaaatgaaattgaaaattcttccagacctacggatatccttagaaggaatagctgtgctacgagatcattatctatgctagccaggtccaagggtagcgaatatttgattcgcactttgcaaccattactaaaaaaaattatccagaacagagatttttttgaaattgagaaattaaaaccggaagatttagatgctgaacgtcaaatagagctttttgttaaatacatgaatgaattattggaatccatatccaactccgtatcttattttccccctcctttattttatatttgtcaaaacatttataaagttgcgtgtgaaaaatttccggatcacgcaattatcgccgctgggtctttcgtatttttacggtttttttgtcctgctttagtcagccctgattctgaaaatatcatagatatttctcacttgagcgaaaagcgtaccttcatcagcttggctaaagttatccaaaatattgccaatggctcagaaaatttctccagatggccagctttgtgttcccaaaaggattttcttaaggaatgtagcgatagaattttcagattcctagctgaactttgtagaacagatcgcacgatagacatccaagtgagaacagacccaacgccaattgcatttgactatcaattccttcattcctttgtttacctttacggtcttgaggtgagaaggaatgtgctaaatgaagcaaaacatgatgatggtgacattgatggtgacgatttctataagaccacgtttttacttattgatgatgttcttggccaattaggccaacctaaaatggaagtttccaatgaaataccaatatacataagagaacatatggacgactatccggaactgtatgagttcatgaataggcacgcgttcagaaacattgagacttcaacagcgtacagcccaagcgttcacgagtccacctcaagtgaaggcattccaattattacgttaacaatgtcaaatttctcagacagacatgtggacattgatacagttgcttacaagttcttgcaaatttatgctcgaatctggaccaccaaacactgtttaataattgactgtacagaattcgacgagggagggcttgatatgaggaaatttatttctttggttatgggactattaccagaagttgcacccaaaaattgtataggctgttactactttaacgtaaacgagacatttatggataattatggaaaatgtttggacaaggacaacgtatatgtttcctcgaaaattcctcattatttcattaatagtaactctgatgaaggacttatgaaatctgtgggtataactggacaagggttgaaggttctgcaagatattcgtgtctctctgcatgatatcacgctttatgacgaaaaaagaaatagatttacgccggtatcgttgaaaataggcgatatttactttcaagtcttgcatgaaactcctaggcaatataaaataagagacatgggtactttattcgacgtaaaattcaatgatgtctacgaaattagccgaatattcgaagtacatgtttcgtcaataactggagtggcagctgaatttacagtaacttttcaggacgagagaaggttgatttttagtagtccgaaataccttgaaattgtgaagatgttctattacgcacagatccggttagaaagtgaatatgaaatggataataattcgagtacctcctccccaaattcaaacaacaaggacaaacagcagaaagagagaacaaaattatag

SEQ ID NO: 82607 - DNA, 642 bp, Saccharomyces pastorianus
atgaaaaacagttcgtataacctaatagctgccactgaggcgtcatttggtttgaactttggctcccattttcatcgctcttccgaggtgtacgtccccgaagatactacaacatttttaggtgttattggaaagtctcttgcagagtctaatccagaactcacagcctatatgtttatctatgttttggaggcattgaagaacaacgtgattcctcatgtttacatccctcataccatttgcggtttgtcttattggatccctaatttataccaacatgtgtatttggctgatgatgaagaaggccccgaaaacatatctcacattttccgaattcttatcaggctctctgtgagagagaccgactttaaagccgtatacatgcaatatgtttggctgctacttttagatgatggccgcttaactgacattatcgttgatgaagttattaatcatgcgttagaaagagactccgaaaaccgcgattggaagaaaacaatatcgttactaactgtcctacccactactgaggttgctaataatattattcaaaaaatattggcaaaaattagatcatttttaccgtcattgaagttagaagctatgacccaaagttggtctgaactaacaatatttagttaa

SEQ ID NO: 82608 - DNA, 864 bp, Saccharomyces pastorianus
atgtataatgaaacttctagcggtacagatgtcttaccagagatcctgtatatcgtatccttattaatagatgtaggtccaagggaactcagatcatcactacaccagctattaatgaatgtatgccattccttggctattaactcagctttaccacaagatcatagaaataatctagatgaaataagtgatatatttgcacatcaaaaggtgaagtttatgtttgggttcagcgaggacaaaggacgaattttacagatttttagcgcttcttcttttgcaagcaagtttaatatcctggatttcttcatcaataatatattattgctgatggaatattcttcaacgtacgaagcaaacgtgtggaagacaagatacaagaaatatgtcttggaatctgtgtttacaagtaattcttttctttcggcacgttcaatcatgattgttggtataatgggtaaatcttacataactgaagggttatgcaaggctatgttaattgaaaccatgaaagttatcgccgaaccaaagattactgacgagcatcttttcttagccatatctcatatttttacttattccaaaattgttgaaggtttggatcccaaccttgacttaatgaagcacttattttggttttcaacactcttccttgaatcacgtcacccgataatttttgagggtgcccttctctttgtgtcaaactgtataaggcgcctatacatggcccagtttgaaaatgaaagtgaaacatcattgataagtactttacttaaggggagaaagtttgctcatacctttttaagcaagatagagatcttagtggtattgtttggaatgaagataattttacacacattctga

SEQ ID NO: 82609 - DNA, 234 bp, Saccharomyces pastorianus
atggcaatgtatttcccaatttctttactcttattactattaatacgagtatcttccgaaatacccacttttactggctctttaatagtagtactagtatttgctttatttgggttgaattcaaacacttttccctcgagcttgtctttctcatgcttactaatctccttgttcatgttatataccatgtccataattttactgccgtttttgcgctttcgaggggcatattga

SEQ ID NO: 82610 - DNA, 3378 bp, Saccharomyces pastorianus
atgtcacagcaggagaatggtgatgtggccactgaattaatcgaaaatagactttccttctcaagaatccctagaataagccttcatgtaagggatttgtcaatcgttgcatccaaaacaaatacgacgctagttaatacgttttccatggacctgcccagtgggtcggtcatggcagttatgggtggttcggggtcagggaagactacgttgctgaatgttctggcatccaagatcagtggtgggttaactcataatggttctatacggtacgtattggaagatacaggttcagaacccaatgaaacagagcctaagagggctcacttggatggccaagaccatcccatccagaaacacgtaataatggcgtacctacctcaacaagatgtactctctcctaggttgacttgtagagaaactcttaagtttgcagctgatttgaaactaaactcttctgagcgaaccaagaaattaatggtcgagcaattaattgaagaattagggctcaaggattgtgccgatactcttgtgggggacaactcgcacaggggtctttctggtggtgaaaagagaagactaagtattggtactcaaatgatttcaaacccttccatcatgttcttagatgagcctaccactggactggatgcatattctgccttcttggttgttaaaactttgaaaaaattagctaaagaagatggcaggacttttatcatgtcaattcatcagccgagatcggatatattgtttttattggaccaggtttgtattttgtcaaagggaaatgtggtatattgtgacaaaatggataatactatcccttattttgagtctattggttatcacgtaccccagctggtaaatccagcagattatttcattgatttatcaagcgtagactctagatctgataaagaagaagctgccacgcaaagtcggctaaattcattgattgatcattggcatgattatgagagaactcatttgcaactacaggcagaatcttatataagcaacgcaacggaaattcaaattcagaatatgactaccagactgccattttggaagcaagttacggtgctaacaaggcgaaatttcaaattaaatttttcagattacgttactttaatatctacttttgcagaaccgttgattattggtactgtttgcggttggatttactataaacctgacaaaagcagtataggtggtttaaggacaacaaccgcatgtctttacgcgtccacaattttgcaatgttacttgtatttgctttttgatacttatcgactttgtgagcaggatattgcgttatatgacagagaaagagcagagggctcggtaacacctttggcattcatcgtagctagaaaaatttcacttttcctctctgacgatttcgcgatgaccatgatttttgtcagtataacatattttatgtttggattggaagcagatgcaaggaagtttttttatcagtttgctgttgtatttttatgtcagctatcctgttccggtttatctatgttatcggtggcggtatcgagagatttttctaaagcttcattagtaggaaatatgacatttacggtattatcgatgggatgtggttttttcgttaatgctaaagtaatgcccgtgtatgttcgttggattaaatatattgcctttacgtggtattcattcggtactctcatgtcaagcacctttacgaattcgtactgtactacagataatctcgatgagtgcttgggtaaccagatattggaagtttacgggtttcctaggaattggataaccgtacctgccgttgtcttactttgctggtctgtgggatattttgtagtaggtgcaattattttatatttgcacaagattgatataactttacaaaatgaagtgaaatcgaagcaaaaaaaaatcaaaaagaaatccccaacaggaatgaaacccgagattcagctgctagatgacgtgtatcatcagaaagatttggaagcggagaaaggaaaaaatatacatattactataaaattagaagatatagacttacgagtcattttttctgcccctttctcaaactggaaagaaggcaacttccaccatgaaacaaaagaaattctacaatcagttaatgccattttcaaacctggaatgattaatgcaattatggggccatcagggtctggaaagtcttctctgttaaacctaatctccggaagattaaaatcttcggtctttgccaaatttgacacttcaggttcaataatgttcaatgatattcaagtttcagagcttatgtttaaaaatgtatgctcgtatgtctcgcaggatgatgaccaccttttggcagctttaaccgttaaagaaaccctgaaatatgccgctgcattaagattgcatcatctgactgaggcagaacgaatggagagaactgacaacctaataaggtctttgggtttaaagcattgtgaaaacaatatcattggtaatgaatttgttaaaggtataagcggtggtgaaaaaagaagagtaactatgggtgtgcaattattaaacgatcctccgatattattgctagatgaaccaacttcagggttagatagcttcacatccgctactatactggaaattttggagaagttatgtagggaacagggcaagacgatcatcattaccattcatcaaccaaggtcagaattattcaagagatttggtaatgttttgctattagctaaatcgggtagaactgctttcaatggatcaccagatgaaatgattgcttatttcactgaattgggatataactgtccttcgtttacgaacgtggcagatttctttcttgatttaatttcagttaatacccagaacgaacagaatgaaataagctcaagggcacgagtagaaaagatacttagtgcatggaaagctaatatggataacgaaagcctttcaccaaccccaatttctgaaaaacaacaatactctcaggagtcatttttcacagaatacagcgagtttgtaagaaaaccagctaatttggttttggcgtacatagtgaacgttaaaaggcaatttactacgacaaggagaagttttgactctttgatggcgcgtattgcacaaattccaggattaggtgttattttcgcattattctttgccccagtcaagcataattatacaagtattagcaatcgtctaggattggcacaagaatctacagcactatattttgtgggcatgctggggaacttggcatgttatccaaccgaaagagattacttttacgaagaatataatgataatgtttatggtatagcaccttttttcttagcttatatgacattagagttgccgctatccgcatag

SEQ ID NO: 82611 - DNA, 1002 bp, Saccharomyces pastorianus
atggacatggccaaccagttgctagatgaattagcacatggaaatttttcccacctaacgctaaacttgtcccaaaatggtcgggaaattgctatcttacagcagcaattgaccggatttgatgataaacagctagaaacgtttgtagaacaacacccggctatgcccaatgatacgagattcaaaatcatgtgtacatcctttttaaattatgcccgggatgtcgacccatggtcagcctggtccagttcggatctaatttttgagttttatcaatgtttaatcaactgtctcatcaacgacaatgctcctcacatagaaatgttgataccagtagcaactagagaaacagaatttatcatcaatctcgctgggaaactagactctttccacttgcaactgcatacgagaagtcaccaatttctatcacatatatcgtccatcctatcaagactatttaacagcatcaaacctccacgaggtaacgcatcttctacaaatatacctggaaaacaacgaatactgctctacctggtcaataaactaaataacatctacttcaggatcgagtcaccgcaattatgttccaatatctttaagaactttcagccaaaaagcatgcttgcacatttcaacgaataccagctcgaccagcaaatagaatacagatatctcttaggaaggtactacttgttgaactctcaagtacataatgccttcgttcaattcaatgaagctttccagtccttattgaacttgccgttaacgaaccaagcgatcactaggaatggcaccagaatactaaattacatgatccctacagggctgatactgggaaagatggtcaaatggggaccgttgcgaccgttcctttcccaagaaacaattgataattggagtgtactctacaaacacgtacgttatgggaatattcaaggcgtgagtctctggctgagacagaacgagcgccatttgtgtgcgagacagttactgatcgtgctc

SEQ ID NO: 82612 - DNA, 1128 bp, Saccharomyces pastorianus
atgagtaggaatcaagatgtgttccccattttggatctacaggaactagttatatgtttgcaaagctgtgattttgcgctagccacacaggaaaatatctctaggcccacctcagactacatggtaaccctttacaaacaaatcatcgagaacttcatgggtatttctgtagagtcgttgctgaatagcagtaaccaagaaacaggggatggtcacttacaggaagagaacgagaacatttattcggacacgttaaatgttttggtattgaacaaaatctgctttaagttctttgagaacataggtgttcaagatttcaatatgacagatttgtacaagcccgaagcccaacggacacagcgcttactgagtgctgtggtgaattacgctcgttttagggaggaacgaatgttcgactgtaattcttttattcttcaaatggaatcgttgctgggtcagcttcgctccaaattcgatgattataacttgatccagcaacagctaaagcaatacgaggacgtagatggggataatatacctgatgagcaagagctccaaaagctggaagagcaaaataaggagctggaaattcagttgaagaaattgaccaagatccaagaaacgttatccatagattataatgactataagatctccaagcagtcaatctttaaagatctggaagctctgagtttccaaatagtggaattagagtccaatcgagataaactgatcaaaatatccaatacagacatggaagagttatccgagggaatcaaagagctaaatgatctgttgatacaaaggaaaaagacgttagacgacttaaccgcacaacagaaaaacttgcaagatacagtgacgacgttcgaaaccataattagtgagctctatgatgtgctgagaataatttccagcgaggtgcaagagtctaatcgaactgaaacggaacttgtgggattaaagcaaaatttaatcaacaataagctgaaattgatgaatgtattggaaacaggtattatgtataaattagaaatcttacaagaacagttagatttgcaactcaagaatttggaaaagctatcgcaagatactaaagaagagtcgcgcctaaatgatactgactct

SEQ ID NO: 82613 - DNA, 1062 bp, Saccharomyces pastorianus
atgaaagcgagggaagtcaccaaagaatacgtagcccgcgtgaagggcgagttccctataggtatagtagaggtagataagcctgtcagatctgttaaccctaaagttgcactaaacgctgtttgcgagatgagcgatgaaaacgctaaacatgccaagaccgttttccaaagggttagctatgatggacagacgagtattgtaaagtgtaaaccattgacaggtagaactcaccaaataagagtccatttgcagtacttgggatttcccatagcaaatgaccctatatactcgaacccagatatctggggtccagatttgggccgcggtggacttcaaaactatgatgacatcgttctgaaactagacgctattggcaagactaagcctgcagagagctggattcatcctcatagcgagggtgaatacttgcttggccgtcagtgcgaagaatgcgaggctgaaatgtacacagatcccggtactaacgatctcgacctctggctgcatgccttccggtacgagtcattggaaagaaactcggatacgcaaaaacctctctggagttatagaacaaaataccctgaatgggccttagagccacatcgccgatatatggaaatggccgttaaggaagctgataagtgtggcccgacaaagactgcttttagtgttggtgccgttcttgttcatggaactcaagtacttgccacaggatattcaagagagctaccaggaaacactcatgcagaacagtgtgctttgataaagtactcgcagttacacccgaactgtcccactatagtccctatgggaacagtgctctatacaaccatggaaccctgttccttcaggctaagtggcaatgagccttgctgcgatagaatcctggccacccaaggtgccattggtactgtcttcgtgggggttatggagcccgatacatttgttaaaaacaatacaagtttgaacaagctggaatcgcacggtgtgaactacatacaaataccaggctacgaggaggagtgcaccatcattgtcttcaaaggccacgattatagt

SEQ ID NO: 82614 - DNA, 726 bp, Saccharomyces pastorianus
atggaggactctaataatgaagccagcgatgacttcaacaacttattaaacaaagaaattgaatctgcaaaggaagtgaagttaagaaaattcgcgaacaggaataataataggaacgaaaacagttccaaagtcaaagatgcgagtggattcagactgagagttattcaaaccgatgggcacaaaactaaaaagacagaccctgattatgaagtgacaattgatggacccttaaggaagattgagccttattttttcacttataaaactttctgtaaggagaggtggagagatcgtaagttggtggatgtattcgtgagcgaattcagggatcgagagcccagctattattccaaaaccattgcagagggaaaagtatacttaaacgatgaacctgcaaaccttgataccatcattcgtgacggtgatctgatcacacataaagtacatcgacatgaaccgccagtcacatctaaaccaatagatattgtgtttgaagacgaagatatccttgtcattgataagcccagcagtattccagtgcacccaacgggcagatacagattcaataccattacaaaaatgctagaaagacagctaggttattcagtacatccatgtaatagactagacaagccaactagtggactaatgttattagccaagactccattaggtgcagatagaatgggagaccaaatgaaagcgagggatgtcccaaagaat

SEQ ID NO: 82615 - DNA, 1155 bp, Saccharomyces pastorianus
atgtctgctgctcctgtccaagacaaagacactctgtccaatgccgagcgtgcgaagaacgtcaacgggttgcttcaggtgctcatggacattaacactctgaacggagggagctccgacactgctgataagataagaattcatgccaaaaacttcgaggcagctttgttcgcaaagagctcttcaaagaaagaatacatggatagcatgaacgaaaaagttgctgtcatgcgcaacacgtacaatacgaggaaaaacgccgttactgctgctgccgctaataacaacattaaccccgtggaacagcaccatattaacaacttgaaaaattctggcaacagcgccaataatatgaatgtcaatatgaatctaaacccacagatgttcttgaatcagcaggctcaggcaaggcaacaggttgcgcaacaattaaggaatcaacaacaacaacaacaacagcaacaacaacaacaacaacaacaacagcagcagcagcaacagaggcgtcaattgactcctcaacaacaacaattagtgaaccagatgaaagtggcacctattcccaaacaattactgcaaagaattcctaacattccacccaatatcaacacctggcagcaggtcactgctttggctcaacaaaagctattgacacctcaggatatggaagctgcgaaggaagtctacaagattcaccagcagttgctattcaaagcaaggctacagcaacaacaagcacaggcacaagcacaagctaataacaacaacaacggcctcccccaaaatggtaatattaacaataacataaatattcctcaacagcagcaaatgcaacctcccaattcaagtgcgaacaacaaccctttgcaacagcaatcatcacaaaataccgtaccaaacgtcctcaaccaaattaaccaaatcttttctccagaggagcaacgcagcttattacaagaagccatcgaaacctgcaagaattttgaaaaaacacaattgggtagtacgatgacggaacctgtcaagcaaagttttattaggaaatacattaaccaaaaggccctgagaaaaatccaagctttgagagatgttaagaacaacaataacgctaacaacaacggctcgaccttcagagagcccaaaatgtccctatga

SEQ ID NO: 82616 - DNA, 627 bp, Saccharomyces pastorianus
atgactttccaacacgatgaaataagcgccattgcgcaaatgttcaaaaacgatagcgttttggataacttgtcaagaccacaattggcagcaatgtcgaagtttatgtcactaaggccatttggtaacgataacatgcttcgttaccaaattcgttccaaactaaaggatataatgaacgacgataaaattattgactacgaaggcgttgaaagtttatcgcaagaagagctgtatcaagcttgtgtgtctcgtggtatgaaagcgtacggtgtatccaaggaggacttggtcgataatctaaaagtttggctagaattgagactgagacaaaaaatcccatccgtcttgatggttttgagttccacgttcacgtttggaggacttccaaaggagaactattcaaaggcattctcgccactagctgaaaaaaaagaaacaaaaagcaaatatgacgaccttttggatctgtactacgacggtatattacaagtgctaagttccattccagatcccgtttacaacgtcgcaaaactagatgtatctgaatcgaaatcatccgctgctgaaactgaagctgaaaagccagttgctgcaaagaagataccgacggaagaaacaccctga

SEQ ID NO: 82617 - DNA, 369 bp, Saccharomyces pastorianus
atgttgaatttggcatcaagagcgtcatgtgtgacaagacgtcaagcaagcttgtattttgttaaaaatcaaggccctagattaatagcttccactattccctcgtgtcattggcctttgagagcgcaaggagtacagcccaactatcctttatctttgagattttattctactgataagtcgaaaagtgttacgaagcccgtagctccaacatccaccgatgctcctgccaagcccaaggagacgcttatggtcaaagtgaagcacgccttgaaacattatgctaatgggacgaaacttttgggttacgaaatccaagtttctactaagcttttgattaaattgctcagggttacgaggggatcctct

SEQ ID NO: 82618 - DNA, 354 bp, Saccharomyces pastorianus
atgtcgaaactatcgtcttatcctcatgccgccgattttataaatatggaagaaccgccaaaatctaaagagtttttcgatgatctttgtgccgtccctaatttactcaaaagacgttttccaaactctcgaagatcgacgcattattgtgaggctttaaattattctaggaaaaagcttcctgttgtgttgtctaaaatgacactgcaagagttgaggcacaatatgtcaacattttttttgcaggaaaaggatcaaataaatatttatgacacctgtaaggtgatagacatgggggaccgtgtcttgctcgaaactatgcctccacagccaagagatttatttgaaaaatag

SEQ ID NO: 82619 - DNA, 507 bp, Saccharomyces pastorianus
atgtcagtttccgctatcgcccccagacggaagagacttgcagatggtttaagcgtcactcagaaggtgtttgtaaggtctcgtaatggaggcgctaccaagatcgtaacagaacactatttaagatcggacatcccatgtctttcgagaagttgtaccaagtgtccgcaaattgtcgtccccgatgctcaaaatgagttgccgaagttcatcttgtcagattctcccttagaattaagcgcacccattggtaagcattacgtcgtcttggataccaacgtggtgttacaggcaattgaccttttagagaatccgaattgttttttcgacgtcattgtcccccagattgtcctagatgaagtgagaaacaagtcatatccggtgtacacgagattaagaactctatgcagagatagcgacgatcataagagattcatcgtgttccataacgaatttagtgaacatacttttgtggaaaggcttccaaatgaaaccgggatcctctag

SEQ ID NO: 82620 - DNA, 132 bp, Saccharomyces pastorianus
atggtggctaaagattgtgataggaattgtgatgatatagagatcttctcagaacccgttaggcaactacaagataattctcgggaaagaagaagcttgaggcgttatgccagtaaacggtctatagtttga

SEQ ID NO: 82621 - DNA, 2031 bp, Saccharomyces pastorianus
atgacagaaattattgatttagacttggtcgatgactttatcaagaaacctatggtcaaacaacagaaaaaccagtcttcaaagcctagggtaaaaagaaggggtcagttgacgtttgatgatttcagaaacatcaaaattgtagaagaacctgttgtactttctcacaatagttcaattgacgaatcactggatgctgctacccaaaatactaataagcgggagaaatatgaaggtacctgtgatgaagaaatgaaaactaaagaaatggaggcaaatatggcaagcaaatattctaatatcaaaacacattcgaacgacactaacaaggtagagtcgatcagtgaacacactgcttctaataatagaccattgaatacattaaactggtcaccaaatattcctttacgatattctgactttgcaaagtttatgagtgatgagacggtaacggaaagcaattgggcgcctcccctttgcacccctctcccatatgcaggcgatgttatgaagatcctttcttttatcgtcaaatttaaatgggtgttcagcgacgatctactgaacctgtcatttcaagatgtggagataggactaaaattagaggtggctggccattctgcgaagaatattcgaatttgtcaggataaaatgaatctactattttgcagccttttgaggttattattctgctccgagaaaagagcagacaaccaaactcatagaaatttcacgctaaaaagatttcttagtttgaaaaatccatatggaaaactggttggcaaactcagaagcttaatccaggagtggggcttaccaaaagaatggcgtggtaatagtgatattttatctactctaaattttaatggaggtggtttgttgacgatggaaccattagatagaataatattattgagatgcatgatcgattggaattgtagctactccgcacttttccataatgaaattcaaaggctcactcacttgaaaggcgatacagggttcaaccatcaaacttttcacgccagcaggtttgctatgtgcggggccaataacatattagatagttgtgaagttttatgctctttgatgagtcaaaagttggaaaatcgaaagaaaaggaagcccagcgacaaaggaaaactgagtaagatcaatagtcagatgaaatttctaaagggtgttcggaaatcattgagcgaaaaagtaactacagacagattacgagctgcagttaaaataaatgaagaatggggtgaatattttgcaaacgaatttacacacacaccaattgatgatcccaccgtagacgaaatttacaagttaagggcatcagagtttatgatagcgagaattccacgagttggagatttctacttaccaccattctggattggcaacgaatgcagttcagtaaacactagttacagtttcaatgacatgtcaacttatcttaattactttgtaaaattcaaagaggagggtacaaaaatactgcctgcaaaaaccgcacaaaatgaaaacaagtgtcaacttaaacttatatataggaacactcctgcatgtatccgtaatttacagttcaatgatgttcactttgccgaggtgccgcattggtttgaagttgcaggagactcgaattctttgagtaacttcattgagtatttggaaagtttatcatcacttactgaaaatgacaccgatgatacaaaaaagggtatagacaatctaattgagtttttgaaaattttcagtatattcataaatgagactattcagcgcataactgctgcccctacagacagtactgaaggacgtcatttgcgaacaagctctcagagaagaaccacggtacattactcgagtgatgtaaatggtgacgtttccgaggaaagtgaaaatgaagttgacattgacgttagcgatgactatgattcagaatatctgagtgaggagaatacattgacaagtaaaggtgaagataggacagataaatctttcgggaaaagagaattacataatggtggctaa

SEQ ID NO: 82622 - DNA, 156 bp, Saccharomyces pastorianus
atgattctcgctttgggcgacttcctgattaacagggagacaaagcatgcgagaggccctgggttcaattcccagctcgcccccttttttactattgaaaatagaagtattcggtcagacgtagctgatcgatgtagcatgtgtacgcatttctag

SEQ ID NO: 82623 - DNA, 1686 bp, Saccharomyces pastorianus
atgcctgcaggtcaacaacatgaggcccaaatgcatgcacaggcacaagctcaggctcaggcacaggcacaggtggaacaacagaagcagcaacagcaattcttgtatccagcttcgggctattacggccatccttctaaccgaggtattccacagcaaaacttgcctcctataggaagcttctcgcctccaacaaacggttcgaccgtacatgaagcctatcaggatcaacagcacatgcaaccaccccacttcatgcccttaccatcgatcgttcaacacgggccaaatatggtacatcaagggatagcgaatgaaaatccacctctatcagatctaagaacgtctctcactgaacagtacgctccttctagtatacaacatcagcagcagcacccgcaaagtattagtcctatagcaaacacgcagtatggtgatatccctgttagaccggaaattgatttagatcctagcattgtgcctgtggtccctgaacccactgagcccatcgaaaacaatatatcgcttaatgaggaagtcactttcttcgaaaaggccaagaggtatatcggcaataaacatttatacactgagtttttgaaaattttaaatttgtactctcaagatatacttgatcttgacgatttagtggaaaaggtagatttctacttgggttccaataaagaactatttacgtggttcaaaaactttgttggctaccaagaaaaaaccaaatgtatcgagaatattgttcatgaaaaacatagattggatttagatttatgtgaggcatttggcccaagttacaagaggctaccaaaaagtgacactttcatgccatgctcaggtagggatgatatgtgttgggaagtcttgaacgatgaatgggttggacatcctgtatgggcttccgaagattcgggatttattgctcatcgtaaaaaccagtatgaggaaacactattcaagatcgaagaggaaagacatgagtatgatttttacattgaatcaaatttaagaactattcaatgtttggaaacaattgtaaataagatcgagaacatgactgagaatgaaaaagccaattttaaactgcctccaggtcttggtcatacttcaatgactatttataaaaaagtgataaggaaagtttatgataaggaaagggggttcgagattattgatgctttgcatgagcaccctgcagtgacagccccagtcgttctgaaaagattaaagcaaaaagacgaagaatggagaagagctcaacgtgaatggaataaagtttggagggagttagaacagaaggtttttttcaagtcattagatcatttaggcttaacatttaaacaggctgacaagaaattattaactacaaagcagttgatatcagagattagcagcatcaaagttgatcaaacaaacaaaaaaattcactggttaactcctaaaccaaagagccagttagattttgatttccctgataaaaacattttctatgatatcttgtgtttggctgacacttttataacccataccacagcctattctaatcccgataaagaaagattgaaagatttactaaaatacttcatctcttcgtttctttctactctcttgggaaaacatcgaagaactcgtcgctactcccataagccaaacgtgtcagaatctacgcggatctga

SEQ ID NO: 82624 - DNA, 1467 bp, Saccharomyces pastorianus
atgtcacaggtttggcataattcgaattcgcaatcaaacgatgtggctacttcaaatgacgctacgggttccaacgaaagaaacgaaaaagaaccgtccctccagggaaataagcccggttttgttcaacagcagcaacggattactttaccctcgctatctgccttgagtactaaggaggaagatagaagagattccaatggccaacaggctctaacttctcatgctgctcacatattaggttatcctcccccacattcaaatgctatgccctcaattgcaactgattcagcattgaaacagccccacgagtatcaccctcgccctaaatcttcgtcctcttctccctctataaacgcttcgcttatgaatgctggtccagctcccctccccacagtgggagccgccagtttttctttgtcgagatttgacaatccattaccgataaaagctcctgttcatacagaggaaccaaaaagttataatggtcttcaggaagaagaaaaggcgacgcaacgacctcaagattgcaaggaagttcccgctggtgtgcagcctgctgatgcccctgaccctagcagcaaccatgcagatgctaacgatgacaataataacaacgaaaattctcacgatgaagatgctgactacagacctctaaacgtgaaggatgccctatcttacctcgaacaggtcaaatttcaatttagttcgcgtccggatatctataatttatttttagatattatgaaggactttaaatctcaggcaatagacacaccgggcgttattgaaagagtatccactttgttcagaggttatccaattttgattcaagggttcaatacttttctaccccaaggctatagaatccaatgctcctctaatccggacgaccccattagagttactacaccaatgggtactacgacagtaaacaataacatcagtccatctggtagaggtacaacggatgcacaggaacttggttcttttccagaaagcgatgggaatggtgttcaacagccctccaatgtgccaatggtgccttcgagtgtgtatcaatcggaacaaaaccaagaccaacaacaatctttgcctcttttagctacttcttctggtttaccttcaattcaacaacctgaaatgcctgcacatcgccaaatcccacaaagtcaatctttagtacctcaagaagatgttaagaaaaacgttgatgtcgaatttagtcaagccataagctacgttaataaaattaaaactagatttgccgaccaacctgatatttacaagcattttctggaaatactacaaacttatcagcgagagcaaaagccaataaacgaagtctacgcacaagtgacgcatcttttccaaaatgctcctgatttactagaagatttcaagaaattcttgcccggactcttcagcttctgccaatcagcaggtgcaaaatgctcagcaacatgc

SEQ ID NO: 82625 - DNA, 426 bp, Saccharomyces pastorianus
atgggaaaaggtaaaaataagatgcacgaacccaaaaatggaagaccacagagaggcgctaatggacacagttccaggcaaaaccataggcgcatggaaatgaagtacgataattcagaaaaaatgaagtttcctgttaaactggctatgtgggattttgatcattgcgatccaaagagatgcagtggtaaaaaacttgaaaggttgggtttaattaaatcattgagagttggacagaaatttcaaggtattgtcgtttcgccaaacggcaaaggtgttgtttgccctgatgatctagaaattgtcgaacaacacggcgcttcggtggtcgagtgttcttgggcacgtttagaagaggtacctttcaataaaataggcggtaagcacgaaaggctgctgccgtatttagtgccgctaatcaagtaa

SEQ ID NO: 82626 - DNA, 219 bp, Saccharomyces pastorianus
atggattgggccagtgaattgttatcacacttctcgtggggaatgggatttttagaattaaacaaagaattgcttgaaatctatcagcagtgcactgactgcgactctgtaaagagggctgaagaggaatggttgcaaaaattagaaaaggaaactcaagaacgaaaatcccgagctaaagaagaagatatatggatgatgggtgtaacattaaattag

SEQ ID NO: 82627 - DNA, 387 bp, Saccharomyces pastorianus
atggcttactctaaaatcacattactagccgctcttgctgctattgcttacgctcaaacccaagcacaaatcaacgaattgaacgttgctttagatgatgttatgaccaacattaacgactacatcaccctatccagcactccaaattcaggtctttccttggaccaaattccagctggtattatggacattgctgggcaattgcttgcaaatccaggtgatgactcctacaccactttgtactctgaagtggacttttctgctgttgagcatatgttgactatgctcccatggtactcttctagactgcttccagaattagaagcaaaggatgcttctctaactacctcgacctgcaggcatgcaagcttgcactgccgtcgttta

SEQ ID NO: 82628 - DNA, 1683 bp, Saccharomyces pastorianus
atggaagagtgctatgacgatgaaacagactctttttcaccaaatttgcaatattatttgagagatacattccaatcatcaccttttctgaatactagaaaagagaacaaatctgaatccagtagttttccaatgagatcctcaaagttgttggaaaagaattctgacatcaaaaaatatttcttggtatccaagaatggaaaaatagtgaggagagactatccaagcacgccagtaattgtcaacgaaacgttgatgataaacaggtttgaaaagaactggataaagttatggcgccaaagaaaactacaaataaatgaaaggctgaatgacaaaaaaaaatggtttacttacccagaacttatcttctctgaagagcgtattaaaccgttatatagaggagatgatagtgcaccatgtacaaaagaacaaaaaagaaagcataaaatacttcaacaaaaggtcggatatcccaataaccctaagacaatagtttgtcacattaacggaaaaaaacatacgtgggttgccctagactggacagtctacaagtttgcacgaaatcttgatcacattgttgtcataactacactgccaaaactgatttctaacaggaaaaaaactgcaaaagatgatacagaatgggcaccgggatatcaaaaagaagtaatagatcaaaaattaaacgacatttttgattatattttacagctagtaaaagtggtcaaaatatccgtcaaaattactttagaaataattgtaggcaaaattaaaaaaagtctggtagatgtcattaatgtctatactccagatttcttagttcttgctactttaaagcacgagcgaaatgagaatcttattacatataaatccaaaaagctgacagatgtctttcctgttagttatccgattcccacatttgttgttccctcgaaacgaatgtattcgttcgaactgaatctacagagagaagtaaatgaacattatgtctcaaaaaatcatatgaagcacgaacatactgacgttgagagcatgagcagttcaatgttcaaaaaaaatacaatatcagatatttcttcacatatttccgtagattcgtacgccgaagatttcaaaaggcaaggttacatcaaaaagcagttcaacacctctaatgattccattccaagaaaattgactggtctcgcccagcattcaagaaggaagatcacgggtgatatagaaaaattacaagacgatgagaaagatagagaatgtactaaggaaaaacttttgttgaagaaaattgatatcataattagagagtcattgaagtcttctttagcgatagaaacgttgcctggtaaaaatgtatcgcagtccagtcacggtgaccaaatttccagctttaagaatgctttgataggcaatgggtcgaaaaacacaaagtttagaaaatctttaataccatattcttcctcagaggaacaaaataccacaacaacgattaaactcagtagctcgcctacgtcccagatcaagtttgcaacctctgtaaaacatagagatggaagagccgcccttggcaaagccagaaatctgcctgatataaggcacagtatgtccttcgacaaagaaaattcctttgatccatctgataaaagcagtagtgttgataatagcattcctttgaggaaagtttaa

SEQ ID NO: 82629 - DNA, 186 bp, Saccharomyces pastorianus
atgatttctgtttgcccacaaaatgacttgcaaaaatgctacagaagcctcacattcgatgttccaggacaacaattcgaagagagaaatgaacaaacccttaaaaacgggccaaaaagaaaggcagtttccaaccatctgttgcctttgacacagtgccttccaccgctggttattcttctatag

SEQ ID NO: 82630 - DNA, 291 bp, Saccharomyces pastorianus
tccttcagagttaatggcgctgtcagtggccctagttcatcacggtccgtagcacgggtcttactgtctgctcttcccgcgtcttccctgctcggtttccctgcggtcctacgctatagcaccagtgccaaagccccggcaggggtttctgtggcgggtatccctcaattgcgggtaacaataagtaactcaacatcacgaacgacgtttaggtttgctgttaccacaaagggtaaaacgtcaataaaagcaagcaatattattcgtgccagagaactatatctggcgtag

SEQ ID NO: 82631 - DNA, 1200 bp, Saccharomyces pastorianus
atgacttcagtatcaccctcgccacctgccagtcgatcgggctcaatgtgctccgacttaccgtcccctttgcagactgagaaactggcacatattataggtcttgatgccgacgatgaagttctccggcgcgtaaccaagcagttgagcagatctaggagaattgcttgtctgactggggcaggcatttcgtgcaacgcgggcattcctgactttcgctcttctgatgggctctacgacctagtgaaaaaggattgttcacagtattggtctatcaagtccggcagggaaatgtttgatatttcgctatttagagatgacttcaaaatatccatttttgctaaatttatggagaggctctattcaaatgttcaattggcaaagccgactaagacgcacaagttcattgcgcatctaaaagataggaacaaactgctgcgctgttacacgcaaaacatcgatgggctcgaagaaagcataggacttactttatcaaataggaaactaccgcttacctcatttagttcacattggaaaaatctggatgtcgttcagttgcacggcgacctgaaaactctttcgtgtacaaagtgcttccagacttttccttggagcaggtactggtctcgttgtctaagaagaggtgagttaccattgtgtccggattgcgaggcacttatcaacaagagattgaatgaaggaaagcgaactcttggttctaatgtgggtattctaagacctaatatcgtcctgtatggtgaaaaccatccatcctgtgaaattattacgcaaggcctaaatcttgacataattaaaggcaatcctgattttttgatcatcatgggtacaagtttgaaagttgatggtgtgaaacaactggtaaaaaaattaagtaagaaaattcacgatcgtggcggcctgatcattctcgtaaacaagacatccattggcgaatcctcctggcacggcattatagactaccaaatccactcagattgtgataattgggtcacctttcttgaatcccaaataccagatttcttcaagacgcaagatcaaattaagaagttgagacagttaaaaagggaggctagcgacttgagaaagcaaatgaaggcccaaaaagactcaatcggacccccccaacaacccctctacgaactgcccaggggattgatattcaaggaaacaacgaattga

SEQ ID NO: 82632 - DNA, 453 bp, Saccharomyces pastorianus
atgttaatgcaaataaaaatggacaatcatccttttaattttcaacctattttagcttcccattcaatgacaagagacagtacaaagccaaaaaaaatgacggacaacgctttcgtgccaagccctcctgtagggtttattaaagaggagaacaaggctgatttgcatacaatttcggtagttgcttcgaatgtgactctaccgcaaattcaactcccaaagattgcaacacttgaagagcctggttatgagagcagaactggctcacttacagatctttctggaagaagaaattctgttaatataggagcattgtgtgaggatgttccaaatactgcgggcccacatattgcaaggccggtgacaataaacaatttgattcctccgtctttaccaagactgaacacataccagcttagaccgcaactaccagatactcatttaaactgtcac

SEQ ID NO: 82633 - DNA, 348 bp, Saccharomyces pastorianus
atgaacacacaagaactatgtaagattttcgtagccagagaatatcctctggtagtggtgctctttatatattttgttctatttttacaccagaagtatcacactactctaaattatgtctggtaccctacgtgttctaaaagaatctgggtgagagaaaaaggaagaaagtgctcctttttttttttttttcaaaggtgcctcggtccgatggcttcgcaaacaatagatgccaaaggaaatgatcttctctttttcgcttctttatttttttttaagttacgacttcgtgcagcctgggatgtaccaagcttgttgttaaacgagcctgacttcttaatcgcttaa

SEQ ID NO: 82634 - DNA, 834 bp, Saccharomyces pastorianus
  modified_base (811)..(811): a, c, g, t, unknown, or other
atgtcggaagacgaattttttggtggtgataatgaagccgtttggaacggttccagattcagtgattcacctgagttccaaacgttgaaagaagaggttgctgcagagttatttgaaataaatgggcaaataagcctgctgcagcagtttaccgcgacacttaagtcatttatagatcggggagatgttagtgcgaaagttgtggaaagaattaataagagatctgtggcaaagatagaagaaataggcgggctcattaaaaaggtcaatacatcagtgaaaaagatggatgcgattgaggaagctagcctggataagactcaaataatagcgagagagaaacttgtgagggatgtccgttactcttttcaagagtttcaaggtattcagcggcagtttacccaagtaatgaaacaagttaatgaaagagcaaaagaatctcttgaagcaagtgagatggcaaatgatgctgctttattagatgaagaacaaaggcagaatagctcaaaaagtactcgaataccaggcagccaaatagtcattgagagagacccgataaataacgaagagtttgcttatcagcaaaatcttatcgagcaaagagaccaggaaatcagcaatattgaaagaggtataacggaactgaacgaagtttttaaagatttgggaagtgttgttcaacagcagggtgtgctagttgacaatattgaagcaaatatttatacaacgtcagataacactcaattggcttcagacgagctaaggaaggccatgcggtaccaaaaacgtacgagcagatggagggtgtatntgttgattgtgcttctcgtaatg

SEQ ID NO: 82635 - DNA, 936 bp, Saccharomyces pastorianus
atggctaaaagacccttaggtttaggtaaacaaagtagagaaaagaaaagaaaggtggaaagtgtcgaaaagaagagcgatgaaccttccagagaatccacacctgtgagaagtcaaatgagtgttgagcttgacgatgatgctgatttagatgatgaattagctcagctgaaaggactgtggtctaaatattttcactctgacagagacgatgaatatgttttaaatggaatcgttcacgaatgtgacagattattgcgtctttctgaagaagataaagagatcaagaagacgctgaacgatattttccatggtatatatgctctggctttatctgaattgactattttcaaggcaggcgatgaggaagccactgaagaaaagagaaaaaaagatgtatcctcattttttgaaaatgctatcgaaagagtcgaattaggtctttcgcatttccctgaatcccaatttctaaaactagttttagcaaagataattttccaaaggattccgttggaatatatttccaatctccatttgaaatcgaaggataaaaaacttgatcttgtaggacagcttgaacatggtaagaagcatttttcaatttatgaaaacgatactgagtttacttttgaaatcctacaaatggtgaatgacttattggacatcgtcgagaattttggtcgcgaacaatctattcaagagggcatagatagcgataatgaagaggaagaggaactcattgatattgagttggaaccagaacaccctgtatatcccctacaacaatcgctagaagccaattatgagtggctaagaaaccattttgataaattgcttgacaacactaatacagatatgaaaatatatgcatcaatagctaacaccctaggggaactatatttaaaaaaagctgaagaaccaagtaaagtttcctaa

SEQ ID NO: 82636 - DNA, 1188 bp, Saccharomyces pastorianus
atgacttcggataaacacctttttgtgctgattcacgggctatggggtaactatactcatatggaatctatgaggacaattttatccactacattaaaaaaggaagatgttaacgatgatatgatatattttttaccaaagcagaatgccatgtttaagacgtttgatggtatcgaaatcattgggtacaggacattgattgaagtttgtgaatttatccgagattataaagacgggaaaatcgccaaactaagcgtaatgggatattcgcaaggcggattagtggcccgatttatgatcggtaagatgttgaccgaatttaaagaactgttcgaggatattgaaccacaattattcattacaatggcaacgcctcatttgggggtagagttttacaatcctacgggcatagcatataaaagtgcgttatatagtgcgctgaggaccttgggatctactattttaggtaaaagtgggagagaaatgtttatcgcaaattctagtaacaatatattggtgaaattgagccagggtgagtaccttgaagcactctcgctatttaaatggaggatagcgtttgcgaatgtcaaaaatgaccgtacggtagccttctatacggcgtttattacggattgcgacccatttatagattttgacaacaaattgaaatatacattcgaagaaaagattccgggatctggctataaaggaatattgcctaagattgtcgacctaaacgctttaaacgttaacagccatgctcctactaaaccgaccaagacttataaaaagtggggacgcactattcttattatactagttgcaacattcttaattctcccaatagccctggttatgaatggcctgggaaccgcttatagttatattgttacttgcaagtaccgcaaaatgctctctaatggcattcttcacaatgaggtcagaggaaaattaggattgacggagcaactgaaaggctatgttacagatgcatacgggtccatcataaattcggctttagatatggatgcgaactatgaagcaagtaatagtaatcttgtaaacgaagaagagcttccttggaaggaatttatccaaaaatacacaactataaatgatggtgtttggaaatctaaatttaaaaaactgccttttgatgaaaaccgaaagttatttgagaatctaaca

SEQ ID NO: 82637 - DNA, 435 bp, Saccharomyces pastorianus
atgaacttaatacaaaacaatgttgtctttgccttattcattcatggactatctgatggaattgcattaggtacgacaacgaacaatgattcactgctcatagtggtgttaattgctatagttattcataaaattcctgccgttctttccctcactagtttgatggtatcgagacaaaacttaatgaaatgggaggtgatctgtaacgttttcttgtttgcgtcatcgactccgatcggatacatagtgttatcccttttgaatttgagtcattcgccaacgatggattggataagtggaaatcttctgcttatgagtggtggcagtttactatatgcgtctttcacagcatttgttggtggagatctcatgatcacgatctcagcgttgaacaggaagtcgttttacctcatgatgaatccgtttatgttttga

SEQ ID NO: 82638 - DNA, 354 bp, Saccharomyces pastorianus
atgaagtttttgggtgtaatactgctagcaagttttcttttgattgctaccttcctcatagggcttatcccattgtattatattgataaacaaaaaagttccattgtcacaaaccaagaaggtgctgactcaatttctgattttactacgaacgcagatactcaaacgatcaatgacgatgttagtagttaccgtgtgaagattgccgttctatcacaattcggtataggaatgttgttaggtacatcatttatgttggtaataccggaaggtatcaaagcgtgtgtcgaacatgatgggaacgttggtgtgaatttattaattgggttttctaggtgtttatgttctcgatag

SEQ ID NO: 82639 - DNA, 1164 bp, Saccharomyces pastorianus
atgtatagtaatagacagaaattggatttgccagaattattacaatacaaccaaggtgttcttgctgtcactgtccttaatggggaattgcccgactctgggctatacgtccaagcgtttttcgatgataatggtcatccaagatttgttagtccgcgtattccatcgagaattgtcaagaatggttggtcaggtgacgtgatcataaaagaattggacaaatccattaccacttttagagttgctaaaaataaaaactacaacagagtggagaaatgcatttgtgaagtagaactacccacacaagagttagttaagaactgttattataagccatcaatattacatctttcaggtgaaggcagtgctaaactaatgctccaaatatcatggttccctattgatacaaaacagttgccggcaaatgacctgatcacaaattctggtgatttaacgattatgtcgaggagtgcagaaaacttgatagcatccgatttaaatggttattcggactcatacttaaagtattacatcaataatgaggaagactgcgcttacaagacgaaggttgttaagaaaactttgaatcctaaatggaatgatgaaggaactattcaaatcaataaccgtttaaatgatgttctaagaatcaaagtcatggactgggatgccacatctgcggatgataccattggtacagcagaaatcccattgaataaggtcaaagtcgagggtactaccgaattagacgtaccggtagaaggattagagaacgctggtcaagacggtggtatgttgcatttagctttcagctttaagccaagatacaccattagcgtgagtaaaagagaaaagaaggtcggagatatagcatccaagggactaggcactggtttgaaagctggtacgaccgtgataggcggcggtgttggtgccattggcaagatcaaagaaggggtattcggtggactaggcagcctcaccaaccataagaagagtcatgagatgggcgaagaagaaactaagtttagcgagaaagagagggacaagatgccctgtgttaaatataaatttcgttttattttcttttatatttttttaaaatctttatctagtataactttccatctctttgttatggtgaaaacaaaaaaaaaaaactga

SEQ ID NO: 82640 - DNA, 2340 bp, Saccharomyces pastorianus
atggccaaagaagatactggggtaacagcaccaaagaagcccgaaacagcccaagtagctaacataaatgggatagataagttagaacctccaaagacgaaagaggaaaccgaatccagtaaaagcgtgtcatctgagaaggcggcacatgctagtgatgaaagcttcaagagaagtatccatgaagcttcttatgtcggctggaaacagattggtggctgggaagacaaagacgaattaactttagatgatgaattgatggatatgagtagagaaaccttcttaaataacatcataccggacagcctttacggtgactggtatcattcggtagccattttctttatcggaggcgtggcatcatttgcacttggtcattataagttttcaatggggtcggccttttttgtcatcgttatcacttcattgttgtatagaacctctgctaaaaagtacagaggttccataagagagttggtccagaaagagttcacggtgcagaaagtggaaaacgactatgaatccctagaatggttgaatgcctttttggataagtactggcccattttagaaccttccgttagtcaattaatcgttcaacaagctaatgaacaaatggctactaatgaggcgattcctaaattcattactcaactatggatcgatgagttgacacttggtgttaaaccccccagagttgatttggtgaagactttccaaaacactgcatccgatgttgttgtgatggactggggtatttcttttactcctcacgatttatgcgacatgagtgctaagcaagtcagaaattacgttaatgaattagcggttgttaaggccaaaatttttggtatcaccatccctgtttctgtgtcagacatcgctttcaaggctcatgctagagtgaaattcaaattgatgactcccttccctcatgtcgaaactgttaatatccagctactgaaggttcctgattttgattttgttgctaccttatttggccgttccatcttcaattgggaaattttagctatcccaggccttatgacactaatacaaaagatggccaagaaatatatgggtccaatcttgttacctccattttctttacaattgaacattccacaactcttatctggttccaacttgtccattggtatattagaaataactgtcaaaaatgcaaaggggttaaaacgtacctcttcaatattgaacgaatcaatcgacccttacttatctttcgaatttaacgatatatctattgccaagacaagaaccgtaagagacacattgaaccccgtttgggacgaaactctgtacgtcttgttaaactcattcactgaccccttgaccattagtgtttatgataagcgtgcaaaattgaaggataaagtcctaggcagaattcagtacaacttgaatactttacatgataaaaccacgcaaagaaacttaaaagctcagtttttaagaaactctaaaccggttggggaattgacttttgatttaagattcttcccaactctagaagagaaaaagttgccggatggatctgtggaggaactaccggatttgaatactggtattgctaaagttgtggtcgaagaaggttctcgttttgctgaagaagaacagaaggttactgcctacgttgaagtttacttgaatgctaaactagtgttaaccactggtaaggcaactgacactggtacattgaagtggaattcagactacgaagcagttatcgcagatcgtcgtaaaacaagatataagtttgtcgtcaaggatggcaaaggagaagaaattggatctaccattcaaaccctgaatgatttaatagatagaagccaagtgaacaaaaatttgattccattaaaaaaccaaaagggtgacataaagattaccacatattggagacctgttagactggagattggttccaactctgtagcttacacgccaccaattggcgccatcagagtattcattgagaaggcaaacgatttgagaaatttggaaaagtttggtaccattgatccatactgtaaggttttggttaatggtttatcgaagggtagaactgatttaaagagccaaactttgaatcctgtctggaatcaagttatttatgttgcagttacttcaccaaaccaaagaattacgcttcaatgtatggatgtagaaacagtcaacaaagatcgttcagttggtgaattcaatgttaacgttcaagatttatttaagaaggatgagaatgataaatatgaggaaactattgatgaaaaagctaaagttggtcgtctagtgatgcctaagaaaaacctaagggcactataa

SEQ ID NO: 82641 - DNA, 132 bp, Saccharomyces pastorianus
atgaacacatcagtcacttccataaagttggtactgttgggtgaggcagcagttggtaaatcgtcaatagtcctaaggtttgtatctaatgatttgacctgcaggcatgcaagcttgcactgccgtcgttta

SEQ ID NO: 82642 - DNA, 606 bp, Saccharomyces pastorianus
atggcgagtgtaccaagtctatgcgacatactgataccgctagaaaagaatagtcgcagcgatggcgatgctgaaagtagcaatacagtcctaattcaactgcgaaaagggcatcacgaacggatgcgttctccttacacaatacaaaagttttacaaatttctaaaaagagctcattgtgaggaaaatttagaatttttcgaaaaagctcatcagttcctccagcttaagcaaaacaggagtattagcgaggagaagctcttggaagtctggaacaagtcgttgttcataaaaaacattgccgtggactcgcccaaagaatgcaacttttcacaggatactagggagatatttgagaagtgctttgctaacaacgaagtacctgccgacgtagacgtcctgtgtgccattagccatgtgatgggcctgttaatggacgggtatcaccgatttgtgagttctgttaatgagaaaaagtactccgccacatatgcccacaatgactctgctatggaacaagatctcaaaaacgagtctacaacttctttttcgtcattaggcgtggaggatatttctgaagatagaaattcgtatgggatcctctag

SEQ ID NO: 82643 - DNA, 2409 bp, Saccharomyces pastorianus
atgattatctttgtttcagaagaacctgagaggaggctagccattgtatccaacttgtatgctcttgttcttaaaccggttgggaaaaagccatctgataaacccctatgtgccattgaacttcttcaaaaaaatgatttgaaaaaatatggcttcaaaagacttacatcacacgaaatttttggtgttatcggactcattgaggttaatggcctgctgtttgttggtgccatcactgggaaatcaaaagttgcacagccatgcccaggagagactgtgaacaaaattttcgctgtcgattttttttgtttaaatgacaacagctgggattttattgaaatcgactcctcaggttatcctgtgttgccggagactgcttcaactgaatatcaagacgccttgccaaaacatccatgctatgaattgaagaaactattatccaatggatctttttattatagttcagattttgatttgacctcaaccttacagcatcgtggatatggtcagcattctttgagtacagatacctacgaagaagaatatatgtggaactctttcctcatgcaagaaatgatcacttacagagatcatttggacacaaatttgaaacaaatcttggatgacgaggggtttttaacaacagttatccgtggatttgcggaaactttcgtctcgtacgttaagaagttgaaagttgctcttaccatcatctcgaaacagagctggaaaagagctggaacaagatttaatgcacgtggtgtggatgatgaggcaaacgttgccaatttcgtagaaacggaattcattatgtattctagccaatactgttatgcttttacacagattagaggcagtatacctgtcttctgggagcaaggtacctctttgatcaatccaagagtacaaattacaagatcatttgaagccactcaaccggtatttgacaaacatatcatgaaatcagtggaaaagtacggacctgtgcatgttgttaatttgttatcaacgaaatcttctgaaattgaactttcaaaacgatacaaggagcatttaactcattcaaaaaaattgaacttcaacaaagatatatttttgacagaattcgatttccataaagaaacttcgcaagaaggcttttccggtgtcagaaaacttattccattaatattggactctcttttatcttctggctattattcttacgatgttagagaaaaaaagaacatatctgaacaacatggcatatttaggaccaactgtttagattgtttggatagaacaaatttagctcagcaaattatttctttggctgcttttagaacttttctcgaagatttccgattgattggttcaaattcgttcatcgacgatgatgatttcgtttctaaacataacaccctgtgggctgatcacggtgatcaaatatcccaaatatatactggtactaatgctttgaagtcctccttttcaagaaaaggtaaaatgtcacttgctggggcattatcagacgccacaaaatcggtcagcagaatatatattaacaatttcatggataaagaaaagcaacaaaatatcgatactttgttgggaaggttaccgtatcagaaagcagtgcaactttatgatcccgtaaacgaatacgtaagtacgaaattacaaagcatgtctgataagttcacatcaacctccaacattaacttgttagtaggatcattcaatgttaatggagcaaccaagaaagttgatttatcaaagtggttatttccaatcggtgaaaaatttaaacccgatattgttgttttaggtcttcaagaagttatagaactatctgcgggttcgattttgaacgctgattactcgaaaagctctttctgggaaaacttagtgggtgattgcttaaaccagtatgatgataaatatctgttgttaagagtagagcaaatgacttctttactaattttattttttgttaaagcagacaaagctaaatacgtcaaacaagtggagggtgctactaaaaaaactggctttaggggtatggccgggaataaaggtgcagtgtctataagatttgagtacggtgccacttcattttgttttgtcaattctcatctcgcagcaggagctacgaatgtcgaagaacgtcgaagtgattacgagagcatagttagaggtattactttcactagaactaagatgattcctcatcacgattccattttctggttaggtgacatgaattatagaataaatctaccgaacgaagacgtcagaagagagttgctcaaccaagaagaaggatatatcgataaactgttgcattttgatcaactttacctaggtattaatcctggcagtgtattcgaaggttcaaagaaccagtctcagttccgtcaacatacagta

SEQ ID NO: 82644 - DNA, 1170 bp, Saccharomyces pastorianus
atgtcatctgaaagcccacaggatcaaccacagaaggagcaaatcagcaataacgtcggcgttaccaccaatagtacaagcaatgaggaaacaagccgctctcaagatgataatgtcaaggaagtcaatggaaatgatgatactaaagaagaggaacaagaagaagacgcagaactagatgatttatttggagatgacaatgatgacgatgatgatgatgatgttaaaaaatcggagactgaaaaaagtgatagtgatagtgatgaagacgacgagggagagaatatcaaccatagaagtcgtcatagagaaagtctcgggttagatgatgatgaagcagaggagcaagccatgtacacccgaaaattttatggtgaggatgctaataacttttctgatcaagatgagactactcacacttttaaagaggaaaatgtagagcttgtcagacatattattccaagtaaagctaatgtgaatgaaacggcgtctcataacgaaattttctatgctagaattcccaactttttaactatcgatccaattcctttcgaccctccaagttttgaggccaaagtaaacgaaagggcaagcaattcagcttctagggaggatcaactagacgaccgcctgattgatgaaaacactgttagatggagatactctcgtgacaaagaccaacatgtctttaaagaatcaaatacacaaatagtgcagtggtcagacggtacatattcgctaaaagttggtgaagagtgtacagatatattggtcaacgatacgagcaacacttttttgacagtatcgcatgaccaacaagagttgatccagtgttacgaagggggtgaaataaaaaagacgttgatgtttattccaacttcgacgaattcaaaaatacatcaaaaactaagtaaagctgttataagaaggaaccaaagacaaagcaagggtcctggaacatacattgtaagtatggatcctgaagtggaaaagaaggagttagagagaaagcaaagccagattttaagagacagaaggagaagacagctcaaagaaaaggagaaacaagaatccccagatgccgcttttgagacgggatttagaaagcaaaattcacccactacctatggagcctcgagaagaactgaatatgaagaagatgacttttag

SEQ ID NO: 82645 - DNA, 624 bp, Saccharomyces pastorianus
atggacatggcgacattgtacgatggtttagagtggattgtcatagatgcttatgtcgtgaaggaagcattgaccaacaggcatcttatcatgcgaaatctagttcaggcacagcagaattcaaaggcgaaacaggaacaagcacgcaggttccggtcaagaagagatattaaccctatgaaaatcgatgaagcactacgtcagttgaaagctgcaactaaaaacgaacaagttttgacccttaagcttcaacgaatcacgtccaacatgattatcgagagaaaacagtggattagctggtatgaagaatggataagaagctcgatcaaagaatttacactaagaaagatagagtatgaaagaaagaagctgacgttactagaacgagtacgttctgatatcagaaaagctgatgaaaacggaggtttgtcacgtctaggacgccatgctgtctcaaacaacaactccgatacttctcaaacccttaaaggggacagttggacgggagagagcaaccgcaaaagtcaaatccccatcacaagatcgctcatactgaatttgatgatgaactattcactgaagacgatgggtacaactctcaggactcagacaccacatcactga

SEQ ID NO: 82646 - DNA, 909 bp, Saccharomyces pastorianus
atgacttcggctgtaccttatgatccatatgatgatctggataacaatccattcgctgagccccaggaggaaggttctgaacctgctgcaacaaccacagatggatcatcttctatgtcagaggagcgtgtaggtaccgagcaaactgctgcttccgttcaggacaacggaactgcaaataacgttcaaaatggtcttggtggggaaggaaacgcaacacgatcaaaaacttcaaacgaacacaatgaaaaccaacaaccatctcaatcatcagaacgtgttatacttcctgaaagaagtgatgagaaaaaaaaatacactctacttgcaaaagtaacaggattggaacgatttggatctgcaaccggtaagaaagagaatccgactattatatttgattgctccacaaatttgccaacatttcgcaaacaacaatacaagaatgtcaaaaaatcatacgaagaattccaccaattgttcaaatatctgaatgttgccattcaggaatcttttgttcctactcttccctctgcgtatactacattcggaattaatagcgaagaagataggatgaaagtaacgcgaaatttccaactttggtttaacaggctatcgcaagaccccttaattattcggaatgaagaagtggcctttttcattgaaagtgactttaatacgtacacacccatcaacaagtccaaatcactcgcatctgggttgaaaagaaaaacattgaaacaattagcacctccatatgatgaaatcacagaattagcagaattccggccattagtcaagtctatatatgttgtttctcagagcttgcaagaaaaactgctaagagtttccagaaatcgcaagatgatggttcaagaagaaaatgccttcggccagatttcgttaatctag

SEQ ID NO: 82647 - DNA, 96 bp, Saccharomyces pastorianus
atggttgctttcactgttgaccaaatgcgttctataatggacaaagttaccaatgtgagtaacatgtccgttatggctcacgtcgatcatggtaag

SEQ ID NO: 82648 - DNA, 1659 bp, Saccharomyces pastorianus
atgagattacattatagaagaagatttaattttttaaggagaatactttttatattatgcattacttcattgtatttatcgagagattcactaaagctacatgcaaaaaatgtattaatggatcataatgtagcagaatatcatggcggaatgatagacgatattcaaatcctgcggtgctaccattggtacaggcaatgtagttctttgtatgccccgaaattacacccctccaatactgctaaaaagatcaaagacaaaaacagcattctgtggaccagagtttctaagaatattactgtagagacattgtattcacttcagtctggaccattctacaacagttacttatatgttcatctgaaagatttccaaagtaatccaaaaaacacaataaaagaactagccatagcaagggactcagcactaatacccctacaagtgctgagagacattaataagttggtgaagtcgagcgacagttctgtcttccacaatcatgtgtatttacgagaaaagcctacttcgtcatggtggaagctgcttttcggcatatccgttgatacagataacatagctgtgttcggtgaggagtgggtatacaaggggagcggcatatggtgtaagtatatccttaatgatgatgataatgacgctcctataactaatttggaaatatatctaggatcatcgtttattgaatcgaggccttcttggaaagaagttatccatgaatttcatagaaataacataccttctctgcccatatcaattacaagaaagcttgaaaccaaaaaccatcatcacaaattttctaatggattgctaggttctttgagaacacccagcaaagacattaatatccaagtggatgcagattacaaaataacatctccccatatacaattttcgaggggacaaagatcgttcaaaattctccaaataactgattttcatttcaaatgtacggataatagcatgaccgtaatcaatgaaataaaaacagtaaattttattgatagggtactcgcatcagaaaaccctgatttagttgtgatcacaggtgatttgttagactcacataatactattgactatcaaacgtgcattatgaaagttgtccaaccaatgatttctaataaaataccctacgcaatttcattgggtgtttctgacgaatccaatttggccacatcggcacaaattagagactttatcaggaatttaccttacacatttaacaacgttgcatcagaagagggtcatatggccatagaaatctcatttaaaaagaagctcacgaagaatactcttttggaaagagacattgataccgaagacgaaacaaacccatcagaggctttatttttcgtctttgattcatttgcgcccgtcaataatttcctacaagattataacgacctgattgggaaaatagactttggcttggcatttcaatattttccattatcggaatataggcctcatggtttatttcctattattgggcagtataatgagaggtctaccttaacagtagatacgccaaggtctagaggacaagtttcaatgacgatcaatggcaaacattacaaaagcttccttgatatcctgagtctttggaatataaaggtgaagagaatgtggattttgatgtaa

SEQ ID NO: 82649 - DNA, 786 bp, Saccharomyces pastorianus
atgagcgaggagtgtattgaaaatcctgaacgtattaaaattggtactgatttaatcaacatccgaaataaaatgaacttaaaagaactaattcatccaaacgaggatgaaaattctaccctactcatacttaatcaaaaaattgacattcctagaccgttgttttacaaaatttggaagctgcatgacttgaaggtctgtgcagatggtgcagccaatagattatatgactacctagatgatgacgaaaccctaaggataaaatatcttcccaattatattattggcgatctggattcactatcagaaaaggtttacaagtattataggaaaaacaaagtaactataataaaacaaactacacaatattcgactgatttcacgaagtgcgttaatttgatctctctacacttcaattcaccagaatttcgctctttaatatcgaataaagacaatcttcagtcaaatcatggaattgaactggaaaagggtattcacacattatacaatactatgaccgagtccctggttttctcgaaagtgactccaattagtctattagcactgggaggaattggtggcagatttgatcaaacggttcactcaataacgcaattgtataccttatccgagaatgcaaactatttcaagctttgttacatgactccaacagacttaatattcttaatcaaaaaaaatggaactttgattgagtatgatccccaatttaggaacacttgtataggaaattgtgggttgttgcctattggagaagcactttggtta

SEQ ID NO: 82650 - DNA, 480 bp, Saccharomyces pastorianus
atggcaacgtacggtttatcgcatacaaggaatacaaaagttggtaacgacatcgtcagaggtgtttccggtggtgaaaggaagcgtgtctccattgctgaagtctccatctgtggatccaaatttcaatgctgggataatgctacaaggggtttggattccgctaccgctttggaatttgttcgtgccttaaagactcaagctgatatttccaatacatctgccacagtggccatctatcaatgttctcaagatgcgtacgacttgttcaataaagtctgtgttttggatgatggttatcagatctactatggccccgccgataaggccaagaagtactttgaagatatggggtatgtttgtccaagcagacaaaccaccgcagattttttgacctcagttacaagtccctctgagagaaccctgaacagagatatgctgagaaaagtattcatataccacagaccccgaaggaaatga

SEQ ID NO: 82651 - DNA, 519 bp, Saccharomyces pastorianus
atgcccgaggccaagcttaacgataacgtcaacgacgttactagctactcctccgcgtcttcttctactgaaaacgctgctgatctacacaattataatgggttcggtgagcatacagaagctcgaatccaaaaactggcaaggactctgaccgcacagagtatgcaaaactccactcaatcggcgcccaacaaaagtgatgctcagtctatattttctagcggtgtggaaggtgtaaacccgatattctctgatcctgaagctccaggctatgacccaaaattggaccccaactccgaaaatttttctagtgccgtctgggttaagaatatggctcacctaagtgcggcagaccctgacttttataaagccttattccttaggttgcgcttggaagaacttaagtgcttctggtgcttccgcagatgttcgctatcagtccattgtggtactattccataccaaattctaaaattggctgagaagttcagcgtgctaagaaccagaattccaatttga

SEQ ID NO: 82652 - DNA, 2085 bp, Saccharomyces pastorianus
  modified_base (1028)..(1059): a, c, g, t, unknown, or other
atggtaatacaaactgctactacgttatcgccagctaaggcaacaccttctttccctcataacgatttgattaaaagtatgtcagacagccctataagtcgccccactcaccctccgattaggaaattaaagtcatccttgaaaatatcacaccctgaacctatttcaagatcaaagtcagaaattttcttcacatcacctgagaaaaatgtacgttttgctattgaattaacaactgttaagagatttgataaaaacgcggagccaagttctatctcaaatgaaaactcacccacattatcccctgttgatagcaataccgctgctgatgacgtccagcttttcaacaatgaggactgctggttcaatgattcttcgttggtcacaaacttgctgaaaaatgaaaagaagtttcgttatatgaattccttaaacaacatgttcaagttggacctttatgattcagaagatgaggatgatattgacgagcacatcaatagccaggccgagtatgggtatacttataattctttatctacccgaggaaaaacttctgaaaataaatctgctacctcttcactggctactcaggcaacaaatatatgtgattggaaacttcactgcacagacttggttcccttcaagatagcccctccactatttaccaaaacattatcggcctccgatttgcaaggtcagctcacaaagtacttaaatggccaaaatgtaaaactgcattctctcactcaattaggcgatgattcaagcaaaattacaggtctagtgtacgtcaaaaacttgagttttgaaaagtatttggaaattaaatttacgttcaactcttggagagatattcattacgttaccgccaactttaatagaacgataaattcgaatgttgatgagtttaaatttacaattgatttgaatagtttgaagtacattttactcatcaaaagaatcattactatggaaaagaatacaagcagctgtccactcaacattgaattatgctgcaggtatgacgnnnnnnnnnnnnnnnnnnnnnnnnnnnnnnnnggtaaaaattatcaccttttcatgactaccttcaagaagggcggtgaaacgaaggaaaagattccagttgtcgtcgagcctgcttctcaaacagatgcagccatgtcgccgaaggaaatgaaagcaaggttcgtctcctcgaatcccactctttcaaggtttttacctcaatcaagaaagttcagcgaggatacagattactataatacatctccattgaaacatctttatcataatgatacgacaagctgggttaagcccaagagattgaacgttgttttagataaacttgaaaatgctacccctcctcctccttcttctgctttggctaacgacaccgccagaactggtaaaataactaaagataagaacaatgtgctcgccccaccaacggccagtaatagtattgacctaccaatattaggatctcaacatcaatcactatattctggttcatcgtcatattcttcatcatcttcctccatttcctcttcattatcctttgcttcttcaaacaattcctccacaaattcttcttccgcctcttgtagtttcccacttactgagctcgataattttgattatgcgaacctatatgaacctaatgataccttcacaacggccaatttgtttaatcattcattaaattccctaatgccggagatttctactccatcattcttcggaggctttagaaatgagaatactattaataacaacgatagtaaaaatttggttacctctttggaggattcatatgaggacaaacaaagtgttattacagatactactatggacgaaaataataaaacttcgactatcaacaattccacagacacgttaatcaaaccctcaaaagaaaatggaacagttaaggagaataaatcatctgcaaacagcaccagtgcaccatcttcatctcagaaccgggccagtacaatactaaacgatcattcgaatgggaagagtgatctcaaatatgtcaactatcgacctgcaggcatgcaagcttgcactgccgtcgtt

SEQ ID NO: 82653 - DNA, 543 bp, Saccharomyces pastorianus
atgagtattgtctattatggttccaacgcttggttaggtggcctttgtgtaaacatgatattagattcttggtctcaccactatttgcatctgcccaatactttgtcctcgaaagttgccatgaccaccaaggaattgatcggcttcattatcttccatatccttaccgcgttctgttactttatgaagccataccatatgaactatattttaatttggtcgtgtgttggtactttcttcgccatgttgggtatggtaatttacttaactaagagcgcacatggtgttggtgacttgttcacttctactcattccacagttactggctctaaaaaggcttgggcttgggtttatacgatctcgtactggtacggttctgtttctccaggctgtaccaatcaaagtgacttctccagatttggttcctctaattgcgctatctggactggtactatagttgctttattaataccagcaaccttgatcccagtattcggtatcattggtgcttctgcttgtgaaaaattatacggtcaaacattt

SEQ ID NO: 82654 - DNA, 153 bp, Saccharomyces pastorianus
atgagtttcggtacgaaaatctccagggctttgagatttttggaaattcctgtcaaaaatagggcctccgtgaattttttaagaaaccctgatttgcaacctatcaagtctgttaatcaaacgtgggtttcggtctatttgcgtagactctag

SEQ ID NO: 82655 - DNA, 1230 bp, Saccharomyces pastorianus
atggctgaactgagcgaacaagtgcaaaatttaagcatcaacgacaacaacgagaatggttatgttcctcctcacttaagaggaaaaccaagaagtgccagaaataacagtagcaactacaataacaacaacggcggctacaacggtggccgtggcggtggcagcttctttagcaacaaccgtcgtggtggttacggcaacggtggtttcttcggtggaaacaacggtggcagcagatctaacggccgttctggtggtagatggatcgatggcaaacatgtcccagctccaagaaacgaaaaggccgagatcgccctatttggtgtccccgaggatccaaatttccaatcttctggtattaacttcgataactacgatgatattccagtggacgcctctggtaaggatgttcctgaaccaatcacagaatttacctcacctccattggacggattgttattggaaaacatcaaattggcccgtttcaccaagccaacacctgtgcaaaaatactccgtccctatcgttgccaacggcagagatttgatggcctgtgcgcagaccggttctggtaagactggtgggtttttattcccagtgttgtccgaatcatttaagactggaccatctcctcaaccagagtctcaaggctccttttaccaaagaaaggcctacccaactgctgtcattatggctccaactagagagttggccacccaaattttcgatgaagccaagaaatttacttatagatcctgggtcaaggcctgcgtcgtctacggtggttctccaattggtaaccaactaagagaaattgaacgtggttgcgatcttttagtcgctactccaggtcgtttgaatgacttgttggaacgtggtaaaatttctttggccaacgtcaagtacttggttctagatgaagctgatagaatgttggatatgggtttcgaacctcaaattagacatattgtcgaagactgtgatatgactcctgttggtgaaagacaaactctgatgttctcagctactttccccgctgatatccaacatttggcccgtgatttcttaagtgactacatctttttgtctgttggtagagtcggttctacttcagaaaacattactcaaaaagtcttatacgttgaaaatcaagataagaagtcagccttatatggatctaatatgtctgcatccactgacggtttgactttgatctttgtcgaaactaag

SEQ ID NO: 82656 - DNA, 387 bp, Saccharomyces pastorianus
atggatcattcaatagaagtcactttcagagtaaaaacacaacaggttataataccggaacaaaacatccggggaaatgaacttcccttgcgtcggtggcaaatggaactcatcatgttagatgcaacaggaaaggaagtggagcctaccatcctctctaaatgcatataccatttgcactctagcttcaaacagcccaaaagacgactgaactcgctgccattttttatcaaggaaaccggttggggagagtttaacttaaaaatagaatgcttttttataggtaacgctggaaagtttagcattgaacatgacttaacgtttgaagataatgcatatgcagttgactataccgttgacctgcagcagcaagctgcactgcctctt

SEQ ID NO: 82657 - DNA, 387 bp, Saccharomyces pastorianus
atgaataaatcatgctttcgttttcctttttttgctaccaccaggtttactggtggcagtcttcctcttcgtaggtttggctttctgcttgataagtttatccttcttcaagtctgtgctactatcttgtgtttcttcatcatctgcgggaactggattgtcatctgcatcaacgacatcttcgaaatcgggggtgctagtactggtgccaccaccaccaccaccaatagtactacctgttctgtaaattgcgactggatgtgtcatactgttgtatttccgcgtgaatccacttttaaccgtagctggtatctttttgataattgctgtggtcacatcaggacctacgaaaaactccataatagaatcccaatcttctttggttaa

SEQ ID NO: 82658 - DNA, 237 bp, Saccharomyces pastorianus
atgttcgccagactcgctaatcctgcccacttcaagcctctcacgggctcccacataacaagagctgccaaaagattttaccatcctaaggtaattgaccactacacaaacccaagaaacgttgggtccatggataagtccttagctaatgtcggcacaggaatcgtgggcgccctgcatgtggtatgtgataaaacttcaaataccgggaaggaaaaccggaatatcgagacgtaa

SEQ ID NO: 82659 - DNA, 1809 bp, Saccharomyces pastorianus
atgagtgaactgcttgccattccacttaagcgaactttagaagtggactttgccacggagttgtcaaaactaattgatactacttcctttcaaacggcatcctttttccaatcagacatactcaaagttgttgatgcaagaaacaatgcgattgcacccgatatctcaatcgacggtctttctgcactgaaggaatactatgtaatattgttgcaattagagaaaaagtttcccaataatcaaatagaatttacatggtttcaaacgctatcacaaaaatctcgtggttctagtcaatactcattacaatgggaaaaattaaccattatttataatattggttgcatgtattcactattggctctaaatagcaacaatgatgcagccgaatccctcaaaacgtcatgtctgtacttccagaatgccgccggatgctttaaacatgttttagaccaccaaaaaaatcttgagacaatcccagtggtagatgacgccacattgaacgctttaacctccctgatgctagcacaagcgcaagaatgcttctggtttaaagccgtgcaagataaacacaaggactccttaatcgcgaagttgtcacaacagatcgtggacttctactgcgaggctattaatgacgcccaaagggggaaacttattagaagtgattggataaaccacttaaaggctaaaaaggcttactttagtgcggtgacttattacagaatagccttatcttttaatgagaagaagcagttcggaaatgtcgtgaaagctctgcaaatgggattgcaatttataaatgaatcaacactatcttcgcaagctaagtttaaaactgttgtcgaatcttctctgaaagaagcccaaagagacaatgaattcatctacttgcaagaagttccttcggaattaccatcaatcaaaccagctctcatggttaaaccatcttcttcagcaacattgttgccttctattaaaaaggatgagactttattcaaagacctaatccctatagaagtgatggaatattgcacagcatacaatgaaaggcaagatgaatacgttgaacaacgtgttaccaatccccttgcttccctaaataaactattgaaggagtccatgactactttccaaataccacaagggcttacaaaggtgagtgaagcagaactgagtcattaccaggcatcactgaataatcttctcattaataataaaaatgtgcaggtacaactcgacaacattgagcaaattttaaatgaagaagcatttactgacaatcagctccgactaaaacacggaaccttaaattggactttacctgaatcttcaactactaacacagcatattatgaaaaactaaaaaagctgagaggataccttgatgaaggtagtgcgattgacaaacaaacaaatgaactatttcaaagcatcgataaaaatttgattggatcagagatcaggttaccggaatctaatgatcctctaacgaataagattaagatgatcatacaggaaagaaatgattatattgataggacgaggcggaaatcttcagaatatagaatacttccaaagatcattacatcgtataaaaaaaatggaacagtcgactttgaaccaattttcatagaccatttaaaatactttgacgaagatttaagatacgttaatagtacaaaggaagaaaatatcaaacttattgaggaagtaaacctaaataagaagaataaccccggcaaaagcgggattgaaccaaagaaaatggtaagaatagatcccagagagctatatattgagatctga

SEQ ID NO: 82660 - DNA, 4806 bp, Saccharomyces pastorianus
atgaacataccacagcgtcaatttagcaacgaagaggtcaaccgctgctatttaagatggcagcatttgagaaatgaacacggaatgaacgctccgagtgtgccggaatttatctatttgactaaagtgttgcaatttgctgccaagcagcgacaagaattacaaatgcaacgccaacagcaaggcatttcaggttctcagcaaaatattgttccaaattcttcagatcaagcagaactgccgaataatgcttcctcgcacatttctgcttctgcttccccgcatttagctccgaatatgcaattgaatggaaatgagacctttagcacttctgctcatcaatcaccaatcatgcaaacacagatgccattaaatagcaatggtggtaataacatgctaccgcaacggcaatcttcggttggttcattaaatgcaactaatttttcaccaacaccagcaaacaatggagaaaatgctgcggagaaaccagataactcaaaccataataacttaaaccttaataattccgagcttcaaccgcaaaatcgatcattacaagaacacaacatacaggattcagatgtgatgccaggttcgcagataaattctcctatgccccagcaggcgcagatgcagcaggcacaattccaagcacaacaggcgcaacaagcgcaacaagcgcaacaggcacagcaggcacaacaagcacaagcgagactgcaacaggggagaagattacccatgacaatgtttactgccgagcaatccgaactgttaaaggcccaaatcacatctctaaaatgtctagtaaatagaaagcctattccgtttgaatttcaggctgttatccaaaaatctattaaccatcctccagatttcaaaagaatgttactgtctttgagtgagtttgcgagaagaagacaacccaccgatcaaaataaccaatcaaatctcaatggcggcaacaatacgcagcaacccggcaccaattcccactacaataacactaacactcacaacgtttctgggcttaccagaaatgcacctttagatagcaaagacgaaaattttgcatctgtttcaccagctggtccatctagtgtacataatgcgaagaatggcaccctcgataaaaattcgcaaactgtaagtggcactccaatcacgcaaacagaatcgaaaaaagaggaaaacgaaaccatttcaaacgtagctaaaacagctcctaatagtaataagacccacaccgagcaaaataacccgccaaaaccgcagaaacccgttcctttaaacgtccttcaagatcaatataaggaaggaataaaagtggtagatatagatgatcctgatatgatggttgattcttttacgatgcccaatatctcacatagtaatatcgattatcagactttattggccaattcggatcatgcaaagtttactattgaacctggcgttctaccggttggtattgacacacataccgctactgacatttaccaaactttaattgcattgaacctagatactacggtaaatgactgtttggataagctactaaatgacgaatgtacggaatcaaccagggaaaatgctctttacgattactacgccttacaattattaccgttacaaaaagccgtaagaggtcatgtattacaatttgaatggcatcaaaattctctattaaccaatacacatccaaattttctttcgaaaataagaaacatcaacgttcaagatgcattgctaacaaaccaactttataaggattatgaattacttaagttagaaaggaagaagactgaggcagtggccagattaaagtcgatgaataaatccgccatcaatcaatataatagaagacaagataaaaagaataaaaggttgaagtttggccatagactcattgctacgcatactaatttagaaagggatgagcaaaagagagctgaaaaaaaggcaaaagaacgtttacaggctttaaaggcgaacgatgaggaagcctatataaaattattagaccaaaccaaagatacaagaattacacatcttctaagacaaacaaacgcatttttagattctttaacaagagccgtgaaagatcaacaaaagtacactaaagaaatgattgattcccacataaaggaagcatcggaggaagtggatgatttgtccatggtccccaagatgaaggatgaagaatatgatgacgacgacgacaattctaacgtcgattattacaatgtcgcacatagaattaaagaagatatcaagaagcagccttcaatattagttggtggtaccttaaaggactatcaaatcaagggtttacagtggatggtttcgcttttcaataatcatttaaatggtattttagcagacgaaatgggtcttggtaagactatccagacgatatccttacttacatatttatatgaaatgaagaatattcgtgggccatatttagtcattgttcctttatctacactgtcaaattggagcagtgaattcgcgaaatgggctcctaccttaagaactatatcatttaaaggttcgccaaatgagaggaaagccaaacaggctaaaataagggcaggtgaatttgatgtagttctgactacctttgagtatattattagagaaagagcacttttatccaaggtcaagtgggtccatatgattattgatgaaggccatagaatgaaaaatgcacaatccaagctttctttaaccttgaacacacattaccatgcagattatagattaattttgacaggtacaccacttcaaaacaacttgccagaattatgggccttattgaattttgtgttacccaagattttcaattccgtgaaatcttttgatgaatggttcaatacaccctttgccaacaccggtgggcaagataaaattgagttgagtgaagaagagacgcttttggttatcaggagattacataaagtcttgagaccctttttattgcgtcgtttgaaaaaggatgtagaaaaagaattaccggataaagttgagaaggtagtgaagtgcaaaatgagcgctttacaacaaattatgtaccaacaaatgttgaaatatcgtcgtctttttatcggtgatcaaaataataagaaaatggtaggtttaagaggtttcaataatcaaatcatgcaactaaagaaaatctgtaatcatccttttgtatttgaagaagttgaggaccaaatcaatccaacaagagaaacgaatgatgatatttggcgtgttgctggtaaatttgaactattagatagaattttgcctaagcttaaggcaactgggcatagagtattaattttttttcaaatgacccaaattatggatattatggaagattttttaaggtacattaatatcaagtacctgaggttagatggtcatacaaaatctgatgaacgtagtgagttgttacgtctatttaacgcccctgattctgaatacttgtgctttatcttatcaactagagcgggtggtttgggtttaaatttacaaactgcagacactgtcattatttttgatactgactggaatcctcatcaagatttgcaagctcaggatagagcgcatagaataggtcagaagaatgaagttagaattctaagattgattactacgaattcagttgaagaagttatcctagagagagcctacaagaagctagatatcgatggtaaagtcattcaagcaggtaaattcgataacaaatctacatcggaggaacaagaagcgttgcttagatctttgctggatgcagaagaggaacgtagaaagaaaagagagtctggtgttgaagaagaagaggagttaaaagactcagaaatcaacgaaattcttgctcgaaatgacgaagaaatggctgttcttacaaggatggatgaagatagatcaaagaaggaggaagaattgggagtaaagagccgtctcttagaaaagagtgaattacctgatatttacagtagagatattggtgccgagcttaaacgtgaagaatcagaatctgctgctgtttacaatggaaggggtgcaagagaacgtaagacggcaacttacaacgataatatgtctgaagaacagtggttaagacaatttgaagttagcgatgatgaaaaaaatgacaagcaggcaagaaaacaacgaacaaagaaggaagataagagcgaggcgattgatgggaatggagaaattaaaggcgaaaacattgacactgataatgacggtcctagaattaataatatatcggccgaagatcgggcagatacggatttggcaatgaatgacgatgatttcttgtctaaaaagagaaaggcaggaaggccccgtggaagacctaagaaagtgaaacttgaaggatctgaaaattctgaaccaccagcgcttgaatcaagtccagttactggcgataactctcccagtgaggattatatggacattccaaaaccacgtacagcgggaaaaacatctgttaaatcagcaagaacttcaacgaggggccgtggtcgcggtcgtggtcgtggtcgatggcgaggacgtggacgaggaaggccgccaaaagcaagaaatgggcttgattatgtccgcacgcccgctgcggcaacgagtcctattgatattagagagaaagttgctaaacaagctctagacttataccactttgctctcaattatgaaaatgaacctggaaggaaactttctgacattttcctctccaaaccttccaaagcactatatcccgattactatatgattattaagtaccctgtcgccttttga

SEQ ID NO: 82661 - DNA, 3945 bp, Saccharomyces pastorianus
atggatattccctcttcaaatcaaattcaacatggccaaaggagtgaaaggaaccgaagaatgccgagggcttctttttcttctacagccactacttctacggcggccacattgacttccgcgatggtactggatcagaacaattcggaaccgtacgcaggtgcaacattcgaagccgtgccaagttctattgtatcattccatcaccctcattcttttcaatcaagcaacctcccaagtccgcattcttcagggaacctagagcagagaggccgccgattgactgaatcagagcctttagtattatcctcggctgaacagtctcgaagctcttctagaaacccttctcattttcgatttttcactcaggagcaaatatccaatgctgaaggcgcttccacgttagaaaatacagattatgacatggcctgggatgccacccccgcctatgaacaagatagaatctatggtacgggcccatcttccaggcgttcttctattcgaagtttttccagagcatcatctctctcaaatgcaaagtcttatggatctttcagtaagaggggtcgctctggttcaagggcaccacaaaggctgggagaaaattctgacactgggttcgtttatcattccgctacacattcatcgtccagtttatcgagatatacgaccagagaaagaattcctattgaactagaaagtcaaacagatgaaatactagaagacgagtcttctacacattctttagaatcttcagatagtaggcggtctgcaagcgaaaataatagaggaagcttttctggtcatgatgatgttcataatcagcatagcgaatatctaaaacctgactatcatgaaaagttttatccacagtatgcaccaaacttgcattaccaaaggttttacattgcggaagaggatttagttattggtatcgctgcttaccagacctcaaaattctggtatattatttacaacctgtgctgcttcttgactttcggattagtttatcttttaacgagatggcttccccatctgaaagttaaattttatggcgtgaaagtgccattggctaaagcagaatgggtcgtgatagaaaacgagtttggtgagtttgtcatacaacctatcgatcgacagtggtataatagaccattaagtactgttttaccttttgaaaattaccctaatccgtcatatgaaccaaatgatatcaatttgagccaccaccatgccaatgaaattaatccaaatgtgcctatcttgatcacatttgaatacagatatattaagttcatatattcaccgctggatgatctctttaaaactaacaataactggatagatcctgactgggtggatttaagtaccgtatcaaatggtttaactaagggggttcaagaagatagagaacttgcgtttggtaaaaatcaaattaatttgagaatgaaaactacttcagaaattttattcaatgaagtgttgcatccgttttatgtctttcaagtattttcgataattttgtggggcattgatgaatactactactacgccgcatgcatttttttgatttctgtactgtctatttttgattcattgaatgaacagaagaaagtatcgagaaacttagctgaaatgtcccactttcattgtgacgttcgtgttttgagggataagttttggacaacgataagctcatcagaactagttccgggcgatatatatgaagtatctgacccaaatataacaatattgccttgtgactctattcttctgtccagtgattgtatagtcaatgaatccatgctaactggtgaatctgtgcccgtttcgaaatttccagctacggaagaaacaatgtaccaattatgtgacgacttccagagcacccaaatatcgagttttgtttccaaatccttcttgtataacggtacaaatataattagagcaagaattgcccccgggcaaaccgctgctttggcgatggttgtaaggacaggattctcaacaacaaagggctccttggttcgttccatggttttcccaaaaccaactggttttaaattctatagagattcctttaaatatattggattcatgtcattaatcgcaattttcggtttttgcgtcagttgcgttcagttcattaaacttggtttagacaaaaagacaatgatattaagagctttagatatcataacaattgtagtgccaccagctctgcccgcaactttaaccattggtaccaattttgctttgagtaggttaaaggagaagggaatattttgtatctctccaacaaggcttaacattagtggtaaaatcgatgttatgtgttttgataaaactggaacacttaccgaagatggcttagatgtacttggagtacaaatatcggagccaaatggggttagaggccagaagtttggagaactattgagtgatattcgccaagtatttcctaaattttctttgaacgattgtagttcgccattagattttaagtccaggaactttttcatgtcattattaacatgtcactcgctgagatcagttgatggaaatttactcggtgacccactagactttaaaatgtttcaatttaccggttggtcattcgaggaggacttccaaaaacaagcattccattcattatacgagggaagacacgaagatgatgttttcccagaaaattcagaaatcattcctgcggtagttcaccctgatagtaataatagagaaaatacgtttactgataatgatcctcataattttctaggggtggtgagaagctttgaatttttatctgagctgagacgtatgagcgtaattgttaaaacgaataatgacgacgtatattggtcgtttactaaaggtgcgcccgaagttatttcagaaatatgtaataaatcaactttacctgcagattttgaagaagtactacgttgttacactcataacggatatagggttattgcatatgctgggaagacacttccaaaaagaacttggttatattcccaaaaagtatctagggaagaggttgagtcaaatttggaatttttgggtttcattatcttccaaaataaactaaaaaaagagacctctgaaactctgaaaagtttacaagatgcaaacatcaggacgataatgtgtacgggtgataacatacttactgctatttccgtaggtagggaagctggtttgatacaatgctctcgcgtttatgttccatccattaatgatacacccttgcacggtgagcccgtaatagtatggagggacgtcaatgagccagataacattttggataccaagactttgaaacctgtcaagctggggaataatagtgttgaaagtctacgtgagtgtaactatactcttgcagttagcggcgatgtatttagactgttgttcagagatgaaaacgagataccagaggaatacttaaacgagattttattgaattcatcaatctacgcaagaatgtcgcctgatgaaaagcatgaattgatgatacagctgcagaagctagattatacagttggattctgtggtgatggtgcaaatgattgtggggcactcaaagcggcagacgtaggtatttccctttcggaggctgaagcttcagttgctgctccgttcacttcaaagatatttaatattagctgcgtacttgatgtcattagggaagggcgtgctgcgttagttacatcttttgcatgtttccagtacatgagtttgtactctgccatccaattcatcactattactatactttacagccgtggttctaatttgggagatttccaattcctgtacattgatttattgctgatcgttccaatcgcaatttgcatgtcatggtccaaatcctatgaaaagatagataaaaagaggccttccgctaacctagtttcactaagattttggttcctcttttga

SEQ ID NO: 82662 - DNA, 378 bp, Saccharomyces pastorianus
atgagctggtacatcaagccaatcgttgggggcgacgacgccgtgcaatcttcagataataccgtattgttcttcgtctcaaattttcaatatattttgactgctatagttttgtctgtgggtccaccatatagagagccgatgtcaaaaaactttgaatttatcgttgatatcactgtctctatcggtgcaagtctactgctaatgactttggatacagaatcataccttggtaagatgttacagctgacccctatatcaaacagttttacaatgtttatcattgtatgggcgatattaaattactatgctcaactgtatataccgccatcgataaaaggttggttaaagaaaaagaagagtagcacaaaagtataa

SEQ ID NO: 82663 - DNA, 99 bp, Saccharomyces pastorianus
atgatgaaattactatttctgaatattatagtcgtgcgccgccatttgcattgtaaaagctacagactatcaccatggtatatatatatatatatatga

SEQ ID NO: 82664 - DNA, 225 bp, Saccharomyces pastorianus
atgaaactcggaagcaaacaggtaaaaattatatccttgttgctgctagacacagtgttcttcgggattgagataactaccgggtacttgtctcactctttggctctaatcgcggactcattccatatgctaaacgatataatttctcttgtggttgcactttgggccgtaaatgttgccaaaaacagaaatccggattcaacgtacacttatggttggaaaagg

SEQ ID NO: 82665 - DNA, 1824 bp, Saccharomyces pastorianus
  modified_base (1662)..(1662): a, c, g, t, unknown, or other
atgccgtacagagtggcgacgggttatagtgaaaaaagtactgacgatgatttgatatggagaaggccaatagtaaaagaggaactcgaggatgctgacaactttttaatggatgatgccgagttgtatgataaagtcaagaacgagagtgcagtatcacacctggataccatagttatgccgatcattttcacggtactgggcatgttcactagaatgtacaagattggtcgtaataatcatgtggtctgggatgaagctcattttggtaagttcggctcttactatctgagacacgaattttaccatgatgttcatccacctttaggtaaaatgcttgttggactgtctggttatttggctggctacaatggttcttgggacttcccatctggtgaggtttatcccgactatatcgattatgtgaaaatgaggttatttcaagcaatgttttcatcattgtgtgtgccactagcctatttcacaggaagggctatcggattttctaggctgagtgtttggctatttaccattctagtaatttttgagaattcgtatgcaacattaggcaagttcattctccttgattcaatgctacttttctttaccgtctcttcttacttttgccttgccaagttccatactatgagaaagtctcccttttcggctaggtggtggctatggttgtgcctcactgggttgaatttgggttgcgctatatctgtgaaaatggtaggtcttttcatcatcagtgtagtaggaatttacaccatcagtgaactatggaatctcctaagtgatagatcggtatcttggaaggtttatgtcaaccattggctagcaagaatattcgggcttatcatcattcctgtttgcgtttttttgttatgcttcaaaatccattttgatctgctgtccaactcagggcccggcgactctaccatgccatcattatttcaagccagtctgaacggtacaaaagttggtaagggaccacgtgatgttgctttgggttcttctattatttccatcaaaaatcaagcgttgggaggcgctttattacattctcatgtccaaccattcccagaaggttctgagcaacagcaagtgactgtctatggttacagtgatgctaacaatgaatggttttttcaaagaatcagaggagtagagccttggactgatgctgagaacaagacaattgagtttgtaaagggtggcgaaatgtatagattaatgcatcgcctaacaggcaagaatctacacacccatgaagtcccagcgcctatatcgaaaagtgaatatgaagtttctgcttacggagatgtagacttaggtgactacaaagataactggattatagaaatcgtggaacaagtaggggaagaagatccaacactactacacccgctatccacatctttccgtattaaaaattctatactgggttgctatttagctcagtcaggtaaacatttaccagaatggggtttcaggcaaggtgaagttgtctgtttaaaacacgcctccaaaagggataagagaacctggtggaatatcgaaacacatgaaaatgaaagattgccacagggagaagatttcgtatatccgaagacttcattcttcaggaatttcatgcagttaaattcagcaatgatggcntccaataatgctttggtaccaaaccctgaaaagtttgatggtatagcttcatctgcctggcaatggccaaccttgaacgtcggggtaagattatgcgaatggagtgaaaaatctataaagtacttcttattaggatctcctgcgtccgtctggccctcaagc

SEQ ID NO: 82666 - DNA, 2994 bp, Saccharomyces pastorianus
atgttgcaagcgccctcaagttcaaactcgggtttgaatcaaggaaatgctgcgccggacggcccacctaacgaaacacagccgtacgaaggcctcgacgcggcagctcaagaagaaataaaagaattggcaagaacgctgacgagccaatcttcccttttatcgcaagaaaagcgtattaccggcactggcgacccgaatacactaactgctgcttcttcatcgtcatcgagccggtcaattttcgctagtgatatcaagggagttaacccaatccttttggacgtcaatgatccagactacgatgagacattggatcctcgatcagaaaatttctcgagtgtcagatgggtacgaaatatggcacaaatatgcgagaatgattcggatttctataaaccgttttcattaggttgcgcctggaaagatttgagtgcctccggtgattctgccgatataacatatcagggaacatttggtaatatgcccatcaaatacttgaaaatgagttggaggtgcatatctcgacgtcttttccaccggacacatggcaagagtgaagataatgactccggtttccaaattttgaagccgatggacggatgcatcaatccgggggaattacttgttgtgcttggacgacccggtgcaggatgtactacgctgctgaaatctatatctgtaaatacacacggattcaagatttctccggacacaatcatcacgtacaatggattctccaacaaagagatcaaaaaccattaccgtggtgaagtggtctacaatgcagaatcagacattcacatcccgcacttgacagtattccaaactttatacacagtggcaagactgaagacaccaaggaaccgaatcaagggtgtcgatagggacacatttgccaaacacatgactgaagtggcaatggcaacttacggactgagtcacactgcagatacaaaagtgggtaatgattttgttcgtggtgtatccgggggagaaaggaaaagagtttccattgctgaagtgtctatatgtggctcgaagtttcagtgctgggataatgccacgaggggcttagattctgctaccgcgctggagttcatcaaggccttgaaaacgcaagccaccatcacaaagtctgcagccactgtggccatttaccaatgttctaaagatgcctatgatttgttcgataaagtctgtgttctttacgatggttaccaaatcttctttggcccaagtaagcaggccaaaaagtactttcaaagaatgggatatgtgtgtcccgaaaggcagaccacagcagattatttgacctctattactagtccttctgaaagaattaaggacaaagacatggtcaaacatggaattatgatcccacaaacggcctatgaaatgaaccagtactggattcaatcagaggaatacaaacaattacaagtgcaggtaaacaaacatttagatacagactcttcccagcaaagagaacaaataaaaaatgcacatattgccaaacaatctaagagagcacggccctcctctccttatacagtaagtttctttttgcaagttaagtatattctaatcagggacatatggaggattaagaatgacccaagcattcaacttttcacggttttgagtcatgcagcaatggctcttatattaggatcaatgttttatgaagtcatgctttccactaccacaacaaccttttattaccgaggcgcggctattttttttgctattttgtttaatgcgttctcatcacttttagagatcttttcactctatgaaacgaggcccattaccgaaaagcacaagacttactcgttatatcgcccaagtgctgatgccttcgcctctacattttctgatgttccaacaaaattagccacggcagtaactttcaacataccatattattttttaatcaatcttaaaagagatgccggtgcttttttcttttactttttaataaacattataacagtttttgctatgtcacatttgttcagatgcattggctcagtgtcgaaaactttacctcaggcaatggttcccgcatctgttcttctgttagcttttgcaatgtacactgggtttgccatcccgagagtccaaatgcttggctggtcaaaatggatttcttatatcaacccattgtcttacctttttgaatcgctaatgattaacgaatttcatggtagaaattttccatgtgctcagtatatacctagtgggccaaattatgccaacgcaacaggtgacgaagtcacctgctccgccctcggttctatcccaggaaataattatgtaagtggtgatgatttcattcaaacgaactacggctatcgacataagaacaaatggcggtctgttggtattggtttagcatacattatttttttcttatttctgtatttattcttttgtgaatacaatgaaggagcaaagcaaaatggtgagatgttagtattcccccatagtgtggttaaaaagatgaagaagaagggtattgtctctgagaagaaaaagaaaaaccaaccaacgttgtcaacatctgatgctgagaaagatgtagagatgaacaacaattcaagtgcgactgattcaagatttttacgcgattctgatgcagctataatgggtaacgataaaactgtcgccaaggagcattattcatctccttcatcttctgcgtctcaaagccatagttttagtaaaagtgatgacattgaattgtccaaatcacaagcgatttttcattggaaaaacttatgctacgatatcccgattaagaatgggaagaggaaaattttggataatgttgatggttgggtcaagcctggtacactaactgccttgattggcgcatctggtgcaggaaaaacaacgttattagattgtcttgccgagagaactacgatgggtttaatcactggtgatgtattcgtagatggtagaccgcgggaccatctttccccagat

SEQ ID NO: 82667 - DNA, 627 bp, Saccharomyces pastorianus
atgctaggtctctatattaatggacagaattggaaaattacctcactgactccgtacaatttgcttactgctttaaaaactgaataccaaagtttactgaaaattacgaaccttttgcaagaactcgagccatcaaaatgcatactagattccaagtttttactcaataagttttctcaattttcattggggaagttgcaaaacttacaaccaatcaaaatggatctccacacaattccagggttctcagaatcagtaatatacttcaatgatatcgaaagcgacccgcaatatgacgaattagtaaatagtgttcaagcattttttgataaatcgaaattcggagagttgcctgaaataaagcaaaactggtcagagatcatattcgttatagatttcgcccgtttagaagatagtgaggtgaaggaggcattgggtgggttggttcgtgccgttaatgttgtctcccagggatatccgcaaagagtcggactattgccatttagttcagatagtgacaagtccgttgttaataaaatttacgagctgaagaactcaactgacaatttaacagaattaaaaagttttttggagacaatgctgcttgcagatgccgggatcctctag

SEQ ID NO: 82668 - DNA, 771 bp, Saccharomyces pastorianus
atgagactacttgcgttggtattgttattgttgtgtgcgccgcttcgtgcatggacttatagcttacgatatggcatacccgaatctgctcaggtctggtctattttagttcatttactgggcgatgttgataatcagctgttaactaatttatatcctttggttaccggtttggatgacgagattgatattcaagaaaatcttgtggcgctaacttccaatgtattaagggagcgatacgataaagaggatgtggctgatttattggaactgtatgctagtctttaccctatgggtatgatacagcacgatatcagttccaatgcagaacaagacgatgcaaatagtagctatttcgttttgaatggtaataggtacgaaaagcccgacgacgtgttctacttgaaatctaaggatttaacaattcaacagaaagtcccagatgttgatgttatacaaccttacgatgttgtcattggtactaactcagaagcgccgatattgatcttgtacggttgtcctaccgttattgactccgacttcgaagaattcaataggaatttatttatggaagcaatgaatggagagggaaaatttagatttatttggagatccacatgttcccttgatgggaaaagcgtggagtatcccttaactcatccgcttgaaattactttacaaaatggttctagaatgagctccatacctcaattaaaaaaaatactatatacttgtacccaaagaaatattggttggagcagacaacgatga

SEQ ID NO: 82669 - DNA, 336 bp, Saccharomyces pastorianus
atggagcatactgcgcatatatttcctattatcatcaagggttccccaccagtaatgtcttctaatccccgacgacaatatcgtttaaatctccggtcaattaagtgcctcaaaaaaccccgtgtgcgggtatggcaagcgccgtggcccctggagccagcactatcagcggctaaaatgcctcgagctgcgcacgcccacgcacgcccacgcacgcccacgcaccccacgcttttgagatccaagcctcagtacctgctggacttcagggcagtgggtatttcgcgccttccgtccgcagcgatctccgtttaccccgctcatttcttttcctaa

SEQ ID NO: 82670 - DNA, 336 bp, Saccharomyces pastorianus
atgacatcaattggtactggttacgatctttccaatagtgttttttcccccgatggtagaaatttccaagtagagtatgccgtcaaagcagtcgaaaacggtaccacatcaatcggtataaagtgtaacgacggtgtagtctttgcagtggaaaagctcattacgtctaaactgctggtcccacaaaaaaatgtcaagattcaagtcgtagaccgtcacatcggttgcgtttattcaggtttgattcctgatggtaggcacctggttaatcgtggtcgtgaagaagccgccagcttcaagacctgcaggcatgcaagctggcactgccgtcgttta

SEQ ID NO: 82671 - DNA, 645 bp, Saccharomyces pastorianus
atggatatggatacgcaggaggcagaactatcgagccagctggagaatcttacaataaattcaccacgaaagctacgctcgaacgcgcacagtaacagtggtaaagtgtttaaggaatatgaaagtaaccacgattttcaagattcaaatttcacttcccaagttgtggaacctgcaatatccgattctgtcaaaaaacctcctacaatgacagttttgaacaactatagcacggtgcatcagaaagtgccgtcaggtttttcaggcacaactgctacatctcatcaagaagctcaatggaagcagtacttccctggtattggtagcggtggtggtaccaactttggtggcgctgttggtactgcaaacaaagttcctgaatcggatctcattgtgagcgacttggttaaggatttatctggagttcttgaaacaaatacatttaaaagacatttagatatgaagaataaaactactactatgcagacccatgaaaaccatgatacgattagtatttcacattctaaagatttctttaacgctgagaaggtctcatcgtcgttttctgatgacagcgattctggcccagcagctgaggcacatgatgtatttgatggcatattacaaagcaaaaatcgatatttg

SEQ ID NO: 82672 - DNA, 1278 bp, Saccharomyces pastorianus
atgtccatcacgaaggtacatgctagaacggtgtatgattctcgcggtaatccgactgttgaggttgaaattacaacagagaatggtctcttcagagcgatcggcccatcaggtgcctccaccggcattcacgaagctgttgaacttagagacgggaacaagtccgaatggatgggaaaaggggtgaccaaggcagtcagtaacgtcaatagtatcatagggcctgctttaatcaagtccgaattatgtgtaaccaatcagaagggcatagacgagctcatgatatcgttaggcggaacttctaacaagtcaaggttgggcgccaatgctatccttggtgtttccttgtgcgttgctcgagctgctgccgcacaaaagggaattactctctacaagtatatagccgagttagcggatgctagacaggacccctttgttattcctgttccttttttcaatgttttgaatggtggagcccacgccggtggctctttagctatacaagaattcaagatcgcgccagtcggggctcagagctttgcagaagccatgaggatgggttcggaagtttaccatcatttgaagatattggcgaaggagcaatatggaccttccgctggaaatgttggtgacgagggtggagttgcccccgatattgacactgccgaagacgccttggacatgattgtggaagccattaacatatgcggttacgagggtagagtgaaagtaggaatcgatagtgctccttctgttttttataaggacgggaaatacgacctaaatttcaaggaaccgaactctgacccatctcactggctcagtccagcccagttagcagaatattactattcattgctaaagaaatacccaatcatttccctggaagatccctacgccgaagatgattggtcctcgtggtctaccttcctaaagactgtcaatgttcagattattgcagatgacctgacatgcaccaacaagaccaggatcgcccgtgctatagaggagaaatgtgcgaatactctgttgctgaaactcaaccagatcggtactctgactgagtctattgaagccgccaatcaggctttcgatgctggatggggtgtaatgatatcgcatagatcaggtgaaaccgaagatccgtttatcgctgatttggtcgttggtttaagatgtggtcaaattaaatcgggcgctttgtcgagatcagaaagactggccaagtataatgaacttttgcgtatcgaagaggaactgggggacgattgtatatga

SEQ ID NO: 82673 - DNA, 456 bp, Saccharomyces pastorianus
atggatatactcaagaggggaaatgaatcggacaagtttacgaaaatagagacagaatctactacgataccaaatgactcggatagatctggttcactgatcagaagaatgaaggattccttcaagcaaagtaacctgcatgtcattccagaagaccttgaaaacagcgaacagacagagcaggaaaaaatccaatggaaactagcttctcagccctatcaaaaagtcttgagccaaaggcacttgaccatgattgccataggtggtactttggggacgggactgttcattggtttaggttattctttggcatctgggccagccgctttgctaatcggttttttgttagttggtacttcaatgttctgtgtcgttcagagtgccgcagagctttcctgccaattcccggtttctggctcagacctgcaggcatgcaagctggcactgccgtcttta

SEQ ID NO: 82674 - DNA, 495 bp, Saccharomyces pastorianus
  modified_base (313)..(379): a, c, g, t, unknown, or other
atgtccaggatggtttcgccctcacagacttcgtacgtcttctgggagccatccttcagaataaaagttatcttcagttcttcgcctggtttcggttttttcaaatggccatggtttaagaacgaagacgtagagaagggcagaaatcttgtggttgtggtggtgcgtgtgagcagagatggagaggtgcgtaaaagatgtgctgcgatgttcgatattctagctgtgtgtccagcccgagtaacaattattcacgcatatggggcgcgggttagagtcatagatacgagacagcgcctatttcgtaatgagnnnnnnnnnnnnnnnnnnnnnnnnnnnnnnnnnnnnnnnnnnnnnnnnnnnnnnnnnnnnnnnnnnntcatttttaaaaaaatgcaactgctacacgctttgaaagattcaatcaaaagtttttccgacgaccagaattggctagcaaaaaaacgaaaatgtaatggagtcatgcaaacatga

SEQ ID NO: 82675 - DNA, 1680 bp, Saccharomyces pastorianus
atgaagctcctgtcttctatcgaacaagcatgcgatatttgccgacttaaaaagctcaagtgctccaaagaaaaaccgaagtgcgccaagtgtctgaagaacaacagggagtgtcgctactctcccaaaaccaaaaggtctccgttgactagggcacatctgacagaagtggaatcaagactagaaagactggaacagctatttctactgatttttcctcgagaagaccttgacatgattttgaaaatggattctttacaggatataaaagcattgttaacacgattatttgtacaagataatgtgaataaagatgccgtcacagatagattggcttcagtggagactgatatgcctctaacattgagacagcatagaataagtgcgacatcatcatcggaagagagtagtaacaaaggtcaaagacagttgactgtatcgattgactcggcagctcatcatgataactccacaattccgttggattttatgcccagggatgctcttcatggatttgattggtctgaagaggatgacatgtcggatggcttgcccttcctgaaaacggaccccaacaataatgggttctttggcgacggttctctcttatgtattcttcgatctattggctttaaaccggaaaattacacgaactctaacgttaacaggctcccgaccatgattacggatagatacacgttggcttctagatccacaacatcccgtttacttcaaagttatctcaataattttcacccctactgccctatcgtgcactcaccgacgctaatgatgttgtataataaccagattgaaatcgcgtcgaaggatcaatggcaaatcctttttaactgcatattagccattggagcctggtgtatagagggggaatctactgatatagatgttttttactatcaaaatgctaaatctcatttgacgagcaaggtcttcgagtcaggttccataattttggtgacagccctacatcttctgtcgcgatatacacagtggaggcagaaaacaaatactagctataattttcacagcttttccataagaatggccatatcattgggcttgaatagggacctcccctcgtccttcagtgatagcagcattctggaacaaagacgccgaatttggtggtctgtctactcttgggagatccaattgtccctgctttatggtcgatccattcagctttctcagaatacaatctccttcccttcttctgtcgacgatgtgcagcgtaccacaacaggtcccaccatatatcatggcatcattgaaacagcaaggctcttacaagttttcacaaaaatctatgaactagacaaaacagtaactgcagaaaaaagtcctatatgtgcaaaaaaatgcttgatgatttgtaatgagattgaggaggtttcgagacaggcaccaaagtttttacaaatggatatttccaccaccgctctaaccaatttgttgaaggaacacccttggctatcctttacaagattcgaactgaagtggagacagttgtctcttatcatttatgtattaagagattttttcactaattttacccagaaaaagtcacaactagaacaggatcaaaatgatcatcaaagttatgaagttaaacgatgctccatcatgttaagcgatgcagcacaaagaactgttatgtct

SEQ ID NO: 82676 - DNA, 402 bp, Saccharomyces pastorianus
atgtcaacgcaactcgcaagtaacatatatgctccattgtacgctccctttttcgggttcgcaggttgtgcagctgccatggtgctttcctgtttgggagctgccattggtacagctaagtcaggtattggtatcgccggtataggtactttcaaaccggaattgatcatgaagtcattgattcctgtggttatgagtggtatcttagccatttatgggcttgttgtggccgttttaattgcaggtaatttatctcctaccgaagactatactctcttcaatgggttcatgcacttgagttgtgggctctgtgtgggatttgcctgtttgagtagtggctacgccattgtatggtcggtgacgttgacctgcaggcatgcaagcttgcactgccgtcgttta

SEQ ID NO: 82677 - DNA, 777 bp, Saccharomyces pastorianus
atgagttataataatccgtaccagttggaaaccccttttgaagagtcatacgagttggacgaaggttcgagcgctatcggtgctgaaggccacgatttcgtgggcttcatgaataagatcagtcaaatcaatcgcgatctcgataagtacgaccataccatcgaccaggtcgattctttgcataagaggctactgaccgaagttaatgaggagcaggcaagccacttaaggcactccctggacaacttcgtcgcacaagccacagacttgcagttcaaactgaaaaatgagattaaaagtgcccaaagggatgggatacatgacaccaacaagcaagctcaggcggaaaactccagacaaagatttttgaagcttatccaggactacagaattgtggattccaactacaaggaggagaataaagagcaagccaagaggcaatatatgatcattcaaccagaagccaccgaagatgaagttgaagcagccataagcgatgtagggggccagcagatcttctcacaagcattgttgaatgcaaacagacgtggggaagccaagactgctcttggggaagtccaggcaaggcaccaagagttattgaaactagaaaaatccatggcagaacttactcaattgtttaatgacatggaagaactggtaatagaacaacaagaaaacgtagacgtcatcgacaagaacgttgaagacgctcaactcgacgtagaacaggtgtcggtcataccgataagccgtcagagtgccagaaaagcggtc

SEQ ID NO: 82678 - DNA, 1200 bp, Saccharomyces pastorianus
atgggtgcaagtggagaaattaattttgattcagaaatggactttgactatgataaacaacatagaaatttactatccaacggatcacctcctatgaatgatggtagtgatgccaatgcgaagttagaaaagccttctgatgattcaattcatcagaatagcaagagtgatgaagaacagagaataccgaaacaaggtaatgaagggaacattgccagcaactatataacccaagtacctctgcaaaagcagaagcaaactgagaagaagatagcgggaaatgcagtaggaagcgtggtcaagaaggaagaagaagcgaatgcagctgtagataatatttttgaagaaaaagctactttacaatcaaaaaagaataatatcaagagagatttggaggttctgaatgaaatatctgcgtcttccaagcccagtaagtacaagaatgttccaatttgggcacaaaaatggaaacctactatcaaagctcttcaaagtataaatgtgaaagatctcaaaattgacccatcttttttaaacattattcccgatgatgacttaacaaagtcagtacaggactgggtttatgctacaatatactcaattgctcctgaactaagatccttcattgagttagaaatgaaatttggtgttattattgatgcgaaaggcccagatcgtgtaaatccaccagtttcttcacaatgtgttttcactgagcttgatgcccatctaacgcctaatattgatgcatctttgttcaaagagttgagcaaatatattcgtggtattagcgaagtcactgaaaatacaggtaaattcagtattattgaatctcagacaagagattccgtctatagagtcggactatccacgcaaagaccaaggtttttgagaatgagtacagatattaagactgggagggtaggacaatttatagagaaaagacatgtagcccagctactattatattcaccaaaagatagttacgacgttaaaatctccttaacttggaattacctgtacctgacaacgatccgccagaaaaatataaatgtcaaagcccaattagtgaaaggacgaaagaccgtgttagttacattcataatgattcctgtaccagaattgatattacaaaagtcgaaaatcataaccaaaattcaaaaagtagacaatcagagaccactcacgaagtggaactag

SEQ ID NO: 82679 - DNA, 1077 bp, Saccharomyces pastorianus
  modified_base (998)..(1063): a, c, g, t, unknown, or other
atgagagcgttgagattcctgattgagaacaaaaacaccgtcttttttacgctcttagtagccttggtgctttcactgtatttattggtctatttattttcgcatacaccaaggccgccatatccagaggagctcaaatacatagctatcgatgaaaaaggtcatgaagttagtcgtgccttacctaacttgaatgaacaccaagatgacgaagaaatatttttatctgttgttatcccaagctataatgagacaggtagaattttactaatgttgacagacgcaatcagctttttaaaggaaaaatatggttccagatgggagattgtcatagtggatgatggttccacagataataccacacaatactgtttgaaaatttgtaaagaacagttcaaattgaactacgaacaattcaggatcatcaagttttctcaaaacagaggcaaaggtggcgcagtgagacaaggttttttacatattagaggtaagtatggtctttttgccgatgctgatggtgctagtaagttcagtgatgtagaaaaactaatagatgctattagcaaaatcgaaacgtctagtacagatctaaaaacgactaaaccagcagtagcaattggttccagagcacatatggtaaataccgaagccgtcataaagagatcaatgataagaaactgcttgatgtacggtttccataccttagttttcatcttcggcatcaggtctatcaaagacacacaatgtggattcaaattgttcaacagagccgctatattgaaaatttttccgtatttgcatacagagggttggatctttgacgttgaaattttgatcttagccatcagaaaaagaatccaaattgaggagataccaatttcctggcatgaggttgatggctctaagatggctttagctattgatagtatcaaaatggcgaaagacttggttattataagaatggcctatttattagggatatatagagatgataagannnnnnnnnnnnnnnnnnnnnnnnnnnnnnnnnnnnnnnnnnnnnnnnnnnnnnnnnnnnnnnnnncagcatttgagtaa

SEQ ID NO: 82680 - DNA, 1458 bp, Saccharomyces pastorianus
atgctacggataagtattgactctatcaagcaattcggttcctttgtgccaggttgttataacaacactagttaccatgctgccgggagggccataagaacatcaaacctgtacagtacaatgatctcagccaacccgagaaggtgcctgcattcttcgaaactgctaaataaagaaggtcaagaagaggactataatgaacagctcatttcaaaaatgtcttcacagaatggatcgaattccagacagaatgaaagtgaaggaaagaaggaaggcaaggcttcctctgtgaagtcgttgttgcaacatactcatagtcacagccacacacatatgcatgacaatcctttattgtcactgaacgtacagcagatcaagaagaatcctggcgtaagaataacatggataggacttgcatcaaatgtggggatggcagtaggaaaatttgtaggaggaatcacttttcattctcaagcattacttgctgattccgtacatgctcttagcgatttggtatctgattttttaacactgttttctgtccaatatgcgtctcgtaaaccaacttcggagtacccatatggctatggtaaagtggaaactgtgggatctttggcagtatccacaatcttagcaatggctggtatatctatcggttggtcgtcgttatgcgctattgtggggcctgtcattcctcatgccattctagaatcgatggctggtttaattggtgaaacgcattcccattctcagtcgctaacacaacaggcaactaatgtaaatgctgtatggatagcagcgggttctatcttggttaaagaatgggtttttcaggcaacaaagaaagttgcaatccaaacaaattctaatgtactaatggcaaacgcctggcatcatcgtgttgactccttgacatcgttggtagcgttggtcgctatcacatctagttattttttcaacattcaatccttagataatttaggtgggcttgtagtgtcaggtttgatcataaaaacaggtggacaaggtatcttatcctcactgaaggagttagttgaccaatctataccacctactgatccgcgttatctagaaatcgaatctgtcataaaagacagcattggcagtttgaaaacagacttagatctcaaacagtcgttacatgttagagaccttactatattagcttccggtcctaatcttcgtgccaccacaactttggaagtgccagtattacattcaggtcaggaagtcgggataagatttttggaaaacgctatttcgactataagagaggatttacgtatgaaggtgccaaacgtggggaaggtggacgtcgagtttgttgatgtaacctctgactctaaaggtgatttggagcactctcatgacactaaatcaacaaattatactcatactcattctgattctgccgatactcacacccataaacattag

SEQ ID NO: 82681 - DNA, 132 bp, Saccharomyces pastorianus
atgcaagtactagtgacgctctggtgtctaatatgcacatgcctggtactaccagtggccgcccaagaaaaggacactgacagcgagttcactggtcacgtgcatggagaactcacagctttcagccaatag

SEQ ID NO: 82682 - DNA, 942 bp, Saccharomyces pastorianus
atgacgggtttactaagtgttgaacaaagtattgcagagaaatttgatggtgtgggtttgcaattgtttagcaacggcactgagcttcatgaagttgccgatcatgaaggcatggatgttgaaagtggagaagaaagtattgaggacgatgaaggaaagagcaagggaagaaccagtttaagaaaaccaagaatttatggtaagccagttcaagaagaagacgcagatattgataatttaccgagtgatgaagaaccttatacaaatgatgacgacgtgcaggactccgaaccaaggatggttgaaatcgatttcaataataccggtgagcagggtgccgaaaaattagctttggaaacagattctgaatttgaagagagtgaagatgagttttcctgggaaagaacagcggcaaacaagctgaagaaaactgaaagtaagaaaaggacctggaatatcggtaagctgatatacatggacaacatttcacctgaagaatgtataagaaggtggaggggcgaggacgacgatagtaaagacgaaagtgacattgaggaagatgttgatgatgacttcttcaggaaaaaagatggtactgttacaaaagagggcaataaagaccatgcagttgatttggaaaagtttgttccatatttcgacaccttcgaaaaattggctaaaaaatggaaaagcgttgatgcaatcaaagagcgattcctcggcgcaggcattttaggtaatgataataaaacgaaaagtgactctaatgaaggtggggaagaactatacggcgattttgaagatctagaagatggaaacccttctgaacaagcagaagacatagtgacaaagaaagtgaggatgaggatgaaaacgaagacactaatggagatgatgataattcattcactaattttgatgcggaggaaaaaaaggacttaa

SEQ ID NO: 82683 - DNA, 144 bp, Saccharomyces pastorianus
atgattttgaacgtgaaaaatgaaagaagaggcaaggctaacggagaaattacaactgcctctacgacgagaagacgtaaaaggttagatgataaagataaattgatatatgctccaatgtccgatatctcagatgtgtgttga

SEQ ID NO: 82684 - DNA, 975 bp, Saccharomyces pastorianus
atggagcagtctaataaacagcaccgtaaggcgaaggagaagaatacagcaaaaaagaagctccatacgcagggtcataatgcaaaggcctttgccgtggcagccccaggtaagatggcgagaactatgcaaaggtcaagtgatgtgaacgaaagaaaactgcatgttcctatggttgatcgtacccctgaagatgatccgcctccatttatcgtcgctgtcgtgggtccacctggaacaggaaagactactttgattcggtccctcgtcaggagaatgacaaaaagcactttgaatgatattcaaggtcctattactgttgtctctggtaaacatagaagactaacttttttggagtgccctgcggacgatctgaatgcgatgattgatattgctaagattgccgacttggttcttttactaattgacggtaatttcggttttgaaatggaaacaatggaattcttaaatattgctcaacatcacggtatgccaagagtacttggtgtagctacacatcttgatctgtttaaatctcagtcaactttgagagcttctaagaaaagattaaagcacagattctggacggaagtttatcaaggtgcaaaattattttacctatctggtgtgattaatggaaggtatcctgatagagagattttaaacctttcacgatttatatctgttatgaaattcagaccattaaaatggaggaacgaacatccctatatgttggctgacagattcacagatttaactcatccggaattaatagagactcaaggagtgcaaatcgaccgcaaagtcgctatctatggttatttgcacggtactcctttgccttctgctccgggcactagggtgcatattgctggtgttggtgatttctcagtagcacaaattgaaaaattaccagatccatgtcccacacctttttaccaacagaaactggatgattttgaacgtgaaaaatga

SEQ ID NO: 82685 - DNA, 3096 bp, Saccharomyces pastorianus
atggttctgcttaacagaaggaaaatacaacctaaggaaataggacagtttgctgattccttctctgaaactccatgggtgattaaagaaagtagcgaacgtataaatgattatgacagtgatttaaaaaagctagatttttacaaaagggatatattcacctgtgagattagtggaaaagatggcctttcgtatttcaaggcgttaaaaagcgaagaacagcaccgtgaaaaggtcagatatcttttaccaaaagaactaaggaaggctatagcaaatttcgcaaacttcagtccgataaggaaggtaggacaccttgtagaaagcgcatttcagcgttttagtaaccgtttctttataggcgatacggtgtgcttgaaaactatccaaaaaaatgcattgattacctataaagaaggagagcctaacttggtagaatcaccaactattgaaaacaatgtcacgttgttccttgtcaaggatgtgtttcaatctaacgggatgatggaaagtgaaaagggagaaatttctgccccaaaattgtcactgtatttaatcacagaatgcctgaatcgagaatctaaaggtgcggccctaattgtaggccagaatgaaattaaaaggccagaatcacacttttctaaattcataattgcgtgttttcttaatgaaatactcataaaagtatcgaataaggagcacgcaccatggagggtgaaacaagaatatatagaaagatatgatgtaaaccctaaatgctctcctaatatgattgattatttgccggatagaatgaactcatcttcttccgagctttacactcctcttactataccaccagagagcgatgttgaacctgctgactggaaggaaacgtcggaaacgtcggaaacgtcactatctaaaataaaagcaattgacgacgagatttcagtctcatttgaccacatttacgataatgtgaactcccttgcctacaatgatttgaagggaaccgtcgacgacaaggagcttccattcactgggccttcgataccatttgaaaatatcagctacttagatagctccttagaatataagaatatcgatcaaaaatggttcaaagagtgcagtcaatttccaacggaacgactattggttgtttatcaattcctgagcttttttggacgttttattggtctatcacattttaattttgatcagttccttactactatcaagtgtactagtccggaggctttagtagatgaatatgtcaaaataaactttcttaaaacttacaacagcaaagggagtttcacaaatgagaagccaagaaacgaaatatataatcaagtgaccagtagtaacgtatcccagcgtgagaaggctaacgtctttaatgcagatgagagtcaacgaatacctagcaatttcaccaggaaccagaaaatgaggaaatttataacggataaaagtactgaatttgtaatgtattccatttttaaagggaagcctctaaaaaatgacgatatggagtttcaatcgtacgaaaaagggaatatactttacattgatatagtttgctcgttaatgtgtctgatgacggataatgaacctgattggaattgtaatctgatggacaattggactgaagaaaagcgaaaggaggaaggaaataaaacagaaattgatatagctatagaaaagtgtttgaactatggagatactagctgggttaaacttttgcacaataaaaactttagcaacggcaattggttgatctgtctccttggaatcttgcaacagaatacacatatgatagcatatagtgatgtcgcagaatgtatcacaaaaaaaatactacctttatccatgaattttgtaaatttaggtgatgagctctgggataactttcgcaagagattatctataaaagataaaattgatgttttatgggttctcgtagattttgcgtccaatttctcgagttatattaaggagttggtagataaagtaccaaaactgtgcaatggaatccgcttaaagttggatagtgcaaaaaaagagtatatcgaattgaaacggcaactaaaaacgttaaccaaaaatcgcgtgaagcttcacagcaacgcttcaatgaaccgatatggatcagatgaatgtaaaggtaaggtcaatgcccttaaagtgaaaattgcatacttaatggaagatatcgccttcctagaggcaaaattgattcagagcgatattaagagactagagattttgggtaaagatagaaatggaaatcgatattattggatggactcaaatggatcgtcatcagccatcagtgaaaaaaatgaggaactttacaactgctgttttttgtgggttcaaggaccctctgaagcggatataaacttttgcttagatgtcgacgtcgaatctttgaaaaaatgggagttgttagctaaagcaaaaggtactgcctacgcgacaaaagaagtcttttcaatatttaggtcgacagacgggtcttactatcaaactgctcaaggtgagaatttcatgataattaattcaaacggtatcttaatgaggccaactattccggcattcatagacaaaaaaattatatcagaaactccagaaaagctcctactctctcatcatcaatgggctttcttcaacgatatagaagatatacatatgttagtagataggttggatgatttaagagaaaatgagggacaattgaagaaagctttgacatccaaaatggaccgtattgaagtatcatacaagcaacagttcaaaattaaaaggcgtattgaatgtgatgaaaccttcaaaaaaaatcacaaacttttgaaaaataacgagttcacgtttcctgaactgaaaagaattgagacaacttgtacatccaacggccaacatttttccaacatggagaaaatttccaaaaaactatcaaggacaaagaatgatctcgttttggaagcgattttaaaagacgtagctcaccttggagaatgtgaaagagcacttctcaaaaagcaacaaaatttgatttatcctttgaattttcatttcgaacaattgaggacgatagacctcgatttatag

SEQ ID NO: 82686 - DNA, 519 bp, Saccharomyces pastorianus
atgagacagctaacagaagaagagaccaaggttgttttcgaaaaactcgccggctatattggtagaaatatttcttttttagtggataataaagaacttcctcatgtcttcagattacaaaaggatagagtatattacgtacccgatcatgttgcaaaattggctactagtgtagcaagacctaacttgatgtctctgggtatttgtttaggtaaattcacgaaaactggaaaattcaggttacatattacttctttgacagtattggctaagcatgccaaatataagatatggattaaacctaatggggagatgccattcttatacggtaatcatgtgttaaaggcacatgtgggtaaaatgtctgatgatataccagaacacgccggtgttattgtgtttgcaatgaatgatgtgccattagggttcggtgtcagtgcgaaaagtacttctgagtcaagaaacatgcaacccactggtatagttgcttacagacaagcagatattggtgagtattag

SEQ ID NO: 82687 - DNA, 411 bp, Saccharomyces pastorianus
atggatggttttcgtgtagctggtgcgttagtagttggtgcgttaaccgctgcatatttatattttggcgggaggttttcgatagcgctggtcattatagtaggttatggtatttattgcaatgaagccagcggtggtagtcaagatagtcaagagaagctcgatttgaacaaacaacagaaaaagccatgttgcagtgataagaagattgcggatggaggaaaaaaaactggcggatgttgttctgataagaagaacggtggtggtaaaggtggaggatgctgttcctcaaaggtggaaagaaaggggggtgttgttcatctaaaggtggaaagaaaggaggatgttgttcctctaaaaagaatattggtgacaatgaaaatactgccactgaagttgagaaagccgtaa

SEQ ID NO: 82688 - DNA, 1191 bp, Saccharomyces pastorianus
atgctgttcctcaaaggtggaaagaaaggggggtgttgttcatctaaaggtggaaagaaaggaggatgttgttcctctaaaaagaatattggtgacaatgaaaatactgccactgaagttgagaaagccgtaaattaccctgttactgtggattttacagaagtttttaggaagcccactaagaaaaggtcgagtacccccaaggttttttcgaaaaatagctcgtctaactctagagtaggtaaaaaattaagtgtttcaaagaagattggtccagatggattgatcaagagcgcgttgactatttcgaatgaaacgcttttgagttcacagatctatgtgttatatagttccctgcaaggtgcagcttcgaaagctgcaaagagcgtttacgacaaactaaaggaattggatgaattgactaatgagccaaaacttttgaaccttgacgatctatccgatttcgatgactattttataaatgttcccgttgaaaatgcattgtatgtgcttgttttaccgtcttatgatatcgattgccctctagattatttcttacaaactcttgaagagaatgcgaatgattttagagtagatagtttcccattacgaaaattggttggctacacagttttggggcttggtgattcagaatcatggcctgaaaagttttgttatcaagccaaaagggccgatcactggatttctcgtttaggtggcaggagaattttccccttaggcaaagtttgtatgaaaacaggaggtagtgccaaaatcgatgagtggacatcattgttagcagagactttgaaagatgatgaaccaattatttatgagtatgatgaaaacgcagactctgaggaagatgaagaagaaggtaatggtagtgatgaattaggcgatgtagaagatattggtggtaagggtagtaatggaaagttttcaggcgcagatgaaatcaaacaaatggtggcgaaagacagtccaacgtacaagaacttgacaaagcaaggttacaaagttattggttcccattcaggcgttaagatctgccgatggactaagaatgaactacgtggtaaagggtcttgttataaaaaatcgctcttcaatatcgcgtccagtagatgcatggaattgactccttctttggcatgttcatccagggatcctctagagtcgacctgcagc

SEQ ID NO: 82689 - DNA, 525 bp, Saccharomyces pastorianus
atggtagaatgcttagagattttgaaaactgtacaaaaccatcaaaggacagttttcaggttaactttagtgaaaggtttcaatatgggtgatgtcagtgcatatgcagatctggtccaacgtggtttaccaggtttcattgaagttaaaggcgccacgtttagtggctcatctgatgggaatggtaatcctttgacaatgcagaatattccattttacgaggaatgtgtaaaatttgtgaaggcgtttaccacggaattacaaagacgtggattacattacgacttggctgccgaacatgcgcattccaactgtttattaattgcagacacgaaattcaaaattaatggagaatggcatacacatatcgattttgataaatttttcgtattgctaaactcgggcaaagacttcacgtacatggactatttagaaaagacacccgaatgggcattgtttggcaatggtgggtttgcaccagggaatacaagagtgtacagaaaagataagaaaaagctagaataa

SEQ ID NO: 82690 - DNA, 636 bp, Saccharomyces pastorianus
atgacctctttatatgcacctggggcggaggatattcggcaaaggttacgtccttttgggtttttctttgagaaatcactaaaggatttgattaagggtattaggtctcacaacgaaacaccagaaaaactggatcaattctttaaacaagtattaagtgaatgccgggaagaagtgaactctccagatctaaattctaagaccaatgccgttcttaaattgacctatttagagatgtacggttttgacatggcttggtgcaactttcatatcttagaggttatgagcagtaataaacttcaacaaaaacgtgtggggtatttggctgcatcacaatctttttacaaagattctgacattttgatgcttgcaactaacttgttgaaaaaagacttaaagtatgacggaaacaatgatgttgttaaagttggcattgctttaagtggtctttccactataattacaccctcattagcaagagatatagctgatgatttgttcactatgctaaacagcacaagaccgtacataagaaagaaggccattaccgcactatttaaagtttttctgcaatatccagaggctttgagagataatttggataagtttgtttcaaagctagacgatgatgatata

SEQ ID NO: 82691 - DNA, 453 bp, Saccharomyces pastorianus
atgctagaagaaggtgattttgaaacagcaatggcatgcctggaaagattgcacacattttgtgattctcaggatccaaatttgagatatattagctgcatattgttttacaagatcggcaaaatcaatactgattttatttctcggttcgaccaactgattatacgcttactctccgatgtcgacgtttctattagatcaaaagcaattgaattggttgaaggtattgttgatgaggataacttaaaggcaattgtccaaacattgatgaagcaatttgtagatgaagatgtggttatcctacaaactggaagcatcgtatacgaaaaatcaaagagaattcccataataattccagaaaattacaagataaaaatggtgaacgtcattatatcgatttgttcagctgacaactattccagtgttaacgactttgaatggtacatgcagtaa

SEQ ID NO: 82692 - DNA, 738 bp, Saccharomyces pastorianus
atggtacatgcagtaataatggacttggcgatgctctgtcaagacatatctgataaaagccttggatcaaaaattggtgaacagtttaggaatttgatgataaaagttccttcaatgagagaagtaaccattgctaatattataaagcttatttcaaatgacaatattaacaaacagttgcctaccgtattgagagaatgcatttggtgtctcggagaattttctaccctagttgaaaatggtaacgacttaataaaaatcatgactgagaatatcagttattattctcatagtgtacaagaagttttaattttagcacttgttaaagtatttagtaattggtgtaataactttcaggaggataaacgctttgaaattaaaatggtgttaaaagagctaattgaattttttgaaaatttatcatattcgagtacattcgaagtccaggaaagaagcgtagaagttttagaatttttaagactaagtttggaggctttagaggaggatacggaaggtctaccaatgctactgagcgaagtcctgcctagtttttttaacgcctatgaactcgcaccaattgcgcgtgggactcaattgaagctagcagtagatgagaatcttgatctagaaactccatttttgacaaaggaggcagctgatgaactcttagatgaacaaaaaagtgaggccctcagtgatttactgtctgatatctcaatggacgagcaagttgactaa

SEQ ID NO: 82693 - DNA, 534 bp, Saccharomyces pastorianus
atgtcagatgaaaaccataacagtgatgttcaagatattccttcacctgaactgtccgtcgatagtaactctaacgagaatgaattgatgaataactcaagcgcagacgatggaatcgaatttgacgccccagaggaagaaagagaagccgaaagggaggaggaaaatgaagaacaacacgaactggaagatgtgaacgatgaagaggaggaagataaggaggaaaaaggagaggaaaacggggaagtaataaacacagaagaagaagaagaagaagaacatcaacaaaaaggcggaaatgatgatgacgatgatgataatgaagaggaagaagaggaagatgacgatgatgatgatgacgacgatgatgatgatgaagaagaagaagaagaagaagaagaagaagaagaagaagaagaagaagaagaagaagaagaagaagaagaagaagaaggtaacgacaacagttcggtaggctcagatagttccgctgaagacggtgaggatgaggaagacttaaaggataagacctaa

SEQ ID NO: 82694 - DNA, 423 bp, Saccharomyces pastorianus
atggaaaatgttaattacgatcttttacaaaagcaagtcaagtacattatggacagtaacatgctaaatttgcctcagtttcaacatttacctcaagaagaaaagatgtctgcgattttaacaatgttaaattcaaattctgacacagctctttccgtacctcctcatgatagtactatctcaacaacagctagcgcctcagccacaagcggcgcaagaagcaatgatcaaagaaaacctccattgtcagatgcccaaagacgtatgagatttcctagggcggatttatctaagccgattaccgaagaagaacacgaccgttatgcagcctatttgcacggtgaaaataaaatcaccgagatgcacaatattcctccgaagtcaagattattcattggtaatttgccgctaaagaacgtttaa

SEQ ID NO: 82695 - DNA, 468 bp, Saccharomyces pastorianus
atgtaccttatctttatcattatgtttggttaccgaagattcatcaaatttgtattcccatttcccgctactggtatttattttcatgggtacaccttcccaattggtaaactccccagcgatcttcaactctggaaagtcttccgccggatgatcaaatacaatggtgaccattatttagttgctttgcctatcttaatgttacaaccaagtatgtatgtatgtacgtacgtatgcaaagaagtggatatagagaaggaaagtaggggagagagggaaagaacaaaaaaattgaagttatttgaaatagtattgtattatttatctgtatgtacaccgtattggtggaacatcactgccaaatttttatcccattttcacatagttccccttaaaagaaactttgttagtatctttaaccctttacactgtgggggtaaaatattaccgcttcggagatttctttga

SEQ ID NO: 82696 - DNA, 609 bp, Saccharomyces pastorianus
  modified_base (62)..(93): a, c, g, t, unknown, or other
atggtggtttcttataacaataacaataataataacaataacaataacaataacaataacannnnnnnnnnnnnnnnnnnnnnnnnnnnnnnnaacatgttccctccttttccttcttccgatgactttgcaatgtatcaacagtccagttcttctggcccttaccaagaaacttatgcgagtggccctcaaaactttggcgatgctgtgtatcctatgaatggtaattttactcttttaccatccgactttacacgagagcctaatgattcgttcttttacgagaatgacggaatttttgattatcagcgtattcaacagcaaccaactcaattccagacaaagcagcgaaatgattcacaacaacaacggttttcacaggaacaaaatttcgaaattgataacgaagttgtccacaataacaatcgttattatgaatatgaaaggtcatctaatgaagtctctccttttgatgatgagaatccaaatgtgttatctgatggcatgtcacccactattatggcaactgcaactgcagttaacaacgcaaatgcgctttaccagttaatgcacaagcaatatcctttgactttacatcgggcccagtag

SEQ ID NO: 82697 - DNA, 1428 bp, Saccharomyces pastorianus
atgaaggacttgtctcattatggtcctgcgctatgtgttaaattttacaatgattatgttctagctggttatgggcctttcatccatgtctatgactatcattcggctacgttgattaacaaatgtaggctatttcactacaataaagttcatggacttagcctttctagtgaagggaaaattttggcctatggtgcaagatcagtaacaatagtggaacttgaagacgttttaaagaaagagtcattggtggatttcgaaaggattaactcagattggattaccggtgctacattcagctttgacaacttgcaaatatatttgttaacatgttataataaagtgctaatttgtgatttaaattgtgaagttctttttaggaagtctcttgggggagaaagatctattctatattccggtataattaaagttttcggtccggataaagtatatgttaacgctggtactgtaatgggcggtgttatcatttgggacctgttctcggagacaaaaattcataacttactgggtcatgaaggttctatcttttatgttaatttaagcaacaacggaagatatgttgccagttgctctgacgacagatcaattagactgtgggatttagaaactggcaagcagctgtctgttggctggagccatacggcaagaatatggaatttaatgttttttgataatgattcaaaactaataagtgtttctgaagattgcacatgccgtgtatggaacattatcgaatcacgagaaaacgttgccgaattatccatatctaacgtttacgaagtacatttaatcaagagtatatggggcgttgatgtgaaagacgacgaaatgatagctgtaacctccgggaatgatggtaggttaaagctgattgatcttcttcaactgaagagacacggcgatgaagaaacatcgttcagtctagatgatatcgcaaagcaatgtggcgatattttcgaaaagaatcaaagtatcaagggatttcaatggttttcattcggtgtaattgctatcacttcattgggtaaaatacttaaatacagtgatgtcacgaaacaatggaagttgttactaacaaatgaaaaattcaactcgtatccaattacaaatgggattcaaacgcaaaatatcgctgtcttttccaataataaaagtgacatccttcttatcaaatttagcaaagatagcgctgacataattgagaccgaagaattccatttagatgagctttctaagacaaataactgtctcgtaacagaatacgatgatgactccttcctattgactttacaatccccaaatcctcgagagaagtttatgtgtctggaaataagccttcagaacttaaaaattaaaagcaagcactgtttcaataagccggaaaatttttcttcctcatgggatcct

SEQ ID NO: 82698 - DNA, 621 bp, Saccharomyces pastorianus
atggttcatcgaggaaggactttgaagtcagacactgatgtaacatctcttaatgcgtcaacagtatcacaccagtcaaagccatttagacagttttcgactaggtcgagagcaaagagtaacgcaagcttcaaaggtttgcgtagagttttaacacatgatggcacgctggataatgattattttaataagcacaacgtttctcagaaatgcaagagttctgatgcacttttcagaaagcgaacgattagtgggttgaatatgacagctttagcaagagtaaagtccaatcaaggaaaaagatcagcatcctttcatagtccggtgcataatacgctgctcagtccaaagaacagcagtcattctaatactggaactgctggtttcggcctgaaaccacgaagaagtaaaagtacccaatctgttctgagtcttcgagatgcgcaagaatctaaaaagagtgaatctactactgacgaggaggtggaatgtttttcggaagacaacattgaagatggaaaggtgaataatgataaagtaatagccgagcatgttatgcctgaagaaaaaaagaatgtgcagcaattaaatcagaatgaattacatccccggattcaatag

SEQ ID NO: 82699 - DNA, 222 bp, Saccharomyces pastorianus
atgaattataactgcgaaatacaaaacaggaacagtaagaatgttgacaatcaagtcagtctaccccctatccaagttctatttaactccatagaaaaacggagtatgtccgagttggcattttcgaacatagaatactcgcatgggaaccttcggtctagtaccgaggaacaaaactatcctgcgcctgtgttacttccacagcatcattcattgcgtatc

SEQ ID NO: 82700 - DNA, 1959 bp, Saccharomyces pastorianus
atgatttccctggcctctgagaaattcgatttgttcttaagtaaaataggtaatgttatggtaatgaggagaatattttacatcatgacgatgtctatcattgcagcgttgattattgcgagtgataggttaccgaatggaaaagctcgaggttcaaatggatcattctcggaccacgatctccttttacagtatgctcggaaatcgatagacctttcaaagatagaaagagatttagagtatattagtagtatgccccacatgtcaggaacaagtggtgatgccgctattagacattatattaaagagtcgttcgacaaaaatggtataaggctagctggggaagaggagttcatggcgtattcgaattacccaggaaatgtctcacttcgtgtatattcaaaggatgatacagaagggtttgatattcccttaaatgaggagaactttaacccaatgagccataatggtcaattgaacaacataccggtgatttatgctaataaagcatcgttggacgatatggcttctatgcaagatcaagggctgttaaacggtgactttattttactagtgcattacggagattatgttttccaacaaatgttgactgctcaagaatatggtgcgaaagcaattatctttatttctgagccttatcaagacaacaaagacgtgatacaaatgaagtcagttgcgttgccgcagtatggtactggtgatgcacttacgcctgaatgggaaggatcaataagagatcctatcgatgctacggaagccaagtgcctacccaaaattccatccataccgatatctgccaatcaaggagagaaaatactagctatattatcagacactggcgtaaagttttctaataatttattcagcgggtcgcttaacgattgtcgacttgacctgctagtgcaaacagcaattagggaacgccacccgcttcacgatatagttggtaaaattgaaggatcggaacaagcgggcagggcaattgttattgccgcaccgaggaactctgttagttatggcgctatgtatccttcttttggaaccgtcgttttgctgtctctgatccaactgtatcaagaaatggtttacaaatttgactggaagcctctaagaaatatatatttcatttcctttgggggctctgaatttaatgaagcgggagccacggagctgatggaaaagagaacagaggcattgaagagtgaaatatacaccattatcgacgtcggccaaatcggtatatgggatgatagtaacaatttagagatacaatgtcatccgctactagtagatctttttcaaaagaacatgacaagccgtaaatttaacattaaagtggataatgttcaccagttcggcgactggacgccatatctagcgcaagggattccagttgcgatcgtttcatctccaggagtcatgaatagagaacatccgatctacacagtagaagacaaattcgatttcatcaaagataaactaagagacaaaaagaagggagaggtactttctgagataatgctatatcttgtcgaaaaatcactcgagctcattgacgatccattcatcccattcagcatatcgaactacgtagatttcctttcaactacgttaaaagacctccaaaaagaatgtcctgatacggtaaactttgacgaagtctttttgggcacaacattgtgggaaaacactaaactgcagttcgaaaaatggaaaagcgaatggacagagcttatgtatggagccggtacatatatagaacccactatcattgccattaatcgttggtcatggaactacctactttccctaataggcgttacccaatgtttggaggaagggttaatggatagaaccttttacaagaacgttatcttcgggccaaaactctgggtcgacaaaggtgacccacttcgtccatggacgttccctgaaatc

SEQ ID NO: 82701 - DNA, 159 bp, Saccharomyces pastorianus
atgcgcaatgcaggtgttcaagttgacacaaatatgcagaatataagcttacaggacacagttctagtcaacgagatgaaggggcggttgaaattcattggggaaactcaatttgcaaaaggcatatggtacggcattgaactagataaaccgttatga

SEQ ID NO: 82702 - DNA, 1845 bp, Saccharomyces pastorianus
  modified_base (1834)..(1834): a, c, g, t, unknown, or other
atgaaaactcatttggataatttcaatcacctattagatgcttcagatagtgtaatggcaccggatctcgacaaaggcacactgttagaaaggagccatcttcttcaaggaatactcgaccaaacaaagttgtcatatgataaagctatgaaggtgcaagaggacctgctcgaggagaatactcagttattagaagaaaatgcagtactatctaaaaaaatatcggatttaggtctgcaattgcaacagactaataatacaatcggcgaccttgccttgcagattgaagctcaaagtaaatcatctaatattgttgataaattgactaatgataatatccaactcacaagtaatataaaggctttaaacaatgagttggaggaactacaggcaaaagaaaaattggatgaaaatttaagaattacctatgagcaactcgagcaagaactgagactgcaattaagtaatttgcaatctgcattggaaaatgaaaaggagatagcagacacatatatcgaagaaaattcaagattaaaagcatcattggaatctattgaagccaaaacatctcacaaatttcaaagtcttgaagtaaaagtgaacactttacaggaggaattatatcaaaataaattgctaaagaaattttaccaaatatatgagccatttgcacaactacatttggcggctctttcctctcaattgcaatatttagccgaagtaatcgaaagtgaaaattttggaaagttggagaatattgaaatccatataattttaaaagtgttgagctctatcagttatgcgcttcatatttacaccataaagaatactcccgatcacctggaaacgacattacaatgtttcaaagtaaatattgctccgatttcaatgtggctaagcgagtttttgcaaaggaagttttcttctaaacaggaaaccgccatctccatttgtcagtttttagaagataataagtttctagataaggatgtgaccttgatactaaaaatacttcatccgatattggaaacaactgttccgaagctgttggcttttcttagaacgaacagcaatttcaatgacaatgataccctatgtcttattggttccctttacgagaaatcactttcacttattgccagaatagataaacttatcggaaaggaagaaatttcgaaacaagacaataggttgtttttatatctttcctgtgatataaccctgtcctctatcttaacgacacttttttcagatgcactgtttttgcgacaagattacaaacgtatttcttctttgaaaaaactagaggtattttttcaaggaatagaaagtctcttagaaaacataactatatttcctgagcaacccagtcaacaaacaagtgattcagaaagtcaatgtaatattaaggagggcaatttttcaaactcgttattaagcgatcgcttgaatgaagagaacattcgactcaaagaagtactggtccaaaaggaaaatatgctaactgaattggaaacaaaaattaaaattattattgggagggatttagagaggaaaacccttgaagagaatatcaaaacactcaaagtagagttaaataacaaaaatgaggaaaattgtggcaaaacagaaattcttaacaagctgaaagaagaaaatttcaacctagtaaaccgtttgaagaatatggagctcaaactatatcaaataaaggataataatacgttgaacaaaatttatttagacagagagaaagtagatagagtaaatttagtttcggaaatcatggaattgagagaaaccataagacgacaaataaaagagcagaaacgangtgagcatgac

SEQ ID NO: 82703 - DNA, 243 bp, Saccharomyces pastorianus
atgaagagagctatgccattcatttctctattgaaacaacgtttagctaatgaaaagccagaggatgtgtttgaaagagagttacaattcagcgaaatcgatactgtcaaggctgctgcaaggaatgttaagaaggcagcacaagctttgaaaattgctgaatttagcgcaatttctttcccatatggcgccaaaccggtaaggatatctttactggtgaagaagttgaaattccacctgtaa

SEQ ID NO: 82704 - DNA, 2793 bp, Saccharomyces pastorianus
atgtcttctggtttggtcttagaaaacacggcacgtagagatgcgttaatcgccatcgaaaagaagtaccaaaaaatatgggctgaagagcaccaatttgaaatcgatgcgccatcaatcgaagatgagcccattacaatggactctgaagagttacatcgcaagtatcctaaattcatgtcgtctatggcctatccttatatgaacggtgttatgcacgccggccattgttttactctctccaaagtcgaattttctattggttttgaaaggatgaacggtaaaagagctttgtttccattgggttttcactgtacaggtatgccaatcttagcatgtgccgataaactaaagagggaagccgaactttttggcaagaacttcgacaatgtaccagcagaagaagaagaaattaaagaagaaacgccggctgagaaagaccacgaggatgttaccaaattcaaagctaaaaaatctaaagccgcagccaagaagggccgtggtaagtaccaattcgaaatcatgttacagcttggtatccctagagaagaaatcattaagttcgccgacgccaagtactggttgacctatttcccacctttgtgtgaaagtgattgtacttcacttggggctcgtatcgattggagacgttcttttgtcaccactgatgccaatccttattacgatgcctttattagatggcaaatgaacaagttaaaggctgctggtaaaatcaaattcggtgaacgttatactatttactctgaaaaagatggtcaagcttgtatggatcacgatagacaatccggtgaaggtgttacaccacaagaatatattggtgtgaaaattgaagctttagagttcaccgatgatgccgcaaaaatcattgattcaagctcagatcttgacaaatccaaaaaattctactttgtcgctgccacgttgagaccggaaactatgtatggacaaacatgttgttttgtttctccaacaattgagtatggtatatttgacgctggtgattcttattttatcactactgaacgtgcattcaagaacatgtcttaccaaaagctaacaccaaagagaggctcctacaagccgatagttactgtcccaggtaaggcatttattggtaccaagattcatgccccacaatctgtatatccagaactaagaatattgcctatggaaactgtcattgctaccaagggtactggtgtcgtcacgtgtgtaccatctaattcaccagatgactacattaccaccaaggacttgttgcacaaacctgaatactacggcattaaacctgaatggattgaccatgaaattgttccaattatgcataccgaaaagtatggtgatttaactgcaaaggctattgttgaagaaaaaaaaattcaatctccaaaggataagaacttgttagcagaagccaagaaaattgcttacaaggaagattactacactggtaccatgatatatggtccttataaaggtgagaaggtcgaacaagccaaaaacaaggttaaggctgatatgattgccgccggtgaagctttcgtctacaacgaaccagaatctcaggtcatgtcacgttctggtgatgactgtatcgtttctttggaagatcaatggtacgttgattacggtgaagaaagttggaagaaacaagcaattgaatgtttggaagggatgcaattatttgctcctgaggtaaaaaacgcatttgaaggtgttttggattggttgaaaaactgggctgtttgccgtacatacgggttaggtaccagattgccttgggatgaaaaatacttagttgagtctttatcagactctactatttatcaatcattttataccattgctcacttactatttaaggattattatggtaacgaaattggaccattaggcatttcagctgatcaaatgacagatgaggttttcgattacattttccaacatcaggatgatgtcaagaacaccaatattcctttgcctgctttacaaaagttgagaagggaatttgagtatttctacccattagacgtctcaatttccgggaaggatttgatccctaaccatttaactttcttcatttacacacatgttgcattattcccaaagaaattctggcctaaaggtatcagagctaacggtcatttgatgttaaacaattctaaaatgtcgaaatctacaggtaattttatgactttagaacaaacggttgaaaagttcggtgctgatgcagctcgtattgcgtttgccgatgcgggagatactgttgaagatgcaaattttgacgaatctaacgctaatgctgctattctgagattattcaatttgaaggagtgggcagaagaaattaccaaggaatctaacttgagaactggggaaattacagatttctttgatatcgcgtttgaacacgaaatgaatgctctgattgaaaagacttatgaacagtatgcattgactaattataagaatgccttgaaatacggtctttttgatttccaagctgctagggattactatcgtgaagctagtggtgtaatgcataaagatttaattgcacgttatattgaaacacaagccttattgctggctccaattgcgcctcatttcgctgagtatatttaccgtgaagttctaggtaaccaaacctctgtacaaaatgccaaatttccacgtgcatccaaaccagtagataagggtgttctggctgctttggattacttgagaaatctacagagaagcataagagaaggcgaagggcaagcactataa

SEQ ID NO: 82705 - DNA, 171 bp, Saccharomyces pastorianus
atggaaaatattacacaacccacacagcaatccacgcaggctactcaaaggtttttgattgagaagttttctcaagaacagatcggcgaaaacattgtgtgcagggtcatttgtaccacgggtcaaattcccatccgagatttgtcagctgatatttcacaagtgcttaag

SEQ ID NO: 82706 - DNA, 585 bp, Saccharomyces pastorianus
atgtcaacaacattagcagcaccagcgaaattaaagagtttgctcctgaatctacatactcactgtattgggctacacgttaacgatgtcacacctaaagtatatttcaagttattgatacggcatcttctacagatatctagatcaaacgctgctcatcctaagctaagaagaagggcccagattttattggtatcgcttttcctatctggtgtcacacttttttctggtgtaacatatagtactttcaaaattattctaaaatgttataaattttacaagtttccatggaagagaaggaataggagacctttaataagaagaacaagatctcaaatgcaattagacagtggtgcaagaataatgtatattcctgaagtggaatcagtcgaccgccagagtcccgatgacaacaaatttatgaatgctacagataaaaaaaaaaggaaaaggatatttattccaccaaaggataacgatgtatatgaacacgataagtttctttttaaaaatgtagaactggaaagagccaagattcgcagtattctactcaaaatttttaaaccaaatgaacgtcttgtctaa

SEQ ID NO: 82707 - DNA, 999 bp, Saccharomyces pastorianus
atggctccaactaatctaaccaagaaaccatctcaatacaaacagtcttcaagaaagggtaagaaagcatggagaaaaaatatcgatttatctgacgtagaacaatatatggaaaagaaaattgatcatgaaattacgcatggtaccagtgatataacctctttgcaaaatgatgctctttttcatgttgatgttgagggtgatgaggtattgaaaaataaattaattaaaaggaaacaaattaagaaggttctaaaaagtaaagagattttagacgccgttaaaacgaattcaaaaattgcagcactaaatcaccataagaatagtagtggaaatcctaataagattcaaggtgtttctaaacacgaattaaagaaattaatggctttggctggcagagtacacggcgaatcgaagatcaagaatagaattgccaaagacggtctagttaaaacaacggctggcgacttatggggtgaagaatccaattcaaagaaacagaaggtcaaattaccttccggtatcaaacttgatgtggaaaaaaaggaccagatacctgaagaactattgaaaaaatccacgacaagttggtctattgcttcagtcagaccaagtactttagatatagagccaattgcagtaaaagaattcacagaaattccacatgctggtaaatcctacaatcccaacaataaagcttggtcagaattgataaacaaagagtataaagaggaaaaggcaagagaagatgaaagaatcgccttggaaaagtacaaagaaagaattagacatttaatggaaactttagatgacaatgaagaggaagagtcttcatcaaacgaagaagaagaagaagaagaagaagaaaatgaaaatgaaaatgaaagtacgcaatgtagtggatctgataaggaaataaaactatcaataaataagcctgtgaagaataaaaagaaaacaaaatatcaaagatacaaggcaaagagacatgaagagtaa

SEQ ID NO: 82708 - DNA, 831 bp, Saccharomyces pastorianus
atgtctcaatacgcaagctcatcctcatggacttctttcttgaagtcaatcgcttcattcaatggtgatctttcttcgttatcggctcctccattcattttatctccaatctcattgaccgagttttctcagtactgggctgaacatccagagctattcttggaaccctcttttatcaatgacgataattacaaagaacactgtttaattgaccctgaagtcgagtcacccgaattggcccgtatgctggccgttactaaatggttcatttccactttaaaatctcaatactgttctcgtaatgaatccttaggttctgagaaaaaacctttgaacccatttctaggtgagttgttcgttggtaaatgggaaaataaagagcatcctgaatttggagaaacggttttgttaagtgagcaagtttctcaccatccacccgtcactgctttttccatcttcaatgataagaacaaggttaagctgcaaggctacaaccaaattaaagccagtttcactaaatccttaatgctgactgttaaacaatttggtcacactatgttggatattaaggatgagagttatttggttaccccacctccattgcatattgaaggtattcttgtcgcttctccctttgttgaattggaaggaaaatcatatatccaatcttcgacaggtctactttgtgttattgaattttcaggtagaggctacttttctggtaaaaagaattcattcaaggcaagaatttacaaagactctaaagatagcaggacaaggaaaaggcattatacacgatatcaggccaatggtctggctcttctaagataa

SEQ ID NO: 82709 - DNA, 1068 bp, Saccharomyces pastorianus
atgagtactttagatattgcagaagacaacaaaataaaaaatgaagaattcaaaatttggaaaaaatcaataccctcattataccaacatatttcaagtttgaagcctatctttggctcaggcgttgatgaatctccatcgacacttaggagtatagttttcactaacgatagctcatgtaataaatccaaaggtgttttgagcgtaccacttttatattctcaagggagtgaaatctttgaggtggattgcatagtgccactcggacttcattacaaaaaacctgaaagcatttcagaaccgttagtacaaccggattataccatggaatctcaaaaggtggagcagactgttttgattccaaaatgggaatttaaaggtgaaacgattgcaaagatgatttacgtggataacagcgaaataaatgtaaaggtgatagccctttctaccaatggttctttggcatggttcagagaaggtgtcaaatcgcccgtttacacaatgatggagccatccacttctctaagttcagcatcgtccggaaatcaaaataaaccctgtgttgattttgcaatttctaacgattcaaaaaccttagcagtaactaaggaaaaacatcttgataatgaaaacgctacaataaaattgatagacaactcaggtaaaataggagaagtgcttcgtacaatacctgttcctggcataaagaatattcaagaaatcaaatttttgaataatcaaatattcgccacttgttctgatgacggtatcataaggttttggggtaatgagatagacaaaaagcccctttggattctaaacgattctttggacggcaaaacaacttgttttgctgcatcaccgtttgttgatacattatttatgaccggaactagtggtggggctctcaaggtttgggatatacgtgcagttatcgctttaggggatgctgatgctgagttaaatatcaaccaaggacataataaagtcaatgaactattcaaagttcatcacttttatagcgagcaagtgtccaaaatagagttttcttccatttcgcctatggaa

SEQ ID NO: 82710 - DNA, 150 bp, Saccharomyces pastorianus
atgaggttgcagatcaaagtcaacgactctactggcgttattgaagatgtcaaattcaagactttaggatgtggctccgccattgcctcctcttcatatatgactgaattggtacaggggatgacctcggacgatgcggcaacacattaa

SEQ ID NO: 82711 - DNA, 120 bp, Saccharomyces pastorianus
atgcttcctgttataacgagatttgcaaggcctgctctgatggccatcagacctgtgaatgccatgggggttttgagagcgaccagcataacgaaaaggctttatcatcccaggtcatag

SEQ ID NO: 82712 - DNA, 858 bp, Saccharomyces pastorianus
atggctttccaaaaagacgctaagtcctctgcttactcctctcgtttccaaactcctttcagaagaagaagagaaggtaagactgattactaccaaagaaagagattggtcacccaacacaaggccaagtacaacactccaaagtacagattggttgttagattcactaacaaggatatcatctgtcaaatcatctcttctaccatcactggtgatgtcgtcttagctgctgcttactcccacgaattgccaagatacggtattacccacggtttgaccaactgggctgctgcttacgctactggtttgttgatcgccagaagaaccttgcaaaagttgggtttggacgaaacttacaagggtgttgaagaagttgaaggtgaatacgaattgaccgaagctgttgaagatggtccacgtccattcaaggtcttcttggatattggtttgcaaagaaccaccactggtgccagagttttcggtgctctaaagggtgcttctgacggtggtttgtacgttcctcactccgaaaacagattcccaggttgggacttcgaaaccgaagaaattgacccagaattattgagatcttacatctttggtggccacgtttcccaatacatggaagaattagctgacgatgatgaagaaagattctccgaattattcaagggttacctagctgatgacattgatgctgactctttggaagacatctacacttctgctcacgaagctatcagagctgacccagctttcaagccaactgaaaagaaattcaccaggaacaatacgctgctgaatccaagaagtacagacaaaccaaatgtccaaggaagaagagctgctcgtggccgg

SEQ ID NO: 82713 - DNA, 531 bp, Saccharomyces pastorianus
atggcacccaagaaatccactaccaagaccacaagtaagggcaagaagcctgcagccagcaaaggcaaggagaaatcaacttccaaggccgctatcaagaaaaccacggcaaaaaaggaggaagcttcctccaagagttacagggagttgatcattgaagggctcacggctttgaaggaacgtaagggatccagtcgtccggcactcaagaagtttatcaaggaaaactacccgatcgtcggatccgcaagcaactttgatttgtacttcaacaatgccataaagaagggtgtggaggccggcgattttgaacagccaaagggacccgctggtgctgtgaaactggccaagaagaaatctccagaagtaaagaaagaaaaagaggtcagtccaaaaccaaagcaagccgccacttctgtgagtgcaaccgcatcaaaagcgaaagccgcatccacgaagctagcgccaaagaaagtagtgaaaaaaaaatcgcctactgttaccgccaagaaggatcttcgccttcttcat

SEQ ID NO: 82714 - DNA, 465 bp, Saccharomyces pastorianus
atggcctcgtctcttaacgagttaaacttggttcaagtacttgaacaagcaagtaacccacaacatattaggtcagatgttcaaaaattagccgaacaacaactaagacaatgggagactcaagcgggatttcattacttattacagtcaatctaccttaatttatctaattctttacaaattagatggttggcggtaattcaatttaagaacggcgtggataaatactggagatccactagaattaacgctatacctaaagatgaaaaagcctcgataagaggtcgtctttttgaaatgatcgatgaacagaataatcaactttgtattcagaatgcccaagcttccgcaaggattgcaaggctagattttcccgtagagtggccaaccttatttgaggatctagaaaacctattgaacgatgagatcatcagaaaaattcagttaagatttacaatatattga

SEQ ID NO: 82715 - DNA, 141 bp, Saccharomyces pastorianus
atgcatccattagtcgatgaattgactctttcacgttacttgacccacggtacttcagtattatcaagttccctttattctgttgctttctttctctttttttttcccaatttcctttttttgcttttgtcccaatcataa

SEQ ID NO: 82716 - DNA, 162 bp, Saccharomyces pastorianus
atggatattttggaagccctttgtttttatagagagggaaaaatacggaatatttttgaaataggtggtctattacttcagagtttttataattcaatcttaaattttgcaatttggaagcaatattcattgccgaagaaggagttattattatacgtgtaa

SEQ ID NO: 82717 - DNA, 942 bp, Saccharomyces pastorianus
atgaatcaacaagggagaccattcaaaggtttggttgtcataagcgcaggtttcgatgcatcagaatttgagcaaacttcaatgcaaaggcatagtgtcaacgttcctacaagtttttatacaacgttcaccaaagatgcattgaaattagcacaaatgcactgtcatggcaaagttttgtctctaatggagggtggatattctgataaagctatatgttctggtgttttcgcacatttgatcggtttacaaaaccaagattgggttaaagaatgggggtctgaacaagtcgttaaagagattgttcgtggttgcaaaccggcttggaaaccctataagacaaaaagagcaaaagatgtcataagaatatgggcagaagaagttatcaggctgggacgagcaatgataccggaattcgatgatatcatttttaaagacgcagttaacagcgcaccttctaattctctactaaaggctactgtcgaaccagcatccacgtcgacaattgctcaaagaataatcagatctcatagaagcaacgcttccccagaaaaagaacttcatgaaaacaagccgagaagcacggaaaaacaggaacaaagggaaattagaagcgataccaaggtcaagcagctctcgtcaaataatagagcagctgaaacccaaattccgtttttgcaacaagaattttccagtgaggatgaagatgaagaatacgtttacgatgaagaattgaacaaaactttcaatcgcacggtggaggatattaccattgatgatatttctagacatttggagaccttagaaattgtaaaaaaaggtgatgaagattcagaccatgagctaaaagaaaaaaattggaaaaactcgcaccaacgccgtctacaaggtaatggaatgttaaattccctccaatacgaaccgcatcgcataagcagcctc

SEQ ID NO: 82718 - DNA, 138 bp, Saccharomyces pastorianus
atgaactctcatgacctaaacatctggaatattcacttatccaaatggacaaccgaagaagaattcaatgtattatacaggacaaaatatagactttatttgctaaagcagatgaatttttcaggagcgcaaaactag

SEQ ID NO: 82719 - DNA, 822 bp, Saccharomyces pastorianus
atgtcttccaaacattcagatccattggagagattttataagcaatttcaagcatttgttcaaaataaccctaatgtcatatcggcagctcgagctgccgcacaaataccggaatttgcaaaagctgttgtagtactatccccatattctttacagcatgtgttcccgagagaatgggtaacaaaatcgtataggaaaactatagtcgaacgaccagaaagattattagcaagctcgatgggtatatcagctgcgattacaatgtatccatcccttttcaccttgaaatcctcgcatcaaaggaaaggttcattgatggcacctcatgtgcttaaggttcatggcagtagctggccggctgagttaattgaactttgccaaatggcagatgctaaattgctaaaaggcgaaatcgaagtcccagatacttggaactcaggtgatatatacttgagctcaaagacaactaaagctctacagggaacaattggggccattgaaactggtgttgactcaattttcaaaggaccatctgcagaacatattagtaacagagcttttgttgctatacggcctcctggtcatcattgccactatggtacaccatccggcttttgtctgttaaacaatgcgcatgtagccatagaatatgcgtatgatacttacaacgtcacgcatgttgtcgtgcttgatttcgatctacaccacggtgatgggacccaagacatttgctggaaacgtgcgggtttcaaacctgaggaggaacctgaagattcatcttatgatgattttggtaagaaatttgccgaggggatcctctag

SEQ ID NO: 82720 - DNA, 612 bp, Saccharomyces pastorianus
atgattacttcaattgacatagcagatgtaacttattctgccaaaccaagaattttggtgccttataaaacacaatgggaagtcgccagtcatcttcctgaatatcgcaaactggcagaaagggtagaattctataaatatgagatgtccacaaaggatgattttgttaaatttttggaaactcatagaataaacggcttttggctcactgaggagtttttcactgtgttaggaaacccttcgagttatattgaattcttccccgcatctttaaaagttatccttgtaccatgggtcggctgtgactttattgacggtaagttattaagatcgaaaggtatcactttatgcaacattggaccacatgctgctgaccatgtcacagaattggctattttcctagcaattagctgctttagaatgacttcattttgggaatattgttttaaatacgtggaaaatggtaatgttgaacagtgtaagaaatatatctctagtgactcgtatgaaattgttacagatagttaccacggtcaggaaatgaaatttccctttcgaacagacaaatgcaagcctaacaaggataggaaagtggtacatttagcagaaaag

SEQ ID NO: 82721 - DNA, 1131 bp, Saccharomyces pastorianus
atgaatcctatcaactctctagcgtttgaccttcacagtgttaaacttgcagacgcgaactcagacactgctgcattatcaaatagcaatactccaaccatgaacaatgcggctcttttgcaaaggccctcctccattatggattctattggcgtccaaagagttccatctccttttgtgccagggagtaaggcgattagtggagccagtactgttcccttcaatgcatatgacgctgaaattactggatctccgctacaaatatctgctaatcaggaaaacaatagtgcatttagtgcagcatcatccaacctgcatatgaacgccagcagcccttccgttctcaataaaccctcgagcacatttccaaatgtagctccttatctctacaacgcaacagggcctgcccccaacgttggtaatcaacccccaccaccggggatagaatctcagtggaaatacattgactctaatggtaacattcaggggccttttggtaccaataatatgtcacagtggtatcaaggaggttattttactccaactttgcaaatctgtagattagcaacatctcctgagccatttggtgtaaatgatcggtttattagactaggtgaattgactactctggtgaataattatcaagacccttttgtcgcctttgatttcattgttattagagctttgaatgctgttccacttgttgcaccaactttatcagaaaagcaaaaagttgagtcaagagatttgatacctgttgctgatgtgcatagtgatgattttacgtatgaagaaatccttggccttaaatttgaagatggaagttactatcatgaaactcaggtttgggttccggttgacggccgtcatatcacaaaggtagatcgcataccaaagatatctgcatataccgcccctctatcaacgacttctagtagatctaataaaaccacttcttcccatgaagagaaggttccttcccacgaggaagattctccagaggagcaagaggttttttcagaagagggcagaactgtttctaacataacgaatgaagaggaatctattgtcgaaaatcctactaagcaggaggaagaatctcgaggaagcgagaaagagcaaatatattgg

SEQ ID NO: 82722 - DNA, 1407 bp, Saccharomyces pastorianus
atgaattttgttacctgccatgttcagatgaggcttcttctccaaaggagactagtgcgtttacgagaatcagagctgtttagaccccagacatcattgtcaactttcaaaagacatgcttcgcaaaagacacgccctatacaaaaatcctcgagaaaatacgcacgtatacttctgttgtcagttttggtaccttacacaggatatgcgttttatgtatcattagctacagtgaagcaaattgatttaagaaacgaaatgtgtcaaagattagaggagaataataacgaggtcacttataagggatccttgctaaaatatagccctttggaagttttaggcagatttgagaacccgttcgaagaatacaggattcagaccgtttttgaattctttgcaaatagagtgttcgaattatttgaaagaaataggggaggtattccacctgatgtacaccaaatgaataagttaatgcctgtacacaagccaacatgggggcctaacttagtggacgtcgaccccgcagaggaaacggcattgccgctagaatgcaaagtgttagacgaattgcacataccgactgcagtagaagaaaatgaagggtcaaagtgcccagtctataacacatggctgggccagtcctgtaactacacggtttataatggattgaggatacttactgatcctctgttcagtgactttcttatccacaagaccctgggtcctaaaagaattactcaaatgccatctcaaattacagaggtgcccaaaccagatatcattcttgtatcccataatcaccccgatcacctggatttagaaagcttggaatactggagtggcaaagactctcccttatggatagtacccaaaggaatgaaatcttatatgacaagtaacggctgtgataatgtcctagaattatcttggtgggaaactttgcaagtaaagaaaaacaatgagatataccacatatcggctactcctgccatgcactggtctgggagatcgctcttagatacgaacaagtctctatggtgctcctttttattaacacaccatggtaatcccatactttttcatgctggtgacactggatatgtgaaagatttattcgttagaattaaagaacgctttggcaaaggttgtaaattagcgctgcttccatgtggtcagtattgccctgagtggcaccaaaaaccacgacatattaatcctcaagaggttctcaagattatgaaagatctagaagctcgaaatgtattaggcgttcattgggggacctttgtattaagcggagagtatttcttagagccaaaggaaaaattagaaatgttggccgagtggggtgggtttaaagaccgctgctactgtccagaagacctgcaggcatgcaagctggcactg

SEQ ID NO: 82723 - DNA, 1413 bp, Saccharomyces pastorianus
atgaaagtattacaattcaatcaagatgcaacgtgctgtgtggtggccgcgtcatcgcatcagatttcgatttttaactgcgacccctttggtaaatgttttgaaattgacactaagaattccaagaagaagacttcaaacaataacggtacagcttcaaactcagaatcacggaataatgaggagagcatattaataactaatggctcccgcgatcgtactgatgcagaagaagaggaagataatgaagataatgccctcgttacaggaaatatactgaaagaaggggagtttgtcattgaaatgttgttttcaactagtcttattgctattgcagatagaggacaaggtctaaacaaaggaaaaaagctgaagattgtcaatacaaagagaaaatctactatttgtgaaatagttttcccacatgaaattgttgatgtggtcatgaatagaaaaagaatgtgcgtacttcttgaaagtgaccagatattcatttatgatatatcttgtatgaaacccttagaaactatcgatctttgggaagatcattataagaggtcccaagccaattcgttctcaaatgcgtcaaacactggtactttggagggagattctgcaaatttgaacagggtggctaccaatttactagcaaatgccactcaaaaaagtgtgaacggatctaatcctagtgtaagaaccagaagaaactctctaagaagtaaaataaggccaagaatggttttaagtaacgatgatagaagtatactgtgttttactgcgtatagctcgcccaagaagaataagcccaattcagaagcactatatgatgtagtgatttatgacacattaaatgtgacgccagttaattacttgaattccgttcataaggggaatgttgcatgtttagcagtaagtcacgatggtaaactgcttgctactgcctcagataaggggaccataataagggtgtttcatacgggggtagattcggactatatgtcttcaaggtcactgtttaaagaatttagacggggtaccagattgtgcaatttgtatcagctagctttcgataagagtatgactatgattggatgtgtaggtgatacggacactattcatcttttcaaacttgatgacgcctctaatagcctccctggagataattctagcaatggccactggaatgaagaggaagatatactagcatcaaattcaaatcccagtatgggaactccaaaggaaatacctctctcgaaaccaagaattgcgaattacttctcgaaaaaaataaaatcttcaataccaaaccagaacctgagccgtaactttgcctatataacagttaacgaatcgaaccaggagttgcttagggtttccagacgaatttcccaaccaagtctatattgcctctga

SEQ ID NO: 82724 - DNA, 1047 bp, Saccharomyces pastorianus
atgctcgaattacgaagttgtagtaatttggtcaatagtagtaggaggcttgtgcctctggtgacttattccggactaagtgcaataacattgcctaaatctcgattttattcacagcctagtgctttagaagtacagggcacatcggattctcgaagcgataatattttagacgaactcaaacaaaggggtctagtgtcccaggtcacacagccagagagtttccttcggacgaagttgaacggtaacgataagatcaaattatactgcggggtggatcccacagctcagtcacttcatttgggaaatctagttccactaatggttttattacacttttacgtaaaaggtcacgacattgtcactgtgataggtggagctacagggaaagttggggacccaagtggtaggaaaacagaaagagacgttatggagaacgatattaggcaaaacaatgtgacatccatctcgcagcaattacaaaggtttttcaaaaatggcctagaatattacagaaaccgatgtgctctcactgaagatgtaccttccggaaaatatacaccaaggaataatttcaactggtggaaagacatcaaaatgttggatttcttagctgattttggtaggcacattcgggtacaatctatgttggcgagggattcaatttcttcgaggcttcaaaccaaaaatggtctgggatttaacgaatttacttaccaagttttacaagcgtacgatttttaccatttgtataaggaagagaatgtgactatacaagtaggtggtaacgaccaatggggaaatataacagcgggtatcgatctcatcaataggatacagcctataaagaataagggtttgccatttggtatcactgtgcccttgttgacgacggctacaggagagaaatttgggaaaagtgcaggcaatgctgtttttattgacccctcaatcaatacggcgtatgacgtttaccagttcttttataatactttggatgctgatgtacccaagttcttgaagatctttacgttctttactcaagtc

SEQ ID NO: 82725 - DNA, 804 bp, Saccharomyces pastorianus
atgggtagacggaagattgaaatccagaggatttctgatgacagaaatagggctgtcacgtttataaaacgtaaagctggcctttttaagaaggcccatgaactatccgttctttgtcaagtagacatagccgtcattatactggggtccaataacacgttctatgagttttcctctgtggatacgaatgatttaatctatcactaccaaaatgacaaaaacttgcttcacgaagtgaaagatccttccgattatggagactttcacaaaagtgcatccgttaacataaatcaagacctactcaggtcgtctatgtcaaataagccttcgaaatcaaatgttaagggaacgaaccagtcagaaaatgatgatgatgagaacaatgatgaggacgacgatgatcatggcaattttgagaggaattcaaatatgcattcgaataaaaaagcctctgataaaaatataccgagtgcacagatgaagttgttatccccgaccgcactcatttcaaagatggatggtagtgagcaaaataaacgtcatcctgagaacgcgctgccgcctttacaacatttgaaaagattgaaaccggatcctttgcaaataagtagaactccgcaacaacaacagcagcaaagtatatcgagatcataccatagtagcatgtacaatcttaaccagccttcatccagttcatcttctccttccacgatggattttccaaaattacctagctttcaaaactcttccttgaatggtcgtcctccacccatttccatttcaccgaacaagttcagtaagcca

SEQ ID NO: 82726 - DNA, 702 bp, Saccharomyces pastorianus
atgggctcttcgcagataatgaaagaaaacaaaacaagtaggtctagcaaaatttctccactatccgcatctgcctcaggccccttaactctccaaaaaggtaataatggcagagtggtaataaaattgccaaatgcaaatgcgcctaacggttctaacaatggtaatggcagtaacaataacaattacccttatcctttcggaagtgggtcttcacctcttttttctgcaacacagccatacattgccactcccttgcaaccatcgaatattcctggcggacctttccaacaaaatacatcttttttagctcaaagacaaacccagcaataccaacaaatgtctttcaaaaaacagagccaaacagtaccattaactacaacattaaccggacgccccccttcaactttttccggccctgaaaccagcaatggccctccaactggttcactgccatcgaagttcgtacatgatttgatgagtaattctccaaatgtttcttctatatcgatatttccagactggtcaatgggacccaacagtgccaagccgggaaacacaaacaatcctggtactttccctcccgtacagacggccgtaaacaacggaaactccagcaatatcaacagcactaacaacactaacaacaacaacaataacaacaacaacaataacaacaacaacagcagcaacaacaacagc

SEQ ID NO: 82727 - DNA, 1716 bp, Saccharomyces pastorianus
atggcttctttgagaagagttagaacagaccagcatacaaacgaaaaggctttgaagagtcagcagattttagagaaaaagtctacggcctacactccacaatttggacagaaccatagcgttccaatggaaaagtctaattcgaatgtgccatctttatttgccgacttccctgctccacccaaacttggaacagtgccgtctaattatgtgtctagtcctgacttagtaagaagggagtctatcatatctaccggatcagaatttcttcctcctcccaaaattggggtacctactaaagctaattcctcgcagggatcgcttatgtactcaccaagtgtggaagctttgcctattgaccctgtcgtcccgcaagttcatgagacgggatacaatgattttggtaacaaacatcctcaaaaaagtatgcctgaagatgaatctcacacatcacatgataatagcaatgctgatcaaaatacattaaaagactctgcagatgttacagatgaaacaatggatgttgaaggacctggcttcaacgatgtgaagaatcctcttcctatggagcccaaccaccagcctacgtctacagtaaatcctatacaaactattggtgacgatatccaaccgattcttcaaactaacgtggaggtccggggtactgatgcatcgaaaatggaaaattcacttccctccattgaaaatgaaagaagtagcgaggagcagccagaaaacatttcaaaatcagcatcatcagcatatttaccatcaactggtggattgtcacccgaaaacagaccactaactcaggatgaaaacagtatctcagagacagttcaatccacatacttgccagcaggaagtatttcaatggaagccaaaccaatttctcaagtgcaagatgttccaagaaatgttaataataaagcatccaaacttgtggagcaacatatggcaccaccaaagccaaaaagtactgacgcaaccaaaatgaactactcaccatacgtgcctcaatcaactgccgctagtgcagatggcgatgaatcaacgattctgaaaacatcgcctgctatatatgcaagaactcaccaagcacatgcatccaatccatcacaatactttcctttggtcaaccaagcaaatgaaactgcttcattcgaattatctgaatcaacatcccaggcacaaagtaatggaaatgttgcttcagagaatagattcagcccaataaagaaagccgaagtcgtcgagaaagacacttttcaacctactattaggaaggcttcaactaaccaatacagggcttttaaaccgttggaatcagatgcggataaatacaatgacgttattgaagatgaatccgatgacgacaatatgtctactgatgaggcaaagaacagaaaggaagaaaaaaagaatgtgaatatgaaaaaggaaacaaaaccaagtaacaaggacatagatgacaagtctaatggttggtttggttggttgaagaaagatactggcgacaaaaaagtgtataaggccaagctaggtcataaaaacacactatactatgatgaaaaattgaaacgttgggtgaataaggacgcaaccgaagaggaaaaacaaaaaattatcgaaagttcggcaccaccacctcctccaatcgtgaaacgtaaagatggcggcccaaaagacaaagccacgttcaggccccatcaataa

SEQ ID NO: 82728 - DNA, 2796 bp, Saccharomyces pastorianus
atgcaggccagtactgagaaaatagctgagcaaaagttttcgtttttggaaaacgacgacgaccttttggacgacgacgacagctttttggcttcttctgaggaagaagacacagtacctaataccgataatacaacgaatttaacctcaaaaccagttgaagaaaaaaaggcttcaagatataaacctattatcgaggaggaagcaggaatgcgtcaagagcaagttcattttaccaatactactggcattgtaacaccgcagcagttccacggtttgactaaaactggactaggcacccccaaccaacaagtcagtgtaccaaatatagttagtcctaagcctcctgtggtaaaagacaatcgttcaatttttaagataaatgaggagaaaaagaagtctgatgcttacgattttccactggaaattatttcagaaagttccaagaagggtcacgcaaagccggttgccgttcctactcaaaggtttggctcagggaattcttttagttctttggacaaaccaattccacagagcaggaaaggctctaataactcaaataggccacccgtgatcccattggggacgcaggtgcctcgatcttcgagaactaactcagcgatctcgcaatctcccgttaattatgctttccctaacccatacaaaattcaacaactacaacaggctcctatccaatcaggtatgcctttaccaaataccaacatacctcccccagcattaaaagtggaaaccaccgtttctgctcctccaattcgggcaagaggggtcagcaatgcctccgtgggaagttcagcgtcttttggtgctagacatgcaacacagtacggcctcaataacggggtacctccggtttcgccatatggtcaagctaccataaatttgccaactgcgaataagtatgcccccgtctctcctacagttcagcagaagcaatatccatcagttgcgcaaaaccttggcgcttcggccgtaaatacccccaattttgtaaagacccatagaggccatacaagctctattagttcgtatacaccaaaccagaatgaacacgcctctagatacgcacccaacaatcaacaatcttatcaggtgccatatacctcacaacctgttggtcctgtagctgggaattcaaactatcaaagccaaacccgaagttcttatgcagttcctatgatgccccaggctcaaacttcagcaagtattcagcctcacacgaacattcaaccgcctactggcattttacctctagcccccttacgacctctagaccccttacaagccgctacgaacttgcaaccccgtgcaagcaacataacggctgcaaattcactacctcttgcaaatttgccacttgctgaaaacatactgccagaaactatcacgcatcgagctacaagtagtgttgcaccaccacgacaggaaaataatccaattaaaatagacaacgaggctttattacgccgtcaatttccgatttttcattggagtgctgcaaacagggtcgtgtacgcagtcccccctatccctgaccaatcgcagtacatgatttcatcaagcattgtacaggaaataaaagtgacaccaattgaccagataattaaaccgaacgatatgctcaaaagcttcccaggtcctttgggtagtgccaaattaaaaaagaaggatttaaccaaatggatggaaaccactattaaatccatatctgaaaatgaatcatccactgatatgactatatggcaactattggaaatgaaactaaacgataaagttaactggaaaaatatttcaaaactactatacaattctgacgaacttttaatgtacctatctcagccctttccaaacggtgacatgattccaaatgcatatagactggatataaattgtcagatgagagtcctggcgttcttacaaacgggaaatcacgatgaggcacttcgcttagctttatgcaagagggattatgccattgcactattggttggcagtttaatgggtaaagacagatggtctgaagtcattcagaaatatttatatgaagggttaactgcggggccaaatgaccaaaaagaattggcacactttctgctccttatctttcaagtatttgttggtaactccaaaatggccataaaaagtttctacactaataatgagaccagtcaatgggcatccgaaaactggaagagtatcgttgcagctgttctgattaatatcccagaaaataatgaagatccactacttataccacctgttgtcctcgaatttttgatagagttcggtatattcctcaccaaaaagggcttgacagccgcagctagtacattatttattattggtaacgtaccactttctaatgagccagtaatggcagattcagacgttatatttgaaagtattggaaacatgaatacttttgaaagcattctatgggatgaaatctacgagtatatattctcgtatgaccctaaattcaaaggattttcatctattttgccccagaagatataccatgcatctcttttacaagaacaaggtttgaacagcctggggacaaagtatactgattacctcagttcctcagttcgaaaactgcctaagaaagatattttaacaataaacctcactcgtgaattgagtgaggtggctagtaggctttccgagtctaatacaggatggattgcaaaaccaaaactaagcagcgtatggggtcaattagataaatccttccatacatatattggtggcgatgatattgatgccttgaagtaa

SEQ ID NO: 82729 - DNA, 1605 bp, Saccharomyces pastorianus
atgacacctgaagccaagaaaaggaaaaaccaaaagaagaagttgaagcaaaagcaaaaaaaagctgctgagaaagctgctagccacagtgaagaaccacttgaattaccagaaagtacgattaacagcagcttcaacgacgactcggtgaaccgtacagaatctgacatagcttcaaaatttgatgttcctccggtctcatcatctaccaatatctctccggctaatgaaacacaactagaaatacctgatactcaagaattgcatcataaactgctcaacgactctgatcaacatgatattaccgcggactcaaatgatttgccagacaactcaatcgttgaacatgactctgttattacccaaacaaaaccagccatgtctgaagaatacgaagagactgccgctcacttatcttcgagaaatccatcgctcgatgtagtcgcgggagaacttcacaataataatgaacatacccagaaaattgccgtatccgctgtggaagaggattctttcaatgaagaagagggtgaaaatcacgacagcataataatttcatcattaaacgatgctaccccttctcaatataatcattttctcccatccgatggcaatcttctttctccagaattatcttctggtgatacgccaactcacaatgttcctctaggcacaaaagacaatgaaataaatgacgatgagtattgtaatgataaggaaattagtttgaacgcaaataatgtgcttcctgatgaactttcaaaggaagaagatgaaagattaaaactagaaacgcatgtatcaaccgaagaaaagaaacaggatatcgctgatcaggaaactgcagaaaacttatttacgtctagtacagaaccatctgagaataaaataagaaattctggtgatgatacctccatgttgtttcaagatgacgaaagtgatcagaaggttccatgggaggaagatgtgaagaaagattttcataatgagaacacaaatgatactcaagaatcggcaccgaacacagatgatcgtgataagggttatgaaggaaacgaagctttgaaaaagtccgaaagttgtacagccgcggacgagaggtcgtactctgaagaaacttcagaagatatctttcacggacacgacaaacaggtagttgaaggccaaaatgattacactgggaaaaatattgagaatgaaagccagaaattaatgggggaagggaatcataagttaccgttgtctgccgaagctgacattatagaacctggtaaggatattcaagatcaagccgaggatttgtttacgcagagcagcggagacttgggagaagttttgccatgggaatctgctgataaaaacgctgatgtaacgagcaaatcccaagagaaacatgaagatttatttgctgcttctggaaacgatgagaaacttccttgggaagtttctgacggtgaagtctcatcgggaaagacggaaaacagcatgcaggccagtactgagaaaatagctgagcaaaagttttcgtttttggaaaacgacgacgaccttttggacgacgacgacagcttccttgggaagtttctgagggagaagacacagtag

SEQ ID NO: 82730 - DNA, 996 bp, Saccharomyces pastorianus
atgacgtcacgagtttcgaggctggaccggcaggtaatattaatagagaccggttccacccaagtagtccggaacatggctgccgatcaaatgggagacttggccaaacagcaccccgaagacattctttcgttgctgtccagagtttacccctttttactagttaagaaatgggaaacgcgtgttactgcagcaagagctgtgggtggcatagttgcccatgctccttcttgggatccgaatgaatctgacttggtaggcggtacaaatgaaggttctccattggataatgctcaggtgaagttggaacatgaaatgaaaataaaattggaagaggctactcagaacaatcagttgaatctcttacaggaggaccatcacctcagttctctatctgattggaaattgaacgaaattttaaagtcaggtaaagtgctcctggcgtcgagtatgaatgattacaatgttcttggtaaggctgacgataatataagaaaacaagctaaaactgatgatataaagcaggaaacatctatgctaaatgcgtctgataaggcgaatgaaaataaaagtaatgctaataagaagtcagcaaggatgcttgctatggcaaggcgaaaaaagaaaatgagtgctaagaatactcccaaacatcctgtagatataacggaaagttcagtttccaagactttattaaatgaaaaaaatatgaccaattctgctgcatcgctagccacttctcccaccagtaaccagctaaatcccaaactggagatcactgaacaagccgatgaaagtaaactaatgatagaatccacagtaaggccattgctagaacaacacgaaattgttgctggcctagtttggcaattccaaggcatttatgaactacttttagataatctaatgagcgaaaattgggaaataaggcatggagctgccgttgggtcttcgagaattggtaaaaaaacatgcttatggagtcagcagggttaa

SEQ ID NO: 82731 - DNA, 1152 bp, Saccharomyces pastorianus
  modified_base (1115)..(1115): a, c, g, t, unknown, or other
  modified_base (1135)..(1135): a, c, g, t, unknown, or other
atggatctattggcaaagttgtgcgaccaccaagaagtactagatattttaaagaacaaggctttagagcatccttcagagtggtcattcaagtcactggtaccgaaattgtatccctttttacgccattcgatttcttctgtgaggagggctgttttgaatctactgattgcattcttatcaataaaggatgattctactaaaaactggttaaacggcaaagtattccgtctagtttttcagaatattttactggagcaaaacccggaactattgcaactgtcttttgatgtttatgttgcgttattggagcattataaagttaaacataccgaaaaaactttagatcatgttttcagtaaacatttgcagccaatactacatcttctaaatacgccagtaggggaaaagggaaagaattatgccatggaatcacaatatattttaaagccttcccagcactatcaattacatccagaaaaaaaacgttctatatctgaaaccacaacagattctgacattccgataccaaaaaataatgaacatatcaatatcgatgcacctatgattgctggagatattactttgctaggattggacgtaatattgaacactagaataatgggagcaaaggcatttgctttgacattgtcaatgtttcaagattccacgcttcaatccttcttcacaaacgttctggttcgttgtttagagctgccattctcaactccacgtatgttggcaggcattattgtttcacagttttgctcctcgtggttacaaaagcatccagaaggggaaaaattaccttcttttgtatcagagattttcagtcctgtgatgaataaacagttactgaatcgcgatgaatttcctgtatttagggagctagtacctagcttaaaagctctgaggactcaatgtcaaagcctactggctacctttgtggatgtaggtatgttacctcagtacaaactacccaacgtagcaattgtggttcaaggcgaaacagaagccggtccacatgcgtttggtgttgaaacagcagaaaaagtgtaccgcgaatactatgatacaatgttcaaatccatgaacaaatcttacaaaatattggncaaaaagacattagaagatnctagcatcgtgtgttga

SEQ ID NO: 82732 - DNA, 2268 bp, Saccharomyces pastorianus
atggacagtgttaaagaagaaaggaatgaaaagttacaaacgatggccggagaatcggtcgtacatttgattcagcaactgttagaaaataataaagttaatgtgtctggtaagatagtcaaaaatctctgcggatttttatgcgttgatacttcagaagttcctgatttctccgtaaatgcagaatataaagaaaaaatattgacgttaataaaagaatctaattcgattgccgcacaagatgacattaatctcgcaaagatgtcggaagaggctcaactaaaaaggaagggtgggttgattacgttaaaaatactatttgaagttcttgggccttctatattacaaaaactacctcagcttagatcgattttatttgattcattatctgatcatgaaaatgaggaagcaagtaaagttgacaacgagcaaggtcaaaaaatagtcgactcatttggtgtactaagagctctattcccatttatgtctgattcgctacgttctagtgaggttttcacccgtttccctgttttattaacgttcttaagatcaaacttatctgtttttcgttattcagctgcaagaacttttgctgatctggctaaaatttcctccgtggaagtaatggcttacaccatacgtgagattttgcctttaatgaatagcgctggttctctatccgatcgtcaagggtccacggagcttatttatcatttatcactttctatggaaaccgatgttctaccttacgtcattttcttaatagttccacttttgggtcgcatgagtgattcgaacgaagatgtgaggaatttagctacaacaacatttgcttctatcatcaaattagttcctttagaagctggtatcgccgatccaaaaggactcccagaagaactagtggcaagcagagagagggagcgtgattttatccaacaaatgatggatccttctaaagctaagccatttaaattacccattgccatcaaggcgactttaagaaaatatcagcaagatggtgttaactggttggcattcctgaacaaatatcatctacatggaatattgtgtgacgatatgggtttgggcaaaacattacaaaccatctgcattatcgcaagcgatcaatatttgaggaaggaagattatgaaaaaacgcgttctgttgaaagtagagccttaccatctctcataatatgccccccatctttaactggtcattgggaaaacgagtttgaccagtatgctccctttttaaaggttgttgtgtatgccggtggcccaactgtcagattaactctgagaccacagttaagtgatgctgatattattgtaacatcatatgacgtagctagaaatgatctcgcagtcctaaacaaaactgaatataattattgtgttttggatgaaggacatataattaaaaactctcaatcaaaacttgctaaggctgttaaagaaattactgcaaaccatagattaattttaaccggaactcccatccaaaacaacgttttagaattgtggtctctgtttgacttcttaatgccgggatttttgggaacggaaaagatgttccaggaaaggttcgcaaagccaatcgctgcgtcaagaaatagtaaaacatcatctaaggagcaggaagcaggtgtactggctttggaggcactacataagcaagttctacctttcatgctgagaagattgaaggaagacgttctatctgatttaccacctaaaattattcaggattactactgtgaattaggtgatttacaaaaacaactatacatggattttactaaaaaacaaaaaaatgtagttgagaaagatattgaaaattctgagattgctgatggcaagcaacatattttccaagctttacaatacatgagaaaattgtgtaatcatccagctttggtcctttcaccaaatcacccgcaattagcgcaagtacaagactatttaaagcaaactggtctagatttacacgatattatcaacgctccaaaactgagcgcattgagaacattactctttgaatgtggtataggtgaagaagatatcgacaaaaaagcaagccaagatcagaattttcctattcaaaatgtcatatcacaacacagagccctgattttctgccaactaaaagatatgctagacatggttgaaaatgacttgtttaaaaagtatatgccctccgtaacctatatgaggctagatggaagcattgacccaagagacagacaaaaagttgttcggaaatta

SEQ ID NO: 82733 - DNA, 1239 bp, Saccharomyces pastorianus
atggtatatgcaaggtacagcagttactacaagcacaatatgtcttggataaaaaatgtaacagaatctccgacttcactgattaaaaaagtttcatgtggtttgataattgctgcttctctatatgccattgcacccagcctaagtgcgctagtctttggggattctaagcagagtattgggaagtacacgacagtgggcttaattaatcgtgggaatgattgcttcataacatcatctttgcaaggcctggctggaatacctcgatttgtagaatatttgaaacggataagaacggtccttctagaattagaaactaagctgtcaaataatgcaaaaggcgacaatcctacagttgataacactacaaggcatagtcgacttgaaaactcgtctaattcacttgcccccttacacgaaagtcttaccagtttaattttggatttgatatctgtaaaagatcgtaagacgtcaatttctccgaaaatagtgataaacacattagagtccatctttaaattaaagatctcatccaaacaaaatgatgcacatgaatttacattaatattactacaaacattacaggaagaacgatcaaaattgatggattacagtaaacagatatgtaatttgaatataccaaagtttccatttgagggcgagacttccaagtttctagtatgccttaaatgcaagggtctatcagaaccatcataccaacagactttcatccgcgaactgtccgtaccacaacaaacatcagagaatctatccaatattctagcacacgatgaaacagaaatcatagacgactattcatgcctgatctgccaaataagagcaatcttaaaccatgaagaatatagaaatttcaaggactgtaccccggatgaaattttaatgttggacagattaaaaaattatgccactaaagccccaattaacgaaaatttaccattcgaagtagaacagtacgtcaagcgttactcaaagggcaatttgcaggtatctaatataaagggaaaggtcatcaaaaaagatgtagtagtacaactgccagacatattaattgttcacttatcgagatccacattcaatggtattacatattctagaaatccctgcaatgtcaaatttggagaaagaataacactttctgaatatacattggctgagagtgggacaataacagaaaacaggcaagtcaaatataatttgaaaagtgttgtgaaacacacc

SEQ ID NO: 82734 - DNA, 1785 bp, Saccharomyces pastorianus
  modified_base (946)..(993): a, c, g, t, unknown, or other
atggctagacaattattcactcctccgataaccaatccaaggtttgaccctaatcaatccatcagggaatcatacaagaacacaactggcggcatgcaatttcaacaaaatctacatgaggatcaaaatgacaatgagagaagtagctgtgatggtgatgaaaactctacaacaggagaaaggctagaaaacaataagtctcctatattgacaaaacaagaaattgacgaagcgttgaacactgtcaccaatttacctccagaattatcaaaattaattgacatttttattgatgacctaaagcagccaaagtacgtacggccactatcagtactgcaattgtctagtcttttccaaagcttttacataaaatttgataaagcatcattccagcacgtcagttcagcgaataataatggctattatttttctggcgggggctctagttcattcttggctgccaaagaaacgttaagtagtggtcttagcggaatttttggcagaagtaggagtagtagtggaaattcacttatgaggccaagaagatcttcatcgcttttcagtaatgagtcaatatcaaattcaactaatgccacacaaatgttgtcacctgaagagataaaaaagcaattgaaaatcaacgaattaaacaacatgaaaatcgaaaaatatatggaactttgtgaaagagatgtttttaagaaaattcttatagtaggcacatccgtatcttcaccgaataaaatgaaaaccttcaaaccacaccaattacaaactttcaaggttggaaatctatttagaaacagtgttgaattcacagaatacaataagttgttgaatgaaaaaatcctctgtttgtccaaactctcaacaatgaataaaatcaatttgataaagtttctgagtcttaataatggcattgatccggaaccaaagtttgaagagnnnnnnnnnnnnnnnnnnnnnnnnnnnnnnnnnnnnnnnnnnnnnnnngaaaagataaaggccctactgaaactacatgaaatcatgacatattcccaagaaatgtctaatgatgattatctttcgttgctaatctactacattattacgattgttccacgggatattttcttgaatgccgaattcatcaggctgttcagatataagaaaaagctggtcgaaacagaatcctttgcattaaccaatctagaagctgcattagtttttgttgaaggcttaaccaaaaatgatttttcaaatgagctacaagataaattgactgtaaatgaaagtaaaattttagaaaattcaatcagcagtagagtctcattgccatcaaaaactgctataatgcataaaaacaacggtaataacggcagtaacctaggtgacatcgtgactcctactatccaaaggccagatgttacaagatcgaattcgtatgatggcttcaggaccgtttttgattcatcattaaaaaatatcatcggaaaaattaggtcatatactccaccacatcctaacaatactagcaataataaccttcacagtagcaacaacttaaacataccacgaagttcgtctcaattatccatggaattgagcaatagagatacaacagagatgtctagggatggctcacgatcaacttcatcatcttcacgatcttcagcatctttagagcacggaaatcgcgaatttaccggcgatttgacagtaaccgctagcattaacggtgctgataaaaaggagtttcagaaatcgtggaaaaatataaaggctataaatttgaagatctga

SEQ ID NO: 82735 - DNA, 474 bp, Saccharomyces pastorianus
atgcatatgcaactcaggaaaagaaaaagggttgactattcagggagaaatcagacgtccgatcctccttcaaccacaacggcagcggtaccatccattattgtccctaagaagcgtaaagtagtcgcacaaaacatggttaatccagctattcgagccacaaccacaacactgggcacctcaaatataataatacctaagcctctgcagcgccctaaattccacaatagcgccagcctatcttcacctgatgatgatcccgaaaagatctctgtattggaagttcagaaaaatttgtccaatctcatcaaaagacaacaaagattattttataaagatatacataagccgactctcgccggcttgaaaaatttcgaaatgttaaggctgcccaatgatctaaaactcctacaaaacatcgtaaacctattatattcattcgagcaattagacagtgactcgggatcctctaga

SEQ ID NO: 82736 - DNA, 1122 bp, Saccharomyces pastorianus
atgacgcacccagttatatcactaaagccaagctacaattctgtaatacggggctgccccggtttacctgatacgttaccacgaatcgaatgccaattaagagtgcgctcaaacaactctttgccattcaaattggttaagatcgaaattgttttaaagacaattgaaatatatttcaacaaaaacctttatagcagcaataacagctctttcatcccatttaatcgtccgtcggacccctctaatggccattctgacaccagtaaccagaatatcagcattcattataagaaaaacatcgtgttatcccaccctacccatgatggcgacgatctcaacaatgatcttattggcatagacatacctttgacgattgggctacctgacgacatcaaagaaacaaactataatccgaaattcggcaaaacgcagactttcctggattgtaccgtgttttatacagaggtcggcggaggaagctcaaataagaaaagaaattttctttacccagtaaacgtcgaaaggtatacatacctaccttcaccgtcatatttcaggccaataaacagatcaaacatcacttctcccgatcaaaagttcttaattagttattccattgagaatccctgtgtttctatgaataatgacacgttgaaactctccatatcaatcaggctgaacccatttcggaacaatgccacaactccctcttcgaatgactttgatgtgtccacgccgacacttttctccacaaagaagaagtttaagtccaagctcaaattgaaatcaattacaacacagatactagaatacttggaaattctgaagaaccaatcagaattttcatccacgcaaacaacaaatattttgcaaacctctgtaagacaagttgatcaagtcatctccatgaattcaatgatttttcaattcaacctaaaaatattcactaaggacaaaattttacaaagctttagatcttctgagtcgagttgtcccgaaactaaattattaatcaacaaaatcgacgacattcctctgcaatatcataattcgataactacgataggtcaacatttaatgttctcactatctttcaataaggttcaattcaataaaagtctg

SEQ ID NO: 82737 - DNA, 1530 bp, Saccharomyces pastorianus
atgctgtccattctaagaaattcggtgagactaaattcaagggctcttagggttgtgccatctgccgccaacaccttaacatcggttcaagcatccagaagacttttaacaagttattcaagttttttacaaaaagaaacaaaagacgacaaacctaaatctattcttacagatgatatgctgttcaaggccggtgttgacgtcgatgagaagggccaaggcaaaaacgaggaaacatcaggagaaggaggagaggacaagaatgaaccttcttccaaaagtgaaaaatctagaagaaaaagaccaacttctacagatattaaaagagaaaagtatgctaactggttttacattttttcgttgtctgcgttgacaggtactgcaatctacatggcaagggattgggagcctcaagagtctgaagaattgaagaaagacatcgataatggctacactttatcacttatgtataaaagattcaaggccaggttcaactcaatgttcacctacttccaagagccacctttccctgatttactacctccaccaccaccaccaccgtaccaaaggccattaactcttgttatcacattggaagattttttggttcattctgagtggtctcaaaagcatggttggagaacggccaaaagacctggtgctgactacttcttgggttacctatcgcagtattacgaaattgttttgttttcatccaactatatgatgtactctgacaaaatcgctgaaaaattagatccaatccatgcattcgtatcttataatttgttcaaggaacactgtgtttacaaagacggtgtgcacattaaggacctgtcaaaattgaatagagatttgagtaaagtaatcattattgacactgaccccaacagttacaaattgcaacctgaaaatgctattccaatggagccatggaatggtgaagctgatgacaaattagtaagattgattccatttttggagtaccttgccactcaacaaaccaaggatgttagaccaatcttgaacagctttgaagacaagaagaacctagcagaagaatttgatcatcgtgtgaaaaaattgaaggataaattttacggagatcataaatctggtggcaactgggcaatgacggcactaggtctcggaaattccctgggcggcagcaccaagttcccgctcgatttgattcatgaagaaggacaaaagaactatttaatgttcatgaagatgattgaggaagaaaaggaaaaaattagaatacagcaggagcaaatgggcgggcaaacatttacgctgaaagactatgttgaaggtaacttgccttcgccagaagaacaaatgaaaatacaattggagaagcagaaggaggtagacgccttatttgaagaggaaaagaaaaagaagaagattgctgaatccaaatatttttcatgtaaaccctcttctcatgtatctacgtatctatgtgtgtatgtaaatgtacctgtacactccccacaccctcattttgttattgtcatgtga

SEQ ID NO: 82738 - DNA, 135 bp, Saccharomyces pastorianus
atgatagaattggattatgtaaaaggtgaagataccatagtagaagcaaccagcacgtcgccgtggctgatgaggtctcctcttgcccgggccgcagaaaagagggggcagtggcctgtttttcgacataaatga

SEQ ID NO: 82739 - DNA, 663 bp, Saccharomyces pastorianus
atgatcaatcttctgcacgtcttcgcttatgatagtagggaattatatgaggttagagaagccgcttctaacactttccattggagtgtcttgttattatgtcatgctgctgttgaaaacttttggtccacactttgtcagtttatgtgtttcatttgctactactggccagctcaattcagtggacgcgcatctcatgcaggtttcttcttcttcttctatgttttaattttcccattatattttgtcacgtatggtctatggatcctgtacatgtctcctgatgttccctcagcttctatgattaattccaatttgtttgctgctatgttactgttctgtggtattttacaaccaagagagaaaatgcctgccttctggagaagattgatgtataatgtatcaccatttacctacgtggttcaagcattggttacaccattagttcacaataaaaaggtcgtttgtaatcctcatgaatacaacatcatggacccaccaagcggaaaaacttgtggtgagtttttatctacctatatggacaataataccggttatttggtaaatccaactgccaccgaaaactgtcaatattgcccatacactgttcaagatcaagttgtggctaaatacaatgtcaaatgggatcacagatggagaaac

SEQ ID NO: 82740 - DNA, 3426 bp, Saccharomyces pastorianus
atgtcttcgactgacgaacatattgagaaagacatttcgtcgagatcgaaccatgacgatgattatgctaattcggtacaatcctacgctgcctccgaaggccaagttgataatgaggatttggcggccacttctcagctatcccgtcacctttcaaacattctttccaatgaagaaggtattgaaaggttggagtctatggcgagagtcatttcacgtaagacaaagaaggaaatggactcttttgaaattaatgacttagattttgatttgcgctcactattacattatttgaggtctcgtcaattggaacaggggattgaacctggtgattctggtattgcctttaaaaacctaacagcagtcggtgttgatgcctctgctgcatatgggcctagtgttgaagagatgtttagaaatattgctagtataccggcacatctcataagtaaatttaccaagaaatctgatgtcccattaaggaatattattcaaaattgtacgggtgtcgttgaatctggtgaaatgttatttgtcgtcggtaggccaggtgcaggttgctccactttcctaaagtgtctatctggtgaaacttcagaattagttgatgtacaaggtgaattctcctatgatggtctggaccaaagcgaaatgatgtctaagtataaaggttacgttatttactgtcccgagcttgatttccatttccctaaaattactgtgaaggaaacaatcgattttgccctaaaatgtaagactcctcgtgttagaattgacaaaatgacgagaaagcaatacgttgataacatcagagatatgtggtgtaccgtttttggtttaagacacacatatgccaccaaagtcggtaacgatttcgtaagaggtgtttctggtggtgaacgtaagcgtgtttccttggttgaagctcaggcaatgaatgcctccatctactcttgggataacgccacaagaggtttggatgcctctactgctttagagtttgcccaagccattagaacggctacaaatatggtaaacaactctgctattgttgctatttaccaagctggtgaaaatatttatgaattatttgataaaactactgttctatataacggtagacagatttacttcggtcctgctgataaagctgttggatatttccaaagaatgggttgggttaaaccaaacagaatgacctctgcggaatttttaacatccgtcacggtcgattttgaaaataggacattggatattaaacctggctatgaagataaagttccaaaatctagttcagagtttgaggaatactggttgaactctgaggattatcaggaacttttaagaacttatgatgattatcaaagtagacaccctgttaatgaaacgagagatagactggatgtggccaagaagcaaagactgcaacaaggccaaagagaaaattctcaatatgttgtcaattattggacacaagtttattattgtatgattcgtggttttcaaagggttaagggtgattcaacgtatactaaggtctacttaagttcttttttgatcaaagctttgattatcggttctatgttccacaaaattgatgacaaaagtcaatccaccacggcaggtgcttattctcgtggtggtatgttattctatgttttattgttcgcttctgttacttccttggccgaaattggtaactctttttctagtagacctgttattgtcaaacacaaatcatattccatgtaccatttgtctgcggaatcgttacaagagattatcactgagttccctactaaatttgtcgctattgtgatactatgtttgattacttactggattccatttatgaaatatgaagctggtgctttcttccagtatattttatatctactgactgtgcaacaatgtacttctttcattttcaagtttgttgctactatgagtaaatctggtgtggatgcccatgccgtcggtggtttatgggtcctgatgctttgtgtttatgctggttttgtcttgccaattggtgaaatgcatcattggattagatggcttcatttcattaatcctttaacttatgcttttgaaagtttagtttccactgaatttcaccacagggaaatgttgtgtagcgccttagtcccatctggtcctggttatgaaggtatttctattgctaaccaagtctgtgatgctgctggtgcggttaagggtaacttgtatgttagtggtgactcttacatcttacaccaatatcatttcgcatataagcatgcttggaggaattggggtgtgaacattgtgtggacttttggttatattgtgttcaatgtcatcttatcagaatatttgaaacctgttgagggaggaggtgacttgctgttatataagagaggtcatatgccggagttaggtaccgaaaatgcagatgcaagaaccgcttccagagaggaaatgatggaggctctgaatggtccaaatgtcgatttagaaaaggtcattgcagaaaaggacgttttcacctggaaccatctggactacaccattccatacgacggagctacaagaaaattattatcggatgtctttggttacgttaagcctggtaagatgaccgccttgatgggtgaatccggtgctggtaaaactaccttgttaaatgttttagcacaaagaatcaatatgggtgtcatcactggtgatatgttagtcaatgccaagcccttgcctgcttctttcaacagatcatgtggttatgttgcgcaagccgataatcatatggccgaattatctgttagggaatccctgagatttgcagccgagttaagacagcaaagttccgttccgttagaggagaaatatgaatatgttgaaaaaattatcacattgctaggtatgcaaaattacgctgaagccttagttggtaagactggtagaggtttgaacgttgaacagaggaagaagttatctattggtgttgaactggttgctaaaccatcattattattgtttttggatgagcctacctctggtctggactctcagtctgcttggtcaattgttcaattcatgagagcattagctgattctggtcaatccattttgtgtacgattcatcaaccctctgctaccttgtttgaacagtttgacagattgttgttgttaaagaaaggtggtaagatggtttactttggtgacattggtccaaattctgaaactttgttgaagtattttgaacgtcaatctggtatgaagtgtggtgtttctgaaaatccagctgaatatattttgaattgtattggtgccggtgccactgctagtgttaactctgattggcacgacttatggcttgcttccacagaatgtgccgctgcagggctgaagttgaagaattacatcgtactttacctgacctgcagc

SEQ ID NO: 82741 - DNA, 1035 bp, Saccharomyces pastorianus
atgagaaaagaattaaaataccttatctgcttcaacatactcctcctgttatctataatatactacacttttgatttgctaacgttgtgtattgacgatactgttaaagatgctatacttgaggaagacttaaatccagatgcacctccaaagcctcaactaatacctaaaatcatacatcagacttataaaacggaagacattcctgagcactggaaagagggtagacaaaaatgtctcgatctacatccagattacaagtacatcctatggacggacgagatggcctatgagtttataaaggaagaatacccgtggtttctcgatacttttgagaactacaaataccccatagaacgtgctgatgccattcgttactttattctctcccattatggtggtgtatacatcgatttagatgacggctgcgaaaggaaactagatcctttgttagctttcccggccttcttaagaaagacttcacctttaggtgtctcaaacgatgtcatgggttctgtgcctagacatcccttctttttaaaggctttaaagtctttgaaacactatgacaagtactggtttatcccttacatgactattatggggtctactggtccgttgtttttaagtgttatttggaagcagtacaaaagatggggcatacctaagaacgggacagtaagaatcctacaacctgcttactacaagatgcatagttattcatttttctccattactaaaggctcttcatggcatttagatgatgcaaaattgatgaaagcactagaaaaccacatcttatcctgcgtcgttaccggatttatttttggcttctttatcctatatggtgaatttacgttctattgctggttgtgttccaagaatttcagtaatctaaccaaaaattggaaacttaacgctataaaagtaaaatttgtcacaatgctaaattcattaggcttaagactaaagttgagtaaaagtaccagtgatactgccagtgccactttgctggcaggcagcagaaacgattga

SEQ ID NO: 82742 - DNA, 399 bp, Saccharomyces pastorianus
atgaagaacgcagcattgtgtgaggctcttcctctgctcgccacgtgctcccacgaaatcccacccacaccacacacggtctgtttcgccttcccccccgcattattactatccccgagcaaactcacacttttgaattcgcgtcgcgtcgcgtcgcgtcgcgctgcgtcattatcattgacccacgcttgctgcgtctcttctcttgctcccggccacaacaactcccccgagataaaaaccaatcttttgctaagccatctttttcttttttttctttcttcttacctcgctattatcgcctttctaaacttccttggccaagcctttcagcggtgcttttttgttctcacgtccactgccaatttccacatttttttcccctcttgttatatataa

SEQ ID NO: 82743 - DNA, 228 bp, Saccharomyces pastorianus
atggatgcttttgagaatatgtctgtatcaaatcatccgggcggtaacgcaagaagaaactcccaatcagcaaacgaaatgcttgcatcgcaaattcaggatttccagaatattccaaggtctttcaatgacagcaatgcaaatgtaaatttgtcaaaaaatcgtactgtcggcaatcaactgcctttctcatcacgtcaacaaaaaattatcatggacatttactga

SEQ ID NO: 82744 - DNA, 1152 bp, Saccharomyces pastorianus
atgcacgtactgctgagcaaaaaaatagcacgctttctgttgatttcgtttgttttcgtgcttgcgctaatggtgacaataaatcatccaaaaactaagcagatgtctgaacagtatgttacaccataccttccgaaatctttgcaacctattgcaaaaattagtgcagaggaacaaaggcgtatacaaagtgaacaggaagaagccgaattgaagcaatctttagagggagaggccattagaaatgccaccgtgaatgccattaaggaaaagatcaaatcttatggtggtaatgaaacgacgctagggttcatggtgccatcgtatatcaatcatagaggatcaccaccaaaggcgtgctttgtctcactaattactgaaagggattccatgacccaaatcttacaatctattgatgaagtgcaggtgaagtttaacaaaaattttgcttatccttgggtttttattagtcagggggagcttgacggaatgaagcaagaaatgattcgtcaagccataactgattctatgaatggtgatcctgagttaattaatattaaatttgctgaaattcctgcagacgaatgggtataccctgaatggattgatgaaaataaagcagcagaatcgctaatttcattggcaaatgtaccggatggtgattctagagctgtaagatatcaagctagatattttgcagggtttttttggaggcatccagttctggatgagtttgattggtactggagagtagaccctggtattaaattgtactgtgatattgatcatgacctttttaggtggatgcaagatgaaggcaaagtatttggtttcacattgagtatgagtgaagctaaggaagccaatgagaagatttgggatgttacgaaaaaatttgcaaaggattttccaaagtttatttccgagaataatttcaagtcatttattacaaaaaaggactctgaagattttaacaactgtgaattcacatcaaattttgaaattggtaatttgaacttttatagatcgccagcttacaggaaattttttaattacatcgacgaagaaggcggtattttctactggaaatggtctgactccatcatccacacattgggttatcgatgttgtgccaaggaggggatcctctag

SEQ ID NO: 82745 - DNA, 237 bp, Saccharomyces pastorianus
atgactgtcatgaatcttttcttcaggccctgtcaactgcagatgggctctggaccgttggagctcatgcttaaaaggccaacgcaattgaccacgtttatgaacaccaggcccggcggatcaacccaaattagattcatatcgggaaatttagatccagtgaaaagaagggaggatagactacgtaaaatatttcccaagtcacgacttttcaccaaggttaaacaagaatcctaa

SEQ ID NO: 82746 - DNA, 696 bp, Saccharomyces pastorianus
atgaagcgctccaggcttgtgcctcaacatatctttagcattattagcaagcgatatctcgccaaacatgcctaccaaaaaacactaaacttgcccaagaccaaattccctaatagatcaaacttagagattacattgagggaattaataccaaaatcttcgcagttagtttacaaggagcagctatgtgatttcttcgaagaattttcaaagcttaatacgactgatgaaaaattagagttcattaaagaaaagttgttcatcttacatgatggaccgccctatgctaacggcgagctccatctcggtcatgctctaaataaaattctgaaagatatcataaatagatatcaactttcacaggggaagtacattttttataagcctggctgggattgtcatggactacccatcgagattaaagctttgaaagatttaagcgcacaacagatcgagtcaatatcgcctttaaaaatcaggtcaatggctttaaaacatgcacaaaaggcaatcaagaggcaaagggaaactttccaacattttgccatcttaacggactgggaaacaccatacctaacaatggataaagactatgaaattaatcagctaaatatttttaaagaaatgtacgaaagaggactgattaagagacagaacaaaccggtttactggggtaagaaactagaacagcgttag

SEQ ID NO: 82747 - DNA, 75 bp, Saccharomyces pastorianus
atggtttgtcgttttgttcatcattcaagggtcatttttatttccatttatgatttcttgagtacaaaaggctaa

SEQ ID NO: 82748 - DNA, 294 bp, Saccharomyces pastorianus
atggcacttgtcaaatacagcacagtttttgtgccactccgaccattgcgactgtttgtgtccatcaagaaagcatattaccacagcgagccgcatagcatcgatctatttcatgataaggattggattgtgaaaagacctaaattcctaaatttacccaaaaatgaacattcaaaattagatatattccagtttaattttaacaagtccgaaagcaataatgtgtatttacaggattcatcattgaaagataacttgataaagcgatgcaatttatctataacgatgggatcc

SEQ ID NO: 82749 - DNA, 1524 bp, Saccharomyces pastorianus
atgtcacttgaagtagataagcaccggaacacactacagtatcataaaaagaacccttactcccctttattctccccaaattctacatataggtgttatcctcgggtattgaacaatccctccgagtctagaagatcagccagttttagtggtatttataaaaaaaggaccaatacgtcaaggttcaattatttaaacgaccgccgtgttttatcaatggaagaatcaatgaaagatgggtcagatagagctagtaaagctggttttataggaggcataagagaaactctttggaactcaggtaagtacttatggcgcacatttgtgaaaaacgaacctcgcaattttgatggttctgaagtagaagcaagtggtaacagcgacgttgagagcagaagttctggaagtaggagcagtgacgtaccatatggtctacgtgaaaattattcctcggatacaagaaaacacaaattcgatacgtcgacgtgggccttaccaaataaaaggagaagaatcgaaagtgaaggtgtggggacaccttcaacctcaccaatcagctttttggcttctcaaaaaagcaattgtgatagtgacaatagcataactttttcgagagatccttttggttggaataagtggaaaacaaatgctattggttctaactcagaaaataacacttctgatcagaaaaatagctacgacaggcgacagtatgggacagcctttattagaaagaaaaaagttgcaaaacagaacattaataatactaaaccggtgtcgagagcacaatctgaggaagtaacatatgtacgacaaatattcaacggagaatataaagttccaaaaatattaaaagaagaaagagaaagacagttaaaattaatggatatggataaggaaaaagacactggcttaaaaaagtctataatcgacttaactgaaaagatcaaaacaattttaattgagaacaacaagaacagactacagacaagaaatgaaaatgatgatgatttagtatttgttaaagaaaaaaagatatcttctttggaaaggaaacataaggattacttaaatcaaaagttgaagtttgatagatctatattagagtttgagaaagacttcaaaagatataacgaaattttaaatgaaagaaagaagattcaagaagatcttaaaaaaaagaaagaacaattggccaagaagaaacttgttcctgaattaaatgaaaaagacgatgatcaagtacaaaaagctttggcatctagagaaaatactcagttaatgaatagagataatatagagataacagtacgtgattttaagaccttggcaccacgaagatggctaaatgacactatcattgagttatttatgaaatacattgaaaaatctacccctaatacagtggcgtttaattcgtttttctataccaatttatcagaaaggggttatcaaggcgtccggaggtggatgaagagaaagaagacacaaattgataaacttgataaatctttacaccaataa

SEQ ID NO: 82750 - DNA, 945 bp, Saccharomyces pastorianus
atgctgctggaaagattgcacaagagactacacgccggctcttctaggcgatctcaagaaaataaggacaagaattgcaaacccgaagacgcgttgcccatccaaccagaagctcaacatcaaactcaggaccctcagccgttgttaaattgtgattacgatgacatgattgcatttgacagaaacttgtctactcccgttttcactccggtaatgactcctataaataatagcagctccaatcaggcgaaaagctcggatgcctcgtattttccaccttacctcaatgctaatagaaccagacagaatagcgcctcttcgctggcgagttccgtttccgatttcgctcagaatttcaaacaacataccttttacaacaataacgctcaattcacttcgttcacaccgcagtttgtcggccttctattagaagtttaccaaaacacgtgcagcgatcctacgataactccgtttgatactacaaaccctccctcaggaatattgaatagagttgccaaagcggctatacagcaatctgagcttcaacaattggatatcggatgtgacagaaatagctggcttttaacattggtaagacagcgcttgttgcaagaggtcagaaaagacggctatctttctcgtaacacttctttaacttctttacccccaccacccccaccacagttttctgaaatgcttagagttccctccccgtttgttaacgcagatattaccgatccaatccccttatcaaacacaaactcgaatccgaatgtaagctctactaccagcctgaccaacacgttgaactggtattccttacaaagatccaacgtctcaatgaagaatagaaatggctcgtcccagtatatttcagaattacaaccacaagctatcttagcccgcacaaattctaacaatagtgttagcaacagtaatgccttt

SEQ ID NO: 82751 - DNA, 366 bp, Saccharomyces pastorianus
atgactacaaataatgacttctattttgctctactacgcatatctattctccaattattgaaggcacaaggatttgacagggcaaggcccagtctggtggatgtcatgaccgatctctatgcaaaattcttgagtttgttagcatcagaggtcagttctatcgctcaggcaagatgtgatcaggacgatacaattgctttacaagatataactctggctctggaaaatctaggtattgttaagcctacgaacgttctggatgtctatgatgaaaactccgaattatcaagttcacgaggaatggaaaagttcaaggactggtgtatttatagtactcaattgaccgacgcgcgggggatcctctag

SEQ ID NO: 82752 - DNA, 1908 bp, Saccharomyces pastorianus
atggactggaacactattgagaaactaattaaaagtgaacaaaaaaaaggcaacagaattgctcagcttttgaacttgcctttgaacttgaaacagaacaaaattagcgtcaagcttgatctctctagcaaggaactcaacacttcttcagacgaggacaatgaatcagaaggcaatactactgatagttctagtgactcagactcagaagacatggagagttcgaaggagaggagtacaaaaagtatgaaaagaaaatctaatgaaaagataaacgttacaattgatcttggtttatcagcttatgccaatgccactgaatatttcaatatcaaaaaaacaagtgctcaaaagcagaaaaaagtcgaaaagaatgtcggcaaggctatgaagaatattgaagtcaaaattgatcaacaattgaaaaaaaagctaaaagattctcacagtgtcttaaaaaagatccgcactccttacttttttgaaaaatatagttggtttatttcaagtgaaggatttttggtcatgatgggtaaaagtccggctgagacagatcaaatctattcaaaatatattgaagatgatgatatttatatgtccaatagttttaactctcatgtatggatcaaaaatccagaaaaaacagaagttccaccgaacactttgatgcaagcgggtatactatgcatgtcctcaagcgaggcttggtcgaagaagatatcttcttctccatggtggtgctttgcaaagaatgttagtaaattcgatggctctgataactccattctgccagaaggtgcctttcggttgaaaaatgagaatgatcaaaaccatttaccccctgctcaacttgtgatgggttttggatttttatggaaagtgaaaaccagtggaaatgaggataatggtgatgatgacgaagaagaagaagaagaagaagaagaagaggaagaagaagaagaagaagaagaaaaagaagatgaagacgaagaagaagaagaaaaagaagaagaagaagaaaaagaagaagagcaacagcaagatgaagacgatagtaacgaggtcaatgggttagagaagggtggagattcaaacgatagcacgaaaaacaacagttttgaacacgataatcttgaaaaagacatcgaaaagcattgcaccatatcatccgataccgactctgattctggaaatgctaaagccaaaaatgacaatagcagtacgcagcgtatccttgatgaaccaggtgttccgatatctttaatcgaaaacataaacagtgacgtccgtggtaaaagaggaaaattgaagaaaattcaaaagaaatacgccgaccaggatgaaactgaacgtctcttgcgtttggaggccttgggtactttgaagggtatcgaaaagcagcaacaaaggaagaaagaagaaataatgaagcgagaagttagagaagatagaaagaataaacgcgagaaacaaaaaagactacaggctttaaaattcaccaaaaaagagaaagcaagagtgaactatgataaacacaagtccgaattaaaaccatctctcgataagggcgatgtggttgatgatattataccagtatttgccccctggcctgcgcttttgaaatataaatacaaagtcaaaatacaaccgggaagtgcgaagaaaactaagactttaactgaaattttacattatttcaagagtagaccactagacggttcttcaactgacaaagaaatggattggccccaagaacatgaaatgattaaaggcttgaaggaacaggacttggttcttctgctctgtgtcgacaagttaaaagtaacaatcgctgggcagaaatccaccaagaacggtggtaactcttcgaagaagggcaaaaaaaaaacgctaaatcatatgagatga

SEQ ID NO: 82753 - DNA, 234 bp, Saccharomyces pastorianus
  modified_base (204)..(204): a, c, g, t, unknown, or other
atgaagcaaagaattagtgccctagatttactgctgttggctagagagctgaaacaggatttggaaggctaccgattgagtaatatatataacattgccgattcctcaaaacaatttttgctgaaatttaataaaccagattctaaactcaacgttgttgtcgattgtggcttaagaatttacttaaccgaacttagtaggccnatacctccaactccttccggcttgtgtcaa

SEQ ID NO: 82754 - DNA, 423 bp, Saccharomyces pastorianus
atgttcgccccactatatcatacttggacaatttctgaacgtgctgttggattagcgtggtatcagacgtaccaaatttacaaccaatcgctgcccaaacttccagaaaatttcagtatgaacaagaaattactgaatggtaatttccctattagtctggatttccaatcatacctcaatgcattaatgaaaagtgaagagatgaggattataatgttcttgaatatgactatcgataaaccgtcaattttgtcatttttggaagccttatatgaatacgctataaacaaaaaatccgaattaacgaatagttttgatttagcttgcgtattatctatagcggcaatacttaaaagagaagcgccaatttacaacggcacgttattgatgaagaacagctttctcgaggaaacgttcatttag

SEQ ID NO: 82755 - DNA, 774 bp, Saccharomyces pastorianus
atggccgtattgagcaataatggtaatgtttctgtgttcaaagataacaaaatgctcacaaatctcgattcaaaaggaaacttaagtagcagaacctaccattgttttgaatggaatcctattaaatcatcaatcgtggttggtaatgaagacggtgagcttcaattctttagcattcgcaaaaattcagaaaatactccagaattttattttgagagtagtattagattaagtgacgcaggctcaaaagactgggtcactcatatagtatggtacgaagacgttcttgtagcggcgctttcaaacaattctgtattttcaatgacactttctgcttcctctcatcaacccgtttctagaatgatacaaaatgcttcgagaagaaaaattactgatttaaaaatagtggattataaggtggttttaacttgtcccggatatgtgcataagatagatttaaaaaattattcaatttctagcttgaaaacaggatctctcgaaaattttcatataatcccattgaatcatgagaaagagagcacgatattattgatgtccaataagactagttataaagttttactagaagacgaacttcatgtgacggctgataatattatcgcgccttacttagagaagaaattcaagaaatggagcacaatttggaatgaattcaataattatgaaacaactcttgtcatacacggaatatctctctctccagacggctattcaatagccatagtatacgatatggaacgggtggctttctaa

SEQ ID NO: 82756 - DNA, 342 bp, Saccharomyces pastorianus
atgaaacagtttggactggcagcctttgacgagttgaaggatggaaagtacaatgacgtaaacaaaaccatacttgaaaagcaatctgtcgaactaagggaccaattaatggtattccaagaacgactggtagaatttgccaagaaacacaatagcgagcttcaagcttcacctgaattccgctcaaaattcatgcatatgtgctcatctattgggattgatcccctatctttatttgatcgagataagcacttatttacagtgaatgatttttattatgaagtatgtcttaaagtcataaaaattagtcggcaaactaacgatctgactggaggcgtcatt

SEQ ID NO: 82757 - DNA, 108 bp, Saccharomyces pastorianus
atggaactttcccagtacctcaactacgcattttcctttgcatattatattatcatccatcttctttgcctctcatatatttacgaaataatacataaaaaatattaa

SEQ ID NO: 82758 - DNA, 1434 bp, Saccharomyces pastorianus
atggagcaacatctcaaatcaattcctctacaggacgacactaagaaaaaaggcatactatcttttttccagaatacaactacggtaaagagtaataagtttctcacgaaagagaaggatgtcatcactctagatgatcctaaagaggacgtcagtgaacctatgatagaaactgttaaacaagaaaccataacaagcatcaataaagagtgtgcagatgaaatgaaaacgacacctaagaaggccaatgctgaagacaagcttttatgctgcaaaaattcacccatagaaagtacaaaatacgatagaaacaccaacaaacaagtacccaatggaaatataatagctatcgagacaaaaagcagaagctcttctccatgctctaggagagaactttcctcatcgaaaaaggaagaagctaaaagagaaaaggaactaaaaaagcagcaacgtgcagaagagaaacacagaaaagagttattacgacaagaagagaaaaagaaaaaagagctaaaggtagaagaggaaagacaaaggcgtgctgagctgaaaaagcaaaaggaagaggaaaagcgtagaaaggaagaagccagattagaagccaaaagaagaaaagaggaggaaagattgaaaaaggaggaggaaatacgtttgaaagaagaagccaaggaaagagcacaatcccgtattggtaacttctttaaaaaactaagcgattctaatacgcctgtggttgaaaagtcggattatgaaaaattttttctacctttctatgctaaagatggagttagagtcagtaataagtggaaactaacaaaagtggagctggaaggtagcaaaagaaaaatagatgatgaattactgaacagtaaagataaaacaagtagtgacgacttattgaattggttacagtctagaagattacctagaggacataaaattaaacgtaaagctgttgacgttttacagcaaatgactttgaaggagaaaacagacgatgagctccaatctttacttgcacaagttccgcacaaatatataaaattctacgaaaacgttagacctccgtttatcggaacctattctatggactttactttgccaccaaacgatcccttttctacggaaggtactggattcaattatgattacgattctgacgttgaatgggttaatgaagaagaagaaggcgaagtcgataacttagaaagtggtgaagaggaggaagaggaagatgatgaagacgtacctagcgaaggagagtttgacgggtttctagacagcgaagaaaacagtgatttggatggcctaccctgcgccaagagaaaatttgtaggcccattgataccaacaatatgcttaaaatccaattttgaaaacttatcagaggaaaataaacgatacttacaacaactcaacgccgaagttatcata

SEQ ID NO: 82759 - DNA, 693 bp, Saccharomyces pastorianus
atggttggtatttacagaatacttgcttcgttcgtcccactcctgggtcttctttttgcattccatgatgatgacatgatagatactgttacaatcattaaaactgtatatgaaacggtgacatcaacttctactgcacctgcacctgccgctacaaaatctgttagtgaaaagaaactggatgacactaaactaacacttcaagtaattcaaactatggtttcatgtttttctgtaggtgaaaatccggccaatatgatatcctgtgggctaggagttgtaatcttaatgttttcattaatcatcgagcttatcaacaagctcgaaaatgatggtatcaatgaaccgcaaaggttatatgacctaattaaaccaaaatacgtcgagctaccttcgaattatgtgaatgaaaaaatcaaaacaacatttgaacctctagacctatacttaggagtaaatatgaatacttcaggaagtgatctaaaccaaaactgtttgattctcaaacttggcgagaagacagctctgcctttcccaggcttggcccagcagatttgttatacaaaaggcgcttcaaatgagttcacaaatgataaattatcggacatacagggatatttaacgaaaacagccaggaattgtaatggcgtttcccagaaaatatcaacattagtaaatatcgggatcctctag

SEQ ID NO: 82760 - DNA, 888 bp, Saccharomyces pastorianus
  modified_base (866)..(866): a, c, g, t, unknown, or other
atgggctcttcgttgagaagctttatcaaagacgttcgtggtgctaaaacactggcagatgaaagggcaattataacgaaacaatctgctaaaattaggacaaaattgagagatgaccatctaccacatgaaaaaaggcgagtaaatatccagaaacttctgtatctatacattctaggggaaaagacacatttcggtcaggtggagtctatcaatttaattgcttctgacgattttgtcgataaaagattaggctatctggccgcaactttattgttggacgaatctgaagatttattgacactcttaacgaacatgttgaacaacgatttgcatcatcccaacaaatatgcagtgtcacttgcactaacctcattaggctttttgagctcccctgaattagccagagatttatacccagacgtcgaaaatatcatcaaaaattcaagagaccctttcctcttgaaaaaagcgcttcaatgtgctgccaaactaattttcaaagacgtttcacttttagaaatcttcaacatcgaagacattactaagatattgtctagtcattcaatatgtactcacggtgtacttttaggtgttacgaaaatcatacaatctattttgttaattggattgaacagaaaaaaagatgaggatgaagatgaagacggtattgattacagcaatgacatcttgtctccattatctttacttttgcgtgattttttcattcgtttggaaaatatgaattctaaaaatattgaacctggatatgatgtccaaggtatttgtgacccatttctgcagtgtgaaataatttacactttaaaactatactttcaagttggtgagctcttaaattcgaacantgttttggactacaaagataat

SEQ ID NO: 82761 - DNA, 471 bp, Saccharomyces pastorianus
atggcagacgctgatgaatatagcactgcacctacccagcaagaaataacaccactgcagacaacagccactatcataaatgcaatatctggagaatgtataactacgaatgttgattttttcgtttccctggacaaatttaaacagttcattgctaggaaatggaagattcctcccgatcagctgttgattctactaccttatggtaacaaactaaaaccgtcgatgtttaaagagctgcttattaataggtcttttactctaaatgatttttacgtttacgacagacgactattctcacttgttagtaaaccgacaccaacaaatcttttaacgtctaaggattctaatcccatgaactcccctaattccaacgacttgacagagactctggaatatttaattaagaatagtcatatatctcaataccaaggtagcgatactattatgatcaagcctatgccctcgcct

SEQ ID NO: 82762 - DNA, 1293 bp, Saccharomyces pastorianus
atgcaggcccaagaacagactttaaatctgaaaaattgtttaaaggaagctaatgagaaaatcaccactgataaaggttctttacaggaattaaatgataataacttgaagtatacaaaaatgattgatgttttagtcaatattgaggagttattacagatacccgaaaaaattgaggagaacattagaaaggaaaatttccatcaggtgcaaattctcctagaaaggggtttcatattaatgaacaacaaatctttgaagacagtggagattttaaagcctataaaccaacaacttgagttacaagaacatttacttttcaacaatctgattgaagaaattcacgacattatgtactccaaatctaacaaaacaaattttactcgagtaaccaataatgatatattcaaaatcataagcatttcacataatggatttacgagtttagaaaattacctgtacaacatagtcaatattgatattatggaacactcaaaaacgataaacaagaaccttgaacaattcattcatgaccaatcgctaaataaaggaaatatcatgctacaagaaaatgctgcgactcaagcaccattggcaccatctagaaaccaagaaaatgaaggatttaacagaatagggttcctactaaaaaccataaataacatcaataaattacctgttgcattcaatataataacagaaagggctaaagaggagattcataatataattgttaaaagtaccgaatcaatacgttcgaagcacccttctctgcttaaaatggctactagtttaaagaatgacaaccattttggcctacccgtacaggatatactatcgatcattttaagggaatgcttttgggaaatatttttgaaattactgtatgctattcagtgccatagggctatttttgaaatgtcaaacattttgcagccaacgtcttccgcaaagccagctttcaagttcaataaaatttggggcaaactgttagatgaaatagaattattacttgtgaggtacatcaatgaccctgaattgatatccagcaataacggtagtattaaaccaattaatggcgcgacaaataacgcacccactttacctaaaaggaaaaatcctaaaattttctctttggagtataacattgaggacaattcttctgtaaagggtcaagcttttgaactaaaggctttgttgaaagatatattgcctggattttctgtctcctcaaacatggatttagactctatttatgtaaaagatgaatccttcgaacagatgagcctctag

SEQ ID NO: 82763 - DNA, 243 bp, Saccharomyces pastorianus
atggattacctaaaaccagcgcagaaggggagaagacgtggtctttccataaacagtctttcggagactcagcaatctgctatgaatagttccctggaccatcttcagaatgacttaaacaggataaatcttcaatggaatagaatactgtcggataacactaatcccttagaactagcgctcgcatttttggatgatacatctgtaggtctgggccaccggtatgaagaattcaatcattaa

SEQ ID NO: 82764 - DNA, 1053 bp, Saccharomyces pastorianus
atgactaataggaggttgattgaaaatggcatggaaagatttaagtccgtggagaagctaatgaagacaaaacagttttcaaaggaggctttaacaaatccagatataatcaaagaccctaaagaactcaaaaaaagagatcaggtcttatttattcacgatggtctagatgagctacaaaagcaattggaacagtatgaggctcaagaaaatgaagaacaaacagaaagacacgaatttcacatcgccaacctagagaatatcttgaaaaaacttcagaataatgaaatggacccagagcccgtagaagaattccaagacgatataaagtactatgtagaaaataacgatgatcccgatttcattgaatacgatacaatttatgaggacatgggttgcgaaatacaaccttcatcaagtaataatgaggctccaaaagaaggaaacaatcaaacttctttatctagcattcgctcatcaaaaaaacaagaacgttctccaaagaaaaaagctccgcagagggatgtttctatatcagacagggcgacgactccaatcgcgccaggtgtagaatcagcctcgcaatctatatcttctacgccaacacctgtgtcaactgatacgccattgcatacagtgaaagatgattcaataaaattcgataattctacccttggtacaccaactacacatgtgtctatgaaaaagaaggaatcggaaaacgactcggagcaacaactaaatttcccaccggatagaactgatgaaattcgaaaaaccatccagcacgatgtagagacgaatgcagcttttcaaaatcccttattcaacgacgaattaaaatactggttagactcgaaaaggtacttaatgcaacctcttcaagaaatgtcaccaaagatggtatcgcaattagaatcttcgctattgaattgtccagattctctagatgccgattcgccatgtctatacaccaaaccattatctttgcctcaaccaaagtcaatcttaaatcccaatgaaccaattcgattagtatatccgtacgatgta

SEQ ID NO: 82765 - DNA, 1101 bp, Saccharomyces pastorianus
atgttgaaacgatcatctctaatatatctatcatgtgtcctaatcattaccataccaatacttttgcatgtatacaacggtccaggactgtcccatgaagccaatgaacatagggcttctcacaagcaaaaaagaacgttagcaaatccggataaacccaaaagcgaaaacgatgaagatctattttgtgcggtaaccaacccagtcaccggatcatacatagatctatcacagctatcttcaactcccaacaaattaagggagggccaaaaacagagttctggcaataacaagcatgaatcctccaagacgaagtggtcagtgagaggttggggctacgatacaaacttcacgttaggcatctgctctagtcctgtcggagaagctgagtcgcaacaactgtccaatctaacgggcgctttttacgtagaccagttgaacgaaaataatttagtatcgattggagacttcagtacaaggcctgcgttagtcggcggctctactgccaagaaattaactctcaaatacgaaaacggctctatgtgcccgaacgggaaggacaagaaggcaactttattgaattttgtctgcgataaagaaattcaatcaaaggcccagatatcatacattggaaacctacacaattgctcgtatttcttcgaagtccgcagcattcatgcgtgccccacctcaaacaaaaataatgaagttaacgttttgggtatcttcatcggtatcttcgctatattctttttagtcgaatttgcggggagaagatggatctatgctaaactaaataggcatttgaaaaacgacgacgagttacacgacatatcgccatctttaaatgagcaaccacactgggacctcatagaggacgggtctcgctggagtaaatttttcaacgggataattaagacgacaagaaggttcacgaaatctttaatgaggtctttagtcagaggtaggaacagccgtcaagggggcataagactacggtcatccccatctgcctcttcgtccagccttgccaacagggagttcttcagagacatggaggctcaaacgaaattattgacagctgagacatcaatagtcata

SEQ ID NO: 82766 - DNA, 510 bp, Saccharomyces pastorianus
atgaagaaaatggtttacgttttggattctatgactaaagaagaactagaatctgatggtagaatgttcattgaagagcctacaagaatggttcgtgtagctaaaggttcaggtacttctgtgttcgaggtagaaatgatattgatgcaacagcagatgatggcaagaatggcacaaaccgcaacccagcaacaaccaggagcccctggtgccaatgctaggatgcctggcatgccaaacatgccgggtatgccaaacatgcctggtatgcccaatatgcctggtatgccaaaagtgactccacaaatgatgcagcaggcacaacaaaagctgaagcaaaatccaggtctaatgcaaaatatgatgaacatgtatggtggcggaatgggcggaggaatgggcggaggaatgcctgatatgaacgaaatgatgaacatgatgcaagatccaacaaatgcaaacaaatggcaaaacaattcggtatgggctaaaggccaccatctgaatata

SEQ ID NO: 82767 - DNA, 408 bp, Saccharomyces pastorianus
atgattgaaatatccaatgtcatcaagcctaatcaaactattatggttttagatgcttccattggtcaagctgcagagcaacaatccaaggctttcaaagaatcgtccgattttggtgccattatattaaccaagatggacggccacgctagagggggtggggcaatttcggccgttgcagccacaaacactccgattatctttattggtacaggtgagcacattcatgatttggaaaagttctcgcctaagtcattcatatctaaactgttgggtattggtgatatagagagtctctttgagcaattacaaaccgtttccaacaaggaagatgcaaaagccacaatggaaaacatccaaaagggtaagttcaccttgctagatttcaagaacagatgcaaacaataa

SEQ ID NO: 82768 - DNA, 477 bp, Saccharomyces pastorianus
atgaacagtgtttgggatgatgctagaatagaggacagaacggtggacaaaccagtaggctcctctcacgctcaggagaaactcgcgctggtaaaatcaactttgtttaaacttgaccaagaagatagaccagaatgcgattcctgggtacaactagtcaaattgatctgcgacgaggaccgtgaagaagaatttactacattcaaggagttattaagggaagtcaaaaacgttaatgataaatccgtcacaggcgttgccttgattcattatatcattgtatttgatcgtgcagactacattgagttactacatgataatccttctggtgcaaaattagatttgaatcttgtcgacgacattgtaggttacacacctttgatgtggagtttcagtctgcagagaaggaactgttgcttggagctgttcaacgcattcgacgaaataaacttcaacatgacgataaggctggattaa

SEQ ID NO: 82769 - DNA, 357 bp, Saccharomyces pastorianus
atggaaaaatacaattacgaattgaatgaaaataaattcaactccaaactgaagaaatttttaaacaacaaaatcaaagatagtaagatgagcaaggcagacgcgtatttacaagaacatgaaataccgtatctagttttaccaactatacccgaaatgacagacttgtattcaaagggtctgattcacattctttccaaccgtttttaccaggcagtatccaagacgatgtttatgaaattcacgatgtcaacttcaaacaaagacaaaatgaaccacagatatctcggactaactcgggtacctcagattttactggagatgaggataaggcgcaatatgaaactgaaggggtag

SEQ ID NO: 82770 - DNA, 1446 bp, Saccharomyces pastorianus
atggttcctccatattcaccactttcggaatttttggaacaaaacaatatgtttcgataccgtaccgaagtaaaacatgaaatacctcaaatttcccaaccgaaagacacctctctcctaatgagtaatgaagactctaccacgaaagaaacttttgataatattgacttacaagtcgccggtttgaccctgtcccctggtgcaaatgacaacatgtttctggattctgatgaaaagaacatgaatcattctcagggagctgcaaccctaatagatcccacatacacagaagactaccacggtacatttgactatgataaactatctccggaccaatacttggaattttccgactttgatataccacaaatcctgaatctattgatatcgctaccacaaaaggaacctcacatgaccacctatccagctggtttaatataccaatgtattagatatgctgatcataagataaagtccaagccactagtagaatcgttaattaacttatctctaactaaaattctgaccagtgtttcttccaacggagctgcaggattggtctccacagaagcttctttacaagcaggtgacattgtattgcaatcgtattggttaagttgtttatcttttctctattactacctctgtagagatgattcatttttcaagaggcatccaagcgtgttacaagagctgattaacaccatccactctattatcatagaactgacatcttccattcattgcaggttgatttctttgatagattcaactttactagcatacacaacaatccaggacgttaaacaaactttatacaaaagagactggaactttttcaaaaagagaaagcaggccaagcttttattgaaggaaaagaacagaaaacaattaaaggaacaacaaaagaaagaacttcatcgaaaaagccaggatcaagaaaatcatgaagaagaggagggtcgacaagatgggaatgattcagatgatagggcatcaacaaatgatgataacaattctagtgtttcactcttttatgataaagaaattttgagacatttatatcctccatcattcgaagagcagatgaaaccctctccactaaagattgttcaaatatttggtgccttgtcttacgttcttaatttacatcaaacgcatccgattttccaacaacaatgtctctctatttcagttaactggtttgccacgaccttattcaataagatcttaaaggacaaaaagaaaagatctttatcaagagcccatgctattcaaatcaggttcaatctttcaactctagaatcatggatacagaacaacgatttctgtgttcctaaaccgatgcttattgatgacttcatgtggcagcgctttccaatgactttaattcgcgacgttggcgagatagatttatcggatccgattctaagaaatgtagcaact

SEQ ID NO: 82771 - DNA, 303 bp, Saccharomyces pastorianus
atggattttatagagggtgaaaaggaccaaaggcaaaaatgtgataccgccaagcaagtaaactgcgagaaataccttcaagctagccattatggtcttttaatgctacttttctcttgctgttctgctcttcgatgtgttcaaaaccctttctcctggttattatacaagagggatttacagagaaaacttaagtgggagaaaactgaaaaatgtgccataccaattaggtgcaaaaatgaaagatctaaagggaagagaaccaagagttatttaaaagggctacatagggtgcaagattag

SEQ ID NO: 82772 - DNA, 237 bp, Saccharomyces pastorianus
atgcaagcggcatcacctgtcatcctggcccttaccgctccaattgccttgacaacaggaccactatcttctttggtggttgcatctgtcagtgggctaaccaatttgttttggctgttgccctggacccataaagttaaagaacaaaggaagaatattgcgaagaaatacgcgggtagtgaattggaagcaaggatgctatattgcgtaaagaatttggcaagtcgcacggattga

SEQ ID NO: 82773 - DNA, 546 bp, Saccharomyces pastorianus
atgagttcgaattcaacaccagaaaaggttactgcaggacacgttctgtggtatattcccaataagatcggttatgttcgtgttatcaccgccgccctttcttttttcgttatgaagaatcatcctacggcctttacatggttgtatagtacatcatgtctactggatgcgctagacggaaccatggcaagaaagtacaatcaggtttccagtctgggtgccgttctggacatggttaccgacagatccagcaccgctggcttgatgtgtttcctttgtgtgcagtatccccaatggtgcgttttcttccaattaatgctgggcttggatattactagtcactacatgcatatgtatgccagtttaagtgctggtaagacttctcataaaagtgtgggcgagggtgagtccagattgtacacctgtactacacgagaagagacgtactgttcactatctgtgcgtttaacgaactattttatgctggattgtacttgcagttgttctcaaattctgcaacctttggtaaatggactacaatcataa

SEQ ID NO: 82774 - DNA, 735 bp, Saccharomyces pastorianus
atgggtttacctaaatcggcatataagaagttactcatagattgtccaatgagagtcattaataaaaactgtgcccaacgagtcaaagatgtttctccgctcattacaaacttcgagaaatggtcggataagcgcaagaagctctatttcaaagatgaagaggagatggtggggcatttccatttggaaaatttcaatttaaaaaataacttatatggtaggcttttagcttctccaatgagagcagaaaaaatctcaaaattaaaatcgtgtagagaattactaattccattgaaagtggtaccatcaactggcaaagatcagcatgctgataaagataaactaaaactggtacctacactagattattccaaatcatacaaaagctcgtacgtattgaattcagcctccattgtacaagacaacttggcggctgcgacgtcatggttcccaatctcggtattgcaaacatcaactccaaagagcctagaagttgattcctctacatttataacggaatacaatgctaacttgcacgcatttataaaagcaagactttcagtgataccgaatgttggaccttcttcgataaatcgtgttttactcatttgtgacaagagaaaaacacccccgattgaaatacaagtagttagtcatggtaaagggctaccaattacacagtctgtctttaaccttggtatctccaagagccaatctagaagctatcgtgagtaa

SEQ ID NO: 82775 - DNA, 774 bp, Saccharomyces pastorianus
atggtttcagttatagacaagcttgtttttgactttggtgggaaaactctggtctctctcgcaccagataataatactttgtgtgtagccaataaaaatggcttaaccaagattctgaagacaaataacccagaagaagagccagagactttagattcttccaaattggtctcgtctataaaatgctattcaaactcgtactttctgatgactacaatgcaaggtgatgctcttaggtataacatcgattctagtcaagaagaattattggctagatttgctttacccctacgtgactgctgtgttattcattcaggtaaaatggccgtatttggaggagacgacttagaactaatccttttggaattggacgatgaaacgcacaaaaaacatgccattaaaatcgatgaacaagtttctcaaatttcttacaattcacagatgaatattttagcagtttcaatgataaatggtaaggtccaaattttttctctgacatctactattccaaacaaagttcatgagttaaatgattacatagtggccaattcatatgatgatacacacagagataagatactctcgaatatgatggatgatatagataaagacaatgacaatgacctgagtgaaacggttgatccagatgagaacaatgtggctgacccagaattctgtgctgctaatagaatttgcacgagagtggcttggcatccgaagggtctgcattttgcgctaccatgtgcagatgatacagtaaaatattctctataa

SEQ ID NO: 82776 - DNA, 483 bp, Saccharomyces pastorianus
atggcttggggtctagaagctcgtgttccattcttagacagagaatttttgcaattgtgtatgaacatcgatccaaatgaaaagatgattaaaccaaaggaaggacgtattgaaaagtacattctaaggaaggcattcgacaccacaggagaaccagatgctaagccatatttaccagaagaaattttatggagacaaaaggtacaattttccgacggtgttggttactcctggatcgacggattaaaagatactgccgaagcagtcatttcagatgaaatgtttgccagtccaaaggccgaatggggtagtgacattccaaccaccaaagaagctttctggtacagactaaaattcgatgctttgttccctcaaaagaccgtggctgacaccgttatgagatggattccaaaggccgactggggttgtgctgaagatcctttggtagatatgcccaaattcatgaaaggggatcctctagag

SEQ ID NO: 82777 - DNA, 1101 bp, Saccharomyces pastorianus
atgtgtggtattttcgccgctttcaggcacgaagacgtgcatagatataagccaaaggctctacaactatcaaaaagaatcagacaccgtggtccagattggtccggtaatgctatcaagaactccactatatttgttcatgaaagactagccattgtcggtgtggaatccggtgctcaaccaattacttcttcagacggagagtacatgctatgtgttaacggtgaaatctacaaccacattcaattaagagaagaatgcgcagactacgagtttggaacgctgagtgactgtgagcctatcatcccaatgtacttaaagcacgatatcgacgctcctaagtacttggatggtatgtttgcttggactctttacgacgctaaacaagatcgtattgtggcagccagagacccaatcggtattacgacattatatatgggacgctcttccgcttctccaaagaccgtttattttgcatccgaactaaaatgtttgactgacgactgtgacactatcactgcattcccaccgggccacgtatacgattctaagactgacaagatcacccgttacttcacaccagattggctggacgaaaaacgcattccttctaccccaatagattacatggcaattagacactccttagaaaaagccgttagaaagagattaatggccgaagtcccatacggtgttctattgtcgggtggtttggactcctctttaatcgcttccattgctgcccgtgaaactgcaaaggccactaacgatgtcgaaccatcaacttacgatagtaaggcaagacatctagcaggtatcgacgatgacggtaagctacacactgctggttggacaagtctccattcctttgccatcggtttaccaaatgctccagatttgcaagccgcaagaaaggttgccaaattcatcggctctattcatcatgaacacacctttacattacaagaaggtttggatgctttggacgacgtgatctaccatttggaaacttacgacgttaccactatcagagcttccactccaatgttcttactatccagaaagattaaggcccaggggtcaagatgttctttccggtga

SEQ ID NO: 82778 - DNA, 486 bp, Saccharomyces pastorianus
atgcagaatatgctatcaatgcatttttttagtgtgatggcaagtttgaatgcaatggcttcgatgagggtaatagtgtttttataccaactctcaattctgggtgactgctcaacaattgacagtttacgagaccttataatctcacaaattgttctcgcatataattgcattagtgtgcatgtaaatatgtatatatctacaaacggaagtgaggcatcgattgcttctcgtatgagtacactggaaagctgcctttttttgataacgatgaataaagggtcagcgtcgtttgggaaacgtcgattttttatagagatttggcttgatgtgcatctaagcgagtattatcggtctgcgcggcttagccgcgggaacaaaaagtggcacagaaacgagctcaagaaaagctcctcagaggtgtcatcagaaacacctcattcatccctacttcatggcacagtcgtaaatgagcaatttgcttga

SEQ ID NO: 82779 - DNA, 642 bp, Saccharomyces pastorianus
atgattttattaaagaggacaaaaattaggggcgtcagcgtctcttttgtaagcttgcaaagaaggactcacagcagactggtgaaccccataaggcagcaacatcaacaaattaccaagcaaaggagttcaaagattttaaagaatgcgcatttctatgactttagatcgctgcccaaagtacctactacacagtatttggaagctagggagctcacccgcgatattctgtatagcggatacaggccagtaatgtacccagtgaaggaaaacccgctattcagagataagaagagaaagtccttgcaaacgttattaacaatgaacgagaaaacaaacgcagaggcgaagacgatcgatgagaaaaagcacaagaacatattgtttggtgaacgtggcactggtggtataatgtcaggtggcgtgaacggtacatggaagtacaatcccaccgtacccaatgagctgttgccattcaattggtggtctacgtccagtatgggtatggaatattttcctgaatggaaaaacgtgcccccatatatgatgagaaagttgaagccgtttgacaaggcactgcaaatgcggttgacacacaaagcaaagacctgcagcatgcaagcttgcactgccgtcgtttac

SEQ ID NO: 82780 - DNA, 585 bp, Saccharomyces pastorianus
atgtctgcttcattgattaatcgttccttaacaaacattaggacagaactggattttctaaaagagtcaaatgtcatttcaaatgacgtttacgatcaaataaataagagcttgccggcaaaatgggatcctgccaatgcaccccgcaacgccagtccagcttccttggaatatgtcgaagctctttatcaatttgatcctcaacaagatggtgatttgggcttaaaaccaggtgacaaggtccaacttttagaaaaattatctccagagtggtacaagggtagctgtaatggccgtaccggtattttcccagcaaactatgtgaagccagctttctctgggtctaacggtccatccaatcttccaccacctccacagtataaagctcaagaattacaacaaatccccacgcaaaatagtgccgcatcatcttatcaacagcagccatttcctccaccttccacaaattattatcagcagcctcaacaacagccgcaacaagctcctcctccccaccaacaacaacaacaacaacaacaacaacaacatcagagctcatatagccactactctagagatcccggt

SEQ ID NO: 82781 - DNA, 876 bp, Saccharomyces pastorianus
atgaacagacaggaatccataaattcgtttaattcagacgaaacatcttcgttgtctgatgtagaaagtcagcagccgcaacaatatatcccttcagagagtggatctaaatccaacatggctcctaatcaactgaagttgacccggacggaaaccgtgaagtcattgcaggacatgggtgtgagctccaaagcccccgttcctgatgttaatgctcctcaatctagcaagaataagatttttcctgaagaatatactttagaaacccctacaggtttagttcctgtcgccactctacattccataggtagaacttctactgcgatttcccgtacgagaactagacagatcgatggcgcttcttcgccttcttctaatgaagatgctttagaaagtgataataacgaaaagggtaaagaaggcgactctagtggtgcgaatgacgaagctccagatctagatccggaaattgaattcgttacctttgtgactggcgatccagaaaacccccataactggcctgcatggatccgttggagttacactgtcctactgtcaatcttagttatttgtgtcgcctacgggtccgcttgtatcagtggtgggttaggaaccgttgaaaagaaataccatgttggtatggaagccgctattttatcatgttctttaatggttattgggttctcgctgggtcctttaatttggtctcctgttagtgatctttacggtagaagagttgcttactttgtttctatgggtctttatgtcatcttcaatatcccttgcgccttagctccaaatctaggttgtcttttagcttgtagatttttatgtggtgtttggtcatcatctggtttgtgtttaggggatcctcta

SEQ ID NO: 82782 - DNA, 1725 bp, Saccharomyces pastorianus
atgccgccagctagtactagtactaccaatgatatgataaccgaagaacctacttctccacaccaaatcccaaggcttacaaggagacttacggggtttcttccccaagaaatcaagtcaattgacacgatgattcctttaaagtcaagagcgttatggaataagcatcaagtcaaaaaatttaacaaggcagaagattttcaagatagattcattgaccatgtggaaactacattagcacgttccctatataattgtgatgacatggctgcttatgaagctgcttcgatgagtattcgtgacaatttggtcattgactggaacaaaactcagcagaaattcaccacaagagacccaaagagagtttactatttgtctttggagtttttgatgggtagggctttggataatgccctgattaatatgaagattgaagatccggaagaccctgctgcctcaaagggagaaccaagagaaatgattaaaggggctttggatgatttaggtttcaagttagaggatgtcttggaccaggaaccggacgcaggtttaggtaatggtggtctaggtcgtcttgcagcttgcttcgtcgactcaatggcaacggaaggcatccctgcctggggttatggtctacgttatgagtatggtatctttgctcaaaagattattgacggttaccaggtggaaactccagattactggttaaattctggtaatccgtgggaaattgaacgtaacgaagtgcaaattcctgtcaccttttatggttatgttgatagaccagaaggcggtaaaactacattgagtgcgtcacaatggatcggtggggaaagagttcttgctgtcgcgtatgatttcccagttccgggtttcaagacttccaatgtaaataacttaagactatggcaagcaaggccaacaacagaatttgattttgcaaaattcaataatggtgactataaaaactctgtggctcagcaacaacgcgcagagtctataaccgctgtgttgtatccaaacgataactttgctcaaggtaaggagttgaggttgaaacagcagtacttctggtgtgctgcatccttacacgacatcttaagaagattcaaaaaatccaagaggccatggactgaatttcctgaccaagtggctattcagttgaatgatactcatccaactttagccatcgttgaattacagagagttttggtcgatctagaaaaactagattggcacgaggcttgggacatcgtgaccaagacttttgcttatactaaccacactgttatgcaagaggccctggaaaaatggcccgtcggcctctttggccatttgctacccagacatttggaaattatatatgatatcaactggttcttcttgcaagatgtggccaaaaaattccccaaggatgttgatcttttgtctcgtatatccatcatcgaagaaaactctccagagagacagatcagaatggcctttttggctattgttggttctcataaagtcaacggtgttgcggaattgcactctgaattaattaagaccaccatcttcaaagatttcgtcaaattctacggtgcatcaaagtttgtcaacgttactaacggtatcacaccaagaagatggttgaagcaagctaaccctaacttggctagattgattagcaaaactcttaacgatcctacagaggactatctactagacatgacaaagttaact

SEQ ID NO: 82783 - DNA, 945 bp, Saccharomyces pastorianus
atggagcgtgttcaaactcttgctaagatctcttgtttatattattcaaagaaagcgttagcttgccgcacaacgtcctcagatcactccaataacgacgtcgaaaagaacatttcacacctggatccaaccggtgtggacaatgtttacgttccgcctgaacagccggaatcgaagcattcccgtttcaggatcgacaaggacactttcagaaaccacaccatcgctgctgtaggtgagttttgtgggacttttatgtttttatggtgcgcttatgttatctgcaacgttgccaaccatgacgttgcactgactgcgcagccggacggttcgcatccgggtcaattgatcatgattgccattggtttcgggttctccgttatgttttccatctggtgcttcgctggtgtctccggtggtgccttgaatcctgctgtgtcgctttccctatgtttggctagaactatctctcccaccagatgtgtggtgatgtggttctcgcaaatcattgccgggatggctgccggtggtgcggctagcgctatgactcctggtaaggttcttttcgccaattctttaggcctgggctgctccagatctagaggcttgtttctagaaatgttcggcactgctgccttgtgtttgaccgttttgatgactgctgttgaaaagcgtgaaaccaacttcatggccgctcttcccatcggtatttctctattcattgtccatgttgccttgaccggctacactggtaccggtgtcaaccctgcaagatctttgggtgccgccgtcgctgctagatatttccccacctaccactggatctattggatcggcccaatattgggtgccttcttggcttggtctgtttggcaattactgcaattcttagactacactacctacgttaatgccgaaaaggctgcaggtcaaaagaaggaataa

SEQ ID NO: 82784 - DNA, 801 bp, Saccharomyces pastorianus
atgtcttcgaacgattcgaacgataccgacaagcaacatacacgtctggatcctaccggtgtggacgacgcctacatccctccggagcagccggaaacaaagcaccatcgctttaaaatctctagggacaccctgagaaaccactttatcgctgcggtcggtgagttctgcggcacattcatgtttttatggtgcgcttacgttatctgcaatgtcgctaaccatgatgtcgcactcgttgcagcgcctgacggttcccatccgggtcaattgattatgattgccatcggtttcggattttccgtcatgttttctatctggtgttttgccggtgtctctggtggggctttgaatcctgctatgtcgctttcgctgtgcttggcgagagccgtctctcctacaagatgtgtcgttatgtgggtttcgcagattgttgccggaatggccgctggaggcgctgcaagcgccatgacacctggtgaagtcctctttgccaattctttgggcctgggctgctctaggacgaggggtctgttcctggagatgttcggcaccgctatcctatgtttaacagtcttaatgacggctgtggagaagcgtgaaaccaactttatggccgcgctgcccatcggcatctccctgtttatcgcacacgtcgctttgactgcatacacaggcacaggtgtcaaccctgcgaggtccttgggtgctgctgtcgcagccagatacttccctcattaccactggatttattggattggcccgctgttaggatccattttagcatggtctgtatggtaa

SEQ ID NO: 82785 - DNA, 25 bp, Saccharomyces pastorianus
gtgtattctgtggtaacgtcgttaa

SEQ ID NO: 82786 - DNA, 25 bp, Saccharomyces pastorianus
acaccatgttgtgtattctgtggta

SEQ ID NO: 82787 - DNA, 25 bp, Saccharomyces pastorianus
tagtagcagtgcttgtagacacaat

SEQ ID NO: 82788 - DNA, 25 bp, Saccharomyces pastorianus
aacgtcgttaatagtagcagtgctt

SEQ ID NO: 82789 - DNA, 25 bp, Saccharomyces pastorianus
ttgtagacacaatggctggagaagc

SEQ ID NO: 82790 - DNA, 25 bp, Saccharomyces pastorianus
gttgcttcgattctgtggtggaaat

SEQ ID NO: 82791 - DNA, 25 bp, Saccharomyces pastorianus
ttcggaacacacaccagattcgcag

SEQ ID NO: 82792 - DNA, 25 bp, Saccharomyces pastorianus
attcgcaggaagtaacagtaactag

SEQ ID NO: 82793 - DNA, 25 bp, Saccharomyces pastorianus
gtagtttcggaacacacaccagatt

SEQ ID NO: 82794 - DNA, 25 bp, Saccharomyces pastorianus
aactagcgtagtttgttgcttcgat

SEQ ID NO: 82795 - DNA, 25 bp, Saccharomyces pastorianus
tagtttgttgcttcgattctgtggt

SEQ ID NO: 82796 - DNA, 25 bp, Saccharomyces pastorianus
ggtgccagggtttacgacccaacag

SEQ ID NO: 82797 - DNA, 25 bp, Saccharomyces pastorianus
ggcactgcagtgaacttggccatgt

SEQ ID NO: 82798 - DNA, 25 bp, Saccharomyces pastorianus
tgcaggttgcaaggacatcgtcgtt

SEQ ID NO: 82799 - DNA, 25 bp, Saccharomyces pastorianus
aaagaaatttccgagctgagcagtc

SEQ ID NO: 82800 - DNA, 25 bp, Saccharomyces pastorianus
acagttttctccgatggacatcaca

SEQ ID NO: 82801 - DNA, 25 bp, Saccharomyces pastorianus
gtgtctcactttcagaggcactgca

SEQ ID NO: 82802 - DNA, 25 bp, Saccharomyces pastorianus
atcgtcgtttcagagcctgccaagg

SEQ ID NO: 82803 - DNA, 25 bp, Saccharomyces pastorianus
agcgcacgctgccaaggagagcatt

SEQ ID NO: 82804 - DNA, 25 bp, Saccharomyces pastorianus
cacacaccacgattttgaggcagta

SEQ ID NO: 82805 - DNA, 25 bp, Saccharomyces pastorianus
ggagacggcttcgattacacatttg

SEQ ID NO: 82806 - DNA, 25 bp, Saccharomyces pastorianus
acacatttgattgctccgggttgga

SEQ ID NO: 82807 - DNA, 25 bp, Saccharomyces pastorianus
gatcggctatgttgtcgaagacttt

SEQ ID NO: 82808 - DNA, 25 bp, Saccharomyces pastorianus
actgggcgttgaggtgttcaatccc

SEQ ID NO: 82809 - DNA, 25 bp, Saccharomyces pastorianus
aatccctccaagcacggtcataaat

SEQ ID NO: 82810 - DNA, 25 bp, Saccharomyces pastorianus
ggacagccaccaacattgcagtttg

SEQ ID NO: 82811 - DNA, 25 bp, Saccharomyces pastorianus
agtcactttcgaaacctctttgaag

SEQ ID NO: 82812 - DNA, 25 bp, Saccharomyces pastorianus
tctgtcacctggcatgctgttaaga

SEQ ID NO: 82813 - DNA, 25 bp, Saccharomyces pastorianus
caacggagacatcgccatggaagat

SEQ ID NO: 82814 - DNA, 25 bp, Saccharomyces pastorianus
tcagtcttagttcttggtgcaggcc

SEQ ID NO: 82815 - DNA, 25 bp, Saccharomyces pastorianus
gggtccaaaacctgtgccattccaa

SEQ ID NO: 82816 - DNA, 25 bp, Saccharomyces pastorianus
gaagaagttgttcgtgccatccaca

SEQ ID NO: 82817 - DNA, 25 bp, Saccharomyces pastorianus
agttatgactggttcgatcggctat

SEQ ID NO: 82818 - DNA, 25 bp, Saccharomyces pastorianus
aaacgatccctgtccatggatgaaa

SEQ ID NO: 82819 - DNA, 25 bp, Saccharomyces pastorianus
agacttggcaattttaccgtccaga

SEQ ID NO: 82820 - DNA, 25 bp, Saccharomyces pastorianus
ttgtcttccagagcctttttattta

SEQ ID NO: 82821 - DNA, 25 bp, Saccharomyces pastorianus
ctttgatattttcttggccatgctt

SEQ ID NO: 82822 - DNA, 25 bp, Saccharomyces pastorianus
atcctttacttctggctcaagagca

SEQ ID NO: 82823 - DNA, 25 bp, Saccharomyces pastorianus
agcaatgcctcattcttggctgctg

SEQ ID NO: 82824 - DNA, 25 bp, Saccharomyces pastorianus
gatatctttgcttccagcaatgcct

SEQ ID NO: 82825 - DNA, 25 bp, Saccharomyces pastorianus
aatcggttttttcagctctaggtag

SEQ ID NO: 82826 - DNA, 25 bp, Saccharomyces pastorianus
ggccatgctttgctttagacgatat

SEQ ID NO: 82827 - DNA, 25 bp, Saccharomyces pastorianus
atagagttggccagtttgtcttcca

SEQ ID NO: 82828 - DNA, 25 bp, Saccharomyces pastorianus
catccgattgtctagcagctcttga

SEQ ID NO: 82829 - DNA, 25 bp, Saccharomyces pastorianus
gatgcgatctataatgcggtcaaat

SEQ ID NO: 82830 - DNA, 25 bp, Saccharomyces pastorianus
aagagaagccgttgtggtgcgatta

SEQ ID NO: 82831 - DNA, 25 bp, Saccharomyces pastorianus
aaactaacacttgtccactatgtaa

SEQ ID NO: 82832 - DNA, 25 bp, Saccharomyces pastorianus
gatttcctagtctgctattcatgaa

SEQ ID NO: 82833 - DNA, 25 bp, Saccharomyces pastorianus
tattcatgaatttgcgttctgtggg

SEQ ID NO: 82834 - DNA, 25 bp, Saccharomyces pastorianus
cagaggttgctctaagatgcgatct

SEQ ID NO: 82835 - DNA, 25 bp, Saccharomyces pastorianus
gttgtttgtagatttcctagtctgc

SEQ ID NO: 82836 - DNA, 25 bp, Saccharomyces pastorianus
tcaagagcacgacggccgcagtaag

SEQ ID NO: 82837 - DNA, 25 bp, Saccharomyces pastorianus
acacaacaaagaaccgacgtcgtca

SEQ ID NO: 82838 - DNA, 25 bp, Saccharomyces pastorianus
gtgcgattattgagaccatgttata

SEQ ID NO: 82839 - DNA, 25 bp, Saccharomyces pastorianus
ggccgcagtaagcacaaatttcaga

SEQ ID NO: 82840 - DNA, 25 bp, Saccharomyces pastorianus
gtgcatattaaactccagggacttc

SEQ ID NO: 82841 - DNA, 25 bp, Saccharomyces pastorianus
ggcacgacctccagagggtgattca

SEQ ID NO: 82842 - DNA, 25 bp, Saccharomyces pastorianus
tagcgatgcggcagttgttcctgaa

SEQ ID NO: 82843 - DNA, 25 bp, Saccharomyces pastorianus
gaagtggttttgctggtacctacga

SEQ ID NO: 82844 - DNA, 25 bp, Saccharomyces pastorianus
agcagtgttggtcacatcctactat

SEQ ID NO: 82845 - DNA, 25 bp, Saccharomyces pastorianus
gattatggtcttgtgtaaaacggct

SEQ ID NO: 82846 - DNA, 25 bp, Saccharomyces pastorianus
gagtacgccgctgatgaagtggttt

SEQ ID NO: 82847 - DNA, 25 bp, Saccharomyces pastorianus
gtacctacgagccacactgatggat

SEQ ID NO: 82848 - DNA, 25 bp, Saccharomyces pastorianus
aagccattgaggatgcctttcgcaa

SEQ ID NO: 82849 - DNA, 25 bp, Saccharomyces pastorianus
acggctaggtaaatttcagtgcata

SEQ ID NO: 82850 - DNA, 25 bp, Saccharomyces pastorianus
gtcgatacaaggactgcccataaag

SEQ ID NO: 82851 - DNA, 25 bp, Saccharomyces pastorianus
agaacttaataccagccacgcagag

SEQ ID NO: 82852 - DNA, 25 bp, Saccharomyces pastorianus
gaggctgctattatcgaagatccaa

SEQ ID NO: 82853 - DNA, 25 bp, Saccharomyces pastorianus
ggccatttgccgcaccaaaattgat

SEQ ID NO: 82854 - DNA, 25 bp, Saccharomyces pastorianus
ccaattgtggccgagtgtgctgttg

SEQ ID NO: 82855 - DNA, 25 bp, Saccharomyces pastorianus
acgatgtggtgaacgtctctggtca

SEQ ID NO: 82856 - DNA, 25 bp, Saccharomyces pastorianus
tggtccaccgcaacagatgatgaat

SEQ ID NO: 82857 - DNA, 25 bp, Saccharomyces pastorianus
gcagttgctgcatttgtggtgttga

SEQ ID NO: 82858 - DNA, 25 bp, Saccharomyces pastorianus
tacattgtcaaaccctggcattgtt

SEQ ID NO: 82859 - DNA, 25 bp, Saccharomyces pastorianus
gacacttatttgaacccttaccctg

SEQ ID NO: 82860 - DNA, 25 bp, Saccharomyces pastorianus
ctggctactatttcactggtgatgg

SEQ ID NO: 82861 - DNA, 25 bp, Saccharomyces pastorianus
gttcttgaccctaacactggtgaag

SEQ ID NO: 82862 - DNA, 25 bp, Saccharomyces pastorianus
tgctagtgctgggtacatggtcttt

SEQ ID NO: 82863 - DNA, 25 bp, Saccharomyces pastorianus
tgtggctcacgggtttgccgcaaga

SEQ ID NO: 82864 - DNA, 25 bp, Saccharomyces pastorianus
aagtttgccgtccaacacattagtg

SEQ ID NO: 82865 - DNA, 25 bp, Saccharomyces pastorianus
caattgatcgtgatgcctggtttca

SEQ ID NO: 82866 - DNA, 25 bp, Saccharomyces pastorianus
agacctcttcagtggtgtggctcac

SEQ ID NO: 82867 - DNA, 25 bp, Saccharomyces pastorianus
aacggccgacaaatttgctagtgct

SEQ ID NO: 82868 - DNA, 25 bp, Saccharomyces pastorianus
catggtctttgttcccgatatttta

SEQ ID NO: 82869 - DNA, 25 bp, Saccharomyces pastorianus
atccatctttcgtcagcatcgagga

SEQ ID NO: 82870 - DNA, 25 bp, Saccharomyces pastorianus
gaagaggatcacatctttccggcaa

SEQ ID NO: 82871 - DNA, 25 bp, Saccharomyces pastorianus
agacattctcctgaagtcaccaaga

SEQ ID NO: 82872 - DNA, 25 bp, Saccharomyces pastorianus
ggataatcacgctacttaccagtta

SEQ ID NO: 82873 - DNA, 25 bp, Saccharomyces pastorianus
accgttggtatttgtagcttctaag

SEQ ID NO: 82874 - DNA, 25 bp, Saccharomyces pastorianus
gaagctgctcttgatcctggaaaaa

SEQ ID NO: 82875 - DNA, 25 bp, Saccharomyces pastorianus
agaatcattctcctacttagtctcg

SEQ ID NO: 82876 - DNA, 25 bp, Saccharomyces pastorianus
gtggcactatgctcttttacgttaa

SEQ ID NO: 82877 - DNA, 25 bp, Saccharomyces pastorianus
taacatacgattccagcgacccaga

SEQ ID NO: 82878 - DNA, 25 bp, Saccharomyces pastorianus
gatggctaagttccctcaatgaatt

SEQ ID NO: 82879 - DNA, 25 bp, Saccharomyces pastorianus
ggagtattctccgacaatcaaacca

SEQ ID NO: 82880 - DNA, 25 bp, Saccharomyces pastorianus
ttcttgggcagatctttctcggagg

SEQ ID NO: 82881 - DNA, 25 bp, Saccharomyces pastorianus
acggctctcatttttgggtccactg

SEQ ID NO: 82882 - DNA, 25 bp, Saccharomyces pastorianus
aaagctctttgctagaggccttctt

SEQ ID NO: 82883 - DNA, 25 bp, Saccharomyces pastorianus
agacgagctatttgtgaaccaccca

SEQ ID NO: 82884 - DNA, 25 bp, Saccharomyces pastorianus
aatcagactggatttacccacccct

SEQ ID NO: 82885 - DNA, 25 bp, Saccharomyces pastorianus
ctgatgggtggcagtacgtcctgta

SEQ ID NO: 82886 - DNA, 25 bp, Saccharomyces pastorianus
ttcatcaccgcaaataactacccga

SEQ ID NO: 82887 - DNA, 25 bp, Saccharomyces pastorianus
cacactagtatttagaagtccgcta

SEQ ID NO: 82888 - DNA, 25 bp, Saccharomyces pastorianus
tgttgttcaacacactagtatttag

SEQ ID NO: 82889 - DNA, 25 bp, Saccharomyces pastorianus
gaagtccgctatttttgttttcaat

SEQ ID NO: 82890 - DNA, 25 bp, Saccharomyces pastorianus
gtcctgtatggtcggtatgaattca

SEQ ID NO: 82891 - DNA, 25 bp, Saccharomyces pastorianus
gcagtacgtcctgtatggtcggtat

SEQ ID NO: 82892 - DNA, 25 bp, Saccharomyces pastorianus
tacccgaatcgtttctttggtcatt

SEQ ID NO: 82893 - DNA, 25 bp, Saccharomyces pastorianus
gtttctttggtcattgtgttgttca

SEQ ID NO: 82894 - DNA, 25 bp, Saccharomyces pastorianus
gaaatctcttggtatactgatgggt

SEQ ID NO: 82895 - DNA, 25 bp, Saccharomyces pastorianus
acgcttcagaagctcgaatcaaggc

SEQ ID NO: 82896 - DNA, 25 bp, Saccharomyces pastorianus
agagcagccacatcaacagggcaat

SEQ ID NO: 82897 - DNA, 25 bp, Saccharomyces pastorianus
atatctcttcactgattgccatgga

SEQ ID NO: 82898 - DNA, 25 bp, Saccharomyces pastorianus
gattgccatggaaaccccagagcag

SEQ ID NO: 82899 - DNA, 25 bp, Saccharomyces pastorianus
gacagtattttcaatattctgcaga

SEQ ID NO: 82900 - DNA, 25 bp, Saccharomyces pastorianus
gggcaatgaactaacggcaactcca

SEQ ID NO: 82901 - DNA, 25 bp, Saccharomyces pastorianus
gttctattgcccaatttgacaggaa

SEQ ID NO: 82902 - DNA, 25 bp, Saccharomyces pastorianus
tcagcccaaactagaatcgctctac

SEQ ID NO: 82903 - DNA, 25 bp, Saccharomyces pastorianus
agaaccttttactacaccttgacag

SEQ ID NO: 82904 - DNA, 25 bp, Saccharomyces pastorianus
acacttttatagagaccgcattaga

SEQ ID NO: 82905 - DNA, 25 bp, Saccharomyces pastorianus
agacggaagctcgatgctaacgctt

SEQ ID NO: 82906 - DNA, 25 bp, Saccharomyces pastorianus
aagacgtttccggtggctgcggatc

SEQ ID NO: 82907 - DNA, 25 bp, Saccharomyces pastorianus
tctgtgaagcatgtccggtggccaa

SEQ ID NO: 82908 - DNA, 25 bp, Saccharomyces pastorianus
gacgggctcaaagctttggtactca

SEQ ID NO: 82909 - DNA, 25 bp, Saccharomyces pastorianus
gtggccaaggattctgacgggctca

SEQ ID NO: 82910 - DNA, 25 bp, Saccharomyces pastorianus
gctgcggatccatgtttgctatcaa

SEQ ID NO: 82911 - DNA, 25 bp, Saccharomyces pastorianus
gagggacgatatttccagatggcat

SEQ ID NO: 82912 - DNA, 25 bp, Saccharomyces pastorianus
gaccatgctacgttctatatctgtg

SEQ ID NO: 82913 - DNA, 25 bp, Saccharomyces pastorianus
cagatggcaatgactccggaggaga

SEQ ID NO: 82914 - DNA, 25 bp, Saccharomyces pastorianus
atgtaaagtgcaagacgtttccggt

SEQ ID NO: 82915 - DNA, 25 bp, Saccharomyces pastorianus
tttggtactcaacgcagatggcaat

SEQ ID NO: 82916 - DNA, 25 bp, Saccharomyces pastorianus
atggcatggcctacaattgatcact

SEQ ID NO: 82917 - DNA, 25 bp, Saccharomyces pastorianus
gttcttgtaatctggaaagccgcat

SEQ ID NO: 82918 - DNA, 25 bp, Saccharomyces pastorianus
caatccggaaatgtgtctcagcaga

SEQ ID NO: 82919 - DNA, 25 bp, Saccharomyces pastorianus
gaggccaaacgcaaagttcttgtaa

SEQ ID NO: 82920 - DNA, 25 bp, Saccharomyces pastorianus
tcagcagaggcatttccctgtacac

SEQ ID NO: 82921 - DNA, 25 bp, Saccharomyces pastorianus
atggcccttatgcttgtgagaatcg

SEQ ID NO: 82922 - DNA, 25 bp, Saccharomyces pastorianus
tttcaggccttcgaactttttactg

SEQ ID NO: 82923 - DNA, 25 bp, Saccharomyces pastorianus
gcattccagtctcttcaggatggta

SEQ ID NO: 82924 - DNA, 25 bp, Saccharomyces pastorianus
atacgatggcgttgtggaagtttca

SEQ ID NO: 82925 - DNA, 25 bp, Saccharomyces pastorianus
atctgtgctcattgctctcttgaac

SEQ ID NO: 82926 - DNA, 25 bp, Saccharomyces pastorianus
ttttactgaccatctcaatccggaa

SEQ ID NO: 82927 - DNA, 25 bp, Saccharomyces pastorianus
aggatggtacgtgccacgggaccat

SEQ ID NO: 82928 - DNA, 25 bp, Saccharomyces pastorianus
aggcgaacggtatccatgctttaca

SEQ ID NO: 82929 - DNA, 25 bp, Saccharomyces pastorianus
tggcacgtaccatcctgaagagact

SEQ ID NO: 82930 - DNA, 25 bp, Saccharomyces pastorianus
tgaaacttccacaacgccatcgtat

SEQ ID NO: 82931 - DNA, 25 bp, Saccharomyces pastorianus
gagcaatgagcacagatggtcccgt

SEQ ID NO: 82932 - DNA, 25 bp, Saccharomyces pastorianus
gattctcacaagcataagggccatg

SEQ ID NO: 82933 - DNA, 25 bp, Saccharomyces pastorianus
gaatgcggctttccagattacaaga

SEQ ID NO: 82934 - DNA, 25 bp, Saccharomyces pastorianus
gattacaagaactttgcgtttggcc

SEQ ID NO: 82935 - DNA, 25 bp, Saccharomyces pastorianus
gctgagacacatttccggattgaga

SEQ ID NO: 82936 - DNA, 25 bp, Saccharomyces pastorianus
tttggcctctacaacgattctcaca

SEQ ID NO: 82937 - DNA, 25 bp, Saccharomyces pastorianus
gggaaatgcctctgctgagacacat

SEQ ID NO: 82938 - DNA, 25 bp, Saccharomyces pastorianus
gtatggtttattccctcttgcaaga

SEQ ID NO: 82939 - DNA, 25 bp, Saccharomyces pastorianus
aactaccatttttgtactcatccca

SEQ ID NO: 82940 - DNA, 25 bp, Saccharomyces pastorianus
acaggtcgagggtctaatgtcctta

SEQ ID NO: 82941 - DNA, 25 bp, Saccharomyces pastorianus
gtgaggtacacttcccaacatgagt

SEQ ID NO: 82942 - DNA, 25 bp, Saccharomyces pastorianus
gacaatgttacgcactactagacta

SEQ ID NO: 82943 - DNA, 25 bp, Saccharomyces pastorianus
agatcctatgggtgacggctggcta

SEQ ID NO: 82944 - DNA, 25 bp, Saccharomyces pastorianus
ggacgctacctatgttgagttgcca

SEQ ID NO: 82945 - DNA, 25 bp, Saccharomyces pastorianus
acaagactgcctttgtcggaattac

SEQ ID NO: 82946 - DNA, 25 bp, Saccharomyces pastorianus
gcctgccgatggtaccgtagaggaa

SEQ ID NO: 82947 - DNA, 25 bp, Saccharomyces pastorianus
aaaatacgccactgatgccttaggg

SEQ ID NO: 82948 - DNA, 25 bp, Saccharomyces pastorianus
gagattgcccaaggtgagtcgctag

SEQ ID NO: 82949 - DNA, 25 bp, Saccharomyces pastorianus
ttgagaaacagctccggcaatgccc

SEQ ID NO: 82950 - DNA, 25 bp, Saccharomyces pastorianus
gaactgcccagtcttcaaagcgatc

SEQ ID NO: 82951 - DNA, 25 bp, Saccharomyces pastorianus
aagtacctctcaaagctgaccaaga

SEQ ID NO: 82952 - DNA, 25 bp, Saccharomyces pastorianus
tcctcgtcatggttacacgtcttaa

SEQ ID NO: 82953 - DNA, 25 bp, Saccharomyces pastorianus
gatccggcaagaagttcccttggtt

SEQ ID NO: 82954 - DNA, 25 bp, Saccharomyces pastorianus
aagaggccagtgacctgattcgtga

SEQ ID NO: 82955 - DNA, 25 bp, Saccharomyces pastorianus
cattatgtttagacctccagtgcag

SEQ ID NO: 82956 - DNA, 25 bp, Saccharomyces pastorianus
agtctctgggtccattccttgaaaa

SEQ ID NO: 82957 - DNA, 25 bp, Saccharomyces pastorianus
aactgtttgaattatccggtcgcca

SEQ ID NO: 82958 - DNA, 25 bp, Saccharomyces pastorianus
attactggacgatgacgactcctcg

SEQ ID NO: 82959 - DNA, 25 bp, Saccharomyces pastorianus
aaagcgatcatcttgaggcactgaa

SEQ ID NO: 82960 - DNA, 25 bp, Saccharomyces pastorianus
tactacccgggcaaaatcttcgtct

SEQ ID NO: 82961 - DNA, 25 bp, Saccharomyces pastorianus
aagctccagctttgcgtgtcggtca

SEQ ID NO: 82962 - DNA, 25 bp, Saccharomyces pastorianus
tgtgttatatcactgtcctactccg

SEQ ID NO: 82963 - DNA, 25 bp, Saccharomyces pastorianus
acagaattgaactgtccccactcgt

SEQ ID NO: 82964 - DNA, 25 bp, Saccharomyces pastorianus
gtacgtcctcttcggtcttagcgaa

SEQ ID NO: 82965 - DNA, 25 bp, Saccharomyces pastorianus
ttagcgaatgcgtccagcgacagca

SEQ ID NO: 82966 - DNA, 25 bp, Saccharomyces pastorianus
aatatcgagattcaccaggtcacat

SEQ ID NO: 82967 - DNA, 25 bp, Saccharomyces pastorianus
acgataaagtgatcagcccgccggc

SEQ ID NO: 82968 - DNA, 25 bp, Saccharomyces pastorianus
atctctccagagtcgtccataatat

SEQ ID NO: 82969 - DNA, 25 bp, Saccharomyces pastorianus
accaccaattgtggccttgttacca

SEQ ID NO: 82970 - DNA, 25 bp, Saccharomyces pastorianus
gtcacatccatattaagctccagct

SEQ ID NO: 82971 - DNA, 25 bp, Saccharomyces pastorianus
aacgtggaccttttcatgatgtcta

SEQ ID NO: 82972 - DNA, 25 bp, Saccharomyces pastorianus
gatccagtcccacagtaagttgtta

SEQ ID NO: 82973 - DNA, 25 bp, Saccharomyces pastorianus
cgtctttttcgaaatgtctccattg

SEQ ID NO: 82974 - DNA, 25 bp, Saccharomyces pastorianus
gattgtccccaccagatatgagtac

SEQ ID NO: 82975 - DNA, 25 bp, Saccharomyces pastorianus
gacctcttgccggtggaagggacaa

SEQ ID NO: 82976 - DNA, 25 bp, Saccharomyces pastorianus
gttgtcattgagaccgcgcagttca

SEQ ID NO: 82977 - DNA, 25 bp, Saccharomyces pastorianus
tatccctggtatgttcgtctttttc

SEQ ID NO: 82978 - DNA, 25 bp, Saccharomyces pastorianus
acaggaacacacactttcaccagtt

SEQ ID NO: 82979 - DNA, 25 bp, Saccharomyces pastorianus
gaatcttcactttgcccctggaaaa

SEQ ID NO: 82980 - DNA, 25 bp, Saccharomyces pastorianus
aaggatcatccaaacacacttcacg

SEQ ID NO: 82981 - DNA, 25 bp, Saccharomyces pastorianus
gacgccaggtgttcccggacaggaa

SEQ ID NO: 82982 - DNA, 25 bp, Saccharomyces pastorianus
acttggtcgggcttcatcttgaatt

SEQ ID NO: 82983 - DNA, 25 bp, Saccharomyces pastorianus
aaaaggtcactgagcatcccacaga

SEQ ID NO: 82984 - DNA, 25 bp, Saccharomyces pastorianus
tcaagttcaatgacgaccccagact

SEQ ID NO: 82985 - DNA, 25 bp, Saccharomyces pastorianus
attcacattcaggttcgttctcttc

SEQ ID NO: 82986 - DNA, 25 bp, Saccharomyces pastorianus
atactatctttgctcagtcctttga

SEQ ID NO: 82987 - DNA, 25 bp, Saccharomyces pastorianus
caaagagcgctacggtttcatctgc

SEQ ID NO: 82988 - DNA, 25 bp, Saccharomyces pastorianus
atttctcggatcacactcatttaag

SEQ ID NO: 82989 - DNA, 25 bp, Saccharomyces pastorianus
ttcaagcattttttggccaagccca

SEQ ID NO: 82990 - DNA, 25 bp, Saccharomyces pastorianus
gagatcaacttcctctgtggattgt

SEQ ID NO: 82991 - DNA, 25 bp, Saccharomyces pastorianus
attatttcctgtgagacccatggcc

SEQ ID NO: 82992 - DNA, 25 bp, Saccharomyces pastorianus
tgcggccacagactatttctcggat

SEQ ID NO: 82993 - DNA, 25 bp, Saccharomyces pastorianus
aaagatagcacttctccaccatttg

SEQ ID NO: 82994 - DNA, 25 bp, Saccharomyces pastorianus
gcggatatcccaaatgctctgtcaa

SEQ ID NO: 82995 - DNA, 25 bp, Saccharomyces pastorianus
ggatctcatagtgggagcagacatg

SEQ ID NO: 82996 - DNA, 25 bp, Saccharomyces pastorianus
tggcagcagtgcacttgtacataat

SEQ ID NO: 82997 - DNA, 25 bp, Saccharomyces pastorianus
tgccaacttatattcaatgcctctt

SEQ ID NO: 82998 - DNA, 25 bp, Saccharomyces pastorianus
caatgcctcttatttaccttttttg

SEQ ID NO: 82999 - DNA, 25 bp, Saccharomyces pastorianus
caacgtgttattactcaacttccta

SEQ ID NO: 83000 - DNA, 25 bp, Saccharomyces pastorianus
caacaagcgagatgggcggatatcc

SEQ ID NO: 83001 - DNA, 25 bp, Saccharomyces pastorianus
tcaacttcctaataaatgccaactt

SEQ ID NO: 83002 - DNA, 25 bp, Saccharomyces pastorianus
acatggttgttttgatcgtcttaac

SEQ ID NO: 83003 - DNA, 25 bp, Saccharomyces pastorianus
gctctgtcaatattgaggtggatct

SEQ ID NO: 83004 - DNA, 25 bp, Saccharomyces pastorianus
tcgtcttaacccagtttcaacgtgt

SEQ ID NO: 83005 - DNA, 25 bp, Saccharomyces pastorianus
tgccaagccggatgcgaggacgcaa

SEQ ID NO: 83006 - DNA, 25 bp, Saccharomyces pastorianus
ggcactactgcagagattgaagacc

SEQ ID NO: 83007 - DNA, 25 bp, Saccharomyces pastorianus
ccctgaagagtatttggacgccaat

SEQ ID NO: 83008 - DNA, 25 bp, Saccharomyces pastorianus
gacgaataatgtcctacgaaaattg

SEQ ID NO: 83009 - DNA, 25 bp, Saccharomyces pastorianus
aaaacagtctgccaagccggatgcg

SEQ ID NO: 83010 - DNA, 25 bp, Saccharomyces pastorianus
gactctactgactgattcattacgt

SEQ ID NO: 83011 - DNA, 25 bp, Saccharomyces pastorianus
aacgtccttcgaatccctgaagagt

SEQ ID NO: 83012 - DNA, 25 bp, Saccharomyces pastorianus
ggatttcagaacacgatatatcgat

SEQ ID NO: 83013 - DNA, 25 bp, Saccharomyces pastorianus
aaggacctggtcattgtagatgaga

SEQ ID NO: 83014 - DNA, 25 bp, Saccharomyces pastorianus
atttggacgccaatgtttttagatt

SEQ ID NO: 83015 - DNA, 25 bp, Saccharomyces pastorianus
gatgacacaatgactctactgactg

SEQ ID NO: 83016 - DNA, 25 bp, Saccharomyces pastorianus
gcatcacagagcatcgcctgcggat

SEQ ID NO: 83017 - DNA, 25 bp, Saccharomyces pastorianus
tagtcaatcatcacacctcagcgat

SEQ ID NO: 83018 - DNA, 25 bp, Saccharomyces pastorianus
atcgcctgcggatgtgtccataaag

SEQ ID NO: 83019 - DNA, 25 bp, Saccharomyces pastorianus
agacatcttgctttcgcatcacaga

SEQ ID NO: 83020 - DNA, 25 bp, Saccharomyces pastorianus
gggtctgcaaaatgtaactctctct

SEQ ID NO: 83021 - DNA, 25 bp, Saccharomyces pastorianus
gattgcgaccttgttatcatggcat

SEQ ID NO: 83022 - DNA, 25 bp, Saccharomyces pastorianus
gatgccatcgagaggattgcgacct

SEQ ID NO: 83023 - DNA, 25 bp, Saccharomyces pastorianus
aaattatattcccacctacagacac

SEQ ID NO: 83024 - DNA, 25 bp, Saccharomyces pastorianus
gtgtccataaagtcgatactccaag

SEQ ID NO: 83025 - DNA, 25 bp, Saccharomyces pastorianus
accaacgttgaggaatctgtgtcga

SEQ ID NO: 83026 - DNA, 25 bp, Saccharomyces pastorianus
aattggcgacgtcgatggactgatc

SEQ ID NO: 83027 - DNA, 25 bp, Saccharomyces pastorianus
aacccactgttcgtccaacaagata

SEQ ID NO: 83028 - DNA, 25 bp, Saccharomyces pastorianus
gaacaaccggatctgcagtacgatt

SEQ ID NO: 83029 - DNA, 25 bp, Saccharomyces pastorianus
aaaagcaaacgagcacagtggccag

SEQ ID NO: 83030 - DNA, 25 bp, Saccharomyces pastorianus
tgaaggtgccagtggttctcacggc

SEQ ID NO: 83031 - DNA, 25 bp, Saccharomyces pastorianus
acgagccagataccacaacgggact

SEQ ID NO: 83032 - DNA, 25 bp, Saccharomyces pastorianus
acgggactccgcagacgggagcaat

SEQ ID NO: 83033 - DNA, 25 bp, Saccharomyces pastorianus
aagcggcttgctatggaacaggaaa

SEQ ID NO: 83034 - DNA, 25 bp, Saccharomyces pastorianus
caaatggttataccgtggccttgga

SEQ ID NO: 83035 - DNA, 25 bp, Saccharomyces pastorianus
gaccaggtttatgacaacccactgt

SEQ ID NO: 83036 - DNA, 25 bp, Saccharomyces pastorianus
aattctgggcgcagcaaagcgttca

SEQ ID NO: 83037 - DNA, 25 bp, Saccharomyces pastorianus
gacgtgtaggtaaagctcttgacaa

SEQ ID NO: 83038 - DNA, 25 bp, Saccharomyces pastorianus
aatggcgaatctggctccgaaacta

SEQ ID NO: 83039 - DNA, 25 bp, Saccharomyces pastorianus
tgagatttgctggtgtaccgccaat

SEQ ID NO: 83040 - DNA, 25 bp, Saccharomyces pastorianus
tacattatacgccaatacctgcttc

SEQ ID NO: 83041 - DNA, 25 bp, Saccharomyces pastorianus
tcgttagcgccttcaccaaaagtat

SEQ ID NO: 83042 - DNA, 25 bp, Saccharomyces pastorianus
ggcaatgatcaagccgctacagcat

SEQ ID NO: 83043 - DNA, 25 bp, Saccharomyces pastorianus
taccatgatgccgtttgggatcgaa

SEQ ID NO: 83044 - DNA, 25 bp, Saccharomyces pastorianus
aatcgtccaagatacagtgcggcat

SEQ ID NO: 83045 - DNA, 25 bp, Saccharomyces pastorianus
cagtataaacaacacctcctcagga

SEQ ID NO: 83046 - DNA, 25 bp, Saccharomyces pastorianus
agaagccggctgtgctacattatac

SEQ ID NO: 83047 - DNA, 25 bp, Saccharomyces pastorianus
ttgcagtcctcaaccatgacgttaa

SEQ ID NO: 83048 - DNA, 25 bp, Saccharomyces pastorianus
aaggtccaattctttgcagtcctca

SEQ ID NO: 83049 - DNA, 25 bp, Saccharomyces pastorianus
tgcactgatcattttggcgtactgt

SEQ ID NO: 83050 - DNA, 25 bp, Saccharomyces pastorianus
tagagtcacctacgttcatcattac

SEQ ID NO: 83051 - DNA, 25 bp, Saccharomyces pastorianus
gtatcatgcggttcgtcctatacgc

SEQ ID NO: 83052 - DNA, 25 bp, Saccharomyces pastorianus
taattggttgcttctggtacttctc

SEQ ID NO: 83053 - DNA, 25 bp, Saccharomyces pastorianus
ataacgctttggtgccagatccaga

SEQ ID NO: 83054 - DNA, 25 bp, Saccharomyces pastorianus
ttgcctgccttgtattttgcactga

SEQ ID NO: 83055 - DNA, 25 bp, Saccharomyces pastorianus
ggtacttctccccaatatcatttgg

SEQ ID NO: 83056 - DNA, 25 bp, Saccharomyces pastorianus
cgccggattcatggcacttgtaatt

SEQ ID NO: 83057 - DNA, 25 bp, Saccharomyces pastorianus
atggccacggtcgttatcttactga

SEQ ID NO: 83058 - DNA, 25 bp, Saccharomyces pastorianus
tgattacttagcttcctcagcatgg

SEQ ID NO: 83059 - DNA, 25 bp, Saccharomyces pastorianus
tggtccagatctaagtgcggccgta

SEQ ID NO: 83060 - DNA, 25 bp, Saccharomyces pastorianus
ttccatattcaccacgtttgtcgta

SEQ ID NO: 83061 - DNA, 25 bp, Saccharomyces pastorianus
gggcacgtcatctctatgagtttca

SEQ ID NO: 83062 - DNA, 25 bp, Saccharomyces pastorianus
aggactagctctgggcagcatcata

SEQ ID NO: 83063 - DNA, 25 bp, Saccharomyces pastorianus
atgctgtggaacctaggcgaccttt

SEQ ID NO: 83064 - DNA, 25 bp, Saccharomyces pastorianus
atacctctcatattcatgctgtgga

SEQ ID NO: 83065 - DNA, 25 bp, Saccharomyces pastorianus
aatggctccgtaatcgttgacttgt

SEQ ID NO: 83066 - DNA, 25 bp, Saccharomyces pastorianus
gccgcaataccactgttcttgatgt

SEQ ID NO: 83067 - DNA, 25 bp, Saccharomyces pastorianus
tcatctactcattgttgcgggtggc

SEQ ID NO: 83068 - DNA, 25 bp, Saccharomyces pastorianus
gcctttcgaggtcttatttgccaaa

SEQ ID NO: 83069 - DNA, 25 bp, Saccharomyces pastorianus
gaagcggccggtggattcactaata

SEQ ID NO: 83070 - DNA, 25 bp, Saccharomyces pastorianus
gtttttcctgtatttgcgtctgcca

SEQ ID NO: 83071 - DNA, 25 bp, Saccharomyces pastorianus
ggttttctacacatgctctaagggt

SEQ ID NO: 83072 - DNA, 25 bp, Saccharomyces pastorianus
tttcacaccgtcattcacagatgtt

SEQ ID NO: 83073 - DNA, 25 bp, Saccharomyces pastorianus
aagaagtttcctgtgctcatttgtg

SEQ ID NO: 83074 - DNA, 25 bp, Saccharomyces pastorianus
gtatcggagaactaccattcaccaa

SEQ ID NO: 83075 - DNA, 25 bp, Saccharomyces pastorianus
gatcatctggaaacgctgctaaagg

SEQ ID NO: 83076 - DNA, 25 bp, Saccharomyces pastorianus
accacgcatttgcactgggatccaa

SEQ ID NO: 83077 - DNA, 25 bp, Saccharomyces pastorianus
agtggcgacaccatatgggcggtca

SEQ ID NO: 83078 - DNA, 25 bp, Saccharomyces pastorianus
gaagtggaccctgaatacgtgagta

SEQ ID NO: 83079 - DNA, 25 bp, Saccharomyces pastorianus
gacaacgttgcactgttcttaaagc

SEQ ID NO: 83080 - DNA, 25 bp, Saccharomyces pastorianus
gtacaggccgtgtccaaatacatca

SEQ ID NO: 83081 - DNA, 25 bp, Saccharomyces pastorianus
agtaggtgtcctgttagatcatctg

SEQ ID NO: 83082 - DNA, 25 bp, Saccharomyces pastorianus
aatactctggaaaacctcgcgtgtt

SEQ ID NO: 83083 - DNA, 25 bp, Saccharomyces pastorianus
gagtgagcacggtattctaactact

SEQ ID NO: 83084 - DNA, 25 bp, Saccharomyces pastorianus
gaaggcaagtctcactgttacaatg

SEQ ID NO: 83085 - DNA, 25 bp, Saccharomyces pastorianus
attgcaagagcccaaatcccgatca

SEQ ID NO: 83086 - DNA, 25 bp, Saccharomyces pastorianus
ataccgggtctgtggccgtagacta

SEQ ID NO: 83087 - DNA, 25 bp, Saccharomyces pastorianus
ggaatacgcgcctcaatacggtgga

SEQ ID NO: 83088 - DNA, 25 bp, Saccharomyces pastorianus
gacttccctattgtcggtgttgcaa

SEQ ID NO: 83089 - DNA, 25 bp, Saccharomyces pastorianus
tggactgcagctcgtgggccaatac

SEQ ID NO: 83090 - DNA, 25 bp, Saccharomyces pastorianus
atcccgatcactgaaagagcccgta

SEQ ID NO: 83091 - DNA, 25 bp, Saccharomyces pastorianus
attgaattccaacgatgggcgcatc

SEQ ID NO: 83092 - DNA, 25 bp, Saccharomyces pastorianus
gcccactgggttcgagctcaaacaa

SEQ ID NO: 83093 - DNA, 25 bp, Saccharomyces pastorianus
gagatggttttgtccaccttagatt

SEQ ID NO: 83094 - DNA, 25 bp, Saccharomyces pastorianus
gattagatggttccacgcaagtgaa

SEQ ID NO: 83095 - DNA, 25 bp, Saccharomyces pastorianus
ttttccttattcactcaagtcctgg

SEQ ID NO: 83096 - DNA, 25 bp, Saccharomyces pastorianus
ggaaaagattcatcaactggccaaa

SEQ ID NO: 83097 - DNA, 25 bp, Saccharomyces pastorianus
aaagttttaacccacatgatgacag

SEQ ID NO: 83098 - DNA, 25 bp, Saccharomyces pastorianus
acagacaagctgctgatagggcaca

SEQ ID NO: 83099 - DNA, 25 bp, Saccharomyces pastorianus
aaggatattcccattttcatcttat

SEQ ID NO: 83100 - DNA, 25 bp, Saccharomyces pastorianus
attcggtattaatttggtgtgcgca

SEQ ID NO: 83101 - DNA, 25 bp, Saccharomyces pastorianus
tcaagtcctggatattctagagatg

SEQ ID NO: 83102 - DNA, 25 bp, Saccharomyces pastorianus
atgctgcaatttcccgaacacgtta

SEQ ID NO: 83103 - DNA, 25 bp, Saccharomyces pastorianus
atagggcacatcgtgtgggacaaac

SEQ ID NO: 83104 - DNA, 25 bp, Saccharomyces pastorianus
aactcgatatatttctgggcttact

SEQ ID NO: 83105 - DNA, 25 bp, Saccharomyces pastorianus
ttgatcgagtccgtgcccattttag

SEQ ID NO: 83106 - DNA, 25 bp, Saccharomyces pastorianus
gaaaatatttatctccacgctggcc

SEQ ID NO: 83107 - DNA, 25 bp, Saccharomyces pastorianus
gggcttactatttcccattcaagtt

SEQ ID NO: 83108 - DNA, 25 bp, Saccharomyces pastorianus
aagtacatgttaggcctgtcggttc

SEQ ID NO: 83109 - DNA, 25 bp, Saccharomyces pastorianus
tggttatatcttttttcccacttat

SEQ ID NO: 83110 - DNA, 25 bp, Saccharomyces pastorianus
taaccttgatcatccaatggtccct

SEQ ID NO: 83111 - DNA, 25 bp, Saccharomyces pastorianus
gcgggctttgccatttctacaaata

SEQ ID NO: 83112 - DNA, 25 bp, Saccharomyces pastorianus
gccctattgggcttttcattgccat

SEQ ID NO: 83113 - DNA, 25 bp, Saccharomyces pastorianus
atatgcctcatttggtttcttggcc

SEQ ID NO: 83114 - DNA, 25 bp, Saccharomyces pastorianus
ggttctttttgtgctgttggttata

SEQ ID NO: 83115 - DNA, 25 bp, Saccharomyces pastorianus
ggaatttgaacagggcctctcggtc

SEQ ID NO: 83116 - DNA, 25 bp, Saccharomyces pastorianus
actgcgtgattattcttgtgctgat

SEQ ID NO: 83117 - DNA, 25 bp, Saccharomyces pastorianus
aaattcctgatacggcggttgacaa

SEQ ID NO: 83118 - DNA, 25 bp, Saccharomyces pastorianus
aatgtgcgcccaatgatgaactgat

SEQ ID NO: 83119 - DNA, 25 bp, Saccharomyces pastorianus
cttcgacgcatactccatacaagga

SEQ ID NO: 83120 - DNA, 25 bp, Saccharomyces pastorianus
gcaatcgcagttacagtcacagtca

SEQ ID NO: 83121 - DNA, 25 bp, Saccharomyces pastorianus
gaacgactcgctgctggttgattta

SEQ ID NO: 83122 - DNA, 25 bp, Saccharomyces pastorianus
tataggttccaacagcaggtggcaa

SEQ ID NO: 83123 - DNA, 25 bp, Saccharomyces pastorianus
tagagcaagattcccacttgggcgc

SEQ ID NO: 83124 - DNA, 25 bp, Saccharomyces pastorianus
ggcgcactgtctcagtctattggga

SEQ ID NO: 83125 - DNA, 25 bp, Saccharomyces pastorianus
aggactcatgacatttcgctggacc

SEQ ID NO: 83126 - DNA, 25 bp, Saccharomyces pastorianus
gttcttagcgtctatggccggtgta

SEQ ID NO: 83127 - DNA, 25 bp, Saccharomyces pastorianus
gtggcaattcactttgttcttagcg

SEQ ID NO: 83128 - DNA, 25 bp, Saccharomyces pastorianus
gaagaactatcgtcattccaagaag

SEQ ID NO: 83129 - DNA, 25 bp, Saccharomyces pastorianus
gatttaagacgccaagctcacgaac

SEQ ID NO: 83130 - DNA, 25 bp, Saccharomyces pastorianus
acgaactttatttcacttcagatta

SEQ ID NO: 83131 - DNA, 25 bp, Saccharomyces pastorianus
cttcagattatgtcaagggcttcca

SEQ ID NO: 83132 - DNA, 25 bp, Saccharomyces pastorianus
gcgcatttaccttctacgaacttta

SEQ ID NO: 83133 - DNA, 25 bp, Saccharomyces pastorianus
agggcttccatagggttattttgca

SEQ ID NO: 83134 - DNA, 25 bp, Saccharomyces pastorianus
atggccggtgtaggcgcatttacct

SEQ ID NO: 83135 - DNA, 25 bp, Saccharomyces pastorianus
tgtgaaattagtcctcaaccccaga

SEQ ID NO: 83136 - DNA, 25 bp, Saccharomyces pastorianus
tcaaccccagagcatttagtgcaga

SEQ ID NO: 83137 - DNA, 25 bp, Saccharomyces pastorianus
tggtggcttttacttgatgaatcgc

SEQ ID NO: 83138 - DNA, 25 bp, Saccharomyces pastorianus
tgtgggcaacagtacggcaattacc

SEQ ID NO: 83139 - DNA, 25 bp, Saccharomyces pastorianus
ttaggaaagcccttaactcgctctg

SEQ ID NO: 83140 - DNA, 25 bp, Saccharomyces pastorianus
tgtcggtattacaagcatgcttctt

SEQ ID NO: 83141 - DNA, 25 bp, Saccharomyces pastorianus
tgctggcatagttgctggtggcttt

SEQ ID NO: 83142 - DNA, 25 bp, Saccharomyces pastorianus
gcagctgtcaaacaagagggtccct

SEQ ID NO: 83143 - DNA, 25 bp, Saccharomyces pastorianus
taactcgctctgtagggttaggcgg

SEQ ID NO: 83144 - DNA, 25 bp, Saccharomyces pastorianus
gagggtcccttggaaccaaatgtgg

SEQ ID NO: 83145 - DNA, 25 bp, Saccharomyces pastorianus
gcttctttgtgaatggttgcggtac

SEQ ID NO: 83146 - DNA, 25 bp, Saccharomyces pastorianus
gtccccttatggaggtttaatgtcg

SEQ ID NO: 83147 - DNA, 25 bp, Saccharomyces pastorianus
gaatcgccagccttctaagttgata

SEQ ID NO: 83148 - DNA, 25 bp, Saccharomyces pastorianus
gattttgatattactgctcctgatg

SEQ ID NO: 83149 - DNA, 25 bp, Saccharomyces pastorianus
atcagtttaccagcattcagcaaag

SEQ ID NO: 83150 - DNA, 25 bp, Saccharomyces pastorianus
gcaccagttgctatcagtttaccag

SEQ ID NO: 83151 - DNA, 25 bp, Saccharomyces pastorianus
attccctggctgtgggttaccaagt

SEQ ID NO: 83152 - DNA, 25 bp, Saccharomyces pastorianus
atcattgccgttataagtattgccc

SEQ ID NO: 83153 - DNA, 25 bp, Saccharomyces pastorianus
taccgtcaattccaccgaatcaagg

SEQ ID NO: 83154 - DNA, 25 bp, Saccharomyces pastorianus
tctaccctctttcttcattgtttta

SEQ ID NO: 83155 - DNA, 25 bp, Saccharomyces pastorianus
agtggctgcatcttccagttatgca

SEQ ID NO: 83156 - DNA, 25 bp, Saccharomyces pastorianus
ggcgttggtcaattcagtggctgca

SEQ ID NO: 83157 - DNA, 25 bp, Saccharomyces pastorianus
ttattgccaataacgccgtggagga

SEQ ID NO: 83158 - DNA, 25 bp, Saccharomyces pastorianus
agtattgcccaagttctacttattc

SEQ ID NO: 83159 - DNA, 25 bp, Saccharomyces pastorianus
aggtggtgctccaggcggtttccca

SEQ ID NO: 83160 - DNA, 25 bp, Saccharomyces pastorianus
actggtaagtctaacaagatcacta

SEQ ID NO: 83161 - DNA, 25 bp, Saccharomyces pastorianus
gagactatttcttggttagacagca

SEQ ID NO: 83162 - DNA, 25 bp, Saccharomyces pastorianus
gatggttgctgaagccgaaaaattc

SEQ ID NO: 83163 - DNA, 25 bp, Saccharomyces pastorianus
ggacaccgtcaccaagaaggctgaa

SEQ ID NO: 83164 - DNA, 25 bp, Saccharomyces pastorianus
agatcactattaccaacgacaaggg

SEQ ID NO: 83165 - DNA, 25 bp, Saccharomyces pastorianus
gaatctcaaagaattgcttccaaga

SEQ ID NO: 83166 - DNA, 25 bp, Saccharomyces pastorianus
gttagacagcaacactactgccagc

SEQ ID NO: 83167 - DNA, 25 bp, Saccharomyces pastorianus
gaacaatctgacaaggacaccgtca

SEQ ID NO: 83168 - DNA, 25 bp, Saccharomyces pastorianus
ctactgccagcaaggaagaattcga

SEQ ID NO: 83169 - DNA, 25 bp, Saccharomyces pastorianus
tattttgaatgtttccgccgtcgaa

SEQ ID NO: 83170 - DNA, 25 bp, Saccharomyces pastorianus
gaaaacggtattcgaaggattcata

SEQ ID NO: 83171 - DNA, 25 bp, Saccharomyces pastorianus
gtaccaccacccaagtcgaaaatca

SEQ ID NO: 83172 - DNA, 25 bp, Saccharomyces pastorianus
aatctttcagtgtcagtgaaagcga

SEQ ID NO: 83173 - DNA, 25 bp, Saccharomyces pastorianus
gaaagcgacaaaagatggagtggtt

SEQ ID NO: 83174 - DNA, 25 bp, Saccharomyces pastorianus
cggtattcgaaggattcatagcagc

SEQ ID NO: 83175 - DNA, 25 bp, Saccharomyces pastorianus
tttcagtgtcagtgaaagcgacaaa

SEQ ID NO: 83176 - DNA, 25 bp, Saccharomyces pastorianus
ttagcgtcgaaaacggtattcgaag

SEQ ID NO: 83177 - DNA, 25 bp, Saccharomyces pastorianus
aggattcatagcagcttgattctta

SEQ ID NO: 83178 - DNA, 25 bp, Saccharomyces pastorianus
ccaccacccaagtcgaaaatcaaga

SEQ ID NO: 83179 - DNA, 25 bp, Saccharomyces pastorianus
cacccaagtcgaaaatcaagacgtg

SEQ ID NO: 83180 - DNA, 25 bp, Saccharomyces pastorianus
aacggtattcgaaggattcatagca

SEQ ID NO: 83181 - DNA, 25 bp, Saccharomyces pastorianus
gtcattgaccttggcacccaagtaa

SEQ ID NO: 83182 - DNA, 25 bp, Saccharomyces pastorianus
ccttcttgtccaaaccgtaagcaat

SEQ ID NO: 83183 - DNA, 25 bp, Saccharomyces pastorianus
accgatcaaacgcttagcgtcgaaa

SEQ ID NO: 83184 - DNA, 25 bp, Saccharomyces pastorianus
catccttggtagcttgtctttgaga

SEQ ID NO: 83185 - DNA, 25 bp, Saccharomyces pastorianus
tacgcaagacattcaaaccagcaat

SEQ ID NO: 83186 - DNA, 25 bp, Saccharomyces pastorianus
gacgacagcgtcattgaccttggca

SEQ ID NO: 83187 - DNA, 25 bp, Saccharomyces pastorianus
aacttgaatttgtggcttaccgtca

SEQ ID NO: 83188 - DNA, 25 bp, Saccharomyces pastorianus
gcagcggcggtaggttcgttaataa

SEQ ID NO: 83189 - DNA, 25 bp, Saccharomyces pastorianus
aatcgttgaagtaagctgggacagt

SEQ ID NO: 83190 - DNA, 25 bp, Saccharomyces pastorianus
atcaagacgtgttcttccttaccct

SEQ ID NO: 83191 - DNA, 25 bp, Saccharomyces pastorianus
cttaccgtcaacatcgatcaacttg

SEQ ID NO: 83192 - DNA, 25 bp, Saccharomyces pastorianus
tcatccttacgctcaaatgtcgtcg

SEQ ID NO: 83193 - DNA, 25 bp, Saccharomyces pastorianus
agtttgatttcaatgttcccgtggt

SEQ ID NO: 83194 - DNA, 25 bp, Saccharomyces pastorianus
aatgtcgtcgtagctgaaacctcac

SEQ ID NO: 83195 - DNA, 25 bp, Saccharomyces pastorianus
aaaatttcaccatctgcgccaagca

SEQ ID NO: 83196 - DNA, 25 bp, Saccharomyces pastorianus
gttcccgtggtgtctaagcagctag

SEQ ID NO: 83197 - DNA, 25 bp, Saccharomyces pastorianus
gaacgcaccatctgcatcatcaaag

SEQ ID NO: 83198 - DNA, 25 bp, Saccharomyces pastorianus
aggtaaacatatcagcgccccaatt

SEQ ID NO: 83199 - DNA, 25 bp, Saccharomyces pastorianus
gcgccccaattgataacgacttttc

SEQ ID NO: 83200 - DNA, 25 bp, Saccharomyces pastorianus
aaatcacggtccaatctttcacaag

SEQ ID NO: 83201 - DNA, 25 bp, Saccharomyces pastorianus
ggaattcaattttaccaacctacag

SEQ ID NO: 83202 - DNA, 25 bp, Saccharomyces pastorianus
cagatctttcggttactcctcaaaa

SEQ ID NO: 83203 - DNA, 25 bp, Saccharomyces pastorianus
gacgcctctgaagctgttaattctc

SEQ ID NO: 83204 - DNA, 25 bp, Saccharomyces pastorianus
gggtaaagccactattgacattcta

SEQ ID NO: 83205 - DNA, 25 bp, Saccharomyces pastorianus
ggtgctgaacgtaagtgcttccaca

SEQ ID NO: 83206 - DNA, 25 bp, Saccharomyces pastorianus
gaagctacctttagagacgcctctg

SEQ ID NO: 83207 - DNA, 25 bp, Saccharomyces pastorianus
aattgttctcgctgttacttgtggc

SEQ ID NO: 83208 - DNA, 25 bp, Saccharomyces pastorianus
tccttgcgtctgattcgggtgaaca

SEQ ID NO: 83209 - DNA, 25 bp, Saccharomyces pastorianus
taaccacctggttgttcatcagaaa

SEQ ID NO: 83210 - DNA, 25 bp, Saccharomyces pastorianus
aaaatctgtattcagcccgaagctg

SEQ ID NO: 83211 - DNA, 25 bp, Saccharomyces pastorianus
taacgtcctaaactccaagatcggc

SEQ ID NO: 83212 - DNA, 25 bp, Saccharomyces pastorianus
tttgcctgctgtctagttttaccag

SEQ ID NO: 83213 - DNA, 25 bp, Saccharomyces pastorianus
gtggtgatttaactttccttgcgtc

SEQ ID NO: 83214 - DNA, 25 bp, Saccharomyces pastorianus
ggtcgatgaggcagaacagcagcaa

SEQ ID NO: 83215 - DNA, 25 bp, Saccharomyces pastorianus
aactctgcggttgagttgaccttag

SEQ ID NO: 83216 - DNA, 25 bp, Saccharomyces pastorianus
actgccgaatacttagtcgcttcta

SEQ ID NO: 83217 - DNA, 25 bp, Saccharomyces pastorianus
atgtgtggtctgttgttattccgcc

SEQ ID NO: 83218 - DNA, 25 bp, Saccharomyces pastorianus
gattagctattaactgctccgatag

SEQ ID NO: 83219 - DNA, 25 bp, Saccharomyces pastorianus
ataacttgcttgtagaacggttcac

SEQ ID NO: 83220 - DNA, 25 bp, Saccharomyces pastorianus
aagtggagtgctttggcgccagatt

SEQ ID NO: 83221 - DNA, 25 bp, Saccharomyces pastorianus
gttattccgccaaagtggagtgctt

SEQ ID NO: 83222 - DNA, 25 bp, Saccharomyces pastorianus
atctgggaacgtgtatgtgtggtct

SEQ ID NO: 83223 - DNA, 25 bp, Saccharomyces pastorianus
agaacggttcacaatccctacagat

SEQ ID NO: 83224 - DNA, 25 bp, Saccharomyces pastorianus
aatagcgatcgatcttcggacgaga

SEQ ID NO: 83225 - DNA, 25 bp, Saccharomyces pastorianus
ttgctaacctacacagcttgaatta

SEQ ID NO: 83226 - DNA, 25 bp, Saccharomyces pastorianus
tttggaacagcctgatggtacctgg

SEQ ID NO: 83227 - DNA, 25 bp, Saccharomyces pastorianus
aacaaaattcattgctcagcgtatt

SEQ ID NO: 83228 - DNA, 25 bp, Saccharomyces pastorianus
gaggaagaccccaacgaattcacaa

SEQ ID NO: 83229 - DNA, 25 bp, Saccharomyces pastorianus
atatcctgcctgttctaatgagaat

SEQ ID NO: 83230 - DNA, 25 bp, Saccharomyces pastorianus
ttacagggctgaagccgactatctt

SEQ ID NO: 83231 - DNA, 25 bp, Saccharomyces pastorianus
gcgtattactattgctagagctcaa

SEQ ID NO: 83232 - DNA, 25 bp, Saccharomyces pastorianus
gtatgattccaagggccgcaacgca

SEQ ID NO: 83233 - DNA, 25 bp, Saccharomyces pastorianus
tatggctcactttatttgacgacca

SEQ ID NO: 83234 - DNA, 25 bp, Saccharomyces pastorianus
gcaacgcaaacttcatcactctaaa

SEQ ID NO: 83235 - DNA, 25 bp, Saccharomyces pastorianus
tatgggtggtcaatcggctgctagc

SEQ ID NO: 83236 - DNA, 25 bp, Saccharomyces pastorianus
agaccgctctctattggttcacaaa

SEQ ID NO: 83237 - DNA, 25 bp, Saccharomyces pastorianus
gttaacggcgtcgaaatgccccaag

SEQ ID NO: 83238 - DNA, 25 bp, Saccharomyces pastorianus
ggctgtaaaactgtactccaagtgc

SEQ ID NO: 83239 - DNA, 25 bp, Saccharomyces pastorianus
ctggaacggtgcctcttataaggta

SEQ ID NO: 83240 - DNA, 25 bp, Saccharomyces pastorianus
acgccagactcctctagattctgga

SEQ ID NO: 83241 - DNA, 25 bp, Saccharomyces pastorianus
tgatgaaaacatctctcctgcccag

SEQ ID NO: 83242 - DNA, 25 bp, Saccharomyces pastorianus
gagaagggcatcatcatcgcagaca

SEQ ID NO: 83243 - DNA, 25 bp, Saccharomyces pastorianus
accccatcgaccaaggctgaacaag

SEQ ID NO: 83244 - DNA, 25 bp, Saccharomyces pastorianus
tgtcgacaggacaagggccaaatat

SEQ ID NO: 83245 - DNA, 25 bp, Saccharomyces pastorianus
aaacgcaactagaagaccgctctct

SEQ ID NO: 83246 - DNA, 25 bp, Saccharomyces pastorianus
tggacgaggtgctaacgccagactc

SEQ ID NO: 83247 - DNA, 25 bp, Saccharomyces pastorianus
ttttgagatgtgttcgttgcacccc

SEQ ID NO: 83248 - DNA, 25 bp, Saccharomyces pastorianus
aaaatcctcgagaagcaagctattg

SEQ ID NO: 83249 - DNA, 25 bp, Saccharomyces pastorianus
aggccttccacttttgaattactgc

SEQ ID NO: 83250 - DNA, 25 bp, Saccharomyces pastorianus
tgtgaacttaagaaccaggccttcc

SEQ ID NO: 83251 - DNA, 25 bp, Saccharomyces pastorianus
ggtacaccatattacatgtcgcctg

SEQ ID NO: 83252 - DNA, 25 bp, Saccharomyces pastorianus
gtgttgatggaccaaccatactccc

SEQ ID NO: 83253 - DNA, 25 bp, Saccharomyces pastorianus
gggttagccaaatctctggaaacta

SEQ ID NO: 83254 - DNA, 25 bp, Saccharomyces pastorianus
ggaaatgtgacaccgtccctgagta

SEQ ID NO: 83255 - DNA, 25 bp, Saccharomyces pastorianus
gaaggaacaatttacccaggcagtg

SEQ ID NO: 83256 - DNA, 25 bp, Saccharomyces pastorianus
atttgccacaacatacgtcggtaca

SEQ ID NO: 83257 - DNA, 25 bp, Saccharomyces pastorianus
atccgacatctggtcactaggttgt

SEQ ID NO: 83258 - DNA, 25 bp, Saccharomyces pastorianus
gatacattcaattcgtaccggagtt

SEQ ID NO: 83259 - DNA, 25 bp, Saccharomyces pastorianus
gaccatgggatatggcatactccgt

SEQ ID NO: 83260 - DNA, 25 bp, Saccharomyces pastorianus
atacgcagtcaaacacaccagcaaa

SEQ ID NO: 83261 - DNA, 25 bp, Saccharomyces pastorianus
tgccttcgtgtctgagaccttgaat

SEQ ID NO: 83262 - DNA, 25 bp, Saccharomyces pastorianus
accagtatctgtttgaccatgggat

SEQ ID NO: 83263 - DNA, 25 bp, Saccharomyces pastorianus
atttctcttatcctctctattatca

SEQ ID NO: 83264 - DNA, 25 bp, Saccharomyces pastorianus
gaaatcgctcgttgtaaaccgctaa

SEQ ID NO: 83265 - DNA, 25 bp, Saccharomyces pastorianus
tatgttcctaatacctgtgtgtttg

SEQ ID NO: 83266 - DNA, 25 bp, Saccharomyces pastorianus
aatgtggctcttccagaggatacat

SEQ ID NO: 83267 - DNA, 25 bp, Saccharomyces pastorianus
gatccagttttagaagcttacctta

SEQ ID NO: 83268 - DNA, 25 bp, Saccharomyces pastorianus
tattgatcggtataactgccttcgt

SEQ ID NO: 83269 - DNA, 25 bp, Saccharomyces pastorianus
gttcttcaccactcttatcaaggaa

SEQ ID NO: 83270 - DNA, 25 bp, Saccharomyces pastorianus
tagtggaggtgatcgcacgcaagcc

SEQ ID NO: 83271 - DNA, 25 bp, Saccharomyces pastorianus
gagactatggtataccccgtactat

SEQ ID NO: 83272 - DNA, 25 bp, Saccharomyces pastorianus
gtgaattctggttcgcactcggatt

SEQ ID NO: 83273 - DNA, 25 bp, Saccharomyces pastorianus
cccgtactatttctatagcggcaag

SEQ ID NO: 83274 - DNA, 25 bp, Saccharomyces pastorianus
actgtgatcttagtgatgtccctta

SEQ ID NO: 83275 - DNA, 25 bp, Saccharomyces pastorianus
gatcagaccctattttgatggcata

SEQ ID NO: 83276 - DNA, 25 bp, Saccharomyces pastorianus
gaagtgccatgagttcttcaccact

SEQ ID NO: 83277 - DNA, 25 bp, Saccharomyces pastorianus
ggattcctcatcgaatagtgccgag

SEQ ID NO: 83278 - DNA, 25 bp, Saccharomyces pastorianus
gtgatgtcccttatagtagcctcca

SEQ ID NO: 83279 - DNA, 25 bp, Saccharomyces pastorianus
gaggatacacaatcacctgtctcag

SEQ ID NO: 83280 - DNA, 25 bp, Saccharomyces pastorianus
caagcaacgctgaggaaaatgtaca

SEQ ID NO: 83281 - DNA, 25 bp, Saccharomyces pastorianus
atggagtactccttactacttttat

SEQ ID NO: 83282 - DNA, 25 bp, Saccharomyces pastorianus
agaagattgccaccgtctttttcta

SEQ ID NO: 83283 - DNA, 25 bp, Saccharomyces pastorianus
gggaagaactttcgagaagccaaca

SEQ ID NO: 83284 - DNA, 25 bp, Saccharomyces pastorianus
tactccttactacttttattgcgaa

SEQ ID NO: 83285 - DNA, 25 bp, Saccharomyces pastorianus
gaagccaacaagcaacgctgaggaa

SEQ ID NO: 83286 - DNA, 25 bp, Saccharomyces pastorianus
ttcacattaaatcccggagaagatt

SEQ ID NO: 83287 - DNA, 25 bp, Saccharomyces pastorianus
tattgcgaagaagattgccaccgtc

SEQ ID NO: 83288 - DNA, 25 bp, Saccharomyces pastorianus
gaatctttcacattaaatcccggag

SEQ ID NO: 83289 - DNA, 25 bp, Saccharomyces pastorianus
acaggagactgaagctggcgaatct

SEQ ID NO: 83290 - DNA, 25 bp, Saccharomyces pastorianus
gaagctggcgaatctttcacattaa

SEQ ID NO: 83291 - DNA, 25 bp, Saccharomyces pastorianus
aagagcttcgggttcgggcctgtca

SEQ ID NO: 83292 - DNA, 25 bp, Saccharomyces pastorianus
ttcaaacggcaacaagctcgcgcag

SEQ ID NO: 83293 - DNA, 25 bp, Saccharomyces pastorianus
tctgtggtggtgtcctcaaggcatc

SEQ ID NO: 83294 - DNA, 25 bp, Saccharomyces pastorianus
ggtttgcgtcgctcatggaaaagtc

SEQ ID NO: 83295 - DNA, 25 bp, Saccharomyces pastorianus
ccaatccaagctctttgtcaagtca

SEQ ID NO: 83296 - DNA, 25 bp, Saccharomyces pastorianus
aggaccgtcacttgtatgcgctcta

SEQ ID NO: 83297 - DNA, 25 bp, Saccharomyces pastorianus
catgaaatacctgttgtccggctac

SEQ ID NO: 83298 - DNA, 25 bp, Saccharomyces pastorianus
ggagatcgaccgcatcttcaaacgg

SEQ ID NO: 83299 - DNA, 25 bp, Saccharomyces pastorianus
gtgtacgagcctgccatgaccaagg

SEQ ID NO: 83300 - DNA, 25 bp, Saccharomyces pastorianus
aaggcatcgccagactgctcggttt

SEQ ID NO: 83301 - DNA, 25 bp, Saccharomyces pastorianus
tctactgcctctggaaccaatggta

SEQ ID NO: 83302 - DNA, 25 bp, Saccharomyces pastorianus
agtcgctgctattatagtagccagc

SEQ ID NO: 83303 - DNA, 25 bp, Saccharomyces pastorianus
atgagattaaattacagtcgctgct

SEQ ID NO: 83304 - DNA, 25 bp, Saccharomyces pastorianus
gattaaattacagtcgctgctatta

SEQ ID NO: 83305 - DNA, 25 bp, Saccharomyces pastorianus
cagtcgctgctattatagtagccag

SEQ ID NO: 83306 - DNA, 25 bp, Saccharomyces pastorianus
tacagtcgctgctattatagtagcc

SEQ ID NO: 83307 - DNA, 25 bp, Saccharomyces pastorianus
tgctattatagtagccagcggcggc

SEQ ID NO: 83308 - DNA, 25 bp, Saccharomyces pastorianus
gctattatagtagccagcggcggcg

SEQ ID NO: 83309 - DNA, 25 bp, Saccharomyces pastorianus
aaattacagtcgctgctattatagt

SEQ ID NO: 83310 - DNA, 25 bp, Saccharomyces pastorianus
gctgctattatagtagccagcggcg

SEQ ID NO: 83311 - DNA, 25 bp, Saccharomyces pastorianus
attacagtcgctgctattatagtag

SEQ ID NO: 83312 - DNA, 25 bp, Saccharomyces pastorianus
gagattaaattacagtcgctgctat

SEQ ID NO: 83313 - DNA, 25 bp, Saccharomyces pastorianus
ttggtgtgtcctaaacggtttccat

SEQ ID NO: 83314 - DNA, 25 bp, Saccharomyces pastorianus
gtgtgtcctaaacggtttccatgca

SEQ ID NO: 83315 - DNA, 25 bp, Saccharomyces pastorianus
gaagcttactgtctaagccatcatt

SEQ ID NO: 83316 - DNA, 25 bp, Saccharomyces pastorianus
gtgtcctaaacggtttccatgcaaa

SEQ ID NO: 83317 - DNA, 25 bp, Saccharomyces pastorianus
gtctaagccatcatttggtgtgtcc

SEQ ID NO: 83318 - DNA, 25 bp, Saccharomyces pastorianus
tcatttggtgtgtcctaaacggttt

SEQ ID NO: 83319 - DNA, 25 bp, Saccharomyces pastorianus
tcctaaacggtttccatgcaaagca

SEQ ID NO: 83320 - DNA, 25 bp, Saccharomyces pastorianus
taagccatcatttggtgtgtcctaa

SEQ ID NO: 83321 - DNA, 25 bp, Saccharomyces pastorianus
cttactgtctaagccatcatttggt

SEQ ID NO: 83322 - DNA, 25 bp, Saccharomyces pastorianus
gccatcatttggtgtgtcctaaacg

SEQ ID NO: 83323 - DNA, 25 bp, Saccharomyces pastorianus
tcagaagcttactgtctaagccatc

SEQ ID NO: 83324 - DNA, 25 bp, Saccharomyces pastorianus
gattactgcggaaccacttatagac

SEQ ID NO: 83325 - DNA, 25 bp, Saccharomyces pastorianus
aacttctacaacagagggcatttta

SEQ ID NO: 83326 - DNA, 25 bp, Saccharomyces pastorianus
ttcatttttgaggtttctaaggcat

SEQ ID NO: 83327 - DNA, 25 bp, Saccharomyces pastorianus
ttttccgaatgatgaaccgtcactt

SEQ ID NO: 83328 - DNA, 25 bp, Saccharomyces pastorianus
agatgtgttgatccaagcttgatag

SEQ ID NO: 83329 - DNA, 25 bp, Saccharomyces pastorianus
ggcaccccaaagcttacttgaaaca

SEQ ID NO: 83330 - DNA, 25 bp, Saccharomyces pastorianus
gataataggcgtacgtttacggcac

SEQ ID NO: 83331 - DNA, 25 bp, Saccharomyces pastorianus
gaattgatccttacgctgcaagaga

SEQ ID NO: 83332 - DNA, 25 bp, Saccharomyces pastorianus
aagaacgagaccgatcagcagtgcg

SEQ ID NO: 83333 - DNA, 25 bp, Saccharomyces pastorianus
gaaccgtcacttactacaatcacag

SEQ ID NO: 83334 - DNA, 25 bp, Saccharomyces pastorianus
agcaagaactatatccgaactggca

SEQ ID NO: 83335 - DNA, 25 bp, Saccharomyces pastorianus
acttgatgagctactgggcggtata

SEQ ID NO: 83336 - DNA, 25 bp, Saccharomyces pastorianus
gataccttgtacaatcctgatttaa

SEQ ID NO: 83337 - DNA, 25 bp, Saccharomyces pastorianus
tccctctaagcgctcaatacgttga

SEQ ID NO: 83338 - DNA, 25 bp, Saccharomyces pastorianus
ttacctcccggtacggaagatcaca

SEQ ID NO: 83339 - DNA, 25 bp, Saccharomyces pastorianus
agtgaattccttacaatgggctaga

SEQ ID NO: 83340 - DNA, 25 bp, Saccharomyces pastorianus
gccaccggaacgaatcatactgctg

SEQ ID NO: 83341 - DNA, 25 bp, Saccharomyces pastorianus
gctcgaggatgcatatcttccagta

SEQ ID NO: 83342 - DNA, 25 bp, Saccharomyces pastorianus
aagtcaaaaatctacgctgcccggt

SEQ ID NO: 83343 - DNA, 25 bp, Saccharomyces pastorianus
gggaaattccaagcctctttgattt

SEQ ID NO: 83344 - DNA, 25 bp, Saccharomyces pastorianus
aatgcagccagaaagttacctcccg

SEQ ID NO: 83345 - DNA, 25 bp, Saccharomyces pastorianus
tgacattgtcattcgcacagggaaa

SEQ ID NO: 83346 - DNA, 25 bp, Saccharomyces pastorianus
gggtgctgctatatcaaatgctact

SEQ ID NO: 83347 - DNA, 25 bp, Saccharomyces pastorianus
cctttcttccgtaacatcaactttg

SEQ ID NO: 83348 - DNA, 25 bp, Saccharomyces pastorianus
tgccctctgttttgacaacgagcca

SEQ ID NO: 83349 - DNA, 25 bp, Saccharomyces pastorianus
gtcccagggacgcagatgaagttat

SEQ ID NO: 83350 - DNA, 25 bp, Saccharomyces pastorianus
gatatcttaaaccttcgcgtgaaac

SEQ ID NO: 83351 - DNA, 25 bp, Saccharomyces pastorianus
taccgatgaacccttatacccaata

SEQ ID NO: 83352 - DNA, 25 bp, Saccharomyces pastorianus
gtttttaacgctatccttaccgatg

SEQ ID NO: 83353 - DNA, 25 bp, Saccharomyces pastorianus
actgtgccaatctccattctcagga

SEQ ID NO: 83354 - DNA, 25 bp, Saccharomyces pastorianus
ggcacaccagaatttatggctccag

SEQ ID NO: 83355 - DNA, 25 bp, Saccharomyces pastorianus
gaacttctacattttgtggcacacc

SEQ ID NO: 83356 - DNA, 25 bp, Saccharomyces pastorianus
ttcgagcaagaattcacctctgcgc

SEQ ID NO: 83357 - DNA, 25 bp, Saccharomyces pastorianus
tatgtcgcagcgttatctcctttta

SEQ ID NO: 83358 - DNA, 25 bp, Saccharomyces pastorianus
gaatatttacaatacctggccgaaa

SEQ ID NO: 83359 - DNA, 25 bp, Saccharomyces pastorianus
aagagagtttcataatgccgtcgaa

SEQ ID NO: 83360 - DNA, 25 bp, Saccharomyces pastorianus
aaggagttcttatcaggcgatttga

SEQ ID NO: 83361 - DNA, 25 bp, Saccharomyces pastorianus
gttggttccaccatctttattgaat

SEQ ID NO: 83362 - DNA, 25 bp, Saccharomyces pastorianus
ttttaccaataaccaccatgccagt

SEQ ID NO: 83363 - DNA, 25 bp, Saccharomyces pastorianus
ggtcggtaaccacaatcatgctggc

SEQ ID NO: 83364 - DNA, 25 bp, Saccharomyces pastorianus
tcatgctggcactatggagagtcat

SEQ ID NO: 83365 - DNA, 25 bp, Saccharomyces pastorianus
tattagatctgtcccaaatgctttg

SEQ ID NO: 83366 - DNA, 25 bp, Saccharomyces pastorianus
aattgggagccaccgttatatgatt

SEQ ID NO: 83367 - DNA, 25 bp, Saccharomyces pastorianus
ggagagtcatccacatacaaacatt

SEQ ID NO: 83368 - DNA, 25 bp, Saccharomyces pastorianus
atcagacgttgcctgtatctagaca

SEQ ID NO: 83369 - DNA, 25 bp, Saccharomyces pastorianus
gggcggattctctcaataccagggc

SEQ ID NO: 83370 - DNA, 25 bp, Saccharomyces pastorianus
gggtccctactatttgttcttgcgt

SEQ ID NO: 83371 - DNA, 25 bp, Saccharomyces pastorianus
tgctatttcatatttcccattcggt

SEQ ID NO: 83372 - DNA, 25 bp, Saccharomyces pastorianus
agtctccgtgactcattgaatcgat

SEQ ID NO: 83373 - DNA, 25 bp, Saccharomyces pastorianus
ttttcttttgggtgcaacagcctgt

SEQ ID NO: 83374 - DNA, 25 bp, Saccharomyces pastorianus
tatgggaccactcgcgtacttaaaa

SEQ ID NO: 83375 - DNA, 25 bp, Saccharomyces pastorianus
ggtgctgactattacatgtgctctt

SEQ ID NO: 83376 - DNA, 25 bp, Saccharomyces pastorianus
gacactgttctcaagctgggcggat

SEQ ID NO: 83377 - DNA, 25 bp, Saccharomyces pastorianus
aacagcctgtttcactctttgtact

SEQ ID NO: 83378 - DNA, 25 bp, Saccharomyces pastorianus
ttatttcgcagccttttccaagaac

SEQ ID NO: 83379 - DNA, 25 bp, Saccharomyces pastorianus
ttgtctcaccgatgggatcacctaa

SEQ ID NO: 83380 - DNA, 25 bp, Saccharomyces pastorianus
ttagtgggccatccggatacagcga

SEQ ID NO: 83381 - DNA, 25 bp, Saccharomyces pastorianus
gatcacctaatatcatggcctcgta

SEQ ID NO: 83382 - DNA, 25 bp, Saccharomyces pastorianus
taaattattgagcactccatcgccc

SEQ ID NO: 83383 - DNA, 25 bp, Saccharomyces pastorianus
tcgcccgtcaatagatctcacaatt

SEQ ID NO: 83384 - DNA, 25 bp, Saccharomyces pastorianus
ggcagtatttcgaattccgcatttg

SEQ ID NO: 83385 - DNA, 25 bp, Saccharomyces pastorianus
ttccgcatttgtttcgggcaatagt

SEQ ID NO: 83386 - DNA, 25 bp, Saccharomyces pastorianus
tacagcgatgatgccggtgtgccaa

SEQ ID NO: 83387 - DNA, 25 bp, Saccharomyces pastorianus
attcgctactctctcatggtaacga

SEQ ID NO: 83388 - DNA, 25 bp, Saccharomyces pastorianus
gtgaggattccaaacgctaccactg

SEQ ID NO: 83389 - DNA, 25 bp, Saccharomyces pastorianus
atggcctcgtatgactctgatttac

SEQ ID NO: 83390 - DNA, 25 bp, Saccharomyces pastorianus
taggcgggaaagtggagaacccttg

SEQ ID NO: 83391 - DNA, 25 bp, Saccharomyces pastorianus
ttagaaatataggcgggaaagtgga

SEQ ID NO: 83392 - DNA, 25 bp, Saccharomyces pastorianus
agaaatataggcgggaaagtggaga

SEQ ID NO: 83393 - DNA, 25 bp, Saccharomyces pastorianus
tagaaatataggcgggaaagtggag

SEQ ID NO: 83394 - DNA, 25 bp, Saccharomyces pastorianus
aattagaaatataggcgggaaagtg

SEQ ID NO: 83395 - DNA, 25 bp, Saccharomyces pastorianus
taacaaaattagaaatataggcggg

SEQ ID NO: 83396 - DNA, 25 bp, Saccharomyces pastorianus
tataggcgggaaagtggagaaccct

SEQ ID NO: 83397 - DNA, 25 bp, Saccharomyces pastorianus
ttaacaaaattagaaatataggcgg

SEQ ID NO: 83398 - DNA, 25 bp, Saccharomyces pastorianus
gaaatataggcgggaaagtggagaa

SEQ ID NO: 83399 - DNA, 25 bp, Saccharomyces pastorianus
attagaaatataggcgggaaagtgg

SEQ ID NO: 83400 - DNA, 25 bp, Saccharomyces pastorianus
ggaaggttctggttctttaactgct

SEQ ID NO: 83401 - DNA, 25 bp, Saccharomyces pastorianus
ttatgccggtgttaatggtcatttg

SEQ ID NO: 83402 - DNA, 25 bp, Saccharomyces pastorianus
caatcacaatgagcttttgaccgaa

SEQ ID NO: 83403 - DNA, 25 bp, Saccharomyces pastorianus
acaggttccattgatttatgccggt

SEQ ID NO: 83404 - DNA, 25 bp, Saccharomyces pastorianus
aacgttggtttgtctgtttctcgtg

SEQ ID NO: 83405 - DNA, 25 bp, Saccharomyces pastorianus
gaattggtgaatttgagtcctcctt

SEQ ID NO: 83406 - DNA, 25 bp, Saccharomyces pastorianus
caatattctcctttggctacagaag

SEQ ID NO: 83407 - DNA, 25 bp, Saccharomyces pastorianus
gagtcctcctttttgtcctatctaa

SEQ ID NO: 83408 - DNA, 25 bp, Saccharomyces pastorianus
aagagccgctaagctttctgaaaag

SEQ ID NO: 83409 - DNA, 25 bp, Saccharomyces pastorianus
gttctttaactgctttgcctgttat

SEQ ID NO: 83410 - DNA, 25 bp, Saccharomyces pastorianus
aacccaaggtggtgatgtctccgct

SEQ ID NO: 83411 - DNA, 25 bp, Saccharomyces pastorianus
gtattctcgttgaacctacttggtt

SEQ ID NO: 83412 - DNA, 25 bp, Saccharomyces pastorianus
gacggtaacgtccataagggcttgt

SEQ ID NO: 83413 - DNA, 25 bp, Saccharomyces pastorianus
agcattgtgctattgtggcttccct

SEQ ID NO: 83414 - DNA, 25 bp, Saccharomyces pastorianus
actgcaaggctgtcgctagagtttt

SEQ ID NO: 83415 - DNA, 25 bp, Saccharomyces pastorianus
gaaattgatcctttggtgttccatg

SEQ ID NO: 83416 - DNA, 25 bp, Saccharomyces pastorianus
tggcttccctttgttgcctagtaaa

SEQ ID NO: 83417 - DNA, 25 bp, Saccharomyces pastorianus
agagggttgacatcctcgctcaaat

SEQ ID NO: 83418 - DNA, 25 bp, Saccharomyces pastorianus
agatgcaccatgtcttattcagtga

SEQ ID NO: 83419 - DNA, 25 bp, Saccharomyces pastorianus
taggacaaggcctcttgttcggcaa

SEQ ID NO: 83420 - DNA, 25 bp, Saccharomyces pastorianus
aagggcttgttgtcattgttgctgg

SEQ ID NO: 83421 - DNA, 25 bp, Saccharomyces pastorianus
atttgccaaggccaactgtattctc

SEQ ID NO: 83422 - DNA, 25 bp, Saccharomyces pastorianus
tcgtagtatctacaggaatgtcctc

SEQ ID NO: 83423 - DNA, 25 bp, Saccharomyces pastorianus
gagaatacagttggccttggcaaat

SEQ ID NO: 83424 - DNA, 25 bp, Saccharomyces pastorianus
tgtccctcaatgatacactttctgc

SEQ ID NO: 83425 - DNA, 25 bp, Saccharomyces pastorianus
actttctgcctttaatctctttgac

SEQ ID NO: 83426 - DNA, 25 bp, Saccharomyces pastorianus
atctctttgacgtttgcttttagta

SEQ ID NO: 83427 - DNA, 25 bp, Saccharomyces pastorianus
agttccaacttctagttccatttcg

SEQ ID NO: 83428 - DNA, 25 bp, Saccharomyces pastorianus
atctcctgcttatggttgaaacccc

SEQ ID NO: 83429 - DNA, 25 bp, Saccharomyces pastorianus
gaatgtcctcaaaaaactctagcga

SEQ ID NO: 83430 - DNA, 25 bp, Saccharomyces pastorianus
ttttttgctatctcctgcttatggt

SEQ ID NO: 83431 - DNA, 25 bp, Saccharomyces pastorianus
ggaaactgttccaagtgtccctcaa

SEQ ID NO: 83432 - DNA, 25 bp, Saccharomyces pastorianus
aaaactctagcgacagccttgcagt

SEQ ID NO: 83433 - DNA, 25 bp, Saccharomyces pastorianus
acgtggatccggaaactacatatac

SEQ ID NO: 83434 - DNA, 25 bp, Saccharomyces pastorianus
agcccaagcgccgtttgatatagac

SEQ ID NO: 83435 - DNA, 25 bp, Saccharomyces pastorianus
tagtggaagttcgatggctacacca

SEQ ID NO: 83436 - DNA, 25 bp, Saccharomyces pastorianus
gacatagcattgtttcagcctccaa

SEQ ID NO: 83437 - DNA, 25 bp, Saccharomyces pastorianus
gatacaaccacctcagcagggtcaa

SEQ ID NO: 83438 - DNA, 25 bp, Saccharomyces pastorianus
gacgacttggcgtttgatctagacg

SEQ ID NO: 83439 - DNA, 25 bp, Saccharomyces pastorianus
cggtgtatggcttggatgacatctc

SEQ ID NO: 83440 - DNA, 25 bp, Saccharomyces pastorianus
ctcttcggtactatcgcagtttgaa

SEQ ID NO: 83441 - DNA, 25 bp, Saccharomyces pastorianus
agccaatccggctcaaattcaggta

SEQ ID NO: 83442 - DNA, 25 bp, Saccharomyces pastorianus
tatacgtaccaacaaccaaatcctc

SEQ ID NO: 83443 - DNA, 25 bp, Saccharomyces pastorianus
cgaacagctgcgcaatagagacata

SEQ ID NO: 83444 - DNA, 25 bp, Saccharomyces pastorianus
tgaaattgctcacaacatctccgct

SEQ ID NO: 83445 - DNA, 25 bp, Saccharomyces pastorianus
gccgctgaaattgctcacaacatct

SEQ ID NO: 83446 - DNA, 25 bp, Saccharomyces pastorianus
gagttgtcattttggctagagctaa

SEQ ID NO: 83447 - DNA, 25 bp, Saccharomyces pastorianus
ttggctagagctaaggctttgggta

SEQ ID NO: 83448 - DNA, 25 bp, Saccharomyces pastorianus
atgcacaccaagacttacgccgctg

SEQ ID NO: 83449 - DNA, 25 bp, Saccharomyces pastorianus
tctccgctaagaacagagttgtcat

SEQ ID NO: 83450 - DNA, 25 bp, Saccharomyces pastorianus
ttgctcacaacatctccgctaagaa

SEQ ID NO: 83451 - DNA, 25 bp, Saccharomyces pastorianus
gactttcttagtcgctaacgttaag

SEQ ID NO: 83452 - DNA, 25 bp, Saccharomyces pastorianus
atctggtcacaagactttcttagtc

SEQ ID NO: 83453 - DNA, 25 bp, Saccharomyces pastorianus
tagtcgctaacgttaaggatttgga

SEQ ID NO: 83454 - DNA, 25 bp, Saccharomyces pastorianus
caccaagacttacgccgctgaaatt

SEQ ID NO: 83455 - DNA, 25 bp, Saccharomyces pastorianus
agcgccatcagcaggtaacgggcaa

SEQ ID NO: 83456 - DNA, 25 bp, Saccharomyces pastorianus
gtccgattggcctaatctggaagag

SEQ ID NO: 83457 - DNA, 25 bp, Saccharomyces pastorianus
gaagatcaaagtatttcactccgtg

SEQ ID NO: 83458 - DNA, 25 bp, Saccharomyces pastorianus
aaaccgtctggaaaccacgatgcag

SEQ ID NO: 83459 - DNA, 25 bp, Saccharomyces pastorianus
tatttcactccgtgttaccgaaaag

SEQ ID NO: 83460 - DNA, 25 bp, Saccharomyces pastorianus
taacgggcaaagtctgagttccaga

SEQ ID NO: 83461 - DNA, 25 bp, Saccharomyces pastorianus
atcccggcagcttaccaaaacgtgg

SEQ ID NO: 83462 - DNA, 25 bp, Saccharomyces pastorianus
cagagcattgcttatcatcgccgtt

SEQ ID NO: 83463 - DNA, 25 bp, Saccharomyces pastorianus
gaatcagcaagagcgccatcagcag

SEQ ID NO: 83464 - DNA, 25 bp, Saccharomyces pastorianus
gcgagctgttgtccgattggcctaa

SEQ ID NO: 83465 - DNA, 25 bp, Saccharomyces pastorianus
ttgatcgttacacttcctatcccgg

SEQ ID NO: 83466 - DNA, 25 bp, Saccharomyces pastorianus
aaaccttgtcgtaatctatgtggcc

SEQ ID NO: 83467 - DNA, 25 bp, Saccharomyces pastorianus
gaacacaccatcttgttgcatgctc

SEQ ID NO: 83468 - DNA, 25 bp, Saccharomyces pastorianus
gagcactttgccattgaaacttttg

SEQ ID NO: 83469 - DNA, 25 bp, Saccharomyces pastorianus
gatacctagacagacttggccaaga

SEQ ID NO: 83470 - DNA, 25 bp, Saccharomyces pastorianus
taaatccgttcccatcgtcaaaaat

SEQ ID NO: 83471 - DNA, 25 bp, Saccharomyces pastorianus
cgatagaccgcaactttgggacttt

SEQ ID NO: 83472 - DNA, 25 bp, Saccharomyces pastorianus
atgtggccacagtatcgcaccatat

SEQ ID NO: 83473 - DNA, 25 bp, Saccharomyces pastorianus
tacgataacctgttagccgctgtaa

SEQ ID NO: 83474 - DNA, 25 bp, Saccharomyces pastorianus
aagaccatcaggtaatgcccacgtt

SEQ ID NO: 83475 - DNA, 25 bp, Saccharomyces pastorianus
accatatcgtatccacggcggtaaa

SEQ ID NO: 83476 - DNA, 25 bp, Saccharomyces pastorianus
taaaggacgctacttacacgggtat

SEQ ID NO: 83477 - DNA, 25 bp, Saccharomyces pastorianus
gatcgtggccaaacctctaaaagca

SEQ ID NO: 83478 - DNA, 25 bp, Saccharomyces pastorianus
ggaagcaacagcgatcgtggccaaa

SEQ ID NO: 83479 - DNA, 25 bp, Saccharomyces pastorianus
gtttgagaacaatattcccggagat

SEQ ID NO: 83480 - DNA, 25 bp, Saccharomyces pastorianus
acaacgatcgattgtttacgccaac

SEQ ID NO: 83481 - DNA, 25 bp, Saccharomyces pastorianus
gacatgatgcaatctgctgggagaa

SEQ ID NO: 83482 - DNA, 25 bp, Saccharomyces pastorianus
gtgaataagaacaaccctgcagaat

SEQ ID NO: 83483 - DNA, 25 bp, Saccharomyces pastorianus
ggctttcaagaatctctctcagaag

SEQ ID NO: 83484 - DNA, 25 bp, Saccharomyces pastorianus
gaagtcaacggttttacatgaagcc

SEQ ID NO: 83485 - DNA, 25 bp, Saccharomyces pastorianus
gtttacgccaacaaaattcggatat

SEQ ID NO: 83486 - DNA, 25 bp, Saccharomyces pastorianus
gaagagcacgctgaggctttcaaga

SEQ ID NO: 83487 - DNA, 25 bp, Saccharomyces pastorianus
agggagcttctatccgaggcggaaa

SEQ ID NO: 83488 - DNA, 25 bp, Saccharomyces pastorianus
actggctatttcaattacgtctcta

SEQ ID NO: 83489 - DNA, 25 bp, Saccharomyces pastorianus
gagctagctttattccattggacaa

SEQ ID NO: 83490 - DNA, 25 bp, Saccharomyces pastorianus
attatcaccctttgtatcttactgt

SEQ ID NO: 83491 - DNA, 25 bp, Saccharomyces pastorianus
atgccatccttgcagatcatcggta

SEQ ID NO: 83492 - DNA, 25 bp, Saccharomyces pastorianus
atttctttcattttgccaggccttt

SEQ ID NO: 83493 - DNA, 25 bp, Saccharomyces pastorianus
acgggatctacgtcgatttctttca

SEQ ID NO: 83494 - DNA, 25 bp, Saccharomyces pastorianus
gaaatatcctcactttatacccgaa

SEQ ID NO: 83495 - DNA, 25 bp, Saccharomyces pastorianus
tactgttctcatatctactggctat

SEQ ID NO: 83496 - DNA, 25 bp, Saccharomyces pastorianus
gcaatagttggtgccacgggatcta

SEQ ID NO: 83497 - DNA, 25 bp, Saccharomyces pastorianus
gccaaatctgcgtagtgagtcttta

SEQ ID NO: 83498 - DNA, 25 bp, Saccharomyces pastorianus
ttaagtttatctctattcatctggg

SEQ ID NO: 83499 - DNA, 25 bp, Saccharomyces pastorianus
aaaattactccccattccagagttg

SEQ ID NO: 83500 - DNA, 25 bp, Saccharomyces pastorianus
gtcacaggcgtggatggcctattca

SEQ ID NO: 83501 - DNA, 25 bp, Saccharomyces pastorianus
aacaatatcctgcttgactgctcaa

SEQ ID NO: 83502 - DNA, 25 bp, Saccharomyces pastorianus
gatccgttggattggtttgaagcta

SEQ ID NO: 83503 - DNA, 25 bp, Saccharomyces pastorianus
tcccctttattcctgggtaatgtca

SEQ ID NO: 83504 - DNA, 25 bp, Saccharomyces pastorianus
tccagagttggtccctttcagatta

SEQ ID NO: 83505 - DNA, 25 bp, Saccharomyces pastorianus
tcgcagctagctctatcgttggata

SEQ ID NO: 83506 - DNA, 25 bp, Saccharomyces pastorianus
ggatacatattaggcctcggtgata

SEQ ID NO: 83507 - DNA, 25 bp, Saccharomyces pastorianus
ttgattcagcaagccacggatccat

SEQ ID NO: 83508 - DNA, 25 bp, Saccharomyces pastorianus
tttgattcctttcccgatccgttgg

SEQ ID NO: 83509 - DNA, 25 bp, Saccharomyces pastorianus
agacctgggaattgcgtttgatcag

SEQ ID NO: 83510 - DNA, 25 bp, Saccharomyces pastorianus
gaaacccggtacaaatgcgacagga

SEQ ID NO: 83511 - DNA, 25 bp, Saccharomyces pastorianus
cctcgaccaggtgaatttacgccaa

SEQ ID NO: 83512 - DNA, 25 bp, Saccharomyces pastorianus
tcgaagacaataaccccacggactt

SEQ ID NO: 83513 - DNA, 25 bp, Saccharomyces pastorianus
gacggctacagcacaatgggcaaaa

SEQ ID NO: 83514 - DNA, 25 bp, Saccharomyces pastorianus
aaattaccgtgggatcctcgaccag

SEQ ID NO: 83515 - DNA, 25 bp, Saccharomyces pastorianus
aattggagtcatatgtcacgagcac

SEQ ID NO: 83516 - DNA, 25 bp, Saccharomyces pastorianus
aacaatatcttcctctatgagccca

SEQ ID NO: 83517 - DNA, 25 bp, Saccharomyces pastorianus
ttaaatcaccgacttctaccaacca

SEQ ID NO: 83518 - DNA, 25 bp, Saccharomyces pastorianus
gagagcttgtaccagaaaacgttta

SEQ ID NO: 83519 - DNA, 25 bp, Saccharomyces pastorianus
tggaacaactgtagcgaaacccggt

SEQ ID NO: 83520 - DNA, 25 bp, Saccharomyces pastorianus
aagccagggctgtcaacaacaatat

SEQ ID NO: 83521 - DNA, 25 bp, Saccharomyces pastorianus
atactgtttcaaattggtccctccg

SEQ ID NO: 83522 - DNA, 25 bp, Saccharomyces pastorianus
agttcatatgccacaccaacgatac

SEQ ID NO: 83523 - DNA, 25 bp, Saccharomyces pastorianus
aaactgcggactgttcaggctggat

SEQ ID NO: 83524 - DNA, 25 bp, Saccharomyces pastorianus
ataggctcatttccttatacgctgc

SEQ ID NO: 83525 - DNA, 25 bp, Saccharomyces pastorianus
tataacggcacatagggtcttacct

SEQ ID NO: 83526 - DNA, 25 bp, Saccharomyces pastorianus
aagcgtccctgtcattagttcatat

SEQ ID NO: 83527 - DNA, 25 bp, Saccharomyces pastorianus
tgatatcgatacaagcgtccctgtc

SEQ ID NO: 83528 - DNA, 25 bp, Saccharomyces pastorianus
tagggtcttacctgccagtgatgat

SEQ ID NO: 83529 - DNA, 25 bp, Saccharomyces pastorianus
gatacctctaagcaaggcacagacg

SEQ ID NO: 83530 - DNA, 25 bp, Saccharomyces pastorianus
acaacggtttttcacacttcatgga

SEQ ID NO: 83531 - DNA, 25 bp, Saccharomyces pastorianus
gatcaatttgagaccagcgattacc

SEQ ID NO: 83532 - DNA, 25 bp, Saccharomyces pastorianus
ggcaaggtcaattaatcccgtcaat

SEQ ID NO: 83533 - DNA, 25 bp, Saccharomyces pastorianus
gaacattcttccaacgattcttcgg

SEQ ID NO: 83534 - DNA, 25 bp, Saccharomyces pastorianus
cgacttcctcgctatccaaatataa

SEQ ID NO: 83535 - DNA, 25 bp, Saccharomyces pastorianus
gacccaaattttgcatacgcgtata

SEQ ID NO: 83536 - DNA, 25 bp, Saccharomyces pastorianus
aaggcgctagcttgtgatcctcagc

SEQ ID NO: 83537 - DNA, 25 bp, Saccharomyces pastorianus
attacggattgggtacgagcgctat

SEQ ID NO: 83538 - DNA, 25 bp, Saccharomyces pastorianus
ttaatctgttgttgcggtggttctt

SEQ ID NO: 83539 - DNA, 25 bp, Saccharomyces pastorianus
taagatgggccagttgctctattcc

SEQ ID NO: 83540 - DNA, 25 bp, Saccharomyces pastorianus
gatgatgccacagcccattatttgc

SEQ ID NO: 83541 - DNA, 25 bp, Saccharomyces pastorianus
tgaaactcgttcctgatgatgccac

SEQ ID NO: 83542 - DNA, 25 bp, Saccharomyces pastorianus
agcatgtcatttgcaaccgacttcc

SEQ ID NO: 83543 - DNA, 25 bp, Saccharomyces pastorianus
ttcgtaccaccagctctatggaaaa

SEQ ID NO: 83544 - DNA, 25 bp, Saccharomyces pastorianus
aatgcccttcttcgttggtccgatt

SEQ ID NO: 83545 - DNA, 25 bp, Saccharomyces pastorianus
ttgaatactgttctgttgcttctat

SEQ ID NO: 83546 - DNA, 25 bp, Saccharomyces pastorianus
aatgcagtgctcaatgccaatcccg

SEQ ID NO: 83547 - DNA, 25 bp, Saccharomyces pastorianus
gcaagcacgctattgttggcattga

SEQ ID NO: 83548 - DNA, 25 bp, Saccharomyces pastorianus
tattggccttgacgcagctatctgg

SEQ ID NO: 83549 - DNA, 25 bp, Saccharomyces pastorianus
gactattccattcgttctaatcgca

SEQ ID NO: 83550 - DNA, 25 bp, Saccharomyces pastorianus
ttcatcggcgtcctattttcaaggt

SEQ ID NO: 83551 - DNA, 25 bp, Saccharomyces pastorianus
gcctatactgatcttttggtcggga

SEQ ID NO: 83552 - DNA, 25 bp, Saccharomyces pastorianus
tggtccgatttggtacgtcttgcac

SEQ ID NO: 83553 - DNA, 25 bp, Saccharomyces pastorianus
ctggtatcactggactttgcctata

SEQ ID NO: 83554 - DNA, 25 bp, Saccharomyces pastorianus
tgataagaggttccacttggccctt

SEQ ID NO: 83555 - DNA, 25 bp, Saccharomyces pastorianus
cctgcattgcgcttttaatttcggc

SEQ ID NO: 83556 - DNA, 25 bp, Saccharomyces pastorianus
tcaccacactgttcgccacaagata

SEQ ID NO: 83557 - DNA, 25 bp, Saccharomyces pastorianus
tggcccttttaatcagccatctgat

SEQ ID NO: 83558 - DNA, 25 bp, Saccharomyces pastorianus
aagtcgcagttgcagtgcccttcct

SEQ ID NO: 83559 - DNA, 25 bp, Saccharomyces pastorianus
atctgatagcgctcaccacactgtt

SEQ ID NO: 83560 - DNA, 25 bp, Saccharomyces pastorianus
gcatcctgcccgatttatggtcttc

SEQ ID NO: 83561 - DNA, 25 bp, Saccharomyces pastorianus
agctttccgcaacagtacctgcatt

SEQ ID NO: 83562 - DNA, 25 bp, Saccharomyces pastorianus
atttcggcaggaagtttatgtacca

SEQ ID NO: 83563 - DNA, 25 bp, Saccharomyces pastorianus
cgatgattgcatggcaagtcgcagt

SEQ ID NO: 83564 - DNA, 25 bp, Saccharomyces pastorianus
tgcccgatttatggtcttccctgtg

SEQ ID NO: 83565 - DNA, 25 bp, Saccharomyces pastorianus
aactgtatctttcctaccagcaagc

SEQ ID NO: 83566 - DNA, 25 bp, Saccharomyces pastorianus
aaccagcatcatcaagaccctttgg

SEQ ID NO: 83567 - DNA, 25 bp, Saccharomyces pastorianus
caccttcgaatacattttgccgtca

SEQ ID NO: 83568 - DNA, 25 bp, Saccharomyces pastorianus
tcgacatccgccgatttaatcaatg

SEQ ID NO: 83569 - DNA, 25 bp, Saccharomyces pastorianus
acatctagctctattggcaccaaca

SEQ ID NO: 83570 - DNA, 25 bp, Saccharomyces pastorianus
agtgaacatgtcttcgtccgcatca

SEQ ID NO: 83571 - DNA, 25 bp, Saccharomyces pastorianus
taatcaatgatttacccgtgggccc

SEQ ID NO: 83572 - DNA, 25 bp, Saccharomyces pastorianus
gaggatttttcgacggcaccagtga

SEQ ID NO: 83573 - DNA, 25 bp, Saccharomyces pastorianus
ggcagcttccacaaatttatcgtcg

SEQ ID NO: 83574 - DNA, 25 bp, Saccharomyces pastorianus
agacgcagttctccacgaggtactt

SEQ ID NO: 83575 - DNA, 25 bp, Saccharomyces pastorianus
agttcgcttatctcggatctacatt

SEQ ID NO: 83576 - DNA, 25 bp, Saccharomyces pastorianus
caagcttgctggtgaacgtagtaac

SEQ ID NO: 83577 - DNA, 25 bp, Saccharomyces pastorianus
gaaggacgccaagattctgacttat

SEQ ID NO: 83578 - DNA, 25 bp, Saccharomyces pastorianus
aggttatatccgcaactagtggtaa

SEQ ID NO: 83579 - DNA, 25 bp, Saccharomyces pastorianus
gcatgcaattaatcaggtcgaccct

SEQ ID NO: 83580 - DNA, 25 bp, Saccharomyces pastorianus
gatgacacttttatacggaacctgg

SEQ ID NO: 83581 - DNA, 25 bp, Saccharomyces pastorianus
agacaccttccgtgaattttccaag

SEQ ID NO: 83582 - DNA, 25 bp, Saccharomyces pastorianus
agatcgtactacttagacaccttcc

SEQ ID NO: 83583 - DNA, 25 bp, Saccharomyces pastorianus
aatcatgaggcgttgagatcgtact

SEQ ID NO: 83584 - DNA, 25 bp, Saccharomyces pastorianus
aactgccaggatttgtctattccag

SEQ ID NO: 83585 - DNA, 25 bp, Saccharomyces pastorianus
cgcccagtttttgaagttattgcat

SEQ ID NO: 83586 - DNA, 25 bp, Saccharomyces pastorianus
ggtcgaccctcaagaattgatggat

SEQ ID NO: 83587 - DNA, 25 bp, Saccharomyces pastorianus
tttgccacctactgcggcgttgatg

SEQ ID NO: 83588 - DNA, 25 bp, Saccharomyces pastorianus
tgagaaggccatcttcatttttgtc

SEQ ID NO: 83589 - DNA, 25 bp, Saccharomyces pastorianus
taagtctgaatatccatttgaaaaa

SEQ ID NO: 83590 - DNA, 25 bp, Saccharomyces pastorianus
aagagaattatgctaccccctgaga

SEQ ID NO: 83591 - DNA, 25 bp, Saccharomyces pastorianus
aatatctagttcctgctgaccttac

SEQ ID NO: 83592 - DNA, 25 bp, Saccharomyces pastorianus
ttgctgacaggttcaagaataggat

SEQ ID NO: 83593 - DNA, 25 bp, Saccharomyces pastorianus
tgaagtctacatttaagtctgaata

SEQ ID NO: 83594 - DNA, 25 bp, Saccharomyces pastorianus
tactgcggcgttgatgtctgccata

SEQ ID NO: 83595 - DNA, 25 bp, Saccharomyces pastorianus
gtcaatgatactttgccacctactg

SEQ ID NO: 83596 - DNA, 25 bp, Saccharomyces pastorianus
gtaaatatctagttcctgctgacct

SEQ ID NO: 83597 - DNA, 25 bp, Saccharomyces pastorianus
tcggagaggattgctgacaggttca

SEQ ID NO: 83598 - DNA, 25 bp, Saccharomyces pastorianus
agccgtcatatttggcaatgtcgga

SEQ ID NO: 83599 - DNA, 25 bp, Saccharomyces pastorianus
gagacagttagcattacatgactct

SEQ ID NO: 83600 - DNA, 25 bp, Saccharomyces pastorianus
aattgggtctatctttgagccgtca

SEQ ID NO: 83601 - DNA, 25 bp, Saccharomyces pastorianus
caaaccacacttctttctcaatttt

SEQ ID NO: 83602 - DNA, 25 bp, Saccharomyces pastorianus
tttttggattctgttgaccagctct

SEQ ID NO: 83603 - DNA, 25 bp, Saccharomyces pastorianus
atacaacattatcggtggagacagt

SEQ ID NO: 83604 - DNA, 25 bp, Saccharomyces pastorianus
ctaaaacatcgtcggtggcttccaa

SEQ ID NO: 83605 - DNA, 25 bp, Saccharomyces pastorianus
gtcggatctacaggtcttgcttaac

SEQ ID NO: 83606 - DNA, 25 bp, Saccharomyces pastorianus
ttcgtactccactaaaacatcgtcg

SEQ ID NO: 83607 - DNA, 25 bp, Saccharomyces pastorianus
aaaatgttctttgacaatggcttca

SEQ ID NO: 83608 - DNA, 25 bp, Saccharomyces pastorianus
atggcttcaaagtcgatagtatctt

SEQ ID NO: 83609 - DNA, 25 bp, Saccharomyces pastorianus
gaaacagcgtctcaggaaaccattg

SEQ ID NO: 83610 - DNA, 25 bp, Saccharomyces pastorianus
aaaggtaggctctcgaaggatgata

SEQ ID NO: 83611 - DNA, 25 bp, Saccharomyces pastorianus
atgcccaactcaggtgctacgggag

SEQ ID NO: 83612 - DNA, 25 bp, Saccharomyces pastorianus
ggtattcttaatgtgtctgctttgg

SEQ ID NO: 83613 - DNA, 25 bp, Saccharomyces pastorianus
gaattaagtggcattccgcctgctc

SEQ ID NO: 83614 - DNA, 25 bp, Saccharomyces pastorianus
aaattttacggtgctggtgccggcg

SEQ ID NO: 83615 - DNA, 25 bp, Saccharomyces pastorianus
ttgatgttacctttgatatcgacgc

SEQ ID NO: 83616 - DNA, 25 bp, Saccharomyces pastorianus
tggttagatgcatcgcaggcagcct

SEQ ID NO: 83617 - DNA, 25 bp, Saccharomyces pastorianus
tgctcccagaggtgtgcctcaaatt

SEQ ID NO: 83618 - DNA, 25 bp, Saccharomyces pastorianus
caggcagcctctacggacgaatata

SEQ ID NO: 83619 - DNA, 25 bp, Saccharomyces pastorianus
gcttgaatcatatgcatttactttg

SEQ ID NO: 83620 - DNA, 25 bp, Saccharomyces pastorianus
gacgaggatgatgagcacaacccta

SEQ ID NO: 83621 - DNA, 25 bp, Saccharomyces pastorianus
tatgttcaagcgctacagtgcctaa

SEQ ID NO: 83622 - DNA, 25 bp, Saccharomyces pastorianus
atatttgtctgtattcgtcatttca

SEQ ID NO: 83623 - DNA, 25 bp, Saccharomyces pastorianus
gatcctgcacattctttaaactata

SEQ ID NO: 83624 - DNA, 25 bp, Saccharomyces pastorianus
aagtcttactacttgaacactgtaa

SEQ ID NO: 83625 - DNA, 25 bp, Saccharomyces pastorianus
ctacgggtcgagtttgcaatggcac

SEQ ID NO: 83626 - DNA, 25 bp, Saccharomyces pastorianus
tgccatgttttttggtaactacggg

SEQ ID NO: 83627 - DNA, 25 bp, Saccharomyces pastorianus
cagtgcctaaacatatgctcgataa

SEQ ID NO: 83628 - DNA, 25 bp, Saccharomyces pastorianus
gagaagccataaggcctggccatga

SEQ ID NO: 83629 - DNA, 25 bp, Saccharomyces pastorianus
gacgacgctcttatttacggtatca

SEQ ID NO: 83630 - DNA, 25 bp, Saccharomyces pastorianus
atggcacgctatgatcgaactgata

SEQ ID NO: 83631 - DNA, 25 bp, Saccharomyces pastorianus
gatgtccttgattccgtgaaatggc

SEQ ID NO: 83632 - DNA, 25 bp, Saccharomyces pastorianus
gatattttgttttttagccccatgt

SEQ ID NO: 83633 - DNA, 25 bp, Saccharomyces pastorianus
ggaggatctttggtgtccattcatc

SEQ ID NO: 83634 - DNA, 25 bp, Saccharomyces pastorianus
cagtattcattgcaggcttccgata

SEQ ID NO: 83635 - DNA, 25 bp, Saccharomyces pastorianus
gaaatattcgtgttcgtgcgtcgcg

SEQ ID NO: 83636 - DNA, 25 bp, Saccharomyces pastorianus
gaaatggctgattctccttgacatt

SEQ ID NO: 83637 - DNA, 25 bp, Saccharomyces pastorianus
ttacctcaatcggagcagatgtgaa

SEQ ID NO: 83638 - DNA, 25 bp, Saccharomyces pastorianus
gtcgcgattttttccgctttcaaga

SEQ ID NO: 83639 - DNA, 25 bp, Saccharomyces pastorianus
gtccattcatctcattaaaccctaa

SEQ ID NO: 83640 - DNA, 25 bp, Saccharomyces pastorianus
agccccatgtcccagcgataaggag

SEQ ID NO: 83641 - DNA, 25 bp, Saccharomyces pastorianus
gatcgatccctatagttacctcaat

SEQ ID NO: 83642 - DNA, 25 bp, Saccharomyces pastorianus
cgttgaatctcaattcagcgccggt

SEQ ID NO: 83643 - DNA, 25 bp, Saccharomyces pastorianus
aagatcgaatcttccgttgaatctc

SEQ ID NO: 83644 - DNA, 25 bp, Saccharomyces pastorianus
aagttcgaattaggccgtcaaccag

SEQ ID NO: 83645 - DNA, 25 bp, Saccharomyces pastorianus
gagaaagttcgaattaggccgtcaa

SEQ ID NO: 83646 - DNA, 25 bp, Saccharomyces pastorianus
cgtcacaaaagatccgctaccggtg

SEQ ID NO: 83647 - DNA, 25 bp, Saccharomyces pastorianus
tcgaattaggccgtcaaccagccaa

SEQ ID NO: 83648 - DNA, 25 bp, Saccharomyces pastorianus
aactgttgccaagagcaagaacgct

SEQ ID NO: 83649 - DNA, 25 bp, Saccharomyces pastorianus
gagctctaagaattgaaaccggtaa

SEQ ID NO: 83650 - DNA, 25 bp, Saccharomyces pastorianus
aaaagatccgctaccggtgccaagc

SEQ ID NO: 83651 - DNA, 25 bp, Saccharomyces pastorianus
atggttcgaagctcactacggtcaa

SEQ ID NO: 83652 - DNA, 25 bp, Saccharomyces pastorianus
cggtgccaagcgtgctcaattcaga

SEQ ID NO: 83653 - DNA, 25 bp, Saccharomyces pastorianus
ttatttacaggcctatcttaaagtt

SEQ ID NO: 83654 - DNA, 25 bp, Saccharomyces pastorianus
acaggcctatcttaaagttatagga

SEQ ID NO: 83655 - DNA, 25 bp, Saccharomyces pastorianus
ttcatatacgttatttacaggccta

SEQ ID NO: 83656 - DNA, 25 bp, Saccharomyces pastorianus
tatacgttatttacaggcctatctt

SEQ ID NO: 83657 - DNA, 25 bp, Saccharomyces pastorianus
catatacgttatttacaggcctatc

SEQ ID NO: 83658 - DNA, 25 bp, Saccharomyces pastorianus
tttacaggcctatcttaaagttata

SEQ ID NO: 83659 - DNA, 25 bp, Saccharomyces pastorianus
atggaactgcttcatatacgttatt

SEQ ID NO: 83660 - DNA, 25 bp, Saccharomyces pastorianus
tacgttatttacaggcctatcttaa

SEQ ID NO: 83661 - DNA, 25 bp, Saccharomyces pastorianus
gcttcatatacgttatttacaggcc

SEQ ID NO: 83662 - DNA, 25 bp, Saccharomyces pastorianus
agttataggaaattacacttgccat

SEQ ID NO: 83663 - DNA, 25 bp, Saccharomyces pastorianus
ggaactgcttcatatacgttattta

SEQ ID NO: 83664 - DNA, 25 bp, Saccharomyces pastorianus
atcaaatgttcacctatccttgtcc

SEQ ID NO: 83665 - DNA, 25 bp, Saccharomyces pastorianus
tatggcgtttgagcctgaaaatcaa

SEQ ID NO: 83666 - DNA, 25 bp, Saccharomyces pastorianus
acctatccttgtccctgtggagata

SEQ ID NO: 83667 - DNA, 25 bp, Saccharomyces pastorianus
gtttgtcccagctgctcactgatga

SEQ ID NO: 83668 - DNA, 25 bp, Saccharomyces pastorianus
ctggatgacatgtttgagggcgaaa

SEQ ID NO: 83669 - DNA, 25 bp, Saccharomyces pastorianus
ggcgaaaaagttgctgtttgtccca

SEQ ID NO: 83670 - DNA, 25 bp, Saccharomyces pastorianus
tgagtactacgaagaggcaggcata

SEQ ID NO: 83671 - DNA, 25 bp, Saccharomyces pastorianus
ttgtccctgtggagataggtttcaa

SEQ ID NO: 83672 - DNA, 25 bp, Saccharomyces pastorianus
taaagaagacttggctgagtactac

SEQ ID NO: 83673 - DNA, 25 bp, Saccharomyces pastorianus
gctgctcactgatgatcgatgtagt

SEQ ID NO: 83674 - DNA, 25 bp, Saccharomyces pastorianus
aaatcgaagatatggcgtttgagcc

SEQ ID NO: 83675 - DNA, 25 bp, Saccharomyces pastorianus
gggaatatacctgagctagctttga

SEQ ID NO: 83676 - DNA, 25 bp, Saccharomyces pastorianus
ttgcctcttggtatggaatgtcgta

SEQ ID NO: 83677 - DNA, 25 bp, Saccharomyces pastorianus
gggtcctggttcttcaaaatatctt

SEQ ID NO: 83678 - DNA, 25 bp, Saccharomyces pastorianus
aatgtcgtatttgtagctttcggaa

SEQ ID NO: 83679 - DNA, 25 bp, Saccharomyces pastorianus
atgggccctgttttagtatggaata

SEQ ID NO: 83680 - DNA, 25 bp, Saccharomyces pastorianus
atcgcttgcaatttagggtcctggt

SEQ ID NO: 83681 - DNA, 25 bp, Saccharomyces pastorianus
aggtctagcgactcttttcaaaaca

SEQ ID NO: 83682 - DNA, 25 bp, Saccharomyces pastorianus
aggcgccgagtgttcaacgatcatc

SEQ ID NO: 83683 - DNA, 25 bp, Saccharomyces pastorianus
caggagcgtccataggtatctcttt

SEQ ID NO: 83684 - DNA, 25 bp, Saccharomyces pastorianus
gtatctctttgggagcaggcgccga

SEQ ID NO: 83685 - DNA, 25 bp, Saccharomyces pastorianus
ttagccattgttcaacgtttgcctc

SEQ ID NO: 83686 - DNA, 25 bp, Saccharomyces pastorianus
aaaactagtgattgtaacgtctgca

SEQ ID NO: 83687 - DNA, 25 bp, Saccharomyces pastorianus
taacgtctgcaaatgggccccaagt

SEQ ID NO: 83688 - DNA, 25 bp, Saccharomyces pastorianus
gcgtacgtaaccactgtaggtgatt

SEQ ID NO: 83689 - DNA, 25 bp, Saccharomyces pastorianus
gattttcatcgattacttaacgtgt

SEQ ID NO: 83690 - DNA, 25 bp, Saccharomyces pastorianus
gaaatttcctgatctggctgatgaa

SEQ ID NO: 83691 - DNA, 25 bp, Saccharomyces pastorianus
attcacggcggtggtgcgtacgtaa

SEQ ID NO: 83692 - DNA, 25 bp, Saccharomyces pastorianus
atgggataacccaagtgccaatgca

SEQ ID NO: 83693 - DNA, 25 bp, Saccharomyces pastorianus
aaatttctcagtatgatccggtcga

SEQ ID NO: 83694 - DNA, 25 bp, Saccharomyces pastorianus
gtaggtgattacgttgccaattata

SEQ ID NO: 83695 - DNA, 25 bp, Saccharomyces pastorianus
gttgtactcgattttgtcggtggtt

SEQ ID NO: 83696 - DNA, 25 bp, Saccharomyces pastorianus
attctagttcattgattcacggcgg

SEQ ID NO: 83697 - DNA, 25 bp, Saccharomyces pastorianus
tatggcggatacttgtggtacgttg

SEQ ID NO: 83698 - DNA, 25 bp, Saccharomyces pastorianus
caatgctattttggtgtcgcctgat

SEQ ID NO: 83699 - DNA, 25 bp, Saccharomyces pastorianus
tgtttgcacaaataccgttccggta

SEQ ID NO: 83700 - DNA, 25 bp, Saccharomyces pastorianus
tagtcccacgttcgctgaagctata

SEQ ID NO: 83701 - DNA, 25 bp, Saccharomyces pastorianus
ggatttacctattgctgaccagatc

SEQ ID NO: 83702 - DNA, 25 bp, Saccharomyces pastorianus
aaactgctggtgctgatcatgtcat

SEQ ID NO: 83703 - DNA, 25 bp, Saccharomyces pastorianus
gtcatcacaatggatctccatgcct

SEQ ID NO: 83704 - DNA, 25 bp, Saccharomyces pastorianus
gagtagctgctttggctgacaagtt

SEQ ID NO: 83705 - DNA, 25 bp, Saccharomyces pastorianus
acggtattttctccggttcagcaag

SEQ ID NO: 83706 - DNA, 25 bp, Saccharomyces pastorianus
ttccatatcccggttgacaacctat

SEQ ID NO: 83707 - DNA, 25 bp, Saccharomyces pastorianus
ccagatcgatattagtcccacgttc

SEQ ID NO: 83708 - DNA, 25 bp, Saccharomyces pastorianus
gttaggtctgttttcgtcatcgatc

SEQ ID NO: 83709 - DNA, 25 bp, Saccharomyces pastorianus
aactctgatgctcctaactttgatg

SEQ ID NO: 83710 - DNA, 25 bp, Saccharomyces pastorianus
aatcgacgccttgcaattgactgac

SEQ ID NO: 83711 - DNA, 25 bp, Saccharomyces pastorianus
ttacgactacttgggtgactcttgg

SEQ ID NO: 83712 - DNA, 25 bp, Saccharomyces pastorianus
gattagactgatttttacctaccct

SEQ ID NO: 83713 - DNA, 25 bp, Saccharomyces pastorianus
gaaacgtggcattcctatatgatat

SEQ ID NO: 83714 - DNA, 25 bp, Saccharomyces pastorianus
gaagtcagcgcattcgccaaattga

SEQ ID NO: 83715 - DNA, 25 bp, Saccharomyces pastorianus
gaagatgttgagtcccacgaaaaat

SEQ ID NO: 83716 - DNA, 25 bp, Saccharomyces pastorianus
ggcagccagctgacgatgtcattat

SEQ ID NO: 83717 - DNA, 25 bp, Saccharomyces pastorianus
tcttgttttctcacccagcagattt

SEQ ID NO: 83718 - DNA, 25 bp, Saccharomyces pastorianus
tttgatgctgacacaacggttggta

SEQ ID NO: 83719 - DNA, 25 bp, Saccharomyces pastorianus
aactcggccaagtccaatagatcaa

SEQ ID NO: 83720 - DNA, 25 bp, Saccharomyces pastorianus
gaaaaaccccttcatgagcatacaa

SEQ ID NO: 83721 - DNA, 25 bp, Saccharomyces pastorianus
tgcctgatcaacctctaccaaaagt

SEQ ID NO: 83722 - DNA, 25 bp, Saccharomyces pastorianus
attttcctctttcacaattcagtcc

SEQ ID NO: 83723 - DNA, 25 bp, Saccharomyces pastorianus
gagaagatttaccaccgagccaata

SEQ ID NO: 83724 - DNA, 25 bp, Saccharomyces pastorianus
aaaaaccccagtgccagtgcctgat

SEQ ID NO: 83725 - DNA, 25 bp, Saccharomyces pastorianus
gacacatctaattctcgtacttgta

SEQ ID NO: 83726 - DNA, 25 bp, Saccharomyces pastorianus
gtatggacattttcactgctcacag

SEQ ID NO: 83727 - DNA, 25 bp, Saccharomyces pastorianus
ggctttacccttattggattatcca

SEQ ID NO: 83728 - DNA, 25 bp, Saccharomyces pastorianus
gaggtactttctgaacattgcgaga

SEQ ID NO: 83729 - DNA, 25 bp, Saccharomyces pastorianus
gcgtcagtaatcaaggctttaccct

SEQ ID NO: 83730 - DNA, 25 bp, Saccharomyces pastorianus
ccttgacattccctttgctgaggaa

SEQ ID NO: 83731 - DNA, 25 bp, Saccharomyces pastorianus
aatttgcaaaccttgtggctcacga

SEQ ID NO: 83732 - DNA, 25 bp, Saccharomyces pastorianus
tttgctgccatcgactgctcagcaa

SEQ ID NO: 83733 - DNA, 25 bp, Saccharomyces pastorianus
ctgcaggaaaatctttacgagtcat

SEQ ID NO: 83734 - DNA, 25 bp, Saccharomyces pastorianus
gaactgcccatatttgatgaactaa

SEQ ID NO: 83735 - DNA, 25 bp, Saccharomyces pastorianus
ttgttcttcaagctcgtaggttttt

SEQ ID NO: 83736 - DNA, 25 bp, Saccharomyces pastorianus
gatgcttgtatcagaacccgtttta

SEQ ID NO: 83737 - DNA, 25 bp, Saccharomyces pastorianus
tacgagtcatgtttgaactgcccat

SEQ ID NO: 83738 - DNA, 25 bp, Saccharomyces pastorianus
tgaactaacttcttgctttgctgcc

SEQ ID NO: 83739 - DNA, 25 bp, Saccharomyces pastorianus
gaagaacttttcctgatgcttgtat

SEQ ID NO: 83740 - DNA, 25 bp, Saccharomyces pastorianus
gtggctcacgatcacgttttgaatt

SEQ ID NO: 83741 - DNA, 25 bp, Saccharomyces pastorianus
atgctggtttgccaaaggcccaatt

SEQ ID NO: 83742 - DNA, 25 bp, Saccharomyces pastorianus
gcatggcaaaggctgtgatcgtaac

SEQ ID NO: 83743 - DNA, 25 bp, Saccharomyces pastorianus
tttcaatgggccttgcgtgcagcta

SEQ ID NO: 83744 - DNA, 25 bp, Saccharomyces pastorianus
gtgatcgtgagccacaaggtttgca

SEQ ID NO: 83745 - DNA, 25 bp, Saccharomyces pastorianus
cactctgggctacttctatgagcat

SEQ ID NO: 83746 - DNA, 25 bp, Saccharomyces pastorianus
gacggtggactagccagcattggta

SEQ ID NO: 83747 - DNA, 25 bp, Saccharomyces pastorianus
taaaacgggttctgatacaagcatc

SEQ ID NO: 83748 - DNA, 25 bp, Saccharomyces pastorianus
gaaaagttcttcctcagcaaaggga

SEQ ID NO: 83749 - DNA, 25 bp, Saccharomyces pastorianus
agctacgctcaagggacggtggact

SEQ ID NO: 83750 - DNA, 25 bp, Saccharomyces pastorianus
atgactcgtaaagattttcctgcag

SEQ ID NO: 83751 - DNA, 25 bp, Saccharomyces pastorianus
atgggcagttcaaacatgactcgta

SEQ ID NO: 83752 - DNA, 25 bp, Saccharomyces pastorianus
gatttctccagttcctttaacacaa

SEQ ID NO: 83753 - DNA, 25 bp, Saccharomyces pastorianus
agtgttgaagaagcccacaagttta

SEQ ID NO: 83754 - DNA, 25 bp, Saccharomyces pastorianus
attgatgaacttcaccagacagctt

SEQ ID NO: 83755 - DNA, 25 bp, Saccharomyces pastorianus
gtttatggactgtatcaacttctgg

SEQ ID NO: 83756 - DNA, 25 bp, Saccharomyces pastorianus
cttctgggcaggtaggatttctcca

SEQ ID NO: 83757 - DNA, 25 bp, Saccharomyces pastorianus
taaactggtcgaaatttggagcttt

SEQ ID NO: 83758 - DNA, 25 bp, Saccharomyces pastorianus
aattcgaagccgtatctaatgcaga

SEQ ID NO: 83759 - DNA, 25 bp, Saccharomyces pastorianus
cacgcttccctcaatcttaaaaata

SEQ ID NO: 83760 - DNA, 25 bp, Saccharomyces pastorianus
ttaccgttagttttccagagaatat

SEQ ID NO: 83761 - DNA, 25 bp, Saccharomyces pastorianus
gaccaaagcttgttctggagttcca

SEQ ID NO: 83762 - DNA, 25 bp, Saccharomyces pastorianus
aagatcttgacagagcacgcttccc

SEQ ID NO: 83763 - DNA, 25 bp, Saccharomyces pastorianus
aggaacaacccacgtcggacaatga

SEQ ID NO: 83764 - DNA, 25 bp, Saccharomyces pastorianus
aggttttcaagtggccgatggtccg

SEQ ID NO: 83765 - DNA, 25 bp, Saccharomyces pastorianus
atggtccgctttatcgctatgatga

SEQ ID NO: 83766 - DNA, 25 bp, Saccharomyces pastorianus
ggagggctccattaaagctcttaga

SEQ ID NO: 83767 - DNA, 25 bp, Saccharomyces pastorianus
acgcctttcctatcaaaccaataag

SEQ ID NO: 83768 - DNA, 25 bp, Saccharomyces pastorianus
atgcgaacactgacccatcgaggaa

SEQ ID NO: 83769 - DNA, 25 bp, Saccharomyces pastorianus
agggccaaaggctagggtctcctat

SEQ ID NO: 83770 - DNA, 25 bp, Saccharomyces pastorianus
gatgatcctgcgaacagtttctatt

SEQ ID NO: 83771 - DNA, 25 bp, Saccharomyces pastorianus
tccaaagaatgagacacccgctgct

SEQ ID NO: 83772 - DNA, 25 bp, Saccharomyces pastorianus
gaagttttgcgctgcaattccacag

SEQ ID NO: 83773 - DNA, 25 bp, Saccharomyces pastorianus
gaatcatcacctgcggaggttccaa

SEQ ID NO: 83774 - DNA, 25 bp, Saccharomyces pastorianus
atatccaaacgtcttttgtccaaag

SEQ ID NO: 83775 - DNA, 25 bp, Saccharomyces pastorianus
agtgctactccctcaaagttatcag

SEQ ID NO: 83776 - DNA, 25 bp, Saccharomyces pastorianus
acttgttttcgttggaggctctatt

SEQ ID NO: 83777 - DNA, 25 bp, Saccharomyces pastorianus
tgttcacccacaactgaaggctcag

SEQ ID NO: 83778 - DNA, 25 bp, Saccharomyces pastorianus
gaactggccctattgacttgttttc

SEQ ID NO: 83779 - DNA, 25 bp, Saccharomyces pastorianus
gaattaggcagcagtgctactccct

SEQ ID NO: 83780 - DNA, 25 bp, Saccharomyces pastorianus
gtatttccattgttgctttactaaa

SEQ ID NO: 83781 - DNA, 25 bp, Saccharomyces pastorianus
ggcatctttaagcaatgcggctgca

SEQ ID NO: 83782 - DNA, 25 bp, Saccharomyces pastorianus
aaataaggcagaggcccagctccga

SEQ ID NO: 83783 - DNA, 25 bp, Saccharomyces pastorianus
tgacggcaacacttcttatttccat

SEQ ID NO: 83784 - DNA, 25 bp, Saccharomyces pastorianus
acaagaccgcttgaatcgtagtaaa

SEQ ID NO: 83785 - DNA, 25 bp, Saccharomyces pastorianus
gaaggttatctacatcgcaatccgt

SEQ ID NO: 83786 - DNA, 25 bp, Saccharomyces pastorianus
agctttcttctatgaccagcgcaaa

SEQ ID NO: 83787 - DNA, 25 bp, Saccharomyces pastorianus
aaatcacgcacacgaggactttctt

SEQ ID NO: 83788 - DNA, 25 bp, Saccharomyces pastorianus
gttagcccgtatatgtcacccagaa

SEQ ID NO: 83789 - DNA, 25 bp, Saccharomyces pastorianus
attcgctaataaacacccgtggtct

SEQ ID NO: 83790 - DNA, 25 bp, Saccharomyces pastorianus
aatccgttcattatcatccacagca

SEQ ID NO: 83791 - DNA, 25 bp, Saccharomyces pastorianus
cgccatcgcagcaatcgcaaaatta

SEQ ID NO: 83792 - DNA, 25 bp, Saccharomyces pastorianus
caaaaccatttgtcgccgctagaaa

SEQ ID NO: 83793 - DNA, 25 bp, Saccharomyces pastorianus
aatactatcttaaccccatagcgtc

SEQ ID NO: 83794 - DNA, 25 bp, Saccharomyces pastorianus
ggaggatgacattgacccactgcac

SEQ ID NO: 83795 - DNA, 25 bp, Saccharomyces pastorianus
agagcttccttggtagttagcccgt

SEQ ID NO: 83796 - DNA, 25 bp, Saccharomyces pastorianus
tattcttcgtcatcctctattagag

SEQ ID NO: 83797 - DNA, 25 bp, Saccharomyces pastorianus
atctacatcgttttctacttcatcc

SEQ ID NO: 83798 - DNA, 25 bp, Saccharomyces pastorianus
ggcgttttcacctacatataattca

SEQ ID NO: 83799 - DNA, 25 bp, Saccharomyces pastorianus
aatatatacccatcgccgcttattc

SEQ ID NO: 83800 - DNA, 25 bp, Saccharomyces pastorianus
ttactatatcgttttcatcctgctc

SEQ ID NO: 83801 - DNA, 25 bp, Saccharomyces pastorianus
cctcctcatcattttcttctgatat

SEQ ID NO: 83802 - DNA, 25 bp, Saccharomyces pastorianus
actgtcttcttcatatgtgtcttcc

SEQ ID NO: 83803 - DNA, 25 bp, Saccharomyces pastorianus
gatatttgctcatcctcaatgtcat

SEQ ID NO: 83804 - DNA, 25 bp, Saccharomyces pastorianus
gtcttcatcttctttggcgttttca

SEQ ID NO: 83805 - DNA, 25 bp, Saccharomyces pastorianus
tcaagggtaaagtcttcgtcttcgt

SEQ ID NO: 83806 - DNA, 25 bp, Saccharomyces pastorianus
ctccttccttatgtggcttactata

SEQ ID NO: 83807 - DNA, 25 bp, Saccharomyces pastorianus
gtgctggaaagcatccatgatcgca

SEQ ID NO: 83808 - DNA, 25 bp, Saccharomyces pastorianus
gacgaagacgaagactttacccttg

SEQ ID NO: 83809 - DNA, 25 bp, Saccharomyces pastorianus
aacaccacttggaaatcatgcagct

SEQ ID NO: 83810 - DNA, 25 bp, Saccharomyces pastorianus
gaaactcattgggagctctgcttca

SEQ ID NO: 83811 - DNA, 25 bp, Saccharomyces pastorianus
ggagctctgcttcaccattaaaaac

SEQ ID NO: 83812 - DNA, 25 bp, Saccharomyces pastorianus
gactttacccttgatgatgacattg

SEQ ID NO: 83813 - DNA, 25 bp, Saccharomyces pastorianus
gtttcctccttaacagagtatatgt

SEQ ID NO: 83814 - DNA, 25 bp, Saccharomyces pastorianus
tccatgatcgcaaagggataccaag

SEQ ID NO: 83815 - DNA, 25 bp, Saccharomyces pastorianus
gaaccggaagtacctgctactgatt

SEQ ID NO: 83816 - DNA, 25 bp, Saccharomyces pastorianus
tcatgcagctaggagaaacgatact

SEQ ID NO: 83817 - DNA, 25 bp, Saccharomyces pastorianus
ttgaagacactgtttcctccttaac

SEQ ID NO: 83818 - DNA, 25 bp, Saccharomyces pastorianus
gattgcgttactccatatatattga

SEQ ID NO: 83819 - DNA, 25 bp, Saccharomyces pastorianus
tgagcttcatcacctacggttgtag

SEQ ID NO: 83820 - DNA, 25 bp, Saccharomyces pastorianus
gttattccactctcagcatcgatcg

SEQ ID NO: 83821 - DNA, 25 bp, Saccharomyces pastorianus
gtgatattctttgtcattggtgcaa

SEQ ID NO: 83822 - DNA, 25 bp, Saccharomyces pastorianus
ggaccggaactgcttatttaatgaa

SEQ ID NO: 83823 - DNA, 25 bp, Saccharomyces pastorianus
tttccagttccttccagattatttc

SEQ ID NO: 83824 - DNA, 25 bp, Saccharomyces pastorianus
ttgcaagacacatctttccagttcc

SEQ ID NO: 83825 - DNA, 25 bp, Saccharomyces pastorianus
ttgaaaatccgttatcttccccatc

SEQ ID NO: 83826 - DNA, 25 bp, Saccharomyces pastorianus
ttccccatcatcatcgtataaatca

SEQ ID NO: 83827 - DNA, 25 bp, Saccharomyces pastorianus
agaatgttgactggcgactacttag

SEQ ID NO: 83828 - DNA, 25 bp, Saccharomyces pastorianus
ggttggaaatacttgcagagcagca

SEQ ID NO: 83829 - DNA, 25 bp, Saccharomyces pastorianus
gttttttcttacagggccattgact

SEQ ID NO: 83830 - DNA, 25 bp, Saccharomyces pastorianus
aagaatctggtctttcttccttcta

SEQ ID NO: 83831 - DNA, 25 bp, Saccharomyces pastorianus
acagataatctcttatgagcctagc

SEQ ID NO: 83832 - DNA, 25 bp, Saccharomyces pastorianus
gtctttcttccttctattttgattg

SEQ ID NO: 83833 - DNA, 25 bp, Saccharomyces pastorianus
gattgggtatatttctattcgtgtt

SEQ ID NO: 83834 - DNA, 25 bp, Saccharomyces pastorianus
tcaagtagcctttattttttcattg

SEQ ID NO: 83835 - DNA, 25 bp, Saccharomyces pastorianus
attcgtgtttcattactggtctggg

SEQ ID NO: 83836 - DNA, 25 bp, Saccharomyces pastorianus
gccattgacttatgccctgaacgag

SEQ ID NO: 83837 - DNA, 25 bp, Saccharomyces pastorianus
ggtccagttgttttcaagtagcctt

SEQ ID NO: 83838 - DNA, 25 bp, Saccharomyces pastorianus
atgagcctagctactttgttttttc

SEQ ID NO: 83839 - DNA, 25 bp, Saccharomyces pastorianus
atgccctgaacgagtcttactttac

SEQ ID NO: 83840 - DNA, 25 bp, Saccharomyces pastorianus
gaaggactgttaccaggtgacgaat

SEQ ID NO: 83841 - DNA, 25 bp, Saccharomyces pastorianus
gcaacgggcaggttctccataatag

SEQ ID NO: 83842 - DNA, 25 bp, Saccharomyces pastorianus
tgatgatcacatgggcagcacagat

SEQ ID NO: 83843 - DNA, 25 bp, Saccharomyces pastorianus
atgagatctcatcgagccaggagga

SEQ ID NO: 83844 - DNA, 25 bp, Saccharomyces pastorianus
gaggaagcccacagatttagataac

SEQ ID NO: 83845 - DNA, 25 bp, Saccharomyces pastorianus
aacatggatctcacgacgccaaaga

SEQ ID NO: 83846 - DNA, 25 bp, Saccharomyces pastorianus
aagaggatgctcgtgaaaaccatga

SEQ ID NO: 83847 - DNA, 25 bp, Saccharomyces pastorianus
tcctcaatgccatggacggcagtaa

SEQ ID NO: 83848 - DNA, 25 bp, Saccharomyces pastorianus
aaatataaacataccgcaacgggca

SEQ ID NO: 83849 - DNA, 25 bp, Saccharomyces pastorianus
gattgctggtattacctaccgtgag

SEQ ID NO: 83850 - DNA, 25 bp, Saccharomyces pastorianus
agtccatcgatgagctcttcacaag

SEQ ID NO: 83851 - DNA, 25 bp, Saccharomyces pastorianus
actctatcctctactgacagtgaag

SEQ ID NO: 83852 - DNA, 25 bp, Saccharomyces pastorianus
ttcacaccgcacctaattatcaata

SEQ ID NO: 83853 - DNA, 25 bp, Saccharomyces pastorianus
agatccagatgctgacactctatcc

SEQ ID NO: 83854 - DNA, 25 bp, Saccharomyces pastorianus
atagttcagcgccaatctttcgtgt

SEQ ID NO: 83855 - DNA, 25 bp, Saccharomyces pastorianus
gtacgattactctggcggtgattat

SEQ ID NO: 83856 - DNA, 25 bp, Saccharomyces pastorianus
acaaactctcattccgagcagacgg

SEQ ID NO: 83857 - DNA, 25 bp, Saccharomyces pastorianus
aggacactgaaacgctcgatgctgt

SEQ ID NO: 83858 - DNA, 25 bp, Saccharomyces pastorianus
gatgaacttgccgaatcaacgccgc

SEQ ID NO: 83859 - DNA, 25 bp, Saccharomyces pastorianus
cgatgtcgacgatggttccgtacca

SEQ ID NO: 83860 - DNA, 25 bp, Saccharomyces pastorianus
tcgtgtgctctctcggcgggtaaat

SEQ ID NO: 83861 - DNA, 25 bp, Saccharomyces pastorianus
atgtactttagttttcacaccgcac

SEQ ID NO: 83862 - DNA, 25 bp, Saccharomyces pastorianus
accattgcgatgtgggtgtttgctg

SEQ ID NO: 83863 - DNA, 25 bp, Saccharomyces pastorianus
ggtctgatttgctcaagtacatttt

SEQ ID NO: 83864 - DNA, 25 bp, Saccharomyces pastorianus
atgtcatcacctacaatcgacttca

SEQ ID NO: 83865 - DNA, 25 bp, Saccharomyces pastorianus
gaataacgagaaaacccagtaccat

SEQ ID NO: 83866 - DNA, 25 bp, Saccharomyces pastorianus
gtcatcacctacaatcgacttcaac

SEQ ID NO: 83867 - DNA, 25 bp, Saccharomyces pastorianus
atccggtaattgaattcttccacag

SEQ ID NO: 83868 - DNA, 25 bp, Saccharomyces pastorianus
atgttcatgtcatcacctacaatcg

SEQ ID NO: 83869 - DNA, 25 bp, Saccharomyces pastorianus
gaaaacccagtaccattgcgatgtg

SEQ ID NO: 83870 - DNA, 25 bp, Saccharomyces pastorianus
gctggtctgatttgctcaagtacat

SEQ ID NO: 83871 - DNA, 25 bp, Saccharomyces pastorianus
gtgtttgctggtctgatttgctcaa

SEQ ID NO: 83872 - DNA, 25 bp, Saccharomyces pastorianus
gaattcttccacagaataacgagaa

SEQ ID NO: 83873 - DNA, 25 bp, Saccharomyces pastorianus
tgctactcaatatcacccagaatac

SEQ ID NO: 83874 - DNA, 25 bp, Saccharomyces pastorianus
gaagttatacggtgacgtctccgaa

SEQ ID NO: 83875 - DNA, 25 bp, Saccharomyces pastorianus
gtgaaaatcacattccattcttagg

SEQ ID NO: 83876 - DNA, 25 bp, Saccharomyces pastorianus
tgacgtctccgaagtccatgaaaga

SEQ ID NO: 83877 - DNA, 25 bp, Saccharomyces pastorianus
taggtttgagaccaacatttttcca

SEQ ID NO: 83878 - DNA, 25 bp, Saccharomyces pastorianus
cacgttgtcgttttcatgcctgaaa

SEQ ID NO: 83879 - DNA, 25 bp, Saccharomyces pastorianus
cggcagaattttatccagacattga

SEQ ID NO: 83880 - DNA, 25 bp, Saccharomyces pastorianus
gaaaagacagtcattcggcagaatt

SEQ ID NO: 83881 - DNA, 25 bp, Saccharomyces pastorianus
ggtcttagatccatccaaaccattt

SEQ ID NO: 83882 - DNA, 25 bp, Saccharomyces pastorianus
gaatcatccatactatattgctact

SEQ ID NO: 83883 - DNA, 25 bp, Saccharomyces pastorianus
catttttgggtttagttgctgcttc

SEQ ID NO: 83884 - DNA, 25 bp, Saccharomyces pastorianus
aacaggtggttaacgttcacgatgt

SEQ ID NO: 83885 - DNA, 25 bp, Saccharomyces pastorianus
acaggtggttaacgttcacgatgtt

SEQ ID NO: 83886 - DNA, 25 bp, Saccharomyces pastorianus
tgaacaggtggttaacgttcacgat

SEQ ID NO: 83887 - DNA, 25 bp, Saccharomyces pastorianus
caggtggttaacgttcacgatgtta

SEQ ID NO: 83888 - DNA, 25 bp, Saccharomyces pastorianus
cctgaacaggtggttaacgttcacg

SEQ ID NO: 83889 - DNA, 25 bp, Saccharomyces pastorianus
gaacaggtggttaacgttcacgatg

SEQ ID NO: 83890 - DNA, 25 bp, Saccharomyces pastorianus
ctgaacaggtggttaacgttcacga

SEQ ID NO: 83891 - DNA, 25 bp, Saccharomyces pastorianus
gcctgaacaggtggttaacgttcac

SEQ ID NO: 83892 - DNA, 25 bp, Saccharomyces pastorianus
gtgccagttcgtacaggtggttcaa

SEQ ID NO: 83893 - DNA, 25 bp, Saccharomyces pastorianus
aaatcctaaagacgacccagtgaag

SEQ ID NO: 83894 - DNA, 25 bp, Saccharomyces pastorianus
gaatatgcgccacgtttcaaaatcg

SEQ ID NO: 83895 - DNA, 25 bp, Saccharomyces pastorianus
aagggatccactttgcaatttggta

SEQ ID NO: 83896 - DNA, 25 bp, Saccharomyces pastorianus
gtcaggcctttaaacaatggtcatt

SEQ ID NO: 83897 - DNA, 25 bp, Saccharomyces pastorianus
gtatccttggattctctggttagag

SEQ ID NO: 83898 - DNA, 25 bp, Saccharomyces pastorianus
aaacgttgctgtatgtatcaagggt

SEQ ID NO: 83899 - DNA, 25 bp, Saccharomyces pastorianus
gtacccacagggaagatccttttcg

SEQ ID NO: 83900 - DNA, 25 bp, Saccharomyces pastorianus
ataacaccactattgctaggagatt

SEQ ID NO: 83901 - DNA, 25 bp, Saccharomyces pastorianus
gatatctgcgcaacagctgaaggaa

SEQ ID NO: 83902 - DNA, 25 bp, Saccharomyces pastorianus
gaaggtattaggatatctgcgcaac

SEQ ID NO: 83903 - DNA, 25 bp, Saccharomyces pastorianus
gatcagaccagtgttcgtagtacat

SEQ ID NO: 83904 - DNA, 25 bp, Saccharomyces pastorianus
cagccgttggaagactttgagcgat

SEQ ID NO: 83905 - DNA, 25 bp, Saccharomyces pastorianus
gacggactcctactattgacgcaaa

SEQ ID NO: 83906 - DNA, 25 bp, Saccharomyces pastorianus
ttagcagcgatgtcaatcctagcat

SEQ ID NO: 83907 - DNA, 25 bp, Saccharomyces pastorianus
atttggcacagttcatcagccgttg

SEQ ID NO: 83908 - DNA, 25 bp, Saccharomyces pastorianus
acattgtttgtctcgggtattattc

SEQ ID NO: 83909 - DNA, 25 bp, Saccharomyces pastorianus
gaatattaatacaccttctactgct

SEQ ID NO: 83910 - DNA, 25 bp, Saccharomyces pastorianus
atcctagcatgcatttgaatttggc

SEQ ID NO: 83911 - DNA, 25 bp, Saccharomyces pastorianus
tgccataggcatgaccacaacacta

SEQ ID NO: 83912 - DNA, 25 bp, Saccharomyces pastorianus
tactgctactattgggccccataaa

SEQ ID NO: 83913 - DNA, 25 bp, Saccharomyces pastorianus
cggtcccctggcgaagtacattgtc

SEQ ID NO: 83914 - DNA, 25 bp, Saccharomyces pastorianus
caaattctttacgaccatggtgtga

SEQ ID NO: 83915 - DNA, 25 bp, Saccharomyces pastorianus
tggcactttattggcggtttgcaaa

SEQ ID NO: 83916 - DNA, 25 bp, Saccharomyces pastorianus
ctctgttgaaacaatcgactccttg

SEQ ID NO: 83917 - DNA, 25 bp, Saccharomyces pastorianus
gttcaaattaatacctcccgtgagg

SEQ ID NO: 83918 - DNA, 25 bp, Saccharomyces pastorianus
aattggtaccgacatttttggtgct

SEQ ID NO: 83919 - DNA, 25 bp, Saccharomyces pastorianus
agagactttgctacgctggttgagt

SEQ ID NO: 83920 - DNA, 25 bp, Saccharomyces pastorianus
aagtcatcgacttcttcttatccga

SEQ ID NO: 83921 - DNA, 25 bp, Saccharomyces pastorianus
attggttcatggaacgtctctcatg

SEQ ID NO: 83922 - DNA, 25 bp, Saccharomyces pastorianus
cgaaattgaaaccagctagcgatat

SEQ ID NO: 83923 - DNA, 25 bp, Saccharomyces pastorianus
aatttcaaccagattgcaacccaat

SEQ ID NO: 83924 - DNA, 25 bp, Saccharomyces pastorianus
accagacgatatcaagtggcacttt

SEQ ID NO: 83925 - DNA, 25 bp, Saccharomyces pastorianus
tggctaatccttcatcttttcaaat

SEQ ID NO: 83926 - DNA, 25 bp, Saccharomyces pastorianus
aaggctttacagctgcctaaaaaga

SEQ ID NO: 83927 - DNA, 25 bp, Saccharomyces pastorianus
gagcatattttacaacagcgcaggt

SEQ ID NO: 83928 - DNA, 25 bp, Saccharomyces pastorianus
acaaattactgtccaatgccctgat

SEQ ID NO: 83929 - DNA, 25 bp, Saccharomyces pastorianus
ggcggtactacctcatcaagatata

SEQ ID NO: 83930 - DNA, 25 bp, Saccharomyces pastorianus
gatatacttcggttgctcaaacgtt

SEQ ID NO: 83931 - DNA, 25 bp, Saccharomyces pastorianus
gagccagtttatctacacaacgtgt

SEQ ID NO: 83932 - DNA, 25 bp, Saccharomyces pastorianus
acaacactttgcaagagtcgtccaa

SEQ ID NO: 83933 - DNA, 25 bp, Saccharomyces pastorianus
gccgcatatccacaagcttctttaa

SEQ ID NO: 83934 - DNA, 25 bp, Saccharomyces pastorianus
ggtattaccccatatttccaggtag

SEQ ID NO: 83935 - DNA, 25 bp, Saccharomyces pastorianus
gtgggttctcgcctgatataatgat

SEQ ID NO: 83936 - DNA, 25 bp, Saccharomyces pastorianus
tagatcatgcgccttaccttaagtg

SEQ ID NO: 83937 - DNA, 25 bp, Saccharomyces pastorianus
ttaatgctgaaacatcccgtggatg

SEQ ID NO: 83938 - DNA, 25 bp, Saccharomyces pastorianus
tgaacgagtgcctatggtacccata

SEQ ID NO: 83939 - DNA, 25 bp, Saccharomyces pastorianus
cggccatggtgttatcgtgtatcta

SEQ ID NO: 83940 - DNA, 25 bp, Saccharomyces pastorianus
taggcttatcgcttgcgaccacgaa

SEQ ID NO: 83941 - DNA, 25 bp, Saccharomyces pastorianus
ggctattttgctggatcttggcatt

SEQ ID NO: 83942 - DNA, 25 bp, Saccharomyces pastorianus
gggtcatttactaacggagcctctg

SEQ ID NO: 83943 - DNA, 25 bp, Saccharomyces pastorianus
agcgcccgttgtgattgtggtgaac

SEQ ID NO: 83944 - DNA, 25 bp, Saccharomyces pastorianus
taacgacacgctggtacggatccat

SEQ ID NO: 83945 - DNA, 25 bp, Saccharomyces pastorianus
atgctagggacttctcgctgggtaa

SEQ ID NO: 83946 - DNA, 25 bp, Saccharomyces pastorianus
aaggcctacaacctgcaagacttag

SEQ ID NO: 83947 - DNA, 25 bp, Saccharomyces pastorianus
aaaccggtagaacgcacgccagttg

SEQ ID NO: 83948 - DNA, 25 bp, Saccharomyces pastorianus
gctcaattccatacactacaccagt

SEQ ID NO: 83949 - DNA, 25 bp, Saccharomyces pastorianus
atgaaaaggtcgagaccgtcccgct

SEQ ID NO: 83950 - DNA, 25 bp, Saccharomyces pastorianus
aaagcccaagccatttatgcacaaa

SEQ ID NO: 83951 - DNA, 25 bp, Saccharomyces pastorianus
gaacaagatcaattccgctcaccgt

SEQ ID NO: 83952 - DNA, 25 bp, Saccharomyces pastorianus
caaactttctaatgcccactacgaa

SEQ ID NO: 83953 - DNA, 25 bp, Saccharomyces pastorianus
gacagcttcatcgataccaagatct

SEQ ID NO: 83954 - DNA, 25 bp, Saccharomyces pastorianus
gaacaacttatcgtcaggaacctct

SEQ ID NO: 83955 - DNA, 25 bp, Saccharomyces pastorianus
ctaggtcgacgtctatgaacaactt

SEQ ID NO: 83956 - DNA, 25 bp, Saccharomyces pastorianus
gttcattgtccagtaaccttaagca

SEQ ID NO: 83957 - DNA, 25 bp, Saccharomyces pastorianus
gaacacaccattgtcaaagcccaag

SEQ ID NO: 83958 - DNA, 25 bp, Saccharomyces pastorianus
gctgctgaaggtgttggttctctat

SEQ ID NO: 83959 - DNA, 25 bp, Saccharomyces pastorianus
ggctgctgactccaagtcctctaaa

SEQ ID NO: 83960 - DNA, 25 bp, Saccharomyces pastorianus
cgccaaatggtttgccggtaacttg

SEQ ID NO: 83961 - DNA, 25 bp, Saccharomyces pastorianus
tcaacggtttgatcgatgtctacaa

SEQ ID NO: 83962 - DNA, 25 bp, Saccharomyces pastorianus
taacttggcatctggtggtgctgct

SEQ ID NO: 83963 - DNA, 25 bp, Saccharomyces pastorianus
ggtgcccgtcaattcaacggtttga

SEQ ID NO: 83964 - DNA, 25 bp, Saccharomyces pastorianus
aggtctatacttcggtatgtacgac

SEQ ID NO: 83965 - DNA, 25 bp, Saccharomyces pastorianus
tcgcaggtgctggtgttatctcaat

SEQ ID NO: 83966 - DNA, 25 bp, Saccharomyces pastorianus
catcttaagaggtgtcgcaggtgct

SEQ ID NO: 83967 - DNA, 25 bp, Saccharomyces pastorianus
ggtatgtacgactctttgaagccta

SEQ ID NO: 83968 - DNA, 25 bp, Saccharomyces pastorianus
ttaaaatctgatggtgttgctggtc

SEQ ID NO: 83969 - DNA, 25 bp, Saccharomyces pastorianus
tcttcatacgataccgttcccggac

SEQ ID NO: 83970 - DNA, 25 bp, Saccharomyces pastorianus
tataccgttggttccggtcttctgg

SEQ ID NO: 83971 - DNA, 25 bp, Saccharomyces pastorianus
gttcccggacatcaaaacctgtatt

SEQ ID NO: 83972 - DNA, 25 bp, Saccharomyces pastorianus
tagtgtcggccccataaaaagaaag

SEQ ID NO: 83973 - DNA, 25 bp, Saccharomyces pastorianus
gtcacaattatagtgtcggccccat

SEQ ID NO: 83974 - DNA, 25 bp, Saccharomyces pastorianus
tgtattgcccgaattgtcacaatta

SEQ ID NO: 83975 - DNA, 25 bp, Saccharomyces pastorianus
actgccccatatgcaattggcgaca

SEQ ID NO: 83976 - DNA, 25 bp, Saccharomyces pastorianus
gacgaacagcttaataaagtcattc

SEQ ID NO: 83977 - DNA, 25 bp, Saccharomyces pastorianus
gggaaaacagttgcactgccccata

SEQ ID NO: 83978 - DNA, 25 bp, Saccharomyces pastorianus
aaaacctgtattgcccgaattgtca

SEQ ID NO: 83979 - DNA, 25 bp, Saccharomyces pastorianus
gtcattcatacctattgtatgtggt

SEQ ID NO: 83980 - DNA, 25 bp, Saccharomyces pastorianus
gattatccgccgaaggtttagccaa

SEQ ID NO: 83981 - DNA, 25 bp, Saccharomyces pastorianus
agtcaacggtctcttccagcaggaa

SEQ ID NO: 83982 - DNA, 25 bp, Saccharomyces pastorianus
atcccgatttcacgataaacgccat

SEQ ID NO: 83983 - DNA, 25 bp, Saccharomyces pastorianus
cagtgacatatttgccgatcctaat

SEQ ID NO: 83984 - DNA, 25 bp, Saccharomyces pastorianus
atgattcctacacacattcttcacg

SEQ ID NO: 83985 - DNA, 25 bp, Saccharomyces pastorianus
aatttccgactcgagattatccgcc

SEQ ID NO: 83986 - DNA, 25 bp, Saccharomyces pastorianus
agtaccccgaatacaaccagtccat

SEQ ID NO: 83987 - DNA, 25 bp, Saccharomyces pastorianus
cacgctcttcctcagagtctaagaa

SEQ ID NO: 83988 - DNA, 25 bp, Saccharomyces pastorianus
gaggaagccctgtcatgattcctac

SEQ ID NO: 83989 - DNA, 25 bp, Saccharomyces pastorianus
gatactatgcccctaacgcaagaac

SEQ ID NO: 83990 - DNA, 25 bp, Saccharomyces pastorianus
tagacgaggcacctactacatgatg

SEQ ID NO: 83991 - DNA, 25 bp, Saccharomyces pastorianus
aatctgtcaaaagacgtggcgtttt

SEQ ID NO: 83992 - DNA, 25 bp, Saccharomyces pastorianus
aaaaatcagcacctctggttggaga

SEQ ID NO: 83993 - DNA, 25 bp, Saccharomyces pastorianus
aatccaatgaagaagctcccagaaa

SEQ ID NO: 83994 - DNA, 25 bp, Saccharomyces pastorianus
ggccaaatcattacgtgctagcagt

SEQ ID NO: 83995 - DNA, 25 bp, Saccharomyces pastorianus
gagagacggtagacatcacacttat

SEQ ID NO: 83996 - DNA, 25 bp, Saccharomyces pastorianus
gacgtggcgttttccaaaaagcagt

SEQ ID NO: 83997 - DNA, 25 bp, Saccharomyces pastorianus
cagcacctctggttggagagacggt

SEQ ID NO: 83998 - DNA, 25 bp, Saccharomyces pastorianus
gaattgacatggatgtcgacgagaa

SEQ ID NO: 83999 - DNA, 25 bp, Saccharomyces pastorianus
gtcatctaaatgctaaatctgtcaa

SEQ ID NO: 84000 - DNA, 25 bp, Saccharomyces pastorianus
agcagtagatgcacgtgaacaaaga

SEQ ID NO: 84001 - DNA, 25 bp, Saccharomyces pastorianus
cattacgtgctagcagtcatctaaa

SEQ ID NO: 84002 - DNA, 25 bp, Saccharomyces pastorianus
aacgcctttgatgagacaagcctta

SEQ ID NO: 84003 - DNA, 25 bp, Saccharomyces pastorianus
gactatctaaccagcatccagacag

SEQ ID NO: 84004 - DNA, 25 bp, Saccharomyces pastorianus
gttgtgtctaaataagtaccctcat

SEQ ID NO: 84005 - DNA, 25 bp, Saccharomyces pastorianus
gaggacatagatgccgacgtggaaa

SEQ ID NO: 84006 - DNA, 25 bp, Saccharomyces pastorianus
tatcgacctacgtgtagtacactac

SEQ ID NO: 84007 - DNA, 25 bp, Saccharomyces pastorianus
atcattcctgatatcgacctacgtg

SEQ ID NO: 84008 - DNA, 25 bp, Saccharomyces pastorianus
gagcgccgatgaagtactcgcagaa

SEQ ID NO: 84009 - DNA, 25 bp, Saccharomyces pastorianus
ggaacacatgtagtgagcgccgatg

SEQ ID NO: 84010 - DNA, 25 bp, Saccharomyces pastorianus
aatgctgttcctataccgttcaaaa

SEQ ID NO: 84011 - DNA, 25 bp, Saccharomyces pastorianus
actacgccacgcagttgtgtctaaa

SEQ ID NO: 84012 - DNA, 25 bp, Saccharomyces pastorianus
taacattgggtttactcatcgaaaa

SEQ ID NO: 84013 - DNA, 25 bp, Saccharomyces pastorianus
gaacggtggaaacgctagctccagc

SEQ ID NO: 84014 - DNA, 25 bp, Saccharomyces pastorianus
gaacatgttagcacaagcccagagg

SEQ ID NO: 84015 - DNA, 25 bp, Saccharomyces pastorianus
atgaagaatactctcccaccgagtg

SEQ ID NO: 84016 - DNA, 25 bp, Saccharomyces pastorianus
agctccagcggcagtttgcagcaaa

SEQ ID NO: 84017 - DNA, 25 bp, Saccharomyces pastorianus
gcacgccttaggattcgagaactat

SEQ ID NO: 84018 - DNA, 25 bp, Saccharomyces pastorianus
gaataccaacgagtccgaacatgtt

SEQ ID NO: 84019 - DNA, 25 bp, Saccharomyces pastorianus
ggtgttgaaaatctacttggctaaa

SEQ ID NO: 84020 - DNA, 25 bp, Saccharomyces pastorianus
ttcttttgtgactagcgaggccagc

SEQ ID NO: 84021 - DNA, 25 bp, Saccharomyces pastorianus
cgatcgatgcgctgctgacaaaaga

SEQ ID NO: 84022 - DNA, 25 bp, Saccharomyces pastorianus
gtgtgtcagtgagctcatttctttt

SEQ ID NO: 84023 - DNA, 25 bp, Saccharomyces pastorianus
agacattctcatatcattgcacgcc

SEQ ID NO: 84024 - DNA, 25 bp, Saccharomyces pastorianus
ggagcgccaaaccatacaatctttt

SEQ ID NO: 84025 - DNA, 25 bp, Saccharomyces pastorianus
gcttttttccagagtgtagccactg

SEQ ID NO: 84026 - DNA, 25 bp, Saccharomyces pastorianus
cttttctggtattttcctgctcaat

SEQ ID NO: 84027 - DNA, 25 bp, Saccharomyces pastorianus
gaaatggtccactacttccgttttg

SEQ ID NO: 84028 - DNA, 25 bp, Saccharomyces pastorianus
attattgctggctcaacgatctgtc

SEQ ID NO: 84029 - DNA, 25 bp, Saccharomyces pastorianus
attgcagttcttgattggctcgaaa

SEQ ID NO: 84030 - DNA, 25 bp, Saccharomyces pastorianus
cgatctgtctacttgactggtggtt

SEQ ID NO: 84031 - DNA, 25 bp, Saccharomyces pastorianus
aagagtctactgcttttacatccca

SEQ ID NO: 84032 - DNA, 25 bp, Saccharomyces pastorianus
ggcctgccaattcatcctttttatt

SEQ ID NO: 84033 - DNA, 25 bp, Saccharomyces pastorianus
tgctcaattcctggcttcttattga

SEQ ID NO: 84034 - DNA, 25 bp, Saccharomyces pastorianus
atgatcattgtatttgggcctgcca

SEQ ID NO: 84035 - DNA, 25 bp, Saccharomyces pastorianus
ttcgaattatggctcacggatagat

SEQ ID NO: 84036 - DNA, 25 bp, Saccharomyces pastorianus
gaatcctctgaaattccacagcaag

SEQ ID NO: 84037 - DNA, 25 bp, Saccharomyces pastorianus
aaaagaatctccacgccaaagttga

SEQ ID NO: 84038 - DNA, 25 bp, Saccharomyces pastorianus
atcgctcgactcatttttccagaag

SEQ ID NO: 84039 - DNA, 25 bp, Saccharomyces pastorianus
attgtcctgtgtattctgatttaga

SEQ ID NO: 84040 - DNA, 25 bp, Saccharomyces pastorianus
caaggatgtcttcggaaagcctccc

SEQ ID NO: 84041 - DNA, 25 bp, Saccharomyces pastorianus
gaaaacttcggccaatccaggtaga

SEQ ID NO: 84042 - DNA, 25 bp, Saccharomyces pastorianus
aaacagctgacattcttccggatat

SEQ ID NO: 84043 - DNA, 25 bp, Saccharomyces pastorianus
gaacctggtacgacacaagttgcca

SEQ ID NO: 84044 - DNA, 25 bp, Saccharomyces pastorianus
ttatcctagtgtccttaaagcttga

SEQ ID NO: 84045 - DNA, 25 bp, Saccharomyces pastorianus
tatattgggctctgaccattgtcct

SEQ ID NO: 84046 - DNA, 25 bp, Saccharomyces pastorianus
ggagaagatgttccctcgagtcaac

SEQ ID NO: 84047 - DNA, 25 bp, Saccharomyces pastorianus
gtcctgcggatgtattctcgctgaa

SEQ ID NO: 84048 - DNA, 25 bp, Saccharomyces pastorianus
aattcagagcccacaggtcagcaaa

SEQ ID NO: 84049 - DNA, 25 bp, Saccharomyces pastorianus
atcattgacgagtcagccgcggaca

SEQ ID NO: 84050 - DNA, 25 bp, Saccharomyces pastorianus
tattcggtatcatcggtacacctca

SEQ ID NO: 84051 - DNA, 25 bp, Saccharomyces pastorianus
gaggcactggagcatccgtatttgc

SEQ ID NO: 84052 - DNA, 25 bp, Saccharomyces pastorianus
gtatgcttgtttttgaccctgcgaa

SEQ ID NO: 84053 - DNA, 25 bp, Saccharomyces pastorianus
gctgaacttttcttaagacggccaa

SEQ ID NO: 84054 - DNA, 25 bp, Saccharomyces pastorianus
gtgtatagagtcacccagggctaga

SEQ ID NO: 84055 - DNA, 25 bp, Saccharomyces pastorianus
gtgatgttaacctctgccaaatatt

SEQ ID NO: 84056 - DNA, 25 bp, Saccharomyces pastorianus
agcttcttcgagtttgatcaccaca

SEQ ID NO: 84057 - DNA, 25 bp, Saccharomyces pastorianus
tcatcgccatgaataccccagtaga

SEQ ID NO: 84058 - DNA, 25 bp, Saccharomyces pastorianus
agaagttgacatttacgcgcacgcc

SEQ ID NO: 84059 - DNA, 25 bp, Saccharomyces pastorianus
ttcctatggcctctcatgtagatca

SEQ ID NO: 84060 - DNA, 25 bp, Saccharomyces pastorianus
aaactgagcatgacctggacatctt

SEQ ID NO: 84061 - DNA, 25 bp, Saccharomyces pastorianus
aagaatgctttcaagttccacacca

SEQ ID NO: 84062 - DNA, 25 bp, Saccharomyces pastorianus
gggtggatctgctgatttcttgaga

SEQ ID NO: 84063 - DNA, 25 bp, Saccharomyces pastorianus
gccactgctacttccatgagattga

SEQ ID NO: 84064 - DNA, 25 bp, Saccharomyces pastorianus
acgcgcacgccaattctacaaatgt

SEQ ID NO: 84065 - DNA, 25 bp, Saccharomyces pastorianus
taaagtagaccctaccggtatctct

SEQ ID NO: 84066 - DNA, 25 bp, Saccharomyces pastorianus
ggtatctctaccattgttcctatgg

SEQ ID NO: 84067 - DNA, 25 bp, Saccharomyces pastorianus
agggtttcgacagagcctttgcaaa

SEQ ID NO: 84068 - DNA, 25 bp, Saccharomyces pastorianus
aaccatcactttttgaaccgattca

SEQ ID NO: 84069 - DNA, 25 bp, Saccharomyces pastorianus
ttttacatgaagacgttccgggctt

SEQ ID NO: 84070 - DNA, 25 bp, Saccharomyces pastorianus
ggcaggcctccatttaatttaaatt

SEQ ID NO: 84071 - DNA, 25 bp, Saccharomyces pastorianus
ccttcctcgcagatatcatttgtga

SEQ ID NO: 84072 - DNA, 25 bp, Saccharomyces pastorianus
caaaacttaagtgtcctgccagatt

SEQ ID NO: 84073 - DNA, 25 bp, Saccharomyces pastorianus
gaacgattcacaaccgcgtaattct

SEQ ID NO: 84074 - DNA, 25 bp, Saccharomyces pastorianus
ggatattatctcctcttgggatatg

SEQ ID NO: 84075 - DNA, 25 bp, Saccharomyces pastorianus
gatagtcaattttcagcacccttta

SEQ ID NO: 84076 - DNA, 25 bp, Saccharomyces pastorianus
gatcactaagtggtccttaccagga

SEQ ID NO: 84077 - DNA, 25 bp, Saccharomyces pastorianus
aaaagctactccgttatcacaatcc

SEQ ID NO: 84078 - DNA, 25 bp, Saccharomyces pastorianus
gttccgggcttggatatcttttaca

SEQ ID NO: 84079 - DNA, 25 bp, Saccharomyces pastorianus
ttagcttcgacatccgttgcacctt

SEQ ID NO: 84080 - DNA, 25 bp, Saccharomyces pastorianus
atagtgacaattccctctctaacat

SEQ ID NO: 84081 - DNA, 25 bp, Saccharomyces pastorianus
gtgacaaccacgatgcctatgaaca

SEQ ID NO: 84082 - DNA, 25 bp, Saccharomyces pastorianus
aagattcgtcatcacctatcatcag

SEQ ID NO: 84083 - DNA, 25 bp, Saccharomyces pastorianus
gtaaaatcgcacaggccgtcttaaa

SEQ ID NO: 84084 - DNA, 25 bp, Saccharomyces pastorianus
aaccaagattccgatggcgtctcat

SEQ ID NO: 84085 - DNA, 25 bp, Saccharomyces pastorianus
gaccactggttttatctcttacatc

SEQ ID NO: 84086 - DNA, 25 bp, Saccharomyces pastorianus
aagtcagagtcttccttagcttcga

SEQ ID NO: 84087 - DNA, 25 bp, Saccharomyces pastorianus
ttattccccgatttcgatagtgccg

SEQ ID NO: 84088 - DNA, 25 bp, Saccharomyces pastorianus
ctcttacatctccaaagggcttgca

SEQ ID NO: 84089 - DNA, 25 bp, Saccharomyces pastorianus
cgatggcgtctcattggtcaatagt

SEQ ID NO: 84090 - DNA, 25 bp, Saccharomyces pastorianus
acatataatattggcgaacattcat

SEQ ID NO: 84091 - DNA, 25 bp, Saccharomyces pastorianus
gactgctactgtaatcgtaagaata

SEQ ID NO: 84092 - DNA, 25 bp, Saccharomyces pastorianus
atcctctgtaagtcgttatttttct

SEQ ID NO: 84093 - DNA, 25 bp, Saccharomyces pastorianus
aggttgactgctactgtaatcgtaa

SEQ ID NO: 84094 - DNA, 25 bp, Saccharomyces pastorianus
atgaacccttgtactgttatcctct

SEQ ID NO: 84095 - DNA, 25 bp, Saccharomyces pastorianus
acccttgtactgttatcctctgtaa

SEQ ID NO: 84096 - DNA, 25 bp, Saccharomyces pastorianus
cgaagttactggtttaggtggcaga

SEQ ID NO: 84097 - DNA, 25 bp, Saccharomyces pastorianus
taattaaggcttaccaacgaagcat

SEQ ID NO: 84098 - DNA, 25 bp, Saccharomyces pastorianus
ttcttttgcctttttcaggttgact

SEQ ID NO: 84099 - DNA, 25 bp, Saccharomyces pastorianus
gtactgttatcctctgtaagtcgtt

SEQ ID NO: 84100 - DNA, 25 bp, Saccharomyces pastorianus
gcctttttcaggttgactgctactg

SEQ ID NO: 84101 - DNA, 25 bp, Saccharomyces pastorianus
gagaagttcgagtttggttgccata

SEQ ID NO: 84102 - DNA, 25 bp, Saccharomyces pastorianus
gcggcatcaagatcgatcgttacaa

SEQ ID NO: 84103 - DNA, 25 bp, Saccharomyces pastorianus
gcgtgagttttttgatacccgctct

SEQ ID NO: 84104 - DNA, 25 bp, Saccharomyces pastorianus
gttatcgtctttgttgaactctgga

SEQ ID NO: 84105 - DNA, 25 bp, Saccharomyces pastorianus
ggtctaagtgaccttttgcgtgagt

SEQ ID NO: 84106 - DNA, 25 bp, Saccharomyces pastorianus
acctcagcagcaaattcaccgttga

SEQ ID NO: 84107 - DNA, 25 bp, Saccharomyces pastorianus
tgatacccgctcttttatttacagg

SEQ ID NO: 84108 - DNA, 25 bp, Saccharomyces pastorianus
atgacagtactgctccttcatacaa

SEQ ID NO: 84109 - DNA, 25 bp, Saccharomyces pastorianus
aacattctgcgcctagccaaataag

SEQ ID NO: 84110 - DNA, 25 bp, Saccharomyces pastorianus
atgttccatgtaatctgcggcatca

SEQ ID NO: 84111 - DNA, 25 bp, Saccharomyces pastorianus
tacaacaatgcttctacctcagcag

SEQ ID NO: 84112 - DNA, 25 bp, Saccharomyces pastorianus
ttaccatcgcccaaggtggtgtttt

SEQ ID NO: 84113 - DNA, 25 bp, Saccharomyces pastorianus
tggtgctccagtctatctaactgct

SEQ ID NO: 84114 - DNA, 25 bp, Saccharomyces pastorianus
tctatctaactgctgtcttagaata

SEQ ID NO: 84115 - DNA, 25 bp, Saccharomyces pastorianus
tctaactgctgtcttagaatatttg

SEQ ID NO: 84116 - DNA, 25 bp, Saccharomyces pastorianus
tcgcccaaggtggtgttttgccaaa

SEQ ID NO: 84117 - DNA, 25 bp, Saccharomyces pastorianus
ggtaatgttaccatcgcccaaggtg

SEQ ID NO: 84118 - DNA, 25 bp, Saccharomyces pastorianus
gaacaagctattgggtaatgttacc

SEQ ID NO: 84119 - DNA, 25 bp, Saccharomyces pastorianus
agctggtttaacattcccagttggt

SEQ ID NO: 84120 - DNA, 25 bp, Saccharomyces pastorianus
atctaactgctgtcttagaatattt

SEQ ID NO: 84121 - DNA, 25 bp, Saccharomyces pastorianus
ccagttggtagagtgcacagattgc

SEQ ID NO: 84122 - DNA, 25 bp, Saccharomyces pastorianus
ctatctaactgctgtcttagaatat

SEQ ID NO: 84123 - DNA, 25 bp, Saccharomyces pastorianus
ccaaacagccgttagattgatctta

SEQ ID NO: 84124 - DNA, 25 bp, Saccharomyces pastorianus
ggagacctattcctcttatatttac

SEQ ID NO: 84125 - DNA, 25 bp, Saccharomyces pastorianus
attggctaaacatgccgtctccgaa

SEQ ID NO: 84126 - DNA, 25 bp, Saccharomyces pastorianus
tgctagagaaatccaaacagccgtt

SEQ ID NO: 84127 - DNA, 25 bp, Saccharomyces pastorianus
atttcccagaagtctatgtctattt

SEQ ID NO: 84128 - DNA, 25 bp, Saccharomyces pastorianus
attggccgcttataacaagaaatcc

SEQ ID NO: 84129 - DNA, 25 bp, Saccharomyces pastorianus
gaaatccactatttctgctagagaa

SEQ ID NO: 84130 - DNA, 25 bp, Saccharomyces pastorianus
aaacatgccgtctccgaaggtacta

SEQ ID NO: 84131 - DNA, 25 bp, Saccharomyces pastorianus
tgccgtctccgaaggtactagggct

SEQ ID NO: 84132 - DNA, 25 bp, Saccharomyces pastorianus
aaaacatcaacctccgtcgatggta

SEQ ID NO: 84133 - DNA, 25 bp, Saccharomyces pastorianus
atcaacctccgtcgatggtaagaag

SEQ ID NO: 84134 - DNA, 25 bp, Saccharomyces pastorianus
gataagcaccaaactgctcaagata

SEQ ID NO: 84135 - DNA, 25 bp, Saccharomyces pastorianus
tctgattttgttgcactcattgaaa

SEQ ID NO: 84136 - DNA, 25 bp, Saccharomyces pastorianus
acgtgtgtatggtccctattggcac

SEQ ID NO: 84137 - DNA, 25 bp, Saccharomyces pastorianus
gttgggactagaactgataagcacc

SEQ ID NO: 84138 - DNA, 25 bp, Saccharomyces pastorianus
gactctgctagtatttctgattttg

SEQ ID NO: 84139 - DNA, 25 bp, Saccharomyces pastorianus
tggcgaaatccatgaatacggtcat

SEQ ID NO: 84140 - DNA, 25 bp, Saccharomyces pastorianus
tgttagagtacacactgatattcgt

SEQ ID NO: 84141 - DNA, 25 bp, Saccharomyces pastorianus
gaacaacaattgaagggccttggga

SEQ ID NO: 84142 - DNA, 25 bp, Saccharomyces pastorianus
gatcttttgtttagcggacgtgtgt

SEQ ID NO: 84143 - DNA, 25 bp, Saccharomyces pastorianus
tattggcaccgactctgctagtatt

SEQ ID NO: 84144 - DNA, 25 bp, Saccharomyces pastorianus
ctttacacagtgcaggaacaacaat

SEQ ID NO: 84145 - DNA, 25 bp, Saccharomyces pastorianus
ggtgctgattttaagggcgtcgcta

SEQ ID NO: 84146 - DNA, 25 bp, Saccharomyces pastorianus
aagagggactgatccgcatcgcgtt

SEQ ID NO: 84147 - DNA, 25 bp, Saccharomyces pastorianus
gcgccgcaccaaatattagcctgga

SEQ ID NO: 84148 - DNA, 25 bp, Saccharomyces pastorianus
attatccttttggttgggcgccgca

SEQ ID NO: 84149 - DNA, 25 bp, Saccharomyces pastorianus
aagaagggctctcgctgcttgtagt

SEQ ID NO: 84150 - DNA, 25 bp, Saccharomyces pastorianus
tagtccaccattgccatttttcaat

SEQ ID NO: 84151 - DNA, 25 bp, Saccharomyces pastorianus
aatgctcggcggactagttgcatgc

SEQ ID NO: 84152 - DNA, 25 bp, Saccharomyces pastorianus
gaaaaagctcttcctcagctagaaa

SEQ ID NO: 84153 - DNA, 25 bp, Saccharomyces pastorianus
gaacgtcttatgagtctgcaacgac

SEQ ID NO: 84154 - DNA, 25 bp, Saccharomyces pastorianus
tttgtgggctggtcttgcaactgaa

SEQ ID NO: 84155 - DNA, 25 bp, Saccharomyces pastorianus
ggcgtcgctacagaaggctttggtt

SEQ ID NO: 84156 - DNA, 25 bp, Saccharomyces pastorianus
actgctccagtcttgtttgcatgga

SEQ ID NO: 84157 - DNA, 25 bp, Saccharomyces pastorianus
gaagacccatctttaggtccactaa

SEQ ID NO: 84158 - DNA, 25 bp, Saccharomyces pastorianus
gacctatctgaagactgctgctttg

SEQ ID NO: 84159 - DNA, 25 bp, Saccharomyces pastorianus
attgacgcggatatcgataccatcg

SEQ ID NO: 84160 - DNA, 25 bp, Saccharomyces pastorianus
taggtccactaatttcacgcaattt

SEQ ID NO: 84161 - DNA, 25 bp, Saccharomyces pastorianus
cataagctacttccggttccttcta

SEQ ID NO: 84162 - DNA, 25 bp, Saccharomyces pastorianus
attctcttcctgaatctgatgctcg

SEQ ID NO: 84163 - DNA, 25 bp, Saccharomyces pastorianus
tgatgctcgttctgccctagagttt

SEQ ID NO: 84164 - DNA, 25 bp, Saccharomyces pastorianus
atcacctgccgttatcgacgaatgc

SEQ ID NO: 84165 - DNA, 25 bp, Saccharomyces pastorianus
tttagggaagccatccggcgcggat

SEQ ID NO: 84166 - DNA, 25 bp, Saccharomyces pastorianus
aaaattaggtattgctactgctcca

SEQ ID NO: 84167 - DNA, 25 bp, Saccharomyces pastorianus
gagtttcaccccaacgataaggctg

SEQ ID NO: 84168 - DNA, 25 bp, Saccharomyces pastorianus
gcgtgctcccattagaggtacggca

SEQ ID NO: 84169 - DNA, 25 bp, Saccharomyces pastorianus
tgactagttactatgggccatcatc

SEQ ID NO: 84170 - DNA, 25 bp, Saccharomyces pastorianus
gctgctgtagttcaccaagctaact

SEQ ID NO: 84171 - DNA, 25 bp, Saccharomyces pastorianus
gtttgtgctgtttgttgccgcaata

SEQ ID NO: 84172 - DNA, 25 bp, Saccharomyces pastorianus
ggcgcgttccagctgtaagtgatac

SEQ ID NO: 84173 - DNA, 25 bp, Saccharomyces pastorianus
atcatcgtcgtcatggcagtcagga

SEQ ID NO: 84174 - DNA, 25 bp, Saccharomyces pastorianus
aatatactgggaccgttcagcaacg

SEQ ID NO: 84175 - DNA, 25 bp, Saccharomyces pastorianus
ttgacaccgccttcatacagacagt

SEQ ID NO: 84176 - DNA, 25 bp, Saccharomyces pastorianus
tttagaaagacctcccgctgctgta

SEQ ID NO: 84177 - DNA, 25 bp, Saccharomyces pastorianus
tacggtttaacaaggcctagcaatg

SEQ ID NO: 84178 - DNA, 25 bp, Saccharomyces pastorianus
aatcctttgctgctgaggttcttga

SEQ ID NO: 84179 - DNA, 25 bp, Saccharomyces pastorianus
gtgcgggaagcttaaatttcaccca

SEQ ID NO: 84180 - DNA, 25 bp, Saccharomyces pastorianus
gaatcttcacacatcggacaggcaa

SEQ ID NO: 84181 - DNA, 25 bp, Saccharomyces pastorianus
gcacctgccttgtatgaatgtggta

SEQ ID NO: 84182 - DNA, 25 bp, Saccharomyces pastorianus
ggacgatatccctgatatagcgcct

SEQ ID NO: 84183 - DNA, 25 bp, Saccharomyces pastorianus
tgaaaaaagcctgcgcgtgcggaaa

SEQ ID NO: 84184 - DNA, 25 bp, Saccharomyces pastorianus
tgttatatggactagccctgcgaca

SEQ ID NO: 84185 - DNA, 25 bp, Saccharomyces pastorianus
ggccatgtagactcaatgtgcttaa

SEQ ID NO: 84186 - DNA, 25 bp, Saccharomyces pastorianus
aaaggatctcgccagagctgctgca

SEQ ID NO: 84187 - DNA, 25 bp, Saccharomyces pastorianus
atggatcatcccgacgagcgaaaag

SEQ ID NO: 84188 - DNA, 25 bp, Saccharomyces pastorianus
aaagctgctctattaggccatgtag

SEQ ID NO: 84189 - DNA, 25 bp, Saccharomyces pastorianus
tggtgtcaagcgtatttctggtttg

SEQ ID NO: 84190 - DNA, 25 bp, Saccharomyces pastorianus
gtgtcaagcgtatttctggtttgat

SEQ ID NO: 84191 - DNA, 25 bp, Saccharomyces pastorianus
agcgtatttctggtttgatctacga

SEQ ID NO: 84192 - DNA, 25 bp, Saccharomyces pastorianus
aagcgtatttctggtttgatctacg

SEQ ID NO: 84193 - DNA, 25 bp, Saccharomyces pastorianus
caagcgtatttctggtttgatctac

SEQ ID NO: 84194 - DNA, 25 bp, Saccharomyces pastorianus
tcaagcgtatttctggtttgatcta

SEQ ID NO: 84195 - DNA, 25 bp, Saccharomyces pastorianus
gtcaagcgtatttctggtttgatct

SEQ ID NO: 84196 - DNA, 25 bp, Saccharomyces pastorianus
gcgtatttctggtttgatctacgaa

SEQ ID NO: 84197 - DNA, 25 bp, Saccharomyces pastorianus
ggtgtcaagcgtatttctggtttga

SEQ ID NO: 84198 - DNA, 25 bp, Saccharomyces pastorianus
tgtcaagcgtatttctggtttgatc

SEQ ID NO: 84199 - DNA, 25 bp, Saccharomyces pastorianus
tgccatcggtgccttgcaagaatct

SEQ ID NO: 84200 - DNA, 25 bp, Saccharomyces pastorianus
gacttgagatttcaatcttctgcca

SEQ ID NO: 84201 - DNA, 25 bp, Saccharomyces pastorianus
tgaagataccaacttggctgccatt

SEQ ID NO: 84202 - DNA, 25 bp, Saccharomyces pastorianus
tagtctctttatttgaagataccaa

SEQ ID NO: 84203 - DNA, 25 bp, Saccharomyces pastorianus
aagataccaacttggctgccattca

SEQ ID NO: 84204 - DNA, 25 bp, Saccharomyces pastorianus
ataccaacttggctgccattcacgc

SEQ ID NO: 84205 - DNA, 25 bp, Saccharomyces pastorianus
gaagataccaacttggctgccattc

SEQ ID NO: 84206 - DNA, 25 bp, Saccharomyces pastorianus
gccaggtactgttgctttgagagaa

SEQ ID NO: 84207 - DNA, 25 bp, Saccharomyces pastorianus
gcaaacagcaagaaagtccactggt

SEQ ID NO: 84208 - DNA, 25 bp, Saccharomyces pastorianus
ttatttgaagataccaacttggctg

SEQ ID NO: 84209 - DNA, 25 bp, Saccharomyces pastorianus
agataccaacttggctgccattcac

SEQ ID NO: 84210 - DNA, 25 bp, Saccharomyces pastorianus
ggaaacacatgactcctggaaacaa

SEQ ID NO: 84211 - DNA, 25 bp, Saccharomyces pastorianus
tgctccaattgacaagtctattgac

SEQ ID NO: 84212 - DNA, 25 bp, Saccharomyces pastorianus
aggctctaggtatcatggctttatt

SEQ ID NO: 84213 - DNA, 25 bp, Saccharomyces pastorianus
gttgagggctactaacgaatggttc

SEQ ID NO: 84214 - DNA, 25 bp, Saccharomyces pastorianus
tttgaccaatgttactttgcctgac

SEQ ID NO: 84215 - DNA, 25 bp, Saccharomyces pastorianus
gaccgattggaaagttattgccatt

SEQ ID NO: 84216 - DNA, 25 bp, Saccharomyces pastorianus
aactatggtgctttcccacaaactt

SEQ ID NO: 84217 - DNA, 25 bp, Saccharomyces pastorianus
taattgctggtaagtcttctgacag

SEQ ID NO: 84218 - DNA, 25 bp, Saccharomyces pastorianus
agccacccagaaactaaggcagttg

SEQ ID NO: 84219 - DNA, 25 bp, Saccharomyces pastorianus
ttcccaggtctgttgagggctacta

SEQ ID NO: 84220 - DNA, 25 bp, Saccharomyces pastorianus
taaggcagttggtgacaacgatcca

SEQ ID NO: 84221 - DNA, 25 bp, Saccharomyces pastorianus
catcctgattcattggtgacgtttg

SEQ ID NO: 84222 - DNA, 25 bp, Saccharomyces pastorianus
ggcactcaccaatctgtccatgata

SEQ ID NO: 84223 - DNA, 25 bp, Saccharomyces pastorianus
tgctagcgtcaacgaaagtattact

SEQ ID NO: 84224 - DNA, 25 bp, Saccharomyces pastorianus
ggacgctgaatttgatgccgctgca

SEQ ID NO: 84225 - DNA, 25 bp, Saccharomyces pastorianus
ggtgacgtttgacaattcaggaaat

SEQ ID NO: 84226 - DNA, 25 bp, Saccharomyces pastorianus
aaggaattcgaatgctagcgtcaac

SEQ ID NO: 84227 - DNA, 25 bp, Saccharomyces pastorianus
tgccgctgcagaatacaacaaaata

SEQ ID NO: 84228 - DNA, 25 bp, Saccharomyces pastorianus
ctcattgttgtgttttttgtgttaa

SEQ ID NO: 84229 - DNA, 25 bp, Saccharomyces pastorianus
aagtattactactcaccatcctgat

SEQ ID NO: 84230 - DNA, 25 bp, Saccharomyces pastorianus
aggaaatgcacctggcactcaccaa

SEQ ID NO: 84231 - DNA, 25 bp, Saccharomyces pastorianus
aactaatttactgctcattgttgtg

SEQ ID NO: 84232 - DNA, 25 bp, Saccharomyces pastorianus
gccgctgcaaacttttatggtctat

SEQ ID NO: 84233 - DNA, 25 bp, Saccharomyces pastorianus
gtgcaggattatggccgttacttaa

SEQ ID NO: 84234 - DNA, 25 bp, Saccharomyces pastorianus
ctgctcgttcatatacggccttaaa

SEQ ID NO: 84235 - DNA, 25 bp, Saccharomyces pastorianus
aaggaaactttcattgccgctgcaa

SEQ ID NO: 84236 - DNA, 25 bp, Saccharomyces pastorianus
gacaggcgttgaaggctaccatgat

SEQ ID NO: 84237 - DNA, 25 bp, Saccharomyces pastorianus
gttacaacacgactttgtgcaggat

SEQ ID NO: 84238 - DNA, 25 bp, Saccharomyces pastorianus
attggcaacaaatacggtggcacta

SEQ ID NO: 84239 - DNA, 25 bp, Saccharomyces pastorianus
ggtggcactaaatcagctgatgcaa

SEQ ID NO: 84240 - DNA, 25 bp, Saccharomyces pastorianus
aagtttgacccatacgatttatcta

SEQ ID NO: 84241 - DNA, 25 bp, Saccharomyces pastorianus
aatatctcgatgaccttttagggca

SEQ ID NO: 84242 - DNA, 25 bp, Saccharomyces pastorianus
gaatggtaaacctgctcgttcatat

SEQ ID NO: 84243 - DNA, 25 bp, Saccharomyces pastorianus
aaactcaggagcgtggatacccacc

SEQ ID NO: 84244 - DNA, 25 bp, Saccharomyces pastorianus
tctggctgcatgtctggctgcatta

SEQ ID NO: 84245 - DNA, 25 bp, Saccharomyces pastorianus
agcatcccggatactataaccaaca

SEQ ID NO: 84246 - DNA, 25 bp, Saccharomyces pastorianus
aacgaaggttgtctggctgcatgtc

SEQ ID NO: 84247 - DNA, 25 bp, Saccharomyces pastorianus
cagcagggctacaatcagcagggat

SEQ ID NO: 84248 - DNA, 25 bp, Saccharomyces pastorianus
gtctgctaacgattactacggcgga

SEQ ID NO: 84249 - DNA, 25 bp, Saccharomyces pastorianus
cttcatccgctcatcagaacaaaac

SEQ ID NO: 84250 - DNA, 25 bp, Saccharomyces pastorianus
gcagggatacaaccaacaaggccat

SEQ ID NO: 84251 - DNA, 25 bp, Saccharomyces pastorianus
gcagggatataaccagcagggatac

SEQ ID NO: 84252 - DNA, 25 bp, Saccharomyces pastorianus
acaaggccatcaacaaccagtctac

SEQ ID NO: 84253 - DNA, 25 bp, Saccharomyces pastorianus
ggcgcgaagagccaatattcccgtc

SEQ ID NO: 84254 - DNA, 25 bp, Saccharomyces pastorianus
gtgatggtactcctgctgtgataaa

SEQ ID NO: 84255 - DNA, 25 bp, Saccharomyces pastorianus
ttttgcgcaagagatctacaccttt

SEQ ID NO: 84256 - DNA, 25 bp, Saccharomyces pastorianus
tagcgcgtacatgggtttcctgaaa

SEQ ID NO: 84257 - DNA, 25 bp, Saccharomyces pastorianus
attatcaatttgaccagcacggagg

SEQ ID NO: 84258 - DNA, 25 bp, Saccharomyces pastorianus
aaatggtgtttgtccgttaacgcat

SEQ ID NO: 84259 - DNA, 25 bp, Saccharomyces pastorianus
tgttacgggcctttcaagcaatgta

SEQ ID NO: 84260 - DNA, 25 bp, Saccharomyces pastorianus
acaaagctgctttgccctgttggga

SEQ ID NO: 84261 - DNA, 25 bp, Saccharomyces pastorianus
gatctacacctttttgatgaaccat

SEQ ID NO: 84262 - DNA, 25 bp, Saccharomyces pastorianus
tcagttctggcgcatttgccaatga

SEQ ID NO: 84263 - DNA, 25 bp, Saccharomyces pastorianus
tctgcaataaatttcacgcccgatg

SEQ ID NO: 84264 - DNA, 25 bp, Saccharomyces pastorianus
aaccattctgcccaaatttctgcaa

SEQ ID NO: 84265 - DNA, 25 bp, Saccharomyces pastorianus
ttgacgatgtcgcacaatccttgaa

SEQ ID NO: 84266 - DNA, 25 bp, Saccharomyces pastorianus
cgagtctcaagcttcttgcgataaa

SEQ ID NO: 84267 - DNA, 25 bp, Saccharomyces pastorianus
atggatcatatggttcccgtttgac

SEQ ID NO: 84268 - DNA, 25 bp, Saccharomyces pastorianus
gccagatatcacaacatttccacac

SEQ ID NO: 84269 - DNA, 25 bp, Saccharomyces pastorianus
aatccttgaattgttctcgcgaaga

SEQ ID NO: 84270 - DNA, 25 bp, Saccharomyces pastorianus
cacaccctggaacggcgatattgaa

SEQ ID NO: 84271 - DNA, 25 bp, Saccharomyces pastorianus
aagtaccctaagatcactgatgctg

SEQ ID NO: 84272 - DNA, 25 bp, Saccharomyces pastorianus
tggttgtactgttcacttggttcca

SEQ ID NO: 84273 - DNA, 25 bp, Saccharomyces pastorianus
tttggtgccttgatgaacgagtctc

SEQ ID NO: 84274 - DNA, 25 bp, Saccharomyces pastorianus
gaagcccttgccaatgagttctaca

SEQ ID NO: 84275 - DNA, 25 bp, Saccharomyces pastorianus
tacagcgagctttactgccgacgaa

SEQ ID NO: 84276 - DNA, 25 bp, Saccharomyces pastorianus
cgctattttccccaagtttatcaat

SEQ ID NO: 84277 - DNA, 25 bp, Saccharomyces pastorianus
atattcccatcaaaagggctctttt

SEQ ID NO: 84278 - DNA, 25 bp, Saccharomyces pastorianus
cgctcccgctataaaggtttctgat

SEQ ID NO: 84279 - DNA, 25 bp, Saccharomyces pastorianus
ggcgctgtgtatttgtccatggaat

SEQ ID NO: 84280 - DNA, 25 bp, Saccharomyces pastorianus
agagctttggctgcatatctatgtg

SEQ ID NO: 84281 - DNA, 25 bp, Saccharomyces pastorianus
acctgggtgccctgttaacaacatt

SEQ ID NO: 84282 - DNA, 25 bp, Saccharomyces pastorianus
ttgcttgcccggtttcatcgcggag

SEQ ID NO: 84283 - DNA, 25 bp, Saccharomyces pastorianus
cattattttgtgcagccatggcgct

SEQ ID NO: 84284 - DNA, 25 bp, Saccharomyces pastorianus
gagtttttcttcttatactgctctg

SEQ ID NO: 84285 - DNA, 25 bp, Saccharomyces pastorianus
tattgccggtgttgtctgctcagat

SEQ ID NO: 84286 - DNA, 25 bp, Saccharomyces pastorianus
tatactgctctgtgttacttcttcc

SEQ ID NO: 84287 - DNA, 25 bp, Saccharomyces pastorianus
tcttgcaactgcaatggctcgtggg

SEQ ID NO: 84288 - DNA, 25 bp, Saccharomyces pastorianus
taaacggccacatcaaatacccaat

SEQ ID NO: 84289 - DNA, 25 bp, Saccharomyces pastorianus
caatcggtgactatttaaacggcca

SEQ ID NO: 84290 - DNA, 25 bp, Saccharomyces pastorianus
aaagtcatatgctaggatcctcatc

SEQ ID NO: 84291 - DNA, 25 bp, Saccharomyces pastorianus
tcaacttgctttgcgctacccaaaa

SEQ ID NO: 84292 - DNA, 25 bp, Saccharomyces pastorianus
aggatcctcatccattcttgcaact

SEQ ID NO: 84293 - DNA, 25 bp, Saccharomyces pastorianus
cagatctgctgatttgttgcttgtt

SEQ ID NO: 84294 - DNA, 25 bp, Saccharomyces pastorianus
gcttgtttacatcatcatttggagg

SEQ ID NO: 84295 - DNA, 25 bp, Saccharomyces pastorianus
ggcaaatgcatattacttcccagtt

SEQ ID NO: 84296 - DNA, 25 bp, Saccharomyces pastorianus
atagtggcatattcggagtcccttg

SEQ ID NO: 84297 - DNA, 25 bp, Saccharomyces pastorianus
tggtgggatcgcttatcaacttgct

SEQ ID NO: 84298 - DNA, 25 bp, Saccharomyces pastorianus
tacggttcagtagcacttggcggtc

SEQ ID NO: 84299 - DNA, 25 bp, Saccharomyces pastorianus
ttggcggtcctttcaatttaacaga

SEQ ID NO: 84300 - DNA, 25 bp, Saccharomyces pastorianus
gtttatctcatgtgatcctgcaaga

SEQ ID NO: 84301 - DNA, 25 bp, Saccharomyces pastorianus
gattttcacccagctatcattggtt

SEQ ID NO: 84302 - DNA, 25 bp, Saccharomyces pastorianus
ttctatttgatcgaccctgaaggac

SEQ ID NO: 84303 - DNA, 25 bp, Saccharomyces pastorianus
tactttggattcagtcattgccccg

SEQ ID NO: 84304 - DNA, 25 bp, Saccharomyces pastorianus
gatgtcaagcccaaccaggattact

SEQ ID NO: 84305 - DNA, 25 bp, Saccharomyces pastorianus
gtggaccattcgatatttttctatt

SEQ ID NO: 84306 - DNA, 25 bp, Saccharomyces pastorianus
tttcaactccacgtgatgtcaagcc

SEQ ID NO: 84307 - DNA, 25 bp, Saccharomyces pastorianus
gggacgtatgcctatttatcaagaa

SEQ ID NO: 84308 - DNA, 25 bp, Saccharomyces pastorianus
gagtacttaagcgattttcacccag

SEQ ID NO: 84309 - DNA, 25 bp, Saccharomyces pastorianus
gtactctccaggtgacttgatcatt

SEQ ID NO: 84310 - DNA, 25 bp, Saccharomyces pastorianus
gttcttgttgactgctaagccatgt

SEQ ID NO: 84311 - DNA, 25 bp, Saccharomyces pastorianus
tttcacctgcggtccagatgaagtt

SEQ ID NO: 84312 - DNA, 25 bp, Saccharomyces pastorianus
gttgctaatcactcctggacttcaa

SEQ ID NO: 84313 - DNA, 25 bp, Saccharomyces pastorianus
aaagctccacaagctgctggtgtta

SEQ ID NO: 84314 - DNA, 25 bp, Saccharomyces pastorianus
tgatcattccattcagtgtttctct

SEQ ID NO: 84315 - DNA, 25 bp, Saccharomyces pastorianus
aaagactatctcatatgtccccaga

SEQ ID NO: 84316 - DNA, 25 bp, Saccharomyces pastorianus
cagacaatatctgccttgccaaaga

SEQ ID NO: 84317 - DNA, 25 bp, Saccharomyces pastorianus
gaaattatcaactccatgttcttgt

SEQ ID NO: 84318 - DNA, 25 bp, Saccharomyces pastorianus
taaggacgattctgccatcaaggcc

SEQ ID NO: 84319 - DNA, 25 bp, Saccharomyces pastorianus
ttgatttcctttttcacctgcggtc

SEQ ID NO: 84320 - DNA, 25 bp, Saccharomyces pastorianus
gaggcttgccttgaattctgttgga

SEQ ID NO: 84321 - DNA, 25 bp, Saccharomyces pastorianus
gaggtaaatccagtgcatcaatagc

SEQ ID NO: 84322 - DNA, 25 bp, Saccharomyces pastorianus
aaaggcttgacatccaaagggtact

SEQ ID NO: 84323 - DNA, 25 bp, Saccharomyces pastorianus
aatggattatccaaaatgccggtac

SEQ ID NO: 84324 - DNA, 25 bp, Saccharomyces pastorianus
aactttaccaacatctctacacatt

SEQ ID NO: 84325 - DNA, 25 bp, Saccharomyces pastorianus
gaaactcttacctggaatactaaca

SEQ ID NO: 84326 - DNA, 25 bp, Saccharomyces pastorianus
ggtgctacgaaggttatttccgaat

SEQ ID NO: 84327 - DNA, 25 bp, Saccharomyces pastorianus
ggtcacattatttcaccaagagatg

SEQ ID NO: 84328 - DNA, 25 bp, Saccharomyces pastorianus
cattaagtgttatacgtgaccgtga

SEQ ID NO: 84329 - DNA, 25 bp, Saccharomyces pastorianus
aatgccggtacatctagtgtatcaa

SEQ ID NO: 84330 - DNA, 25 bp, Saccharomyces pastorianus
ggaaaataatgctttgatgctcact

SEQ ID NO: 84331 - DNA, 25 bp, Saccharomyces pastorianus
aatgccctatactcgattatcggta

SEQ ID NO: 84332 - DNA, 25 bp, Saccharomyces pastorianus
gtaagcctccatatactggtagcaa

SEQ ID NO: 84333 - DNA, 25 bp, Saccharomyces pastorianus
atgacatgttagtaggtaagcctcc

SEQ ID NO: 84334 - DNA, 25 bp, Saccharomyces pastorianus
aggcccaattgttccagttattacg

SEQ ID NO: 84335 - DNA, 25 bp, Saccharomyces pastorianus
gggctgcaagaactagtcttttcac

SEQ ID NO: 84336 - DNA, 25 bp, Saccharomyces pastorianus
aattcggtgagcaagtccccggata

SEQ ID NO: 84337 - DNA, 25 bp, Saccharomyces pastorianus
gcaaaaaaccactctaggcccaatt

SEQ ID NO: 84338 - DNA, 25 bp, Saccharomyces pastorianus
ggtattctttgggatgtctgttgta

SEQ ID NO: 84339 - DNA, 25 bp, Saccharomyces pastorianus
ttatcggtacgcctgaatactgtgc

SEQ ID NO: 84340 - DNA, 25 bp, Saccharomyces pastorianus
gcaaggccccaaaattccattttat

SEQ ID NO: 84341 - DNA, 25 bp, Saccharomyces pastorianus
aacctatacggatagcaagccgatt

SEQ ID NO: 84342 - DNA, 25 bp, Saccharomyces pastorianus
ggtttttcactgctctagctagtat

SEQ ID NO: 84343 - DNA, 25 bp, Saccharomyces pastorianus
ttatacttacttgacgtgccctgtt

SEQ ID NO: 84344 - DNA, 25 bp, Saccharomyces pastorianus
gggttcttttgccaatttgtactat

SEQ ID NO: 84345 - DNA, 25 bp, Saccharomyces pastorianus
gatctccataccaattttttctcta

SEQ ID NO: 84346 - DNA, 25 bp, Saccharomyces pastorianus
ggattctgagcccttatacttactt

SEQ ID NO: 84347 - DNA, 25 bp, Saccharomyces pastorianus
cagacagggttgattgccaattcat

SEQ ID NO: 84348 - DNA, 25 bp, Saccharomyces pastorianus
agttaaagactttggccactccatc

SEQ ID NO: 84349 - DNA, 25 bp, Saccharomyces pastorianus
tggaggctttttcgcatctggtcta

SEQ ID NO: 84350 - DNA, 25 bp, Saccharomyces pastorianus
atcccaggccatggtggtatcacag

SEQ ID NO: 84351 - DNA, 25 bp, Saccharomyces pastorianus
acgtgccctgttgaagatctccata

SEQ ID NO: 84352 - DNA, 25 bp, Saccharomyces pastorianus
aagtttacagacttccacccatctt

SEQ ID NO: 84353 - DNA, 25 bp, Saccharomyces pastorianus
cggacacttgtacaatcggagcata

SEQ ID NO: 84354 - DNA, 25 bp, Saccharomyces pastorianus
ttaacggccgttcaatgggaatcat

SEQ ID NO: 84355 - DNA, 25 bp, Saccharomyces pastorianus
atgctccaaaatgctcggacacttg

SEQ ID NO: 84356 - DNA, 25 bp, Saccharomyces pastorianus
catagactcaagtggcgagccttca

SEQ ID NO: 84357 - DNA, 25 bp, Saccharomyces pastorianus
tgttttccaaaaaggccactcctca

SEQ ID NO: 84358 - DNA, 25 bp, Saccharomyces pastorianus
agtcggtcatggcttgttttcagca

SEQ ID NO: 84359 - DNA, 25 bp, Saccharomyces pastorianus
aagctgcccttcctggccaaaaaag

SEQ ID NO: 84360 - DNA, 25 bp, Saccharomyces pastorianus
aatccccattccaagaaactgcttt

SEQ ID NO: 84361 - DNA, 25 bp, Saccharomyces pastorianus
gctttcccagctttacatagactca

SEQ ID NO: 84362 - DNA, 25 bp, Saccharomyces pastorianus
tgggccttagctaaccttttgactt

SEQ ID NO: 84363 - DNA, 25 bp, Saccharomyces pastorianus
tagcttggaatcatggctttcccag

SEQ ID NO: 84364 - DNA, 25 bp, Saccharomyces pastorianus
tttgacgcggctacgaaactcggtt

SEQ ID NO: 84365 - DNA, 25 bp, Saccharomyces pastorianus
ggttccgctcaattttatctttttg

SEQ ID NO: 84366 - DNA, 25 bp, Saccharomyces pastorianus
cacattgagcaacttactgagggag

SEQ ID NO: 84367 - DNA, 25 bp, Saccharomyces pastorianus
ctgtgcctggaactacttcgtgtag

SEQ ID NO: 84368 - DNA, 25 bp, Saccharomyces pastorianus
ttttatctttttgacgcggctacga

SEQ ID NO: 84369 - DNA, 25 bp, Saccharomyces pastorianus
aaaggagacctgtgcctggaactac

SEQ ID NO: 84370 - DNA, 25 bp, Saccharomyces pastorianus
gagcagtccgttaacttaaactaca

SEQ ID NO: 84371 - DNA, 25 bp, Saccharomyces pastorianus
ggttaaacaacactccatgccagta

SEQ ID NO: 84372 - DNA, 25 bp, Saccharomyces pastorianus
ccaattggtagtatgcaggtgctgc

SEQ ID NO: 84373 - DNA, 25 bp, Saccharomyces pastorianus
ggaatatacccctttgatacttctc

SEQ ID NO: 84374 - DNA, 25 bp, Saccharomyces pastorianus
gaaactcggtttcgagcagtccgtt

SEQ ID NO: 84375 - DNA, 25 bp, Saccharomyces pastorianus
ggcttgagaatcgttccactggaaa

SEQ ID NO: 84376 - DNA, 25 bp, Saccharomyces pastorianus
gaagaactagacgagctgacccaaa

SEQ ID NO: 84377 - DNA, 25 bp, Saccharomyces pastorianus
aggctcatgatattgctaccaaccc

SEQ ID NO: 84378 - DNA, 25 bp, Saccharomyces pastorianus
acccaatcgatcttttcaccaaatg

SEQ ID NO: 84379 - DNA, 25 bp, Saccharomyces pastorianus
aggtagaccctcgagattgcatgat

SEQ ID NO: 84380 - DNA, 25 bp, Saccharomyces pastorianus
aaacaacttactgacgacccaatcg

SEQ ID NO: 84381 - DNA, 25 bp, Saccharomyces pastorianus
aattactttttcatccgcggaactg

SEQ ID NO: 84382 - DNA, 25 bp, Saccharomyces pastorianus
atccaagatcggtgcatgggcttcc

SEQ ID NO: 84383 - DNA, 25 bp, Saccharomyces pastorianus
gagggtgtcgtccagaattcttctt

SEQ ID NO: 84384 - DNA, 25 bp, Saccharomyces pastorianus
aatgcggcaatcgtattcttttgga

SEQ ID NO: 84385 - DNA, 25 bp, Saccharomyces pastorianus
gacgagacctcgtggatccaagatc

SEQ ID NO: 84386 - DNA, 25 bp, Saccharomyces pastorianus
gggtgaactttctgatccattcttg

SEQ ID NO: 84387 - DNA, 25 bp, Saccharomyces pastorianus
ttagagttgaatcgcaaggcccctg

SEQ ID NO: 84388 - DNA, 25 bp, Saccharomyces pastorianus
ttccttgccgagcttgatttcgata

SEQ ID NO: 84389 - DNA, 25 bp, Saccharomyces pastorianus
ggctcgattatctttggttccttgc

SEQ ID NO: 84390 - DNA, 25 bp, Saccharomyces pastorianus
tggttctctctactaggctcgatta

SEQ ID NO: 84391 - DNA, 25 bp, Saccharomyces pastorianus
tgacgacgtgcaacctgggagctat

SEQ ID NO: 84392 - DNA, 25 bp, Saccharomyces pastorianus
aaggcccctgctgagtatttgacga

SEQ ID NO: 84393 - DNA, 25 bp, Saccharomyces pastorianus
ttgaaaggtgctctgatttgcggcc

SEQ ID NO: 84394 - DNA, 25 bp, Saccharomyces pastorianus
gattatgggtccttttgccgtgtta

SEQ ID NO: 84395 - DNA, 25 bp, Saccharomyces pastorianus
tacctgtgacatgcttgccggaaag

SEQ ID NO: 84396 - DNA, 25 bp, Saccharomyces pastorianus
gtggaatccatttcgttgttctata

SEQ ID NO: 84397 - DNA, 25 bp, Saccharomyces pastorianus
atcttcttttatctcatggaccctg

SEQ ID NO: 84398 - DNA, 25 bp, Saccharomyces pastorianus
ggtattactctgcagccattattta

SEQ ID NO: 84399 - DNA, 25 bp, Saccharomyces pastorianus
ttgtgatccagcaagagactcccct

SEQ ID NO: 84400 - DNA, 25 bp, Saccharomyces pastorianus
tggtagaccattccatcttctttta

SEQ ID NO: 84401 - DNA, 25 bp, Saccharomyces pastorianus
agagtatacttttctacgcctccaa

SEQ ID NO: 84402 - DNA, 25 bp, Saccharomyces pastorianus
gggtttagtaactgtcctgacatct

SEQ ID NO: 84403 - DNA, 25 bp, Saccharomyces pastorianus
gagactcccctgctgtattgaaaga

SEQ ID NO: 84404 - DNA, 25 bp, Saccharomyces pastorianus
gtcctgacatctgtcctgatgaact

SEQ ID NO: 84405 - DNA, 25 bp, Saccharomyces pastorianus
tatggcttaatacactctcttcaaa

SEQ ID NO: 84406 - DNA, 25 bp, Saccharomyces pastorianus
tccaaacgtcaaaccgggccaagat

SEQ ID NO: 84407 - DNA, 25 bp, Saccharomyces pastorianus
acgttaagagttatgtgcctgcaga

SEQ ID NO: 84408 - DNA, 25 bp, Saccharomyces pastorianus
ttcccgcctttacatgtactttaca

SEQ ID NO: 84409 - DNA, 25 bp, Saccharomyces pastorianus
agatttttgccttctgtaatacaca

SEQ ID NO: 84410 - DNA, 25 bp, Saccharomyces pastorianus
gcctatactttttctcatcactgat

SEQ ID NO: 84411 - DNA, 25 bp, Saccharomyces pastorianus
attgtccaaggccattgtcgttcaa

SEQ ID NO: 84412 - DNA, 25 bp, Saccharomyces pastorianus
tacaatactttttgacacttcccgc

SEQ ID NO: 84413 - DNA, 25 bp, Saccharomyces pastorianus
atcactgatgtacctggatccttgg

SEQ ID NO: 84414 - DNA, 25 bp, Saccharomyces pastorianus
ttcattttatggtctgtggccgctt

SEQ ID NO: 84415 - DNA, 25 bp, Saccharomyces pastorianus
ggttccatggcctttttgttcatga

SEQ ID NO: 84416 - DNA, 25 bp, Saccharomyces pastorianus
agcggctcatgggaagtctctaaat

SEQ ID NO: 84417 - DNA, 25 bp, Saccharomyces pastorianus
tgtaatacacacgacgtttcctggg

SEQ ID NO: 84418 - DNA, 25 bp, Saccharomyces pastorianus
ctgcctttagggtggttggttccat

SEQ ID NO: 84419 - DNA, 25 bp, Saccharomyces pastorianus
tgaaaaaccgatctttaacgccaag

SEQ ID NO: 84420 - DNA, 25 bp, Saccharomyces pastorianus
cattttctacaatgacccggtgtct

SEQ ID NO: 84421 - DNA, 25 bp, Saccharomyces pastorianus
acaatccccatcattcggcaaattt

SEQ ID NO: 84422 - DNA, 25 bp, Saccharomyces pastorianus
ggcaaatttgagatcgacacggacg

SEQ ID NO: 84423 - DNA, 25 bp, Saccharomyces pastorianus
caagaatctgctttgattgccgata

SEQ ID NO: 84424 - DNA, 25 bp, Saccharomyces pastorianus
gacacggacgcaaacgttccaagag

SEQ ID NO: 84425 - DNA, 25 bp, Saccharomyces pastorianus
gtgtcttccctatcttttgaaccat

SEQ ID NO: 84426 - DNA, 25 bp, Saccharomyces pastorianus
ggttatgctgctgaaatttccgcca

SEQ ID NO: 84427 - DNA, 25 bp, Saccharomyces pastorianus
tgcagctattgagaacccatcctaa

SEQ ID NO: 84428 - DNA, 25 bp, Saccharomyces pastorianus
tgaaggccggcacttacccaaaggt

SEQ ID NO: 84429 - DNA, 25 bp, Saccharomyces pastorianus
ttattgagtgtcatgaaggccggca

SEQ ID NO: 84430 - DNA, 25 bp, Saccharomyces pastorianus
gaaagtcacctgagcgcataactga

SEQ ID NO: 84431 - DNA, 25 bp, Saccharomyces pastorianus
gaaaggtactattccactggatcat

SEQ ID NO: 84432 - DNA, 25 bp, Saccharomyces pastorianus
ggaatccggaggttattgatccaaa

SEQ ID NO: 84433 - DNA, 25 bp, Saccharomyces pastorianus
atgatattacgatcggctactccgg

SEQ ID NO: 84434 - DNA, 25 bp, Saccharomyces pastorianus
attcaagaatgtgctgctgcctcat

SEQ ID NO: 84435 - DNA, 25 bp, Saccharomyces pastorianus
atacaatcttatcctattccctgaa

SEQ ID NO: 84436 - DNA, 25 bp, Saccharomyces pastorianus
gatgtcaaagatattcccttagagg

SEQ ID NO: 84437 - DNA, 25 bp, Saccharomyces pastorianus
accattcagttaccgatagtttcaa

SEQ ID NO: 84438 - DNA, 25 bp, Saccharomyces pastorianus
gtgatcccgaaacaaaccattcagt

SEQ ID NO: 84439 - DNA, 25 bp, Saccharomyces pastorianus
atacccgaagttagtcgatattcac

SEQ ID NO: 84440 - DNA, 25 bp, Saccharomyces pastorianus
tacgggcctgagatactcgttacaa

SEQ ID NO: 84441 - DNA, 25 bp, Saccharomyces pastorianus
tactctgacgagttttttggtctgg

SEQ ID NO: 84442 - DNA, 25 bp, Saccharomyces pastorianus
ggctatatcgccgatcctgaagaat

SEQ ID NO: 84443 - DNA, 25 bp, Saccharomyces pastorianus
acctttgaaatcagcttagccgcac

SEQ ID NO: 84444 - DNA, 25 bp, Saccharomyces pastorianus
agggcgttgatgctagttttgactc

SEQ ID NO: 84445 - DNA, 25 bp, Saccharomyces pastorianus
tatgtattactttttgccgcagcgg

SEQ ID NO: 84446 - DNA, 25 bp, Saccharomyces pastorianus
gcggctggtttattacaagttctca

SEQ ID NO: 84447 - DNA, 25 bp, Saccharomyces pastorianus
gcacatacgattgcagttgcctcaa

SEQ ID NO: 84448 - DNA, 25 bp, Saccharomyces pastorianus
gggattatagaactgcagctgctga

SEQ ID NO: 84449 - DNA, 25 bp, Saccharomyces pastorianus
taatgcatctggtcttatcccgcca

SEQ ID NO: 84450 - DNA, 25 bp, Saccharomyces pastorianus
atacggcgccgaatacttgatcaac

SEQ ID NO: 84451 - DNA, 25 bp, Saccharomyces pastorianus
gactcggtcggaaaggatacctttg

SEQ ID NO: 84452 - DNA, 25 bp, Saccharomyces pastorianus
aatcattcagcacctgatggttgtg

SEQ ID NO: 84453 - DNA, 25 bp, Saccharomyces pastorianus
gaaaagtaacatccctattcatgaa

SEQ ID NO: 84454 - DNA, 25 bp, Saccharomyces pastorianus
agatccggacgagttggtatttcaa

SEQ ID NO: 84455 - DNA, 25 bp, Saccharomyces pastorianus
ggatagtcgttgaccgctatttaga

SEQ ID NO: 84456 - DNA, 25 bp, Saccharomyces pastorianus
tatttgatgtcatgctacaagccaa

SEQ ID NO: 84457 - DNA, 25 bp, Saccharomyces pastorianus
gttactccgagatacacaaatcatt

SEQ ID NO: 84458 - DNA, 25 bp, Saccharomyces pastorianus
gatccgaaccgtaaggcacttttct

SEQ ID NO: 84459 - DNA, 25 bp, Saccharomyces pastorianus
gacgagtaattgttgcacctgcatc

SEQ ID NO: 84460 - DNA, 25 bp, Saccharomyces pastorianus
atccaaggaagtttcgcgacgagta

SEQ ID NO: 84461 - DNA, 25 bp, Saccharomyces pastorianus
aggacactccttcatatttgatgtc

SEQ ID NO: 84462 - DNA, 25 bp, Saccharomyces pastorianus
tgcatcacacttcaaaacctccagt

SEQ ID NO: 84463 - DNA, 25 bp, Saccharomyces pastorianus
gacagacagcaagaacgacagccta

SEQ ID NO: 84464 - DNA, 25 bp, Saccharomyces pastorianus
agtcgcaattactcaaagtcattct

SEQ ID NO: 84465 - DNA, 25 bp, Saccharomyces pastorianus
gcagcggcgggaggatatcccatat

SEQ ID NO: 84466 - DNA, 25 bp, Saccharomyces pastorianus
gatatcccatatcgtttctattcat

SEQ ID NO: 84467 - DNA, 25 bp, Saccharomyces pastorianus
tcttgtttattttccactgtttggc

SEQ ID NO: 84468 - DNA, 25 bp, Saccharomyces pastorianus
gacagcctaagtttcgagacaacgc

SEQ ID NO: 84469 - DNA, 25 bp, Saccharomyces pastorianus
aatacgtaccatttgcagcggcggg

SEQ ID NO: 84470 - DNA, 25 bp, Saccharomyces pastorianus
tattcatcaaagttctgaccgcctc

SEQ ID NO: 84471 - DNA, 25 bp, Saccharomyces pastorianus
aatttactactttcttcttcctctg

SEQ ID NO: 84472 - DNA, 25 bp, Saccharomyces pastorianus
aagtcattctcacacactttcttgt

SEQ ID NO: 84473 - DNA, 25 bp, Saccharomyces pastorianus
tcttcctctggagggtcctggaata

SEQ ID NO: 84474 - DNA, 25 bp, Saccharomyces pastorianus
gccggtttgtttgtttcaggcgcaa

SEQ ID NO: 84475 - DNA, 25 bp, Saccharomyces pastorianus
gacggtggcagacctcccagtttat

SEQ ID NO: 84476 - DNA, 25 bp, Saccharomyces pastorianus
gccgaaagtcgctattttgatttac

SEQ ID NO: 84477 - DNA, 25 bp, Saccharomyces pastorianus
tcgaatactggtgggctttgggcaa

SEQ ID NO: 84478 - DNA, 25 bp, Saccharomyces pastorianus
tgagtactctggtccatcatggtgt

SEQ ID NO: 84479 - DNA, 25 bp, Saccharomyces pastorianus
taagtttggcaacttccccgcggag

SEQ ID NO: 84480 - DNA, 25 bp, Saccharomyces pastorianus
agattttccaagtgccagacgtcag

SEQ ID NO: 84481 - DNA, 25 bp, Saccharomyces pastorianus
gtttatccgagctaagagttcacca

SEQ ID NO: 84482 - DNA, 25 bp, Saccharomyces pastorianus
gcaaagggttctctccatggcaaaa

SEQ ID NO: 84483 - DNA, 25 bp, Saccharomyces pastorianus
tgtgtttctggaatcgacggtggca

SEQ ID NO: 84484 - DNA, 25 bp, Saccharomyces pastorianus
aaaagcttttgggactcgaatactg

SEQ ID NO: 84485 - DNA, 25 bp, Saccharomyces pastorianus
gtaaagatctcttcgtgaccactgc

SEQ ID NO: 84486 - DNA, 25 bp, Saccharomyces pastorianus
ttgccggagcagacaccaagagttt

SEQ ID NO: 84487 - DNA, 25 bp, Saccharomyces pastorianus
gttaattcctaacgcgatccactgg

SEQ ID NO: 84488 - DNA, 25 bp, Saccharomyces pastorianus
tttctgtttatcactgtctggtcca

SEQ ID NO: 84489 - DNA, 25 bp, Saccharomyces pastorianus
gcttcgtgttgacctattagctcac

SEQ ID NO: 84490 - DNA, 25 bp, Saccharomyces pastorianus
aatcttttgagtctcctgaaccaga

SEQ ID NO: 84491 - DNA, 25 bp, Saccharomyces pastorianus
ggtggctgcatctacagaattccaa

SEQ ID NO: 84492 - DNA, 25 bp, Saccharomyces pastorianus
aatgagcgattttccgtttgatttg

SEQ ID NO: 84493 - DNA, 25 bp, Saccharomyces pastorianus
gacgatgtacgtgactgattcttta

SEQ ID NO: 84494 - DNA, 25 bp, Saccharomyces pastorianus
aaatgtcctggtggcgacttgctaa

SEQ ID NO: 84495 - DNA, 25 bp, Saccharomyces pastorianus
acctattgggtgtttgcttcgtgtt

SEQ ID NO: 84496 - DNA, 25 bp, Saccharomyces pastorianus
gaacccgctgaacatgttggtccag

SEQ ID NO: 84497 - DNA, 25 bp, Saccharomyces pastorianus
ctgattctgactctagtaccaagga

SEQ ID NO: 84498 - DNA, 25 bp, Saccharomyces pastorianus
acaactacattcaacctggtcaagg

SEQ ID NO: 84499 - DNA, 25 bp, Saccharomyces pastorianus
taaggatgtctctaacgttttcgtt

SEQ ID NO: 84500 - DNA, 25 bp, Saccharomyces pastorianus
gatcttatctatcttgccagttctt

SEQ ID NO: 84501 - DNA, 25 bp, Saccharomyces pastorianus
gttttcgttactttcatgagtgtca

SEQ ID NO: 84502 - DNA, 25 bp, Saccharomyces pastorianus
accattggtattggtgctgccattg

SEQ ID NO: 84503 - DNA, 25 bp, Saccharomyces pastorianus
gtttttgtggctgattgcttaccca

SEQ ID NO: 84504 - DNA, 25 bp, Saccharomyces pastorianus
ttactgtctgctggttgattgctgc

SEQ ID NO: 84505 - DNA, 25 bp, Saccharomyces pastorianus
caaccagattctgctaccattttct

SEQ ID NO: 84506 - DNA, 25 bp, Saccharomyces pastorianus
ttgattgctgcctgtgtccactcta

SEQ ID NO: 84507 - DNA, 25 bp, Saccharomyces pastorianus
gttactcgtcacacaggcattgcaa

SEQ ID NO: 84508 - DNA, 25 bp, Saccharomyces pastorianus
aatgtgagcctacttacggacccga

SEQ ID NO: 84509 - DNA, 25 bp, Saccharomyces pastorianus
aaagtgctcgcgttacggagataca

SEQ ID NO: 84510 - DNA, 25 bp, Saccharomyces pastorianus
ttagatcaggcggagttactcgtca

SEQ ID NO: 84511 - DNA, 25 bp, Saccharomyces pastorianus
caagcaatgctttactttgggtgga

SEQ ID NO: 84512 - DNA, 25 bp, Saccharomyces pastorianus
gcaaggatactgttgatctctacaa

SEQ ID NO: 84513 - DNA, 25 bp, Saccharomyces pastorianus
atggatagccgcctctaagaacgta

SEQ ID NO: 84514 - DNA, 25 bp, Saccharomyces pastorianus
aggttagtgcccaattgccctttat

SEQ ID NO: 84515 - DNA, 25 bp, Saccharomyces pastorianus
gagtatccttttatgcagaagcgca

SEQ ID NO: 84516 - DNA, 25 bp, Saccharomyces pastorianus
tgccctttattatgggtttccctat

SEQ ID NO: 84517 - DNA, 25 bp, Saccharomyces pastorianus
acgatcatcgcgttcttttggagat

SEQ ID NO: 84518 - DNA, 25 bp, Saccharomyces pastorianus
aaatacgtacaaacccaagcagatg

SEQ ID NO: 84519 - DNA, 25 bp, Saccharomyces pastorianus
aacgtcctcacggtgatgacttaca

SEQ ID NO: 84520 - DNA, 25 bp, Saccharomyces pastorianus
gaagagctgaatacgtttctgtcaa

SEQ ID NO: 84521 - DNA, 25 bp, Saccharomyces pastorianus
ggactttgcagtttgaatacggtga

SEQ ID NO: 84522 - DNA, 25 bp, Saccharomyces pastorianus
ctggcgacagagacgctattgttca

SEQ ID NO: 84523 - DNA, 25 bp, Saccharomyces pastorianus
tagatggcattcatggaagtcgcaa

SEQ ID NO: 84524 - DNA, 25 bp, Saccharomyces pastorianus
gaaggatgccaattccattatcaaa

SEQ ID NO: 84525 - DNA, 25 bp, Saccharomyces pastorianus
gatgccgattatactgttggtgaat

SEQ ID NO: 84526 - DNA, 25 bp, Saccharomyces pastorianus
gaattttcctcatgaagatgccgat

SEQ ID NO: 84527 - DNA, 25 bp, Saccharomyces pastorianus
taatccatgaacacgaggcttattg

SEQ ID NO: 84528 - DNA, 25 bp, Saccharomyces pastorianus
gtattttctcatgtagctagttggg

SEQ ID NO: 84529 - DNA, 25 bp, Saccharomyces pastorianus
gccgccaccaagaaatgattgttgt

SEQ ID NO: 84530 - DNA, 25 bp, Saccharomyces pastorianus
accgatgtattatcaaccacaaccg

SEQ ID NO: 84531 - DNA, 25 bp, Saccharomyces pastorianus
accacaaccgcaacctatatacata

SEQ ID NO: 84532 - DNA, 25 bp, Saccharomyces pastorianus
ttgttgtaactgtggcgattgctgt

SEQ ID NO: 84533 - DNA, 25 bp, Saccharomyces pastorianus
attgcgaacgttttatgttgtctgt

SEQ ID NO: 84534 - DNA, 25 bp, Saccharomyces pastorianus
ttgctgttcagcaattgcgaacgtt

SEQ ID NO: 84535 - DNA, 25 bp, Saccharomyces pastorianus
aactgtggcgattgctgttcagcaa

SEQ ID NO: 84536 - DNA, 25 bp, Saccharomyces pastorianus
atatacatacaacaagggccgccgc

SEQ ID NO: 84537 - DNA, 25 bp, Saccharomyces pastorianus
agggccgccgccaccaagaaatgat

SEQ ID NO: 84538 - DNA, 25 bp, Saccharomyces pastorianus
tttatgttgtctgtgtctaattgat

SEQ ID NO: 84539 - DNA, 25 bp, Saccharomyces pastorianus
aatactatcaaccacaaccgatgta

SEQ ID NO: 84540 - DNA, 25 bp, Saccharomyces pastorianus
gtatgatgcagaatcgattgctcac

SEQ ID NO: 84541 - DNA, 25 bp, Saccharomyces pastorianus
gaaaactgtcatcgtcactgcatgc

SEQ ID NO: 84542 - DNA, 25 bp, Saccharomyces pastorianus
agagacccaaattgaactgcagttg

SEQ ID NO: 84543 - DNA, 25 bp, Saccharomyces pastorianus
gttccttttaatcatgtgacagcgc

SEQ ID NO: 84544 - DNA, 25 bp, Saccharomyces pastorianus
gtgacagcgctctcaatgaataatg

SEQ ID NO: 84545 - DNA, 25 bp, Saccharomyces pastorianus
aaatcgcatctttggaagcccattt

SEQ ID NO: 84546 - DNA, 25 bp, Saccharomyces pastorianus
tgccatataccccaaactttcgaat

SEQ ID NO: 84547 - DNA, 25 bp, Saccharomyces pastorianus
aaactttcgaattgccagcttcctt

SEQ ID NO: 84548 - DNA, 25 bp, Saccharomyces pastorianus
gtcatcgtcactgcatgcaaaggaa

SEQ ID NO: 84549 - DNA, 25 bp, Saccharomyces pastorianus
ccaagatgttagcatatggcagatc

SEQ ID NO: 84550 - DNA, 25 bp, Saccharomyces pastorianus
tcgaattgccagcttccttggaagt

SEQ ID NO: 84551 - DNA, 25 bp, Saccharomyces pastorianus
tactcaaaatgctagcgtgcgcgcc

SEQ ID NO: 84552 - DNA, 25 bp, Saccharomyces pastorianus
tgaggacgaaaaccgtagctctttt

SEQ ID NO: 84553 - DNA, 25 bp, Saccharomyces pastorianus
gctcttttacgccaaaccaatgcag

SEQ ID NO: 84554 - DNA, 25 bp, Saccharomyces pastorianus
gcgctatgaattggctattccagca

SEQ ID NO: 84555 - DNA, 25 bp, Saccharomyces pastorianus
aatgcagtatttctcaattaattga

SEQ ID NO: 84556 - DNA, 25 bp, Saccharomyces pastorianus
gtagctcttttacgccaaaccaatg

SEQ ID NO: 84557 - DNA, 25 bp, Saccharomyces pastorianus
ttttacgccaaaccaatgcagtatt

SEQ ID NO: 84558 - DNA, 25 bp, Saccharomyces pastorianus
gaaatgggctttactcaaaatgcta

SEQ ID NO: 84559 - DNA, 25 bp, Saccharomyces pastorianus
gagagcgctatgaattggctattcc

SEQ ID NO: 84560 - DNA, 25 bp, Saccharomyces pastorianus
aaatgctagcgtgcgcgccctattt

SEQ ID NO: 84561 - DNA, 25 bp, Saccharomyces pastorianus
gccaaaccaatgcagtatttctcaa

SEQ ID NO: 84562 - DNA, 25 bp, Saccharomyces pastorianus
gtgtacatacccaccactaaggaag

SEQ ID NO: 84563 - DNA, 25 bp, Saccharomyces pastorianus
cttttatttaatggcctcttttgat

SEQ ID NO: 84564 - DNA, 25 bp, Saccharomyces pastorianus
aagctcgatggtgtacatacccacc

SEQ ID NO: 84565 - DNA, 25 bp, Saccharomyces pastorianus
caacataaaagctcgatggtgtaca

SEQ ID NO: 84566 - DNA, 25 bp, Saccharomyces pastorianus
gaagaagtggtggaaaagctttatt

SEQ ID NO: 84567 - DNA, 25 bp, Saccharomyces pastorianus
cttcctccatgttttttttctcaca

SEQ ID NO: 84568 - DNA, 25 bp, Saccharomyces pastorianus
gaaggcatactaaatactattgaag

SEQ ID NO: 84569 - DNA, 25 bp, Saccharomyces pastorianus
catacccaccactaaggaagctaaa

SEQ ID NO: 84570 - DNA, 25 bp, Saccharomyces pastorianus
ttttctcacaattttcagtttgagt

SEQ ID NO: 84571 - DNA, 25 bp, Saccharomyces pastorianus
ctcttttgattcattcttcctccat

SEQ ID NO: 84572 - DNA, 25 bp, Saccharomyces pastorianus
gacgtaatgggaaatcagaaggcat

SEQ ID NO: 84573 - DNA, 25 bp, Saccharomyces pastorianus
gtaaatctgtcttcaccaacgttaa

SEQ ID NO: 84574 - DNA, 25 bp, Saccharomyces pastorianus
gtcaacccggtcaaatggcaagcat

SEQ ID NO: 84575 - DNA, 25 bp, Saccharomyces pastorianus
tcgtatagagttccacctcatgctt

SEQ ID NO: 84576 - DNA, 25 bp, Saccharomyces pastorianus
aaccgcggcagtcattggatctgaa

SEQ ID NO: 84577 - DNA, 25 bp, Saccharomyces pastorianus
taagcgccacagtactggtcacgaa

SEQ ID NO: 84578 - DNA, 25 bp, Saccharomyces pastorianus
actcgccagtaccaaattcacatta

SEQ ID NO: 84579 - DNA, 25 bp, Saccharomyces pastorianus
tgagaaaatccttcgctagggcccg

SEQ ID NO: 84580 - DNA, 25 bp, Saccharomyces pastorianus
aagcaaggacttcagcagcgtatca

SEQ ID NO: 84581 - DNA, 25 bp, Saccharomyces pastorianus
attactattagcacctcaactccat

SEQ ID NO: 84582 - DNA, 25 bp, Saccharomyces pastorianus
gggcccgtcaatcgcttgatttgga

SEQ ID NO: 84583 - DNA, 25 bp, Saccharomyces pastorianus
atgcttccaccgcaataactgagaa

SEQ ID NO: 84584 - DNA, 25 bp, Saccharomyces pastorianus
taaacttttcaaccatctctgtgcc

SEQ ID NO: 84585 - DNA, 25 bp, Saccharomyces pastorianus
agacaaatcgccatagtcgcctcta

SEQ ID NO: 84586 - DNA, 25 bp, Saccharomyces pastorianus
gaatctatccgctaacacaggtcct

SEQ ID NO: 84587 - DNA, 25 bp, Saccharomyces pastorianus
gacagtcgagtctacgttccaagat

SEQ ID NO: 84588 - DNA, 25 bp, Saccharomyces pastorianus
tagtcgcctctacagaccacattta

SEQ ID NO: 84589 - DNA, 25 bp, Saccharomyces pastorianus
ttgggtaccctacacgtatgcggaa

SEQ ID NO: 84590 - DNA, 25 bp, Saccharomyces pastorianus
caggtcctaagcgtggtactcaaag

SEQ ID NO: 84591 - DNA, 25 bp, Saccharomyces pastorianus
aggtgcgaaatacgtcttacaatca

SEQ ID NO: 84592 - DNA, 25 bp, Saccharomyces pastorianus
agacgatgctaagcttcctctccgt

SEQ ID NO: 84593 - DNA, 25 bp, Saccharomyces pastorianus
gtgccgctgattttattgcttctaa

SEQ ID NO: 84594 - DNA, 25 bp, Saccharomyces pastorianus
gaattttgaaccgtcgacagtcgag

SEQ ID NO: 84595 - DNA, 25 bp, Saccharomyces pastorianus
agatgccacttatcatgacctacct

SEQ ID NO: 84596 - DNA, 25 bp, Saccharomyces pastorianus
gttactgggctacacgatcttgacg

SEQ ID NO: 84597 - DNA, 25 bp, Saccharomyces pastorianus
tcaaagtttcgactcagatgccact

SEQ ID NO: 84598 - DNA, 25 bp, Saccharomyces pastorianus
tgcaggcacttcatcgtccttagat

SEQ ID NO: 84599 - DNA, 25 bp, Saccharomyces pastorianus
atgagtgcgctgcaacttactgcat

SEQ ID NO: 84600 - DNA, 25 bp, Saccharomyces pastorianus
atgacctaccttcttcagttgcagg

SEQ ID NO: 84601 - DNA, 25 bp, Saccharomyces pastorianus
ttagatcctgttcaaagcccgacga

SEQ ID NO: 84602 - DNA, 25 bp, Saccharomyces pastorianus
atggtgcacctgatgttactgggct

SEQ ID NO: 84603 - DNA, 25 bp, Saccharomyces pastorianus
gaaccctccctacaagaaagctttg

SEQ ID NO: 84604 - DNA, 25 bp, Saccharomyces pastorianus
gatatgctatattcccaattgggct

SEQ ID NO: 84605 - DNA, 25 bp, Saccharomyces pastorianus
gaggtacatctctagaagcgtttat

SEQ ID NO: 84606 - DNA, 25 bp, Saccharomyces pastorianus
gatatcttcttggtcattgtttttt

SEQ ID NO: 84607 - DNA, 25 bp, Saccharomyces pastorianus
atggtttcaccagtcttgaacctac

SEQ ID NO: 84608 - DNA, 25 bp, Saccharomyces pastorianus
ggtgagctcgtaggcattactggaa

SEQ ID NO: 84609 - DNA, 25 bp, Saccharomyces pastorianus
ttcgggagccaatagtgacaacatc

SEQ ID NO: 84610 - DNA, 25 bp, Saccharomyces pastorianus
atacccgataatcacacccagaatt

SEQ ID NO: 84611 - DNA, 25 bp, Saccharomyces pastorianus
ttcgcttcaatctgtaatctctctg

SEQ ID NO: 84612 - DNA, 25 bp, Saccharomyces pastorianus
atatttgtttcgttcttcgtagtat

SEQ ID NO: 84613 - DNA, 25 bp, Saccharomyces pastorianus
gtaatctctctgcaaaatttcggga

SEQ ID NO: 84614 - DNA, 25 bp, Saccharomyces pastorianus
aatcatctgttttaggtgagctcgt

SEQ ID NO: 84615 - DNA, 25 bp, Saccharomyces pastorianus
acatttccgttcttatcattgtaaa

SEQ ID NO: 84616 - DNA, 25 bp, Saccharomyces pastorianus
attgtggatgcccagatatcttctt

SEQ ID NO: 84617 - DNA, 25 bp, Saccharomyces pastorianus
aagtgagacacttgtcacaccaaag

SEQ ID NO: 84618 - DNA, 25 bp, Saccharomyces pastorianus
taatattgatgcctcaatccctgaa

SEQ ID NO: 84619 - DNA, 25 bp, Saccharomyces pastorianus
gtgtggtggcctaagatttcaatct

SEQ ID NO: 84620 - DNA, 25 bp, Saccharomyces pastorianus
gtccgtggacatttctcatattttg

SEQ ID NO: 84621 - DNA, 25 bp, Saccharomyces pastorianus
ggaaaagtacgcgtccgtggacatt

SEQ ID NO: 84622 - DNA, 25 bp, Saccharomyces pastorianus
aatctttatcattccgtggtcgtct

SEQ ID NO: 84623 - DNA, 25 bp, Saccharomyces pastorianus
gagaggagttttacttattgaccgt

SEQ ID NO: 84624 - DNA, 25 bp, Saccharomyces pastorianus
gtcattcggaaccaacactgcagaa

SEQ ID NO: 84625 - DNA, 25 bp, Saccharomyces pastorianus
gagctagggctttcttttcctacaa

SEQ ID NO: 84626 - DNA, 25 bp, Saccharomyces pastorianus
ccctccaccaaatcattttttctgt

SEQ ID NO: 84627 - DNA, 25 bp, Saccharomyces pastorianus
tggcttttcagctgcgtcattcgga

SEQ ID NO: 84628 - DNA, 25 bp, Saccharomyces pastorianus
aactctcatctttctgactacttgg

SEQ ID NO: 84629 - DNA, 25 bp, Saccharomyces pastorianus
gaggctgcatcttcttccgaagcta

SEQ ID NO: 84630 - DNA, 25 bp, Saccharomyces pastorianus
gtcagcacttctacagtcgaaactg

SEQ ID NO: 84631 - DNA, 25 bp, Saccharomyces pastorianus
gaaactgcttccaatgccggtcaaa

SEQ ID NO: 84632 - DNA, 25 bp, Saccharomyces pastorianus
tttcgttttaagtgccattgcctct

SEQ ID NO: 84633 - DNA, 25 bp, Saccharomyces pastorianus
gaattggactttgatgccatcacta

SEQ ID NO: 84634 - DNA, 25 bp, Saccharomyces pastorianus
tgagttctgaaatcgctgctgctct

SEQ ID NO: 84635 - DNA, 25 bp, Saccharomyces pastorianus
ggattccaaattccatctgatgtct

SEQ ID NO: 84636 - DNA, 25 bp, Saccharomyces pastorianus
tatcggtgacatcaactctcatctt

SEQ ID NO: 84637 - DNA, 25 bp, Saccharomyces pastorianus
gcgccgccgaaactgctgaattgca

SEQ ID NO: 84638 - DNA, 25 bp, Saccharomyces pastorianus
atcatctgccgaatcatcttctaag

SEQ ID NO: 84639 - DNA, 25 bp, Saccharomyces pastorianus
tgctgtataatatccctttggttga

SEQ ID NO: 84640 - DNA, 25 bp, Saccharomyces pastorianus
atgaggcttccaggcaaagattcgc

SEQ ID NO: 84641 - DNA, 25 bp, Saccharomyces pastorianus
gatttgctatgtgtggttctcctca

SEQ ID NO: 84642 - DNA, 25 bp, Saccharomyces pastorianus
gattaatactcctagtctgaccgga

SEQ ID NO: 84643 - DNA, 25 bp, Saccharomyces pastorianus
tgggttcctcccatatagtttatgt

SEQ ID NO: 84644 - DNA, 25 bp, Saccharomyces pastorianus
gttctcctcacctgtttttattgaa

SEQ ID NO: 84645 - DNA, 25 bp, Saccharomyces pastorianus
aaagcgactctcctacaaagtgtga

SEQ ID NO: 84646 - DNA, 25 bp, Saccharomyces pastorianus
gatgaattcattgtccagtggcaag

SEQ ID NO: 84647 - DNA, 25 bp, Saccharomyces pastorianus
tactggtgaaatgatccgtcttcta

SEQ ID NO: 84648 - DNA, 25 bp, Saccharomyces pastorianus
gaatgggcctggaacatgctgtata

SEQ ID NO: 84649 - DNA, 25 bp, Saccharomyces pastorianus
aattatggaacttcttttgcccctg

SEQ ID NO: 84650 - DNA, 25 bp, Saccharomyces pastorianus
gttactggacgaaacactgcttaaa

SEQ ID NO: 84651 - DNA, 25 bp, Saccharomyces pastorianus
atcgacgattctaaagctctctttg

SEQ ID NO: 84652 - DNA, 25 bp, Saccharomyces pastorianus
ttaaagactaccactcggccatgag

SEQ ID NO: 84653 - DNA, 25 bp, Saccharomyces pastorianus
gaagcacatctagtcagtcaaagtt

SEQ ID NO: 84654 - DNA, 25 bp, Saccharomyces pastorianus
tcaattcctgtctcctacgaataag

SEQ ID NO: 84655 - DNA, 25 bp, Saccharomyces pastorianus
ggagcgaatcagacgccagtctttc

SEQ ID NO: 84656 - DNA, 25 bp, Saccharomyces pastorianus
caagagctcgatctcttccatattt

SEQ ID NO: 84657 - DNA, 25 bp, Saccharomyces pastorianus
aaagttcgctaatctcgctgactag

SEQ ID NO: 84658 - DNA, 25 bp, Saccharomyces pastorianus
actagcgaatttggccatggacact

SEQ ID NO: 84659 - DNA, 25 bp, Saccharomyces pastorianus
gaaaagctgcggatggctccatcac

SEQ ID NO: 84660 - DNA, 25 bp, Saccharomyces pastorianus
tgttttctgttcaaacgactcctcc

SEQ ID NO: 84661 - DNA, 25 bp, Saccharomyces pastorianus
gaaagtcgtggttcctggtgtcaaa

SEQ ID NO: 84662 - DNA, 25 bp, Saccharomyces pastorianus
aagtgtcgcagttccagttgatatt

SEQ ID NO: 84663 - DNA, 25 bp, Saccharomyces pastorianus
aagagagtcatcactttgccagact

SEQ ID NO: 84664 - DNA, 25 bp, Saccharomyces pastorianus
tttgccagactacccaggtgtggat

SEQ ID NO: 84665 - DNA, 25 bp, Saccharomyces pastorianus
agaggctacgcaccaagacgtcagt

SEQ ID NO: 84666 - DNA, 25 bp, Saccharomyces pastorianus
ggcgctctttattatcccagagatg

SEQ ID NO: 84667 - DNA, 25 bp, Saccharomyces pastorianus
tttcggtttccctagaagtgtcgca

SEQ ID NO: 84668 - DNA, 25 bp, Saccharomyces pastorianus
acacccgcaaaggattctactggca

SEQ ID NO: 84669 - DNA, 25 bp, Saccharomyces pastorianus
ggttcaacaatgacttgtccctgtt

SEQ ID NO: 84670 - DNA, 25 bp, Saccharomyces pastorianus
gtcagttggcaaacacacccgcaaa

SEQ ID NO: 84671 - DNA, 25 bp, Saccharomyces pastorianus
ccaaataactatgctggcgctcttt

SEQ ID NO: 84672 - DNA, 25 bp, Saccharomyces pastorianus
tgttattgaacggaagcatcttctt

SEQ ID NO: 84673 - DNA, 25 bp, Saccharomyces pastorianus
gctacggtgccagatctgcttatgt

SEQ ID NO: 84674 - DNA, 25 bp, Saccharomyces pastorianus
gtacataagggcctcatcttcctct

SEQ ID NO: 84675 - DNA, 25 bp, Saccharomyces pastorianus
ttttattatgctcagagggccctac

SEQ ID NO: 84676 - DNA, 25 bp, Saccharomyces pastorianus
gcgtttcttcgctaggatggtgaat

SEQ ID NO: 84677 - DNA, 25 bp, Saccharomyces pastorianus
gatctgcttatgttcattattttgg

SEQ ID NO: 84678 - DNA, 25 bp, Saccharomyces pastorianus
ttttttccccaatgagctgctacgg

SEQ ID NO: 84679 - DNA, 25 bp, Saccharomyces pastorianus
aatgagctgctacggtgccagatct

SEQ ID NO: 84680 - DNA, 25 bp, Saccharomyces pastorianus
gagggccctacatgacagctttttt

SEQ ID NO: 84681 - DNA, 25 bp, Saccharomyces pastorianus
ccatctacctatcgctgttattgaa

SEQ ID NO: 84682 - DNA, 25 bp, Saccharomyces pastorianus
atgcacgtacataagggcctcatct

SEQ ID NO: 84683 - DNA, 25 bp, Saccharomyces pastorianus
tagcttcccttacggactactggta

SEQ ID NO: 84684 - DNA, 25 bp, Saccharomyces pastorianus
gaagatttacatacctgtgtcgcac

SEQ ID NO: 84685 - DNA, 25 bp, Saccharomyces pastorianus
tcgtctatgattataaccgccacta

SEQ ID NO: 84686 - DNA, 25 bp, Saccharomyces pastorianus
tgcattcggtagacttcaagacatc

SEQ ID NO: 84687 - DNA, 25 bp, Saccharomyces pastorianus
ggtgatgctccattctaaaaacgtt

SEQ ID NO: 84688 - DNA, 25 bp, Saccharomyces pastorianus
gttaccctgtggaaatcgactcctt

SEQ ID NO: 84689 - DNA, 25 bp, Saccharomyces pastorianus
agcactccaatagctgttaccctgt

SEQ ID NO: 84690 - DNA, 25 bp, Saccharomyces pastorianus
gggtatactgtcctatgcgacgtca

SEQ ID NO: 84691 - DNA, 25 bp, Saccharomyces pastorianus
gcgaccttttgctattgttcattgc

SEQ ID NO: 84692 - DNA, 25 bp, Saccharomyces pastorianus
ctgtgtcgcacagatacccaatagc

SEQ ID NO: 84693 - DNA, 25 bp, Saccharomyces pastorianus
gacatcgtctttgcaatcgtctatg

SEQ ID NO: 84694 - DNA, 25 bp, Saccharomyces pastorianus
agggaacctccaagtacaccaagca

SEQ ID NO: 84695 - DNA, 25 bp, Saccharomyces pastorianus
tcaaggagcatgtttcgggcactaa

SEQ ID NO: 84696 - DNA, 25 bp, Saccharomyces pastorianus
aaaattgtcgacgtcgccaaggccg

SEQ ID NO: 84697 - DNA, 25 bp, Saccharomyces pastorianus
aagaactcgctgaggctacccgtaa

SEQ ID NO: 84698 - DNA, 25 bp, Saccharomyces pastorianus
gcgtcgttacgaggaagccattgca

SEQ ID NO: 84699 - DNA, 25 bp, Saccharomyces pastorianus
aagcactctaccaaaggcgaccgtt

SEQ ID NO: 84700 - DNA, 25 bp, Saccharomyces pastorianus
ggtagaacagctggtgggtcctccc

SEQ ID NO: 84701 - DNA, 25 bp, Saccharomyces pastorianus
agaaatcaactccatactctttccg

SEQ ID NO: 84702 - DNA, 25 bp, Saccharomyces pastorianus
caactccatcttctggtccaaagaa

SEQ ID NO: 84703 - DNA, 25 bp, Saccharomyces pastorianus
ggcgaccgtttctccagataaagct

SEQ ID NO: 84704 - DNA, 25 bp, Saccharomyces pastorianus
aaagcgaattagctgccatccgcaa

SEQ ID NO: 84705 - DNA, 25 bp, Saccharomyces pastorianus
gtccggtaaaacagctttagccgct

SEQ ID NO: 84706 - DNA, 25 bp, Saccharomyces pastorianus
caaactttcttgacgatgctggtag

SEQ ID NO: 84707 - DNA, 25 bp, Saccharomyces pastorianus
atctggattcccattcatcaggtta

SEQ ID NO: 84708 - DNA, 25 bp, Saccharomyces pastorianus
atcaggttaatttctcccaacgagt

SEQ ID NO: 84709 - DNA, 25 bp, Saccharomyces pastorianus
cccaacgagttgtcaggcatgtcag

SEQ ID NO: 84710 - DNA, 25 bp, Saccharomyces pastorianus
gatcatgactactacatcagcttat

SEQ ID NO: 84711 - DNA, 25 bp, Saccharomyces pastorianus
aggagctgtcctaacttcaatgtcg

SEQ ID NO: 84712 - DNA, 25 bp, Saccharomyces pastorianus
caagaccgtcgtttattgatcatga

SEQ ID NO: 84713 - DNA, 25 bp, Saccharomyces pastorianus
ggatatcttgagttgcttcgacaat

SEQ ID NO: 84714 - DNA, 25 bp, Saccharomyces pastorianus
catcagcttattcggtacttcaaca

SEQ ID NO: 84715 - DNA, 25 bp, Saccharomyces pastorianus
gttagtatctctattaatccacggc

SEQ ID NO: 84716 - DNA, 25 bp, Saccharomyces pastorianus
ttatattcaaggtctgccccagtac

SEQ ID NO: 84717 - DNA, 25 bp, Saccharomyces pastorianus
aagtgcgttccgtcaaagaggcctc

SEQ ID NO: 84718 - DNA, 25 bp, Saccharomyces pastorianus
gaagtagtcccaagatcagccacag

SEQ ID NO: 84719 - DNA, 25 bp, Saccharomyces pastorianus
ggaaggcccatgtatccaagacctg

SEQ ID NO: 84720 - DNA, 25 bp, Saccharomyces pastorianus
ttcgcagctgttattatcatcaccc

SEQ ID NO: 84721 - DNA, 25 bp, Saccharomyces pastorianus
gccccagtaccaaacatcttatttt

SEQ ID NO: 84722 - DNA, 25 bp, Saccharomyces pastorianus
gcagaccagtgccatactacaagaa

SEQ ID NO: 84723 - DNA, 25 bp, Saccharomyces pastorianus
gaataatggaatgccctactcactc

SEQ ID NO: 84724 - DNA, 25 bp, Saccharomyces pastorianus
gatcgccccaataaggctagctttt

SEQ ID NO: 84725 - DNA, 25 bp, Saccharomyces pastorianus
gcattacgaacattctccacatcaa

SEQ ID NO: 84726 - DNA, 25 bp, Saccharomyces pastorianus
aagacctgctgaagatgcttacaat

SEQ ID NO: 84727 - DNA, 25 bp, Saccharomyces pastorianus
gtttggaataccagtcgttgtagca

SEQ ID NO: 84728 - DNA, 25 bp, Saccharomyces pastorianus
aggttatttatacgcattggctgca

SEQ ID NO: 84729 - DNA, 25 bp, Saccharomyces pastorianus
gaaattcaaaccataccgggtctat

SEQ ID NO: 84730 - DNA, 25 bp, Saccharomyces pastorianus
gcacatgctgtggtagatgcaacga

SEQ ID NO: 84731 - DNA, 25 bp, Saccharomyces pastorianus
gggtctatcgacatatgctggttac

SEQ ID NO: 84732 - DNA, 25 bp, Saccharomyces pastorianus
tgaatgctggcgcatctcatgccgt

SEQ ID NO: 84733 - DNA, 25 bp, Saccharomyces pastorianus
gtacgacgtcaatagctccatcgag

SEQ ID NO: 84734 - DNA, 25 bp, Saccharomyces pastorianus
aagcttaccagcatcgtccaaaaaa

SEQ ID NO: 84735 - DNA, 25 bp, Saccharomyces pastorianus
acatcgattttgttgccaagggtgt

SEQ ID NO: 84736 - DNA, 25 bp, Saccharomyces pastorianus
tagaggttttacgttccccatcagg

SEQ ID NO: 84737 - DNA, 25 bp, Saccharomyces pastorianus
gctccatcgaggacaagcttaccag

SEQ ID NO: 84738 - DNA, 25 bp, Saccharomyces pastorianus
aggtgcctcaacatgttcttatcca

SEQ ID NO: 84739 - DNA, 25 bp, Saccharomyces pastorianus
tgccagaaccagacttgctgctgat

SEQ ID NO: 84740 - DNA, 25 bp, Saccharomyces pastorianus
tagggtcattgttcaaaggctgcgg

SEQ ID NO: 84741 - DNA, 25 bp, Saccharomyces pastorianus
aagccactggtgctaactggttcat

SEQ ID NO: 84742 - DNA, 25 bp, Saccharomyces pastorianus
cggtatgtttgattctctcaagcca

SEQ ID NO: 84743 - DNA, 25 bp, Saccharomyces pastorianus
gcagctggtgctctttcgttactat

SEQ ID NO: 84744 - DNA, 25 bp, Saccharomyces pastorianus
aaagggtggcgctcgccaattcaat

SEQ ID NO: 84745 - DNA, 25 bp, Saccharomyces pastorianus
aggtaatctggcttctggtggtgca

SEQ ID NO: 84746 - DNA, 25 bp, Saccharomyces pastorianus
atgggtggtcactacaggtgcctca

SEQ ID NO: 84747 - DNA, 25 bp, Saccharomyces pastorianus
gttatttccatgtatgaccagttgc

SEQ ID NO: 84748 - DNA, 25 bp, Saccharomyces pastorianus
caacggtgctatagattgtctcaaa

SEQ ID NO: 84749 - DNA, 25 bp, Saccharomyces pastorianus
attcaaacagttttaagcgaggata

SEQ ID NO: 84750 - DNA, 25 bp, Saccharomyces pastorianus
ggttctttcttgcaaagcgcacctg

SEQ ID NO: 84751 - DNA, 25 bp, Saccharomyces pastorianus
aagcgaggataaatcacatggttat

SEQ ID NO: 84752 - DNA, 25 bp, Saccharomyces pastorianus
atcgctaatatcattggtgaggcca

SEQ ID NO: 84753 - DNA, 25 bp, Saccharomyces pastorianus
gcacaaattttactcattctaccgg

SEQ ID NO: 84754 - DNA, 25 bp, Saccharomyces pastorianus
ttctaccggttctttcttgcaaagc

SEQ ID NO: 84755 - DNA, 25 bp, Saccharomyces pastorianus
tgacgacagtcagtgggtaccagga

SEQ ID NO: 84756 - DNA, 25 bp, Saccharomyces pastorianus
aagcgcacctgttgaactgacgaca

SEQ ID NO: 84757 - DNA, 25 bp, Saccharomyces pastorianus
cagtgggtaccaggagtttttgaag

SEQ ID NO: 84758 - DNA, 25 bp, Saccharomyces pastorianus
acatggttatgtgctaaaggacggc

SEQ ID NO: 84759 - DNA, 25 bp, Saccharomyces pastorianus
aaggacggcgaagtcatcgctaata

SEQ ID NO: 84760 - DNA, 25 bp, Saccharomyces pastorianus
aattgctgttactggtggcgaaaat

SEQ ID NO: 84761 - DNA, 25 bp, Saccharomyces pastorianus
caccgccatcgtgatgctggagtga

SEQ ID NO: 84762 - DNA, 25 bp, Saccharomyces pastorianus
caatcgaaggtttcagtggctactg

SEQ ID NO: 84763 - DNA, 25 bp, Saccharomyces pastorianus
taaggattctgcgagaccatctaat

SEQ ID NO: 84764 - DNA, 25 bp, Saccharomyces pastorianus
gacgccgttgatgcactaagtagaa

SEQ ID NO: 84765 - DNA, 25 bp, Saccharomyces pastorianus
gcctgttgtcaacgcagctgttaac

SEQ ID NO: 84766 - DNA, 25 bp, Saccharomyces pastorianus
ctgccactaagactccactaattaa

SEQ ID NO: 84767 - DNA, 25 bp, Saccharomyces pastorianus
tcttcctcttcatcggcggcaaagg

SEQ ID NO: 84768 - DNA, 25 bp, Saccharomyces pastorianus
aagcttttgccagatggtgacgccg

SEQ ID NO: 84769 - DNA, 25 bp, Saccharomyces pastorianus
atctagtgcagaatcttccaacgcc

SEQ ID NO: 84770 - DNA, 25 bp, Saccharomyces pastorianus
gccaaagacgatgctgccactaaga

SEQ ID NO: 84771 - DNA, 25 bp, Saccharomyces pastorianus
ttgtcctgcaccaagcgatagcgaa

SEQ ID NO: 84772 - DNA, 25 bp, Saccharomyces pastorianus
gaatggaaacttgcgagtctcccta

SEQ ID NO: 84773 - DNA, 25 bp, Saccharomyces pastorianus
gcgagtctccctattaatgcttgaa

SEQ ID NO: 84774 - DNA, 25 bp, Saccharomyces pastorianus
agtgcagagctgtcctatacgattt

SEQ ID NO: 84775 - DNA, 25 bp, Saccharomyces pastorianus
tgtctgttgattcgttgtcctgcac

SEQ ID NO: 84776 - DNA, 25 bp, Saccharomyces pastorianus
gagatctgtcaactctttaatcgag

SEQ ID NO: 84777 - DNA, 25 bp, Saccharomyces pastorianus
gttggatgtggaaaccctgaatacc

SEQ ID NO: 84778 - DNA, 25 bp, Saccharomyces pastorianus
ctcctatcaaatcccgttgtctgtt

SEQ ID NO: 84779 - DNA, 25 bp, Saccharomyces pastorianus
tactagctcattgtatacctgccaa

SEQ ID NO: 84780 - DNA, 25 bp, Saccharomyces pastorianus
agctgctttaagacgtaccatggaa

SEQ ID NO: 84781 - DNA, 25 bp, Saccharomyces pastorianus
aatggtctgcgattcgatgtcgcct

SEQ ID NO: 84782 - DNA, 25 bp, Saccharomyces pastorianus
gagttggtatcaggctctccagcga

SEQ ID NO: 84783 - DNA, 25 bp, Saccharomyces pastorianus
tggatcaacctgtcgacttgacgtt

SEQ ID NO: 84784 - DNA, 25 bp, Saccharomyces pastorianus
aagaattacagtacgactccaccct

SEQ ID NO: 84785 - DNA, 25 bp, Saccharomyces pastorianus
gatatcggatcaggttcagtcataa

SEQ ID NO: 84786 - DNA, 25 bp, Saccharomyces pastorianus
cattgccatcttccgaattctctaa

SEQ ID NO: 84787 - DNA, 25 bp, Saccharomyces pastorianus
agatgtgaccatcctgttacgttag

SEQ ID NO: 84788 - DNA, 25 bp, Saccharomyces pastorianus
ttggacatcattaagggctcctccc

SEQ ID NO: 84789 - DNA, 25 bp, Saccharomyces pastorianus
gtatggatctaacctcactaagtaa

SEQ ID NO: 84790 - DNA, 25 bp, Saccharomyces pastorianus
gttcgtgacttgtcccaattgagtg

SEQ ID NO: 84791 - DNA, 25 bp, Saccharomyces pastorianus
gaccgtatagccgaatactctctga

SEQ ID NO: 84792 - DNA, 25 bp, Saccharomyces pastorianus
ggctcctccctttctgatagagttg

SEQ ID NO: 84793 - DNA, 25 bp, Saccharomyces pastorianus
ttgaccaactggacacaatctttga

SEQ ID NO: 84794 - DNA, 25 bp, Saccharomyces pastorianus
gaaggcttcgacacctatttccaag

SEQ ID NO: 84795 - DNA, 25 bp, Saccharomyces pastorianus
gatggtcacatctatattcttggaa

SEQ ID NO: 84796 - DNA, 25 bp, Saccharomyces pastorianus
gatatcaccgtcagctacaaacttt

SEQ ID NO: 84797 - DNA, 25 bp, Saccharomyces pastorianus
agaactcttgagtcatcgacagctt

SEQ ID NO: 84798 - DNA, 25 bp, Saccharomyces pastorianus
gcttgtgcaatgataccatcttctt

SEQ ID NO: 84799 - DNA, 25 bp, Saccharomyces pastorianus
acggtctttcttggtatcctcaaat

SEQ ID NO: 84800 - DNA, 25 bp, Saccharomyces pastorianus
ggagtcgtactgtaattcttcaatc

SEQ ID NO: 84801 - DNA, 25 bp, Saccharomyces pastorianus
ttatgactgaacctgatccgatatc

SEQ ID NO: 84802 - DNA, 25 bp, Saccharomyces pastorianus
ggatgttccatatccacgaatggtt

SEQ ID NO: 84803 - DNA, 25 bp, Saccharomyces pastorianus
gagtattcggctatacggtctttct

SEQ ID NO: 84804 - DNA, 25 bp, Saccharomyces pastorianus
cagcttatatgttctttgctaatga

SEQ ID NO: 84805 - DNA, 25 bp, Saccharomyces pastorianus
gaagaaaagcaaccctatgaatcta

SEQ ID NO: 84806 - DNA, 25 bp, Saccharomyces pastorianus
gtccgttccgagaatcctgacgtaa

SEQ ID NO: 84807 - DNA, 25 bp, Saccharomyces pastorianus
gtaacttttggccaagtaggcagaa

SEQ ID NO: 84808 - DNA, 25 bp, Saccharomyces pastorianus
gagaaagaaggatcctaacgcccct

SEQ ID NO: 84809 - DNA, 25 bp, Saccharomyces pastorianus
gaaggatcctaacgcccctaagagg

SEQ ID NO: 84810 - DNA, 25 bp, Saccharomyces pastorianus
cagagacattgtccgttccgagaat

SEQ ID NO: 84811 - DNA, 25 bp, Saccharomyces pastorianus
aggtggaaggccttaactgctgaag

SEQ ID NO: 84812 - DNA, 25 bp, Saccharomyces pastorianus
gggcttgtcagcttatatgttcttt

SEQ ID NO: 84813 - DNA, 25 bp, Saccharomyces pastorianus
gaatcctgacgtaacttttggccaa

SEQ ID NO: 84814 - DNA, 25 bp, Saccharomyces pastorianus
ctatgaatctaaggctcaagcagac

SEQ ID NO: 84815 - DNA, 25 bp, Saccharomyces pastorianus
agaagctagacgttgcaggagtgca

SEQ ID NO: 84816 - DNA, 25 bp, Saccharomyces pastorianus
gcaattcgatgcgatgtgctcgact

SEQ ID NO: 84817 - DNA, 25 bp, Saccharomyces pastorianus
gtgctcgactttcaacaatatcctc

SEQ ID NO: 84818 - DNA, 25 bp, Saccharomyces pastorianus
gatgcattacagcaatcgcctcatt

SEQ ID NO: 84819 - DNA, 25 bp, Saccharomyces pastorianus
acaatatcctcagtacgtgtcttga

SEQ ID NO: 84820 - DNA, 25 bp, Saccharomyces pastorianus
gctacgacattattcgcgatttgtg

SEQ ID NO: 84821 - DNA, 25 bp, Saccharomyces pastorianus
caaacacgaggtttcgggccagaga

SEQ ID NO: 84822 - DNA, 25 bp, Saccharomyces pastorianus
ggcaaccaggaggtctcgcaagaga

SEQ ID NO: 84823 - DNA, 25 bp, Saccharomyces pastorianus
gggccagagaatcagctacgacatt

SEQ ID NO: 84824 - DNA, 25 bp, Saccharomyces pastorianus
gctttggtgagcctgatctaacgaa

SEQ ID NO: 84825 - DNA, 25 bp, Saccharomyces pastorianus
atgtattccgcatgagggctttggt

SEQ ID NO: 84826 - DNA, 25 bp, Saccharomyces pastorianus
attaccatgaaggtccaggttacga

SEQ ID NO: 84827 - DNA, 25 bp, Saccharomyces pastorianus
gatattatcaagtctgtcggttcca

SEQ ID NO: 84828 - DNA, 25 bp, Saccharomyces pastorianus
actttattctcgtggtgtgcatttg

SEQ ID NO: 84829 - DNA, 25 bp, Saccharomyces pastorianus
gtgaacgccaaaggttacagtgatg

SEQ ID NO: 84830 - DNA, 25 bp, Saccharomyces pastorianus
aacttgttcaatgcctcagtcaaat

SEQ ID NO: 84831 - DNA, 25 bp, Saccharomyces pastorianus
aagacttgcacacctattaccatga

SEQ ID NO: 84832 - DNA, 25 bp, Saccharomyces pastorianus
ggtgtgcatttgaagtgaacgccaa

SEQ ID NO: 84833 - DNA, 25 bp, Saccharomyces pastorianus
caagtctgtcggttccaacttgttc

SEQ ID NO: 84834 - DNA, 25 bp, Saccharomyces pastorianus
ggatgaattagtccattactcctac

SEQ ID NO: 84835 - DNA, 25 bp, Saccharomyces pastorianus
agtgagattcaagaccaaaaggttt

SEQ ID NO: 84836 - DNA, 25 bp, Saccharomyces pastorianus
attactcctactaccaagacttgca

SEQ ID NO: 84837 - DNA, 25 bp, Saccharomyces pastorianus
gatgatattactatcccggtggctc

SEQ ID NO: 84838 - DNA, 25 bp, Saccharomyces pastorianus
ggcaagcgacgaggatgacattaac

SEQ ID NO: 84839 - DNA, 25 bp, Saccharomyces pastorianus
taatgcgctgttatcgttgctgcca

SEQ ID NO: 84840 - DNA, 25 bp, Saccharomyces pastorianus
gacagctgtcgcagattgcactaca

SEQ ID NO: 84841 - DNA, 25 bp, Saccharomyces pastorianus
gaatctaacttgaacctaccatctt

SEQ ID NO: 84842 - DNA, 25 bp, Saccharomyces pastorianus
cccggtggctctacgtgttgtgaag

SEQ ID NO: 84843 - DNA, 25 bp, Saccharomyces pastorianus
ttccggttctgcttctatatcaaca

SEQ ID NO: 84844 - DNA, 25 bp, Saccharomyces pastorianus
gtttgtctactgaagctggtcatat

SEQ ID NO: 84845 - DNA, 25 bp, Saccharomyces pastorianus
ggaaattgagtctgcccgacagctg

SEQ ID NO: 84846 - DNA, 25 bp, Saccharomyces pastorianus
atatcaacattaacagcggccgaac

SEQ ID NO: 84847 - DNA, 25 bp, Saccharomyces pastorianus
aatcacaatttgacccttccagagg

SEQ ID NO: 84848 - DNA, 25 bp, Saccharomyces pastorianus
gtggcttccacgagacagtaccatt

SEQ ID NO: 84849 - DNA, 25 bp, Saccharomyces pastorianus
ggatgctcttgaatactgtggttta

SEQ ID NO: 84850 - DNA, 25 bp, Saccharomyces pastorianus
atagcacctattttgcggaattgga

SEQ ID NO: 84851 - DNA, 25 bp, Saccharomyces pastorianus
gttcttgcctatgtttacagggttt

SEQ ID NO: 84852 - DNA, 25 bp, Saccharomyces pastorianus
gaatatggctgtttctcgtacacca

SEQ ID NO: 84853 - DNA, 25 bp, Saccharomyces pastorianus
tcgtacaccagcctagatacctatg

SEQ ID NO: 84854 - DNA, 25 bp, Saccharomyces pastorianus
aaagtactcggtttcatcaaggatt

SEQ ID NO: 84855 - DNA, 25 bp, Saccharomyces pastorianus
attccagttgcgaacgttttcacta

SEQ ID NO: 84856 - DNA, 25 bp, Saccharomyces pastorianus
ttttaaccgagcgttgtggcttcca

SEQ ID NO: 84857 - DNA, 25 bp, Saccharomyces pastorianus
gttattcaaaacttgttcttgccta

SEQ ID NO: 84858 - DNA, 25 bp, Saccharomyces pastorianus
aaagggcaccgtcttatgctcatta

SEQ ID NO: 84859 - DNA, 25 bp, Saccharomyces pastorianus
atgcgctgttttccaattaatgaca

SEQ ID NO: 84860 - DNA, 25 bp, Saccharomyces pastorianus
ttctaccctagctttgtacttttca

SEQ ID NO: 84861 - DNA, 25 bp, Saccharomyces pastorianus
tatccctaattttccaacttggctt

SEQ ID NO: 84862 - DNA, 25 bp, Saccharomyces pastorianus
acttctcggtcttaaagcttcttct

SEQ ID NO: 84863 - DNA, 25 bp, Saccharomyces pastorianus
ggcttgattttttacttctcggtct

SEQ ID NO: 84864 - DNA, 25 bp, Saccharomyces pastorianus
taatgacactaggttcggcagagaa

SEQ ID NO: 84865 - DNA, 25 bp, Saccharomyces pastorianus
tgacaatcgttgttctaccctagct

SEQ ID NO: 84866 - DNA, 25 bp, Saccharomyces pastorianus
gaagcgcaatcgttgctctaaatca

SEQ ID NO: 84867 - DNA, 25 bp, Saccharomyces pastorianus
taaagcttcttctgttcctgacaat

SEQ ID NO: 84868 - DNA, 25 bp, Saccharomyces pastorianus
gtattttgacatgccattctctatc

SEQ ID NO: 84869 - DNA, 25 bp, Saccharomyces pastorianus
gccattctctatcaatgaagcgcaa

SEQ ID NO: 84870 - DNA, 25 bp, Saccharomyces pastorianus
aaatgggctcgactgcatagcacct

SEQ ID NO: 84871 - DNA, 25 bp, Saccharomyces pastorianus
agagccattgccttattgaccgcat

SEQ ID NO: 84872 - DNA, 25 bp, Saccharomyces pastorianus
gagccattgttggatgttcttgttc

SEQ ID NO: 84873 - DNA, 25 bp, Saccharomyces pastorianus
gtacgattgagtgcttgtctgacga

SEQ ID NO: 84874 - DNA, 25 bp, Saccharomyces pastorianus
tctcacctgatatcttccggaataa

SEQ ID NO: 84875 - DNA, 25 bp, Saccharomyces pastorianus
accgcatatttgtcatctgttaaga

SEQ ID NO: 84876 - DNA, 25 bp, Saccharomyces pastorianus
tgacaagacaaagccactcgacgtg

SEQ ID NO: 84877 - DNA, 25 bp, Saccharomyces pastorianus
gatagagttctgtcttttctctctc

SEQ ID NO: 84878 - DNA, 25 bp, Saccharomyces pastorianus
atacgacaatggtctgcgaagcctt

SEQ ID NO: 84879 - DNA, 25 bp, Saccharomyces pastorianus
atccattattggtacggctgtgcaa

SEQ ID NO: 84880 - DNA, 25 bp, Saccharomyces pastorianus
gaagaactacgtgctgctgctttat

SEQ ID NO: 84881 - DNA, 25 bp, Saccharomyces pastorianus
atttgactcaattggctgttatcag

SEQ ID NO: 84882 - DNA, 25 bp, Saccharomyces pastorianus
gtggacaatcctacgaactatttga

SEQ ID NO: 84883 - DNA, 25 bp, Saccharomyces pastorianus
gcaagctcttgacctattcttacag

SEQ ID NO: 84884 - DNA, 25 bp, Saccharomyces pastorianus
ggccatttctagcaaactttctcag

SEQ ID NO: 84885 - DNA, 25 bp, Saccharomyces pastorianus
gccgtaggtttggattttgtctaca

SEQ ID NO: 84886 - DNA, 25 bp, Saccharomyces pastorianus
aagtgccgtggaaacattattggat

SEQ ID NO: 84887 - DNA, 25 bp, Saccharomyces pastorianus
ccagggtccattaagtcatccagaa

SEQ ID NO: 84888 - DNA, 25 bp, Saccharomyces pastorianus
ggctgttatcaggttccaaaccatt

SEQ ID NO: 84889 - DNA, 25 bp, Saccharomyces pastorianus
cacaattggaggatctttctgaaag

SEQ ID NO: 84890 - DNA, 25 bp, Saccharomyces pastorianus
gggctaagatttcttccatcctagt

SEQ ID NO: 84891 - DNA, 25 bp, Saccharomyces pastorianus
gatgaaatgttatccccagggtcca

SEQ ID NO: 84892 - DNA, 25 bp, Saccharomyces pastorianus
ctgcacaacgtcactcaaaggcggc

SEQ ID NO: 84893 - DNA, 25 bp, Saccharomyces pastorianus
tgcacaacgtcactcaaaggcggcc

SEQ ID NO: 84894 - DNA, 25 bp, Saccharomyces pastorianus
ccgcggcgttttccattgcgaaatt

SEQ ID NO: 84895 - DNA, 25 bp, Saccharomyces pastorianus
tttccattgcgaaatttttcacttt

SEQ ID NO: 84896 - DNA, 25 bp, Saccharomyces pastorianus
aacgtcactcaaaggcggcccgcgg

SEQ ID NO: 84897 - DNA, 25 bp, Saccharomyces pastorianus
gcgttttccattgcgaaatttttca

SEQ ID NO: 84898 - DNA, 25 bp, Saccharomyces pastorianus
cctgcacaacgtcactcaaaggcgg

SEQ ID NO: 84899 - DNA, 25 bp, Saccharomyces pastorianus
gcggcgttttccattgcgaaatttt

SEQ ID NO: 84900 - DNA, 25 bp, Saccharomyces pastorianus
ttcgagattcctgcacaacgtcact

SEQ ID NO: 84901 - DNA, 25 bp, Saccharomyces pastorianus
atgactcttcgagattcctgcacaa

SEQ ID NO: 84902 - DNA, 25 bp, Saccharomyces pastorianus
actcttcgagattcctgcacaacgt

SEQ ID NO: 84903 - DNA, 25 bp, Saccharomyces pastorianus
ttaatggtgcgacattcctgacgtt

SEQ ID NO: 84904 - DNA, 25 bp, Saccharomyces pastorianus
taagaacccgaatatgagctcacag

SEQ ID NO: 84905 - DNA, 25 bp, Saccharomyces pastorianus
agtcaattcattcttggcatcgccc

SEQ ID NO: 84906 - DNA, 25 bp, Saccharomyces pastorianus
gttgacagtatacccattggacgtt

SEQ ID NO: 84907 - DNA, 25 bp, Saccharomyces pastorianus
ccggacatgggcttggtacatattt

SEQ ID NO: 84908 - DNA, 25 bp, Saccharomyces pastorianus
gagctcacaggacgtagatctttca

SEQ ID NO: 84909 - DNA, 25 bp, Saccharomyces pastorianus
tcttgtctacgaagcattggttgcc

SEQ ID NO: 84910 - DNA, 25 bp, Saccharomyces pastorianus
aggtccgcgcccgttaatggtgcga

SEQ ID NO: 84911 - DNA, 25 bp, Saccharomyces pastorianus
gggccaacaatggttaggtccgcgc

SEQ ID NO: 84912 - DNA, 25 bp, Saccharomyces pastorianus
tctttcacgttcaaatactctgcca

SEQ ID NO: 84913 - DNA, 25 bp, Saccharomyces pastorianus
gccactatcccagtactacgtttgt

SEQ ID NO: 84914 - DNA, 25 bp, Saccharomyces pastorianus
aagaagttgcctccacagcagcttc

SEQ ID NO: 84915 - DNA, 25 bp, Saccharomyces pastorianus
aactgacgacaatggcactacaaat

SEQ ID NO: 84916 - DNA, 25 bp, Saccharomyces pastorianus
gctgtcccctcatttatctggattt

SEQ ID NO: 84917 - DNA, 25 bp, Saccharomyces pastorianus
ttttggtaccagatgccctattaat

SEQ ID NO: 84918 - DNA, 25 bp, Saccharomyces pastorianus
gcgcagacgctggtaacatatcaag

SEQ ID NO: 84919 - DNA, 25 bp, Saccharomyces pastorianus
tagggttcttgtcctctagttggaa

SEQ ID NO: 84920 - DNA, 25 bp, Saccharomyces pastorianus
gtacatattttgaagcctacgcggt

SEQ ID NO: 84921 - DNA, 25 bp, Saccharomyces pastorianus
aacggtctcaactcaactgacgaca

SEQ ID NO: 84922 - DNA, 25 bp, Saccharomyces pastorianus
tagacagcttttcctgatgagccaa

SEQ ID NO: 84923 - DNA, 25 bp, Saccharomyces pastorianus
aagaaagattgcacgtcgctgtccc

SEQ ID NO: 84924 - DNA, 25 bp, Saccharomyces pastorianus
atggaaggtgtagacggcgcatctt

SEQ ID NO: 84925 - DNA, 25 bp, Saccharomyces pastorianus
agagaccattcaaggctccatcttt

SEQ ID NO: 84926 - DNA, 25 bp, Saccharomyces pastorianus
gaaactgcaagttactaccgtcaga

SEQ ID NO: 84927 - DNA, 25 bp, Saccharomyces pastorianus
aaaattcacctcttcggtaagcctg

SEQ ID NO: 84928 - DNA, 25 bp, Saccharomyces pastorianus
gttcatgcaatccatttctccagtg

SEQ ID NO: 84929 - DNA, 25 bp, Saccharomyces pastorianus
aacctggtaatgctatgtccggcga

SEQ ID NO: 84930 - DNA, 25 bp, Saccharomyces pastorianus
gttggtcatgatgcaactctcccgt

SEQ ID NO: 84931 - DNA, 25 bp, Saccharomyces pastorianus
gtaagcctgcaaccggcgatttgaa

SEQ ID NO: 84932 - DNA, 25 bp, Saccharomyces pastorianus
aattttatactgttcttccatcggt

SEQ ID NO: 84933 - DNA, 25 bp, Saccharomyces pastorianus
aagtctatctacactggtatggcta

SEQ ID NO: 84934 - DNA, 25 bp, Saccharomyces pastorianus
ggctccatctttgtttggtggtatg

SEQ ID NO: 84935 - DNA, 25 bp, Saccharomyces pastorianus
catcggtatctcttggatcatctac

SEQ ID NO: 84936 - DNA, 25 bp, Saccharomyces pastorianus
tacggtgtcattatgtggccgataa

SEQ ID NO: 84937 - DNA, 25 bp, Saccharomyces pastorianus
aaaccattcgagtacccagtgatcc

SEQ ID NO: 84938 - DNA, 25 bp, Saccharomyces pastorianus
acttccgtcatattggcagggcaca

SEQ ID NO: 84939 - DNA, 25 bp, Saccharomyces pastorianus
gccgctgacgagtatttccgttacg

SEQ ID NO: 84940 - DNA, 25 bp, Saccharomyces pastorianus
gagaatccattgtcacttcaacacg

SEQ ID NO: 84941 - DNA, 25 bp, Saccharomyces pastorianus
ttggctcttggctatggtaatacta

SEQ ID NO: 84942 - DNA, 25 bp, Saccharomyces pastorianus
aggtgccgatgtttctgtgctattg

SEQ ID NO: 84943 - DNA, 25 bp, Saccharomyces pastorianus
cagtgatcctgatggtggtaccgcc

SEQ ID NO: 84944 - DNA, 25 bp, Saccharomyces pastorianus
acgccagcattgtgcacgtgacgaa

SEQ ID NO: 84945 - DNA, 25 bp, Saccharomyces pastorianus
gagggcacttactctaagttcattt

SEQ ID NO: 84946 - DNA, 25 bp, Saccharomyces pastorianus
gaaagattaccgttgacttccgtca

SEQ ID NO: 84947 - DNA, 25 bp, Saccharomyces pastorianus
acggtgatggtttaatctccgccgc

SEQ ID NO: 84948 - DNA, 25 bp, Saccharomyces pastorianus
ctgtgatgaggtcattgggtctttc

SEQ ID NO: 84949 - DNA, 25 bp, Saccharomyces pastorianus
gaaacacgtgctaacatccattggt

SEQ ID NO: 84950 - DNA, 25 bp, Saccharomyces pastorianus
ttcgcccagtgaagcagaagtaaat

SEQ ID NO: 84951 - DNA, 25 bp, Saccharomyces pastorianus
gaagcctttgccctctttgataaag

SEQ ID NO: 84952 - DNA, 25 bp, Saccharomyces pastorianus
gaattggccactgtgatgaggtcat

SEQ ID NO: 84953 - DNA, 25 bp, Saccharomyces pastorianus
taatctccgccgctgagttgaaaca

SEQ ID NO: 84954 - DNA, 25 bp, Saccharomyces pastorianus
gatgtctcgtcaactcaaatcaaat

SEQ ID NO: 84955 - DNA, 25 bp, Saccharomyces pastorianus
acaatggctctatctcatcaagtga

SEQ ID NO: 84956 - DNA, 25 bp, Saccharomyces pastorianus
atttttggctctgatgtctcgtcaa

SEQ ID NO: 84957 - DNA, 25 bp, Saccharomyces pastorianus
gatggtaaccatcaaatcgaattta

SEQ ID NO: 84958 - DNA, 25 bp, Saccharomyces pastorianus
caggtcttcctgttattgcaatgaa

SEQ ID NO: 84959 - DNA, 25 bp, Saccharomyces pastorianus
ggttgtcagcagaggattacccaaa

SEQ ID NO: 84960 - DNA, 25 bp, Saccharomyces pastorianus
agtttccctgcatacttcaagttca

SEQ ID NO: 84961 - DNA, 25 bp, Saccharomyces pastorianus
tatgcgattacggagtttccctgca

SEQ ID NO: 84962 - DNA, 25 bp, Saccharomyces pastorianus
gggagcttcatgaatctctgatttt

SEQ ID NO: 84963 - DNA, 25 bp, Saccharomyces pastorianus
tcaagttcagggttggacctgccaa

SEQ ID NO: 84964 - DNA, 25 bp, Saccharomyces pastorianus
ctggaagcgctgtcaaatcgaattt

SEQ ID NO: 84965 - DNA, 25 bp, Saccharomyces pastorianus
tgacttcaacatcattcactcctga

SEQ ID NO: 84966 - DNA, 25 bp, Saccharomyces pastorianus
gaactatccagtgcttgacgaatta

SEQ ID NO: 84967 - DNA, 25 bp, Saccharomyces pastorianus
aatcgaatttgtgtggttgtcagca

SEQ ID NO: 84968 - DNA, 25 bp, Saccharomyces pastorianus
agatatgtttggctcaggtcttcct

SEQ ID NO: 84969 - DNA, 25 bp, Saccharomyces pastorianus
tgctacaaaagcagtttcgccctcc

SEQ ID NO: 84970 - DNA, 25 bp, Saccharomyces pastorianus
gagttgcacaagtttcctgatgaaa

SEQ ID NO: 84971 - DNA, 25 bp, Saccharomyces pastorianus
tctgtctggttactgtcgaagttgt

SEQ ID NO: 84972 - DNA, 25 bp, Saccharomyces pastorianus
tgtagacggcattggtatcttaacc

SEQ ID NO: 84973 - DNA, 25 bp, Saccharomyces pastorianus
aatgggatagcgcagtccgcaccac

SEQ ID NO: 84974 - DNA, 25 bp, Saccharomyces pastorianus
agtccgcaccactagaagttccggt

SEQ ID NO: 84975 - DNA, 25 bp, Saccharomyces pastorianus
gaatgctttagcgtcgagttgcaca

SEQ ID NO: 84976 - DNA, 25 bp, Saccharomyces pastorianus
gaagatattgacactgctgccttaa

SEQ ID NO: 84977 - DNA, 25 bp, Saccharomyces pastorianus
gctacaagttggatgcacgtgttca

SEQ ID NO: 84978 - DNA, 25 bp, Saccharomyces pastorianus
ctgactgcaagtggatcggtttaca

SEQ ID NO: 84979 - DNA, 25 bp, Saccharomyces pastorianus
ttaacgatcctggtttcacaaacac

SEQ ID NO: 84980 - DNA, 25 bp, Saccharomyces pastorianus
tgcgttatatcctttgctacacatg

SEQ ID NO: 84981 - DNA, 25 bp, Saccharomyces pastorianus
catgttgctcgtgttgttgttgcta

SEQ ID NO: 84982 - DNA, 25 bp, Saccharomyces pastorianus
gaaatcattggaggcgtctgttatt

SEQ ID NO: 84983 - DNA, 25 bp, Saccharomyces pastorianus
aataagtctagttgcttcaggtgct

SEQ ID NO: 84984 - DNA, 25 bp, Saccharomyces pastorianus
atgaattggccgttgctcaagtaac

SEQ ID NO: 84985 - DNA, 25 bp, Saccharomyces pastorianus
gttgttgctacgtctttgaatcctc

SEQ ID NO: 84986 - DNA, 25 bp, Saccharomyces pastorianus
gaaagtaccaaagctccggaactag

SEQ ID NO: 84987 - DNA, 25 bp, Saccharomyces pastorianus
aatgacaaacttccactgccaagta

SEQ ID NO: 84988 - DNA, 25 bp, Saccharomyces pastorianus
gaacgccgtggcatctttaaagaaa

SEQ ID NO: 84989 - DNA, 25 bp, Saccharomyces pastorianus
gttgctcaagtaacgggtcacccaa

SEQ ID NO: 84990 - DNA, 25 bp, Saccharomyces pastorianus
agactacttgtatactttgcacgat

SEQ ID NO: 84991 - DNA, 25 bp, Saccharomyces pastorianus
tgtgcctttgttacgtctatattca

SEQ ID NO: 84992 - DNA, 25 bp, Saccharomyces pastorianus
tcttttttgtgcctttgttacgtct

SEQ ID NO: 84993 - DNA, 25 bp, Saccharomyces pastorianus
tgattattcgattttcttcttgctg

SEQ ID NO: 84994 - DNA, 25 bp, Saccharomyces pastorianus
gtatgtcatatgtacttgttttctt

SEQ ID NO: 84995 - DNA, 25 bp, Saccharomyces pastorianus
agttctttgctatttcacacttcct

SEQ ID NO: 84996 - DNA, 25 bp, Saccharomyces pastorianus
cacttgctgcctgaaatatatatat

SEQ ID NO: 84997 - DNA, 25 bp, Saccharomyces pastorianus
gtaaacagttctttgctatttcaca

SEQ ID NO: 84998 - DNA, 25 bp, Saccharomyces pastorianus
ggaagagctttctaagtctgaagaa

SEQ ID NO: 84999 - DNA, 25 bp, Saccharomyces pastorianus
tgctatttcacacttcctggttgat

SEQ ID NO: 85000 - DNA, 25 bp, Saccharomyces pastorianus
acacttcctggttgatggtcacttg

SEQ ID NO: 85001 - DNA, 25 bp, Saccharomyces pastorianus
gatggtcacttgctgcctgaaatat

SEQ ID NO: 85002 - DNA, 25 bp, Saccharomyces pastorianus
agattggtggtattggtactgtgcc

SEQ ID NO: 85003 - DNA, 25 bp, Saccharomyces pastorianus
tcacattgcttgtagattcgacgaa

SEQ ID NO: 85004 - DNA, 25 bp, Saccharomyces pastorianus
gtcaagttcgttccatctaagccaa

SEQ ID NO: 85005 - DNA, 25 bp, Saccharomyces pastorianus
gctgctttggtcaagttcgttccat

SEQ ID NO: 85006 - DNA, 25 bp, Saccharomyces pastorianus
acgatccaccaaagggttgcgcttc

SEQ ID NO: 85007 - DNA, 25 bp, Saccharomyces pastorianus
caccaaagggttgcgcttctttcaa

SEQ ID NO: 85008 - DNA, 25 bp, Saccharomyces pastorianus
attggtggtattggtactgtgccag

SEQ ID NO: 85009 - DNA, 25 bp, Saccharomyces pastorianus
aaagggttgcgcttctttcaacgct

SEQ ID NO: 85010 - DNA, 25 bp, Saccharomyces pastorianus
tgacgctgctttggtcaagttcgtt

SEQ ID NO: 85011 - DNA, 25 bp, Saccharomyces pastorianus
tgctcacattgcttgtagattcgac

SEQ ID NO: 85012 - DNA, 25 bp, Saccharomyces pastorianus
gctttggtcaagttcgttccatcta

SEQ ID NO: 85013 - DNA, 25 bp, Saccharomyces pastorianus
gttcctagtgtcattgaaccatctt

SEQ ID NO: 85014 - DNA, 25 bp, Saccharomyces pastorianus
gttcctgttactactgaagttgcca

SEQ ID NO: 85015 - DNA, 25 bp, Saccharomyces pastorianus
tggttgctccaacaaaggttctttt

SEQ ID NO: 85016 - DNA, 25 bp, Saccharomyces pastorianus
gctatccgcgatatcacttacaatg

SEQ ID NO: 85017 - DNA, 25 bp, Saccharomyces pastorianus
agatgtcatcaaggctatccgcgat

SEQ ID NO: 85018 - DNA, 25 bp, Saccharomyces pastorianus
aatgccagaagtgttctttccttcc

SEQ ID NO: 85019 - DNA, 25 bp, Saccharomyces pastorianus
aagaccattctgtcactttgagaga

SEQ ID NO: 85020 - DNA, 25 bp, Saccharomyces pastorianus
atctactccgtttttgagcactctt

SEQ ID NO: 85021 - DNA, 25 bp, Saccharomyces pastorianus
agaggttccgtcgaagatgtcatca

SEQ ID NO: 85022 - DNA, 25 bp, Saccharomyces pastorianus
gtcaccattgactttgaatctgcca

SEQ ID NO: 85023 - DNA, 25 bp, Saccharomyces pastorianus
tagttcctctatctaaccacaaaga

SEQ ID NO: 85024 - DNA, 25 bp, Saccharomyces pastorianus
aagctttcctttttgcctcgtgatg

SEQ ID NO: 85025 - DNA, 25 bp, Saccharomyces pastorianus
aattgtcaagacagttggtgaagca

SEQ ID NO: 85026 - DNA, 25 bp, Saccharomyces pastorianus
tcgtgatgttcaagaagctggttct

SEQ ID NO: 85027 - DNA, 25 bp, Saccharomyces pastorianus
agacagttggtgaagcagtcgcttc

SEQ ID NO: 85028 - DNA, 25 bp, Saccharomyces pastorianus
ttgcctcgtgatgttcaagaagctg

SEQ ID NO: 85029 - DNA, 25 bp, Saccharomyces pastorianus
agcagtcgcttcaagaatggtcgat

SEQ ID NO: 85030 - DNA, 25 bp, Saccharomyces pastorianus
cctttttgcctcgtgatgttcaaga

SEQ ID NO: 85031 - DNA, 25 bp, Saccharomyces pastorianus
tttcctttttgcctcgtgatgttca

SEQ ID NO: 85032 - DNA, 25 bp, Saccharomyces pastorianus
atcaagctttcctttttgcctcgtg

SEQ ID NO: 85033 - DNA, 25 bp, Saccharomyces pastorianus
tcgcttcaagaatggtcgataatga

SEQ ID NO: 85034 - DNA, 25 bp, Saccharomyces pastorianus
agacatcaagctttcctttttgcct

SEQ ID NO: 85035 - DNA, 25 bp, Saccharomyces pastorianus
ccccacacatttttatagccttctg

SEQ ID NO: 85036 - DNA, 25 bp, Saccharomyces pastorianus
gggcaggtctaacgtaaattcatct

SEQ ID NO: 85037 - DNA, 25 bp, Saccharomyces pastorianus
cttggtataccttttctgtgttgtc

SEQ ID NO: 85038 - DNA, 25 bp, Saccharomyces pastorianus
tcagttcctgtctttaggatgttat

SEQ ID NO: 85039 - DNA, 25 bp, Saccharomyces pastorianus
ttctgtgttgtctttcagttcctgt

SEQ ID NO: 85040 - DNA, 25 bp, Saccharomyces pastorianus
taaacttggaattctgggcaggtct

SEQ ID NO: 85041 - DNA, 25 bp, Saccharomyces pastorianus
aaagtgtagcaagaggctcctccac

SEQ ID NO: 85042 - DNA, 25 bp, Saccharomyces pastorianus
gcctggtccgcgctagaatctggaa

SEQ ID NO: 85043 - DNA, 25 bp, Saccharomyces pastorianus
atgttatttatcgatctttttcaga

SEQ ID NO: 85044 - DNA, 25 bp, Saccharomyces pastorianus
cctccactggcattttcacgatttg

SEQ ID NO: 85045 - DNA, 25 bp, Saccharomyces pastorianus
gatcaattatgtttttcccttggta

SEQ ID NO: 85046 - DNA, 25 bp, Saccharomyces pastorianus
gtctcgtccactcgtgatggtatga

SEQ ID NO: 85047 - DNA, 25 bp, Saccharomyces pastorianus
tagaatcaacggtcagttcggtact

SEQ ID NO: 85048 - DNA, 25 bp, Saccharomyces pastorianus
gttctggtacaggttgcagtgccaa

SEQ ID NO: 85049 - DNA, 25 bp, Saccharomyces pastorianus
gcctcagaagttgcacgccatggaa

SEQ ID NO: 85050 - DNA, 25 bp, Saccharomyces pastorianus
tgatgccatcaacgaggccttgact

SEQ ID NO: 85051 - DNA, 25 bp, Saccharomyces pastorianus
tctaaatacacttctgccttctggg

SEQ ID NO: 85052 - DNA, 25 bp, Saccharomyces pastorianus
aacaccgatgatctttctgatgcca

SEQ ID NO: 85053 - DNA, 25 bp, Saccharomyces pastorianus
gagtgagttcacaggtgccgcacaa

SEQ ID NO: 85054 - DNA, 25 bp, Saccharomyces pastorianus
ggtatgaacttggtttcctacgaat

SEQ ID NO: 85055 - DNA, 25 bp, Saccharomyces pastorianus
ggccttgactttgcccgatgtaaag

SEQ ID NO: 85056 - DNA, 25 bp, Saccharomyces pastorianus
ggttccttaatcctgagtgagttca

SEQ ID NO: 85057 - DNA, 25 bp, Saccharomyces pastorianus
gctcgactatgctctgatatgcaag

SEQ ID NO: 85058 - DNA, 25 bp, Saccharomyces pastorianus
atcacccctgacaaacagaagaaag

SEQ ID NO: 85059 - DNA, 25 bp, Saccharomyces pastorianus
atgctctgatatgcaagtgtattgc

SEQ ID NO: 85060 - DNA, 25 bp, Saccharomyces pastorianus
accgctcgactatgctctgatatgc

SEQ ID NO: 85061 - DNA, 25 bp, Saccharomyces pastorianus
aacaacagcatcaaccacagaacgg

SEQ ID NO: 85062 - DNA, 25 bp, Saccharomyces pastorianus
ggaccgctcgactatgctctgatat

SEQ ID NO: 85063 - DNA, 25 bp, Saccharomyces pastorianus
gactatgctctgatatgcaagtgta

SEQ ID NO: 85064 - DNA, 25 bp, Saccharomyces pastorianus
acagcatcaaccacagaacggaccg

SEQ ID NO: 85065 - DNA, 25 bp, Saccharomyces pastorianus
agaacggaccgctcgactatgctct

SEQ ID NO: 85066 - DNA, 25 bp, Saccharomyces pastorianus
tggctatcacccctgacaaacagaa

SEQ ID NO: 85067 - DNA, 25 bp, Saccharomyces pastorianus
atcaaccacagaacggaccgctcga

SEQ ID NO: 85068 - DNA, 25 bp, Saccharomyces pastorianus
ggttggacccagaacaaaaagagca

SEQ ID NO: 85069 - DNA, 25 bp, Saccharomyces pastorianus
gtgtattgcaatgttctttgtcgtt

SEQ ID NO: 85070 - DNA, 25 bp, Saccharomyces pastorianus
ggacccagaacaaaaagagcaaatc

SEQ ID NO: 85071 - DNA, 25 bp, Saccharomyces pastorianus
caatgttctttgtcgttgcgggcgt

SEQ ID NO: 85072 - DNA, 25 bp, Saccharomyces pastorianus
agagcaaatcaagcgtctccaccag

SEQ ID NO: 85073 - DNA, 25 bp, Saccharomyces pastorianus
tgcgggcgtggtgctgatgttcttc

SEQ ID NO: 85074 - DNA, 25 bp, Saccharomyces pastorianus
agcaaatcaagcgtctccaccagtt

SEQ ID NO: 85075 - DNA, 25 bp, Saccharomyces pastorianus
gcaagtgtattgcaatgttctttgt

SEQ ID NO: 85076 - DNA, 25 bp, Saccharomyces pastorianus
tcgagaccgggttggacccagaaca

SEQ ID NO: 85077 - DNA, 25 bp, Saccharomyces pastorianus
aaatcaagcgtctccaccagttgga

SEQ ID NO: 85078 - DNA, 25 bp, Saccharomyces pastorianus
tgcaatgttctttgtcgttgcgggc

SEQ ID NO: 85079 - DNA, 25 bp, Saccharomyces pastorianus
taaccaattgtatgccaagtacgcc

SEQ ID NO: 85080 - DNA, 25 bp, Saccharomyces pastorianus
tttatcacacaaggcgcctacgagg

SEQ ID NO: 85081 - DNA, 25 bp, Saccharomyces pastorianus
ttaccgagggtcaaatcttcgttga

SEQ ID NO: 85082 - DNA, 25 bp, Saccharomyces pastorianus
caatcaacgtcttgccttcgttgag

SEQ ID NO: 85083 - DNA, 25 bp, Saccharomyces pastorianus
gctgctgctatgaaggccgttgtcg

SEQ ID NO: 85084 - DNA, 25 bp, Saccharomyces pastorianus
gaagatcccgacacaagaagctccg

SEQ ID NO: 85085 - DNA, 25 bp, Saccharomyces pastorianus
atgatattacgcatccaattccgga

SEQ ID NO: 85086 - DNA, 25 bp, Saccharomyces pastorianus
gaccacggtgacgtttctaaccaat

SEQ ID NO: 85087 - DNA, 25 bp, Saccharomyces pastorianus
tgaagaggcgttatccatcgaagat

SEQ ID NO: 85088 - DNA, 25 bp, Saccharomyces pastorianus
gttgaccgtcaattacataacaagg

SEQ ID NO: 85089 - DNA, 25 bp, Saccharomyces pastorianus
gatgaaatctgccatcggtgaaggt

SEQ ID NO: 85090 - DNA, 25 bp, Saccharomyces pastorianus
acaacccatgtttgagttttccgat

SEQ ID NO: 85091 - DNA, 25 bp, Saccharomyces pastorianus
agaggacatcctgcaaggcggaccg

SEQ ID NO: 85092 - DNA, 25 bp, Saccharomyces pastorianus
ttcgctatagcttttcagccactaa

SEQ ID NO: 85093 - DNA, 25 bp, Saccharomyces pastorianus
gtagacatttgaaactcgtaccttc

SEQ ID NO: 85094 - DNA, 25 bp, Saccharomyces pastorianus
atatcccatggctactggaccagta

SEQ ID NO: 85095 - DNA, 25 bp, Saccharomyces pastorianus
tcgtaccttcaacacccatggatat

SEQ ID NO: 85096 - DNA, 25 bp, Saccharomyces pastorianus
ttccgtgttttacctcttgctataa

SEQ ID NO: 85097 - DNA, 25 bp, Saccharomyces pastorianus
gagttttccgatagcatacagacag

SEQ ID NO: 85098 - DNA, 25 bp, Saccharomyces pastorianus
aatttccaaatacctttcgctatag

SEQ ID NO: 85099 - DNA, 25 bp, Saccharomyces pastorianus
tctcgctatattggacttttgggat

SEQ ID NO: 85100 - DNA, 25 bp, Saccharomyces pastorianus
agcttcttctcagacattcttatga

SEQ ID NO: 85101 - DNA, 25 bp, Saccharomyces pastorianus
aatgacgacactaattttgcgctaa

SEQ ID NO: 85102 - DNA, 25 bp, Saccharomyces pastorianus
aaatgcagagcaccaggtttgttct

SEQ ID NO: 85103 - DNA, 25 bp, Saccharomyces pastorianus
gtggaattgactaatacttcgttca

SEQ ID NO: 85104 - DNA, 25 bp, Saccharomyces pastorianus
ttaaagccgctaacgatcaagatat

SEQ ID NO: 85105 - DNA, 25 bp, Saccharomyces pastorianus
ttcgttcaatttatactctttcaag

SEQ ID NO: 85106 - DNA, 25 bp, Saccharomyces pastorianus
ggatgttcgatccaagaaatgcaga

SEQ ID NO: 85107 - DNA, 25 bp, Saccharomyces pastorianus
atattcaaatttccacgagggcaaa

SEQ ID NO: 85108 - DNA, 25 bp, Saccharomyces pastorianus
agtcctagtggcaacgaaagtgtca

SEQ ID NO: 85109 - DNA, 25 bp, Saccharomyces pastorianus
gaaaaattcctctctagtcctagtg

SEQ ID NO: 85110 - DNA, 25 bp, Saccharomyces pastorianus
ggtttgttctgggattctttacaca

SEQ ID NO: 85111 - DNA, 25 bp, Saccharomyces pastorianus
gagcaactgtctcgtgaagataaag

SEQ ID NO: 85112 - DNA, 25 bp, Saccharomyces pastorianus
agaagtttctatactgcgtcgcctt

SEQ ID NO: 85113 - DNA, 25 bp, Saccharomyces pastorianus
agtgcctcccggtgttacaagaact

SEQ ID NO: 85114 - DNA, 25 bp, Saccharomyces pastorianus
gaactgtttcctccactcataagaa

SEQ ID NO: 85115 - DNA, 25 bp, Saccharomyces pastorianus
aggcgcggtagtacaaaccttgaag

SEQ ID NO: 85116 - DNA, 25 bp, Saccharomyces pastorianus
aagtacatctcccacaatctcagtg

SEQ ID NO: 85117 - DNA, 25 bp, Saccharomyces pastorianus
agataatcactcactctttagatga

SEQ ID NO: 85118 - DNA, 25 bp, Saccharomyces pastorianus
tgctgtcatcgggttctattccaaa

SEQ ID NO: 85119 - DNA, 25 bp, Saccharomyces pastorianus
gcaacaacgctgacgctttgagtag

SEQ ID NO: 85120 - DNA, 25 bp, Saccharomyces pastorianus
gaacacaaacgattcatcctccaat

SEQ ID NO: 85121 - DNA, 25 bp, Saccharomyces pastorianus
tattccaaaatctgcatccccggtt

SEQ ID NO: 85122 - DNA, 25 bp, Saccharomyces pastorianus
gcctggtgttaaaagaactgcctca

SEQ ID NO: 85123 - DNA, 25 bp, Saccharomyces pastorianus
aaagaaatcgactcgtccgttccat

SEQ ID NO: 85124 - DNA, 25 bp, Saccharomyces pastorianus
attatgggtggctcaaatgctatca

SEQ ID NO: 85125 - DNA, 25 bp, Saccharomyces pastorianus
ggaatccttcgcttatgtgatcaga

SEQ ID NO: 85126 - DNA, 25 bp, Saccharomyces pastorianus
tccgttccatttgggtctccaaaat

SEQ ID NO: 85127 - DNA, 25 bp, Saccharomyces pastorianus
gacgtcttacaattcttgactagtt

SEQ ID NO: 85128 - DNA, 25 bp, Saccharomyces pastorianus
aataacggcacgtcaaaggctgcaa

SEQ ID NO: 85129 - DNA, 25 bp, Saccharomyces pastorianus
aattccctatcgcttgctaattgga

SEQ ID NO: 85130 - DNA, 25 bp, Saccharomyces pastorianus
gttttcgttcagattcctctaaggg

SEQ ID NO: 85131 - DNA, 25 bp, Saccharomyces pastorianus
gggacttacaggttgacgtcttaca

SEQ ID NO: 85132 - DNA, 25 bp, Saccharomyces pastorianus
aattgcgataacgtggaatccttcg

SEQ ID NO: 85133 - DNA, 25 bp, Saccharomyces pastorianus
gggtctccaaaatttacttcggatg

SEQ ID NO: 85134 - DNA, 25 bp, Saccharomyces pastorianus
agattcgttacccaagttgccattc

SEQ ID NO: 85135 - DNA, 25 bp, Saccharomyces pastorianus
ggccttgtttcatgttccgcaatga

SEQ ID NO: 85136 - DNA, 25 bp, Saccharomyces pastorianus
tacactgctattatcggccttgttt

SEQ ID NO: 85137 - DNA, 25 bp, Saccharomyces pastorianus
gtgagccttttgcaactgaattcta

SEQ ID NO: 85138 - DNA, 25 bp, Saccharomyces pastorianus
gcttacacttattgctcatccagaa

SEQ ID NO: 85139 - DNA, 25 bp, Saccharomyces pastorianus
ggctacgcgccaaaaatcttcacta

SEQ ID NO: 85140 - DNA, 25 bp, Saccharomyces pastorianus
attttgtcgtcctttgtatcgtcta

SEQ ID NO: 85141 - DNA, 25 bp, Saccharomyces pastorianus
gaagggcttaccatgtccaacaaga

SEQ ID NO: 85142 - DNA, 25 bp, Saccharomyces pastorianus
catttactctgtggccatatctttg

SEQ ID NO: 85143 - DNA, 25 bp, Saccharomyces pastorianus
tgattactgcctctcaattgattaa

SEQ ID NO: 85144 - DNA, 25 bp, Saccharomyces pastorianus
taatacagggctacaccgttttctt

SEQ ID NO: 85145 - DNA, 25 bp, Saccharomyces pastorianus
aattgccaaggcacgaagacctcga

SEQ ID NO: 85146 - DNA, 25 bp, Saccharomyces pastorianus
tactaaagcgcttgaaccctctaac

SEQ ID NO: 85147 - DNA, 25 bp, Saccharomyces pastorianus
tatacttcggcggtaactgctgcaa

SEQ ID NO: 85148 - DNA, 25 bp, Saccharomyces pastorianus
aagatattcacggactcagcaaaac

SEQ ID NO: 85149 - DNA, 25 bp, Saccharomyces pastorianus
agatgactccgaactttctgtgttg

SEQ ID NO: 85150 - DNA, 25 bp, Saccharomyces pastorianus
gttgatgtcacggatacactccaat

SEQ ID NO: 85151 - DNA, 25 bp, Saccharomyces pastorianus
gctgcaagcatgactattccgaggt

SEQ ID NO: 85152 - DNA, 25 bp, Saccharomyces pastorianus
gactagtgtttccacgctacataat

SEQ ID NO: 85153 - DNA, 25 bp, Saccharomyces pastorianus
tcgacattattcagcgactaccaat

SEQ ID NO: 85154 - DNA, 25 bp, Saccharomyces pastorianus
gtggtctccaattatctttcctttg

SEQ ID NO: 85155 - DNA, 25 bp, Saccharomyces pastorianus
accgccaaaccagaccatttagatt

SEQ ID NO: 85156 - DNA, 25 bp, Saccharomyces pastorianus
attctccgcggtactcagacgataa

SEQ ID NO: 85157 - DNA, 25 bp, Saccharomyces pastorianus
cgccttccaaggcagaaagcttact

SEQ ID NO: 85158 - DNA, 25 bp, Saccharomyces pastorianus
gcacgcgtgttggagtttcaagatt

SEQ ID NO: 85159 - DNA, 25 bp, Saccharomyces pastorianus
gggaccctgcgtatattaacagaag

SEQ ID NO: 85160 - DNA, 25 bp, Saccharomyces pastorianus
gaatggagaggcctcggcatcacac

SEQ ID NO: 85161 - DNA, 25 bp, Saccharomyces pastorianus
ggccatgctaaaagttatcccatct

SEQ ID NO: 85162 - DNA, 25 bp, Saccharomyces pastorianus
aacattatgaatgccatgcgccaga

SEQ ID NO: 85163 - DNA, 25 bp, Saccharomyces pastorianus
atcccatctgattacttcaattcgg

SEQ ID NO: 85164 - DNA, 25 bp, Saccharomyces pastorianus
tcaagattccattcactattctccg

SEQ ID NO: 85165 - DNA, 25 bp, Saccharomyces pastorianus
ggcatgtgatgttacctaaggccat

SEQ ID NO: 85166 - DNA, 25 bp, Saccharomyces pastorianus
ctgaccaagaaagagcacgcgtgtt

SEQ ID NO: 85167 - DNA, 25 bp, Saccharomyces pastorianus
atacgctttccatggaggtgctgtc

SEQ ID NO: 85168 - DNA, 25 bp, Saccharomyces pastorianus
aatgggcattgcttgtttcgcacag

SEQ ID NO: 85169 - DNA, 25 bp, Saccharomyces pastorianus
tttcgcacagtgacctacggtggca

SEQ ID NO: 85170 - DNA, 25 bp, Saccharomyces pastorianus
acagcgcttcgatttggtcattcaa

SEQ ID NO: 85171 - DNA, 25 bp, Saccharomyces pastorianus
ggtgctgtcctaatacaatctgaga

SEQ ID NO: 85172 - DNA, 25 bp, Saccharomyces pastorianus
ctacggtggcagtgcattggacaat

SEQ ID NO: 85173 - DNA, 25 bp, Saccharomyces pastorianus
tgatatctccttaccaaatgggcat

SEQ ID NO: 85174 - DNA, 25 bp, Saccharomyces pastorianus
ggcagtcagctctttaattgcattt

SEQ ID NO: 85175 - DNA, 25 bp, Saccharomyces pastorianus
gagagaagtgactacccctatgcct

SEQ ID NO: 85176 - DNA, 25 bp, Saccharomyces pastorianus
acgatgctttttgtctacttttaca

SEQ ID NO: 85177 - DNA, 25 bp, Saccharomyces pastorianus
taaggttcccttagaagagctcgaa

SEQ ID NO: 85178 - DNA, 25 bp, Saccharomyces pastorianus
tttacttccgcatttcttacgcaat

SEQ ID NO: 85179 - DNA, 25 bp, Saccharomyces pastorianus
actgcgagttcgaatcatctatgga

SEQ ID NO: 85180 - DNA, 25 bp, Saccharomyces pastorianus
gcagcggtacttttagtgatcttga

SEQ ID NO: 85181 - DNA, 25 bp, Saccharomyces pastorianus
aaaggacagcttctctaaggaacta

SEQ ID NO: 85182 - DNA, 25 bp, Saccharomyces pastorianus
gaagccgctaaaatctttgagaact

SEQ ID NO: 85183 - DNA, 25 bp, Saccharomyces pastorianus
gatcttgagaattcagcggaaccgt

SEQ ID NO: 85184 - DNA, 25 bp, Saccharomyces pastorianus
aggccctatatgaaattagctcgag

SEQ ID NO: 85185 - DNA, 25 bp, Saccharomyces pastorianus
gatgcaatgggctctaaatcaatga

SEQ ID NO: 85186 - DNA, 25 bp, Saccharomyces pastorianus
ggaaccgtttcatttatcgacagat

SEQ ID NO: 85187 - DNA, 25 bp, Saccharomyces pastorianus
gtgtcatctgcgaaaaggccctata

SEQ ID NO: 85188 - DNA, 25 bp, Saccharomyces pastorianus
ttaaatgttcattcccaactgagga

SEQ ID NO: 85189 - DNA, 25 bp, Saccharomyces pastorianus
aagcctgtgtgacgcactcaagata

SEQ ID NO: 85190 - DNA, 25 bp, Saccharomyces pastorianus
gctctatcgggctcataatgcttaa

SEQ ID NO: 85191 - DNA, 25 bp, Saccharomyces pastorianus
acagggatcgcggtgcaatgtgcca

SEQ ID NO: 85192 - DNA, 25 bp, Saccharomyces pastorianus
agacacgtccaagttgctcgagaaa

SEQ ID NO: 85193 - DNA, 25 bp, Saccharomyces pastorianus
tcaattgcaggtagttccaccgcag

SEQ ID NO: 85194 - DNA, 25 bp, Saccharomyces pastorianus
ggtcaaatttctcaagccgcaaggc

SEQ ID NO: 85195 - DNA, 25 bp, Saccharomyces pastorianus
ttattgttctgccacaagcctgtgt

SEQ ID NO: 85196 - DNA, 25 bp, Saccharomyces pastorianus
aaacactgttacaaaacctcctctg

SEQ ID NO: 85197 - DNA, 25 bp, Saccharomyces pastorianus
attcgacctgatatcatgctctcta

SEQ ID NO: 85198 - DNA, 25 bp, Saccharomyces pastorianus
catatcccgttgtgcactttttaga

SEQ ID NO: 85199 - DNA, 25 bp, Saccharomyces pastorianus
ggttcattaagctccggaaatcgca

SEQ ID NO: 85200 - DNA, 25 bp, Saccharomyces pastorianus
gtaacagtgttttgtcgcagtatct

SEQ ID NO: 85201 - DNA, 25 bp, Saccharomyces pastorianus
agtgttttgtcgcagtatcttgagt

SEQ ID NO: 85202 - DNA, 25 bp, Saccharomyces pastorianus
tgttttgtcgcagtatcttgagtgc

SEQ ID NO: 85203 - DNA, 25 bp, Saccharomyces pastorianus
aacagtgttttgtcgcagtatcttg

SEQ ID NO: 85204 - DNA, 25 bp, Saccharomyces pastorianus
gcagaggaggttttgtaacagtgtt

SEQ ID NO: 85205 - DNA, 25 bp, Saccharomyces pastorianus
acagtgttttgtcgcagtatcttga

SEQ ID NO: 85206 - DNA, 25 bp, Saccharomyces pastorianus
atagagcagaggaggttttgtaaca

SEQ ID NO: 85207 - DNA, 25 bp, Saccharomyces pastorianus
tttgtcgcagtatcttgagtgcgtc

SEQ ID NO: 85208 - DNA, 25 bp, Saccharomyces pastorianus
ttgtaacagtgttttgtcgcagtat

SEQ ID NO: 85209 - DNA, 25 bp, Saccharomyces pastorianus
ggttttgtaacagtgttttgtcgca

SEQ ID NO: 85210 - DNA, 25 bp, Saccharomyces pastorianus
cccgatagagcagaggaggttttgt

SEQ ID NO: 85211 - DNA, 25 bp, Saccharomyces pastorianus
gaggtcataattctatcattggtca

SEQ ID NO: 85212 - DNA, 25 bp, Saccharomyces pastorianus
gaaggtgtctctgccatgatatgct

SEQ ID NO: 85213 - DNA, 25 bp, Saccharomyces pastorianus
gatatgctcacctcaagaatctatg

SEQ ID NO: 85214 - DNA, 25 bp, Saccharomyces pastorianus
aggtattgacgttgattccgacgaa

SEQ ID NO: 85215 - DNA, 25 bp, Saccharomyces pastorianus
aacactgtgcctttgttaccaattg

SEQ ID NO: 85216 - DNA, 25 bp, Saccharomyces pastorianus
tgaaattgcttctaattccctaaga

SEQ ID NO: 85217 - DNA, 25 bp, Saccharomyces pastorianus
accgatatactttcacaactcagag

SEQ ID NO: 85218 - DNA, 25 bp, Saccharomyces pastorianus
gaattgttatcagtgcctatacgta

SEQ ID NO: 85219 - DNA, 25 bp, Saccharomyces pastorianus
gccatgagagctacgttgaacgaat

SEQ ID NO: 85220 - DNA, 25 bp, Saccharomyces pastorianus
attagcaggcgaactggctgatcat

SEQ ID NO: 85221 - DNA, 25 bp, Saccharomyces pastorianus
gtgtttcgacggatttgaactctag

SEQ ID NO: 85222 - DNA, 25 bp, Saccharomyces pastorianus
tattggtgccatgctgcgttacaaa

SEQ ID NO: 85223 - DNA, 25 bp, Saccharomyces pastorianus
tatcgaactttctgccgaagcgttg

SEQ ID NO: 85224 - DNA, 25 bp, Saccharomyces pastorianus
ttgacgaaatttcccaggacactgg

SEQ ID NO: 85225 - DNA, 25 bp, Saccharomyces pastorianus
gcatgtaaggttatttccatcgtgg

SEQ ID NO: 85226 - DNA, 25 bp, Saccharomyces pastorianus
gctattgacaaagctaccggccaag

SEQ ID NO: 85227 - DNA, 25 bp, Saccharomyces pastorianus
gaattattcgatccaagactagcat

SEQ ID NO: 85228 - DNA, 25 bp, Saccharomyces pastorianus
aatcttcagaaggtgcccaatttgt

SEQ ID NO: 85229 - DNA, 25 bp, Saccharomyces pastorianus
ttcggtgctaccttggaattcatca

SEQ ID NO: 85230 - DNA, 25 bp, Saccharomyces pastorianus
atggacgttgtctccgaagaacctt

SEQ ID NO: 85231 - DNA, 25 bp, Saccharomyces pastorianus
ggtgcccaatttgtcacaggttttg

SEQ ID NO: 85232 - DNA, 25 bp, Saccharomyces pastorianus
cggtttcaaccaggctatcgaactt

SEQ ID NO: 85233 - DNA, 25 bp, Saccharomyces pastorianus
gtatgccagctcatgcttactgcaa

SEQ ID NO: 85234 - DNA, 25 bp, Saccharomyces pastorianus
ttctacgaggtattgtaggcccaat

SEQ ID NO: 85235 - DNA, 25 bp, Saccharomyces pastorianus
caatctccatcgttggatcttgtgt

SEQ ID NO: 85236 - DNA, 25 bp, Saccharomyces pastorianus
gatccacttagctggcctatcggac

SEQ ID NO: 85237 - DNA, 25 bp, Saccharomyces pastorianus
ccactaatggcggttctcatggagt

SEQ ID NO: 85238 - DNA, 25 bp, Saccharomyces pastorianus
taggcccaatggtactgtcgtcctg

SEQ ID NO: 85239 - DNA, 25 bp, Saccharomyces pastorianus
agggaggctttagatttcttcgcca

SEQ ID NO: 85240 - DNA, 25 bp, Saccharomyces pastorianus
gcttactgcaattccgatgttttca

SEQ ID NO: 85241 - DNA, 25 bp, Saccharomyces pastorianus
ggtttgatcaaatctccgatccact

SEQ ID NO: 85242 - DNA, 25 bp, Saccharomyces pastorianus
ggcctatcggacgttcctgaaattt

SEQ ID NO: 85243 - DNA, 25 bp, Saccharomyces pastorianus
agcagctatcgaggcttctacgagg

SEQ ID NO: 85244 - DNA, 25 bp, Saccharomyces pastorianus
ggacctacgggtcaggctgaatcaa

SEQ ID NO: 85245 - DNA, 25 bp, Saccharomyces pastorianus
gcctacgcaatatactcagctactg

SEQ ID NO: 85246 - DNA, 25 bp, Saccharomyces pastorianus
aaaagttccactgcgaaagtattcg

SEQ ID NO: 85247 - DNA, 25 bp, Saccharomyces pastorianus
gtacaatatttttgcgacaacgtct

SEQ ID NO: 85248 - DNA, 25 bp, Saccharomyces pastorianus
gcacgccattgcgaaagctttggtt

SEQ ID NO: 85249 - DNA, 25 bp, Saccharomyces pastorianus
gacaacgtctggaggcggacctacg

SEQ ID NO: 85250 - DNA, 25 bp, Saccharomyces pastorianus
agctttggttgtgttcaatccatta

SEQ ID NO: 85251 - DNA, 25 bp, Saccharomyces pastorianus
gactacataaagctggcgtcttaac

SEQ ID NO: 85252 - DNA, 25 bp, Saccharomyces pastorianus
acaagagattacaggcacgtcgaaa

SEQ ID NO: 85253 - DNA, 25 bp, Saccharomyces pastorianus
ggctgaatcaatcatgcacgccatt

SEQ ID NO: 85254 - DNA, 25 bp, Saccharomyces pastorianus
ggatttcttttgatgagtacgcttt

SEQ ID NO: 85255 - DNA, 25 bp, Saccharomyces pastorianus
gcgatactgtacttgggctctagga

SEQ ID NO: 85256 - DNA, 25 bp, Saccharomyces pastorianus
tgttgatcctgtgcatttgtctcca

SEQ ID NO: 85257 - DNA, 25 bp, Saccharomyces pastorianus
tatatatcttactgttccggcctag

SEQ ID NO: 85258 - DNA, 25 bp, Saccharomyces pastorianus
ggatccctcagattgttcttaactt

SEQ ID NO: 85259 - DNA, 25 bp, Saccharomyces pastorianus
gaatatgagccacttttgccaagga

SEQ ID NO: 85260 - DNA, 25 bp, Saccharomyces pastorianus
gctcgcttgagcttggcagaacaat

SEQ ID NO: 85261 - DNA, 25 bp, Saccharomyces pastorianus
tttcataatctcagtgctctcagtc

SEQ ID NO: 85262 - DNA, 25 bp, Saccharomyces pastorianus
agtctcaatggaccccgaatattta

SEQ ID NO: 85263 - DNA, 25 bp, Saccharomyces pastorianus
gatagccaatcgtatagctcgcttg

SEQ ID NO: 85264 - DNA, 25 bp, Saccharomyces pastorianus
gagtctcattcctattctttttatt

SEQ ID NO: 85265 - DNA, 25 bp, Saccharomyces pastorianus
gctggtacgctgttgatggacttca

SEQ ID NO: 85266 - DNA, 25 bp, Saccharomyces pastorianus
acgaccaaatgttgccgttgcacgt

SEQ ID NO: 85267 - DNA, 25 bp, Saccharomyces pastorianus
ttcctgaagaaccaacgttgccgtt

SEQ ID NO: 85268 - DNA, 25 bp, Saccharomyces pastorianus
agatgacgtcgaagcaacgctggat

SEQ ID NO: 85269 - DNA, 25 bp, Saccharomyces pastorianus
taactccaaccatagttccttctat

SEQ ID NO: 85270 - DNA, 25 bp, Saccharomyces pastorianus
atatgttcacatactacgagggata

SEQ ID NO: 85271 - DNA, 25 bp, Saccharomyces pastorianus
aacgctggatggtttagttcctgat

SEQ ID NO: 85272 - DNA, 25 bp, Saccharomyces pastorianus
aaactgtgcagtttcatctttacct

SEQ ID NO: 85273 - DNA, 25 bp, Saccharomyces pastorianus
gttggtggtcacaaatttgctgcaa

SEQ ID NO: 85274 - DNA, 25 bp, Saccharomyces pastorianus
aaattttccaacgtgggcacaggca

SEQ ID NO: 85275 - DNA, 25 bp, Saccharomyces pastorianus
gttgccttacttcatttggctgaac

SEQ ID NO: 85276 - DNA, 25 bp, Saccharomyces pastorianus
aacgatgcgggattacggcacccta

SEQ ID NO: 85277 - DNA, 25 bp, Saccharomyces pastorianus
tagcgacaacagtgattcgagcgat

SEQ ID NO: 85278 - DNA, 25 bp, Saccharomyces pastorianus
ggaatacccaagatgacgcacgagt

SEQ ID NO: 85279 - DNA, 25 bp, Saccharomyces pastorianus
gcgatagtgacgatatgagaccttt

SEQ ID NO: 85280 - DNA, 25 bp, Saccharomyces pastorianus
gatcaagcagtgcatgctcttagat

SEQ ID NO: 85281 - DNA, 25 bp, Saccharomyces pastorianus
gatagatcaaccgtggaatacccaa

SEQ ID NO: 85282 - DNA, 25 bp, Saccharomyces pastorianus
aaatacgacgttatcttggacaagg

SEQ ID NO: 85283 - DNA, 25 bp, Saccharomyces pastorianus
aacaccaattacagcaccaacgaag

SEQ ID NO: 85284 - DNA, 25 bp, Saccharomyces pastorianus
gatgaagctgagacttaacaccaat

SEQ ID NO: 85285 - DNA, 25 bp, Saccharomyces pastorianus
gagacctttaccgaggccattattt

SEQ ID NO: 85286 - DNA, 25 bp, Saccharomyces pastorianus
gatgacgcacgagttctgcaaacaa

SEQ ID NO: 85287 - DNA, 25 bp, Saccharomyces pastorianus
aaatgttgaatttggtgacctaggc

SEQ ID NO: 85288 - DNA, 25 bp, Saccharomyces pastorianus
gtgctagctgataatcctggattga

SEQ ID NO: 85289 - DNA, 25 bp, Saccharomyces pastorianus
aagccgccaatcgttgttgtcacaa

SEQ ID NO: 85290 - DNA, 25 bp, Saccharomyces pastorianus
ctaagggccctggagtgaggactat

SEQ ID NO: 85291 - DNA, 25 bp, Saccharomyces pastorianus
ggagcgatattgtcaacagtcttat

SEQ ID NO: 85292 - DNA, 25 bp, Saccharomyces pastorianus
ggactataatttcacatcccgatac

SEQ ID NO: 85293 - DNA, 25 bp, Saccharomyces pastorianus
ttggatcaacatttctgggtagctc

SEQ ID NO: 85294 - DNA, 25 bp, Saccharomyces pastorianus
tctgggtagctcaggcaccgaagtt

SEQ ID NO: 85295 - DNA, 25 bp, Saccharomyces pastorianus
ttaaacgacagggtaagccgccaat

SEQ ID NO: 85296 - DNA, 25 bp, Saccharomyces pastorianus
tgtagactacgcaatttgtccaata

SEQ ID NO: 85297 - DNA, 25 bp, Saccharomyces pastorianus
acttatgctcaatcgctcgacgcga

SEQ ID NO: 85298 - DNA, 25 bp, Saccharomyces pastorianus
cgacgcgagagtatctaagggccct

SEQ ID NO: 85299 - DNA, 25 bp, Saccharomyces pastorianus
ggaagtcgaattgccattggaagat

SEQ ID NO: 85300 - DNA, 25 bp, Saccharomyces pastorianus
gtattgtgactccatgggcagacca

SEQ ID NO: 85301 - DNA, 25 bp, Saccharomyces pastorianus
gaagctgccttagtggttaatatta

SEQ ID NO: 85302 - DNA, 25 bp, Saccharomyces pastorianus
tgaaggaatcccaattgccaagaat

SEQ ID NO: 85303 - DNA, 25 bp, Saccharomyces pastorianus
gttaatattactcaccacgaattgg

SEQ ID NO: 85304 - DNA, 25 bp, Saccharomyces pastorianus
ccaccagccaccattgaaactttta

SEQ ID NO: 85305 - DNA, 25 bp, Saccharomyces pastorianus
acgtaaaatgatgtccttccaggca

SEQ ID NO: 85306 - DNA, 25 bp, Saccharomyces pastorianus
gaattggttccaaagcatatcagat

SEQ ID NO: 85307 - DNA, 25 bp, Saccharomyces pastorianus
atgagccttccgttggtgtaaagac

SEQ ID NO: 85308 - DNA, 25 bp, Saccharomyces pastorianus
gtccttccaggcaaatccaacagaa

SEQ ID NO: 85309 - DNA, 25 bp, Saccharomyces pastorianus
tcaaagttcccagacatgggctcct

SEQ ID NO: 85310 - DNA, 25 bp, Saccharomyces pastorianus
gcattaattatgtaccccacgcaag

SEQ ID NO: 85311 - DNA, 25 bp, Saccharomyces pastorianus
gggccgcaagaacgcttcaaaaaag

SEQ ID NO: 85312 - DNA, 25 bp, Saccharomyces pastorianus
tcagccgcaacatttgccaatcaaa

SEQ ID NO: 85313 - DNA, 25 bp, Saccharomyces pastorianus
gagtcgccagatgtaccattgttcg

SEQ ID NO: 85314 - DNA, 25 bp, Saccharomyces pastorianus
gacctagttttggaagggccgcaag

SEQ ID NO: 85315 - DNA, 25 bp, Saccharomyces pastorianus
gtgcaagaacttgttgacctagttt

SEQ ID NO: 85316 - DNA, 25 bp, Saccharomyces pastorianus
atcaaaactcactctccagtagagt

SEQ ID NO: 85317 - DNA, 25 bp, Saccharomyces pastorianus
gaaactgacatttcacgatatcttg

SEQ ID NO: 85318 - DNA, 25 bp, Saccharomyces pastorianus
gtaccccacgcaagatgaatttgat

SEQ ID NO: 85319 - DNA, 25 bp, Saccharomyces pastorianus
aaggctagaagacccaatggatttt

SEQ ID NO: 85320 - DNA, 25 bp, Saccharomyces pastorianus
tcaattgatctatcccgcattaatt

SEQ ID NO: 85321 - DNA, 25 bp, Saccharomyces pastorianus
atcggcttacaaaccttcaattact

SEQ ID NO: 85322 - DNA, 25 bp, Saccharomyces pastorianus
gaggctagcgtaactttagcggcat

SEQ ID NO: 85323 - DNA, 25 bp, Saccharomyces pastorianus
gaatctttggctcctttcgataatc

SEQ ID NO: 85324 - DNA, 25 bp, Saccharomyces pastorianus
gatagcctctgtcaatgattcttta

SEQ ID NO: 85325 - DNA, 25 bp, Saccharomyces pastorianus
gtaccgacaatgtattggccacaat

SEQ ID NO: 85326 - DNA, 25 bp, Saccharomyces pastorianus
aatgtgaccccaaagatagcctctg

SEQ ID NO: 85327 - DNA, 25 bp, Saccharomyces pastorianus
atattgctgacatctccaagccaga

SEQ ID NO: 85328 - DNA, 25 bp, Saccharomyces pastorianus
aactatctttggaccaattccgcct

SEQ ID NO: 85329 - DNA, 25 bp, Saccharomyces pastorianus
tgaaattttcccaaatcctaggcta

SEQ ID NO: 85330 - DNA, 25 bp, Saccharomyces pastorianus
cgcctttgcacaccgatgaaatttt

SEQ ID NO: 85331 - DNA, 25 bp, Saccharomyces pastorianus
catgggctaaatccccgtatttgca

SEQ ID NO: 85332 - DNA, 25 bp, Saccharomyces pastorianus
tcactggtcgcgctaggcaaataca

SEQ ID NO: 85333 - DNA, 25 bp, Saccharomyces pastorianus
gaaatttaattaccagtgtctcact

SEQ ID NO: 85334 - DNA, 25 bp, Saccharomyces pastorianus
attcaggtgttgtttgcattgcttt

SEQ ID NO: 85335 - DNA, 25 bp, Saccharomyces pastorianus
tgcattgctttgaattgcccgaaat

SEQ ID NO: 85336 - DNA, 25 bp, Saccharomyces pastorianus
aactcatttccaaatctggctgttt

SEQ ID NO: 85337 - DNA, 25 bp, Saccharomyces pastorianus
gtttgccggttgtgatgttgatgat

SEQ ID NO: 85338 - DNA, 25 bp, Saccharomyces pastorianus
gtcttttgactgattactctctacc

SEQ ID NO: 85339 - DNA, 25 bp, Saccharomyces pastorianus
gattgtctttaaattcctgtcgtct

SEQ ID NO: 85340 - DNA, 25 bp, Saccharomyces pastorianus
aactttttactcagactatcacaga

SEQ ID NO: 85341 - DNA, 25 bp, Saccharomyces pastorianus
acattggcagacataggcgtggaaa

SEQ ID NO: 85342 - DNA, 25 bp, Saccharomyces pastorianus
gaggattaactccttggttgcctta

SEQ ID NO: 85343 - DNA, 25 bp, Saccharomyces pastorianus
aagggtattgcatactgccactcac

SEQ ID NO: 85344 - DNA, 25 bp, Saccharomyces pastorianus
ggaccaaccgttaggagctgatatt

SEQ ID NO: 85345 - DNA, 25 bp, Saccharomyces pastorianus
atttgttggacaaactcctcgcgta

SEQ ID NO: 85346 - DNA, 25 bp, Saccharomyces pastorianus
ttgcctgatttcaagccaagctttc

SEQ ID NO: 85347 - DNA, 25 bp, Saccharomyces pastorianus
tacaggtgtcgatacatggtccatc

SEQ ID NO: 85348 - DNA, 25 bp, Saccharomyces pastorianus
ggtaccaagtctagatccacgcggt

SEQ ID NO: 85349 - DNA, 25 bp, Saccharomyces pastorianus
tagcgcgtgcttttggtgttccgtt

SEQ ID NO: 85350 - DNA, 25 bp, Saccharomyces pastorianus
aactcctcgcgtatgaccctattaa

SEQ ID NO: 85351 - DNA, 25 bp, Saccharomyces pastorianus
actaggtgattttggcttagcgcgt

SEQ ID NO: 85352 - DNA, 25 bp, Saccharomyces pastorianus
cacaccgtattctgcatcgtgattt

SEQ ID NO: 85353 - DNA, 25 bp, Saccharomyces pastorianus
gttccgttgagagcttacacacatg

SEQ ID NO: 85354 - DNA, 25 bp, Saccharomyces pastorianus
agagatggtctaatacggccgaaaa

SEQ ID NO: 85355 - DNA, 25 bp, Saccharomyces pastorianus
aaagaggcggaatcctactcgtcac

SEQ ID NO: 85356 - DNA, 25 bp, Saccharomyces pastorianus
gctgtgctcgggaccatttaacaac

SEQ ID NO: 85357 - DNA, 25 bp, Saccharomyces pastorianus
acattttatacttggctgtgctcgg

SEQ ID NO: 85358 - DNA, 25 bp, Saccharomyces pastorianus
tacgggccccttattcattagtgtg

SEQ ID NO: 85359 - DNA, 25 bp, Saccharomyces pastorianus
tatgacaatcatgggctctacgggc

SEQ ID NO: 85360 - DNA, 25 bp, Saccharomyces pastorianus
aatatctaaaggttcctcctggcat

SEQ ID NO: 85361 - DNA, 25 bp, Saccharomyces pastorianus
ccggattcatttttggctttttcat

SEQ ID NO: 85362 - DNA, 25 bp, Saccharomyces pastorianus
atgtgatgggctctgttccaaggca

SEQ ID NO: 85363 - DNA, 25 bp, Saccharomyces pastorianus
ctacgacagcgttttccttgatata

SEQ ID NO: 85364 - DNA, 25 bp, Saccharomyces pastorianus
aatcatatcttgtcttgcgtggtta

SEQ ID NO: 85365 - DNA, 25 bp, Saccharomyces pastorianus
tccgctcaagcttttggtgatgtca

SEQ ID NO: 85366 - DNA, 25 bp, Saccharomyces pastorianus
attaatctcacacatccatgacggc

SEQ ID NO: 85367 - DNA, 25 bp, Saccharomyces pastorianus
gatggtactttaaaggctgccgtaa

SEQ ID NO: 85368 - DNA, 25 bp, Saccharomyces pastorianus
tatgccaagtgacaccagcggttct

SEQ ID NO: 85369 - DNA, 25 bp, Saccharomyces pastorianus
tcgtcttcgaattttctatgccaag

SEQ ID NO: 85370 - DNA, 25 bp, Saccharomyces pastorianus
gattacttcgagagaccaactgatg

SEQ ID NO: 85371 - DNA, 25 bp, Saccharomyces pastorianus
gttcgaaattttgaccgctggttct

SEQ ID NO: 85372 - DNA, 25 bp, Saccharomyces pastorianus
atctcttttgctgcttcagatggtg

SEQ ID NO: 85373 - DNA, 25 bp, Saccharomyces pastorianus
ggctgccgtaatctttaattcgagt

SEQ ID NO: 85374 - DNA, 25 bp, Saccharomyces pastorianus
cagcggttctgcctacaatcaagat

SEQ ID NO: 85375 - DNA, 25 bp, Saccharomyces pastorianus
gaaggtattcctgcctatcatgggt

SEQ ID NO: 85376 - DNA, 25 bp, Saccharomyces pastorianus
cgcacctgtgatatccaaaacttgg

SEQ ID NO: 85377 - DNA, 25 bp, Saccharomyces pastorianus
gaaaaccgcacctgtgatatccaaa

SEQ ID NO: 85378 - DNA, 25 bp, Saccharomyces pastorianus
gttgggtattcttctgtttcttctc

SEQ ID NO: 85379 - DNA, 25 bp, Saccharomyces pastorianus
ggcaaaactgagaaaaccgcacctg

SEQ ID NO: 85380 - DNA, 25 bp, Saccharomyces pastorianus
ctgtgatatccaaaacttggttggg

SEQ ID NO: 85381 - DNA, 25 bp, Saccharomyces pastorianus
cttggttgggtattcttctgtttct

SEQ ID NO: 85382 - DNA, 25 bp, Saccharomyces pastorianus
accgcacctgtgatatccaaaactt

SEQ ID NO: 85383 - DNA, 25 bp, Saccharomyces pastorianus
aaactgagaaaaccgcacctgtgat

SEQ ID NO: 85384 - DNA, 25 bp, Saccharomyces pastorianus
gggtattcttctgtttcttctcgta

SEQ ID NO: 85385 - DNA, 25 bp, Saccharomyces pastorianus
tattcttctgtttcttctcgtaggt

SEQ ID NO: 85386 - DNA, 25 bp, Saccharomyces pastorianus
tcttctgtttcttctcgtaggtggt

SEQ ID NO: 85387 - DNA, 25 bp, Saccharomyces pastorianus
atatggccgcgttcaatgatttgct

SEQ ID NO: 85388 - DNA, 25 bp, Saccharomyces pastorianus
atgcgcccataaatcctaccaagat

SEQ ID NO: 85389 - DNA, 25 bp, Saccharomyces pastorianus
gataccttgaaactgggaacccatg

SEQ ID NO: 85390 - DNA, 25 bp, Saccharomyces pastorianus
caaacccactcttcgctaatgatgt

SEQ ID NO: 85391 - DNA, 25 bp, Saccharomyces pastorianus
gaacccatgcccatgattctgcaat

SEQ ID NO: 85392 - DNA, 25 bp, Saccharomyces pastorianus
tttgcggcaaggttatcacagatct

SEQ ID NO: 85393 - DNA, 25 bp, Saccharomyces pastorianus
gtgaagaacctcctgtacggactac

SEQ ID NO: 85394 - DNA, 25 bp, Saccharomyces pastorianus
aatttccacaatatcatcttcccat

SEQ ID NO: 85395 - DNA, 25 bp, Saccharomyces pastorianus
gtgactacagacacgtttgttcttg

SEQ ID NO: 85396 - DNA, 25 bp, Saccharomyces pastorianus
agatatgcatccaattgagcctact

SEQ ID NO: 85397 - DNA, 25 bp, Saccharomyces pastorianus
gatagaggtcccacatcttttaacg

SEQ ID NO: 85398 - DNA, 25 bp, Saccharomyces pastorianus
cactgctgcagttattttcgttgtt

SEQ ID NO: 85399 - DNA, 25 bp, Saccharomyces pastorianus
gcgtatattgattctgggtttggat

SEQ ID NO: 85400 - DNA, 25 bp, Saccharomyces pastorianus
tggtctatcgtagcatccagtgcaa

SEQ ID NO: 85401 - DNA, 25 bp, Saccharomyces pastorianus
gtctacagcctctaaggaacttcat

SEQ ID NO: 85402 - DNA, 25 bp, Saccharomyces pastorianus
gcagcactgctggtttttgcaaata

SEQ ID NO: 85403 - DNA, 25 bp, Saccharomyces pastorianus
ggtggtcaaacaagtatcaggccct

SEQ ID NO: 85404 - DNA, 25 bp, Saccharomyces pastorianus
caaattggcgaagtagtcactacaa

SEQ ID NO: 85405 - DNA, 25 bp, Saccharomyces pastorianus
aacgtctgggatcttggtggtcaaa

SEQ ID NO: 85406 - DNA, 25 bp, Saccharomyces pastorianus
atcaggccctactggaggtgttatt

SEQ ID NO: 85407 - DNA, 25 bp, Saccharomyces pastorianus
gaccaaccgggtgcattaagtgcca

SEQ ID NO: 85408 - DNA, 25 bp, Saccharomyces pastorianus
taagtgccagtgaagtctccaaaga

SEQ ID NO: 85409 - DNA, 25 bp, Saccharomyces pastorianus
gaatttatgtcctcttacaatgctc

SEQ ID NO: 85410 - DNA, 25 bp, Saccharomyces pastorianus
gaacggtttcgatgacacacttaaa

SEQ ID NO: 85411 - DNA, 25 bp, Saccharomyces pastorianus
ggatttacttttccacatatggcaa

SEQ ID NO: 85412 - DNA, 25 bp, Saccharomyces pastorianus
tggcaaccgctttttcatattcaag

SEQ ID NO: 85413 - DNA, 25 bp, Saccharomyces pastorianus
ttacaatgctcaaagccacaccttt

SEQ ID NO: 85414 - DNA, 25 bp, Saccharomyces pastorianus
gtattcatccggtcgtaagttctaa

SEQ ID NO: 85415 - DNA, 25 bp, Saccharomyces pastorianus
gcaagaacccttatactaacagtag

SEQ ID NO: 85416 - DNA, 25 bp, Saccharomyces pastorianus
aggtcaagaacgttggcatgtccag

SEQ ID NO: 85417 - DNA, 25 bp, Saccharomyces pastorianus
acttacagtattcaccgtcaacggt

SEQ ID NO: 85418 - DNA, 25 bp, Saccharomyces pastorianus
ggacacatgactacaatgctatcga

SEQ ID NO: 85419 - DNA, 25 bp, Saccharomyces pastorianus
tattttccggaactgataggtacac

SEQ ID NO: 85420 - DNA, 25 bp, Saccharomyces pastorianus
ggagctcggttgtttcttttgccaa

SEQ ID NO: 85421 - DNA, 25 bp, Saccharomyces pastorianus
aaattcttcaatatgcaaccagtgc

SEQ ID NO: 85422 - DNA, 25 bp, Saccharomyces pastorianus
ggcgattgttgattcgtggtttcaa

SEQ ID NO: 85423 - DNA, 25 bp, Saccharomyces pastorianus
gatcatatgatttgttcgacgccat

SEQ ID NO: 85424 - DNA, 25 bp, Saccharomyces pastorianus
aaaccattctgagtcattctagtga

SEQ ID NO: 85425 - DNA, 25 bp, Saccharomyces pastorianus
cagaggctaatctcattggcaacga

SEQ ID NO: 85426 - DNA, 25 bp, Saccharomyces pastorianus
agcatactggtctcttactattgga

SEQ ID NO: 85427 - DNA, 25 bp, Saccharomyces pastorianus
ttcctgggtgtgtccgaatatcttt

SEQ ID NO: 85428 - DNA, 25 bp, Saccharomyces pastorianus
gtgccgaattcacatttatcattgt

SEQ ID NO: 85429 - DNA, 25 bp, Saccharomyces pastorianus
gcaacaattgcaagccagtgccgaa

SEQ ID NO: 85430 - DNA, 25 bp, Saccharomyces pastorianus
taacaaacccaagtgcacatcagca

SEQ ID NO: 85431 - DNA, 25 bp, Saccharomyces pastorianus
gggtgatgaccacattcatattcta

SEQ ID NO: 85432 - DNA, 25 bp, Saccharomyces pastorianus
aaggctactttggaggtttactgct

SEQ ID NO: 85433 - DNA, 25 bp, Saccharomyces pastorianus
ctttatctcaaggacgtgcaatcac

SEQ ID NO: 85434 - DNA, 25 bp, Saccharomyces pastorianus
ttaaccatgaggagttgtttgcccc

SEQ ID NO: 85435 - DNA, 25 bp, Saccharomyces pastorianus
ggtttactgctgttaggaatttcta

SEQ ID NO: 85436 - DNA, 25 bp, Saccharomyces pastorianus
gattttttattattaccggcttgat

SEQ ID NO: 85437 - DNA, 25 bp, Saccharomyces pastorianus
tattctacagcttctacttaatgag

SEQ ID NO: 85438 - DNA, 25 bp, Saccharomyces pastorianus
gtattgcctaaactacttcgggaca

SEQ ID NO: 85439 - DNA, 25 bp, Saccharomyces pastorianus
gtgcaatcacggtgccactggtaga

SEQ ID NO: 85440 - DNA, 25 bp, Saccharomyces pastorianus
gttttcaagctaccttaaggctact

SEQ ID NO: 85441 - DNA, 25 bp, Saccharomyces pastorianus
gtgccactggtagaggtattgccta

SEQ ID NO: 85442 - DNA, 25 bp, Saccharomyces pastorianus
aagggcacgcgctgcaagtgatgat

SEQ ID NO: 85443 - DNA, 25 bp, Saccharomyces pastorianus
ttagttgccgaaaccgaggatcgca

SEQ ID NO: 85444 - DNA, 25 bp, Saccharomyces pastorianus
aacattcgcgctaaacccggttgag

SEQ ID NO: 85445 - DNA, 25 bp, Saccharomyces pastorianus
agagccagtgcctttaccggaagac

SEQ ID NO: 85446 - DNA, 25 bp, Saccharomyces pastorianus
tatatttatacccttcgtgccaaac

SEQ ID NO: 85447 - DNA, 25 bp, Saccharomyces pastorianus
tattacggttcaagagccagtgcct

SEQ ID NO: 85448 - DNA, 25 bp, Saccharomyces pastorianus
ggcttgcatattatcgagaacgctt

SEQ ID NO: 85449 - DNA, 25 bp, Saccharomyces pastorianus
tgaatactccgattttgcgtctgac

SEQ ID NO: 85450 - DNA, 25 bp, Saccharomyces pastorianus
gatgccgagccccagtttaaagaag

SEQ ID NO: 85451 - DNA, 25 bp, Saccharomyces pastorianus
gaagacgcaccagaagatgccgagc

SEQ ID NO: 85452 - DNA, 25 bp, Saccharomyces pastorianus
gtgccaaactcgatgatgaatactc

SEQ ID NO: 85453 - DNA, 25 bp, Saccharomyces pastorianus
tcatgggttcccgaataccgatacg

SEQ ID NO: 85454 - DNA, 25 bp, Saccharomyces pastorianus
gttccaccggatttccatggagcaa

SEQ ID NO: 85455 - DNA, 25 bp, Saccharomyces pastorianus
gcagatactctctccagacgaatgg

SEQ ID NO: 85456 - DNA, 25 bp, Saccharomyces pastorianus
atttcgagctaccaagtatccacag

SEQ ID NO: 85457 - DNA, 25 bp, Saccharomyces pastorianus
tgcgaagcctgcatttccagtagac

SEQ ID NO: 85458 - DNA, 25 bp, Saccharomyces pastorianus
ttagtgacgctgactcatgggttcc

SEQ ID NO: 85459 - DNA, 25 bp, Saccharomyces pastorianus
tcgaaattcgttagttccaccggat

SEQ ID NO: 85460 - DNA, 25 bp, Saccharomyces pastorianus
taaattctctgcagatactctctcc

SEQ ID NO: 85461 - DNA, 25 bp, Saccharomyces pastorianus
tgaacaaggttttttctcttccaag

SEQ ID NO: 85462 - DNA, 25 bp, Saccharomyces pastorianus
taagtgggtccacatttccttcaat

SEQ ID NO: 85463 - DNA, 25 bp, Saccharomyces pastorianus
aaaacttgtctcatcggctggttgg

SEQ ID NO: 85464 - DNA, 25 bp, Saccharomyces pastorianus
tcaagctctctctagacgttatcaa

SEQ ID NO: 85465 - DNA, 25 bp, Saccharomyces pastorianus
atatttgacgaaaacgatgcccatg

SEQ ID NO: 85466 - DNA, 25 bp, Saccharomyces pastorianus
aaggccgctttattgaacagaggag

SEQ ID NO: 85467 - DNA, 25 bp, Saccharomyces pastorianus
cacgagaaggtgttgaaggccgctt

SEQ ID NO: 85468 - DNA, 25 bp, Saccharomyces pastorianus
gagttggctcctcagataaaccttc

SEQ ID NO: 85469 - DNA, 25 bp, Saccharomyces pastorianus
gtgagcaaccatccatatttgacga

SEQ ID NO: 85470 - DNA, 25 bp, Saccharomyces pastorianus
cgatgcccatgatctgtatttccaa

SEQ ID NO: 85471 - DNA, 25 bp, Saccharomyces pastorianus
gtgtcccttgtgatgtttgcttcaa

SEQ ID NO: 85472 - DNA, 25 bp, Saccharomyces pastorianus
ctgaaagattgcaaccgggctgggt

SEQ ID NO: 85473 - DNA, 25 bp, Saccharomyces pastorianus
cgggctgggttcaattgttcgttat

SEQ ID NO: 85474 - DNA, 25 bp, Saccharomyces pastorianus
tatgtctttattctggtggtgtccc

SEQ ID NO: 85475 - DNA, 25 bp, Saccharomyces pastorianus
gtttctccccggcaagaatttatca

SEQ ID NO: 85476 - DNA, 25 bp, Saccharomyces pastorianus
tagcatgaacaatgtttctccccgg

SEQ ID NO: 85477 - DNA, 25 bp, Saccharomyces pastorianus
aaacaagtaaagtccgcaccctctg

SEQ ID NO: 85478 - DNA, 25 bp, Saccharomyces pastorianus
gcatctactaccacatcttcttgga

SEQ ID NO: 85479 - DNA, 25 bp, Saccharomyces pastorianus
aaggttcagagttcttccaaacaag

SEQ ID NO: 85480 - DNA, 25 bp, Saccharomyces pastorianus
caccactacctttgctagcatgaac

SEQ ID NO: 85481 - DNA, 25 bp, Saccharomyces pastorianus
tgatgacgacggctgggaattccaa

SEQ ID NO: 85482 - DNA, 25 bp, Saccharomyces pastorianus
tcttcttggactacggtgacttcta

SEQ ID NO: 85483 - DNA, 25 bp, Saccharomyces pastorianus
tataggaaccgttgtctccccatat

SEQ ID NO: 85484 - DNA, 25 bp, Saccharomyces pastorianus
gaagcgctagctctatcaggcaatg

SEQ ID NO: 85485 - DNA, 25 bp, Saccharomyces pastorianus
gggatgaaagagtcgtctccgttaa

SEQ ID NO: 85486 - DNA, 25 bp, Saccharomyces pastorianus
agtgtttgtgatacagttcgtctgt

SEQ ID NO: 85487 - DNA, 25 bp, Saccharomyces pastorianus
tagctatgcactgtccatctggaga

SEQ ID NO: 85488 - DNA, 25 bp, Saccharomyces pastorianus
taactctgagaaaggcctggcatgt

SEQ ID NO: 85489 - DNA, 25 bp, Saccharomyces pastorianus
atctggagaccagcataactctgag

SEQ ID NO: 85490 - DNA, 25 bp, Saccharomyces pastorianus
aaatcatccgatgcagtagctatgc

SEQ ID NO: 85491 - DNA, 25 bp, Saccharomyces pastorianus
aaattttcgcacaggtagctttcaa

SEQ ID NO: 85492 - DNA, 25 bp, Saccharomyces pastorianus
aggcctggcatgtgatgtgactagt

SEQ ID NO: 85493 - DNA, 25 bp, Saccharomyces pastorianus
actgcccatcaggagaaattttcgc

SEQ ID NO: 85494 - DNA, 25 bp, Saccharomyces pastorianus
agctttcaatccattctgtgtttcc

SEQ ID NO: 85495 - DNA, 25 bp, Saccharomyces pastorianus
gttcgtctgttaatgtcgtatatca

SEQ ID NO: 85496 - DNA, 25 bp, Saccharomyces pastorianus
gctagcatataatggccacttgcaa

SEQ ID NO: 85497 - DNA, 25 bp, Saccharomyces pastorianus
aaaagcctcttacagttgctcgatg

SEQ ID NO: 85498 - DNA, 25 bp, Saccharomyces pastorianus
gggaacttgctgtttacatcctcaa

SEQ ID NO: 85499 - DNA, 25 bp, Saccharomyces pastorianus
atcattcctgcggtatggacttctt

SEQ ID NO: 85500 - DNA, 25 bp, Saccharomyces pastorianus
gggacacactgaacgggtctttgat

SEQ ID NO: 85501 - DNA, 25 bp, Saccharomyces pastorianus
gggttgtgtagttcgtactttccag

SEQ ID NO: 85502 - DNA, 25 bp, Saccharomyces pastorianus
agagacgggccattgtttgaagaca

SEQ ID NO: 85503 - DNA, 25 bp, Saccharomyces pastorianus
tcggtaatataatgtgttcccttgc

SEQ ID NO: 85504 - DNA, 25 bp, Saccharomyces pastorianus
gttgctcgatggttctttatatcat

SEQ ID NO: 85505 - DNA, 25 bp, Saccharomyces pastorianus
aaatggtgtggtacccatctcccaa

SEQ ID NO: 85506 - DNA, 25 bp, Saccharomyces pastorianus
aaaagggcgtactgcatcattcctg

SEQ ID NO: 85507 - DNA, 25 bp, Saccharomyces pastorianus
ttgtgtcggtggacgtacccatgaa

SEQ ID NO: 85508 - DNA, 25 bp, Saccharomyces pastorianus
aaaattggctgttggtctatcctga

SEQ ID NO: 85509 - DNA, 25 bp, Saccharomyces pastorianus
ggtagacatgccattcggtacgttt

SEQ ID NO: 85510 - DNA, 25 bp, Saccharomyces pastorianus
atgcaaggcgattctgtcccaaaat

SEQ ID NO: 85511 - DNA, 25 bp, Saccharomyces pastorianus
gggtatacctgttatggctcatata

SEQ ID NO: 85512 - DNA, 25 bp, Saccharomyces pastorianus
gaatcgggcatatctgatggcttga

SEQ ID NO: 85513 - DNA, 25 bp, Saccharomyces pastorianus
tttattgaagaactgtgctcccggg

SEQ ID NO: 85514 - DNA, 25 bp, Saccharomyces pastorianus
gacagatattgccactcagggcttg

SEQ ID NO: 85515 - DNA, 25 bp, Saccharomyces pastorianus
ggagctgtatgaaaccgccatgcaa

SEQ ID NO: 85516 - DNA, 25 bp, Saccharomyces pastorianus
gtctatcctgattgaatgtgtcccc

SEQ ID NO: 85517 - DNA, 25 bp, Saccharomyces pastorianus
gttgaagtcggttcttacaccaaag

SEQ ID NO: 85518 - DNA, 25 bp, Saccharomyces pastorianus
tatatctgaccttctcgggatgcaa

SEQ ID NO: 85519 - DNA, 25 bp, Saccharomyces pastorianus
gatgaagtgtatactgcgcctgctt

SEQ ID NO: 85520 - DNA, 25 bp, Saccharomyces pastorianus
gctactttgtgcaatccttgggatc

SEQ ID NO: 85521 - DNA, 25 bp, Saccharomyces pastorianus
tccatctttctatatgttcacgcct

SEQ ID NO: 85522 - DNA, 25 bp, Saccharomyces pastorianus
ataaatcacctttatccgcagctgc

SEQ ID NO: 85523 - DNA, 25 bp, Saccharomyces pastorianus
ggatgctcttttggtgctacgatgc

SEQ ID NO: 85524 - DNA, 25 bp, Saccharomyces pastorianus
ctgctttaggcttcccaaatgctat

SEQ ID NO: 85525 - DNA, 25 bp, Saccharomyces pastorianus
ggatgatcctgttgtcggcccagat

SEQ ID NO: 85526 - DNA, 25 bp, Saccharomyces pastorianus
ttcctacccttgttatcaattccag

SEQ ID NO: 85527 - DNA, 25 bp, Saccharomyces pastorianus
agacaacaactcgtgggctaccaag

SEQ ID NO: 85528 - DNA, 25 bp, Saccharomyces pastorianus
gggatcttctcctttcagcaattag

SEQ ID NO: 85529 - DNA, 25 bp, Saccharomyces pastorianus
gatacaattcaggttcctacccttg

SEQ ID NO: 85530 - DNA, 25 bp, Saccharomyces pastorianus
tgtcacagaaccactgccggatata

SEQ ID NO: 85531 - DNA, 25 bp, Saccharomyces pastorianus
atcaaaaattcccactctaacgctg

SEQ ID NO: 85532 - DNA, 25 bp, Saccharomyces pastorianus
agaagttatcagttccggttatagt

SEQ ID NO: 85533 - DNA, 25 bp, Saccharomyces pastorianus
attatcgtcgtggagctcactcaag

SEQ ID NO: 85534 - DNA, 25 bp, Saccharomyces pastorianus
ccccgtgccttaccaatgaatcttt

SEQ ID NO: 85535 - DNA, 25 bp, Saccharomyces pastorianus
tctatacgaaggaaccgtggctcaa

SEQ ID NO: 85536 - DNA, 25 bp, Saccharomyces pastorianus
actctaacgctgtactttctaggaa

SEQ ID NO: 85537 - DNA, 25 bp, Saccharomyces pastorianus
taagctggcagaaacctgtcacaga

SEQ ID NO: 85538 - DNA, 25 bp, Saccharomyces pastorianus
ctaacgagggtcagattggcctaat

SEQ ID NO: 85539 - DNA, 25 bp, Saccharomyces pastorianus
gtgtacctacacgtgaaattctaag

SEQ ID NO: 85540 - DNA, 25 bp, Saccharomyces pastorianus
tacgtatttaatccatgacctcccc

SEQ ID NO: 85541 - DNA, 25 bp, Saccharomyces pastorianus
atgcgttcagtgtcacgttttcgta

SEQ ID NO: 85542 - DNA, 25 bp, Saccharomyces pastorianus
tgttctccagttactatgcgttcag

SEQ ID NO: 85543 - DNA, 25 bp, Saccharomyces pastorianus
tcccggcagagtttcgtttattact

SEQ ID NO: 85544 - DNA, 25 bp, Saccharomyces pastorianus
tctcactgcctttggtatgacctgg

SEQ ID NO: 85545 - DNA, 25 bp, Saccharomyces pastorianus
tacggatgggcaatcttctttcatt

SEQ ID NO: 85546 - DNA, 25 bp, Saccharomyces pastorianus
gctgccattagttccgttatcattt

SEQ ID NO: 85547 - DNA, 25 bp, Saccharomyces pastorianus
gttactccccaaaagagctgctgga

SEQ ID NO: 85548 - DNA, 25 bp, Saccharomyces pastorianus
tgtctgcccaggtgtagccatgtta

SEQ ID NO: 85549 - DNA, 25 bp, Saccharomyces pastorianus
tacagctctgtaacgcaatgggaat

SEQ ID NO: 85550 - DNA, 25 bp, Saccharomyces pastorianus
gctaggtctctgcagttcaatttca

SEQ ID NO: 85551 - DNA, 25 bp, Saccharomyces pastorianus
gtttctttcgaaatgtgggcgctgc

SEQ ID NO: 85552 - DNA, 25 bp, Saccharomyces pastorianus
aaggtccagctccagtgcaggcgat

SEQ ID NO: 85553 - DNA, 25 bp, Saccharomyces pastorianus
attctttctgaaaccgccaattgga

SEQ ID NO: 85554 - DNA, 25 bp, Saccharomyces pastorianus
atctattgtggtttttccttcctcg

SEQ ID NO: 85555 - DNA, 25 bp, Saccharomyces pastorianus
aagatacacccgacagttgctatat

SEQ ID NO: 85556 - DNA, 25 bp, Saccharomyces pastorianus
gcaatttgtacaggttattccggca

SEQ ID NO: 85557 - DNA, 25 bp, Saccharomyces pastorianus
gaggtcgccagcaatgtattcagga

SEQ ID NO: 85558 - DNA, 25 bp, Saccharomyces pastorianus
aggccacaaatgacgcttgccagag

SEQ ID NO: 85559 - DNA, 25 bp, Saccharomyces pastorianus
aaagccttcattgcctgcaagttta

SEQ ID NO: 85560 - DNA, 25 bp, Saccharomyces pastorianus
aaagcccgtcttcatctattgtggt

SEQ ID NO: 85561 - DNA, 25 bp, Saccharomyces pastorianus
gggcaatattccatcctttcaatcg

SEQ ID NO: 85562 - DNA, 25 bp, Saccharomyces pastorianus
ttcctcggtagctagttcaactttg

SEQ ID NO: 85563 - DNA, 25 bp, Saccharomyces pastorianus
gtattttggctttaccacttggtgt

SEQ ID NO: 85564 - DNA, 25 bp, Saccharomyces pastorianus
attcacttgaactatttggcccata

SEQ ID NO: 85565 - DNA, 25 bp, Saccharomyces pastorianus
aatctcaaggcttcaatggcgctcg

SEQ ID NO: 85566 - DNA, 25 bp, Saccharomyces pastorianus
gtcagctgcaattaccagttcatct

SEQ ID NO: 85567 - DNA, 25 bp, Saccharomyces pastorianus
tttaagggtcattacgctcaacgtc

SEQ ID NO: 85568 - DNA, 25 bp, Saccharomyces pastorianus
ggctacatttcgtggctacttgata

SEQ ID NO: 85569 - DNA, 25 bp, Saccharomyces pastorianus
acactattgttcgttctgggtgcac

SEQ ID NO: 85570 - DNA, 25 bp, Saccharomyces pastorianus
gggcgcaaaccctcaacaagatatt

SEQ ID NO: 85571 - DNA, 25 bp, Saccharomyces pastorianus
tgtactgcttgaaccacacggatgg

SEQ ID NO: 85572 - DNA, 25 bp, Saccharomyces pastorianus
ggcgcaattttgttcttatctggct

SEQ ID NO: 85573 - DNA, 25 bp, Saccharomyces pastorianus
atacgtccatgatccactagctaaa

SEQ ID NO: 85574 - DNA, 25 bp, Saccharomyces pastorianus
agaccgtgacgttgtagactatatt

SEQ ID NO: 85575 - DNA, 25 bp, Saccharomyces pastorianus
gattcccggaatgccgttagagcat

SEQ ID NO: 85576 - DNA, 25 bp, Saccharomyces pastorianus
gtcgcattgtttcgttttcaatcag

SEQ ID NO: 85577 - DNA, 25 bp, Saccharomyces pastorianus
cagttcctaaactagtctcagtgca

SEQ ID NO: 85578 - DNA, 25 bp, Saccharomyces pastorianus
tgggttcaggaagctctcgaggcta

SEQ ID NO: 85579 - DNA, 25 bp, Saccharomyces pastorianus
tgcccatcctctcattgttgcaaat

SEQ ID NO: 85580 - DNA, 25 bp, Saccharomyces pastorianus
tgaactctgttcaagtcgcattgtt

SEQ ID NO: 85581 - DNA, 25 bp, Saccharomyces pastorianus
taggtcccgtcaacttccaggtaat

SEQ ID NO: 85582 - DNA, 25 bp, Saccharomyces pastorianus
gtgcaaccaatcatgattcccggaa

SEQ ID NO: 85583 - DNA, 25 bp, Saccharomyces pastorianus
aaacacgtcgtttgctcataaaaat

SEQ ID NO: 85584 - DNA, 25 bp, Saccharomyces pastorianus
agactatattgcctttttgtgtgat

SEQ ID NO: 85585 - DNA, 25 bp, Saccharomyces pastorianus
gattcatctgatggctgctgcaacc

SEQ ID NO: 85586 - DNA, 25 bp, Saccharomyces pastorianus
tgcctcttatttgggttctgttgaa

SEQ ID NO: 85587 - DNA, 25 bp, Saccharomyces pastorianus
aagctgggaaaacatcggtccgaca

SEQ ID NO: 85588 - DNA, 25 bp, Saccharomyces pastorianus
tcggtccgacagtacaagaactctt

SEQ ID NO: 85589 - DNA, 25 bp, Saccharomyces pastorianus
tatccgcacgaagttgtcaggacga

SEQ ID NO: 85590 - DNA, 25 bp, Saccharomyces pastorianus
gtacaaagggttgagtgcctcttat

SEQ ID NO: 85591 - DNA, 25 bp, Saccharomyces pastorianus
atagtgggttgaccccgcatttgat

SEQ ID NO: 85592 - DNA, 25 bp, Saccharomyces pastorianus
agcgctggtcttgcaaaatttgtgg

SEQ ID NO: 85593 - DNA, 25 bp, Saccharomyces pastorianus
caaccgcaggttgggcaacggcgac

SEQ ID NO: 85594 - DNA, 25 bp, Saccharomyces pastorianus
gaaatgagggtttcaccggcttgta

SEQ ID NO: 85595 - DNA, 25 bp, Saccharomyces pastorianus
gctagtatagcaacatatccgcacg

SEQ ID NO: 85596 - DNA, 25 bp, Saccharomyces pastorianus
aattgggcgcgcactacgtttagaa

SEQ ID NO: 85597 - DNA, 25 bp, Saccharomyces pastorianus
ttggtcactacccttttgaggaaga

SEQ ID NO: 85598 - DNA, 25 bp, Saccharomyces pastorianus
aacacgcttcacttctagtacgaga

SEQ ID NO: 85599 - DNA, 25 bp, Saccharomyces pastorianus
tagactctacagtggtttacccttt

SEQ ID NO: 85600 - DNA, 25 bp, Saccharomyces pastorianus
atctggagtaactacagccttgcta

SEQ ID NO: 85601 - DNA, 25 bp, Saccharomyces pastorianus
taaatgtcacattatcccagctcgt

SEQ ID NO: 85602 - DNA, 25 bp, Saccharomyces pastorianus
gtgcgcatgcgtttggctcaattaa

SEQ ID NO: 85603 - DNA, 25 bp, Saccharomyces pastorianus
gaaatgtccaaagccgaactgccac

SEQ ID NO: 85604 - DNA, 25 bp, Saccharomyces pastorianus
gatagcaaaccttcgaaacctttca

SEQ ID NO: 85605 - DNA, 25 bp, Saccharomyces pastorianus
gatgttctaaagttcaccttcacag

SEQ ID NO: 85606 - DNA, 25 bp, Saccharomyces pastorianus
caggctttagatgccgtgcgcatgc

SEQ ID NO: 85607 - DNA, 25 bp, Saccharomyces pastorianus
ctggacactcactgggtcgtgaaaa

SEQ ID NO: 85608 - DNA, 25 bp, Saccharomyces pastorianus
ggcactgcaccatcacattacagaa

SEQ ID NO: 85609 - DNA, 25 bp, Saccharomyces pastorianus
taaagagggacagcttctgcagact

SEQ ID NO: 85610 - DNA, 25 bp, Saccharomyces pastorianus
gaactgaagttcaagccagactagg

SEQ ID NO: 85611 - DNA, 25 bp, Saccharomyces pastorianus
gaaatcaagttgaatcactttctag

SEQ ID NO: 85612 - DNA, 25 bp, Saccharomyces pastorianus
atataccttataatcctgccacttt

SEQ ID NO: 85613 - DNA, 25 bp, Saccharomyces pastorianus
aagagaacggtgaactcggtataag

SEQ ID NO: 85614 - DNA, 25 bp, Saccharomyces pastorianus
ctgccactttcaaaaggcgaactga

SEQ ID NO: 85615 - DNA, 25 bp, Saccharomyces pastorianus
gaagctgattctggacactcactgg

SEQ ID NO: 85616 - DNA, 25 bp, Saccharomyces pastorianus
ttccaaggttcaacgcccaaataag

SEQ ID NO: 85617 - DNA, 25 bp, Saccharomyces pastorianus
ggacagcttctgcagactgtatcaa

SEQ ID NO: 85618 - DNA, 25 bp, Saccharomyces pastorianus
aacgacatttcgtgggacgctcatg

SEQ ID NO: 85619 - DNA, 25 bp, Saccharomyces pastorianus
caaaagcccaatcgctaccatggag

SEQ ID NO: 85620 - DNA, 25 bp, Saccharomyces pastorianus
cctctttgctgcttgtactgaagga

SEQ ID NO: 85621 - DNA, 25 bp, Saccharomyces pastorianus
gggatacctcctgcgaagaaactat

SEQ ID NO: 85622 - DNA, 25 bp, Saccharomyces pastorianus
cgatactgtattggcaacggctggc

SEQ ID NO: 85623 - DNA, 25 bp, Saccharomyces pastorianus
atggagcacggtacttccgtttcaa

SEQ ID NO: 85624 - DNA, 25 bp, Saccharomyces pastorianus
ggacgctcatgacccttggttaatg

SEQ ID NO: 85625 - DNA, 25 bp, Saccharomyces pastorianus
tagtcaagctatgggatacctcctg

SEQ ID NO: 85626 - DNA, 25 bp, Saccharomyces pastorianus
gaaggaaatgcggtctcactattag

SEQ ID NO: 85627 - DNA, 25 bp, Saccharomyces pastorianus
aactctttaattctagcatctgcag

SEQ ID NO: 85628 - DNA, 25 bp, Saccharomyces pastorianus
tacccatggtggtcatatgctcggt

SEQ ID NO: 85629 - DNA, 25 bp, Saccharomyces pastorianus
atcttgtttggtgaaccagctacca

SEQ ID NO: 85630 - DNA, 25 bp, Saccharomyces pastorianus
ggcttcaaacttctttgctcaaacc

SEQ ID NO: 85631 - DNA, 25 bp, Saccharomyces pastorianus
ccagcctacttgcaacaattgtcaa

SEQ ID NO: 85632 - DNA, 25 bp, Saccharomyces pastorianus
tactctactggttctatcttgtttg

SEQ ID NO: 85633 - DNA, 25 bp, Saccharomyces pastorianus
ggtgccatttggaatatcaactctt

SEQ ID NO: 85634 - DNA, 25 bp, Saccharomyces pastorianus
aagtcttggctaaagtcattggcaa

SEQ ID NO: 85635 - DNA, 25 bp, Saccharomyces pastorianus
aacgtgtttactgactactctactg

SEQ ID NO: 85636 - DNA, 25 bp, Saccharomyces pastorianus
aggaattggacaactcctccaccat

SEQ ID NO: 85637 - DNA, 25 bp, Saccharomyces pastorianus
gattccatctgatttcatcttagct

SEQ ID NO: 85638 - DNA, 25 bp, Saccharomyces pastorianus
atcttagctgctcaatctcataacc

SEQ ID NO: 85639 - DNA, 25 bp, Saccharomyces pastorianus
accatttctactcacgatgcttcca

SEQ ID NO: 85640 - DNA, 25 bp, Saccharomyces pastorianus
atgtcccgtgtctatatatatccat

SEQ ID NO: 85641 - DNA, 25 bp, Saccharomyces pastorianus
gtcccgtgtctatatatatccattg

SEQ ID NO: 85642 - DNA, 25 bp, Saccharomyces pastorianus
attttcttgctattgaaatgagcgt

SEQ ID NO: 85643 - DNA, 25 bp, Saccharomyces pastorianus
gacggtattctattttcttgctatt

SEQ ID NO: 85644 - DNA, 25 bp, Saccharomyces pastorianus
tgaaatgagcgttttttgttactac

SEQ ID NO: 85645 - DNA, 25 bp, Saccharomyces pastorianus
cggtattctattttcttgctattga

SEQ ID NO: 85646 - DNA, 25 bp, Saccharomyces pastorianus
ctacgattggttttacagacggaat

SEQ ID NO: 85647 - DNA, 25 bp, Saccharomyces pastorianus
ttgacggtattctattttcttgcta

SEQ ID NO: 85648 - DNA, 25 bp, Saccharomyces pastorianus
gagcgttttttgttactacgattgg

SEQ ID NO: 85649 - DNA, 25 bp, Saccharomyces pastorianus
gtctatatatatccattgacggtat

SEQ ID NO: 85650 - DNA, 25 bp, Saccharomyces pastorianus
tatccattgacggtattctattttc

SEQ ID NO: 85651 - DNA, 25 bp, Saccharomyces pastorianus
ctacgccaagactattttattctca

SEQ ID NO: 85652 - DNA, 25 bp, Saccharomyces pastorianus
tactgaagaaggcatactacgccaa

SEQ ID NO: 85653 - DNA, 25 bp, Saccharomyces pastorianus
atactacgccaagactattttattc

SEQ ID NO: 85654 - DNA, 25 bp, Saccharomyces pastorianus
gcatactacgccaagactattttat

SEQ ID NO: 85655 - DNA, 25 bp, Saccharomyces pastorianus
catactacgccaagactattttatt

SEQ ID NO: 85656 - DNA, 25 bp, Saccharomyces pastorianus
tattactgaagaaggcatactacgc

SEQ ID NO: 85657 - DNA, 25 bp, Saccharomyces pastorianus
gaaggcatactacgccaagactatt

SEQ ID NO: 85658 - DNA, 25 bp, Saccharomyces pastorianus
gaagaaggcatactacgccaagact

SEQ ID NO: 85659 - DNA, 25 bp, Saccharomyces pastorianus
ggcatactacgccaagactatttta

SEQ ID NO: 85660 - DNA, 25 bp, Saccharomyces pastorianus
actacgccaagactattttattctc

SEQ ID NO: 85661 - DNA, 25 bp, Saccharomyces pastorianus
tgaagaaggcatactacgccaagac

SEQ ID NO: 85662 - DNA, 25 bp, Saccharomyces pastorianus
ggcgactcggttaggttatttcttg

SEQ ID NO: 85663 - DNA, 25 bp, Saccharomyces pastorianus
gattgtgtgtcatttcatccgaacg

SEQ ID NO: 85664 - DNA, 25 bp, Saccharomyces pastorianus
atgtgtttacaggatccagcgataa

SEQ ID NO: 85665 - DNA, 25 bp, Saccharomyces pastorianus
gcgcccgtcatttctattgctgttt

SEQ ID NO: 85666 - DNA, 25 bp, Saccharomyces pastorianus
agcgcagaaccagatgagccattta

SEQ ID NO: 85667 - DNA, 25 bp, Saccharomyces pastorianus
atccgaacggttgctatgtgtttac

SEQ ID NO: 85668 - DNA, 25 bp, Saccharomyces pastorianus
acttgggtgacgttactgcatctat

SEQ ID NO: 85669 - DNA, 25 bp, Saccharomyces pastorianus
tggaggtgccgatcacacagtccgt

SEQ ID NO: 85670 - DNA, 25 bp, Saccharomyces pastorianus
ttatttcttggacatactgcgcccg

SEQ ID NO: 85671 - DNA, 25 bp, Saccharomyces pastorianus
ttagtagcgtcgttctacaccaaaa

SEQ ID NO: 85672 - DNA, 25 bp, Saccharomyces pastorianus
atgtgggacgtttctacgggcgact

SEQ ID NO: 85673 - DNA, 25 bp, Saccharomyces pastorianus
gacgatatttttgctttaatgctga

SEQ ID NO: 85674 - DNA, 25 bp, Saccharomyces pastorianus
atggtgcattccttattcgttgttt

SEQ ID NO: 85675 - DNA, 25 bp, Saccharomyces pastorianus
gacccgttccatacgttaccaatag

SEQ ID NO: 85676 - DNA, 25 bp, Saccharomyces pastorianus
ggcagacctagtaaatcttcccgat

SEQ ID NO: 85677 - DNA, 25 bp, Saccharomyces pastorianus
tcttcccgattatatatctcgctca

SEQ ID NO: 85678 - DNA, 25 bp, Saccharomyces pastorianus
gaacttcgtagtaaaatcgctccaa

SEQ ID NO: 85679 - DNA, 25 bp, Saccharomyces pastorianus
gcctcaactaaccaagacaacactt

SEQ ID NO: 85680 - DNA, 25 bp, Saccharomyces pastorianus
gacaacactttaactggcgaagact

SEQ ID NO: 85681 - DNA, 25 bp, Saccharomyces pastorianus
aatgctgaagggtgacacaacctat

SEQ ID NO: 85682 - DNA, 25 bp, Saccharomyces pastorianus
gcaacctttgcaacagcatctcaaa

SEQ ID NO: 85683 - DNA, 25 bp, Saccharomyces pastorianus
gatttatctttatcgggctccaagc

SEQ ID NO: 85684 - DNA, 25 bp, Saccharomyces pastorianus
gataatgtggctccccttcgattta

SEQ ID NO: 85685 - DNA, 25 bp, Saccharomyces pastorianus
cttttgtgcttccatatgtgtcaaa

SEQ ID NO: 85686 - DNA, 25 bp, Saccharomyces pastorianus
taaccgcaacccaaagatactttct

SEQ ID NO: 85687 - DNA, 25 bp, Saccharomyces pastorianus
ggaacactgagcttacgtaaccgca

SEQ ID NO: 85688 - DNA, 25 bp, Saccharomyces pastorianus
cgtagatttcattgtggcgctgttc

SEQ ID NO: 85689 - DNA, 25 bp, Saccharomyces pastorianus
ggcgctgttcttgttggaacactga

SEQ ID NO: 85690 - DNA, 25 bp, Saccharomyces pastorianus
cattgtggcgctgttcttgttggaa

SEQ ID NO: 85691 - DNA, 25 bp, Saccharomyces pastorianus
gaagtggcgtagatttcattgtggc

SEQ ID NO: 85692 - DNA, 25 bp, Saccharomyces pastorianus
tgagcttacgtaaccgcaacccaaa

SEQ ID NO: 85693 - DNA, 25 bp, Saccharomyces pastorianus
aaaggataatgtggctccccttcga

SEQ ID NO: 85694 - DNA, 25 bp, Saccharomyces pastorianus
gtgcttccatatgtgtcaaaggata

SEQ ID NO: 85695 - DNA, 25 bp, Saccharomyces pastorianus
ggctgtcttgtactatcaggtctca

SEQ ID NO: 85696 - DNA, 25 bp, Saccharomyces pastorianus
ctgcagcatcactcggtgtgttatt

SEQ ID NO: 85697 - DNA, 25 bp, Saccharomyces pastorianus
tgaatttcatgccaggtcacgtaat

SEQ ID NO: 85698 - DNA, 25 bp, Saccharomyces pastorianus
gtaatactgaatctcttaggcgaca

SEQ ID NO: 85699 - DNA, 25 bp, Saccharomyces pastorianus
aggcgacattcctttggtcacaaga

SEQ ID NO: 85700 - DNA, 25 bp, Saccharomyces pastorianus
tcaggtctcacaagtctccggattg

SEQ ID NO: 85701 - DNA, 25 bp, Saccharomyces pastorianus
gaacgtacgattcttcggtgtcatt

SEQ ID NO: 85702 - DNA, 25 bp, Saccharomyces pastorianus
aacatctttgtcagcgctaatcact

SEQ ID NO: 85703 - DNA, 25 bp, Saccharomyces pastorianus
atgtttcaccatctatattcccaat

SEQ ID NO: 85704 - DNA, 25 bp, Saccharomyces pastorianus
gcgctaatcacttgtcaactttgga

SEQ ID NO: 85705 - DNA, 25 bp, Saccharomyces pastorianus
cgatattcgattacggcgcatttaa

SEQ ID NO: 85706 - DNA, 25 bp, Saccharomyces pastorianus
agccactccgagaactttactaggt

SEQ ID NO: 85707 - DNA, 25 bp, Saccharomyces pastorianus
gtggtgcaagcttacatcagattaa

SEQ ID NO: 85708 - DNA, 25 bp, Saccharomyces pastorianus
gtccgagtctccaaggaatcattgt

SEQ ID NO: 85709 - DNA, 25 bp, Saccharomyces pastorianus
tggatgacggtaccatggacacaga

SEQ ID NO: 85710 - DNA, 25 bp, Saccharomyces pastorianus
taagattatctcaagcgctagcaaa

SEQ ID NO: 85711 - DNA, 25 bp, Saccharomyces pastorianus
gagggtttaccatgctacaattaag

SEQ ID NO: 85712 - DNA, 25 bp, Saccharomyces pastorianus
caaattttcctttggtcaagccact

SEQ ID NO: 85713 - DNA, 25 bp, Saccharomyces pastorianus
gagagagtacattgcctatgctaag

SEQ ID NO: 85714 - DNA, 25 bp, Saccharomyces pastorianus
atattcttacttaaacgtctggcat

SEQ ID NO: 85715 - DNA, 25 bp, Saccharomyces pastorianus
tcactagtgagcacgcctaaactcg

SEQ ID NO: 85716 - DNA, 25 bp, Saccharomyces pastorianus
gaagccttgaggttggtccgagtct

SEQ ID NO: 85717 - DNA, 25 bp, Saccharomyces pastorianus
aaagccaacttcattttggctcaca

SEQ ID NO: 85718 - DNA, 25 bp, Saccharomyces pastorianus
attgttgccgagacccggatattct

SEQ ID NO: 85719 - DNA, 25 bp, Saccharomyces pastorianus
ggctgatgctacttctgattccaat

SEQ ID NO: 85720 - DNA, 25 bp, Saccharomyces pastorianus
ggctcacaaaagtttccaaagatta

SEQ ID NO: 85721 - DNA, 25 bp, Saccharomyces pastorianus
tttttcctgggcttgtaatgccaaa

SEQ ID NO: 85722 - DNA, 25 bp, Saccharomyces pastorianus
ttccaatcccgaagcagaatcttta

SEQ ID NO: 85723 - DNA, 25 bp, Saccharomyces pastorianus
tgtaatgaggacgtttcgccagcat

SEQ ID NO: 85724 - DNA, 25 bp, Saccharomyces pastorianus
gaaagacacttattcagtttccggg

SEQ ID NO: 85725 - DNA, 25 bp, Saccharomyces pastorianus
ccgggactctggcttggatagaaat

SEQ ID NO: 85726 - DNA, 25 bp, Saccharomyces pastorianus
tgcatgaatttgtcgcattgatggt

SEQ ID NO: 85727 - DNA, 25 bp, Saccharomyces pastorianus
gacgtttcgccagcatttggattat

SEQ ID NO: 85728 - DNA, 25 bp, Saccharomyces pastorianus
attgccatggctatttgacgtttat

SEQ ID NO: 85729 - DNA, 25 bp, Saccharomyces pastorianus
cataatttatgcttcgaccgtccag

SEQ ID NO: 85730 - DNA, 25 bp, Saccharomyces pastorianus
aaaggtctacaaagttccggcatca

SEQ ID NO: 85731 - DNA, 25 bp, Saccharomyces pastorianus
gaaaaagatcctatagctcctattg

SEQ ID NO: 85732 - DNA, 25 bp, Saccharomyces pastorianus
aacatattatccagtgggctctcta

SEQ ID NO: 85733 - DNA, 25 bp, Saccharomyces pastorianus
agcacatatcgagcggctttctaag

SEQ ID NO: 85734 - DNA, 25 bp, Saccharomyces pastorianus
gtgattattttacctgactgttctc

SEQ ID NO: 85735 - DNA, 25 bp, Saccharomyces pastorianus
gggctctctatggtgtgtttaaatt

SEQ ID NO: 85736 - DNA, 25 bp, Saccharomyces pastorianus
gcatgtcatctttacgagcagcaca

SEQ ID NO: 85737 - DNA, 25 bp, Saccharomyces pastorianus
acattctatgggttgttttctggca

SEQ ID NO: 85738 - DNA, 25 bp, Saccharomyces pastorianus
cttcgaccgtccagaattggtgtgt

SEQ ID NO: 85739 - DNA, 25 bp, Saccharomyces pastorianus
tttcgaatgatgatggtgacactta

SEQ ID NO: 85740 - DNA, 25 bp, Saccharomyces pastorianus
gagaatactttgattacttagacag

SEQ ID NO: 85741 - DNA, 25 bp, Saccharomyces pastorianus
ggataccgatatcactttattctgt

SEQ ID NO: 85742 - DNA, 25 bp, Saccharomyces pastorianus
gcacaatcccaaccttgtgggaaac

SEQ ID NO: 85743 - DNA, 25 bp, Saccharomyces pastorianus
ggtccgatgcatacagagaatactt

SEQ ID NO: 85744 - DNA, 25 bp, Saccharomyces pastorianus
ttagacttcttcaggtccgatgcat

SEQ ID NO: 85745 - DNA, 25 bp, Saccharomyces pastorianus
tggagacacccattactggaggagt

SEQ ID NO: 85746 - DNA, 25 bp, Saccharomyces pastorianus
tgtgtcatttctggaccaacttcga

SEQ ID NO: 85747 - DNA, 25 bp, Saccharomyces pastorianus
gacagttctggtggattcttctacg

SEQ ID NO: 85748 - DNA, 25 bp, Saccharomyces pastorianus
atatggattcattctttcggtaagt

SEQ ID NO: 85749 - DNA, 25 bp, Saccharomyces pastorianus
gaatatgagcgcacaatcccaacct

SEQ ID NO: 85750 - DNA, 25 bp, Saccharomyces pastorianus
tgctccgtcaaaacaggtgctaaaa

SEQ ID NO: 85751 - DNA, 25 bp, Saccharomyces pastorianus
atagcgcctgctccgtcaaaacagg

SEQ ID NO: 85752 - DNA, 25 bp, Saccharomyces pastorianus
aaccaaactacaaatagcgcctgct

SEQ ID NO: 85753 - DNA, 25 bp, Saccharomyces pastorianus
tacaaatagcgcctgctccgtcaaa

SEQ ID NO: 85754 - DNA, 25 bp, Saccharomyces pastorianus
gctccgtcaaaacaggtgctaaaac

SEQ ID NO: 85755 - DNA, 25 bp, Saccharomyces pastorianus
aaactacaaatagcgcctgctccgt

SEQ ID NO: 85756 - DNA, 25 bp, Saccharomyces pastorianus
agcgcctgctccgtcaaaacaggtg

SEQ ID NO: 85757 - DNA, 25 bp, Saccharomyces pastorianus
aacaggtgctaaaacgtcaacatgt

SEQ ID NO: 85758 - DNA, 25 bp, Saccharomyces pastorianus
aaatagcgcctgctccgtcaaaaca

SEQ ID NO: 85759 - DNA, 25 bp, Saccharomyces pastorianus
gtcaaaacaggtgctaaaacgtcaa

SEQ ID NO: 85760 - DNA, 25 bp, Saccharomyces pastorianus
gcctgctccgtcaaaacaggtgcta

SEQ ID NO: 85761 - DNA, 25 bp, Saccharomyces pastorianus
gatttcacctcttgtcctatcgaac

SEQ ID NO: 85762 - DNA, 25 bp, Saccharomyces pastorianus
aaggacgtcacctggactcctgact

SEQ ID NO: 85763 - DNA, 25 bp, Saccharomyces pastorianus
gtatctgcgaacctagcaaggacgt

SEQ ID NO: 85764 - DNA, 25 bp, Saccharomyces pastorianus
tggacaagtcagaaatccatttctt

SEQ ID NO: 85765 - DNA, 25 bp, Saccharomyces pastorianus
gattccatcatccagatttcacctc

SEQ ID NO: 85766 - DNA, 25 bp, Saccharomyces pastorianus
gactcctgactacttctgtactaga

SEQ ID NO: 85767 - DNA, 25 bp, Saccharomyces pastorianus
aaacaagtgtatctgcgaacctagc

SEQ ID NO: 85768 - DNA, 25 bp, Saccharomyces pastorianus
gctgcctctttgttcttggacaagt

SEQ ID NO: 85769 - DNA, 25 bp, Saccharomyces pastorianus
gaacctagcaaggacgtcacctgga

SEQ ID NO: 85770 - DNA, 25 bp, Saccharomyces pastorianus
cacctcttgtcctatcgaacagaag

SEQ ID NO: 85771 - DNA, 25 bp, Saccharomyces pastorianus
gaaattacaagcttccaccaggaat

SEQ ID NO: 85772 - DNA, 25 bp, Saccharomyces pastorianus
ggtactcaagttctctttcacttaa

SEQ ID NO: 85773 - DNA, 25 bp, Saccharomyces pastorianus
taagatatgccttgtagtcgccacc

SEQ ID NO: 85774 - DNA, 25 bp, Saccharomyces pastorianus
aatagtgctactgtcggctctgtaa

SEQ ID NO: 85775 - DNA, 25 bp, Saccharomyces pastorianus
actgccatttttggttggacgaata

SEQ ID NO: 85776 - DNA, 25 bp, Saccharomyces pastorianus
gcatcgctcgatctcaaacatcata

SEQ ID NO: 85777 - DNA, 25 bp, Saccharomyces pastorianus
gtccaaagatagttctgtgccccta

SEQ ID NO: 85778 - DNA, 25 bp, Saccharomyces pastorianus
atatatcccatatctacctatcagc

SEQ ID NO: 85779 - DNA, 25 bp, Saccharomyces pastorianus
atggtccttgctactgcaatcagta

SEQ ID NO: 85780 - DNA, 25 bp, Saccharomyces pastorianus
gtaattagctacaacgcctactggt

SEQ ID NO: 85781 - DNA, 25 bp, Saccharomyces pastorianus
gcaatcagtacggtgttcggtattt

SEQ ID NO: 85782 - DNA, 25 bp, Saccharomyces pastorianus
ttcctctacttgatcgcggctggtt

SEQ ID NO: 85783 - DNA, 25 bp, Saccharomyces pastorianus
acttctacagaatggtcacagcgtt

SEQ ID NO: 85784 - DNA, 25 bp, Saccharomyces pastorianus
aagctttcatttctgcgttgtttct

SEQ ID NO: 85785 - DNA, 25 bp, Saccharomyces pastorianus
tcgtatttctcttgaatgtccctgt

SEQ ID NO: 85786 - DNA, 25 bp, Saccharomyces pastorianus
atgtccctgttctagcatataacgc

SEQ ID NO: 85787 - DNA, 25 bp, Saccharomyces pastorianus
gggattttaccttctcatattcttt

SEQ ID NO: 85788 - DNA, 25 bp, Saccharomyces pastorianus
atcgctattcgtgacgggtcttata

SEQ ID NO: 85789 - DNA, 25 bp, Saccharomyces pastorianus
gtaccagaggcaattctacaagctt

SEQ ID NO: 85790 - DNA, 25 bp, Saccharomyces pastorianus
gaaaacacatctactggacgccacg

SEQ ID NO: 85791 - DNA, 25 bp, Saccharomyces pastorianus
aattgtttgaattccatttgccaga

SEQ ID NO: 85792 - DNA, 25 bp, Saccharomyces pastorianus
ggacgccacggatattttcagaaaa

SEQ ID NO: 85793 - DNA, 25 bp, Saccharomyces pastorianus
ggaaccggattatcgctattcgtga

SEQ ID NO: 85794 - DNA, 25 bp, Saccharomyces pastorianus
aactgaagcaggtactggctcgaaa

SEQ ID NO: 85795 - DNA, 25 bp, Saccharomyces pastorianus
gatgatatacccattagacagctat

SEQ ID NO: 85796 - DNA, 25 bp, Saccharomyces pastorianus
atgagccaagatagcgaggacgatt

SEQ ID NO: 85797 - DNA, 25 bp, Saccharomyces pastorianus
gatttgacttctactttgctaggca

SEQ ID NO: 85798 - DNA, 25 bp, Saccharomyces pastorianus
atttcgtagacttgatggatccata

SEQ ID NO: 85799 - DNA, 25 bp, Saccharomyces pastorianus
attctggatattgcacatttcgtag

SEQ ID NO: 85800 - DNA, 25 bp, Saccharomyces pastorianus
ggacgattcaatacgggatgactca

SEQ ID NO: 85801 - DNA, 25 bp, Saccharomyces pastorianus
agctatcatcgtctatcacttctgt

SEQ ID NO: 85802 - DNA, 25 bp, Saccharomyces pastorianus
agccggtaaagactggcatgactta

SEQ ID NO: 85803 - DNA, 25 bp, Saccharomyces pastorianus
gcgactctttcaaacgatatcagac

SEQ ID NO: 85804 - DNA, 25 bp, Saccharomyces pastorianus
gaataatgagctctgttaccaactg

SEQ ID NO: 85805 - DNA, 25 bp, Saccharomyces pastorianus
gatgatgactcctcccttaaatata

SEQ ID NO: 85806 - DNA, 25 bp, Saccharomyces pastorianus
gatgtcaatttctatgcaactgtcc

SEQ ID NO: 85807 - DNA, 25 bp, Saccharomyces pastorianus
gggcaaccaattctccaatgctaat

SEQ ID NO: 85808 - DNA, 25 bp, Saccharomyces pastorianus
agcgacctcgttaatctgcagagat

SEQ ID NO: 85809 - DNA, 25 bp, Saccharomyces pastorianus
acctcaatttgggaacgcgatgtca

SEQ ID NO: 85810 - DNA, 25 bp, Saccharomyces pastorianus
tgcagagatctaatgtcccgtatat

SEQ ID NO: 85811 - DNA, 25 bp, Saccharomyces pastorianus
aagaagacggtgctctgtacccaca

SEQ ID NO: 85812 - DNA, 25 bp, Saccharomyces pastorianus
gaatggcagccatagcgacctcgtt

SEQ ID NO: 85813 - DNA, 25 bp, Saccharomyces pastorianus
acaccaatattcaagtccctcatac

SEQ ID NO: 85814 - DNA, 25 bp, Saccharomyces pastorianus
aggcgactctttttacatcagcagc

SEQ ID NO: 85815 - DNA, 25 bp, Saccharomyces pastorianus
gagcaaatggcgcacaacaactatt

SEQ ID NO: 85816 - DNA, 25 bp, Saccharomyces pastorianus
gagtatatccgcagtgacttcaaag

SEQ ID NO: 85817 - DNA, 25 bp, Saccharomyces pastorianus
atctctgtgacttttatttcggcgc

SEQ ID NO: 85818 - DNA, 25 bp, Saccharomyces pastorianus
cgcgctttggcgctctagtaagaga

SEQ ID NO: 85819 - DNA, 25 bp, Saccharomyces pastorianus
atgtggcggacaaacctgatctctg

SEQ ID NO: 85820 - DNA, 25 bp, Saccharomyces pastorianus
gcactgccacaacatcgacgtaaaa

SEQ ID NO: 85821 - DNA, 25 bp, Saccharomyces pastorianus
aataatgacctgtatacccgaccac

SEQ ID NO: 85822 - DNA, 25 bp, Saccharomyces pastorianus
aggagaccgtctacagattctgatc

SEQ ID NO: 85823 - DNA, 25 bp, Saccharomyces pastorianus
aacgctttatcaatccgaactggga

SEQ ID NO: 85824 - DNA, 25 bp, Saccharomyces pastorianus
aaacgtctgctggatctattcaagg

SEQ ID NO: 85825 - DNA, 25 bp, Saccharomyces pastorianus
gtcaagtaccgcatggattgggcca

SEQ ID NO: 85826 - DNA, 25 bp, Saccharomyces pastorianus
gagatccgtaacttattcacacaaa

SEQ ID NO: 85827 - DNA, 25 bp, Saccharomyces pastorianus
ggaaccctcgatattgattgacgtt

SEQ ID NO: 85828 - DNA, 25 bp, Saccharomyces pastorianus
atccgatcattctaacggctcacta

SEQ ID NO: 85829 - DNA, 25 bp, Saccharomyces pastorianus
taccaccatctctccgaagaagaag

SEQ ID NO: 85830 - DNA, 25 bp, Saccharomyces pastorianus
gacagtcagtccaccaaaaattcta

SEQ ID NO: 85831 - DNA, 25 bp, Saccharomyces pastorianus
aaaaggttagtagccgcaccgacag

SEQ ID NO: 85832 - DNA, 25 bp, Saccharomyces pastorianus
aagtttggagcgtgcaaatggtacc

SEQ ID NO: 85833 - DNA, 25 bp, Saccharomyces pastorianus
aagctgatacaaacgactacctaga

SEQ ID NO: 85834 - DNA, 25 bp, Saccharomyces pastorianus
ctaatactgtaactaccaccatctc

SEQ ID NO: 85835 - DNA, 25 bp, Saccharomyces pastorianus
gtgctgccaccaaggacggtttttt

SEQ ID NO: 85836 - DNA, 25 bp, Saccharomyces pastorianus
ggaggaacagcgtgctgccaccaag

SEQ ID NO: 85837 - DNA, 25 bp, Saccharomyces pastorianus
gaagaagtcgcatcctatgaaaggt

SEQ ID NO: 85838 - DNA, 25 bp, Saccharomyces pastorianus
tgataactttcactcttctcaccag

SEQ ID NO: 85839 - DNA, 25 bp, Saccharomyces pastorianus
gaagaatctttcagtgtttgttaca

SEQ ID NO: 85840 - DNA, 25 bp, Saccharomyces pastorianus
gtattcaggtcaatcagcagttaag

SEQ ID NO: 85841 - DNA, 25 bp, Saccharomyces pastorianus
gaaagctgttcatgactgttgtctg

SEQ ID NO: 85842 - DNA, 25 bp, Saccharomyces pastorianus
gtcgaacctgataaacttccgaagt

SEQ ID NO: 85843 - DNA, 25 bp, Saccharomyces pastorianus
gatgtgcttaagacatctccccttc

SEQ ID NO: 85844 - DNA, 25 bp, Saccharomyces pastorianus
aagattcatttacggcagatgccaa

SEQ ID NO: 85845 - DNA, 25 bp, Saccharomyces pastorianus
gacgcatctccaccaaggataacga

SEQ ID NO: 85846 - DNA, 25 bp, Saccharomyces pastorianus
tccattggctaagacgtccgtatta

SEQ ID NO: 85847 - DNA, 25 bp, Saccharomyces pastorianus
gttgtctgcagactatccaagattc

SEQ ID NO: 85848 - DNA, 25 bp, Saccharomyces pastorianus
aaagacctttcaaggcgacgcatct

SEQ ID NO: 85849 - DNA, 25 bp, Saccharomyces pastorianus
tggtttggcgagtgacatttctgtc

SEQ ID NO: 85850 - DNA, 25 bp, Saccharomyces pastorianus
gaagattcctctagtggcacttatg

SEQ ID NO: 85851 - DNA, 25 bp, Saccharomyces pastorianus
gaactttttagcaggagattgtctc

SEQ ID NO: 85852 - DNA, 25 bp, Saccharomyces pastorianus
attaagatcatctcctcataccgtt

SEQ ID NO: 85853 - DNA, 25 bp, Saccharomyces pastorianus
atgtcacagtcttttgcaatggtta

SEQ ID NO: 85854 - DNA, 25 bp, Saccharomyces pastorianus
aaataattcgtttgcgccaagtccg

SEQ ID NO: 85855 - DNA, 25 bp, Saccharomyces pastorianus
gataaaatttcagcccattggttct

SEQ ID NO: 85856 - DNA, 25 bp, Saccharomyces pastorianus
gacatttctgtcgaccagcaagttg

SEQ ID NO: 85857 - DNA, 25 bp, Saccharomyces pastorianus
gcgccaagtccgcagcaaaatattg

SEQ ID NO: 85858 - DNA, 25 bp, Saccharomyces pastorianus
agattgtctcagcttggtttggcga

SEQ ID NO: 85859 - DNA, 25 bp, Saccharomyces pastorianus
cgaaagctccatcatatccacaaat

SEQ ID NO: 85860 - DNA, 25 bp, Saccharomyces pastorianus
tcgattgctgttttgagtgccatga

SEQ ID NO: 85861 - DNA, 25 bp, Saccharomyces pastorianus
gacttgcagaacagattcggtgata

SEQ ID NO: 85862 - DNA, 25 bp, Saccharomyces pastorianus
acggtgatttatcagttctaccaac

SEQ ID NO: 85863 - DNA, 25 bp, Saccharomyces pastorianus
atcggtgcaccaatggctggtgtta

SEQ ID NO: 85864 - DNA, 25 bp, Saccharomyces pastorianus
gatcagagttgcagacaagtcacaa

SEQ ID NO: 85865 - DNA, 25 bp, Saccharomyces pastorianus
aaatttcctagcaccagcagaacct

SEQ ID NO: 85866 - DNA, 25 bp, Saccharomyces pastorianus
gaatgcgatgttgcttcttacaata

SEQ ID NO: 85867 - DNA, 25 bp, Saccharomyces pastorianus
atccaagggtctatgaagatttcca

SEQ ID NO: 85868 - DNA, 25 bp, Saccharomyces pastorianus
gcatcagatttgttggttgtcctag

SEQ ID NO: 85869 - DNA, 25 bp, Saccharomyces pastorianus
tgctaaaccaaaggctgatgtccac

SEQ ID NO: 85870 - DNA, 25 bp, Saccharomyces pastorianus
tgatgtccacgatactcaccaaatc

SEQ ID NO: 85871 - DNA, 25 bp, Saccharomyces pastorianus
ggttccttcatgaatactgtccagt

SEQ ID NO: 85872 - DNA, 25 bp, Saccharomyces pastorianus
gaatatcggccttccatacaagagt

SEQ ID NO: 85873 - DNA, 25 bp, Saccharomyces pastorianus
gcacgggcactaacaaggtcatcaa

SEQ ID NO: 85874 - DNA, 25 bp, Saccharomyces pastorianus
aaatggagctccgacaaggacccca

SEQ ID NO: 85875 - DNA, 25 bp, Saccharomyces pastorianus
gatgccggcgttttaacaccatggt

SEQ ID NO: 85876 - DNA, 25 bp, Saccharomyces pastorianus
atatccacgggttatttttgtctcg

SEQ ID NO: 85877 - DNA, 25 bp, Saccharomyces pastorianus
gtgatattccagcacctcttaggtt

SEQ ID NO: 85878 - DNA, 25 bp, Saccharomyces pastorianus
tggcagccgcagtcttgggaagtta

SEQ ID NO: 85879 - DNA, 25 bp, Saccharomyces pastorianus
cgtggtgaagcaattccccaaggat

SEQ ID NO: 85880 - DNA, 25 bp, Saccharomyces pastorianus
aaggaccccatgattcgtgacaata

SEQ ID NO: 85881 - DNA, 25 bp, Saccharomyces pastorianus
atacaagagttgcagaccccgtgct

SEQ ID NO: 85882 - DNA, 25 bp, Saccharomyces pastorianus
ggtaccgatatttccattgttacgt

SEQ ID NO: 85883 - DNA, 25 bp, Saccharomyces pastorianus
agaagatttcgctttccctgatact

SEQ ID NO: 85884 - DNA, 25 bp, Saccharomyces pastorianus
ggtgctgaaattgtcgcccaagtta

SEQ ID NO: 85885 - DNA, 25 bp, Saccharomyces pastorianus
gaagaagctttatcccctgatttca

SEQ ID NO: 85886 - DNA, 25 bp, Saccharomyces pastorianus
gctcaacattcacaggacttttctc

SEQ ID NO: 85887 - DNA, 25 bp, Saccharomyces pastorianus
gtcccttattctgctgaagatgcta

SEQ ID NO: 85888 - DNA, 25 bp, Saccharomyces pastorianus
agagttactggtgccgatgttccaa

SEQ ID NO: 85889 - DNA, 25 bp, Saccharomyces pastorianus
cgttcagttttctttggaagccgct

SEQ ID NO: 85890 - DNA, 25 bp, Saccharomyces pastorianus
attactgttgaatccactttcccat

SEQ ID NO: 85891 - DNA, 25 bp, Saccharomyces pastorianus
gatgttccaacaccttacgctaaag

SEQ ID NO: 85892 - DNA, 25 bp, Saccharomyces pastorianus
atcaacttgcgttctattagacctt

SEQ ID NO: 85893 - DNA, 25 bp, Saccharomyces pastorianus
gacgaaaaagaatcagcttaggcat

SEQ ID NO: 85894 - DNA, 25 bp, Saccharomyces pastorianus
ccacttcgaagtctcggaaaacaga

SEQ ID NO: 85895 - DNA, 25 bp, Saccharomyces pastorianus
ttctcccacttcgaagtctcggaaa

SEQ ID NO: 85896 - DNA, 25 bp, Saccharomyces pastorianus
acagaccccggaaacagccgcgacg

SEQ ID NO: 85897 - DNA, 25 bp, Saccharomyces pastorianus
aaacagccgcgacgaaaaagaatca

SEQ ID NO: 85898 - DNA, 25 bp, Saccharomyces pastorianus
tcccacttcgaagtctcggaaaaca

SEQ ID NO: 85899 - DNA, 25 bp, Saccharomyces pastorianus
acgaaaaagaatcagcttaggcatg

SEQ ID NO: 85900 - DNA, 25 bp, Saccharomyces pastorianus
tcgaagtctcggaaaacagaccccg

SEQ ID NO: 85901 - DNA, 25 bp, Saccharomyces pastorianus
cgcgacgaaaaagaatcagcttagg

SEQ ID NO: 85902 - DNA, 25 bp, Saccharomyces pastorianus
gccgcgacgaaaaagaatcagctta

SEQ ID NO: 85903 - DNA, 25 bp, Saccharomyces pastorianus
gcgacgaaaaagaatcagcttaggc

SEQ ID NO: 85904 - DNA, 25 bp, Saccharomyces pastorianus
taaagaagcaccttgcctctttcaa

SEQ ID NO: 85905 - DNA, 25 bp, Saccharomyces pastorianus
gtgaccaaggttatttcgaccctga

SEQ ID NO: 85906 - DNA, 25 bp, Saccharomyces pastorianus
gagtcaccgtcgtcattctagatga

SEQ ID NO: 85907 - DNA, 25 bp, Saccharomyces pastorianus
gaaaacgtcactttgggatatgcta

SEQ ID NO: 85908 - DNA, 25 bp, Saccharomyces pastorianus
aagatttcacccattgagctcgacg

SEQ ID NO: 85909 - DNA, 25 bp, Saccharomyces pastorianus
aaatgacctcaaacaatctgcctcc

SEQ ID NO: 85910 - DNA, 25 bp, Saccharomyces pastorianus
gacggcattatgctatcgcatccaa

SEQ ID NO: 85911 - DNA, 25 bp, Saccharomyces pastorianus
ggtttttggtccttacaggcagaat

SEQ ID NO: 85912 - DNA, 25 bp, Saccharomyces pastorianus
ggccaagtagttcaagccgccattg

SEQ ID NO: 85913 - DNA, 25 bp, Saccharomyces pastorianus
aaagtcggcgaagtttccatcagag

SEQ ID NO: 85914 - DNA, 25 bp, Saccharomyces pastorianus
aaagcctggtactgtgggccagcca

SEQ ID NO: 85915 - DNA, 25 bp, Saccharomyces pastorianus
ggccctgtgatgcatcgcaggtatt

SEQ ID NO: 85916 - DNA, 25 bp, Saccharomyces pastorianus
atcaagccgtacattattttcccca

SEQ ID NO: 85917 - DNA, 25 bp, Saccharomyces pastorianus
gcaagaccctgctatggttactaga

SEQ ID NO: 85918 - DNA, 25 bp, Saccharomyces pastorianus
agagtttgtcaccagtcccttaaag

SEQ ID NO: 85919 - DNA, 25 bp, Saccharomyces pastorianus
accgtagaggctgcgcgggtaatcc

SEQ ID NO: 85920 - DNA, 25 bp, Saccharomyces pastorianus
gaatcatgtcccctccagcaaagga

SEQ ID NO: 85921 - DNA, 25 bp, Saccharomyces pastorianus
taccaggaaggtcacgtgccgtact

SEQ ID NO: 85922 - DNA, 25 bp, Saccharomyces pastorianus
gagtgctttaccatagtcgcaggtt

SEQ ID NO: 85923 - DNA, 25 bp, Saccharomyces pastorianus
gcctttatacttcggcaaacctcag

SEQ ID NO: 85924 - DNA, 25 bp, Saccharomyces pastorianus
tgccgtacttttacacgtgaccgta

SEQ ID NO: 85925 - DNA, 25 bp, Saccharomyces pastorianus
gtcataccatacgacttagctgagg

SEQ ID NO: 85926 - DNA, 25 bp, Saccharomyces pastorianus
cacatgggtgggattacccgcgcag

SEQ ID NO: 85927 - DNA, 25 bp, Saccharomyces pastorianus
gcagcctctacggtcacgtgtaaaa

SEQ ID NO: 85928 - DNA, 25 bp, Saccharomyces pastorianus
cagcctctacggtcacgtgtaaaag

SEQ ID NO: 85929 - DNA, 25 bp, Saccharomyces pastorianus
ggattacccgcgcagcctctacggt

SEQ ID NO: 85930 - DNA, 25 bp, Saccharomyces pastorianus
actggcagcgtgaatggcacggcca

SEQ ID NO: 85931 - DNA, 25 bp, Saccharomyces pastorianus
atgggtgggattacccgcgcagcct

SEQ ID NO: 85932 - DNA, 25 bp, Saccharomyces pastorianus
cgtgtaaaagtacggcacgtgacct

SEQ ID NO: 85933 - DNA, 25 bp, Saccharomyces pastorianus
gcctctacggtcacgtgtaaaagta

SEQ ID NO: 85934 - DNA, 25 bp, Saccharomyces pastorianus
gcacggccacatgggtgggattacc

SEQ ID NO: 85935 - DNA, 25 bp, Saccharomyces pastorianus
tacggtcacgtgtaaaagtacggca

SEQ ID NO: 85936 - DNA, 25 bp, Saccharomyces pastorianus
ggcagcgtgaatggcacggccacat

SEQ ID NO: 85937 - DNA, 25 bp, Saccharomyces pastorianus
attgttactgttgaccggagccata

SEQ ID NO: 85938 - DNA, 25 bp, Saccharomyces pastorianus
atattctccatttcagcactatacc

SEQ ID NO: 85939 - DNA, 25 bp, Saccharomyces pastorianus
tcccctcatttatccactttttata

SEQ ID NO: 85940 - DNA, 25 bp, Saccharomyces pastorianus
gtttctctgcattattttcctcttt

SEQ ID NO: 85941 - DNA, 25 bp, Saccharomyces pastorianus
gttgtgctactttctcggcaacatc

SEQ ID NO: 85942 - DNA, 25 bp, Saccharomyces pastorianus
gtgcggccgccgaaaatacatcaga

SEQ ID NO: 85943 - DNA, 25 bp, Saccharomyces pastorianus
ttatcatcattcttgtctgggctca

SEQ ID NO: 85944 - DNA, 25 bp, Saccharomyces pastorianus
gaaacacgttgttcacttcacctga

SEQ ID NO: 85945 - DNA, 25 bp, Saccharomyces pastorianus
gatccataccaacacttaccaagaa

SEQ ID NO: 85946 - DNA, 25 bp, Saccharomyces pastorianus
ctcttcctcttagttccattcaaat

SEQ ID NO: 85947 - DNA, 25 bp, Saccharomyces pastorianus
atgcagtcgtcgctatcattgttac

SEQ ID NO: 85948 - DNA, 25 bp, Saccharomyces pastorianus
gtcccaattataactgctctgcagc

SEQ ID NO: 85949 - DNA, 25 bp, Saccharomyces pastorianus
gaaagacttctgctaaacgttaatt

SEQ ID NO: 85950 - DNA, 25 bp, Saccharomyces pastorianus
gttgggtcattctgctaacattcat

SEQ ID NO: 85951 - DNA, 25 bp, Saccharomyces pastorianus
gttagctttggtctaattcctgaat

SEQ ID NO: 85952 - DNA, 25 bp, Saccharomyces pastorianus
aagttgctcaatttgctctcaagga

SEQ ID NO: 85953 - DNA, 25 bp, Saccharomyces pastorianus
gcccgggttctaacatagcatacgt

SEQ ID NO: 85954 - DNA, 25 bp, Saccharomyces pastorianus
tctttggcttcccaagtggacgtaa

SEQ ID NO: 85955 - DNA, 25 bp, Saccharomyces pastorianus
gaaacagagcactctttggcttccc

SEQ ID NO: 85956 - DNA, 25 bp, Saccharomyces pastorianus
gtgtgtgctttagacttgaccaccc

SEQ ID NO: 85957 - DNA, 25 bp, Saccharomyces pastorianus
cgttaattatgattgcccgggttct

SEQ ID NO: 85958 - DNA, 25 bp, Saccharomyces pastorianus
gaagctactgtcgactcgttacagg

SEQ ID NO: 85959 - DNA, 25 bp, Saccharomyces pastorianus
ctggacgaccctagtcaagttttcg

SEQ ID NO: 85960 - DNA, 25 bp, Saccharomyces pastorianus
gaagccgtttgtagcgttttgcaat

SEQ ID NO: 85961 - DNA, 25 bp, Saccharomyces pastorianus
gaaattgactacacgtctgaagagc

SEQ ID NO: 85962 - DNA, 25 bp, Saccharomyces pastorianus
actgcgggtctgttaaccacttgaa

SEQ ID NO: 85963 - DNA, 25 bp, Saccharomyces pastorianus
aactgtggatgttctcatggatcat

SEQ ID NO: 85964 - DNA, 25 bp, Saccharomyces pastorianus
acgttttgcgactggacgaccctag

SEQ ID NO: 85965 - DNA, 25 bp, Saccharomyces pastorianus
atgtccgaaatgtgatacgttttgc

SEQ ID NO: 85966 - DNA, 25 bp, Saccharomyces pastorianus
atacctcgaggtgggaaatgtccga

SEQ ID NO: 85967 - DNA, 25 bp, Saccharomyces pastorianus
aagatcgtgtcgtaaagcataaagc

SEQ ID NO: 85968 - DNA, 25 bp, Saccharomyces pastorianus
aatgtcttcacaggtactttctaga

SEQ ID NO: 85969 - DNA, 25 bp, Saccharomyces pastorianus
ggatgaacttgatagtcgacgtttt

SEQ ID NO: 85970 - DNA, 25 bp, Saccharomyces pastorianus
agatcaccattcttaacctatcgct

SEQ ID NO: 85971 - DNA, 25 bp, Saccharomyces pastorianus
agaatatttctgcaccattggataa

SEQ ID NO: 85972 - DNA, 25 bp, Saccharomyces pastorianus
gataggcattcaccacaatactttg

SEQ ID NO: 85973 - DNA, 25 bp, Saccharomyces pastorianus
ttatagcccctgataccgagggacg

SEQ ID NO: 85974 - DNA, 25 bp, Saccharomyces pastorianus
gggacgagccgttggagatctttat

SEQ ID NO: 85975 - DNA, 25 bp, Saccharomyces pastorianus
gaattcgcatctttacactctttta

SEQ ID NO: 85976 - DNA, 25 bp, Saccharomyces pastorianus
gtcacggagcctggccaatcagaaa

SEQ ID NO: 85977 - DNA, 25 bp, Saccharomyces pastorianus
gaaggcggtcacattattactatga

SEQ ID NO: 85978 - DNA, 25 bp, Saccharomyces pastorianus
gtctattagtcaaacctgtcacgga

SEQ ID NO: 85979 - DNA, 25 bp, Saccharomyces pastorianus
tttcccacccggtatattctatgaa

SEQ ID NO: 85980 - DNA, 25 bp, Saccharomyces pastorianus
agttcattgccgactagatcgtcat

SEQ ID NO: 85981 - DNA, 25 bp, Saccharomyces pastorianus
cagatcatttctggcgggctacgac

SEQ ID NO: 85982 - DNA, 25 bp, Saccharomyces pastorianus
acaaggatgggttcttggcccggca

SEQ ID NO: 85983 - DNA, 25 bp, Saccharomyces pastorianus
aaatctcagctggactgggctagtt

SEQ ID NO: 85984 - DNA, 25 bp, Saccharomyces pastorianus
gttaactgttgaatcgatccctgca

SEQ ID NO: 85985 - DNA, 25 bp, Saccharomyces pastorianus
aaccgtcttttgagcagttcaggga

SEQ ID NO: 85986 - DNA, 25 bp, Saccharomyces pastorianus
caacggccgcgcaacaggaggacaa

SEQ ID NO: 85987 - DNA, 25 bp, Saccharomyces pastorianus
gttatgtagaccgtgctggacttaa

SEQ ID NO: 85988 - DNA, 25 bp, Saccharomyces pastorianus
ctgctgctcctgttcaactggaaaa

SEQ ID NO: 85989 - DNA, 25 bp, Saccharomyces pastorianus
ttcagggaaagtcggctctgttctc

SEQ ID NO: 85990 - DNA, 25 bp, Saccharomyces pastorianus
gcaacacttgcggtggccactgaaa

SEQ ID NO: 85991 - DNA, 25 bp, Saccharomyces pastorianus
gttctcgacggttccaaggaggcta

SEQ ID NO: 85992 - DNA, 25 bp, Saccharomyces pastorianus
ttccttttgagcgtgttgggagaaa

SEQ ID NO: 85993 - DNA, 25 bp, Saccharomyces pastorianus
aatcgtggtcgttgtcagagtggct

SEQ ID NO: 85994 - DNA, 25 bp, Saccharomyces pastorianus
gaagcgtgtttgactaagcacagca

SEQ ID NO: 85995 - DNA, 25 bp, Saccharomyces pastorianus
atccttcagggccacgcgtttgatt

SEQ ID NO: 85996 - DNA, 25 bp, Saccharomyces pastorianus
tgatggttttgtagtctctgtggac

SEQ ID NO: 85997 - DNA, 25 bp, Saccharomyces pastorianus
agttgttcctcgctggtgtcttcac

SEQ ID NO: 85998 - DNA, 25 bp, Saccharomyces pastorianus
attctagcagaggtttcggatttta

SEQ ID NO: 85999 - DNA, 25 bp, Saccharomyces pastorianus
gcccttgtgtcctactatcagtgaa

SEQ ID NO: 86000 - DNA, 25 bp, Saccharomyces pastorianus
agagtggctgtctgcatccttcagg

SEQ ID NO: 86001 - DNA, 25 bp, Saccharomyces pastorianus
attctagatatagtggcgcccttgt

SEQ ID NO: 86002 - DNA, 25 bp, Saccharomyces pastorianus
gtttgatttctgcttccagttgttc

SEQ ID NO: 86003 - DNA, 25 bp, Saccharomyces pastorianus
ttgagtatggccacaccgcagtata

SEQ ID NO: 86004 - DNA, 25 bp, Saccharomyces pastorianus
gctatccatattgctactttctaca

SEQ ID NO: 86005 - DNA, 25 bp, Saccharomyces pastorianus
gtatactactgctagcgttgcaaac

SEQ ID NO: 86006 - DNA, 25 bp, Saccharomyces pastorianus
gaaaccaccaatatcatccaagcga

SEQ ID NO: 86007 - DNA, 25 bp, Saccharomyces pastorianus
taatagaccatagccaaccgaacac

SEQ ID NO: 86008 - DNA, 25 bp, Saccharomyces pastorianus
atgtgacagtcttagacggccctgt

SEQ ID NO: 86009 - DNA, 25 bp, Saccharomyces pastorianus
aaccgaacaccattttccatcaaag

SEQ ID NO: 86010 - DNA, 25 bp, Saccharomyces pastorianus
ccgaacttcgttatccctaatgtga

SEQ ID NO: 86011 - DNA, 25 bp, Saccharomyces pastorianus
aactttcagatggaatctccgcaga

SEQ ID NO: 86012 - DNA, 25 bp, Saccharomyces pastorianus
ggcacccggcaaccatttattaatg

SEQ ID NO: 86013 - DNA, 25 bp, Saccharomyces pastorianus
aggtccatatactatcagccaactc

SEQ ID NO: 86014 - DNA, 25 bp, Saccharomyces pastorianus
ctttcacctttacagcaagaagtat

SEQ ID NO: 86015 - DNA, 25 bp, Saccharomyces pastorianus
tattcgcaacacaggcaacagcatt

SEQ ID NO: 86016 - DNA, 25 bp, Saccharomyces pastorianus
gattggtttagttgggacactgcta

SEQ ID NO: 86017 - DNA, 25 bp, Saccharomyces pastorianus
tcgccagatgagatactacaggaga

SEQ ID NO: 86018 - DNA, 25 bp, Saccharomyces pastorianus
agaactaaactattcgcaacacagg

SEQ ID NO: 86019 - DNA, 25 bp, Saccharomyces pastorianus
gcgtgtactcgcttatcttgcaaag

SEQ ID NO: 86020 - DNA, 25 bp, Saccharomyces pastorianus
gatctaaaagctctggatgaaacta

SEQ ID NO: 86021 - DNA, 25 bp, Saccharomyces pastorianus
atacaaacagctttctttagatcta

SEQ ID NO: 86022 - DNA, 25 bp, Saccharomyces pastorianus
caggcaacagcattcacagcaagaa

SEQ ID NO: 86023 - DNA, 25 bp, Saccharomyces pastorianus
tcacagcaagaaactgtatcgccag

SEQ ID NO: 86024 - DNA, 25 bp, Saccharomyces pastorianus
gaacacaatctttcacctttacagc

SEQ ID NO: 86025 - DNA, 25 bp, Saccharomyces pastorianus
gtcaacacagtcgttaagacccgtt

SEQ ID NO: 86026 - DNA, 25 bp, Saccharomyces pastorianus
cgagtaatactttgccgaggacgag

SEQ ID NO: 86027 - DNA, 25 bp, Saccharomyces pastorianus
gatagtttagtcacagcgatgcaaa

SEQ ID NO: 86028 - DNA, 25 bp, Saccharomyces pastorianus
ttacgtcaattcgtgatgccttctc

SEQ ID NO: 86029 - DNA, 25 bp, Saccharomyces pastorianus
gaattatcaccttgtcgttccaaag

SEQ ID NO: 86030 - DNA, 25 bp, Saccharomyces pastorianus
agggcttacctccatgcatgttaat

SEQ ID NO: 86031 - DNA, 25 bp, Saccharomyces pastorianus
tgccgaacctgacctttcaaatggg

SEQ ID NO: 86032 - DNA, 25 bp, Saccharomyces pastorianus
taggtttcaatgatcttcccagcac

SEQ ID NO: 86033 - DNA, 25 bp, Saccharomyces pastorianus
gatttaattttttcaaccctgccag

SEQ ID NO: 86034 - DNA, 25 bp, Saccharomyces pastorianus
gccttctcggcatcgactaatattt

SEQ ID NO: 86035 - DNA, 25 bp, Saccharomyces pastorianus
tgaacagccgacactgatcccaatt

SEQ ID NO: 86036 - DNA, 25 bp, Saccharomyces pastorianus
gtttcgacgcaattttgcttgcatt

SEQ ID NO: 86037 - DNA, 25 bp, Saccharomyces pastorianus
catgtttgcattccgtaaggtaaaa

SEQ ID NO: 86038 - DNA, 25 bp, Saccharomyces pastorianus
cttgcattatgcttttgagaccgaa

SEQ ID NO: 86039 - DNA, 25 bp, Saccharomyces pastorianus
cttcccagactgtagatttccgtgt

SEQ ID NO: 86040 - DNA, 25 bp, Saccharomyces pastorianus
atgttgtgccattcgaaaccttaag

SEQ ID NO: 86041 - DNA, 25 bp, Saccharomyces pastorianus
atgagttcacatcgccttatggtca

SEQ ID NO: 86042 - DNA, 25 bp, Saccharomyces pastorianus
ggagagctttactgaatgtcgccaa

SEQ ID NO: 86043 - DNA, 25 bp, Saccharomyces pastorianus
taggtgttgcagtagagcccttccc

SEQ ID NO: 86044 - DNA, 25 bp, Saccharomyces pastorianus
gaatgtcgccaaatcactcaaaatt

SEQ ID NO: 86045 - DNA, 25 bp, Saccharomyces pastorianus
gatttccgtgtgatatcgtttcgac

SEQ ID NO: 86046 - DNA, 25 bp, Saccharomyces pastorianus
aagcggcatcatatttctataccat

SEQ ID NO: 86047 - DNA, 25 bp, Saccharomyces pastorianus
aacgatgagcctaaactatacttat

SEQ ID NO: 86048 - DNA, 25 bp, Saccharomyces pastorianus
gttcggcggcaaaggactggaaaat

SEQ ID NO: 86049 - DNA, 25 bp, Saccharomyces pastorianus
aaagcttcaaactctctgcaagcaa

SEQ ID NO: 86050 - DNA, 25 bp, Saccharomyces pastorianus
gtcgatcatcttttacgccaaggtt

SEQ ID NO: 86051 - DNA, 25 bp, Saccharomyces pastorianus
atgacagtgagcctgagtcttctgc

SEQ ID NO: 86052 - DNA, 25 bp, Saccharomyces pastorianus
ttctgcgcttattccgagactcaat

SEQ ID NO: 86053 - DNA, 25 bp, Saccharomyces pastorianus
gtctacagacgggtcgatcatcttt

SEQ ID NO: 86054 - DNA, 25 bp, Saccharomyces pastorianus
tgagtgccaagtttgaatccggtat

SEQ ID NO: 86055 - DNA, 25 bp, Saccharomyces pastorianus
ctatacttattgatcgaaggccaag

SEQ ID NO: 86056 - DNA, 25 bp, Saccharomyces pastorianus
atattaatgatttaccccagattgt

SEQ ID NO: 86057 - DNA, 25 bp, Saccharomyces pastorianus
caatccacacgaagggcatgacagt

SEQ ID NO: 86058 - DNA, 25 bp, Saccharomyces pastorianus
tatccagcattgcaagcagcgactg

SEQ ID NO: 86059 - DNA, 25 bp, Saccharomyces pastorianus
gattgggcggccttaagagatgcta

SEQ ID NO: 86060 - DNA, 25 bp, Saccharomyces pastorianus
atggacttctactcttatccagcat

SEQ ID NO: 86061 - DNA, 25 bp, Saccharomyces pastorianus
gatgaatttgctgcggaggctgctt

SEQ ID NO: 86062 - DNA, 25 bp, Saccharomyces pastorianus
ctatgggatctgtcgatgatgcttc

SEQ ID NO: 86063 - DNA, 25 bp, Saccharomyces pastorianus
tgcttcttcttccataccagttgac

SEQ ID NO: 86064 - DNA, 25 bp, Saccharomyces pastorianus
gactgcttctggtgcatttgatgaa

SEQ ID NO: 86065 - DNA, 25 bp, Saccharomyces pastorianus
gatgctactgtaacatggacccaaa

SEQ ID NO: 86066 - DNA, 25 bp, Saccharomyces pastorianus
ttcgccatccttaactccaatggat

SEQ ID NO: 86067 - DNA, 25 bp, Saccharomyces pastorianus
tccagcaccagagcatttgttcaac

SEQ ID NO: 86068 - DNA, 25 bp, Saccharomyces pastorianus
gtgattccagacaactagccagatt

SEQ ID NO: 86069 - DNA, 25 bp, Saccharomyces pastorianus
gaattcatacgcttccttgggaaaa

SEQ ID NO: 86070 - DNA, 25 bp, Saccharomyces pastorianus
gtcggagttacatgtcttggtcacg

SEQ ID NO: 86071 - DNA, 25 bp, Saccharomyces pastorianus
gtgtggtttctccagcaaaagctat

SEQ ID NO: 86072 - DNA, 25 bp, Saccharomyces pastorianus
aagataccacactttcatgttccca

SEQ ID NO: 86073 - DNA, 25 bp, Saccharomyces pastorianus
gaatgccgacttattcgaggatccc

SEQ ID NO: 86074 - DNA, 25 bp, Saccharomyces pastorianus
attttcgatgtatccgctggtcaac

SEQ ID NO: 86075 - DNA, 25 bp, Saccharomyces pastorianus
ggaactcgttgaccacggaattcat

SEQ ID NO: 86076 - DNA, 25 bp, Saccharomyces pastorianus
atatggcctcgtgcctgttcaaaga

SEQ ID NO: 86077 - DNA, 25 bp, Saccharomyces pastorianus
gacgacccggacatcaatatggcct

SEQ ID NO: 86078 - DNA, 25 bp, Saccharomyces pastorianus
gaggatccctatcaggacgagctta

SEQ ID NO: 86079 - DNA, 25 bp, Saccharomyces pastorianus
agagtgcatcgctcgttggagttgt

SEQ ID NO: 86080 - DNA, 25 bp, Saccharomyces pastorianus
aatgtcgttgtcactctagcagcat

SEQ ID NO: 86081 - DNA, 25 bp, Saccharomyces pastorianus
atgggcggctacgtatttgcgatct

SEQ ID NO: 86082 - DNA, 25 bp, Saccharomyces pastorianus
atcgctgccatgtttgctacatatg

SEQ ID NO: 86083 - DNA, 25 bp, Saccharomyces pastorianus
tgccgctacagctcaaagttttggt

SEQ ID NO: 86084 - DNA, 25 bp, Saccharomyces pastorianus
gccacttttgtctatattgccgcat

SEQ ID NO: 86085 - DNA, 25 bp, Saccharomyces pastorianus
atggcaatatgttaccgatccctca

SEQ ID NO: 86086 - DNA, 25 bp, Saccharomyces pastorianus
agattctaccggactactcgattca

SEQ ID NO: 86087 - DNA, 25 bp, Saccharomyces pastorianus
ttgcggcatcaactctattatcttc

SEQ ID NO: 86088 - DNA, 25 bp, Saccharomyces pastorianus
gagcgtatcctttttactggtcacg

SEQ ID NO: 86089 - DNA, 25 bp, Saccharomyces pastorianus
tattgcttgcctcgactacggtgat

SEQ ID NO: 86090 - DNA, 25 bp, Saccharomyces pastorianus
atccccttcttgatcattggtgagc

SEQ ID NO: 86091 - DNA, 25 bp, Saccharomyces pastorianus
aatgtgtccggatcgcattggtgca

SEQ ID NO: 86092 - DNA, 25 bp, Saccharomyces pastorianus
atatcctggcgtttttgaacgtggt

SEQ ID NO: 86093 - DNA, 25 bp, Saccharomyces pastorianus
tgaccttgtcgtgcagcgccaaaaa

SEQ ID NO: 86094 - DNA, 25 bp, Saccharomyces pastorianus
gggttaaccgcgataaatgtgtccg

SEQ ID NO: 86095 - DNA, 25 bp, Saccharomyces pastorianus
gtaatgctctgatcaagccatacaa

SEQ ID NO: 86096 - DNA, 25 bp, Saccharomyces pastorianus
atgtcacctcattggaagctagata

SEQ ID NO: 86097 - DNA, 25 bp, Saccharomyces pastorianus
ttggtgcacgatatcgccgaatctt

SEQ ID NO: 86098 - DNA, 25 bp, Saccharomyces pastorianus
catgctgatcaaggattcgcgggtt

SEQ ID NO: 86099 - DNA, 25 bp, Saccharomyces pastorianus
gcgatattactccagttgaccctat

SEQ ID NO: 86100 - DNA, 25 bp, Saccharomyces pastorianus
gaagaaccggttatcttgacctcgg

SEQ ID NO: 86101 - DNA, 25 bp, Saccharomyces pastorianus
taaaccccatccaaactatatcctg

SEQ ID NO: 86102 - DNA, 25 bp, Saccharomyces pastorianus
aagagactcccataggttttccgct

SEQ ID NO: 86103 - DNA, 25 bp, Saccharomyces pastorianus
gttactatactgtctccatttgatt

SEQ ID NO: 86104 - DNA, 25 bp, Saccharomyces pastorianus
gttttccgctgttttgattatccca

SEQ ID NO: 86105 - DNA, 25 bp, Saccharomyces pastorianus
gtcctcagctattcaaattggtccc

SEQ ID NO: 86106 - DNA, 25 bp, Saccharomyces pastorianus
gaacgatttgctgtacttctcgatg

SEQ ID NO: 86107 - DNA, 25 bp, Saccharomyces pastorianus
aatggtattcgcagtcgttggtata

SEQ ID NO: 86108 - DNA, 25 bp, Saccharomyces pastorianus
gaagacacgctataggcgctatcat

SEQ ID NO: 86109 - DNA, 25 bp, Saccharomyces pastorianus
gacattagtatggtttggccctatg

SEQ ID NO: 86110 - DNA, 25 bp, Saccharomyces pastorianus
ggaaatggaatcgttggcccgccac

SEQ ID NO: 86111 - DNA, 25 bp, Saccharomyces pastorianus
gatgcttttgctattcattcctcaa

SEQ ID NO: 86112 - DNA, 25 bp, Saccharomyces pastorianus
catttttgggtgtatccttggcgct

SEQ ID NO: 86113 - DNA, 25 bp, Saccharomyces pastorianus
aagttcttagttgattccaatggta

SEQ ID NO: 86114 - DNA, 25 bp, Saccharomyces pastorianus
cacgccgcagtataaagaattggaa

SEQ ID NO: 86115 - DNA, 25 bp, Saccharomyces pastorianus
agttctcatagttaatgttgcctcc

SEQ ID NO: 86116 - DNA, 25 bp, Saccharomyces pastorianus
ctccttaacaaaaccatcgtccttg

SEQ ID NO: 86117 - DNA, 25 bp, Saccharomyces pastorianus
gaattatggcgttacattcccaatt

SEQ ID NO: 86118 - DNA, 25 bp, Saccharomyces pastorianus
aattacggaattttgccagttgaat

SEQ ID NO: 86119 - DNA, 25 bp, Saccharomyces pastorianus
aacggaagtaatgctgactctgtct

SEQ ID NO: 86120 - DNA, 25 bp, Saccharomyces pastorianus
gggttcccatgtaatcagttcggga

SEQ ID NO: 86121 - DNA, 25 bp, Saccharomyces pastorianus
gcgaatcttttaagtttgaccaact

SEQ ID NO: 86122 - DNA, 25 bp, Saccharomyces pastorianus
aatgttgcctccaagtgcggcttca

SEQ ID NO: 86123 - DNA, 25 bp, Saccharomyces pastorianus
gctgactctgtctataattatttga

SEQ ID NO: 86124 - DNA, 25 bp, Saccharomyces pastorianus
gctccgatcggcttttagtttgttg

SEQ ID NO: 86125 - DNA, 25 bp, Saccharomyces pastorianus
gcccacgacttacgttccaaagaat

SEQ ID NO: 86126 - DNA, 25 bp, Saccharomyces pastorianus
tttgaaaccccatgaactcgagtgt

SEQ ID NO: 86127 - DNA, 25 bp, Saccharomyces pastorianus
gatctctacagccttttcaagacgt

SEQ ID NO: 86128 - DNA, 25 bp, Saccharomyces pastorianus
aacattcgttctctggatttaagga

SEQ ID NO: 86129 - DNA, 25 bp, Saccharomyces pastorianus
gtgtagtcaacctaactttcgaaat

SEQ ID NO: 86130 - DNA, 25 bp, Saccharomyces pastorianus
tacggtggcgactggtcaaattctt

SEQ ID NO: 86131 - DNA, 25 bp, Saccharomyces pastorianus
ggactgcggaatttggatctctaca

SEQ ID NO: 86132 - DNA, 25 bp, Saccharomyces pastorianus
gattcgaggattatggcccacgact

SEQ ID NO: 86133 - DNA, 25 bp, Saccharomyces pastorianus
gggtgagtccatatttcctggtgaa

SEQ ID NO: 86134 - DNA, 25 bp, Saccharomyces pastorianus
aaattctttgatcgcaacatgctca

SEQ ID NO: 86135 - DNA, 25 bp, Saccharomyces pastorianus
gccagcagggagtttgttgatccac

SEQ ID NO: 86136 - DNA, 25 bp, Saccharomyces pastorianus
gtttccgtgacaatatcgagaccag

SEQ ID NO: 86137 - DNA, 25 bp, Saccharomyces pastorianus
aaactatcatatataccgtgcggtg

SEQ ID NO: 86138 - DNA, 25 bp, Saccharomyces pastorianus
tcaaaggtttcctattcccattggt

SEQ ID NO: 86139 - DNA, 25 bp, Saccharomyces pastorianus
ggccataaagatatcggtcctgaga

SEQ ID NO: 86140 - DNA, 25 bp, Saccharomyces pastorianus
taccagacggtggacgactgcgtgt

SEQ ID NO: 86141 - DNA, 25 bp, Saccharomyces pastorianus
gacgactgcgtgtattactttatga

SEQ ID NO: 86142 - DNA, 25 bp, Saccharomyces pastorianus
aaaatatgctttaccgtaccagacg

SEQ ID NO: 86143 - DNA, 25 bp, Saccharomyces pastorianus
ttacaagaacgatattacccaggat

SEQ ID NO: 86144 - DNA, 25 bp, Saccharomyces pastorianus
ctctccacctacaactgtttttatc

SEQ ID NO: 86145 - DNA, 25 bp, Saccharomyces pastorianus
ggctttcttaacatttgcacaacgt

SEQ ID NO: 86146 - DNA, 25 bp, Saccharomyces pastorianus
agagaattggcctccggtttgtctt

SEQ ID NO: 86147 - DNA, 25 bp, Saccharomyces pastorianus
atcgctaacggtgaaaacgccatta

SEQ ID NO: 86148 - DNA, 25 bp, Saccharomyces pastorianus
cgtcttgaggaaattggctgctgct

SEQ ID NO: 86149 - DNA, 25 bp, Saccharomyces pastorianus
gaacactgcttcgttattctaagag

SEQ ID NO: 86150 - DNA, 25 bp, Saccharomyces pastorianus
tttgtctttcccagttggtttcaag

SEQ ID NO: 86151 - DNA, 25 bp, Saccharomyces pastorianus
tatggtgtttccatcactgatgctt

SEQ ID NO: 86152 - DNA, 25 bp, Saccharomyces pastorianus
aactacgacgctaagtccgttgcag

SEQ ID NO: 86153 - DNA, 25 bp, Saccharomyces pastorianus
ctaatgattgactactctcacggta

SEQ ID NO: 86154 - DNA, 25 bp, Saccharomyces pastorianus
gtaccttaaatgttgctgtggatgc

SEQ ID NO: 86155 - DNA, 25 bp, Saccharomyces pastorianus
gaaggtaaccaaggcatcccagccg

SEQ ID NO: 86156 - DNA, 25 bp, Saccharomyces pastorianus
ctgccggttccaacggtctaatgat

SEQ ID NO: 86157 - DNA, 25 bp, Saccharomyces pastorianus
aacctatgcggatggtctaccgagc

SEQ ID NO: 86158 - DNA, 25 bp, Saccharomyces pastorianus
tttcgattccgacaagaccattttc

SEQ ID NO: 86159 - DNA, 25 bp, Saccharomyces pastorianus
gatgacgttgtcatcccaacctatg

SEQ ID NO: 86160 - DNA, 25 bp, Saccharomyces pastorianus
gaccattttcggattttgctttgat

SEQ ID NO: 86161 - DNA, 25 bp, Saccharomyces pastorianus
atcgtattacggtgaattttccaat

SEQ ID NO: 86162 - DNA, 25 bp, Saccharomyces pastorianus
catgctgccctcaaagtaactcatt

SEQ ID NO: 86163 - DNA, 25 bp, Saccharomyces pastorianus
gaccagctctttgttacccaaatat

SEQ ID NO: 86164 - DNA, 25 bp, Saccharomyces pastorianus
gatagtgatatttcgaccagctctt

SEQ ID NO: 86165 - DNA, 25 bp, Saccharomyces pastorianus
tcattttatcccaatcatgctgccc

SEQ ID NO: 86166 - DNA, 25 bp, Saccharomyces pastorianus
aggaagcttctttggcagttgcaca

SEQ ID NO: 86167 - DNA, 25 bp, Saccharomyces pastorianus
ggtatgcctttccaaatgatattat

SEQ ID NO: 86168 - DNA, 25 bp, Saccharomyces pastorianus
tatgccttggttgtcgttggtgaca

SEQ ID NO: 86169 - DNA, 25 bp, Saccharomyces pastorianus
aagacattggatgaggttgccctgg

SEQ ID NO: 86170 - DNA, 25 bp, Saccharomyces pastorianus
agcgatctttaaagctcattgggat

SEQ ID NO: 86171 - DNA, 25 bp, Saccharomyces pastorianus
ggtgtagatccggattatatcacta

SEQ ID NO: 86172 - DNA, 25 bp, Saccharomyces pastorianus
gaaggtaacattctgcctccaggag

SEQ ID NO: 86173 - DNA, 25 bp, Saccharomyces pastorianus
tccaggagtcagcttaccaaacgat

SEQ ID NO: 86174 - DNA, 25 bp, Saccharomyces pastorianus
acgtgtaaaccatgtaatctttgag

SEQ ID NO: 86175 - DNA, 25 bp, Saccharomyces pastorianus
aaaattgcgtctttctatgccttgg

SEQ ID NO: 86176 - DNA, 25 bp, Saccharomyces pastorianus
aaggtaccatcgaggctttcacgaa

SEQ ID NO: 86177 - DNA, 25 bp, Saccharomyces pastorianus
aagttgactatgaagccgctggtga

SEQ ID NO: 86178 - DNA, 25 bp, Saccharomyces pastorianus
aagcgccgatgtagctgcagggcta

SEQ ID NO: 86179 - DNA, 25 bp, Saccharomyces pastorianus
aagcgctactgtacctaccaaaggt

SEQ ID NO: 86180 - DNA, 25 bp, Saccharomyces pastorianus
tacggtcgtattgcgccaaggtcag

SEQ ID NO: 86181 - DNA, 25 bp, Saccharomyces pastorianus
ttcacagagggatttcgcgatcaaa

SEQ ID NO: 86182 - DNA, 25 bp, Saccharomyces pastorianus
actgccgcgggatacgacatttatg

SEQ ID NO: 86183 - DNA, 25 bp, Saccharomyces pastorianus
gacatatcgttcaccgtacctgttg

SEQ ID NO: 86184 - DNA, 25 bp, Saccharomyces pastorianus
ctcaggatattaccattccggctat

SEQ ID NO: 86185 - DNA, 25 bp, Saccharomyces pastorianus
ttccggctatgggtcaaggtatggt

SEQ ID NO: 86186 - DNA, 25 bp, Saccharomyces pastorianus
tacctgttggtacctacggtcgtat

SEQ ID NO: 86187 - DNA, 25 bp, Saccharomyces pastorianus
gatcgcgtagcccaattgattctgg

SEQ ID NO: 86188 - DNA, 25 bp, Saccharomyces pastorianus
gatgcccagatcgttgttgtagact

SEQ ID NO: 86189 - DNA, 25 bp, Saccharomyces pastorianus
aggtatggtttccaccgacatatcg

SEQ ID NO: 86190 - DNA, 25 bp, Saccharomyces pastorianus
atggctactgaaccaaattcctgta

SEQ ID NO: 86191 - DNA, 25 bp, Saccharomyces pastorianus
gattctgtctgtgaagctggcggaa

SEQ ID NO: 86192 - DNA, 25 bp, Saccharomyces pastorianus
ctgtggccacgaccagtgtgatgat

SEQ ID NO: 86193 - DNA, 25 bp, Saccharomyces pastorianus
gatgacgaggattcattcgcacaag

SEQ ID NO: 86194 - DNA, 25 bp, Saccharomyces pastorianus
ggaacactcaaaagtgactcgtttt

SEQ ID NO: 86195 - DNA, 25 bp, Saccharomyces pastorianus
gaaaattctgagctcgctgtggcca

SEQ ID NO: 86196 - DNA, 25 bp, Saccharomyces pastorianus
gaacaaaccaggacgattctgtctg

SEQ ID NO: 86197 - DNA, 25 bp, Saccharomyces pastorianus
atatgactacgatagccgatagaaa

SEQ ID NO: 86198 - DNA, 25 bp, Saccharomyces pastorianus
gacttgttgatcctgaccagatcga

SEQ ID NO: 86199 - DNA, 25 bp, Saccharomyces pastorianus
gcaaccaggcactatatgagaaact

SEQ ID NO: 86200 - DNA, 25 bp, Saccharomyces pastorianus
ggtgaataaccagaccatgcaattg

SEQ ID NO: 86201 - DNA, 25 bp, Saccharomyces pastorianus
tggcaaattaatccgacttcacagt

SEQ ID NO: 86202 - DNA, 25 bp, Saccharomyces pastorianus
tgggaactcagccaacagtagcgta

SEQ ID NO: 86203 - DNA, 25 bp, Saccharomyces pastorianus
aatccgttcatactgcatgcatcac

SEQ ID NO: 86204 - DNA, 25 bp, Saccharomyces pastorianus
atccaatggcggtggtgggttcctt

SEQ ID NO: 86205 - DNA, 25 bp, Saccharomyces pastorianus
taggagcccggcattcgactcgagg

SEQ ID NO: 86206 - DNA, 25 bp, Saccharomyces pastorianus
aaatccacagggttttcctcaggat

SEQ ID NO: 86207 - DNA, 25 bp, Saccharomyces pastorianus
agggcaatcctgtctatgaaatcga

SEQ ID NO: 86208 - DNA, 25 bp, Saccharomyces pastorianus
gaaatcgagtttaccaatgcagaaa

SEQ ID NO: 86209 - DNA, 25 bp, Saccharomyces pastorianus
ttacagaccctattaggagcccggc

SEQ ID NO: 86210 - DNA, 25 bp, Saccharomyces pastorianus
gggttccttcgatctagagctataa

SEQ ID NO: 86211 - DNA, 25 bp, Saccharomyces pastorianus
atgaggtcattctaccaagaggtac

SEQ ID NO: 86212 - DNA, 25 bp, Saccharomyces pastorianus
tggtttttgttcagcgtcctgagaa

SEQ ID NO: 86213 - DNA, 25 bp, Saccharomyces pastorianus
gactggacatcaaaacttctgaacg

SEQ ID NO: 86214 - DNA, 25 bp, Saccharomyces pastorianus
gaaactttgatatcatctagtgaca

SEQ ID NO: 86215 - DNA, 25 bp, Saccharomyces pastorianus
atatcggttgctggaatttggcatt

SEQ ID NO: 86216 - DNA, 25 bp, Saccharomyces pastorianus
gggagtatttacgaaggtgcgccta

SEQ ID NO: 86217 - DNA, 25 bp, Saccharomyces pastorianus
aagcgattccttacaggttgacgaa

SEQ ID NO: 86218 - DNA, 25 bp, Saccharomyces pastorianus
aaccagtgggattagtaagcgattc

SEQ ID NO: 86219 - DNA, 25 bp, Saccharomyces pastorianus
tactagtcaaggtagcgaaccagtg

SEQ ID NO: 86220 - DNA, 25 bp, Saccharomyces pastorianus
gaagactgcagatgctttgactcag

SEQ ID NO: 86221 - DNA, 25 bp, Saccharomyces pastorianus
gcgtcctgagaagcattcggttcac

SEQ ID NO: 86222 - DNA, 25 bp, Saccharomyces pastorianus
ggtgcgcctagggagaagactacta

SEQ ID NO: 86223 - DNA, 25 bp, Saccharomyces pastorianus
caccgattgtcacgttggagattca

SEQ ID NO: 86224 - DNA, 25 bp, Saccharomyces pastorianus
aaggtggagccttctatattagtat

SEQ ID NO: 86225 - DNA, 25 bp, Saccharomyces pastorianus
ttaggttcggtggtcattatgtaca

SEQ ID NO: 86226 - DNA, 25 bp, Saccharomyces pastorianus
aagtaatgtcgcttcctggattcaa

SEQ ID NO: 86227 - DNA, 25 bp, Saccharomyces pastorianus
gtatgccttactgtgaccgagttta

SEQ ID NO: 86228 - DNA, 25 bp, Saccharomyces pastorianus
aaggttgacccactttcgcaaggtg

SEQ ID NO: 86229 - DNA, 25 bp, Saccharomyces pastorianus
gagcggtatctcaagacgttaggtt

SEQ ID NO: 86230 - DNA, 25 bp, Saccharomyces pastorianus
gatggaacttccttgaccataatca

SEQ ID NO: 86231 - DNA, 25 bp, Saccharomyces pastorianus
gggagtattctcaccgattgtcacg

SEQ ID NO: 86232 - DNA, 25 bp, Saccharomyces pastorianus
gggtcacgtagacactgttgctaat

SEQ ID NO: 86233 - DNA, 25 bp, Saccharomyces pastorianus
ggattcaaggcaccaaggtcaactt

SEQ ID NO: 86234 - DNA, 25 bp, Saccharomyces pastorianus
tacagaagtgtggatcgtgcaggca

SEQ ID NO: 86235 - DNA, 25 bp, Saccharomyces pastorianus
tacgaatcattaccgcagtacgttg

SEQ ID NO: 86236 - DNA, 25 bp, Saccharomyces pastorianus
aggcattgtgatctgggactctcag

SEQ ID NO: 86237 - DNA, 25 bp, Saccharomyces pastorianus
aagactttaataggccttcaaggca

SEQ ID NO: 86238 - DNA, 25 bp, Saccharomyces pastorianus
gggactctcagaaattttttatcat

SEQ ID NO: 86239 - DNA, 25 bp, Saccharomyces pastorianus
tacgttgattttgtaccgatgtata

SEQ ID NO: 86240 - DNA, 25 bp, Saccharomyces pastorianus
aaagggcacagtatttcaatttgaa

SEQ ID NO: 86241 - DNA, 25 bp, Saccharomyces pastorianus
ggaagaccttttacactacatagag

SEQ ID NO: 86242 - DNA, 25 bp, Saccharomyces pastorianus
aatggtgcgctgttacgcgttacaa

SEQ ID NO: 86243 - DNA, 25 bp, Saccharomyces pastorianus
ggagaagcatccaacgatatacgaa

SEQ ID NO: 86244 - DNA, 25 bp, Saccharomyces pastorianus
ggcaggaagttcaaaagtcgtcgtt

SEQ ID NO: 86245 - DNA, 25 bp, Saccharomyces pastorianus
aaaacagagggctaaccagtgcatt

SEQ ID NO: 86246 - DNA, 25 bp, Saccharomyces pastorianus
aagagttgccagtactgttaaagaa

SEQ ID NO: 86247 - DNA, 25 bp, Saccharomyces pastorianus
acttggatgtctatgtacggtctaa

SEQ ID NO: 86248 - DNA, 25 bp, Saccharomyces pastorianus
aaggagggacattttgacaagttga

SEQ ID NO: 86249 - DNA, 25 bp, Saccharomyces pastorianus
aaagggacaacttcaggaaacactg

SEQ ID NO: 86250 - DNA, 25 bp, Saccharomyces pastorianus
gaatcttttgaacaagcgcttagga

SEQ ID NO: 86251 - DNA, 25 bp, Saccharomyces pastorianus
caaggacaactacctaaagctgggt

SEQ ID NO: 86252 - DNA, 25 bp, Saccharomyces pastorianus
gttacaggatcccaaactattggaa

SEQ ID NO: 86253 - DNA, 25 bp, Saccharomyces pastorianus
agaaatattgtctaacccatggaat

SEQ ID NO: 86254 - DNA, 25 bp, Saccharomyces pastorianus
tacggtctaagttacaggatcccaa

SEQ ID NO: 86255 - DNA, 25 bp, Saccharomyces pastorianus
gggctaaccagtgcattgattgaat

SEQ ID NO: 86256 - DNA, 25 bp, Saccharomyces pastorianus
gaaactcgtttccaacatgtgtact

SEQ ID NO: 86257 - DNA, 25 bp, Saccharomyces pastorianus
aatagttggccagatttcgcgaata

SEQ ID NO: 86258 - DNA, 25 bp, Saccharomyces pastorianus
caatgaaccattttggcctaaccaa

SEQ ID NO: 86259 - DNA, 25 bp, Saccharomyces pastorianus
gaaccctctttggtacatgcgataa

SEQ ID NO: 86260 - DNA, 25 bp, Saccharomyces pastorianus
gaaggttgcttggaacggctagtaa

SEQ ID NO: 86261 - DNA, 25 bp, Saccharomyces pastorianus
atctggtgtcattattttgtcctac

SEQ ID NO: 86262 - DNA, 25 bp, Saccharomyces pastorianus
gttgattccttatcattaactagca

SEQ ID NO: 86263 - DNA, 25 bp, Saccharomyces pastorianus
ttggcctaaccaatcaattgcgaat

SEQ ID NO: 86264 - DNA, 25 bp, Saccharomyces pastorianus
gcatttgcattccacctttttgaaa

SEQ ID NO: 86265 - DNA, 25 bp, Saccharomyces pastorianus
acggctagtaatagaatctctccaa

SEQ ID NO: 86266 - DNA, 25 bp, Saccharomyces pastorianus
aatctctccaaattctagaaccctc

SEQ ID NO: 86267 - DNA, 25 bp, Saccharomyces pastorianus
gaaacggattcttcggtcacaaggt

SEQ ID NO: 86268 - DNA, 25 bp, Saccharomyces pastorianus
gatgccggcaagtactggctgatct

SEQ ID NO: 86269 - DNA, 25 bp, Saccharomyces pastorianus
gtagtacccacaatggatgtcctgg

SEQ ID NO: 86270 - DNA, 25 bp, Saccharomyces pastorianus
gtcacaaggtcagatgctaagttca

SEQ ID NO: 86271 - DNA, 25 bp, Saccharomyces pastorianus
agcacgccgctaagatagaccttgt

SEQ ID NO: 86272 - DNA, 25 bp, Saccharomyces pastorianus
ggatgctgcctcaggagaacaacgt

SEQ ID NO: 86273 - DNA, 25 bp, Saccharomyces pastorianus
gggatccaataacttcctgcgtaaa

SEQ ID NO: 86274 - DNA, 25 bp, Saccharomyces pastorianus
tgcacgttgaattggctgagctgaa

SEQ ID NO: 86275 - DNA, 25 bp, Saccharomyces pastorianus
gcctaaagctcatcgccagtgaaag

SEQ ID NO: 86276 - DNA, 25 bp, Saccharomyces pastorianus
ttggtttgcaacctaatgggacaat

SEQ ID NO: 86277 - DNA, 25 bp, Saccharomyces pastorianus
gtgaaagacaacgtggcttaccaag

SEQ ID NO: 86278 - DNA, 25 bp, Saccharomyces pastorianus
ggagaccaggaaccgcaagctagtt

SEQ ID NO: 86279 - DNA, 25 bp, Saccharomyces pastorianus
gtaccgatacagtaacaatggctac

SEQ ID NO: 86280 - DNA, 25 bp, Saccharomyces pastorianus
tctgttttttacctgtaccgataca

SEQ ID NO: 86281 - DNA, 25 bp, Saccharomyces pastorianus
tgatggcactgcatggagtaggacc

SEQ ID NO: 86282 - DNA, 25 bp, Saccharomyces pastorianus
gatcacgatgctacatggttgaaac

SEQ ID NO: 86283 - DNA, 25 bp, Saccharomyces pastorianus
aacaagatcatcaggtacaggacct

SEQ ID NO: 86284 - DNA, 25 bp, Saccharomyces pastorianus
aagctagttgtgacggatgatggca

SEQ ID NO: 86285 - DNA, 25 bp, Saccharomyces pastorianus
tgggtccgttagcaagatctgtgaa

SEQ ID NO: 86286 - DNA, 25 bp, Saccharomyces pastorianus
tctctgtgggagtaatcggttctgt

SEQ ID NO: 86287 - DNA, 25 bp, Saccharomyces pastorianus
gatctgtgaagtggactctctctgt

SEQ ID NO: 86288 - DNA, 25 bp, Saccharomyces pastorianus
aatggctacttctacgatcacgatg

SEQ ID NO: 86289 - DNA, 25 bp, Saccharomyces pastorianus
cagggtctgccgtatgtggccgtaa

SEQ ID NO: 86290 - DNA, 25 bp, Saccharomyces pastorianus
tacaggaccgtgctcagggaacgca

SEQ ID NO: 86291 - DNA, 25 bp, Saccharomyces pastorianus
atcagtttggttcccgaaagtcaat

SEQ ID NO: 86292 - DNA, 25 bp, Saccharomyces pastorianus
ggctacgataggtgcggcgttcatc

SEQ ID NO: 86293 - DNA, 25 bp, Saccharomyces pastorianus
ttctaacgacgcctctacggagaaa

SEQ ID NO: 86294 - DNA, 25 bp, Saccharomyces pastorianus
gacaatcgaggttccttctaacgac

SEQ ID NO: 86295 - DNA, 25 bp, Saccharomyces pastorianus
agtggtactgctaggagattcatca

SEQ ID NO: 86296 - DNA, 25 bp, Saccharomyces pastorianus
gacgtatccagtctgcaatgtgcaa

SEQ ID NO: 86297 - DNA, 25 bp, Saccharomyces pastorianus
cactggtgccaatgtattatcgaga

SEQ ID NO: 86298 - DNA, 25 bp, Saccharomyces pastorianus
ataccggcggagttacagggtctgc

SEQ ID NO: 86299 - DNA, 25 bp, Saccharomyces pastorianus
ggcgttcatcaccaagacaatcgag

SEQ ID NO: 86300 - DNA, 25 bp, Saccharomyces pastorianus
tattcccagtatgcgcctgcaaaag

SEQ ID NO: 86301 - DNA, 25 bp, Saccharomyces pastorianus
gacgaacttccgtatcagttgtgtt

SEQ ID NO: 86302 - DNA, 25 bp, Saccharomyces pastorianus
tggtcgtgccattctacatggttgg

SEQ ID NO: 86303 - DNA, 25 bp, Saccharomyces pastorianus
gcgctttacccatttgtgggctatt

SEQ ID NO: 86304 - DNA, 25 bp, Saccharomyces pastorianus
gtgtcctatcaaacattctggtcgt

SEQ ID NO: 86305 - DNA, 25 bp, Saccharomyces pastorianus
acatggttggctgttcctggtatat

SEQ ID NO: 86306 - DNA, 25 bp, Saccharomyces pastorianus
tggaccttgggctcaccgcaaagaa

SEQ ID NO: 86307 - DNA, 25 bp, Saccharomyces pastorianus
tgtgatatcattgccaagtcgctgg

SEQ ID NO: 86308 - DNA, 25 bp, Saccharomyces pastorianus
gtggcacatcagattgcccttgcag

SEQ ID NO: 86309 - DNA, 25 bp, Saccharomyces pastorianus
acaaagttgatcgaaggcccctcag

SEQ ID NO: 86310 - DNA, 25 bp, Saccharomyces pastorianus
aaaagccgctttgttccgttgcaat

SEQ ID NO: 86311 - DNA, 25 bp, Saccharomyces pastorianus
ccacgggttttatatcccagaacag

SEQ ID NO: 86312 - DNA, 25 bp, Saccharomyces pastorianus
gggcgtgcagactcaacagcgtgtt

SEQ ID NO: 86313 - DNA, 25 bp, Saccharomyces pastorianus
ctacgattttacaagctcatacgca

SEQ ID NO: 86314 - DNA, 25 bp, Saccharomyces pastorianus
gttcttacctgccttcgacaaaaag

SEQ ID NO: 86315 - DNA, 25 bp, Saccharomyces pastorianus
atatctagtcgacaagatcggcttg

SEQ ID NO: 86316 - DNA, 25 bp, Saccharomyces pastorianus
ggagaacgttgaccgctgtaagaca

SEQ ID NO: 86317 - DNA, 25 bp, Saccharomyces pastorianus
ggtatagagctgcatctaccgacag

SEQ ID NO: 86318 - DNA, 25 bp, Saccharomyces pastorianus
gacgacgaagatctgccacaagagt

SEQ ID NO: 86319 - DNA, 25 bp, Saccharomyces pastorianus
gagacgagatcgttcttacctgcct

SEQ ID NO: 86320 - DNA, 25 bp, Saccharomyces pastorianus
accctggtcgctgcagagacgagat

SEQ ID NO: 86321 - DNA, 25 bp, Saccharomyces pastorianus
gagacactgtaaaattccctacgaa

SEQ ID NO: 86322 - DNA, 25 bp, Saccharomyces pastorianus
gcgtagcttttcttgcattactctt

SEQ ID NO: 86323 - DNA, 25 bp, Saccharomyces pastorianus
gttccaggttttcttcaacatcttt

SEQ ID NO: 86324 - DNA, 25 bp, Saccharomyces pastorianus
gcagcagctgcagacactttggagt

SEQ ID NO: 86325 - DNA, 25 bp, Saccharomyces pastorianus
tcttggctcttttgcatgttttcaa

SEQ ID NO: 86326 - DNA, 25 bp, Saccharomyces pastorianus
gacttgctagtactggcagcagctg

SEQ ID NO: 86327 - DNA, 25 bp, Saccharomyces pastorianus
atgttttcaagcatattagccctgg

SEQ ID NO: 86328 - DNA, 25 bp, Saccharomyces pastorianus
ttagccctggcaatttccaacagtt

SEQ ID NO: 86329 - DNA, 25 bp, Saccharomyces pastorianus
agcttgcttaggtcgggagtatctc

SEQ ID NO: 86330 - DNA, 25 bp, Saccharomyces pastorianus
gtaacaggtttctccttttcagcag

SEQ ID NO: 86331 - DNA, 25 bp, Saccharomyces pastorianus
gaatatcgactctgttgcgtagctt

SEQ ID NO: 86332 - DNA, 25 bp, Saccharomyces pastorianus
ctttttcttttcgagcaatgcttgc

SEQ ID NO: 86333 - DNA, 25 bp, Saccharomyces pastorianus
atcgaccagtcgtgtcttatataat

SEQ ID NO: 86334 - DNA, 25 bp, Saccharomyces pastorianus
tgtcgtcgtgtcctgcgggaacatc

SEQ ID NO: 86335 - DNA, 25 bp, Saccharomyces pastorianus
ttaagtcagtggtgtcgtcgtgtcc

SEQ ID NO: 86336 - DNA, 25 bp, Saccharomyces pastorianus
gacccagagggacaggctctcttaa

SEQ ID NO: 86337 - DNA, 25 bp, Saccharomyces pastorianus
atggagcgtattggatagtgatcac

SEQ ID NO: 86338 - DNA, 25 bp, Saccharomyces pastorianus
acaggttgatatcgaccagtcgtgt

SEQ ID NO: 86339 - DNA, 25 bp, Saccharomyces pastorianus
cgggaacatcgcttaacttaaacat

SEQ ID NO: 86340 - DNA, 25 bp, Saccharomyces pastorianus
aagacgcagtggcactcgaggacaa

SEQ ID NO: 86341 - DNA, 25 bp, Saccharomyces pastorianus
tcgaacatgcggctgaggacccaga

SEQ ID NO: 86342 - DNA, 25 bp, Saccharomyces pastorianus
cgcgcagtttgggttacaggttgat

SEQ ID NO: 86343 - DNA, 25 bp, Saccharomyces pastorianus
gatcacgttgtcgaacatgcggctg

SEQ ID NO: 86344 - DNA, 25 bp, Saccharomyces pastorianus
tagagactccatcattcttccgtat

SEQ ID NO: 86345 - DNA, 25 bp, Saccharomyces pastorianus
gaggaattcattaccacttcacttt

SEQ ID NO: 86346 - DNA, 25 bp, Saccharomyces pastorianus
caggtttactacgacatgatggcag

SEQ ID NO: 86347 - DNA, 25 bp, Saccharomyces pastorianus
gaaccttcaaggtacgcaccgtcaa

SEQ ID NO: 86348 - DNA, 25 bp, Saccharomyces pastorianus
gtgttactgcccttcgagaaaagct

SEQ ID NO: 86349 - DNA, 25 bp, Saccharomyces pastorianus
acgctgctgcagtgttttgggatcc

SEQ ID NO: 86350 - DNA, 25 bp, Saccharomyces pastorianus
cgcaccgtcaattgatgtcctttta

SEQ ID NO: 86351 - DNA, 25 bp, Saccharomyces pastorianus
actactggcttgacggatatctatc

SEQ ID NO: 86352 - DNA, 25 bp, Saccharomyces pastorianus
gacggtgccagtaagagttttcaaa

SEQ ID NO: 86353 - DNA, 25 bp, Saccharomyces pastorianus
taacgcactcaaggtttttggccga

SEQ ID NO: 86354 - DNA, 25 bp, Saccharomyces pastorianus
gatattgaccggctgctggaatttt

SEQ ID NO: 86355 - DNA, 25 bp, Saccharomyces pastorianus
agatcacctggattacctacatacc

SEQ ID NO: 86356 - DNA, 25 bp, Saccharomyces pastorianus
gatatattcgcctcagcatccggaa

SEQ ID NO: 86357 - DNA, 25 bp, Saccharomyces pastorianus
atcttcgtgacggatttacccgaga

SEQ ID NO: 86358 - DNA, 25 bp, Saccharomyces pastorianus
gaatttgacgtcatattgatcgccg

SEQ ID NO: 86359 - DNA, 25 bp, Saccharomyces pastorianus
gggacctgtcacctagaaatacctt

SEQ ID NO: 86360 - DNA, 25 bp, Saccharomyces pastorianus
gtaggactttcatgggccttaaaat

SEQ ID NO: 86361 - DNA, 25 bp, Saccharomyces pastorianus
gcgggcactggtttagtaggacttt

SEQ ID NO: 86362 - DNA, 25 bp, Saccharomyces pastorianus
attgatcgccgacccgatatattcg

SEQ ID NO: 86363 - DNA, 25 bp, Saccharomyces pastorianus
gggatcatctttaatactttcacaa

SEQ ID NO: 86364 - DNA, 25 bp, Saccharomyces pastorianus
tagcgaacagcgacatcaaacagat

SEQ ID NO: 86365 - DNA, 25 bp, Saccharomyces pastorianus
tttttggcggcatcagggacctgtc

SEQ ID NO: 86366 - DNA, 25 bp, Saccharomyces pastorianus
gcttcgtcaagctgtttccaataca

SEQ ID NO: 86367 - DNA, 25 bp, Saccharomyces pastorianus
aagggattctctacgtggtggcgca

SEQ ID NO: 86368 - DNA, 25 bp, Saccharomyces pastorianus
gacagatggagactgcccgtactca

SEQ ID NO: 86369 - DNA, 25 bp, Saccharomyces pastorianus
tagcggaaccaggtacccatcggaa

SEQ ID NO: 86370 - DNA, 25 bp, Saccharomyces pastorianus
gaactaactccaaggtcggcattat

SEQ ID NO: 86371 - DNA, 25 bp, Saccharomyces pastorianus
ttctgtctcgccaaatgttttccaa

SEQ ID NO: 86372 - DNA, 25 bp, Saccharomyces pastorianus
tcaccaatgctgacacctagcggaa

SEQ ID NO: 86373 - DNA, 25 bp, Saccharomyces pastorianus
tcaacacctttatctggagctgctt

SEQ ID NO: 86374 - DNA, 25 bp, Saccharomyces pastorianus
gggcattcccagagtgacatttaag

SEQ ID NO: 86375 - DNA, 25 bp, Saccharomyces pastorianus
ttgggccgtctttataagggattct

SEQ ID NO: 86376 - DNA, 25 bp, Saccharomyces pastorianus
ggaaccagttcaatcatctgctcat

SEQ ID NO: 86377 - DNA, 25 bp, Saccharomyces pastorianus
gttctacacgttgcaacctatggat

SEQ ID NO: 86378 - DNA, 25 bp, Saccharomyces pastorianus
aatagcggcacagttatgacacaag

SEQ ID NO: 86379 - DNA, 25 bp, Saccharomyces pastorianus
acttccagaccgtttcgaatacaca

SEQ ID NO: 86380 - DNA, 25 bp, Saccharomyces pastorianus
gggctatgataacgttttcccactt

SEQ ID NO: 86381 - DNA, 25 bp, Saccharomyces pastorianus
acgtgcatttacctcgtatgattca

SEQ ID NO: 86382 - DNA, 25 bp, Saccharomyces pastorianus
aggtacatttctactcagccaattg

SEQ ID NO: 86383 - DNA, 25 bp, Saccharomyces pastorianus
tgcggtagcatttccatcataaaga

SEQ ID NO: 86384 - DNA, 25 bp, Saccharomyces pastorianus
gctgccttacagtttcattctgatg

SEQ ID NO: 86385 - DNA, 25 bp, Saccharomyces pastorianus
tgaacacgactcaatgcacttccag

SEQ ID NO: 86386 - DNA, 25 bp, Saccharomyces pastorianus
gaattggctgagcttgaacacgact

SEQ ID NO: 86387 - DNA, 25 bp, Saccharomyces pastorianus
taagctatgatatcgctgccttaca

SEQ ID NO: 86388 - DNA, 25 bp, Saccharomyces pastorianus
taatgacgattttgtacctgttgaa

SEQ ID NO: 86389 - DNA, 25 bp, Saccharomyces pastorianus
gaagcagatggcgaacctttgttgg

SEQ ID NO: 86390 - DNA, 25 bp, Saccharomyces pastorianus
agattcacctcctcgaatgacagaa

SEQ ID NO: 86391 - DNA, 25 bp, Saccharomyces pastorianus
tgagttaatgccaccagattcacct

SEQ ID NO: 86392 - DNA, 25 bp, Saccharomyces pastorianus
ttaggccaagcccacacagaagcag

SEQ ID NO: 86393 - DNA, 25 bp, Saccharomyces pastorianus
gctacatctagggaagccacacctt

SEQ ID NO: 86394 - DNA, 25 bp, Saccharomyces pastorianus
cgtatacccattttcaattctttga

SEQ ID NO: 86395 - DNA, 25 bp, Saccharomyces pastorianus
gaatggcttagacaccgtaccaaaa

SEQ ID NO: 86396 - DNA, 25 bp, Saccharomyces pastorianus
gaacaacccgaagtcgctgatattt

SEQ ID NO: 86397 - DNA, 25 bp, Saccharomyces pastorianus
ttgagagggttcacaccgggcgact

SEQ ID NO: 86398 - DNA, 25 bp, Saccharomyces pastorianus
cgggcgacttgaacggaatatctgt

SEQ ID NO: 86399 - DNA, 25 bp, Saccharomyces pastorianus
aatcctgccttacttaagtctctag

SEQ ID NO: 86400 - DNA, 25 bp, Saccharomyces pastorianus
gagatatctccagtgtgacctggca

SEQ ID NO: 86401 - DNA, 25 bp, Saccharomyces pastorianus
gatccgcttttccaccaaataaaca

SEQ ID NO: 86402 - DNA, 25 bp, Saccharomyces pastorianus
gtgcattgtatggtcggagtctcca

SEQ ID NO: 86403 - DNA, 25 bp, Saccharomyces pastorianus
ggagtctccagatctgcaacagttt

SEQ ID NO: 86404 - DNA, 25 bp, Saccharomyces pastorianus
ttacgcatatagtttctgtcggtga

SEQ ID NO: 86405 - DNA, 25 bp, Saccharomyces pastorianus
tatggattggcacatcatctgtagg

SEQ ID NO: 86406 - DNA, 25 bp, Saccharomyces pastorianus
gtgacctggcaagtgcgtatttgtt

SEQ ID NO: 86407 - DNA, 25 bp, Saccharomyces pastorianus
aattgctcatcctgtaaggccacat

SEQ ID NO: 86408 - DNA, 25 bp, Saccharomyces pastorianus
tgttcttcgtatatgagctcttcaa

SEQ ID NO: 86409 - DNA, 25 bp, Saccharomyces pastorianus
aggccacatcgtgcaataactatga

SEQ ID NO: 86410 - DNA, 25 bp, Saccharomyces pastorianus
gaatgcggtcgctgatatagctaca

SEQ ID NO: 86411 - DNA, 25 bp, Saccharomyces pastorianus
atgtttagttctctcttcttgtcga

SEQ ID NO: 86412 - DNA, 25 bp, Saccharomyces pastorianus
ttaggcttaatcgtaggcttgtctt

SEQ ID NO: 86413 - DNA, 25 bp, Saccharomyces pastorianus
tgacccttgcttgtttttatctgtt

SEQ ID NO: 86414 - DNA, 25 bp, Saccharomyces pastorianus
gacaggtgctttttctttaactaag

SEQ ID NO: 86415 - DNA, 25 bp, Saccharomyces pastorianus
aatggcatcctctagaaacctgaaa

SEQ ID NO: 86416 - DNA, 25 bp, Saccharomyces pastorianus
tatctcttttttcgacacattcttc

SEQ ID NO: 86417 - DNA, 25 bp, Saccharomyces pastorianus
ggcttgtctttcctttcgaattcag

SEQ ID NO: 86418 - DNA, 25 bp, Saccharomyces pastorianus
ttttttgcaacacggttgacccttg

SEQ ID NO: 86419 - DNA, 25 bp, Saccharomyces pastorianus
tgcgctattcttcttcagttgttta

SEQ ID NO: 86420 - DNA, 25 bp, Saccharomyces pastorianus
aagaccagcgattcttcgacgagat

SEQ ID NO: 86421 - DNA, 25 bp, Saccharomyces pastorianus
gtagctatatcagcgaccgcattcg

SEQ ID NO: 86422 - DNA, 25 bp, Saccharomyces pastorianus
aatccacgcgcagtgtggcaagctt

SEQ ID NO: 86423 - DNA, 25 bp, Saccharomyces pastorianus
gcaagcttgctgtcgagattccagt

SEQ ID NO: 86424 - DNA, 25 bp, Saccharomyces pastorianus
atgcgaccccgaatacgtaattaca

SEQ ID NO: 86425 - DNA, 25 bp, Saccharomyces pastorianus
atctcgtcgaagaatcgctggtctt

SEQ ID NO: 86426 - DNA, 25 bp, Saccharomyces pastorianus
gctggtcttagcacaactgaattcg

SEQ ID NO: 86427 - DNA, 25 bp, Saccharomyces pastorianus
gaactaaacatgcaaccgggtcgga

SEQ ID NO: 86428 - DNA, 25 bp, Saccharomyces pastorianus
taggagaacactccgactcttctga

SEQ ID NO: 86429 - DNA, 25 bp, Saccharomyces pastorianus
agcacctgtctttcctatatctaaa

SEQ ID NO: 86430 - DNA, 25 bp, Saccharomyces pastorianus
gcattcgctgctgagttatttgtac

SEQ ID NO: 86431 - DNA, 25 bp, Saccharomyces pastorianus
gacaagcctacgattaagcctaaat

SEQ ID NO: 86432 - DNA, 25 bp, Saccharomyces pastorianus
gaaacttcagatgctgttcatactg

SEQ ID NO: 86433 - DNA, 25 bp, Saccharomyces pastorianus
tgaaaaccgtgcagctgatacgccc

SEQ ID NO: 86434 - DNA, 25 bp, Saccharomyces pastorianus
gacgaggagcaaccagaagacgtta

SEQ ID NO: 86435 - DNA, 25 bp, Saccharomyces pastorianus
aaacgacatcattaaacctttggtg

SEQ ID NO: 86436 - DNA, 25 bp, Saccharomyces pastorianus
ggactctgccattctggaaaacgaa

SEQ ID NO: 86437 - DNA, 25 bp, Saccharomyces pastorianus
gatcataaggactctgccattctgg

SEQ ID NO: 86438 - DNA, 25 bp, Saccharomyces pastorianus
gatacgcccgaaacttcagatgctg

SEQ ID NO: 86439 - DNA, 25 bp, Saccharomyces pastorianus
gacagagttagctatacgtttgaat

SEQ ID NO: 86440 - DNA, 25 bp, Saccharomyces pastorianus
tgttactttgagaaaccctagcact

SEQ ID NO: 86441 - DNA, 25 bp, Saccharomyces pastorianus
tgaccccataaatttcgccactgta

SEQ ID NO: 86442 - DNA, 25 bp, Saccharomyces pastorianus
aaggacggcatagcttactacaaac

SEQ ID NO: 86443 - DNA, 25 bp, Saccharomyces pastorianus
actccaggattgtcgactttgcatg

SEQ ID NO: 86444 - DNA, 25 bp, Saccharomyces pastorianus
aaccgaacgcggtcatttgtattca

SEQ ID NO: 86445 - DNA, 25 bp, Saccharomyces pastorianus
aatacgagattgtcccgaatacgaa

SEQ ID NO: 86446 - DNA, 25 bp, Saccharomyces pastorianus
agggcgagagctttgcttttgcaaa

SEQ ID NO: 86447 - DNA, 25 bp, Saccharomyces pastorianus
gataactgcgttttcttcattaata

SEQ ID NO: 86448 - DNA, 25 bp, Saccharomyces pastorianus
gaaaatgttatctccgttgcaagtg

SEQ ID NO: 86449 - DNA, 25 bp, Saccharomyces pastorianus
aacgagctacatattggcaattggg

SEQ ID NO: 86450 - DNA, 25 bp, Saccharomyces pastorianus
taggattgggcccttctgaaaaaat

SEQ ID NO: 86451 - DNA, 25 bp, Saccharomyces pastorianus
tcttcaccgatactcactgttatac

SEQ ID NO: 86452 - DNA, 25 bp, Saccharomyces pastorianus
taacgcctgttttgcttcattagtc

SEQ ID NO: 86453 - DNA, 25 bp, Saccharomyces pastorianus
ggtgactatcacacggtggcactaa

SEQ ID NO: 86454 - DNA, 25 bp, Saccharomyces pastorianus
ggacgaaattactactgcatgggac

SEQ ID NO: 86455 - DNA, 25 bp, Saccharomyces pastorianus
gggtatctccatcaggttagtacct

SEQ ID NO: 86456 - DNA, 25 bp, Saccharomyces pastorianus
taccgagcttgcaaatatcgacgaa

SEQ ID NO: 86457 - DNA, 25 bp, Saccharomyces pastorianus
aaaagtgtcaccatgggtatctcca

SEQ ID NO: 86458 - DNA, 25 bp, Saccharomyces pastorianus
aacagtcaagtttagcggtcctggt

SEQ ID NO: 86459 - DNA, 25 bp, Saccharomyces pastorianus
gtttcagaaaattaccgagcttgca

SEQ ID NO: 86460 - DNA, 25 bp, Saccharomyces pastorianus
actaagccttccttgtctatgacaa

SEQ ID NO: 86461 - DNA, 25 bp, Saccharomyces pastorianus
aaagaatattcgacgcgccagctgt

SEQ ID NO: 86462 - DNA, 25 bp, Saccharomyces pastorianus
attaccaactggactaagccttcct

SEQ ID NO: 86463 - DNA, 25 bp, Saccharomyces pastorianus
gcggtcctggtaacataacagttat

SEQ ID NO: 86464 - DNA, 25 bp, Saccharomyces pastorianus
gggacgtagaaccattgctagtaag

SEQ ID NO: 86465 - DNA, 25 bp, Saccharomyces pastorianus
agacctctattaatgctcttaccag

SEQ ID NO: 86466 - DNA, 25 bp, Saccharomyces pastorianus
ttaaagccctacgttaacgcaaatg

SEQ ID NO: 86467 - DNA, 25 bp, Saccharomyces pastorianus
agaacctatgttaccccagatatgg

SEQ ID NO: 86468 - DNA, 25 bp, Saccharomyces pastorianus
ccccagatatggttaatttcgaatt

SEQ ID NO: 86469 - DNA, 25 bp, Saccharomyces pastorianus
aagagtgccgttgaccacaaagcaa

SEQ ID NO: 86470 - DNA, 25 bp, Saccharomyces pastorianus
gttaacgcaaatgtaccacctctaa

SEQ ID NO: 86471 - DNA, 25 bp, Saccharomyces pastorianus
gcccattagatcctcgtttacagtt

SEQ ID NO: 86472 - DNA, 25 bp, Saccharomyces pastorianus
tttaaaggatttagcggcggcccat

SEQ ID NO: 86473 - DNA, 25 bp, Saccharomyces pastorianus
aatgctcttaccaggccttggaaga

SEQ ID NO: 86474 - DNA, 25 bp, Saccharomyces pastorianus
gctcacccatttcgcaatttagtaa

SEQ ID NO: 86475 - DNA, 25 bp, Saccharomyces pastorianus
caaagggacaagagcttcagggatt

SEQ ID NO: 86476 - DNA, 25 bp, Saccharomyces pastorianus
gtggcaagctatttcaggttcctct

SEQ ID NO: 86477 - DNA, 25 bp, Saccharomyces pastorianus
ttcatcacctattcggcctttatat

SEQ ID NO: 86478 - DNA, 25 bp, Saccharomyces pastorianus
gaaccaactcacatcatctgcaaaa

SEQ ID NO: 86479 - DNA, 25 bp, Saccharomyces pastorianus
acatccacatttttgctttcgtttt

SEQ ID NO: 86480 - DNA, 25 bp, Saccharomyces pastorianus
tccgtcttaagtttgatcaccgtta

SEQ ID NO: 86481 - DNA, 25 bp, Saccharomyces pastorianus
cattgctggtgggttttctttgcta

SEQ ID NO: 86482 - DNA, 25 bp, Saccharomyces pastorianus
atacactggctgtttatctgttttg

SEQ ID NO: 86483 - DNA, 25 bp, Saccharomyces pastorianus
ctctgctcgtgatgtagccttggaa

SEQ ID NO: 86484 - DNA, 25 bp, Saccharomyces pastorianus
gtgtcactcaacaacctttaacctt

SEQ ID NO: 86485 - DNA, 25 bp, Saccharomyces pastorianus
aataatcttttagcagtcccaacct

SEQ ID NO: 86486 - DNA, 25 bp, Saccharomyces pastorianus
aagttattccaatcgcagctgttac

SEQ ID NO: 86487 - DNA, 25 bp, Saccharomyces pastorianus
cagacgtcaatatcgcagtagcact

SEQ ID NO: 86488 - DNA, 25 bp, Saccharomyces pastorianus
gtttagagcataacgttccgatcat

SEQ ID NO: 86489 - DNA, 25 bp, Saccharomyces pastorianus
cctagagccctcaaagccttataag

SEQ ID NO: 86490 - DNA, 25 bp, Saccharomyces pastorianus
atcactggtgtatcttttctatcta

SEQ ID NO: 86491 - DNA, 25 bp, Saccharomyces pastorianus
aagaacaaatggctcggcgtttcct

SEQ ID NO: 86492 - DNA, 25 bp, Saccharomyces pastorianus
gctcgcctgtggagggtttctaaat

SEQ ID NO: 86493 - DNA, 25 bp, Saccharomyces pastorianus
aaaatctctggaatgcaccaccatc

SEQ ID NO: 86494 - DNA, 25 bp, Saccharomyces pastorianus
agccagccatgactacttcgtggaa

SEQ ID NO: 86495 - DNA, 25 bp, Saccharomyces pastorianus
ttgtggcgcctttgaattccatagt

SEQ ID NO: 86496 - DNA, 25 bp, Saccharomyces pastorianus
ttaaacaatttcttgctcgcctgtg

SEQ ID NO: 86497 - DNA, 25 bp, Saccharomyces pastorianus
gtcaaattcccatggttgtggcgcc

SEQ ID NO: 86498 - DNA, 25 bp, Saccharomyces pastorianus
gggccttgtcgccaatgaacacaaa

SEQ ID NO: 86499 - DNA, 25 bp, Saccharomyces pastorianus
aaatccttagaaagccccactgacg

SEQ ID NO: 86500 - DNA, 25 bp, Saccharomyces pastorianus
gaatgagctgaaaaagggccttgtc

SEQ ID NO: 86501 - DNA, 25 bp, Saccharomyces pastorianus
gatagtctattctcctttaaaaagc

SEQ ID NO: 86502 - DNA, 25 bp, Saccharomyces pastorianus
agcatggaggcggacatttcagata

SEQ ID NO: 86503 - DNA, 25 bp, Saccharomyces pastorianus
ggcaccagaacacatattcaccaga

SEQ ID NO: 86504 - DNA, 25 bp, Saccharomyces pastorianus
gaaatggctacaatcctgactagaa

SEQ ID NO: 86505 - DNA, 25 bp, Saccharomyces pastorianus
acgataactcaacacggcaccagaa

SEQ ID NO: 86506 - DNA, 25 bp, Saccharomyces pastorianus
aaagccccactgacgatagcatgga

SEQ ID NO: 86507 - DNA, 25 bp, Saccharomyces pastorianus
accatattttctaggttctcatatt

SEQ ID NO: 86508 - DNA, 25 bp, Saccharomyces pastorianus
attcaccagaggattccgtggaatt

SEQ ID NO: 86509 - DNA, 25 bp, Saccharomyces pastorianus
aatgattttaccgtcttgcttcctt

SEQ ID NO: 86510 - DNA, 25 bp, Saccharomyces pastorianus
aacacatttgccgaggctgttacgc

SEQ ID NO: 86511 - DNA, 25 bp, Saccharomyces pastorianus
gttctaacttatatccttctgcgga

SEQ ID NO: 86512 - DNA, 25 bp, Saccharomyces pastorianus
tgatcctggttgtcctcggttctaa

SEQ ID NO: 86513 - DNA, 25 bp, Saccharomyces pastorianus
ttattgatcggctccatcatcggaa

SEQ ID NO: 86514 - DNA, 25 bp, Saccharomyces pastorianus
gggttcagtttctatcccattgatc

SEQ ID NO: 86515 - DNA, 25 bp, Saccharomyces pastorianus
gtacgctgtcttaagtttgcctgta

SEQ ID NO: 86516 - DNA, 25 bp, Saccharomyces pastorianus
gacggttcaccatagcaagttattg

SEQ ID NO: 86517 - DNA, 25 bp, Saccharomyces pastorianus
gatccaattttccttgttgtcggtt

SEQ ID NO: 86518 - DNA, 25 bp, Saccharomyces pastorianus
agagcgaaccttaatcctccgttat

SEQ ID NO: 86519 - DNA, 25 bp, Saccharomyces pastorianus
ttgttgtggcagcaattggtccgtt

SEQ ID NO: 86520 - DNA, 25 bp, Saccharomyces pastorianus
gaagccatcgatattgtatctggat

SEQ ID NO: 86521 - DNA, 25 bp, Saccharomyces pastorianus
gtacctgtactacgtggctgtattg

SEQ ID NO: 86522 - DNA, 25 bp, Saccharomyces pastorianus
cagattgctggagtattccgtcgat

SEQ ID NO: 86523 - DNA, 25 bp, Saccharomyces pastorianus
ggcttgatgtctttacacttccaaa

SEQ ID NO: 86524 - DNA, 25 bp, Saccharomyces pastorianus
attcttacataggacaatcagccag

SEQ ID NO: 86525 - DNA, 25 bp, Saccharomyces pastorianus
gttgatttacaaacagtctccttag

SEQ ID NO: 86526 - DNA, 25 bp, Saccharomyces pastorianus
aatgatggtgtgttttctccctcta

SEQ ID NO: 86527 - DNA, 25 bp, Saccharomyces pastorianus
tattgcgcaatactcatggccgttt

SEQ ID NO: 86528 - DNA, 25 bp, Saccharomyces pastorianus
gtattccgtcgatttaagttctcaa

SEQ ID NO: 86529 - DNA, 25 bp, Saccharomyces pastorianus
aactgccactggaacggtacctgta

SEQ ID NO: 86530 - DNA, 25 bp, Saccharomyces pastorianus
gtgttttctccctctaatataacgt

SEQ ID NO: 86531 - DNA, 25 bp, Saccharomyces pastorianus
gtgacgatatcttcaatcccaaacc

SEQ ID NO: 86532 - DNA, 25 bp, Saccharomyces pastorianus
attattgaccatattccgggacatt

SEQ ID NO: 86533 - DNA, 25 bp, Saccharomyces pastorianus
gtaaatcggtacctacacctagtct

SEQ ID NO: 86534 - DNA, 25 bp, Saccharomyces pastorianus
aggactccagtaccaagcactttaa

SEQ ID NO: 86535 - DNA, 25 bp, Saccharomyces pastorianus
gtaacattcgcgctggtgtgacgat

SEQ ID NO: 86536 - DNA, 25 bp, Saccharomyces pastorianus
tgcttccgagtccagaatcgctgaa

SEQ ID NO: 86537 - DNA, 25 bp, Saccharomyces pastorianus
gtggcaccaatgcaatgcttccgag

SEQ ID NO: 86538 - DNA, 25 bp, Saccharomyces pastorianus
aggcccttctgtggaatcgtacgaa

SEQ ID NO: 86539 - DNA, 25 bp, Saccharomyces pastorianus
gcagcagcgcctaatgacacaagta

SEQ ID NO: 86540 - DNA, 25 bp, Saccharomyces pastorianus
ccagtttcacctccttgttatatta

SEQ ID NO: 86541 - DNA, 25 bp, Saccharomyces pastorianus
ggacattcgctactactttctatta

SEQ ID NO: 86542 - DNA, 25 bp, Saccharomyces pastorianus
atcgtggtgttttgccagtttccat

SEQ ID NO: 86543 - DNA, 25 bp, Saccharomyces pastorianus
gtattgtgacggtctattccaccat

SEQ ID NO: 86544 - DNA, 25 bp, Saccharomyces pastorianus
ctattagaaagtgttgccgcagtga

SEQ ID NO: 86545 - DNA, 25 bp, Saccharomyces pastorianus
aggtgctacgcctagacttgggaga

SEQ ID NO: 86546 - DNA, 25 bp, Saccharomyces pastorianus
ttccatgagacaggccgcaaaccaa

SEQ ID NO: 86547 - DNA, 25 bp, Saccharomyces pastorianus
atgggcgcggtgtagtacgaaacta

SEQ ID NO: 86548 - DNA, 25 bp, Saccharomyces pastorianus
attttctggtctttatcgtggtgtt

SEQ ID NO: 86549 - DNA, 25 bp, Saccharomyces pastorianus
atcatccgggttaaccttcttagtg

SEQ ID NO: 86550 - DNA, 25 bp, Saccharomyces pastorianus
ggccgcaaaccaagccgttagattg

SEQ ID NO: 86551 - DNA, 25 bp, Saccharomyces pastorianus
gccgcagtgactccttttgaagcaa

SEQ ID NO: 86552 - DNA, 25 bp, Saccharomyces pastorianus
accatgccccttgatactgtgaaaa

SEQ ID NO: 86553 - DNA, 25 bp, Saccharomyces pastorianus
ggtgttgcaatttcagctggcgtca

SEQ ID NO: 86554 - DNA, 25 bp, Saccharomyces pastorianus
gtctacattactctctttattggcc

SEQ ID NO: 86555 - DNA, 25 bp, Saccharomyces pastorianus
atttactccggtaggcagtctcata

SEQ ID NO: 86556 - DNA, 25 bp, Saccharomyces pastorianus
gacaaggtatcacttttcctacgac

SEQ ID NO: 86557 - DNA, 25 bp, Saccharomyces pastorianus
tttattggccctgatactctgcatc

SEQ ID NO: 86558 - DNA, 25 bp, Saccharomyces pastorianus
tcagctggcgtcattcaattatctt

SEQ ID NO: 86559 - DNA, 25 bp, Saccharomyces pastorianus
ttcctacgaccttgtttactttcat

SEQ ID NO: 86560 - DNA, 25 bp, Saccharomyces pastorianus
gattacgtcttacgattccttcctt

SEQ ID NO: 86561 - DNA, 25 bp, Saccharomyces pastorianus
gagggctcatctaatgtctacatta

SEQ ID NO: 86562 - DNA, 25 bp, Saccharomyces pastorianus
aaacttctccgaactggttgattgg

SEQ ID NO: 86563 - DNA, 25 bp, Saccharomyces pastorianus
gttcagcttagtgcaaactcctcat

SEQ ID NO: 86564 - DNA, 25 bp, Saccharomyces pastorianus
acttatttgctatccttttggcggc

SEQ ID NO: 86565 - DNA, 25 bp, Saccharomyces pastorianus
atggagccgttcgttctatggcagc

SEQ ID NO: 86566 - DNA, 25 bp, Saccharomyces pastorianus
agatgctgtctccactattaacttg

SEQ ID NO: 86567 - DNA, 25 bp, Saccharomyces pastorianus
tatggcagcccgtcttggaattgaa

SEQ ID NO: 86568 - DNA, 25 bp, Saccharomyces pastorianus
agaggactctttacgggcagatgct

SEQ ID NO: 86569 - DNA, 25 bp, Saccharomyces pastorianus
gctggtgcctttgttgactttcata

SEQ ID NO: 86570 - DNA, 25 bp, Saccharomyces pastorianus
tgaggttgccaagctagctgctgat

SEQ ID NO: 86571 - DNA, 25 bp, Saccharomyces pastorianus
aaagctccaatattcgttctcacgc

SEQ ID NO: 86572 - DNA, 25 bp, Saccharomyces pastorianus
gaactagttagtatcctccctgtaa

SEQ ID NO: 86573 - DNA, 25 bp, Saccharomyces pastorianus
agagggatttcactacacattttat

SEQ ID NO: 86574 - DNA, 25 bp, Saccharomyces pastorianus
gttgactttcatattccaccagagt

SEQ ID NO: 86575 - DNA, 25 bp, Saccharomyces pastorianus
gtcaaagtccgaagttcccgtgtgg

SEQ ID NO: 86576 - DNA, 25 bp, Saccharomyces pastorianus
ttgccttagttattggttgctggac

SEQ ID NO: 86577 - DNA, 25 bp, Saccharomyces pastorianus
aacaacccagatcgccgttggtggt

SEQ ID NO: 86578 - DNA, 25 bp, Saccharomyces pastorianus
ttctggcttatggtggtgttgcctt

SEQ ID NO: 86579 - DNA, 25 bp, Saccharomyces pastorianus
ggactcaagacgtcattcatgctca

SEQ ID NO: 86580 - DNA, 25 bp, Saccharomyces pastorianus
ggagctaatgacgttgccaacgcta

SEQ ID NO: 86581 - DNA, 25 bp, Saccharomyces pastorianus
gatgattttgcagtcgccatcaaga

SEQ ID NO: 86582 - DNA, 25 bp, Saccharomyces pastorianus
tatatctattcggttctccaagcca

SEQ ID NO: 86583 - DNA, 25 bp, Saccharomyces pastorianus
attactactgtcatggctacccaat

SEQ ID NO: 86584 - DNA, 25 bp, Saccharomyces pastorianus
gccactatgtcttttgctcatggag

SEQ ID NO: 86585 - DNA, 25 bp, Saccharomyces pastorianus
gtcctttgtctgctgtgtatgtgat

SEQ ID NO: 86586 - DNA, 25 bp, Saccharomyces pastorianus
aatcacggcaccatttccttgtcaa

SEQ ID NO: 86587 - DNA, 25 bp, Saccharomyces pastorianus
gaagttctcaaaagctgtacacgga

SEQ ID NO: 86588 - DNA, 25 bp, Saccharomyces pastorianus
gttctcaaaagctgtacacggaaac

SEQ ID NO: 86589 - DNA, 25 bp, Saccharomyces pastorianus
agctgtacacggaaacaatcacggc

SEQ ID NO: 86590 - DNA, 25 bp, Saccharomyces pastorianus
ctagatgattggttttcaaggaagt

SEQ ID NO: 86591 - DNA, 25 bp, Saccharomyces pastorianus
aaacaatcacggcaccatttccttg

SEQ ID NO: 86592 - DNA, 25 bp, Saccharomyces pastorianus
cacggaaacaatcacggcaccattt

SEQ ID NO: 86593 - DNA, 25 bp, Saccharomyces pastorianus
gattggttttcaaggaagttctcaa

SEQ ID NO: 86594 - DNA, 25 bp, Saccharomyces pastorianus
acacggaaacaatcacggcaccatt

SEQ ID NO: 86595 - DNA, 25 bp, Saccharomyces pastorianus
cggcaccatttccttgtcaactctg

SEQ ID NO: 86596 - DNA, 25 bp, Saccharomyces pastorianus
tcaaggaagttctcaaaagctgtac

SEQ ID NO: 86597 - DNA, 25 bp, Saccharomyces pastorianus
tgggccgtaattgacctaccagaaa

SEQ ID NO: 86598 - DNA, 25 bp, Saccharomyces pastorianus
tagtgtccgaaataccatcctcaag

SEQ ID NO: 86599 - DNA, 25 bp, Saccharomyces pastorianus
tttgccactctagtttgggccgtaa

SEQ ID NO: 86600 - DNA, 25 bp, Saccharomyces pastorianus
gattattctggctcgtaacgcatat

SEQ ID NO: 86601 - DNA, 25 bp, Saccharomyces pastorianus
tcccgttgtgttttgcttagtgtcc

SEQ ID NO: 86602 - DNA, 25 bp, Saccharomyces pastorianus
tctttccttcttctacaatttgggt

SEQ ID NO: 86603 - DNA, 25 bp, Saccharomyces pastorianus
ggtttgacctttacgcatttggatt

SEQ ID NO: 86604 - DNA, 25 bp, Saccharomyces pastorianus
acaatttgggtattgctcccgttgt

SEQ ID NO: 86605 - DNA, 25 bp, Saccharomyces pastorianus
ggtattgccgcaacatttctttctt

SEQ ID NO: 86606 - DNA, 25 bp, Saccharomyces pastorianus
aacatttctttcttggtgggcttca

SEQ ID NO: 86607 - DNA, 25 bp, Saccharomyces pastorianus
gaggtttgggatgctccgactcgca

SEQ ID NO: 86608 - DNA, 25 bp, Saccharomyces pastorianus
gtttatatcctggtgggcttcaaaa

SEQ ID NO: 86609 - DNA, 25 bp, Saccharomyces pastorianus
gaggattttgtctggccactttagc

SEQ ID NO: 86610 - DNA, 25 bp, Saccharomyces pastorianus
aacctcggtattgcacctgttgttt

SEQ ID NO: 86611 - DNA, 25 bp, Saccharomyces pastorianus
tagcttgggctgttgtcgatttacc

SEQ ID NO: 86612 - DNA, 25 bp, Saccharomyces pastorianus
tcgcgttcttttacaacctcggtat

SEQ ID NO: 86613 - DNA, 25 bp, Saccharomyces pastorianus
gtattgctgcaacgtttatatcctg

SEQ ID NO: 86614 - DNA, 25 bp, Saccharomyces pastorianus
ttgggctggcttttcaggctattat

SEQ ID NO: 86615 - DNA, 25 bp, Saccharomyces pastorianus
aggatgttcagacactcatggcgct

SEQ ID NO: 86616 - DNA, 25 bp, Saccharomyces pastorianus
tgacctttatgcttttgggctggct

SEQ ID NO: 86617 - DNA, 25 bp, Saccharomyces pastorianus
agtggtgctcttctaatggttgtcg

SEQ ID NO: 86618 - DNA, 25 bp, Saccharomyces pastorianus
tgcttagtgtctgaaatgccgtctt

SEQ ID NO: 86619 - DNA, 25 bp, Saccharomyces pastorianus
tatgatgatactgacgtttcctcca

SEQ ID NO: 86620 - DNA, 25 bp, Saccharomyces pastorianus
gatgactcagttctcaatttttgga

SEQ ID NO: 86621 - DNA, 25 bp, Saccharomyces pastorianus
aagggccttgcaagccagaaagaaa

SEQ ID NO: 86622 - DNA, 25 bp, Saccharomyces pastorianus
agcccaatgctggatttactggccc

SEQ ID NO: 86623 - DNA, 25 bp, Saccharomyces pastorianus
tgacgtttcctccagagttttgaaa

SEQ ID NO: 86624 - DNA, 25 bp, Saccharomyces pastorianus
gaatcgccctactttctagagatca

SEQ ID NO: 86625 - DNA, 25 bp, Saccharomyces pastorianus
gagaaggtgcttctttatcttttat

SEQ ID NO: 86626 - DNA, 25 bp, Saccharomyces pastorianus
tgaattcagcctcccaagagaaggt

SEQ ID NO: 86627 - DNA, 25 bp, Saccharomyces pastorianus
gacagtgaccagatctttagcttca

SEQ ID NO: 86628 - DNA, 25 bp, Saccharomyces pastorianus
acaggtacgttgtatgtctatcaag

SEQ ID NO: 86629 - DNA, 25 bp, Saccharomyces pastorianus
agatcattcgagaactcccatgcca

SEQ ID NO: 86630 - DNA, 25 bp, Saccharomyces pastorianus
aacttccctggcacaaacgagttat

SEQ ID NO: 86631 - DNA, 25 bp, Saccharomyces pastorianus
tatgaatgtcttgccaacttccctg

SEQ ID NO: 86632 - DNA, 25 bp, Saccharomyces pastorianus
tattcatattattacggtgcttctg

SEQ ID NO: 86633 - DNA, 25 bp, Saccharomyces pastorianus
tacggtgcttctgtacttgaacgat

SEQ ID NO: 86634 - DNA, 25 bp, Saccharomyces pastorianus
aaacgagttatcatctggcacccat

SEQ ID NO: 86635 - DNA, 25 bp, Saccharomyces pastorianus
acgcttcatagtgcctatacctttt

SEQ ID NO: 86636 - DNA, 25 bp, Saccharomyces pastorianus
gcagctctatttatatgaatgtctt

SEQ ID NO: 86637 - DNA, 25 bp, Saccharomyces pastorianus
tggcacccatctctcacctaaaatg

SEQ ID NO: 86638 - DNA, 25 bp, Saccharomyces pastorianus
gtatacgaggcgcacgcttcatagt

SEQ ID NO: 86639 - DNA, 25 bp, Saccharomyces pastorianus
gaacgatgcgtctttcataggtccc

SEQ ID NO: 86640 - DNA, 25 bp, Saccharomyces pastorianus
gtctttcataggtcccgtatacgag

SEQ ID NO: 86641 - DNA, 25 bp, Saccharomyces pastorianus
tcacttggcccaatactacatgttc

SEQ ID NO: 86642 - DNA, 25 bp, Saccharomyces pastorianus
cagattaaagccagccatctctagt

SEQ ID NO: 86643 - DNA, 25 bp, Saccharomyces pastorianus
catgttccaagccgctcatccaact

SEQ ID NO: 86644 - DNA, 25 bp, Saccharomyces pastorianus
aaagccagccatctctagtgctcta

SEQ ID NO: 86645 - DNA, 25 bp, Saccharomyces pastorianus
accaccatgttgaccggtattgccc

SEQ ID NO: 86646 - DNA, 25 bp, Saccharomyces pastorianus
aagccagccatctctagtgctctat

SEQ ID NO: 86647 - DNA, 25 bp, Saccharomyces pastorianus
cggtattgccccagaccaagtgacc

SEQ ID NO: 86648 - DNA, 25 bp, Saccharomyces pastorianus
tccaactgaaacctacccagtcgaa

SEQ ID NO: 86649 - DNA, 25 bp, Saccharomyces pastorianus
gttccaagccgctcatccaactgaa

SEQ ID NO: 86650 - DNA, 25 bp, Saccharomyces pastorianus
atgttccaagccgctcatccaactg

SEQ ID NO: 86651 - DNA, 25 bp, Saccharomyces pastorianus
ccaagccgctcatccaactgaaacc

SEQ ID NO: 86652 - DNA, 25 bp, Saccharomyces pastorianus
attgctacttctctaggaacggccg

SEQ ID NO: 86653 - DNA, 25 bp, Saccharomyces pastorianus
ataattattgcttgtggcggctcct

SEQ ID NO: 86654 - DNA, 25 bp, Saccharomyces pastorianus
gacactcctgtaatagaagtcgctg

SEQ ID NO: 86655 - DNA, 25 bp, Saccharomyces pastorianus
gaagtcgctgacaatttcatatttc

SEQ ID NO: 86656 - DNA, 25 bp, Saccharomyces pastorianus
ggatgtcatgttttcaatacttctt

SEQ ID NO: 86657 - DNA, 25 bp, Saccharomyces pastorianus
ggaacggccgtgatctctaatcaaa

SEQ ID NO: 86658 - DNA, 25 bp, Saccharomyces pastorianus
gattgaaccggcatgtggcgccgca

SEQ ID NO: 86659 - DNA, 25 bp, Saccharomyces pastorianus
ttgggttacaacactaagatcctag

SEQ ID NO: 86660 - DNA, 25 bp, Saccharomyces pastorianus
tggcggctcctctaatactataaag

SEQ ID NO: 86661 - DNA, 25 bp, Saccharomyces pastorianus
aataggccaaccagttcaattcaag

SEQ ID NO: 86662 - DNA, 25 bp, Saccharomyces pastorianus
agatcctagaaaatgcactgggctc

SEQ ID NO: 86663 - DNA, 25 bp, Saccharomyces pastorianus
aactgttgcagcgacaatggctcct

SEQ ID NO: 86664 - DNA, 25 bp, Saccharomyces pastorianus
gttctaaggcgttgttatcatcatt

SEQ ID NO: 86665 - DNA, 25 bp, Saccharomyces pastorianus
aatggctcctagtcgtaatggtcct

SEQ ID NO: 86666 - DNA, 25 bp, Saccharomyces pastorianus
gactttcgttgaccttctttgatga

SEQ ID NO: 86667 - DNA, 25 bp, Saccharomyces pastorianus
ccttctaagtcgctcaatctgggaa

SEQ ID NO: 86668 - DNA, 25 bp, Saccharomyces pastorianus
taagtacccctccacatgttggtgt

SEQ ID NO: 86669 - DNA, 25 bp, Saccharomyces pastorianus
aatctgggaagtttctccgcctcat

SEQ ID NO: 86670 - DNA, 25 bp, Saccharomyces pastorianus
atggtcctcgtattccaagttctaa

SEQ ID NO: 86671 - DNA, 25 bp, Saccharomyces pastorianus
agtgaactgtcatccaactgttgca

SEQ ID NO: 86672 - DNA, 25 bp, Saccharomyces pastorianus
ttcaagccatctaatccgacgtttg

SEQ ID NO: 86673 - DNA, 25 bp, Saccharomyces pastorianus
tactatctaacaaaccagcaccttc

SEQ ID NO: 86674 - DNA, 25 bp, Saccharomyces pastorianus
tcttgtaggccctaacggtaatact

SEQ ID NO: 86675 - DNA, 25 bp, Saccharomyces pastorianus
gaggtccgtcgagtagtagaagatt

SEQ ID NO: 86676 - DNA, 25 bp, Saccharomyces pastorianus
ttcctttcccgcaagccgttaagat

SEQ ID NO: 86677 - DNA, 25 bp, Saccharomyces pastorianus
agaaggtctatactccatttcctcc

SEQ ID NO: 86678 - DNA, 25 bp, Saccharomyces pastorianus
gaagacaacgtcttgtaggccctaa

SEQ ID NO: 86679 - DNA, 25 bp, Saccharomyces pastorianus
atgacatggcatgcgacgttattaa

SEQ ID NO: 86680 - DNA, 25 bp, Saccharomyces pastorianus
tattcaccctatctatcatatcaag

SEQ ID NO: 86681 - DNA, 25 bp, Saccharomyces pastorianus
tcctgcccaattgcctagaaaggtt

SEQ ID NO: 86682 - DNA, 25 bp, Saccharomyces pastorianus
ccatgggtcccttcaagggcttgaa

SEQ ID NO: 86683 - DNA, 25 bp, Saccharomyces pastorianus
gcaagccgttaagatcctacaagat

SEQ ID NO: 86684 - DNA, 25 bp, Saccharomyces pastorianus
ttcaagggcttgaaggaggtccgtc

SEQ ID NO: 86685 - DNA, 25 bp, Saccharomyces pastorianus
cagcatgctgtcgtttgtttttgat

SEQ ID NO: 86686 - DNA, 25 bp, Saccharomyces pastorianus
gatatcatttcgatctgcttcagca

SEQ ID NO: 86687 - DNA, 25 bp, Saccharomyces pastorianus
ctttcaccactgttccctataagga

SEQ ID NO: 86688 - DNA, 25 bp, Saccharomyces pastorianus
acctttctttttcatgctacacttg

SEQ ID NO: 86689 - DNA, 25 bp, Saccharomyces pastorianus
agctcctcggctttcaaagtagtct

SEQ ID NO: 86690 - DNA, 25 bp, Saccharomyces pastorianus
cagtttagctggctcttgtgtactt

SEQ ID NO: 86691 - DNA, 25 bp, Saccharomyces pastorianus
gaatttgctctcgtaccttggagtc

SEQ ID NO: 86692 - DNA, 25 bp, Saccharomyces pastorianus
gtaccattccgctctatatgtatat

SEQ ID NO: 86693 - DNA, 25 bp, Saccharomyces pastorianus
tggagtccttttcctggtccttgat

SEQ ID NO: 86694 - DNA, 25 bp, Saccharomyces pastorianus
ttttccttgctaaattcccttgagt

SEQ ID NO: 86695 - DNA, 25 bp, Saccharomyces pastorianus
tttgtactttcttgccaacaccaac

SEQ ID NO: 86696 - DNA, 25 bp, Saccharomyces pastorianus
aacaaacgacagcatgctgaagcag

SEQ ID NO: 86697 - DNA, 25 bp, Saccharomyces pastorianus
agctgagactactttgaaagccgag

SEQ ID NO: 86698 - DNA, 25 bp, Saccharomyces pastorianus
aaaggactccaaggtacgagagcaa

SEQ ID NO: 86699 - DNA, 25 bp, Saccharomyces pastorianus
taaggtacaataactcaagggaatt

SEQ ID NO: 86700 - DNA, 25 bp, Saccharomyces pastorianus
gcaagcctgctataataaggtacaa

SEQ ID NO: 86701 - DNA, 25 bp, Saccharomyces pastorianus
gcaagtacacaagagccagctaaac

SEQ ID NO: 86702 - DNA, 25 bp, Saccharomyces pastorianus
tcagcaccgctgaaaggaagagaac

SEQ ID NO: 86703 - DNA, 25 bp, Saccharomyces pastorianus
aaaagaggtcgatcagcaccgctga

SEQ ID NO: 86704 - DNA, 25 bp, Saccharomyces pastorianus
aacaatgataccgacgctgctgcgg

SEQ ID NO: 86705 - DNA, 25 bp, Saccharomyces pastorianus
aagccgaggagctgatcaaggacca

SEQ ID NO: 86706 - DNA, 25 bp, Saccharomyces pastorianus
acgctgctgcgggaggcaagtacac

SEQ ID NO: 86707 - DNA, 25 bp, Saccharomyces pastorianus
ggtgtgttcacctcagtattattct

SEQ ID NO: 86708 - DNA, 25 bp, Saccharomyces pastorianus
gtattattcttcaagcgccgtgcat

SEQ ID NO: 86709 - DNA, 25 bp, Saccharomyces pastorianus
tgtccacgatcctcgacactaagtg

SEQ ID NO: 86710 - DNA, 25 bp, Saccharomyces pastorianus
tgtcctgtccaacatgctggtcaag

SEQ ID NO: 86711 - DNA, 25 bp, Saccharomyces pastorianus
tacgccgagggcgacgccatcttta

SEQ ID NO: 86712 - DNA, 25 bp, Saccharomyces pastorianus
gctggtcaagactgccatgggtttt

SEQ ID NO: 86713 - DNA, 25 bp, Saccharomyces pastorianus
gtgcatttcctgtatggctaggcat

SEQ ID NO: 86714 - DNA, 25 bp, Saccharomyces pastorianus
aagaatggcagctccgtgtccacga

SEQ ID NO: 86715 - DNA, 25 bp, Saccharomyces pastorianus
atttggtgttggaagaggctacgcc

SEQ ID NO: 86716 - DNA, 25 bp, Saccharomyces pastorianus
aagtgggatattgtcctgtccaaca

SEQ ID NO: 86717 - DNA, 25 bp, Saccharomyces pastorianus
aaagcactccctccaaggattctaa

SEQ ID NO: 86718 - DNA, 25 bp, Saccharomyces pastorianus
gggcggaagtctttgcaactgatat

SEQ ID NO: 86719 - DNA, 25 bp, Saccharomyces pastorianus
gcccgtggtggcctttatgatatta

SEQ ID NO: 86720 - DNA, 25 bp, Saccharomyces pastorianus
ttacggttatctatgggcggaagtc

SEQ ID NO: 86721 - DNA, 25 bp, Saccharomyces pastorianus
gaattaatcaacctctcatcgcatt

SEQ ID NO: 86722 - DNA, 25 bp, Saccharomyces pastorianus
gaatcgaggtttaatggccccggat

SEQ ID NO: 86723 - DNA, 25 bp, Saccharomyces pastorianus
agactcttactctgccggttattac

SEQ ID NO: 86724 - DNA, 25 bp, Saccharomyces pastorianus
catggtatccatgacctggtgggac

SEQ ID NO: 86725 - DNA, 25 bp, Saccharomyces pastorianus
ggtgctttattcactctaagacaat

SEQ ID NO: 86726 - DNA, 25 bp, Saccharomyces pastorianus
tatgtatcacaccaaattcgctaag

SEQ ID NO: 86727 - DNA, 25 bp, Saccharomyces pastorianus
ctgtcaatttgcgatacctggaacc

SEQ ID NO: 86728 - DNA, 25 bp, Saccharomyces pastorianus
gaggcaccttcccaaatgttagaat

SEQ ID NO: 86729 - DNA, 25 bp, Saccharomyces pastorianus
gctttactccaagatttgagctatt

SEQ ID NO: 86730 - DNA, 25 bp, Saccharomyces pastorianus
gggctattacggaaagtttggctgt

SEQ ID NO: 86731 - DNA, 25 bp, Saccharomyces pastorianus
gtgttactcatgcatttcagtgata

SEQ ID NO: 86732 - DNA, 25 bp, Saccharomyces pastorianus
tatggagtggtgtaagttcgctgct

SEQ ID NO: 86733 - DNA, 25 bp, Saccharomyces pastorianus
gcttgatttcttcgcagtattggaa

SEQ ID NO: 86734 - DNA, 25 bp, Saccharomyces pastorianus
aagttcgctgcttgatttcttcgca

SEQ ID NO: 86735 - DNA, 25 bp, Saccharomyces pastorianus
attactgctgctttactccaagatt

SEQ ID NO: 86736 - DNA, 25 bp, Saccharomyces pastorianus
gaacatatcagacatattactgctg

SEQ ID NO: 86737 - DNA, 25 bp, Saccharomyces pastorianus
aatggttttaatctatccagggacg

SEQ ID NO: 86738 - DNA, 25 bp, Saccharomyces pastorianus
gaaaacctaggcgtggtcaacgata

SEQ ID NO: 86739 - DNA, 25 bp, Saccharomyces pastorianus
gtttggctgtgttactcatgcattt

SEQ ID NO: 86740 - DNA, 25 bp, Saccharomyces pastorianus
gggttatagtgagcccagatgttat

SEQ ID NO: 86741 - DNA, 25 bp, Saccharomyces pastorianus
gttggataacttctcacccaagaga

SEQ ID NO: 86742 - DNA, 25 bp, Saccharomyces pastorianus
atcccatttgtatcgtattgcagaa

SEQ ID NO: 86743 - DNA, 25 bp, Saccharomyces pastorianus
gacaagaaatcaccgttttatccag

SEQ ID NO: 86744 - DNA, 25 bp, Saccharomyces pastorianus
attgatctccaaaccaggtttcctg

SEQ ID NO: 86745 - DNA, 25 bp, Saccharomyces pastorianus
ctaccgcgactagacgattacatat

SEQ ID NO: 86746 - DNA, 25 bp, Saccharomyces pastorianus
ttgcagaaaacttctctaccgcgac

SEQ ID NO: 86747 - DNA, 25 bp, Saccharomyces pastorianus
gactggttacgagacacccgtcaaa

SEQ ID NO: 86748 - DNA, 25 bp, Saccharomyces pastorianus
taatggtgctgtaccatcccatttg

SEQ ID NO: 86749 - DNA, 25 bp, Saccharomyces pastorianus
aggtttcctgttcatctgggccaat

SEQ ID NO: 86750 - DNA, 25 bp, Saccharomyces pastorianus
acgtagacactgacttgagtatcga

SEQ ID NO: 86751 - DNA, 25 bp, Saccharomyces pastorianus
gtaccaattccaaggcctgacacaa

SEQ ID NO: 86752 - DNA, 25 bp, Saccharomyces pastorianus
aacgccctaaatgcatgtatctaat

SEQ ID NO: 86753 - DNA, 25 bp, Saccharomyces pastorianus
agacgatactacattccaccatttg

SEQ ID NO: 86754 - DNA, 25 bp, Saccharomyces pastorianus
catctccatcatatacattttctcc

SEQ ID NO: 86755 - DNA, 25 bp, Saccharomyces pastorianus
tatcgataaattccaatcctctccc

SEQ ID NO: 86756 - DNA, 25 bp, Saccharomyces pastorianus
taatgcacctgcaattgccgttaga

SEQ ID NO: 86757 - DNA, 25 bp, Saccharomyces pastorianus
gaagttatattagcctgcgacacag

SEQ ID NO: 86758 - DNA, 25 bp, Saccharomyces pastorianus
gaacctatcggtttgcatccaaaaa

SEQ ID NO: 86759 - DNA, 25 bp, Saccharomyces pastorianus
gatatgaatctctctttacagacga

SEQ ID NO: 86760 - DNA, 25 bp, Saccharomyces pastorianus
ggtacgttactatgcttactcatct

SEQ ID NO: 86761 - DNA, 25 bp, Saccharomyces pastorianus
gaactcgacaactcttctagtacca

SEQ ID NO: 86762 - DNA, 25 bp, Saccharomyces pastorianus
ttatcccaggatgatgacgcactga

SEQ ID NO: 86763 - DNA, 25 bp, Saccharomyces pastorianus
ggtgatatggttgatctgtcctctt

SEQ ID NO: 86764 - DNA, 25 bp, Saccharomyces pastorianus
attacgagagcggacgatgcacccc

SEQ ID NO: 86765 - DNA, 25 bp, Saccharomyces pastorianus
gacttagtctttagtttatcccagg

SEQ ID NO: 86766 - DNA, 25 bp, Saccharomyces pastorianus
attaatgcacagtccatgccctttt

SEQ ID NO: 86767 - DNA, 25 bp, Saccharomyces pastorianus
tgaaaacgttccatgcgagcaacag

SEQ ID NO: 86768 - DNA, 25 bp, Saccharomyces pastorianus
tgtcctcttttgtcaacacgcagag

SEQ ID NO: 86769 - DNA, 25 bp, Saccharomyces pastorianus
gtaaggacattctcatgggtgaacc

SEQ ID NO: 86770 - DNA, 25 bp, Saccharomyces pastorianus
atgcaacaccgcaacctgattgata

SEQ ID NO: 86771 - DNA, 25 bp, Saccharomyces pastorianus
tgtggtcaaatcctgtacgcctgat

SEQ ID NO: 86772 - DNA, 25 bp, Saccharomyces pastorianus
tgcccttttcagtcaacggtgtcaa

SEQ ID NO: 86773 - DNA, 25 bp, Saccharomyces pastorianus
taagttgctgtgtgccttggacaat

SEQ ID NO: 86774 - DNA, 25 bp, Saccharomyces pastorianus
ggaatggatctgtgtcgttccacgt

SEQ ID NO: 86775 - DNA, 25 bp, Saccharomyces pastorianus
tcgttcgctcattttgtcttgccaa

SEQ ID NO: 86776 - DNA, 25 bp, Saccharomyces pastorianus
agacctattagctatgtgttacatc

SEQ ID NO: 86777 - DNA, 25 bp, Saccharomyces pastorianus
aggtttcaactccacaggttattgt

SEQ ID NO: 86778 - DNA, 25 bp, Saccharomyces pastorianus
acgttcgaaggccttttctgatgaa

SEQ ID NO: 86779 - DNA, 25 bp, Saccharomyces pastorianus
tgtcttgccaatgccggagtccgaa

SEQ ID NO: 86780 - DNA, 25 bp, Saccharomyces pastorianus
gaacatttcctaccaactttcaata

SEQ ID NO: 86781 - DNA, 25 bp, Saccharomyces pastorianus
aagatgctaaagtctcgttcgctca

SEQ ID NO: 86782 - DNA, 25 bp, Saccharomyces pastorianus
aagttcgtcactttccaagatagac

SEQ ID NO: 86783 - DNA, 25 bp, Saccharomyces pastorianus
tgaccccaaccgatttattgactgc

SEQ ID NO: 86784 - DNA, 25 bp, Saccharomyces pastorianus
tccccatctcggtgccatataattg

SEQ ID NO: 86785 - DNA, 25 bp, Saccharomyces pastorianus
ttaaccagactgtttcccaatccag

SEQ ID NO: 86786 - DNA, 25 bp, Saccharomyces pastorianus
gagaaacgcaactaccctagagcct

SEQ ID NO: 86787 - DNA, 25 bp, Saccharomyces pastorianus
cctgtcgcctcttacatgactaaaa

SEQ ID NO: 86788 - DNA, 25 bp, Saccharomyces pastorianus
tgaggttcagtgtcccaatgagaga

SEQ ID NO: 86789 - DNA, 25 bp, Saccharomyces pastorianus
ctgatttttctttgactttcgagga

SEQ ID NO: 86790 - DNA, 25 bp, Saccharomyces pastorianus
cacctgcctctgagtgcatttggag

SEQ ID NO: 86791 - DNA, 25 bp, Saccharomyces pastorianus
gactggcgaaccgaatgggcacctg

SEQ ID NO: 86792 - DNA, 25 bp, Saccharomyces pastorianus
tcaatgtagcgcttggtccaggtac

SEQ ID NO: 86793 - DNA, 25 bp, Saccharomyces pastorianus
ggtactaccatgttgatgcacctac

SEQ ID NO: 86794 - DNA, 25 bp, Saccharomyces pastorianus
caatgtggtccagctttggtattca

SEQ ID NO: 86795 - DNA, 25 bp, Saccharomyces pastorianus
ggttcgttcaaagatatcatgttcg

SEQ ID NO: 86796 - DNA, 25 bp, Saccharomyces pastorianus
gattggaggtgctattttctttgaa

SEQ ID NO: 86797 - DNA, 25 bp, Saccharomyces pastorianus
aaattcacttgtatttctggtaaga

SEQ ID NO: 86798 - DNA, 25 bp, Saccharomyces pastorianus
gtagcgcttttattaagagttcatc

SEQ ID NO: 86799 - DNA, 25 bp, Saccharomyces pastorianus
acgtaacagacattcaaggtggctt

SEQ ID NO: 86800 - DNA, 25 bp, Saccharomyces pastorianus
tagggacacatcattggtctacctt

SEQ ID NO: 86801 - DNA, 25 bp, Saccharomyces pastorianus
gatattactttcctgccaaacttga

SEQ ID NO: 86802 - DNA, 25 bp, Saccharomyces pastorianus
gatcgccgataacgaatccctcgag

SEQ ID NO: 86803 - DNA, 25 bp, Saccharomyces pastorianus
cattggtctaccttccacaattaac

SEQ ID NO: 86804 - DNA, 25 bp, Saccharomyces pastorianus
aatacgcgaactcagcaaatccaag

SEQ ID NO: 86805 - DNA, 25 bp, Saccharomyces pastorianus
tcaaggtggcttgatgatcgccgat

SEQ ID NO: 86806 - DNA, 25 bp, Saccharomyces pastorianus
gggcgctaggattcatgttatgcaa

SEQ ID NO: 86807 - DNA, 25 bp, Saccharomyces pastorianus
gagagcttcatgtcgggatctcaat

SEQ ID NO: 86808 - DNA, 25 bp, Saccharomyces pastorianus
tgatgtgcttattcgctgactacct

SEQ ID NO: 86809 - DNA, 25 bp, Saccharomyces pastorianus
gatatgctagtgacatccttgaggg

SEQ ID NO: 86810 - DNA, 25 bp, Saccharomyces pastorianus
aatctgtagtatctgtcgggttgac

SEQ ID NO: 86811 - DNA, 25 bp, Saccharomyces pastorianus
agacgagttgccattgtgcatatac

SEQ ID NO: 86812 - DNA, 25 bp, Saccharomyces pastorianus
aggcgattgccatctcagtgctgaa

SEQ ID NO: 86813 - DNA, 25 bp, Saccharomyces pastorianus
aaagacacccgttcgcatgttttat

SEQ ID NO: 86814 - DNA, 25 bp, Saccharomyces pastorianus
ggcatcttttccaactcgtctggaa

SEQ ID NO: 86815 - DNA, 25 bp, Saccharomyces pastorianus
taagttgcctaagccggcatctttt

SEQ ID NO: 86816 - DNA, 25 bp, Saccharomyces pastorianus
gtcgggttgactgttttctcgaaat

SEQ ID NO: 86817 - DNA, 25 bp, Saccharomyces pastorianus
agagtttatggctaccccatacacg

SEQ ID NO: 86818 - DNA, 25 bp, Saccharomyces pastorianus
gcgacaatttttcttatgatccatt

SEQ ID NO: 86819 - DNA, 25 bp, Saccharomyces pastorianus
aggatcacaccttcgggccaatttg

SEQ ID NO: 86820 - DNA, 25 bp, Saccharomyces pastorianus
gagcgtttgtctaactcaagcgaca

SEQ ID NO: 86821 - DNA, 25 bp, Saccharomyces pastorianus
ggtgatcacgtattttatccgtcct

SEQ ID NO: 86822 - DNA, 25 bp, Saccharomyces pastorianus
tacacgccagttatcccaattaatg

SEQ ID NO: 86823 - DNA, 25 bp, Saccharomyces pastorianus
aatcacctacataccaaagctttta

SEQ ID NO: 86824 - DNA, 25 bp, Saccharomyces pastorianus
ctatattcgtcttgttggtgatcac

SEQ ID NO: 86825 - DNA, 25 bp, Saccharomyces pastorianus
tattgccaggatccgattcgcagtt

SEQ ID NO: 86826 - DNA, 25 bp, Saccharomyces pastorianus
agtcactaaccccagatgagcgttt

SEQ ID NO: 86827 - DNA, 25 bp, Saccharomyces pastorianus
agcattatatgtgatctaggccttg

SEQ ID NO: 86828 - DNA, 25 bp, Saccharomyces pastorianus
aaccctgttgcggtctcgagaatca

SEQ ID NO: 86829 - DNA, 25 bp, Saccharomyces pastorianus
acaccaagtctgtacacgttatctt

SEQ ID NO: 86830 - DNA, 25 bp, Saccharomyces pastorianus
aaatgaagacgtacaccaagtctgt

SEQ ID NO: 86831 - DNA, 25 bp, Saccharomyces pastorianus
atgactttctcccaaggacctaagt

SEQ ID NO: 86832 - DNA, 25 bp, Saccharomyces pastorianus
ggacctaagttagccagttgccaat

SEQ ID NO: 86833 - DNA, 25 bp, Saccharomyces pastorianus
acgtttctgaaaagaatctgtccgg

SEQ ID NO: 86834 - DNA, 25 bp, Saccharomyces pastorianus
ataagatgagaaccctgttgcggtc

SEQ ID NO: 86835 - DNA, 25 bp, Saccharomyces pastorianus
gtttcggtagggttcgataagatga

SEQ ID NO: 86836 - DNA, 25 bp, Saccharomyces pastorianus
tggacacaactcgtgtttaggaaga

SEQ ID NO: 86837 - DNA, 25 bp, Saccharomyces pastorianus
gaaaagaatctgtccggaagaaacg

SEQ ID NO: 86838 - DNA, 25 bp, Saccharomyces pastorianus
gaatcagggatgactttctcccaag

SEQ ID NO: 86839 - DNA, 25 bp, Saccharomyces pastorianus
gcatttcttagcatcttcgggagat

SEQ ID NO: 86840 - DNA, 25 bp, Saccharomyces pastorianus
gagattccatttccgcaccagtaaa

SEQ ID NO: 86841 - DNA, 25 bp, Saccharomyces pastorianus
gaaaggcccgcaagatattgatctc

SEQ ID NO: 86842 - DNA, 25 bp, Saccharomyces pastorianus
gttgaggcgcagaatcccattatta

SEQ ID NO: 86843 - DNA, 25 bp, Saccharomyces pastorianus
ggatgctatgaacggtactcctctc

SEQ ID NO: 86844 - DNA, 25 bp, Saccharomyces pastorianus
gaggtcaaacaaagcgtcgctctcg

SEQ ID NO: 86845 - DNA, 25 bp, Saccharomyces pastorianus
tgaactcatcaattccatatcccac

SEQ ID NO: 86846 - DNA, 25 bp, Saccharomyces pastorianus
tcattttgccccatgacacgaaagg

SEQ ID NO: 86847 - DNA, 25 bp, Saccharomyces pastorianus
agtcttcttctactggccttgaagg

SEQ ID NO: 86848 - DNA, 25 bp, Saccharomyces pastorianus
taaagaagagatccagcaccacact

SEQ ID NO: 86849 - DNA, 25 bp, Saccharomyces pastorianus
gccttgaaggtctttccgagtccaa

SEQ ID NO: 86850 - DNA, 25 bp, Saccharomyces pastorianus
gtatctgttttatccggtcattcca

SEQ ID NO: 86851 - DNA, 25 bp, Saccharomyces pastorianus
gaggacgacgaaacctttccacgtg

SEQ ID NO: 86852 - DNA, 25 bp, Saccharomyces pastorianus
tgggttcccctccaaagaggagcta

SEQ ID NO: 86853 - DNA, 25 bp, Saccharomyces pastorianus
tcgcctacggtaataagcttgtcat

SEQ ID NO: 86854 - DNA, 25 bp, Saccharomyces pastorianus
tgacttgtatctcattaccgctaaa

SEQ ID NO: 86855 - DNA, 25 bp, Saccharomyces pastorianus
tttggccagaagcaacagcacttta

SEQ ID NO: 86856 - DNA, 25 bp, Saccharomyces pastorianus
tattatcagatcttgcttcgcctac

SEQ ID NO: 86857 - DNA, 25 bp, Saccharomyces pastorianus
agatgtctacgatttcagtgggttc

SEQ ID NO: 86858 - DNA, 25 bp, Saccharomyces pastorianus
aatgtttgcttctggcggtgatgac

SEQ ID NO: 86859 - DNA, 25 bp, Saccharomyces pastorianus
acccaccagggcgttatagatgtct

SEQ ID NO: 86860 - DNA, 25 bp, Saccharomyces pastorianus
taacacgcatcaaggcttccatagg

SEQ ID NO: 86861 - DNA, 25 bp, Saccharomyces pastorianus
attggtgtcaaattccctggcagag

SEQ ID NO: 86862 - DNA, 25 bp, Saccharomyces pastorianus
atgaaggccatctggaccatacgct

SEQ ID NO: 86863 - DNA, 25 bp, Saccharomyces pastorianus
ctactataccctgcatttgttcatg

SEQ ID NO: 86864 - DNA, 25 bp, Saccharomyces pastorianus
gaaactcccggtgatctagacgtgt

SEQ ID NO: 86865 - DNA, 25 bp, Saccharomyces pastorianus
taaagtggtgcccatgtcgtatgcc

SEQ ID NO: 86866 - DNA, 25 bp, Saccharomyces pastorianus
gatctagacgtgttcatcttggaca

SEQ ID NO: 86867 - DNA, 25 bp, Saccharomyces pastorianus
agggcatttgttggtcatcacgtga

SEQ ID NO: 86868 - DNA, 25 bp, Saccharomyces pastorianus
aagcggcatggacgatgttcttaaa

SEQ ID NO: 86869 - DNA, 25 bp, Saccharomyces pastorianus
atacgctgcttttggctgaaactcc

SEQ ID NO: 86870 - DNA, 25 bp, Saccharomyces pastorianus
atgcgtttctacacaatgccggtaa

SEQ ID NO: 86871 - DNA, 25 bp, Saccharomyces pastorianus
atgccggtaacgatgcctactatac

SEQ ID NO: 86872 - DNA, 25 bp, Saccharomyces pastorianus
acgacgatttgcaggaattgaggga

SEQ ID NO: 86873 - DNA, 25 bp, Saccharomyces pastorianus
aaggaccttattgcagaaaacgaga

SEQ ID NO: 86874 - DNA, 25 bp, Saccharomyces pastorianus
gtcgcatccaaaacgtactgtccat

SEQ ID NO: 86875 - DNA, 25 bp, Saccharomyces pastorianus
cattcaggctgcgttatatgagatt

SEQ ID NO: 86876 - DNA, 25 bp, Saccharomyces pastorianus
gcagccctaaacacgctttttgaaa

SEQ ID NO: 86877 - DNA, 25 bp, Saccharomyces pastorianus
gaaaacgagatcttcgtcgcatcca

SEQ ID NO: 86878 - DNA, 25 bp, Saccharomyces pastorianus
tgtccatactgccatgcagccctaa

SEQ ID NO: 86879 - DNA, 25 bp, Saccharomyces pastorianus
aaactatcaagcacgtcaaggacct

SEQ ID NO: 86880 - DNA, 25 bp, Saccharomyces pastorianus
aaacatattggaggcaacgacgatt

SEQ ID NO: 86881 - DNA, 25 bp, Saccharomyces pastorianus
caggtccaaagttctggttttgcaa

SEQ ID NO: 86882 - DNA, 25 bp, Saccharomyces pastorianus
gaaggaaggcgcagacattcaggct

SEQ ID NO: 86883 - DNA, 25 bp, Saccharomyces pastorianus
tggcggacggtctaacttcatggat

SEQ ID NO: 86884 - DNA, 25 bp, Saccharomyces pastorianus
agagagcttgtcttcttatcagccg

SEQ ID NO: 86885 - DNA, 25 bp, Saccharomyces pastorianus
ggtggctgcgttgactgcatacgac

SEQ ID NO: 86886 - DNA, 25 bp, Saccharomyces pastorianus
aggcacccaggattcggctcataat

SEQ ID NO: 86887 - DNA, 25 bp, Saccharomyces pastorianus
caagggcaagttctccacggacgat

SEQ ID NO: 86888 - DNA, 25 bp, Saccharomyces pastorianus
ttacagaactcgctgatcggactgc

SEQ ID NO: 86889 - DNA, 25 bp, Saccharomyces pastorianus
gatcacggctcgtacgatgacggta

SEQ ID NO: 86890 - DNA, 25 bp, Saccharomyces pastorianus
tccaactcgctgactaatgccgata

SEQ ID NO: 86891 - DNA, 25 bp, Saccharomyces pastorianus
gaggtactcgaagagcagccgttcc

SEQ ID NO: 86892 - DNA, 25 bp, Saccharomyces pastorianus
gttcatccaggcaagggcgatcaga

SEQ ID NO: 86893 - DNA, 25 bp, Saccharomyces pastorianus
tcgcgtctgctgtgtcgttacagaa

SEQ ID NO: 86894 - DNA, 25 bp, Saccharomyces pastorianus
aagctcttctccgattaacacacat

SEQ ID NO: 86895 - DNA, 25 bp, Saccharomyces pastorianus
gggccatcacctaacgaggcgttaa

SEQ ID NO: 86896 - DNA, 25 bp, Saccharomyces pastorianus
agtctttcccactcaaaatctttgc

SEQ ID NO: 86897 - DNA, 25 bp, Saccharomyces pastorianus
atctgccgtttcaacagcgaacaca

SEQ ID NO: 86898 - DNA, 25 bp, Saccharomyces pastorianus
gaagactcctgcgaacggatcttga

SEQ ID NO: 86899 - DNA, 25 bp, Saccharomyces pastorianus
atggagtgtctactacggtaccttc

SEQ ID NO: 86900 - DNA, 25 bp, Saccharomyces pastorianus
acagactatttcgacacagttcata

SEQ ID NO: 86901 - DNA, 25 bp, Saccharomyces pastorianus
agtgacggtgtgtctctttcacaaa

SEQ ID NO: 86902 - DNA, 25 bp, Saccharomyces pastorianus
gcgttaaaacagttgcgtgcatcta

SEQ ID NO: 86903 - DNA, 25 bp, Saccharomyces pastorianus
tttgcatcccgccattatgttaaga

SEQ ID NO: 86904 - DNA, 25 bp, Saccharomyces pastorianus
ggtaatgaagaccagctcaagctct

SEQ ID NO: 86905 - DNA, 25 bp, Saccharomyces pastorianus
aaatactcgaatttgcatgccaagc

SEQ ID NO: 86906 - DNA, 25 bp, Saccharomyces pastorianus
gactccatcattcacaacttttgtt

SEQ ID NO: 86907 - DNA, 25 bp, Saccharomyces pastorianus
cacggcgctattaaaatttgttgat

SEQ ID NO: 86908 - DNA, 25 bp, Saccharomyces pastorianus
aaataactgctggaatgctttgaaa

SEQ ID NO: 86909 - DNA, 25 bp, Saccharomyces pastorianus
taaggccaagccaatttcaaatata

SEQ ID NO: 86910 - DNA, 25 bp, Saccharomyces pastorianus
gacatatacgactccatcattcaca

SEQ ID NO: 86911 - DNA, 25 bp, Saccharomyces pastorianus
gttaacttctacaaaccactggata

SEQ ID NO: 86912 - DNA, 25 bp, Saccharomyces pastorianus
gatttatcagcattgacctccgatc

SEQ ID NO: 86913 - DNA, 25 bp, Saccharomyces pastorianus
gcattgacctccgatctgatgtcct

SEQ ID NO: 86914 - DNA, 25 bp, Saccharomyces pastorianus
acacaccaagaaacacggcgctatt

SEQ ID NO: 86915 - DNA, 25 bp, Saccharomyces pastorianus
tgtcctccactgacgtcaacgagaa

SEQ ID NO: 86916 - DNA, 25 bp, Saccharomyces pastorianus
tgccgctcaaatcaactcgtgggtt

SEQ ID NO: 86917 - DNA, 25 bp, Saccharomyces pastorianus
tgaggcctttggttctgtaatcttc

SEQ ID NO: 86918 - DNA, 25 bp, Saccharomyces pastorianus
agctaaaggctgacttcccagcgta

SEQ ID NO: 86919 - DNA, 25 bp, Saccharomyces pastorianus
aaatccctgagtcttggaccgtaca

SEQ ID NO: 86920 - DNA, 25 bp, Saccharomyces pastorianus
tttaactgctcgtcgtactatttac

SEQ ID NO: 86921 - DNA, 25 bp, Saccharomyces pastorianus
atagaaagccctgccggtcaaaaga

SEQ ID NO: 86922 - DNA, 25 bp, Saccharomyces pastorianus
gggtggtcacctacaacactacaat

SEQ ID NO: 86923 - DNA, 25 bp, Saccharomyces pastorianus
tgtaatcttcttcaccgacgacaag

SEQ ID NO: 86924 - DNA, 25 bp, Saccharomyces pastorianus
tccgtcgtccaaaccatcattaaag

SEQ ID NO: 86925 - DNA, 25 bp, Saccharomyces pastorianus
tacgctttgaaaccggagttacctg

SEQ ID NO: 86926 - DNA, 25 bp, Saccharomyces pastorianus
aaatcgcgctgttatcttgactggt

SEQ ID NO: 86927 - DNA, 25 bp, Saccharomyces pastorianus
gatgttcctattgcgtggactgtac

SEQ ID NO: 86928 - DNA, 25 bp, Saccharomyces pastorianus
atacgccaacagcttttaactcaca

SEQ ID NO: 86929 - DNA, 25 bp, Saccharomyces pastorianus
tgttccaactgccttgccagaagaa

SEQ ID NO: 86930 - DNA, 25 bp, Saccharomyces pastorianus
aagagattttccagccttggcagcc

SEQ ID NO: 86931 - DNA, 25 bp, Saccharomyces pastorianus
aaccgtcgtaccatctacaatttga

SEQ ID NO: 86932 - DNA, 25 bp, Saccharomyces pastorianus
acgtcaaatctgctttgcctcaaga

SEQ ID NO: 86933 - DNA, 25 bp, Saccharomyces pastorianus
aatcgcgctgtcattatcgttggtg

SEQ ID NO: 86934 - DNA, 25 bp, Saccharomyces pastorianus
gaggcttacggttcagtcattttct

SEQ ID NO: 86935 - DNA, 25 bp, Saccharomyces pastorianus
tggactgccctcgaactattgggat

SEQ ID NO: 86936 - DNA, 25 bp, Saccharomyces pastorianus
ttgcgagcgcaatgccaactgctga

SEQ ID NO: 86937 - DNA, 25 bp, Saccharomyces pastorianus
atacgaccggtgctgtgcaaattca

SEQ ID NO: 86938 - DNA, 25 bp, Saccharomyces pastorianus
agtgtttcaccaagcttccatgggc

SEQ ID NO: 86939 - DNA, 25 bp, Saccharomyces pastorianus
gctcatgttgcgcaagttggacctt

SEQ ID NO: 86940 - DNA, 25 bp, Saccharomyces pastorianus
gcctatacacgtttattgcacacta

SEQ ID NO: 86941 - DNA, 25 bp, Saccharomyces pastorianus
atgggtctcggtattcactacagtc

SEQ ID NO: 86942 - DNA, 25 bp, Saccharomyces pastorianus
aagttggaccttgccggtgctacca

SEQ ID NO: 86943 - DNA, 25 bp, Saccharomyces pastorianus
gctattctacgctgttgtatccaaa

SEQ ID NO: 86944 - DNA, 25 bp, Saccharomyces pastorianus
cgtcagcactattatcaagcctata

SEQ ID NO: 86945 - DNA, 25 bp, Saccharomyces pastorianus
gagagcccttttactgagactgcgt

SEQ ID NO: 86946 - DNA, 25 bp, Saccharomyces pastorianus
ggtgctaccaaagcccagtgtttca

SEQ ID NO: 86947 - DNA, 25 bp, Saccharomyces pastorianus
ttccatgggcctatagtactcgatg

SEQ ID NO: 86948 - DNA, 25 bp, Saccharomyces pastorianus
gtactcgatggtttagcagcagaat

SEQ ID NO: 86949 - DNA, 25 bp, Saccharomyces pastorianus
agaactgcgcagtccggttataacg

SEQ ID NO: 86950 - DNA, 25 bp, Saccharomyces pastorianus
aaagttgcatttgccttagccgtgc

SEQ ID NO: 86951 - DNA, 25 bp, Saccharomyces pastorianus
ctgggccggcttgccaagatgcaaa

SEQ ID NO: 86952 - DNA, 25 bp, Saccharomyces pastorianus
cttcagactggcaccgacaaagcaa

SEQ ID NO: 86953 - DNA, 25 bp, Saccharomyces pastorianus
tttggaatccaaccactcaagcgac

SEQ ID NO: 86954 - DNA, 25 bp, Saccharomyces pastorianus
acacgtaccgttaagtctcaagcaa

SEQ ID NO: 86955 - DNA, 25 bp, Saccharomyces pastorianus
gacagagtactttacacgtaccgtt

SEQ ID NO: 86956 - DNA, 25 bp, Saccharomyces pastorianus
gcagtccggttataacgtctgacat

SEQ ID NO: 86957 - DNA, 25 bp, Saccharomyces pastorianus
gtctgacatgtccttttttgatttg

SEQ ID NO: 86958 - DNA, 25 bp, Saccharomyces pastorianus
cgtgctgacaccattggctatttgg

SEQ ID NO: 86959 - DNA, 25 bp, Saccharomyces pastorianus
gtctcaagcaaagggttttcttatt

SEQ ID NO: 86960 - DNA, 25 bp, Saccharomyces pastorianus
agaacaccgcatttggtttgtacga

SEQ ID NO: 86961 - DNA, 25 bp, Saccharomyces pastorianus
acggttctgctccagatttgccaaa

SEQ ID NO: 86962 - DNA, 25 bp, Saccharomyces pastorianus
ggtttgtacgaaccatgccacggtt

SEQ ID NO: 86963 - DNA, 25 bp, Saccharomyces pastorianus
taatgttttggcctcttcaagatta

SEQ ID NO: 86964 - DNA, 25 bp, Saccharomyces pastorianus
tctgccgccatgatcctagttaaga

SEQ ID NO: 86965 - DNA, 25 bp, Saccharomyces pastorianus
gaatcacaagaatggccgctttcat

SEQ ID NO: 86966 - DNA, 25 bp, Saccharomyces pastorianus
tcatctccgatgaagcctccgttat

SEQ ID NO: 86967 - DNA, 25 bp, Saccharomyces pastorianus
atcgccactatcttgtctgctgcaa

SEQ ID NO: 86968 - DNA, 25 bp, Saccharomyces pastorianus
aacatgagccaccattgcctatttg

SEQ ID NO: 86969 - DNA, 25 bp, Saccharomyces pastorianus
gaacgaattccctacattgaaggtt

SEQ ID NO: 86970 - DNA, 25 bp, Saccharomyces pastorianus
gaataaggtcaaccctatcgccact

SEQ ID NO: 86971 - DNA, 25 bp, Saccharomyces pastorianus
gacttccttttcaaagcactgcatg

SEQ ID NO: 86972 - DNA, 25 bp, Saccharomyces pastorianus
gacatgctgcgaggctatcatttca

SEQ ID NO: 86973 - DNA, 25 bp, Saccharomyces pastorianus
agcgcaatggcagaatcactcgatc

SEQ ID NO: 86974 - DNA, 25 bp, Saccharomyces pastorianus
aagcctaccgataagactgtccagt

SEQ ID NO: 86975 - DNA, 25 bp, Saccharomyces pastorianus
cgtggcgcttgagaataccgtttat

SEQ ID NO: 86976 - DNA, 25 bp, Saccharomyces pastorianus
tatagctcagtggtacgggattcaa

SEQ ID NO: 86977 - DNA, 25 bp, Saccharomyces pastorianus
gacgagttcaatccatacacaagag

SEQ ID NO: 86978 - DNA, 25 bp, Saccharomyces pastorianus
gacggtgtgttgtgtattctttcac

SEQ ID NO: 86979 - DNA, 25 bp, Saccharomyces pastorianus
acctttcttcccatgtgacattgac

SEQ ID NO: 86980 - DNA, 25 bp, Saccharomyces pastorianus
atcactcgatctacagcacctgaat

SEQ ID NO: 86981 - DNA, 25 bp, Saccharomyces pastorianus
catcatgaagtatgcccgccgtaaa

SEQ ID NO: 86982 - DNA, 25 bp, Saccharomyces pastorianus
aatgtggtcatgtcttgcgtgccga

SEQ ID NO: 86983 - DNA, 25 bp, Saccharomyces pastorianus
tggtcaaccaactggtgttgctgtt

SEQ ID NO: 86984 - DNA, 25 bp, Saccharomyces pastorianus
gaggtactgaaccaagtcttgcgca

SEQ ID NO: 86985 - DNA, 25 bp, Saccharomyces pastorianus
gtttgggcctatcggcaaaatcaat

SEQ ID NO: 86986 - DNA, 25 bp, Saccharomyces pastorianus
gatttattcgacttgtttgggccta

SEQ ID NO: 86987 - DNA, 25 bp, Saccharomyces pastorianus
tttcaagaggattcggttctgtcat

SEQ ID NO: 86988 - DNA, 25 bp, Saccharomyces pastorianus
ggatgtcgctgtccacattgatgaa

SEQ ID NO: 86989 - DNA, 25 bp, Saccharomyces pastorianus
caagtcttgcgcaggatgtcgctgt

SEQ ID NO: 86990 - DNA, 25 bp, Saccharomyces pastorianus
tagagctatcgatacattcaacggc

SEQ ID NO: 86991 - DNA, 25 bp, Saccharomyces pastorianus
ggttctgtcatttatcctactgagg

SEQ ID NO: 86992 - DNA, 25 bp, Saccharomyces pastorianus
gttcatcatcaatttaccgtactct

SEQ ID NO: 86993 - DNA, 25 bp, Saccharomyces pastorianus
agttggcagatcgtactggaccagc

SEQ ID NO: 86994 - DNA, 25 bp, Saccharomyces pastorianus
gagtgcaccgaatccttgacaatgt

SEQ ID NO: 86995 - DNA, 25 bp, Saccharomyces pastorianus
acacgcatggcattgtcgcagggca

SEQ ID NO: 86996 - DNA, 25 bp, Saccharomyces pastorianus
gcacttgcaggcttcgatttgatgg

SEQ ID NO: 86997 - DNA, 25 bp, Saccharomyces pastorianus
aaagaactactgttgatcccgccag

SEQ ID NO: 86998 - DNA, 25 bp, Saccharomyces pastorianus
atgcacctattttggtgggctcaga

SEQ ID NO: 86999 - DNA, 25 bp, Saccharomyces pastorianus
gcgaatacaacccaaatgcacctat

SEQ ID NO: 87000 - DNA, 25 bp, Saccharomyces pastorianus
aaacgaccactttttatcctgcaat

SEQ ID NO: 87001 - DNA, 25 bp, Saccharomyces pastorianus
gtgagagatcctgaacctgatgaat

SEQ ID NO: 87002 - DNA, 25 bp, Saccharomyces pastorianus
acggaagtgactcgccgtctagtgc

SEQ ID NO: 87003 - DNA, 25 bp, Saccharomyces pastorianus
gtacgttccaatttgtcgttgatgt

SEQ ID NO: 87004 - DNA, 25 bp, Saccharomyces pastorianus
tattgcgccaatacccatgcctaag

SEQ ID NO: 87005 - DNA, 25 bp, Saccharomyces pastorianus
acgtgcttccactagtattgtcaac

SEQ ID NO: 87006 - DNA, 25 bp, Saccharomyces pastorianus
tttgctgtgctttgtgcttttggca

SEQ ID NO: 87007 - DNA, 25 bp, Saccharomyces pastorianus
attgggtgtgttccactcaatctgc

SEQ ID NO: 87008 - DNA, 25 bp, Saccharomyces pastorianus
ttggcagcatcataggactcatctt

SEQ ID NO: 87009 - DNA, 25 bp, Saccharomyces pastorianus
aattccacgatgagcctggagctga

SEQ ID NO: 87010 - DNA, 25 bp, Saccharomyces pastorianus
gggataggtctgacacttaccaaaa

SEQ ID NO: 87011 - DNA, 25 bp, Saccharomyces pastorianus
ggactcatctttgggtttatattgg

SEQ ID NO: 87012 - DNA, 25 bp, Saccharomyces pastorianus
ggaaacggtggtttgctccgatacg

SEQ ID NO: 87013 - DNA, 25 bp, Saccharomyces pastorianus
atacgtacggtccttgaacgtgctt

SEQ ID NO: 87014 - DNA, 25 bp, Saccharomyces pastorianus
tcgctgagccgtttagttgcacaaa

SEQ ID NO: 87015 - DNA, 25 bp, Saccharomyces pastorianus
atggattacgatagctctgatacaa

SEQ ID NO: 87016 - DNA, 25 bp, Saccharomyces pastorianus
ttcaagtaaccccttaatcactaag

SEQ ID NO: 87017 - DNA, 25 bp, Saccharomyces pastorianus
agtcactcctcacgctaaggagagg

SEQ ID NO: 87018 - DNA, 25 bp, Saccharomyces pastorianus
attagagccactgtcatttccctct

SEQ ID NO: 87019 - DNA, 25 bp, Saccharomyces pastorianus
gatattccagtattttggcccatct

SEQ ID NO: 87020 - DNA, 25 bp, Saccharomyces pastorianus
gtgatttgttatggtctaggtctat

SEQ ID NO: 87021 - DNA, 25 bp, Saccharomyces pastorianus
gtccattcatcagaagattaccaga

SEQ ID NO: 87022 - DNA, 25 bp, Saccharomyces pastorianus
atttccctcttgttgtcgctatttt

SEQ ID NO: 87023 - DNA, 25 bp, Saccharomyces pastorianus
gctctgatacaatgaacggtggttc

SEQ ID NO: 87024 - DNA, 25 bp, Saccharomyces pastorianus
tcgtattacaatggccgaaggctgg

SEQ ID NO: 87025 - DNA, 25 bp, Saccharomyces pastorianus
gtcgctattttcaatcttcgatatt

SEQ ID NO: 87026 - DNA, 25 bp, Saccharomyces pastorianus
ttatcttaagttctactgcccttgg

SEQ ID NO: 87027 - DNA, 25 bp, Saccharomyces pastorianus
gtacaaaatgcttggtcatgtcata

SEQ ID NO: 87028 - DNA, 25 bp, Saccharomyces pastorianus
tcccaactccttcggctaatatgaa

SEQ ID NO: 87029 - DNA, 25 bp, Saccharomyces pastorianus
tgtcctttgcttcccattttatatg

SEQ ID NO: 87030 - DNA, 25 bp, Saccharomyces pastorianus
ggtcatgtcataagcttcatcgatt

SEQ ID NO: 87031 - DNA, 25 bp, Saccharomyces pastorianus
gaaattatgtcctttgcttcccatt

SEQ ID NO: 87032 - DNA, 25 bp, Saccharomyces pastorianus
ggaactgtctcgctgtttatttcaa

SEQ ID NO: 87033 - DNA, 25 bp, Saccharomyces pastorianus
atcgatttattgacttcccaactcc

SEQ ID NO: 87034 - DNA, 25 bp, Saccharomyces pastorianus
gagtttgctatggaactgtctcgct

SEQ ID NO: 87035 - DNA, 25 bp, Saccharomyces pastorianus
ctcgctgtttatttcaacgtttcta

SEQ ID NO: 87036 - DNA, 25 bp, Saccharomyces pastorianus
gttctactgcccttggaaattatgt

SEQ ID NO: 87037 - DNA, 25 bp, Saccharomyces pastorianus
attgacagcccaacgtgaaaggttt

SEQ ID NO: 87038 - DNA, 25 bp, Saccharomyces pastorianus
ccgccttgacgttgaagccttgaaa

SEQ ID NO: 87039 - DNA, 25 bp, Saccharomyces pastorianus
aaatgcgaatagtcgttcctcagct

SEQ ID NO: 87040 - DNA, 25 bp, Saccharomyces pastorianus
cattccgtttgcagtggttggttct

SEQ ID NO: 87041 - DNA, 25 bp, Saccharomyces pastorianus
gttagatctatcattccgtttgcag

SEQ ID NO: 87042 - DNA, 25 bp, Saccharomyces pastorianus
gattcgaactcatctccaagactta

SEQ ID NO: 87043 - DNA, 25 bp, Saccharomyces pastorianus
accagttattggcaagtctgataca

SEQ ID NO: 87044 - DNA, 25 bp, Saccharomyces pastorianus
ggaacaacattctcaatacttacgt

SEQ ID NO: 87045 - DNA, 25 bp, Saccharomyces pastorianus
ctcgttggagcgctattaatgttga

SEQ ID NO: 87046 - DNA, 25 bp, Saccharomyces pastorianus
gcaattctttatttcctgcaaccaa

SEQ ID NO: 87047 - DNA, 25 bp, Saccharomyces pastorianus
gaaaggagttgagccgccttgacgt

SEQ ID NO: 87048 - DNA, 25 bp, Saccharomyces pastorianus
ctttacctgatgaagtcctcaccaa

SEQ ID NO: 87049 - DNA, 25 bp, Saccharomyces pastorianus
gagacaaactaaacctgctgcagct

SEQ ID NO: 87050 - DNA, 25 bp, Saccharomyces pastorianus
agaccactacttctgatgcggctaa

SEQ ID NO: 87051 - DNA, 25 bp, Saccharomyces pastorianus
ttgtcttatttagctcatcacggaa

SEQ ID NO: 87052 - DNA, 25 bp, Saccharomyces pastorianus
aagaggtacacggtggctctccatg

SEQ ID NO: 87053 - DNA, 25 bp, Saccharomyces pastorianus
agaactgcgtctcctcttgaattga

SEQ ID NO: 87054 - DNA, 25 bp, Saccharomyces pastorianus
gaagatattcctgttgctactgaga

SEQ ID NO: 87055 - DNA, 25 bp, Saccharomyces pastorianus
gatgaacgctcctcagaaacctgaa

SEQ ID NO: 87056 - DNA, 25 bp, Saccharomyces pastorianus
cacggaattatctttttaccactgg

SEQ ID NO: 87057 - DNA, 25 bp, Saccharomyces pastorianus
ttgcaggacctgacggctcaagaac

SEQ ID NO: 87058 - DNA, 25 bp, Saccharomyces pastorianus
atatgacgcctttttgttcggtgtt

SEQ ID NO: 87059 - DNA, 25 bp, Saccharomyces pastorianus
gatgcaccagcaaatgaggcttcaa

SEQ ID NO: 87060 - DNA, 25 bp, Saccharomyces pastorianus
taaatcatatacgacctacttgctg

SEQ ID NO: 87061 - DNA, 25 bp, Saccharomyces pastorianus
ctacttgctgtacgagatggctcat

SEQ ID NO: 87062 - DNA, 25 bp, Saccharomyces pastorianus
aaaggacgccacaagtacgcagata

SEQ ID NO: 87063 - DNA, 25 bp, Saccharomyces pastorianus
gttctgacccaatattcgaagcata

SEQ ID NO: 87064 - DNA, 25 bp, Saccharomyces pastorianus
ccttcttggcactttcagtttcaat

SEQ ID NO: 87065 - DNA, 25 bp, Saccharomyces pastorianus
aaccgatgatattttccttcttggc

SEQ ID NO: 87066 - DNA, 25 bp, Saccharomyces pastorianus
aatgctttagtttcagttctgaccc

SEQ ID NO: 87067 - DNA, 25 bp, Saccharomyces pastorianus
gtttttcaattttcgtcacttctat

SEQ ID NO: 87068 - DNA, 25 bp, Saccharomyces pastorianus
gaagttatcatccacaggccagcgg

SEQ ID NO: 87069 - DNA, 25 bp, Saccharomyces pastorianus
tttgtttttgtccacgttgattccg

SEQ ID NO: 87070 - DNA, 25 bp, Saccharomyces pastorianus
gatggttacactcgtttagcgcaga

SEQ ID NO: 87071 - DNA, 25 bp, Saccharomyces pastorianus
actgttaagcaattagacgggccct

SEQ ID NO: 87072 - DNA, 25 bp, Saccharomyces pastorianus
ggacaaacctgctaaagatgcctct

SEQ ID NO: 87073 - DNA, 25 bp, Saccharomyces pastorianus
agctaaggttctgtactgatggtta

SEQ ID NO: 87074 - DNA, 25 bp, Saccharomyces pastorianus
atcacagactaccattgccgaggtc

SEQ ID NO: 87075 - DNA, 25 bp, Saccharomyces pastorianus
agatgcctctaaactgccaagggct

SEQ ID NO: 87076 - DNA, 25 bp, Saccharomyces pastorianus
atcaagagacgactatgccaatggg

SEQ ID NO: 87077 - DNA, 25 bp, Saccharomyces pastorianus
taagagtaccttacttcgacccaag

SEQ ID NO: 87078 - DNA, 25 bp, Saccharomyces pastorianus
gaaaccgtactagatccaataacaa

SEQ ID NO: 87079 - DNA, 25 bp, Saccharomyces pastorianus
aagaaacaagacttcgatgctgcga

SEQ ID NO: 87080 - DNA, 25 bp, Saccharomyces pastorianus
gaggtcatctctaacctctatgacg

SEQ ID NO: 87081 - DNA, 25 bp, Saccharomyces pastorianus
gtaccacctatactcttgtcattga

SEQ ID NO: 87082 - DNA, 25 bp, Saccharomyces pastorianus
aatattgaagttccaggcgctacta

SEQ ID NO: 87083 - DNA, 25 bp, Saccharomyces pastorianus
aataactattactcgccacttgcat

SEQ ID NO: 87084 - DNA, 25 bp, Saccharomyces pastorianus
ggaatccttatactgtttaaccttg

SEQ ID NO: 87085 - DNA, 25 bp, Saccharomyces pastorianus
aagcgtgctggtgcttttgggctca

SEQ ID NO: 87086 - DNA, 25 bp, Saccharomyces pastorianus
acaaacgtggccttcaagtacctga

SEQ ID NO: 87087 - DNA, 25 bp, Saccharomyces pastorianus
ttacattcacaggtctcagctcgtt

SEQ ID NO: 87088 - DNA, 25 bp, Saccharomyces pastorianus
gaagtggtcccgctacgtgttgtac

SEQ ID NO: 87089 - DNA, 25 bp, Saccharomyces pastorianus
ggcgctactatcttgagcacatttg

SEQ ID NO: 87090 - DNA, 25 bp, Saccharomyces pastorianus
aagatcctggctctgtttaatgtgg

SEQ ID NO: 87091 - DNA, 25 bp, Saccharomyces pastorianus
agctcgttcgctctggaaaggatca

SEQ ID NO: 87092 - DNA, 25 bp, Saccharomyces pastorianus
aaaagttcgctgctggtactaaggc

SEQ ID NO: 87093 - DNA, 25 bp, Saccharomyces pastorianus
cgctgctggtactaaggctttgtta

SEQ ID NO: 87094 - DNA, 25 bp, Saccharomyces pastorianus
gccagtcgacttcatcattgctgat

SEQ ID NO: 87095 - DNA, 25 bp, Saccharomyces pastorianus
aagagctctgctgctggtaacaccg

SEQ ID NO: 87096 - DNA, 25 bp, Saccharomyces pastorianus
agaaagttgtttgctgctactgttg

SEQ ID NO: 87097 - DNA, 25 bp, Saccharomyces pastorianus
ggtggtgacactgccactgtcgcta

SEQ ID NO: 87098 - DNA, 25 bp, Saccharomyces pastorianus
taaggctttgttagacgaagttgtc

SEQ ID NO: 87099 - DNA, 25 bp, Saccharomyces pastorianus
aagtcgtcttgccagtcgacttcat

SEQ ID NO: 87100 - DNA, 25 bp, Saccharomyces pastorianus
cgaagttgtcaagagctctgctgct

SEQ ID NO: 87101 - DNA, 25 bp, Saccharomyces pastorianus
cactgccactgtcgctaagaagtac

SEQ ID NO: 87102 - DNA, 25 bp, Saccharomyces pastorianus
gctgctggtaacaccgtcatcattg

SEQ ID NO: 87103 - DNA, 25 bp, Saccharomyces pastorianus
atgacggtgttaccagcagcagagc

SEQ ID NO: 87104 - DNA, 25 bp, Saccharomyces pastorianus
gcagcagagctcttgacaacttcgt

SEQ ID NO: 87105 - DNA, 25 bp, Saccharomyces pastorianus
gtgacaccgtacttcttagcgacag

SEQ ID NO: 87106 - DNA, 25 bp, Saccharomyces pastorianus
ggcaattccttaccttccaataatt

SEQ ID NO: 87107 - DNA, 25 bp, Saccharomyces pastorianus
cttagcctttgcaacagtagcagca

SEQ ID NO: 87108 - DNA, 25 bp, Saccharomyces pastorianus
gacaacttcgtctaacaaagcctta

SEQ ID NO: 87109 - DNA, 25 bp, Saccharomyces pastorianus
aaagaagcaccaccaccagtagaga

SEQ ID NO: 87110 - DNA, 25 bp, Saccharomyces pastorianus
tagcgacagtggcagtgtcaccacc

SEQ ID NO: 87111 - DNA, 25 bp, Saccharomyces pastorianus
catgggagatcttgtcagtgacacc

SEQ ID NO: 87112 - DNA, 25 bp, Saccharomyces pastorianus
gaaagcaacacctggcaattcctta

SEQ ID NO: 87113 - DNA, 25 bp, Saccharomyces pastorianus
agccttagtaccagcagcgaacttt

SEQ ID NO: 87114 - DNA, 25 bp, Saccharomyces pastorianus
gaaaacgttcgccagagatcagaat

SEQ ID NO: 87115 - DNA, 25 bp, Saccharomyces pastorianus
gaaggcggtaaaggtgcctaccttg

SEQ ID NO: 87116 - DNA, 25 bp, Saccharomyces pastorianus
aaacgttttgctcttcagttgtcaa

SEQ ID NO: 87117 - DNA, 25 bp, Saccharomyces pastorianus
ggtccagcgtggttacagttttgtg

SEQ ID NO: 87118 - DNA, 25 bp, Saccharomyces pastorianus
gttgtccatattacatccatctact

SEQ ID NO: 87119 - DNA, 25 bp, Saccharomyces pastorianus
gataagatcgactcaggttgcaata

SEQ ID NO: 87120 - DNA, 25 bp, Saccharomyces pastorianus
ggtgtactgctaataaacccgcaag

SEQ ID NO: 87121 - DNA, 25 bp, Saccharomyces pastorianus
agtgagactgacttgttgtccatat

SEQ ID NO: 87122 - DNA, 25 bp, Saccharomyces pastorianus
gcctaccttgtgaaatcctgggact

SEQ ID NO: 87123 - DNA, 25 bp, Saccharomyces pastorianus
ggaaattcttgcagctattggtata

SEQ ID NO: 87124 - DNA, 25 bp, Saccharomyces pastorianus
gtgacaagtgttctcaaagctacaa

SEQ ID NO: 87125 - DNA, 25 bp, Saccharomyces pastorianus
gagacgtacgactagccaagaagca

SEQ ID NO: 87126 - DNA, 25 bp, Saccharomyces pastorianus
agctctttgcacgaaattacaccct

SEQ ID NO: 87127 - DNA, 25 bp, Saccharomyces pastorianus
caatggcgtagtggacccgaccaaa

SEQ ID NO: 87128 - DNA, 25 bp, Saccharomyces pastorianus
gaaggctaccatagttgtgcacaag

SEQ ID NO: 87129 - DNA, 25 bp, Saccharomyces pastorianus
agtgcatgcaattccgagagacgta

SEQ ID NO: 87130 - DNA, 25 bp, Saccharomyces pastorianus
gggaactttgtagtccctgtggact

SEQ ID NO: 87131 - DNA, 25 bp, Saccharomyces pastorianus
tccctgtggactcgcctatggaaaa

SEQ ID NO: 87132 - DNA, 25 bp, Saccharomyces pastorianus
ggaactagtcggtctgccagtatta

SEQ ID NO: 87133 - DNA, 25 bp, Saccharomyces pastorianus
gacaaacaatcctcccaaatggtga

SEQ ID NO: 87134 - DNA, 25 bp, Saccharomyces pastorianus
gaatcgtgtaactagtgcatgcaat

SEQ ID NO: 87135 - DNA, 25 bp, Saccharomyces pastorianus
gacacttggacaattcaatggcgta

SEQ ID NO: 87136 - DNA, 25 bp, Saccharomyces pastorianus
aaggactcctcaattacatggccat

SEQ ID NO: 87137 - DNA, 25 bp, Saccharomyces pastorianus
atccccggcgttgatgcgtatatta

SEQ ID NO: 87138 - DNA, 25 bp, Saccharomyces pastorianus
ttttgacaataaagcgatccccggc

SEQ ID NO: 87139 - DNA, 25 bp, Saccharomyces pastorianus
ccagcttatgggttgccgaggaact

SEQ ID NO: 87140 - DNA, 25 bp, Saccharomyces pastorianus
agagccccagggttgcattggaaat

SEQ ID NO: 87141 - DNA, 25 bp, Saccharomyces pastorianus
caccaactactcacgctttaataac

SEQ ID NO: 87142 - DNA, 25 bp, Saccharomyces pastorianus
gagatgggctcgtgatactcctaga

SEQ ID NO: 87143 - DNA, 25 bp, Saccharomyces pastorianus
tagaattattggcaccatccctcac

SEQ ID NO: 87144 - DNA, 25 bp, Saccharomyces pastorianus
gaagttgacaagtttcccgtcgaag

SEQ ID NO: 87145 - DNA, 25 bp, Saccharomyces pastorianus
attcgctaaggaactatgtgccgga

SEQ ID NO: 87146 - DNA, 25 bp, Saccharomyces pastorianus
ggccatccttagtaaccagcttatg

SEQ ID NO: 87147 - DNA, 25 bp, Saccharomyces pastorianus
caatgaatcctgaaagagcttacaa

SEQ ID NO: 87148 - DNA, 25 bp, Saccharomyces pastorianus
gaaaacatatgcgagttattgaact

SEQ ID NO: 87149 - DNA, 25 bp, Saccharomyces pastorianus
gagcttacaacaatgtaacgctgaa

SEQ ID NO: 87150 - DNA, 25 bp, Saccharomyces pastorianus
tcacagaacaacacaatcagctcaa

SEQ ID NO: 87151 - DNA, 25 bp, Saccharomyces pastorianus
tagaaagtacggaaagacacaatag

SEQ ID NO: 87152 - DNA, 25 bp, Saccharomyces pastorianus
gtattatcaatcctgaaaggcaaag

SEQ ID NO: 87153 - DNA, 25 bp, Saccharomyces pastorianus
aaggcaaaggatgagcttggaagaa

SEQ ID NO: 87154 - DNA, 25 bp, Saccharomyces pastorianus
aacacaatcagctcaatgaatcctg

SEQ ID NO: 87155 - DNA, 25 bp, Saccharomyces pastorianus
gaatcctgaaagagcttacaacaat

SEQ ID NO: 87156 - DNA, 25 bp, Saccharomyces pastorianus
gacacaatagtattatcaatcctga

SEQ ID NO: 87157 - DNA, 25 bp, Saccharomyces pastorianus
atgcgagttattgaacttggtagaa

SEQ ID NO: 87158 - DNA, 25 bp, Saccharomyces pastorianus
gacgatactgttggatgctttgatc

SEQ ID NO: 87159 - DNA, 25 bp, Saccharomyces pastorianus
aaaattccactcctgacgatactgt

SEQ ID NO: 87160 - DNA, 25 bp, Saccharomyces pastorianus
cagttttcgttaccgactatccacg

SEQ ID NO: 87161 - DNA, 25 bp, Saccharomyces pastorianus
ctatccacgtctttgtaaaccattc

SEQ ID NO: 87162 - DNA, 25 bp, Saccharomyces pastorianus
aaggaagtgcaccacacggaggctt

SEQ ID NO: 87163 - DNA, 25 bp, Saccharomyces pastorianus
aataatgcatcgtcagagctatcaa

SEQ ID NO: 87164 - DNA, 25 bp, Saccharomyces pastorianus
gccggagagtattttaagtccccag

SEQ ID NO: 87165 - DNA, 25 bp, Saccharomyces pastorianus
tgctttgatctactggttcctggaa

SEQ ID NO: 87166 - DNA, 25 bp, Saccharomyces pastorianus
aacgccacaatgaagtttcacactt

SEQ ID NO: 87167 - DNA, 25 bp, Saccharomyces pastorianus
tggactggtatgtttctctgagaaa

SEQ ID NO: 87168 - DNA, 25 bp, Saccharomyces pastorianus
cacacggaggctttggtctagggtt

SEQ ID NO: 87169 - DNA, 25 bp, Saccharomyces pastorianus
tattgccattattgctaccattatc

SEQ ID NO: 87170 - DNA, 25 bp, Saccharomyces pastorianus
gcttgtattgccattattgctacca

SEQ ID NO: 87171 - DNA, 25 bp, Saccharomyces pastorianus
gtattgccattattgctaccattat

SEQ ID NO: 87172 - DNA, 25 bp, Saccharomyces pastorianus
ttgccattattgctaccattatcta

SEQ ID NO: 87173 - DNA, 25 bp, Saccharomyces pastorianus
tgccattattgctaccattatctac

SEQ ID NO: 87174 - DNA, 25 bp, Saccharomyces pastorianus
ggcttgtattgccattattgctacc

SEQ ID NO: 87175 - DNA, 25 bp, Saccharomyces pastorianus
ttgtattgccattattgctaccatt

SEQ ID NO: 87176 - DNA, 25 bp, Saccharomyces pastorianus
cttgtattgccattattgctaccat

SEQ ID NO: 87177 - DNA, 25 bp, Saccharomyces pastorianus
tgtattgccattattgctaccatta

SEQ ID NO: 87178 - DNA, 25 bp, Saccharomyces pastorianus
attgccattattgctaccattatct

SEQ ID NO: 87179 - DNA, 25 bp, Saccharomyces pastorianus
ggtttggcttgtattgccattattg

SEQ ID NO: 87180 - DNA, 25 bp, Saccharomyces pastorianus
aacataccaacctcaatccgggtgg

SEQ ID NO: 87181 - DNA, 25 bp, Saccharomyces pastorianus
gaaagccgggaataggtcgcaatcg

SEQ ID NO: 87182 - DNA, 25 bp, Saccharomyces pastorianus
atggccgattcggtatccgcgcgca

SEQ ID NO: 87183 - DNA, 25 bp, Saccharomyces pastorianus
gcgcaaagaggcaacataccaacct

SEQ ID NO: 87184 - DNA, 25 bp, Saccharomyces pastorianus
gttgcattggacaggaattcctttt

SEQ ID NO: 87185 - DNA, 25 bp, Saccharomyces pastorianus
catttggacatcgagcatttttcag

SEQ ID NO: 87186 - DNA, 25 bp, Saccharomyces pastorianus
atttttcagctgttgtcctttacca

SEQ ID NO: 87187 - DNA, 25 bp, Saccharomyces pastorianus
gtgcacccataccatatgatcgtta

SEQ ID NO: 87188 - DNA, 25 bp, Saccharomyces pastorianus
tttctatggctgtcgttgcattgga

SEQ ID NO: 87189 - DNA, 25 bp, Saccharomyces pastorianus
caaccgcggctgtttctatggctgt

SEQ ID NO: 87190 - DNA, 25 bp, Saccharomyces pastorianus
tgtcctttaccagaagaagaaactt

SEQ ID NO: 87191 - DNA, 25 bp, Saccharomyces pastorianus
ccattctctgggacaagctggtaga

SEQ ID NO: 87192 - DNA, 25 bp, Saccharomyces pastorianus
aatacgccactatgtcttcttcgaa

SEQ ID NO: 87193 - DNA, 25 bp, Saccharomyces pastorianus
gtcatgactgtactctggaaattct

SEQ ID NO: 87194 - DNA, 25 bp, Saccharomyces pastorianus
gaagaaacttttatgctccttttga

SEQ ID NO: 87195 - DNA, 25 bp, Saccharomyces pastorianus
gaaactagcttcgacaattggcagt

SEQ ID NO: 87196 - DNA, 25 bp, Saccharomyces pastorianus
accacattaacggttcgcttcgtag

SEQ ID NO: 87197 - DNA, 25 bp, Saccharomyces pastorianus
cgttgaatcctattatcccactatt

SEQ ID NO: 87198 - DNA, 25 bp, Saccharomyces pastorianus
tgacgggcgtacgaggcataatgct

SEQ ID NO: 87199 - DNA, 25 bp, Saccharomyces pastorianus
ggaaattctagatactgcaggccaa

SEQ ID NO: 87200 - DNA, 25 bp, Saccharomyces pastorianus
gtagaatcgcggttcgttgaatcct

SEQ ID NO: 87201 - DNA, 25 bp, Saccharomyces pastorianus
ttcttcgaactccacacataacttt

SEQ ID NO: 87202 - DNA, 25 bp, Saccharomyces pastorianus
gaaccaagcctttattgagcgtgtt

SEQ ID NO: 87203 - DNA, 25 bp, Saccharomyces pastorianus
gatttattacagacggcctggcaca

SEQ ID NO: 87204 - DNA, 25 bp, Saccharomyces pastorianus
gatgtcaccaagcttacccgatgaa

SEQ ID NO: 87205 - DNA, 25 bp, Saccharomyces pastorianus
gagacggataacgtggctctacccc

SEQ ID NO: 87206 - DNA, 25 bp, Saccharomyces pastorianus
aaaggagccgatcgcgcctattgtt

SEQ ID NO: 87207 - DNA, 25 bp, Saccharomyces pastorianus
gacctcgttgtctttgtgaatatcg

SEQ ID NO: 87208 - DNA, 25 bp, Saccharomyces pastorianus
ggcctggcacatgaatccgctaaag

SEQ ID NO: 87209 - DNA, 25 bp, Saccharomyces pastorianus
cctattgttattcatccggtctgga

SEQ ID NO: 87210 - DNA, 25 bp, Saccharomyces pastorianus
ggagccggcagtggaatcaccttga

SEQ ID NO: 87211 - DNA, 25 bp, Saccharomyces pastorianus
gcgctttatcaaaacctcagggctc

SEQ ID NO: 87212 - DNA, 25 bp, Saccharomyces pastorianus
ggtgctaatgcaacaagcgctttat

SEQ ID NO: 87213 - DNA, 25 bp, Saccharomyces pastorianus
taaagcgtgcccacggcggtgttgc

SEQ ID NO: 87214 - DNA, 25 bp, Saccharomyces pastorianus
gtatttcccaattttgccacattgt

SEQ ID NO: 87215 - DNA, 25 bp, Saccharomyces pastorianus
cacctttgcaggttgtgccattatt

SEQ ID NO: 87216 - DNA, 25 bp, Saccharomyces pastorianus
ggcgctactgccttattatgttaca

SEQ ID NO: 87217 - DNA, 25 bp, Saccharomyces pastorianus
ttggctgccagaggcatcagggtct

SEQ ID NO: 87218 - DNA, 25 bp, Saccharomyces pastorianus
gggtccctatttcattgaaccttgg

SEQ ID NO: 87219 - DNA, 25 bp, Saccharomyces pastorianus
gactcaaccgctcgttacattatat

SEQ ID NO: 87220 - DNA, 25 bp, Saccharomyces pastorianus
gactgtgtgggttcaacaactgcca

SEQ ID NO: 87221 - DNA, 25 bp, Saccharomyces pastorianus
gaaccttggtgttcacgtggttatg

SEQ ID NO: 87222 - DNA, 25 bp, Saccharomyces pastorianus
atgggcaccacatctatttcttggg

SEQ ID NO: 87223 - DNA, 25 bp, Saccharomyces pastorianus
aagcagttcacttgtatttcccaat

SEQ ID NO: 87224 - DNA, 25 bp, Saccharomyces pastorianus
tcttagcatccttctttgttcttat

SEQ ID NO: 87225 - DNA, 25 bp, Saccharomyces pastorianus
aacattcaattcttagcatccttct

SEQ ID NO: 87226 - DNA, 25 bp, Saccharomyces pastorianus
attcttagcatccttctttgttctt

SEQ ID NO: 87227 - DNA, 25 bp, Saccharomyces pastorianus
agcatccttctttgttcttatctta

SEQ ID NO: 87228 - DNA, 25 bp, Saccharomyces pastorianus
attcaattcttagcatccttctttg

SEQ ID NO: 87229 - DNA, 25 bp, Saccharomyces pastorianus
gcaaacattcaattcttagcatcct

SEQ ID NO: 87230 - DNA, 25 bp, Saccharomyces pastorianus
ttagcatccttctttgttcttatct

SEQ ID NO: 87231 - DNA, 25 bp, Saccharomyces pastorianus
tccttctttgttcttatcttaacca

SEQ ID NO: 87232 - DNA, 25 bp, Saccharomyces pastorianus
aattcttagcatccttctttgttct

SEQ ID NO: 87233 - DNA, 25 bp, Saccharomyces pastorianus
cttctttgttcttatcttaaccata

SEQ ID NO: 87234 - DNA, 25 bp, Saccharomyces pastorianus
gcatccttctttgttcttatcttaa

SEQ ID NO: 87235 - DNA, 25 bp, Saccharomyces pastorianus
acctgttcttagcttgtaccagagg

SEQ ID NO: 87236 - DNA, 25 bp, Saccharomyces pastorianus
gtaatggtgcatttgtcatccgtcc

SEQ ID NO: 87237 - DNA, 25 bp, Saccharomyces pastorianus
atgaccttgttagggtgatgtacac

SEQ ID NO: 87238 - DNA, 25 bp, Saccharomyces pastorianus
agtcacatcaagatcgtttatggtt

SEQ ID NO: 87239 - DNA, 25 bp, Saccharomyces pastorianus
gtcccatatagccaattcgttcaaa

SEQ ID NO: 87240 - DNA, 25 bp, Saccharomyces pastorianus
gggatgttttgaatttacctgttct

SEQ ID NO: 87241 - DNA, 25 bp, Saccharomyces pastorianus
tagccctttgaagatattactctgg

SEQ ID NO: 87242 - DNA, 25 bp, Saccharomyces pastorianus
gatccaacaacaacctagagtaatg

SEQ ID NO: 87243 - DNA, 25 bp, Saccharomyces pastorianus
gatgtacaccctaatcaacagtttt

SEQ ID NO: 87244 - DNA, 25 bp, Saccharomyces pastorianus
atgtgaaccgcatgggcagtttacc

SEQ ID NO: 87245 - DNA, 25 bp, Saccharomyces pastorianus
taacctctactgtggaggcacccaa

SEQ ID NO: 87246 - DNA, 25 bp, Saccharomyces pastorianus
cacttgatgcttccttattgagaga

SEQ ID NO: 87247 - DNA, 25 bp, Saccharomyces pastorianus
gagtccaagtacgtttaccgatgaa

SEQ ID NO: 87248 - DNA, 25 bp, Saccharomyces pastorianus
gattttgtttactatctggttaata

SEQ ID NO: 87249 - DNA, 25 bp, Saccharomyces pastorianus
atgatcccagctccacttgatgctt

SEQ ID NO: 87250 - DNA, 25 bp, Saccharomyces pastorianus
ggtgtcccagcagcaagaaaagcaa

SEQ ID NO: 87251 - DNA, 25 bp, Saccharomyces pastorianus
gggtcacgtttacgatcatttttgg

SEQ ID NO: 87252 - DNA, 25 bp, Saccharomyces pastorianus
gagagaacatgcattccaaggaact

SEQ ID NO: 87253 - DNA, 25 bp, Saccharomyces pastorianus
gtttaaattggtgtcccagcagcaa

SEQ ID NO: 87254 - DNA, 25 bp, Saccharomyces pastorianus
atacggactcggttatttcaattat

SEQ ID NO: 87255 - DNA, 25 bp, Saccharomyces pastorianus
gatctaagcacagttttgagtccaa

SEQ ID NO: 87256 - DNA, 25 bp, Saccharomyces pastorianus
ggtgttatttctgttgtttcatgat

SEQ ID NO: 87257 - DNA, 25 bp, Saccharomyces pastorianus
gtattgtacgactttttcctcgagg

SEQ ID NO: 87258 - DNA, 25 bp, Saccharomyces pastorianus
gctagattactttttcgcaggttta

SEQ ID NO: 87259 - DNA, 25 bp, Saccharomyces pastorianus
aatctttgccctgcacatcttgaga

SEQ ID NO: 87260 - DNA, 25 bp, Saccharomyces pastorianus
agaatgacttccatgttcctgtacc

SEQ ID NO: 87261 - DNA, 25 bp, Saccharomyces pastorianus
gactctatgttgactggtcgtacac

SEQ ID NO: 87262 - DNA, 25 bp, Saccharomyces pastorianus
gaactacctttacgttactgtggcg

SEQ ID NO: 87263 - DNA, 25 bp, Saccharomyces pastorianus
ctgtgtgtcattccaattcttcttg

SEQ ID NO: 87264 - DNA, 25 bp, Saccharomyces pastorianus
tgcgctatggcatctgtgcacaata

SEQ ID NO: 87265 - DNA, 25 bp, Saccharomyces pastorianus
aatatggccctcgtgggtattgtac

SEQ ID NO: 87266 - DNA, 25 bp, Saccharomyces pastorianus
aagctcggtctttcactgtcgtgat

SEQ ID NO: 87267 - DNA, 25 bp, Saccharomyces pastorianus
gatagcacaagctttcactgcgtca

SEQ ID NO: 87268 - DNA, 25 bp, Saccharomyces pastorianus
gggcctttgatgaccacattgacac

SEQ ID NO: 87269 - DNA, 25 bp, Saccharomyces pastorianus
gcagcgatcctactctcgaagggaa

SEQ ID NO: 87270 - DNA, 25 bp, Saccharomyces pastorianus
gatgtcacactacctcttggtgaga

SEQ ID NO: 87271 - DNA, 25 bp, Saccharomyces pastorianus
tatgacgacgaaacgttccctcgat

SEQ ID NO: 87272 - DNA, 25 bp, Saccharomyces pastorianus
gggaacttcaatttagacgcctact

SEQ ID NO: 87273 - DNA, 25 bp, Saccharomyces pastorianus
atttgtccacgcgtaatgttttcca

SEQ ID NO: 87274 - DNA, 25 bp, Saccharomyces pastorianus
gagtcgctatctcatctgaactaca

SEQ ID NO: 87275 - DNA, 25 bp, Saccharomyces pastorianus
aaggtattgtatttgttgccgcggc

SEQ ID NO: 87276 - DNA, 25 bp, Saccharomyces pastorianus
ccagattctttacaacggcgtcgat

SEQ ID NO: 87277 - DNA, 25 bp, Saccharomyces pastorianus
acaatgccactttacaaactcctat

SEQ ID NO: 87278 - DNA, 25 bp, Saccharomyces pastorianus
tgtgtaaacatctttgccccaggcg

SEQ ID NO: 87279 - DNA, 25 bp, Saccharomyces pastorianus
ccctccactgccatgttgattatgg

SEQ ID NO: 87280 - DNA, 25 bp, Saccharomyces pastorianus
ctagacttagattggccacgcattt

SEQ ID NO: 87281 - DNA, 25 bp, Saccharomyces pastorianus
ctgtgggcgactgacctttgtgcaa

SEQ ID NO: 87282 - DNA, 25 bp, Saccharomyces pastorianus
agattggccacgcattttttaccct

SEQ ID NO: 87283 - DNA, 25 bp, Saccharomyces pastorianus
tgacctttgtgcaatgttccacgat

SEQ ID NO: 87284 - DNA, 25 bp, Saccharomyces pastorianus
gctcctgaaactccctagacttaga

SEQ ID NO: 87285 - DNA, 25 bp, Saccharomyces pastorianus
ggcgactgacctttgtgcaatgttc

SEQ ID NO: 87286 - DNA, 25 bp, Saccharomyces pastorianus
cattttttaccctgtgggcgactga

SEQ ID NO: 87287 - DNA, 25 bp, Saccharomyces pastorianus
ttggccacgcattttttaccctgtg

SEQ ID NO: 87288 - DNA, 25 bp, Saccharomyces pastorianus
actccctagacttagattggccacg

SEQ ID NO: 87289 - DNA, 25 bp, Saccharomyces pastorianus
cctttgtgcaatgttccacgatgaa

SEQ ID NO: 87290 - DNA, 25 bp, Saccharomyces pastorianus
tgttggctacatcctttccatagac

SEQ ID NO: 87291 - DNA, 25 bp, Saccharomyces pastorianus
attagagtgccattgttttcgccgc

SEQ ID NO: 87292 - DNA, 25 bp, Saccharomyces pastorianus
aggaacgtcagattgcttggatcat

SEQ ID NO: 87293 - DNA, 25 bp, Saccharomyces pastorianus
ttttcgccgctggtcgagagaatcg

SEQ ID NO: 87294 - DNA, 25 bp, Saccharomyces pastorianus
aagacggccgtcgagattagagtgc

SEQ ID NO: 87295 - DNA, 25 bp, Saccharomyces pastorianus
aaacaactggtgcaagacgcctcgt

SEQ ID NO: 87296 - DNA, 25 bp, Saccharomyces pastorianus
agcgcatagcttcgtcgcagattat

SEQ ID NO: 87297 - DNA, 25 bp, Saccharomyces pastorianus
aagacgcctcgttgctgttgcggaa

SEQ ID NO: 87298 - DNA, 25 bp, Saccharomyces pastorianus
tcgtacgacacctttgttggctaca

SEQ ID NO: 87299 - DNA, 25 bp, Saccharomyces pastorianus
aaacaggtggccctctcagaaatag

SEQ ID NO: 87300 - DNA, 25 bp, Saccharomyces pastorianus
tccggattgtgtacgactcgtccaa

SEQ ID NO: 87301 - DNA, 25 bp, Saccharomyces pastorianus
atggctgtgcaatgcggacacttcc

SEQ ID NO: 87302 - DNA, 25 bp, Saccharomyces pastorianus
aacgatcctaaacagcggttgatga

SEQ ID NO: 87303 - DNA, 25 bp, Saccharomyces pastorianus
agcatgcttgcgaccggtcttagta

SEQ ID NO: 87304 - DNA, 25 bp, Saccharomyces pastorianus
ttcaacacattgtatgctgcactga

SEQ ID NO: 87305 - DNA, 25 bp, Saccharomyces pastorianus
gcgggctcgtttgacgcggctatta

SEQ ID NO: 87306 - DNA, 25 bp, Saccharomyces pastorianus
caggatatgggcaccgggataccgt

SEQ ID NO: 87307 - DNA, 25 bp, Saccharomyces pastorianus
ggacacttcctacaacgatcctaaa

SEQ ID NO: 87308 - DNA, 25 bp, Saccharomyces pastorianus
atcagtgcgatccaatggctgtgca

SEQ ID NO: 87309 - DNA, 25 bp, Saccharomyces pastorianus
agggcgacttgatgttgcaggatat

SEQ ID NO: 87310 - DNA, 25 bp, Saccharomyces pastorianus
gtttggatatatcgcccagcatgct

SEQ ID NO: 87311 - DNA, 25 bp, Saccharomyces pastorianus
gcggctattagtatcagtgcgatcc

SEQ ID NO: 87312 - DNA, 25 bp, Saccharomyces pastorianus
tccagaatgaaactgcacggctgca

SEQ ID NO: 87313 - DNA, 25 bp, Saccharomyces pastorianus
ggatatgctgcactctggtcgaacc

SEQ ID NO: 87314 - DNA, 25 bp, Saccharomyces pastorianus
gcacggctgcagattcaaaagctcc

SEQ ID NO: 87315 - DNA, 25 bp, Saccharomyces pastorianus
gtcatcttcgcctggatatgctgca

SEQ ID NO: 87316 - DNA, 25 bp, Saccharomyces pastorianus
gggcgatatatccaaaccacaccac

SEQ ID NO: 87317 - DNA, 25 bp, Saccharomyces pastorianus
acccgcacccgatatccagaatgaa

SEQ ID NO: 87318 - DNA, 25 bp, Saccharomyces pastorianus
atggtctccctcctgtgtcaaaatc

SEQ ID NO: 87319 - DNA, 25 bp, Saccharomyces pastorianus
tcagcgtcatcttcgcctggatatg

SEQ ID NO: 87320 - DNA, 25 bp, Saccharomyces pastorianus
tgtgtcaaaatctccccagacagtc

SEQ ID NO: 87321 - DNA, 25 bp, Saccharomyces pastorianus
gattcaaaagctccaacgccctcag

SEQ ID NO: 87322 - DNA, 25 bp, Saccharomyces pastorianus
tcaaaatctccccagacagtccgga

SEQ ID NO: 87323 - DNA, 25 bp, Saccharomyces pastorianus
attcttgcaatctgttttggcgctc

SEQ ID NO: 87324 - DNA, 25 bp, Saccharomyces pastorianus
acttgctagcatcctttcggtggaa

SEQ ID NO: 87325 - DNA, 25 bp, Saccharomyces pastorianus
aggtacttttgcatgtgggcgtcca

SEQ ID NO: 87326 - DNA, 25 bp, Saccharomyces pastorianus
ccgagacttgctcttcaggtgtgaa

SEQ ID NO: 87327 - DNA, 25 bp, Saccharomyces pastorianus
gaaactcttcgtcttgcaacaaatc

SEQ ID NO: 87328 - DNA, 25 bp, Saccharomyces pastorianus
tcctgtggcaggatcacgttatcgt

SEQ ID NO: 87329 - DNA, 25 bp, Saccharomyces pastorianus
aaatccttagtctccgtcattcttg

SEQ ID NO: 87330 - DNA, 25 bp, Saccharomyces pastorianus
aatgccgtttgttgggctctgcgga

SEQ ID NO: 87331 - DNA, 25 bp, Saccharomyces pastorianus
ctgcggaattgagtctgcggatctt

SEQ ID NO: 87332 - DNA, 25 bp, Saccharomyces pastorianus
gaggatcaaaactcacgtccccaaa

SEQ ID NO: 87333 - DNA, 25 bp, Saccharomyces pastorianus
tatcgtacgtgaccgaatgccgttt

SEQ ID NO: 87334 - DNA, 25 bp, Saccharomyces pastorianus
atctgttcatgttccaactgtcgca

SEQ ID NO: 87335 - DNA, 25 bp, Saccharomyces pastorianus
ttagcagaatctggaacgtccccgt

SEQ ID NO: 87336 - DNA, 25 bp, Saccharomyces pastorianus
tcatgatggtcacggcacagttctt

SEQ ID NO: 87337 - DNA, 25 bp, Saccharomyces pastorianus
ctgttctgtacatgctcacgtttta

SEQ ID NO: 87338 - DNA, 25 bp, Saccharomyces pastorianus
agttgaccaggtttgcggacagata

SEQ ID NO: 87339 - DNA, 25 bp, Saccharomyces pastorianus
gcagttgtccaacgttgtcttttcg

SEQ ID NO: 87340 - DNA, 25 bp, Saccharomyces pastorianus
ttcttgagtgccgtgttccacgaaa

SEQ ID NO: 87341 - DNA, 25 bp, Saccharomyces pastorianus
ggccatgttcgccattttcagaagg

SEQ ID NO: 87342 - DNA, 25 bp, Saccharomyces pastorianus
gagcaacaccaagtttctacgggca

SEQ ID NO: 87343 - DNA, 25 bp, Saccharomyces pastorianus
ttcgacatgattccgggcttcactg

SEQ ID NO: 87344 - DNA, 25 bp, Saccharomyces pastorianus
tcttttcgtttggtgtctgttcagg

SEQ ID NO: 87345 - DNA, 25 bp, Saccharomyces pastorianus
ggtgttgctcaaagcagtccacaca

SEQ ID NO: 87346 - DNA, 25 bp, Saccharomyces pastorianus
aatgtagcttggctcttgctcaaat

SEQ ID NO: 87347 - DNA, 25 bp, Saccharomyces pastorianus
ggtcttgcccgtagaaacttggtgt

SEQ ID NO: 87348 - DNA, 25 bp, Saccharomyces pastorianus
tgctcaaatgcaatgcgcccatgga

SEQ ID NO: 87349 - DNA, 25 bp, Saccharomyces pastorianus
gtcataatgacactgggccctgaac

SEQ ID NO: 87350 - DNA, 25 bp, Saccharomyces pastorianus
cggcagttcataaggtcaggtacaa

SEQ ID NO: 87351 - DNA, 25 bp, Saccharomyces pastorianus
cagtccacacaaactgcgacagttg

SEQ ID NO: 87352 - DNA, 25 bp, Saccharomyces pastorianus
gaacatggccatttcgtggaacacg

SEQ ID NO: 87353 - DNA, 25 bp, Saccharomyces pastorianus
gatatcctctaacccttctgaaaat

SEQ ID NO: 87354 - DNA, 25 bp, Saccharomyces pastorianus
ggccctgaacagacaccaaacgaaa

SEQ ID NO: 87355 - DNA, 25 bp, Saccharomyces pastorianus
aacgttggacaactgcggtcttgcc

SEQ ID NO: 87356 - DNA, 25 bp, Saccharomyces pastorianus
taagtccggcgtggccgaagttcac

SEQ ID NO: 87357 - DNA, 25 bp, Saccharomyces pastorianus
gagtggaacatatcctccgcgagag

SEQ ID NO: 87358 - DNA, 25 bp, Saccharomyces pastorianus
cggccacctggatttgctgaagaaa

SEQ ID NO: 87359 - DNA, 25 bp, Saccharomyces pastorianus
ataccccgttgcaccatgtggagga

SEQ ID NO: 87360 - DNA, 25 bp, Saccharomyces pastorianus
ggacattaacggctacactccaatg

SEQ ID NO: 87361 - DNA, 25 bp, Saccharomyces pastorianus
atgcggagggccaaacgccatacga

SEQ ID NO: 87362 - DNA, 25 bp, Saccharomyces pastorianus
aaaggtacatccgtgccatggtcag

SEQ ID NO: 87363 - DNA, 25 bp, Saccharomyces pastorianus
gagctgggtggagacttcactatca

SEQ ID NO: 87364 - DNA, 25 bp, Saccharomyces pastorianus
ggccactgccaggttgatcgtggaa

SEQ ID NO: 87365 - DNA, 25 bp, Saccharomyces pastorianus
tgaccccgcaatccaaggacattaa

SEQ ID NO: 87366 - DNA, 25 bp, Saccharomyces pastorianus
gacgaggccactctgcaacgcagga

SEQ ID NO: 87367 - DNA, 25 bp, Saccharomyces pastorianus
aaacgagcttgtgctgcagggcgac

SEQ ID NO: 87368 - DNA, 25 bp, Saccharomyces pastorianus
acctccccttgatgaatgttgtgca

SEQ ID NO: 87369 - DNA, 25 bp, Saccharomyces pastorianus
aagcttgccttgcagttgaactcta

SEQ ID NO: 87370 - DNA, 25 bp, Saccharomyces pastorianus
tttccacgaattgtctttgcatcca

SEQ ID NO: 87371 - DNA, 25 bp, Saccharomyces pastorianus
ctatggtgctaccaccttggatgta

SEQ ID NO: 87372 - DNA, 25 bp, Saccharomyces pastorianus
atggcgtcgagggaagtactccaaa

SEQ ID NO: 87373 - DNA, 25 bp, Saccharomyces pastorianus
gcagggcgaccaatacttcaatgaa

SEQ ID NO: 87374 - DNA, 25 bp, Saccharomyces pastorianus
caatgacaggtctctaatgggcaat

SEQ ID NO: 87375 - DNA, 25 bp, Saccharomyces pastorianus
atggttccaacgatgccgaagacag

SEQ ID NO: 87376 - DNA, 25 bp, Saccharomyces pastorianus
tattggatacaaacgctgcgcacct

SEQ ID NO: 87377 - DNA, 25 bp, Saccharomyces pastorianus
gaaacgctgactcactacttatggt

SEQ ID NO: 87378 - DNA, 25 bp, Saccharomyces pastorianus
tacatcttagatcctcacacagctg

SEQ ID NO: 87379 - DNA, 25 bp, Saccharomyces pastorianus
aatcgtcaacaattggttccaggaa

SEQ ID NO: 87380 - DNA, 25 bp, Saccharomyces pastorianus
gaaggcgcatcaaaggactttacat

SEQ ID NO: 87381 - DNA, 25 bp, Saccharomyces pastorianus
gctcacccagctaaatttgccgatg

SEQ ID NO: 87382 - DNA, 25 bp, Saccharomyces pastorianus
agtccatccaatacatttctctatc

SEQ ID NO: 87383 - DNA, 25 bp, Saccharomyces pastorianus
gaaagccggtgaaatcgtcaacaat

SEQ ID NO: 87384 - DNA, 25 bp, Saccharomyces pastorianus
agctgtcggtgtttgcgccacagaa

SEQ ID NO: 87385 - DNA, 25 bp, Saccharomyces pastorianus
ctgctactttatccccagcaatgga

SEQ ID NO: 87386 - DNA, 25 bp, Saccharomyces pastorianus
gactactatggtacctagctcgtga

SEQ ID NO: 87387 - DNA, 25 bp, Saccharomyces pastorianus
aacaatgcattgtctggattttcca

SEQ ID NO: 87388 - DNA, 25 bp, Saccharomyces pastorianus
gacaaatccatcattgaaggcgcat

SEQ ID NO: 87389 - DNA, 25 bp, Saccharomyces pastorianus
gacgttgttcaagacgatgcattga

SEQ ID NO: 87390 - DNA, 25 bp, Saccharomyces pastorianus
attagggctgataattttccccatt

SEQ ID NO: 87391 - DNA, 25 bp, Saccharomyces pastorianus
ggtatctctcttggatactttccaa

SEQ ID NO: 87392 - DNA, 25 bp, Saccharomyces pastorianus
attcttaatttcgtatgactctgtg

SEQ ID NO: 87393 - DNA, 25 bp, Saccharomyces pastorianus
attctttccaattgtgtcatcgatg

SEQ ID NO: 87394 - DNA, 25 bp, Saccharomyces pastorianus
gtggtcttgcattaattctttccaa

SEQ ID NO: 87395 - DNA, 25 bp, Saccharomyces pastorianus
ctttactttcttgcctggacataat

SEQ ID NO: 87396 - DNA, 25 bp, Saccharomyces pastorianus
agatctattgtttgcttgaagtttt

SEQ ID NO: 87397 - DNA, 25 bp, Saccharomyces pastorianus
gtgttaataccaacgaatcctttat

SEQ ID NO: 87398 - DNA, 25 bp, Saccharomyces pastorianus
ggacataatttctgacttgtgcaaa

SEQ ID NO: 87399 - DNA, 25 bp, Saccharomyces pastorianus
gtgtatgcacatcctgaaatccaag

SEQ ID NO: 87400 - DNA, 25 bp, Saccharomyces pastorianus
ggatcaaagctctattatctgcgag

SEQ ID NO: 87401 - DNA, 25 bp, Saccharomyces pastorianus
tttgccattgaatcccaacacattg

SEQ ID NO: 87402 - DNA, 25 bp, Saccharomyces pastorianus
gaagttcatcggtgattttgccatt

SEQ ID NO: 87403 - DNA, 25 bp, Saccharomyces pastorianus
cattctactgtagaggcgctacgag

SEQ ID NO: 87404 - DNA, 25 bp, Saccharomyces pastorianus
ttgatctggatgtggacgtcacccc

SEQ ID NO: 87405 - DNA, 25 bp, Saccharomyces pastorianus
gacggctatgaggtcgatacaaaga

SEQ ID NO: 87406 - DNA, 25 bp, Saccharomyces pastorianus
aaatatctcttctcgacggctatga

SEQ ID NO: 87407 - DNA, 25 bp, Saccharomyces pastorianus
tatctgcgagcggtggttacataaa

SEQ ID NO: 87408 - DNA, 25 bp, Saccharomyces pastorianus
ggaaatccccttggttgcaagtaat

SEQ ID NO: 87409 - DNA, 25 bp, Saccharomyces pastorianus
tttggtatcaactgatgggtccatg

SEQ ID NO: 87410 - DNA, 25 bp, Saccharomyces pastorianus
tttaccgaggattctgaagttcatc

SEQ ID NO: 87411 - DNA, 25 bp, Saccharomyces pastorianus
tgcagcacatgttacctccgaggaa

SEQ ID NO: 87412 - DNA, 25 bp, Saccharomyces pastorianus
gcgtttgtcatgctagacctactga

SEQ ID NO: 87413 - DNA, 25 bp, Saccharomyces pastorianus
accgcggatctgtctgtctatttga

SEQ ID NO: 87414 - DNA, 25 bp, Saccharomyces pastorianus
gactttcatggcctttgcagcacat

SEQ ID NO: 87415 - DNA, 25 bp, Saccharomyces pastorianus
aagtgatggactctgttttccaccg

SEQ ID NO: 87416 - DNA, 25 bp, Saccharomyces pastorianus
gtaccttcagcatttgttccaggaa

SEQ ID NO: 87417 - DNA, 25 bp, Saccharomyces pastorianus
gtctatttgacttcctcacagaact

SEQ ID NO: 87418 - DNA, 25 bp, Saccharomyces pastorianus
tagtgtctgcacttctttggctaag

SEQ ID NO: 87419 - DNA, 25 bp, Saccharomyces pastorianus
gaagaccgactccaagatgcgtaag

SEQ ID NO: 87420 - DNA, 25 bp, Saccharomyces pastorianus
agaactcgacggtgtcttgtacgtt

SEQ ID NO: 87421 - DNA, 25 bp, Saccharomyces pastorianus
cggaccccattactgatagaggctc

SEQ ID NO: 87422 - DNA, 25 bp, Saccharomyces pastorianus
acagggcaattctttgttcaaacag

SEQ ID NO: 87423 - DNA, 25 bp, Saccharomyces pastorianus
gcaatatcgtctagagctggcacag

SEQ ID NO: 87424 - DNA, 25 bp, Saccharomyces pastorianus
gaggctgtgcactgttatgaccaac

SEQ ID NO: 87425 - DNA, 25 bp, Saccharomyces pastorianus
aatgtgccagcaaggactgcggtac

SEQ ID NO: 87426 - DNA, 25 bp, Saccharomyces pastorianus
gagcatgtagctatcagatccaaat

SEQ ID NO: 87427 - DNA, 25 bp, Saccharomyces pastorianus
gaccaactaattactgctcaaccgc

SEQ ID NO: 87428 - DNA, 25 bp, Saccharomyces pastorianus
ggtaggttcagtacagatccctgtt

SEQ ID NO: 87429 - DNA, 25 bp, Saccharomyces pastorianus
aaagccatggcgctgatcaaactgg

SEQ ID NO: 87430 - DNA, 25 bp, Saccharomyces pastorianus
ggtcgggtacagcaacaaagccatg

SEQ ID NO: 87431 - DNA, 25 bp, Saccharomyces pastorianus
aacagggcctgtatcgcgaggctgt

SEQ ID NO: 87432 - DNA, 25 bp, Saccharomyces pastorianus
ggtacacctcaacggcagagcatgt

SEQ ID NO: 87433 - DNA, 25 bp, Saccharomyces pastorianus
ggagtccacggatcagtccattgaa

SEQ ID NO: 87434 - DNA, 25 bp, Saccharomyces pastorianus
acctcagtgttggattcgtttcttt

SEQ ID NO: 87435 - DNA, 25 bp, Saccharomyces pastorianus
gtgtcgatcgcgtttatgttcatag

SEQ ID NO: 87436 - DNA, 25 bp, Saccharomyces pastorianus
attgtgcgggctactcacggagtac

SEQ ID NO: 87437 - DNA, 25 bp, Saccharomyces pastorianus
tcgcaattttctactaccattcaca

SEQ ID NO: 87438 - DNA, 25 bp, Saccharomyces pastorianus
atacttgttgtcctatgggtccttc

SEQ ID NO: 87439 - DNA, 25 bp, Saccharomyces pastorianus
aagcctttcacggagttgatcacct

SEQ ID NO: 87440 - DNA, 25 bp, Saccharomyces pastorianus
acagaccgatgtagttgctgccaca

SEQ ID NO: 87441 - DNA, 25 bp, Saccharomyces pastorianus
atcttcttggagcacctggcaggaa

SEQ ID NO: 87442 - DNA, 25 bp, Saccharomyces pastorianus
ttcttccgtctgctaacatttttga

SEQ ID NO: 87443 - DNA, 25 bp, Saccharomyces pastorianus
gagtacaagctcaaccattggcgat

SEQ ID NO: 87444 - DNA, 25 bp, Saccharomyces pastorianus
gagttgcattatctcccagagctgc

SEQ ID NO: 87445 - DNA, 25 bp, Saccharomyces pastorianus
gatcttctggtctttatgcgcggca

SEQ ID NO: 87446 - DNA, 25 bp, Saccharomyces pastorianus
aacccgtcaggtgcaggcttggatc

SEQ ID NO: 87447 - DNA, 25 bp, Saccharomyces pastorianus
agacgacttgtccttttgggcatct

SEQ ID NO: 87448 - DNA, 25 bp, Saccharomyces pastorianus
ggcttgattttttcgaacccgtcag

SEQ ID NO: 87449 - DNA, 25 bp, Saccharomyces pastorianus
aagttcctaccacaacgcgtgtaat

SEQ ID NO: 87450 - DNA, 25 bp, Saccharomyces pastorianus
agctgctcattgaactttgctgcga

SEQ ID NO: 87451 - DNA, 25 bp, Saccharomyces pastorianus
agctttgctagtcttgacggctgta

SEQ ID NO: 87452 - DNA, 25 bp, Saccharomyces pastorianus
ttgctgcgagcttagacgacttgtc

SEQ ID NO: 87453 - DNA, 25 bp, Saccharomyces pastorianus
agagccaacgcagtatcatcgtcaa

SEQ ID NO: 87454 - DNA, 25 bp, Saccharomyces pastorianus
ggcatctctgagttggatttcgaaa

SEQ ID NO: 87455 - DNA, 25 bp, Saccharomyces pastorianus
ggacaagtcgtctaagctcgcagca

SEQ ID NO: 87456 - DNA, 25 bp, Saccharomyces pastorianus
gcagggtgcctcgtgcacagttaga

SEQ ID NO: 87457 - DNA, 25 bp, Saccharomyces pastorianus
accaccagcgctctagatacatata

SEQ ID NO: 87458 - DNA, 25 bp, Saccharomyces pastorianus
tgaaaaactgtgctgtctgcgctgc

SEQ ID NO: 87459 - DNA, 25 bp, Saccharomyces pastorianus
aggccatctccaaagacctttacga

SEQ ID NO: 87460 - DNA, 25 bp, Saccharomyces pastorianus
aagcctgcacctgacgggttcgaaa

SEQ ID NO: 87461 - DNA, 25 bp, Saccharomyces pastorianus
agccaaccctcacagatttcgaaat

SEQ ID NO: 87462 - DNA, 25 bp, Saccharomyces pastorianus
aacggtagcacttgcatctgcaggg

SEQ ID NO: 87463 - DNA, 25 bp, Saccharomyces pastorianus
ggagataatgcaactccaccaccag

SEQ ID NO: 87464 - DNA, 25 bp, Saccharomyces pastorianus
gtctgcgctgcattcaaaagaacga

SEQ ID NO: 87465 - DNA, 25 bp, Saccharomyces pastorianus
acaggtgtccttccatcagtgcgtc

SEQ ID NO: 87466 - DNA, 25 bp, Saccharomyces pastorianus
gaagatttgtactgttctccgctat

SEQ ID NO: 87467 - DNA, 25 bp, Saccharomyces pastorianus
tattctgtttggaagcgcgcaactg

SEQ ID NO: 87468 - DNA, 25 bp, Saccharomyces pastorianus
aagatttatctccacttcgaagtaa

SEQ ID NO: 87469 - DNA, 25 bp, Saccharomyces pastorianus
agatgaggcattccgatggcttaga

SEQ ID NO: 87470 - DNA, 25 bp, Saccharomyces pastorianus
ggctgtttggcgtggatgtttattc

SEQ ID NO: 87471 - DNA, 25 bp, Saccharomyces pastorianus
gatgtcctcacaagcgcaacgaatt

SEQ ID NO: 87472 - DNA, 25 bp, Saccharomyces pastorianus
aaatcttgcgctcatgtcgaaacca

SEQ ID NO: 87473 - DNA, 25 bp, Saccharomyces pastorianus
aacgccatcgcggttgataagcaca

SEQ ID NO: 87474 - DNA, 25 bp, Saccharomyces pastorianus
cctctcatggttcggacttacttaa

SEQ ID NO: 87475 - DNA, 25 bp, Saccharomyces pastorianus
caatcaggtatatcacgacgccggg

SEQ ID NO: 87476 - DNA, 25 bp, Saccharomyces pastorianus
gtattccccattgaagctgtacgat

SEQ ID NO: 87477 - DNA, 25 bp, Saccharomyces pastorianus
caggttcatcggacagttcaggttc

SEQ ID NO: 87478 - DNA, 25 bp, Saccharomyces pastorianus
gaagattcaactgatgctgactcat

SEQ ID NO: 87479 - DNA, 25 bp, Saccharomyces pastorianus
ggatcaggacactgttatcaacgaa

SEQ ID NO: 87480 - DNA, 25 bp, Saccharomyces pastorianus
gttaagctgggatgtttcacacaat

SEQ ID NO: 87481 - DNA, 25 bp, Saccharomyces pastorianus
gaccagggaaccgaggatcagcaaa

SEQ ID NO: 87482 - DNA, 25 bp, Saccharomyces pastorianus
gttcaggttcagtgggacattctaa

SEQ ID NO: 87483 - DNA, 25 bp, Saccharomyces pastorianus
ttttgtgattctctagaacctgttg

SEQ ID NO: 87484 - DNA, 25 bp, Saccharomyces pastorianus
aggattttgctaggcttatcaggga

SEQ ID NO: 87485 - DNA, 25 bp, Saccharomyces pastorianus
acgtctatgactcaatcccaaataa

SEQ ID NO: 87486 - DNA, 25 bp, Saccharomyces pastorianus
aaactgtcatcgttgggactgtcaa

SEQ ID NO: 87487 - DNA, 25 bp, Saccharomyces pastorianus
gactgtcaactaatggtactaggca

SEQ ID NO: 87488 - DNA, 25 bp, Saccharomyces pastorianus
agtagtggtgcttcaattggcgctc

SEQ ID NO: 87489 - DNA, 25 bp, Saccharomyces pastorianus
attggcgctctgtctgatataggca

SEQ ID NO: 87490 - DNA, 25 bp, Saccharomyces pastorianus
tgaagggacttctatggcatctatg

SEQ ID NO: 87491 - DNA, 25 bp, Saccharomyces pastorianus
tgttggtcaatcttccctatcagaa

SEQ ID NO: 87492 - DNA, 25 bp, Saccharomyces pastorianus
atgtaaatactcctgtttcccgaat

SEQ ID NO: 87493 - DNA, 25 bp, Saccharomyces pastorianus
gcaccatcttttgtaagtagccctc

SEQ ID NO: 87494 - DNA, 25 bp, Saccharomyces pastorianus
ttcggaacccactagtgttttcact

SEQ ID NO: 87495 - DNA, 25 bp, Saccharomyces pastorianus
gtagctcagccgatgccaggtgtaa

SEQ ID NO: 87496 - DNA, 25 bp, Saccharomyces pastorianus
gatgttaccgaagacgtctctctat

SEQ ID NO: 87497 - DNA, 25 bp, Saccharomyces pastorianus
gtggagatcacttctttgcctaatc

SEQ ID NO: 87498 - DNA, 25 bp, Saccharomyces pastorianus
ttatccgtggagagcgcgtcaagca

SEQ ID NO: 87499 - DNA, 25 bp, Saccharomyces pastorianus
ttactgggccgcacttttggattgc

SEQ ID NO: 87500 - DNA, 25 bp, Saccharomyces pastorianus
aagtgcgttgaaccagagccctgcg

SEQ ID NO: 87501 - DNA, 25 bp, Saccharomyces pastorianus
agttcaagttgctcactggtgggct

SEQ ID NO: 87502 - DNA, 25 bp, Saccharomyces pastorianus
aagttctccttggatacgagcgggc

SEQ ID NO: 87503 - DNA, 25 bp, Saccharomyces pastorianus
aggcgtcctcaaagaataccccgat

SEQ ID NO: 87504 - DNA, 25 bp, Saccharomyces pastorianus
gagtctgtgtctacgatgtggtcaa

SEQ ID NO: 87505 - DNA, 25 bp, Saccharomyces pastorianus
gagactgggaatcctcatcgaggct

SEQ ID NO: 87506 - DNA, 25 bp, Saccharomyces pastorianus
gaaaccgcgtgccacactggtagag

SEQ ID NO: 87507 - DNA, 25 bp, Saccharomyces pastorianus
ttcatctacctgtgtaggccgcaat

SEQ ID NO: 87508 - DNA, 25 bp, Saccharomyces pastorianus
atttggcactttggtcacaacgcag

SEQ ID NO: 87509 - DNA, 25 bp, Saccharomyces pastorianus
attcgagtcccctggagagctacta

SEQ ID NO: 87510 - DNA, 25 bp, Saccharomyces pastorianus
ggtttaccctaacaagtatatccag

SEQ ID NO: 87511 - DNA, 25 bp, Saccharomyces pastorianus
gtgtttggtcaaataacttctggtc

SEQ ID NO: 87512 - DNA, 25 bp, Saccharomyces pastorianus
atatccagggtggtgtggttgcctc

SEQ ID NO: 87513 - DNA, 25 bp, Saccharomyces pastorianus
tggacctgattctaacacctcggaa

SEQ ID NO: 87514 - DNA, 25 bp, Saccharomyces pastorianus
agcctcagcatgaattacggttcct

SEQ ID NO: 87515 - DNA, 25 bp, Saccharomyces pastorianus
gacaggcctggaagactcgcaatgg

SEQ ID NO: 87516 - DNA, 25 bp, Saccharomyces pastorianus
tttcaccgtctatgggcccaaattt

SEQ ID NO: 87517 - DNA, 25 bp, Saccharomyces pastorianus
acttctggtctagatcaactaatgg

SEQ ID NO: 87518 - DNA, 25 bp, Saccharomyces pastorianus
gttgcctcagatgtgggtcctttca

SEQ ID NO: 87519 - DNA, 25 bp, Saccharomyces pastorianus
gcaatggcctattttggacctgatt

SEQ ID NO: 87520 - DNA, 25 bp, Saccharomyces pastorianus
ggaattcatcatcaccactaaagcc

SEQ ID NO: 87521 - DNA, 25 bp, Saccharomyces pastorianus
agggcctgccactgcctcgatatat

SEQ ID NO: 87522 - DNA, 25 bp, Saccharomyces pastorianus
ctgctgaggcgccaatatttccaaa

SEQ ID NO: 87523 - DNA, 25 bp, Saccharomyces pastorianus
aataaagctgctgaggcgccaatat

SEQ ID NO: 87524 - DNA, 25 bp, Saccharomyces pastorianus
tgaggcgccaatatttccaaagctg

SEQ ID NO: 87525 - DNA, 25 bp, Saccharomyces pastorianus
aagatgtatatccactaattcaaat

SEQ ID NO: 87526 - DNA, 25 bp, Saccharomyces pastorianus
ggtaaatgccttccagggcctgcca

SEQ ID NO: 87527 - DNA, 25 bp, Saccharomyces pastorianus
gttcgtgtgttactagatgttttgg

SEQ ID NO: 87528 - DNA, 25 bp, Saccharomyces pastorianus
tgccactgcctcgatatatcaaacg

SEQ ID NO: 87529 - DNA, 25 bp, Saccharomyces pastorianus
agacgtgaagatgcatgagctcata

SEQ ID NO: 87530 - DNA, 25 bp, Saccharomyces pastorianus
atgatcagttcgtgtgttactagat

SEQ ID NO: 87531 - DNA, 25 bp, Saccharomyces pastorianus
ggcgccaatatttccaaagctggaa

SEQ ID NO: 87532 - DNA, 25 bp, Saccharomyces pastorianus
gatggtaagtttatctccacattta

SEQ ID NO: 87533 - DNA, 25 bp, Saccharomyces pastorianus
ggcatgtagccagcgtataccaggt

SEQ ID NO: 87534 - DNA, 25 bp, Saccharomyces pastorianus
gcgcactgggttaatcacttatctt

SEQ ID NO: 87535 - DNA, 25 bp, Saccharomyces pastorianus
gccgactactggtgtcatgttccaa

SEQ ID NO: 87536 - DNA, 25 bp, Saccharomyces pastorianus
gcgcattggtgcattcgatcataca

SEQ ID NO: 87537 - DNA, 25 bp, Saccharomyces pastorianus
tagtcaatcatgtggcgttcagccc

SEQ ID NO: 87538 - DNA, 25 bp, Saccharomyces pastorianus
gtaggtatattgtctcagcgtcttt

SEQ ID NO: 87539 - DNA, 25 bp, Saccharomyces pastorianus
taccaggttgcgtggtcatcggact

SEQ ID NO: 87540 - DNA, 25 bp, Saccharomyces pastorianus
agtttataccgtcgactggagtgtc

SEQ ID NO: 87541 - DNA, 25 bp, Saccharomyces pastorianus
aacattttgaagtcgcatgcgcact

SEQ ID NO: 87542 - DNA, 25 bp, Saccharomyces pastorianus
tagaaagctttctgttgacctccct

SEQ ID NO: 87543 - DNA, 25 bp, Saccharomyces pastorianus
gtcattgattgacgacccgcaagaa

SEQ ID NO: 87544 - DNA, 25 bp, Saccharomyces pastorianus
aggtgtaccacattgacgagtcatt

SEQ ID NO: 87545 - DNA, 25 bp, Saccharomyces pastorianus
gttgacgacgatgctcttacggacg

SEQ ID NO: 87546 - DNA, 25 bp, Saccharomyces pastorianus
agacgagagacttgtacccttcagc

SEQ ID NO: 87547 - DNA, 25 bp, Saccharomyces pastorianus
aaagatgctaatccgcgggtttgcc

SEQ ID NO: 87548 - DNA, 25 bp, Saccharomyces pastorianus
agaatttcgctgactatacctgtaa

SEQ ID NO: 87549 - DNA, 25 bp, Saccharomyces pastorianus
cacagggttactttcgttgtcgaag

SEQ ID NO: 87550 - DNA, 25 bp, Saccharomyces pastorianus
gtaatctgccattctcacagggtta

SEQ ID NO: 87551 - DNA, 25 bp, Saccharomyces pastorianus
gggcctacctagcagtattgtcaac

SEQ ID NO: 87552 - DNA, 25 bp, Saccharomyces pastorianus
attgtcaacgaaggtgctgctggtc

SEQ ID NO: 87553 - DNA, 25 bp, Saccharomyces pastorianus
agattccgtcaaacttccgatgttc

SEQ ID NO: 87554 - DNA, 25 bp, Saccharomyces pastorianus
gatgagtctgacttgggcaggccca

SEQ ID NO: 87555 - DNA, 25 bp, Saccharomyces pastorianus
gggcaggcccaagttgacgcaattt

SEQ ID NO: 87556 - DNA, 25 bp, Saccharomyces pastorianus
gaactctggcgtattgcaacaattt

SEQ ID NO: 87557 - DNA, 25 bp, Saccharomyces pastorianus
tgtttctagatgtcactggcggtat

SEQ ID NO: 87558 - DNA, 25 bp, Saccharomyces pastorianus
tatggattgtttccccattcagggt

SEQ ID NO: 87559 - DNA, 25 bp, Saccharomyces pastorianus
tgttgtcttattgacccaggtggta

SEQ ID NO: 87560 - DNA, 25 bp, Saccharomyces pastorianus
aaggattttactcgcatcactggcc

SEQ ID NO: 87561 - DNA, 25 bp, Saccharomyces pastorianus
ggtttcagtctggatacgttcgtga

SEQ ID NO: 87562 - DNA, 25 bp, Saccharomyces pastorianus
aatttgatttctggtattgcctgca

SEQ ID NO: 87563 - DNA, 25 bp, Saccharomyces pastorianus
gcagtggtttgtatatcgatctcga

SEQ ID NO: 87564 - DNA, 25 bp, Saccharomyces pastorianus
tcactggccattttttcactgctaa

SEQ ID NO: 87565 - DNA, 25 bp, Saccharomyces pastorianus
gagtctaccggcgtgggcagtcaaa

SEQ ID NO: 87566 - DNA, 25 bp, Saccharomyces pastorianus
gtgatttatcgaaagttacgctgga

SEQ ID NO: 87567 - DNA, 25 bp, Saccharomyces pastorianus
agaaggttttgctcaagttcaagga

SEQ ID NO: 87568 - DNA, 25 bp, Saccharomyces pastorianus
aacaatctgatattaagggaaccat

SEQ ID NO: 87569 - DNA, 25 bp, Saccharomyces pastorianus
gtaacgttatagagtctaccggcgt

SEQ ID NO: 87570 - DNA, 25 bp, Saccharomyces pastorianus
gctttcgatactcacggtaacgtta

SEQ ID NO: 87571 - DNA, 25 bp, Saccharomyces pastorianus
gtacacctgtacaaacgcaatgata

SEQ ID NO: 87572 - DNA, 25 bp, Saccharomyces pastorianus
gggaaccattgctttcgatactcac

SEQ ID NO: 87573 - DNA, 25 bp, Saccharomyces pastorianus
tacgctggatgcagaaggttttgct

SEQ ID NO: 87574 - DNA, 25 bp, Saccharomyces pastorianus
gtgggcagtcaaaggatcgaagata

SEQ ID NO: 87575 - DNA, 25 bp, Saccharomyces pastorianus
aggagattcgctactcgtacacctg

SEQ ID NO: 87576 - DNA, 25 bp, Saccharomyces pastorianus
gaaccatttggtcctggatctggcg

SEQ ID NO: 87577 - DNA, 25 bp, Saccharomyces pastorianus
ggtaactgaaccgagcttcgctaac

SEQ ID NO: 87578 - DNA, 25 bp, Saccharomyces pastorianus
gtgatctgtatcctgttggcacaag

SEQ ID NO: 87579 - DNA, 25 bp, Saccharomyces pastorianus
gatccaaatagaagacctgccccaa

SEQ ID NO: 87580 - DNA, 25 bp, Saccharomyces pastorianus
gaagggttcaacatcgtttctctct

SEQ ID NO: 87581 - DNA, 25 bp, Saccharomyces pastorianus
ggaacagcaccgttgaacccatatc

SEQ ID NO: 87582 - DNA, 25 bp, Saccharomyces pastorianus
acaagccatccggattggtctggag

SEQ ID NO: 87583 - DNA, 25 bp, Saccharomyces pastorianus
aaagcttacctgtggagccagacct

SEQ ID NO: 87584 - DNA, 25 bp, Saccharomyces pastorianus
tttctctctgagctagtggtgattc

SEQ ID NO: 87585 - DNA, 25 bp, Saccharomyces pastorianus
gtacgtcgatcaccatggcatgtgt

SEQ ID NO: 87586 - DNA, 25 bp, Saccharomyces pastorianus
caaggcggtatgattttcgatccaa

SEQ ID NO: 87587 - DNA, 25 bp, Saccharomyces pastorianus
gatcattgtctcgtttttgtctaat

SEQ ID NO: 87588 - DNA, 25 bp, Saccharomyces pastorianus
atcaccattttgatttctcgtgccg

SEQ ID NO: 87589 - DNA, 25 bp, Saccharomyces pastorianus
cgaaattatgggtctgttgctacag

SEQ ID NO: 87590 - DNA, 25 bp, Saccharomyces pastorianus
agatctaatattctttcctctcctg

SEQ ID NO: 87591 - DNA, 25 bp, Saccharomyces pastorianus
ttctcgtgccgcattaatcaagcaa

SEQ ID NO: 87592 - DNA, 25 bp, Saccharomyces pastorianus
gaagcatacatttggcagttcctag

SEQ ID NO: 87593 - DNA, 25 bp, Saccharomyces pastorianus
gggaatataacgaccacatcatgcg

SEQ ID NO: 87594 - DNA, 25 bp, Saccharomyces pastorianus
gttcttgaccacctccaaaattggt

SEQ ID NO: 87595 - DNA, 25 bp, Saccharomyces pastorianus
gaaatctttgccactattaacgagg

SEQ ID NO: 87596 - DNA, 25 bp, Saccharomyces pastorianus
gtaagattcagctgattttccctcc

SEQ ID NO: 87597 - DNA, 25 bp, Saccharomyces pastorianus
ggcagttcctagctagtttagcact

SEQ ID NO: 87598 - DNA, 25 bp, Saccharomyces pastorianus
atcatcctctgcgatcaagacggga

SEQ ID NO: 87599 - DNA, 25 bp, Saccharomyces pastorianus
cttgcgtggtggttaggctttccaa

SEQ ID NO: 87600 - DNA, 25 bp, Saccharomyces pastorianus
attggacccagacgcctttggagag

SEQ ID NO: 87601 - DNA, 25 bp, Saccharomyces pastorianus
ggaaataccttgcatttgccgcgat

SEQ ID NO: 87602 - DNA, 25 bp, Saccharomyces pastorianus
gatattttctcgtttcttgtcggaa

SEQ ID NO: 87603 - DNA, 25 bp, Saccharomyces pastorianus
tgagcatagacccttctcgattgga

SEQ ID NO: 87604 - DNA, 25 bp, Saccharomyces pastorianus
gatgaatgcttcctggcgcttgtca

SEQ ID NO: 87605 - DNA, 25 bp, Saccharomyces pastorianus
gaagctgcccttcaatggtgatgaa

SEQ ID NO: 87606 - DNA, 25 bp, Saccharomyces pastorianus
gctcaaactcattgtcacgcaggtg

SEQ ID NO: 87607 - DNA, 25 bp, Saccharomyces pastorianus
aggcgactcctcaatttgttgcaga

SEQ ID NO: 87608 - DNA, 25 bp, Saccharomyces pastorianus
ggtgggcgactctaagatcatcctc

SEQ ID NO: 87609 - DNA, 25 bp, Saccharomyces pastorianus
taccacttcatctccaactataata

SEQ ID NO: 87610 - DNA, 25 bp, Saccharomyces pastorianus
gaaatcattcgccatctattcatcc

SEQ ID NO: 87611 - DNA, 25 bp, Saccharomyces pastorianus
gattcctgtgtaaacctgagtcttt

SEQ ID NO: 87612 - DNA, 25 bp, Saccharomyces pastorianus
attttcagctttcatcaggattcca

SEQ ID NO: 87613 - DNA, 25 bp, Saccharomyces pastorianus
gataaacccacaagtccattcattg

SEQ ID NO: 87614 - DNA, 25 bp, Saccharomyces pastorianus
attcatccacaattgatgccccagc

SEQ ID NO: 87615 - DNA, 25 bp, Saccharomyces pastorianus
attccaagtgtcctctttcgttaag

SEQ ID NO: 87616 - DNA, 25 bp, Saccharomyces pastorianus
gacacgactgcgtttaacgattcct

SEQ ID NO: 87617 - DNA, 25 bp, Saccharomyces pastorianus
atgtctgcacattttccatggagcc

SEQ ID NO: 87618 - DNA, 25 bp, Saccharomyces pastorianus
aggattccattttccaacgcatcat

SEQ ID NO: 87619 - DNA, 25 bp, Saccharomyces pastorianus
gaaattgctcaacttaccaccattc

SEQ ID NO: 87620 - DNA, 25 bp, Saccharomyces pastorianus
accgagcatcaaaaagactcaggtt

SEQ ID NO: 87621 - DNA, 25 bp, Saccharomyces pastorianus
agtcgtgtcattactgcctgtagcc

SEQ ID NO: 87622 - DNA, 25 bp, Saccharomyces pastorianus
gatttttcctctcaaaccgagcatc

SEQ ID NO: 87623 - DNA, 25 bp, Saccharomyces pastorianus
gactcaggtttacacaggaatcgtt

SEQ ID NO: 87624 - DNA, 25 bp, Saccharomyces pastorianus
ggctccatggaaaatgtgcagacat

SEQ ID NO: 87625 - DNA, 25 bp, Saccharomyces pastorianus
cataaatgagccatttctgttcgtt

SEQ ID NO: 87626 - DNA, 25 bp, Saccharomyces pastorianus
catgtcatctgtgtacttggtatta

SEQ ID NO: 87627 - DNA, 25 bp, Saccharomyces pastorianus
tgatcttttttgtcataaatgagcc

SEQ ID NO: 87628 - DNA, 25 bp, Saccharomyces pastorianus
agatgaagtggtacggctccatgga

SEQ ID NO: 87629 - DNA, 25 bp, Saccharomyces pastorianus
ggaatcgttaaacgcagtcgtgtca

SEQ ID NO: 87630 - DNA, 25 bp, Saccharomyces pastorianus
tgcctgtagccatgtcatctgtgta

SEQ ID NO: 87631 - DNA, 25 bp, Saccharomyces pastorianus
aacgacgacattccccagatagact

SEQ ID NO: 87632 - DNA, 25 bp, Saccharomyces pastorianus
aactgacctgcatcaagatctcgat

SEQ ID NO: 87633 - DNA, 25 bp, Saccharomyces pastorianus
agatctcgattacatcgtactgcaa

SEQ ID NO: 87634 - DNA, 25 bp, Saccharomyces pastorianus
gaatctgtgttctcttttccacaaa

SEQ ID NO: 87635 - DNA, 25 bp, Saccharomyces pastorianus
gcacgatgctgtagccaagtttcaa

SEQ ID NO: 87636 - DNA, 25 bp, Saccharomyces pastorianus
ggattagcaacgacgacattcccca

SEQ ID NO: 87637 - DNA, 25 bp, Saccharomyces pastorianus
gtttgccctagatatcaacgcttat

SEQ ID NO: 87638 - DNA, 25 bp, Saccharomyces pastorianus
accccaaagggaacgcacgatgctg

SEQ ID NO: 87639 - DNA, 25 bp, Saccharomyces pastorianus
gaagaacacagctagagacgcttat

SEQ ID NO: 87640 - DNA, 25 bp, Saccharomyces pastorianus
gatttactgcgagaaattttcactg

SEQ ID NO: 87641 - DNA, 25 bp, Saccharomyces pastorianus
gatagactgggacaagtttgcccta

SEQ ID NO: 87642 - DNA, 25 bp, Saccharomyces pastorianus
attaattcaggcttatccagatgta

SEQ ID NO: 87643 - DNA, 25 bp, Saccharomyces pastorianus
atgctacttggtgtggcccctgtaa

SEQ ID NO: 87644 - DNA, 25 bp, Saccharomyces pastorianus
gaatcaccagatattgccaaagagt

SEQ ID NO: 87645 - DNA, 25 bp, Saccharomyces pastorianus
tatgcccacctttgttcttggcaag

SEQ ID NO: 87646 - DNA, 25 bp, Saccharomyces pastorianus
gagtgtgaagtgacggctatgccca

SEQ ID NO: 87647 - DNA, 25 bp, Saccharomyces pastorianus
ggcaagatcattggagctaacccta

SEQ ID NO: 87648 - DNA, 25 bp, Saccharomyces pastorianus
aggatggccaactcatcggcaagat

SEQ ID NO: 87649 - DNA, 25 bp, Saccharomyces pastorianus
gatgatacaaccacacttaacgaaa

SEQ ID NO: 87650 - DNA, 25 bp, Saccharomyces pastorianus
agtcatcgacttttatgctacttgg

SEQ ID NO: 87651 - DNA, 25 bp, Saccharomyces pastorianus
aagtgcgacgtggacgaatcaccag

SEQ ID NO: 87652 - DNA, 25 bp, Saccharomyces pastorianus
gcataagattccagtcctcatacac

SEQ ID NO: 87653 - DNA, 25 bp, Saccharomyces pastorianus
aaacgaatccggtacaggccacaag

SEQ ID NO: 87654 - DNA, 25 bp, Saccharomyces pastorianus
accgtcgctgtatcaccaggtgatg

SEQ ID NO: 87655 - DNA, 25 bp, Saccharomyces pastorianus
aagactttgtattgtccgtggccac

SEQ ID NO: 87656 - DNA, 25 bp, Saccharomyces pastorianus
atgagtacatcttgtccggttccaa

SEQ ID NO: 87657 - DNA, 25 bp, Saccharomyces pastorianus
atctgtggctgtggcaaacgggtct

SEQ ID NO: 87658 - DNA, 25 bp, Saccharomyces pastorianus
aaactccaaattccggcacttgtga

SEQ ID NO: 87659 - DNA, 25 bp, Saccharomyces pastorianus
ttccaaagatcgtggtgtcctgttt

SEQ ID NO: 87660 - DNA, 25 bp, Saccharomyces pastorianus
actctgtttatagcgttgtcttcac

SEQ ID NO: 87661 - DNA, 25 bp, Saccharomyces pastorianus
aatacatcgctgctggttctctaga

SEQ ID NO: 87662 - DNA, 25 bp, Saccharomyces pastorianus
gacaaagcgttgtatccggctcatt

SEQ ID NO: 87663 - DNA, 25 bp, Saccharomyces pastorianus
gggacttacgtacaggccagtgttc

SEQ ID NO: 87664 - DNA, 25 bp, Saccharomyces pastorianus
tccctcactcaactggcgtcaagag

SEQ ID NO: 87665 - DNA, 25 bp, Saccharomyces pastorianus
gaaacatctgttatgctatcaaaaa

SEQ ID NO: 87666 - DNA, 25 bp, Saccharomyces pastorianus
ataacggtctgatttgcggcctggc

SEQ ID NO: 87667 - DNA, 25 bp, Saccharomyces pastorianus
ttatggctcgccttattctgttcac

SEQ ID NO: 87668 - DNA, 25 bp, Saccharomyces pastorianus
gaggttacaacggataacggtctga

SEQ ID NO: 87669 - DNA, 25 bp, Saccharomyces pastorianus
atatagtattcagtccctcactcaa

SEQ ID NO: 87670 - DNA, 25 bp, Saccharomyces pastorianus
gcgcattgttttatagctgaagagg

SEQ ID NO: 87671 - DNA, 25 bp, Saccharomyces pastorianus
gctatcaaaaacgtcagcgcattgt

SEQ ID NO: 87672 - DNA, 25 bp, Saccharomyces pastorianus
ctctgcgctcttcccgtattatttc

SEQ ID NO: 87673 - DNA, 25 bp, Saccharomyces pastorianus
agaagggcggcctcattatggctcg

SEQ ID NO: 87674 - DNA, 25 bp, Saccharomyces pastorianus
tgcggcctggcaatgcttggtaaaa

SEQ ID NO: 87675 - DNA, 25 bp, Saccharomyces pastorianus
aaacagcgatccaccgaggaactat

SEQ ID NO: 87676 - DNA, 25 bp, Saccharomyces pastorianus
gaggaactatactcgctacagtcga

SEQ ID NO: 87677 - DNA, 25 bp, Saccharomyces pastorianus
gacctttacgagtacctctgtaacg

SEQ ID NO: 87678 - DNA, 25 bp, Saccharomyces pastorianus
attctgggttgtggttcgacatctc

SEQ ID NO: 87679 - DNA, 25 bp, Saccharomyces pastorianus
gtcacagaagtcatctatgcgcccg

SEQ ID NO: 87680 - DNA, 25 bp, Saccharomyces pastorianus
agggccaggcccaagtcacagaagt

SEQ ID NO: 87681 - DNA, 25 bp, Saccharomyces pastorianus
aactcggatttgtcaagggccaggc

SEQ ID NO: 87682 - DNA, 25 bp, Saccharomyces pastorianus
tatgcgcccgttcttaaacagcgat

SEQ ID NO: 87683 - DNA, 25 bp, Saccharomyces pastorianus
gatcgattccgcagacttactagtg

SEQ ID NO: 87684 - DNA, 25 bp, Saccharomyces pastorianus
ctctcgtcgctaaaccaattctata

SEQ ID NO: 87685 - DNA, 25 bp, Saccharomyces pastorianus
agactcagacttcccaacaggcaga

SEQ ID NO: 87686 - DNA, 25 bp, Saccharomyces pastorianus
gatactgtgcccaagaagaataccg

SEQ ID NO: 87687 - DNA, 25 bp, Saccharomyces pastorianus
agccagtggcaactcctgcaaagaa

SEQ ID NO: 87688 - DNA, 25 bp, Saccharomyces pastorianus
aacggaatcgagcttcacaagggca

SEQ ID NO: 87689 - DNA, 25 bp, Saccharomyces pastorianus
gaccttcttgaaaagtctggttgtg

SEQ ID NO: 87690 - DNA, 25 bp, Saccharomyces pastorianus
gaatcacacgtcttgcatcagcgag

SEQ ID NO: 87691 - DNA, 25 bp, Saccharomyces pastorianus
gcatagattgctccaagacgtttga

SEQ ID NO: 87692 - DNA, 25 bp, Saccharomyces pastorianus
gtggaaaagacctcgaacggaatcg

SEQ ID NO: 87693 - DNA, 25 bp, Saccharomyces pastorianus
tcacaagggcaagtcgttgtacaaa

SEQ ID NO: 87694 - DNA, 25 bp, Saccharomyces pastorianus
gtcctaacgcgtactatacatgcat

SEQ ID NO: 87695 - DNA, 25 bp, Saccharomyces pastorianus
aagtggagaagcctgtgatcaagaa

SEQ ID NO: 87696 - DNA, 25 bp, Saccharomyces pastorianus
gttacgttcaactgtgaggtgtgca

SEQ ID NO: 87697 - DNA, 25 bp, Saccharomyces pastorianus
agataacgaactgacctttgtggaa

SEQ ID NO: 87698 - DNA, 25 bp, Saccharomyces pastorianus
ttaccttctagaaactcgatcccag

SEQ ID NO: 87699 - DNA, 25 bp, Saccharomyces pastorianus
atgttgcgtcaggagcaccagtgca

SEQ ID NO: 87700 - DNA, 25 bp, Saccharomyces pastorianus
gaagcacctgaacaagcacctgaag

SEQ ID NO: 87701 - DNA, 25 bp, Saccharomyces pastorianus
gaacaagaagagatcgccccaagct

SEQ ID NO: 87702 - DNA, 25 bp, Saccharomyces pastorianus
tcgatcccagctccaaaacaagaag

SEQ ID NO: 87703 - DNA, 25 bp, Saccharomyces pastorianus
aagaagctgaggaagccgctccaca

SEQ ID NO: 87704 - DNA, 25 bp, Saccharomyces pastorianus
aacctcctttgccttcgaggaatgt

SEQ ID NO: 87705 - DNA, 25 bp, Saccharomyces pastorianus
aggaaaatccttgggccacagcaga

SEQ ID NO: 87706 - DNA, 25 bp, Saccharomyces pastorianus
tattatctcaccaaaatccttctcc

SEQ ID NO: 87707 - DNA, 25 bp, Saccharomyces pastorianus
attacccggtatgcacattgaagcg

SEQ ID NO: 87708 - DNA, 25 bp, Saccharomyces pastorianus
aacgactttcctccagtgggattgc

SEQ ID NO: 87709 - DNA, 25 bp, Saccharomyces pastorianus
aagccaacaactacgacctatgtcg

SEQ ID NO: 87710 - DNA, 25 bp, Saccharomyces pastorianus
ggattgctacttcttttgttgctgc

SEQ ID NO: 87711 - DNA, 25 bp, Saccharomyces pastorianus
actcctccatctacggttactgata

SEQ ID NO: 87712 - DNA, 25 bp, Saccharomyces pastorianus
gcagctgtgatggttactcgtgtac

SEQ ID NO: 87713 - DNA, 25 bp, Saccharomyces pastorianus
ggttcggcgtcaaaatttctctgta

SEQ ID NO: 87714 - DNA, 25 bp, Saccharomyces pastorianus
tacacccattgtcagtacgtatgct

SEQ ID NO: 87715 - DNA, 25 bp, Saccharomyces pastorianus
aagtggccataacttcagcaccaaa

SEQ ID NO: 87716 - DNA, 25 bp, Saccharomyces pastorianus
gatgccaagcttccgctacaagtga

SEQ ID NO: 87717 - DNA, 25 bp, Saccharomyces pastorianus
atgacgtctgtcattaccccaagtg

SEQ ID NO: 87718 - DNA, 25 bp, Saccharomyces pastorianus
gctgctgcatcctcaacttggatta

SEQ ID NO: 87719 - DNA, 25 bp, Saccharomyces pastorianus
aagaatatgctatgccggcatcaaa

SEQ ID NO: 87720 - DNA, 25 bp, Saccharomyces pastorianus
taacctgtgcgcttttgaggatgaa

SEQ ID NO: 87721 - DNA, 25 bp, Saccharomyces pastorianus
atgccgttatttttggttctgaaag

SEQ ID NO: 87722 - DNA, 25 bp, Saccharomyces pastorianus
gtcaaagacgattctttcattcctt

SEQ ID NO: 87723 - DNA, 25 bp, Saccharomyces pastorianus
attcctttaagccttgattgcagag

SEQ ID NO: 87724 - DNA, 25 bp, Saccharomyces pastorianus
aagtaatgtcatgccaactagagga

SEQ ID NO: 87725 - DNA, 25 bp, Saccharomyces pastorianus
tttatcccgacaccataacgtttga

SEQ ID NO: 87726 - DNA, 25 bp, Saccharomyces pastorianus
gaattgtcagttaacctgtgcgctt

SEQ ID NO: 87727 - DNA, 25 bp, Saccharomyces pastorianus
ggcagaatttgccttcgatctacaa

SEQ ID NO: 87728 - DNA, 25 bp, Saccharomyces pastorianus
aaggtaccgcatctttcttgatgaa

SEQ ID NO: 87729 - DNA, 25 bp, Saccharomyces pastorianus
gaagcatggtttatcgaaggtcaaa

SEQ ID NO: 87730 - DNA, 25 bp, Saccharomyces pastorianus
agggaatggccacactgcagcagta

SEQ ID NO: 87731 - DNA, 25 bp, Saccharomyces pastorianus
aggacgtcaaatttccacatgataa

SEQ ID NO: 87732 - DNA, 25 bp, Saccharomyces pastorianus
gaacttccttttatattgtcttgca

SEQ ID NO: 87733 - DNA, 25 bp, Saccharomyces pastorianus
gatgaggctgatccattccatgatt

SEQ ID NO: 87734 - DNA, 25 bp, Saccharomyces pastorianus
agagacatcccttcttcaaaaaagt

SEQ ID NO: 87735 - DNA, 25 bp, Saccharomyces pastorianus
gcttggttccaaatcaggagctgca

SEQ ID NO: 87736 - DNA, 25 bp, Saccharomyces pastorianus
attgtcttgcaataaacacccgaaa

SEQ ID NO: 87737 - DNA, 25 bp, Saccharomyces pastorianus
gatcacaatattttaacctactctg

SEQ ID NO: 87738 - DNA, 25 bp, Saccharomyces pastorianus
atgataacggctgcgaacttccttt

SEQ ID NO: 87739 - DNA, 25 bp, Saccharomyces pastorianus
gatgctatttggctgtactccattt

SEQ ID NO: 87740 - DNA, 25 bp, Saccharomyces pastorianus
aaggcataacagctcacatagaagt

SEQ ID NO: 87741 - DNA, 25 bp, Saccharomyces pastorianus
ttatttactacccattttcccatgc

SEQ ID NO: 87742 - DNA, 25 bp, Saccharomyces pastorianus
aagaggtactggcacacacgatggt

SEQ ID NO: 87743 - DNA, 25 bp, Saccharomyces pastorianus
aaggaatccattaacgaagacgcgt

SEQ ID NO: 87744 - DNA, 25 bp, Saccharomyces pastorianus
tgactgccccttgatattatttact

SEQ ID NO: 87745 - DNA, 25 bp, Saccharomyces pastorianus
aaacgtactcactcgaatcggtgcg

SEQ ID NO: 87746 - DNA, 25 bp, Saccharomyces pastorianus
attggcacgcctggacaaagatatt

SEQ ID NO: 87747 - DNA, 25 bp, Saccharomyces pastorianus
aatggcacagatcggctcatttgtc

SEQ ID NO: 87748 - DNA, 25 bp, Saccharomyces pastorianus
tttctgagttaagtgactgcccctt

SEQ ID NO: 87749 - DNA, 25 bp, Saccharomyces pastorianus
atttgtccccgcagaagagatcaga

SEQ ID NO: 87750 - DNA, 25 bp, Saccharomyces pastorianus
aatcgggcattcagtatttcagaag

SEQ ID NO: 87751 - DNA, 25 bp, Saccharomyces pastorianus
atgcttgatatcctacacatcttga

SEQ ID NO: 87752 - DNA, 25 bp, Saccharomyces pastorianus
ttagacctgccctttgtacaaagtg

SEQ ID NO: 87753 - DNA, 25 bp, Saccharomyces pastorianus
atccacacctattggttcagctttg

SEQ ID NO: 87754 - DNA, 25 bp, Saccharomyces pastorianus
tactaagcgctatttacaaggatac

SEQ ID NO: 87755 - DNA, 25 bp, Saccharomyces pastorianus
aattgcggtatccaaacatccacac

SEQ ID NO: 87756 - DNA, 25 bp, Saccharomyces pastorianus
gagaacttcttcaaatgcggtattt

SEQ ID NO: 87757 - DNA, 25 bp, Saccharomyces pastorianus
aattcgcgctattgtattacatgtg

SEQ ID NO: 87758 - DNA, 25 bp, Saccharomyces pastorianus
acatgtgggcattgaagctggaata

SEQ ID NO: 87759 - DNA, 25 bp, Saccharomyces pastorianus
gcgtaggctacgactttttatctgt

SEQ ID NO: 87760 - DNA, 25 bp, Saccharomyces pastorianus
attaatcttttagacctgccctttg

SEQ ID NO: 87761 - DNA, 25 bp, Saccharomyces pastorianus
tgaacaagatgaccaatccgccacc

SEQ ID NO: 87762 - DNA, 25 bp, Saccharomyces pastorianus
gggtgtttcagttttctttactcag

SEQ ID NO: 87763 - DNA, 25 bp, Saccharomyces pastorianus
ttgttccaccgccaaactggatgaa

SEQ ID NO: 87764 - DNA, 25 bp, Saccharomyces pastorianus
gaatctgcttctttaccgaagggta

SEQ ID NO: 87765 - DNA, 25 bp, Saccharomyces pastorianus
gctttgcgccttatttggcatcatt

SEQ ID NO: 87766 - DNA, 25 bp, Saccharomyces pastorianus
taatgctagcgatattgttccaccg

SEQ ID NO: 87767 - DNA, 25 bp, Saccharomyces pastorianus
gcagcctttcccaagttttacaagt

SEQ ID NO: 87768 - DNA, 25 bp, Saccharomyces pastorianus
atccgatttcactctttggtggcac

SEQ ID NO: 87769 - DNA, 25 bp, Saccharomyces pastorianus
tatccctgtgggttgatcgctaatt

SEQ ID NO: 87770 - DNA, 25 bp, Saccharomyces pastorianus
aatcttcctgatatccatacttggg

SEQ ID NO: 87771 - DNA, 25 bp, Saccharomyces pastorianus
tgtacctcatcgttgcagggctttg

SEQ ID NO: 87772 - DNA, 25 bp, Saccharomyces pastorianus
atggatgaggactgcagcctttccc

SEQ ID NO: 87773 - DNA, 25 bp, Saccharomyces pastorianus
atgtcactaggcgtactgtacctca

SEQ ID NO: 87774 - DNA, 25 bp, Saccharomyces pastorianus
aaaaattgccccttgagaataatag

SEQ ID NO: 87775 - DNA, 25 bp, Saccharomyces pastorianus
attggtagataagaccgcgttggtc

SEQ ID NO: 87776 - DNA, 25 bp, Saccharomyces pastorianus
agagagccagaagtgcctcagcggc

SEQ ID NO: 87777 - DNA, 25 bp, Saccharomyces pastorianus
tgaagaaaacctcttctgaccttgg

SEQ ID NO: 87778 - DNA, 25 bp, Saccharomyces pastorianus
accagattggttcaagtttcaacga

SEQ ID NO: 87779 - DNA, 25 bp, Saccharomyces pastorianus
ggccaattctggcaaacttattaga

SEQ ID NO: 87780 - DNA, 25 bp, Saccharomyces pastorianus
cgcgttggtcattggtatacttcga

SEQ ID NO: 87781 - DNA, 25 bp, Saccharomyces pastorianus
gcctcagcggcttttgacattaata

SEQ ID NO: 87782 - DNA, 25 bp, Saccharomyces pastorianus
gaagatgacctttgcagagagccag

SEQ ID NO: 87783 - DNA, 25 bp, Saccharomyces pastorianus
aataggacgcattcgatagagtata

SEQ ID NO: 87784 - DNA, 25 bp, Saccharomyces pastorianus
ggataccctgtgattctgaattacc

SEQ ID NO: 87785 - DNA, 25 bp, Saccharomyces pastorianus
catttggccttatagagtgtggtcg

SEQ ID NO: 87786 - DNA, 25 bp, Saccharomyces pastorianus
ccttatagagtgtggtcgtggcgga

SEQ ID NO: 87787 - DNA, 25 bp, Saccharomyces pastorianus
aggttgtttatctttcgagtactga

SEQ ID NO: 87788 - DNA, 25 bp, Saccharomyces pastorianus
tgtttatctttcgagtactgaatgt

SEQ ID NO: 87789 - DNA, 25 bp, Saccharomyces pastorianus
gtggcggaggttgtttatctttcga

SEQ ID NO: 87790 - DNA, 25 bp, Saccharomyces pastorianus
tcgtggcggaggttgtttatctttc

SEQ ID NO: 87791 - DNA, 25 bp, Saccharomyces pastorianus
tttggccttatagagtgtggtcgtg

SEQ ID NO: 87792 - DNA, 25 bp, Saccharomyces pastorianus
gttgtttatctttcgagtactgaat

SEQ ID NO: 87793 - DNA, 25 bp, Saccharomyces pastorianus
gcggaggttgtttatctttcgagta

SEQ ID NO: 87794 - DNA, 25 bp, Saccharomyces pastorianus
ggaggttgtttatctttcgagtact

SEQ ID NO: 87795 - DNA, 25 bp, Saccharomyces pastorianus
ggcggaggttgtttatctttcgagt

SEQ ID NO: 87796 - DNA, 25 bp, Saccharomyces pastorianus
ccccttgtttattatcttctacgca

SEQ ID NO: 87797 - DNA, 25 bp, Saccharomyces pastorianus
ggagttttagctgtactgggtgtac

SEQ ID NO: 87798 - DNA, 25 bp, Saccharomyces pastorianus
atctgtccgatcgtattggtcgtaa

SEQ ID NO: 87799 - DNA, 25 bp, Saccharomyces pastorianus
ttgatgtttggtttctctgggtaca

SEQ ID NO: 87800 - DNA, 25 bp, Saccharomyces pastorianus
aatcggttctgtagtaggcgtcgaa

SEQ ID NO: 87801 - DNA, 25 bp, Saccharomyces pastorianus
atggtttatctgctgtgactggtaa

SEQ ID NO: 87802 - DNA, 25 bp, Saccharomyces pastorianus
taccaattggtgcttatctgtccga

SEQ ID NO: 87803 - DNA, 25 bp, Saccharomyces pastorianus
tagtgaagcgtcagcaaccgctgtt

SEQ ID NO: 87804 - DNA, 25 bp, Saccharomyces pastorianus
taggcgtcgaatgtttccaacccat

SEQ ID NO: 87805 - DNA, 25 bp, Saccharomyces pastorianus
gtctaatcattggatgtgcgtacga

SEQ ID NO: 87806 - DNA, 25 bp, Saccharomyces pastorianus
gaatttcacaactatttggtatcca

SEQ ID NO: 87807 - DNA, 25 bp, Saccharomyces pastorianus
atccgactacgaatgctcttctgaa

SEQ ID NO: 87808 - DNA, 25 bp, Saccharomyces pastorianus
tctgctgcatttgactataaaacgt

SEQ ID NO: 87809 - DNA, 25 bp, Saccharomyces pastorianus
gtgacaaagctaatggcgaaactgt

SEQ ID NO: 87810 - DNA, 25 bp, Saccharomyces pastorianus
aatcctgagggagagctcgaatggc

SEQ ID NO: 87811 - DNA, 25 bp, Saccharomyces pastorianus
gaaattgaggccatgaacattccat

SEQ ID NO: 87812 - DNA, 25 bp, Saccharomyces pastorianus
ttcgaagactggaatttggcagatg

SEQ ID NO: 87813 - DNA, 25 bp, Saccharomyces pastorianus
cgaatgctcttctgaatttgttaga

SEQ ID NO: 87814 - DNA, 25 bp, Saccharomyces pastorianus
gcatgaaataccttgtgacagttgt

SEQ ID NO: 87815 - DNA, 25 bp, Saccharomyces pastorianus
attccatgtgaaaaaatcctgaggg

SEQ ID NO: 87816 - DNA, 25 bp, Saccharomyces pastorianus
cagatgggaaatgccttaatggcgc

SEQ ID NO: 87817 - DNA, 25 bp, Saccharomyces pastorianus
gcgaaactgtatcattagagccatt

SEQ ID NO: 87818 - DNA, 25 bp, Saccharomyces pastorianus
gttgtcgaattaactaatttgacag

SEQ ID NO: 87819 - DNA, 25 bp, Saccharomyces pastorianus
caggatgctaccgttgtcgaattaa

SEQ ID NO: 87820 - DNA, 25 bp, Saccharomyces pastorianus
ggatgctaccgttgtcgaattaact

SEQ ID NO: 87821 - DNA, 25 bp, Saccharomyces pastorianus
ctatttgattaccatgatattggcg

SEQ ID NO: 87822 - DNA, 25 bp, Saccharomyces pastorianus
aacaggatgctaccgttgtcgaatt

SEQ ID NO: 87823 - DNA, 25 bp, Saccharomyces pastorianus
gactgtattcaataggcggccatga

SEQ ID NO: 87824 - DNA, 25 bp, Saccharomyces pastorianus
taaacaggatgctaccgttgtcgaa

SEQ ID NO: 87825 - DNA, 25 bp, Saccharomyces pastorianus
atgctaccgttgtcgaattaactaa

SEQ ID NO: 87826 - DNA, 25 bp, Saccharomyces pastorianus
actgtattcaataggcggccatgaa

SEQ ID NO: 87827 - DNA, 25 bp, Saccharomyces pastorianus
aactatttgattaccatgatattgg

SEQ ID NO: 87828 - DNA, 25 bp, Saccharomyces pastorianus
caagactgtattcaataggcggcca

SEQ ID NO: 87829 - DNA, 25 bp, Saccharomyces pastorianus
gtgcggccgataaacaggatgctac

SEQ ID NO: 87830 - DNA, 25 bp, Saccharomyces pastorianus
cagtcgctcatccaattagccaata

SEQ ID NO: 87831 - DNA, 25 bp, Saccharomyces pastorianus
gtgcaactgcagtaggtcagtcgct

SEQ ID NO: 87832 - DNA, 25 bp, Saccharomyces pastorianus
agatcattgttgtggcttctcggaa

SEQ ID NO: 87833 - DNA, 25 bp, Saccharomyces pastorianus
caagtgtacaaatgtgcggccgata

SEQ ID NO: 87834 - DNA, 25 bp, Saccharomyces pastorianus
gggagccatcaaccccacaaagaaa

SEQ ID NO: 87835 - DNA, 25 bp, Saccharomyces pastorianus
tttagtcgactgtgtcgcgaatcaa

SEQ ID NO: 87836 - DNA, 25 bp, Saccharomyces pastorianus
gtaggtcagtcgctcatccaattag

SEQ ID NO: 87837 - DNA, 25 bp, Saccharomyces pastorianus
caatatctcgtatttagtcgactgt

SEQ ID NO: 87838 - DNA, 25 bp, Saccharomyces pastorianus
atacgcttcaacaagtgtacaaatg

SEQ ID NO: 87839 - DNA, 25 bp, Saccharomyces pastorianus
gaatggcttcaccaagatcattgtt

SEQ ID NO: 87840 - DNA, 25 bp, Saccharomyces pastorianus
caaggacatttatgttgtgtgggtt

SEQ ID NO: 87841 - DNA, 25 bp, Saccharomyces pastorianus
aagcattctttacggggagctttcg

SEQ ID NO: 87842 - DNA, 25 bp, Saccharomyces pastorianus
gagctttcgaaattttttatattca

SEQ ID NO: 87843 - DNA, 25 bp, Saccharomyces pastorianus
gaaattttttatattcaaggacatt

SEQ ID NO: 87844 - DNA, 25 bp, Saccharomyces pastorianus
tggagctgattatcaagcattcttt

SEQ ID NO: 87845 - DNA, 25 bp, Saccharomyces pastorianus
aaagtatttctttaatggagctgat

SEQ ID NO: 87846 - DNA, 25 bp, Saccharomyces pastorianus
ctgattatcaagcattctttacggg

SEQ ID NO: 87847 - DNA, 25 bp, Saccharomyces pastorianus
gacatttatgttgtgtgggttatta

SEQ ID NO: 87848 - DNA, 25 bp, Saccharomyces pastorianus
aatggagctgattatcaagcattct

SEQ ID NO: 87849 - DNA, 25 bp, Saccharomyces pastorianus
atttctttaatggagctgattatca

SEQ ID NO: 87850 - DNA, 25 bp, Saccharomyces pastorianus
gagctgattatcaagcattctttac

SEQ ID NO: 87851 - DNA, 25 bp, Saccharomyces pastorianus
caaggacatttatgttgtgtgggtt

SEQ ID NO: 87852 - DNA, 25 bp, Saccharomyces pastorianus
aagcattctttacggggagctttcg

SEQ ID NO: 87853 - DNA, 25 bp, Saccharomyces pastorianus
gagctttcgaaattttttatattca

SEQ ID NO: 87854 - DNA, 25 bp, Saccharomyces pastorianus
gaaattttttatattcaaggacatt

SEQ ID NO: 87855 - DNA, 25 bp, Saccharomyces pastorianus
ctgattatcaagcattctttacggg

SEQ ID NO: 87856 - DNA, 25 bp, Saccharomyces pastorianus
tggagctgattatcaagcattcttt

SEQ ID NO: 87857 - DNA, 25 bp, Saccharomyces pastorianus
aaagtatttctttaatggagctgat

SEQ ID NO: 87858 - DNA, 25 bp, Saccharomyces pastorianus
gacatttatgttgtgtgggttatta

SEQ ID NO: 87859 - DNA, 25 bp, Saccharomyces pastorianus
aatggagctgattatcaagcattct

SEQ ID NO: 87860 - DNA, 25 bp, Saccharomyces pastorianus
atttctttaatggagctgattatca

SEQ ID NO: 87861 - DNA, 25 bp, Saccharomyces pastorianus
gagctgattatcaagcattctttac

SEQ ID NO: 87862 - DNA, 25 bp, Saccharomyces pastorianus
atgcatgtggttttctgcaagggaa

SEQ ID NO: 87863 - DNA, 25 bp, Saccharomyces pastorianus
taatcaaacctatacgccgacagaa

SEQ ID NO: 87864 - DNA, 25 bp, Saccharomyces pastorianus
taatacaaggccttctcattctctc

SEQ ID NO: 87865 - DNA, 25 bp, Saccharomyces pastorianus
gtgtggttcgcatggcttcacaaat

SEQ ID NO: 87866 - DNA, 25 bp, Saccharomyces pastorianus
gggcagcctgctgaaagtcctgaaa

SEQ ID NO: 87867 - DNA, 25 bp, Saccharomyces pastorianus
ttctcattctctcgccaaatttatc

SEQ ID NO: 87868 - DNA, 25 bp, Saccharomyces pastorianus
atgcgagttatgtggcaagcgactt

SEQ ID NO: 87869 - DNA, 25 bp, Saccharomyces pastorianus
caagcgacttttatgcatgtggttt

SEQ ID NO: 87870 - DNA, 25 bp, Saccharomyces pastorianus
aatgctctattgtttaagtgcggta

SEQ ID NO: 87871 - DNA, 25 bp, Saccharomyces pastorianus
atgatacatttctcactgggcagcc

SEQ ID NO: 87872 - DNA, 25 bp, Saccharomyces pastorianus
aacgtttacgtgtggttcgcatggc

SEQ ID NO: 87873 - DNA, 25 bp, Saccharomyces pastorianus
tttgtttacatcttccgtgcccatc

SEQ ID NO: 87874 - DNA, 25 bp, Saccharomyces pastorianus
ttgttttccattttgtttacatctt

SEQ ID NO: 87875 - DNA, 25 bp, Saccharomyces pastorianus
gatcctgttcttatttgttttccat

SEQ ID NO: 87876 - DNA, 25 bp, Saccharomyces pastorianus
tacccggcatactttgaagacgaaa

SEQ ID NO: 87877 - DNA, 25 bp, Saccharomyces pastorianus
gtgcccatcaatacccggcatactt

SEQ ID NO: 87878 - DNA, 25 bp, Saccharomyces pastorianus
atgacgtttcagatcctgttcttat

SEQ ID NO: 87879 - DNA, 25 bp, Saccharomyces pastorianus
gtttcagatcctgttcttatttgtt

SEQ ID NO: 87880 - DNA, 25 bp, Saccharomyces pastorianus
agacgaaaaagatacctacataaag

SEQ ID NO: 87881 - DNA, 25 bp, Saccharomyces pastorianus
tttacatcttccgtgcccatcaata

SEQ ID NO: 87882 - DNA, 25 bp, Saccharomyces pastorianus
ctgttcttatttgttttccattttg

SEQ ID NO: 87883 - DNA, 25 bp, Saccharomyces pastorianus
caatacccggcatactttgaagacg

SEQ ID NO: 87884 - DNA, 25 bp, Saccharomyces pastorianus
gagagccttgaagatttcgcacgat

SEQ ID NO: 87885 - DNA, 25 bp, Saccharomyces pastorianus
ttgattctactttcccgcaaaaggg

SEQ ID NO: 87886 - DNA, 25 bp, Saccharomyces pastorianus
gaggccatcgtactgtggtaagcca

SEQ ID NO: 87887 - DNA, 25 bp, Saccharomyces pastorianus
ggtgcaggctccatgattgaatcat

SEQ ID NO: 87888 - DNA, 25 bp, Saccharomyces pastorianus
aggattctgttcactttgttggtac

SEQ ID NO: 87889 - DNA, 25 bp, Saccharomyces pastorianus
aatctctaggaggtgccgattccag

SEQ ID NO: 87890 - DNA, 25 bp, Saccharomyces pastorianus
ggatacgccgttcgatgcagctaaa

SEQ ID NO: 87891 - DNA, 25 bp, Saccharomyces pastorianus
ggatatacatttcccggtgcaggct

SEQ ID NO: 87892 - DNA, 25 bp, Saccharomyces pastorianus
aacagcatcatatcggcattcaacc

SEQ ID NO: 87893 - DNA, 25 bp, Saccharomyces pastorianus
taggtggcacactactcgttttgag

SEQ ID NO: 87894 - DNA, 25 bp, Saccharomyces pastorianus
accatttttggtgaacggccttgat

SEQ ID NO: 87895 - DNA, 25 bp, Saccharomyces pastorianus
atggaacatttcttccccaacaaga

SEQ ID NO: 87896 - DNA, 25 bp, Saccharomyces pastorianus
accagtctaggttcgagttcaaact

SEQ ID NO: 87897 - DNA, 25 bp, Saccharomyces pastorianus
ggcacaaacaacttttgctcaaatg

SEQ ID NO: 87898 - DNA, 25 bp, Saccharomyces pastorianus
taaagggttcttctgctgcattagg

SEQ ID NO: 87899 - DNA, 25 bp, Saccharomyces pastorianus
gaaaattccatatatctcatcttga

SEQ ID NO: 87900 - DNA, 25 bp, Saccharomyces pastorianus
gcaaaagctttgaaccagtctaggt

SEQ ID NO: 87901 - DNA, 25 bp, Saccharomyces pastorianus
ggcttacaaagaattgcctgggttt

SEQ ID NO: 87902 - DNA, 25 bp, Saccharomyces pastorianus
cgaattagacaatctgggccatttt

SEQ ID NO: 87903 - DNA, 25 bp, Saccharomyces pastorianus
gaattggtcaacactctgagcgata

SEQ ID NO: 87904 - DNA, 25 bp, Saccharomyces pastorianus
tgattccgatttttctaaaggtcta

SEQ ID NO: 87905 - DNA, 25 bp, Saccharomyces pastorianus
atgtctactattccctcagaaatca

SEQ ID NO: 87906 - DNA, 25 bp, Saccharomyces pastorianus
atctctgatgaacagctgaactcct

SEQ ID NO: 87907 - DNA, 25 bp, Saccharomyces pastorianus
cttcggtattgtgatgatgacttta

SEQ ID NO: 87908 - DNA, 25 bp, Saccharomyces pastorianus
tccttggccatcaccttcggtattg

SEQ ID NO: 87909 - DNA, 25 bp, Saccharomyces pastorianus
cttggccatcaccttcggtattgtg

SEQ ID NO: 87910 - DNA, 25 bp, Saccharomyces pastorianus
agctgaactccttggccatcacctt

SEQ ID NO: 87911 - DNA, 25 bp, Saccharomyces pastorianus
gactttaattgtcatttaccatgct

SEQ ID NO: 87912 - DNA, 25 bp, Saccharomyces pastorianus
aactccttggccatcaccttcggta

SEQ ID NO: 87913 - DNA, 25 bp, Saccharomyces pastorianus
cggtattgtgatgatgactttaatt

SEQ ID NO: 87914 - DNA, 25 bp, Saccharomyces pastorianus
ttggccatcaccttcggtattgtga

SEQ ID NO: 87915 - DNA, 25 bp, Saccharomyces pastorianus
tctgatgaacagctgaactccttgg

SEQ ID NO: 87916 - DNA, 25 bp, Saccharomyces pastorianus
tgatgaacagctgaactccttggcc

SEQ ID NO: 87917 - DNA, 25 bp, Saccharomyces pastorianus
gatggtcacgcctctggtagaatac

SEQ ID NO: 87918 - DNA, 25 bp, Saccharomyces pastorianus
gatcgtgttacagttacgctcgcaa

SEQ ID NO: 87919 - DNA, 25 bp, Saccharomyces pastorianus
agttcctatttatctaccatgctgc

SEQ ID NO: 87920 - DNA, 25 bp, Saccharomyces pastorianus
gatatgactcaatttccctctgatt

SEQ ID NO: 87921 - DNA, 25 bp, Saccharomyces pastorianus
gggaaccccattatcgtacactgtt

SEQ ID NO: 87922 - DNA, 25 bp, Saccharomyces pastorianus
ggaccctcttgtaggacctgtcaaa

SEQ ID NO: 87923 - DNA, 25 bp, Saccharomyces pastorianus
cgggcggcgccaatgatatgactca

SEQ ID NO: 87924 - DNA, 25 bp, Saccharomyces pastorianus
gagtacacacgggacttgatcgaac

SEQ ID NO: 87925 - DNA, 25 bp, Saccharomyces pastorianus
acctgtcaaaactgttcaccacttt

SEQ ID NO: 87926 - DNA, 25 bp, Saccharomyces pastorianus
aaggactattatacggtcaccgata

SEQ ID NO: 87927 - DNA, 25 bp, Saccharomyces pastorianus
ggagaagtgctaccagtactggcct

SEQ ID NO: 87928 - DNA, 25 bp, Saccharomyces pastorianus
ggacttggaacctctcttcaattta

SEQ ID NO: 87929 - DNA, 25 bp, Saccharomyces pastorianus
gtagacttttcgacggcagtaacct

SEQ ID NO: 87930 - DNA, 25 bp, Saccharomyces pastorianus
cagttaacacgttcaccttggtaga

SEQ ID NO: 87931 - DNA, 25 bp, Saccharomyces pastorianus
tggcaaaagcttcatcggcagcctt

SEQ ID NO: 87932 - DNA, 25 bp, Saccharomyces pastorianus
tctagcttcgtgcttcttggcaaaa

SEQ ID NO: 87933 - DNA, 25 bp, Saccharomyces pastorianus
gatagcttccaagactggttcacca

SEQ ID NO: 87934 - DNA, 25 bp, Saccharomyces pastorianus
gttcttcaagtcgaattcacccaac

SEQ ID NO: 87935 - DNA, 25 bp, Saccharomyces pastorianus
ggattccaatctttgtctagcttcg

SEQ ID NO: 87936 - DNA, 25 bp, Saccharomyces pastorianus
aacggtgttttggttgtcagcacat

SEQ ID NO: 87937 - DNA, 25 bp, Saccharomyces pastorianus
gaactcttcagcttggttaaccatc

SEQ ID NO: 87938 - DNA, 25 bp, Saccharomyces pastorianus
ggttcaccagctggcatcattggga

SEQ ID NO: 87939 - DNA, 25 bp, Saccharomyces pastorianus
gggaacccgtatatttcagcttcac

SEQ ID NO: 87940 - DNA, 25 bp, Saccharomyces pastorianus
gaaatcatgtcgaggctgctgtgtg

SEQ ID NO: 87941 - DNA, 25 bp, Saccharomyces pastorianus
acaaattcagcggtcatcactgtat

SEQ ID NO: 87942 - DNA, 25 bp, Saccharomyces pastorianus
tgggcttacgatagaaggccataaa

SEQ ID NO: 87943 - DNA, 25 bp, Saccharomyces pastorianus
aatgtggcggaatcttacagtttga

SEQ ID NO: 87944 - DNA, 25 bp, Saccharomyces pastorianus
tttgccagttaaaggaccagagtgt

SEQ ID NO: 87945 - DNA, 25 bp, Saccharomyces pastorianus
cattacgcccgaaggtttgccagtt

SEQ ID NO: 87946 - DNA, 25 bp, Saccharomyces pastorianus
aaacactgtgttgcttgtcccagaa

SEQ ID NO: 87947 - DNA, 25 bp, Saccharomyces pastorianus
tcagcttcacggatgatttccaggg

SEQ ID NO: 87948 - DNA, 25 bp, Saccharomyces pastorianus
ttacagtttgatgctgtccgcgggc

SEQ ID NO: 87949 - DNA, 25 bp, Saccharomyces pastorianus
gagaagttccgccaattataaaaag

SEQ ID NO: 87950 - DNA, 25 bp, Saccharomyces pastorianus
agagcagctgcccagtttggccaaa

SEQ ID NO: 87951 - DNA, 25 bp, Saccharomyces pastorianus
ttattaagcctcacgtccagcaatg

SEQ ID NO: 87952 - DNA, 25 bp, Saccharomyces pastorianus
gggacaccactggagaaccgtcgat

SEQ ID NO: 87953 - DNA, 25 bp, Saccharomyces pastorianus
tctccagcgctgtaaccaaatcgtt

SEQ ID NO: 87954 - DNA, 25 bp, Saccharomyces pastorianus
agggtccagcaatactttgagcctg

SEQ ID NO: 87955 - DNA, 25 bp, Saccharomyces pastorianus
cagggctttggaagtacacccgcaa

SEQ ID NO: 87956 - DNA, 25 bp, Saccharomyces pastorianus
attttcaagctgatcctttgggaac

SEQ ID NO: 87957 - DNA, 25 bp, Saccharomyces pastorianus
gatctgcaacaccagcaaactctag

SEQ ID NO: 87958 - DNA, 25 bp, Saccharomyces pastorianus
aagaacggtctgcagggtccagcaa

SEQ ID NO: 87959 - DNA, 25 bp, Saccharomyces pastorianus
aagcttattttgctgagctgggcaa

SEQ ID NO: 87960 - DNA, 25 bp, Saccharomyces pastorianus
tacgcctggtgttgctcaaagtcga

SEQ ID NO: 87961 - DNA, 25 bp, Saccharomyces pastorianus
gtgaacgccatttggtccactatat

SEQ ID NO: 87962 - DNA, 25 bp, Saccharomyces pastorianus
ggaccacgacatgtatgcccaatat

SEQ ID NO: 87963 - DNA, 25 bp, Saccharomyces pastorianus
atgctgctgatttccctatttttca

SEQ ID NO: 87964 - DNA, 25 bp, Saccharomyces pastorianus
atttttcatcgtactggcgctggta

SEQ ID NO: 87965 - DNA, 25 bp, Saccharomyces pastorianus
agtcctgtactgtgtgttgtcctgg

SEQ ID NO: 87966 - DNA, 25 bp, Saccharomyces pastorianus
tatattggctgcatgcttgtacaca

SEQ ID NO: 87967 - DNA, 25 bp, Saccharomyces pastorianus
ggctggcaatggcaagttctttcaa

SEQ ID NO: 87968 - DNA, 25 bp, Saccharomyces pastorianus
ctggttggcctttttcttcattata

SEQ ID NO: 87969 - DNA, 25 bp, Saccharomyces pastorianus
acttcggtcttcttgatgctcgtga

SEQ ID NO: 87970 - DNA, 25 bp, Saccharomyces pastorianus
tatattcagtgctacccacaaggcc

SEQ ID NO: 87971 - DNA, 25 bp, Saccharomyces pastorianus
aaactttgcgttcatctggacttcg

SEQ ID NO: 87972 - DNA, 25 bp, Saccharomyces pastorianus
gtgacgccattttgcgcggcaagaa

SEQ ID NO: 87973 - DNA, 25 bp, Saccharomyces pastorianus
tgtgaaaacgttccactcccttata

SEQ ID NO: 87974 - DNA, 25 bp, Saccharomyces pastorianus
tgcaaccttcggatgggccagctgt

SEQ ID NO: 87975 - DNA, 25 bp, Saccharomyces pastorianus
aacggctccggcgtcatcgttatta

SEQ ID NO: 87976 - DNA, 25 bp, Saccharomyces pastorianus
tattactccgagacgtcactgcaat

SEQ ID NO: 87977 - DNA, 25 bp, Saccharomyces pastorianus
accagatctggagtgccacggtagt

SEQ ID NO: 87978 - DNA, 25 bp, Saccharomyces pastorianus
ccagctgttgttgcaattcccgaaa

SEQ ID NO: 87979 - DNA, 25 bp, Saccharomyces pastorianus
tcccttatattcagagcacccttaa

SEQ ID NO: 87980 - DNA, 25 bp, Saccharomyces pastorianus
ctcattccagactatccttgtttta

SEQ ID NO: 87981 - DNA, 25 bp, Saccharomyces pastorianus
ctgcgcggatcatgtcttacgaggt

SEQ ID NO: 87982 - DNA, 25 bp, Saccharomyces pastorianus
aaggaagacccttcattggctcttg

SEQ ID NO: 87983 - DNA, 25 bp, Saccharomyces pastorianus
tggtgccgggtttgctgccttttca

SEQ ID NO: 87984 - DNA, 25 bp, Saccharomyces pastorianus
gtcaatggcatatgatacacctctt

SEQ ID NO: 87985 - DNA, 25 bp, Saccharomyces pastorianus
tttttaccggtgctgggctggcata

SEQ ID NO: 87986 - DNA, 25 bp, Saccharomyces pastorianus
ggctggcatacaaagctggaccaca

SEQ ID NO: 87987 - DNA, 25 bp, Saccharomyces pastorianus
aaatatctgatttacctttccggca

SEQ ID NO: 87988 - DNA, 25 bp, Saccharomyces pastorianus
gggtaaaaaatcctactctagtgct

SEQ ID NO: 87989 - DNA, 25 bp, Saccharomyces pastorianus
aggcctgttcatggcgtcaatggca

SEQ ID NO: 87990 - DNA, 25 bp, Saccharomyces pastorianus
ttcatacacctacacctgcaaatac

SEQ ID NO: 87991 - DNA, 25 bp, Saccharomyces pastorianus
cactgggtggtgttttaggcctgtt

SEQ ID NO: 87992 - DNA, 25 bp, Saccharomyces pastorianus
cagcaactgcaactgcgggaaatat

SEQ ID NO: 87993 - DNA, 25 bp, Saccharomyces pastorianus
gacttcctgtcctggaaaatcagtt

SEQ ID NO: 87994 - DNA, 25 bp, Saccharomyces pastorianus
gagggtgccaatctatttataacgc

SEQ ID NO: 87995 - DNA, 25 bp, Saccharomyces pastorianus
ctgggcctcagtccgtattggaaaa

SEQ ID NO: 87996 - DNA, 25 bp, Saccharomyces pastorianus
acgacttcgtgcacaaatttattgg

SEQ ID NO: 87997 - DNA, 25 bp, Saccharomyces pastorianus
ttggcctcactagcgcttaacgata

SEQ ID NO: 87998 - DNA, 25 bp, Saccharomyces pastorianus
gaggtctgcgttgtacaagtcgtac

SEQ ID NO: 87999 - DNA, 25 bp, Saccharomyces pastorianus
gttgcttctcaagagttgtggctca

SEQ ID NO: 88000 - DNA, 25 bp, Saccharomyces pastorianus
gaacgacgatttagttgcttctcaa

SEQ ID NO: 88001 - DNA, 25 bp, Saccharomyces pastorianus
agttcttctgtcgagttacttatca

SEQ ID NO: 88002 - DNA, 25 bp, Saccharomyces pastorianus
tcaaaccaattgtccttcactataa

SEQ ID NO: 88003 - DNA, 25 bp, Saccharomyces pastorianus
attctgattgatgttgctgggcctc

SEQ ID NO: 88004 - DNA, 25 bp, Saccharomyces pastorianus
aaagatgcttctgccaacaaaggtg

SEQ ID NO: 88005 - DNA, 25 bp, Saccharomyces pastorianus
caatgtcgagctaactgttggcgga

SEQ ID NO: 88006 - DNA, 25 bp, Saccharomyces pastorianus
accagatccgtctcagagctgacaa

SEQ ID NO: 88007 - DNA, 25 bp, Saccharomyces pastorianus
tgacaaagatcgcaccggcattcaa

SEQ ID NO: 88008 - DNA, 25 bp, Saccharomyces pastorianus
actgcagctcaaacctctggaacag

SEQ ID NO: 88009 - DNA, 25 bp, Saccharomyces pastorianus
gaaaatcgccaaaactaccgccact

SEQ ID NO: 88010 - DNA, 25 bp, Saccharomyces pastorianus
gcttacctagagacatcactgctgt

SEQ ID NO: 88011 - DNA, 25 bp, Saccharomyces pastorianus
ggacattgccttattacaacatggg

SEQ ID NO: 88012 - DNA, 25 bp, Saccharomyces pastorianus
ttattgtctttgtcggtagcttacc

SEQ ID NO: 88013 - DNA, 25 bp, Saccharomyces pastorianus
aggtggtaacagtcaagagcgtcta

SEQ ID NO: 88014 - DNA, 25 bp, Saccharomyces pastorianus
aagacccaacagtgcagccggaaat

SEQ ID NO: 88015 - DNA, 25 bp, Saccharomyces pastorianus
taaaaatagttcacccgaccagatc

SEQ ID NO: 88016 - DNA, 25 bp, Saccharomyces pastorianus
aagagcatttcgatttggcactaag

SEQ ID NO: 88017 - DNA, 25 bp, Saccharomyces pastorianus
tatcggtacggccatgatcttatcg

SEQ ID NO: 88018 - DNA, 25 bp, Saccharomyces pastorianus
tacgtgttggctatctgtgtgtttc

SEQ ID NO: 88019 - DNA, 25 bp, Saccharomyces pastorianus
tacatgagactccattgccggtgat

SEQ ID NO: 88020 - DNA, 25 bp, Saccharomyces pastorianus
gagaagctgccaatgcctgtaaaaa

SEQ ID NO: 88021 - DNA, 25 bp, Saccharomyces pastorianus
atgtttgccggtgtaatcatcctac

SEQ ID NO: 88022 - DNA, 25 bp, Saccharomyces pastorianus
agatttctgttctatcggtacggcc

SEQ ID NO: 88023 - DNA, 25 bp, Saccharomyces pastorianus
gtatcgactgttctgtgagccataa

SEQ ID NO: 88024 - DNA, 25 bp, Saccharomyces pastorianus
gtttggcagttattgcttcctccaa

SEQ ID NO: 88025 - DNA, 25 bp, Saccharomyces pastorianus
ggccacaacgttcctaatgggtgtt

SEQ ID NO: 88026 - DNA, 25 bp, Saccharomyces pastorianus
ttactttgtgcgttgttgccggaat

SEQ ID NO: 88027 - DNA, 25 bp, Saccharomyces pastorianus
gaaacaagttccagtgcgtctacta

SEQ ID NO: 88028 - DNA, 25 bp, Saccharomyces pastorianus
taggttctacggttggagttgtcat

SEQ ID NO: 88029 - DNA, 25 bp, Saccharomyces pastorianus
cgacaacatttaacactcactttcc

SEQ ID NO: 88030 - DNA, 25 bp, Saccharomyces pastorianus
gaatcaaatcctccgttaactttca

SEQ ID NO: 88031 - DNA, 25 bp, Saccharomyces pastorianus
gggagattttcatacgtatcgtcat

SEQ ID NO: 88032 - DNA, 25 bp, Saccharomyces pastorianus
acagagctagttcctcagatggtat

SEQ ID NO: 88033 - DNA, 25 bp, Saccharomyces pastorianus
ctatctggcgcactaaacactcaag

SEQ ID NO: 88034 - DNA, 25 bp, Saccharomyces pastorianus
actcaagatgcctcagatgccaata

SEQ ID NO: 88035 - DNA, 25 bp, Saccharomyces pastorianus
ttccccaaacatctgtgcttcaaga

SEQ ID NO: 88036 - DNA, 25 bp, Saccharomyces pastorianus
gaaacagaagcaccgccaaatccgt

SEQ ID NO: 88037 - DNA, 25 bp, Saccharomyces pastorianus
tgcgtctactattactcggccaaat

SEQ ID NO: 88038 - DNA, 25 bp, Saccharomyces pastorianus
ggcaaatgaagatccagaccccgct

SEQ ID NO: 88039 - DNA, 25 bp, Saccharomyces pastorianus
ggacatttccagaagcaagtgttga

SEQ ID NO: 88040 - DNA, 25 bp, Saccharomyces pastorianus
agaagccatgagcaatcagacattg

SEQ ID NO: 88041 - DNA, 25 bp, Saccharomyces pastorianus
agaccccgctgcacagaaaagactg

SEQ ID NO: 88042 - DNA, 25 bp, Saccharomyces pastorianus
gtgctggcactgaggttaataataa

SEQ ID NO: 88043 - DNA, 25 bp, Saccharomyces pastorianus
atctgttggtaagcttggtggtccc

SEQ ID NO: 88044 - DNA, 25 bp, Saccharomyces pastorianus
gacattgctgctacccagcgataaa

SEQ ID NO: 88045 - DNA, 25 bp, Saccharomyces pastorianus
gcaagcatttaaagccagctcagat

SEQ ID NO: 88046 - DNA, 25 bp, Saccharomyces pastorianus
agaatttgccaaagaagccatgagc

SEQ ID NO: 88047 - DNA, 25 bp, Saccharomyces pastorianus
aacaataccaatagtgctggcactg

SEQ ID NO: 88048 - DNA, 25 bp, Saccharomyces pastorianus
gatttgtattttctcgattgggtga

SEQ ID NO: 88049 - DNA, 25 bp, Saccharomyces pastorianus
tcagttgtctttatcgtcccaggta

SEQ ID NO: 88050 - DNA, 25 bp, Saccharomyces pastorianus
ttaggtgccgctggcgctacaaaaa

SEQ ID NO: 88051 - DNA, 25 bp, Saccharomyces pastorianus
ggtgacatttctccagctgatgtta

SEQ ID NO: 88052 - DNA, 25 bp, Saccharomyces pastorianus
aaaggtttagtcgtcatcgccggtg

SEQ ID NO: 88053 - DNA, 25 bp, Saccharomyces pastorianus
atgaggccagaatgcctgctgtgtt

SEQ ID NO: 88054 - DNA, 25 bp, Saccharomyces pastorianus
gaaggcttccaaggccaagaatgtt

SEQ ID NO: 88055 - DNA, 25 bp, Saccharomyces pastorianus
attcgctaaaccattggcctctaag

SEQ ID NO: 88056 - DNA, 25 bp, Saccharomyces pastorianus
agctgatgttatttcccacatccca

SEQ ID NO: 88057 - DNA, 25 bp, Saccharomyces pastorianus
tgctgtgttgccattcgctaaacca

SEQ ID NO: 88058 - DNA, 25 bp, Saccharomyces pastorianus
atgtgaagatcactctgtcccatac

SEQ ID NO: 88059 - DNA, 25 bp, Saccharomyces pastorianus
tcccatacatcttcataccttcaaa

SEQ ID NO: 88060 - DNA, 25 bp, Saccharomyces pastorianus
caacgtaacaagagcggcctttcct

SEQ ID NO: 88061 - DNA, 25 bp, Saccharomyces pastorianus
tcctcttctgagtttgacaacatga

SEQ ID NO: 88062 - DNA, 25 bp, Saccharomyces pastorianus
agctactcaacctctatcagtaacg

SEQ ID NO: 88063 - DNA, 25 bp, Saccharomyces pastorianus
gaaagccaatcgattcccatcaaga

SEQ ID NO: 88064 - DNA, 25 bp, Saccharomyces pastorianus
ggaaatccctgatctaatcaccgtt

SEQ ID NO: 88065 - DNA, 25 bp, Saccharomyces pastorianus
aaacaaatcttctacttctcaacgt

SEQ ID NO: 88066 - DNA, 25 bp, Saccharomyces pastorianus
gaacgacatgtcagcctctaaaagt

SEQ ID NO: 88067 - DNA, 25 bp, Saccharomyces pastorianus
attgacaagattatcccaccccaaa

SEQ ID NO: 88068 - DNA, 25 bp, Saccharomyces pastorianus
ttagcagctcatcagcgtgaactgg

SEQ ID NO: 88069 - DNA, 25 bp, Saccharomyces pastorianus
cgagccgaatatccggtttctcaga

SEQ ID NO: 88070 - DNA, 25 bp, Saccharomyces pastorianus
aaagacagctattctacctctcaat

SEQ ID NO: 88071 - DNA, 25 bp, Saccharomyces pastorianus
aaagccggaaatgcagtcgcagtta

SEQ ID NO: 88072 - DNA, 25 bp, Saccharomyces pastorianus
ggaagacgtttctcatcgatacata

SEQ ID NO: 88073 - DNA, 25 bp, Saccharomyces pastorianus
taaagccgctggactcgaggaagac

SEQ ID NO: 88074 - DNA, 25 bp, Saccharomyces pastorianus
caaccctcaacaagtagccaagcta

SEQ ID NO: 88075 - DNA, 25 bp, Saccharomyces pastorianus
gtcgcagttagtcagcgttttgcaa

SEQ ID NO: 88076 - DNA, 25 bp, Saccharomyces pastorianus
tacccgacccatgtggattcgtgaa

SEQ ID NO: 88077 - DNA, 25 bp, Saccharomyces pastorianus
gggtcctacggccacaattacatac

SEQ ID NO: 88078 - DNA, 25 bp, Saccharomyces pastorianus
ttacatacgaagacaccaaccctca

SEQ ID NO: 88079 - DNA, 25 bp, Saccharomyces pastorianus
gaaacaacctgttcgaagtctactt

SEQ ID NO: 88080 - DNA, 25 bp, Saccharomyces pastorianus
gaaggttctgcagtcagcacaagac

SEQ ID NO: 88081 - DNA, 25 bp, Saccharomyces pastorianus
ttgagaaattcgcatctacccgacc

SEQ ID NO: 88082 - DNA, 25 bp, Saccharomyces pastorianus
tttgatggacctgggaaacgggctt

SEQ ID NO: 88083 - DNA, 25 bp, Saccharomyces pastorianus
tatggcacgtctcattcacagtact

SEQ ID NO: 88084 - DNA, 25 bp, Saccharomyces pastorianus
gaaagcctccactcaagcgaagaaa

SEQ ID NO: 88085 - DNA, 25 bp, Saccharomyces pastorianus
aatattttgagcacttctctctccg

SEQ ID NO: 88086 - DNA, 25 bp, Saccharomyces pastorianus
ggtctggaacctgaaactcgatcta

SEQ ID NO: 88087 - DNA, 25 bp, Saccharomyces pastorianus
gcttcctcacattcggatacaactg

SEQ ID NO: 88088 - DNA, 25 bp, Saccharomyces pastorianus
atgcttataacagaggtccaccttc

SEQ ID NO: 88089 - DNA, 25 bp, Saccharomyces pastorianus
gacagataagttctccggtaaccaa

SEQ ID NO: 88090 - DNA, 25 bp, Saccharomyces pastorianus
aaatgggcttggtcttaatacgtat

SEQ ID NO: 88091 - DNA, 25 bp, Saccharomyces pastorianus
tctctctccgtgatggcagatacta

SEQ ID NO: 88092 - DNA, 25 bp, Saccharomyces pastorianus
aacgggcttgccttgaatgcttata

SEQ ID NO: 88093 - DNA, 25 bp, Saccharomyces pastorianus
aattcatattctggtgcgattccga

SEQ ID NO: 88094 - DNA, 25 bp, Saccharomyces pastorianus
attcttcgccatatcttgtgtatcc

SEQ ID NO: 88095 - DNA, 25 bp, Saccharomyces pastorianus
tatagaggccaaagtcgtcggaata

SEQ ID NO: 88096 - DNA, 25 bp, Saccharomyces pastorianus
ataacactcagtatcacagcgggcc

SEQ ID NO: 88097 - DNA, 25 bp, Saccharomyces pastorianus
accaatcgggatattcttcgccata

SEQ ID NO: 88098 - DNA, 25 bp, Saccharomyces pastorianus
atatgaatccccaagggtcctgttc

SEQ ID NO: 88099 - DNA, 25 bp, Saccharomyces pastorianus
aacacagtcttcatgaacccttaca

SEQ ID NO: 88100 - DNA, 25 bp, Saccharomyces pastorianus
ctagtgttgagggttcgccgtcatc

SEQ ID NO: 88101 - DNA, 25 bp, Saccharomyces pastorianus
gttcgccgtcatctagggatactga

SEQ ID NO: 88102 - DNA, 25 bp, Saccharomyces pastorianus
tctaatgtataaccccgctggtcct

SEQ ID NO: 88103 - DNA, 25 bp, Saccharomyces pastorianus
tgccaacctaccctctaatgtataa

SEQ ID NO: 88104 - DNA, 25 bp, Saccharomyces pastorianus
gatgtggtaaccaggccgctattat

SEQ ID NO: 88105 - DNA, 25 bp, Saccharomyces pastorianus
aatacgatccatctgtgagacccgg

SEQ ID NO: 88106 - DNA, 25 bp, Saccharomyces pastorianus
accaggccgctattatggaggtgga

SEQ ID NO: 88107 - DNA, 25 bp, Saccharomyces pastorianus
cccgttactgccttggtggataata

SEQ ID NO: 88108 - DNA, 25 bp, Saccharomyces pastorianus
tgtgagacccggtgaaccaaccgtc

SEQ ID NO: 88109 - DNA, 25 bp, Saccharomyces pastorianus
cgatctattcgattatttccccgtt

SEQ ID NO: 88110 - DNA, 25 bp, Saccharomyces pastorianus
cagtgctccaaattattgttataga

SEQ ID NO: 88111 - DNA, 25 bp, Saccharomyces pastorianus
aatcttctgtttgcatggaggtctc

SEQ ID NO: 88112 - DNA, 25 bp, Saccharomyces pastorianus
tattcgattatttccccgttactgc

SEQ ID NO: 88113 - DNA, 25 bp, Saccharomyces pastorianus
gtggaaaatgtttaccgatctattc

SEQ ID NO: 88114 - DNA, 25 bp, Saccharomyces pastorianus
tggaggtctctcacccatgatagag

SEQ ID NO: 88115 - DNA, 25 bp, Saccharomyces pastorianus
cccatctaaaccatcttctatactt

SEQ ID NO: 88116 - DNA, 25 bp, Saccharomyces pastorianus
gaaatcacgagttgcctcacagagg

SEQ ID NO: 88117 - DNA, 25 bp, Saccharomyces pastorianus
tcctccatttttcccacaaatacat

SEQ ID NO: 88118 - DNA, 25 bp, Saccharomyces pastorianus
ggtggcctccattttacaagtacgt

SEQ ID NO: 88119 - DNA, 25 bp, Saccharomyces pastorianus
gtgttacactgcatatttttctaat

SEQ ID NO: 88120 - DNA, 25 bp, Saccharomyces pastorianus
agcctccgcttcagggctgtaggat

SEQ ID NO: 88121 - DNA, 25 bp, Saccharomyces pastorianus
atatttcttggctatctgtaagcaa

SEQ ID NO: 88122 - DNA, 25 bp, Saccharomyces pastorianus
caaatacattttcttctcttcttct

SEQ ID NO: 88123 - DNA, 25 bp, Saccharomyces pastorianus
ttcttcttctgcttttttgtttcga

SEQ ID NO: 88124 - DNA, 25 bp, Saccharomyces pastorianus
taagaatctgttttgagcctccgct

SEQ ID NO: 88125 - DNA, 25 bp, Saccharomyces pastorianus
agagtccacaagtatattccatata

SEQ ID NO: 88126 - DNA, 25 bp, Saccharomyces pastorianus
tgcatcttcacatcgtggcgcaatt

SEQ ID NO: 88127 - DNA, 25 bp, Saccharomyces pastorianus
taaaatggaggccacctgcatcttc

SEQ ID NO: 88128 - DNA, 25 bp, Saccharomyces pastorianus
tgtttattccaatcctattcctgtc

SEQ ID NO: 88129 - DNA, 25 bp, Saccharomyces pastorianus
gaccaagagttgcagcttttcgaag

SEQ ID NO: 88130 - DNA, 25 bp, Saccharomyces pastorianus
atggcacgcatccatatcagcttag

SEQ ID NO: 88131 - DNA, 25 bp, Saccharomyces pastorianus
gactcttcatcggtatttcaatgct

SEQ ID NO: 88132 - DNA, 25 bp, Saccharomyces pastorianus
ttaaacttgaaccactccatgtctg

SEQ ID NO: 88133 - DNA, 25 bp, Saccharomyces pastorianus
agatgaatccgtgcgttccattgta

SEQ ID NO: 88134 - DNA, 25 bp, Saccharomyces pastorianus
gaagatctcttctcatttcacctaa

SEQ ID NO: 88135 - DNA, 25 bp, Saccharomyces pastorianus
gggacggcgaagaactctctatcta

SEQ ID NO: 88136 - DNA, 25 bp, Saccharomyces pastorianus
tattcctgtcagctacctagatacc

SEQ ID NO: 88137 - DNA, 25 bp, Saccharomyces pastorianus
agaacgactcctgcgttataatctt

SEQ ID NO: 88138 - DNA, 25 bp, Saccharomyces pastorianus
tacgagcgttttcaattgcaccagc

SEQ ID NO: 88139 - DNA, 25 bp, Saccharomyces pastorianus
ttatttccttacgagcgttttcaat

SEQ ID NO: 88140 - DNA, 25 bp, Saccharomyces pastorianus
ttcttttcttctctatttgcttttt

SEQ ID NO: 88141 - DNA, 25 bp, Saccharomyces pastorianus
gagcgttttcaattgcaccagccat

SEQ ID NO: 88142 - DNA, 25 bp, Saccharomyces pastorianus
cgactcctgcgttataatcttagat

SEQ ID NO: 88143 - DNA, 25 bp, Saccharomyces pastorianus
ttttcaattgcaccagccattgttt

SEQ ID NO: 88144 - DNA, 25 bp, Saccharomyces pastorianus
ctcctgcgttataatcttagatatc

SEQ ID NO: 88145 - DNA, 25 bp, Saccharomyces pastorianus
atgaaagaacgactcctgcgttata

SEQ ID NO: 88146 - DNA, 25 bp, Saccharomyces pastorianus
cttagatatctatatgctttgagaa

SEQ ID NO: 88147 - DNA, 25 bp, Saccharomyces pastorianus
gcgttttcaattgcaccagccattg

SEQ ID NO: 88148 - DNA, 25 bp, Saccharomyces pastorianus
gaaagaagagaactagaagacttaa

SEQ ID NO: 88149 - DNA, 25 bp, Saccharomyces pastorianus
atgagagccaagtggagaaagaaga

SEQ ID NO: 88150 - DNA, 25 bp, Saccharomyces pastorianus
gaagagaactagaagacttaagaga

SEQ ID NO: 88151 - DNA, 25 bp, Saccharomyces pastorianus
gagaaagaagagaactagaagactt

SEQ ID NO: 88152 - DNA, 25 bp, Saccharomyces pastorianus
ccaagtggagaaagaagagaactag

SEQ ID NO: 88153 - DNA, 25 bp, Saccharomyces pastorianus
gccaagtggagaaagaagagaacta

SEQ ID NO: 88154 - DNA, 25 bp, Saccharomyces pastorianus
agccaagtggagaaagaagagaact

SEQ ID NO: 88155 - DNA, 25 bp, Saccharomyces pastorianus
ggagaaagaagagaactagaagact

SEQ ID NO: 88156 - DNA, 25 bp, Saccharomyces pastorianus
aaagaagagaactagaagacttaag

SEQ ID NO: 88157 - DNA, 25 bp, Saccharomyces pastorianus
agaagagaactagaagacttaagag

SEQ ID NO: 88158 - DNA, 25 bp, Saccharomyces pastorianus
gagccaagtggagaaagaagagaac

SEQ ID NO: 88159 - DNA, 25 bp, Saccharomyces pastorianus
aaggcagaacaggtcgatactcaac

SEQ ID NO: 88160 - DNA, 25 bp, Saccharomyces pastorianus
ccctggaatttctagccctgatgag

SEQ ID NO: 88161 - DNA, 25 bp, Saccharomyces pastorianus
ataccgcttataccaaatgttccag

SEQ ID NO: 88162 - DNA, 25 bp, Saccharomyces pastorianus
gccctgatgagtgcttgagacaaat

SEQ ID NO: 88163 - DNA, 25 bp, Saccharomyces pastorianus
taaacgtgggaccagcagccgtacg

SEQ ID NO: 88164 - DNA, 25 bp, Saccharomyces pastorianus
atgttccagggttctacctatctta

SEQ ID NO: 88165 - DNA, 25 bp, Saccharomyces pastorianus
cccgctgacaattcctctaatttta

SEQ ID NO: 88166 - DNA, 25 bp, Saccharomyces pastorianus
ggtgcaccagaattactacttaaca

SEQ ID NO: 88167 - DNA, 25 bp, Saccharomyces pastorianus
gaaaacccttcctttgatcttagat

SEQ ID NO: 88168 - DNA, 25 bp, Saccharomyces pastorianus
gatactcaacccttacacgtgtatt

SEQ ID NO: 88169 - DNA, 25 bp, Saccharomyces pastorianus
ttatattgccttttaggtctcccgc

SEQ ID NO: 88170 - DNA, 25 bp, Saccharomyces pastorianus
caacagactaactggctggaacgcc

SEQ ID NO: 88171 - DNA, 25 bp, Saccharomyces pastorianus
agaatgacagcgatgtaccggaact

SEQ ID NO: 88172 - DNA, 25 bp, Saccharomyces pastorianus
gatgttgactctatcatcaagaact

SEQ ID NO: 88173 - DNA, 25 bp, Saccharomyces pastorianus
gaacttccacgcagaggtcagcact

SEQ ID NO: 88174 - DNA, 25 bp, Saccharomyces pastorianus
gccagagtcgaccagttgaacttga

SEQ ID NO: 88175 - DNA, 25 bp, Saccharomyces pastorianus
gccatcaaagccagagtcgaccagt

SEQ ID NO: 88176 - DNA, 25 bp, Saccharomyces pastorianus
gggtgatgtcagatcgctgaatatc

SEQ ID NO: 88177 - DNA, 25 bp, Saccharomyces pastorianus
gttgaacttgaacttgacggatgac

SEQ ID NO: 88178 - DNA, 25 bp, Saccharomyces pastorianus
caccagactatgtcaagtccaaata

SEQ ID NO: 88179 - DNA, 25 bp, Saccharomyces pastorianus
ggtcagcactcctcaagtattatct

SEQ ID NO: 88180 - DNA, 25 bp, Saccharomyces pastorianus
gcgatgtaccggaactggccaccat

SEQ ID NO: 88181 - DNA, 25 bp, Saccharomyces pastorianus
caggctcagaggattcgtttgttaa

SEQ ID NO: 88182 - DNA, 25 bp, Saccharomyces pastorianus
ctgaaggttctaccggcaccccaag

SEQ ID NO: 88183 - DNA, 25 bp, Saccharomyces pastorianus
gtgagaaggagcaactacgccattt

SEQ ID NO: 88184 - DNA, 25 bp, Saccharomyces pastorianus
aattacagcgcggtgtggccgcaag

SEQ ID NO: 88185 - DNA, 25 bp, Saccharomyces pastorianus
accccaagagggtcaggctcagagg

SEQ ID NO: 88186 - DNA, 25 bp, Saccharomyces pastorianus
gacttcttcgttaggcagcgtgaga

SEQ ID NO: 88187 - DNA, 25 bp, Saccharomyces pastorianus
gagcaactacgccatttgaaagaac

SEQ ID NO: 88188 - DNA, 25 bp, Saccharomyces pastorianus
gaaagggccacggatgacttcttcg

SEQ ID NO: 88189 - DNA, 25 bp, Saccharomyces pastorianus
gctcattgcaattacagcgcggtgt

SEQ ID NO: 88190 - DNA, 25 bp, Saccharomyces pastorianus
gcaaggttctactctgaaggttcta

SEQ ID NO: 88191 - DNA, 25 bp, Saccharomyces pastorianus
tgtggccgcaaggttctactctgaa

SEQ ID NO: 88192 - DNA, 25 bp, Saccharomyces pastorianus
gacatccatggcaacagtttcgaca

SEQ ID NO: 88193 - DNA, 25 bp, Saccharomyces pastorianus
gattgattctctttcttacttcctc

SEQ ID NO: 88194 - DNA, 25 bp, Saccharomyces pastorianus
taagcccacaattcaccaacggtta

SEQ ID NO: 88195 - DNA, 25 bp, Saccharomyces pastorianus
gtcccggccaactgaaagaatatat

SEQ ID NO: 88196 - DNA, 25 bp, Saccharomyces pastorianus
tgttgttcaatgcaccaagtcccgg

SEQ ID NO: 88197 - DNA, 25 bp, Saccharomyces pastorianus
caaggtcttctctactggcaaaata

SEQ ID NO: 88198 - DNA, 25 bp, Saccharomyces pastorianus
tatcggttccttcactgacatccat

SEQ ID NO: 88199 - DNA, 25 bp, Saccharomyces pastorianus
ggaagttcaccagtaatgtcgcata

SEQ ID NO: 88200 - DNA, 25 bp, Saccharomyces pastorianus
ttagctgccaaaactctgaacgatt

SEQ ID NO: 88201 - DNA, 25 bp, Saccharomyces pastorianus
gtccctaccgttggtggaatctgac

SEQ ID NO: 88202 - DNA, 25 bp, Saccharomyces pastorianus
aacttcttctgctatatcggttcct

SEQ ID NO: 88203 - DNA, 25 bp, Saccharomyces pastorianus
gaacggccgaggtatcaaataattt

SEQ ID NO: 88204 - DNA, 25 bp, Saccharomyces pastorianus
tcaaggaacataacggtgcagccaa

SEQ ID NO: 88205 - DNA, 25 bp, Saccharomyces pastorianus
aagatgttgcccattacaaaatcaa

SEQ ID NO: 88206 - DNA, 25 bp, Saccharomyces pastorianus
aacaaaagcgtctccaaggcatccc

SEQ ID NO: 88207 - DNA, 25 bp, Saccharomyces pastorianus
acagcgtttattgaccttacttgaa

SEQ ID NO: 88208 - DNA, 25 bp, Saccharomyces pastorianus
ccagatggtatggtggcacgccttt

SEQ ID NO: 88209 - DNA, 25 bp, Saccharomyces pastorianus
gggctcatcaagattcagacacatt

SEQ ID NO: 88210 - DNA, 25 bp, Saccharomyces pastorianus
catgtatgcctggagaacggccgag

SEQ ID NO: 88211 - DNA, 25 bp, Saccharomyces pastorianus
acgcctttgggctcatcaagattca

SEQ ID NO: 88212 - DNA, 25 bp, Saccharomyces pastorianus
aaaggatataccctccatactccaa

SEQ ID NO: 88213 - DNA, 25 bp, Saccharomyces pastorianus
cgaagctggtgctggacagcgttta

SEQ ID NO: 88214 - DNA, 25 bp, Saccharomyces pastorianus
gacgaggtttttgcagactatggaa

SEQ ID NO: 88215 - DNA, 25 bp, Saccharomyces pastorianus
gattcgctggaactacagatactga

SEQ ID NO: 88216 - DNA, 25 bp, Saccharomyces pastorianus
tcatttacggtgtatgcattcaggt

SEQ ID NO: 88217 - DNA, 25 bp, Saccharomyces pastorianus
aacaaattggactcgaagctagaca

SEQ ID NO: 88218 - DNA, 25 bp, Saccharomyces pastorianus
gaaaatttggccaaacgaggctgat

SEQ ID NO: 88219 - DNA, 25 bp, Saccharomyces pastorianus
gcttatggcgctggaacatttggat

SEQ ID NO: 88220 - DNA, 25 bp, Saccharomyces pastorianus
aatagaccctttaattggcatcaac

SEQ ID NO: 88221 - DNA, 25 bp, Saccharomyces pastorianus
agcctattttactactattgggaca

SEQ ID NO: 88222 - DNA, 25 bp, Saccharomyces pastorianus
atcagtgagcatgacctggtccaca

SEQ ID NO: 88223 - DNA, 25 bp, Saccharomyces pastorianus
agacaaggtcatcggaacttttttg

SEQ ID NO: 88224 - DNA, 25 bp, Saccharomyces pastorianus
aaattacaaccttcgcttatggcgc

SEQ ID NO: 88225 - DNA, 25 bp, Saccharomyces pastorianus
aagtcaaggttttgcctggaaccag

SEQ ID NO: 88226 - DNA, 25 bp, Saccharomyces pastorianus
gcacgtcgtatgcaggagcagccat

SEQ ID NO: 88227 - DNA, 25 bp, Saccharomyces pastorianus
ggactccaagacaggcgattacagg

SEQ ID NO: 88228 - DNA, 25 bp, Saccharomyces pastorianus
gatgcacacgaggacaactttgatg

SEQ ID NO: 88229 - DNA, 25 bp, Saccharomyces pastorianus
agcataagctttgtggaggactcca

SEQ ID NO: 88230 - DNA, 25 bp, Saccharomyces pastorianus
atgattggcggcactggcacgtcgt

SEQ ID NO: 88231 - DNA, 25 bp, Saccharomyces pastorianus
atgacgtccactcgaatgaagatag

SEQ ID NO: 88232 - DNA, 25 bp, Saccharomyces pastorianus
gatggccatgaatttccgagagcaa

SEQ ID NO: 88233 - DNA, 25 bp, Saccharomyces pastorianus
aatggataggccacgcaggaaatct

SEQ ID NO: 88234 - DNA, 25 bp, Saccharomyces pastorianus
tggaaccaggacttattcgccacac

SEQ ID NO: 88235 - DNA, 25 bp, Saccharomyces pastorianus
atctgtatgggctcatgacgtccac

SEQ ID NO: 88236 - DNA, 25 bp, Saccharomyces pastorianus
ccgttccagctggtcactggtagag

SEQ ID NO: 88237 - DNA, 25 bp, Saccharomyces pastorianus
atttggctgcgggactgtaggactc

SEQ ID NO: 88238 - DNA, 25 bp, Saccharomyces pastorianus
ggcgataccgttgcagtatttggct

SEQ ID NO: 88239 - DNA, 25 bp, Saccharomyces pastorianus
gcgcttccaagatcattgccattga

SEQ ID NO: 88240 - DNA, 25 bp, Saccharomyces pastorianus
gctgccgctggtggagaaatttcta

SEQ ID NO: 88241 - DNA, 25 bp, Saccharomyces pastorianus
gggcggctcttaagacagctaatgt

SEQ ID NO: 88242 - DNA, 25 bp, Saccharomyces pastorianus
gaaatttctacaaggccgttccagc

SEQ ID NO: 88243 - DNA, 25 bp, Saccharomyces pastorianus
gactctccgttatccaaggtgcaaa

SEQ ID NO: 88244 - DNA, 25 bp, Saccharomyces pastorianus
gaagaatttatcactcacaggagac

SEQ ID NO: 88245 - DNA, 25 bp, Saccharomyces pastorianus
gtgccacggattttgttaatcccaa

SEQ ID NO: 88246 - DNA, 25 bp, Saccharomyces pastorianus
attgttctcaatttggtgccacgga

SEQ ID NO: 88247 - DNA, 25 bp, Saccharomyces pastorianus
agagcctcttttgagacagggaaat

SEQ ID NO: 88248 - DNA, 25 bp, Saccharomyces pastorianus
tgatgagggccgtaaatcgcacatt

SEQ ID NO: 88249 - DNA, 25 bp, Saccharomyces pastorianus
gtgttcccagagaggctgattgact

SEQ ID NO: 88250 - DNA, 25 bp, Saccharomyces pastorianus
gaatcatacgaaccgcacattgtgg

SEQ ID NO: 88251 - DNA, 25 bp, Saccharomyces pastorianus
taacgtatcccgtattgttgcttgg

SEQ ID NO: 88252 - DNA, 25 bp, Saccharomyces pastorianus
ataacatttcggatttcgccaaaga

SEQ ID NO: 88253 - DNA, 25 bp, Saccharomyces pastorianus
gatgcgataactctaacttgtattc

SEQ ID NO: 88254 - DNA, 25 bp, Saccharomyces pastorianus
aactgctggacatgctagagcctct

SEQ ID NO: 88255 - DNA, 25 bp, Saccharomyces pastorianus
aggatgtggcaagtcgtctacgtgt

SEQ ID NO: 88256 - DNA, 25 bp, Saccharomyces pastorianus
tgggtgtcgtcaaacaggatgccgt

SEQ ID NO: 88257 - DNA, 25 bp, Saccharomyces pastorianus
ggcatgtcaatgatgtgttcccaga

SEQ ID NO: 88258 - DNA, 25 bp, Saccharomyces pastorianus
cctggctcaccaaagatcctatgat

SEQ ID NO: 88259 - DNA, 25 bp, Saccharomyces pastorianus
gagtcctcgatacttttcaatcacc

SEQ ID NO: 88260 - DNA, 25 bp, Saccharomyces pastorianus
accatgcttcaattccatccaaaat

SEQ ID NO: 88261 - DNA, 25 bp, Saccharomyces pastorianus
ttccgggcgtattacaatccactgt

SEQ ID NO: 88262 - DNA, 25 bp, Saccharomyces pastorianus
aatcattcaccaatattccgggcgt

SEQ ID NO: 88263 - DNA, 25 bp, Saccharomyces pastorianus
gcgtgttgccctttttcaagatgaa

SEQ ID NO: 88264 - DNA, 25 bp, Saccharomyces pastorianus
catgaccttaggagcggacttatcg

SEQ ID NO: 88265 - DNA, 25 bp, Saccharomyces pastorianus
ttcctcttctataaacaccctggta

SEQ ID NO: 88266 - DNA, 25 bp, Saccharomyces pastorianus
gtacatatgaccattccatgacctt

SEQ ID NO: 88267 - DNA, 25 bp, Saccharomyces pastorianus
gctagtaccgctccttaagctagag

SEQ ID NO: 88268 - DNA, 25 bp, Saccharomyces pastorianus
ggaacctattgtatccgctgatggt

SEQ ID NO: 88269 - DNA, 25 bp, Saccharomyces pastorianus
ttgtttaggcttcttaccggcagag

SEQ ID NO: 88270 - DNA, 25 bp, Saccharomyces pastorianus
acagccgtctgtttcaatttcttgg

SEQ ID NO: 88271 - DNA, 25 bp, Saccharomyces pastorianus
aaggagtaccttctgttggcttatt

SEQ ID NO: 88272 - DNA, 25 bp, Saccharomyces pastorianus
cttctgttggcttatttttcatgga

SEQ ID NO: 88273 - DNA, 25 bp, Saccharomyces pastorianus
attctgtcttccagcatatgtttgg

SEQ ID NO: 88274 - DNA, 25 bp, Saccharomyces pastorianus
aacattatccattctgtcttccagc

SEQ ID NO: 88275 - DNA, 25 bp, Saccharomyces pastorianus
gctacagtatgtgtaacagccgtct

SEQ ID NO: 88276 - DNA, 25 bp, Saccharomyces pastorianus
gagcttggagctgctacagtatgtg

SEQ ID NO: 88277 - DNA, 25 bp, Saccharomyces pastorianus
gccaaagtggcttgtttaggcttct

SEQ ID NO: 88278 - DNA, 25 bp, Saccharomyces pastorianus
tcttgatttcaagggacgtgcagat

SEQ ID NO: 88279 - DNA, 25 bp, Saccharomyces pastorianus
tcaatttcttggtcgcgtattcctc

SEQ ID NO: 88280 - DNA, 25 bp, Saccharomyces pastorianus
agccgctggttctattgctgtttaa

SEQ ID NO: 88281 - DNA, 25 bp, Saccharomyces pastorianus
gtagccacaatttcagacaaccata

SEQ ID NO: 88282 - DNA, 25 bp, Saccharomyces pastorianus
ataggaattcgtactgcagccgctg

SEQ ID NO: 88283 - DNA, 25 bp, Saccharomyces pastorianus
accaaccttccgtaagacttgcaat

SEQ ID NO: 88284 - DNA, 25 bp, Saccharomyces pastorianus
ttctgatcctggcactcatacgaac

SEQ ID NO: 88285 - DNA, 25 bp, Saccharomyces pastorianus
agaaactttcatcattacccggatg

SEQ ID NO: 88286 - DNA, 25 bp, Saccharomyces pastorianus
ggatgattctctatacgtagccaca

SEQ ID NO: 88287 - DNA, 25 bp, Saccharomyces pastorianus
atacgaacggctctttcttctactt

SEQ ID NO: 88288 - DNA, 25 bp, Saccharomyces pastorianus
gtgttcctccacttgagatggctga

SEQ ID NO: 88289 - DNA, 25 bp, Saccharomyces pastorianus
ttttgctcgcttcgatgtgttcctc

SEQ ID NO: 88290 - DNA, 25 bp, Saccharomyces pastorianus
ttaactctgtcatctttttgctcgc

SEQ ID NO: 88291 - DNA, 25 bp, Saccharomyces pastorianus
gcagcaacaggcaatgtccaacaat

SEQ ID NO: 88292 - DNA, 25 bp, Saccharomyces pastorianus
agagctcaagttcaccaaaacggaa

SEQ ID NO: 88293 - DNA, 25 bp, Saccharomyces pastorianus
atggctttggtaaccagtctcaaca

SEQ ID NO: 88294 - DNA, 25 bp, Saccharomyces pastorianus
agcactagcgtcgtaccaacacaaa

SEQ ID NO: 88295 - DNA, 25 bp, Saccharomyces pastorianus
gatgatccaaaccacaatccgtttt

SEQ ID NO: 88296 - DNA, 25 bp, Saccharomyces pastorianus
ggaaccaactagtagcagcttcttc

SEQ ID NO: 88297 - DNA, 25 bp, Saccharomyces pastorianus
gaatcctataacacccgaagaacta

SEQ ID NO: 88298 - DNA, 25 bp, Saccharomyces pastorianus
ggaggctcgtattcctgcccaacat

SEQ ID NO: 88299 - DNA, 25 bp, Saccharomyces pastorianus
acagtacttagcttctatgcaacag

SEQ ID NO: 88300 - DNA, 25 bp, Saccharomyces pastorianus
gagctactagccacaggaacaggta

SEQ ID NO: 88301 - DNA, 25 bp, Saccharomyces pastorianus
tacaggtttaccaagcactagcgtc

SEQ ID NO: 88302 - DNA, 25 bp, Saccharomyces pastorianus
ccgtggtatcgatattcaagccgtt

SEQ ID NO: 88303 - DNA, 25 bp, Saccharomyces pastorianus
ggcactgaaattgcggctattccgg

SEQ ID NO: 88304 - DNA, 25 bp, Saccharomyces pastorianus
tatcaatttcgatttccccaaaacg

SEQ ID NO: 88305 - DNA, 25 bp, Saccharomyces pastorianus
gtagatccggtaggtttggccactt

SEQ ID NO: 88306 - DNA, 25 bp, Saccharomyces pastorianus
gttccattcccgatagagcaacaga

SEQ ID NO: 88307 - DNA, 25 bp, Saccharomyces pastorianus
ttggccacttgggtttagcaatcaa

SEQ ID NO: 88308 - DNA, 25 bp, Saccharomyces pastorianus
aaggttcgtacattggtctgctccg

SEQ ID NO: 88309 - DNA, 25 bp, Saccharomyces pastorianus
ctccgatttattgacccgtggtatc

SEQ ID NO: 88310 - DNA, 25 bp, Saccharomyces pastorianus
tgacgaaacggtacctgttccattc

SEQ ID NO: 88311 - DNA, 25 bp, Saccharomyces pastorianus
ggctattccggctactatcgataag

SEQ ID NO: 88312 - DNA, 25 bp, Saccharomyces pastorianus
ggctattcctgttattactctcatg

SEQ ID NO: 88313 - DNA, 25 bp, Saccharomyces pastorianus
atcgcccattagttctaagattgtg

SEQ ID NO: 88314 - DNA, 25 bp, Saccharomyces pastorianus
tgcaaaccccaatgttacaatcgcc

SEQ ID NO: 88315 - DNA, 25 bp, Saccharomyces pastorianus
gttacaatcgcccattagttctaag

SEQ ID NO: 88316 - DNA, 25 bp, Saccharomyces pastorianus
tgattgtcttttcttgcaaacccca

SEQ ID NO: 88317 - DNA, 25 bp, Saccharomyces pastorianus
ttgtcttttcttgcaaaccccaatg

SEQ ID NO: 88318 - DNA, 25 bp, Saccharomyces pastorianus
gtcttttcttgcaaaccccaatgtt

SEQ ID NO: 88319 - DNA, 25 bp, Saccharomyces pastorianus
aaaccccaatgttacaatcgcccat

SEQ ID NO: 88320 - DNA, 25 bp, Saccharomyces pastorianus
ttattgatgattgtcttttcttgca

SEQ ID NO: 88321 - DNA, 25 bp, Saccharomyces pastorianus
ttttcttgcaaaccccaatgttaca

SEQ ID NO: 88322 - DNA, 25 bp, Saccharomyces pastorianus
gtacaatcagataataaacactttt

SEQ ID NO: 88323 - DNA, 25 bp, Saccharomyces pastorianus
tagttctaagattgtgttgtccttt

SEQ ID NO: 88324 - DNA, 25 bp, Saccharomyces pastorianus
ggcataacgatacacctgatggcat

SEQ ID NO: 88325 - DNA, 25 bp, Saccharomyces pastorianus
ttgtcaacgagccttcaccaagatt

SEQ ID NO: 88326 - DNA, 25 bp, Saccharomyces pastorianus
gtaactggagagtttcccctaggtg

SEQ ID NO: 88327 - DNA, 25 bp, Saccharomyces pastorianus
tatggcgtactaaatggcttggatc

SEQ ID NO: 88328 - DNA, 25 bp, Saccharomyces pastorianus
aagaccgtatctattccaaggaaat

SEQ ID NO: 88329 - DNA, 25 bp, Saccharomyces pastorianus
aatgatcatcgagctggtaactgga

SEQ ID NO: 88330 - DNA, 25 bp, Saccharomyces pastorianus
aaaagagaagccttggaccgtgcca

SEQ ID NO: 88331 - DNA, 25 bp, Saccharomyces pastorianus
ggcttggatcatttgtaccgacaat

SEQ ID NO: 88332 - DNA, 25 bp, Saccharomyces pastorianus
gaacgtccacttatatgtcaccaga

SEQ ID NO: 88333 - DNA, 25 bp, Saccharomyces pastorianus
ggacgtttggtcattgggcttaatg

SEQ ID NO: 88334 - DNA, 25 bp, Saccharomyces pastorianus
ggatttgctgcaacgtattgtcaac

SEQ ID NO: 88335 - DNA, 25 bp, Saccharomyces pastorianus
atgtagtgccttcaccacagttcca

SEQ ID NO: 88336 - DNA, 25 bp, Saccharomyces pastorianus
actaattggttgatgattgtactgt

SEQ ID NO: 88337 - DNA, 25 bp, Saccharomyces pastorianus
tggcaactattttggaatcaggaac

SEQ ID NO: 88338 - DNA, 25 bp, Saccharomyces pastorianus
gggcttaacgtttttgacgatagat

SEQ ID NO: 88339 - DNA, 25 bp, Saccharomyces pastorianus
gattgtactgttattctgttccaca

SEQ ID NO: 88340 - DNA, 25 bp, Saccharomyces pastorianus
ttccacaggaatggtttttttggca

SEQ ID NO: 88341 - DNA, 25 bp, Saccharomyces pastorianus
tgtactgttattctgttccacagga

SEQ ID NO: 88342 - DNA, 25 bp, Saccharomyces pastorianus
aattccctaactaattggttgatga

SEQ ID NO: 88343 - DNA, 25 bp, Saccharomyces pastorianus
gacgatagataattccctaactaat

SEQ ID NO: 88344 - DNA, 25 bp, Saccharomyces pastorianus
aatcaggaacatgtagtgccttcac

SEQ ID NO: 88345 - DNA, 25 bp, Saccharomyces pastorianus
ggaacatgtagtgccttcaccacag

SEQ ID NO: 88346 - DNA, 25 bp, Saccharomyces pastorianus
gaagccaaaagaggcatttctctga

SEQ ID NO: 88347 - DNA, 25 bp, Saccharomyces pastorianus
gagactatggattgcgttccttgtc

SEQ ID NO: 88348 - DNA, 25 bp, Saccharomyces pastorianus
aaccctccaccacaaaggaagctgg

SEQ ID NO: 88349 - DNA, 25 bp, Saccharomyces pastorianus
taatcgccttcggtttcgttagagg

SEQ ID NO: 88350 - DNA, 25 bp, Saccharomyces pastorianus
gttccttgtcaagtcatgagcacta

SEQ ID NO: 88351 - DNA, 25 bp, Saccharomyces pastorianus
gaggcatttctctgactgaatttga

SEQ ID NO: 88352 - DNA, 25 bp, Saccharomyces pastorianus
atctgggaaaccattcaagtatggt

SEQ ID NO: 88353 - DNA, 25 bp, Saccharomyces pastorianus
tggattgcgttccttgtcaagtcat

SEQ ID NO: 88354 - DNA, 25 bp, Saccharomyces pastorianus
ttgtcaagtcatgagcactatgttt

SEQ ID NO: 88355 - DNA, 25 bp, Saccharomyces pastorianus
gcttcggtgggttattaatcgcctt

SEQ ID NO: 88356 - DNA, 25 bp, Saccharomyces pastorianus
atattttggcagtgttcaaccctcc

SEQ ID NO: 88357 - DNA, 25 bp, Saccharomyces pastorianus
agtttcttactcaccgacagatggc

SEQ ID NO: 88358 - DNA, 25 bp, Saccharomyces pastorianus
atcccagtcatgaagttgtctccac

SEQ ID NO: 88359 - DNA, 25 bp, Saccharomyces pastorianus
gattgccaccggatcacttgataga

SEQ ID NO: 88360 - DNA, 25 bp, Saccharomyces pastorianus
tcaagattgagcgtctccgcagttt

SEQ ID NO: 88361 - DNA, 25 bp, Saccharomyces pastorianus
gaattcaccacgtttgacacaagag

SEQ ID NO: 88362 - DNA, 25 bp, Saccharomyces pastorianus
gcaggtggcaattctagcggcaaaa

SEQ ID NO: 88363 - DNA, 25 bp, Saccharomyces pastorianus
atgacgataccatccgcttattcga

SEQ ID NO: 88364 - DNA, 25 bp, Saccharomyces pastorianus
gttgtctccacatatgactcaagat

SEQ ID NO: 88365 - DNA, 25 bp, Saccharomyces pastorianus
gggatcacctttctgcgaagttgga

SEQ ID NO: 88366 - DNA, 25 bp, Saccharomyces pastorianus
tcctatgagaccctacgagattgcc

SEQ ID NO: 88367 - DNA, 25 bp, Saccharomyces pastorianus
gctgtaattagttggcacccgctgc

SEQ ID NO: 88368 - DNA, 25 bp, Saccharomyces pastorianus
gcctggtccgatgtcatttttacga

SEQ ID NO: 88369 - DNA, 25 bp, Saccharomyces pastorianus
aagttccaacttgtgggtgcagcct

SEQ ID NO: 88370 - DNA, 25 bp, Saccharomyces pastorianus
aaactgctactcaaggaacgacctg

SEQ ID NO: 88371 - DNA, 25 bp, Saccharomyces pastorianus
aaattcttccgttggccaccattat

SEQ ID NO: 88372 - DNA, 25 bp, Saccharomyces pastorianus
gcgcacgtctactattccaattata

SEQ ID NO: 88373 - DNA, 25 bp, Saccharomyces pastorianus
acctgaaactctatatctctgcatt

SEQ ID NO: 88374 - DNA, 25 bp, Saccharomyces pastorianus
ttgcattcttcacagatcgtagcga

SEQ ID NO: 88375 - DNA, 25 bp, Saccharomyces pastorianus
cctcactcttcattgctgctaaata

SEQ ID NO: 88376 - DNA, 25 bp, Saccharomyces pastorianus
aaaatcagtggtctctggcgcacgt

SEQ ID NO: 88377 - DNA, 25 bp, Saccharomyces pastorianus
gttagctgctggtgcatactttcta

SEQ ID NO: 88378 - DNA, 25 bp, Saccharomyces pastorianus
atttgaattgggttggcctggtccg

SEQ ID NO: 88379 - DNA, 25 bp, Saccharomyces pastorianus
gatgaatatactctttgggctaacg

SEQ ID NO: 88380 - DNA, 25 bp, Saccharomyces pastorianus
gtgctcagagacattatcgacatca

SEQ ID NO: 88381 - DNA, 25 bp, Saccharomyces pastorianus
atatcaagacgctgacggccaacaa

SEQ ID NO: 88382 - DNA, 25 bp, Saccharomyces pastorianus
gaaaaccacatcatccctaaactaa

SEQ ID NO: 88383 - DNA, 25 bp, Saccharomyces pastorianus
ggacgatggaatttcacggccaatt

SEQ ID NO: 88384 - DNA, 25 bp, Saccharomyces pastorianus
tggatgctgacaacgacactgaaga

SEQ ID NO: 88385 - DNA, 25 bp, Saccharomyces pastorianus
ggagacctcgtagacctgaaaactg

SEQ ID NO: 88386 - DNA, 25 bp, Saccharomyces pastorianus
gttcatcgagtatatccgccaaata

SEQ ID NO: 88387 - DNA, 25 bp, Saccharomyces pastorianus
gattgcaatcctgttcatcgagtat

SEQ ID NO: 88388 - DNA, 25 bp, Saccharomyces pastorianus
atggagcgccacaaactagcagacg

SEQ ID NO: 88389 - DNA, 25 bp, Saccharomyces pastorianus
aatctccatggtgccttaaaaggac

SEQ ID NO: 88390 - DNA, 25 bp, Saccharomyces pastorianus
gccattggaatttcccggtgacaaa

SEQ ID NO: 88391 - DNA, 25 bp, Saccharomyces pastorianus
tacagtgccgtatcaaaattcattg

SEQ ID NO: 88392 - DNA, 25 bp, Saccharomyces pastorianus
gggttgcgatatgtccagtatatca

SEQ ID NO: 88393 - DNA, 25 bp, Saccharomyces pastorianus
ggaaagtgaagcacctagtgggttt

SEQ ID NO: 88394 - DNA, 25 bp, Saccharomyces pastorianus
aagagtctttgggtctaagttcaga

SEQ ID NO: 88395 - DNA, 25 bp, Saccharomyces pastorianus
agtaccgactttagtcaattcgaag

SEQ ID NO: 88396 - DNA, 25 bp, Saccharomyces pastorianus
tatcacatttgatcttaccaacgaa

SEQ ID NO: 88397 - DNA, 25 bp, Saccharomyces pastorianus
atgctcctaataccaagaccaaacc

SEQ ID NO: 88398 - DNA, 25 bp, Saccharomyces pastorianus
acgatcagtataaagtttcagccaa

SEQ ID NO: 88399 - DNA, 25 bp, Saccharomyces pastorianus
gatgataaaactaaccacttgactt

SEQ ID NO: 88400 - DNA, 25 bp, Saccharomyces pastorianus
aagttcagacgtcttgccattggaa

SEQ ID NO: 88401 - DNA, 25 bp, Saccharomyces pastorianus
gaccttctatggtcagaccctgacg

SEQ ID NO: 88402 - DNA, 25 bp, Saccharomyces pastorianus
taaaattttctgtctgcatggagga

SEQ ID NO: 88403 - DNA, 25 bp, Saccharomyces pastorianus
gcagctatcatggaagtggacgaga

SEQ ID NO: 88404 - DNA, 25 bp, Saccharomyces pastorianus
ggactttcccccatgatagaaacca

SEQ ID NO: 88405 - DNA, 25 bp, Saccharomyces pastorianus
gatgtggtaatcaagcagctatcat

SEQ ID NO: 88406 - DNA, 25 bp, Saccharomyces pastorianus
ttctgtctgcatggaggactttccc

SEQ ID NO: 88407 - DNA, 25 bp, Saccharomyces pastorianus
gtgctcctaattactgctacagatg

SEQ ID NO: 88408 - DNA, 25 bp, Saccharomyces pastorianus
atacccacatagaattacgatactg

SEQ ID NO: 88409 - DNA, 25 bp, Saccharomyces pastorianus
aaatgttcacagatcttttcgatta

SEQ ID NO: 88410 - DNA, 25 bp, Saccharomyces pastorianus
gattattttcctataaccgcattag

SEQ ID NO: 88411 - DNA, 25 bp, Saccharomyces pastorianus
gatactgagaggcaatcacgagtct

SEQ ID NO: 88412 - DNA, 25 bp, Saccharomyces pastorianus
agagaactagaagacttaagagaaa

SEQ ID NO: 88413 - DNA, 25 bp, Saccharomyces pastorianus
gaaagaagagaactagaagacttaa

SEQ ID NO: 88414 - DNA, 25 bp, Saccharomyces pastorianus
gaagagaactagaagacttaagaga

SEQ ID NO: 88415 - DNA, 25 bp, Saccharomyces pastorianus
gagaaagaagagaactagaagactt

SEQ ID NO: 88416 - DNA, 25 bp, Saccharomyces pastorianus
aagagaactagaagacttaagagaa

SEQ ID NO: 88417 - DNA, 25 bp, Saccharomyces pastorianus
ggagaaagaagagaactagaagact

SEQ ID NO: 88418 - DNA, 25 bp, Saccharomyces pastorianus
aagaagagaactagaagacttaaga

SEQ ID NO: 88419 - DNA, 25 bp, Saccharomyces pastorianus
aaagaagagaactagaagacttaag

SEQ ID NO: 88420 - DNA, 25 bp, Saccharomyces pastorianus
agaagagaactagaagacttaagag

SEQ ID NO: 88421 - DNA, 25 bp, Saccharomyces pastorianus
gagaactagaagacttaagagaaag

SEQ ID NO: 88422 - DNA, 25 bp, Saccharomyces pastorianus
attgaacttgaatttgacggatgat

SEQ ID NO: 88423 - DNA, 25 bp, Saccharomyces pastorianus
ttccatgcagaattgagcaccccat

SEQ ID NO: 88424 - DNA, 25 bp, Saccharomyces pastorianus
agggtacagatgacgacaatatcga

SEQ ID NO: 88425 - DNA, 25 bp, Saccharomyces pastorianus
gactaactggttggaatgcaatcaa

SEQ ID NO: 88426 - DNA, 25 bp, Saccharomyces pastorianus
agatctaaatacaagctgcacaaga

SEQ ID NO: 88427 - DNA, 25 bp, Saccharomyces pastorianus
gggtgatgtcagaccgctaaatatt

SEQ ID NO: 88428 - DNA, 25 bp, Saccharomyces pastorianus
tccattatcaaggacttccatgcag

SEQ ID NO: 88429 - DNA, 25 bp, Saccharomyces pastorianus
caatatcgatatttccaatgggcat

SEQ ID NO: 88430 - DNA, 25 bp, Saccharomyces pastorianus
ttgagcaccccatttttaaaaccag

SEQ ID NO: 88431 - DNA, 25 bp, Saccharomyces pastorianus
caccagactatgtcagatctaaata

SEQ ID NO: 88432 - DNA, 25 bp, Saccharomyces pastorianus
gcaatcaaatcaagagtcgaccaat

SEQ ID NO: 88433 - DNA, 25 bp, Saccharomyces pastorianus
aaagaggattattatgccagacaac

SEQ ID NO: 88434 - DNA, 25 bp, Saccharomyces pastorianus
accgttgcatttcccgtaataccag

SEQ ID NO: 88435 - DNA, 25 bp, Saccharomyces pastorianus
ctttatcaagagagaacgtgccaaa

SEQ ID NO: 88436 - DNA, 25 bp, Saccharomyces pastorianus
tggtgccggacctggtaatcctcaa

SEQ ID NO: 88437 - DNA, 25 bp, Saccharomyces pastorianus
ggctgccagtaaacctaagaattgt

SEQ ID NO: 88438 - DNA, 25 bp, Saccharomyces pastorianus
gacctggtaatcctcaagatatctt

SEQ ID NO: 88439 - DNA, 25 bp, Saccharomyces pastorianus
tttcccgtaataccaggctgccagt

SEQ ID NO: 88440 - DNA, 25 bp, Saccharomyces pastorianus
acaagagagggaacaattagcacat

SEQ ID NO: 88441 - DNA, 25 bp, Saccharomyces pastorianus
acctaagaattgtctctcgctttta

SEQ ID NO: 88442 - DNA, 25 bp, Saccharomyces pastorianus
ctcgcttttattcagatggtcctct

SEQ ID NO: 88443 - DNA, 25 bp, Saccharomyces pastorianus
attcagatggtcctctcggtggtgc

SEQ ID NO: 88444 - DNA, 25 bp, Saccharomyces pastorianus
gagttaagggccacctcagagggaa

SEQ ID NO: 88445 - DNA, 25 bp, Saccharomyces pastorianus
gcgtaaactgtcattgccaggacta

SEQ ID NO: 88446 - DNA, 25 bp, Saccharomyces pastorianus
aggtgtatcgccgaactcatggaaa

SEQ ID NO: 88447 - DNA, 25 bp, Saccharomyces pastorianus
catctcactggatgttacaggccca

SEQ ID NO: 88448 - DNA, 25 bp, Saccharomyces pastorianus
tatccactggcgctaggctagaagg

SEQ ID NO: 88449 - DNA, 25 bp, Saccharomyces pastorianus
ttacaggcccagctatcggagttaa

SEQ ID NO: 88450 - DNA, 25 bp, Saccharomyces pastorianus
gcaggttccgcagagttgagaccac

SEQ ID NO: 88451 - DNA, 25 bp, Saccharomyces pastorianus
ttgagaccacttcttgaacgacctt

SEQ ID NO: 88452 - DNA, 25 bp, Saccharomyces pastorianus
taacaggtctttagcatccacatct

SEQ ID NO: 88453 - DNA, 25 bp, Saccharomyces pastorianus
ccaggactagcgcaaagaccattat

SEQ ID NO: 88454 - DNA, 25 bp, Saccharomyces pastorianus
gagaacaataaaccgcatccgagga

SEQ ID NO: 88455 - DNA, 25 bp, Saccharomyces pastorianus
atctgggccttgttcatctgatttc

SEQ ID NO: 88456 - DNA, 25 bp, Saccharomyces pastorianus
ttcgaatcgtcctcaaaactcgcag

SEQ ID NO: 88457 - DNA, 25 bp, Saccharomyces pastorianus
gatttcctcctgaatgtattgctaa

SEQ ID NO: 88458 - DNA, 25 bp, Saccharomyces pastorianus
tattgctaacgctactgggattttt

SEQ ID NO: 88459 - DNA, 25 bp, Saccharomyces pastorianus
agctccgctagaaacgtatacccga

SEQ ID NO: 88460 - DNA, 25 bp, Saccharomyces pastorianus
gttgtaccgtttctgactttatact

SEQ ID NO: 88461 - DNA, 25 bp, Saccharomyces pastorianus
gttgctactgtgtttgttgtaccgt

SEQ ID NO: 88462 - DNA, 25 bp, Saccharomyces pastorianus
ggcagctccccatgacaacaaacag

SEQ ID NO: 88463 - DNA, 25 bp, Saccharomyces pastorianus
gatttttgcccggtatgttacacgc

SEQ ID NO: 88464 - DNA, 25 bp, Saccharomyces pastorianus
agctgcagtccttcttcgatctggg

SEQ ID NO: 88465 - DNA, 25 bp, Saccharomyces pastorianus
gagcgttgaaactcctctgttacaa

SEQ ID NO: 88466 - DNA, 25 bp, Saccharomyces pastorianus
gcattgttgccattgttttctggca

SEQ ID NO: 88467 - DNA, 25 bp, Saccharomyces pastorianus
gtctgcaacagcacagtcagcgact

SEQ ID NO: 88468 - DNA, 25 bp, Saccharomyces pastorianus
atgacagtgcaagtgcctcttccgc

SEQ ID NO: 88469 - DNA, 25 bp, Saccharomyces pastorianus
gaaagccttggccatgacagtgcaa

SEQ ID NO: 88470 - DNA, 25 bp, Saccharomyces pastorianus
gattgctttcattgcattgttgcca

SEQ ID NO: 88471 - DNA, 25 bp, Saccharomyces pastorianus
aaaccgaaatcgtctgcaacagcac

SEQ ID NO: 88472 - DNA, 25 bp, Saccharomyces pastorianus
gttttctggcatcggtacattcaaa

SEQ ID NO: 88473 - DNA, 25 bp, Saccharomyces pastorianus
tttcgatttcgatattgatgaccta

SEQ ID NO: 88474 - DNA, 25 bp, Saccharomyces pastorianus
cctcttccgcttccagaaaatttga

SEQ ID NO: 88475 - DNA, 25 bp, Saccharomyces pastorianus
agtcagcgactggtaagcttggtaa

SEQ ID NO: 88476 - DNA, 25 bp, Saccharomyces pastorianus
ggttattttttacttctcattattg

SEQ ID NO: 88477 - DNA, 25 bp, Saccharomyces pastorianus
gttcgagtcagctctgtagtgggca

SEQ ID NO: 88478 - DNA, 25 bp, Saccharomyces pastorianus
cgcaagtttagttcgagtcagctct

SEQ ID NO: 88479 - DNA, 25 bp, Saccharomyces pastorianus
gtccgggcctaacagatttgacctt

SEQ ID NO: 88480 - DNA, 25 bp, Saccharomyces pastorianus
ttaagcggtctctcgcaagtttagt

SEQ ID NO: 88481 - DNA, 25 bp, Saccharomyces pastorianus
gcagatgactacctagaccatttac

SEQ ID NO: 88482 - DNA, 25 bp, Saccharomyces pastorianus
gagaacgtgccagattttgtccagc

SEQ ID NO: 88483 - DNA, 25 bp, Saccharomyces pastorianus
gttgtgcctcaagaagtgttaaact

SEQ ID NO: 88484 - DNA, 25 bp, Saccharomyces pastorianus
atttggttggcatcaccattgtccg

SEQ ID NO: 88485 - DNA, 25 bp, Saccharomyces pastorianus
gatgtagagctaagccatggcgtaa

SEQ ID NO: 88486 - DNA, 25 bp, Saccharomyces pastorianus
gccagattttgtccagctgtaacaa

SEQ ID NO: 88487 - DNA, 25 bp, Saccharomyces pastorianus
gacagatggtcaagttgtgcctcaa

SEQ ID NO: 88488 - DNA, 25 bp, Saccharomyces pastorianus
gcagtagcttaccacgattaacgat

SEQ ID NO: 88489 - DNA, 25 bp, Saccharomyces pastorianus
taacggcaccgttcgacaccataaa

SEQ ID NO: 88490 - DNA, 25 bp, Saccharomyces pastorianus
attactgcccatggtattaccttct

SEQ ID NO: 88491 - DNA, 25 bp, Saccharomyces pastorianus
aaggccttgagtgcaggtattgcgt

SEQ ID NO: 88492 - DNA, 25 bp, Saccharomyces pastorianus
gtaaatacaacaagcgccgtactat

SEQ ID NO: 88493 - DNA, 25 bp, Saccharomyces pastorianus
ggatttactacttatacctctacaa

SEQ ID NO: 88494 - DNA, 25 bp, Saccharomyces pastorianus
gttatataaccatgcctatcaccgt

SEQ ID NO: 88495 - DNA, 25 bp, Saccharomyces pastorianus
agacgctccctatgcaggtttgtat

SEQ ID NO: 88496 - DNA, 25 bp, Saccharomyces pastorianus
ccatcaaaatttaccaactccttca

SEQ ID NO: 88497 - DNA, 25 bp, Saccharomyces pastorianus
gctacttgtttaagagacgctccct

SEQ ID NO: 88498 - DNA, 25 bp, Saccharomyces pastorianus
tatcaccgtcattaaagtccgttat

SEQ ID NO: 88499 - DNA, 25 bp, Saccharomyces pastorianus
aatgtagctttcttgtcttgctgga

SEQ ID NO: 88500 - DNA, 25 bp, Saccharomyces pastorianus
gctcagtcatgtatgctgcttcaca

SEQ ID NO: 88501 - DNA, 25 bp, Saccharomyces pastorianus
taatgaaggcacagcattcctcctc

SEQ ID NO: 88502 - DNA, 25 bp, Saccharomyces pastorianus
taaggcgctgcctattgatgttcgt

SEQ ID NO: 88503 - DNA, 25 bp, Saccharomyces pastorianus
caaattgtgtaccttctagttgttc

SEQ ID NO: 88504 - DNA, 25 bp, Saccharomyces pastorianus
ttggcttagttgcttgctcagtcat

SEQ ID NO: 88505 - DNA, 25 bp, Saccharomyces pastorianus
gcattcctcctctttgccaaagatg

SEQ ID NO: 88506 - DNA, 25 bp, Saccharomyces pastorianus
agggctgtctatctctttcaaattt

SEQ ID NO: 88507 - DNA, 25 bp, Saccharomyces pastorianus
tgctggattctcgtcttcaaaaggt

SEQ ID NO: 88508 - DNA, 25 bp, Saccharomyces pastorianus
aatgcgatgaatttcttggcttagt

SEQ ID NO: 88509 - DNA, 25 bp, Saccharomyces pastorianus
gtaatgtacctctccatagctgtag

SEQ ID NO: 88510 - DNA, 25 bp, Saccharomyces pastorianus
gaactagtcaagagcgatcctcact

SEQ ID NO: 88511 - DNA, 25 bp, Saccharomyces pastorianus
gagtattgccaatatccatccactg

SEQ ID NO: 88512 - DNA, 25 bp, Saccharomyces pastorianus
gaagttattcaaagtccctccgatg

SEQ ID NO: 88513 - DNA, 25 bp, Saccharomyces pastorianus
atggcaataaaatcaccctcgggaa

SEQ ID NO: 88514 - DNA, 25 bp, Saccharomyces pastorianus
ctttagtgatcgctgactctggtat

SEQ ID NO: 88515 - DNA, 25 bp, Saccharomyces pastorianus
gatcctcactttccttatggtacct

SEQ ID NO: 88516 - DNA, 25 bp, Saccharomyces pastorianus
gaatatggaactcgcactgacccaa

SEQ ID NO: 88517 - DNA, 25 bp, Saccharomyces pastorianus
agaagcttcatctgcgtacaggaat

SEQ ID NO: 88518 - DNA, 25 bp, Saccharomyces pastorianus
ttgaagtctttgcatccgtggttat

SEQ ID NO: 88519 - DNA, 25 bp, Saccharomyces pastorianus
ttaaaatcaaagagcccggcgtctg

SEQ ID NO: 88520 - DNA, 25 bp, Saccharomyces pastorianus
gagctatacattgtcgagccacaga

SEQ ID NO: 88521 - DNA, 25 bp, Saccharomyces pastorianus
aattcagggatctaatgggtaccac

SEQ ID NO: 88522 - DNA, 25 bp, Saccharomyces pastorianus
gcccgttcagacgatgaggattcta

SEQ ID NO: 88523 - DNA, 25 bp, Saccharomyces pastorianus
attgcatcactacccagtttagatt

SEQ ID NO: 88524 - DNA, 25 bp, Saccharomyces pastorianus
aaagtgatcccaatgaagcccgttc

SEQ ID NO: 88525 - DNA, 25 bp, Saccharomyces pastorianus
tttccgacggatgttgatgacccat

SEQ ID NO: 88526 - DNA, 25 bp, Saccharomyces pastorianus
ggatgttgatgacccattggcgcat

SEQ ID NO: 88527 - DNA, 25 bp, Saccharomyces pastorianus
gagcaggttttcctcttggaatgac

SEQ ID NO: 88528 - DNA, 25 bp, Saccharomyces pastorianus
agatctattctatttggtagcgaag

SEQ ID NO: 88529 - DNA, 25 bp, Saccharomyces pastorianus
cattggcgcatcatagggacagaat

SEQ ID NO: 88530 - DNA, 25 bp, Saccharomyces pastorianus
gaatttcattgacttggatggccaa

SEQ ID NO: 88531 - DNA, 25 bp, Saccharomyces pastorianus
gggatctttttaacaggcttggagg

SEQ ID NO: 88532 - DNA, 25 bp, Saccharomyces pastorianus
tcttttcccctcatcaattactgaa

SEQ ID NO: 88533 - DNA, 25 bp, Saccharomyces pastorianus
gaattgtcccagatgaacttagtta

SEQ ID NO: 88534 - DNA, 25 bp, Saccharomyces pastorianus
atcaattactgaattgtcccagatg

SEQ ID NO: 88535 - DNA, 25 bp, Saccharomyces pastorianus
tttcccctcatcaattactgaattg

SEQ ID NO: 88536 - DNA, 25 bp, Saccharomyces pastorianus
aattactgaattgtcccagatgaac

SEQ ID NO: 88537 - DNA, 25 bp, Saccharomyces pastorianus
attgtcccagatgaacttagttagt

SEQ ID NO: 88538 - DNA, 25 bp, Saccharomyces pastorianus
ttactgaattgtcccagatgaactt

SEQ ID NO: 88539 - DNA, 25 bp, Saccharomyces pastorianus
gatgaacttagttagtcaaacgcat

SEQ ID NO: 88540 - DNA, 25 bp, Saccharomyces pastorianus
gaacttagttagtcaaacgcatttt

SEQ ID NO: 88541 - DNA, 25 bp, Saccharomyces pastorianus
gtcccagatgaacttagttagtcaa

SEQ ID NO: 88542 - DNA, 25 bp, Saccharomyces pastorianus
cttttcccctcatcaattactgaat

SEQ ID NO: 88543 - DNA, 25 bp, Saccharomyces pastorianus
tctggaacgccctaataataataca

SEQ ID NO: 88544 - DNA, 25 bp, Saccharomyces pastorianus
atggtggcaaactattcaatggatt

SEQ ID NO: 88545 - DNA, 25 bp, Saccharomyces pastorianus
acagttggagaagctggaagcgcaa

SEQ ID NO: 88546 - DNA, 25 bp, Saccharomyces pastorianus
gaacaactgtctgaatcattggaag

SEQ ID NO: 88547 - DNA, 25 bp, Saccharomyces pastorianus
aaacagatccgcataccgcaagtat

SEQ ID NO: 88548 - DNA, 25 bp, Saccharomyces pastorianus
aaatgaccagctacctaaatattct

SEQ ID NO: 88549 - DNA, 25 bp, Saccharomyces pastorianus
ggaggtcatttcaaaagtcatcaaa

SEQ ID NO: 88550 - DNA, 25 bp, Saccharomyces pastorianus
tacaggtagcggtgggaaatcatat

SEQ ID NO: 88551 - DNA, 25 bp, Saccharomyces pastorianus
atgagaaattatgcccgtcaaaatt

SEQ ID NO: 88552 - DNA, 25 bp, Saccharomyces pastorianus
atctgttcatatggcaacttctgca

SEQ ID NO: 88553 - DNA, 25 bp, Saccharomyces pastorianus
aatgagcccttaaatgaatctgttc

SEQ ID NO: 88554 - DNA, 25 bp, Saccharomyces pastorianus
atcacattcacacccagtttcttta

SEQ ID NO: 88555 - DNA, 25 bp, Saccharomyces pastorianus
agcttgacattaatccgcctttagt

SEQ ID NO: 88556 - DNA, 25 bp, Saccharomyces pastorianus
gaaacttatttcagcttttgacgac

SEQ ID NO: 88557 - DNA, 25 bp, Saccharomyces pastorianus
gagtagattcctcaatgttgcaatt

SEQ ID NO: 88558 - DNA, 25 bp, Saccharomyces pastorianus
gttctggtcatttcatcacattcac

SEQ ID NO: 88559 - DNA, 25 bp, Saccharomyces pastorianus
gatgacgcgctggtagtagagacaa

SEQ ID NO: 88560 - DNA, 25 bp, Saccharomyces pastorianus
atggcctaatcatttcctggtctaa

SEQ ID NO: 88561 - DNA, 25 bp, Saccharomyces pastorianus
ggaagaacttcctacgtttcatgat

SEQ ID NO: 88562 - DNA, 25 bp, Saccharomyces pastorianus
ttcagcgttgaactccacataccta

SEQ ID NO: 88563 - DNA, 25 bp, Saccharomyces pastorianus
aatatgctattggaccctgcagcca

SEQ ID NO: 88564 - DNA, 25 bp, Saccharomyces pastorianus
gagacaatcacttctttactgaaca

SEQ ID NO: 88565 - DNA, 25 bp, Saccharomyces pastorianus
agggccctgacgttgacatggacaa

SEQ ID NO: 88566 - DNA, 25 bp, Saccharomyces pastorianus
agggtgctgacgaccgtcttgaagc

SEQ ID NO: 88567 - DNA, 25 bp, Saccharomyces pastorianus
aggacaacaccaacaagggccctga

SEQ ID NO: 88568 - DNA, 25 bp, Saccharomyces pastorianus
gtcttgaagctgacgacagcgacga

SEQ ID NO: 88569 - DNA, 25 bp, Saccharomyces pastorianus
agacctggcgctgtacaaggactct

SEQ ID NO: 88570 - DNA, 25 bp, Saccharomyces pastorianus
gtatatagaaagacgggccatggca

SEQ ID NO: 88571 - DNA, 25 bp, Saccharomyces pastorianus
gcgacgacttggagaacattgattc

SEQ ID NO: 88572 - DNA, 25 bp, Saccharomyces pastorianus
caatcatttgcagaggtctaccgcc

SEQ ID NO: 88573 - DNA, 25 bp, Saccharomyces pastorianus
taagacggcgataagcggcatgtcc

SEQ ID NO: 88574 - DNA, 25 bp, Saccharomyces pastorianus
taccgcccgcttgggtaaatacata

SEQ ID NO: 88575 - DNA, 25 bp, Saccharomyces pastorianus
acattgattcgggagacctggcgct

SEQ ID NO: 88576 - DNA, 25 bp, Saccharomyces pastorianus
agaaaagaatttaccgcctccatca

SEQ ID NO: 88577 - DNA, 25 bp, Saccharomyces pastorianus
gtattgctgaaaccagatgcccaca

SEQ ID NO: 88578 - DNA, 25 bp, Saccharomyces pastorianus
ggaaatcatagcacgacgctggcac

SEQ ID NO: 88579 - DNA, 25 bp, Saccharomyces pastorianus
aggcaaagttcttctcagatcccga

SEQ ID NO: 88580 - DNA, 25 bp, Saccharomyces pastorianus
aaagagatgacccaatcgccttacc

SEQ ID NO: 88581 - DNA, 25 bp, Saccharomyces pastorianus
gatcccgatgcaagggtcgcaacaa

SEQ ID NO: 88582 - DNA, 25 bp, Saccharomyces pastorianus
gaatgcttccgtcatcaaatccatg

SEQ ID NO: 88583 - DNA, 25 bp, Saccharomyces pastorianus
gaaggttttccaacgcttacggctg

SEQ ID NO: 88584 - DNA, 25 bp, Saccharomyces pastorianus
aaacaagttctactcatggctcacc

SEQ ID NO: 88585 - DNA, 25 bp, Saccharomyces pastorianus
ggaatagtctccacagctagccagc

SEQ ID NO: 88586 - DNA, 25 bp, Saccharomyces pastorianus
tgaagtctgtgcttctatcaccatg

SEQ ID NO: 88587 - DNA, 25 bp, Saccharomyces pastorianus
gatcatgatctgttatcgagttcga

SEQ ID NO: 88588 - DNA, 25 bp, Saccharomyces pastorianus
ggatgatacgctcaatttactggat

SEQ ID NO: 88589 - DNA, 25 bp, Saccharomyces pastorianus
gcccctccctttctgaatacaaatt

SEQ ID NO: 88590 - DNA, 25 bp, Saccharomyces pastorianus
cactgctgcagttccacaacagaat

SEQ ID NO: 88591 - DNA, 25 bp, Saccharomyces pastorianus
gtgaactcccaaatactccagattt

SEQ ID NO: 88592 - DNA, 25 bp, Saccharomyces pastorianus
tttaccgactgatagtgaactccca

SEQ ID NO: 88593 - DNA, 25 bp, Saccharomyces pastorianus
atgatcatttgttgtctttaccgac

SEQ ID NO: 88594 - DNA, 25 bp, Saccharomyces pastorianus
ggtccatatgtgatgatttctcaga

SEQ ID NO: 88595 - DNA, 25 bp, Saccharomyces pastorianus
agattctctcttcttcgatcatgat

SEQ ID NO: 88596 - DNA, 25 bp, Saccharomyces pastorianus
agaacatttatccaacgatgctgat

SEQ ID NO: 88597 - DNA, 25 bp, Saccharomyces pastorianus
tggatactaccgtcaacagcaataa

SEQ ID NO: 88598 - DNA, 25 bp, Saccharomyces pastorianus
agcaagaaactacccctgaacaggt

SEQ ID NO: 88599 - DNA, 25 bp, Saccharomyces pastorianus
tcctctttcaaagcgacatctatga

SEQ ID NO: 88600 - DNA, 25 bp, Saccharomyces pastorianus
gagacaaaggcgtcgtgccgctcat

SEQ ID NO: 88601 - DNA, 25 bp, Saccharomyces pastorianus
gtgccgctcatcagaatcacattat

SEQ ID NO: 88602 - DNA, 25 bp, Saccharomyces pastorianus
tcagcattctttaaattccacacag

SEQ ID NO: 88603 - DNA, 25 bp, Saccharomyces pastorianus
gttatctacagcagttttctcacta

SEQ ID NO: 88604 - DNA, 25 bp, Saccharomyces pastorianus
aagccacgagtgttaactcaacgaa

SEQ ID NO: 88605 - DNA, 25 bp, Saccharomyces pastorianus
taaaaatgccccaattaccgaccat

SEQ ID NO: 88606 - DNA, 25 bp, Saccharomyces pastorianus
caaattcattctcgcgatccatcga

SEQ ID NO: 88607 - DNA, 25 bp, Saccharomyces pastorianus
aaagatcaccgctgagaaaatcact

SEQ ID NO: 88608 - DNA, 25 bp, Saccharomyces pastorianus
aggtgctctctacaatactataagt

SEQ ID NO: 88609 - DNA, 25 bp, Saccharomyces pastorianus
taaaactagaaatgcccagtccgtt

SEQ ID NO: 88610 - DNA, 25 bp, Saccharomyces pastorianus
tcctcctatggacctttgtagtgac

SEQ ID NO: 88611 - DNA, 25 bp, Saccharomyces pastorianus
tacaggaatctgttttcgaccatat

SEQ ID NO: 88612 - DNA, 25 bp, Saccharomyces pastorianus
ggcaatggccattgaatgacctatt

SEQ ID NO: 88613 - DNA, 25 bp, Saccharomyces pastorianus
aatgtggcagagagcttggattcaa

SEQ ID NO: 88614 - DNA, 25 bp, Saccharomyces pastorianus
gaacgcgaaatacggtcaattgcat

SEQ ID NO: 88615 - DNA, 25 bp, Saccharomyces pastorianus
tcgttttcagcatttatcacagcat

SEQ ID NO: 88616 - DNA, 25 bp, Saccharomyces pastorianus
aatccaggaactgccagaacgcgaa

SEQ ID NO: 88617 - DNA, 25 bp, Saccharomyces pastorianus
gaagcacgtgctcaagtcacaaccg

SEQ ID NO: 88618 - DNA, 25 bp, Saccharomyces pastorianus
aacatgctttcgttttcgttttcag

SEQ ID NO: 88619 - DNA, 25 bp, Saccharomyces pastorianus
aactctattatgatcggctgggcag

SEQ ID NO: 88620 - DNA, 25 bp, Saccharomyces pastorianus
gtctttgacactgtaccactgaaca

SEQ ID NO: 88621 - DNA, 25 bp, Saccharomyces pastorianus
ggcaagtacactaagcctaccgaac

SEQ ID NO: 88622 - DNA, 25 bp, Saccharomyces pastorianus
aatcctgagaccagcagactagcat

SEQ ID NO: 88623 - DNA, 25 bp, Saccharomyces pastorianus
actagtcgaagtttccagcaaattg

SEQ ID NO: 88624 - DNA, 25 bp, Saccharomyces pastorianus
gaatatgccatatcacattgcgaag

SEQ ID NO: 88625 - DNA, 25 bp, Saccharomyces pastorianus
accactgaacaagtttgggtgctta

SEQ ID NO: 88626 - DNA, 25 bp, Saccharomyces pastorianus
gcaggtgaaaacctatcccagttca

SEQ ID NO: 88627 - DNA, 25 bp, Saccharomyces pastorianus
gatggcttattaaaactacgcgcag

SEQ ID NO: 88628 - DNA, 25 bp, Saccharomyces pastorianus
actacgcgcaggcaacattgtaaat

SEQ ID NO: 88629 - DNA, 25 bp, Saccharomyces pastorianus
cagcttatgatagtgttaccggcaa

SEQ ID NO: 88630 - DNA, 25 bp, Saccharomyces pastorianus
atggcttcgaactggccaccaaagc

SEQ ID NO: 88631 - DNA, 25 bp, Saccharomyces pastorianus
gttaattccatcattgtcaaccaat

SEQ ID NO: 88632 - DNA, 25 bp, Saccharomyces pastorianus
gagaccatcagacaacaattcacgg

SEQ ID NO: 88633 - DNA, 25 bp, Saccharomyces pastorianus
atataaccctattactgatggcaaa

SEQ ID NO: 88634 - DNA, 25 bp, Saccharomyces pastorianus
ggatcctgacctaacgacttttgtt

SEQ ID NO: 88635 - DNA, 25 bp, Saccharomyces pastorianus
ctaaactcttttatgggcgcaggta

SEQ ID NO: 88636 - DNA, 25 bp, Saccharomyces pastorianus
cgacttttgtttgcgtttgtatcag

SEQ ID NO: 88637 - DNA, 25 bp, Saccharomyces pastorianus
aatgccattatgtgctggagaaatc

SEQ ID NO: 88638 - DNA, 25 bp, Saccharomyces pastorianus
gttatttttgacactgctccaactg

SEQ ID NO: 88639 - DNA, 25 bp, Saccharomyces pastorianus
gatttccatgtcgttaaaatgccat

SEQ ID NO: 88640 - DNA, 25 bp, Saccharomyces pastorianus
aagttctcacagttcctaaacaaag

SEQ ID NO: 88641 - DNA, 25 bp, Saccharomyces pastorianus
gctccaactggccacacattaagat

SEQ ID NO: 88642 - DNA, 25 bp, Saccharomyces pastorianus
taatctaactccctcacaatctgta

SEQ ID NO: 88643 - DNA, 25 bp, Saccharomyces pastorianus
agacgatttatttgccaatgacggc

SEQ ID NO: 88644 - DNA, 25 bp, Saccharomyces pastorianus
taccacagcaactcctattcaattt

SEQ ID NO: 88645 - DNA, 25 bp, Saccharomyces pastorianus
gaaactactgtcgatgacctacagg

SEQ ID NO: 88646 - DNA, 25 bp, Saccharomyces pastorianus
aagtggatcgcgttatgctgaacaa

SEQ ID NO: 88647 - DNA, 25 bp, Saccharomyces pastorianus
gaacgtagacatgaccacttggaga

SEQ ID NO: 88648 - DNA, 25 bp, Saccharomyces pastorianus
gaagaatctgactttctcaccacga

SEQ ID NO: 88649 - DNA, 25 bp, Saccharomyces pastorianus
aaatggcgccagtggaacgtagaca

SEQ ID NO: 88650 - DNA, 25 bp, Saccharomyces pastorianus
tgcggatttcaacacttcaagcaat

SEQ ID NO: 88651 - DNA, 25 bp, Saccharomyces pastorianus
aattctggtacgcaggtggcccacg

SEQ ID NO: 88652 - DNA, 25 bp, Saccharomyces pastorianus
gatgccggaaagaccatagaaccac

SEQ ID NO: 88653 - DNA, 25 bp, Saccharomyces pastorianus
ttaaaggctacgctaacaccgattg

SEQ ID NO: 88654 - DNA, 25 bp, Saccharomyces pastorianus
ttgagttgtgctatcataccttgat

SEQ ID NO: 88655 - DNA, 25 bp, Saccharomyces pastorianus
aatgatgacgtaccgcaagaggagt

SEQ ID NO: 88656 - DNA, 25 bp, Saccharomyces pastorianus
gagagcttatcgtctttcaagaggg

SEQ ID NO: 88657 - DNA, 25 bp, Saccharomyces pastorianus
gatcatttaatcaagggctcgctaa

SEQ ID NO: 88658 - DNA, 25 bp, Saccharomyces pastorianus
tgatcatctcaaccacaaggtccat

SEQ ID NO: 88659 - DNA, 25 bp, Saccharomyces pastorianus
aggtgcgttctatggagactcagtc

SEQ ID NO: 88660 - DNA, 25 bp, Saccharomyces pastorianus
ggctactaagccttctattgagagt

SEQ ID NO: 88661 - DNA, 25 bp, Saccharomyces pastorianus
agcggctatgacgatcgatcattaa

SEQ ID NO: 88662 - DNA, 25 bp, Saccharomyces pastorianus
tgctgagcaggctagaagcggctat

SEQ ID NO: 88663 - DNA, 25 bp, Saccharomyces pastorianus
tgcgatatttgtaacctaaccttca

SEQ ID NO: 88664 - DNA, 25 bp, Saccharomyces pastorianus
actggctgtttatcaccaggtgcat

SEQ ID NO: 88665 - DNA, 25 bp, Saccharomyces pastorianus
tcagaatgtcttatggctcgcatga

SEQ ID NO: 88666 - DNA, 25 bp, Saccharomyces pastorianus
gttccagaatttttccagactgcga

SEQ ID NO: 88667 - DNA, 25 bp, Saccharomyces pastorianus
gatctgacagagaatacccactatt

SEQ ID NO: 88668 - DNA, 25 bp, Saccharomyces pastorianus
atttgattctaccaaccatcctgac

SEQ ID NO: 88669 - DNA, 25 bp, Saccharomyces pastorianus
agaacggtaccatcagtaagacagg

SEQ ID NO: 88670 - DNA, 25 bp, Saccharomyces pastorianus
aacacgatcctgtggaagggaatct

SEQ ID NO: 88671 - DNA, 25 bp, Saccharomyces pastorianus
ataactgtgcgtctaacggccaaaa

SEQ ID NO: 88672 - DNA, 25 bp, Saccharomyces pastorianus
ggtgcatttttatcaaaggttccag

SEQ ID NO: 88673 - DNA, 25 bp, Saccharomyces pastorianus
aaagactcatagaacacgatcctgt

SEQ ID NO: 88674 - DNA, 25 bp, Saccharomyces pastorianus
ttggcaagagtattcatctgtattt

SEQ ID NO: 88675 - DNA, 25 bp, Saccharomyces pastorianus
acccgaaccctcttctgataaagat

SEQ ID NO: 88676 - DNA, 25 bp, Saccharomyces pastorianus
ggaggccatattctccaagaattat

SEQ ID NO: 88677 - DNA, 25 bp, Saccharomyces pastorianus
tgatcacgccggtaccaagaagaga

SEQ ID NO: 88678 - DNA, 25 bp, Saccharomyces pastorianus
agcttcaaattgatcacgccggtac

SEQ ID NO: 88679 - DNA, 25 bp, Saccharomyces pastorianus
ggagatatatgccttcgtagaatta

SEQ ID NO: 88680 - DNA, 25 bp, Saccharomyces pastorianus
tacccgtataccaacctgctaatta

SEQ ID NO: 88681 - DNA, 25 bp, Saccharomyces pastorianus
gaagagagcttgatttatctaccaa

SEQ ID NO: 88682 - DNA, 25 bp, Saccharomyces pastorianus
taccaggattccttaagacgtgatc

SEQ ID NO: 88683 - DNA, 25 bp, Saccharomyces pastorianus
gaaggttccatttctaactacaaag

SEQ ID NO: 88684 - DNA, 25 bp, Saccharomyces pastorianus
tatctgacgttagcggcatatatcc

SEQ ID NO: 88685 - DNA, 25 bp, Saccharomyces pastorianus
gaaagtttgacgcatctctaccaac

SEQ ID NO: 88686 - DNA, 25 bp, Saccharomyces pastorianus
gatgaagtcactatgggtatgctac

SEQ ID NO: 88687 - DNA, 25 bp, Saccharomyces pastorianus
agcgcccagcaaaagttacaggttt

SEQ ID NO: 88688 - DNA, 25 bp, Saccharomyces pastorianus
ggaaaatgcccgcagatgcatctta

SEQ ID NO: 88689 - DNA, 25 bp, Saccharomyces pastorianus
tgtcttggacgtgcggataggccta

SEQ ID NO: 88690 - DNA, 25 bp, Saccharomyces pastorianus
taaaacacaccgctgaggaacgaat

SEQ ID NO: 88691 - DNA, 25 bp, Saccharomyces pastorianus
gggtatgctacagtcagtcaaatta

SEQ ID NO: 88692 - DNA, 25 bp, Saccharomyces pastorianus
tgaagattcagcaggttaccgaaga

SEQ ID NO: 88693 - DNA, 25 bp, Saccharomyces pastorianus
atggccagatatccgtagcactaca

SEQ ID NO: 88694 - DNA, 25 bp, Saccharomyces pastorianus
gggcatacctatcgcgtttagatac

SEQ ID NO: 88695 - DNA, 25 bp, Saccharomyces pastorianus
tggccattctatctcggtttgttaa

SEQ ID NO: 88696 - DNA, 25 bp, Saccharomyces pastorianus
taaccggacaactaacgccagcaag

SEQ ID NO: 88697 - DNA, 25 bp, Saccharomyces pastorianus
tttgatcttcggaactgcggacacc

SEQ ID NO: 88698 - DNA, 25 bp, Saccharomyces pastorianus
gcttttagagcgctcctggacaaaa

SEQ ID NO: 88699 - DNA, 25 bp, Saccharomyces pastorianus
ataccacaactttatgggccctgaa

SEQ ID NO: 88700 - DNA, 25 bp, Saccharomyces pastorianus
atcactcaaagttgtctcggcttct

SEQ ID NO: 88701 - DNA, 25 bp, Saccharomyces pastorianus
aaactgtgttgcgatctactcttcc

SEQ ID NO: 88702 - DNA, 25 bp, Saccharomyces pastorianus
tcggcttcttgttcgagcagttcaa

SEQ ID NO: 88703 - DNA, 25 bp, Saccharomyces pastorianus
gaaagaccctcagagaccacggagt

SEQ ID NO: 88704 - DNA, 25 bp, Saccharomyces pastorianus
gcaagggcaggttcgactccgctat

SEQ ID NO: 88705 - DNA, 25 bp, Saccharomyces pastorianus
tgaagcgttgccctatgacgtgcag

SEQ ID NO: 88706 - DNA, 25 bp, Saccharomyces pastorianus
tacgttcttggaaatcctggctgcc

SEQ ID NO: 88707 - DNA, 25 bp, Saccharomyces pastorianus
aaccttaggtcttggccagaacgat

SEQ ID NO: 88708 - DNA, 25 bp, Saccharomyces pastorianus
gtaaactttactccgtggtctctga

SEQ ID NO: 88709 - DNA, 25 bp, Saccharomyces pastorianus
ggtgtccgcagttccgaagatcaaa

SEQ ID NO: 88710 - DNA, 25 bp, Saccharomyces pastorianus
gtccaggagcgctctaaaagccaaa

SEQ ID NO: 88711 - DNA, 25 bp, Saccharomyces pastorianus
gcaggtaacccttttgtccaggagc

SEQ ID NO: 88712 - DNA, 25 bp, Saccharomyces pastorianus
aacacagtttgttgtcctcatcgta

SEQ ID NO: 88713 - DNA, 25 bp, Saccharomyces pastorianus
gctgggcagccaggatttccaagaa

SEQ ID NO: 88714 - DNA, 25 bp, Saccharomyces pastorianus
gggtctttctgattagatcgcggcc

SEQ ID NO: 88715 - DNA, 25 bp, Saccharomyces pastorianus
gagttatcgttctggccaagaccta

SEQ ID NO: 88716 - DNA, 25 bp, Saccharomyces pastorianus
ggaaccaattctcttaccatcgaat

SEQ ID NO: 88717 - DNA, 25 bp, Saccharomyces pastorianus
atgggcacctaaacacattcctgtg

SEQ ID NO: 88718 - DNA, 25 bp, Saccharomyces pastorianus
taacggcttcttgatcttgtactcg

SEQ ID NO: 88719 - DNA, 25 bp, Saccharomyces pastorianus
atttcattcgtttcttcaaaggaag

SEQ ID NO: 88720 - DNA, 25 bp, Saccharomyces pastorianus
taaacgcctctaactttccggctat

SEQ ID NO: 88721 - DNA, 25 bp, Saccharomyces pastorianus
ggctatcaccgttcatggtcatatg

SEQ ID NO: 88722 - DNA, 25 bp, Saccharomyces pastorianus
tcagccacactttctcaagagatta

SEQ ID NO: 88723 - DNA, 25 bp, Saccharomyces pastorianus
gaagctaagctaaccttgcacgggt

SEQ ID NO: 88724 - DNA, 25 bp, Saccharomyces pastorianus
aatcgctgaattcccagaagaaggc

SEQ ID NO: 88725 - DNA, 25 bp, Saccharomyces pastorianus
tgaagctgaccaatatttacatcgt

SEQ ID NO: 88726 - DNA, 25 bp, Saccharomyces pastorianus
gtagacgcttcttacagaatccatt

SEQ ID NO: 88727 - DNA, 25 bp, Saccharomyces pastorianus
gatccaagagcgtttcgatgtcaaa

SEQ ID NO: 88728 - DNA, 25 bp, Saccharomyces pastorianus
ctaagggtttggctatttcattcgt

SEQ ID NO: 88729 - DNA, 25 bp, Saccharomyces pastorianus
aaacgtatttgcgtgtccacagatg

SEQ ID NO: 88730 - DNA, 25 bp, Saccharomyces pastorianus
tttgctaaggctttggacggccaaa

SEQ ID NO: 88731 - DNA, 25 bp, Saccharomyces pastorianus
tgcttggtcttacgccgccttgatt

SEQ ID NO: 88732 - DNA, 25 bp, Saccharomyces pastorianus
gccaatgtcccagttgaaaatatct

SEQ ID NO: 88733 - DNA, 25 bp, Saccharomyces pastorianus
gatttgggctgactctgaaatcgaa

SEQ ID NO: 88734 - DNA, 25 bp, Saccharomyces pastorianus
tctgggctgatatttttgctaaggc

SEQ ID NO: 88735 - DNA, 25 bp, Saccharomyces pastorianus
ttacgccgccttgatttgggctgac

SEQ ID NO: 88736 - DNA, 25 bp, Saccharomyces pastorianus
gactttgactaacgctgccaatgtc

SEQ ID NO: 88737 - DNA, 25 bp, Saccharomyces pastorianus
taacgctgccaatgtcccagttgaa

SEQ ID NO: 88738 - DNA, 25 bp, Saccharomyces pastorianus
tactgaatctgcttggtcttacgcc

SEQ ID NO: 88739 - DNA, 25 bp, Saccharomyces pastorianus
tgctgccccagctggtgtcgctggt

SEQ ID NO: 88740 - DNA, 25 bp, Saccharomyces pastorianus
gaagccggtgaagccgaagctgaaa

SEQ ID NO: 88741 - DNA, 25 bp, Saccharomyces pastorianus
acttgataagcagtacgagcacttc

SEQ ID NO: 88742 - DNA, 25 bp, Saccharomyces pastorianus
gtatccatcgataccagtgttctgg

SEQ ID NO: 88743 - DNA, 25 bp, Saccharomyces pastorianus
gaaacggagtcactttccgcattcg

SEQ ID NO: 88744 - DNA, 25 bp, Saccharomyces pastorianus
gcgcagcaattagttggcgacaact

SEQ ID NO: 88745 - DNA, 25 bp, Saccharomyces pastorianus
gagcacttcattcatagggtccagt

SEQ ID NO: 88746 - DNA, 25 bp, Saccharomyces pastorianus
tccgcattcgtttatttaccaggct

SEQ ID NO: 88747 - DNA, 25 bp, Saccharomyces pastorianus
acaactcgttaatactgcggtcaaa

SEQ ID NO: 88748 - DNA, 25 bp, Saccharomyces pastorianus
tgtccaagctaaacagggcgccggt

SEQ ID NO: 88749 - DNA, 25 bp, Saccharomyces pastorianus
atcaccgacaaatcgctggtatttc

SEQ ID NO: 88750 - DNA, 25 bp, Saccharomyces pastorianus
gacctggtacgtgcagaaacctttt

SEQ ID NO: 88751 - DNA, 25 bp, Saccharomyces pastorianus
tgtgacgaaccttgacctggtacgt

SEQ ID NO: 88752 - DNA, 25 bp, Saccharomyces pastorianus
gccttctggtggctcatttcacaaa

SEQ ID NO: 88753 - DNA, 25 bp, Saccharomyces pastorianus
tgatgactcagacccaatactagtt

SEQ ID NO: 88754 - DNA, 25 bp, Saccharomyces pastorianus
gacaggcacagttttccatacaacc

SEQ ID NO: 88755 - DNA, 25 bp, Saccharomyces pastorianus
tgttacaggtaaccttcccctactg

SEQ ID NO: 88756 - DNA, 25 bp, Saccharomyces pastorianus
gttcaaaattggagcgccttctggt

SEQ ID NO: 88757 - DNA, 25 bp, Saccharomyces pastorianus
gaagactccacaagttactcagaca

SEQ ID NO: 88758 - DNA, 25 bp, Saccharomyces pastorianus
ggaagccaccgttatacacgatgga

SEQ ID NO: 88759 - DNA, 25 bp, Saccharomyces pastorianus
agttgttgtttttgcctactctaca

SEQ ID NO: 88760 - DNA, 25 bp, Saccharomyces pastorianus
acaacctttatgacaacactcttcc

SEQ ID NO: 88761 - DNA, 25 bp, Saccharomyces pastorianus
gaaggcacaccttttgatctagagg

SEQ ID NO: 88762 - DNA, 25 bp, Saccharomyces pastorianus
gagaagaacccctgtaaatgtaact

SEQ ID NO: 88763 - DNA, 25 bp, Saccharomyces pastorianus
tacctatcccttctagataccgtag

SEQ ID NO: 88764 - DNA, 25 bp, Saccharomyces pastorianus
tacaccttgttttttgccattctag

SEQ ID NO: 88765 - DNA, 25 bp, Saccharomyces pastorianus
ggcctctcaccttactgttattaaa

SEQ ID NO: 88766 - DNA, 25 bp, Saccharomyces pastorianus
gttcattcttttgcttttcatcgat

SEQ ID NO: 88767 - DNA, 25 bp, Saccharomyces pastorianus
gcttccaaggatgaccacggcgatg

SEQ ID NO: 88768 - DNA, 25 bp, Saccharomyces pastorianus
gctttctaggaaattctttgcccaa

SEQ ID NO: 88769 - DNA, 25 bp, Saccharomyces pastorianus
aagaacgactctgttactgccgaag

SEQ ID NO: 88770 - DNA, 25 bp, Saccharomyces pastorianus
atatacagagcatcgcctccagtag

SEQ ID NO: 88771 - DNA, 25 bp, Saccharomyces pastorianus
tgacctttgtcgtcgttaggacttt

SEQ ID NO: 88772 - DNA, 25 bp, Saccharomyces pastorianus
ctgcagttaagtagcgcctctcaaa

SEQ ID NO: 88773 - DNA, 25 bp, Saccharomyces pastorianus
gattttcatgttctccattctagcc

SEQ ID NO: 88774 - DNA, 25 bp, Saccharomyces pastorianus
tcccagatattcgagcaacagtagt

SEQ ID NO: 88775 - DNA, 25 bp, Saccharomyces pastorianus
aatgtatttcctgtgctcaagtctc

SEQ ID NO: 88776 - DNA, 25 bp, Saccharomyces pastorianus
agtctccagtcattggtactcgtac

SEQ ID NO: 88777 - DNA, 25 bp, Saccharomyces pastorianus
ttctttagtcggtatgcgttccttt

SEQ ID NO: 88778 - DNA, 25 bp, Saccharomyces pastorianus
ctaatattctttttcgtcaccgtgt

SEQ ID NO: 88779 - DNA, 25 bp, Saccharomyces pastorianus
gtcaccgtgtttatagttctgatgg

SEQ ID NO: 88780 - DNA, 25 bp, Saccharomyces pastorianus
gttcctttcctttatatccgtcagg

SEQ ID NO: 88781 - DNA, 25 bp, Saccharomyces pastorianus
atgagctgttcacccaatttttgta

SEQ ID NO: 88782 - DNA, 25 bp, Saccharomyces pastorianus
cgtaccaacatattcctgcttgtgg

SEQ ID NO: 88783 - DNA, 25 bp, Saccharomyces pastorianus
gaatattcctgcgaatcccagatat

SEQ ID NO: 88784 - DNA, 25 bp, Saccharomyces pastorianus
ggacttcacacagtttttctatctt

SEQ ID NO: 88785 - DNA, 25 bp, Saccharomyces pastorianus
gaagagtcatcatggacatcgtcct

SEQ ID NO: 88786 - DNA, 25 bp, Saccharomyces pastorianus
caagagagagaagttctacgcagag

SEQ ID NO: 88787 - DNA, 25 bp, Saccharomyces pastorianus
gtgtcatggcctcttactggtggtg

SEQ ID NO: 88788 - DNA, 25 bp, Saccharomyces pastorianus
atcatggacatcgtcctcgggttct

SEQ ID NO: 88789 - DNA, 25 bp, Saccharomyces pastorianus
tcatggacatcgtcctcgggttctc

SEQ ID NO: 88790 - DNA, 25 bp, Saccharomyces pastorianus
aacaagagagagaagttctacgcag

SEQ ID NO: 88791 - DNA, 25 bp, Saccharomyces pastorianus
ggtgtcatggcctcttactggtggt

SEQ ID NO: 88792 - DNA, 25 bp, Saccharomyces pastorianus
tggacatcgtcctcgggttctccct

SEQ ID NO: 88793 - DNA, 25 bp, Saccharomyces pastorianus
gagaagagtcatcatggacatcgtc

SEQ ID NO: 88794 - DNA, 25 bp, Saccharomyces pastorianus
caagagaagagtcatcatggacatc

SEQ ID NO: 88795 - DNA, 25 bp, Saccharomyces pastorianus
tcatcatggacatcgtcctcgggtt

SEQ ID NO: 88796 - DNA, 25 bp, Saccharomyces pastorianus
tctgcgtccttgtacaaactcgaaa

SEQ ID NO: 88797 - DNA, 25 bp, Saccharomyces pastorianus
aaagtcgatttctgcgtccttgtac

SEQ ID NO: 88798 - DNA, 25 bp, Saccharomyces pastorianus
gtgcatcctcacaaagaacactgat

SEQ ID NO: 88799 - DNA, 25 bp, Saccharomyces pastorianus
tgcccattcttttctgccctaaaaa

SEQ ID NO: 88800 - DNA, 25 bp, Saccharomyces pastorianus
atacttctatcatttggcaccacac

SEQ ID NO: 88801 - DNA, 25 bp, Saccharomyces pastorianus
gacgaagatgctcttgatcttttct

SEQ ID NO: 88802 - DNA, 25 bp, Saccharomyces pastorianus
ttggcaccacacttgacaaattctg

SEQ ID NO: 88803 - DNA, 25 bp, Saccharomyces pastorianus
aaagttgtctcatatgtgcatcctc

SEQ ID NO: 88804 - DNA, 25 bp, Saccharomyces pastorianus
tgtcatttgacccagctttgcgtag

SEQ ID NO: 88805 - DNA, 25 bp, Saccharomyces pastorianus
caaattctgcaatagcggctggagt

SEQ ID NO: 88806 - DNA, 25 bp, Saccharomyces pastorianus
atcttttctttgatctgcccattct

SEQ ID NO: 88807 - DNA, 25 bp, Saccharomyces pastorianus
gtacgttacatgtttttcagaccag

SEQ ID NO: 88808 - DNA, 25 bp, Saccharomyces pastorianus
gaatggttcaagtctatcccactgt

SEQ ID NO: 88809 - DNA, 25 bp, Saccharomyces pastorianus
cggtcatccattcagattccacaaa

SEQ ID NO: 88810 - DNA, 25 bp, Saccharomyces pastorianus
aaatgcggtagtcaacttctctcta

SEQ ID NO: 88811 - DNA, 25 bp, Saccharomyces pastorianus
ttgccacatgtattgctcccgtaga

SEQ ID NO: 88812 - DNA, 25 bp, Saccharomyces pastorianus
atatgacaaacctgtgccttctcag

SEQ ID NO: 88813 - DNA, 25 bp, Saccharomyces pastorianus
aaagagagccattttgaccggtcat

SEQ ID NO: 88814 - DNA, 25 bp, Saccharomyces pastorianus
ggatgttgttgctatgtccttgtac

SEQ ID NO: 88815 - DNA, 25 bp, Saccharomyces pastorianus
acactattcaacctctattttctca

SEQ ID NO: 88816 - DNA, 25 bp, Saccharomyces pastorianus
gccttctcaggagcctatcgtagta

SEQ ID NO: 88817 - DNA, 25 bp, Saccharomyces pastorianus
gctgtctacggattactacttcatg

SEQ ID NO: 88818 - DNA, 25 bp, Saccharomyces pastorianus
tggaatggaagacctgccagcgctt

SEQ ID NO: 88819 - DNA, 25 bp, Saccharomyces pastorianus
aggatggcaccaacacacagtgtgg

SEQ ID NO: 88820 - DNA, 25 bp, Saccharomyces pastorianus
atgttatagatgttgaggcccggga

SEQ ID NO: 88821 - DNA, 25 bp, Saccharomyces pastorianus
ggtagaattactttgtcctcgagag

SEQ ID NO: 88822 - DNA, 25 bp, Saccharomyces pastorianus
gcatgctctcattcagttcgctaat

SEQ ID NO: 88823 - DNA, 25 bp, Saccharomyces pastorianus
agcccttcaccgcagtaaataatgg

SEQ ID NO: 88824 - DNA, 25 bp, Saccharomyces pastorianus
agaggattgggcttctacagtccaa

SEQ ID NO: 88825 - DNA, 25 bp, Saccharomyces pastorianus
aagctgataccagggcatgctctca

SEQ ID NO: 88826 - DNA, 25 bp, Saccharomyces pastorianus
atgtcgatggcttgtatggctcaaa

SEQ ID NO: 88827 - DNA, 25 bp, Saccharomyces pastorianus
gcgactaatagcaagccgactttta

SEQ ID NO: 88828 - DNA, 25 bp, Saccharomyces pastorianus
aaagaggctgtaggcgatgcgttaa

SEQ ID NO: 88829 - DNA, 25 bp, Saccharomyces pastorianus
aaggcttttcgagggcagacattca

SEQ ID NO: 88830 - DNA, 25 bp, Saccharomyces pastorianus
tagtgccaattagcgcagcctcaaa

SEQ ID NO: 88831 - DNA, 25 bp, Saccharomyces pastorianus
attgaaggtgatcccaacgcgctag

SEQ ID NO: 88832 - DNA, 25 bp, Saccharomyces pastorianus
aattacatgcagctggatctccatt

SEQ ID NO: 88833 - DNA, 25 bp, Saccharomyces pastorianus
tcacctgattaattgcgccggaaga

SEQ ID NO: 88834 - DNA, 25 bp, Saccharomyces pastorianus
atctgacaggtctcttagggtacaa

SEQ ID NO: 88835 - DNA, 25 bp, Saccharomyces pastorianus
gaggacttattgaacgctgcacacg

SEQ ID NO: 88836 - DNA, 25 bp, Saccharomyces pastorianus
gagacttatagtatcgctggcgttt

SEQ ID NO: 88837 - DNA, 25 bp, Saccharomyces pastorianus
agaggatctcttgccatgttcaaat

SEQ ID NO: 88838 - DNA, 25 bp, Saccharomyces pastorianus
ttgcgttccggaatttgccacgata

SEQ ID NO: 88839 - DNA, 25 bp, Saccharomyces pastorianus
gacgctcgctcaggatcttgaagat

SEQ ID NO: 88840 - DNA, 25 bp, Saccharomyces pastorianus
tgttgttttgtgcaactccaccatc

SEQ ID NO: 88841 - DNA, 25 bp, Saccharomyces pastorianus
gtcgaatctaccatcgtaggctgga

SEQ ID NO: 88842 - DNA, 25 bp, Saccharomyces pastorianus
aagaaccactccttggtcgaatcta

SEQ ID NO: 88843 - DNA, 25 bp, Saccharomyces pastorianus
gaattaacgccggtttgtacatctt

SEQ ID NO: 88844 - DNA, 25 bp, Saccharomyces pastorianus
ttcctccactgctaagattggccca

SEQ ID NO: 88845 - DNA, 25 bp, Saccharomyces pastorianus
ttgtctggtaccgttctttacttga

SEQ ID NO: 88846 - DNA, 25 bp, Saccharomyces pastorianus
aggctggaactctaccgttggtcaa

SEQ ID NO: 88847 - DNA, 25 bp, Saccharomyces pastorianus
ttatcggtcctaatgtcaccatcgg

SEQ ID NO: 88848 - DNA, 25 bp, Saccharomyces pastorianus
ggctacaggtgccaacattgttggt

SEQ ID NO: 88849 - DNA, 25 bp, Saccharomyces pastorianus
ggtaatgccttgatcgatccaaccg

SEQ ID NO: 88850 - DNA, 25 bp, Saccharomyces pastorianus
attggcccagacgtggttatcggtc

SEQ ID NO: 88851 - DNA, 25 bp, Saccharomyces pastorianus
atttcagagctataccgctggtgaa

SEQ ID NO: 88852 - DNA, 25 bp, Saccharomyces pastorianus
taccgcgccgcctgctaatataaag

SEQ ID NO: 88853 - DNA, 25 bp, Saccharomyces pastorianus
aaattcaaatggtccaacgcccgct

SEQ ID NO: 88854 - DNA, 25 bp, Saccharomyces pastorianus
aaggctactttatctgcttcaggtc

SEQ ID NO: 88855 - DNA, 25 bp, Saccharomyces pastorianus
agactaaaaccatcgcatctaccgc

SEQ ID NO: 88856 - DNA, 25 bp, Saccharomyces pastorianus
ggcagagtttcaacagccactgact

SEQ ID NO: 88857 - DNA, 25 bp, Saccharomyces pastorianus
agtgtagatggcagaacctcctcga

SEQ ID NO: 88858 - DNA, 25 bp, Saccharomyces pastorianus
aattaacaggttgggtgcaggcagc

SEQ ID NO: 88859 - DNA, 25 bp, Saccharomyces pastorianus
taaagggtagttccaccgccaatgg

SEQ ID NO: 88860 - DNA, 25 bp, Saccharomyces pastorianus
agaacctcctcgactttgaaggcta

SEQ ID NO: 88861 - DNA, 25 bp, Saccharomyces pastorianus
tccgtggctgtacaacctgctaata

SEQ ID NO: 88862 - DNA, 25 bp, Saccharomyces pastorianus
taagatccccattgttccagtggtt

SEQ ID NO: 88863 - DNA, 25 bp, Saccharomyces pastorianus
ccctttctgggttggttcatggctt

SEQ ID NO: 88864 - DNA, 25 bp, Saccharomyces pastorianus
aaggagattggctactctcccgcta

SEQ ID NO: 88865 - DNA, 25 bp, Saccharomyces pastorianus
agggtaccaggtcttacacgagtga

SEQ ID NO: 88866 - DNA, 25 bp, Saccharomyces pastorianus
gccttctgtcagcattagcaacgat

SEQ ID NO: 88867 - DNA, 25 bp, Saccharomyces pastorianus
gtgagctgacaatgttgcctttcaa

SEQ ID NO: 88868 - DNA, 25 bp, Saccharomyces pastorianus
gtctttgaaatacgtcccctttctg

SEQ ID NO: 88869 - DNA, 25 bp, Saccharomyces pastorianus
acaagcgtgctctatgggtttttcc

SEQ ID NO: 88870 - DNA, 25 bp, Saccharomyces pastorianus
caagaagggtgctttccatttggca

SEQ ID NO: 88871 - DNA, 25 bp, Saccharomyces pastorianus
gtatgccgctcttcaacatgacaag

SEQ ID NO: 88872 - DNA, 25 bp, Saccharomyces pastorianus
aagaatgagcctgtgccttctgtca

SEQ ID NO: 88873 - DNA, 25 bp, Saccharomyces pastorianus
gactttggccgtaatgaatttccca

SEQ ID NO: 88874 - DNA, 25 bp, Saccharomyces pastorianus
acatgaggacgttgaagcttcccaa

SEQ ID NO: 88875 - DNA, 25 bp, Saccharomyces pastorianus
tcaagagacgtgttcctttggacct

SEQ ID NO: 88876 - DNA, 25 bp, Saccharomyces pastorianus
caggagaacttggaagcctttttca

SEQ ID NO: 88877 - DNA, 25 bp, Saccharomyces pastorianus
gagagaggcctcgaagtccaaaaac

SEQ ID NO: 88878 - DNA, 25 bp, Saccharomyces pastorianus
gaagcttcccaaattcctgaattgc

SEQ ID NO: 88879 - DNA, 25 bp, Saccharomyces pastorianus
aagatcctttaacggccataagaag

SEQ ID NO: 88880 - DNA, 25 bp, Saccharomyces pastorianus
gaattgagcaaaaccaacggacttt

SEQ ID NO: 88881 - DNA, 25 bp, Saccharomyces pastorianus
ggttatcgaagcactacgtagttct

SEQ ID NO: 88882 - DNA, 25 bp, Saccharomyces pastorianus
taatggtacggtcttggtggaattt

SEQ ID NO: 88883 - DNA, 25 bp, Saccharomyces pastorianus
ctttggacctaactgctgccagaaa

SEQ ID NO: 88884 - DNA, 25 bp, Saccharomyces pastorianus
cggcaatggcagaagagtcctcttt

SEQ ID NO: 88885 - DNA, 25 bp, Saccharomyces pastorianus
aaagcttcacattctggaattgtct

SEQ ID NO: 88886 - DNA, 25 bp, Saccharomyces pastorianus
tcctcatcgtcatcggcaatggcag

SEQ ID NO: 88887 - DNA, 25 bp, Saccharomyces pastorianus
aagaatcactccttgtgctcctcat

SEQ ID NO: 88888 - DNA, 25 bp, Saccharomyces pastorianus
ttgactcttccttgccgtttttctt

SEQ ID NO: 88889 - DNA, 25 bp, Saccharomyces pastorianus
gaggcctctctctgtaaatcaaact

SEQ ID NO: 88890 - DNA, 25 bp, Saccharomyces pastorianus
atttcgttggactcatcgtcattgg

SEQ ID NO: 88891 - DNA, 25 bp, Saccharomyces pastorianus
aaacactcagtttcttaccttcata

SEQ ID NO: 88892 - DNA, 25 bp, Saccharomyces pastorianus
aaggatcttgatctaccgctgaagt

SEQ ID NO: 88893 - DNA, 25 bp, Saccharomyces pastorianus
gcaagtttttcttcttatggccgtt

SEQ ID NO: 88894 - DNA, 25 bp, Saccharomyces pastorianus
agtttttggacttcgaggcctctct

SEQ ID NO: 88895 - DNA, 25 bp, Saccharomyces pastorianus
tacgccaacctatctacgcataaat

SEQ ID NO: 88896 - DNA, 25 bp, Saccharomyces pastorianus
aggacagaccgcataagtgccctat

SEQ ID NO: 88897 - DNA, 25 bp, Saccharomyces pastorianus
agcattgtggactgcaatttccgaa

SEQ ID NO: 88898 - DNA, 25 bp, Saccharomyces pastorianus
gagtccgacaacaatagtggtgctg

SEQ ID NO: 88899 - DNA, 25 bp, Saccharomyces pastorianus
aaatccactcatttaactccggagg

SEQ ID NO: 88900 - DNA, 25 bp, Saccharomyces pastorianus
ggtgtatccacacaagtctatatca

SEQ ID NO: 88901 - DNA, 25 bp, Saccharomyces pastorianus
aagtgtccttacaactctactctga

SEQ ID NO: 88902 - DNA, 25 bp, Saccharomyces pastorianus
atttccgaacgttgacgtctggcta

SEQ ID NO: 88903 - DNA, 25 bp, Saccharomyces pastorianus
tcaacgcggctttgccaggaacaat

SEQ ID NO: 88904 - DNA, 25 bp, Saccharomyces pastorianus
ataagtgccctatctgtcaacgcgg

SEQ ID NO: 88905 - DNA, 25 bp, Saccharomyces pastorianus
aacgggcgttttttcgcgctgtgat

SEQ ID NO: 88906 - DNA, 25 bp, Saccharomyces pastorianus
aagtttttgatttcctgacgctggc

SEQ ID NO: 88907 - DNA, 25 bp, Saccharomyces pastorianus
ttacgggttttacgaggaatgcctg

SEQ ID NO: 88908 - DNA, 25 bp, Saccharomyces pastorianus
ccgggctcaccaactggttatggaa

SEQ ID NO: 88909 - DNA, 25 bp, Saccharomyces pastorianus
atgaggatctggaacctactttcaa

SEQ ID NO: 88910 - DNA, 25 bp, Saccharomyces pastorianus
gtccatggagggttatctcccgaga

SEQ ID NO: 88911 - DNA, 25 bp, Saccharomyces pastorianus
gtggtccgcgccaaattactgttat

SEQ ID NO: 88912 - DNA, 25 bp, Saccharomyces pastorianus
aaattttctccgctgttcccgatga

SEQ ID NO: 88913 - DNA, 25 bp, Saccharomyces pastorianus
gtgcaggatggctctttggcagtaa

SEQ ID NO: 88914 - DNA, 25 bp, Saccharomyces pastorianus
aatggactgaaccttattgcccggg

SEQ ID NO: 88915 - DNA, 25 bp, Saccharomyces pastorianus
gacgctggccgctataattgacggt

SEQ ID NO: 88916 - DNA, 25 bp, Saccharomyces pastorianus
aagtttcccctcgtggtgcaggatg

SEQ ID NO: 88917 - DNA, 25 bp, Saccharomyces pastorianus
aaagctctgtttgccttgctatttc

SEQ ID NO: 88918 - DNA, 25 bp, Saccharomyces pastorianus
gtgattggcatattcaacgcccttc

SEQ ID NO: 88919 - DNA, 25 bp, Saccharomyces pastorianus
caattaacggcgaatctccacttta

SEQ ID NO: 88920 - DNA, 25 bp, Saccharomyces pastorianus
tgctatttctttacacagctgctgt

SEQ ID NO: 88921 - DNA, 25 bp, Saccharomyces pastorianus
catttctgctaacggtgaggtcttt

SEQ ID NO: 88922 - DNA, 25 bp, Saccharomyces pastorianus
atgacccacggcttgaaagctctgt

SEQ ID NO: 88923 - DNA, 25 bp, Saccharomyces pastorianus
gatatcgaaggcttatcctgtccaa

SEQ ID NO: 88924 - DNA, 25 bp, Saccharomyces pastorianus
agttgagatcccaggcgaggttcca

SEQ ID NO: 88925 - DNA, 25 bp, Saccharomyces pastorianus
cagctgctgtcaatgcgggtgtgat

SEQ ID NO: 88926 - DNA, 25 bp, Saccharomyces pastorianus
gactgttatcccagacttttgattt

SEQ ID NO: 88927 - DNA, 25 bp, Saccharomyces pastorianus
ggttccacctggcaaatatgttgtt

SEQ ID NO: 88928 - DNA, 25 bp, Saccharomyces pastorianus
tgccctcggcaaaagaaacaacgtt

SEQ ID NO: 88929 - DNA, 25 bp, Saccharomyces pastorianus
caaatgtcttgttttaatgtcaaac

SEQ ID NO: 88930 - DNA, 25 bp, Saccharomyces pastorianus
gtgctggcttagtaacggaattgaa

SEQ ID NO: 88931 - DNA, 25 bp, Saccharomyces pastorianus
catgaaccctaaatgtgctggctta

SEQ ID NO: 88932 - DNA, 25 bp, Saccharomyces pastorianus
cactagtgaaagtgccctcggcaaa

SEQ ID NO: 88933 - DNA, 25 bp, Saccharomyces pastorianus
ggaattgaaaagttgcactagtgaa

SEQ ID NO: 88934 - DNA, 25 bp, Saccharomyces pastorianus
gtgaagaaacctatcattaggcaag

SEQ ID NO: 88935 - DNA, 25 bp, Saccharomyces pastorianus
attaggcaagaagcgaacaaatgtc

SEQ ID NO: 88936 - DNA, 25 bp, Saccharomyces pastorianus
agagcaatattaactatcacgccgc

SEQ ID NO: 88937 - DNA, 25 bp, Saccharomyces pastorianus
tattaactatcacgccgctaggctg

SEQ ID NO: 88938 - DNA, 25 bp, Saccharomyces pastorianus
aaacttgttacaatgctggtcttca

SEQ ID NO: 88939 - DNA, 25 bp, Saccharomyces pastorianus
ggactccaataatccagccttgcat

SEQ ID NO: 88940 - DNA, 25 bp, Saccharomyces pastorianus
tgacaattactatcctggctggtat

SEQ ID NO: 88941 - DNA, 25 bp, Saccharomyces pastorianus
gggaaatcgttcatgcatttggcaa

SEQ ID NO: 88942 - DNA, 25 bp, Saccharomyces pastorianus
gtaaaggtttcacatcaatcggcgg

SEQ ID NO: 88943 - DNA, 25 bp, Saccharomyces pastorianus
attgcctaacccacacttgagaaag

SEQ ID NO: 88944 - DNA, 25 bp, Saccharomyces pastorianus
caacctctcttacactgggacttaa

SEQ ID NO: 88945 - DNA, 25 bp, Saccharomyces pastorianus
aaggcaatctggtgcatcggtcaat

SEQ ID NO: 88946 - DNA, 25 bp, Saccharomyces pastorianus
tagttccgctataaacacgtcacct

SEQ ID NO: 88947 - DNA, 25 bp, Saccharomyces pastorianus
cagagcgatattgcctttccttata

SEQ ID NO: 88948 - DNA, 25 bp, Saccharomyces pastorianus
gtattagacacacagacccatttgg

SEQ ID NO: 88949 - DNA, 25 bp, Saccharomyces pastorianus
acgtcacctatttccgtggtggata

SEQ ID NO: 88950 - DNA, 25 bp, Saccharomyces pastorianus
agaactaccgaaaccgcttgcaatg

SEQ ID NO: 88951 - DNA, 25 bp, Saccharomyces pastorianus
tcgctacttgagacgtgtggttacc

SEQ ID NO: 88952 - DNA, 25 bp, Saccharomyces pastorianus
gatttctacaatttgctggttcagc

SEQ ID NO: 88953 - DNA, 25 bp, Saccharomyces pastorianus
taggtgactttgatttcccggcaga

SEQ ID NO: 88954 - DNA, 25 bp, Saccharomyces pastorianus
aaccgcttgcaatgactttaccata

SEQ ID NO: 88955 - DNA, 25 bp, Saccharomyces pastorianus
aatgaggatgtctttcttgaagcag

SEQ ID NO: 88956 - DNA, 25 bp, Saccharomyces pastorianus
aggaagtttcgtccagcgcaaataa

SEQ ID NO: 88957 - DNA, 25 bp, Saccharomyces pastorianus
tgtggttaccgagatgagcgttaat

SEQ ID NO: 88958 - DNA, 25 bp, Saccharomyces pastorianus
aaacttccaggagattcgctacttg

SEQ ID NO: 88959 - DNA, 25 bp, Saccharomyces pastorianus
agaaagtacacattgatctcctatg

SEQ ID NO: 88960 - DNA, 25 bp, Saccharomyces pastorianus
atggacgcttcactgtacctaacaa

SEQ ID NO: 88961 - DNA, 25 bp, Saccharomyces pastorianus
gcttaccgggcgatcacatcaaatt

SEQ ID NO: 88962 - DNA, 25 bp, Saccharomyces pastorianus
caatctcggaaaaggcggccaggct

SEQ ID NO: 88963 - DNA, 25 bp, Saccharomyces pastorianus
tgtaaagtgcaaaccgcttaccggg

SEQ ID NO: 88964 - DNA, 25 bp, Saccharomyces pastorianus
tctaaaactgatcgagccaaggctt

SEQ ID NO: 88965 - DNA, 25 bp, Saccharomyces pastorianus
gccaaggcttgctcttaatgcagtt

SEQ ID NO: 88966 - DNA, 25 bp, Saccharomyces pastorianus
ctggccccaatgatcttgatctgtg

SEQ ID NO: 88967 - DNA, 25 bp, Saccharomyces pastorianus
atttacagtacttaggccacccaat

SEQ ID NO: 88968 - DNA, 25 bp, Saccharomyces pastorianus
tgatttgtatactgatcctggcccc

SEQ ID NO: 88969 - DNA, 25 bp, Saccharomyces pastorianus
gtggttacatgcctatctatacgaa

SEQ ID NO: 88970 - DNA, 25 bp, Saccharomyces pastorianus
cggccaggctgacttcgatatagtt

SEQ ID NO: 88971 - DNA, 25 bp, Saccharomyces pastorianus
cacccaattgctaacgatcctattt

SEQ ID NO: 88972 - DNA, 25 bp, Saccharomyces pastorianus
atgcttaataacatcacggccgaag

SEQ ID NO: 88973 - DNA, 25 bp, Saccharomyces pastorianus
ggaggatcattcatcatattccaat

SEQ ID NO: 88974 - DNA, 25 bp, Saccharomyces pastorianus
ttacgctattcagatgctagtgcat

SEQ ID NO: 88975 - DNA, 25 bp, Saccharomyces pastorianus
gaagtgcccttgttttggaggatca

SEQ ID NO: 88976 - DNA, 25 bp, Saccharomyces pastorianus
ctctacccgggttgaaatttgcatt

SEQ ID NO: 88977 - DNA, 25 bp, Saccharomyces pastorianus
acatcaggacgtctcaactaacagt

SEQ ID NO: 88978 - DNA, 25 bp, Saccharomyces pastorianus
gtcaagcccacaataccaggtacga

SEQ ID NO: 88979 - DNA, 25 bp, Saccharomyces pastorianus
ctcccttccatcaaattcacttgaa

SEQ ID NO: 88980 - DNA, 25 bp, Saccharomyces pastorianus
ggtacaataacgaccatttttctct

SEQ ID NO: 88981 - DNA, 25 bp, Saccharomyces pastorianus
ggtacgactcctgatccaataattg

SEQ ID NO: 88982 - DNA, 25 bp, Saccharomyces pastorianus
tggtcaaatccagcttcttttcaag

SEQ ID NO: 88983 - DNA, 25 bp, Saccharomyces pastorianus
tagccgctgtggtctgtacggtgaa

SEQ ID NO: 88984 - DNA, 25 bp, Saccharomyces pastorianus
gattgtgattcagaccagttctgca

SEQ ID NO: 88985 - DNA, 25 bp, Saccharomyces pastorianus
tcgggtatttggaaattctccggca

SEQ ID NO: 88986 - DNA, 25 bp, Saccharomyces pastorianus
ggaatctaccccagatgacattgcc

SEQ ID NO: 88987 - DNA, 25 bp, Saccharomyces pastorianus
agttctgcatatatactcctcgggt

SEQ ID NO: 88988 - DNA, 25 bp, Saccharomyces pastorianus
gccagcattgttatctgacttgaat

SEQ ID NO: 88989 - DNA, 25 bp, Saccharomyces pastorianus
agtgctgccgccacagaggaatcta

SEQ ID NO: 88990 - DNA, 25 bp, Saccharomyces pastorianus
gcactcctccgtcctattaaattta

SEQ ID NO: 88991 - DNA, 25 bp, Saccharomyces pastorianus
cttgccagggtcgtccaaagattgt

SEQ ID NO: 88992 - DNA, 25 bp, Saccharomyces pastorianus
ttgtcaaactttgccggtagccgct

SEQ ID NO: 88993 - DNA, 25 bp, Saccharomyces pastorianus
gatgacattgccactatcacgttgt

SEQ ID NO: 88994 - DNA, 25 bp, Saccharomyces pastorianus
ggaaactttctcctcgatattttgg

SEQ ID NO: 88995 - DNA, 25 bp, Saccharomyces pastorianus
atggtggtcttatttatctgcgcta

SEQ ID NO: 88996 - DNA, 25 bp, Saccharomyces pastorianus
cattttttcctactcatatgtggtt

SEQ ID NO: 88997 - DNA, 25 bp, Saccharomyces pastorianus
atctgcgctaaatcacttttcaaat

SEQ ID NO: 88998 - DNA, 25 bp, Saccharomyces pastorianus
attgagactattgggcgtaacgctg

SEQ ID NO: 88999 - DNA, 25 bp, Saccharomyces pastorianus
actggctaatcccactggaactttg

SEQ ID NO: 89000 - DNA, 25 bp, Saccharomyces pastorianus
aagctcccttgtcctactggctaat

SEQ ID NO: 89001 - DNA, 25 bp, Saccharomyces pastorianus
gtaacgctgttcataagctcccttg

SEQ ID NO: 89002 - DNA, 25 bp, Saccharomyces pastorianus
aaagcccttaatattcctggcaagt

SEQ ID NO: 89003 - DNA, 25 bp, Saccharomyces pastorianus
ggcaagtacatattgaaaccctttc

SEQ ID NO: 89004 - DNA, 25 bp, Saccharomyces pastorianus
atcgccgaaggcactggtttaggaa

SEQ ID NO: 89005 - DNA, 25 bp, Saccharomyces pastorianus
gcttatgattctttggtttttcaac

SEQ ID NO: 89006 - DNA, 25 bp, Saccharomyces pastorianus
ccaaatcgccagatgtagggtcaac

SEQ ID NO: 89007 - DNA, 25 bp, Saccharomyces pastorianus
aaccaaatcgccagatgtagggtca

SEQ ID NO: 89008 - DNA, 25 bp, Saccharomyces pastorianus
tttcaaccaaatcgccagatgtagg

SEQ ID NO: 89009 - DNA, 25 bp, Saccharomyces pastorianus
aatcgccagatgtagggtcaacttc

SEQ ID NO: 89010 - DNA, 25 bp, Saccharomyces pastorianus
atgcttatgattctttggtttttca

SEQ ID NO: 89011 - DNA, 25 bp, Saccharomyces pastorianus
ttttcaaccaaatcgccagatgtag

SEQ ID NO: 89012 - DNA, 25 bp, Saccharomyces pastorianus
aaatcgccagatgtagggtcaactt

SEQ ID NO: 89013 - DNA, 25 bp, Saccharomyces pastorianus
ggtttttcaaccaaatcgccagatg

SEQ ID NO: 89014 - DNA, 25 bp, Saccharomyces pastorianus
atcgccagatgtagggtcaacttca

SEQ ID NO: 89015 - DNA, 25 bp, Saccharomyces pastorianus
gtttttcaaccaaatcgccagatgt

SEQ ID NO: 89016 - DNA, 25 bp, Saccharomyces pastorianus
gaagggctcttctactgggtacgaa

SEQ ID NO: 89017 - DNA, 25 bp, Saccharomyces pastorianus
ttctacctagatcctgaagctgcta

SEQ ID NO: 89018 - DNA, 25 bp, Saccharomyces pastorianus
acttggaggctaaatgaacgtcatt

SEQ ID NO: 89019 - DNA, 25 bp, Saccharomyces pastorianus
aacgtcattacggttcctggcaggg

SEQ ID NO: 89020 - DNA, 25 bp, Saccharomyces pastorianus
aatcttcatgcctgattgtgggcca

SEQ ID NO: 89021 - DNA, 25 bp, Saccharomyces pastorianus
gattacgagggtaagccaccacctg

SEQ ID NO: 89022 - DNA, 25 bp, Saccharomyces pastorianus
agtgagatcgctactgaaaattctg

SEQ ID NO: 89023 - DNA, 25 bp, Saccharomyces pastorianus
aatggtatccccttagtcgttgaat

SEQ ID NO: 89024 - DNA, 25 bp, Saccharomyces pastorianus
tgacattgtattgccggattccgaa

SEQ ID NO: 89025 - DNA, 25 bp, Saccharomyces pastorianus
accacctgtagatcttgaccgtgag

SEQ ID NO: 89026 - DNA, 25 bp, Saccharomyces pastorianus
cagggccagaggaaaccgaatgttt

SEQ ID NO: 89027 - DNA, 25 bp, Saccharomyces pastorianus
tcacaccgtttgttcaacagagcat

SEQ ID NO: 89028 - DNA, 25 bp, Saccharomyces pastorianus
gcttatatacgctaactccggacat

SEQ ID NO: 89029 - DNA, 25 bp, Saccharomyces pastorianus
ttttgctgaggcatcaccgttgaca

SEQ ID NO: 89030 - DNA, 25 bp, Saccharomyces pastorianus
taatcatcggaatgagctgcgctca

SEQ ID NO: 89031 - DNA, 25 bp, Saccharomyces pastorianus
atgctatctgcttttatggtggtaa

SEQ ID NO: 89032 - DNA, 25 bp, Saccharomyces pastorianus
aaccgatcccttgcaagacagtgtg

SEQ ID NO: 89033 - DNA, 25 bp, Saccharomyces pastorianus
tacgaaatatttgctcctgatgaca

SEQ ID NO: 89034 - DNA, 25 bp, Saccharomyces pastorianus
gagagactctaaaaccgatcccttg

SEQ ID NO: 89035 - DNA, 25 bp, Saccharomyces pastorianus
gctgcgctcaaattgccatactgga

SEQ ID NO: 89036 - DNA, 25 bp, Saccharomyces pastorianus
acaccagaaatcatcacaccgtttg

SEQ ID NO: 89037 - DNA, 25 bp, Saccharomyces pastorianus
gctaactccggacattgactgtaca

SEQ ID NO: 89038 - DNA, 25 bp, Saccharomyces pastorianus
tatcgagcaaatctgcctcgcttga

SEQ ID NO: 89039 - DNA, 25 bp, Saccharomyces pastorianus
tgagctgacaacgtcatcttcgtca

SEQ ID NO: 89040 - DNA, 25 bp, Saccharomyces pastorianus
ggagaacatccttatcgagcaaatc

SEQ ID NO: 89041 - DNA, 25 bp, Saccharomyces pastorianus
ggaaattatttcagactagcagtaa

SEQ ID NO: 89042 - DNA, 25 bp, Saccharomyces pastorianus
aacgtcatcttcgtcagtactctcg

SEQ ID NO: 89043 - DNA, 25 bp, Saccharomyces pastorianus
agtactctcgccatccagtaaatat

SEQ ID NO: 89044 - DNA, 25 bp, Saccharomyces pastorianus
aaatctgcctcgcttgagctgacaa

SEQ ID NO: 89045 - DNA, 25 bp, Saccharomyces pastorianus
atgccaccaattatactaaaccgtt

SEQ ID NO: 89046 - DNA, 25 bp, Saccharomyces pastorianus
atcactttgctattcagatattagg

SEQ ID NO: 89047 - DNA, 25 bp, Saccharomyces pastorianus
ctcgccatccagtaaatatgtgttt

SEQ ID NO: 89048 - DNA, 25 bp, Saccharomyces pastorianus
gcagtaatttatcactttgctattc

SEQ ID NO: 89049 - DNA, 25 bp, Saccharomyces pastorianus
gatgaattatttattgccccaggca

SEQ ID NO: 89050 - DNA, 25 bp, Saccharomyces pastorianus
gagacctaatatcatcccaatcatt

SEQ ID NO: 89051 - DNA, 25 bp, Saccharomyces pastorianus
tgccccaggcaagaaagttttatat

SEQ ID NO: 89052 - DNA, 25 bp, Saccharomyces pastorianus
gattctactgtagacgcggaaaccg

SEQ ID NO: 89053 - DNA, 25 bp, Saccharomyces pastorianus
agaaggtgttgtctacgccgtagaa

SEQ ID NO: 89054 - DNA, 25 bp, Saccharomyces pastorianus
gtctacgccgtagaattttctcaca

SEQ ID NO: 89055 - DNA, 25 bp, Saccharomyces pastorianus
gaacccattcagatctaagttggct

SEQ ID NO: 89056 - DNA, 25 bp, Saccharomyces pastorianus
agttttatatttaggtgctgcttcc

SEQ ID NO: 89057 - DNA, 25 bp, Saccharomyces pastorianus
gtcgaataccgtgtatggaacccat

SEQ ID NO: 89058 - DNA, 25 bp, Saccharomyces pastorianus
gcggaaaccgtttttgctagagaag

SEQ ID NO: 89059 - DNA, 25 bp, Saccharomyces pastorianus
gaacaattgactttagagccatatg

SEQ ID NO: 89060 - DNA, 25 bp, Saccharomyces pastorianus
tggccgacaaactatcatcaaccga

SEQ ID NO: 89061 - DNA, 25 bp, Saccharomyces pastorianus
gaagttcgcattttgcgctacgaaa

SEQ ID NO: 89062 - DNA, 25 bp, Saccharomyces pastorianus
tggagtcccaccttctgttttattt

SEQ ID NO: 89063 - DNA, 25 bp, Saccharomyces pastorianus
atcctgcagccatattgtccatatt

SEQ ID NO: 89064 - DNA, 25 bp, Saccharomyces pastorianus
aagtcggcatagcagcatattccct

SEQ ID NO: 89065 - DNA, 25 bp, Saccharomyces pastorianus
agagctccccttattcgtggtagaa

SEQ ID NO: 89066 - DNA, 25 bp, Saccharomyces pastorianus
atctctaccgtcaagaagttcgcat

SEQ ID NO: 89067 - DNA, 25 bp, Saccharomyces pastorianus
tcatcaaccgatgctatgggctgtt

SEQ ID NO: 89068 - DNA, 25 bp, Saccharomyces pastorianus
gaagtttcctcttttatctctaccg

SEQ ID NO: 89069 - DNA, 25 bp, Saccharomyces pastorianus
atattccctggaagatcctgcagcc

SEQ ID NO: 89070 - DNA, 25 bp, Saccharomyces pastorianus
aatttcttcgtctacttcagagctc

SEQ ID NO: 89071 - DNA, 25 bp, Saccharomyces pastorianus
caggcgatcaatgccctttagtgat

SEQ ID NO: 89072 - DNA, 25 bp, Saccharomyces pastorianus
gacgctcatgtccaaaagttcgttg

SEQ ID NO: 89073 - DNA, 25 bp, Saccharomyces pastorianus
gatgtctgtggtatctgtcgtgcca

SEQ ID NO: 89074 - DNA, 25 bp, Saccharomyces pastorianus
gactgtgtccgatgtgtaggcaaac

SEQ ID NO: 89075 - DNA, 25 bp, Saccharomyces pastorianus
atataccgttggctcgatacaccaa

SEQ ID NO: 89076 - DNA, 25 bp, Saccharomyces pastorianus
gcacatccctagcacatctgatgag

SEQ ID NO: 89077 - DNA, 25 bp, Saccharomyces pastorianus
ataacggtacctgtccaagctgtaa

SEQ ID NO: 89078 - DNA, 25 bp, Saccharomyces pastorianus
gacgcagccaataacgatccaaatg

SEQ ID NO: 89079 - DNA, 25 bp, Saccharomyces pastorianus
gggctatgccatcataacttccatg

SEQ ID NO: 89080 - DNA, 25 bp, Saccharomyces pastorianus
gtgtttgcttggtcatggcacatcc

SEQ ID NO: 89081 - DNA, 25 bp, Saccharomyces pastorianus
taggcaaactttccagctacagaag

SEQ ID NO: 89082 - DNA, 25 bp, Saccharomyces pastorianus
ttagggattcacacttccaagatga

SEQ ID NO: 89083 - DNA, 25 bp, Saccharomyces pastorianus
agaagcaggtttgttagcccttaga

SEQ ID NO: 89084 - DNA, 25 bp, Saccharomyces pastorianus
caggcctgggagaattgatcgtaaa

SEQ ID NO: 89085 - DNA, 25 bp, Saccharomyces pastorianus
ccagctggacgggttcgacgacaga

SEQ ID NO: 89086 - DNA, 25 bp, Saccharomyces pastorianus
tcaggcgccgatatccaggcaatgt

SEQ ID NO: 89087 - DNA, 25 bp, Saccharomyces pastorianus
aacatctgccacattcttaaggatt

SEQ ID NO: 89088 - DNA, 25 bp, Saccharomyces pastorianus
atgcaagttacagcggaggatttta

SEQ ID NO: 89089 - DNA, 25 bp, Saccharomyces pastorianus
ggccactaacaaaatcgagactctt

SEQ ID NO: 89090 - DNA, 25 bp, Saccharomyces pastorianus
gtgagaacgcaccaagtattgtatt

SEQ ID NO: 89091 - DNA, 25 bp, Saccharomyces pastorianus
tcgagactcttgacccagcattaat

SEQ ID NO: 89092 - DNA, 25 bp, Saccharomyces pastorianus
aaggatgatttgtcaggcgccgata

SEQ ID NO: 89093 - DNA, 25 bp, Saccharomyces pastorianus
gacaaatttttaatcctagcgtgtg

SEQ ID NO: 89094 - DNA, 25 bp, Saccharomyces pastorianus
atggatttagcccaacaccaaagaa

SEQ ID NO: 89095 - DNA, 25 bp, Saccharomyces pastorianus
atgtactgctgctgtttgcgtatta

SEQ ID NO: 89096 - DNA, 25 bp, Saccharomyces pastorianus
ggagcttccggattcagtttctgat

SEQ ID NO: 89097 - DNA, 25 bp, Saccharomyces pastorianus
cagcccatttaccacgagcgtagaa

SEQ ID NO: 89098 - DNA, 25 bp, Saccharomyces pastorianus
gaacgattcattcctagccattgac

SEQ ID NO: 89099 - DNA, 25 bp, Saccharomyces pastorianus
gatagtttagtagtgggcagcccat

SEQ ID NO: 89100 - DNA, 25 bp, Saccharomyces pastorianus
tatgctggcagtgacgagatcgtta

SEQ ID NO: 89101 - DNA, 25 bp, Saccharomyces pastorianus
gatcataaggcatctgacactttgg

SEQ ID NO: 89102 - DNA, 25 bp, Saccharomyces pastorianus
cagcaaatgttggtgattctcgaat

SEQ ID NO: 89103 - DNA, 25 bp, Saccharomyces pastorianus
ttgcgtattacgttgggagcttccg

SEQ ID NO: 89104 - DNA, 25 bp, Saccharomyces pastorianus
aataatgatttaccaacgaccgttg

SEQ ID NO: 89105 - DNA, 25 bp, Saccharomyces pastorianus
gtggacgaaaccaaaggctttgacg

SEQ ID NO: 89106 - DNA, 25 bp, Saccharomyces pastorianus
tggttttgactccacagccttcaat

SEQ ID NO: 89107 - DNA, 25 bp, Saccharomyces pastorianus
gaccgttgtttccaatcctggagat

SEQ ID NO: 89108 - DNA, 25 bp, Saccharomyces pastorianus
caatagcaccaagaacggcaaggat

SEQ ID NO: 89109 - DNA, 25 bp, Saccharomyces pastorianus
tatcgactggtcgaccactggagat

SEQ ID NO: 89110 - DNA, 25 bp, Saccharomyces pastorianus
tcctccagccgacaacggtgaagaa

SEQ ID NO: 89111 - DNA, 25 bp, Saccharomyces pastorianus
ggctttgacgataatgactcaggta

SEQ ID NO: 89112 - DNA, 25 bp, Saccharomyces pastorianus
aggccttgacagtactggttttgac

SEQ ID NO: 89113 - DNA, 25 bp, Saccharomyces pastorianus
ttcgatgttttcaggccttgacagt

SEQ ID NO: 89114 - DNA, 25 bp, Saccharomyces pastorianus
acagccttcaatgccacggtggacg

SEQ ID NO: 89115 - DNA, 25 bp, Saccharomyces pastorianus
gagatccgaatatgcccaagaggcc

SEQ ID NO: 89116 - DNA, 25 bp, Saccharomyces pastorianus
aaactgtgaggatccattgccgact

SEQ ID NO: 89117 - DNA, 25 bp, Saccharomyces pastorianus
ggcctccttcaaacaggaactattg

SEQ ID NO: 89118 - DNA, 25 bp, Saccharomyces pastorianus
ggaatccaggatagaacttgatcct

SEQ ID NO: 89119 - DNA, 25 bp, Saccharomyces pastorianus
gaacttgatcctgagttaaactgtg

SEQ ID NO: 89120 - DNA, 25 bp, Saccharomyces pastorianus
gtgaggatccattgccgactctggc

SEQ ID NO: 89121 - DNA, 25 bp, Saccharomyces pastorianus
gaatacggtgttttactggagaggt

SEQ ID NO: 89122 - DNA, 25 bp, Saccharomyces pastorianus
ggaactattgacgaaaccatttcga

SEQ ID NO: 89123 - DNA, 25 bp, Saccharomyces pastorianus
agactcaaattagaatacggtgttt

SEQ ID NO: 89124 - DNA, 25 bp, Saccharomyces pastorianus
aatccaaaggtcacgactttcggtg

SEQ ID NO: 89125 - DNA, 25 bp, Saccharomyces pastorianus
gactctggcctccttcaaacaggaa

SEQ ID NO: 89126 - DNA, 25 bp, Saccharomyces pastorianus
ggaagtcctaatatcggtgatcaat

SEQ ID NO: 89127 - DNA, 25 bp, Saccharomyces pastorianus
gactcgaggtcatttcagatcttct

SEQ ID NO: 89128 - DNA, 25 bp, Saccharomyces pastorianus
aacgattttattaccttgagagatg

SEQ ID NO: 89129 - DNA, 25 bp, Saccharomyces pastorianus
gtcagaaccacagttagaacccata

SEQ ID NO: 89130 - DNA, 25 bp, Saccharomyces pastorianus
tagaacccatataccaagcaacaag

SEQ ID NO: 89131 - DNA, 25 bp, Saccharomyces pastorianus
taaaactctctatctctcatgcaat

SEQ ID NO: 89132 - DNA, 25 bp, Saccharomyces pastorianus
acagctgggccattctcatgaagaa

SEQ ID NO: 89133 - DNA, 25 bp, Saccharomyces pastorianus
agagatcaatcagcgcgtttcactt

SEQ ID NO: 89134 - DNA, 25 bp, Saccharomyces pastorianus
tcagcgcgtttcacttttaaatcaa

SEQ ID NO: 89135 - DNA, 25 bp, Saccharomyces pastorianus
aaatttcacttttcgaagagcttgt

SEQ ID NO: 89136 - DNA, 25 bp, Saccharomyces pastorianus
ggatcagttttagactctccggaaa

SEQ ID NO: 89137 - DNA, 25 bp, Saccharomyces pastorianus
gagcgttctcgaggcccaatttcta

SEQ ID NO: 89138 - DNA, 25 bp, Saccharomyces pastorianus
gcattccaccaatatcattctttag

SEQ ID NO: 89139 - DNA, 25 bp, Saccharomyces pastorianus
acgaatccgcaactacattctgggc

SEQ ID NO: 89140 - DNA, 25 bp, Saccharomyces pastorianus
acagatcctcatcgtgttgaagcag

SEQ ID NO: 89141 - DNA, 25 bp, Saccharomyces pastorianus
ttagctgcatgtacggagcgttctc

SEQ ID NO: 89142 - DNA, 25 bp, Saccharomyces pastorianus
gcattatgggctggacttgccacga

SEQ ID NO: 89143 - DNA, 25 bp, Saccharomyces pastorianus
aagagcgcttggtgcttgcattcca

SEQ ID NO: 89144 - DNA, 25 bp, Saccharomyces pastorianus
gaaggcctccgttcttatggttatt

SEQ ID NO: 89145 - DNA, 25 bp, Saccharomyces pastorianus
ggtcaatgccagttacattcttggt

SEQ ID NO: 89146 - DNA, 25 bp, Saccharomyces pastorianus
aaattcttgcttgggaaggcctccg

SEQ ID NO: 89147 - DNA, 25 bp, Saccharomyces pastorianus
atttggttgggcaccccatcaaatt

SEQ ID NO: 89148 - DNA, 25 bp, Saccharomyces pastorianus
gaagataagaaacctgtcgtcgaca

SEQ ID NO: 89149 - DNA, 25 bp, Saccharomyces pastorianus
atcctctgctgtcttctccatgttt

SEQ ID NO: 89150 - DNA, 25 bp, Saccharomyces pastorianus
aaggaagaggctgctccaaagccac

SEQ ID NO: 89151 - DNA, 25 bp, Saccharomyces pastorianus
tgaaccagtggttcacctggaaaag

SEQ ID NO: 89152 - DNA, 25 bp, Saccharomyces pastorianus
gatgatgctccagaatcaccagata

SEQ ID NO: 89153 - DNA, 25 bp, Saccharomyces pastorianus
atagatcttgggtgtatgcttgtac

SEQ ID NO: 89154 - DNA, 25 bp, Saccharomyces pastorianus
agaatcaccagatatccattttgaa

SEQ ID NO: 89155 - DNA, 25 bp, Saccharomyces pastorianus
gcagaagccttcacttttgctatca

SEQ ID NO: 89156 - DNA, 25 bp, Saccharomyces pastorianus
gtatgcttgtacagcagatattgca

SEQ ID NO: 89157 - DNA, 25 bp, Saccharomyces pastorianus
gaccttaaagatttgtgctaaccac

SEQ ID NO: 89158 - DNA, 25 bp, Saccharomyces pastorianus
gaagcctaacgttggttctgataga

SEQ ID NO: 89159 - DNA, 25 bp, Saccharomyces pastorianus
gactgttgaatcttcttcctttgat

SEQ ID NO: 89160 - DNA, 25 bp, Saccharomyces pastorianus
gacttcaatctgctaagacccacta

SEQ ID NO: 89161 - DNA, 25 bp, Saccharomyces pastorianus
ataaagacttacagcgcccagtggc

SEQ ID NO: 89162 - DNA, 25 bp, Saccharomyces pastorianus
agcgccaccgcctttatcagaagaa

SEQ ID NO: 89163 - DNA, 25 bp, Saccharomyces pastorianus
atgatgatccatttagctcttcctc

SEQ ID NO: 89164 - DNA, 25 bp, Saccharomyces pastorianus
gccgtcgtacgaattcctagtgaaa

SEQ ID NO: 89165 - DNA, 25 bp, Saccharomyces pastorianus
gagcagatcgacttcctaatacata

SEQ ID NO: 89166 - DNA, 25 bp, Saccharomyces pastorianus
gaattatgggtcaagctccgattag

SEQ ID NO: 89167 - DNA, 25 bp, Saccharomyces pastorianus
gagcagcattctccgactgttgaat

SEQ ID NO: 89168 - DNA, 25 bp, Saccharomyces pastorianus
gcactccttatacttctgttttcaa

SEQ ID NO: 89169 - DNA, 25 bp, Saccharomyces pastorianus
acacagcgttgcgttgaagactatg

SEQ ID NO: 89170 - DNA, 25 bp, Saccharomyces pastorianus
tcgtttctttgaaagtcgcgattat

SEQ ID NO: 89171 - DNA, 25 bp, Saccharomyces pastorianus
ctttgaaagtcgcgattattccgag

SEQ ID NO: 89172 - DNA, 25 bp, Saccharomyces pastorianus
gaaaatagttataagagtgccgaaa

SEQ ID NO: 89173 - DNA, 25 bp, Saccharomyces pastorianus
tttcgtttctttgaaagtcgcgatt

SEQ ID NO: 89174 - DNA, 25 bp, Saccharomyces pastorianus
ttttcgtttctttgaaagtcgcgat

SEQ ID NO: 89175 - DNA, 25 bp, Saccharomyces pastorianus
acttgcggtatagaaaatagttata

SEQ ID NO: 89176 - DNA, 25 bp, Saccharomyces pastorianus
tttctttgaaagtcgcgattattcc

SEQ ID NO: 89177 - DNA, 25 bp, Saccharomyces pastorianus
ttcgtttctttgaaagtcgcgatta

SEQ ID NO: 89178 - DNA, 25 bp, Saccharomyces pastorianus
cgtttctttgaaagtcgcgattatt

SEQ ID NO: 89179 - DNA, 25 bp, Saccharomyces pastorianus
gtttctttgaaagtcgcgattattc

SEQ ID NO: 89180 - DNA, 25 bp, Saccharomyces pastorianus
ttctttgaaagtcgcgattattccg

SEQ ID NO: 89181 - DNA, 25 bp, Saccharomyces pastorianus
tggtatattccacattcgctaagcc

SEQ ID NO: 89182 - DNA, 25 bp, Saccharomyces pastorianus
tcattatccgttgtggtggctaatc

SEQ ID NO: 89183 - DNA, 25 bp, Saccharomyces pastorianus
gaactcaaccattctttatcggcag

SEQ ID NO: 89184 - DNA, 25 bp, Saccharomyces pastorianus
attcgctaagcctggtcaaattgca

SEQ ID NO: 89185 - DNA, 25 bp, Saccharomyces pastorianus
aggtgattcggcaagcttctggcaa

SEQ ID NO: 89186 - DNA, 25 bp, Saccharomyces pastorianus
gagcgaaattcatcaagtcctatca

SEQ ID NO: 89187 - DNA, 25 bp, Saccharomyces pastorianus
gagaagctccaaatactggcccacg

SEQ ID NO: 89188 - DNA, 25 bp, Saccharomyces pastorianus
actggcccacgattattcattatcc

SEQ ID NO: 89189 - DNA, 25 bp, Saccharomyces pastorianus
gacttggtccaatcacgtttcaaca

SEQ ID NO: 89190 - DNA, 25 bp, Saccharomyces pastorianus
gtgtccccaatctcggtttgacttg

SEQ ID NO: 89191 - DNA, 25 bp, Saccharomyces pastorianus
ggaaatttgactatcgtgtccccaa

SEQ ID NO: 89192 - DNA, 25 bp, Saccharomyces pastorianus
atctaagcgcatcaccaacattttc

SEQ ID NO: 89193 - DNA, 25 bp, Saccharomyces pastorianus
aggcctgcaggcaagtgcacaaaca

SEQ ID NO: 89194 - DNA, 25 bp, Saccharomyces pastorianus
agatcttttatgcttgcttttcaaa

SEQ ID NO: 89195 - DNA, 25 bp, Saccharomyces pastorianus
accaacattttctggcgtcagtcca

SEQ ID NO: 89196 - DNA, 25 bp, Saccharomyces pastorianus
cgtcagtccaccagctaacataaaa

SEQ ID NO: 89197 - DNA, 25 bp, Saccharomyces pastorianus
gtcagaaatcgagttccaatccaaa

SEQ ID NO: 89198 - DNA, 25 bp, Saccharomyces pastorianus
ttgcttttcaaaaggcctgcaggca

SEQ ID NO: 89199 - DNA, 25 bp, Saccharomyces pastorianus
agtcttttacaccatttgtctccac

SEQ ID NO: 89200 - DNA, 25 bp, Saccharomyces pastorianus
aacctatttcttagcatttttgacg

SEQ ID NO: 89201 - DNA, 25 bp, Saccharomyces pastorianus
tccgcttacatcaacaccaataacg

SEQ ID NO: 89202 - DNA, 25 bp, Saccharomyces pastorianus
tgccttccaacccagtcagaaatcg

SEQ ID NO: 89203 - DNA, 25 bp, Saccharomyces pastorianus
gagatgtctcttagcataccaaagg

SEQ ID NO: 89204 - DNA, 25 bp, Saccharomyces pastorianus
tagtgcctccgagcgatgtatttat

SEQ ID NO: 89205 - DNA, 25 bp, Saccharomyces pastorianus
taaggcagtctgatgtagagcgttt

SEQ ID NO: 89206 - DNA, 25 bp, Saccharomyces pastorianus
agactcccagtttttcgtaaggcag

SEQ ID NO: 89207 - DNA, 25 bp, Saccharomyces pastorianus
tgaatacggcgtgtttaaccttatt

SEQ ID NO: 89208 - DNA, 25 bp, Saccharomyces pastorianus
tgatttatccggctctttagtgcct

SEQ ID NO: 89209 - DNA, 25 bp, Saccharomyces pastorianus
aatggtctggacttgatgagtagca

SEQ ID NO: 89210 - DNA, 25 bp, Saccharomyces pastorianus
ggtgacttggtcgatattgatttat

SEQ ID NO: 89211 - DNA, 25 bp, Saccharomyces pastorianus
ggttgaggacagacatactagattc

SEQ ID NO: 89212 - DNA, 25 bp, Saccharomyces pastorianus
aatgccagtatttcgttaccttgtt

SEQ ID NO: 89213 - DNA, 25 bp, Saccharomyces pastorianus
gagtagcattacgtttagccaacaa

SEQ ID NO: 89214 - DNA, 25 bp, Saccharomyces pastorianus
gttctacccgattgaacttgccaaa

SEQ ID NO: 89215 - DNA, 25 bp, Saccharomyces pastorianus
gcctatcggactggctgctagagac

SEQ ID NO: 89216 - DNA, 25 bp, Saccharomyces pastorianus
atcaggtagtgcatctccaacttta

SEQ ID NO: 89217 - DNA, 25 bp, Saccharomyces pastorianus
gtactggttcaatggctatgccaag

SEQ ID NO: 89218 - DNA, 25 bp, Saccharomyces pastorianus
agtttgcggagcaactcctggccaa

SEQ ID NO: 89219 - DNA, 25 bp, Saccharomyces pastorianus
gaggtcggccttgttacatcaggta

SEQ ID NO: 89220 - DNA, 25 bp, Saccharomyces pastorianus
ttcttgcccgatgccgaaacagagg

SEQ ID NO: 89221 - DNA, 25 bp, Saccharomyces pastorianus
gtatcacaccagtagaagctgcgtt

SEQ ID NO: 89222 - DNA, 25 bp, Saccharomyces pastorianus
gctgcgttaaactgggtgatttcaa

SEQ ID NO: 89223 - DNA, 25 bp, Saccharomyces pastorianus
gacggttctttggttcaaattgcta

SEQ ID NO: 89224 - DNA, 25 bp, Saccharomyces pastorianus
gggccagctgccagaaatggtgtca

SEQ ID NO: 89225 - DNA, 25 bp, Saccharomyces pastorianus
attcaacatgattacgaggacccga

SEQ ID NO: 89226 - DNA, 25 bp, Saccharomyces pastorianus
aaagtattcttggatagcgatgcag

SEQ ID NO: 89227 - DNA, 25 bp, Saccharomyces pastorianus
ggagcaattgcactggatttacaaa

SEQ ID NO: 89228 - DNA, 25 bp, Saccharomyces pastorianus
gagcccactagaacttttgcagatt

SEQ ID NO: 89229 - DNA, 25 bp, Saccharomyces pastorianus
tgagtatatggaccatctgcgcccg

SEQ ID NO: 89230 - DNA, 25 bp, Saccharomyces pastorianus
aatgaaaatctagggcgcgcagtcc

SEQ ID NO: 89231 - DNA, 25 bp, Saccharomyces pastorianus
ggagcaatgaacaactagcccagct

SEQ ID NO: 89232 - DNA, 25 bp, Saccharomyces pastorianus
cgcagtcctcgtggacggtatagtt

SEQ ID NO: 89233 - DNA, 25 bp, Saccharomyces pastorianus
gaaaagcacgctgtaacttctcaaa

SEQ ID NO: 89234 - DNA, 25 bp, Saccharomyces pastorianus
tagcccagctgatcactgagtatat

SEQ ID NO: 89235 - DNA, 25 bp, Saccharomyces pastorianus
tatgtggctgttatgcgctatacga

SEQ ID NO: 89236 - DNA, 25 bp, Saccharomyces pastorianus
taggacaaatagtctcagcttggag

SEQ ID NO: 89237 - DNA, 25 bp, Saccharomyces pastorianus
tgaatcaaagagcacggaccgaagt

SEQ ID NO: 89238 - DNA, 25 bp, Saccharomyces pastorianus
agtggactcggacattgagctcgat

SEQ ID NO: 89239 - DNA, 25 bp, Saccharomyces pastorianus
gcgaccaatatgagcttttgtcaca

SEQ ID NO: 89240 - DNA, 25 bp, Saccharomyces pastorianus
tctccttttcttcgcgatttgagtt

SEQ ID NO: 89241 - DNA, 25 bp, Saccharomyces pastorianus
ggatatcacactaatcagcgaccaa

SEQ ID NO: 89242 - DNA, 25 bp, Saccharomyces pastorianus
gtgattatgcaatgtttcccactaa

SEQ ID NO: 89243 - DNA, 25 bp, Saccharomyces pastorianus
acaattttgcgatctgtctcctttt

SEQ ID NO: 89244 - DNA, 25 bp, Saccharomyces pastorianus
aatcgggatctcttgaggatatcac

SEQ ID NO: 89245 - DNA, 25 bp, Saccharomyces pastorianus
gattcaagtgatgctgctttgacag

SEQ ID NO: 89246 - DNA, 25 bp, Saccharomyces pastorianus
aagggtcccagcaacgatgatcaac

SEQ ID NO: 89247 - DNA, 25 bp, Saccharomyces pastorianus
gagaatattgcatgaccatccgaca

SEQ ID NO: 89248 - DNA, 25 bp, Saccharomyces pastorianus
gtgtttctgcctaagtttacgcgga

SEQ ID NO: 89249 - DNA, 25 bp, Saccharomyces pastorianus
tcactcgcttggaccggatgggctt

SEQ ID NO: 89250 - DNA, 25 bp, Saccharomyces pastorianus
aaaattcatactgtctcactcgctt

SEQ ID NO: 89251 - DNA, 25 bp, Saccharomyces pastorianus
agcctttaccaatcgatagtgttca

SEQ ID NO: 89252 - DNA, 25 bp, Saccharomyces pastorianus
attccaggccaacccaagtaagtcg

SEQ ID NO: 89253 - DNA, 25 bp, Saccharomyces pastorianus
acaaatagttccctcataacccaga

SEQ ID NO: 89254 - DNA, 25 bp, Saccharomyces pastorianus
tcaaatattgttccgcgggtacgcg

SEQ ID NO: 89255 - DNA, 25 bp, Saccharomyces pastorianus
ggaaggcttccacaattatgcactt

SEQ ID NO: 89256 - DNA, 25 bp, Saccharomyces pastorianus
agtgttcatcgcacgtaatgttgtt

SEQ ID NO: 89257 - DNA, 25 bp, Saccharomyces pastorianus
cgcgacactattcccagctaataat

SEQ ID NO: 89258 - DNA, 25 bp, Saccharomyces pastorianus
tgcaaaaggcttgtcacacaatctc

SEQ ID NO: 89259 - DNA, 25 bp, Saccharomyces pastorianus
agctttcgtttgaaatcgcgtctcc

SEQ ID NO: 89260 - DNA, 25 bp, Saccharomyces pastorianus
ctatatggtatattctcctgttttc

SEQ ID NO: 89261 - DNA, 25 bp, Saccharomyces pastorianus
gttctgtcttgcaaaaggcttgtca

SEQ ID NO: 89262 - DNA, 25 bp, Saccharomyces pastorianus
aatttcagcgataaccctttctcaa

SEQ ID NO: 89263 - DNA, 25 bp, Saccharomyces pastorianus
atatttgtctattcttcttttatgg

SEQ ID NO: 89264 - DNA, 25 bp, Saccharomyces pastorianus
ctaactctagttgtgatattttctc

SEQ ID NO: 89265 - DNA, 25 bp, Saccharomyces pastorianus
gtgatattttctctttctatttaaa

SEQ ID NO: 89266 - DNA, 25 bp, Saccharomyces pastorianus
tatattctcctgttttctccttttt

SEQ ID NO: 89267 - DNA, 25 bp, Saccharomyces pastorianus
ttcttttatggcttcttgttctcct

SEQ ID NO: 89268 - DNA, 25 bp, Saccharomyces pastorianus
tgttctcctgttctgtcttgcaaaa

SEQ ID NO: 89269 - DNA, 25 bp, Saccharomyces pastorianus
actgtttgttggttgatcgctgcct

SEQ ID NO: 89270 - DNA, 25 bp, Saccharomyces pastorianus
aattgctaaccacttcggtgctgac

SEQ ID NO: 89271 - DNA, 25 bp, Saccharomyces pastorianus
gtctaggtgctgctattgtcgttag

SEQ ID NO: 89272 - DNA, 25 bp, Saccharomyces pastorianus
agtgatggctccaaaagctcctgtt

SEQ ID NO: 89273 - DNA, 25 bp, Saccharomyces pastorianus
ttattgcttacccaacttgtttcgg

SEQ ID NO: 89274 - DNA, 25 bp, Saccharomyces pastorianus
aaatctgtatgctagctggtacccc

SEQ ID NO: 89275 - DNA, 25 bp, Saccharomyces pastorianus
aaagctcctgttgctagtccaagac

SEQ ID NO: 89276 - DNA, 25 bp, Saccharomyces pastorianus
tgggctaccatttcggacctagtga

SEQ ID NO: 89277 - DNA, 25 bp, Saccharomyces pastorianus
acattccttgtcttcttcagcatta

SEQ ID NO: 89278 - DNA, 25 bp, Saccharomyces pastorianus
gactctgccggtattttctatggta

SEQ ID NO: 89279 - DNA, 25 bp, Saccharomyces pastorianus
tggttcttagctttgccatggccaa

SEQ ID NO: 89280 - DNA, 25 bp, Saccharomyces pastorianus
ctcatcatttgtgtcatcttctaac

SEQ ID NO: 89281 - DNA, 25 bp, Saccharomyces pastorianus
tacatgctaatattacgatcattcc

SEQ ID NO: 89282 - DNA, 25 bp, Saccharomyces pastorianus
ccttgcgtttcagtttccactaatt

SEQ ID NO: 89283 - DNA, 25 bp, Saccharomyces pastorianus
gtttccactaatttagatgactatt

SEQ ID NO: 89284 - DNA, 25 bp, Saccharomyces pastorianus
catgctaatattacgatcattcctc

SEQ ID NO: 89285 - DNA, 25 bp, Saccharomyces pastorianus
tctacatgctaatattacgatcatt

SEQ ID NO: 89286 - DNA, 25 bp, Saccharomyces pastorianus
ttctcatcatttgtgtcatcttcta

SEQ ID NO: 89287 - DNA, 25 bp, Saccharomyces pastorianus
tgcgtttcagtttccactaatttag

SEQ ID NO: 89288 - DNA, 25 bp, Saccharomyces pastorianus
ctacatgctaatattacgatcattc

SEQ ID NO: 89289 - DNA, 25 bp, Saccharomyces pastorianus
acatgctaatattacgatcattcct

SEQ ID NO: 89290 - DNA, 25 bp, Saccharomyces pastorianus
gtttcagtttccactaatttagatg

SEQ ID NO: 89291 - DNA, 25 bp, Saccharomyces pastorianus
aacagcctcctcctcggagagaatc

SEQ ID NO: 89292 - DNA, 25 bp, Saccharomyces pastorianus
gagaatccggtggttgctgtagaac

SEQ ID NO: 89293 - DNA, 25 bp, Saccharomyces pastorianus
tgtagaacctgttgtcacttcctat

SEQ ID NO: 89294 - DNA, 25 bp, Saccharomyces pastorianus
gttgctgtagaacctgttgtcactt

SEQ ID NO: 89295 - DNA, 25 bp, Saccharomyces pastorianus
ctgttgtcacttcctatgttgtcta

SEQ ID NO: 89296 - DNA, 25 bp, Saccharomyces pastorianus
atgaggcatcatcaaaatatgcatt

SEQ ID NO: 89297 - DNA, 25 bp, Saccharomyces pastorianus
aacctgttgtcacttcctatgttgt

SEQ ID NO: 89298 - DNA, 25 bp, Saccharomyces pastorianus
atccggtggttgctgtagaacctgt

SEQ ID NO: 89299 - DNA, 25 bp, Saccharomyces pastorianus
tcctcctcggagagaatccggtggt

SEQ ID NO: 89300 - DNA, 25 bp, Saccharomyces pastorianus
tagaacctgttgtcacttcctatgt

SEQ ID NO: 89301 - DNA, 25 bp, Saccharomyces pastorianus
aaatatgcattatgccccacaacaa

SEQ ID NO: 89302 - DNA, 25 bp, Saccharomyces pastorianus
gcctacactgaattgaacgatccat

SEQ ID NO: 89303 - DNA, 25 bp, Saccharomyces pastorianus
gatcaattacatacagctgagactg

SEQ ID NO: 89304 - DNA, 25 bp, Saccharomyces pastorianus
gttcccatctggtgatcaattacat

SEQ ID NO: 89305 - DNA, 25 bp, Saccharomyces pastorianus
gatgaaaccttctgtaatgctctag

SEQ ID NO: 89306 - DNA, 25 bp, Saccharomyces pastorianus
atgttagataagcttgtcggtgaat

SEQ ID NO: 89307 - DNA, 25 bp, Saccharomyces pastorianus
ggaaatttgtaatgcctacactgaa

SEQ ID NO: 89308 - DNA, 25 bp, Saccharomyces pastorianus
ttttggccaccctcaaatgatgtct

SEQ ID NO: 89309 - DNA, 25 bp, Saccharomyces pastorianus
caaattagaatgtccacctccacta

SEQ ID NO: 89310 - DNA, 25 bp, Saccharomyces pastorianus
gcgtttcgaggtctttgtagctaca

SEQ ID NO: 89311 - DNA, 25 bp, Saccharomyces pastorianus
ggtattcaacgttaagttcccatct

SEQ ID NO: 89312 - DNA, 25 bp, Saccharomyces pastorianus
gaagctcaattagtcgatgaaacct

SEQ ID NO: 89313 - DNA, 25 bp, Saccharomyces pastorianus
tgggtatcccattgacaggtcctaa

SEQ ID NO: 89314 - DNA, 25 bp, Saccharomyces pastorianus
tacgaaccccgaagtgctacagatg

SEQ ID NO: 89315 - DNA, 25 bp, Saccharomyces pastorianus
tcctaaacctttgcccacgagaaga

SEQ ID NO: 89316 - DNA, 25 bp, Saccharomyces pastorianus
taaaatcacctttcgtgcacgctaa

SEQ ID NO: 89317 - DNA, 25 bp, Saccharomyces pastorianus
gacgccaatggcctcgaaaaatcac

SEQ ID NO: 89318 - DNA, 25 bp, Saccharomyces pastorianus
gacgcgcccatatcctgtaaatgta

SEQ ID NO: 89319 - DNA, 25 bp, Saccharomyces pastorianus
gaaaacctcgatttttattcagact

SEQ ID NO: 89320 - DNA, 25 bp, Saccharomyces pastorianus
gctcaaactagtgctgtcggacaaa

SEQ ID NO: 89321 - DNA, 25 bp, Saccharomyces pastorianus
gaggcagtctactatgctcctttaa

SEQ ID NO: 89322 - DNA, 25 bp, Saccharomyces pastorianus
aatatcgctggacttgggttcggac

SEQ ID NO: 89323 - DNA, 25 bp, Saccharomyces pastorianus
gaagcactctatggcaggcgtcgga

SEQ ID NO: 89324 - DNA, 25 bp, Saccharomyces pastorianus
cagacgctactaccagttctaacta

SEQ ID NO: 89325 - DNA, 25 bp, Saccharomyces pastorianus
acatcgggtcatttagcaaggcata

SEQ ID NO: 89326 - DNA, 25 bp, Saccharomyces pastorianus
gaagcgtctcttttgacaattcatc

SEQ ID NO: 89327 - DNA, 25 bp, Saccharomyces pastorianus
gaggattcactacatcgggtcattt

SEQ ID NO: 89328 - DNA, 25 bp, Saccharomyces pastorianus
atgcacgcagcgattcagtcgacat

SEQ ID NO: 89329 - DNA, 25 bp, Saccharomyces pastorianus
ttgtccgtataagggatgcacgcag

SEQ ID NO: 89330 - DNA, 25 bp, Saccharomyces pastorianus
agactgcttttgatttccgatacca

SEQ ID NO: 89331 - DNA, 25 bp, Saccharomyces pastorianus
gatactctctgaaaacgcggaagca

SEQ ID NO: 89332 - DNA, 25 bp, Saccharomyces pastorianus
aagctcgctatcacaactaacttgt

SEQ ID NO: 89333 - DNA, 25 bp, Saccharomyces pastorianus
aaatttgcgcaagaggattcactac

SEQ ID NO: 89334 - DNA, 25 bp, Saccharomyces pastorianus
ggagccaaaatacttaataacgcct

SEQ ID NO: 89335 - DNA, 25 bp, Saccharomyces pastorianus
ggatgccttggacaagcacgacact

SEQ ID NO: 89336 - DNA, 25 bp, Saccharomyces pastorianus
gatgagtacttctacattacccacc

SEQ ID NO: 89337 - DNA, 25 bp, Saccharomyces pastorianus
gaagacggtcaattattccaccaac

SEQ ID NO: 89338 - DNA, 25 bp, Saccharomyces pastorianus
ttattccaccaactgcacaaggatg

SEQ ID NO: 89339 - DNA, 25 bp, Saccharomyces pastorianus
ttgccatcctacttgactatcgtca

SEQ ID NO: 89340 - DNA, 25 bp, Saccharomyces pastorianus
acgacactgctttgtacccacgttt

SEQ ID NO: 89341 - DNA, 25 bp, Saccharomyces pastorianus
acgtggtattggtggtatattcttt

SEQ ID NO: 89342 - DNA, 25 bp, Saccharomyces pastorianus
ttcatggttatacaaccaccaccct

SEQ ID NO: 89343 - DNA, 25 bp, Saccharomyces pastorianus
gatgagtttgcctgaacatgcttca

SEQ ID NO: 89344 - DNA, 25 bp, Saccharomyces pastorianus
ttggaaccaagatgggaccccacaa

SEQ ID NO: 89345 - DNA, 25 bp, Saccharomyces pastorianus
gtttcgatgctttcttgccatccta

SEQ ID NO: 89346 - DNA, 25 bp, Saccharomyces pastorianus
gaaaggtgatatgcattctcattta

SEQ ID NO: 89347 - DNA, 25 bp, Saccharomyces pastorianus
attggaagcttgtcaacaggcgtgc

SEQ ID NO: 89348 - DNA, 25 bp, Saccharomyces pastorianus
gaattcagaagttgctcagacaaat

SEQ ID NO: 89349 - DNA, 25 bp, Saccharomyces pastorianus
ggagtcaaagctcatcaatttcaat

SEQ ID NO: 89350 - DNA, 25 bp, Saccharomyces pastorianus
caacttctcgcagtgtggagtcaaa

SEQ ID NO: 89351 - DNA, 25 bp, Saccharomyces pastorianus
agtgagccagtcattttactcgcct

SEQ ID NO: 89352 - DNA, 25 bp, Saccharomyces pastorianus
agatcattcttttttagtgagccag

SEQ ID NO: 89353 - DNA, 25 bp, Saccharomyces pastorianus
atgtcttctctacttcaacttctcg

SEQ ID NO: 89354 - DNA, 25 bp, Saccharomyces pastorianus
aacaggcgtgcagatcttttgaaaa

SEQ ID NO: 89355 - DNA, 25 bp, Saccharomyces pastorianus
accttcatcttttattttcttctat

SEQ ID NO: 89356 - DNA, 25 bp, Saccharomyces pastorianus
attttactcgccttttgtgaattca

SEQ ID NO: 89357 - DNA, 25 bp, Saccharomyces pastorianus
aatctcggagagtctttcactaatt

SEQ ID NO: 89358 - DNA, 25 bp, Saccharomyces pastorianus
atcggtcagccattgagcagagaac

SEQ ID NO: 89359 - DNA, 25 bp, Saccharomyces pastorianus
ggcaccgttattgatatccttctta

SEQ ID NO: 89360 - DNA, 25 bp, Saccharomyces pastorianus
gttaaccaatattccttcaattcag

SEQ ID NO: 89361 - DNA, 25 bp, Saccharomyces pastorianus
cttaacccctaccatgttacattat

SEQ ID NO: 89362 - DNA, 25 bp, Saccharomyces pastorianus
gacgaaactcatatcggtcagccat

SEQ ID NO: 89363 - DNA, 25 bp, Saccharomyces pastorianus
gttacattatgcatcgcagcaaggg

SEQ ID NO: 89364 - DNA, 25 bp, Saccharomyces pastorianus
cagatggcactgattttgctctcaa

SEQ ID NO: 89365 - DNA, 25 bp, Saccharomyces pastorianus
tgaccgatgaacagagacgcagatt

SEQ ID NO: 89366 - DNA, 25 bp, Saccharomyces pastorianus
tgagagtaaatattccttaacccct

SEQ ID NO: 89367 - DNA, 25 bp, Saccharomyces pastorianus
gagacacgcgtttcaaattgcaaga

SEQ ID NO: 89368 - DNA, 25 bp, Saccharomyces pastorianus
gaaaactccgttgaacaaatcaagg

SEQ ID NO: 89369 - DNA, 25 bp, Saccharomyces pastorianus
cattgctgacaagaccaagttcgct

SEQ ID NO: 89370 - DNA, 25 bp, Saccharomyces pastorianus
gttgtcctgggtcactctgaaagaa

SEQ ID NO: 89371 - DNA, 25 bp, Saccharomyces pastorianus
cagtctgggccattggtaccggttt

SEQ ID NO: 89372 - DNA, 25 bp, Saccharomyces pastorianus
atgttggtgctaagtgggttgtcct

SEQ ID NO: 89373 - DNA, 25 bp, Saccharomyces pastorianus
cggtgcccaaaacgcctacttgaag

SEQ ID NO: 89374 - DNA, 25 bp, Saccharomyces pastorianus
acaagtcactgtcggtgcccaaaac

SEQ ID NO: 89375 - DNA, 25 bp, Saccharomyces pastorianus
acttgaaggcttccggtgcttacac

SEQ ID NO: 89376 - DNA, 25 bp, Saccharomyces pastorianus
gtgcttacactggtgaaaactccgt

SEQ ID NO: 89377 - DNA, 25 bp, Saccharomyces pastorianus
agaagccacaagtcactgtcggtgc

SEQ ID NO: 89378 - DNA, 25 bp, Saccharomyces pastorianus
gaagatgacaagttcattgctgaca

SEQ ID NO: 89379 - DNA, 25 bp, Saccharomyces pastorianus
gaagcctggaaaatgttatctgcaa

SEQ ID NO: 89380 - DNA, 25 bp, Saccharomyces pastorianus
taccaatgttcccaacgggagcgta

SEQ ID NO: 89381 - DNA, 25 bp, Saccharomyces pastorianus
tcttcttcagattccctcatggaga

SEQ ID NO: 89382 - DNA, 25 bp, Saccharomyces pastorianus
acccagagatgttgttgtcctagtt

SEQ ID NO: 89383 - DNA, 25 bp, Saccharomyces pastorianus
gttgtcctagttacacatggtattt

SEQ ID NO: 89384 - DNA, 25 bp, Saccharomyces pastorianus
aaacatgcattttggccgagaggac

SEQ ID NO: 89385 - DNA, 25 bp, Saccharomyces pastorianus
tcctgaggaccgtgctacccaaatg

SEQ ID NO: 89386 - DNA, 25 bp, Saccharomyces pastorianus
tccctcatggagaaagtgcggcaga

SEQ ID NO: 89387 - DNA, 25 bp, Saccharomyces pastorianus
gatctacgtatggtcatttcttctt

SEQ ID NO: 89388 - DNA, 25 bp, Saccharomyces pastorianus
gaatccatcaatagatacgtcctga

SEQ ID NO: 89389 - DNA, 25 bp, Saccharomyces pastorianus
tattcaggcacttccatgataggca

SEQ ID NO: 89390 - DNA, 25 bp, Saccharomyces pastorianus
aagtggcccgctgctgtagttgatg

SEQ ID NO: 89391 - DNA, 25 bp, Saccharomyces pastorianus
gcgagaatctcttttcattatcttt

SEQ ID NO: 89392 - DNA, 25 bp, Saccharomyces pastorianus
agacccgtacctttgctgacttgga

SEQ ID NO: 89393 - DNA, 25 bp, Saccharomyces pastorianus
cattccagcaattccttaggcgtaa

SEQ ID NO: 89394 - DNA, 25 bp, Saccharomyces pastorianus
ttaggcgtaacccttggctcgacat

SEQ ID NO: 89395 - DNA, 25 bp, Saccharomyces pastorianus
taacggagaccttattatcattttc

SEQ ID NO: 89396 - DNA, 25 bp, Saccharomyces pastorianus
tggctcgacatttttcagacccgta

SEQ ID NO: 89397 - DNA, 25 bp, Saccharomyces pastorianus
tggcccttttcttttcatgcaaatg

SEQ ID NO: 89398 - DNA, 25 bp, Saccharomyces pastorianus
ttggtatctgtttcctttaacggag

SEQ ID NO: 89399 - DNA, 25 bp, Saccharomyces pastorianus
gttgatgcggcaattccattattat

SEQ ID NO: 89400 - DNA, 25 bp, Saccharomyces pastorianus
gaaaacacattcaagtggcccgctg

SEQ ID NO: 89401 - DNA, 25 bp, Saccharomyces pastorianus
gaacttgtcgttctctaatttgtca

SEQ ID NO: 89402 - DNA, 25 bp, Saccharomyces pastorianus
cctccttgaacctagactctttgaa

SEQ ID NO: 89403 - DNA, 25 bp, Saccharomyces pastorianus
atggtgcatcatccacatctgttaa

SEQ ID NO: 89404 - DNA, 25 bp, Saccharomyces pastorianus
gaagttcacttctggcgatatcaag

SEQ ID NO: 89405 - DNA, 25 bp, Saccharomyces pastorianus
agtgtttctagttctagcgcttcca

SEQ ID NO: 89406 - DNA, 25 bp, Saccharomyces pastorianus
cattggccaaaccttcagtatcgtt

SEQ ID NO: 89407 - DNA, 25 bp, Saccharomyces pastorianus
ggtgctcttgtcgtcgctaataaca

SEQ ID NO: 89408 - DNA, 25 bp, Saccharomyces pastorianus
aaggtttccaagtcatcttctaagg

SEQ ID NO: 89409 - DNA, 25 bp, Saccharomyces pastorianus
attggtggtctcgacaacctaacaa

SEQ ID NO: 89410 - DNA, 25 bp, Saccharomyces pastorianus
ttgttggtaacttcacctccttgaa

SEQ ID NO: 89411 - DNA, 25 bp, Saccharomyces pastorianus
tgttaaactatcgtccacttccaaa

SEQ ID NO: 89412 - DNA, 25 bp, Saccharomyces pastorianus
agatatccagaagcgggacctactg

SEQ ID NO: 89413 - DNA, 25 bp, Saccharomyces pastorianus
gagactaacgatgctattactgcta

SEQ ID NO: 89414 - DNA, 25 bp, Saccharomyces pastorianus
ggtcaaacaagtgtcgctatcctat

SEQ ID NO: 89415 - DNA, 25 bp, Saccharomyces pastorianus
gacctactgcgccagtcactaaatt

SEQ ID NO: 89416 - DNA, 25 bp, Saccharomyces pastorianus
gagaatactgtttgaatgcccagat

SEQ ID NO: 89417 - DNA, 25 bp, Saccharomyces pastorianus
gctggatatgccatgttttagctac

SEQ ID NO: 89418 - DNA, 25 bp, Saccharomyces pastorianus
tgcgaaagacgctatacccctagga

SEQ ID NO: 89419 - DNA, 25 bp, Saccharomyces pastorianus
tttacaattttgttgcgggctcagc

SEQ ID NO: 89420 - DNA, 25 bp, Saccharomyces pastorianus
gttgcgtgtgattttattggccagc

SEQ ID NO: 89421 - DNA, 25 bp, Saccharomyces pastorianus
gctacatgaagctgaggacaccact

SEQ ID NO: 89422 - DNA, 25 bp, Saccharomyces pastorianus
ggccagcatggttttctgtgctgat

SEQ ID NO: 89423 - DNA, 25 bp, Saccharomyces pastorianus
atgtcatcacccgaattacacgcaa

SEQ ID NO: 89424 - DNA, 25 bp, Saccharomyces pastorianus
gcggaacatccccaatcgtggaatt

SEQ ID NO: 89425 - DNA, 25 bp, Saccharomyces pastorianus
aagacgccgatagtgttttatttga

SEQ ID NO: 89426 - DNA, 25 bp, Saccharomyces pastorianus
gcacacgttgccgaagagacaccaa

SEQ ID NO: 89427 - DNA, 25 bp, Saccharomyces pastorianus
gaacagttgtccgtaagtgaccaga

SEQ ID NO: 89428 - DNA, 25 bp, Saccharomyces pastorianus
gaccttattatctttgcttacggcg

SEQ ID NO: 89429 - DNA, 25 bp, Saccharomyces pastorianus
tgaggcgtcctccaacaattaccta

SEQ ID NO: 89430 - DNA, 25 bp, Saccharomyces pastorianus
gagtggcctggaacagtccttgtag

SEQ ID NO: 89431 - DNA, 25 bp, Saccharomyces pastorianus
gcaactggctatcatgaggcgtcct

SEQ ID NO: 89432 - DNA, 25 bp, Saccharomyces pastorianus
ttacctacccatatggaagcgcttg

SEQ ID NO: 89433 - DNA, 25 bp, Saccharomyces pastorianus
taatggcgtcccacgaagaacaggt

SEQ ID NO: 89434 - DNA, 25 bp, Saccharomyces pastorianus
actgtattgtccctcaaagatgccc

SEQ ID NO: 89435 - DNA, 25 bp, Saccharomyces pastorianus
tatagtgagtcaatgccggctcctg

SEQ ID NO: 89436 - DNA, 25 bp, Saccharomyces pastorianus
tgctactccgctgatcgaatcaaga

SEQ ID NO: 89437 - DNA, 25 bp, Saccharomyces pastorianus
gattctgtatgtctgcatctttaac

SEQ ID NO: 89438 - DNA, 25 bp, Saccharomyces pastorianus
tgactcaccagttattcccttacta

SEQ ID NO: 89439 - DNA, 25 bp, Saccharomyces pastorianus
tagtggtgaaatatgtcccggacaa

SEQ ID NO: 89440 - DNA, 25 bp, Saccharomyces pastorianus
aattccggcaaatccagttacgacg

SEQ ID NO: 89441 - DNA, 25 bp, Saccharomyces pastorianus
tagcctttaattcccgttatctacg

SEQ ID NO: 89442 - DNA, 25 bp, Saccharomyces pastorianus
cactaagtcgtttggtgctgctggt

SEQ ID NO: 89443 - DNA, 25 bp, Saccharomyces pastorianus
attgtctacggtgtggctgactcac

SEQ ID NO: 89444 - DNA, 25 bp, Saccharomyces pastorianus
aatgccggctcctgttttagctcaa

SEQ ID NO: 89445 - DNA, 25 bp, Saccharomyces pastorianus
aaccgtcctatgagataattgtcga

SEQ ID NO: 89446 - DNA, 25 bp, Saccharomyces pastorianus
gaattagccgagatcctacctgata

SEQ ID NO: 89447 - DNA, 25 bp, Saccharomyces pastorianus
ggcaagaaccgactccataaaagct

SEQ ID NO: 89448 - DNA, 25 bp, Saccharomyces pastorianus
gatcgaaccaaaaccgtcctatgag

SEQ ID NO: 89449 - DNA, 25 bp, Saccharomyces pastorianus
gatgggttcaaacagactcccttag

SEQ ID NO: 89450 - DNA, 25 bp, Saccharomyces pastorianus
gatcctacctgataactcacctaga

SEQ ID NO: 89451 - DNA, 25 bp, Saccharomyces pastorianus
atgtcgaacctctacaaaattggaa

SEQ ID NO: 89452 - DNA, 25 bp, Saccharomyces pastorianus
gactcccttagttctggtatattgg

SEQ ID NO: 89453 - DNA, 25 bp, Saccharomyces pastorianus
gaagatgctttatgccggcgcatta

SEQ ID NO: 89454 - DNA, 25 bp, Saccharomyces pastorianus
agaggtttcttcaggtttggaggat

SEQ ID NO: 89455 - DNA, 25 bp, Saccharomyces pastorianus
gatttgtactaactgcatatccaac

SEQ ID NO: 89456 - DNA, 25 bp, Saccharomyces pastorianus
caccttctgctaggctgtcatatac

SEQ ID NO: 89457 - DNA, 25 bp, Saccharomyces pastorianus
ttcggtcaccaattaacaagggcag

SEQ ID NO: 89458 - DNA, 25 bp, Saccharomyces pastorianus
aatgtacgccaaacggttgacacta

SEQ ID NO: 89459 - DNA, 25 bp, Saccharomyces pastorianus
gaacatgcgtgcctgaaactatttc

SEQ ID NO: 89460 - DNA, 25 bp, Saccharomyces pastorianus
gaaattaatgctgcttgggcgttac

SEQ ID NO: 89461 - DNA, 25 bp, Saccharomyces pastorianus
tgaaaaatggcccaccttctgctag

SEQ ID NO: 89462 - DNA, 25 bp, Saccharomyces pastorianus
gaacggtggccaactagcatatttt

SEQ ID NO: 89463 - DNA, 25 bp, Saccharomyces pastorianus
atgtaatccttcgagtcaatatcag

SEQ ID NO: 89464 - DNA, 25 bp, Saccharomyces pastorianus
taccgaaatacttggaatacgctgc

SEQ ID NO: 89465 - DNA, 25 bp, Saccharomyces pastorianus
gcttgggcgttacatgaggccattt

SEQ ID NO: 89466 - DNA, 25 bp, Saccharomyces pastorianus
gaatacgctgcaaatatcccaaagt

SEQ ID NO: 89467 - DNA, 25 bp, Saccharomyces pastorianus
gataccgtcaaatcgctgataacga

SEQ ID NO: 89468 - DNA, 25 bp, Saccharomyces pastorianus
gagacagttatcacaaacgcctttg

SEQ ID NO: 89469 - DNA, 25 bp, Saccharomyces pastorianus
gtgggtacccgctatgctataagag

SEQ ID NO: 89470 - DNA, 25 bp, Saccharomyces pastorianus
gaggcgtgcatttaactagttacat

SEQ ID NO: 89471 - DNA, 25 bp, Saccharomyces pastorianus
gaatgagcctttaccattggatgtg

SEQ ID NO: 89472 - DNA, 25 bp, Saccharomyces pastorianus
atctgccatagtttcaatgctcaca

SEQ ID NO: 89473 - DNA, 25 bp, Saccharomyces pastorianus
ggcttctttattcactcaatgtatt

SEQ ID NO: 89474 - DNA, 25 bp, Saccharomyces pastorianus
gatatgtactcggtaagccttttag

SEQ ID NO: 89475 - DNA, 25 bp, Saccharomyces pastorianus
gctactttcaccgatgtcttatatg

SEQ ID NO: 89476 - DNA, 25 bp, Saccharomyces pastorianus
ggatcacaccaattacatgagcaat

SEQ ID NO: 89477 - DNA, 25 bp, Saccharomyces pastorianus
tggaagcccgaatgattgaatctgc

SEQ ID NO: 89478 - DNA, 25 bp, Saccharomyces pastorianus
ttggcctcgccaacaaggatgagag

SEQ ID NO: 89479 - DNA, 25 bp, Saccharomyces pastorianus
atgttagtgaccatgttggcctcgc

SEQ ID NO: 89480 - DNA, 25 bp, Saccharomyces pastorianus
aatggatttgcaactggacccgttt

SEQ ID NO: 89481 - DNA, 25 bp, Saccharomyces pastorianus
gatttctggcacatctatttcttac

SEQ ID NO: 89482 - DNA, 25 bp, Saccharomyces pastorianus
gtggaaagtctagcccagtcatatt

SEQ ID NO: 89483 - DNA, 25 bp, Saccharomyces pastorianus
agtagcttcgataatgctgcagaaa

SEQ ID NO: 89484 - DNA, 25 bp, Saccharomyces pastorianus
tacagggcgacaaagatatctccaa

SEQ ID NO: 89485 - DNA, 25 bp, Saccharomyces pastorianus
ctggacccgtttgatgtggatgaaa

SEQ ID NO: 89486 - DNA, 25 bp, Saccharomyces pastorianus
tttttggtctggcttcagtagcttc

SEQ ID NO: 89487 - DNA, 25 bp, Saccharomyces pastorianus
gatatgttctattttacagggcgac

SEQ ID NO: 89488 - DNA, 25 bp, Saccharomyces pastorianus
aaagttgctgtgtctcaagagggat

SEQ ID NO: 89489 - DNA, 25 bp, Saccharomyces pastorianus
gaacagggtttgtttgatagcaaca

SEQ ID NO: 89490 - DNA, 25 bp, Saccharomyces pastorianus
cgcctttcctcacctaaagaacaat

SEQ ID NO: 89491 - DNA, 25 bp, Saccharomyces pastorianus
cagattataagcaacctggaatgga

SEQ ID NO: 89492 - DNA, 25 bp, Saccharomyces pastorianus
gaacacggcaagaatccagattata

SEQ ID NO: 89493 - DNA, 25 bp, Saccharomyces pastorianus
ttgagaaccacttttttgcgcactc

SEQ ID NO: 89494 - DNA, 25 bp, Saccharomyces pastorianus
gcactccaagacaattgatgcgtaa

SEQ ID NO: 89495 - DNA, 25 bp, Saccharomyces pastorianus
cacttttttgcgcactccaagacaa

SEQ ID NO: 89496 - DNA, 25 bp, Saccharomyces pastorianus
aggttggacactttggaacacggca

SEQ ID NO: 89497 - DNA, 25 bp, Saccharomyces pastorianus
aagggcgtctttctcaatcgtcact

SEQ ID NO: 89498 - DNA, 25 bp, Saccharomyces pastorianus
tcaatcgtcactagggccgcctttc

SEQ ID NO: 89499 - DNA, 25 bp, Saccharomyces pastorianus
tgatgcgtaaatcgccaagggcgtc

SEQ ID NO: 89500 - DNA, 25 bp, Saccharomyces pastorianus
aggagacactaattggtcatattat

SEQ ID NO: 89501 - DNA, 25 bp, Saccharomyces pastorianus
tattgctcacgagccattgatacca

SEQ ID NO: 89502 - DNA, 25 bp, Saccharomyces pastorianus
gaaattatcagctttcgtttgatca

SEQ ID NO: 89503 - DNA, 25 bp, Saccharomyces pastorianus
gaacaccaatgttgctaaggacaaa

SEQ ID NO: 89504 - DNA, 25 bp, Saccharomyces pastorianus
ctggctactttacttttaactgact

SEQ ID NO: 89505 - DNA, 25 bp, Saccharomyces pastorianus
aaaattgtccttattgctcacgagc

SEQ ID NO: 89506 - DNA, 25 bp, Saccharomyces pastorianus
tgttcaggtcttttcatcagagaga

SEQ ID NO: 89507 - DNA, 25 bp, Saccharomyces pastorianus
agcagattttgaacttggaaagcca

SEQ ID NO: 89508 - DNA, 25 bp, Saccharomyces pastorianus
gtaatcatattggtattcactctgt

SEQ ID NO: 89509 - DNA, 25 bp, Saccharomyces pastorianus
aattgtccagagctatgttcaggtc

SEQ ID NO: 89510 - DNA, 25 bp, Saccharomyces pastorianus
attcactctgtagtaatcaagccag

SEQ ID NO: 89511 - DNA, 25 bp, Saccharomyces pastorianus
gtgaaattgcctactcgaatacgaa

SEQ ID NO: 89512 - DNA, 25 bp, Saccharomyces pastorianus
aatgcaactgcagagctgaacctcc

SEQ ID NO: 89513 - DNA, 25 bp, Saccharomyces pastorianus
ctggcgctggcgtagatgtaaatac

SEQ ID NO: 89514 - DNA, 25 bp, Saccharomyces pastorianus
agcaacctccacaggatattctttc

SEQ ID NO: 89515 - DNA, 25 bp, Saccharomyces pastorianus
aaaccaaggagtgccctcagcgaaa

SEQ ID NO: 89516 - DNA, 25 bp, Saccharomyces pastorianus
acctccccacggtcgatgagcaaag

SEQ ID NO: 89517 - DNA, 25 bp, Saccharomyces pastorianus
gcaacttatatctcagtcccttaaa

SEQ ID NO: 89518 - DNA, 25 bp, Saccharomyces pastorianus
tcgaatacgaacaccaacactgaaa

SEQ ID NO: 89519 - DNA, 25 bp, Saccharomyces pastorianus
gagaaccgcaatactggcgctggcg

SEQ ID NO: 89520 - DNA, 25 bp, Saccharomyces pastorianus
aaggtacaactgctattgcatatca

SEQ ID NO: 89521 - DNA, 25 bp, Saccharomyces pastorianus
taaaagggttcatgccaatcttcaa

SEQ ID NO: 89522 - DNA, 25 bp, Saccharomyces pastorianus
cattgaagttcgtccaagattcgtc

SEQ ID NO: 89523 - DNA, 25 bp, Saccharomyces pastorianus
tggtacggtcgacctggattccaga

SEQ ID NO: 89524 - DNA, 25 bp, Saccharomyces pastorianus
gggcaactacggattctatcctgtc

SEQ ID NO: 89525 - DNA, 25 bp, Saccharomyces pastorianus
gtctctctcttccaaagtgctggta

SEQ ID NO: 89526 - DNA, 25 bp, Saccharomyces pastorianus
ttacttgttggtgatgtctctctct

SEQ ID NO: 89527 - DNA, 25 bp, Saccharomyces pastorianus
tatcctgtcactgtgggatctgcat

SEQ ID NO: 89528 - DNA, 25 bp, Saccharomyces pastorianus
gactagtctggcatcaacatggcaa

SEQ ID NO: 89529 - DNA, 25 bp, Saccharomyces pastorianus
gtttgggtgatgacttcactgacga

SEQ ID NO: 89530 - DNA, 25 bp, Saccharomyces pastorianus
ggcattatagacgtaccgttccaga

SEQ ID NO: 89531 - DNA, 25 bp, Saccharomyces pastorianus
aaagtcgctctaacttggcattata

SEQ ID NO: 89532 - DNA, 25 bp, Saccharomyces pastorianus
tttaaccgatcctcagcaagtcctg

SEQ ID NO: 89533 - DNA, 25 bp, Saccharomyces pastorianus
aattgctagagctcatcagttagtg

SEQ ID NO: 89534 - DNA, 25 bp, Saccharomyces pastorianus
attagtgacagtctggtcggcaccg

SEQ ID NO: 89535 - DNA, 25 bp, Saccharomyces pastorianus
taacgtatggaggtactgctgtgaa

SEQ ID NO: 89536 - DNA, 25 bp, Saccharomyces pastorianus
gaggcaatcacgaaacccggcaaat

SEQ ID NO: 89537 - DNA, 25 bp, Saccharomyces pastorianus
caatagcatattctgtgttcatggt

SEQ ID NO: 89538 - DNA, 25 bp, Saccharomyces pastorianus
atcgttgtggtaatgtagcagctgt

SEQ ID NO: 89539 - DNA, 25 bp, Saccharomyces pastorianus
agtctggtcggcaccgaattactgt

SEQ ID NO: 89540 - DNA, 25 bp, Saccharomyces pastorianus
tgacttattatggagcgaccccgaa

SEQ ID NO: 89541 - DNA, 25 bp, Saccharomyces pastorianus
cgaccccgaagacgttgacacatgg

SEQ ID NO: 89542 - DNA, 25 bp, Saccharomyces pastorianus
gattatctccggatatgaccacggt

SEQ ID NO: 89543 - DNA, 25 bp, Saccharomyces pastorianus
aaatgttcgacggtggattagtgac

SEQ ID NO: 89544 - DNA, 25 bp, Saccharomyces pastorianus
actgctaatattgcctcatttccga

SEQ ID NO: 89545 - DNA, 25 bp, Saccharomyces pastorianus
gcagcagttgctcacaagtgtttaa

SEQ ID NO: 89546 - DNA, 25 bp, Saccharomyces pastorianus
attgatctgaaacctgatactgcta

SEQ ID NO: 89547 - DNA, 25 bp, Saccharomyces pastorianus
tgaaggcgccatcctcgcagagtaa

SEQ ID NO: 89548 - DNA, 25 bp, Saccharomyces pastorianus
ttgaaaagcgcgctcgttgccaata

SEQ ID NO: 89549 - DNA, 25 bp, Saccharomyces pastorianus
gctcgttgccaatatcgctatggga

SEQ ID NO: 89550 - DNA, 25 bp, Saccharomyces pastorianus
gcaggatcggcctttttagggattg

SEQ ID NO: 89551 - DNA, 25 bp, Saccharomyces pastorianus
aaagcaacaggtcaactccgcgata

SEQ ID NO: 89552 - DNA, 25 bp, Saccharomyces pastorianus
gaatttatcaacaagcagcagcagt

SEQ ID NO: 89553 - DNA, 25 bp, Saccharomyces pastorianus
gaagcagcgacgatcgtaactatat

SEQ ID NO: 89554 - DNA, 25 bp, Saccharomyces pastorianus
tagacgacggatcaaacttctttgt

SEQ ID NO: 89555 - DNA, 25 bp, Saccharomyces pastorianus
gaatctaagggcactaccaccaaag

SEQ ID NO: 89556 - DNA, 25 bp, Saccharomyces pastorianus
aaccactttgactatcactgactgt

SEQ ID NO: 89557 - DNA, 25 bp, Saccharomyces pastorianus
tgaaaagagcgaagcccctgagtct

SEQ ID NO: 89558 - DNA, 25 bp, Saccharomyces pastorianus
tcttctcattccgttgtcatcaaca

SEQ ID NO: 89559 - DNA, 25 bp, Saccharomyces pastorianus
aacgtcgtcgttccaggtgctttag

SEQ ID NO: 89560 - DNA, 25 bp, Saccharomyces pastorianus
ctgactgtccatgcaccattgagaa

SEQ ID NO: 89561 - DNA, 25 bp, Saccharomyces pastorianus
aagtctaactgtctccacagtcgtc

SEQ ID NO: 89562 - DNA, 25 bp, Saccharomyces pastorianus
tctgtcccagttaccgaatctaagg

SEQ ID NO: 89563 - DNA, 25 bp, Saccharomyces pastorianus
atctactgactacaccactgactac

SEQ ID NO: 89564 - DNA, 25 bp, Saccharomyces pastorianus
acagtaacggtgctaacgtcgtcgt

SEQ ID NO: 89565 - DNA, 25 bp, Saccharomyces pastorianus
aatataccacttactgtccagaacc

SEQ ID NO: 89566 - DNA, 25 bp, Saccharomyces pastorianus
gtgctgaagtttttcactgtgaact

SEQ ID NO: 89567 - DNA, 25 bp, Saccharomyces pastorianus
tcgctcctggagtatcgcttaatag

SEQ ID NO: 89568 - DNA, 25 bp, Saccharomyces pastorianus
gataggtttgcacagctggatcctc

SEQ ID NO: 89569 - DNA, 25 bp, Saccharomyces pastorianus
gctggatcctcatagcttatcaaag

SEQ ID NO: 89570 - DNA, 25 bp, Saccharomyces pastorianus
tttgttgttcgcatctactggcgtt

SEQ ID NO: 89571 - DNA, 25 bp, Saccharomyces pastorianus
tgcttagatcttccataaatgtgct

SEQ ID NO: 89572 - DNA, 25 bp, Saccharomyces pastorianus
tggcgttctccattttgcttagatc

SEQ ID NO: 89573 - DNA, 25 bp, Saccharomyces pastorianus
tagatatcgcacactggttctgctc

SEQ ID NO: 89574 - DNA, 25 bp, Saccharomyces pastorianus
aagggttcatctaattcgctcctgg

SEQ ID NO: 89575 - DNA, 25 bp, Saccharomyces pastorianus
gagcgccaccaatactcgtagatat

SEQ ID NO: 89576 - DNA, 25 bp, Saccharomyces pastorianus
aggatactaatgatggagcgccacc

SEQ ID NO: 89577 - DNA, 25 bp, Saccharomyces pastorianus
agaggagtttggtttagaccttgag

SEQ ID NO: 89578 - DNA, 25 bp, Saccharomyces pastorianus
attttgtttgctagcacctgttgct

SEQ ID NO: 89579 - DNA, 25 bp, Saccharomyces pastorianus
tttggccagatcctgcaacgttgaa

SEQ ID NO: 89580 - DNA, 25 bp, Saccharomyces pastorianus
gaaccaaataccaaaagagccttat

SEQ ID NO: 89581 - DNA, 25 bp, Saccharomyces pastorianus
gatcctgcaacgttgaaccaaatac

SEQ ID NO: 89582 - DNA, 25 bp, Saccharomyces pastorianus
aagagccttatgagattaaagctga

SEQ ID NO: 89583 - DNA, 25 bp, Saccharomyces pastorianus
gccagatcctgcaacgttgaaccaa

SEQ ID NO: 89584 - DNA, 25 bp, Saccharomyces pastorianus
gcgcaactggagatctttagatttt

SEQ ID NO: 89585 - DNA, 25 bp, Saccharomyces pastorianus
ttttcattttgtttgctagcacctg

SEQ ID NO: 89586 - DNA, 25 bp, Saccharomyces pastorianus
agggcgcaactggagatctttagat

SEQ ID NO: 89587 - DNA, 25 bp, Saccharomyces pastorianus
agggttttggccagatcctgcaacg

SEQ ID NO: 89588 - DNA, 25 bp, Saccharomyces pastorianus
gcaagaaagggtgcactggttcaat

SEQ ID NO: 89589 - DNA, 25 bp, Saccharomyces pastorianus
ggtgcactggttcaatgtgatccat

SEQ ID NO: 89590 - DNA, 25 bp, Saccharomyces pastorianus
ctcgaaagtcgaatttgttaagcat

SEQ ID NO: 89591 - DNA, 25 bp, Saccharomyces pastorianus
tccatccatcaaggcgctcatatta

SEQ ID NO: 89592 - DNA, 25 bp, Saccharomyces pastorianus
gcgctcatattacaaattgacgcca

SEQ ID NO: 89593 - DNA, 25 bp, Saccharomyces pastorianus
agcatgagctaaataggctattatc

SEQ ID NO: 89594 - DNA, 25 bp, Saccharomyces pastorianus
gacacccatcttttagtagatccct

SEQ ID NO: 89595 - DNA, 25 bp, Saccharomyces pastorianus
tttagtagatccctcgaaagtcgaa

SEQ ID NO: 89596 - DNA, 25 bp, Saccharomyces pastorianus
aattgacgccaagatgagtgatata

SEQ ID NO: 89597 - DNA, 25 bp, Saccharomyces pastorianus
gaggagttggatgacacccatcttt

SEQ ID NO: 89598 - DNA, 25 bp, Saccharomyces pastorianus
aatgtgatccatccatcaaggcgct

SEQ ID NO: 89599 - DNA, 25 bp, Saccharomyces pastorianus
aaggaatacaccaagattgtcaagg

SEQ ID NO: 89600 - DNA, 25 bp, Saccharomyces pastorianus
ttggccaagtgtaagaaacctgatt

SEQ ID NO: 89601 - DNA, 25 bp, Saccharomyces pastorianus
gaaaaagcagagcaacaaccaggtt

SEQ ID NO: 89602 - DNA, 25 bp, Saccharomyces pastorianus
gcagtcggtatcattggttacgcca

SEQ ID NO: 89603 - DNA, 25 bp, Saccharomyces pastorianus
attgtcaaggctgttggtattggtt

SEQ ID NO: 89604 - DNA, 25 bp, Saccharomyces pastorianus
gtatcattggttacgccatcaagtt

SEQ ID NO: 89605 - DNA, 25 bp, Saccharomyces pastorianus
aacctgatttgaaggaatacaccaa

SEQ ID NO: 89606 - DNA, 25 bp, Saccharomyces pastorianus
gaagcacctgtagaatttgtcagag

SEQ ID NO: 89607 - DNA, 25 bp, Saccharomyces pastorianus
gtattggttttattgcagtcggtat

SEQ ID NO: 89608 - DNA, 25 bp, Saccharomyces pastorianus
aaagctggttgaagcacctgtagaa

SEQ ID NO: 89609 - DNA, 25 bp, Saccharomyces pastorianus
gaaggtactcaattcttggccaagt

SEQ ID NO: 89610 - DNA, 25 bp, Saccharomyces pastorianus
ccgatgttatcgcaattttccaaga

SEQ ID NO: 89611 - DNA, 25 bp, Saccharomyces pastorianus
gggattccaattcatatcgtcgata

SEQ ID NO: 89612 - DNA, 25 bp, Saccharomyces pastorianus
gacacgagacttgtttcctgggata

SEQ ID NO: 89613 - DNA, 25 bp, Saccharomyces pastorianus
gaagacctattcagtgacacgagac

SEQ ID NO: 89614 - DNA, 25 bp, Saccharomyces pastorianus
agggttctggaaggtcatgtgcttt

SEQ ID NO: 89615 - DNA, 25 bp, Saccharomyces pastorianus
agcactgcagatgagttgaccacaa

SEQ ID NO: 89616 - DNA, 25 bp, Saccharomyces pastorianus
gatcctaaggacaatagcactgcag

SEQ ID NO: 89617 - DNA, 25 bp, Saccharomyces pastorianus
aaaacgccactagccgatgttatcg

SEQ ID NO: 89618 - DNA, 25 bp, Saccharomyces pastorianus
ggttacctctgagtggaagtccaaa

SEQ ID NO: 89619 - DNA, 25 bp, Saccharomyces pastorianus
attgaagtatttgcagtccagaaac

SEQ ID NO: 89620 - DNA, 25 bp, Saccharomyces pastorianus
ccaaaggtctacacagggattccaa

SEQ ID NO: 89621 - DNA, 25 bp, Saccharomyces pastorianus
gtacaacacgttttagtcgccaatc

SEQ ID NO: 89622 - DNA, 25 bp, Saccharomyces pastorianus
aagcagcccaagattgtcagcattg

SEQ ID NO: 89623 - DNA, 25 bp, Saccharomyces pastorianus
gttccgcagacatttgacaggtgaa

SEQ ID NO: 89624 - DNA, 25 bp, Saccharomyces pastorianus
gatctcacgctaaggaaatgggtat

SEQ ID NO: 89625 - DNA, 25 bp, Saccharomyces pastorianus
gaaccagtttgctagatctcacgct

SEQ ID NO: 89626 - DNA, 25 bp, Saccharomyces pastorianus
acaaggattccgtaggttcattgaa

SEQ ID NO: 89627 - DNA, 25 bp, Saccharomyces pastorianus
gtacaaaactgaaacactgggtgca

SEQ ID NO: 89628 - DNA, 25 bp, Saccharomyces pastorianus
gataattctcagttgtataggacat

SEQ ID NO: 89629 - DNA, 25 bp, Saccharomyces pastorianus
aaggctgcttacttgaacgacataa

SEQ ID NO: 89630 - DNA, 25 bp, Saccharomyces pastorianus
gaacaagaagaaaccaagcagccca

SEQ ID NO: 89631 - DNA, 25 bp, Saccharomyces pastorianus
gtcgccaatcctactaaatatgaat

SEQ ID NO: 89632 - DNA, 25 bp, Saccharomyces pastorianus
agctcagccccgttacaacaacgaa

SEQ ID NO: 89633 - DNA, 25 bp, Saccharomyces pastorianus
agaagagatgcttgccaaccaccaa

SEQ ID NO: 89634 - DNA, 25 bp, Saccharomyces pastorianus
agatcaatggccagtgcccgcggaa

SEQ ID NO: 89635 - DNA, 25 bp, Saccharomyces pastorianus
tcagaacttcgctggatcgcacaag

SEQ ID NO: 89636 - DNA, 25 bp, Saccharomyces pastorianus
tggatctgccgggtatcaatcatgc

SEQ ID NO: 89637 - DNA, 25 bp, Saccharomyces pastorianus
gtaccgtgtctctaccactctggaa

SEQ ID NO: 89638 - DNA, 25 bp, Saccharomyces pastorianus
ggaaagagcacgtgcctcgctggat

SEQ ID NO: 89639 - DNA, 25 bp, Saccharomyces pastorianus
aatcatgcagagacgctgctcagcc

SEQ ID NO: 89640 - DNA, 25 bp, Saccharomyces pastorianus
aacgaacaacttgcctagaagatca

SEQ ID NO: 89641 - DNA, 25 bp, Saccharomyces pastorianus
actggacacaagatactccgtggaa

SEQ ID NO: 89642 - DNA, 25 bp, Saccharomyces pastorianus
agtgcccgcggaaataagctcagaa

SEQ ID NO: 89643 - DNA, 25 bp, Saccharomyces pastorianus
gttttctccataccccacagggcgg

SEQ ID NO: 89644 - DNA, 25 bp, Saccharomyces pastorianus
cacaatgccgccatagtgcggaaaa

SEQ ID NO: 89645 - DNA, 25 bp, Saccharomyces pastorianus
tactcaaggctctgcgcagcgtttt

SEQ ID NO: 89646 - DNA, 25 bp, Saccharomyces pastorianus
ttttttcatattacgtctccggctt

SEQ ID NO: 89647 - DNA, 25 bp, Saccharomyces pastorianus
tctcttactcttggcgccgggcgga

SEQ ID NO: 89648 - DNA, 25 bp, Saccharomyces pastorianus
tctagtctttctccgtaaagtagtt

SEQ ID NO: 89649 - DNA, 25 bp, Saccharomyces pastorianus
gagccgtgccgggtgatgcacatca

SEQ ID NO: 89650 - DNA, 25 bp, Saccharomyces pastorianus
ggtgatgcacatcatcacatcctat

SEQ ID NO: 89651 - DNA, 25 bp, Saccharomyces pastorianus
gtaaccattttctagtctttctccg

SEQ ID NO: 89652 - DNA, 25 bp, Saccharomyces pastorianus
aagcggtaatagtggcagttgtaac

SEQ ID NO: 89653 - DNA, 25 bp, Saccharomyces pastorianus
aagtagttacgtgccacaatgccgc

SEQ ID NO: 89654 - DNA, 25 bp, Saccharomyces pastorianus
aaatgactatagatctccgttgggt

SEQ ID NO: 89655 - DNA, 25 bp, Saccharomyces pastorianus
attccggtgagaaaccccattcttg

SEQ ID NO: 89656 - DNA, 25 bp, Saccharomyces pastorianus
gtattcttccacaatcaacgattat

SEQ ID NO: 89657 - DNA, 25 bp, Saccharomyces pastorianus
agcacattcttctaagttcggtgaa

SEQ ID NO: 89658 - DNA, 25 bp, Saccharomyces pastorianus
aatagacagttttcctctggtcacc

SEQ ID NO: 89659 - DNA, 25 bp, Saccharomyces pastorianus
gagaagagaccatgttctgcaacat

SEQ ID NO: 89660 - DNA, 25 bp, Saccharomyces pastorianus
aagcaatccactcatgtattcttcc

SEQ ID NO: 89661 - DNA, 25 bp, Saccharomyces pastorianus
aaaagtcagttcattccggtgagaa

SEQ ID NO: 89662 - DNA, 25 bp, Saccharomyces pastorianus
gatctccgttgggtgtaagcaatcc

SEQ ID NO: 89663 - DNA, 25 bp, Saccharomyces pastorianus
ttcctctggtcaccatctaacaaga

SEQ ID NO: 89664 - DNA, 25 bp, Saccharomyces pastorianus
aacagccctatatcttcttttgtaa

SEQ ID NO: 89665 - DNA, 25 bp, Saccharomyces pastorianus
tggcagtttacggactggcactctc

SEQ ID NO: 89666 - DNA, 25 bp, Saccharomyces pastorianus
gtacctatcgtctatctggagttca

SEQ ID NO: 89667 - DNA, 25 bp, Saccharomyces pastorianus
gctgccctttcacaattgacgtata

SEQ ID NO: 89668 - DNA, 25 bp, Saccharomyces pastorianus
agagcacccggctcatctttgtcaa

SEQ ID NO: 89669 - DNA, 25 bp, Saccharomyces pastorianus
taaacgtcttcctcttggcagttta

SEQ ID NO: 89670 - DNA, 25 bp, Saccharomyces pastorianus
atagacattattgctgccctttcac

SEQ ID NO: 89671 - DNA, 25 bp, Saccharomyces pastorianus
acaggtatgcttccttttactttag

SEQ ID NO: 89672 - DNA, 25 bp, Saccharomyces pastorianus
ttcaccaatttaaacgtcttcctct

SEQ ID NO: 89673 - DNA, 25 bp, Saccharomyces pastorianus
cagcttcggcggtatctacaacata

SEQ ID NO: 89674 - DNA, 25 bp, Saccharomyces pastorianus
gtcagttattcctccaaaattcttc

SEQ ID NO: 89675 - DNA, 25 bp, Saccharomyces pastorianus
ggttccgtcaaatctttacaggtat

SEQ ID NO: 89676 - DNA, 25 bp, Saccharomyces pastorianus
caaggaatcgatttctttaccagtt

SEQ ID NO: 89677 - DNA, 25 bp, Saccharomyces pastorianus
cagttgctcgtgaatgtaataccat

SEQ ID NO: 89678 - DNA, 25 bp, Saccharomyces pastorianus
aactggtggttctaagacctgtcaa

SEQ ID NO: 89679 - DNA, 25 bp, Saccharomyces pastorianus
aagacctgtcaaccgagctggattc

SEQ ID NO: 89680 - DNA, 25 bp, Saccharomyces pastorianus
gggcatgagttacctttaccaaaat

SEQ ID NO: 89681 - DNA, 25 bp, Saccharomyces pastorianus
ggatgagtgagatttccaacaacta

SEQ ID NO: 89682 - DNA, 25 bp, Saccharomyces pastorianus
gctggattcactctcagcacgaatt

SEQ ID NO: 89683 - DNA, 25 bp, Saccharomyces pastorianus
ataccatcgtattatgtgactctag

SEQ ID NO: 89684 - DNA, 25 bp, Saccharomyces pastorianus
gatctttcaattagctactttggcc

SEQ ID NO: 89685 - DNA, 25 bp, Saccharomyces pastorianus
aagttatgatgcaacctctacatta

SEQ ID NO: 89686 - DNA, 25 bp, Saccharomyces pastorianus
tatcttctaactttcctttcgttca

SEQ ID NO: 89687 - DNA, 25 bp, Saccharomyces pastorianus
aacgcttcttcttcactcgaaatat

SEQ ID NO: 89688 - DNA, 25 bp, Saccharomyces pastorianus
aatttacattgactgctctttcgtg

SEQ ID NO: 89689 - DNA, 25 bp, Saccharomyces pastorianus
tcttgtcgatgttcaaacaacgtgt

SEQ ID NO: 89690 - DNA, 25 bp, Saccharomyces pastorianus
gtattctgtcagtcacttcgtgaat

SEQ ID NO: 89691 - DNA, 25 bp, Saccharomyces pastorianus
atgactctcctacttcaaaaatgta

SEQ ID NO: 89692 - DNA, 25 bp, Saccharomyces pastorianus
aatcagctgatgtcagtattctgtc

SEQ ID NO: 89693 - DNA, 25 bp, Saccharomyces pastorianus
gaatctgttatatatccctttaaag

SEQ ID NO: 89694 - DNA, 25 bp, Saccharomyces pastorianus
acttctagattttcatcttgtcgat

SEQ ID NO: 89695 - DNA, 25 bp, Saccharomyces pastorianus
aatatttaacgcttcttcttcactc

SEQ ID NO: 89696 - DNA, 25 bp, Saccharomyces pastorianus
gctctttcgtgcaattcatactgta

SEQ ID NO: 89697 - DNA, 25 bp, Saccharomyces pastorianus
gtgttatcagagaaacagctccatg

SEQ ID NO: 89698 - DNA, 25 bp, Saccharomyces pastorianus
ttggacagtggtagccccagcgatt

SEQ ID NO: 89699 - DNA, 25 bp, Saccharomyces pastorianus
accgcttggttagggacatcatctc

SEQ ID NO: 89700 - DNA, 25 bp, Saccharomyces pastorianus
gtacaattacactctgttccacgtt

SEQ ID NO: 89701 - DNA, 25 bp, Saccharomyces pastorianus
atcattttgggctctttatttactt

SEQ ID NO: 89702 - DNA, 25 bp, Saccharomyces pastorianus
cgttatattctttctggcaacccag

SEQ ID NO: 89703 - DNA, 25 bp, Saccharomyces pastorianus
ctaatggtgctatatatctcgggaa

SEQ ID NO: 89704 - DNA, 25 bp, Saccharomyces pastorianus
atcatctcctacaggcgcaatggat

SEQ ID NO: 89705 - DNA, 25 bp, Saccharomyces pastorianus
ggatctttaccggaaagtgccttat

SEQ ID NO: 89706 - DNA, 25 bp, Saccharomyces pastorianus
ttatgccctttacggttggacagtg

SEQ ID NO: 89707 - DNA, 25 bp, Saccharomyces pastorianus
agtgccttatatgataccgcttggt

SEQ ID NO: 89708 - DNA, 25 bp, Saccharomyces pastorianus
tttattgcgattgcctacaccacaa

SEQ ID NO: 89709 - DNA, 25 bp, Saccharomyces pastorianus
ttgttggctgattgtactggcctgc

SEQ ID NO: 89710 - DNA, 25 bp, Saccharomyces pastorianus
gatttgcacacaacaaccacttgac

SEQ ID NO: 89711 - DNA, 25 bp, Saccharomyces pastorianus
agtgattcctcgatacgttgacgct

SEQ ID NO: 89712 - DNA, 25 bp, Saccharomyces pastorianus
acaactttcaactccaagtgcacct

SEQ ID NO: 89713 - DNA, 25 bp, Saccharomyces pastorianus
ggatgcttcattgaccgtgggacag

SEQ ID NO: 89714 - DNA, 25 bp, Saccharomyces pastorianus
tccccacataatctacaactttcaa

SEQ ID NO: 89715 - DNA, 25 bp, Saccharomyces pastorianus
accacttgacaaaacctctgaggaa

SEQ ID NO: 89716 - DNA, 25 bp, Saccharomyces pastorianus
agttgtatttggttctgccttgctt

SEQ ID NO: 89717 - DNA, 25 bp, Saccharomyces pastorianus
aaatggctttgtatccccacataat

SEQ ID NO: 89718 - DNA, 25 bp, Saccharomyces pastorianus
tactggcctgccgatagtgattcct

SEQ ID NO: 89719 - DNA, 25 bp, Saccharomyces pastorianus
ataactattctcttccgatttgcac

SEQ ID NO: 89720 - DNA, 25 bp, Saccharomyces pastorianus
cgtaaacctgtgcaagtactactta

SEQ ID NO: 89721 - DNA, 25 bp, Saccharomyces pastorianus
gaccgaatagagtccaccggcgtgg

SEQ ID NO: 89722 - DNA, 25 bp, Saccharomyces pastorianus
gatgtcaatacttttgcccttgcta

SEQ ID NO: 89723 - DNA, 25 bp, Saccharomyces pastorianus
ggcacatgattcttcagagggcgaa

SEQ ID NO: 89724 - DNA, 25 bp, Saccharomyces pastorianus
ccagaaacttcctactatcaaactt

SEQ ID NO: 89725 - DNA, 25 bp, Saccharomyces pastorianus
gtggcagccccaatgcagggaacag

SEQ ID NO: 89726 - DNA, 25 bp, Saccharomyces pastorianus
ttttgcccttgctaatgaagcggat

SEQ ID NO: 89727 - DNA, 25 bp, Saccharomyces pastorianus
gtgacggtgcatcgcaagtagatca

SEQ ID NO: 89728 - DNA, 25 bp, Saccharomyces pastorianus
ggaaagcctcctcataatgtcgatg

SEQ ID NO: 89729 - DNA, 25 bp, Saccharomyces pastorianus
gaagttccaggtcacaatgccaaat

SEQ ID NO: 89730 - DNA, 25 bp, Saccharomyces pastorianus
atcaaactttggaatcgccgtcaat

SEQ ID NO: 89731 - DNA, 25 bp, Saccharomyces pastorianus
accccagcctggagacgagtcttat

SEQ ID NO: 89732 - DNA, 25 bp, Saccharomyces pastorianus
gcctctttacactccatttctaaag

SEQ ID NO: 89733 - DNA, 25 bp, Saccharomyces pastorianus
aggtatttgtactgtcccagggtct

SEQ ID NO: 89734 - DNA, 25 bp, Saccharomyces pastorianus
gacccgggacttatcatgtgcgaac

SEQ ID NO: 89735 - DNA, 25 bp, Saccharomyces pastorianus
gtgcgaacaacgtttttggctccag

SEQ ID NO: 89736 - DNA, 25 bp, Saccharomyces pastorianus
atatccatatgttctgttgtcacag

SEQ ID NO: 89737 - DNA, 25 bp, Saccharomyces pastorianus
aagcgaacgtcttggcatcgaacct

SEQ ID NO: 89738 - DNA, 25 bp, Saccharomyces pastorianus
attcgataacgttcagctcgcctct

SEQ ID NO: 89739 - DNA, 25 bp, Saccharomyces pastorianus
attgcagcatctttatccaggaaaa

SEQ ID NO: 89740 - DNA, 25 bp, Saccharomyces pastorianus
aatgtatctttttcctaggcttgtt

SEQ ID NO: 89741 - DNA, 25 bp, Saccharomyces pastorianus
aaacctcagggtgcaatgtatcttt

SEQ ID NO: 89742 - DNA, 25 bp, Saccharomyces pastorianus
tttttagtaatcttgccagcgggct

SEQ ID NO: 89743 - DNA, 25 bp, Saccharomyces pastorianus
gaacacacctttcaaatcctgttgg

SEQ ID NO: 89744 - DNA, 25 bp, Saccharomyces pastorianus
agcatattctgccttagtgacacct

SEQ ID NO: 89745 - DNA, 25 bp, Saccharomyces pastorianus
gtgacacctgtattcaaatcttttt

SEQ ID NO: 89746 - DNA, 25 bp, Saccharomyces pastorianus
tttcaattcctcttttagctcgtca

SEQ ID NO: 89747 - DNA, 25 bp, Saccharomyces pastorianus
tgccagcgggcttaaaatccaaatc

SEQ ID NO: 89748 - DNA, 25 bp, Saccharomyces pastorianus
ggaatagctcctcttacagcatatt

SEQ ID NO: 89749 - DNA, 25 bp, Saccharomyces pastorianus
tcctgttggtgtgtcattgtcatgt

SEQ ID NO: 89750 - DNA, 25 bp, Saccharomyces pastorianus
tccaaatcctttgcggtgaacacac

SEQ ID NO: 89751 - DNA, 25 bp, Saccharomyces pastorianus
gctcgtcagctctggtcggaatagc

SEQ ID NO: 89752 - DNA, 25 bp, Saccharomyces pastorianus
ttgtcatgtgttcttacttcttccg

SEQ ID NO: 89753 - DNA, 25 bp, Saccharomyces pastorianus
aggctattccccatttcaacaagaa

SEQ ID NO: 89754 - DNA, 25 bp, Saccharomyces pastorianus
atagcaccacagaggcaggagccgc

SEQ ID NO: 89755 - DNA, 25 bp, Saccharomyces pastorianus
taaaacaggattcctccgacggtga

SEQ ID NO: 89756 - DNA, 25 bp, Saccharomyces pastorianus
aagttgatttactcccactagaaca

SEQ ID NO: 89757 - DNA, 25 bp, Saccharomyces pastorianus
tgagactgagcgcatcactcggaat

SEQ ID NO: 89758 - DNA, 25 bp, Saccharomyces pastorianus
gaagacgaagatgacaccccagata

SEQ ID NO: 89759 - DNA, 25 bp, Saccharomyces pastorianus
gccgtcccaaccatggagttagtgt

SEQ ID NO: 89760 - DNA, 25 bp, Saccharomyces pastorianus
ttcaaagaagttgccgccgtcccaa

SEQ ID NO: 89761 - DNA, 25 bp, Saccharomyces pastorianus
gagccgctaccgtatgtaccagaag

SEQ ID NO: 89762 - DNA, 25 bp, Saccharomyces pastorianus
caaggtggtctgcaacaactcataa

SEQ ID NO: 89763 - DNA, 25 bp, Saccharomyces pastorianus
agcgttaccactgctgtctaagaac

SEQ ID NO: 89764 - DNA, 25 bp, Saccharomyces pastorianus
ggcggagcagatcttgttgccaaaa

SEQ ID NO: 89765 - DNA, 25 bp, Saccharomyces pastorianus
tataggctccctacttcaagaaagt

SEQ ID NO: 89766 - DNA, 25 bp, Saccharomyces pastorianus
aggtggccaggatacttggtcctcg

SEQ ID NO: 89767 - DNA, 25 bp, Saccharomyces pastorianus
gtcggcaaatgctacttcactgatc

SEQ ID NO: 89768 - DNA, 25 bp, Saccharomyces pastorianus
gcaactcctgatattgttccagctt

SEQ ID NO: 89769 - DNA, 25 bp, Saccharomyces pastorianus
gaggtacagcgcctttatccggtag

SEQ ID NO: 89770 - DNA, 25 bp, Saccharomyces pastorianus
ggcagaccgcaatcgcaacagacaa

SEQ ID NO: 89771 - DNA, 25 bp, Saccharomyces pastorianus
ggcactaagatatttacgcgcagca

SEQ ID NO: 89772 - DNA, 25 bp, Saccharomyces pastorianus
gtctaggatctatgcctttcaggca

SEQ ID NO: 89773 - DNA, 25 bp, Saccharomyces pastorianus
agcgtgacatttcctaagcctttga

SEQ ID NO: 89774 - DNA, 25 bp, Saccharomyces pastorianus
tgttccagctttacaatcgcaggtg

SEQ ID NO: 89775 - DNA, 25 bp, Saccharomyces pastorianus
gatactctcttgttcaaggcgccaa

SEQ ID NO: 89776 - DNA, 25 bp, Saccharomyces pastorianus
aggtccacacggtcaatcgatcatt

SEQ ID NO: 89777 - DNA, 25 bp, Saccharomyces pastorianus
tgaagtgcaggttcaaggtccacac

SEQ ID NO: 89778 - DNA, 25 bp, Saccharomyces pastorianus
gaagggttctcttccgcatattaag

SEQ ID NO: 89779 - DNA, 25 bp, Saccharomyces pastorianus
gtactacacctctcaggacattaga

SEQ ID NO: 89780 - DNA, 25 bp, Saccharomyces pastorianus
aagcgcggtttctcagtatatttct

SEQ ID NO: 89781 - DNA, 25 bp, Saccharomyces pastorianus
gaatgcttcacgtatcattgctaga

SEQ ID NO: 89782 - DNA, 25 bp, Saccharomyces pastorianus
ggttaatttggcttctcacacgtac

SEQ ID NO: 89783 - DNA, 25 bp, Saccharomyces pastorianus
agtcgatccagaatcacttgcggct

SEQ ID NO: 89784 - DNA, 25 bp, Saccharomyces pastorianus
ttcactgactctgtataaacccttt

SEQ ID NO: 89785 - DNA, 25 bp, Saccharomyces pastorianus
ggtgaaattttgcatcccttactca

SEQ ID NO: 89786 - DNA, 25 bp, Saccharomyces pastorianus
cggtttgtgccgaatagggtccata

SEQ ID NO: 89787 - DNA, 25 bp, Saccharomyces pastorianus
acagtgctcaagaacctttctcaga

SEQ ID NO: 89788 - DNA, 25 bp, Saccharomyces pastorianus
agggtccatagcttgcttcgggata

SEQ ID NO: 89789 - DNA, 25 bp, Saccharomyces pastorianus
acatagtctacgttgttcaggtaac

SEQ ID NO: 89790 - DNA, 25 bp, Saccharomyces pastorianus
gatggcataatagctattcctgctt

SEQ ID NO: 89791 - DNA, 25 bp, Saccharomyces pastorianus
gattccggcgctattcaagagctat

SEQ ID NO: 89792 - DNA, 25 bp, Saccharomyces pastorianus
gatgatttcatagcatgcaccgcga

SEQ ID NO: 89793 - DNA, 25 bp, Saccharomyces pastorianus
aatcgtcagtcaagattccggcgct

SEQ ID NO: 89794 - DNA, 25 bp, Saccharomyces pastorianus
gaacctagctcaataatcgacgtga

SEQ ID NO: 89795 - DNA, 25 bp, Saccharomyces pastorianus
ataggttgagcagtacacggtttgt

SEQ ID NO: 89796 - DNA, 25 bp, Saccharomyces pastorianus
atagtagccacgtcaccgattatag

SEQ ID NO: 89797 - DNA, 25 bp, Saccharomyces pastorianus
ttcagtcctaaccatattgcgtcgg

SEQ ID NO: 89798 - DNA, 25 bp, Saccharomyces pastorianus
aaattctgcgaagggacataccatt

SEQ ID NO: 89799 - DNA, 25 bp, Saccharomyces pastorianus
gcaggacctctacacaacaaggagt

SEQ ID NO: 89800 - DNA, 25 bp, Saccharomyces pastorianus
gtccctaaagactaacgctccatgg

SEQ ID NO: 89801 - DNA, 25 bp, Saccharomyces pastorianus
gaatccaaatactacgggctataag

SEQ ID NO: 89802 - DNA, 25 bp, Saccharomyces pastorianus
acgctccatgggatgcaatctggta

SEQ ID NO: 89803 - DNA, 25 bp, Saccharomyces pastorianus
gtagtcgcaggcctaggttccctag

SEQ ID NO: 89804 - DNA, 25 bp, Saccharomyces pastorianus
gattcgccattctatttcagtccta

SEQ ID NO: 89805 - DNA, 25 bp, Saccharomyces pastorianus
tgttcattgacacatgcccaaccat

SEQ ID NO: 89806 - DNA, 25 bp, Saccharomyces pastorianus
ggttccctaggctttgaatgttcat

SEQ ID NO: 89807 - DNA, 25 bp, Saccharomyces pastorianus
aaagctgtcgttcgcaccaaatgaa

SEQ ID NO: 89808 - DNA, 25 bp, Saccharomyces pastorianus
cactcggcattgaagggtccggtta

SEQ ID NO: 89809 - DNA, 25 bp, Saccharomyces pastorianus
gaataccaagctgctgttgaacaga

SEQ ID NO: 89810 - DNA, 25 bp, Saccharomyces pastorianus
gagaacattacgattcaggacctgt

SEQ ID NO: 89811 - DNA, 25 bp, Saccharomyces pastorianus
cgcatcactagcgttacagcgtggt

SEQ ID NO: 89812 - DNA, 25 bp, Saccharomyces pastorianus
ttggaccatataggacactcggcat

SEQ ID NO: 89813 - DNA, 25 bp, Saccharomyces pastorianus
gcactattgtgaatttggcacgcga

SEQ ID NO: 89814 - DNA, 25 bp, Saccharomyces pastorianus
gaatgcgcccgtggaaaaggttatt

SEQ ID NO: 89815 - DNA, 25 bp, Saccharomyces pastorianus
gaattaccccactacttcgtatatt

SEQ ID NO: 89816 - DNA, 25 bp, Saccharomyces pastorianus
gatgttctgagtgctttggaccata

SEQ ID NO: 89817 - DNA, 25 bp, Saccharomyces pastorianus
acaaggtgatgcattacaggacgta

SEQ ID NO: 89818 - DNA, 25 bp, Saccharomyces pastorianus
cagcgtggtgctacagtatttgtta

SEQ ID NO: 89819 - DNA, 25 bp, Saccharomyces pastorianus
atgtgccaactgagttcaccacgag

SEQ ID NO: 89820 - DNA, 25 bp, Saccharomyces pastorianus
agcctatcggcaatgaccactacaa

SEQ ID NO: 89821 - DNA, 25 bp, Saccharomyces pastorianus
tgagatacgaatcccagactctgat

SEQ ID NO: 89822 - DNA, 25 bp, Saccharomyces pastorianus
ccagactctgatattccagccaata

SEQ ID NO: 89823 - DNA, 25 bp, Saccharomyces pastorianus
gccaatatcgaggacgaccctgtga

SEQ ID NO: 89824 - DNA, 25 bp, Saccharomyces pastorianus
ttggtctcaagttgtctccttccag

SEQ ID NO: 89825 - DNA, 25 bp, Saccharomyces pastorianus
gccaccgttttcagtacctgagata

SEQ ID NO: 89826 - DNA, 25 bp, Saccharomyces pastorianus
agggaaggacctcatcagcctatcg

SEQ ID NO: 89827 - DNA, 25 bp, Saccharomyces pastorianus
atgggttttgatcaagcgcttggtc

SEQ ID NO: 89828 - DNA, 25 bp, Saccharomyces pastorianus
ggagttacccacaaacacagcagat

SEQ ID NO: 89829 - DNA, 25 bp, Saccharomyces pastorianus
gatatgatgtcttccaacgcttcca

SEQ ID NO: 89830 - DNA, 25 bp, Saccharomyces pastorianus
tatgaatgttctaccgcaatctccc

SEQ ID NO: 89831 - DNA, 25 bp, Saccharomyces pastorianus
ttcagccttgagattttggacgagc

SEQ ID NO: 89832 - DNA, 25 bp, Saccharomyces pastorianus
gagcttacaagagtgaccgccgcaa

SEQ ID NO: 89833 - DNA, 25 bp, Saccharomyces pastorianus
gatccgttattcctcactaaattgg

SEQ ID NO: 89834 - DNA, 25 bp, Saccharomyces pastorianus
gtgacacagagtatttccccaggga

SEQ ID NO: 89835 - DNA, 25 bp, Saccharomyces pastorianus
gggaatatccgaaagaccctgtatc

SEQ ID NO: 89836 - DNA, 25 bp, Saccharomyces pastorianus
tagaacataaagagccggaccacct

SEQ ID NO: 89837 - DNA, 25 bp, Saccharomyces pastorianus
gatgatttaaatgacctagcccaaa

SEQ ID NO: 89838 - DNA, 25 bp, Saccharomyces pastorianus
gaccgccgcaatgaccatttttaag

SEQ ID NO: 89839 - DNA, 25 bp, Saccharomyces pastorianus
aagtggaagcgattcttcaccctcg

SEQ ID NO: 89840 - DNA, 25 bp, Saccharomyces pastorianus
ggaccacctccagaaagcggatcga

SEQ ID NO: 89841 - DNA, 25 bp, Saccharomyces pastorianus
atggcggcatatagccgagtcccat

SEQ ID NO: 89842 - DNA, 25 bp, Saccharomyces pastorianus
gatgtatcctagcaaaggacccctt

SEQ ID NO: 89843 - DNA, 25 bp, Saccharomyces pastorianus
aataataatttccactccaacactc

SEQ ID NO: 89844 - DNA, 25 bp, Saccharomyces pastorianus
tataccggaggttacgacagatatt

SEQ ID NO: 89845 - DNA, 25 bp, Saccharomyces pastorianus
gataatccagaatcgttcaaccaat

SEQ ID NO: 89846 - DNA, 25 bp, Saccharomyces pastorianus
gaccccttgatggattctctgcaat

SEQ ID NO: 89847 - DNA, 25 bp, Saccharomyces pastorianus
tagaaataccttcttccggtcacaa

SEQ ID NO: 89848 - DNA, 25 bp, Saccharomyces pastorianus
gagtcccatcgttggcatacaaaga

SEQ ID NO: 89849 - DNA, 25 bp, Saccharomyces pastorianus
aaactttgcttggtatccccactag

SEQ ID NO: 89850 - DNA, 25 bp, Saccharomyces pastorianus
cactccaacactctttatactatcg

SEQ ID NO: 89851 - DNA, 25 bp, Saccharomyces pastorianus
aaaagccggtatgttcatggtcaaa

SEQ ID NO: 89852 - DNA, 25 bp, Saccharomyces pastorianus
atattctcgatgtgctacgcctttc

SEQ ID NO: 89853 - DNA, 25 bp, Saccharomyces pastorianus
aaccttacacactacatcacgatta

SEQ ID NO: 89854 - DNA, 25 bp, Saccharomyces pastorianus
ctgcgctattttcacgtatcttcaa

SEQ ID NO: 89855 - DNA, 25 bp, Saccharomyces pastorianus
aaagatgacgctgctgaaccactcc

SEQ ID NO: 89856 - DNA, 25 bp, Saccharomyces pastorianus
aatagcacaagtacgctccctagag

SEQ ID NO: 89857 - DNA, 25 bp, Saccharomyces pastorianus
gccgaccatcattgcatctggataa

SEQ ID NO: 89858 - DNA, 25 bp, Saccharomyces pastorianus
gtcaagcctgctagatccaaacatt

SEQ ID NO: 89859 - DNA, 25 bp, Saccharomyces pastorianus
aagtgttcgacatgccggatcgtca

SEQ ID NO: 89860 - DNA, 25 bp, Saccharomyces pastorianus
tagcacgaatgcctacgaccataag

SEQ ID NO: 89861 - DNA, 25 bp, Saccharomyces pastorianus
atgcttcactatcatctgcgctatt

SEQ ID NO: 89862 - DNA, 25 bp, Saccharomyces pastorianus
gacgcgtccgaaattcccaatatat

SEQ ID NO: 89863 - DNA, 25 bp, Saccharomyces pastorianus
gaatgaccttcctcgagctaaattg

SEQ ID NO: 89864 - DNA, 25 bp, Saccharomyces pastorianus
gatacacaaagctagtttccagaaa

SEQ ID NO: 89865 - DNA, 25 bp, Saccharomyces pastorianus
agcagcaacatattctcccatcgga

SEQ ID NO: 89866 - DNA, 25 bp, Saccharomyces pastorianus
atgccaaaagcaacactgacctctg

SEQ ID NO: 89867 - DNA, 25 bp, Saccharomyces pastorianus
gggcccggtttaagaatggactcat

SEQ ID NO: 89868 - DNA, 25 bp, Saccharomyces pastorianus
ggacgccccatttgagaatgacctt

SEQ ID NO: 89869 - DNA, 25 bp, Saccharomyces pastorianus
gaatcccttactaaatcgaacacta

SEQ ID NO: 89870 - DNA, 25 bp, Saccharomyces pastorianus
acactgacctctgttctaatactga

SEQ ID NO: 89871 - DNA, 25 bp, Saccharomyces pastorianus
atggactcatgtcacctgaaaggat

SEQ ID NO: 89872 - DNA, 25 bp, Saccharomyces pastorianus
taatactgagctcaaggacgcccca

SEQ ID NO: 89873 - DNA, 25 bp, Saccharomyces pastorianus
actgaattccatgctggcgaacgaa

SEQ ID NO: 89874 - DNA, 25 bp, Saccharomyces pastorianus
agcgttttgacatacactgcgaact

SEQ ID NO: 89875 - DNA, 25 bp, Saccharomyces pastorianus
gggatgggattctgtacctattgaa

SEQ ID NO: 89876 - DNA, 25 bp, Saccharomyces pastorianus
gataacccactaactcgcttgaatt

SEQ ID NO: 89877 - DNA, 25 bp, Saccharomyces pastorianus
tttctgcccttgttcaacttgcaaa

SEQ ID NO: 89878 - DNA, 25 bp, Saccharomyces pastorianus
gacaacgaatcacctgcgatgggat

SEQ ID NO: 89879 - DNA, 25 bp, Saccharomyces pastorianus
cggttcccctcttctataataatgg

SEQ ID NO: 89880 - DNA, 25 bp, Saccharomyces pastorianus
ctgcgaactgaatcacaggcttttt

SEQ ID NO: 89881 - DNA, 25 bp, Saccharomyces pastorianus
acgagttacaacgatgcgcggttcc

SEQ ID NO: 89882 - DNA, 25 bp, Saccharomyces pastorianus
ttgaatttcgatggtttctgccctt

SEQ ID NO: 89883 - DNA, 25 bp, Saccharomyces pastorianus
tttcgagaacaagatcatgccctat

SEQ ID NO: 89884 - DNA, 25 bp, Saccharomyces pastorianus
ttttttcccatgacagataacccac

SEQ ID NO: 89885 - DNA, 25 bp, Saccharomyces pastorianus
tacttttccgtcaatacagcttcca

SEQ ID NO: 89886 - DNA, 25 bp, Saccharomyces pastorianus
gttaagtacttttccgtcaatacag

SEQ ID NO: 89887 - DNA, 25 bp, Saccharomyces pastorianus
tccgtcaatacagcttccacaaaat

SEQ ID NO: 89888 - DNA, 25 bp, Saccharomyces pastorianus
aagtacttttccgtcaatacagctt

SEQ ID NO: 89889 - DNA, 25 bp, Saccharomyces pastorianus
tactcaaccttttctttaatatatt

SEQ ID NO: 89890 - DNA, 25 bp, Saccharomyces pastorianus
ttttccgtcaatacagcttccacaa

SEQ ID NO: 89891 - DNA, 25 bp, Saccharomyces pastorianus
tgttgtaatttactcaaccttttct

SEQ ID NO: 89892 - DNA, 25 bp, Saccharomyces pastorianus
gtacttttccgtcaatacagcttcc

SEQ ID NO: 89893 - DNA, 25 bp, Saccharomyces pastorianus
tttccgtcaatacagcttccacaaa

SEQ ID NO: 89894 - DNA, 25 bp, Saccharomyces pastorianus
ttccgtcaatacagcttccacaaaa

SEQ ID NO: 89895 - DNA, 25 bp, Saccharomyces pastorianus
gccgctttattgttgtaatttactc

SEQ ID NO: 89896 - DNA, 25 bp, Saccharomyces pastorianus
aaagccaactgaaaagccaactgaa

SEQ ID NO: 89897 - DNA, 25 bp, Saccharomyces pastorianus
gttctagcactcaaactgttacctc

SEQ ID NO: 89898 - DNA, 25 bp, Saccharomyces pastorianus
ttctccagctccaactgaaaagcca

SEQ ID NO: 89899 - DNA, 25 bp, Saccharomyces pastorianus
tcctacactggtgccgctgttaagg

SEQ ID NO: 89900 - DNA, 25 bp, Saccharomyces pastorianus
tagcactcaaactgttacctcctac

SEQ ID NO: 89901 - DNA, 25 bp, Saccharomyces pastorianus
aagccaacccaacaaggttctagca

SEQ ID NO: 89902 - DNA, 25 bp, Saccharomyces pastorianus
aaagaataccacttctccagctcca

SEQ ID NO: 89903 - DNA, 25 bp, Saccharomyces pastorianus
agccaactgaaaagccaacccaaca

SEQ ID NO: 89904 - DNA, 25 bp, Saccharomyces pastorianus
aaactgttacctcctacactggtgc

SEQ ID NO: 89905 - DNA, 25 bp, Saccharomyces pastorianus
cccaacaaggttctagcactcaaac

SEQ ID NO: 89906 - DNA, 25 bp, Saccharomyces pastorianus
gaaaagccaaccgaaaagccaactg

SEQ ID NO: 89907 - DNA, 25 bp, Saccharomyces pastorianus
gaagtttcttcgcaagatcctgaca

SEQ ID NO: 89908 - DNA, 25 bp, Saccharomyces pastorianus
gggagtttgctccacagaatacaac

SEQ ID NO: 89909 - DNA, 25 bp, Saccharomyces pastorianus
gcaacgtataaacagcgcttctcaa

SEQ ID NO: 89910 - DNA, 25 bp, Saccharomyces pastorianus
gataacaatgcagctacttcgaaca

SEQ ID NO: 89911 - DNA, 25 bp, Saccharomyces pastorianus
tcagacaatggcaaactttacggtt

SEQ ID NO: 89912 - DNA, 25 bp, Saccharomyces pastorianus
aagatcctgacagtggtgttgccgg

SEQ ID NO: 89913 - DNA, 25 bp, Saccharomyces pastorianus
acggtttctaagatcgcgatacttg

SEQ ID NO: 89914 - DNA, 25 bp, Saccharomyces pastorianus
aaggtgtctatgaagcagcccaagc

SEQ ID NO: 89915 - DNA, 25 bp, Saccharomyces pastorianus
gatggtttgttcgaggaacccagaa

SEQ ID NO: 89916 - DNA, 25 bp, Saccharomyces pastorianus
ttcttctgaaacttccggtggagaa

SEQ ID NO: 89917 - DNA, 25 bp, Saccharomyces pastorianus
agaagaggcttcgtttcctgaaaga

SEQ ID NO: 89918 - DNA, 25 bp, Saccharomyces pastorianus
gaatgtgtgccagatgtcccaggat

SEQ ID NO: 89919 - DNA, 25 bp, Saccharomyces pastorianus
gatagcttcctcatactggactgtt

SEQ ID NO: 89920 - DNA, 25 bp, Saccharomyces pastorianus
ggtatcgtcacaacatttctaatgc

SEQ ID NO: 89921 - DNA, 25 bp, Saccharomyces pastorianus
gatgtcctaatatttaacccaccat

SEQ ID NO: 89922 - DNA, 25 bp, Saccharomyces pastorianus
gacgggatggcgattactgataaac

SEQ ID NO: 89923 - DNA, 25 bp, Saccharomyces pastorianus
gaaaattccatccacttagctgttg

SEQ ID NO: 89924 - DNA, 25 bp, Saccharomyces pastorianus
aatcgtttggccatcgtttgcgaaa

SEQ ID NO: 89925 - DNA, 25 bp, Saccharomyces pastorianus
ttggttcgggatcaggtatcgtcac

SEQ ID NO: 89926 - DNA, 25 bp, Saccharomyces pastorianus
gaacaaattctttctccagatggtg

SEQ ID NO: 89927 - DNA, 25 bp, Saccharomyces pastorianus
ggcgctcgaagcaactttggatact

SEQ ID NO: 89928 - DNA, 25 bp, Saccharomyces pastorianus
tgatatcaacccatgggcgctcgaa

SEQ ID NO: 89929 - DNA, 25 bp, Saccharomyces pastorianus
aaatctcgtattatcctgttcaggg

SEQ ID NO: 89930 - DNA, 25 bp, Saccharomyces pastorianus
aggttccattttcaatttcacacag

SEQ ID NO: 89931 - DNA, 25 bp, Saccharomyces pastorianus
tatcaagaggactgtgcccggccaa

SEQ ID NO: 89932 - DNA, 25 bp, Saccharomyces pastorianus
tgtggcttcaactgcatgggatgga

SEQ ID NO: 89933 - DNA, 25 bp, Saccharomyces pastorianus
gtcccctcatcattccaatatttta

SEQ ID NO: 89934 - DNA, 25 bp, Saccharomyces pastorianus
tcagaaaagttacctggtcccctca

SEQ ID NO: 89935 - DNA, 25 bp, Saccharomyces pastorianus
ttgacattagactaccttccggcaa

SEQ ID NO: 89936 - DNA, 25 bp, Saccharomyces pastorianus
ggccaacttcacaattcatcatgca

SEQ ID NO: 89937 - DNA, 25 bp, Saccharomyces pastorianus
ctaactctacggatgctactaaagg

SEQ ID NO: 89938 - DNA, 25 bp, Saccharomyces pastorianus
gtgtataccaagcacagttctcgcc

SEQ ID NO: 89939 - DNA, 25 bp, Saccharomyces pastorianus
atgcgcacgggctggcaatcagaaa

SEQ ID NO: 89940 - DNA, 25 bp, Saccharomyces pastorianus
tcctccggtgttgccagttatagaa

SEQ ID NO: 89941 - DNA, 25 bp, Saccharomyces pastorianus
ttgttccaattccacagtccaaatc

SEQ ID NO: 89942 - DNA, 25 bp, Saccharomyces pastorianus
gacgaaaatccctctcaaggccaag

SEQ ID NO: 89943 - DNA, 25 bp, Saccharomyces pastorianus
aacaatcaaagtccgcgctgggttc

SEQ ID NO: 89944 - DNA, 25 bp, Saccharomyces pastorianus
aatgactcatcgtcctctgatacaa

SEQ ID NO: 89945 - DNA, 25 bp, Saccharomyces pastorianus
acgcaacaacaattctgctgccttt

SEQ ID NO: 89946 - DNA, 25 bp, Saccharomyces pastorianus
ggaacttctgatacctctgcaacaa

SEQ ID NO: 89947 - DNA, 25 bp, Saccharomyces pastorianus
tgcctttcctcctacagacgaaaat

SEQ ID NO: 89948 - DNA, 25 bp, Saccharomyces pastorianus
caaggccaaggttcaagcagttcgg

SEQ ID NO: 89949 - DNA, 25 bp, Saccharomyces pastorianus
gatgttactaccgtcgaactacgca

SEQ ID NO: 89950 - DNA, 25 bp, Saccharomyces pastorianus
agcagcgaacggtccaaactcaaat

SEQ ID NO: 89951 - DNA, 25 bp, Saccharomyces pastorianus
gacacaatctgaatcctccattttt

SEQ ID NO: 89952 - DNA, 25 bp, Saccharomyces pastorianus
ggtattgcaccgcagtcagatccga

SEQ ID NO: 89953 - DNA, 25 bp, Saccharomyces pastorianus
gtatatcgtactttgcttccacatc

SEQ ID NO: 89954 - DNA, 25 bp, Saccharomyces pastorianus
aagcacctggttactcaagcacttg

SEQ ID NO: 89955 - DNA, 25 bp, Saccharomyces pastorianus
agcgcggttccaagtgctcttaaag

SEQ ID NO: 89956 - DNA, 25 bp, Saccharomyces pastorianus
aaaatctacctcaagtacttcctca

SEQ ID NO: 89957 - DNA, 25 bp, Saccharomyces pastorianus
atgaaagtattgtctccggcggcaa

SEQ ID NO: 89958 - DNA, 25 bp, Saccharomyces pastorianus
tacgacagctctctctatttcaaaa

SEQ ID NO: 89959 - DNA, 25 bp, Saccharomyces pastorianus
catctcattcggcaacaagttcttc

SEQ ID NO: 89960 - DNA, 25 bp, Saccharomyces pastorianus
aatggctcaggctaacttcagcgac

SEQ ID NO: 89961 - DNA, 25 bp, Saccharomyces pastorianus
gcaacatgttttccacggcagctaa

SEQ ID NO: 89962 - DNA, 25 bp, Saccharomyces pastorianus
gaagacgctttggttgtgcacagaa

SEQ ID NO: 89963 - DNA, 25 bp, Saccharomyces pastorianus
tcctcaattcggcacacacattaag

SEQ ID NO: 89964 - DNA, 25 bp, Saccharomyces pastorianus
aacactgcccagaggttcaatcgat

SEQ ID NO: 89965 - DNA, 25 bp, Saccharomyces pastorianus
catgtccctgtggtaagaaattcaa

SEQ ID NO: 89966 - DNA, 25 bp, Saccharomyces pastorianus
atataccacaaatagtccctcaaaa

SEQ ID NO: 89967 - DNA, 25 bp, Saccharomyces pastorianus
ggaagatcggccatattcctgtgat

SEQ ID NO: 89968 - DNA, 25 bp, Saccharomyces pastorianus
tagaatgatttgcagcggtggtaaa

SEQ ID NO: 89969 - DNA, 25 bp, Saccharomyces pastorianus
gaaaaggcgtatgcatgtccctgtg

SEQ ID NO: 89970 - DNA, 25 bp, Saccharomyces pastorianus
attcctgtgatcaccctggatgtga

SEQ ID NO: 89971 - DNA, 25 bp, Saccharomyces pastorianus
aggaagatctcctcaattcggcaca

SEQ ID NO: 89972 - DNA, 25 bp, Saccharomyces pastorianus
gaacttcaagtgtttctagtagtcc

SEQ ID NO: 89973 - DNA, 25 bp, Saccharomyces pastorianus
gagttatcgacaaagactgcccaga

SEQ ID NO: 89974 - DNA, 25 bp, Saccharomyces pastorianus
ggaggccttgtacacaattattctg

SEQ ID NO: 89975 - DNA, 25 bp, Saccharomyces pastorianus
tctaatcatcgaatggaggccttgt

SEQ ID NO: 89976 - DNA, 25 bp, Saccharomyces pastorianus
aattattctggtgcctttgggctct

SEQ ID NO: 89977 - DNA, 25 bp, Saccharomyces pastorianus
aagcggaaggctaccacaacgacca

SEQ ID NO: 89978 - DNA, 25 bp, Saccharomyces pastorianus
tttgggctcttttgcaaagcggaag

SEQ ID NO: 89979 - DNA, 25 bp, Saccharomyces pastorianus
gatgtgcagtctttcaagtctcata

SEQ ID NO: 89980 - DNA, 25 bp, Saccharomyces pastorianus
gaaccatgtcaaaattgcttctcaa

SEQ ID NO: 89981 - DNA, 25 bp, Saccharomyces pastorianus
ggatgacatctcagtgggcgattta

SEQ ID NO: 89982 - DNA, 25 bp, Saccharomyces pastorianus
ttgactttgagtacgcaggccctaa

SEQ ID NO: 89983 - DNA, 25 bp, Saccharomyces pastorianus
gatgaaacgcaccttatggagcaca

SEQ ID NO: 89984 - DNA, 25 bp, Saccharomyces pastorianus
agatatttctgttgctgtcgccact

SEQ ID NO: 89985 - DNA, 25 bp, Saccharomyces pastorianus
cgaaattgttcgcttgagtcataaa

SEQ ID NO: 89986 - DNA, 25 bp, Saccharomyces pastorianus
gagagacctgtcactgttaatggac

SEQ ID NO: 89987 - DNA, 25 bp, Saccharomyces pastorianus
cggattcatgggtcttttctccaaa

SEQ ID NO: 89988 - DNA, 25 bp, Saccharomyces pastorianus
aaaacactgctgcttccttaaccac

SEQ ID NO: 89989 - DNA, 25 bp, Saccharomyces pastorianus
caaagcatgtaccttggccgccaag

SEQ ID NO: 89990 - DNA, 25 bp, Saccharomyces pastorianus
aaacagccgtcctaggcttgcatgg

SEQ ID NO: 89991 - DNA, 25 bp, Saccharomyces pastorianus
gcgcgtgatggcaaattaaccctag

SEQ ID NO: 89992 - DNA, 25 bp, Saccharomyces pastorianus
gaagctgttaccttcttgaagactg

SEQ ID NO: 89993 - DNA, 25 bp, Saccharomyces pastorianus
ccagtcgttcgtaatgcagagtcat

SEQ ID NO: 89994 - DNA, 25 bp, Saccharomyces pastorianus
atattccagccgtcaatggtgccat

SEQ ID NO: 89995 - DNA, 25 bp, Saccharomyces pastorianus
aactatctcaggtggattctcagtc

SEQ ID NO: 89996 - DNA, 25 bp, Saccharomyces pastorianus
taaggatacggcgttgactccactt

SEQ ID NO: 89997 - DNA, 25 bp, Saccharomyces pastorianus
tggacttccatacacacttccaatt

SEQ ID NO: 89998 - DNA, 25 bp, Saccharomyces pastorianus
ttcattacctctgacagcggagaat

SEQ ID NO: 89999 - DNA, 25 bp, Saccharomyces pastorianus
gagattaaccctacttacacgacaa

SEQ ID NO: 90000 - DNA, 25 bp, Saccharomyces pastorianus
gtagaagggcacctttgcagcttcc

SEQ ID NO: 90001 - DNA, 25 bp, Saccharomyces pastorianus
tgcagcttcctcaattagtcaataa

SEQ ID NO: 90002 - DNA, 25 bp, Saccharomyces pastorianus
gaagttaggctactgtccgtacggt

SEQ ID NO: 90003 - DNA, 25 bp, Saccharomyces pastorianus
gtacggtaagcgttgctgtttcaaa

SEQ ID NO: 90004 - DNA, 25 bp, Saccharomyces pastorianus
aactgagctctgtgaatcttttact

SEQ ID NO: 90005 - DNA, 25 bp, Saccharomyces pastorianus
gattctcagtctactggacttccat

SEQ ID NO: 90006 - DNA, 25 bp, Saccharomyces pastorianus
gaagtagccctcaatgacaacgaag

SEQ ID NO: 90007 - DNA, 25 bp, Saccharomyces pastorianus
gaaccatgcctgatttcattggaag

SEQ ID NO: 90008 - DNA, 25 bp, Saccharomyces pastorianus
ggaagctcaagaagtagccctcaat

SEQ ID NO: 90009 - DNA, 25 bp, Saccharomyces pastorianus
gtgttttgcattgatttcatccata

SEQ ID NO: 90010 - DNA, 25 bp, Saccharomyces pastorianus
taaccgtacaattagaatcgcaaat

SEQ ID NO: 90011 - DNA, 25 bp, Saccharomyces pastorianus
gacgaggttgaatatgacgaccatg

SEQ ID NO: 90012 - DNA, 25 bp, Saccharomyces pastorianus
aaccgatatgttattgggtatgcaa

SEQ ID NO: 90013 - DNA, 25 bp, Saccharomyces pastorianus
agaaaactaccctgacgaaccatgc

SEQ ID NO: 90014 - DNA, 25 bp, Saccharomyces pastorianus
ggtacttgcctgaattaaccgtaca

SEQ ID NO: 90015 - DNA, 25 bp, Saccharomyces pastorianus
aaacctgccagatttaataagcttt

SEQ ID NO: 90016 - DNA, 25 bp, Saccharomyces pastorianus
ataatcgccgaattcaagttaccag

SEQ ID NO: 90017 - DNA, 25 bp, Saccharomyces pastorianus
gacacaacagcacctaaaacttcca

SEQ ID NO: 90018 - DNA, 25 bp, Saccharomyces pastorianus
aaattcgaatactcgcaggcgttct

SEQ ID NO: 90019 - DNA, 25 bp, Saccharomyces pastorianus
tggcgacttccaaagcgaaacgagt

SEQ ID NO: 90020 - DNA, 25 bp, Saccharomyces pastorianus
gatttgcttgactgggatggcccaa

SEQ ID NO: 90021 - DNA, 25 bp, Saccharomyces pastorianus
gaccaacttcaatgttcctgtggaa

SEQ ID NO: 90022 - DNA, 25 bp, Saccharomyces pastorianus
gatttcaacctctgcaagttacgat

SEQ ID NO: 90023 - DNA, 25 bp, Saccharomyces pastorianus
agcatccctgacttaatcgatcttg

SEQ ID NO: 90024 - DNA, 25 bp, Saccharomyces pastorianus
gatgcagatggctttgacagtgaaa

SEQ ID NO: 90025 - DNA, 25 bp, Saccharomyces pastorianus
ggatggcccaaaatcagacacagat

SEQ ID NO: 90026 - DNA, 25 bp, Saccharomyces pastorianus
tgacgatagtactagcaccacgaat

SEQ ID NO: 90027 - DNA, 25 bp, Saccharomyces pastorianus
acatcattgccctttgcggagaaaa

SEQ ID NO: 90028 - DNA, 25 bp, Saccharomyces pastorianus
gaattataaccgctctgcctggaac

SEQ ID NO: 90029 - DNA, 25 bp, Saccharomyces pastorianus
aattgaaacgaactattctctctta

SEQ ID NO: 90030 - DNA, 25 bp, Saccharomyces pastorianus
gaaacgaactattctctcttaaatt

SEQ ID NO: 90031 - DNA, 25 bp, Saccharomyces pastorianus
gaactattctctcttaaattatatg

SEQ ID NO: 90032 - DNA, 25 bp, Saccharomyces pastorianus
aaccgctctgcctggaacaatacag

SEQ ID NO: 90033 - DNA, 25 bp, Saccharomyces pastorianus
gctctgcctggaacaatacagcaaa

SEQ ID NO: 90034 - DNA, 25 bp, Saccharomyces pastorianus
ggtgaattataaccgctctgcctgg

SEQ ID NO: 90035 - DNA, 25 bp, Saccharomyces pastorianus
tataaccgctctgcctggaacaata

SEQ ID NO: 90036 - DNA, 25 bp, Saccharomyces pastorianus
attataaccgctctgcctggaacaa

SEQ ID NO: 90037 - DNA, 25 bp, Saccharomyces pastorianus
aacgaactattctctcttaaattat

SEQ ID NO: 90038 - DNA, 25 bp, Saccharomyces pastorianus
taaccgctctgcctggaacaataca

SEQ ID NO: 90039 - DNA, 25 bp, Saccharomyces pastorianus
gttgtctttggtgaagttgttgacg

SEQ ID NO: 90040 - DNA, 25 bp, Saccharomyces pastorianus
gaaggttgagtccttgggttctcct

SEQ ID NO: 90041 - DNA, 25 bp, Saccharomyces pastorianus
gttgagtccttgggttctccttccg

SEQ ID NO: 90042 - DNA, 25 bp, Saccharomyces pastorianus
tgaagttgttgacggttacgacatc

SEQ ID NO: 90043 - DNA, 25 bp, Saccharomyces pastorianus
ggtccatactcctacggttctcaat

SEQ ID NO: 90044 - DNA, 25 bp, Saccharomyces pastorianus
tagaattgttgttgccaagtccggt

SEQ ID NO: 90045 - DNA, 25 bp, Saccharomyces pastorianus
gccaccaaggctagaattgttgttg

SEQ ID NO: 90046 - DNA, 25 bp, Saccharomyces pastorianus
gctagaattgttgttgccaagtccg

SEQ ID NO: 90047 - DNA, 25 bp, Saccharomyces pastorianus
tggtgaagttgttgacggttacgac

SEQ ID NO: 90048 - DNA, 25 bp, Saccharomyces pastorianus
tccatactcctacggttctcaattc

SEQ ID NO: 90049 - DNA, 25 bp, Saccharomyces pastorianus
tacgacatcgttaagaaggttgagt

SEQ ID NO: 90050 - DNA, 25 bp, Saccharomyces pastorianus
gacgaggttcttcaatttctggaga

SEQ ID NO: 90051 - DNA, 25 bp, Saccharomyces pastorianus
taaacacgcctgtggtcattcatgc

SEQ ID NO: 90052 - DNA, 25 bp, Saccharomyces pastorianus
ccattcaggtctccacgacggagaa

SEQ ID NO: 90053 - DNA, 25 bp, Saccharomyces pastorianus
ctttccagctccatatcgcaattaa

SEQ ID NO: 90054 - DNA, 25 bp, Saccharomyces pastorianus
gtaataacactgctaccacgctaaa

SEQ ID NO: 90055 - DNA, 25 bp, Saccharomyces pastorianus
atgaataccatcagcggcaacgccg

SEQ ID NO: 90056 - DNA, 25 bp, Saccharomyces pastorianus
aacatgtctctactgacgaggttct

SEQ ID NO: 90057 - DNA, 25 bp, Saccharomyces pastorianus
atttctggagagctttatcgatgag

SEQ ID NO: 90058 - DNA, 25 bp, Saccharomyces pastorianus
tgtggctaacaccagcctcaacatc

SEQ ID NO: 90059 - DNA, 25 bp, Saccharomyces pastorianus
agacaagcataggtgtcagtgccac

SEQ ID NO: 90060 - DNA, 25 bp, Saccharomyces pastorianus
gagagacttcaagggtctgccaccc

SEQ ID NO: 90061 - DNA, 25 bp, Saccharomyces pastorianus
gcagcggcctcaaagtacccggttt

SEQ ID NO: 90062 - DNA, 25 bp, Saccharomyces pastorianus
ttcctctgactactaccagttcaaa

SEQ ID NO: 90063 - DNA, 25 bp, Saccharomyces pastorianus
gtagcagcagccttgcccttttaca

SEQ ID NO: 90064 - DNA, 25 bp, Saccharomyces pastorianus
agaatcctgacatctgagcgtcttc

SEQ ID NO: 90065 - DNA, 25 bp, Saccharomyces pastorianus
ttcacatacgccttctgtatactac

SEQ ID NO: 90066 - DNA, 25 bp, Saccharomyces pastorianus
gacatctgagcgtcttcagtgtttt

SEQ ID NO: 90067 - DNA, 25 bp, Saccharomyces pastorianus
ttttctctttctttccagatccaaa

SEQ ID NO: 90068 - DNA, 25 bp, Saccharomyces pastorianus
ttatttgttcattcactttcgagta

SEQ ID NO: 90069 - DNA, 25 bp, Saccharomyces pastorianus
attgattgactcattttcctctgac

SEQ ID NO: 90070 - DNA, 25 bp, Saccharomyces pastorianus
gagtgagacctgtagcagcagcctt

SEQ ID NO: 90071 - DNA, 25 bp, Saccharomyces pastorianus
ttccaaaccatgttgtcaagcattg

SEQ ID NO: 90072 - DNA, 25 bp, Saccharomyces pastorianus
atgaagcattctcacaagcctggaa

SEQ ID NO: 90073 - DNA, 25 bp, Saccharomyces pastorianus
ttggatttatcccacgagccaatct

SEQ ID NO: 90074 - DNA, 25 bp, Saccharomyces pastorianus
ggcggtgctaatgctttactccaag

SEQ ID NO: 90075 - DNA, 25 bp, Saccharomyces pastorianus
gtaagcctgcgtccggaaaatatat

SEQ ID NO: 90076 - DNA, 25 bp, Saccharomyces pastorianus
tggtgacacaactcagaaagctggt

SEQ ID NO: 90077 - DNA, 25 bp, Saccharomyces pastorianus
aagcctggaatttctttgagttgaa

SEQ ID NO: 90078 - DNA, 25 bp, Saccharomyces pastorianus
gaacaatcccgaagtaagcctgcgt

SEQ ID NO: 90079 - DNA, 25 bp, Saccharomyces pastorianus
tagcgctaagtttcgcattgcaagc

SEQ ID NO: 90080 - DNA, 25 bp, Saccharomyces pastorianus
aagtgggagcttacgaagtcgcatt

SEQ ID NO: 90081 - DNA, 25 bp, Saccharomyces pastorianus
gagccaatctcccagttaatctatg

SEQ ID NO: 90082 - DNA, 25 bp, Saccharomyces pastorianus
ggtggtcctctagatccaagtgagt

SEQ ID NO: 90083 - DNA, 25 bp, Saccharomyces pastorianus
gtttgtctcttatatacagccgcaa

SEQ ID NO: 90084 - DNA, 25 bp, Saccharomyces pastorianus
tgattacacagagcgttagtcctaa

SEQ ID NO: 90085 - DNA, 25 bp, Saccharomyces pastorianus
ggtaccggaggagtttgtctcttat

SEQ ID NO: 90086 - DNA, 25 bp, Saccharomyces pastorianus
gctcgacctttctatttgacacatt

SEQ ID NO: 90087 - DNA, 25 bp, Saccharomyces pastorianus
ggtggagaataaggctcgacctttc

SEQ ID NO: 90088 - DNA, 25 bp, Saccharomyces pastorianus
tatgcgtacgcagattcgaatcctc

SEQ ID NO: 90089 - DNA, 25 bp, Saccharomyces pastorianus
ggctgagggtgacatcgtatttatc

SEQ ID NO: 90090 - DNA, 25 bp, Saccharomyces pastorianus
agattcgaatcctctccattatggt

SEQ ID NO: 90091 - DNA, 25 bp, Saccharomyces pastorianus
tttatcagttacaagcatgggcaag

SEQ ID NO: 90092 - DNA, 25 bp, Saccharomyces pastorianus
tacagccgcaagatggtgagaacga

SEQ ID NO: 90093 - DNA, 25 bp, Saccharomyces pastorianus
gtataacactaccagacgactacat

SEQ ID NO: 90094 - DNA, 25 bp, Saccharomyces pastorianus
atcgagcatgccagattactaccag

SEQ ID NO: 90095 - DNA, 25 bp, Saccharomyces pastorianus
aaagcggccgcttatacaccaacag

SEQ ID NO: 90096 - DNA, 25 bp, Saccharomyces pastorianus
gtgggaacctccaagaaacccgcag

SEQ ID NO: 90097 - DNA, 25 bp, Saccharomyces pastorianus
atcagcgtccggatacattaacgat

SEQ ID NO: 90098 - DNA, 25 bp, Saccharomyces pastorianus
gactcgttgcaagagctgctgatta

SEQ ID NO: 90099 - DNA, 25 bp, Saccharomyces pastorianus
tatacaccaacaggcatcgagcatg

SEQ ID NO: 90100 - DNA, 25 bp, Saccharomyces pastorianus
attcgtctaggcgatcgtggagaaa

SEQ ID NO: 90101 - DNA, 25 bp, Saccharomyces pastorianus
gaaacccgcagtgagaaagaccaaa

SEQ ID NO: 90102 - DNA, 25 bp, Saccharomyces pastorianus
gcgtttggacgccataaagtaacca

SEQ ID NO: 90103 - DNA, 25 bp, Saccharomyces pastorianus
atctttagaggaggcagtagtgaac

SEQ ID NO: 90104 - DNA, 25 bp, Saccharomyces pastorianus
tactaccaggacatacaacattaaa

SEQ ID NO: 90105 - DNA, 25 bp, Saccharomyces pastorianus
agatcagcgccagcaagtaaacccg

SEQ ID NO: 90106 - DNA, 25 bp, Saccharomyces pastorianus
gcaggcttagcgaatacctctgcta

SEQ ID NO: 90107 - DNA, 25 bp, Saccharomyces pastorianus
aaagcagcaggttccctcaagtcag

SEQ ID NO: 90108 - DNA, 25 bp, Saccharomyces pastorianus
taaacccgcctgatttccttctaag

SEQ ID NO: 90109 - DNA, 25 bp, Saccharomyces pastorianus
taactcctcctcatccttaaggaat

SEQ ID NO: 90110 - DNA, 25 bp, Saccharomyces pastorianus
gagatatctttattggcagcgacga

SEQ ID NO: 90111 - DNA, 25 bp, Saccharomyces pastorianus
gagcgaacaatacttcccatattta

SEQ ID NO: 90112 - DNA, 25 bp, Saccharomyces pastorianus
acaaccagtctctcatgttcattta

SEQ ID NO: 90113 - DNA, 25 bp, Saccharomyces pastorianus
aaggaatccccgtcacaaggcagct

SEQ ID NO: 90114 - DNA, 25 bp, Saccharomyces pastorianus
ggtacttctagtcccaaagcagcag

SEQ ID NO: 90115 - DNA, 25 bp, Saccharomyces pastorianus
ggtggtatatcaatccccgaaatta

SEQ ID NO: 90116 - DNA, 25 bp, Saccharomyces pastorianus
gatggaatcttcaattttcggtaac

SEQ ID NO: 90117 - DNA, 25 bp, Saccharomyces pastorianus
ggcctcagctcatccataagatttt

SEQ ID NO: 90118 - DNA, 25 bp, Saccharomyces pastorianus
agccttatgttggtaatctttctaa

SEQ ID NO: 90119 - DNA, 25 bp, Saccharomyces pastorianus
aatgattctgatcgtggttcacagt

SEQ ID NO: 90120 - DNA, 25 bp, Saccharomyces pastorianus
gcagtattttgatgacgcattcgag

SEQ ID NO: 90121 - DNA, 25 bp, Saccharomyces pastorianus
gaaacgcagatttttatagccagat

SEQ ID NO: 90122 - DNA, 25 bp, Saccharomyces pastorianus
agaatgtgcattcccaaatattttg

SEQ ID NO: 90123 - DNA, 25 bp, Saccharomyces pastorianus
agtgctttagaattgggcctcagct

SEQ ID NO: 90124 - DNA, 25 bp, Saccharomyces pastorianus
gaaaaggacaccgaggccacattaa

SEQ ID NO: 90125 - DNA, 25 bp, Saccharomyces pastorianus
gggcatgcttacaaaactgtttcca

SEQ ID NO: 90126 - DNA, 25 bp, Saccharomyces pastorianus
tagccagatacctctttgaggcatt

SEQ ID NO: 90127 - DNA, 25 bp, Saccharomyces pastorianus
tcaggtcttccgtagcggtatctaa

SEQ ID NO: 90128 - DNA, 25 bp, Saccharomyces pastorianus
tatcattcccgatgcagtaatagac

SEQ ID NO: 90129 - DNA, 25 bp, Saccharomyces pastorianus
agatgatggacagtactcctcctat

SEQ ID NO: 90130 - DNA, 25 bp, Saccharomyces pastorianus
aaggacagcaacagcctggcgtgca

SEQ ID NO: 90131 - DNA, 25 bp, Saccharomyces pastorianus
acagtcaggcgagagctaggcagct

SEQ ID NO: 90132 - DNA, 25 bp, Saccharomyces pastorianus
tagcgctgttgctgaatacgggctc

SEQ ID NO: 90133 - DNA, 25 bp, Saccharomyces pastorianus
aatattccaggatcaggtcttccgt

SEQ ID NO: 90134 - DNA, 25 bp, Saccharomyces pastorianus
tgaaacgacttttagcacttgctac

SEQ ID NO: 90135 - DNA, 25 bp, Saccharomyces pastorianus
tgaaaatgcatttggtatacccgaa

SEQ ID NO: 90136 - DNA, 25 bp, Saccharomyces pastorianus
gaacgatctcagtagcgctgttgct

SEQ ID NO: 90137 - DNA, 25 bp, Saccharomyces pastorianus
tagaaacaccttttccatcggttgc

SEQ ID NO: 90138 - DNA, 25 bp, Saccharomyces pastorianus
tactgcgacaagtgagccaacttca

SEQ ID NO: 90139 - DNA, 25 bp, Saccharomyces pastorianus
taatggcgtagttagccctaaacct

SEQ ID NO: 90140 - DNA, 25 bp, Saccharomyces pastorianus
tctaaagctacgtcggtttccacct

SEQ ID NO: 90141 - DNA, 25 bp, Saccharomyces pastorianus
atggagatattgagcctcccctaca

SEQ ID NO: 90142 - DNA, 25 bp, Saccharomyces pastorianus
gagtagcttcacaacacctgaatgg

SEQ ID NO: 90143 - DNA, 25 bp, Saccharomyces pastorianus
gaatcaattggtgcagcttctctga

SEQ ID NO: 90144 - DNA, 25 bp, Saccharomyces pastorianus
gtttagcacctaacatagacagcgt

SEQ ID NO: 90145 - DNA, 25 bp, Saccharomyces pastorianus
aagaagagcttctcgtctgtctgta

SEQ ID NO: 90146 - DNA, 25 bp, Saccharomyces pastorianus
gggaatcgtcgccacaacttgttcc

SEQ ID NO: 90147 - DNA, 25 bp, Saccharomyces pastorianus
gtattagatcgacacttttcccaaa

SEQ ID NO: 90148 - DNA, 25 bp, Saccharomyces pastorianus
tcgtcactacaaaccctaactctaa

SEQ ID NO: 90149 - DNA, 25 bp, Saccharomyces pastorianus
caaaaaatcttcatcgttcgctcac

SEQ ID NO: 90150 - DNA, 25 bp, Saccharomyces pastorianus
cgtgctgccacgcattaaggacgaa

SEQ ID NO: 90151 - DNA, 25 bp, Saccharomyces pastorianus
agggctttccacattgattaccatc

SEQ ID NO: 90152 - DNA, 25 bp, Saccharomyces pastorianus
tgataccgaggacacttacgtagtt

SEQ ID NO: 90153 - DNA, 25 bp, Saccharomyces pastorianus
ggaggaatcgtcgagaccaccatta

SEQ ID NO: 90154 - DNA, 25 bp, Saccharomyces pastorianus
atggacttaccattttcaccagaag

SEQ ID NO: 90155 - DNA, 25 bp, Saccharomyces pastorianus
gagaaccgttaaattccccgtgctg

SEQ ID NO: 90156 - DNA, 25 bp, Saccharomyces pastorianus
gattaccatccatcttctcatgaga

SEQ ID NO: 90157 - DNA, 25 bp, Saccharomyces pastorianus
tgacccgttacaagtatccaagcct

SEQ ID NO: 90158 - DNA, 25 bp, Saccharomyces pastorianus
taccaggtgctaactctagggcttt

SEQ ID NO: 90159 - DNA, 25 bp, Saccharomyces pastorianus
aagctacttacaacaacggtctact

SEQ ID NO: 90160 - DNA, 25 bp, Saccharomyces pastorianus
aagatgctattatcgctgctccagt

SEQ ID NO: 90161 - DNA, 25 bp, Saccharomyces pastorianus
gctcggagctggttaaccctattga

SEQ ID NO: 90162 - DNA, 25 bp, Saccharomyces pastorianus
aaacattgacttctggtgtaaacca

SEQ ID NO: 90163 - DNA, 25 bp, Saccharomyces pastorianus
ggaaaacggtccaactcatgcgccg

SEQ ID NO: 90164 - DNA, 25 bp, Saccharomyces pastorianus
cactgactgttttctttgcttactc

SEQ ID NO: 90165 - DNA, 25 bp, Saccharomyces pastorianus
gtgtaaaccacttgcacggcatcag

SEQ ID NO: 90166 - DNA, 25 bp, Saccharomyces pastorianus
taccaccagcttccttggaaaacgg

SEQ ID NO: 90167 - DNA, 25 bp, Saccharomyces pastorianus
ttactctgcgtacgttcgtcaagaa

SEQ ID NO: 90168 - DNA, 25 bp, Saccharomyces pastorianus
ttgccacctttatcgtcaactgaga

SEQ ID NO: 90169 - DNA, 25 bp, Saccharomyces pastorianus
ggaagcaggcttacaacgtcgagtt

SEQ ID NO: 90170 - DNA, 25 bp, Saccharomyces pastorianus
atgctccaaagaagccactgactgt

SEQ ID NO: 90171 - DNA, 25 bp, Saccharomyces pastorianus
aatcgcgataacagtcttagaccgt

SEQ ID NO: 90172 - DNA, 25 bp, Saccharomyces pastorianus
accgctattagctcaatatcgccag

SEQ ID NO: 90173 - DNA, 25 bp, Saccharomyces pastorianus
caagctcaggaattggttgcccaac

SEQ ID NO: 90174 - DNA, 25 bp, Saccharomyces pastorianus
ggaaacgccctgaagatgcaccaaa

SEQ ID NO: 90175 - DNA, 25 bp, Saccharomyces pastorianus
atctccagaaagtcatccggtcact

SEQ ID NO: 90176 - DNA, 25 bp, Saccharomyces pastorianus
agccgcatatgagttaccgctatta

SEQ ID NO: 90177 - DNA, 25 bp, Saccharomyces pastorianus
ggttctataatcgattagccgcata

SEQ ID NO: 90178 - DNA, 25 bp, Saccharomyces pastorianus
gccaggtcgcgttatgatcatacta

SEQ ID NO: 90179 - DNA, 25 bp, Saccharomyces pastorianus
gatgaattgccatcgcaagctcagg

SEQ ID NO: 90180 - DNA, 25 bp, Saccharomyces pastorianus
atgttggcgaagagcatcctaattc

SEQ ID NO: 90181 - DNA, 25 bp, Saccharomyces pastorianus
gattttagcgatgttccccttgaca

SEQ ID NO: 90182 - DNA, 25 bp, Saccharomyces pastorianus
aaatcgctagaagatccttacaaat

SEQ ID NO: 90183 - DNA, 25 bp, Saccharomyces pastorianus
gaaagccatttaattcagctacaga

SEQ ID NO: 90184 - DNA, 25 bp, Saccharomyces pastorianus
tagttcaaaatcttcggagctggga

SEQ ID NO: 90185 - DNA, 25 bp, Saccharomyces pastorianus
aatccgcgagtgacgaaagagtatt

SEQ ID NO: 90186 - DNA, 25 bp, Saccharomyces pastorianus
aatcctaacatcattaatgcgatca

SEQ ID NO: 90187 - DNA, 25 bp, Saccharomyces pastorianus
aagcagagatggattcagtcagtaa

SEQ ID NO: 90188 - DNA, 25 bp, Saccharomyces pastorianus
ggttaaatactaaagatcccgatga

SEQ ID NO: 90189 - DNA, 25 bp, Saccharomyces pastorianus
cgatggtatcatcgaaagccattta

SEQ ID NO: 90190 - DNA, 25 bp, Saccharomyces pastorianus
gactgtagagatgtgtactgtcatg

SEQ ID NO: 90191 - DNA, 25 bp, Saccharomyces pastorianus
aagatcccgatgaacaacaattatt

SEQ ID NO: 90192 - DNA, 25 bp, Saccharomyces pastorianus
ctgactataattgaaaatccgcgag

SEQ ID NO: 90193 - DNA, 25 bp, Saccharomyces pastorianus
ggtggttccattatagtactgctga

SEQ ID NO: 90194 - DNA, 25 bp, Saccharomyces pastorianus
gcaatagtgccctcttgtaacgaaa

SEQ ID NO: 90195 - DNA, 25 bp, Saccharomyces pastorianus
atttcatcttgcactgcatctcaga

SEQ ID NO: 90196 - DNA, 25 bp, Saccharomyces pastorianus
gtactgctgagcgatcatcaatcac

SEQ ID NO: 90197 - DNA, 25 bp, Saccharomyces pastorianus
gcacctttaggttcaatttcatctt

SEQ ID NO: 90198 - DNA, 25 bp, Saccharomyces pastorianus
gcatctcagatttcacaaaggtctt

SEQ ID NO: 90199 - DNA, 25 bp, Saccharomyces pastorianus
atgctgcatctataagtccaactct

SEQ ID NO: 90200 - DNA, 25 bp, Saccharomyces pastorianus
gagagcagcaatgcggtggttccat

SEQ ID NO: 90201 - DNA, 25 bp, Saccharomyces pastorianus
gaaagctcctcgaatatcaacgcaa

SEQ ID NO: 90202 - DNA, 25 bp, Saccharomyces pastorianus
ggaagtcatcccgttaacgatggag

SEQ ID NO: 90203 - DNA, 25 bp, Saccharomyces pastorianus
agccgctccgaaaaccgtatttgat

SEQ ID NO: 90204 - DNA, 25 bp, Saccharomyces pastorianus
tatcacactcatatccgtttcaggg

SEQ ID NO: 90205 - DNA, 25 bp, Saccharomyces pastorianus
tacacgacctgatggtaacacctca

SEQ ID NO: 90206 - DNA, 25 bp, Saccharomyces pastorianus
gagctatgctatatgccagatccct

SEQ ID NO: 90207 - DNA, 25 bp, Saccharomyces pastorianus
ggattattattctctgctgccttta

SEQ ID NO: 90208 - DNA, 25 bp, Saccharomyces pastorianus
tgctgcctttatcgcatacatgcat

SEQ ID NO: 90209 - DNA, 25 bp, Saccharomyces pastorianus
taacacctcagatttgccattacct

SEQ ID NO: 90210 - DNA, 25 bp, Saccharomyces pastorianus
gccggcggagagtatgcatcaaaaa

SEQ ID NO: 90211 - DNA, 25 bp, Saccharomyces pastorianus
gcaattgtcctttttgtttctgtga

SEQ ID NO: 90212 - DNA, 25 bp, Saccharomyces pastorianus
aagggcaccagtaccagacagttat

SEQ ID NO: 90213 - DNA, 25 bp, Saccharomyces pastorianus
gtaggcctgctattcaattgctctc

SEQ ID NO: 90214 - DNA, 25 bp, Saccharomyces pastorianus
cgctgtgaatgatacgcgttcgatc

SEQ ID NO: 90215 - DNA, 25 bp, Saccharomyces pastorianus
tttgtggtccaagctaaaactgcag

SEQ ID NO: 90216 - DNA, 25 bp, Saccharomyces pastorianus
ggactgggcgtaacaccaattactt

SEQ ID NO: 90217 - DNA, 25 bp, Saccharomyces pastorianus
ggtattactatgctcaccaaacagt

SEQ ID NO: 90218 - DNA, 25 bp, Saccharomyces pastorianus
accgggtgtggtattactatgctca

SEQ ID NO: 90219 - DNA, 25 bp, Saccharomyces pastorianus
actatgctcaccaaacagtttgcat

SEQ ID NO: 90220 - DNA, 25 bp, Saccharomyces pastorianus
aacctctactggatttgcattatgt

SEQ ID NO: 90221 - DNA, 25 bp, Saccharomyces pastorianus
cattatgttttgtggtccaagctaa

SEQ ID NO: 90222 - DNA, 25 bp, Saccharomyces pastorianus
agtttgcataacctctactggattt

SEQ ID NO: 90223 - DNA, 25 bp, Saccharomyces pastorianus
aaaactgcaggactgggcgtaacac

SEQ ID NO: 90224 - DNA, 25 bp, Saccharomyces pastorianus
aacaccaattacttcactatacggg

SEQ ID NO: 90225 - DNA, 25 bp, Saccharomyces pastorianus
agatataaattataccgggtgtggt

SEQ ID NO: 90226 - DNA, 25 bp, Saccharomyces pastorianus
gttaaatttagagtcagttctgcta

SEQ ID NO: 90227 - DNA, 25 bp, Saccharomyces pastorianus
acacagtcgcatttttgagtttcat

SEQ ID NO: 90228 - DNA, 25 bp, Saccharomyces pastorianus
gtttatctgcatttattggtttttt

SEQ ID NO: 90229 - DNA, 25 bp, Saccharomyces pastorianus
gtcatcgttattcgtactcaacttt

SEQ ID NO: 90230 - DNA, 25 bp, Saccharomyces pastorianus
tttactacaaagatggtccaatttt

SEQ ID NO: 90231 - DNA, 25 bp, Saccharomyces pastorianus
gtcagttctgctaagtttatctgca

SEQ ID NO: 90232 - DNA, 25 bp, Saccharomyces pastorianus
cctttctcagtcatcgttattcgta

SEQ ID NO: 90233 - DNA, 25 bp, Saccharomyces pastorianus
atatacactacctttctcagtcatc

SEQ ID NO: 90234 - DNA, 25 bp, Saccharomyces pastorianus
taaacattactatacgcatatttcg

SEQ ID NO: 90235 - DNA, 25 bp, Saccharomyces pastorianus
tattcgtactcaacttttattattt

SEQ ID NO: 90236 - DNA, 25 bp, Saccharomyces pastorianus
ttattttaaggaacacagtcgcatt

SEQ ID NO: 90237 - DNA, 25 bp, Saccharomyces pastorianus
aaagggttatactggcaaggcatca

SEQ ID NO: 90238 - DNA, 25 bp, Saccharomyces pastorianus
gatagcctagttggtattgatctcg

SEQ ID NO: 90239 - DNA, 25 bp, Saccharomyces pastorianus
attcacagagcacatttattggttg

SEQ ID NO: 90240 - DNA, 25 bp, Saccharomyces pastorianus
attgtatctgcaacgaagcctgcta

SEQ ID NO: 90241 - DNA, 25 bp, Saccharomyces pastorianus
cttcgttagcttcatccgacgctaa

SEQ ID NO: 90242 - DNA, 25 bp, Saccharomyces pastorianus
gatagataaacccaccatcaagaag

SEQ ID NO: 90243 - DNA, 25 bp, Saccharomyces pastorianus
gttacgcgagatcttgtattcaatt

SEQ ID NO: 90244 - DNA, 25 bp, Saccharomyces pastorianus
ctatcaccttcatcttcgttagctt

SEQ ID NO: 90245 - DNA, 25 bp, Saccharomyces pastorianus
accgattcgagcacacttttggaaa

SEQ ID NO: 90246 - DNA, 25 bp, Saccharomyces pastorianus
cgacgctaatgaatcccacctaaaa

SEQ ID NO: 90247 - DNA, 25 bp, Saccharomyces pastorianus
aagcctgctaagttcacaaatgagt

SEQ ID NO: 90248 - DNA, 25 bp, Saccharomyces pastorianus
tattgcagtcgatgtgctccgcaga

SEQ ID NO: 90249 - DNA, 25 bp, Saccharomyces pastorianus
agaaagtcaccacggcgaactggat

SEQ ID NO: 90250 - DNA, 25 bp, Saccharomyces pastorianus
gaacatggcgatgtacttcttacag

SEQ ID NO: 90251 - DNA, 25 bp, Saccharomyces pastorianus
gcaaagtttctgtctggtgttccga

SEQ ID NO: 90252 - DNA, 25 bp, Saccharomyces pastorianus
tgttccgaccaaaacctttagtgag

SEQ ID NO: 90253 - DNA, 25 bp, Saccharomyces pastorianus
tagcatacgtgcgagaggtctccac

SEQ ID NO: 90254 - DNA, 25 bp, Saccharomyces pastorianus
gaatgtgactcttttcaagcaggat

SEQ ID NO: 90255 - DNA, 25 bp, Saccharomyces pastorianus
agatctccacacacgttattgcagt

SEQ ID NO: 90256 - DNA, 25 bp, Saccharomyces pastorianus
gaaaccgtacgttatgttcctcatc

SEQ ID NO: 90257 - DNA, 25 bp, Saccharomyces pastorianus
ggagttgcaatatgaccttcccgca

SEQ ID NO: 90258 - DNA, 25 bp, Saccharomyces pastorianus
aggtctccaccgttgatcgaaggga

SEQ ID NO: 90259 - DNA, 25 bp, Saccharomyces pastorianus
accgtccttggtcagcttgatgtta

SEQ ID NO: 90260 - DNA, 25 bp, Saccharomyces pastorianus
tatacataatcctttccgtctttcg

SEQ ID NO: 90261 - DNA, 25 bp, Saccharomyces pastorianus
gacggattgtaagccctcagcagat

SEQ ID NO: 90262 - DNA, 25 bp, Saccharomyces pastorianus
gaaacggtgcgcttgtctaagcaat

SEQ ID NO: 90263 - DNA, 25 bp, Saccharomyces pastorianus
gcaatgacatgcttctactctactt

SEQ ID NO: 90264 - DNA, 25 bp, Saccharomyces pastorianus
tggatctgcatctcggtcagcaaca

SEQ ID NO: 90265 - DNA, 25 bp, Saccharomyces pastorianus
tgtgacgttaaccttcaaagccgca

SEQ ID NO: 90266 - DNA, 25 bp, Saccharomyces pastorianus
attataatcttctgcttctcactgc

SEQ ID NO: 90267 - DNA, 25 bp, Saccharomyces pastorianus
ggcccaagttggtctctaggacgga

SEQ ID NO: 90268 - DNA, 25 bp, Saccharomyces pastorianus
attcagccttcggattcagcaattg

SEQ ID NO: 90269 - DNA, 25 bp, Saccharomyces pastorianus
tctttcgttcgtttcttaccagaat

SEQ ID NO: 90270 - DNA, 25 bp, Saccharomyces pastorianus
ttatcaactaatgtgcctctggcga

SEQ ID NO: 90271 - DNA, 25 bp, Saccharomyces pastorianus
gtatgccgcctaagaatgtgctaga

SEQ ID NO: 90272 - DNA, 25 bp, Saccharomyces pastorianus
gcttaagatctactggtgtgggcaa

SEQ ID NO: 90273 - DNA, 25 bp, Saccharomyces pastorianus
gggcaagttgcgtccaagagtaatt

SEQ ID NO: 90274 - DNA, 25 bp, Saccharomyces pastorianus
gcagtttgcggccaaagtccatgca

SEQ ID NO: 90275 - DNA, 25 bp, Saccharomyces pastorianus
tacaatgaggtccaccctgaaggtg

SEQ ID NO: 90276 - DNA, 25 bp, Saccharomyces pastorianus
gattctcggactgaaatcataccgt

SEQ ID NO: 90277 - DNA, 25 bp, Saccharomyces pastorianus
cctgaactgttcaaatgcgacgaca

SEQ ID NO: 90278 - DNA, 25 bp, Saccharomyces pastorianus
gtacacgcagaatattgacggttta

SEQ ID NO: 90279 - DNA, 25 bp, Saccharomyces pastorianus
gcaggctattgagactgtacacgca

SEQ ID NO: 90280 - DNA, 25 bp, Saccharomyces pastorianus
gaagccaatacccagtacagtacaa

SEQ ID NO: 90281 - DNA, 25 bp, Saccharomyces pastorianus
tggtgctccaaatgctgacggttta

SEQ ID NO: 90282 - DNA, 25 bp, Saccharomyces pastorianus
cctgtcattgtgtttgctgttccaa

SEQ ID NO: 90283 - DNA, 25 bp, Saccharomyces pastorianus
ttagccgcattactggtgttcccaa

SEQ ID NO: 90284 - DNA, 25 bp, Saccharomyces pastorianus
agattaggcttagcacccgacgtga

SEQ ID NO: 90285 - DNA, 25 bp, Saccharomyces pastorianus
gccagtattgcctgtattggtacca

SEQ ID NO: 90286 - DNA, 25 bp, Saccharomyces pastorianus
aatgctgaagtggtggttcctcctg

SEQ ID NO: 90287 - DNA, 25 bp, Saccharomyces pastorianus
tgcacttcctcccatgttattggta

SEQ ID NO: 90288 - DNA, 25 bp, Saccharomyces pastorianus
tgggttaccgaaagctgacattaca

SEQ ID NO: 90289 - DNA, 25 bp, Saccharomyces pastorianus
aactaggtcttccaaatgcacttcc

SEQ ID NO: 90290 - DNA, 25 bp, Saccharomyces pastorianus
agttgagtcgttgctcgggtcgaaa

SEQ ID NO: 90291 - DNA, 25 bp, Saccharomyces pastorianus
aagcgctaattgacgtattgccagt

SEQ ID NO: 90292 - DNA, 25 bp, Saccharomyces pastorianus
ggttttctgaaaggcgcatacttcc

SEQ ID NO: 90293 - DNA, 25 bp, Saccharomyces pastorianus
gaaccgtttagacgcagcaacaaca

SEQ ID NO: 90294 - DNA, 25 bp, Saccharomyces pastorianus
ggatcttctgtgctattcatttgta

SEQ ID NO: 90295 - DNA, 25 bp, Saccharomyces pastorianus
gacgctcattctcccgtagtaatga

SEQ ID NO: 90296 - DNA, 25 bp, Saccharomyces pastorianus
ggtgtactgttaaatgatcctcaat

SEQ ID NO: 90297 - DNA, 25 bp, Saccharomyces pastorianus
tacttcctgaaattgcttccactta

SEQ ID NO: 90298 - DNA, 25 bp, Saccharomyces pastorianus
tgacaagtcctacgattatgatgat

SEQ ID NO: 90299 - DNA, 25 bp, Saccharomyces pastorianus
gattccagtatccagaaggttttta

SEQ ID NO: 90300 - DNA, 25 bp, Saccharomyces pastorianus
gagattacgatgacgaaccgtttag

SEQ ID NO: 90301 - DNA, 25 bp, Saccharomyces pastorianus
taaattaggtttgagccgtagtcca

SEQ ID NO: 90302 - DNA, 25 bp, Saccharomyces pastorianus
aatctgaggtcctagaggcagtgac

SEQ ID NO: 90303 - DNA, 25 bp, Saccharomyces pastorianus
gacactttgaggttgctaatttgct

SEQ ID NO: 90304 - DNA, 25 bp, Saccharomyces pastorianus
gcctacttgttattatcagaattgg

SEQ ID NO: 90305 - DNA, 25 bp, Saccharomyces pastorianus
tgaagcatccataagtaaagacact

SEQ ID NO: 90306 - DNA, 25 bp, Saccharomyces pastorianus
atcactccagcctacttgttattat

SEQ ID NO: 90307 - DNA, 25 bp, Saccharomyces pastorianus
gtaaagacactttgaggttgctaat

SEQ ID NO: 90308 - DNA, 25 bp, Saccharomyces pastorianus
aacagtgccatatatcactccagcc

SEQ ID NO: 90309 - DNA, 25 bp, Saccharomyces pastorianus
atatatcactccagcctacttgtta

SEQ ID NO: 90310 - DNA, 25 bp, Saccharomyces pastorianus
aacagatgatgattgaagcatccat

SEQ ID NO: 90311 - DNA, 25 bp, Saccharomyces pastorianus
actccagcctacttgttattatcag

SEQ ID NO: 90312 - DNA, 25 bp, Saccharomyces pastorianus
gaggttgctaatttgctttttcgaa

SEQ ID NO: 90313 - DNA, 25 bp, Saccharomyces pastorianus
tgctttttcgaaataaaacagtgcc

SEQ ID NO: 90314 - DNA, 25 bp, Saccharomyces pastorianus
acagcacattggttgacttatacga

SEQ ID NO: 90315 - DNA, 25 bp, Saccharomyces pastorianus
gcatttaaatcgtgaagccctaggg

SEQ ID NO: 90316 - DNA, 25 bp, Saccharomyces pastorianus
ggatgtgccactcttatttgaagga

SEQ ID NO: 90317 - DNA, 25 bp, Saccharomyces pastorianus
gccgtaagtgccagtagcatcgtca

SEQ ID NO: 90318 - DNA, 25 bp, Saccharomyces pastorianus
atatgcggagtgactgtaagcgtaa

SEQ ID NO: 90319 - DNA, 25 bp, Saccharomyces pastorianus
atgtgtgtattggatgtgccactct

SEQ ID NO: 90320 - DNA, 25 bp, Saccharomyces pastorianus
aattggctactattacttgaaggga

SEQ ID NO: 90321 - DNA, 25 bp, Saccharomyces pastorianus
agcatcgtcatgtccagattactga

SEQ ID NO: 90322 - DNA, 25 bp, Saccharomyces pastorianus
ggtcgaaccaggacagaatgcttat

SEQ ID NO: 90323 - DNA, 25 bp, Saccharomyces pastorianus
gggataacacatcctgcaatcaggt

SEQ ID NO: 90324 - DNA, 25 bp, Saccharomyces pastorianus
gattgctagacaagtggtcgaacca

SEQ ID NO: 90325 - DNA, 25 bp, Saccharomyces pastorianus
gcttgtagtatttttcttctttcga

SEQ ID NO: 90326 - DNA, 25 bp, Saccharomyces pastorianus
tggcaattgcttaacggccgtcgca

SEQ ID NO: 90327 - DNA, 25 bp, Saccharomyces pastorianus
tactaactcttgttttcttgccttc

SEQ ID NO: 90328 - DNA, 25 bp, Saccharomyces pastorianus
gactcctagttcttcagtgcttatt

SEQ ID NO: 90329 - DNA, 25 bp, Saccharomyces pastorianus
agagcattcccttactaactcttgt

SEQ ID NO: 90330 - DNA, 25 bp, Saccharomyces pastorianus
ggccgtcgcaactaaaccgaatgaa

SEQ ID NO: 90331 - DNA, 25 bp, Saccharomyces pastorianus
attaatgtatcttcggtatcctttt

SEQ ID NO: 90332 - DNA, 25 bp, Saccharomyces pastorianus
ggacaagccctgtttttgctttgta

SEQ ID NO: 90333 - DNA, 25 bp, Saccharomyces pastorianus
ggtttttctcatttctacaggacaa

SEQ ID NO: 90334 - DNA, 25 bp, Saccharomyces pastorianus
tcttctttcgagttattgtggcaat

SEQ ID NO: 90335 - DNA, 25 bp, Saccharomyces pastorianus
tactttagcgttattgtcattgtta

SEQ ID NO: 90336 - DNA, 25 bp, Saccharomyces pastorianus
agcacggctttacaaaaaactctat

SEQ ID NO: 90337 - DNA, 25 bp, Saccharomyces pastorianus
ctttgactactgagctgtccttaga

SEQ ID NO: 90338 - DNA, 25 bp, Saccharomyces pastorianus
gcatttactgaaactgagcacggct

SEQ ID NO: 90339 - DNA, 25 bp, Saccharomyces pastorianus
gaattaagagagctgaaccttcaaa

SEQ ID NO: 90340 - DNA, 25 bp, Saccharomyces pastorianus
atgatgcgctactcaaagaatcgga

SEQ ID NO: 90341 - DNA, 25 bp, Saccharomyces pastorianus
aatagttgccatttcattcggttta

SEQ ID NO: 90342 - DNA, 25 bp, Saccharomyces pastorianus
tcaacaattcagcaggtacaagcat

SEQ ID NO: 90343 - DNA, 25 bp, Saccharomyces pastorianus
gctacaggagctcgaaagtgaatta

SEQ ID NO: 90344 - DNA, 25 bp, Saccharomyces pastorianus
gggaatgctctttggaatagttgcc

SEQ ID NO: 90345 - DNA, 25 bp, Saccharomyces pastorianus
aaatctgcatgtagcttgaaggaaa

SEQ ID NO: 90346 - DNA, 25 bp, Saccharomyces pastorianus
gaagaactaggagtcgtcgaaggca

SEQ ID NO: 90347 - DNA, 25 bp, Saccharomyces pastorianus
gaatagtccagacatgggtcaagaa

SEQ ID NO: 90348 - DNA, 25 bp, Saccharomyces pastorianus
atggatgacgatgatgctctgaata

SEQ ID NO: 90349 - DNA, 25 bp, Saccharomyces pastorianus
aaccactggttaggactctgggcga

SEQ ID NO: 90350 - DNA, 25 bp, Saccharomyces pastorianus
ccttgcgttggagggaacagtttca

SEQ ID NO: 90351 - DNA, 25 bp, Saccharomyces pastorianus
tttccgtttagttcccgaatatgat

SEQ ID NO: 90352 - DNA, 25 bp, Saccharomyces pastorianus
tgaaggattctgtggagtctttaaa

SEQ ID NO: 90353 - DNA, 25 bp, Saccharomyces pastorianus
agggaactcgatactttgcagcaaa

SEQ ID NO: 90354 - DNA, 25 bp, Saccharomyces pastorianus
atacgaaggcagagacgcggacgac

SEQ ID NO: 90355 - DNA, 25 bp, Saccharomyces pastorianus
cacgaaccttgcatcgacaatgttg

SEQ ID NO: 90356 - DNA, 25 bp, Saccharomyces pastorianus
ggactctgggcgataagttacgtaa

SEQ ID NO: 90357 - DNA, 25 bp, Saccharomyces pastorianus
ctttggaacagagcgtccttgcgtt

SEQ ID NO: 90358 - DNA, 25 bp, Saccharomyces pastorianus
gatttcttcgatgagccaggagcat

SEQ ID NO: 90359 - DNA, 25 bp, Saccharomyces pastorianus
aattgcggtttgacgatttcttcga

SEQ ID NO: 90360 - DNA, 25 bp, Saccharomyces pastorianus
actctctagcatctctaggcattta

SEQ ID NO: 90361 - DNA, 25 bp, Saccharomyces pastorianus
attggccttgtcttgtgataacacc

SEQ ID NO: 90362 - DNA, 25 bp, Saccharomyces pastorianus
tgataacaccctttaccgtcggaga

SEQ ID NO: 90363 - DNA, 25 bp, Saccharomyces pastorianus
aacactcatattgcttttcgagcac

SEQ ID NO: 90364 - DNA, 25 bp, Saccharomyces pastorianus
taccgtcggagagtcgttttgtttg

SEQ ID NO: 90365 - DNA, 25 bp, Saccharomyces pastorianus
gagcattcttttacggcatccttaa

SEQ ID NO: 90366 - DNA, 25 bp, Saccharomyces pastorianus
tttgaatatttggtcactctctagc

SEQ ID NO: 90367 - DNA, 25 bp, Saccharomyces pastorianus
gttgtcgtatttatcttctgcacca

SEQ ID NO: 90368 - DNA, 25 bp, Saccharomyces pastorianus
ttgttactttcgttgggaataccat

SEQ ID NO: 90369 - DNA, 25 bp, Saccharomyces pastorianus
ttctggcttggcatataccgctgat

SEQ ID NO: 90370 - DNA, 25 bp, Saccharomyces pastorianus
gcgaatagacagacgcctttctgct

SEQ ID NO: 90371 - DNA, 25 bp, Saccharomyces pastorianus
gtctcaaggtacaaggtcccgtact

SEQ ID NO: 90372 - DNA, 25 bp, Saccharomyces pastorianus
gctacttcgccggatttcgctaaat

SEQ ID NO: 90373 - DNA, 25 bp, Saccharomyces pastorianus
aattctcttggcgaatcctcaactt

SEQ ID NO: 90374 - DNA, 25 bp, Saccharomyces pastorianus
agaccgcactgtttcaactgtgaaa

SEQ ID NO: 90375 - DNA, 25 bp, Saccharomyces pastorianus
ggactgtcactatgacgcgttcaaa

SEQ ID NO: 90376 - DNA, 25 bp, Saccharomyces pastorianus
gtctccatctttgaaggcttcttct

SEQ ID NO: 90377 - DNA, 25 bp, Saccharomyces pastorianus
gaataatgctacttcctcaacgtct

SEQ ID NO: 90378 - DNA, 25 bp, Saccharomyces pastorianus
gtaccgaggaaagaccgcactgttt

SEQ ID NO: 90379 - DNA, 25 bp, Saccharomyces pastorianus
ataccgctgattatcctaacgctac

SEQ ID NO: 90380 - DNA, 25 bp, Saccharomyces pastorianus
aataaccttgttgtggtggaccttg

SEQ ID NO: 90381 - DNA, 25 bp, Saccharomyces pastorianus
ggtagtaaccttgttgttggctcat

SEQ ID NO: 90382 - DNA, 25 bp, Saccharomyces pastorianus
tccaacgtaacgatcccatcatatt

SEQ ID NO: 90383 - DNA, 25 bp, Saccharomyces pastorianus
gacatagactggttgctgctgagga

SEQ ID NO: 90384 - DNA, 25 bp, Saccharomyces pastorianus
acgaatcagttatcgcataccaatt

SEQ ID NO: 90385 - DNA, 25 bp, Saccharomyces pastorianus
aaacaactgtccaagcagctttcct

SEQ ID NO: 90386 - DNA, 25 bp, Saccharomyces pastorianus
tgcggtggaccttgttgataataac

SEQ ID NO: 90387 - DNA, 25 bp, Saccharomyces pastorianus
gtaattatatagtctttcgcagcat

SEQ ID NO: 90388 - DNA, 25 bp, Saccharomyces pastorianus
ctcctttggttgaccttgttggaca

SEQ ID NO: 90389 - DNA, 25 bp, Saccharomyces pastorianus
gaggataaccctgttgcggtggacc

SEQ ID NO: 90390 - DNA, 25 bp, Saccharomyces pastorianus
gatggtcaattcttgttccaacgta

SEQ ID NO: 90391 - DNA, 25 bp, Saccharomyces pastorianus
ggtcaaccaaaggaggaaagctgct

SEQ ID NO: 90392 - DNA, 25 bp, Saccharomyces pastorianus
gaaagctgcttggacagttgtttaa

SEQ ID NO: 90393 - DNA, 25 bp, Saccharomyces pastorianus
acaaggttattatcaacaaggtcca

SEQ ID NO: 90394 - DNA, 25 bp, Saccharomyces pastorianus
aggacccccacagcaaggttattat

SEQ ID NO: 90395 - DNA, 25 bp, Saccharomyces pastorianus
caaggtccaccgcaacagggttatc

SEQ ID NO: 90396 - DNA, 25 bp, Saccharomyces pastorianus
gcaacagggttatcctcagcagcaa

SEQ ID NO: 90397 - DNA, 25 bp, Saccharomyces pastorianus
gtctatgtccaacaaggtcaaccaa

SEQ ID NO: 90398 - DNA, 25 bp, Saccharomyces pastorianus
tccaccacaacaaggttattatcaa

SEQ ID NO: 90399 - DNA, 25 bp, Saccharomyces pastorianus
tcctcagcagcaaccagtctatgtc

SEQ ID NO: 90400 - DNA, 25 bp, Saccharomyces pastorianus
gcaaggttattatcaacaaggtcca

SEQ ID NO: 90401 - DNA, 25 bp, Saccharomyces pastorianus
ttatcctcagcagcaaccagtctat

SEQ ID NO: 90402 - DNA, 25 bp, Saccharomyces pastorianus
acagagccattgttaaatgccttag

SEQ ID NO: 90403 - DNA, 25 bp, Saccharomyces pastorianus
ggtaaatctcagatgaagcttctcg

SEQ ID NO: 90404 - DNA, 25 bp, Saccharomyces pastorianus
taccaatacctattaccttcgggtg

SEQ ID NO: 90405 - DNA, 25 bp, Saccharomyces pastorianus
ttcggttatcgttagattctccatc

SEQ ID NO: 90406 - DNA, 25 bp, Saccharomyces pastorianus
atttgcttttgcatgtttgagcgca

SEQ ID NO: 90407 - DNA, 25 bp, Saccharomyces pastorianus
atgccttagattctttagtacccag

SEQ ID NO: 90408 - DNA, 25 bp, Saccharomyces pastorianus
tagtacccagaataggatcagaatt

SEQ ID NO: 90409 - DNA, 25 bp, Saccharomyces pastorianus
agatctgagttggacagttttgtca

SEQ ID NO: 90410 - DNA, 25 bp, Saccharomyces pastorianus
tttgagcgcaggtagaatgcttaca

SEQ ID NO: 90411 - DNA, 25 bp, Saccharomyces pastorianus
acgaggacactggttttcacgatga

SEQ ID NO: 90412 - DNA, 25 bp, Saccharomyces pastorianus
tacacaattcttacgcggatctaat

SEQ ID NO: 90413 - DNA, 25 bp, Saccharomyces pastorianus
gcacctacccagtatttaaccagtt

SEQ ID NO: 90414 - DNA, 25 bp, Saccharomyces pastorianus
acatcttccaacacagtcttcatat

SEQ ID NO: 90415 - DNA, 25 bp, Saccharomyces pastorianus
attattcattttatagccgggtaag

SEQ ID NO: 90416 - DNA, 25 bp, Saccharomyces pastorianus
tgttttgacccaaacaactgtttat

SEQ ID NO: 90417 - DNA, 25 bp, Saccharomyces pastorianus
aatgcagtgtggaagcctctgcttc

SEQ ID NO: 90418 - DNA, 25 bp, Saccharomyces pastorianus
attcctggtgctgtcttcttagaaa

SEQ ID NO: 90419 - DNA, 25 bp, Saccharomyces pastorianus
tctgcttctaccataacatcttcca

SEQ ID NO: 90420 - DNA, 25 bp, Saccharomyces pastorianus
tataaacgtttgtgcacctacccag

SEQ ID NO: 90421 - DNA, 25 bp, Saccharomyces pastorianus
aggcattggcaatacccgttttgtt

SEQ ID NO: 90422 - DNA, 25 bp, Saccharomyces pastorianus
aactgtttatcattattcctggtgc

SEQ ID NO: 90423 - DNA, 25 bp, Saccharomyces pastorianus
taaccagttgggaggagctaacaat

SEQ ID NO: 90424 - DNA, 25 bp, Saccharomyces pastorianus
tactcctcgagatcatgataacgtc

SEQ ID NO: 90425 - DNA, 25 bp, Saccharomyces pastorianus
cattaactgatgttcctgtcgttta

SEQ ID NO: 90426 - DNA, 25 bp, Saccharomyces pastorianus
ctgtcgtttatctggacgctgttca

SEQ ID NO: 90427 - DNA, 25 bp, Saccharomyces pastorianus
cttttgccgaataaagcagccagta

SEQ ID NO: 90428 - DNA, 25 bp, Saccharomyces pastorianus
gtgacgaattcgtttcctcagacaa

SEQ ID NO: 90429 - DNA, 25 bp, Saccharomyces pastorianus
tttgacaaacaaatctcgacgagtg

SEQ ID NO: 90430 - DNA, 25 bp, Saccharomyces pastorianus
aactactctgttttagcaattgaat

SEQ ID NO: 90431 - DNA, 25 bp, Saccharomyces pastorianus
gacatgtttttgtgcccagaggtaa

SEQ ID NO: 90432 - DNA, 25 bp, Saccharomyces pastorianus
acgctgttcaaggtcttttgccgaa

SEQ ID NO: 90433 - DNA, 25 bp, Saccharomyces pastorianus
ggaatttcctatgttttcaaagcga

SEQ ID NO: 90434 - DNA, 25 bp, Saccharomyces pastorianus
gttaccaagcatggtcaggtcgtta

SEQ ID NO: 90435 - DNA, 25 bp, Saccharomyces pastorianus
atttgcaagagcgtttccatgccgc

SEQ ID NO: 90436 - DNA, 25 bp, Saccharomyces pastorianus
acgtcaccggtgaagctttagttca

SEQ ID NO: 90437 - DNA, 25 bp, Saccharomyces pastorianus
gagattagctgcttaccatgctcaa

SEQ ID NO: 90438 - DNA, 25 bp, Saccharomyces pastorianus
caaaaagaccggtatctgggctggt

SEQ ID NO: 90439 - DNA, 25 bp, Saccharomyces pastorianus
gaatgggttcatcttggacggtttc

SEQ ID NO: 90440 - DNA, 25 bp, Saccharomyces pastorianus
tgggctggtgttgatgcttcccaac

SEQ ID NO: 90441 - DNA, 25 bp, Saccharomyces pastorianus
cacttggccactggtgacatgttga

SEQ ID NO: 90442 - DNA, 25 bp, Saccharomyces pastorianus
gatgacaatgcagacgccttgaaga

SEQ ID NO: 90443 - DNA, 25 bp, Saccharomyces pastorianus
gatctcaaatcgcaaagggcactca

SEQ ID NO: 90444 - DNA, 25 bp, Saccharomyces pastorianus
ggtagattaattcacccagcctctg

SEQ ID NO: 90445 - DNA, 25 bp, Saccharomyces pastorianus
accaaggtggtttagtctctgatga

SEQ ID NO: 90446 - DNA, 25 bp, Saccharomyces pastorianus
tttgtctctttagcctacattgctc

SEQ ID NO: 90447 - DNA, 25 bp, Saccharomyces pastorianus
tggagcattggtttttcctttttcg

SEQ ID NO: 90448 - DNA, 25 bp, Saccharomyces pastorianus
acggtttcctttgccaattgtgcga

SEQ ID NO: 90449 - DNA, 25 bp, Saccharomyces pastorianus
ttaaaaggccctgcttctaccttct

SEQ ID NO: 90450 - DNA, 25 bp, Saccharomyces pastorianus
cctggttcttttcaccagaacttgt

SEQ ID NO: 90451 - DNA, 25 bp, Saccharomyces pastorianus
gcgatctggaaacttttttgtctct

SEQ ID NO: 90452 - DNA, 25 bp, Saccharomyces pastorianus
cattgccccggcagagatgggtcat

SEQ ID NO: 90453 - DNA, 25 bp, Saccharomyces pastorianus
gaggcctgagataaattctggttac

SEQ ID NO: 90454 - DNA, 25 bp, Saccharomyces pastorianus
gactctgcttttcatttttggcggc

SEQ ID NO: 90455 - DNA, 25 bp, Saccharomyces pastorianus
gaacttgtaccatttcttctcagag

SEQ ID NO: 90456 - DNA, 25 bp, Saccharomyces pastorianus
tactttgttcaaactgactctgctt

SEQ ID NO: 90457 - DNA, 25 bp, Saccharomyces pastorianus
agaagctgacttcaatcccgtgctt

SEQ ID NO: 90458 - DNA, 25 bp, Saccharomyces pastorianus
gtaaccagaatttatctcaggcctc

SEQ ID NO: 90459 - DNA, 25 bp, Saccharomyces pastorianus
gacttgtccaattctcagttggcca

SEQ ID NO: 90460 - DNA, 25 bp, Saccharomyces pastorianus
tgatcgcgtgctgacaaattactcg

SEQ ID NO: 90461 - DNA, 25 bp, Saccharomyces pastorianus
aattgggcgatgagctccctgatac

SEQ ID NO: 90462 - DNA, 25 bp, Saccharomyces pastorianus
aagtttgccgatgacttgtccaatt

SEQ ID NO: 90463 - DNA, 25 bp, Saccharomyces pastorianus
ctgatactgggctcgattgtcggat

SEQ ID NO: 90464 - DNA, 25 bp, Saccharomyces pastorianus
aatgctccataatgtccctcatgac

SEQ ID NO: 90465 - DNA, 25 bp, Saccharomyces pastorianus
taagagcccgactaaggccacgaat

SEQ ID NO: 90466 - DNA, 25 bp, Saccharomyces pastorianus
ttccagcatgttcttgatgggatct

SEQ ID NO: 90467 - DNA, 25 bp, Saccharomyces pastorianus
ttagaagacactccacccaagtttg

SEQ ID NO: 90468 - DNA, 25 bp, Saccharomyces pastorianus
aagaccgctgttgccttatttctac

SEQ ID NO: 90469 - DNA, 25 bp, Saccharomyces pastorianus
agactgtattcgctcaagtccctaa

SEQ ID NO: 90470 - DNA, 25 bp, Saccharomyces pastorianus
gcactactaagttggccgctgatgt

SEQ ID NO: 90471 - DNA, 25 bp, Saccharomyces pastorianus
agttatctaccattcctacaagcat

SEQ ID NO: 90472 - DNA, 25 bp, Saccharomyces pastorianus
actacacaaattcttctcctggttc

SEQ ID NO: 90473 - DNA, 25 bp, Saccharomyces pastorianus
ggaccatcgtctttgttggtgacat

SEQ ID NO: 90474 - DNA, 25 bp, Saccharomyces pastorianus
tgggcccaatttccaacttggtcaa

SEQ ID NO: 90475 - DNA, 25 bp, Saccharomyces pastorianus
tgatgctactgtcgctcaaggtgta

SEQ ID NO: 90476 - DNA, 25 bp, Saccharomyces pastorianus
gaatgtccaaatatcgccggcttta

SEQ ID NO: 90477 - DNA, 25 bp, Saccharomyces pastorianus
acatttttaccttcactttgccagt

SEQ ID NO: 90478 - DNA, 25 bp, Saccharomyces pastorianus
aaggcttacacatcttcagctcaag

SEQ ID NO: 90479 - DNA, 25 bp, Saccharomyces pastorianus
gctagtgttagcaggtactttctta

SEQ ID NO: 90480 - DNA, 25 bp, Saccharomyces pastorianus
ggtttactttgggtttgctcacatt

SEQ ID NO: 90481 - DNA, 25 bp, Saccharomyces pastorianus
gggccaaggtcaagttcaatatttt

SEQ ID NO: 90482 - DNA, 25 bp, Saccharomyces pastorianus
agacccgaattgaactacactacta

SEQ ID NO: 90483 - DNA, 25 bp, Saccharomyces pastorianus
acttcctatggtactttcagttggg

SEQ ID NO: 90484 - DNA, 25 bp, Saccharomyces pastorianus
attaggactgcgcagactgtccttg

SEQ ID NO: 90485 - DNA, 25 bp, Saccharomyces pastorianus
ttgtatgtggatttggccgcggatc

SEQ ID NO: 90486 - DNA, 25 bp, Saccharomyces pastorianus
ttgggtattcccactgccaatgtac

SEQ ID NO: 90487 - DNA, 25 bp, Saccharomyces pastorianus
atgatttgtccgtacttcctatggt

SEQ ID NO: 90488 - DNA, 25 bp, Saccharomyces pastorianus
ggatccgccgaattgggtattccca

SEQ ID NO: 90489 - DNA, 25 bp, Saccharomyces pastorianus
aagtcgatttgccaatacctgcgca

SEQ ID NO: 90490 - DNA, 25 bp, Saccharomyces pastorianus
gaaatcgtcctaccaagaatcagag

SEQ ID NO: 90491 - DNA, 25 bp, Saccharomyces pastorianus
atcaccgctgcgttacaattacaac

SEQ ID NO: 90492 - DNA, 25 bp, Saccharomyces pastorianus
aattattcacataacgctgcggtgg

SEQ ID NO: 90493 - DNA, 25 bp, Saccharomyces pastorianus
ttggtgggattagtttcggcctgac

SEQ ID NO: 90494 - DNA, 25 bp, Saccharomyces pastorianus
taaacctcatccaattttctccaaa

SEQ ID NO: 90495 - DNA, 25 bp, Saccharomyces pastorianus
aaattcttccctgaaatcgatgcaa

SEQ ID NO: 90496 - DNA, 25 bp, Saccharomyces pastorianus
aaatcagctattggctatcaccgct

SEQ ID NO: 90497 - DNA, 25 bp, Saccharomyces pastorianus
aactacctgacattcatcctatcaa

SEQ ID NO: 90498 - DNA, 25 bp, Saccharomyces pastorianus
gattaccaggcgagaactttgttga

SEQ ID NO: 90499 - DNA, 25 bp, Saccharomyces pastorianus
tcggcctgacggctgaagatatcaa

SEQ ID NO: 90500 - DNA, 25 bp, Saccharomyces pastorianus
gatgcaaaccaggactcatggccta

SEQ ID NO: 90501 - DNA, 25 bp, Saccharomyces pastorianus
cggttctgttgattccgtgtcaaga

SEQ ID NO: 90502 - DNA, 25 bp, Saccharomyces pastorianus
agaacaagccgaagactacctcaag

SEQ ID NO: 90503 - DNA, 25 bp, Saccharomyces pastorianus
aaaagcttcctacacatatctctct

SEQ ID NO: 90504 - DNA, 25 bp, Saccharomyces pastorianus
agatggaaccgctacagggctgaaa

SEQ ID NO: 90505 - DNA, 25 bp, Saccharomyces pastorianus
tacctcaaggacatacccggtgatg

SEQ ID NO: 90506 - DNA, 25 bp, Saccharomyces pastorianus
atataatggcgcctttacgagaaaa

SEQ ID NO: 90507 - DNA, 25 bp, Saccharomyces pastorianus
taatatatcgcgtcagggctctgtc

SEQ ID NO: 90508 - DNA, 25 bp, Saccharomyces pastorianus
agatctaacacggtagtcagctact

SEQ ID NO: 90509 - DNA, 25 bp, Saccharomyces pastorianus
acgaactctgatgtggtagacctca

SEQ ID NO: 90510 - DNA, 25 bp, Saccharomyces pastorianus
ctattctctgggacatggcttgcgt

SEQ ID NO: 90511 - DNA, 25 bp, Saccharomyces pastorianus
gtagacctcagctattctctgggac

SEQ ID NO: 90512 - DNA, 25 bp, Saccharomyces pastorianus
agtaccatccgcgttattagtattg

SEQ ID NO: 90513 - DNA, 25 bp, Saccharomyces pastorianus
gagacacgctgttaataagccatca

SEQ ID NO: 90514 - DNA, 25 bp, Saccharomyces pastorianus
aagacctttatcgaattcgccctct

SEQ ID NO: 90515 - DNA, 25 bp, Saccharomyces pastorianus
gcattggtaccataaaagcttctat

SEQ ID NO: 90516 - DNA, 25 bp, Saccharomyces pastorianus
tgaattcttccaatcgtcattccgg

SEQ ID NO: 90517 - DNA, 25 bp, Saccharomyces pastorianus
aaaccgggttttatgacgcaggatg

SEQ ID NO: 90518 - DNA, 25 bp, Saccharomyces pastorianus
tcaaattcaatttcctcttcccaaa

SEQ ID NO: 90519 - DNA, 25 bp, Saccharomyces pastorianus
gaataatcttcacgagtcacaaatg

SEQ ID NO: 90520 - DNA, 25 bp, Saccharomyces pastorianus
agcaggtgcaacttcatatcaaaca

SEQ ID NO: 90521 - DNA, 25 bp, Saccharomyces pastorianus
gagatcaatttccacgacaacaaag

SEQ ID NO: 90522 - DNA, 25 bp, Saccharomyces pastorianus
attacactatttttgctcaggcgcc

SEQ ID NO: 90523 - DNA, 25 bp, Saccharomyces pastorianus
gcgcgctgaaaattctagctcaaat

SEQ ID NO: 90524 - DNA, 25 bp, Saccharomyces pastorianus
ggaaactgtttctcaacgtcaaact

SEQ ID NO: 90525 - DNA, 25 bp, Saccharomyces pastorianus
gcgatgcgcgctgaaaattctagct

SEQ ID NO: 90526 - DNA, 25 bp, Saccharomyces pastorianus
aatgttttctacactgcgatgcgcg

SEQ ID NO: 90527 - DNA, 25 bp, Saccharomyces pastorianus
atatcatctgtttattagcattcgt

SEQ ID NO: 90528 - DNA, 25 bp, Saccharomyces pastorianus
ggttacaacaaatcagtagcaatca

SEQ ID NO: 90529 - DNA, 25 bp, Saccharomyces pastorianus
aacgtcaaacttctactatagtata

SEQ ID NO: 90530 - DNA, 25 bp, Saccharomyces pastorianus
gtttattagcattcgtgttagtagt

SEQ ID NO: 90531 - DNA, 25 bp, Saccharomyces pastorianus
ttagtcgaagggaaactgtttctca

SEQ ID NO: 90532 - DNA, 25 bp, Saccharomyces pastorianus
tctacactgcgatgcgcgctgaaaa

SEQ ID NO: 90533 - DNA, 25 bp, Saccharomyces pastorianus
gtttctcaacgtcaaacttctacta

SEQ ID NO: 90534 - DNA, 25 bp, Saccharomyces pastorianus
taggcctggtgacatgctaaagaca

SEQ ID NO: 90535 - DNA, 25 bp, Saccharomyces pastorianus
ttcccatcattatctatacctgtag

SEQ ID NO: 90536 - DNA, 25 bp, Saccharomyces pastorianus
gttatcatatctcctacaacgctga

SEQ ID NO: 90537 - DNA, 25 bp, Saccharomyces pastorianus
gttagcccgactttcaatgacaatg

SEQ ID NO: 90538 - DNA, 25 bp, Saccharomyces pastorianus
gatgggtttccaataggcctacaag

SEQ ID NO: 90539 - DNA, 25 bp, Saccharomyces pastorianus
tattacctttctttcccggaatcag

SEQ ID NO: 90540 - DNA, 25 bp, Saccharomyces pastorianus
gaaatttccggagaaccactcctag

SEQ ID NO: 90541 - DNA, 25 bp, Saccharomyces pastorianus
atgggagccttccagtgaactgagc

SEQ ID NO: 90542 - DNA, 25 bp, Saccharomyces pastorianus
ggcctacaagtagttagcccgactt

SEQ ID NO: 90543 - DNA, 25 bp, Saccharomyces pastorianus
aacgctgatgccatttaggcctggt

SEQ ID NO: 90544 - DNA, 25 bp, Saccharomyces pastorianus
taatggataccacttctgcgctcaa

SEQ ID NO: 90545 - DNA, 25 bp, Saccharomyces pastorianus
ggtagtcaatttccagatttccaaa

SEQ ID NO: 90546 - DNA, 25 bp, Saccharomyces pastorianus
tggtagaacaggtcgtgcagcaaat

SEQ ID NO: 90547 - DNA, 25 bp, Saccharomyces pastorianus
gaaacatgatcccttgaatagcaat

SEQ ID NO: 90548 - DNA, 25 bp, Saccharomyces pastorianus
gatatccctaatgtttccttggtag

SEQ ID NO: 90549 - DNA, 25 bp, Saccharomyces pastorianus
aggtgacgattttacatggttctaa

SEQ ID NO: 90550 - DNA, 25 bp, Saccharomyces pastorianus
aaagcctgtttatgcaaccattggg

SEQ ID NO: 90551 - DNA, 25 bp, Saccharomyces pastorianus
tgtctcctttgttagtgccgctgaa

SEQ ID NO: 90552 - DNA, 25 bp, Saccharomyces pastorianus
aaatgagggcactgctgtctccttt

SEQ ID NO: 90553 - DNA, 25 bp, Saccharomyces pastorianus
gggttctgaacctttgattcaacag

SEQ ID NO: 90554 - DNA, 25 bp, Saccharomyces pastorianus
agcaatatcttttccgaagccgtaa

SEQ ID NO: 90555 - DNA, 25 bp, Saccharomyces pastorianus
aattgtcgctaaatatgatccacca

SEQ ID NO: 90556 - DNA, 25 bp, Saccharomyces pastorianus
gaaagtgcgttgagggtgaatccca

SEQ ID NO: 90557 - DNA, 25 bp, Saccharomyces pastorianus
gggtgaatcccaatgacgaactcat

SEQ ID NO: 90558 - DNA, 25 bp, Saccharomyces pastorianus
tagggcactacaactaaaaccttct

SEQ ID NO: 90559 - DNA, 25 bp, Saccharomyces pastorianus
agatcctgaaatacaactatgcttg

SEQ ID NO: 90560 - DNA, 25 bp, Saccharomyces pastorianus
ggcttcactggccaattccaataga

SEQ ID NO: 90561 - DNA, 25 bp, Saccharomyces pastorianus
aactatgcttgggtctcttatttta

SEQ ID NO: 90562 - DNA, 25 bp, Saccharomyces pastorianus
aatctggcggtatcatccatgaata

SEQ ID NO: 90563 - DNA, 25 bp, Saccharomyces pastorianus
gttggatctctcttgaatacgtaca

SEQ ID NO: 90564 - DNA, 25 bp, Saccharomyces pastorianus
gaagcaatccaagcctatcataggg

SEQ ID NO: 90565 - DNA, 25 bp, Saccharomyces pastorianus
ttagagctcgctataatctggcggt

SEQ ID NO: 90566 - DNA, 25 bp, Saccharomyces pastorianus
aagcagcaggctacttattaagtgt

SEQ ID NO: 90567 - DNA, 25 bp, Saccharomyces pastorianus
agcgaatggtctaagctgcttctag

SEQ ID NO: 90568 - DNA, 25 bp, Saccharomyces pastorianus
gtgggaccccgttctgtatgaacaa

SEQ ID NO: 90569 - DNA, 25 bp, Saccharomyces pastorianus
ttctggtggttggacctggatacta

SEQ ID NO: 90570 - DNA, 25 bp, Saccharomyces pastorianus
gcttctagatatgtggtgggacccc

SEQ ID NO: 90571 - DNA, 25 bp, Saccharomyces pastorianus
cataccctatgtcgattattcagag

SEQ ID NO: 90572 - DNA, 25 bp, Saccharomyces pastorianus
gacaggttggaaactctggctgaca

SEQ ID NO: 90573 - DNA, 25 bp, Saccharomyces pastorianus
attcccaccgggagcatgctctgaa

SEQ ID NO: 90574 - DNA, 25 bp, Saccharomyces pastorianus
ggaggcttcaatttgggctcatttt

SEQ ID NO: 90575 - DNA, 25 bp, Saccharomyces pastorianus
aacctaagagacgacataccctatg

SEQ ID NO: 90576 - DNA, 25 bp, Saccharomyces pastorianus
gagacagacgttcagggagtttcct

SEQ ID NO: 90577 - DNA, 25 bp, Saccharomyces pastorianus
gcgagatgcagtactacaccacttt

SEQ ID NO: 90578 - DNA, 25 bp, Saccharomyces pastorianus
tgagtacggaaacaccagttcggga

SEQ ID NO: 90579 - DNA, 25 bp, Saccharomyces pastorianus
tatatcgtcatcttgcttccttttt

SEQ ID NO: 90580 - DNA, 25 bp, Saccharomyces pastorianus
gcagctttcggcacgtgagtacgga

SEQ ID NO: 90581 - DNA, 25 bp, Saccharomyces pastorianus
aatgcactattacgcagctttcggc

SEQ ID NO: 90582 - DNA, 25 bp, Saccharomyces pastorianus
tcatcttgcttcctttttcttactc

SEQ ID NO: 90583 - DNA, 25 bp, Saccharomyces pastorianus
acatcatatcctgccaatgcactat

SEQ ID NO: 90584 - DNA, 25 bp, Saccharomyces pastorianus
gaaacaccatacaatccatcacatc

SEQ ID NO: 90585 - DNA, 25 bp, Saccharomyces pastorianus
ttcctgccctggaaacaccatacaa

SEQ ID NO: 90586 - DNA, 25 bp, Saccharomyces pastorianus
atgcgccgcctatatcgtcatcttg

SEQ ID NO: 90587 - DNA, 25 bp, Saccharomyces pastorianus
tacaatccatcacatcatatcctgc

SEQ ID NO: 90588 - DNA, 25 bp, Saccharomyces pastorianus
tcgggaccgggtacacaatagggat

SEQ ID NO: 90589 - DNA, 25 bp, Saccharomyces pastorianus
ccttttcatgtttgtagatttctgt

SEQ ID NO: 90590 - DNA, 25 bp, Saccharomyces pastorianus
gactttactctaccttttcatgttt

SEQ ID NO: 90591 - DNA, 25 bp, Saccharomyces pastorianus
tctagtctcgagaatggcccacagc

SEQ ID NO: 90592 - DNA, 25 bp, Saccharomyces pastorianus
aaagccacccaagctattattgtac

SEQ ID NO: 90593 - DNA, 25 bp, Saccharomyces pastorianus
gccaatatcacttttcttttctact

SEQ ID NO: 90594 - DNA, 25 bp, Saccharomyces pastorianus
ttcgctatcgtgtatgccaatatca

SEQ ID NO: 90595 - DNA, 25 bp, Saccharomyces pastorianus
aatttcgcgtagagcccattgtgaa

SEQ ID NO: 90596 - DNA, 25 bp, Saccharomyces pastorianus
gaacaacttcgctatcgtgtatgcc

SEQ ID NO: 90597 - DNA, 25 bp, Saccharomyces pastorianus
gggctgcgacaatttcgcgtagagc

SEQ ID NO: 90598 - DNA, 25 bp, Saccharomyces pastorianus
ttctactacttactcgactttactc

SEQ ID NO: 90599 - DNA, 25 bp, Saccharomyces pastorianus
gagcccattgtgaaaaaagccaccc

SEQ ID NO: 90600 - DNA, 25 bp, Saccharomyces pastorianus
cgagtgataaccctgctgctgtaat

SEQ ID NO: 90601 - DNA, 25 bp, Saccharomyces pastorianus
agggtccaccgataacacagcaaaa

SEQ ID NO: 90602 - DNA, 25 bp, Saccharomyces pastorianus
aatattacgcaaccatcaccaattc

SEQ ID NO: 90603 - DNA, 25 bp, Saccharomyces pastorianus
attctgctccgtgcgttaatcaatt

SEQ ID NO: 90604 - DNA, 25 bp, Saccharomyces pastorianus
atcaattgaacagtgactctccgcc

SEQ ID NO: 90605 - DNA, 25 bp, Saccharomyces pastorianus
ctaatataggttacgtcccagggct

SEQ ID NO: 90606 - DNA, 25 bp, Saccharomyces pastorianus
cggtacctcaaaagttcctcagatc

SEQ ID NO: 90607 - DNA, 25 bp, Saccharomyces pastorianus
agtctctatctcaaaacggtacctc

SEQ ID NO: 90608 - DNA, 25 bp, Saccharomyces pastorianus
gaatggtacacaaagccgtctgaat

SEQ ID NO: 90609 - DNA, 25 bp, Saccharomyces pastorianus
tcggaccaactttgctacgagtgat

SEQ ID NO: 90610 - DNA, 25 bp, Saccharomyces pastorianus
tttagatctcaacagggtccaccga

SEQ ID NO: 90611 - DNA, 25 bp, Saccharomyces pastorianus
attagctaagctgcacaagttatca

SEQ ID NO: 90612 - DNA, 25 bp, Saccharomyces pastorianus
gcccctcaatgcaatctcacaatga

SEQ ID NO: 90613 - DNA, 25 bp, Saccharomyces pastorianus
tgcagttgtacagattgcccctcaa

SEQ ID NO: 90614 - DNA, 25 bp, Saccharomyces pastorianus
aatgaacagacggtgctcgaccagc

SEQ ID NO: 90615 - DNA, 25 bp, Saccharomyces pastorianus
gtttggcccataacctagaaaatga

SEQ ID NO: 90616 - DNA, 25 bp, Saccharomyces pastorianus
atgaccattgaaaacgttgccgaag

SEQ ID NO: 90617 - DNA, 25 bp, Saccharomyces pastorianus
gctgaacttcataaactgcatccaa

SEQ ID NO: 90618 - DNA, 25 bp, Saccharomyces pastorianus
tgctcgaccagctgggcgacagatg

SEQ ID NO: 90619 - DNA, 25 bp, Saccharomyces pastorianus
gagcgtagcctctcaattaggtagt

SEQ ID NO: 90620 - DNA, 25 bp, Saccharomyces pastorianus
gagtatttgacaggtttggcccata

SEQ ID NO: 90621 - DNA, 25 bp, Saccharomyces pastorianus
ttaatgggctgtatccgagcgtagc

SEQ ID NO: 90622 - DNA, 25 bp, Saccharomyces pastorianus
gggattacacgaactatgcgataaa

SEQ ID NO: 90623 - DNA, 25 bp, Saccharomyces pastorianus
gggcccatgggaatgttatgctagt

SEQ ID NO: 90624 - DNA, 25 bp, Saccharomyces pastorianus
caaaaagcaccaaggccttactggt

SEQ ID NO: 90625 - DNA, 25 bp, Saccharomyces pastorianus
atgctagtgctaactttgaacggtc

SEQ ID NO: 90626 - DNA, 25 bp, Saccharomyces pastorianus
gatacagttccttagttcctattga

SEQ ID NO: 90627 - DNA, 25 bp, Saccharomyces pastorianus
tcaaaggttcagcaaacggcgtaat

SEQ ID NO: 90628 - DNA, 25 bp, Saccharomyces pastorianus
gaatttaacgaacatgtccacaata

SEQ ID NO: 90629 - DNA, 25 bp, Saccharomyces pastorianus
tgataaagttcctgggtggttggct

SEQ ID NO: 90630 - DNA, 25 bp, Saccharomyces pastorianus
ggtgagccagtgtacatttctagat

SEQ ID NO: 90631 - DNA, 25 bp, Saccharomyces pastorianus
ttgaacggtcaccactacacgacta

SEQ ID NO: 90632 - DNA, 25 bp, Saccharomyces pastorianus
attaggaccttcgagatttgcggag

SEQ ID NO: 90633 - DNA, 25 bp, Saccharomyces pastorianus
gaatccactgaacttcttcgcacag

SEQ ID NO: 90634 - DNA, 25 bp, Saccharomyces pastorianus
tgtagaaggcgcctgtcctcaaata

SEQ ID NO: 90635 - DNA, 25 bp, Saccharomyces pastorianus
acttggcatataacatcggcattca

SEQ ID NO: 90636 - DNA, 25 bp, Saccharomyces pastorianus
tacaggcccgtttgttttcatatgc

SEQ ID NO: 90637 - DNA, 25 bp, Saccharomyces pastorianus
tatggaatgggccagctatccctta

SEQ ID NO: 90638 - DNA, 25 bp, Saccharomyces pastorianus
gtcctcaaatacagcagcgcgttta

SEQ ID NO: 90639 - DNA, 25 bp, Saccharomyces pastorianus
agaaatctctatcgcgttttgggta

SEQ ID NO: 90640 - DNA, 25 bp, Saccharomyces pastorianus
tacccgtaaactgtccatatgcatc

SEQ ID NO: 90641 - DNA, 25 bp, Saccharomyces pastorianus
atgttaacggcaacttcggctcaga

SEQ ID NO: 90642 - DNA, 25 bp, Saccharomyces pastorianus
aaatttttcaatcccgctatcagag

SEQ ID NO: 90643 - DNA, 25 bp, Saccharomyces pastorianus
gctaggtcctaacttccatcaaata

SEQ ID NO: 90644 - DNA, 25 bp, Saccharomyces pastorianus
gcttccacgctgaatatatacgaat

SEQ ID NO: 90645 - DNA, 25 bp, Saccharomyces pastorianus
gagaataaacgcttccacgctgaat

SEQ ID NO: 90646 - DNA, 25 bp, Saccharomyces pastorianus
gatatttgacgatttactagcagaa

SEQ ID NO: 90647 - DNA, 25 bp, Saccharomyces pastorianus
aaatacatcaagaacctcgaacaaa

SEQ ID NO: 90648 - DNA, 25 bp, Saccharomyces pastorianus
gacaacaacattttaatagctcagc

SEQ ID NO: 90649 - DNA, 25 bp, Saccharomyces pastorianus
aaaacagtgctgataccgctaaaaa

SEQ ID NO: 90650 - DNA, 25 bp, Saccharomyces pastorianus
gtgagtatgatgtcttatgtaacga

SEQ ID NO: 90651 - DNA, 25 bp, Saccharomyces pastorianus
aacctgttcctgacaaagacgccca

SEQ ID NO: 90652 - DNA, 25 bp, Saccharomyces pastorianus
aagacgcccaactcataagtagttc

SEQ ID NO: 90653 - DNA, 25 bp, Saccharomyces pastorianus
tgcacctccttcttttcaaaacagt

SEQ ID NO: 90654 - DNA, 25 bp, Saccharomyces pastorianus
gataatgtaaccaaacctgttcctg

SEQ ID NO: 90655 - DNA, 25 bp, Saccharomyces pastorianus
ttaccagcaccacatcacatattat

SEQ ID NO: 90656 - DNA, 25 bp, Saccharomyces pastorianus
ggacaggcgttcgatcattctttaa

SEQ ID NO: 90657 - DNA, 25 bp, Saccharomyces pastorianus
tcaagatatactggcgcttccggac

SEQ ID NO: 90658 - DNA, 25 bp, Saccharomyces pastorianus
gaattctaatgtacgcgagagcgct

SEQ ID NO: 90659 - DNA, 25 bp, Saccharomyces pastorianus
atagcaaccgctactggaactcttt

SEQ ID NO: 90660 - DNA, 25 bp, Saccharomyces pastorianus
agtgacgtttgctggacaggcgttc

SEQ ID NO: 90661 - DNA, 25 bp, Saccharomyces pastorianus
gagagcgctcaaggtaaggcattaa

SEQ ID NO: 90662 - DNA, 25 bp, Saccharomyces pastorianus
ggattcatattttcaataccgccat

SEQ ID NO: 90663 - DNA, 25 bp, Saccharomyces pastorianus
agataatactcgcaccgacgcggag

SEQ ID NO: 90664 - DNA, 25 bp, Saccharomyces pastorianus
aattccaggaacgacggtgccaatg

SEQ ID NO: 90665 - DNA, 25 bp, Saccharomyces pastorianus
gcatcacacaattggcgtacgcaag

SEQ ID NO: 90666 - DNA, 25 bp, Saccharomyces pastorianus
gtcggagaatggtcaggcgctatta

SEQ ID NO: 90667 - DNA, 25 bp, Saccharomyces pastorianus
attaccgtgaccgtgtgagacaatt

SEQ ID NO: 90668 - DNA, 25 bp, Saccharomyces pastorianus
tttgacctggaaagcgagcgtatgc

SEQ ID NO: 90669 - DNA, 25 bp, Saccharomyces pastorianus
tggaagaccgaagacgccgtagaat

SEQ ID NO: 90670 - DNA, 25 bp, Saccharomyces pastorianus
aactttcttttcacccagcagtagt

SEQ ID NO: 90671 - DNA, 25 bp, Saccharomyces pastorianus
gaacaacgtcatcggttttgtcctc

SEQ ID NO: 90672 - DNA, 25 bp, Saccharomyces pastorianus
aaaattctcatcctctttatcagca

SEQ ID NO: 90673 - DNA, 25 bp, Saccharomyces pastorianus
attactgattgtgcaacctggctaa

SEQ ID NO: 90674 - DNA, 25 bp, Saccharomyces pastorianus
gcacagctagccatttattcgtcaa

SEQ ID NO: 90675 - DNA, 25 bp, Saccharomyces pastorianus
tgtttaccaccaacgacaagccagt

SEQ ID NO: 90676 - DNA, 25 bp, Saccharomyces pastorianus
ctaacaacttcgcagctattaccaa

SEQ ID NO: 90677 - DNA, 25 bp, Saccharomyces pastorianus
gggttgcaagtttgatcttcgtcca

SEQ ID NO: 90678 - DNA, 25 bp, Saccharomyces pastorianus
gaaaccacgcacttgttttggcgtt

SEQ ID NO: 90679 - DNA, 25 bp, Saccharomyces pastorianus
atcctaggcgcttcagatctctgtt

SEQ ID NO: 90680 - DNA, 25 bp, Saccharomyces pastorianus
cttcgggctctaaagctttgctcaa

SEQ ID NO: 90681 - DNA, 25 bp, Saccharomyces pastorianus
aggcgaattttgtatcctccttcgg

SEQ ID NO: 90682 - DNA, 25 bp, Saccharomyces pastorianus
gagagtaagtccattggccccgatg

SEQ ID NO: 90683 - DNA, 25 bp, Saccharomyces pastorianus
actccagaaggatttgcgccgtcga

SEQ ID NO: 90684 - DNA, 25 bp, Saccharomyces pastorianus
atgggctttactccaatctatttgg

SEQ ID NO: 90685 - DNA, 25 bp, Saccharomyces pastorianus
ggccccgatgggttatctttcaatg

SEQ ID NO: 90686 - DNA, 25 bp, Saccharomyces pastorianus
atgatactgtactagcgccagtccc

SEQ ID NO: 90687 - DNA, 25 bp, Saccharomyces pastorianus
gatcttcgtccaagcctttcaaata

SEQ ID NO: 90688 - DNA, 25 bp, Saccharomyces pastorianus
gttatgaaatggtaccctgtcctaa

SEQ ID NO: 90689 - DNA, 25 bp, Saccharomyces pastorianus
gcgcgccatgtggacatctattttg

SEQ ID NO: 90690 - DNA, 25 bp, Saccharomyces pastorianus
gatactgaaagtgttgccgcgtttt

SEQ ID NO: 90691 - DNA, 25 bp, Saccharomyces pastorianus
atgccccttgtgcagacaacactgt

SEQ ID NO: 90692 - DNA, 25 bp, Saccharomyces pastorianus
gaaggaatcgcagctgactcatata

SEQ ID NO: 90693 - DNA, 25 bp, Saccharomyces pastorianus
attactaggtcgtctgttggtctac

SEQ ID NO: 90694 - DNA, 25 bp, Saccharomyces pastorianus
gtacacatgaccctcttttatttca

SEQ ID NO: 90695 - DNA, 25 bp, Saccharomyces pastorianus
aagagaggccagaatgccccttgtg

SEQ ID NO: 90696 - DNA, 25 bp, Saccharomyces pastorianus
aacatgagtgatcctagctgcgcgc

SEQ ID NO: 90697 - DNA, 25 bp, Saccharomyces pastorianus
gttggtctacaggagcgttcagaac

SEQ ID NO: 90698 - DNA, 25 bp, Saccharomyces pastorianus
acgctcgggtcctggatttatggga

SEQ ID NO: 90699 - DNA, 25 bp, Saccharomyces pastorianus
agaatcggcggtaacctcgttatcg

SEQ ID NO: 90700 - DNA, 25 bp, Saccharomyces pastorianus
agacccacaggtcataccttgtaca

SEQ ID NO: 90701 - DNA, 25 bp, Saccharomyces pastorianus
tatctcacagtcaaatccacaatcc

SEQ ID NO: 90702 - DNA, 25 bp, Saccharomyces pastorianus
tatcacattttgttacaccctttaa

SEQ ID NO: 90703 - DNA, 25 bp, Saccharomyces pastorianus
caccctttaaagctcgtaactgcgt

SEQ ID NO: 90704 - DNA, 25 bp, Saccharomyces pastorianus
gaatctcttagtatctcacagtcaa

SEQ ID NO: 90705 - DNA, 25 bp, Saccharomyces pastorianus
aggcgctgcatgtcattccatgtac

SEQ ID NO: 90706 - DNA, 25 bp, Saccharomyces pastorianus
gattgtattagtacaggcgctgcat

SEQ ID NO: 90707 - DNA, 25 bp, Saccharomyces pastorianus
taccttgtacactcagtagtccttc

SEQ ID NO: 90708 - DNA, 25 bp, Saccharomyces pastorianus
tcgttatcgtatgtcacctggcact

SEQ ID NO: 90709 - DNA, 25 bp, Saccharomyces pastorianus
ccttccttcgtacttatggctgtaa

SEQ ID NO: 90710 - DNA, 25 bp, Saccharomyces pastorianus
tcggccagtgtcgttctaagttcat

SEQ ID NO: 90711 - DNA, 25 bp, Saccharomyces pastorianus
gccaacgccatcgatatttcactaa

SEQ ID NO: 90712 - DNA, 25 bp, Saccharomyces pastorianus
ttccgattgctatgggtgtgctcat

SEQ ID NO: 90713 - DNA, 25 bp, Saccharomyces pastorianus
gctcccgctttagcactgagtgatc

SEQ ID NO: 90714 - DNA, 25 bp, Saccharomyces pastorianus
aatgctcgccggtttagcgatggca

SEQ ID NO: 90715 - DNA, 25 bp, Saccharomyces pastorianus
gtttgagaggactggccaacgccat

SEQ ID NO: 90716 - DNA, 25 bp, Saccharomyces pastorianus
aagtggactccaccggatattgaat

SEQ ID NO: 90717 - DNA, 25 bp, Saccharomyces pastorianus
tgaatttgttctgggcactttgcta

SEQ ID NO: 90718 - DNA, 25 bp, Saccharomyces pastorianus
gtattgccatttcaacaggtgcgga

SEQ ID NO: 90719 - DNA, 25 bp, Saccharomyces pastorianus
tcaaggcttttttctacgcgggcta

SEQ ID NO: 90720 - DNA, 25 bp, Saccharomyces pastorianus
tgtttacagcgatgtgtcacccaca

SEQ ID NO: 90721 - DNA, 25 bp, Saccharomyces pastorianus
aaaggcgccgctgtgaaagttgttg

SEQ ID NO: 90722 - DNA, 25 bp, Saccharomyces pastorianus
atcgcattcccgtcactgtgaagag

SEQ ID NO: 90723 - DNA, 25 bp, Saccharomyces pastorianus
ggctgttgcagagggccataataca

SEQ ID NO: 90724 - DNA, 25 bp, Saccharomyces pastorianus
gtggtctatttgcagctgacgctaa

SEQ ID NO: 90725 - DNA, 25 bp, Saccharomyces pastorianus
cgacggtggatacaaatctgccttt

SEQ ID NO: 90726 - DNA, 25 bp, Saccharomyces pastorianus
agttctttggccgaacacattggca

SEQ ID NO: 90727 - DNA, 25 bp, Saccharomyces pastorianus
gaggctcagcgtgacagtgcagata

SEQ ID NO: 90728 - DNA, 25 bp, Saccharomyces pastorianus
tctgcctttggcactgatagttgtg

SEQ ID NO: 90729 - DNA, 25 bp, Saccharomyces pastorianus
gtaatactgaagtgccggaggctca

SEQ ID NO: 90730 - DNA, 25 bp, Saccharomyces pastorianus
cgaatcgactaggaacgtggctgtt

SEQ ID NO: 90731 - DNA, 25 bp, Saccharomyces pastorianus
taggttacctgccaaggacgacggt

SEQ ID NO: 90732 - DNA, 25 bp, Saccharomyces pastorianus
gaatctaacttgcatttgtcccggg

SEQ ID NO: 90733 - DNA, 25 bp, Saccharomyces pastorianus
ttcgtttcgtttttcatatgctatc

SEQ ID NO: 90734 - DNA, 25 bp, Saccharomyces pastorianus
tgcatttttcgccatcattcttttc

SEQ ID NO: 90735 - DNA, 25 bp, Saccharomyces pastorianus
taagctctttctgccgtgcaaaagg

SEQ ID NO: 90736 - DNA, 25 bp, Saccharomyces pastorianus
cggcgaaacgcaagaccgagcattc

SEQ ID NO: 90737 - DNA, 25 bp, Saccharomyces pastorianus
gacagctattgcactttggcggcac

SEQ ID NO: 90738 - DNA, 25 bp, Saccharomyces pastorianus
atccatttccttttgggctaactag

SEQ ID NO: 90739 - DNA, 25 bp, Saccharomyces pastorianus
ggtcaataggactcgacaaatcatt

SEQ ID NO: 90740 - DNA, 25 bp, Saccharomyces pastorianus
ttttcttgccttttacattccacac

SEQ ID NO: 90741 - DNA, 25 bp, Saccharomyces pastorianus
aaatcattatttacgcgcgtgcatt

SEQ ID NO: 90742 - DNA, 25 bp, Saccharomyces pastorianus
tttccgcgggttttgtggtcaatag

SEQ ID NO: 90743 - DNA, 25 bp, Saccharomyces pastorianus
tctgccaagatcattaacattatat

SEQ ID NO: 90744 - DNA, 25 bp, Saccharomyces pastorianus
tttggcttggttcccaggtatgcta

SEQ ID NO: 90745 - DNA, 25 bp, Saccharomyces pastorianus
ctgccaagatcattaacattatatt

SEQ ID NO: 90746 - DNA, 25 bp, Saccharomyces pastorianus
tcccttttcttaccaccagtcgccg

SEQ ID NO: 90747 - DNA, 25 bp, Saccharomyces pastorianus
ttctgccaagatcattaacattata

SEQ ID NO: 90748 - DNA, 25 bp, Saccharomyces pastorianus
attctgccaagatcattaacattat

SEQ ID NO: 90749 - DNA, 25 bp, Saccharomyces pastorianus
tttgaccattttggcttggttccca

SEQ ID NO: 90750 - DNA, 25 bp, Saccharomyces pastorianus
tatattatcccttttcttaccacca

SEQ ID NO: 90751 - DNA, 25 bp, Saccharomyces pastorianus
gggtactgactgtatagtggatatc

SEQ ID NO: 90752 - DNA, 25 bp, Saccharomyces pastorianus
tcgccgtttttctagcccgtgggtg

SEQ ID NO: 90753 - DNA, 25 bp, Saccharomyces pastorianus
gattctgccaagatcattaacatta

SEQ ID NO: 90754 - DNA, 25 bp, Saccharomyces pastorianus
acgatgggaataaacagcacaagct

SEQ ID NO: 90755 - DNA, 25 bp, Saccharomyces pastorianus
atgctgattcttttaacgttactgt

SEQ ID NO: 90756 - DNA, 25 bp, Saccharomyces pastorianus
ttttaggtcaaactatcaccaaggt

SEQ ID NO: 90757 - DNA, 25 bp, Saccharomyces pastorianus
tcaccaaggtacaatccgatgtagt

SEQ ID NO: 90758 - DNA, 25 bp, Saccharomyces pastorianus
ttctattgctgtttgcattaccgca

SEQ ID NO: 90759 - DNA, 25 bp, Saccharomyces pastorianus
ttttctagaaaaatccacatgctga

SEQ ID NO: 90760 - DNA, 25 bp, Saccharomyces pastorianus
gcattaccgcaacatacgatgggaa

SEQ ID NO: 90761 - DNA, 25 bp, Saccharomyces pastorianus
gatgctactagtcatattcttctta

SEQ ID NO: 90762 - DNA, 25 bp, Saccharomyces pastorianus
gctgttgtgtacatttttcctcatc

SEQ ID NO: 90763 - DNA, 25 bp, Saccharomyces pastorianus
gtttcactgtgatgctactagtcat

SEQ ID NO: 90764 - DNA, 25 bp, Saccharomyces pastorianus
aacgttactgtttcactgtgatgct

SEQ ID NO: 90765 - DNA, 25 bp, Saccharomyces pastorianus
caagggcggcctaccataatttact

SEQ ID NO: 90766 - DNA, 25 bp, Saccharomyces pastorianus
ggctacaaatcttttagtttccctg

SEQ ID NO: 90767 - DNA, 25 bp, Saccharomyces pastorianus
gtgcgtgattaccatgatttcttaa

SEQ ID NO: 90768 - DNA, 25 bp, Saccharomyces pastorianus
ggcctaaattcgaatggcagcgttt

SEQ ID NO: 90769 - DNA, 25 bp, Saccharomyces pastorianus
tttacttaccttttcacctacaatg

SEQ ID NO: 90770 - DNA, 25 bp, Saccharomyces pastorianus
ggcagcgtttcattgccagtgaaaa

SEQ ID NO: 90771 - DNA, 25 bp, Saccharomyces pastorianus
tagtttccctgattccaagggcggc

SEQ ID NO: 90772 - DNA, 25 bp, Saccharomyces pastorianus
tgagaaatttcttacggtgcgtgat

SEQ ID NO: 90773 - DNA, 25 bp, Saccharomyces pastorianus
aagtcgtctcaagagtggcttagca

SEQ ID NO: 90774 - DNA, 25 bp, Saccharomyces pastorianus
aggaagctggtgacgtctattacaa

SEQ ID NO: 90775 - DNA, 25 bp, Saccharomyces pastorianus
gatagtggttgcctaaatctggata

SEQ ID NO: 90776 - DNA, 25 bp, Saccharomyces pastorianus
aatgttgtcacgaggcttacagcat

SEQ ID NO: 90777 - DNA, 25 bp, Saccharomyces pastorianus
gagagccagttccactaggtatact

SEQ ID NO: 90778 - DNA, 25 bp, Saccharomyces pastorianus
gtccatggcgagcagatcattgttc

SEQ ID NO: 90779 - DNA, 25 bp, Saccharomyces pastorianus
tttaccaatggatgcgttgacgcta

SEQ ID NO: 90780 - DNA, 25 bp, Saccharomyces pastorianus
tgaaaaatctgttaggcggtcgggc

SEQ ID NO: 90781 - DNA, 25 bp, Saccharomyces pastorianus
atgtgtaactttttctttcttcaat

SEQ ID NO: 90782 - DNA, 25 bp, Saccharomyces pastorianus
tttcttcaatcctcaagacaccgag

SEQ ID NO: 90783 - DNA, 25 bp, Saccharomyces pastorianus
gatggtgtattgacggttacgctaa

SEQ ID NO: 90784 - DNA, 25 bp, Saccharomyces pastorianus
gtatcgccgtcatggcaggattgat

SEQ ID NO: 90785 - DNA, 25 bp, Saccharomyces pastorianus
ttattgacgcttcgtgtatcgccgt

SEQ ID NO: 90786 - DNA, 25 bp, Saccharomyces pastorianus
gagagctgatgtacatttcctggat

SEQ ID NO: 90787 - DNA, 25 bp, Saccharomyces pastorianus
aaacagtgttataacgccgttctag

SEQ ID NO: 90788 - DNA, 25 bp, Saccharomyces pastorianus
aagtaataccctcaaacagtgttat

SEQ ID NO: 90789 - DNA, 25 bp, Saccharomyces pastorianus
atttggaagcaggtcttccgcgcca

SEQ ID NO: 90790 - DNA, 25 bp, Saccharomyces pastorianus
gacaggcagagttttctgaggcaca

SEQ ID NO: 90791 - DNA, 25 bp, Saccharomyces pastorianus
gaggaactcatcatcgtcattatta

SEQ ID NO: 90792 - DNA, 25 bp, Saccharomyces pastorianus
gggtttctcgaggaactcatcatcg

SEQ ID NO: 90793 - DNA, 25 bp, Saccharomyces pastorianus
tacctcgaggtgcatcgatgatgta

SEQ ID NO: 90794 - DNA, 25 bp, Saccharomyces pastorianus
gtgttgctgttgtacagtttgacaa

SEQ ID NO: 90795 - DNA, 25 bp, Saccharomyces pastorianus
catcgtcattattattgtgttgctg

SEQ ID NO: 90796 - DNA, 25 bp, Saccharomyces pastorianus
taacgccgttctagggtttctcgag

SEQ ID NO: 90797 - DNA, 25 bp, Saccharomyces pastorianus
tcttccgcgccacgagagtagtgga

SEQ ID NO: 90798 - DNA, 25 bp, Saccharomyces pastorianus
agcagtttcactagagatagtcaac

SEQ ID NO: 90799 - DNA, 25 bp, Saccharomyces pastorianus
aagatcctgcactttcttgaagaag

SEQ ID NO: 90800 - DNA, 25 bp, Saccharomyces pastorianus
gaaattaactttcttctcaaagcct

SEQ ID NO: 90801 - DNA, 25 bp, Saccharomyces pastorianus
aagcctaattgtgggttatgcgatc

SEQ ID NO: 90802 - DNA, 25 bp, Saccharomyces pastorianus
aaagttggtgatcctaagtcgtgca

SEQ ID NO: 90803 - DNA, 25 bp, Saccharomyces pastorianus
ttgcttcgacataccagtacttcat

SEQ ID NO: 90804 - DNA, 25 bp, Saccharomyces pastorianus
cttcgagggtattgttacatgatgc

SEQ ID NO: 90805 - DNA, 25 bp, Saccharomyces pastorianus
ggaatattgcttcgacataccagta

SEQ ID NO: 90806 - DNA, 25 bp, Saccharomyces pastorianus
atgttgagagcgttccgctgttcta

SEQ ID NO: 90807 - DNA, 25 bp, Saccharomyces pastorianus
gctgttctatacatacttcgagggt

SEQ ID NO: 90808 - DNA, 25 bp, Saccharomyces pastorianus
tcctaagtcgtgcaccaagatcctg

SEQ ID NO: 90809 - DNA, 25 bp, Saccharomyces pastorianus
tattctttccacgtttctgccactt

SEQ ID NO: 90810 - DNA, 25 bp, Saccharomyces pastorianus
aaaccttcttcgcttgtacttatat

SEQ ID NO: 90811 - DNA, 25 bp, Saccharomyces pastorianus
ttaatcttggattattgctttcttc

SEQ ID NO: 90812 - DNA, 25 bp, Saccharomyces pastorianus
ggcataccgtctattttaatcttgg

SEQ ID NO: 90813 - DNA, 25 bp, Saccharomyces pastorianus
gattcttgggaatcttccaacgtat

SEQ ID NO: 90814 - DNA, 25 bp, Saccharomyces pastorianus
gaagcaaccactttgaggcactgga

SEQ ID NO: 90815 - DNA, 25 bp, Saccharomyces pastorianus
acgtttctgccactttgggagcatc

SEQ ID NO: 90816 - DNA, 25 bp, Saccharomyces pastorianus
tgggagcatctctatactgtagaag

SEQ ID NO: 90817 - DNA, 25 bp, Saccharomyces pastorianus
atttggttgtgaattgctcagaaga

SEQ ID NO: 90818 - DNA, 25 bp, Saccharomyces pastorianus
gaagagaaaggcataccgtctattt

SEQ ID NO: 90819 - DNA, 25 bp, Saccharomyces pastorianus
tcttcgttaaaaccttcttcgcttg

SEQ ID NO: 90820 - DNA, 25 bp, Saccharomyces pastorianus
gtccaggtggaaaaagctgccgcaa

SEQ ID NO: 90821 - DNA, 25 bp, Saccharomyces pastorianus
gcgatgacagaatctaccaagctac

SEQ ID NO: 90822 - DNA, 25 bp, Saccharomyces pastorianus
ggtccactgactaaattttccacag

SEQ ID NO: 90823 - DNA, 25 bp, Saccharomyces pastorianus
gctgccgcaaatggtacacggttta

SEQ ID NO: 90824 - DNA, 25 bp, Saccharomyces pastorianus
gagggatctgccttaacagacaagt

SEQ ID NO: 90825 - DNA, 25 bp, Saccharomyces pastorianus
gcagagtccgcgcaaacattgaaaa

SEQ ID NO: 90826 - DNA, 25 bp, Saccharomyces pastorianus
gaatgattttcagtcgcttaaagca

SEQ ID NO: 90827 - DNA, 25 bp, Saccharomyces pastorianus
acaaattgccctcgaatactacttc

SEQ ID NO: 90828 - DNA, 25 bp, Saccharomyces pastorianus
gaatcttcaaaagccgcagagtccg

SEQ ID NO: 90829 - DNA, 25 bp, Saccharomyces pastorianus
aagctcaatgatgaactacgttcca

SEQ ID NO: 90830 - DNA, 25 bp, Saccharomyces pastorianus
aagggaactccaacaagcaaatgcg

SEQ ID NO: 90831 - DNA, 25 bp, Saccharomyces pastorianus
caccccaggtatacatctttaggaa

SEQ ID NO: 90832 - DNA, 25 bp, Saccharomyces pastorianus
ataccagaacctctgccggttgaga

SEQ ID NO: 90833 - DNA, 25 bp, Saccharomyces pastorianus
tattctcaatttcccaacttttcgc

SEQ ID NO: 90834 - DNA, 25 bp, Saccharomyces pastorianus
aacttttcgcaaacacaggtggata

SEQ ID NO: 90835 - DNA, 25 bp, Saccharomyces pastorianus
acaaagataattccaccccaggtat

SEQ ID NO: 90836 - DNA, 25 bp, Saccharomyces pastorianus
cagacttgcgggagtccttgttgaa

SEQ ID NO: 90837 - DNA, 25 bp, Saccharomyces pastorianus
agcagagtgtccatctataccagaa

SEQ ID NO: 90838 - DNA, 25 bp, Saccharomyces pastorianus
ggactctaacggacacgtctggtat

SEQ ID NO: 90839 - DNA, 25 bp, Saccharomyces pastorianus
gagatacctccgtgatgtggcacag

SEQ ID NO: 90840 - DNA, 25 bp, Saccharomyces pastorianus
attacgatgtgttcaatgctctggg

SEQ ID NO: 90841 - DNA, 25 bp, Saccharomyces pastorianus
actagctaagctcgaatcacatcct

SEQ ID NO: 90842 - DNA, 25 bp, Saccharomyces pastorianus
gactagtgctgaaccattggatcct

SEQ ID NO: 90843 - DNA, 25 bp, Saccharomyces pastorianus
aattctgtcattgatgccatcgtgg

SEQ ID NO: 90844 - DNA, 25 bp, Saccharomyces pastorianus
ttgcgtctgactttggcgttttaaa

SEQ ID NO: 90845 - DNA, 25 bp, Saccharomyces pastorianus
gaaaaagctttgagcgcctccaaat

SEQ ID NO: 90846 - DNA, 25 bp, Saccharomyces pastorianus
tatcaggccgctgcaaagaactcct

SEQ ID NO: 90847 - DNA, 25 bp, Saccharomyces pastorianus
tactgaatcctgcattgtcattgaa

SEQ ID NO: 90848 - DNA, 25 bp, Saccharomyces pastorianus
taagagctgctgcttccaaagctgc

SEQ ID NO: 90849 - DNA, 25 bp, Saccharomyces pastorianus
aagaactcctctattgatgctgcct

SEQ ID NO: 90850 - DNA, 25 bp, Saccharomyces pastorianus
gagtctttaccaggtcatttgcatc

SEQ ID NO: 90851 - DNA, 25 bp, Saccharomyces pastorianus
gactgttgacttaagcatttctacg

SEQ ID NO: 90852 - DNA, 25 bp, Saccharomyces pastorianus
tacgcaacagctttatatcaggccg

SEQ ID NO: 90853 - DNA, 25 bp, Saccharomyces pastorianus
aattctttgcgggattgttaggtca

SEQ ID NO: 90854 - DNA, 25 bp, Saccharomyces pastorianus
gacattaccgaaaacccatatgttt

SEQ ID NO: 90855 - DNA, 25 bp, Saccharomyces pastorianus
ggatgatgggcttgatatcccgaaa

SEQ ID NO: 90856 - DNA, 25 bp, Saccharomyces pastorianus
agactgtgctaatggcaggctacca

SEQ ID NO: 90857 - DNA, 25 bp, Saccharomyces pastorianus
gcagcaattacaatcacctcaacta

SEQ ID NO: 90858 - DNA, 25 bp, Saccharomyces pastorianus
atcacatccggatacaaatggtcag

SEQ ID NO: 90859 - DNA, 25 bp, Saccharomyces pastorianus
acctcaactaatgctcgttcgaaca

SEQ ID NO: 90860 - DNA, 25 bp, Saccharomyces pastorianus
gatttctcccgttgtcaaagatagt

SEQ ID NO: 90861 - DNA, 25 bp, Saccharomyces pastorianus
tactcagttcaagatccaattgcga

SEQ ID NO: 90862 - DNA, 25 bp, Saccharomyces pastorianus
ggctaccagaattgatttctcccgt

SEQ ID NO: 90863 - DNA, 25 bp, Saccharomyces pastorianus
tatcgatactaaggcttccaagggt

SEQ ID NO: 90864 - DNA, 25 bp, Saccharomyces pastorianus
gaaaagcgatacacctgcgaatata

SEQ ID NO: 90865 - DNA, 25 bp, Saccharomyces pastorianus
gaatgccggtgttcatacgttgatc

SEQ ID NO: 90866 - DNA, 25 bp, Saccharomyces pastorianus
aaaggcgctgttgttatagaccaag

SEQ ID NO: 90867 - DNA, 25 bp, Saccharomyces pastorianus
aaaggctcttaacgttccactacat

SEQ ID NO: 90868 - DNA, 25 bp, Saccharomyces pastorianus
ggtgcgtacgcagccttaacaagga

SEQ ID NO: 90869 - DNA, 25 bp, Saccharomyces pastorianus
ataaggcgggattattgccagcagg

SEQ ID NO: 90870 - DNA, 25 bp, Saccharomyces pastorianus
ttaccagatggcacgttagatccag

SEQ ID NO: 90871 - DNA, 25 bp, Saccharomyces pastorianus
gttccactacatacgaagttcattg

SEQ ID NO: 90872 - DNA, 25 bp, Saccharomyces pastorianus
acggtcttgtctctaaaggcgctgt

SEQ ID NO: 90873 - DNA, 25 bp, Saccharomyces pastorianus
tagatccagattttcccttgcaaac

SEQ ID NO: 90874 - DNA, 25 bp, Saccharomyces pastorianus
ggattttacacggtcttgtctctaa

SEQ ID NO: 90875 - DNA, 25 bp, Saccharomyces pastorianus
ttgcgatcatttaggacaggaacat

SEQ ID NO: 90876 - DNA, 25 bp, Saccharomyces pastorianus
gactctcgttctgggacattctatt

SEQ ID NO: 90877 - DNA, 25 bp, Saccharomyces pastorianus
gaaactaagcctgatggatttgaat

SEQ ID NO: 90878 - DNA, 25 bp, Saccharomyces pastorianus
ataccccagcacgtattgcgatcat

SEQ ID NO: 90879 - DNA, 25 bp, Saccharomyces pastorianus
aatgaagtctcctaaataccccagc

SEQ ID NO: 90880 - DNA, 25 bp, Saccharomyces pastorianus
ggatttgaattaataccgcttagca

SEQ ID NO: 90881 - DNA, 25 bp, Saccharomyces pastorianus
aaaggccatgccattccgaaaattg

SEQ ID NO: 90882 - DNA, 25 bp, Saccharomyces pastorianus
ctgggcaatattagggcgttccatt

SEQ ID NO: 90883 - DNA, 25 bp, Saccharomyces pastorianus
gcgttccattctacctaatgctcaa

SEQ ID NO: 90884 - DNA, 25 bp, Saccharomyces pastorianus
taaagtactactgggactctcgttc

SEQ ID NO: 90885 - DNA, 25 bp, Saccharomyces pastorianus
agcagtccagcttttgaagcagcaa

SEQ ID NO: 90886 - DNA, 25 bp, Saccharomyces pastorianus
ggacccattggacaaaaacttacag

SEQ ID NO: 90887 - DNA, 25 bp, Saccharomyces pastorianus
gaggcactaagtactgttacaatca

SEQ ID NO: 90888 - DNA, 25 bp, Saccharomyces pastorianus
tgagcatctgctactcatgacactc

SEQ ID NO: 90889 - DNA, 25 bp, Saccharomyces pastorianus
gagaatgtactatatttccggttaa

SEQ ID NO: 90890 - DNA, 25 bp, Saccharomyces pastorianus
aacttacagccagttgacatcaagc

SEQ ID NO: 90891 - DNA, 25 bp, Saccharomyces pastorianus
tgctgaaaatgcgttgcacgtgaat

SEQ ID NO: 90892 - DNA, 25 bp, Saccharomyces pastorianus
gctgtcatgcatgagtacttgcgca

SEQ ID NO: 90893 - DNA, 25 bp, Saccharomyces pastorianus
gaacacaactccaataagcgacata

SEQ ID NO: 90894 - DNA, 25 bp, Saccharomyces pastorianus
attactaatgaatccagcacacttg

SEQ ID NO: 90895 - DNA, 25 bp, Saccharomyces pastorianus
ttccggttaagtttaaagctgtcat

SEQ ID NO: 90896 - DNA, 25 bp, Saccharomyces pastorianus
gtaggaactgtactcataatgcatt

SEQ ID NO: 90897 - DNA, 25 bp, Saccharomyces pastorianus
ataagtgggtacgagcttgccttgc

SEQ ID NO: 90898 - DNA, 25 bp, Saccharomyces pastorianus
aagtaccgaaactagctcttcctat

SEQ ID NO: 90899 - DNA, 25 bp, Saccharomyces pastorianus
ctgggttaccgctatttattatcat

SEQ ID NO: 90900 - DNA, 25 bp, Saccharomyces pastorianus
gccttatgggtttcatatgccctgt

SEQ ID NO: 90901 - DNA, 25 bp, Saccharomyces pastorianus
ttcatataccacattctacccaaaa

SEQ ID NO: 90902 - DNA, 25 bp, Saccharomyces pastorianus
tattctttagtttggcttttctgca

SEQ ID NO: 90903 - DNA, 25 bp, Saccharomyces pastorianus
taaccattggcctctgctcaaaaat

SEQ ID NO: 90904 - DNA, 25 bp, Saccharomyces pastorianus
attgtttgcgctgtcctagtaattt

SEQ ID NO: 90905 - DNA, 25 bp, Saccharomyces pastorianus
gatatgtattctctgggttaccgct

SEQ ID NO: 90906 - DNA, 25 bp, Saccharomyces pastorianus
acatcagctgaaaagtgccgtctag

SEQ ID NO: 90907 - DNA, 25 bp, Saccharomyces pastorianus
cacttctgctttcttgtgagtataa

SEQ ID NO: 90908 - DNA, 25 bp, Saccharomyces pastorianus
gctgtagccaagacacatcctgata

SEQ ID NO: 90909 - DNA, 25 bp, Saccharomyces pastorianus
taaaaaatccatgcccgttaagaag

SEQ ID NO: 90910 - DNA, 25 bp, Saccharomyces pastorianus
aaattctccaatttctgttgatagc

SEQ ID NO: 90911 - DNA, 25 bp, Saccharomyces pastorianus
aagaagacaacgacaacctcgcctg

SEQ ID NO: 90912 - DNA, 25 bp, Saccharomyces pastorianus
cagagtccttgtccctggaaaataa

SEQ ID NO: 90913 - DNA, 25 bp, Saccharomyces pastorianus
ataagataccagagtccttgtccct

SEQ ID NO: 90914 - DNA, 25 bp, Saccharomyces pastorianus
tgacattcgtcatctgttagcaaat

SEQ ID NO: 90915 - DNA, 25 bp, Saccharomyces pastorianus
aggcgtgctgagtcttttgaacatt

SEQ ID NO: 90916 - DNA, 25 bp, Saccharomyces pastorianus
tgccaagactttattaatcctcccc

SEQ ID NO: 90917 - DNA, 25 bp, Saccharomyces pastorianus
ggatgtctctatgcaagatttggtt

SEQ ID NO: 90918 - DNA, 25 bp, Saccharomyces pastorianus
gcaaatttatccagcttactaacat

SEQ ID NO: 90919 - DNA, 25 bp, Saccharomyces pastorianus
gagtttgccgatcgtatattccaag

SEQ ID NO: 90920 - DNA, 25 bp, Saccharomyces pastorianus
tttccgccagctatagtcaacttag

SEQ ID NO: 90921 - DNA, 25 bp, Saccharomyces pastorianus
gtgcctattgccaacgtaccaaaga

SEQ ID NO: 90922 - DNA, 25 bp, Saccharomyces pastorianus
tatcctcctgtgaaaccgcaaggtt

SEQ ID NO: 90923 - DNA, 25 bp, Saccharomyces pastorianus
gcgtttctgctgatggccctatgaa

SEQ ID NO: 90924 - DNA, 25 bp, Saccharomyces pastorianus
agtacgatggtattgttcttgctac

SEQ ID NO: 90925 - DNA, 25 bp, Saccharomyces pastorianus
ggtgttcttgtttccttgaatgacc

SEQ ID NO: 90926 - DNA, 25 bp, Saccharomyces pastorianus
gaaattcactactattatcctcctg

SEQ ID NO: 90927 - DNA, 25 bp, Saccharomyces pastorianus
ttttatatgctcaccaagcctttcc

SEQ ID NO: 90928 - DNA, 25 bp, Saccharomyces pastorianus
ccaaatttcctctggttactacatt

SEQ ID NO: 90929 - DNA, 25 bp, Saccharomyces pastorianus
cgcctctggttatctaagccctgaa

SEQ ID NO: 90930 - DNA, 25 bp, Saccharomyces pastorianus
ggtattcagacaacccttaatcgag

SEQ ID NO: 90931 - DNA, 25 bp, Saccharomyces pastorianus
tccatgcgtcccattttcaaaattc

SEQ ID NO: 90932 - DNA, 25 bp, Saccharomyces pastorianus
aatgggatgccaaagtcgccgccgt

SEQ ID NO: 90933 - DNA, 25 bp, Saccharomyces pastorianus
caactctggttccacgggcagaagt

SEQ ID NO: 90934 - DNA, 25 bp, Saccharomyces pastorianus
ggttagaaacgttggctgccattcc

SEQ ID NO: 90935 - DNA, 25 bp, Saccharomyces pastorianus
attcctgatactcttccaactctgg

SEQ ID NO: 90936 - DNA, 25 bp, Saccharomyces pastorianus
atattatcgctgactacttacctcc

SEQ ID NO: 90937 - DNA, 25 bp, Saccharomyces pastorianus
gtcgccgccgtcagagaaaaatatg

SEQ ID NO: 90938 - DNA, 25 bp, Saccharomyces pastorianus
gatagtcaatcctgatgttccagat

SEQ ID NO: 90939 - DNA, 25 bp, Saccharomyces pastorianus
gaatttctatcgtccaatgtcacat

SEQ ID NO: 90940 - DNA, 25 bp, Saccharomyces pastorianus
aatatcaaatttcccttctctactg

SEQ ID NO: 90941 - DNA, 25 bp, Saccharomyces pastorianus
gcctgcgaacgcctcatttaatttg

SEQ ID NO: 90942 - DNA, 25 bp, Saccharomyces pastorianus
aattgaagctggtagaggaggcaaa

SEQ ID NO: 90943 - DNA, 25 bp, Saccharomyces pastorianus
gcgaacgcctcatttaatttggaag

SEQ ID NO: 90944 - DNA, 25 bp, Saccharomyces pastorianus
actcctaaagatgtgcctgcgaacg

SEQ ID NO: 90945 - DNA, 25 bp, Saccharomyces pastorianus
cagttaatgttttgagatactctgc

SEQ ID NO: 90946 - DNA, 25 bp, Saccharomyces pastorianus
gtaactcctaaagatgtgcctgcga

SEQ ID NO: 90947 - DNA, 25 bp, Saccharomyces pastorianus
aaggaatacgccaagctacaccctg

SEQ ID NO: 90948 - DNA, 25 bp, Saccharomyces pastorianus
gctacaccctgtagtaactcctaaa

SEQ ID NO: 90949 - DNA, 25 bp, Saccharomyces pastorianus
gagcaggcacagtacgaggagaaat

SEQ ID NO: 90950 - DNA, 25 bp, Saccharomyces pastorianus
aagaagaaagaggagcaggcacagt

SEQ ID NO: 90951 - DNA, 25 bp, Saccharomyces pastorianus
cgcctcatttaatttggaagatcct

SEQ ID NO: 90952 - DNA, 25 bp, Saccharomyces pastorianus
tgatcatttcagcaaccaccttgca

SEQ ID NO: 90953 - DNA, 25 bp, Saccharomyces pastorianus
ttttgcctatcttgctctgaaatgg

SEQ ID NO: 90954 - DNA, 25 bp, Saccharomyces pastorianus
tcttctaatttcctcgggagacctt

SEQ ID NO: 90955 - DNA, 25 bp, Saccharomyces pastorianus
tgcagccagcgtcaagcaagggctt

SEQ ID NO: 90956 - DNA, 25 bp, Saccharomyces pastorianus
ggactaacgtacacattgcatgaca

SEQ ID NO: 90957 - DNA, 25 bp, Saccharomyces pastorianus
gcatgacagcaagccttgtttgctt

SEQ ID NO: 90958 - DNA, 25 bp, Saccharomyces pastorianus
gaaatggcgcattatcatcggaaga

SEQ ID NO: 90959 - DNA, 25 bp, Saccharomyces pastorianus
agcctcctcctctggagtgaagtcg

SEQ ID NO: 90960 - DNA, 25 bp, Saccharomyces pastorianus
gtttgcttatttttgcctatcttgc

SEQ ID NO: 90961 - DNA, 25 bp, Saccharomyces pastorianus
tcattttcacgcctaatggcagcct

SEQ ID NO: 90962 - DNA, 25 bp, Saccharomyces pastorianus
gtaggctaacggtcttcagcccatt

SEQ ID NO: 90963 - DNA, 25 bp, Saccharomyces pastorianus
gcggagagatccctgctattgaaaa

SEQ ID NO: 90964 - DNA, 25 bp, Saccharomyces pastorianus
cactccagaggaggaggctgccatt

SEQ ID NO: 90965 - DNA, 25 bp, Saccharomyces pastorianus
gtgaacgattcaccgtagacaagaa

SEQ ID NO: 90966 - DNA, 25 bp, Saccharomyces pastorianus
tccgttttgcagaaggttatcgaat

SEQ ID NO: 90967 - DNA, 25 bp, Saccharomyces pastorianus
agagactctaacttccctgacgaag

SEQ ID NO: 90968 - DNA, 25 bp, Saccharomyces pastorianus
gtgacttctaatgttgtcctagtga

SEQ ID NO: 90969 - DNA, 25 bp, Saccharomyces pastorianus
agcccttgcttgacgctggctgcaa

SEQ ID NO: 90970 - DNA, 25 bp, Saccharomyces pastorianus
acgaaattattctggcggcaaacta

SEQ ID NO: 90971 - DNA, 25 bp, Saccharomyces pastorianus
atgacgacgagattgtgatgcccgt

SEQ ID NO: 90972 - DNA, 25 bp, Saccharomyces pastorianus
gacgattccagaaagagtgctcccg

SEQ ID NO: 90973 - DNA, 25 bp, Saccharomyces pastorianus
gaatgggccgagcaccacagagact

SEQ ID NO: 90974 - DNA, 25 bp, Saccharomyces pastorianus
aggagggctaggtatcaatctgact

SEQ ID NO: 90975 - DNA, 25 bp, Saccharomyces pastorianus
gaattgcccgaaaatgcttcaggtg

SEQ ID NO: 90976 - DNA, 25 bp, Saccharomyces pastorianus
ggaaagacttcttgcgcaagcggaa

SEQ ID NO: 90977 - DNA, 25 bp, Saccharomyces pastorianus
gcaaactttcggtgagagatctatt

SEQ ID NO: 90978 - DNA, 25 bp, Saccharomyces pastorianus
gggtgacttcacaacagattatttc

SEQ ID NO: 90979 - DNA, 25 bp, Saccharomyces pastorianus
ggacagactcgagatgtgcatattt

SEQ ID NO: 90980 - DNA, 25 bp, Saccharomyces pastorianus
gcactgcccatgttgacgagtacat

SEQ ID NO: 90981 - DNA, 25 bp, Saccharomyces pastorianus
ttgatgagtatgagggcactgccca

SEQ ID NO: 90982 - DNA, 25 bp, Saccharomyces pastorianus
tggcagccaaagatcacagacaact

SEQ ID NO: 90983 - DNA, 25 bp, Saccharomyces pastorianus
gatctattgggatccgaattgcccg

SEQ ID NO: 90984 - DNA, 25 bp, Saccharomyces pastorianus
taacggtatttatcctatcaagtag

SEQ ID NO: 90985 - DNA, 25 bp, Saccharomyces pastorianus
taactcgcttacgtccagtacatct

SEQ ID NO: 90986 - DNA, 25 bp, Saccharomyces pastorianus
gaaaagtcactttgcagtacctcct

SEQ ID NO: 90987 - DNA, 25 bp, Saccharomyces pastorianus
ttgaacaacataaccacctcgcatg

SEQ ID NO: 90988 - DNA, 25 bp, Saccharomyces pastorianus
atcgattcgcctggttatggcttta

SEQ ID NO: 90989 - DNA, 25 bp, Saccharomyces pastorianus
agacttgtattgactaactcgctta

SEQ ID NO: 90990 - DNA, 25 bp, Saccharomyces pastorianus
gggaagtcctctatcttgaacaaca

SEQ ID NO: 90991 - DNA, 25 bp, Saccharomyces pastorianus
gtacatctcctaaacggttcggtat

SEQ ID NO: 90992 - DNA, 25 bp, Saccharomyces pastorianus
ttaccaactctacccagacttgtat

SEQ ID NO: 90993 - DNA, 25 bp, Saccharomyces pastorianus
gctttctcttactcgctggagataa

SEQ ID NO: 90994 - DNA, 25 bp, Saccharomyces pastorianus
acaacttgtcagatgctttctctta

SEQ ID NO: 90995 - DNA, 25 bp, Saccharomyces pastorianus
gaacacggagttccttttgaagttg

SEQ ID NO: 90996 - DNA, 25 bp, Saccharomyces pastorianus
aagctgttcgcacaagggtacgtac

SEQ ID NO: 90997 - DNA, 25 bp, Saccharomyces pastorianus
ttcctttgatgagcgtaggcggtca

SEQ ID NO: 90998 - DNA, 25 bp, Saccharomyces pastorianus
tgaaactggctcgagatcctagaat

SEQ ID NO: 90999 - DNA, 25 bp, Saccharomyces pastorianus
atgtaacccgttaatcacagattgt

SEQ ID NO: 91000 - DNA, 25 bp, Saccharomyces pastorianus
gatggactgtctactcgcaaaatgt

SEQ ID NO: 91001 - DNA, 25 bp, Saccharomyces pastorianus
actgtttagtgcatcgagtcttaca

SEQ ID NO: 91002 - DNA, 25 bp, Saccharomyces pastorianus
gaaaaatccctggaattcctttgat

SEQ ID NO: 91003 - DNA, 25 bp, Saccharomyces pastorianus
gtagctacaaacgatgccggcctga

SEQ ID NO: 91004 - DNA, 25 bp, Saccharomyces pastorianus
agtgcacttttctttcaatacaatc

SEQ ID NO: 91005 - DNA, 25 bp, Saccharomyces pastorianus
caagtaccgtatcgccttgaaactg

SEQ ID NO: 91006 - DNA, 25 bp, Saccharomyces pastorianus
gtacgtacgcggatgactgtttagt

SEQ ID NO: 91007 - DNA, 25 bp, Saccharomyces pastorianus
agatcagatctggttacattcctta

SEQ ID NO: 91008 - DNA, 25 bp, Saccharomyces pastorianus
attcgacagcttttctgtgtcagcc

SEQ ID NO: 91009 - DNA, 25 bp, Saccharomyces pastorianus
taccgcgtccactatcatcaagaag

SEQ ID NO: 91010 - DNA, 25 bp, Saccharomyces pastorianus
gggccggtcattctatgatacttca

SEQ ID NO: 91011 - DNA, 25 bp, Saccharomyces pastorianus
agcacaagtgctagaccatccagta

SEQ ID NO: 91012 - DNA, 25 bp, Saccharomyces pastorianus
caggcgttcgattgagcagtcctta

SEQ ID NO: 91013 - DNA, 25 bp, Saccharomyces pastorianus
gatccagctggacatgtaactcgta

SEQ ID NO: 91014 - DNA, 25 bp, Saccharomyces pastorianus
gaaacttgactctttatccatccta

SEQ ID NO: 91015 - DNA, 25 bp, Saccharomyces pastorianus
aggctatatgttcactgtcccaggt

SEQ ID NO: 91016 - DNA, 25 bp, Saccharomyces pastorianus
tgacagcagcatactcaaacggtgt

SEQ ID NO: 91017 - DNA, 25 bp, Saccharomyces pastorianus
atgtaactcgtatagcttccttgct

SEQ ID NO: 91018 - DNA, 25 bp, Saccharomyces pastorianus
agttgtcgaagtgtgcctcatacgg

SEQ ID NO: 91019 - DNA, 25 bp, Saccharomyces pastorianus
acaccgccgtgttatattgtttaag

SEQ ID NO: 91020 - DNA, 25 bp, Saccharomyces pastorianus
gacccgacatcgtccgaacttaaat

SEQ ID NO: 91021 - DNA, 25 bp, Saccharomyces pastorianus
ctgttttcaacgtactgggaccact

SEQ ID NO: 91022 - DNA, 25 bp, Saccharomyces pastorianus
ggaatgggccacgtttctaagatac

SEQ ID NO: 91023 - DNA, 25 bp, Saccharomyces pastorianus
taccaccttggcgacaataatccta

SEQ ID NO: 91024 - DNA, 25 bp, Saccharomyces pastorianus
atacgttcatgtttctacttgctcc

SEQ ID NO: 91025 - DNA, 25 bp, Saccharomyces pastorianus
aaggcagccgctttggtatatccag

SEQ ID NO: 91026 - DNA, 25 bp, Saccharomyces pastorianus
actactgtctggcatattgacccga

SEQ ID NO: 91027 - DNA, 25 bp, Saccharomyces pastorianus
tgggaccacttctacatccagttag

SEQ ID NO: 91028 - DNA, 25 bp, Saccharomyces pastorianus
gcaaatttcttggaattccgactgt

SEQ ID NO: 91029 - DNA, 25 bp, Saccharomyces pastorianus
aagttccaattaggtcaccagctcc

SEQ ID NO: 91030 - DNA, 25 bp, Saccharomyces pastorianus
agctccactattggatgtagaagct

SEQ ID NO: 91031 - DNA, 25 bp, Saccharomyces pastorianus
actgtcgatgaattaaccttgaaca

SEQ ID NO: 91032 - DNA, 25 bp, Saccharomyces pastorianus
caaagtttgggcactgtcgatgaat

SEQ ID NO: 91033 - DNA, 25 bp, Saccharomyces pastorianus
gtcaccagctccactattggatgta

SEQ ID NO: 91034 - DNA, 25 bp, Saccharomyces pastorianus
gtattatccggccaaagtttgggca

SEQ ID NO: 91035 - DNA, 25 bp, Saccharomyces pastorianus
tatccggccaaagtttgggcactgt

SEQ ID NO: 91036 - DNA, 25 bp, Saccharomyces pastorianus
atgaacgtattatccggccaaagtt

SEQ ID NO: 91037 - DNA, 25 bp, Saccharomyces pastorianus
atatcacagcctaaagttccaatta

SEQ ID NO: 91038 - DNA, 25 bp, Saccharomyces pastorianus
taaccttgaacatatcacagcctaa

SEQ ID NO: 91039 - DNA, 25 bp, Saccharomyces pastorianus
aattaggtcaccagctccactattg

SEQ ID NO: 91040 - DNA, 25 bp, Saccharomyces pastorianus
cgtggagtttcgcttggatttgata

SEQ ID NO: 91041 - DNA, 25 bp, Saccharomyces pastorianus
atgtgacgcttcgtccatgagtgtt

SEQ ID NO: 91042 - DNA, 25 bp, Saccharomyces pastorianus
agccttgtggagtcaattgtatcat

SEQ ID NO: 91043 - DNA, 25 bp, Saccharomyces pastorianus
caggcgtaaattccatgttcttcaa

SEQ ID NO: 91044 - DNA, 25 bp, Saccharomyces pastorianus
gaagcttcactaaatagccttgtgg

SEQ ID NO: 91045 - DNA, 25 bp, Saccharomyces pastorianus
tgtcttttcttaacagggccttcgt

SEQ ID NO: 91046 - DNA, 25 bp, Saccharomyces pastorianus
gatacaacttgtgtttgcgtggagt

SEQ ID NO: 91047 - DNA, 25 bp, Saccharomyces pastorianus
atgttcttcaagctcccatttggga

SEQ ID NO: 91048 - DNA, 25 bp, Saccharomyces pastorianus
gctgtcatcgaattgtgaagcttca

SEQ ID NO: 91049 - DNA, 25 bp, Saccharomyces pastorianus
gtatcatcaatgcttcttctctgtc

SEQ ID NO: 91050 - DNA, 25 bp, Saccharomyces pastorianus
attggcatttggaaccttagtaggc

SEQ ID NO: 91051 - DNA, 25 bp, Saccharomyces pastorianus
gaactccttgaaaaatgcgatacgt

SEQ ID NO: 91052 - DNA, 25 bp, Saccharomyces pastorianus
gaaagaatcgcagaggccgtaaata

SEQ ID NO: 91053 - DNA, 25 bp, Saccharomyces pastorianus
gaaatgttaaaccaactggcgatga

SEQ ID NO: 91054 - DNA, 25 bp, Saccharomyces pastorianus
tacaattagatactacggagctatg

SEQ ID NO: 91055 - DNA, 25 bp, Saccharomyces pastorianus
gcaagacaactcaagtcattccaga

SEQ ID NO: 91056 - DNA, 25 bp, Saccharomyces pastorianus
atgcgatacgttggaaaatcactat

SEQ ID NO: 91057 - DNA, 25 bp, Saccharomyces pastorianus
gtcgactacgattacttactttata

SEQ ID NO: 91058 - DNA, 25 bp, Saccharomyces pastorianus
ggcgatgataacagatactttcaag

SEQ ID NO: 91059 - DNA, 25 bp, Saccharomyces pastorianus
cttcggctggtgacgatcctcttgg

SEQ ID NO: 91060 - DNA, 25 bp, Saccharomyces pastorianus
gataagttgacagtcgactacgatt

SEQ ID NO: 91061 - DNA, 25 bp, Saccharomyces pastorianus
tcattccagagagtcggcttcggct

SEQ ID NO: 91062 - DNA, 25 bp, Saccharomyces pastorianus
tgtgacatctccaagcaaacctttg

SEQ ID NO: 91063 - DNA, 25 bp, Saccharomyces pastorianus
aaagtaaaaccgctctgtccgcata

SEQ ID NO: 91064 - DNA, 25 bp, Saccharomyces pastorianus
gacggtcactcaaagtcatctggta

SEQ ID NO: 91065 - DNA, 25 bp, Saccharomyces pastorianus
gaaggctaattactgcaccaagggt

SEQ ID NO: 91066 - DNA, 25 bp, Saccharomyces pastorianus
taaccaatcggatcacttacgcatt

SEQ ID NO: 91067 - DNA, 25 bp, Saccharomyces pastorianus
aaaggcacgacattgtctctgcaac

SEQ ID NO: 91068 - DNA, 25 bp, Saccharomyces pastorianus
aactcgattgttctacctaatggtt

SEQ ID NO: 91069 - DNA, 25 bp, Saccharomyces pastorianus
gtaagtttgtcatccccaaagtctc

SEQ ID NO: 91070 - DNA, 25 bp, Saccharomyces pastorianus
aacctttgcaaccttttgacgatct

SEQ ID NO: 91071 - DNA, 25 bp, Saccharomyces pastorianus
ctgtccgcatattctaactcgattg

SEQ ID NO: 91072 - DNA, 25 bp, Saccharomyces pastorianus
caaacagattgcttccatagagggt

SEQ ID NO: 91073 - DNA, 25 bp, Saccharomyces pastorianus
tgagactttccactttcttcaaaac

SEQ ID NO: 91074 - DNA, 25 bp, Saccharomyces pastorianus
gactactttcatgaggaggaccgat

SEQ ID NO: 91075 - DNA, 25 bp, Saccharomyces pastorianus
gacttctatatcatcgtcaccagga

SEQ ID NO: 91076 - DNA, 25 bp, Saccharomyces pastorianus
aaaattgtgctttggttctcagtga

SEQ ID NO: 91077 - DNA, 25 bp, Saccharomyces pastorianus
acggcacttggcgatgacaaacatt

SEQ ID NO: 91078 - DNA, 25 bp, Saccharomyces pastorianus
gtaccaggattcaactaagcagctt

SEQ ID NO: 91079 - DNA, 25 bp, Saccharomyces pastorianus
gatccatactgttttctttcattcg

SEQ ID NO: 91080 - DNA, 25 bp, Saccharomyces pastorianus
attcttgatcacgaaggccttgtca

SEQ ID NO: 91081 - DNA, 25 bp, Saccharomyces pastorianus
cagatttgatcctaggttccccaac

SEQ ID NO: 91082 - DNA, 25 bp, Saccharomyces pastorianus
cactgacgatgataccgattctggt

SEQ ID NO: 91083 - DNA, 25 bp, Saccharomyces pastorianus
gttggaggatgttgccacggcactt

SEQ ID NO: 91084 - DNA, 25 bp, Saccharomyces pastorianus
taattcgctacatatcccacaggat

SEQ ID NO: 91085 - DNA, 25 bp, Saccharomyces pastorianus
aaaacttctgcaagagggtggctct

SEQ ID NO: 91086 - DNA, 25 bp, Saccharomyces pastorianus
gagaatcgctctcatgggtcaagat

SEQ ID NO: 91087 - DNA, 25 bp, Saccharomyces pastorianus
aaatctatgtccatgttaggcgttc

SEQ ID NO: 91088 - DNA, 25 bp, Saccharomyces pastorianus
cacttttatgacttgtaattcgcta

SEQ ID NO: 91089 - DNA, 25 bp, Saccharomyces pastorianus
gaagtctctgatatcgatgttacta

SEQ ID NO: 91090 - DNA, 25 bp, Saccharomyces pastorianus
gaactttgaagcgacactggaatca

SEQ ID NO: 91091 - DNA, 25 bp, Saccharomyces pastorianus
tgttaggcgttcaacaccattttct

SEQ ID NO: 91092 - DNA, 25 bp, Saccharomyces pastorianus
gaagaagctgctttactcataaaag

SEQ ID NO: 91093 - DNA, 25 bp, Saccharomyces pastorianus
agagtccgaatatcgcgagtttgaa

SEQ ID NO: 91094 - DNA, 25 bp, Saccharomyces pastorianus
gagggtggctctttgtcaggaaata

SEQ ID NO: 91095 - DNA, 25 bp, Saccharomyces pastorianus
cacatgggccaatggtgaaacaata

SEQ ID NO: 91096 - DNA, 25 bp, Saccharomyces pastorianus
gaatttgaagatttccccattgaca

SEQ ID NO: 91097 - DNA, 25 bp, Saccharomyces pastorianus
tgacacatgggccaatggtgaaaca

SEQ ID NO: 91098 - DNA, 25 bp, Saccharomyces pastorianus
atgagtacggacgttgctgctgcac

SEQ ID NO: 91099 - DNA, 25 bp, Saccharomyces pastorianus
tgctgtaacgcaaacaaacatatgg

SEQ ID NO: 91100 - DNA, 25 bp, Saccharomyces pastorianus
tgaagatttccccattgacacatgg

SEQ ID NO: 91101 - DNA, 25 bp, Saccharomyces pastorianus
gatttccccattgacacatgggcca

SEQ ID NO: 91102 - DNA, 25 bp, Saccharomyces pastorianus
ttccccattgacacatgggccaatg

SEQ ID NO: 91103 - DNA, 25 bp, Saccharomyces pastorianus
aaaagcaatgctgtaacgcaaacaa

SEQ ID NO: 91104 - DNA, 25 bp, Saccharomyces pastorianus
cacaagcccaaagtaaaatagattt

SEQ ID NO: 91105 - DNA, 25 bp, Saccharomyces pastorianus
gtacggacgttgctgctgcacaagc

SEQ ID NO: 91106 - DNA, 25 bp, Saccharomyces pastorianus
taagattttcactctgcctgaggat

SEQ ID NO: 91107 - DNA, 25 bp, Saccharomyces pastorianus
gagtgctaatgctcctttactaaaa

SEQ ID NO: 91108 - DNA, 25 bp, Saccharomyces pastorianus
agccgttggtgtctctaatttttct

SEQ ID NO: 91109 - DNA, 25 bp, Saccharomyces pastorianus
aagaggctacgttgttctggccaaa

SEQ ID NO: 91110 - DNA, 25 bp, Saccharomyces pastorianus
ggtaacgttctgtgcattccaacat

SEQ ID NO: 91111 - DNA, 25 bp, Saccharomyces pastorianus
aaggtggtaccagctactaatcaaa

SEQ ID NO: 91112 - DNA, 25 bp, Saccharomyces pastorianus
ggtgttgagccagcacagcttatta

SEQ ID NO: 91113 - DNA, 25 bp, Saccharomyces pastorianus
atggcactgttgacatcgatactaa

SEQ ID NO: 91114 - DNA, 25 bp, Saccharomyces pastorianus
ttggccagtgcctttgaaaaccgac

SEQ ID NO: 91115 - DNA, 25 bp, Saccharomyces pastorianus
gtatcgttgttgaagcctactcacc

SEQ ID NO: 91116 - DNA, 25 bp, Saccharomyces pastorianus
gaaattcatccattgctaccacaag

SEQ ID NO: 91117 - DNA, 25 bp, Saccharomyces pastorianus
acgccatcgtcatcactgaacttaa

SEQ ID NO: 91118 - DNA, 25 bp, Saccharomyces pastorianus
cattcaatggtactcaagggactta

SEQ ID NO: 91119 - DNA, 25 bp, Saccharomyces pastorianus
cattcaatcctgtttcggagacaaa

SEQ ID NO: 91120 - DNA, 25 bp, Saccharomyces pastorianus
aatgtcctattttacttcttgtaga

SEQ ID NO: 91121 - DNA, 25 bp, Saccharomyces pastorianus
gaaattcaatcacccaggtctacct

SEQ ID NO: 91122 - DNA, 25 bp, Saccharomyces pastorianus
gggacagtcatagcggtcaattact

SEQ ID NO: 91123 - DNA, 25 bp, Saccharomyces pastorianus
gtatagatactaacaacgccatcgt

SEQ ID NO: 91124 - DNA, 25 bp, Saccharomyces pastorianus
agggtcttttaattcgctgcgaaat

SEQ ID NO: 91125 - DNA, 25 bp, Saccharomyces pastorianus
gtgttttgccccattatcaatgcac

SEQ ID NO: 91126 - DNA, 25 bp, Saccharomyces pastorianus
ggtggaggcaaatatctctgactat

SEQ ID NO: 91127 - DNA, 25 bp, Saccharomyces pastorianus
aagtcgctgatttaactggctctaa

SEQ ID NO: 91128 - DNA, 25 bp, Saccharomyces pastorianus
tacgatccaaaatatgtttcagcat

SEQ ID NO: 91129 - DNA, 25 bp, Saccharomyces pastorianus
cacataacaatttaggcggaggctt

SEQ ID NO: 91130 - DNA, 25 bp, Saccharomyces pastorianus
attagtactgggaatggccgcctac

SEQ ID NO: 91131 - DNA, 25 bp, Saccharomyces pastorianus
attttcaaaggagtgggcaagccca

SEQ ID NO: 91132 - DNA, 25 bp, Saccharomyces pastorianus
actaaggctgaatatgtgacacata

SEQ ID NO: 91133 - DNA, 25 bp, Saccharomyces pastorianus
gggcatctggccttacaaaaattta

SEQ ID NO: 91134 - DNA, 25 bp, Saccharomyces pastorianus
gagtcatgtggtgaagcttatgcaa

SEQ ID NO: 91135 - DNA, 25 bp, Saccharomyces pastorianus
ggccgcctacggaagaagtttccat

SEQ ID NO: 91136 - DNA, 25 bp, Saccharomyces pastorianus
ctttgccatgcattatatgatcgat

SEQ ID NO: 91137 - DNA, 25 bp, Saccharomyces pastorianus
aggatatcacagcaatctattcagt

SEQ ID NO: 91138 - DNA, 25 bp, Saccharomyces pastorianus
gaaggcttgcactttaatgtgtcat

SEQ ID NO: 91139 - DNA, 25 bp, Saccharomyces pastorianus
ctcgatgtccgccattgttaaagtt

SEQ ID NO: 91140 - DNA, 25 bp, Saccharomyces pastorianus
ccgccattgttaaagttgtctctaa

SEQ ID NO: 91141 - DNA, 25 bp, Saccharomyces pastorianus
attactgggaactcgatgtccgcca

SEQ ID NO: 91142 - DNA, 25 bp, Saccharomyces pastorianus
gattttggacattactgggaactcg

SEQ ID NO: 91143 - DNA, 25 bp, Saccharomyces pastorianus
gtccgccattgttaaagttgtctct

SEQ ID NO: 91144 - DNA, 25 bp, Saccharomyces pastorianus
gatgtccgccattgttaaagttgtc

SEQ ID NO: 91145 - DNA, 25 bp, Saccharomyces pastorianus
ttttggacattactgggaactcgat

SEQ ID NO: 91146 - DNA, 25 bp, Saccharomyces pastorianus
tactgggaactcgatgtccgccatt

SEQ ID NO: 91147 - DNA, 25 bp, Saccharomyces pastorianus
atgggttccatgattttggacatta

SEQ ID NO: 91148 - DNA, 25 bp, Saccharomyces pastorianus
ggaactcgatgtccgccattgttaa

SEQ ID NO: 91149 - DNA, 25 bp, Saccharomyces pastorianus
tgttaaagttgtctctaatatcatc

SEQ ID NO: 91150 - DNA, 25 bp, Saccharomyces pastorianus
gaactttagctttaatatgtggatc

SEQ ID NO: 91151 - DNA, 25 bp, Saccharomyces pastorianus
gaatattttccggagacaacatctt

SEQ ID NO: 91152 - DNA, 25 bp, Saccharomyces pastorianus
agccattaagcgcagagtactttct

SEQ ID NO: 91153 - DNA, 25 bp, Saccharomyces pastorianus
gatagaaaacaatcctggtcatgat

SEQ ID NO: 91154 - DNA, 25 bp, Saccharomyces pastorianus
tttcgcaatacccatttgatttaga

SEQ ID NO: 91155 - DNA, 25 bp, Saccharomyces pastorianus
tgaaaaacgacgaacctttgtcaat

SEQ ID NO: 91156 - DNA, 25 bp, Saccharomyces pastorianus
gagaatgtcctgactacgttggaat

SEQ ID NO: 91157 - DNA, 25 bp, Saccharomyces pastorianus
actgagttaggtgtctccgttaatt

SEQ ID NO: 91158 - DNA, 25 bp, Saccharomyces pastorianus
gacgccagctgcaaagaagccatta

SEQ ID NO: 91159 - DNA, 25 bp, Saccharomyces pastorianus
gtactttctgtactcgtatcgagga

SEQ ID NO: 91160 - DNA, 25 bp, Saccharomyces pastorianus
ttttgtttgacatggcgacacaccc

SEQ ID NO: 91161 - DNA, 25 bp, Saccharomyces pastorianus
gttctaaagtcgatccctctattat

SEQ ID NO: 91162 - DNA, 25 bp, Saccharomyces pastorianus
agatggttacattacgctggacgaa

SEQ ID NO: 91163 - DNA, 25 bp, Saccharomyces pastorianus
acagttttgagtacaacgtccagag

SEQ ID NO: 91164 - DNA, 25 bp, Saccharomyces pastorianus
tgagctgggctttcgaactttatga

SEQ ID NO: 91165 - DNA, 25 bp, Saccharomyces pastorianus
ggagccaagacgtcaaagctttcca

SEQ ID NO: 91166 - DNA, 25 bp, Saccharomyces pastorianus
gaaacaatccacctattttgataga

SEQ ID NO: 91167 - DNA, 25 bp, Saccharomyces pastorianus
gaagattttgctaatcaccttttta

SEQ ID NO: 91168 - DNA, 25 bp, Saccharomyces pastorianus
ttaatgaggatgaggcaacgcccga

SEQ ID NO: 91169 - DNA, 25 bp, Saccharomyces pastorianus
atgctaaccattgtggcgagtgttt

SEQ ID NO: 91170 - DNA, 25 bp, Saccharomyces pastorianus
gagggattgccctagtggccaacta

SEQ ID NO: 91171 - DNA, 25 bp, Saccharomyces pastorianus
ttttccatttggttctcctgaagat

SEQ ID NO: 91172 - DNA, 25 bp, Saccharomyces pastorianus
gataacacattccagagatactcaa

SEQ ID NO: 91173 - DNA, 25 bp, Saccharomyces pastorianus
gaagcatgtcaaaaggtcgttttac

SEQ ID NO: 91174 - DNA, 25 bp, Saccharomyces pastorianus
aaaccaaggtatttgcagcagtcaa

SEQ ID NO: 91175 - DNA, 25 bp, Saccharomyces pastorianus
atcaggaagattctgtggcgttgca

SEQ ID NO: 91176 - DNA, 25 bp, Saccharomyces pastorianus
ttctagagactacaaccaatctgat

SEQ ID NO: 91177 - DNA, 25 bp, Saccharomyces pastorianus
gcttaattcgggagccaaagtgttt

SEQ ID NO: 91178 - DNA, 25 bp, Saccharomyces pastorianus
tcgtctactcatttcggcaacaaaa

SEQ ID NO: 91179 - DNA, 25 bp, Saccharomyces pastorianus
ggatttggacaccagtatatgggaa

SEQ ID NO: 91180 - DNA, 25 bp, Saccharomyces pastorianus
ggcgttgcagaaatggtatcggatt

SEQ ID NO: 91181 - DNA, 25 bp, Saccharomyces pastorianus
aagtcctcgtctttgaagcatgtca

SEQ ID NO: 91182 - DNA, 25 bp, Saccharomyces pastorianus
gcaacaaaaggctatctgaggcata

SEQ ID NO: 91183 - DNA, 25 bp, Saccharomyces pastorianus
ggtcgtgttttaacttccagcggag

SEQ ID NO: 91184 - DNA, 25 bp, Saccharomyces pastorianus
atatgcatctggttggatccgtaag

SEQ ID NO: 91185 - DNA, 25 bp, Saccharomyces pastorianus
acttcgttgggatatgcaggcgttc

SEQ ID NO: 91186 - DNA, 25 bp, Saccharomyces pastorianus
gtggatttgctgattacttcgttgg

SEQ ID NO: 91187 - DNA, 25 bp, Saccharomyces pastorianus
taatatcaagcacaccacatggaag

SEQ ID NO: 91188 - DNA, 25 bp, Saccharomyces pastorianus
actataaaaaggctcctcctccaag

SEQ ID NO: 91189 - DNA, 25 bp, Saccharomyces pastorianus
gaattctatcgacctctctaatatc

SEQ ID NO: 91190 - DNA, 25 bp, Saccharomyces pastorianus
aacagtttgcaacccttgaaggacg

SEQ ID NO: 91191 - DNA, 25 bp, Saccharomyces pastorianus
tcagcggagcgctatccttagagaa

SEQ ID NO: 91192 - DNA, 25 bp, Saccharomyces pastorianus
gttcccatgcctgaattctctaagt

SEQ ID NO: 91193 - DNA, 25 bp, Saccharomyces pastorianus
attttggtgcaatcaactctttgag

SEQ ID NO: 91194 - DNA, 25 bp, Saccharomyces pastorianus
ccattgtggcattttgctctaggta

SEQ ID NO: 91195 - DNA, 25 bp, Saccharomyces pastorianus
gctaacactagattggccagataca

SEQ ID NO: 91196 - DNA, 25 bp, Saccharomyces pastorianus
tcctccaaaagttgtgtcttccaag

SEQ ID NO: 91197 - DNA, 25 bp, Saccharomyces pastorianus
ttgcctttggctattccatggaata

SEQ ID NO: 91198 - DNA, 25 bp, Saccharomyces pastorianus
ataagtctttgcctcaaggaccagc

SEQ ID NO: 91199 - DNA, 25 bp, Saccharomyces pastorianus
gctctaggtataattgcctttggct

SEQ ID NO: 91200 - DNA, 25 bp, Saccharomyces pastorianus
gcattgctaatgttgttcactttta

SEQ ID NO: 91201 - DNA, 25 bp, Saccharomyces pastorianus
gtcttccaagaatataggttcggca

SEQ ID NO: 91202 - DNA, 25 bp, Saccharomyces pastorianus
gtatctacattgattcctccaaaag

SEQ ID NO: 91203 - DNA, 25 bp, Saccharomyces pastorianus
ggcaccaaatgccaagcgcattgct

SEQ ID NO: 91204 - DNA, 25 bp, Saccharomyces pastorianus
aaggaccagcaccagccatcaaggc

SEQ ID NO: 91205 - DNA, 25 bp, Saccharomyces pastorianus
aaattttacccgtagagcatcagga

SEQ ID NO: 91206 - DNA, 25 bp, Saccharomyces pastorianus
aaagtattggcagcacatatcggca

SEQ ID NO: 91207 - DNA, 25 bp, Saccharomyces pastorianus
gtcccaaactgaatgctttactgaa

SEQ ID NO: 91208 - DNA, 25 bp, Saccharomyces pastorianus
gagaggctaccattaaacaacgaca

SEQ ID NO: 91209 - DNA, 25 bp, Saccharomyces pastorianus
aatggtgctcaaaagcctacttgaa

SEQ ID NO: 91210 - DNA, 25 bp, Saccharomyces pastorianus
agtcgggctcacagactttggttga

SEQ ID NO: 91211 - DNA, 25 bp, Saccharomyces pastorianus
tttgcaccgagtcttatccacgatt

SEQ ID NO: 91212 - DNA, 25 bp, Saccharomyces pastorianus
tcattttccatatacgatgccttga

SEQ ID NO: 91213 - DNA, 25 bp, Saccharomyces pastorianus
tatccacgattttgacggcgagaaa

SEQ ID NO: 91214 - DNA, 25 bp, Saccharomyces pastorianus
gatattcatgcagtggctagcgtat

SEQ ID NO: 91215 - DNA, 25 bp, Saccharomyces pastorianus
tatcaggtgctgcattgatcgcatt

SEQ ID NO: 91216 - DNA, 25 bp, Saccharomyces pastorianus
gttacaaaaagaagtcttacacctg

SEQ ID NO: 91217 - DNA, 25 bp, Saccharomyces pastorianus
cgaacggctcatacaaaaccaaagg

SEQ ID NO: 91218 - DNA, 25 bp, Saccharomyces pastorianus
agggcttccatacgaacggctcata

SEQ ID NO: 91219 - DNA, 25 bp, Saccharomyces pastorianus
tatagggcttccatacgaacggctc

SEQ ID NO: 91220 - DNA, 25 bp, Saccharomyces pastorianus
gcttccatacgaacggctcatacaa

SEQ ID NO: 91221 - DNA, 25 bp, Saccharomyces pastorianus
gccaagaaaagacttcaccaccatt

SEQ ID NO: 91222 - DNA, 25 bp, Saccharomyces pastorianus
gggaagtatagaaatttgccaagaa

SEQ ID NO: 91223 - DNA, 25 bp, Saccharomyces pastorianus
cttacacctgtatagggcttccata

SEQ ID NO: 91224 - DNA, 25 bp, Saccharomyces pastorianus
cattgaacacttgttacgggtcgga

SEQ ID NO: 91225 - DNA, 25 bp, Saccharomyces pastorianus
caccattgaacacttgttacgggtc

SEQ ID NO: 91226 - DNA, 25 bp, Saccharomyces pastorianus
atgcctaagagattaagtgggttac

SEQ ID NO: 91227 - DNA, 25 bp, Saccharomyces pastorianus
acggtgcagcacagatgacaatcca

SEQ ID NO: 91228 - DNA, 25 bp, Saccharomyces pastorianus
tttccccgaacagctaaagtgcatg

SEQ ID NO: 91229 - DNA, 25 bp, Saccharomyces pastorianus
gccgccctgggtgttggaattgcca

SEQ ID NO: 91230 - DNA, 25 bp, Saccharomyces pastorianus
gaaccctggtgatgttgtcgtttgt

SEQ ID NO: 91231 - DNA, 25 bp, Saccharomyces pastorianus
gatgcctaaatttttgaaccctggt

SEQ ID NO: 91232 - DNA, 25 bp, Saccharomyces pastorianus
taggcgaattggatttccccgaaca

SEQ ID NO: 91233 - DNA, 25 bp, Saccharomyces pastorianus
aatagcactctcattcaatgtccct

SEQ ID NO: 91234 - DNA, 25 bp, Saccharomyces pastorianus
atttcgcatttccttcgcagttaaa

SEQ ID NO: 91235 - DNA, 25 bp, Saccharomyces pastorianus
aattctctgttcgtgatttcgcatt

SEQ ID NO: 91236 - DNA, 25 bp, Saccharomyces pastorianus
gaaacaggctcttttcaattctctg

SEQ ID NO: 91237 - DNA, 25 bp, Saccharomyces pastorianus
aggatttttcctttccattggcatg

SEQ ID NO: 91238 - DNA, 25 bp, Saccharomyces pastorianus
gttcgctactgttccaactggtggt

SEQ ID NO: 91239 - DNA, 25 bp, Saccharomyces pastorianus
ttcgctactgttccaactggtggtg

SEQ ID NO: 91240 - DNA, 25 bp, Saccharomyces pastorianus
ttccaactggtggtgcttcttctgc

SEQ ID NO: 91241 - DNA, 25 bp, Saccharomyces pastorianus
agttcgctactgttccaactggtgg

SEQ ID NO: 91242 - DNA, 25 bp, Saccharomyces pastorianus
aagaagttcgctactgttccaactg

SEQ ID NO: 91243 - DNA, 25 bp, Saccharomyces pastorianus
tgctgctgccggtgctgccggtgct

SEQ ID NO: 91244 - DNA, 25 bp, Saccharomyces pastorianus
aaagaagttcgctactgttccaact

SEQ ID NO: 91245 - DNA, 25 bp, Saccharomyces pastorianus
aagttcgctactgttccaactggtg

SEQ ID NO: 91246 - DNA, 25 bp, Saccharomyces pastorianus
agaagttcgctactgttccaactgg

SEQ ID NO: 91247 - DNA, 25 bp, Saccharomyces pastorianus
gaagttcgctactgttccaactggt

SEQ ID NO: 91248 - DNA, 25 bp, Saccharomyces pastorianus
cgctactgttccaactggtggtgct

SEQ ID NO: 91249 - DNA, 25 bp, Saccharomyces pastorianus
gaaatcatcgctgaaggtcaaaaga

SEQ ID NO: 91250 - DNA, 25 bp, Saccharomyces pastorianus
agctgcttacttattattggttcaa

SEQ ID NO: 91251 - DNA, 25 bp, Saccharomyces pastorianus
attgttgtcctctttggaaggtaag

SEQ ID NO: 91252 - DNA, 25 bp, Saccharomyces pastorianus
cgtcgtcgaatctgtcggtgctgaa

SEQ ID NO: 91253 - DNA, 25 bp, Saccharomyces pastorianus
caacgaattgttgtcctctttggaa

SEQ ID NO: 91254 - DNA, 25 bp, Saccharomyces pastorianus
aaggtggtaacgctgccccatccgc

SEQ ID NO: 91255 - DNA, 25 bp, Saccharomyces pastorianus
atctgtcggtgctgaagtcgatgaa

SEQ ID NO: 91256 - DNA, 25 bp, Saccharomyces pastorianus
tctttggaagaaatcatcgctgaag

SEQ ID NO: 91257 - DNA, 25 bp, Saccharomyces pastorianus
tggttcaaggtggtaacgctgcccc

SEQ ID NO: 91258 - DNA, 25 bp, Saccharomyces pastorianus
gtcgatgaagccagaatcaacgaat

SEQ ID NO: 91259 - DNA, 25 bp, Saccharomyces pastorianus
gaaatacttagctgcttacttatta

SEQ ID NO: 91260 - DNA, 25 bp, Saccharomyces pastorianus
gataacgagtctgaattgagggcca

SEQ ID NO: 91261 - DNA, 25 bp, Saccharomyces pastorianus
agggtgaacctcagagtacatcgat

SEQ ID NO: 91262 - DNA, 25 bp, Saccharomyces pastorianus
aatgatctcaaagttctaagcgaat

SEQ ID NO: 91263 - DNA, 25 bp, Saccharomyces pastorianus
gatgatgatatcagcgagtacttcg

SEQ ID NO: 91264 - DNA, 25 bp, Saccharomyces pastorianus
caaagtactctcttggaagtgaact

SEQ ID NO: 91265 - DNA, 25 bp, Saccharomyces pastorianus
gagtacttcgccacttacaatggga

SEQ ID NO: 91266 - DNA, 25 bp, Saccharomyces pastorianus
aagatgtgttgaaactgccgcagat

SEQ ID NO: 91267 - DNA, 25 bp, Saccharomyces pastorianus
tgagggccagtcaatcgcagcagat

SEQ ID NO: 91268 - DNA, 25 bp, Saccharomyces pastorianus
gaaaacatttggcaattctccggaa

SEQ ID NO: 91269 - DNA, 25 bp, Saccharomyces pastorianus
aatgtcaggctctccaaataggcga

SEQ ID NO: 91270 - DNA, 25 bp, Saccharomyces pastorianus
agtgtgcagattactgaaggctcaa

SEQ ID NO: 91271 - DNA, 25 bp, Saccharomyces pastorianus
gtatcggcaccttcattgacaacaa

SEQ ID NO: 91272 - DNA, 25 bp, Saccharomyces pastorianus
accgttttcaccttcttgatgttga

SEQ ID NO: 91273 - DNA, 25 bp, Saccharomyces pastorianus
cgttcgcggcgtcactgatggtaaa

SEQ ID NO: 91274 - DNA, 25 bp, Saccharomyces pastorianus
tgctgcggttggtattcgctatact

SEQ ID NO: 91275 - DNA, 25 bp, Saccharomyces pastorianus
acatacgccatgactgtgttcagtt

SEQ ID NO: 91276 - DNA, 25 bp, Saccharomyces pastorianus
ttaccttcctactactgtgtatcgg

SEQ ID NO: 91277 - DNA, 25 bp, Saccharomyces pastorianus
gtcatgtctagttctgtcgctaatt

SEQ ID NO: 91278 - DNA, 25 bp, Saccharomyces pastorianus
gcatcgttttctctgtcatgtctag

SEQ ID NO: 91279 - DNA, 25 bp, Saccharomyces pastorianus
ggctataccgatcccacaatgttga

SEQ ID NO: 91280 - DNA, 25 bp, Saccharomyces pastorianus
ggatctgctacggttatgggctaac

SEQ ID NO: 91281 - DNA, 25 bp, Saccharomyces pastorianus
tactgttctgtggtgagtccttcaa

SEQ ID NO: 91282 - DNA, 25 bp, Saccharomyces pastorianus
cacagaggtggtggtcaaatcatcc

SEQ ID NO: 91283 - DNA, 25 bp, Saccharomyces pastorianus
tctggtgtttcggtccagacggtaa

SEQ ID NO: 91284 - DNA, 25 bp, Saccharomyces pastorianus
aggtactccattgtttaccgtcaag

SEQ ID NO: 91285 - DNA, 25 bp, Saccharomyces pastorianus
atcaaggattccgttgttgctgctt

SEQ ID NO: 91286 - DNA, 25 bp, Saccharomyces pastorianus
gctgctttccaatgggctaccaagg

SEQ ID NO: 91287 - DNA, 25 bp, Saccharomyces pastorianus
gtggtatctactccgtcttaaacaa

SEQ ID NO: 91288 - DNA, 25 bp, Saccharomyces pastorianus
caaagaccaggtactccattgttta

SEQ ID NO: 91289 - DNA, 25 bp, Saccharomyces pastorianus
ttacatgccgatgctatccacagag

SEQ ID NO: 91290 - DNA, 25 bp, Saccharomyces pastorianus
aaggctgtccaatacttgcacgaaa

SEQ ID NO: 91291 - DNA, 25 bp, Saccharomyces pastorianus
gtcaaatcatcccaaccatgagaag

SEQ ID NO: 91292 - DNA, 25 bp, Saccharomyces pastorianus
ggtcgaaattcaatgtccagaacaa

SEQ ID NO: 91293 - DNA, 25 bp, Saccharomyces pastorianus
gttaccgcattgtatgactaccaag

SEQ ID NO: 91294 - DNA, 25 bp, Saccharomyces pastorianus
tatccacagtatgctgctgcgcaat

SEQ ID NO: 91295 - DNA, 25 bp, Saccharomyces pastorianus
agctcctggcgttgaaactgttacc

SEQ ID NO: 91296 - DNA, 25 bp, Saccharomyces pastorianus
ggatacggttatggtgccgcagcac

SEQ ID NO: 91297 - DNA, 25 bp, Saccharomyces pastorianus
aagctgctggtgatttgtctttccc

SEQ ID NO: 91298 - DNA, 25 bp, Saccharomyces pastorianus
cagcgtactccggacgtgaacgaat

SEQ ID NO: 91299 - DNA, 25 bp, Saccharomyces pastorianus
tgggtatgatccagcaactgccact

SEQ ID NO: 91300 - DNA, 25 bp, Saccharomyces pastorianus
tgttccgggtacttatccacagtat

SEQ ID NO: 91301 - DNA, 25 bp, Saccharomyces pastorianus
actgggctaggcttccaacaatcac

SEQ ID NO: 91302 - DNA, 25 bp, Saccharomyces pastorianus
tatggtgtagcaaccgccgaaggct

SEQ ID NO: 91303 - DNA, 25 bp, Saccharomyces pastorianus
taatcctctaacatcacctgttgcg

SEQ ID NO: 91304 - DNA, 25 bp, Saccharomyces pastorianus
aaaattgcccagtttgctctaaagt

SEQ ID NO: 91305 - DNA, 25 bp, Saccharomyces pastorianus
gatcttgtagtttcaatacgcgaga

SEQ ID NO: 91306 - DNA, 25 bp, Saccharomyces pastorianus
ggtgacacaatgatccgcaaagcca

SEQ ID NO: 91307 - DNA, 25 bp, Saccharomyces pastorianus
gagaagtactcatatccacaggata

SEQ ID NO: 91308 - DNA, 25 bp, Saccharomyces pastorianus
gatcatcatcgatgctgaaccgatc

SEQ ID NO: 91309 - DNA, 25 bp, Saccharomyces pastorianus
tacttgcagcttaccggacgttgaa

SEQ ID NO: 91310 - DNA, 25 bp, Saccharomyces pastorianus
aggatatttcgcttctggacgcaag

SEQ ID NO: 91311 - DNA, 25 bp, Saccharomyces pastorianus
gatgaactcccatgtaatacttgca

SEQ ID NO: 91312 - DNA, 25 bp, Saccharomyces pastorianus
agttatccagcgattgtttgaacaa

SEQ ID NO: 91313 - DNA, 25 bp, Saccharomyces pastorianus
gatactgagatttctgaggcgccca

SEQ ID NO: 91314 - DNA, 25 bp, Saccharomyces pastorianus
taaaggccaacaatagtccgtcaaa

SEQ ID NO: 91315 - DNA, 25 bp, Saccharomyces pastorianus
acggcaattgcgatccgaatggtga

SEQ ID NO: 91316 - DNA, 25 bp, Saccharomyces pastorianus
attcctctagctgagaaggtgccta

SEQ ID NO: 91317 - DNA, 25 bp, Saccharomyces pastorianus
gtgtgaggtcgactctaacggcaat

SEQ ID NO: 91318 - DNA, 25 bp, Saccharomyces pastorianus
gttaatactttcgatgctgttgcag

SEQ ID NO: 91319 - DNA, 25 bp, Saccharomyces pastorianus
gaaaattgcgccattgtccttgaag

SEQ ID NO: 91320 - DNA, 25 bp, Saccharomyces pastorianus
gtccttgaagctattgccgagcatg

SEQ ID NO: 91321 - DNA, 25 bp, Saccharomyces pastorianus
tatcatatcgccattcctggattca

SEQ ID NO: 91322 - DNA, 25 bp, Saccharomyces pastorianus
gccagcgtttcattttatcagcaag

SEQ ID NO: 91323 - DNA, 25 bp, Saccharomyces pastorianus
tgctgttgcagtgtggagtcttcca

SEQ ID NO: 91324 - DNA, 25 bp, Saccharomyces pastorianus
ttgcttttagtaactcgccagcgtt

SEQ ID NO: 91325 - DNA, 25 bp, Saccharomyces pastorianus
ctcgcgtaaagcaagtcattccaaa

SEQ ID NO: 91326 - DNA, 25 bp, Saccharomyces pastorianus
gaatttgcatcatccacattacata

SEQ ID NO: 91327 - DNA, 25 bp, Saccharomyces pastorianus
tgagattgtctgttctttgacggaa

SEQ ID NO: 91328 - DNA, 25 bp, Saccharomyces pastorianus
ggaagcctggagagtactacaaaca

SEQ ID NO: 91329 - DNA, 25 bp, Saccharomyces pastorianus
ggacaaatcccagcaatctagccaa

SEQ ID NO: 91330 - DNA, 25 bp, Saccharomyces pastorianus
gagtacgtgcattggtccgattgtc

SEQ ID NO: 91331 - DNA, 25 bp, Saccharomyces pastorianus
ttggtccgattgtcgacaggcaagt

SEQ ID NO: 91332 - DNA, 25 bp, Saccharomyces pastorianus
gggaaaccccatgatgatgtgattg

SEQ ID NO: 91333 - DNA, 25 bp, Saccharomyces pastorianus
gaggcatagggctttgaccaacttt

SEQ ID NO: 91334 - DNA, 25 bp, Saccharomyces pastorianus
aaggactggtctggaatttcgcaat

SEQ ID NO: 91335 - DNA, 25 bp, Saccharomyces pastorianus
ttctttgacggaaacagctctgaaa

SEQ ID NO: 91336 - DNA, 25 bp, Saccharomyces pastorianus
agaaatcccaaattaagctgccatg

SEQ ID NO: 91337 - DNA, 25 bp, Saccharomyces pastorianus
aagcgctctcaacgaatatgccaag

SEQ ID NO: 91338 - DNA, 25 bp, Saccharomyces pastorianus
tttgaccaggtaccatgaggaacaa

SEQ ID NO: 91339 - DNA, 25 bp, Saccharomyces pastorianus
aaggcaacacagaaaactcgatcgt

SEQ ID NO: 91340 - DNA, 25 bp, Saccharomyces pastorianus
atcggaagtaacagaccaaggcaac

SEQ ID NO: 91341 - DNA, 25 bp, Saccharomyces pastorianus
agttgcaacggctgagaccactaca

SEQ ID NO: 91342 - DNA, 25 bp, Saccharomyces pastorianus
aaaatccgaagaacatccacctggg

SEQ ID NO: 91343 - DNA, 25 bp, Saccharomyces pastorianus
tcccctagtctttgacaccttagag

SEQ ID NO: 91344 - DNA, 25 bp, Saccharomyces pastorianus
attgttacctggaaaatcatcggaa

SEQ ID NO: 91345 - DNA, 25 bp, Saccharomyces pastorianus
tataggaaacttgacgctcccctag

SEQ ID NO: 91346 - DNA, 25 bp, Saccharomyces pastorianus
aatcgacaggcctgaagttgcaacg

SEQ ID NO: 91347 - DNA, 25 bp, Saccharomyces pastorianus
gacaccttagagttctacttatact

SEQ ID NO: 91348 - DNA, 25 bp, Saccharomyces pastorianus
agacacattggacccagctttgctg

SEQ ID NO: 91349 - DNA, 25 bp, Saccharomyces pastorianus
gtttcgatcaatccaccaacgttaa

SEQ ID NO: 91350 - DNA, 25 bp, Saccharomyces pastorianus
gcgtatcctgattgagttgttgaca

SEQ ID NO: 91351 - DNA, 25 bp, Saccharomyces pastorianus
atgtcatcttacaaagcgatctgga

SEQ ID NO: 91352 - DNA, 25 bp, Saccharomyces pastorianus
ggtccaagaatggttcgtgacgtct

SEQ ID NO: 91353 - DNA, 25 bp, Saccharomyces pastorianus
taacggctccgaatttgttcacaaa

SEQ ID NO: 91354 - DNA, 25 bp, Saccharomyces pastorianus
gcgatcatgcaggaagctggtttaa

SEQ ID NO: 91355 - DNA, 25 bp, Saccharomyces pastorianus
ttagactcgcttattattcgtaacg

SEQ ID NO: 91356 - DNA, 25 bp, Saccharomyces pastorianus
gctgcattcataagagttaacggct

SEQ ID NO: 91357 - DNA, 25 bp, Saccharomyces pastorianus
tggctacaaacagggcagacacatt

SEQ ID NO: 91358 - DNA, 25 bp, Saccharomyces pastorianus
tgagtttccctcacttcgtgatagg

SEQ ID NO: 91359 - DNA, 25 bp, Saccharomyces pastorianus
gaaacagtgctcaataatcgtgacg

SEQ ID NO: 91360 - DNA, 25 bp, Saccharomyces pastorianus
ttgatgtctactctatcgtcgttac

SEQ ID NO: 91361 - DNA, 25 bp, Saccharomyces pastorianus
tatgaagcaggcgacatccactcat

SEQ ID NO: 91362 - DNA, 25 bp, Saccharomyces pastorianus
caaggctactagcactggatgcaag

SEQ ID NO: 91363 - DNA, 25 bp, Saccharomyces pastorianus
gggatactatcttccgtctgaaacc

SEQ ID NO: 91364 - DNA, 25 bp, Saccharomyces pastorianus
gcgttccgacttattaccaaggcta

SEQ ID NO: 91365 - DNA, 25 bp, Saccharomyces pastorianus
gcactggctgtcattctcttagaaa

SEQ ID NO: 91366 - DNA, 25 bp, Saccharomyces pastorianus
gaagcatacctcatctaagcaagat

SEQ ID NO: 91367 - DNA, 25 bp, Saccharomyces pastorianus
gtaattctgtcgcaagcactacaat

SEQ ID NO: 91368 - DNA, 25 bp, Saccharomyces pastorianus
cactcatccgaaccagttgtcgaag

SEQ ID NO: 91369 - DNA, 25 bp, Saccharomyces pastorianus
tcgtcgttacattccaccttgaaaa

SEQ ID NO: 91370 - DNA, 25 bp, Saccharomyces pastorianus
gctaggatcctacgtacgttcctaa

SEQ ID NO: 91371 - DNA, 25 bp, Saccharomyces pastorianus
aagccggacttaatcattgccattg

SEQ ID NO: 91372 - DNA, 25 bp, Saccharomyces pastorianus
tacgttcctaaaggagcccggcgtg

SEQ ID NO: 91373 - DNA, 25 bp, Saccharomyces pastorianus
gacaagaaccgttattttgcagcta

SEQ ID NO: 91374 - DNA, 25 bp, Saccharomyces pastorianus
gatctgcctgccgaaatgttgaatg

SEQ ID NO: 91375 - DNA, 25 bp, Saccharomyces pastorianus
cggcgtgccaaccatcagaattttt

SEQ ID NO: 91376 - DNA, 25 bp, Saccharomyces pastorianus
tggtggtttcattcctgctaggatc

SEQ ID NO: 91377 - DNA, 25 bp, Saccharomyces pastorianus
aactatgtcaagtatccgctgagag

SEQ ID NO: 91378 - DNA, 25 bp, Saccharomyces pastorianus
cttcgggatttttgttctacacgat

SEQ ID NO: 91379 - DNA, 25 bp, Saccharomyces pastorianus
gtaccacacttcattacgctttgag

SEQ ID NO: 91380 - DNA, 25 bp, Saccharomyces pastorianus
gaatctactgacattgttttccata

SEQ ID NO: 91381 - DNA, 25 bp, Saccharomyces pastorianus
caaggatttgaatcgggtccaccta

SEQ ID NO: 91382 - DNA, 25 bp, Saccharomyces pastorianus
ggtggactccatggtctaggaaact

SEQ ID NO: 91383 - DNA, 25 bp, Saccharomyces pastorianus
ggtccacctatacatgatccggtag

SEQ ID NO: 91384 - DNA, 25 bp, Saccharomyces pastorianus
ggattgatcctgacgcagcgaatta

SEQ ID NO: 91385 - DNA, 25 bp, Saccharomyces pastorianus
aattttttgctcatacctacaagga

SEQ ID NO: 91386 - DNA, 25 bp, Saccharomyces pastorianus
ggtagctttgatgccgcttttggaa

SEQ ID NO: 91387 - DNA, 25 bp, Saccharomyces pastorianus
gaattacatattccgtgatcccgat

SEQ ID NO: 91388 - DNA, 25 bp, Saccharomyces pastorianus
aaactgtaacccaaatctttctgct

SEQ ID NO: 91389 - DNA, 25 bp, Saccharomyces pastorianus
ttatgggtgggatccatcgtctgtg

SEQ ID NO: 91390 - DNA, 25 bp, Saccharomyces pastorianus
acaaggccatagctacttacaaggt

SEQ ID NO: 91391 - DNA, 25 bp, Saccharomyces pastorianus
atcgtctgtggttggatttcgctac

SEQ ID NO: 91392 - DNA, 25 bp, Saccharomyces pastorianus
taaaatcatctgctgttgtgcccca

SEQ ID NO: 91393 - DNA, 25 bp, Saccharomyces pastorianus
gccattctccagtttttccttatgg

SEQ ID NO: 91394 - DNA, 25 bp, Saccharomyces pastorianus
cttgcacgttttggtagtacatcta

SEQ ID NO: 91395 - DNA, 25 bp, Saccharomyces pastorianus
gagttaatttttcttcccattcagg

SEQ ID NO: 91396 - DNA, 25 bp, Saccharomyces pastorianus
gttccaaagttgttgtacccgacat

SEQ ID NO: 91397 - DNA, 25 bp, Saccharomyces pastorianus
acagcacatctgtttttcgccattc

SEQ ID NO: 91398 - DNA, 25 bp, Saccharomyces pastorianus
aattctcatttctgttagggctagt

SEQ ID NO: 91399 - DNA, 25 bp, Saccharomyces pastorianus
agggtcaagactccatcgaaactgt

SEQ ID NO: 91400 - DNA, 25 bp, Saccharomyces pastorianus
ggaggatacattcttactacttcga

SEQ ID NO: 91401 - DNA, 25 bp, Saccharomyces pastorianus
gtttcgatatctgaaccccatcttt

SEQ ID NO: 91402 - DNA, 25 bp, Saccharomyces pastorianus
atcagtgatgccgtttacttccttc

SEQ ID NO: 91403 - DNA, 25 bp, Saccharomyces pastorianus
tggccatgaaaacccgcagttgcta

SEQ ID NO: 91404 - DNA, 25 bp, Saccharomyces pastorianus
cagatgtgctgtgactgggttccat

SEQ ID NO: 91405 - DNA, 25 bp, Saccharomyces pastorianus
caagggcgtatatgtcgggtacaac

SEQ ID NO: 91406 - DNA, 25 bp, Saccharomyces pastorianus
acagtttcgatggagtcttgaccct

SEQ ID NO: 91407 - DNA, 25 bp, Saccharomyces pastorianus
aatatcgtcattatccttgtcgctg

SEQ ID NO: 91408 - DNA, 25 bp, Saccharomyces pastorianus
agtaagaatgtatcctcctttgagc

SEQ ID NO: 91409 - DNA, 25 bp, Saccharomyces pastorianus
aacaactttggaacctcacacgatc

SEQ ID NO: 91410 - DNA, 25 bp, Saccharomyces pastorianus
aaatgcttttctcttcgaagtagta

SEQ ID NO: 91411 - DNA, 25 bp, Saccharomyces pastorianus
ggcttagcagatttacccttattaa

SEQ ID NO: 91412 - DNA, 25 bp, Saccharomyces pastorianus
gaagtaaacggcatcactgatccaa

SEQ ID NO: 91413 - DNA, 25 bp, Saccharomyces pastorianus
taatagttcactctaccttctagcc

SEQ ID NO: 91414 - DNA, 25 bp, Saccharomyces pastorianus
ggaattgatattccctcatcatttg

SEQ ID NO: 91415 - DNA, 25 bp, Saccharomyces pastorianus
atctgtcctaagtccgatttgtcga

SEQ ID NO: 91416 - DNA, 25 bp, Saccharomyces pastorianus
gttgaagttgcacactacacaggaa

SEQ ID NO: 91417 - DNA, 25 bp, Saccharomyces pastorianus
aaaagtagtcaaggaggctctcgaa

SEQ ID NO: 91418 - DNA, 25 bp, Saccharomyces pastorianus
gggcttttcacgttttatgatggaa

SEQ ID NO: 91419 - DNA, 25 bp, Saccharomyces pastorianus
gatacagatgcaggtcgtttgagaa

SEQ ID NO: 91420 - DNA, 25 bp, Saccharomyces pastorianus
ttttttacatattcccacaccttgg

SEQ ID NO: 91421 - DNA, 25 bp, Saccharomyces pastorianus
gcgcacattaacagcgggcccaaat

SEQ ID NO: 91422 - DNA, 25 bp, Saccharomyces pastorianus
gaagaccttgatgaacccaaatttg

SEQ ID NO: 91423 - DNA, 25 bp, Saccharomyces pastorianus
aatgacgcgtattcgaacttagtgg

SEQ ID NO: 91424 - DNA, 25 bp, Saccharomyces pastorianus
gtaatctccaacgaacagtgttcta

SEQ ID NO: 91425 - DNA, 25 bp, Saccharomyces pastorianus
ttcaaacccaccatcataccaaagt

SEQ ID NO: 91426 - DNA, 25 bp, Saccharomyces pastorianus
tatttgtgacaaagcatctgatgcc

SEQ ID NO: 91427 - DNA, 25 bp, Saccharomyces pastorianus
atattgcccacagatgggtccgccg

SEQ ID NO: 91428 - DNA, 25 bp, Saccharomyces pastorianus
tctgatgcctcaagatttaaccttt

SEQ ID NO: 91429 - DNA, 25 bp, Saccharomyces pastorianus
gagttctattcacgcaatcggtagt

SEQ ID NO: 91430 - DNA, 25 bp, Saccharomyces pastorianus
tcggtcctcgaatgaagcaatatct

SEQ ID NO: 91431 - DNA, 25 bp, Saccharomyces pastorianus
agtcgtttcatgttctcagcacggg

SEQ ID NO: 91432 - DNA, 25 bp, Saccharomyces pastorianus
caaagttccgaggatgtcatcacca

SEQ ID NO: 91433 - DNA, 25 bp, Saccharomyces pastorianus
gtagtggacggcacagtcgtttcat

SEQ ID NO: 91434 - DNA, 25 bp, Saccharomyces pastorianus
gggtccgccgagttcaacgtgaaat

SEQ ID NO: 91435 - DNA, 25 bp, Saccharomyces pastorianus
gatatattctttgtgtcctagacta

SEQ ID NO: 91436 - DNA, 25 bp, Saccharomyces pastorianus
aaggccaggatcatcctcttgaggc

SEQ ID NO: 91437 - DNA, 25 bp, Saccharomyces pastorianus
cagccttttatacctcgcttcttaa

SEQ ID NO: 91438 - DNA, 25 bp, Saccharomyces pastorianus
caaagtctactttcccaaggccagg

SEQ ID NO: 91439 - DNA, 25 bp, Saccharomyces pastorianus
gaaaactccttctgggacagcacca

SEQ ID NO: 91440 - DNA, 25 bp, Saccharomyces pastorianus
gaagaacccttcatttggcccgaag

SEQ ID NO: 91441 - DNA, 25 bp, Saccharomyces pastorianus
gacttaactgcttgggctcagacgc

SEQ ID NO: 91442 - DNA, 25 bp, Saccharomyces pastorianus
gactatctttatcatatctacggct

SEQ ID NO: 91443 - DNA, 25 bp, Saccharomyces pastorianus
ttacgacgcagctgcttcatgggaa

SEQ ID NO: 91444 - DNA, 25 bp, Saccharomyces pastorianus
gtatgaacctacagacgacgcgatt

SEQ ID NO: 91445 - DNA, 25 bp, Saccharomyces pastorianus
gcgaagcacacaccgtatcaagcaa

SEQ ID NO: 91446 - DNA, 25 bp, Saccharomyces pastorianus
attcatcgtcccaaaatcgttcaac

SEQ ID NO: 91447 - DNA, 25 bp, Saccharomyces pastorianus
tcactttaaccaccatttctttaag

SEQ ID NO: 91448 - DNA, 25 bp, Saccharomyces pastorianus
aatacctactgtttcatactttcac

SEQ ID NO: 91449 - DNA, 25 bp, Saccharomyces pastorianus
ttcgaggaaacataactttcaacat

SEQ ID NO: 91450 - DNA, 25 bp, Saccharomyces pastorianus
acataactttcaacatcaggctctt

SEQ ID NO: 91451 - DNA, 25 bp, Saccharomyces pastorianus
ttaggaacgctaaacatatcattgt

SEQ ID NO: 91452 - DNA, 25 bp, Saccharomyces pastorianus
ctactgtttcatactttcactttaa

SEQ ID NO: 91453 - DNA, 25 bp, Saccharomyces pastorianus
tcatactttcactttaaccaccatt

SEQ ID NO: 91454 - DNA, 25 bp, Saccharomyces pastorianus
tactttcactttaaccaccatttct

SEQ ID NO: 91455 - DNA, 25 bp, Saccharomyces pastorianus
tatcattgtttacttttcgaggaaa

SEQ ID NO: 91456 - DNA, 25 bp, Saccharomyces pastorianus
attatattctattctctctactggg

SEQ ID NO: 91457 - DNA, 25 bp, Saccharomyces pastorianus
taaccaccatttctttaagctaaag

SEQ ID NO: 91458 - DNA, 25 bp, Saccharomyces pastorianus
aaagcctgacgttatcatctgcgcg

SEQ ID NO: 91459 - DNA, 25 bp, Saccharomyces pastorianus
gcaagccttgatcgatgcccaaaag

SEQ ID NO: 91460 - DNA, 25 bp, Saccharomyces pastorianus
aggatgctcatattgtctctgtcac

SEQ ID NO: 91461 - DNA, 25 bp, Saccharomyces pastorianus
ttaatttcgggctcaggttccaact

SEQ ID NO: 91462 - DNA, 25 bp, Saccharomyces pastorianus
gggccaaggcaagatcccagtttga

SEQ ID NO: 91463 - DNA, 25 bp, Saccharomyces pastorianus
atccagcgctaccaggttgtttcga

SEQ ID NO: 91464 - DNA, 25 bp, Saccharomyces pastorianus
ggtttgttcgctatacccatataca

SEQ ID NO: 91465 - DNA, 25 bp, Saccharomyces pastorianus
cgcgggctggttattgatccttgga

SEQ ID NO: 91466 - DNA, 25 bp, Saccharomyces pastorianus
ttgagccaactgcaatctgtgccga

SEQ ID NO: 91467 - DNA, 25 bp, Saccharomyces pastorianus
tcgatggtaccacacacgcaattga

SEQ ID NO: 91468 - DNA, 25 bp, Saccharomyces pastorianus
gatccttggatctactttcttgagc

SEQ ID NO: 91469 - DNA, 25 bp, Saccharomyces pastorianus
actgcttctaaatcccgtatcattg

SEQ ID NO: 91470 - DNA, 25 bp, Saccharomyces pastorianus
agagtcctttcttctgaacaacggc

SEQ ID NO: 91471 - DNA, 25 bp, Saccharomyces pastorianus
actctctagctaccaagctttgtac

SEQ ID NO: 91472 - DNA, 25 bp, Saccharomyces pastorianus
aaactggcgtttactcctggtcaag

SEQ ID NO: 91473 - DNA, 25 bp, Saccharomyces pastorianus
gggacattccttttctcatattgtg

SEQ ID NO: 91474 - DNA, 25 bp, Saccharomyces pastorianus
attgccctgtccttattccattttt

SEQ ID NO: 91475 - DNA, 25 bp, Saccharomyces pastorianus
aactattgctatgcatactgcggga

SEQ ID NO: 91476 - DNA, 25 bp, Saccharomyces pastorianus
gtgggcaattggcactcagctactg

SEQ ID NO: 91477 - DNA, 25 bp, Saccharomyces pastorianus
ggaatgcctcgtagaaagctttctt

SEQ ID NO: 91478 - DNA, 25 bp, Saccharomyces pastorianus
ttaacctctttattattgccctgtc

SEQ ID NO: 91479 - DNA, 25 bp, Saccharomyces pastorianus
ggcacattcctttgctattctggaa

SEQ ID NO: 91480 - DNA, 25 bp, Saccharomyces pastorianus
gtggcccatcgaatttgaaccaatt

SEQ ID NO: 91481 - DNA, 25 bp, Saccharomyces pastorianus
gaagtacttccccttaattcaattg

SEQ ID NO: 91482 - DNA, 25 bp, Saccharomyces pastorianus
cactacggccactacaatcatttat

SEQ ID NO: 91483 - DNA, 25 bp, Saccharomyces pastorianus
tgaaccaatttcaaggccgcggcca

SEQ ID NO: 91484 - DNA, 25 bp, Saccharomyces pastorianus
ggtcgatcgacaatgccaacgtgca

SEQ ID NO: 91485 - DNA, 25 bp, Saccharomyces pastorianus
acgccatggtggtttactagtctat

SEQ ID NO: 91486 - DNA, 25 bp, Saccharomyces pastorianus
aagctgatccaacctacggaatctc

SEQ ID NO: 91487 - DNA, 25 bp, Saccharomyces pastorianus
gggaaattctcaacgccatggtggt

SEQ ID NO: 91488 - DNA, 25 bp, Saccharomyces pastorianus
tcacctctgggttcatatcatgcat

SEQ ID NO: 91489 - DNA, 25 bp, Saccharomyces pastorianus
tgccaatgtgccatcttcgcaaaga

SEQ ID NO: 91490 - DNA, 25 bp, Saccharomyces pastorianus
gtggcacagattcaggcagagcttc

SEQ ID NO: 91491 - DNA, 25 bp, Saccharomyces pastorianus
gcacgggtttgattctgataaagat

SEQ ID NO: 91492 - DNA, 25 bp, Saccharomyces pastorianus
aggattctcgtttggattatctgac

SEQ ID NO: 91493 - DNA, 25 bp, Saccharomyces pastorianus
agatgacggcgataacgacaataat

SEQ ID NO: 91494 - DNA, 25 bp, Saccharomyces pastorianus
atacgcgaagtttctgggcgtggat

SEQ ID NO: 91495 - DNA, 25 bp, Saccharomyces pastorianus
tagagccaccaaatacgcgaagttt

SEQ ID NO: 91496 - DNA, 25 bp, Saccharomyces pastorianus
gtgacgttcgacaaggattctcgtt

SEQ ID NO: 91497 - DNA, 25 bp, Saccharomyces pastorianus
taactttgaatatttagcccagcta

SEQ ID NO: 91498 - DNA, 25 bp, Saccharomyces pastorianus
aagtagcgtaaagcctattttgaag

SEQ ID NO: 91499 - DNA, 25 bp, Saccharomyces pastorianus
tagcccagctaaataatgtcaaatt

SEQ ID NO: 91500 - DNA, 25 bp, Saccharomyces pastorianus
gaatctgatgaatcctggcacgggt

SEQ ID NO: 91501 - DNA, 25 bp, Saccharomyces pastorianus
ggattatctgactggctttcacaag

SEQ ID NO: 91502 - DNA, 25 bp, Saccharomyces pastorianus
actgcattatctcctacgcttgttg

SEQ ID NO: 91503 - DNA, 25 bp, Saccharomyces pastorianus
aaatcctccgtcttatcatttttcg

SEQ ID NO: 91504 - DNA, 25 bp, Saccharomyces pastorianus
tgtcgtttgcctttctttggtttat

SEQ ID NO: 91505 - DNA, 25 bp, Saccharomyces pastorianus
aggctttacgctactttcattattg

SEQ ID NO: 91506 - DNA, 25 bp, Saccharomyces pastorianus
ccgaatcttctgtctttcttcaatt

SEQ ID NO: 91507 - DNA, 25 bp, Saccharomyces pastorianus
gttatcgccgtcatctttatcagaa

SEQ ID NO: 91508 - DNA, 25 bp, Saccharomyces pastorianus
aaacccgtgccaggattcatcagat

SEQ ID NO: 91509 - DNA, 25 bp, Saccharomyces pastorianus
aaacttcgcgtatttggtggctcta

SEQ ID NO: 91510 - DNA, 25 bp, Saccharomyces pastorianus
atctgaacttttttactcttggctt

SEQ ID NO: 91511 - DNA, 25 bp, Saccharomyces pastorianus
tgggttccaatgtctccaattcaac

SEQ ID NO: 91512 - DNA, 25 bp, Saccharomyces pastorianus
gtatatttccgtgattgctcctttc

SEQ ID NO: 91513 - DNA, 25 bp, Saccharomyces pastorianus
gaatttcacttttattccgccgaag

SEQ ID NO: 91514 - DNA, 25 bp, Saccharomyces pastorianus
gacggtgactaatatggaggctctc

SEQ ID NO: 91515 - DNA, 25 bp, Saccharomyces pastorianus
ggacagattaagtctcgctcatatg

SEQ ID NO: 91516 - DNA, 25 bp, Saccharomyces pastorianus
acactactcccgcattaactgattt

SEQ ID NO: 91517 - DNA, 25 bp, Saccharomyces pastorianus
tatcaactcttatctatccattcct

SEQ ID NO: 91518 - DNA, 25 bp, Saccharomyces pastorianus
gaggctctcagattatatacggaaa

SEQ ID NO: 91519 - DNA, 25 bp, Saccharomyces pastorianus
gggagtgccaccagaaacggatttc

SEQ ID NO: 91520 - DNA, 25 bp, Saccharomyces pastorianus
atttccaggctccttcgtgattgaa

SEQ ID NO: 91521 - DNA, 25 bp, Saccharomyces pastorianus
aatggcagctccaggtgcggacgac

SEQ ID NO: 91522 - DNA, 25 bp, Saccharomyces pastorianus
gattctatcaatctgctactgccat

SEQ ID NO: 91523 - DNA, 25 bp, Saccharomyces pastorianus
tgatgtttttacagcttatgccaaa

SEQ ID NO: 91524 - DNA, 25 bp, Saccharomyces pastorianus
gtacaagtacttaacttcatttgga

SEQ ID NO: 91525 - DNA, 25 bp, Saccharomyces pastorianus
ttgatacctttgaattccttggtgg

SEQ ID NO: 91526 - DNA, 25 bp, Saccharomyces pastorianus
aactttggaggcatattgactattg

SEQ ID NO: 91527 - DNA, 25 bp, Saccharomyces pastorianus
cttggtggccttggcgatatcttca

SEQ ID NO: 91528 - DNA, 25 bp, Saccharomyces pastorianus
tacaagtacttaacttcatttggat

SEQ ID NO: 91529 - DNA, 25 bp, Saccharomyces pastorianus
aaactttggaggcatattgactatt

SEQ ID NO: 91530 - DNA, 25 bp, Saccharomyces pastorianus
gatacctttgaattccttggtggcc

SEQ ID NO: 91531 - DNA, 25 bp, Saccharomyces pastorianus
tacctttgaattccttggtggcctt

SEQ ID NO: 91532 - DNA, 25 bp, Saccharomyces pastorianus
tccttggtggccttggcgatatctt

SEQ ID NO: 91533 - DNA, 25 bp, Saccharomyces pastorianus
atacctttgaattccttggtggcct

SEQ ID NO: 91534 - DNA, 25 bp, Saccharomyces pastorianus
ctttggaggcatattgactattgat

SEQ ID NO: 91535 - DNA, 25 bp, Saccharomyces pastorianus
gggataaacccaatggaccgatctt

SEQ ID NO: 91536 - DNA, 25 bp, Saccharomyces pastorianus
tggcgatatcttcaccaaccttctt

SEQ ID NO: 91537 - DNA, 25 bp, Saccharomyces pastorianus
gctatgcttgacgttcttatccttc

SEQ ID NO: 91538 - DNA, 25 bp, Saccharomyces pastorianus
aaggcggcggaagcaccgacttcac

SEQ ID NO: 91539 - DNA, 25 bp, Saccharomyces pastorianus
gtggccttggcgatatcttcaccaa

SEQ ID NO: 91540 - DNA, 25 bp, Saccharomyces pastorianus
caccgacagctctcaagtacaagta

SEQ ID NO: 91541 - DNA, 25 bp, Saccharomyces pastorianus
gactattgatttatccttctattgg

SEQ ID NO: 91542 - DNA, 25 bp, Saccharomyces pastorianus
tacctttgaattccttggtggcctt

SEQ ID NO: 91543 - DNA, 25 bp, Saccharomyces pastorianus
gttaccgctatgcttgacgttctta

SEQ ID NO: 91544 - DNA, 25 bp, Saccharomyces pastorianus
ggacagtaactttgatacctttgaa

SEQ ID NO: 91545 - DNA, 25 bp, Saccharomyces pastorianus
tttggattttcaattggacagtaac

SEQ ID NO: 91546 - DNA, 25 bp, Saccharomyces pastorianus
ttgatttcaagaaccctcatgacat

SEQ ID NO: 91547 - DNA, 25 bp, Saccharomyces pastorianus
tttcaagaaccctcatgacatcatt

SEQ ID NO: 91548 - DNA, 25 bp, Saccharomyces pastorianus
atttcaagaaccctcatgacatcat

SEQ ID NO: 91549 - DNA, 25 bp, Saccharomyces pastorianus
gttgatttcaagaaccctcatgaca

SEQ ID NO: 91550 - DNA, 25 bp, Saccharomyces pastorianus
tgagagctgtcggtggtgaagtcgg

SEQ ID NO: 91551 - DNA, 25 bp, Saccharomyces pastorianus
gagagctgtcggtggtgaagtcggt

SEQ ID NO: 91552 - DNA, 25 bp, Saccharomyces pastorianus
ggttgtcgtgttgatttcaagaacc

SEQ ID NO: 91553 - DNA, 25 bp, Saccharomyces pastorianus
gttgtcgtgttgatttcaagaaccc

SEQ ID NO: 91554 - DNA, 25 bp, Saccharomyces pastorianus
ttgtcgtgttgatttcaagaaccct

SEQ ID NO: 91555 - DNA, 25 bp, Saccharomyces pastorianus
tgatttcaagaaccctcatgacatc

SEQ ID NO: 91556 - DNA, 25 bp, Saccharomyces pastorianus
tgttgatttcaagaaccctcatgac

SEQ ID NO: 91557 - DNA, 25 bp, Saccharomyces pastorianus
ggcaatcaggtccatactttcaaaa

SEQ ID NO: 91558 - DNA, 25 bp, Saccharomyces pastorianus
ggaaaaaactaccagctcgaaagct

SEQ ID NO: 91559 - DNA, 25 bp, Saccharomyces pastorianus
gcattgaaactgtcggaaggcttaa

SEQ ID NO: 91560 - DNA, 25 bp, Saccharomyces pastorianus
acatactgccacacctcagaagaaa

SEQ ID NO: 91561 - DNA, 25 bp, Saccharomyces pastorianus
aatttgtcacggaccttgatattaa

SEQ ID NO: 91562 - DNA, 25 bp, Saccharomyces pastorianus
gagcacgcagactatcatttagcat

SEQ ID NO: 91563 - DNA, 25 bp, Saccharomyces pastorianus
gacttttacagaccagaaggctctt

SEQ ID NO: 91564 - DNA, 25 bp, Saccharomyces pastorianus
atcaggtccagttgcgtacaagggc

SEQ ID NO: 91565 - DNA, 25 bp, Saccharomyces pastorianus
gaatcatccaaaaacctttctttcg

SEQ ID NO: 91566 - DNA, 25 bp, Saccharomyces pastorianus
aagaccaaactcacaacatactgcc

SEQ ID NO: 91567 - DNA, 25 bp, Saccharomyces pastorianus
agggcatcaatttccagagtcacga

SEQ ID NO: 91568 - DNA, 25 bp, Saccharomyces pastorianus
gtgacactgcggttactttaaaaga

SEQ ID NO: 91569 - DNA, 25 bp, Saccharomyces pastorianus
ttagaacgaccacccttattaagag

SEQ ID NO: 91570 - DNA, 25 bp, Saccharomyces pastorianus
aaggtccatctctatctgacgaagt

SEQ ID NO: 91571 - DNA, 25 bp, Saccharomyces pastorianus
agagcaatcgcgaatcctcactgga

SEQ ID NO: 91572 - DNA, 25 bp, Saccharomyces pastorianus
attcgatatcatccgtgacactgcg

SEQ ID NO: 91573 - DNA, 25 bp, Saccharomyces pastorianus
ggtatcgttgatccttttgttgaac

SEQ ID NO: 91574 - DNA, 25 bp, Saccharomyces pastorianus
ttaagagatggcaccactcctctag

SEQ ID NO: 91575 - DNA, 25 bp, Saccharomyces pastorianus
tatcgggcttgaattcgtagaacca

SEQ ID NO: 91576 - DNA, 25 bp, Saccharomyces pastorianus
tgaaccctcggaaaggcctttgacg

SEQ ID NO: 91577 - DNA, 25 bp, Saccharomyces pastorianus
ttacagattggttcggtgctagtga

SEQ ID NO: 91578 - DNA, 25 bp, Saccharomyces pastorianus
acaatgaactcttccaaggtccatc

SEQ ID NO: 91579 - DNA, 25 bp, Saccharomyces pastorianus
aaatgccagatttcagtctcgatct

SEQ ID NO: 91580 - DNA, 25 bp, Saccharomyces pastorianus
ggaaaagcgtcttgctaccacattc

SEQ ID NO: 91581 - DNA, 25 bp, Saccharomyces pastorianus
cataactactttcctcagaactctg

SEQ ID NO: 91582 - DNA, 25 bp, Saccharomyces pastorianus
agatgatactttattccccagcgtg

SEQ ID NO: 91583 - DNA, 25 bp, Saccharomyces pastorianus
agaaatctctagcttcggtgcttcc

SEQ ID NO: 91584 - DNA, 25 bp, Saccharomyces pastorianus
tcctccctaccaaaatattcatcgt

SEQ ID NO: 91585 - DNA, 25 bp, Saccharomyces pastorianus
agaactctgaaagcctgaccgctga

SEQ ID NO: 91586 - DNA, 25 bp, Saccharomyces pastorianus
gaacacattagcagcgccatatcga

SEQ ID NO: 91587 - DNA, 25 bp, Saccharomyces pastorianus
ggtggctgcttctcatactaaaaca

SEQ ID NO: 91588 - DNA, 25 bp, Saccharomyces pastorianus
agtctcgatcttgtctccaatgata

SEQ ID NO: 91589 - DNA, 25 bp, Saccharomyces pastorianus
gtatcgggaccaaatcatgttcaaa

SEQ ID NO: 91590 - DNA, 25 bp, Saccharomyces pastorianus
acctatgatgtaccgttttgcgaca

SEQ ID NO: 91591 - DNA, 25 bp, Saccharomyces pastorianus
gatatcgtctggaacaatgccctgc

SEQ ID NO: 91592 - DNA, 25 bp, Saccharomyces pastorianus
atgtctatcccacgcgaagtatcgg

SEQ ID NO: 91593 - DNA, 25 bp, Saccharomyces pastorianus
aatttcagggcatgtctatcccacg

SEQ ID NO: 91594 - DNA, 25 bp, Saccharomyces pastorianus
atcggcagtcatgttctttggtttc

SEQ ID NO: 91595 - DNA, 25 bp, Saccharomyces pastorianus
aaatttcttcccacaagagcacatg

SEQ ID NO: 91596 - DNA, 25 bp, Saccharomyces pastorianus
ctattgggattaacggagggctcgc

SEQ ID NO: 91597 - DNA, 25 bp, Saccharomyces pastorianus
gggctcgcaagatttgttatcacct

SEQ ID NO: 91598 - DNA, 25 bp, Saccharomyces pastorianus
aatgccgttgaagccaaattcagtc

SEQ ID NO: 91599 - DNA, 25 bp, Saccharomyces pastorianus
caatgccctgcatctaagtaatgaa

SEQ ID NO: 91600 - DNA, 25 bp, Saccharomyces pastorianus
acatgatagctgtgtatttaccttt

SEQ ID NO: 91601 - DNA, 25 bp, Saccharomyces pastorianus
aacttgctgcttgtgatttgaacga

SEQ ID NO: 91602 - DNA, 25 bp, Saccharomyces pastorianus
ggctcagatcattacagttcttgga

SEQ ID NO: 91603 - DNA, 25 bp, Saccharomyces pastorianus
aagtgagattttgcgtacctccctc

SEQ ID NO: 91604 - DNA, 25 bp, Saccharomyces pastorianus
gatatcctacgatccaattggtggt

SEQ ID NO: 91605 - DNA, 25 bp, Saccharomyces pastorianus
atacgcttcgagatggtctgcggct

SEQ ID NO: 91606 - DNA, 25 bp, Saccharomyces pastorianus
cggctcccaacgttattgtcaatga

SEQ ID NO: 91607 - DNA, 25 bp, Saccharomyces pastorianus
aatatctgagtgtcttttgtgctac

SEQ ID NO: 91608 - DNA, 25 bp, Saccharomyces pastorianus
aatgaccgatttggcgccattatgc

SEQ ID NO: 91609 - DNA, 25 bp, Saccharomyces pastorianus
aacccgtttgttagacgtatgcact

SEQ ID NO: 91610 - DNA, 25 bp, Saccharomyces pastorianus
gcactaagcgcgaaatacccactat

SEQ ID NO: 91611 - DNA, 25 bp, Saccharomyces pastorianus
ggtggttctcaaccgaatgaccgat

SEQ ID NO: 91612 - DNA, 25 bp, Saccharomyces pastorianus
atatggtccatcttaccatcatcgc

SEQ ID NO: 91613 - DNA, 25 bp, Saccharomyces pastorianus
gctattggacatcttcccacaaaga

SEQ ID NO: 91614 - DNA, 25 bp, Saccharomyces pastorianus
taatagaggacgacccggacgtatt

SEQ ID NO: 91615 - DNA, 25 bp, Saccharomyces pastorianus
gccgctagattctctatctacagta

SEQ ID NO: 91616 - DNA, 25 bp, Saccharomyces pastorianus
gcagtttatcaacacgctattggac

SEQ ID NO: 91617 - DNA, 25 bp, Saccharomyces pastorianus
tgaagatacattaacaccgccgcta

SEQ ID NO: 91618 - DNA, 25 bp, Saccharomyces pastorianus
aacggatgccggtggtcaacttgta

SEQ ID NO: 91619 - DNA, 25 bp, Saccharomyces pastorianus
tatgcacatacatcggccttctgat

SEQ ID NO: 91620 - DNA, 25 bp, Saccharomyces pastorianus
accatcatcgctgggtgaggctgca

SEQ ID NO: 91621 - DNA, 25 bp, Saccharomyces pastorianus
atgctgatgggcatgctatgcacat

SEQ ID NO: 91622 - DNA, 25 bp, Saccharomyces pastorianus
gtgaggctgcaccaaagcagtttat

SEQ ID NO: 91623 - DNA, 25 bp, Saccharomyces pastorianus
caaggagttctaccgttaatgcaaa

SEQ ID NO: 91624 - DNA, 25 bp, Saccharomyces pastorianus
agctatctagtattggtgactctac

SEQ ID NO: 91625 - DNA, 25 bp, Saccharomyces pastorianus
gaacgacgggattacaaagctgaaa

SEQ ID NO: 91626 - DNA, 25 bp, Saccharomyces pastorianus
gccacgttacccaactcagatgaag

SEQ ID NO: 91627 - DNA, 25 bp, Saccharomyces pastorianus
ggtgactctactgcaatgacatcaa

SEQ ID NO: 91628 - DNA, 25 bp, Saccharomyces pastorianus
aaagcccacaattcatcttctttcg

SEQ ID NO: 91629 - DNA, 25 bp, Saccharomyces pastorianus
atcgccatcaagattatctgcgctg

SEQ ID NO: 91630 - DNA, 25 bp, Saccharomyces pastorianus
aaagcagcgaattgccacgttaccc

SEQ ID NO: 91631 - DNA, 25 bp, Saccharomyces pastorianus
ttatctgcgctgcaaaaatctccag

SEQ ID NO: 91632 - DNA, 25 bp, Saccharomyces pastorianus
ttaacaagttaaccagctctccagt

SEQ ID NO: 91633 - DNA, 25 bp, Saccharomyces pastorianus
ctgactcgcctacatcacaaagaag

SEQ ID NO: 91634 - DNA, 25 bp, Saccharomyces pastorianus
caatttttactctggtgtgcacaag

SEQ ID NO: 91635 - DNA, 25 bp, Saccharomyces pastorianus
aagtagcggtatgcacagtagcggc

SEQ ID NO: 91636 - DNA, 25 bp, Saccharomyces pastorianus
gtatcaccgtcgcattttttgaatt

SEQ ID NO: 91637 - DNA, 25 bp, Saccharomyces pastorianus
atttgatcaaagcaccactcctaat

SEQ ID NO: 91638 - DNA, 25 bp, Saccharomyces pastorianus
atcttcgccatcagagagaccgtac

SEQ ID NO: 91639 - DNA, 25 bp, Saccharomyces pastorianus
cgtaccacacgtttagagcagccag

SEQ ID NO: 91640 - DNA, 25 bp, Saccharomyces pastorianus
gactgcgaatttgtcccaaaccgta

SEQ ID NO: 91641 - DNA, 25 bp, Saccharomyces pastorianus
agcagccaggttgcgaaactcttct

SEQ ID NO: 91642 - DNA, 25 bp, Saccharomyces pastorianus
aactcttctaagatggtttccagca

SEQ ID NO: 91643 - DNA, 25 bp, Saccharomyces pastorianus
ggtttccagcaattgtgtactatca

SEQ ID NO: 91644 - DNA, 25 bp, Saccharomyces pastorianus
gtgtgcacaagagtgttcatcattt

SEQ ID NO: 91645 - DNA, 25 bp, Saccharomyces pastorianus
ttacctccgccgcattatgagaata

SEQ ID NO: 91646 - DNA, 25 bp, Saccharomyces pastorianus
attagtgcagatccagcctgattcc

SEQ ID NO: 91647 - DNA, 25 bp, Saccharomyces pastorianus
gtgtcaacaggattcaagagcgcat

SEQ ID NO: 91648 - DNA, 25 bp, Saccharomyces pastorianus
attatcggtattgacagctgccata

SEQ ID NO: 91649 - DNA, 25 bp, Saccharomyces pastorianus
gcaagcggaccggtcgaatgagtat

SEQ ID NO: 91650 - DNA, 25 bp, Saccharomyces pastorianus
ggagtatatcaaaaacccggctgta

SEQ ID NO: 91651 - DNA, 25 bp, Saccharomyces pastorianus
atacggctatgttgctgtggaacac

SEQ ID NO: 91652 - DNA, 25 bp, Saccharomyces pastorianus
gacagctgccataccagatcaggag

SEQ ID NO: 91653 - DNA, 25 bp, Saccharomyces pastorianus
agtggactttacctcaggccgttat

SEQ ID NO: 91654 - DNA, 25 bp, Saccharomyces pastorianus
aatactgtattgtctgcattatcgg

SEQ ID NO: 91655 - DNA, 25 bp, Saccharomyces pastorianus
gagccaaaccagtcatcgcaagcgg

SEQ ID NO: 91656 - DNA, 25 bp, Saccharomyces pastorianus
gaaaatacatcatccccagctaagg

SEQ ID NO: 91657 - DNA, 25 bp, Saccharomyces pastorianus
ttagacacgtgcctccaggactact

SEQ ID NO: 91658 - DNA, 25 bp, Saccharomyces pastorianus
gtgatagctttgatctttccagaga

SEQ ID NO: 91659 - DNA, 25 bp, Saccharomyces pastorianus
ggactactcgagtatgctaccgtca

SEQ ID NO: 91660 - DNA, 25 bp, Saccharomyces pastorianus
tattgaccaacagttccagctctac

SEQ ID NO: 91661 - DNA, 25 bp, Saccharomyces pastorianus
aacagaacatacagcgtttcagccg

SEQ ID NO: 91662 - DNA, 25 bp, Saccharomyces pastorianus
gatctttccagagacgagaagcctt

SEQ ID NO: 91663 - DNA, 25 bp, Saccharomyces pastorianus
gaaaagcccgatcctttagacacgt

SEQ ID NO: 91664 - DNA, 25 bp, Saccharomyces pastorianus
acgctttcttccgtcacagagatta

SEQ ID NO: 91665 - DNA, 25 bp, Saccharomyces pastorianus
cagcgtagctgattcgacattggag

SEQ ID NO: 91666 - DNA, 25 bp, Saccharomyces pastorianus
agccgctgacaccaatttcgaaaaa

SEQ ID NO: 91667 - DNA, 25 bp, Saccharomyces pastorianus
acctgactatgcactgttgtccaac

SEQ ID NO: 91668 - DNA, 25 bp, Saccharomyces pastorianus
gcgatatacagcatgcacctgacta

SEQ ID NO: 91669 - DNA, 25 bp, Saccharomyces pastorianus
aaccgcataaaaccttttgctcgtg

SEQ ID NO: 91670 - DNA, 25 bp, Saccharomyces pastorianus
ttctacggcggcttcactcagtgag

SEQ ID NO: 91671 - DNA, 25 bp, Saccharomyces pastorianus
gggcaatagccgttataggtcgaat

SEQ ID NO: 91672 - DNA, 25 bp, Saccharomyces pastorianus
taaaccgtatctcgttctaaaggag

SEQ ID NO: 91673 - DNA, 25 bp, Saccharomyces pastorianus
caacgacgagcagcaactttgtatt

SEQ ID NO: 91674 - DNA, 25 bp, Saccharomyces pastorianus
taggtcgaacgcagaatacagccaa

SEQ ID NO: 91675 - DNA, 25 bp, Saccharomyces pastorianus
ataggtcgaattctgcacataggtc

SEQ ID NO: 91676 - DNA, 25 bp, Saccharomyces pastorianus
ttttgctcgtgttatgactgcacag

SEQ ID NO: 91677 - DNA, 25 bp, Saccharomyces pastorianus
gttaaccacgttagaagcaggtctt

SEQ ID NO: 91678 - DNA, 25 bp, Saccharomyces pastorianus
aatgctcggttagctcgtcggaaaa

SEQ ID NO: 91679 - DNA, 25 bp, Saccharomyces pastorianus
gtggcaacaccagccattgcaaagt

SEQ ID NO: 91680 - DNA, 25 bp, Saccharomyces pastorianus
tacctctacgccaacgagtacgaag

SEQ ID NO: 91681 - DNA, 25 bp, Saccharomyces pastorianus
aatacgtcctcgatcttcgaagacc

SEQ ID NO: 91682 - DNA, 25 bp, Saccharomyces pastorianus
atcaaataccggtcatagcgagatt

SEQ ID NO: 91683 - DNA, 25 bp, Saccharomyces pastorianus
gacgctgcgttggaaattacctcta

SEQ ID NO: 91684 - DNA, 25 bp, Saccharomyces pastorianus
ggtcatttgcctttattacacactc

SEQ ID NO: 91685 - DNA, 25 bp, Saccharomyces pastorianus
atgatatcttactcagacgctgcgt

SEQ ID NO: 91686 - DNA, 25 bp, Saccharomyces pastorianus
tgaaaacttcacctgccaatacgtc

SEQ ID NO: 91687 - DNA, 25 bp, Saccharomyces pastorianus
ggcggacagctcaagttccacagga

SEQ ID NO: 91688 - DNA, 25 bp, Saccharomyces pastorianus
acagcatttgacgaatgtcccacgc

SEQ ID NO: 91689 - DNA, 25 bp, Saccharomyces pastorianus
agagactatggcgttttgattgaaa

SEQ ID NO: 91690 - DNA, 25 bp, Saccharomyces pastorianus
gagattgttgcgttttccgatgccg

SEQ ID NO: 91691 - DNA, 25 bp, Saccharomyces pastorianus
tacgttgttctagcttttgtcccat

SEQ ID NO: 91692 - DNA, 25 bp, Saccharomyces pastorianus
ttgtcccattggctttttcatttgt

SEQ ID NO: 91693 - DNA, 25 bp, Saccharomyces pastorianus
taaagttcctttgcttgctgataag

SEQ ID NO: 91694 - DNA, 25 bp, Saccharomyces pastorianus
ggcgcccaagttttatttgcctcca

SEQ ID NO: 91695 - DNA, 25 bp, Saccharomyces pastorianus
gcatggaccaaccttcccagaaaag

SEQ ID NO: 91696 - DNA, 25 bp, Saccharomyces pastorianus
agaatcattccttatccagagacta

SEQ ID NO: 91697 - DNA, 25 bp, Saccharomyces pastorianus
gaaattcgaagatcagggcgcccaa

SEQ ID NO: 91698 - DNA, 25 bp, Saccharomyces pastorianus
gccaccatcaaacctgacgttaaag

SEQ ID NO: 91699 - DNA, 25 bp, Saccharomyces pastorianus
agttttgccatgcaactggacccca

SEQ ID NO: 91700 - DNA, 25 bp, Saccharomyces pastorianus
tcaggatcacctgcaatagggtcat

SEQ ID NO: 91701 - DNA, 25 bp, Saccharomyces pastorianus
gattatcctctgaatttcactgctt

SEQ ID NO: 91702 - DNA, 25 bp, Saccharomyces pastorianus
cactgcttgcaatctatgtttaatc

SEQ ID NO: 91703 - DNA, 25 bp, Saccharomyces pastorianus
tcatatggtatgtactgacagcgat

SEQ ID NO: 91704 - DNA, 25 bp, Saccharomyces pastorianus
atcgtcaggatcaactgctctcttg

SEQ ID NO: 91705 - DNA, 25 bp, Saccharomyces pastorianus
gtggttaacagcaccttgaaagcta

SEQ ID NO: 91706 - DNA, 25 bp, Saccharomyces pastorianus
gggtttaagtctacatcaggatcac

SEQ ID NO: 91707 - DNA, 25 bp, Saccharomyces pastorianus
aactgctctcttggcggtggttaac

SEQ ID NO: 91708 - DNA, 25 bp, Saccharomyces pastorianus
gcaataccttggatagcatttttca

SEQ ID NO: 91709 - DNA, 25 bp, Saccharomyces pastorianus
agttcatcatcatcgtcaggatcaa

SEQ ID NO: 91710 - DNA, 25 bp, Saccharomyces pastorianus
atagggtcatcgctacccgggagat

SEQ ID NO: 91711 - DNA, 25 bp, Saccharomyces pastorianus
acgggatcgacgtggctaagactga

SEQ ID NO: 91712 - DNA, 25 bp, Saccharomyces pastorianus
atttattgcgtctgggttcaacact

SEQ ID NO: 91713 - DNA, 25 bp, Saccharomyces pastorianus
gagactcaaagatgctgtaccgttc

SEQ ID NO: 91714 - DNA, 25 bp, Saccharomyces pastorianus
aaggttcagtatacaatgacccatt

SEQ ID NO: 91715 - DNA, 25 bp, Saccharomyces pastorianus
gaaagaaatcgtcaaccggttgagt

SEQ ID NO: 91716 - DNA, 25 bp, Saccharomyces pastorianus
gttgagtacgaccacccaggatatc

SEQ ID NO: 91717 - DNA, 25 bp, Saccharomyces pastorianus
atgacccattcatcaaagatcttga

SEQ ID NO: 91718 - DNA, 25 bp, Saccharomyces pastorianus
gaagcacacccaaggtttacgttga

SEQ ID NO: 91719 - DNA, 25 bp, Saccharomyces pastorianus
atgctgtaccgttcacgccgtttaa

SEQ ID NO: 91720 - DNA, 25 bp, Saccharomyces pastorianus
gtgaacgtacagaattcgagactca

SEQ ID NO: 91721 - DNA, 25 bp, Saccharomyces pastorianus
gagaaactacgcacctacgaggaat

SEQ ID NO: 91722 - DNA, 25 bp, Saccharomyces pastorianus
ggacaactatattatcaaaggtgtc

SEQ ID NO: 91723 - DNA, 25 bp, Saccharomyces pastorianus
aagaaggacaactatattatcaaag

SEQ ID NO: 91724 - DNA, 25 bp, Saccharomyces pastorianus
cgctaccgccgctccaaaagaaaag

SEQ ID NO: 91725 - DNA, 25 bp, Saccharomyces pastorianus
aggacaactatattatcaaaggtgt

SEQ ID NO: 91726 - DNA, 25 bp, Saccharomyces pastorianus
caaaagaaaagaccagcagtgaaaa

SEQ ID NO: 91727 - DNA, 25 bp, Saccharomyces pastorianus
aaaagaccagcagtgaaaagaagga

SEQ ID NO: 91728 - DNA, 25 bp, Saccharomyces pastorianus
aaggacaactatattatcaaaggtg

SEQ ID NO: 91729 - DNA, 25 bp, Saccharomyces pastorianus
aagaaaagaccagcagtgaaaagaa

SEQ ID NO: 91730 - DNA, 25 bp, Saccharomyces pastorianus
agaaggacaactatattatcaaagg

SEQ ID NO: 91731 - DNA, 25 bp, Saccharomyces pastorianus
gctaccgccgctccaaaagaaaaga

SEQ ID NO: 91732 - DNA, 25 bp, Saccharomyces pastorianus
gaaggacaactatattatcaaaggt

SEQ ID NO: 91733 - DNA, 25 bp, Saccharomyces pastorianus
ggcggacacgtttagctttggtaat

SEQ ID NO: 91734 - DNA, 25 bp, Saccharomyces pastorianus
gaggcactagtccatccaaattcaa

SEQ ID NO: 91735 - DNA, 25 bp, Saccharomyces pastorianus
attcgctgtttgcttttccatcggc

SEQ ID NO: 91736 - DNA, 25 bp, Saccharomyces pastorianus
gaaagctttttaatgcggcggacac

SEQ ID NO: 91737 - DNA, 25 bp, Saccharomyces pastorianus
ttaatgcggcggacacgtttagctt

SEQ ID NO: 91738 - DNA, 25 bp, Saccharomyces pastorianus
gctttggtaatacatctacccgatg

SEQ ID NO: 91739 - DNA, 25 bp, Saccharomyces pastorianus
gtccatccaaattcaaaacctgtct

SEQ ID NO: 91740 - DNA, 25 bp, Saccharomyces pastorianus
atggattcgctgtttgcttttccat

SEQ ID NO: 91741 - DNA, 25 bp, Saccharomyces pastorianus
catctacccgatggaggcactagtc

SEQ ID NO: 91742 - DNA, 25 bp, Saccharomyces pastorianus
ttccatcggcttccggtgcggtagt

SEQ ID NO: 91743 - DNA, 25 bp, Saccharomyces pastorianus
gtagtggcgtcagcagaaagctttt

SEQ ID NO: 91744 - DNA, 25 bp, Saccharomyces pastorianus
tatttcctgatccagaggccactaa

SEQ ID NO: 91745 - DNA, 25 bp, Saccharomyces pastorianus
gatcatcgatacattcatccaagct

SEQ ID NO: 91746 - DNA, 25 bp, Saccharomyces pastorianus
tatttgcgaagctcatccagatgtt

SEQ ID NO: 91747 - DNA, 25 bp, Saccharomyces pastorianus
tagcgagcactaccaagacatgttg

SEQ ID NO: 91748 - DNA, 25 bp, Saccharomyces pastorianus
aaccatatcgtcactatatttgcga

SEQ ID NO: 91749 - DNA, 25 bp, Saccharomyces pastorianus
atttttcaacggattaggcgctgac

SEQ ID NO: 91750 - DNA, 25 bp, Saccharomyces pastorianus
aggcgctgacagatcgttgtgttac

SEQ ID NO: 91751 - DNA, 25 bp, Saccharomyces pastorianus
aggccactaattctgctacgatctt

SEQ ID NO: 91752 - DNA, 25 bp, Saccharomyces pastorianus
ttgcttccgaaaccttatttcctga

SEQ ID NO: 91753 - DNA, 25 bp, Saccharomyces pastorianus
tacaccaggtattctcttgacgagc

SEQ ID NO: 91754 - DNA, 25 bp, Saccharomyces pastorianus
aggcgtgttctcatttttcaacgga

SEQ ID NO: 91755 - DNA, 25 bp, Saccharomyces pastorianus
gatacgaggtcttacatacccttaa

SEQ ID NO: 91756 - DNA, 25 bp, Saccharomyces pastorianus
aggataggcccggtgcaaattccac

SEQ ID NO: 91757 - DNA, 25 bp, Saccharomyces pastorianus
acatcctagggttttgtcaagcaat

SEQ ID NO: 91758 - DNA, 25 bp, Saccharomyces pastorianus
gtgcaccttctaccaatacatatac

SEQ ID NO: 91759 - DNA, 25 bp, Saccharomyces pastorianus
gcaataacgctggtgaaactccgaa

SEQ ID NO: 91760 - DNA, 25 bp, Saccharomyces pastorianus
aaagtattctgctccttctaacatg

SEQ ID NO: 91761 - DNA, 25 bp, Saccharomyces pastorianus
aggatatcgacagccaacaccttca

SEQ ID NO: 91762 - DNA, 25 bp, Saccharomyces pastorianus
ggatcatccgtattttctccttcat

SEQ ID NO: 91763 - DNA, 25 bp, Saccharomyces pastorianus
gttcggtcccagcttttaatcatag

SEQ ID NO: 91764 - DNA, 25 bp, Saccharomyces pastorianus
aagagcggcctctgagtataggaaa

SEQ ID NO: 91765 - DNA, 25 bp, Saccharomyces pastorianus
aaattccactccttcttcaagacat

SEQ ID NO: 91766 - DNA, 25 bp, Saccharomyces pastorianus
cataactcgtcacaatactgctggt

SEQ ID NO: 91767 - DNA, 25 bp, Saccharomyces pastorianus
atggtggtatgtccaatccgtttca

SEQ ID NO: 91768 - DNA, 25 bp, Saccharomyces pastorianus
acaatactgctggtgatgacgatca

SEQ ID NO: 91769 - DNA, 25 bp, Saccharomyces pastorianus
gtataggacttcttattgtcgtctt

SEQ ID NO: 91770 - DNA, 25 bp, Saccharomyces pastorianus
atgctctgaagttgcgttttgatcg

SEQ ID NO: 91771 - DNA, 25 bp, Saccharomyces pastorianus
aggcaattggaatgggtctacgaaa

SEQ ID NO: 91772 - DNA, 25 bp, Saccharomyces pastorianus
ttcaacacttaacaccagcatggct

SEQ ID NO: 91773 - DNA, 25 bp, Saccharomyces pastorianus
gaatacaggaatctactcaaacaac

SEQ ID NO: 91774 - DNA, 25 bp, Saccharomyces pastorianus
aaaacagcaacttgatgctctgaag

SEQ ID NO: 91775 - DNA, 25 bp, Saccharomyces pastorianus
tcaaacaactattcctctagaagag

SEQ ID NO: 91776 - DNA, 25 bp, Saccharomyces pastorianus
acgacgattgttgtataggacttct

SEQ ID NO: 91777 - DNA, 25 bp, Saccharomyces pastorianus
gtcattgaagagtcatctgaaccta

SEQ ID NO: 91778 - DNA, 25 bp, Saccharomyces pastorianus
ttccaatggagcaaattcaacgcga

SEQ ID NO: 91779 - DNA, 25 bp, Saccharomyces pastorianus
gatccgttacgtgttttaggtgaat

SEQ ID NO: 91780 - DNA, 25 bp, Saccharomyces pastorianus
gccgcgacggtaggtggttcacaaa

SEQ ID NO: 91781 - DNA, 25 bp, Saccharomyces pastorianus
gacagtgtaccatcttctgcaacga

SEQ ID NO: 91782 - DNA, 25 bp, Saccharomyces pastorianus
gtgacaccgcatttattagcgggca

SEQ ID NO: 91783 - DNA, 25 bp, Saccharomyces pastorianus
atcgagtagcacaaattcagtcatt

SEQ ID NO: 91784 - DNA, 25 bp, Saccharomyces pastorianus
gaaaatgtgaaccttgccgcgacgg

SEQ ID NO: 91785 - DNA, 25 bp, Saccharomyces pastorianus
acaaccagaagatccgttacgtgtt

SEQ ID NO: 91786 - DNA, 25 bp, Saccharomyces pastorianus
gaaagtgagaatagtccccaacata

SEQ ID NO: 91787 - DNA, 25 bp, Saccharomyces pastorianus
atgaagttacggttcctatggtaga

SEQ ID NO: 91788 - DNA, 25 bp, Saccharomyces pastorianus
gcatctgctttcctttcacaaagtg

SEQ ID NO: 91789 - DNA, 25 bp, Saccharomyces pastorianus
ttagggcttctgtatctcctagttc

SEQ ID NO: 91790 - DNA, 25 bp, Saccharomyces pastorianus
gtgacagcacatcgaatgccccaag

SEQ ID NO: 91791 - DNA, 25 bp, Saccharomyces pastorianus
tatcaaatgcgtcaaattccccggg

SEQ ID NO: 91792 - DNA, 25 bp, Saccharomyces pastorianus
tgaggcgccgtgatctgaaaattct

SEQ ID NO: 91793 - DNA, 25 bp, Saccharomyces pastorianus
gagaacgtttcttgcgagtacttcg

SEQ ID NO: 91794 - DNA, 25 bp, Saccharomyces pastorianus
gggcatgttggctaactccagcaca

SEQ ID NO: 91795 - DNA, 25 bp, Saccharomyces pastorianus
cgagtacttcgtttgcggcattatc

SEQ ID NO: 91796 - DNA, 25 bp, Saccharomyces pastorianus
gatagtagataacttccccacttta

SEQ ID NO: 91797 - DNA, 25 bp, Saccharomyces pastorianus
ggatttccatgtggcgtgacagcac

SEQ ID NO: 91798 - DNA, 25 bp, Saccharomyces pastorianus
ttatccacggtaccctatggtcata

SEQ ID NO: 91799 - DNA, 25 bp, Saccharomyces pastorianus
ctcatcattgttgccgagttcctga

SEQ ID NO: 91800 - DNA, 25 bp, Saccharomyces pastorianus
aatcctgtgggctccatcttagagg

SEQ ID NO: 91801 - DNA, 25 bp, Saccharomyces pastorianus
gatagtgatcttgtgctgcgactca

SEQ ID NO: 91802 - DNA, 25 bp, Saccharomyces pastorianus
gttccttcacacagaaacgggtcag

SEQ ID NO: 91803 - DNA, 25 bp, Saccharomyces pastorianus
aagtactaccgtgttcctggcgagt

SEQ ID NO: 91804 - DNA, 25 bp, Saccharomyces pastorianus
aagaggaagctgtcgctcatccaga

SEQ ID NO: 91805 - DNA, 25 bp, Saccharomyces pastorianus
tacggtcctgcgagacgtctagata

SEQ ID NO: 91806 - DNA, 25 bp, Saccharomyces pastorianus
agacgtccacgtttacgctcaagtt

SEQ ID NO: 91807 - DNA, 25 bp, Saccharomyces pastorianus
ttctaggtctcctcgaaggttacgg

SEQ ID NO: 91808 - DNA, 25 bp, Saccharomyces pastorianus
agatcgacactgttgagtacccctg

SEQ ID NO: 91809 - DNA, 25 bp, Saccharomyces pastorianus
aaggccgtcaagcatgtcagactga

SEQ ID NO: 91810 - DNA, 25 bp, Saccharomyces pastorianus
tgccgaatgggccaagccatctgaa

SEQ ID NO: 91811 - DNA, 25 bp, Saccharomyces pastorianus
tttacctcagatccacagagctaat

SEQ ID NO: 91812 - DNA, 25 bp, Saccharomyces pastorianus
attttgcctacatctttacctcaga

SEQ ID NO: 91813 - DNA, 25 bp, Saccharomyces pastorianus
atgagtactttttcagcctacccat

SEQ ID NO: 91814 - DNA, 25 bp, Saccharomyces pastorianus
ttcagcctacccatttttacattta

SEQ ID NO: 91815 - DNA, 25 bp, Saccharomyces pastorianus
gatggcaagtgctatcactcaacaa

SEQ ID NO: 91816 - DNA, 25 bp, Saccharomyces pastorianus
gtagatcatgaaactgccaagcaac

SEQ ID NO: 91817 - DNA, 25 bp, Saccharomyces pastorianus
agctgcctctaaaatatctcctctt

SEQ ID NO: 91818 - DNA, 25 bp, Saccharomyces pastorianus
atatgttagcacaaggttcgccagc

SEQ ID NO: 91819 - DNA, 25 bp, Saccharomyces pastorianus
tgccttgaagaatttgggtgccgaa

SEQ ID NO: 91820 - DNA, 25 bp, Saccharomyces pastorianus
agactctacagtttccattttgcct

SEQ ID NO: 91821 - DNA, 25 bp, Saccharomyces pastorianus
cattgcgggtgtgtttacgttccta

SEQ ID NO: 91822 - DNA, 25 bp, Saccharomyces pastorianus
gaactcacttacaaaccttttatcg

SEQ ID NO: 91823 - DNA, 25 bp, Saccharomyces pastorianus
taccagcagcgggaaggtttcgtac

SEQ ID NO: 91824 - DNA, 25 bp, Saccharomyces pastorianus
gcgatatcaaatcatgctgccagaa

SEQ ID NO: 91825 - DNA, 25 bp, Saccharomyces pastorianus
gaattccagagcgttatcgggacta

SEQ ID NO: 91826 - DNA, 25 bp, Saccharomyces pastorianus
acaacctactacatgtactgccaac

SEQ ID NO: 91827 - DNA, 25 bp, Saccharomyces pastorianus
gtccgatgatcaatagtaccagcag

SEQ ID NO: 91828 - DNA, 25 bp, Saccharomyces pastorianus
cgagcaaggtgactccgacgaactt

SEQ ID NO: 91829 - DNA, 25 bp, Saccharomyces pastorianus
gtggaaaattttgctcccattgcgg

SEQ ID NO: 91830 - DNA, 25 bp, Saccharomyces pastorianus
gttaacgactaataccgagcaaggt

SEQ ID NO: 91831 - DNA, 25 bp, Saccharomyces pastorianus
aaatctgagctcgttgttccaacat

SEQ ID NO: 91832 - DNA, 25 bp, Saccharomyces pastorianus
tgagggcgcttcacttaacgacgat

SEQ ID NO: 91833 - DNA, 25 bp, Saccharomyces pastorianus
ggatggctcccacgaatcaagatta

SEQ ID NO: 91834 - DNA, 25 bp, Saccharomyces pastorianus
caaacgcacgcatacgaaggctatt

SEQ ID NO: 91835 - DNA, 25 bp, Saccharomyces pastorianus
gttggctggtagatcaccacacttg

SEQ ID NO: 91836 - DNA, 25 bp, Saccharomyces pastorianus
gaaggctattattccccgatgtatc

SEQ ID NO: 91837 - DNA, 25 bp, Saccharomyces pastorianus
agtaccatgctacccatattcttca

SEQ ID NO: 91838 - DNA, 25 bp, Saccharomyces pastorianus
atcccggccccttgtataataatgg

SEQ ID NO: 91839 - DNA, 25 bp, Saccharomyces pastorianus
atattcttcaactccaacacaaacg

SEQ ID NO: 91840 - DNA, 25 bp, Saccharomyces pastorianus
gattatcatccttcagtagccaatt

SEQ ID NO: 91841 - DNA, 25 bp, Saccharomyces pastorianus
ataataccagccgactaccatgcaa

SEQ ID NO: 91842 - DNA, 25 bp, Saccharomyces pastorianus
tatatgacagcaacctacccttatc

SEQ ID NO: 91843 - DNA, 25 bp, Saccharomyces pastorianus
gtcgtacaacggaatagggctcaag

SEQ ID NO: 91844 - DNA, 25 bp, Saccharomyces pastorianus
agttagcgagctacgggaccgactg

SEQ ID NO: 91845 - DNA, 25 bp, Saccharomyces pastorianus
cagggtagtcaacagcagcggcaac

SEQ ID NO: 91846 - DNA, 25 bp, Saccharomyces pastorianus
ggctcaagtcggcaaaagggtcatc

SEQ ID NO: 91847 - DNA, 25 bp, Saccharomyces pastorianus
ataggcgcagaccacagggtagtca

SEQ ID NO: 91848 - DNA, 25 bp, Saccharomyces pastorianus
aacagcagcggatgtcctctttgta

SEQ ID NO: 91849 - DNA, 25 bp, Saccharomyces pastorianus
cacttgctagcaacaataggcgcag

SEQ ID NO: 91850 - DNA, 25 bp, Saccharomyces pastorianus
aagcaggcctcttgctgtgcagaaa

SEQ ID NO: 91851 - DNA, 25 bp, Saccharomyces pastorianus
caaaagggtcatctacgtcgggcca

SEQ ID NO: 91852 - DNA, 25 bp, Saccharomyces pastorianus
acgtgcagcgatcacttgctagcaa

SEQ ID NO: 91853 - DNA, 25 bp, Saccharomyces pastorianus
atgcgatcaaaaaggccagccatga

SEQ ID NO: 91854 - DNA, 25 bp, Saccharomyces pastorianus
gataatgattcaagcgtaccactaa

SEQ ID NO: 91855 - DNA, 25 bp, Saccharomyces pastorianus
aatatgccggcaactcaagcacatc

SEQ ID NO: 91856 - DNA, 25 bp, Saccharomyces pastorianus
tcaagcttcttgacgttggcaataa

SEQ ID NO: 91857 - DNA, 25 bp, Saccharomyces pastorianus
agaggaatgccgtctatgtttgata

SEQ ID NO: 91858 - DNA, 25 bp, Saccharomyces pastorianus
atgactcggatgcacaaaactacaa

SEQ ID NO: 91859 - DNA, 25 bp, Saccharomyces pastorianus
atggcctcgatttcagcaattggtc

SEQ ID NO: 91860 - DNA, 25 bp, Saccharomyces pastorianus
taagtattcgtgtggccaatcaatt

SEQ ID NO: 91861 - DNA, 25 bp, Saccharomyces pastorianus
gcacatccaatagtagccctttgac

SEQ ID NO: 91862 - DNA, 25 bp, Saccharomyces pastorianus
ataacacataagcagtccatagacg

SEQ ID NO: 91863 - DNA, 25 bp, Saccharomyces pastorianus
tgacctcacctcatgagttaactgt

SEQ ID NO: 91864 - DNA, 25 bp, Saccharomyces pastorianus
gacgaaagatctgaacccttataca

SEQ ID NO: 91865 - DNA, 25 bp, Saccharomyces pastorianus
ctggcacaagaggatttcactttgc

SEQ ID NO: 91866 - DNA, 25 bp, Saccharomyces pastorianus
tgcgccaccggcttttattgatgaa

SEQ ID NO: 91867 - DNA, 25 bp, Saccharomyces pastorianus
aggcccaacaatcactatcgaacag

SEQ ID NO: 91868 - DNA, 25 bp, Saccharomyces pastorianus
gttagatactcaaatcgcccagtta

SEQ ID NO: 91869 - DNA, 25 bp, Saccharomyces pastorianus
aacagtggcgagctcgacgacatta

SEQ ID NO: 91870 - DNA, 25 bp, Saccharomyces pastorianus
ttacttactaggtgcgaatgcgcca

SEQ ID NO: 91871 - DNA, 25 bp, Saccharomyces pastorianus
tagattctcaatcctggtccatgac

SEQ ID NO: 91872 - DNA, 25 bp, Saccharomyces pastorianus
tggtccatgacgcaagcccagttaa

SEQ ID NO: 91873 - DNA, 25 bp, Saccharomyces pastorianus
gcccagttaaacttccagctgcaaa

SEQ ID NO: 91874 - DNA, 25 bp, Saccharomyces pastorianus
aacgatatgcccagttacttactag

SEQ ID NO: 91875 - DNA, 25 bp, Saccharomyces pastorianus
atcagtccatgaatcaggcccaaca

SEQ ID NO: 91876 - DNA, 25 bp, Saccharomyces pastorianus
ttgcctttactctgcatggaaactg

SEQ ID NO: 91877 - DNA, 25 bp, Saccharomyces pastorianus
aaattctcactttatttgcgccaat

SEQ ID NO: 91878 - DNA, 25 bp, Saccharomyces pastorianus
gaaaattcgctgatctctcttacag

SEQ ID NO: 91879 - DNA, 25 bp, Saccharomyces pastorianus
ggtaaaccttgctacacggtcacaa

SEQ ID NO: 91880 - DNA, 25 bp, Saccharomyces pastorianus
gaatcgaatatccatgcaatctcaa

SEQ ID NO: 91881 - DNA, 25 bp, Saccharomyces pastorianus
gattctatcctgaaatacatgcccg

SEQ ID NO: 91882 - DNA, 25 bp, Saccharomyces pastorianus
tttatacacgttaacggcccaccag

SEQ ID NO: 91883 - DNA, 25 bp, Saccharomyces pastorianus
acatgatagatgagcccgactggaa

SEQ ID NO: 91884 - DNA, 25 bp, Saccharomyces pastorianus
aaaatgcttctaatgcgaacccgcc

SEQ ID NO: 91885 - DNA, 25 bp, Saccharomyces pastorianus
ccgcctatgcctaacgaatctaaat

SEQ ID NO: 91886 - DNA, 25 bp, Saccharomyces pastorianus
acgcattccctgatctggttgaaac

SEQ ID NO: 91887 - DNA, 25 bp, Saccharomyces pastorianus
gaaggcgcacttcacacaaaacgtc

SEQ ID NO: 91888 - DNA, 25 bp, Saccharomyces pastorianus
gaggactcacctgtaggtcttgaga

SEQ ID NO: 91889 - DNA, 25 bp, Saccharomyces pastorianus
ttaccggaccgttgcatcttaaaga

SEQ ID NO: 91890 - DNA, 25 bp, Saccharomyces pastorianus
gtagtatcgccgaagtcggaccata

SEQ ID NO: 91891 - DNA, 25 bp, Saccharomyces pastorianus
tgaaattgacggttccaggacgatt

SEQ ID NO: 91892 - DNA, 25 bp, Saccharomyces pastorianus
gagaacgtggctctggactacaaga

SEQ ID NO: 91893 - DNA, 25 bp, Saccharomyces pastorianus
aagaaccctcttgatatcgatcctc

SEQ ID NO: 91894 - DNA, 25 bp, Saccharomyces pastorianus
tgcagacccgatcgtcatctaatta

SEQ ID NO: 91895 - DNA, 25 bp, Saccharomyces pastorianus
atcgatcctcctactgatagtgcag

SEQ ID NO: 91896 - DNA, 25 bp, Saccharomyces pastorianus
agaagcctcagcatgtgggaagaac

SEQ ID NO: 91897 - DNA, 25 bp, Saccharomyces pastorianus
ggaatgaccgccaaacctaaagtag

SEQ ID NO: 91898 - DNA, 25 bp, Saccharomyces pastorianus
gaagggtgccaacatgtacgtatat

SEQ ID NO: 91899 - DNA, 25 bp, Saccharomyces pastorianus
ttcttcttttatcttgcttgactca

SEQ ID NO: 91900 - DNA, 25 bp, Saccharomyces pastorianus
aggtttttacgttgattgctgcatc

SEQ ID NO: 91901 - DNA, 25 bp, Saccharomyces pastorianus
gacactatcttggtttcttcttcta

SEQ ID NO: 91902 - DNA, 25 bp, Saccharomyces pastorianus
ggaaaatgggcttgcccgactgtcg

SEQ ID NO: 91903 - DNA, 25 bp, Saccharomyces pastorianus
ggagctccttactgtttcaactgat

SEQ ID NO: 91904 - DNA, 25 bp, Saccharomyces pastorianus
tgctgcatccatcggtcgtgagtat

SEQ ID NO: 91905 - DNA, 25 bp, Saccharomyces pastorianus
gtgtgcgtgtgtatatatgtctgac

SEQ ID NO: 91906 - DNA, 25 bp, Saccharomyces pastorianus
ttaatattgcgcttgcggagctcct

SEQ ID NO: 91907 - DNA, 25 bp, Saccharomyces pastorianus
gttgccttgcagcagacactatctt

SEQ ID NO: 91908 - DNA, 25 bp, Saccharomyces pastorianus
tattgtcaaattgccgatgccctgc

SEQ ID NO: 91909 - DNA, 25 bp, Saccharomyces pastorianus
aacattttcttgatgggcgctttct

SEQ ID NO: 91910 - DNA, 25 bp, Saccharomyces pastorianus
gttcttggttctgtatgccacttga

SEQ ID NO: 91911 - DNA, 25 bp, Saccharomyces pastorianus
acttccacatttcgtccatttaggg

SEQ ID NO: 91912 - DNA, 25 bp, Saccharomyces pastorianus
acgattgttactttagtcctggcaa

SEQ ID NO: 91913 - DNA, 25 bp, Saccharomyces pastorianus
agttcgatttcttcggtagctctca

SEQ ID NO: 91914 - DNA, 25 bp, Saccharomyces pastorianus
atatcctacttcagtcttttcacga

SEQ ID NO: 91915 - DNA, 25 bp, Saccharomyces pastorianus
gatttcctgttctatgatccctata

SEQ ID NO: 91916 - DNA, 25 bp, Saccharomyces pastorianus
attttgtacagtctgtgtcctccac

SEQ ID NO: 91917 - DNA, 25 bp, Saccharomyces pastorianus
gtctcatgtgcagtagctgtttcca

SEQ ID NO: 91918 - DNA, 25 bp, Saccharomyces pastorianus
gtcctccacgacaagtttaacactt

SEQ ID NO: 91919 - DNA, 25 bp, Saccharomyces pastorianus
gatttagtggcttactcccattgac

SEQ ID NO: 91920 - DNA, 25 bp, Saccharomyces pastorianus
gagacgaaacctggttcagggcaaa

SEQ ID NO: 91921 - DNA, 25 bp, Saccharomyces pastorianus
tagccgcgagagctaaaatgcgttc

SEQ ID NO: 91922 - DNA, 25 bp, Saccharomyces pastorianus
gcatggcttaagagcaacccgaata

SEQ ID NO: 91923 - DNA, 25 bp, Saccharomyces pastorianus
cagaccctacggcaagagtgaaaac

SEQ ID NO: 91924 - DNA, 25 bp, Saccharomyces pastorianus
atgcgttcaggaatgttatgtcccc

SEQ ID NO: 91925 - DNA, 25 bp, Saccharomyces pastorianus
atgagacgattgcagaccctacggc

SEQ ID NO: 91926 - DNA, 25 bp, Saccharomyces pastorianus
gatgctgaagtattactagccgcga

SEQ ID NO: 91927 - DNA, 25 bp, Saccharomyces pastorianus
agcacgagaacaaaggccctgaatg

SEQ ID NO: 91928 - DNA, 25 bp, Saccharomyces pastorianus
gagcaacccgaatagctttccggaa

SEQ ID NO: 91929 - DNA, 25 bp, Saccharomyces pastorianus
atagctttccggaatgatgctgaag

SEQ ID NO: 91930 - DNA, 25 bp, Saccharomyces pastorianus
ggagcctaggtaccatttgaacatt

SEQ ID NO: 91931 - DNA, 25 bp, Saccharomyces pastorianus
tagtcaactttaccttagatagctt

SEQ ID NO: 91932 - DNA, 25 bp, Saccharomyces pastorianus
tatactcctcaagtttttccaacaa

SEQ ID NO: 91933 - DNA, 25 bp, Saccharomyces pastorianus
aattaccccatttacagatcgccaa

SEQ ID NO: 91934 - DNA, 25 bp, Saccharomyces pastorianus
ggttatcaagagacctgtcagttca

SEQ ID NO: 91935 - DNA, 25 bp, Saccharomyces pastorianus
atatgtactagaagagcccactcct

SEQ ID NO: 91936 - DNA, 25 bp, Saccharomyces pastorianus
gcccactcctttatctttgttagaa

SEQ ID NO: 91937 - DNA, 25 bp, Saccharomyces pastorianus
acaatctgttgttatgggctccgag

SEQ ID NO: 91938 - DNA, 25 bp, Saccharomyces pastorianus
gtaaatatacaccaggatcctcctt

SEQ ID NO: 91939 - DNA, 25 bp, Saccharomyces pastorianus
ggctcctcaacagcagctacagaag

SEQ ID NO: 91940 - DNA, 25 bp, Saccharomyces pastorianus
ggatcctccttgatttttgccaaag

SEQ ID NO: 91941 - DNA, 25 bp, Saccharomyces pastorianus
atgatttcaccctaaacacgccaaa

SEQ ID NO: 91942 - DNA, 25 bp, Saccharomyces pastorianus
tacattgaactgtccaaagccacct

SEQ ID NO: 91943 - DNA, 25 bp, Saccharomyces pastorianus
gagaatctaggctgtcagttcattg

SEQ ID NO: 91944 - DNA, 25 bp, Saccharomyces pastorianus
aaccgaagaagagcacccaatacat

SEQ ID NO: 91945 - DNA, 25 bp, Saccharomyces pastorianus
ggagttcagagtaaaatcaccgttg

SEQ ID NO: 91946 - DNA, 25 bp, Saccharomyces pastorianus
gaaggcacgaacttttgtcgaaatt

SEQ ID NO: 91947 - DNA, 25 bp, Saccharomyces pastorianus
gtatcaacaggtcttaaacaacatt

SEQ ID NO: 91948 - DNA, 25 bp, Saccharomyces pastorianus
aaagccacctctaagaaggatcctt

SEQ ID NO: 91949 - DNA, 25 bp, Saccharomyces pastorianus
aacgatgagttgtacgcgcagctga

SEQ ID NO: 91950 - DNA, 25 bp, Saccharomyces pastorianus
ctgtcagttcattgccgaagttcta

SEQ ID NO: 91951 - DNA, 25 bp, Saccharomyces pastorianus
ggcttaggcgttccatttgctgaaa

SEQ ID NO: 91952 - DNA, 25 bp, Saccharomyces pastorianus
attattgactcctccaacttgttag

SEQ ID NO: 91953 - DNA, 25 bp, Saccharomyces pastorianus
tatcgtatttgctgcgttctacgct

SEQ ID NO: 91954 - DNA, 25 bp, Saccharomyces pastorianus
gattggcttaccaggcatgaccatg

SEQ ID NO: 91955 - DNA, 25 bp, Saccharomyces pastorianus
gggctggttcactggttattgcatc

SEQ ID NO: 91956 - DNA, 25 bp, Saccharomyces pastorianus
tattaagtttgatggcgctgtcgct

SEQ ID NO: 91957 - DNA, 25 bp, Saccharomyces pastorianus
tatcaaccattttctgctacttctg

SEQ ID NO: 91958 - DNA, 25 bp, Saccharomyces pastorianus
tttcaatcatcgtgtccggtaccaa

SEQ ID NO: 91959 - DNA, 25 bp, Saccharomyces pastorianus
gttctacgctcttggtatcggtact

SEQ ID NO: 91960 - DNA, 25 bp, Saccharomyces pastorianus
gcgggattgtcgtgcttatcaacca

SEQ ID NO: 91961 - DNA, 25 bp, Saccharomyces pastorianus
accatggctttagtcgtgtgctcta

SEQ ID NO: 91962 - DNA, 25 bp, Saccharomyces pastorianus
gtgctctattgctttccattttcta

SEQ ID NO: 91963 - DNA, 25 bp, Saccharomyces pastorianus
gcaggtacatttgcctttttcgcgg

SEQ ID NO: 91964 - DNA, 25 bp, Saccharomyces pastorianus
tgtatcagccgtcagtagtatccag

SEQ ID NO: 91965 - DNA, 25 bp, Saccharomyces pastorianus
ctctgtggaaccattcgcatctgta

SEQ ID NO: 91966 - DNA, 25 bp, Saccharomyces pastorianus
atactcgtcaccctaggtctagtta

SEQ ID NO: 91967 - DNA, 25 bp, Saccharomyces pastorianus
agttacctgttaaactcggcctctg

SEQ ID NO: 91968 - DNA, 25 bp, Saccharomyces pastorianus
gtctatttatcacttgggttcctcc

SEQ ID NO: 91969 - DNA, 25 bp, Saccharomyces pastorianus
tacatcctcagcaacctctgtggaa

SEQ ID NO: 91970 - DNA, 25 bp, Saccharomyces pastorianus
ctatgctgcatctcgtgggttctat

SEQ ID NO: 91971 - DNA, 25 bp, Saccharomyces pastorianus
gacaagcttcaccaaggaacgtcgt

SEQ ID NO: 91972 - DNA, 25 bp, Saccharomyces pastorianus
tgagagcccaaaccaattccttaac

SEQ ID NO: 91973 - DNA, 25 bp, Saccharomyces pastorianus
gttaaaagctatgcgggctcctcgt

SEQ ID NO: 91974 - DNA, 25 bp, Saccharomyces pastorianus
gtcgtcatcgtcaagtttaacatct

SEQ ID NO: 91975 - DNA, 25 bp, Saccharomyces pastorianus
aagaagaatctttcgcagcagttgc

SEQ ID NO: 91976 - DNA, 25 bp, Saccharomyces pastorianus
ggtcttggagactatttcttgcatt

SEQ ID NO: 91977 - DNA, 25 bp, Saccharomyces pastorianus
tacaaccgcgattgtatctcctgca

SEQ ID NO: 91978 - DNA, 25 bp, Saccharomyces pastorianus
aaacatcaattccaacacttcacaa

SEQ ID NO: 91979 - DNA, 25 bp, Saccharomyces pastorianus
gaaatttctcggtcgctctcagaaa

SEQ ID NO: 91980 - DNA, 25 bp, Saccharomyces pastorianus
gtaatcatcttgcattttctaacct

SEQ ID NO: 91981 - DNA, 25 bp, Saccharomyces pastorianus
taaagagctgtcttctacaaccgcg

SEQ ID NO: 91982 - DNA, 25 bp, Saccharomyces pastorianus
gtatctcctgcacaaaaacgtctta

SEQ ID NO: 91983 - DNA, 25 bp, Saccharomyces pastorianus
aaaagatgcgtctggcaagccatta

SEQ ID NO: 91984 - DNA, 25 bp, Saccharomyces pastorianus
tctaaccttcaacaaacgcctttat

SEQ ID NO: 91985 - DNA, 25 bp, Saccharomyces pastorianus
caaacgcctttatcccaattgcaaa

SEQ ID NO: 91986 - DNA, 25 bp, Saccharomyces pastorianus
cgcttcttatggtcacttcactaat

SEQ ID NO: 91987 - DNA, 25 bp, Saccharomyces pastorianus
atatttcatccaaccatccggtaga

SEQ ID NO: 91988 - DNA, 25 bp, Saccharomyces pastorianus
tggtcacttcactaatcaagagtac

SEQ ID NO: 91989 - DNA, 25 bp, Saccharomyces pastorianus
aaggaattagatttggctagaccaa

SEQ ID NO: 91990 - DNA, 25 bp, Saccharomyces pastorianus
taccaaatatttcatccaaccatcc

SEQ ID NO: 91991 - DNA, 25 bp, Saccharomyces pastorianus
ggtacagctacaaaatcagatgacg

SEQ ID NO: 91992 - DNA, 25 bp, Saccharomyces pastorianus
gagagtccaagtccaattttcatat

SEQ ID NO: 91993 - DNA, 25 bp, Saccharomyces pastorianus
cttcgacttgagaccaggtgtgtta

SEQ ID NO: 91994 - DNA, 25 bp, Saccharomyces pastorianus
ggtattgctgaaccattgtctttac

SEQ ID NO: 91995 - DNA, 25 bp, Saccharomyces pastorianus
tggctagaccaatttacttaccaac

SEQ ID NO: 91996 - DNA, 25 bp, Saccharomyces pastorianus
tttcatatgctattggtattgctga

SEQ ID NO: 91997 - DNA, 25 bp, Saccharomyces pastorianus
gattctttggtttttggcttggaca

SEQ ID NO: 91998 - DNA, 25 bp, Saccharomyces pastorianus
tggtgccctttattagctctagtag

SEQ ID NO: 91999 - DNA, 25 bp, Saccharomyces pastorianus
ggcaaagggttttcaccacacgcaa

SEQ ID NO: 92000 - DNA, 25 bp, Saccharomyces pastorianus
acttgaggcctgactttgttgatag

SEQ ID NO: 92001 - DNA, 25 bp, Saccharomyces pastorianus
gatgtatacctgacctccaaaagat

SEQ ID NO: 92002 - DNA, 25 bp, Saccharomyces pastorianus
ctgagtaacatggtcgtcttctgga

SEQ ID NO: 92003 - DNA, 25 bp, Saccharomyces pastorianus
gtctctggagctgttctagcatttt

SEQ ID NO: 92004 - DNA, 25 bp, Saccharomyces pastorianus
tcttctggacctgcatgtttgacaa

SEQ ID NO: 92005 - DNA, 25 bp, Saccharomyces pastorianus
attggtacgatgttgtctctggagc

SEQ ID NO: 92006 - DNA, 25 bp, Saccharomyces pastorianus
gattttcacttcatgcatactagca

SEQ ID NO: 92007 - DNA, 25 bp, Saccharomyces pastorianus
ggccggacggaatctcgaacgattt

SEQ ID NO: 92008 - DNA, 25 bp, Saccharomyces pastorianus
atacgtctcccaatcatggtttcat

SEQ ID NO: 92009 - DNA, 25 bp, Saccharomyces pastorianus
accatttgccattattttgttaaca

SEQ ID NO: 92010 - DNA, 25 bp, Saccharomyces pastorianus
aaagaaaagacaaccatttgccatt

SEQ ID NO: 92011 - DNA, 25 bp, Saccharomyces pastorianus
gttgtttacctattttcctgccaat

SEQ ID NO: 92012 - DNA, 25 bp, Saccharomyces pastorianus
tcccaatcatggtttcatggtcact

SEQ ID NO: 92013 - DNA, 25 bp, Saccharomyces pastorianus
tgttcattattctgtttaactttga

SEQ ID NO: 92014 - DNA, 25 bp, Saccharomyces pastorianus
aattacttatacgtctcccaatcat

SEQ ID NO: 92015 - DNA, 25 bp, Saccharomyces pastorianus
ttttcctgccaattcaatttggtac

SEQ ID NO: 92016 - DNA, 25 bp, Saccharomyces pastorianus
tatcgtttctgttcgttgtttacct

SEQ ID NO: 92017 - DNA, 25 bp, Saccharomyces pastorianus
atgatctgttatttccttgttgtaa

SEQ ID NO: 92018 - DNA, 25 bp, Saccharomyces pastorianus
atttggtactatctttctattatca

SEQ ID NO: 92019 - DNA, 25 bp, Saccharomyces pastorianus
gagttaatcataccatctaaacaag

SEQ ID NO: 92020 - DNA, 25 bp, Saccharomyces pastorianus
aaaagccttgcatattgctcagagt

SEQ ID NO: 92021 - DNA, 25 bp, Saccharomyces pastorianus
caagattttaaacgcagaattccaa

SEQ ID NO: 92022 - DNA, 25 bp, Saccharomyces pastorianus
ggaggtaacaacgaatttgcacaat

SEQ ID NO: 92023 - DNA, 25 bp, Saccharomyces pastorianus
taattttgcacctccgttgaacgaa

SEQ ID NO: 92024 - DNA, 25 bp, Saccharomyces pastorianus
tacaaatgtcagttcttccaataat

SEQ ID NO: 92025 - DNA, 25 bp, Saccharomyces pastorianus
gaatgctgcaacttattcaaagcct

SEQ ID NO: 92026 - DNA, 25 bp, Saccharomyces pastorianus
gtgccatcccgaataatctgtctat

SEQ ID NO: 92027 - DNA, 25 bp, Saccharomyces pastorianus
actcgataactttcagattgctgtg

SEQ ID NO: 92028 - DNA, 25 bp, Saccharomyces pastorianus
ttccaataattttacgaatgctgca

SEQ ID NO: 92029 - DNA, 25 bp, Saccharomyces pastorianus
agaatttggttgtgtgccatcccga

SEQ ID NO: 92030 - DNA, 25 bp, Saccharomyces pastorianus
agcaatctccggtttgtctcaatta

SEQ ID NO: 92031 - DNA, 25 bp, Saccharomyces pastorianus
tgcattctgtgcctcatctaaaaag

SEQ ID NO: 92032 - DNA, 25 bp, Saccharomyces pastorianus
agattggagtttattcattcccgct

SEQ ID NO: 92033 - DNA, 25 bp, Saccharomyces pastorianus
atttggtgtcattgcattctgtgcc

SEQ ID NO: 92034 - DNA, 25 bp, Saccharomyces pastorianus
ggtgttagcgttaatcgcccaattt

SEQ ID NO: 92035 - DNA, 25 bp, Saccharomyces pastorianus
tgccattgccccaattggtggagga

SEQ ID NO: 92036 - DNA, 25 bp, Saccharomyces pastorianus
ggtaatgcacccaaatgtttcgatt

SEQ ID NO: 92037 - DNA, 25 bp, Saccharomyces pastorianus
tataaatctcaagtcggtgtctggg

SEQ ID NO: 92038 - DNA, 25 bp, Saccharomyces pastorianus
gtcggcttacgctgtacttatgatg

SEQ ID NO: 92039 - DNA, 25 bp, Saccharomyces pastorianus
gttttcacctggctgttagcaatct

SEQ ID NO: 92040 - DNA, 25 bp, Saccharomyces pastorianus
aaggtagacctgctgttgctatgct

SEQ ID NO: 92041 - DNA, 25 bp, Saccharomyces pastorianus
gaaggctgatggaagcgttcgctaa

SEQ ID NO: 92042 - DNA, 25 bp, Saccharomyces pastorianus
aaaggtgtccgatggatcttcagaa

SEQ ID NO: 92043 - DNA, 25 bp, Saccharomyces pastorianus
agctaagccagaggtcaagccagaa

SEQ ID NO: 92044 - DNA, 25 bp, Saccharomyces pastorianus
gtcaagcctgagactcacatcaatt

SEQ ID NO: 92045 - DNA, 25 bp, Saccharomyces pastorianus
gtacgacggtattagaattcaagct

SEQ ID NO: 92046 - DNA, 25 bp, Saccharomyces pastorianus
gaaatggactccttaagattcttgt

SEQ ID NO: 92047 - DNA, 25 bp, Saccharomyces pastorianus
gaattcaagctgatcagacccctga

SEQ ID NO: 92048 - DNA, 25 bp, Saccharomyces pastorianus
agaccactcctttaagaaggctgat

SEQ ID NO: 92049 - DNA, 25 bp, Saccharomyces pastorianus
aggtcaagccagaagtcaagcctga

SEQ ID NO: 92050 - DNA, 25 bp, Saccharomyces pastorianus
gaagcgttcgctaaaagacagggta

SEQ ID NO: 92051 - DNA, 25 bp, Saccharomyces pastorianus
cttaagattcttgtacgacggtatt

SEQ ID NO: 92052 - DNA, 25 bp, Saccharomyces pastorianus
agttgctcacgtaaaggatctgatt

SEQ ID NO: 92053 - DNA, 25 bp, Saccharomyces pastorianus
atggctcagagattcaagacgcttt

SEQ ID NO: 92054 - DNA, 25 bp, Saccharomyces pastorianus
acgctttagaagaaatctcgggcca

SEQ ID NO: 92055 - DNA, 25 bp, Saccharomyces pastorianus
ggtatcccaggaaacagttgctcac

SEQ ID NO: 92056 - DNA, 25 bp, Saccharomyces pastorianus
tgtaaagctactttgtctaccctct

SEQ ID NO: 92057 - DNA, 25 bp, Saccharomyces pastorianus
gaccaatttttccttcgactcgaat

SEQ ID NO: 92058 - DNA, 25 bp, Saccharomyces pastorianus
agcaaagacatactgcccttactgt

SEQ ID NO: 92059 - DNA, 25 bp, Saccharomyces pastorianus
tgaacgttcccaaatccaaggccct

SEQ ID NO: 92060 - DNA, 25 bp, Saccharomyces pastorianus
ttgtctaccctcttccaagaattga

SEQ ID NO: 92061 - DNA, 25 bp, Saccharomyces pastorianus
gtacctaacgtatacatcaatggca

SEQ ID NO: 92062 - DNA, 25 bp, Saccharomyces pastorianus
aaggcccttgtgttggaattagatg

SEQ ID NO: 92063 - DNA, 25 bp, Saccharomyces pastorianus
gtgtagagttcattcagtcgttgat

SEQ ID NO: 92064 - DNA, 25 bp, Saccharomyces pastorianus
aagagcgtttgtgggtcatgctata

SEQ ID NO: 92065 - DNA, 25 bp, Saccharomyces pastorianus
agggatcttgtacctcagacggaat

SEQ ID NO: 92066 - DNA, 25 bp, Saccharomyces pastorianus
atttagcgggtctcattggtttcaa

SEQ ID NO: 92067 - DNA, 25 bp, Saccharomyces pastorianus
gatgcatattacacgttgctcctga

SEQ ID NO: 92068 - DNA, 25 bp, Saccharomyces pastorianus
taaggctttttcacttgccacatgc

SEQ ID NO: 92069 - DNA, 25 bp, Saccharomyces pastorianus
tgaggcggacgaacccaaaattttg

SEQ ID NO: 92070 - DNA, 25 bp, Saccharomyces pastorianus
acgttgctcctgatgctgaagttag

SEQ ID NO: 92071 - DNA, 25 bp, Saccharomyces pastorianus
gacggaccaagatacaacctgggaa

SEQ ID NO: 92072 - DNA, 25 bp, Saccharomyces pastorianus
aaattttgccaatgtcgtacgtgct

SEQ ID NO: 92073 - DNA, 25 bp, Saccharomyces pastorianus
gataatgaacttaccaaaccggagg

SEQ ID NO: 92074 - DNA, 25 bp, Saccharomyces pastorianus
attgggctgaatacgttacggaaag

SEQ ID NO: 92075 - DNA, 25 bp, Saccharomyces pastorianus
aattattcttatatgggctatccaa

SEQ ID NO: 92076 - DNA, 25 bp, Saccharomyces pastorianus
tgtcatacatccgtcaacagcagta

SEQ ID NO: 92077 - DNA, 25 bp, Saccharomyces pastorianus
taccgtatggttaatttatctctag

SEQ ID NO: 92078 - DNA, 25 bp, Saccharomyces pastorianus
ggagacccaaatttaattctggcat

SEQ ID NO: 92079 - DNA, 25 bp, Saccharomyces pastorianus
ggcagatgatttcaatccattggaa

SEQ ID NO: 92080 - DNA, 25 bp, Saccharomyces pastorianus
atttatctctaggtggagacccaaa

SEQ ID NO: 92081 - DNA, 25 bp, Saccharomyces pastorianus
gggaccgaacgatttagacaattat

SEQ ID NO: 92082 - DNA, 25 bp, Saccharomyces pastorianus
gccaatgacggatttatccccatga

SEQ ID NO: 92083 - DNA, 25 bp, Saccharomyces pastorianus
ttattaggcgcgaaaattgggctga

SEQ ID NO: 92084 - DNA, 25 bp, Saccharomyces pastorianus
cattgagaaactattgggaccgaac

SEQ ID NO: 92085 - DNA, 25 bp, Saccharomyces pastorianus
gttatgtcatcgaatactatcctgg

SEQ ID NO: 92086 - DNA, 25 bp, Saccharomyces pastorianus
tgcatatctagcagccgttccgatt

SEQ ID NO: 92087 - DNA, 25 bp, Saccharomyces pastorianus
ttgccgccatcctaatcaagacaaa

SEQ ID NO: 92088 - DNA, 25 bp, Saccharomyces pastorianus
gaggctaccgaccacttttgaagaa

SEQ ID NO: 92089 - DNA, 25 bp, Saccharomyces pastorianus
gtaagatacatttgcgtctagccaa

SEQ ID NO: 92090 - DNA, 25 bp, Saccharomyces pastorianus
gtgcagtgaagttctttccaggatt

SEQ ID NO: 92091 - DNA, 25 bp, Saccharomyces pastorianus
gggcttaatcttgggacagtatcgt

SEQ ID NO: 92092 - DNA, 25 bp, Saccharomyces pastorianus
tttctccaaatccaggttaccatct

SEQ ID NO: 92093 - DNA, 25 bp, Saccharomyces pastorianus
taaagactcctttccaattgtgcag

SEQ ID NO: 92094 - DNA, 25 bp, Saccharomyces pastorianus
aacatcctggtggacttgcatgcaa

SEQ ID NO: 92095 - DNA, 25 bp, Saccharomyces pastorianus
tttgcagagtttgaggctaccgacc

SEQ ID NO: 92096 - DNA, 25 bp, Saccharomyces pastorianus
atagcttccactttcacataccata

SEQ ID NO: 92097 - DNA, 25 bp, Saccharomyces pastorianus
acagttcatataggtcccgacggca

SEQ ID NO: 92098 - DNA, 25 bp, Saccharomyces pastorianus
tccaatggacgcctttgatagcttc

SEQ ID NO: 92099 - DNA, 25 bp, Saccharomyces pastorianus
gcaagatgacaaccctgttcctgtt

SEQ ID NO: 92100 - DNA, 25 bp, Saccharomyces pastorianus
cgttggatacgggtttcttcacagg

SEQ ID NO: 92101 - DNA, 25 bp, Saccharomyces pastorianus
gaagactacattatcggctgccaag

SEQ ID NO: 92102 - DNA, 25 bp, Saccharomyces pastorianus
gagacggcttttgtgccatcagcat

SEQ ID NO: 92103 - DNA, 25 bp, Saccharomyces pastorianus
aaaagggtacccagccattggcaat

SEQ ID NO: 92104 - DNA, 25 bp, Saccharomyces pastorianus
agagcaaactacgatctggtccttt

SEQ ID NO: 92105 - DNA, 25 bp, Saccharomyces pastorianus
agataagtcatctaccgctgcgaag

SEQ ID NO: 92106 - DNA, 25 bp, Saccharomyces pastorianus
gatctggtcctttatgtctacaaca

SEQ ID NO: 92107 - DNA, 25 bp, Saccharomyces pastorianus
cagttcccattatttgctatccata

SEQ ID NO: 92108 - DNA, 25 bp, Saccharomyces pastorianus
attgcaccaggccaaggattctgaa

SEQ ID NO: 92109 - DNA, 25 bp, Saccharomyces pastorianus
gacaggatatccaaccattgctttg

SEQ ID NO: 92110 - DNA, 25 bp, Saccharomyces pastorianus
ggtttgcgcctatttacgaagaaat

SEQ ID NO: 92111 - DNA, 25 bp, Saccharomyces pastorianus
ggtacacatcacattgacggccagg

SEQ ID NO: 92112 - DNA, 25 bp, Saccharomyces pastorianus
taccgtgaaggtactgccaagccaa

SEQ ID NO: 92113 - DNA, 25 bp, Saccharomyces pastorianus
gcatctgatgaatctgttcgcgata

SEQ ID NO: 92114 - DNA, 25 bp, Saccharomyces pastorianus
gatgtccttgtcaaatattacgcga

SEQ ID NO: 92115 - DNA, 25 bp, Saccharomyces pastorianus
ctgccggaaataactctaagcctat

SEQ ID NO: 92116 - DNA, 25 bp, Saccharomyces pastorianus
cattgctttgtatcctgccggaaat

SEQ ID NO: 92117 - DNA, 25 bp, Saccharomyces pastorianus
gatatcttaagttttcctgtgacag

SEQ ID NO: 92118 - DNA, 25 bp, Saccharomyces pastorianus
aagtgctgatttggtgtttgatgtc

SEQ ID NO: 92119 - DNA, 25 bp, Saccharomyces pastorianus
ttttttccaccattcttgcaggttc

SEQ ID NO: 92120 - DNA, 25 bp, Saccharomyces pastorianus
gaatcgggaactgtatttgactcaa

SEQ ID NO: 92121 - DNA, 25 bp, Saccharomyces pastorianus
agaataccggtagaagattgcttaa

SEQ ID NO: 92122 - DNA, 25 bp, Saccharomyces pastorianus
agaaagaggtgtcccaggcgtcatt

SEQ ID NO: 92123 - DNA, 25 bp, Saccharomyces pastorianus
attccaagttctttggcctacggag

SEQ ID NO: 92124 - DNA, 25 bp, Saccharomyces pastorianus
atcgcttttgaacttggcgttggca

SEQ ID NO: 92125 - DNA, 25 bp, Saccharomyces pastorianus
gcaggttccctgtcagatttggaaa

SEQ ID NO: 92126 - DNA, 25 bp, Saccharomyces pastorianus
ttgccggcatgtgcgttggcgaaaa

SEQ ID NO: 92127 - DNA, 25 bp, Saccharomyces pastorianus
aagaggctctcctatcgcttttgaa

SEQ ID NO: 92128 - DNA, 25 bp, Saccharomyces pastorianus
aggcgtcattcctccaagtgctgat

SEQ ID NO: 92129 - DNA, 25 bp, Saccharomyces pastorianus
tcgtccaagatcagggccgcattta

SEQ ID NO: 92130 - DNA, 25 bp, Saccharomyces pastorianus
tagattcagcttcgtcctacaataa

SEQ ID NO: 92131 - DNA, 25 bp, Saccharomyces pastorianus
tgatctaaaccatccttccattttt

SEQ ID NO: 92132 - DNA, 25 bp, Saccharomyces pastorianus
aagtttgttatcgacagcaaccaag

SEQ ID NO: 92133 - DNA, 25 bp, Saccharomyces pastorianus
gcaaccaaggcagagaggcttcttt

SEQ ID NO: 92134 - DNA, 25 bp, Saccharomyces pastorianus
gtggagtttgagctccattcctaag

SEQ ID NO: 92135 - DNA, 25 bp, Saccharomyces pastorianus
gatgtacggaacattccaagctgta

SEQ ID NO: 92136 - DNA, 25 bp, Saccharomyces pastorianus
ttgatgtccccaacaaacttattga

SEQ ID NO: 92137 - DNA, 25 bp, Saccharomyces pastorianus
aagctgtaaatacttctcgtccaag

SEQ ID NO: 92138 - DNA, 25 bp, Saccharomyces pastorianus
agggccattgcccaaagtaaatatt

SEQ ID NO: 92139 - DNA, 25 bp, Saccharomyces pastorianus
gattactacgaattggtctccaaag

SEQ ID NO: 92140 - DNA, 25 bp, Saccharomyces pastorianus
tgctgctgcttccaacgctttgggt

SEQ ID NO: 92141 - DNA, 25 bp, Saccharomyces pastorianus
tgctgcttccaacgctttgggtgct

SEQ ID NO: 92142 - DNA, 25 bp, Saccharomyces pastorianus
tttgggtgctggtgtcttcggtgct

SEQ ID NO: 92143 - DNA, 25 bp, Saccharomyces pastorianus
ggtgctgctgcttccaacgctttgg

SEQ ID NO: 92144 - DNA, 25 bp, Saccharomyces pastorianus
ttcgctactgttgccgctgtccaag

SEQ ID NO: 92145 - DNA, 25 bp, Saccharomyces pastorianus
atcgtcgctgccttcgctactgttg

SEQ ID NO: 92146 - DNA, 25 bp, Saccharomyces pastorianus
tgcttccaacgctttgggtgctggt

SEQ ID NO: 92147 - DNA, 25 bp, Saccharomyces pastorianus
aattcaagaccatcgtcgctgcctt

SEQ ID NO: 92148 - DNA, 25 bp, Saccharomyces pastorianus
caacgctttgggtgctggtgtcttc

SEQ ID NO: 92149 - DNA, 25 bp, Saccharomyces pastorianus
ttccaacgctttgggtgctggtgtc

SEQ ID NO: 92150 - DNA, 25 bp, Saccharomyces pastorianus
aacgctttgggtgctggtgtcttcg

SEQ ID NO: 92151 - DNA, 25 bp, Saccharomyces pastorianus
accaaaggttccaacaccactagca

SEQ ID NO: 92152 - DNA, 25 bp, Saccharomyces pastorianus
gtaccaaaggttccaacaccactag

SEQ ID NO: 92153 - DNA, 25 bp, Saccharomyces pastorianus
tctaccaatggttccaacggtacca

SEQ ID NO: 92154 - DNA, 25 bp, Saccharomyces pastorianus
accaagatctccactggtgctgctg

SEQ ID NO: 92155 - DNA, 25 bp, Saccharomyces pastorianus
tggtgctgctgcttccaacgctttg

SEQ ID NO: 92156 - DNA, 25 bp, Saccharomyces pastorianus
tgcaattcaagaccatcgtcgctgc

SEQ ID NO: 92157 - DNA, 25 bp, Saccharomyces pastorianus
caagctgctaacgtttctaccaatg

SEQ ID NO: 92158 - DNA, 25 bp, Saccharomyces pastorianus
caacgctttgggtgctggtgtcttc

SEQ ID NO: 92159 - DNA, 25 bp, Saccharomyces pastorianus
aaaggttccaacaccactagcacca

SEQ ID NO: 92160 - DNA, 25 bp, Saccharomyces pastorianus
gttccaacaccactagcaccaagat

SEQ ID NO: 92161 - DNA, 25 bp, Saccharomyces pastorianus
aggttccaacaccactagcaccaag

SEQ ID NO: 92162 - DNA, 25 bp, Saccharomyces pastorianus
tcgcggtggttttcctggcttttct

SEQ ID NO: 92163 - DNA, 25 bp, Saccharomyces pastorianus
cctggcttttctcctcatatataag

SEQ ID NO: 92164 - DNA, 25 bp, Saccharomyces pastorianus
tcatcgcggtggttttcctggcttt

SEQ ID NO: 92165 - DNA, 25 bp, Saccharomyces pastorianus
tgctgtgtgtcatcgcggtggtttt

SEQ ID NO: 92166 - DNA, 25 bp, Saccharomyces pastorianus
ggaactcgagaaattcttgattttc

SEQ ID NO: 92167 - DNA, 25 bp, Saccharomyces pastorianus
tcctggcttttctcctcatatataa

SEQ ID NO: 92168 - DNA, 25 bp, Saccharomyces pastorianus
ggcttttctcctcatatataaggaa

SEQ ID NO: 92169 - DNA, 25 bp, Saccharomyces pastorianus
gtgtcatcgcggtggttttcctggc

SEQ ID NO: 92170 - DNA, 25 bp, Saccharomyces pastorianus
ttttcctggcttttctcctcatata

SEQ ID NO: 92171 - DNA, 25 bp, Saccharomyces pastorianus
ttctcctcatatataaggaactcga

SEQ ID NO: 92172 - DNA, 25 bp, Saccharomyces pastorianus
tggttttcctggcttttctcctcat

SEQ ID NO: 92173 - DNA, 25 bp, Saccharomyces pastorianus
gaagcggccaaagcggccaatcacg

SEQ ID NO: 92174 - DNA, 25 bp, Saccharomyces pastorianus
caagaatttctcgagttccttatat

SEQ ID NO: 92175 - DNA, 25 bp, Saccharomyces pastorianus
ctctggtcttcgctattttggaaat

SEQ ID NO: 92176 - DNA, 25 bp, Saccharomyces pastorianus
ttctttttctcatttctcaagcgga

SEQ ID NO: 92177 - DNA, 25 bp, Saccharomyces pastorianus
gcacggctcccaacgagtcgttttt

SEQ ID NO: 92178 - DNA, 25 bp, Saccharomyces pastorianus
aagaaaaggcgtggctctggtcttc

SEQ ID NO: 92179 - DNA, 25 bp, Saccharomyces pastorianus
aaagccaggaaaaccaccgcgatga

SEQ ID NO: 92180 - DNA, 25 bp, Saccharomyces pastorianus
gcaccatatctcatgtaacaaacgt

SEQ ID NO: 92181 - DNA, 25 bp, Saccharomyces pastorianus
tgacacacagcaccatatctcatgt

SEQ ID NO: 92182 - DNA, 25 bp, Saccharomyces pastorianus
tctcatttctcaagcggatattccg

SEQ ID NO: 92183 - DNA, 25 bp, Saccharomyces pastorianus
ataaactttggcgtcctacgcccag

SEQ ID NO: 92184 - DNA, 25 bp, Saccharomyces pastorianus
ttattgcaattttcattcctccctt

SEQ ID NO: 92185 - DNA, 25 bp, Saccharomyces pastorianus
attcctcccttagcagtctggctaa

SEQ ID NO: 92186 - DNA, 25 bp, Saccharomyces pastorianus
ttttccctggtctgatccatgcttt

SEQ ID NO: 92187 - DNA, 25 bp, Saccharomyces pastorianus
atccatgctttgtacgtgatcagct

SEQ ID NO: 92188 - DNA, 25 bp, Saccharomyces pastorianus
ggatctgctcattaactttctgtta

SEQ ID NO: 92189 - DNA, 25 bp, Saccharomyces pastorianus
gcagtctggctaaaaagaggttttt

SEQ ID NO: 92190 - DNA, 25 bp, Saccharomyces pastorianus
tatgaggagaacgaggcccggtact

SEQ ID NO: 92191 - DNA, 25 bp, Saccharomyces pastorianus
gtacgtgatcagctgtcatccatat

SEQ ID NO: 92192 - DNA, 25 bp, Saccharomyces pastorianus
ggtttttttaccaaggatctgctca

SEQ ID NO: 92193 - DNA, 25 bp, Saccharomyces pastorianus
atcagctgtcatccatatgaggaga

SEQ ID NO: 92194 - DNA, 25 bp, Saccharomyces pastorianus
tactagggtttttccctggtctgat

SEQ ID NO: 92195 - DNA, 25 bp, Saccharomyces pastorianus
aaatggatgcaaccggttcagcaaa

SEQ ID NO: 92196 - DNA, 25 bp, Saccharomyces pastorianus
atacttccctgatttgcctaaagag

SEQ ID NO: 92197 - DNA, 25 bp, Saccharomyces pastorianus
ccttctcaaaggtgcattgctatac

SEQ ID NO: 92198 - DNA, 25 bp, Saccharomyces pastorianus
aactcgccggttacaccatagtgga

SEQ ID NO: 92199 - DNA, 25 bp, Saccharomyces pastorianus
gacggaaaagtcatcgaatccttag

SEQ ID NO: 92200 - DNA, 25 bp, Saccharomyces pastorianus
ttagcaagatccacttttccttctc

SEQ ID NO: 92201 - DNA, 25 bp, Saccharomyces pastorianus
ttcactcagggttgcaccatcacag

SEQ ID NO: 92202 - DNA, 25 bp, Saccharomyces pastorianus
gaatccttagaaatcgcctctgatg

SEQ ID NO: 92203 - DNA, 25 bp, Saccharomyces pastorianus
aaatagactctaccattcactcagg

SEQ ID NO: 92204 - DNA, 25 bp, Saccharomyces pastorianus
aagctactaccagctagtgccagaa

SEQ ID NO: 92205 - DNA, 25 bp, Saccharomyces pastorianus
ttaatggtgaccttgttccacccac

SEQ ID NO: 92206 - DNA, 25 bp, Saccharomyces pastorianus
tacgtctttattttcttctaggtca

SEQ ID NO: 92207 - DNA, 25 bp, Saccharomyces pastorianus
gaagcaaagctctgttacgtcttta

SEQ ID NO: 92208 - DNA, 25 bp, Saccharomyces pastorianus
gaacctctccacgtatacaacgaaa

SEQ ID NO: 92209 - DNA, 25 bp, Saccharomyces pastorianus
gtcttcttctattcttgactctgag

SEQ ID NO: 92210 - DNA, 25 bp, Saccharomyces pastorianus
agcagcttcaatttccagtctcagg

SEQ ID NO: 92211 - DNA, 25 bp, Saccharomyces pastorianus
gatgacgtcctttatgaccttgaca

SEQ ID NO: 92212 - DNA, 25 bp, Saccharomyces pastorianus
gaaagggttaggttgtcaccacaat

SEQ ID NO: 92213 - DNA, 25 bp, Saccharomyces pastorianus
gatggcaaatctgttagcagcttca

SEQ ID NO: 92214 - DNA, 25 bp, Saccharomyces pastorianus
gaccgagcaacagatccacaaattt

SEQ ID NO: 92215 - DNA, 25 bp, Saccharomyces pastorianus
caaaaatctgctcccattaacaagg

SEQ ID NO: 92216 - DNA, 25 bp, Saccharomyces pastorianus
gtcaccacaatcctcgtcgataaaa

SEQ ID NO: 92217 - DNA, 25 bp, Saccharomyces pastorianus
gtcctctccaagttatgtgttccag

SEQ ID NO: 92218 - DNA, 25 bp, Saccharomyces pastorianus
gccaatcagttcattaacctcgcag

SEQ ID NO: 92219 - DNA, 25 bp, Saccharomyces pastorianus
agaggatgttccttacctgttgcca

SEQ ID NO: 92220 - DNA, 25 bp, Saccharomyces pastorianus
agggctcaccaaaccgagttgactc

SEQ ID NO: 92221 - DNA, 25 bp, Saccharomyces pastorianus
ggaaaatcccatcatgcagaccgct

SEQ ID NO: 92222 - DNA, 25 bp, Saccharomyces pastorianus
gaccgctttaagaagactccctgaa

SEQ ID NO: 92223 - DNA, 25 bp, Saccharomyces pastorianus
gttatgtgttccagttgccaatcag

SEQ ID NO: 92224 - DNA, 25 bp, Saccharomyces pastorianus
gaagatgaatcttatgccagagcat

SEQ ID NO: 92225 - DNA, 25 bp, Saccharomyces pastorianus
gagttgactcatcatttactgccaa

SEQ ID NO: 92226 - DNA, 25 bp, Saccharomyces pastorianus
tgccacagtcttttacgtctattgc

SEQ ID NO: 92227 - DNA, 25 bp, Saccharomyces pastorianus
tatattttgaagtcacccgtcctct

SEQ ID NO: 92228 - DNA, 25 bp, Saccharomyces pastorianus
taaggtttcctttgctcatttcgtc

SEQ ID NO: 92229 - DNA, 25 bp, Saccharomyces pastorianus
agtcgttactgcaatgcggtttccc

SEQ ID NO: 92230 - DNA, 25 bp, Saccharomyces pastorianus
ttataatgtgctctgttctctccaa

SEQ ID NO: 92231 - DNA, 25 bp, Saccharomyces pastorianus
accttttcaggacgtattgtgcaac

SEQ ID NO: 92232 - DNA, 25 bp, Saccharomyces pastorianus
ggaaaggatcattttttgcccacct

SEQ ID NO: 92233 - DNA, 25 bp, Saccharomyces pastorianus
gaagatcttcttgctatgtgttacg

SEQ ID NO: 92234 - DNA, 25 bp, Saccharomyces pastorianus
agaacctcactgaagatcctcatct

SEQ ID NO: 92235 - DNA, 25 bp, Saccharomyces pastorianus
gggtactgtggtatgatcctcgtta

SEQ ID NO: 92236 - DNA, 25 bp, Saccharomyces pastorianus
tagcggttcctcacaagatcacaaa

SEQ ID NO: 92237 - DNA, 25 bp, Saccharomyces pastorianus
aattgtggacctcatagcggttcct

SEQ ID NO: 92238 - DNA, 25 bp, Saccharomyces pastorianus
gtgtagttccaagatcgcatgccaa

SEQ ID NO: 92239 - DNA, 25 bp, Saccharomyces pastorianus
aattggcctaaagtcgtcagctatt

SEQ ID NO: 92240 - DNA, 25 bp, Saccharomyces pastorianus
gagggtgacaattctagcgttgata

SEQ ID NO: 92241 - DNA, 25 bp, Saccharomyces pastorianus
ggatcaaagcaagcgttttttctca

SEQ ID NO: 92242 - DNA, 25 bp, Saccharomyces pastorianus
aatgggtgcttttctaagcgcgtct

SEQ ID NO: 92243 - DNA, 25 bp, Saccharomyces pastorianus
gatcagatgctcgattgggcacaag

SEQ ID NO: 92244 - DNA, 25 bp, Saccharomyces pastorianus
tcgtcagctattgcaagttcatttg

SEQ ID NO: 92245 - DNA, 25 bp, Saccharomyces pastorianus
gtaaaagtcttctattcgccatctc

SEQ ID NO: 92246 - DNA, 25 bp, Saccharomyces pastorianus
tagagtaggcggttcttcactggga

SEQ ID NO: 92247 - DNA, 25 bp, Saccharomyces pastorianus
ggacatttgactaccatgaacactt

SEQ ID NO: 92248 - DNA, 25 bp, Saccharomyces pastorianus
tatactttggcggatcttataccag

SEQ ID NO: 92249 - DNA, 25 bp, Saccharomyces pastorianus
attatcactaattactggcgctcaa

SEQ ID NO: 92250 - DNA, 25 bp, Saccharomyces pastorianus
gttgggattcgctcaatgaactaaa

SEQ ID NO: 92251 - DNA, 25 bp, Saccharomyces pastorianus
gtcacagacattgaagcgaacagta

SEQ ID NO: 92252 - DNA, 25 bp, Saccharomyces pastorianus
aatactaaggtgcaaatctttgagg

SEQ ID NO: 92253 - DNA, 25 bp, Saccharomyces pastorianus
agaggattctggacatttaatggcc

SEQ ID NO: 92254 - DNA, 25 bp, Saccharomyces pastorianus
gaagagacatacacgaattggcaaa

SEQ ID NO: 92255 - DNA, 25 bp, Saccharomyces pastorianus
tatctggaagccactggtgatattg

SEQ ID NO: 92256 - DNA, 25 bp, Saccharomyces pastorianus
gcgggtggcaatatagtcacagaca

SEQ ID NO: 92257 - DNA, 25 bp, Saccharomyces pastorianus
aattgccatatctttaagcgattta

SEQ ID NO: 92258 - DNA, 25 bp, Saccharomyces pastorianus
aaaactactatttttgcagaagcaa

SEQ ID NO: 92259 - DNA, 25 bp, Saccharomyces pastorianus
ttttgaaatctttacccagcttgga

SEQ ID NO: 92260 - DNA, 25 bp, Saccharomyces pastorianus
gcactttttactcaaagggtcaaag

SEQ ID NO: 92261 - DNA, 25 bp, Saccharomyces pastorianus
gttgtagaagccttacatcccttca

SEQ ID NO: 92262 - DNA, 25 bp, Saccharomyces pastorianus
ttttgcatctgcaggtcacggtacc

SEQ ID NO: 92263 - DNA, 25 bp, Saccharomyces pastorianus
gctaagtatttagctccggtcgggc

SEQ ID NO: 92264 - DNA, 25 bp, Saccharomyces pastorianus
gggccctgggatgattactctatta

SEQ ID NO: 92265 - DNA, 25 bp, Saccharomyces pastorianus
aggtgtgaatcctgcttctgcgcac

SEQ ID NO: 92266 - DNA, 25 bp, Saccharomyces pastorianus
gtaagtctatcaccggttttactga

SEQ ID NO: 92267 - DNA, 25 bp, Saccharomyces pastorianus
aagacttgcaggacattgcttccga

SEQ ID NO: 92268 - DNA, 25 bp, Saccharomyces pastorianus
gttgtcgcagctgtttgtcacggtc

SEQ ID NO: 92269 - DNA, 25 bp, Saccharomyces pastorianus
catcccttcaacacattccgaaaag

SEQ ID NO: 92270 - DNA, 25 bp, Saccharomyces pastorianus
gggatgagcattccttagccaaaga

SEQ ID NO: 92271 - DNA, 25 bp, Saccharomyces pastorianus
cacggtaccttatttgactatccta

SEQ ID NO: 92272 - DNA, 25 bp, Saccharomyces pastorianus
atgcattgggctcttatgacgacga

SEQ ID NO: 92273 - DNA, 25 bp, Saccharomyces pastorianus
ggcgatgattcgtctagttcttcaa

SEQ ID NO: 92274 - DNA, 25 bp, Saccharomyces pastorianus
gttgtcatgttcaccccaatattta

SEQ ID NO: 92275 - DNA, 25 bp, Saccharomyces pastorianus
ggagagttgctaaccatttgcccaa

SEQ ID NO: 92276 - DNA, 25 bp, Saccharomyces pastorianus
atttgcccaagttatccctacaaga

SEQ ID NO: 92277 - DNA, 25 bp, Saccharomyces pastorianus
cattctttggtttgtctttgctatc

SEQ ID NO: 92278 - DNA, 25 bp, Saccharomyces pastorianus
cagttatcttctttttctaccctga

SEQ ID NO: 92279 - DNA, 25 bp, Saccharomyces pastorianus
gccgtcggcttatttttgttcatta

SEQ ID NO: 92280 - DNA, 25 bp, Saccharomyces pastorianus
gccacaggtcaagcagtttcattca

SEQ ID NO: 92281 - DNA, 25 bp, Saccharomyces pastorianus
aacgctttctccacatgtactaatt

SEQ ID NO: 92282 - DNA, 25 bp, Saccharomyces pastorianus
gaggaaatcgacatcatctttgcta

SEQ ID NO: 92283 - DNA, 25 bp, Saccharomyces pastorianus
gataccctggttacttcctttgaca

SEQ ID NO: 92284 - DNA, 25 bp, Saccharomyces pastorianus
aacaccagtcgcaccagtaattgca

SEQ ID NO: 92285 - DNA, 25 bp, Saccharomyces pastorianus
agaagtctgattcccagtgcaacac

SEQ ID NO: 92286 - DNA, 25 bp, Saccharomyces pastorianus
tacgctcaactcttttagcacttgt

SEQ ID NO: 92287 - DNA, 25 bp, Saccharomyces pastorianus
caattctctttggtcttggaggcga

SEQ ID NO: 92288 - DNA, 25 bp, Saccharomyces pastorianus
caccaaatgtgtttctacgctcaac

SEQ ID NO: 92289 - DNA, 25 bp, Saccharomyces pastorianus
attgttgctgcaccccattttgaaa

SEQ ID NO: 92290 - DNA, 25 bp, Saccharomyces pastorianus
gcggttcccaatctgtttcatattt

SEQ ID NO: 92291 - DNA, 25 bp, Saccharomyces pastorianus
tatgttttggttgccaaggccgcca

SEQ ID NO: 92292 - DNA, 25 bp, Saccharomyces pastorianus
agggcacaacaatcataccatcatg

SEQ ID NO: 92293 - DNA, 25 bp, Saccharomyces pastorianus
gaaacatcggcagctcttgtaatta

SEQ ID NO: 92294 - DNA, 25 bp, Saccharomyces pastorianus
gattgttgtgccctgttccatgaaa

SEQ ID NO: 92295 - DNA, 25 bp, Saccharomyces pastorianus
cccaagagccttcatgacctattag

SEQ ID NO: 92296 - DNA, 25 bp, Saccharomyces pastorianus
tgacgtggcggccttggcaaccaaa

SEQ ID NO: 92297 - DNA, 25 bp, Saccharomyces pastorianus
caagagctgccgatgtttcgattaa

SEQ ID NO: 92298 - DNA, 25 bp, Saccharomyces pastorianus
tttctgcatgcatttcgtccggatc

SEQ ID NO: 92299 - DNA, 25 bp, Saccharomyces pastorianus
tactctgttcgcgatgtttctgcat

SEQ ID NO: 92300 - DNA, 25 bp, Saccharomyces pastorianus
gcgactggtgttgcactgggaatca

SEQ ID NO: 92301 - DNA, 25 bp, Saccharomyces pastorianus
ctccggtacctgctttttatacaag

SEQ ID NO: 92302 - DNA, 25 bp, Saccharomyces pastorianus
caggatcctagactgctttggcatc

SEQ ID NO: 92303 - DNA, 25 bp, Saccharomyces pastorianus
gtccggatctttccagcatgatggt

SEQ ID NO: 92304 - DNA, 25 bp, Saccharomyces pastorianus
gtaaccagggtatcaacttcgcctc

SEQ ID NO: 92305 - DNA, 25 bp, Saccharomyces pastorianus
tataatgtggaaactcctgcgcctg

SEQ ID NO: 92306 - DNA, 25 bp, Saccharomyces pastorianus
atacggaatctactccattaaggag

SEQ ID NO: 92307 - DNA, 25 bp, Saccharomyces pastorianus
ggttgctcctttcacaaactttaga

SEQ ID NO: 92308 - DNA, 25 bp, Saccharomyces pastorianus
aggaggattataccagtcattttat

SEQ ID NO: 92309 - DNA, 25 bp, Saccharomyces pastorianus
aaacctctcttatcaattgggctgg

SEQ ID NO: 92310 - DNA, 25 bp, Saccharomyces pastorianus
actaaagctatgtggcctgtgtata

SEQ ID NO: 92311 - DNA, 25 bp, Saccharomyces pastorianus
gatagaacaccctctgaaaacctct

SEQ ID NO: 92312 - DNA, 25 bp, Saccharomyces pastorianus
aaactcctgcgcctggttataaatg

SEQ ID NO: 92313 - DNA, 25 bp, Saccharomyces pastorianus
gatgatgagctctttcaagcgggaa

SEQ ID NO: 92314 - DNA, 25 bp, Saccharomyces pastorianus
atggatccatatcaacacggttgct

SEQ ID NO: 92315 - DNA, 25 bp, Saccharomyces pastorianus
gaggccgtaaacgaggtctacaaat

SEQ ID NO: 92316 - DNA, 25 bp, Saccharomyces pastorianus
aaaaggctgcctgggagttcacaaa

SEQ ID NO: 92317 - DNA, 25 bp, Saccharomyces pastorianus
gaacgatcctagtgtggtttttaca

SEQ ID NO: 92318 - DNA, 25 bp, Saccharomyces pastorianus
gtgcatggccatttgaatacttctt

SEQ ID NO: 92319 - DNA, 25 bp, Saccharomyces pastorianus
tcaatggcctaattcataccccagt

SEQ ID NO: 92320 - DNA, 25 bp, Saccharomyces pastorianus
ccagtgttcctgattttcattccat

SEQ ID NO: 92321 - DNA, 25 bp, Saccharomyces pastorianus
ataccccagtaaatgccagtgttcc

SEQ ID NO: 92322 - DNA, 25 bp, Saccharomyces pastorianus
attcctttgggtaagcctggcacag

SEQ ID NO: 92323 - DNA, 25 bp, Saccharomyces pastorianus
atgtggccctagctcatctgtatgc

SEQ ID NO: 92324 - DNA, 25 bp, Saccharomyces pastorianus
acagtcaacccttctcttgtttttg

SEQ ID NO: 92325 - DNA, 25 bp, Saccharomyces pastorianus
gatcaagtcattgaccgcggttcaa

SEQ ID NO: 92326 - DNA, 25 bp, Saccharomyces pastorianus
tttttggtcctcaacttttcgatga

SEQ ID NO: 92327 - DNA, 25 bp, Saccharomyces pastorianus
tcacttggcccaatactacatgttc

SEQ ID NO: 92328 - DNA, 25 bp, Saccharomyces pastorianus
agtcgaagttgctgaagccgttttc

SEQ ID NO: 92329 - DNA, 25 bp, Saccharomyces pastorianus
tgaaacctacccagtcgaagttgct

SEQ ID NO: 92330 - DNA, 25 bp, Saccharomyces pastorianus
cacttggcccaatactacatgttcc

SEQ ID NO: 92331 - DNA, 25 bp, Saccharomyces pastorianus
aagccagccatctccaaggctctat

SEQ ID NO: 92332 - DNA, 25 bp, Saccharomyces pastorianus
aaacctacccagtcgaagttgctga

SEQ ID NO: 92333 - DNA, 25 bp, Saccharomyces pastorianus
gccagccatctccaaggctctatcc

SEQ ID NO: 92334 - DNA, 25 bp, Saccharomyces pastorianus
aaagccagccatctccaaggctcta

SEQ ID NO: 92335 - DNA, 25 bp, Saccharomyces pastorianus
agccagccatctccaaggctctatc

SEQ ID NO: 92336 - DNA, 25 bp, Saccharomyces pastorianus
tggtattgccccagaccaagtgacc

SEQ ID NO: 92337 - DNA, 25 bp, Saccharomyces pastorianus
cttggcccaatactacatgttccaa

SEQ ID NO: 92338 - DNA, 25 bp, Saccharomyces pastorianus
gctaacgttttaaccaacgcgactg

SEQ ID NO: 92339 - DNA, 25 bp, Saccharomyces pastorianus
aggcatcaggatttggcgactacta

SEQ ID NO: 92340 - DNA, 25 bp, Saccharomyces pastorianus
aacgcgactgcagctacgctgagcg

SEQ ID NO: 92341 - DNA, 25 bp, Saccharomyces pastorianus
taactaacccatacgaaacttcagg

SEQ ID NO: 92342 - DNA, 25 bp, Saccharomyces pastorianus
cagttccgttagagacatattttca

SEQ ID NO: 92343 - DNA, 25 bp, Saccharomyces pastorianus
actatttgaatgtatccgtaatctg

SEQ ID NO: 92344 - DNA, 25 bp, Saccharomyces pastorianus
gcgcatggtctaatacagttccgtt

SEQ ID NO: 92345 - DNA, 25 bp, Saccharomyces pastorianus
aatctggatgaatgaaaccctttat

SEQ ID NO: 92346 - DNA, 25 bp, Saccharomyces pastorianus
ctacgctgagcgcatggtctaatac

SEQ ID NO: 92347 - DNA, 25 bp, Saccharomyces pastorianus
caggatttggcgactactatttgaa

SEQ ID NO: 92348 - DNA, 25 bp, Saccharomyces pastorianus
gaaacttcaggttattatgcctttt

SEQ ID NO: 92349 - DNA, 25 bp, Saccharomyces pastorianus
ggagcatgacctattgggttactat

SEQ ID NO: 92350 - DNA, 25 bp, Saccharomyces pastorianus
gactttaccaaagacttccatgtga

SEQ ID NO: 92351 - DNA, 25 bp, Saccharomyces pastorianus
ttgacggaggcattcgattcagaac

SEQ ID NO: 92352 - DNA, 25 bp, Saccharomyces pastorianus
gatcacaggttttacatccatgggt

SEQ ID NO: 92353 - DNA, 25 bp, Saccharomyces pastorianus
tattccgaaggtccagtttttgacg

SEQ ID NO: 92354 - DNA, 25 bp, Saccharomyces pastorianus
tcatagttagccctcgagtgcacag

SEQ ID NO: 92355 - DNA, 25 bp, Saccharomyces pastorianus
aaatgatcctaccttagcataccct

SEQ ID NO: 92356 - DNA, 25 bp, Saccharomyces pastorianus
gagtgcacagccttgagactttatt

SEQ ID NO: 92357 - DNA, 25 bp, Saccharomyces pastorianus
gattcagaacataccctagcaacca

SEQ ID NO: 92358 - DNA, 25 bp, Saccharomyces pastorianus
aagatttatctctgccgacatatta

SEQ ID NO: 92359 - DNA, 25 bp, Saccharomyces pastorianus
gagaaatcctcgctttacttattat

SEQ ID NO: 92360 - DNA, 25 bp, Saccharomyces pastorianus
gaaacatccatttaaatatcgcggt

SEQ ID NO: 92361 - DNA, 25 bp, Saccharomyces pastorianus
cagtgctgagcatgggatcggtttc

SEQ ID NO: 92362 - DNA, 25 bp, Saccharomyces pastorianus
aacgcagccggtttgattggtgatg

SEQ ID NO: 92363 - DNA, 25 bp, Saccharomyces pastorianus
gtcatgtcggtgacggaaacatcca

SEQ ID NO: 92364 - DNA, 25 bp, Saccharomyces pastorianus
gaggacttactagaaccatttgttt

SEQ ID NO: 92365 - DNA, 25 bp, Saccharomyces pastorianus
gttcttattgaaacgtcagggtcca

SEQ ID NO: 92366 - DNA, 25 bp, Saccharomyces pastorianus
tatattccgtatctgcggctgtgac

SEQ ID NO: 92367 - DNA, 25 bp, Saccharomyces pastorianus
gtatgacatgtcacttcaattgaaa

SEQ ID NO: 92368 - DNA, 25 bp, Saccharomyces pastorianus
aagctgactgctttcctcaaagata

SEQ ID NO: 92369 - DNA, 25 bp, Saccharomyces pastorianus
tctggagaaccaacacaacttttat

SEQ ID NO: 92370 - DNA, 25 bp, Saccharomyces pastorianus
atacttgaaggacttgcctttccct

SEQ ID NO: 92371 - DNA, 25 bp, Saccharomyces pastorianus
gcaagttgggacaaaggacctgttc

SEQ ID NO: 92372 - DNA, 25 bp, Saccharomyces pastorianus
aactcgttgacgataaactggcaag

SEQ ID NO: 92373 - DNA, 25 bp, Saccharomyces pastorianus
gaaaattttggcactagccgtcgcc

SEQ ID NO: 92374 - DNA, 25 bp, Saccharomyces pastorianus
aaggcttggcattggtatgctgtac

SEQ ID NO: 92375 - DNA, 25 bp, Saccharomyces pastorianus
cagtgaattggactacttgcggtaa

SEQ ID NO: 92376 - DNA, 25 bp, Saccharomyces pastorianus
tagccgtcgcctttcaaggcttggc

SEQ ID NO: 92377 - DNA, 25 bp, Saccharomyces pastorianus
ggagcgtaaaactaccaccagtgaa

SEQ ID NO: 92378 - DNA, 25 bp, Saccharomyces pastorianus
gacctgttcccgatcgtgaagaatt

SEQ ID NO: 92379 - DNA, 25 bp, Saccharomyces pastorianus
catcgacattgtaccgcatagcgga

SEQ ID NO: 92380 - DNA, 25 bp, Saccharomyces pastorianus
ttttacgcataatacatcgacattg

SEQ ID NO: 92381 - DNA, 25 bp, Saccharomyces pastorianus
ggattactatccactatgacgagat

SEQ ID NO: 92382 - DNA, 25 bp, Saccharomyces pastorianus
gaatttgtatacagccgtgccgatg

SEQ ID NO: 92383 - DNA, 25 bp, Saccharomyces pastorianus
acggttatgcctccggaagtagcca

SEQ ID NO: 92384 - DNA, 25 bp, Saccharomyces pastorianus
atgagctcggtacgcctgcagtgta

SEQ ID NO: 92385 - DNA, 25 bp, Saccharomyces pastorianus
gcaaggtttatagaccctacggtca

SEQ ID NO: 92386 - DNA, 25 bp, Saccharomyces pastorianus
gacttatatgtcactgaacgcgcaa

SEQ ID NO: 92387 - DNA, 25 bp, Saccharomyces pastorianus
atctccaccttttgcaagcacgaag

SEQ ID NO: 92388 - DNA, 25 bp, Saccharomyces pastorianus
ggtgctctagcctttgacaccgaga

SEQ ID NO: 92389 - DNA, 25 bp, Saccharomyces pastorianus
gcagtgtactgggttacggaccatt

SEQ ID NO: 92390 - DNA, 25 bp, Saccharomyces pastorianus
aattggctttgcacactacctgaac

SEQ ID NO: 92391 - DNA, 25 bp, Saccharomyces pastorianus
cgagaccggcgatgcaattggcttt

SEQ ID NO: 92392 - DNA, 25 bp, Saccharomyces pastorianus
actacctgaaccatttgacgtcgtg

SEQ ID NO: 92393 - DNA, 25 bp, Saccharomyces pastorianus
gatcgtctcatttggtttgctggtc

SEQ ID NO: 92394 - DNA, 25 bp, Saccharomyces pastorianus
tcctttgttaggttgcgcattcatg

SEQ ID NO: 92395 - DNA, 25 bp, Saccharomyces pastorianus
tggcatttcttgttggatcgtctca

SEQ ID NO: 92396 - DNA, 25 bp, Saccharomyces pastorianus
tatgtgactcaagcttccatccaag

SEQ ID NO: 92397 - DNA, 25 bp, Saccharomyces pastorianus
gtatcattggctctttgtgtctatt

SEQ ID NO: 92398 - DNA, 25 bp, Saccharomyces pastorianus
agtcatgtcttaccgctatgttcaa

SEQ ID NO: 92399 - DNA, 25 bp, Saccharomyces pastorianus
aagcgtacggttctccatttacatt

SEQ ID NO: 92400 - DNA, 25 bp, Saccharomyces pastorianus
tttgctggtccattaccgtggtgac

SEQ ID NO: 92401 - DNA, 25 bp, Saccharomyces pastorianus
tttggtattctgctttcctttgtta

SEQ ID NO: 92402 - DNA, 25 bp, Saccharomyces pastorianus
agaatttccgatccaaccttagctg

SEQ ID NO: 92403 - DNA, 25 bp, Saccharomyces pastorianus
taacctcattataccttgccactta

SEQ ID NO: 92404 - DNA, 25 bp, Saccharomyces pastorianus
ttgccgccatacacaaatttgttgt

SEQ ID NO: 92405 - DNA, 25 bp, Saccharomyces pastorianus
atgctaaccacattccccatggaaa

SEQ ID NO: 92406 - DNA, 25 bp, Saccharomyces pastorianus
cactacggcatcgactatggcttac

SEQ ID NO: 92407 - DNA, 25 bp, Saccharomyces pastorianus
tatgctgtgcactaatgggatattc

SEQ ID NO: 92408 - DNA, 25 bp, Saccharomyces pastorianus
gataatcagcagcacccaaactatt

SEQ ID NO: 92409 - DNA, 25 bp, Saccharomyces pastorianus
gactatggcttacattttgccgcca

SEQ ID NO: 92410 - DNA, 25 bp, Saccharomyces pastorianus
cagcacgtcgttataacttcttcac

SEQ ID NO: 92411 - DNA, 25 bp, Saccharomyces pastorianus
agccagactctgtttcggatttaac

SEQ ID NO: 92412 - DNA, 25 bp, Saccharomyces pastorianus
ggaaaagcttcctttctatctttgt

SEQ ID NO: 92413 - DNA, 25 bp, Saccharomyces pastorianus
ggatattcgggatttgcagttttca

SEQ ID NO: 92414 - DNA, 25 bp, Saccharomyces pastorianus
tcactagtcttcatcaccatgggta

SEQ ID NO: 92415 - DNA, 25 bp, Saccharomyces pastorianus
ggtggtgttccatacattgcagttt

SEQ ID NO: 92416 - DNA, 25 bp, Saccharomyces pastorianus
agttttcgttactgctgcatttggc

SEQ ID NO: 92417 - DNA, 25 bp, Saccharomyces pastorianus
ggttatttatctcaatctcgcacat

SEQ ID NO: 92418 - DNA, 25 bp, Saccharomyces pastorianus
aagttggctcctaaattcctgtcaa

SEQ ID NO: 92419 - DNA, 25 bp, Saccharomyces pastorianus
ggtttcacggcttttgcaccaaaat

SEQ ID NO: 92420 - DNA, 25 bp, Saccharomyces pastorianus
ggagacatctactggtggtgacaaa

SEQ ID NO: 92421 - DNA, 25 bp, Saccharomyces pastorianus
tctgttttcctgttcttagctgttt

SEQ ID NO: 92422 - DNA, 25 bp, Saccharomyces pastorianus
ggcgctttggcttacatggagacat

SEQ ID NO: 92423 - DNA, 25 bp, Saccharomyces pastorianus
ttctgcggccacatttatgacgatc

SEQ ID NO: 92424 - DNA, 25 bp, Saccharomyces pastorianus
tcaatggtgttagctttgctgccgc

SEQ ID NO: 92425 - DNA, 25 bp, Saccharomyces pastorianus
cttaacaaccattatttctgccgca

SEQ ID NO: 92426 - DNA, 25 bp, Saccharomyces pastorianus
actctttgactcctcagcaattgaa

SEQ ID NO: 92427 - DNA, 25 bp, Saccharomyces pastorianus
gtcaagatttgtccgctttctggaa

SEQ ID NO: 92428 - DNA, 25 bp, Saccharomyces pastorianus
ttttgtctttgcaaccaggttctga

SEQ ID NO: 92429 - DNA, 25 bp, Saccharomyces pastorianus
gaagctggtattcactttgccgtgg

SEQ ID NO: 92430 - DNA, 25 bp, Saccharomyces pastorianus
attggaagtgatgacgccaccgcca

SEQ ID NO: 92431 - DNA, 25 bp, Saccharomyces pastorianus
gacattttgttcgatatccctgaag

SEQ ID NO: 92432 - DNA, 25 bp, Saccharomyces pastorianus
cgttgctggtttgttgacctacttt

SEQ ID NO: 92433 - DNA, 25 bp, Saccharomyces pastorianus
aagtcccattcatctggtttcaagc

SEQ ID NO: 92434 - DNA, 25 bp, Saccharomyces pastorianus
gaattgggccaggactctttgactc

SEQ ID NO: 92435 - DNA, 25 bp, Saccharomyces pastorianus
tttatcgggtacctcaatggcttcc

SEQ ID NO: 92436 - DNA, 25 bp, Saccharomyces pastorianus
tttgccgtggctgctggtaacgaaa

SEQ ID NO: 92437 - DNA, 25 bp, Saccharomyces pastorianus
tcacaaaccaactgccggctgaaag

SEQ ID NO: 92438 - DNA, 25 bp, Saccharomyces pastorianus
ttttgaacactgcattgcacccgac

SEQ ID NO: 92439 - DNA, 25 bp, Saccharomyces pastorianus
gaatacgtctgctcgccttttaaga

SEQ ID NO: 92440 - DNA, 25 bp, Saccharomyces pastorianus
gtctgctcgccttttaagaggcttt

SEQ ID NO: 92441 - DNA, 25 bp, Saccharomyces pastorianus
agggaccaagcgctcgcaccgttag

SEQ ID NO: 92442 - DNA, 25 bp, Saccharomyces pastorianus
gagcttgtgcaatgggagtgccaat

SEQ ID NO: 92443 - DNA, 25 bp, Saccharomyces pastorianus
tagcaacgcttgactcacaaaccaa

SEQ ID NO: 92444 - DNA, 25 bp, Saccharomyces pastorianus
aactgccggctgaaagagcttgtgc

SEQ ID NO: 92445 - DNA, 25 bp, Saccharomyces pastorianus
gctcgcaccgttagcaacgcttgac

SEQ ID NO: 92446 - DNA, 25 bp, Saccharomyces pastorianus
ttcaaaggagccgaatacgtctgct

SEQ ID NO: 92447 - DNA, 25 bp, Saccharomyces pastorianus
ttgcacccgacaaatcagccactaa

SEQ ID NO: 92448 - DNA, 25 bp, Saccharomyces pastorianus
aatggtgatacgttggctttgagaa

SEQ ID NO: 92449 - DNA, 25 bp, Saccharomyces pastorianus
gtggtagccaagtatcccatgggaa

SEQ ID NO: 92450 - DNA, 25 bp, Saccharomyces pastorianus
gtccttgccactttggcgattttga

SEQ ID NO: 92451 - DNA, 25 bp, Saccharomyces pastorianus
tgaagctgccactcagtacgatatt

SEQ ID NO: 92452 - DNA, 25 bp, Saccharomyces pastorianus
aaaaatacgttgcactgtcccgtgt

SEQ ID NO: 92453 - DNA, 25 bp, Saccharomyces pastorianus
atttcagacatgctggctgtccttg

SEQ ID NO: 92454 - DNA, 25 bp, Saccharomyces pastorianus
gaccgtgggagatgctatttcagac

SEQ ID NO: 92455 - DNA, 25 bp, Saccharomyces pastorianus
aaggactcctctaagttaggtcaat

SEQ ID NO: 92456 - DNA, 25 bp, Saccharomyces pastorianus
gctggttaagtgcatcgttcctgat

SEQ ID NO: 92457 - DNA, 25 bp, Saccharomyces pastorianus
gcagttccaccgcttacataaaaaa

SEQ ID NO: 92458 - DNA, 25 bp, Saccharomyces pastorianus
gaagagtatactgatttgcccaaca

SEQ ID NO: 92459 - DNA, 25 bp, Saccharomyces pastorianus
gatactcttcctcattttccaaaaa

SEQ ID NO: 92460 - DNA, 25 bp, Saccharomyces pastorianus
gtttccgtgttaatcaaccgtattg

SEQ ID NO: 92461 - DNA, 25 bp, Saccharomyces pastorianus
tacaagctacactttttcccaatgc

SEQ ID NO: 92462 - DNA, 25 bp, Saccharomyces pastorianus
attacccaacaactagatactcttc

SEQ ID NO: 92463 - DNA, 25 bp, Saccharomyces pastorianus
ctgcaacactgcatgatcaagtttt

SEQ ID NO: 92464 - DNA, 25 bp, Saccharomyces pastorianus
aacaggttcatctcgacaatgccaa

SEQ ID NO: 92465 - DNA, 25 bp, Saccharomyces pastorianus
actctggataatttagctgcaacac

SEQ ID NO: 92466 - DNA, 25 bp, Saccharomyces pastorianus
acttgctaggcatttactccaaaga

SEQ ID NO: 92467 - DNA, 25 bp, Saccharomyces pastorianus
ttcccaatgccatactgaaacaggt

SEQ ID NO: 92468 - DNA, 25 bp, Saccharomyces pastorianus
gaatcggccacatcatccattatgg

SEQ ID NO: 92469 - DNA, 25 bp, Saccharomyces pastorianus
aaccgtattgctttcgaatcggcca

SEQ ID NO: 92470 - DNA, 25 bp, Saccharomyces pastorianus
gatcgatactgtgaaatgcccgcaa

SEQ ID NO: 92471 - DNA, 25 bp, Saccharomyces pastorianus
tgaaccctcaaataccttggttggt

SEQ ID NO: 92472 - DNA, 25 bp, Saccharomyces pastorianus
ccgcaacctttcaacacattagcat

SEQ ID NO: 92473 - DNA, 25 bp, Saccharomyces pastorianus
ggtccacgcaggtcacagaagttca

SEQ ID NO: 92474 - DNA, 25 bp, Saccharomyces pastorianus
gccgcaggtatggactcgtatgttt

SEQ ID NO: 92475 - DNA, 25 bp, Saccharomyces pastorianus
aagacggcgttcctgaattgatcat

SEQ ID NO: 92476 - DNA, 25 bp, Saccharomyces pastorianus
tagtctacccatcgtgggaggtcca

SEQ ID NO: 92477 - DNA, 25 bp, Saccharomyces pastorianus
atttagtcatcattcctcaaacctc

SEQ ID NO: 92478 - DNA, 25 bp, Saccharomyces pastorianus
gccatgttgacggtgtagctgtatc

SEQ ID NO: 92479 - DNA, 25 bp, Saccharomyces pastorianus
tggaagtgttcccatagtctaccca

SEQ ID NO: 92480 - DNA, 25 bp, Saccharomyces pastorianus
aggaaccattacaccatatgtcggg

SEQ ID NO: 92481 - DNA, 25 bp, Saccharomyces pastorianus
cagcatgctgcagtgttttattcaa

SEQ ID NO: 92482 - DNA, 25 bp, Saccharomyces pastorianus
aagctgatgctgacttctaagccag

SEQ ID NO: 92483 - DNA, 25 bp, Saccharomyces pastorianus
gaaatgtgccaatgagactcttgat

SEQ ID NO: 92484 - DNA, 25 bp, Saccharomyces pastorianus
aatgtgttcaaccagctcactgttt

SEQ ID NO: 92485 - DNA, 25 bp, Saccharomyces pastorianus
attatcccaatgctgaaatgtgcca

SEQ ID NO: 92486 - DNA, 25 bp, Saccharomyces pastorianus
ttctaagccaggtcagcatgctgca

SEQ ID NO: 92487 - DNA, 25 bp, Saccharomyces pastorianus
gacatcgagcctatggatttgttga

SEQ ID NO: 92488 - DNA, 25 bp, Saccharomyces pastorianus
caagctcgtttattttattatccca

SEQ ID NO: 92489 - DNA, 25 bp, Saccharomyces pastorianus
gattgacttgtatactgcaactatc

SEQ ID NO: 92490 - DNA, 25 bp, Saccharomyces pastorianus
gaggctcattgagcaagctcgttta

SEQ ID NO: 92491 - DNA, 25 bp, Saccharomyces pastorianus
gagttgtcgacatgttagctgttta

SEQ ID NO: 92492 - DNA, 25 bp, Saccharomyces pastorianus
tattgctaaggccaccaaagaattc

SEQ ID NO: 92493 - DNA, 25 bp, Saccharomyces pastorianus
aatacttgtacctaagagccgttgg

SEQ ID NO: 92494 - DNA, 25 bp, Saccharomyces pastorianus
taaggccaccaaagaattcaagggt

SEQ ID NO: 92495 - DNA, 25 bp, Saccharomyces pastorianus
tgctaaggccaccaaagaattcaag

SEQ ID NO: 92496 - DNA, 25 bp, Saccharomyces pastorianus
tggtcctttaggtctatcgccaaag

SEQ ID NO: 92497 - DNA, 25 bp, Saccharomyces pastorianus
gaagatattgctaaggccaccaaag

SEQ ID NO: 92498 - DNA, 25 bp, Saccharomyces pastorianus
agatattgctaaggccaccaaagaa

SEQ ID NO: 92499 - DNA, 25 bp, Saccharomyces pastorianus
gtgttgacttcaagaatccccatga

SEQ ID NO: 92500 - DNA, 25 bp, Saccharomyces pastorianus
tcaaggttaccgttcaattaaagat

SEQ ID NO: 92501 - DNA, 25 bp, Saccharomyces pastorianus
tttggctccaaagattggtccttta

SEQ ID NO: 92502 - DNA, 25 bp, Saccharomyces pastorianus
gaatccccatgatatcattgaaggc

SEQ ID NO: 92503 - DNA, 25 bp, Saccharomyces pastorianus
agtactccgtcaaaattctctaatg

SEQ ID NO: 92504 - DNA, 25 bp, Saccharomyces pastorianus
attcaattggtgttcctgagttacc

SEQ ID NO: 92505 - DNA, 25 bp, Saccharomyces pastorianus
ggactcccacgaatacaaggttgaa

SEQ ID NO: 92506 - DNA, 25 bp, Saccharomyces pastorianus
aagtgcgcaatgtcgttagttctat

SEQ ID NO: 92507 - DNA, 25 bp, Saccharomyces pastorianus
ttctaaagcattatcagtcaactca

SEQ ID NO: 92508 - DNA, 25 bp, Saccharomyces pastorianus
gagctctctctggagtactattgta

SEQ ID NO: 92509 - DNA, 25 bp, Saccharomyces pastorianus
aagactggttcaagagctctctctg

SEQ ID NO: 92510 - DNA, 25 bp, Saccharomyces pastorianus
gggccactaactttatcgaaactga

SEQ ID NO: 92511 - DNA, 25 bp, Saccharomyces pastorianus
ctaatagaggttttccaatttgcaa

SEQ ID NO: 92512 - DNA, 25 bp, Saccharomyces pastorianus
aggatggaactatttccccatacaa

SEQ ID NO: 92513 - DNA, 25 bp, Saccharomyces pastorianus
gggaggcgataataacggcgttcta

SEQ ID NO: 92514 - DNA, 25 bp, Saccharomyces pastorianus
atatttgtccatttacgttcgtgat

SEQ ID NO: 92515 - DNA, 25 bp, Saccharomyces pastorianus
gattttgagttacgcccaacaacca

SEQ ID NO: 92516 - DNA, 25 bp, Saccharomyces pastorianus
ttggccgcaggagattacttgacat

SEQ ID NO: 92517 - DNA, 25 bp, Saccharomyces pastorianus
gagtcgcgcagtttactttcaagca

SEQ ID NO: 92518 - DNA, 25 bp, Saccharomyces pastorianus
gattctactgattcacacacggtgc

SEQ ID NO: 92519 - DNA, 25 bp, Saccharomyces pastorianus
ttcccacaccgatgattctactgat

SEQ ID NO: 92520 - DNA, 25 bp, Saccharomyces pastorianus
ggtataactatttcgcacaggcttc

SEQ ID NO: 92521 - DNA, 25 bp, Saccharomyces pastorianus
aacctgatagcgtcgatactggtat

SEQ ID NO: 92522 - DNA, 25 bp, Saccharomyces pastorianus
gagagttcaaagtccctaagtgtac

SEQ ID NO: 92523 - DNA, 25 bp, Saccharomyces pastorianus
acgggtgcagcggattttacttcct

SEQ ID NO: 92524 - DNA, 25 bp, Saccharomyces pastorianus
agaaagatttgcctttgcccgtgcc

SEQ ID NO: 92525 - DNA, 25 bp, Saccharomyces pastorianus
gagttatgcaaactgctgccttttc

SEQ ID NO: 92526 - DNA, 25 bp, Saccharomyces pastorianus
agggttaatgctatcgaacacgtta

SEQ ID NO: 92527 - DNA, 25 bp, Saccharomyces pastorianus
acgttagtggtgtgtatttgtctca

SEQ ID NO: 92528 - DNA, 25 bp, Saccharomyces pastorianus
atcgaacacgttattatcccaagaa

SEQ ID NO: 92529 - DNA, 25 bp, Saccharomyces pastorianus
cttggccgaagtttcctatgcaaca

SEQ ID NO: 92530 - DNA, 25 bp, Saccharomyces pastorianus
gaagtagctgctgatgaggaacctc

SEQ ID NO: 92531 - DNA, 25 bp, Saccharomyces pastorianus
gtctcaatttgagtcctacatcgac

SEQ ID NO: 92532 - DNA, 25 bp, Saccharomyces pastorianus
tgctgccttttccttggccgaagtt

SEQ ID NO: 92533 - DNA, 25 bp, Saccharomyces pastorianus
gagtcctacatcgaccctgaaatta

SEQ ID NO: 92534 - DNA, 25 bp, Saccharomyces pastorianus
gaaactttagttgaattagcctctt

SEQ ID NO: 92535 - DNA, 25 bp, Saccharomyces pastorianus
gcaagaaagtgtctctactgcaaga

SEQ ID NO: 92536 - DNA, 25 bp, Saccharomyces pastorianus
ataatcttgcatctttgcctcttgg

SEQ ID NO: 92537 - DNA, 25 bp, Saccharomyces pastorianus
gcggcattgtctacaggctgtgcaa

SEQ ID NO: 92538 - DNA, 25 bp, Saccharomyces pastorianus
ttagcctatttataatcttgcatct

SEQ ID NO: 92539 - DNA, 25 bp, Saccharomyces pastorianus
ttgcctcttggtctgtcttttactt

SEQ ID NO: 92540 - DNA, 25 bp, Saccharomyces pastorianus
gaaaaggtccctatgttgcttcttt

SEQ ID NO: 92541 - DNA, 25 bp, Saccharomyces pastorianus
ttgcatctttgcctcttggtctgtc

SEQ ID NO: 92542 - DNA, 25 bp, Saccharomyces pastorianus
ccctatgttgcttcttttctactaa

SEQ ID NO: 92543 - DNA, 25 bp, Saccharomyces pastorianus
gtctacaggctgtgcaaaattatat

SEQ ID NO: 92544 - DNA, 25 bp, Saccharomyces pastorianus
gataaatgtaaccagaacaacgaag

SEQ ID NO: 92545 - DNA, 25 bp, Saccharomyces pastorianus
acaagcggcattgtctacaggctgt

SEQ ID NO: 92546 - DNA, 25 bp, Saccharomyces pastorianus
gcttcttttctactaaaattagcct

SEQ ID NO: 92547 - DNA, 25 bp, Saccharomyces pastorianus
aatactaccggcgaattgtcttata

SEQ ID NO: 92548 - DNA, 25 bp, Saccharomyces pastorianus
tatttccatgatccccataggtact

SEQ ID NO: 92549 - DNA, 25 bp, Saccharomyces pastorianus
tattgcttgtgatgggttacgccca

SEQ ID NO: 92550 - DNA, 25 bp, Saccharomyces pastorianus
gacccactgttagaggtgttgccat

SEQ ID NO: 92551 - DNA, 25 bp, Saccharomyces pastorianus
atgtgtctttagaggctgtcgctac

SEQ ID NO: 92552 - DNA, 25 bp, Saccharomyces pastorianus
gcgggaaagtagaccctgctatctt

SEQ ID NO: 92553 - DNA, 25 bp, Saccharomyces pastorianus
aaaattctgtcgctctgctggtaca

SEQ ID NO: 92554 - DNA, 25 bp, Saccharomyces pastorianus
acagatctcttggtaaagccggcag

SEQ ID NO: 92555 - DNA, 25 bp, Saccharomyces pastorianus
ggcgatgtggtcgaatccttcagaa

SEQ ID NO: 92556 - DNA, 25 bp, Saccharomyces pastorianus
agaggcaactgtctacctatttcca

SEQ ID NO: 92557 - DNA, 25 bp, Saccharomyces pastorianus
agagtccttgcgaaattacctgaaa

SEQ ID NO: 92558 - DNA, 25 bp, Saccharomyces pastorianus
caattgaagttgctgaggctgtttt

SEQ ID NO: 92559 - DNA, 25 bp, Saccharomyces pastorianus
aattgaagttgctgaggctgttttc

SEQ ID NO: 92560 - DNA, 25 bp, Saccharomyces pastorianus
caatactactctttccaagctgctc

SEQ ID NO: 92561 - DNA, 25 bp, Saccharomyces pastorianus
cccaattgaagttgctgaggctgtt

SEQ ID NO: 92562 - DNA, 25 bp, Saccharomyces pastorianus
ctacccaattgaagttgctgaggct

SEQ ID NO: 92563 - DNA, 25 bp, Saccharomyces pastorianus
acccaattgaagttgctgaggctgt

SEQ ID NO: 92564 - DNA, 25 bp, Saccharomyces pastorianus
atactactctttccaagctgctcac

SEQ ID NO: 92565 - DNA, 25 bp, Saccharomyces pastorianus
attgaagttgctgaggctgttttca

SEQ ID NO: 92566 - DNA, 25 bp, Saccharomyces pastorianus
tcaatactactctttccaagctgct

SEQ ID NO: 92567 - DNA, 25 bp, Saccharomyces pastorianus
tacccaattgaagttgctgaggctg

SEQ ID NO: 92568 - DNA, 25 bp, Saccharomyces pastorianus
ccaattgaagttgctgaggctgttt

SEQ ID NO: 92569 - DNA, 25 bp, Saccharomyces pastorianus
gacgggtctgaagattgtcattgga

SEQ ID NO: 92570 - DNA, 25 bp, Saccharomyces pastorianus
ggcattctttagattccaaacctct

SEQ ID NO: 92571 - DNA, 25 bp, Saccharomyces pastorianus
tatgttgattaagcagacgggtctg

SEQ ID NO: 92572 - DNA, 25 bp, Saccharomyces pastorianus
aatcctttacttgttagcggtgacg

SEQ ID NO: 92573 - DNA, 25 bp, Saccharomyces pastorianus
aagtgctttggttgaatggcattct

SEQ ID NO: 92574 - DNA, 25 bp, Saccharomyces pastorianus
gaaggtgtctctgtatttgctatgt

SEQ ID NO: 92575 - DNA, 25 bp, Saccharomyces pastorianus
gtactcaaatataacgtgctttcta

SEQ ID NO: 92576 - DNA, 25 bp, Saccharomyces pastorianus
tcaatcagattttcgaaaccgtaag

SEQ ID NO: 92577 - DNA, 25 bp, Saccharomyces pastorianus
attgatttacgtccctaatgaggcg

SEQ ID NO: 92578 - DNA, 25 bp, Saccharomyces pastorianus
atacgtgtcaaatgtaatcctttac

SEQ ID NO: 92579 - DNA, 25 bp, Saccharomyces pastorianus
gagcttgaggccttgcttcgtatca

SEQ ID NO: 92580 - DNA, 25 bp, Saccharomyces pastorianus
agagcactattggttatgggcgaaa

SEQ ID NO: 92581 - DNA, 25 bp, Saccharomyces pastorianus
taaaaggcctgtacgcggccggtga

SEQ ID NO: 92582 - DNA, 25 bp, Saccharomyces pastorianus
gatgtagtcactgcagctattcaaa

SEQ ID NO: 92583 - DNA, 25 bp, Saccharomyces pastorianus
gaaattcttggctgccgaatcctta

SEQ ID NO: 92584 - DNA, 25 bp, Saccharomyces pastorianus
tataatttaccaatcactgtcgccc

SEQ ID NO: 92585 - DNA, 25 bp, Saccharomyces pastorianus
tgggacgtaccgttattctcaacga

SEQ ID NO: 92586 - DNA, 25 bp, Saccharomyces pastorianus
taccaaggctgatccgttgggacgt

SEQ ID NO: 92587 - DNA, 25 bp, Saccharomyces pastorianus
gaagtaacaccggttgtccatttca

SEQ ID NO: 92588 - DNA, 25 bp, Saccharomyces pastorianus
tgcaaacatactcttcgttcactac

SEQ ID NO: 92589 - DNA, 25 bp, Saccharomyces pastorianus
aagtttctggcggtgttcatggcgc

SEQ ID NO: 92590 - DNA, 25 bp, Saccharomyces pastorianus
gaatttggctctgacgttactccag

SEQ ID NO: 92591 - DNA, 25 bp, Saccharomyces pastorianus
tagagtctcgttccactatcaagtc

SEQ ID NO: 92592 - DNA, 25 bp, Saccharomyces pastorianus
aagtttgtcaagaaggccacccatt

SEQ ID NO: 92593 - DNA, 25 bp, Saccharomyces pastorianus
aaaagtcaaattggccatctccgag

SEQ ID NO: 92594 - DNA, 25 bp, Saccharomyces pastorianus
ggaagtcccaattgctgtactcgca

SEQ ID NO: 92595 - DNA, 25 bp, Saccharomyces pastorianus
agaatctggaatgccgctgcacaat

SEQ ID NO: 92596 - DNA, 25 bp, Saccharomyces pastorianus
tactcgcactctttggctcatgaat

SEQ ID NO: 92597 - DNA, 25 bp, Saccharomyces pastorianus
attgtgaggcaaagggcatcccgct

SEQ ID NO: 92598 - DNA, 25 bp, Saccharomyces pastorianus
ccgaggccttcgactatgctaaaga

SEQ ID NO: 92599 - DNA, 25 bp, Saccharomyces pastorianus
catctccatttgtctatccaagtct

SEQ ID NO: 92600 - DNA, 25 bp, Saccharomyces pastorianus
aaggccgctagaatggacccagatg

SEQ ID NO: 92601 - DNA, 25 bp, Saccharomyces pastorianus
aagaacatcctttcgactgtaacgg

SEQ ID NO: 92602 - DNA, 25 bp, Saccharomyces pastorianus
tactttagcgtggaagcgccaccgt

SEQ ID NO: 92603 - DNA, 25 bp, Saccharomyces pastorianus
cctctagattcaagtcggcgcatta

SEQ ID NO: 92604 - DNA, 25 bp, Saccharomyces pastorianus
gagagttctactgctgctaggcgac

SEQ ID NO: 92605 - DNA, 25 bp, Saccharomyces pastorianus
ggcgacgagagattgctgtttctaa

SEQ ID NO: 92606 - DNA, 25 bp, Saccharomyces pastorianus
gaggcagttgatctcggacgaaaac

SEQ ID NO: 92607 - DNA, 25 bp, Saccharomyces pastorianus
gcggatcaacgccttgttgaccaag

SEQ ID NO: 92608 - DNA, 25 bp, Saccharomyces pastorianus
cccggcgtcgatcaggagtacttaa

SEQ ID NO: 92609 - DNA, 25 bp, Saccharomyces pastorianus
gttgaccaaggctaacaaggctgca

SEQ ID NO: 92610 - DNA, 25 bp, Saccharomyces pastorianus
gacttgtgcccaaagcgacgtactt

SEQ ID NO: 92611 - DNA, 25 bp, Saccharomyces pastorianus
gaaattggctttccctctagattca

SEQ ID NO: 92612 - DNA, 25 bp, Saccharomyces pastorianus
agggcttctacaagtcgcctacgaa

SEQ ID NO: 92613 - DNA, 25 bp, Saccharomyces pastorianus
atgtgcctgtgggtccaaaggttcc

SEQ ID NO: 92614 - DNA, 25 bp, Saccharomyces pastorianus
tacacgaagatcattccatgcctct

SEQ ID NO: 92615 - DNA, 25 bp, Saccharomyces pastorianus
agcatttcttctgcatggtccaagt

SEQ ID NO: 92616 - DNA, 25 bp, Saccharomyces pastorianus
aatacaaatcaactttctcctccat

SEQ ID NO: 92617 - DNA, 25 bp, Saccharomyces pastorianus
aactccatcaactagtccaagcggt

SEQ ID NO: 92618 - DNA, 25 bp, Saccharomyces pastorianus
attggtgccaaacttgagcccacga

SEQ ID NO: 92619 - DNA, 25 bp, Saccharomyces pastorianus
aggagcagtatcacctcgatgtgcc

SEQ ID NO: 92620 - DNA, 25 bp, Saccharomyces pastorianus
atcacctgctaatgcggacacggat

SEQ ID NO: 92621 - DNA, 25 bp, Saccharomyces pastorianus
gactctcaaacgatgtgcccattgt

SEQ ID NO: 92622 - DNA, 25 bp, Saccharomyces pastorianus
gtacgcagtggttctttctacagtg

SEQ ID NO: 92623 - DNA, 25 bp, Saccharomyces pastorianus
atgaaccatcaaccaacggcggata

SEQ ID NO: 92624 - DNA, 25 bp, Saccharomyces pastorianus
ataccattgactttatagggccgga

SEQ ID NO: 92625 - DNA, 25 bp, Saccharomyces pastorianus
atgcctaccgcctaaagttaatgcc

SEQ ID NO: 92626 - DNA, 25 bp, Saccharomyces pastorianus
gccggacgagccaagtggtgcacaa

SEQ ID NO: 92627 - DNA, 25 bp, Saccharomyces pastorianus
tgactcgcacttctgtttggactta

SEQ ID NO: 92628 - DNA, 25 bp, Saccharomyces pastorianus
acgacagaacccgtccattgggtat

SEQ ID NO: 92629 - DNA, 25 bp, Saccharomyces pastorianus
aatagtgtcttcagtggcattgcgg

SEQ ID NO: 92630 - DNA, 25 bp, Saccharomyces pastorianus
aggtgcgtcattaccattgttgaaa

SEQ ID NO: 92631 - DNA, 25 bp, Saccharomyces pastorianus
taaagatgctcagtgccagtctcca

SEQ ID NO: 92632 - DNA, 25 bp, Saccharomyces pastorianus
gactcatcaattgtcatctccatgc

SEQ ID NO: 92633 - DNA, 25 bp, Saccharomyces pastorianus
attgggtatgcccttgtcctttact

SEQ ID NO: 92634 - DNA, 25 bp, Saccharomyces pastorianus
atattttctcttatttctacgacag

SEQ ID NO: 92635 - DNA, 25 bp, Saccharomyces pastorianus
aatgccatagcggtgacgcctatat

SEQ ID NO: 92636 - DNA, 25 bp, Saccharomyces pastorianus
ggatccacggcgtactcattgagtg

SEQ ID NO: 92637 - DNA, 25 bp, Saccharomyces pastorianus
gacaccataaataatcccctcgaga

SEQ ID NO: 92638 - DNA, 25 bp, Saccharomyces pastorianus
tcccctcgagagttcatgcataagc

SEQ ID NO: 92639 - DNA, 25 bp, Saccharomyces pastorianus
gactatcgagtcatctgccagtgaa

SEQ ID NO: 92640 - DNA, 25 bp, Saccharomyces pastorianus
gacgcctatatgtcctcatactttg

SEQ ID NO: 92641 - DNA, 25 bp, Saccharomyces pastorianus
attgattgttgccacgcctacggga

SEQ ID NO: 92642 - DNA, 25 bp, Saccharomyces pastorianus
aagccatttgcacatattctctcgc

SEQ ID NO: 92643 - DNA, 25 bp, Saccharomyces pastorianus
tgtgataactgcaagcccctattcg

SEQ ID NO: 92644 - DNA, 25 bp, Saccharomyces pastorianus
agctccttgtttatccctattagaa

SEQ ID NO: 92645 - DNA, 25 bp, Saccharomyces pastorianus
ggctctttaatatcgccaagcgtaa

SEQ ID NO: 92646 - DNA, 25 bp, Saccharomyces pastorianus
gagataaggtcgtatcctccgtatc

SEQ ID NO: 92647 - DNA, 25 bp, Saccharomyces pastorianus
ggtggtaattctaccaacgctccag

SEQ ID NO: 92648 - DNA, 25 bp, Saccharomyces pastorianus
gtagtaagactagttccaccgcttc

SEQ ID NO: 92649 - DNA, 25 bp, Saccharomyces pastorianus
aaaagagttcttcctcaactgcaac

SEQ ID NO: 92650 - DNA, 25 bp, Saccharomyces pastorianus
ctaacgtagcggcaaactggcattt

SEQ ID NO: 92651 - DNA, 25 bp, Saccharomyces pastorianus
gttatgatccaccaagcgataccaa

SEQ ID NO: 92652 - DNA, 25 bp, Saccharomyces pastorianus
tgcttatgtgtatacttcgtccagt

SEQ ID NO: 92653 - DNA, 25 bp, Saccharomyces pastorianus
gagggatctggcttggacccacata

SEQ ID NO: 92654 - DNA, 25 bp, Saccharomyces pastorianus
aacgctccaggaaccattgcatggt

SEQ ID NO: 92655 - DNA, 25 bp, Saccharomyces pastorianus
aaaacgtcatccgatcacagcagtt

SEQ ID NO: 92656 - DNA, 25 bp, Saccharomyces pastorianus
gcagcggatatcagcaacccaggat

SEQ ID NO: 92657 - DNA, 25 bp, Saccharomyces pastorianus
tagaagagggtggtcctaacaaagt

SEQ ID NO: 92658 - DNA, 25 bp, Saccharomyces pastorianus
acaaagttggacctaatttacatgg

SEQ ID NO: 92659 - DNA, 25 bp, Saccharomyces pastorianus
aaacgaggtgtcagcagtgtcatac

SEQ ID NO: 92660 - DNA, 25 bp, Saccharomyces pastorianus
aagggttattcttacacagatgcaa

SEQ ID NO: 92661 - DNA, 25 bp, Saccharomyces pastorianus
ggtgtcagcagtgtcatacaataga

SEQ ID NO: 92662 - DNA, 25 bp, Saccharomyces pastorianus
atgaggatagtatgtccgagtactt

SEQ ID NO: 92663 - DNA, 25 bp, Saccharomyces pastorianus
gcaaaaaagggtgctacattgttta

SEQ ID NO: 92664 - DNA, 25 bp, Saccharomyces pastorianus
gcaaacatcaacaagaacgtcaaat

SEQ ID NO: 92665 - DNA, 25 bp, Saccharomyces pastorianus
ggtatttttggtagacattcaggtc

SEQ ID NO: 92666 - DNA, 25 bp, Saccharomyces pastorianus
gtacgggattcaaaccaggctctgc

SEQ ID NO: 92667 - DNA, 25 bp, Saccharomyces pastorianus
cattcaggtcaggtaaagggttatt

SEQ ID NO: 92668 - DNA, 25 bp, Saccharomyces pastorianus
gactttattcccttatttcacgaag

SEQ ID NO: 92669 - DNA, 25 bp, Saccharomyces pastorianus
agcgaggtactgttcttgagcgata

SEQ ID NO: 92670 - DNA, 25 bp, Saccharomyces pastorianus
tctgggctcacggatacgaatctgg

SEQ ID NO: 92671 - DNA, 25 bp, Saccharomyces pastorianus
gggtatgttcaggatcccaacgcgc

SEQ ID NO: 92672 - DNA, 25 bp, Saccharomyces pastorianus
atagctactgggttagcttcccgac

SEQ ID NO: 92673 - DNA, 25 bp, Saccharomyces pastorianus
acatcttgcgggatatcggtgcgaa

SEQ ID NO: 92674 - DNA, 25 bp, Saccharomyces pastorianus
gaaagtgccgcaattggttcaacag

SEQ ID NO: 92675 - DNA, 25 bp, Saccharomyces pastorianus
gcctgcgcatgattcgttggatttg

SEQ ID NO: 92676 - DNA, 25 bp, Saccharomyces pastorianus
gaaacacagtcttacgccaacatct

SEQ ID NO: 92677 - DNA, 25 bp, Saccharomyces pastorianus
ggtttccaacattctgtcgcagttt

SEQ ID NO: 92678 - DNA, 25 bp, Saccharomyces pastorianus
acagttgcaaggctacgtctgggct

SEQ ID NO: 92679 - DNA, 25 bp, Saccharomyces pastorianus
aagacgatcaagctatttcgcgcct

SEQ ID NO: 92680 - DNA, 25 bp, Saccharomyces pastorianus
gaaaatctgcgtcaaccggaaccac

SEQ ID NO: 92681 - DNA, 25 bp, Saccharomyces pastorianus
ttatccaggtgtattttgcgtgcga

SEQ ID NO: 92682 - DNA, 25 bp, Saccharomyces pastorianus
atttgcacaagctgcccaaggcggt

SEQ ID NO: 92683 - DNA, 25 bp, Saccharomyces pastorianus
ccattggcctcactgtagaagattt

SEQ ID NO: 92684 - DNA, 25 bp, Saccharomyces pastorianus
cgcgcctctgtgaattgggctttga

SEQ ID NO: 92685 - DNA, 25 bp, Saccharomyces pastorianus
gtgaaggttctttccaagttgacta

SEQ ID NO: 92686 - DNA, 25 bp, Saccharomyces pastorianus
aagtgtttgtgtccatgttgctaga

SEQ ID NO: 92687 - DNA, 25 bp, Saccharomyces pastorianus
aaggcggtaatgcttcatccggtgc

SEQ ID NO: 92688 - DNA, 25 bp, Saccharomyces pastorianus
agatgctgcgcaaggtggacctcca

SEQ ID NO: 92689 - DNA, 25 bp, Saccharomyces pastorianus
taacccagaagctttagccccattg

SEQ ID NO: 92690 - DNA, 25 bp, Saccharomyces pastorianus
ttagctcctgcggtatgtgcggtgc

SEQ ID NO: 92691 - DNA, 25 bp, Saccharomyces pastorianus
aatggtcaggacttatcgttactta

SEQ ID NO: 92692 - DNA, 25 bp, Saccharomyces pastorianus
ggtgttgcaggattttaccggcctt

SEQ ID NO: 92693 - DNA, 25 bp, Saccharomyces pastorianus
aaatgccaccagaacgaagccaatg

SEQ ID NO: 92694 - DNA, 25 bp, Saccharomyces pastorianus
gttacttatactgttgagccggata

SEQ ID NO: 92695 - DNA, 25 bp, Saccharomyces pastorianus
ggatatatccgctgtgctctaatac

SEQ ID NO: 92696 - DNA, 25 bp, Saccharomyces pastorianus
gcgacggcgtttcttttagctcctg

SEQ ID NO: 92697 - DNA, 25 bp, Saccharomyces pastorianus
gttatactactccaagtcgccgttc

SEQ ID NO: 92698 - DNA, 25 bp, Saccharomyces pastorianus
agcgtccagctacagcgttatacta

SEQ ID NO: 92699 - DNA, 25 bp, Saccharomyces pastorianus
gatatcactgcagcaaggtctgggt

SEQ ID NO: 92700 - DNA, 25 bp, Saccharomyces pastorianus
ttttattaccactgttccttcacct

SEQ ID NO: 92701 - DNA, 25 bp, Saccharomyces pastorianus
catgccatgatgttaaccggtttaa

SEQ ID NO: 92702 - DNA, 25 bp, Saccharomyces pastorianus
gtttgcaaactgtcacccaattcac

SEQ ID NO: 92703 - DNA, 25 bp, Saccharomyces pastorianus
ggagccttgacatcatccttagtgt

SEQ ID NO: 92704 - DNA, 25 bp, Saccharomyces pastorianus
gatatcaatggcaaccaaatggact

SEQ ID NO: 92705 - DNA, 25 bp, Saccharomyces pastorianus
ttctggagccttgacatcatcctta

SEQ ID NO: 92706 - DNA, 25 bp, Saccharomyces pastorianus
atggactttagcgtgaccgtgctta

SEQ ID NO: 92707 - DNA, 25 bp, Saccharomyces pastorianus
ccggtttaatcggttctagcagctt

SEQ ID NO: 92708 - DNA, 25 bp, Saccharomyces pastorianus
aagtccttaccttcatcaaaagcag

SEQ ID NO: 92709 - DNA, 25 bp, Saccharomyces pastorianus
tcacccatagcggagatgatggtaa

SEQ ID NO: 92710 - DNA, 25 bp, Saccharomyces pastorianus
accaaatggactttagcgtgaccgt

SEQ ID NO: 92711 - DNA, 25 bp, Saccharomyces pastorianus
tttttcatttatatcccatgccatg

SEQ ID NO: 92712 - DNA, 25 bp, Saccharomyces pastorianus
cactaaggatgatgtcaaggctcca

SEQ ID NO: 92713 - DNA, 25 bp, Saccharomyces pastorianus
gtcacgctaaagtccatttggttgc

SEQ ID NO: 92714 - DNA, 25 bp, Saccharomyces pastorianus
taaggatgatgtcaaggctccagaa

SEQ ID NO: 92715 - DNA, 25 bp, Saccharomyces pastorianus
gctaaagtccatttggttgccattg

SEQ ID NO: 92716 - DNA, 25 bp, Saccharomyces pastorianus
ttaccatcatctccgctatgggtga

SEQ ID NO: 92717 - DNA, 25 bp, Saccharomyces pastorianus
ggttaccatcatctccgctatgggt

SEQ ID NO: 92718 - DNA, 25 bp, Saccharomyces pastorianus
acgctaaagtccatttggttgccat

SEQ ID NO: 92719 - DNA, 25 bp, Saccharomyces pastorianus
tgatggttaccatcatctccgctat

SEQ ID NO: 92720 - DNA, 25 bp, Saccharomyces pastorianus
taaagtccatttggttgccattgat

SEQ ID NO: 92721 - DNA, 25 bp, Saccharomyces pastorianus
atggttaccatcatctccgctatgg

SEQ ID NO: 92722 - DNA, 25 bp, Saccharomyces pastorianus
aagtccatttggttgccattgatat

SEQ ID NO: 92723 - DNA, 25 bp, Saccharomyces pastorianus
cactaaggatgatgtcaaggctcca

SEQ ID NO: 92724 - DNA, 25 bp, Saccharomyces pastorianus
gtcacgctaaagtccatttggttgc

SEQ ID NO: 92725 - DNA, 25 bp, Saccharomyces pastorianus
taaggatgatgtcaaggctccagaa

SEQ ID NO: 92726 - DNA, 25 bp, Saccharomyces pastorianus
gctaaagtccatttggttgccattg

SEQ ID NO: 92727 - DNA, 25 bp, Saccharomyces pastorianus
ttaccatcatctccgctatgggtga

SEQ ID NO: 92728 - DNA, 25 bp, Saccharomyces pastorianus
tttgaaactgctgacgctggttcct

SEQ ID NO: 92729 - DNA, 25 bp, Saccharomyces pastorianus
tgatggttaccatcatctccgctat

SEQ ID NO: 92730 - DNA, 25 bp, Saccharomyces pastorianus
atggttaccatcatctccgctatgg

SEQ ID NO: 92731 - DNA, 25 bp, Saccharomyces pastorianus
aagtccatttggttgccattgatat

SEQ ID NO: 92732 - DNA, 25 bp, Saccharomyces pastorianus
gtgaattgggtgacagtttgcaaac

SEQ ID NO: 92733 - DNA, 25 bp, Saccharomyces pastorianus
cagtttgcaaactgcttttgatgaa

SEQ ID NO: 92734 - DNA, 25 bp, Saccharomyces pastorianus
ttcatgtgcgcatatctaccggctg

SEQ ID NO: 92735 - DNA, 25 bp, Saccharomyces pastorianus
tgcaagcagccggtcggtggcaaat

SEQ ID NO: 92736 - DNA, 25 bp, Saccharomyces pastorianus
atcacatcatgtactcttcgctgaa

SEQ ID NO: 92737 - DNA, 25 bp, Saccharomyces pastorianus
tgtactcttcgctgaaccgggtttt

SEQ ID NO: 92738 - DNA, 25 bp, Saccharomyces pastorianus
acttttctttttccttatgcaggca

SEQ ID NO: 92739 - DNA, 25 bp, Saccharomyces pastorianus
tatgcaggcagtgtaattcattggg

SEQ ID NO: 92740 - DNA, 25 bp, Saccharomyces pastorianus
gggaggatgattttcatgtgcgcat

SEQ ID NO: 92741 - DNA, 25 bp, Saccharomyces pastorianus
ggtcggtggcaaatccggcgcttcc

SEQ ID NO: 92742 - DNA, 25 bp, Saccharomyces pastorianus
ttctttttccttatgcaggcagtgt

SEQ ID NO: 92743 - DNA, 25 bp, Saccharomyces pastorianus
gcaggccaagggaaatattagtttt

SEQ ID NO: 92744 - DNA, 25 bp, Saccharomyces pastorianus
tttattcgtatttcacacttttctt

SEQ ID NO: 92745 - DNA, 25 bp, Saccharomyces pastorianus
atccccaatcaaatctactccaaga

SEQ ID NO: 92746 - DNA, 25 bp, Saccharomyces pastorianus
gaggtcggtactccaagattaccta

SEQ ID NO: 92747 - DNA, 25 bp, Saccharomyces pastorianus
aatctcaggtattattgcgcgtctg

SEQ ID NO: 92748 - DNA, 25 bp, Saccharomyces pastorianus
gcaggtttgaagatcatgtcggaca

SEQ ID NO: 92749 - DNA, 25 bp, Saccharomyces pastorianus
tgaggaaggttcgtcgggacctctt

SEQ ID NO: 92750 - DNA, 25 bp, Saccharomyces pastorianus
gaaggtcaacggcatcttccgttaa

SEQ ID NO: 92751 - DNA, 25 bp, Saccharomyces pastorianus
aacgatataatgtcaccgcttcctg

SEQ ID NO: 92752 - DNA, 25 bp, Saccharomyces pastorianus
atgtggagcctggtaccatttctac

SEQ ID NO: 92753 - DNA, 25 bp, Saccharomyces pastorianus
gccatcgtcagcacgcagaatatta

SEQ ID NO: 92754 - DNA, 25 bp, Saccharomyces pastorianus
agtaagcaactctggatccccaatc

SEQ ID NO: 92755 - DNA, 25 bp, Saccharomyces pastorianus
gtagagaacatcttcacgcacctga

SEQ ID NO: 92756 - DNA, 25 bp, Saccharomyces pastorianus
ctgcgtcatcttgatcatcgttgta

SEQ ID NO: 92757 - DNA, 25 bp, Saccharomyces pastorianus
atgaggtggacgatgctgctttctt

SEQ ID NO: 92758 - DNA, 25 bp, Saccharomyces pastorianus
gtcgtcatcacctagcaaatctcgt

SEQ ID NO: 92759 - DNA, 25 bp, Saccharomyces pastorianus
ttggccgcgttattgctgttgtaaa

SEQ ID NO: 92760 - DNA, 25 bp, Saccharomyces pastorianus
ttcaagatcatcaccgtcgtcatca

SEQ ID NO: 92761 - DNA, 25 bp, Saccharomyces pastorianus
tggacgatgctgctttcttttcctt

SEQ ID NO: 92762 - DNA, 25 bp, Saccharomyces pastorianus
tttccttttcaagatcatcaccgtc

SEQ ID NO: 92763 - DNA, 25 bp, Saccharomyces pastorianus
tagcaaatctcgttcgtctgcgtca

SEQ ID NO: 92764 - DNA, 25 bp, Saccharomyces pastorianus
gccgcgttattgctgttgtaaactt

SEQ ID NO: 92765 - DNA, 25 bp, Saccharomyces pastorianus
atcatcgttgtagttggccgcgtta

SEQ ID NO: 92766 - DNA, 25 bp, Saccharomyces pastorianus
tcgttcgtctgcgtcatcttgatca

SEQ ID NO: 92767 - DNA, 25 bp, Saccharomyces pastorianus
taattctcggaactttaccttccat

SEQ ID NO: 92768 - DNA, 25 bp, Saccharomyces pastorianus
atgtgctttaaaggctttccatgat

SEQ ID NO: 92769 - DNA, 25 bp, Saccharomyces pastorianus
gagccttctgcattttcgataattc

SEQ ID NO: 92770 - DNA, 25 bp, Saccharomyces pastorianus
cgttctccgtctttagtgaaagcca

SEQ ID NO: 92771 - DNA, 25 bp, Saccharomyces pastorianus
acggattgtcgtttggctggctcac

SEQ ID NO: 92772 - DNA, 25 bp, Saccharomyces pastorianus
catctggaattttggttgactggaa

SEQ ID NO: 92773 - DNA, 25 bp, Saccharomyces pastorianus
gacggagtagttcttgagccttctg

SEQ ID NO: 92774 - DNA, 25 bp, Saccharomyces pastorianus
taccttccataatagctaccgcaga

SEQ ID NO: 92775 - DNA, 25 bp, Saccharomyces pastorianus
agtgaaagccactacagacggagta

SEQ ID NO: 92776 - DNA, 25 bp, Saccharomyces pastorianus
ggctggctcaccaactaaacgttct

SEQ ID NO: 92777 - DNA, 25 bp, Saccharomyces pastorianus
atcaataccgataactgcatctgga

SEQ ID NO: 92778 - DNA, 25 bp, Saccharomyces pastorianus
attggtttctcggattcaagctgga

SEQ ID NO: 92779 - DNA, 25 bp, Saccharomyces pastorianus
caaattttttcaactgcggcatcag

SEQ ID NO: 92780 - DNA, 25 bp, Saccharomyces pastorianus
tgcggcatcaggtcaaacatcggtg

SEQ ID NO: 92781 - DNA, 25 bp, Saccharomyces pastorianus
gaccagctagctaatgacacagaaa

SEQ ID NO: 92782 - DNA, 25 bp, Saccharomyces pastorianus
ggaatgccatcgaaaccgctaacaa

SEQ ID NO: 92783 - DNA, 25 bp, Saccharomyces pastorianus
gagcgtctgggctatctgatacgga

SEQ ID NO: 92784 - DNA, 25 bp, Saccharomyces pastorianus
tttcagcaaaagatctcgccagcca

SEQ ID NO: 92785 - DNA, 25 bp, Saccharomyces pastorianus
gcattcctccagctccaaaaggtat

SEQ ID NO: 92786 - DNA, 25 bp, Saccharomyces pastorianus
gtaattttactcttgcgggcattcc

SEQ ID NO: 92787 - DNA, 25 bp, Saccharomyces pastorianus
cacaaagactcttccatcactgttg

SEQ ID NO: 92788 - DNA, 25 bp, Saccharomyces pastorianus
gaacggcatcatcaacgtttcagca

SEQ ID NO: 92789 - DNA, 25 bp, Saccharomyces pastorianus
cttatcgaaccctacaacaacatta

SEQ ID NO: 92790 - DNA, 25 bp, Saccharomyces pastorianus
ccccattgtttacagagtgccgttt

SEQ ID NO: 92791 - DNA, 25 bp, Saccharomyces pastorianus
agattttatttattgcgtagcttca

SEQ ID NO: 92792 - DNA, 25 bp, Saccharomyces pastorianus
gaaagcaaaaatgggttccgccttg

SEQ ID NO: 92793 - DNA, 25 bp, Saccharomyces pastorianus
gagattacaccaaactatcccagtg

SEQ ID NO: 92794 - DNA, 25 bp, Saccharomyces pastorianus
gaaagctggctttgtctccaaaaca

SEQ ID NO: 92795 - DNA, 25 bp, Saccharomyces pastorianus
cagtgatcattgtcacatcctgtga

SEQ ID NO: 92796 - DNA, 25 bp, Saccharomyces pastorianus
atggatcctgttatgggtgacgaag

SEQ ID NO: 92797 - DNA, 25 bp, Saccharomyces pastorianus
attactaggagctatgcttcaggaa

SEQ ID NO: 92798 - DNA, 25 bp, Saccharomyces pastorianus
tttgtctccaaaacagctagtcgat

SEQ ID NO: 92799 - DNA, 25 bp, Saccharomyces pastorianus
ttctgctttgttattggatcgagtg

SEQ ID NO: 92800 - DNA, 25 bp, Saccharomyces pastorianus
ggaagctaacactaccgctatgacg

SEQ ID NO: 92801 - DNA, 25 bp, Saccharomyces pastorianus
gtacttacaagtgcttggttttcca

SEQ ID NO: 92802 - DNA, 25 bp, Saccharomyces pastorianus
gtgcgggcacactacttcataatgg

SEQ ID NO: 92803 - DNA, 25 bp, Saccharomyces pastorianus
tgcaaatttgccctcattacgtgat

SEQ ID NO: 92804 - DNA, 25 bp, Saccharomyces pastorianus
aaacggctaacaacgcaagaactca

SEQ ID NO: 92805 - DNA, 25 bp, Saccharomyces pastorianus
acaccactctaactgatgctcgtaa

SEQ ID NO: 92806 - DNA, 25 bp, Saccharomyces pastorianus
aatacgactattttcctagtgggat

SEQ ID NO: 92807 - DNA, 25 bp, Saccharomyces pastorianus
ttttcttgtcatgatcgtcgagctc

SEQ ID NO: 92808 - DNA, 25 bp, Saccharomyces pastorianus
catacggacttacctcactttagga

SEQ ID NO: 92809 - DNA, 25 bp, Saccharomyces pastorianus
gggcatagtttctacttcactcatt

SEQ ID NO: 92810 - DNA, 25 bp, Saccharomyces pastorianus
aaaacttggcgatgccaccgtcaac

SEQ ID NO: 92811 - DNA, 25 bp, Saccharomyces pastorianus
gtgttgagaccagacctattattca

SEQ ID NO: 92812 - DNA, 25 bp, Saccharomyces pastorianus
acctcattaggtgctgcttacggta

SEQ ID NO: 92813 - DNA, 25 bp, Saccharomyces pastorianus
tttgggtctatacggtttgattgtt

SEQ ID NO: 92814 - DNA, 25 bp, Saccharomyces pastorianus
tgaagttttgggtctatacggtttg

SEQ ID NO: 92815 - DNA, 25 bp, Saccharomyces pastorianus
ctgcaattatcttcacctcattagg

SEQ ID NO: 92816 - DNA, 25 bp, Saccharomyces pastorianus
ttttgctgaagttttgggtctatac

SEQ ID NO: 92817 - DNA, 25 bp, Saccharomyces pastorianus
ttgttattcgttgggtcaaaagcaa

SEQ ID NO: 92818 - DNA, 25 bp, Saccharomyces pastorianus
gagaccagacctattattcaagaac

SEQ ID NO: 92819 - DNA, 25 bp, Saccharomyces pastorianus
gaccagacctattattcaagaacat

SEQ ID NO: 92820 - DNA, 25 bp, Saccharomyces pastorianus
agacctattattcaagaacattgtt

SEQ ID NO: 92821 - DNA, 25 bp, Saccharomyces pastorianus
ctcattaggtgctgcttacggtact

SEQ ID NO: 92822 - DNA, 25 bp, Saccharomyces pastorianus
ttatggctggtatcattgccattta

SEQ ID NO: 92823 - DNA, 25 bp, Saccharomyces pastorianus
gaggttcctctcaacaaccaagatt

SEQ ID NO: 92824 - DNA, 25 bp, Saccharomyces pastorianus
gtgttggtatctgtgccacttgtgt

SEQ ID NO: 92825 - DNA, 25 bp, Saccharomyces pastorianus
gtgccacttgtgtgttgagaccaga

SEQ ID NO: 92826 - DNA, 25 bp, Saccharomyces pastorianus
acggtttgattgttgctttgttgtt

SEQ ID NO: 92827 - DNA, 25 bp, Saccharomyces pastorianus
tacgcccctttctttggtgccattg

SEQ ID NO: 92828 - DNA, 25 bp, Saccharomyces pastorianus
ttcgtcggtatgattttgattttga

SEQ ID NO: 92829 - DNA, 25 bp, Saccharomyces pastorianus
actgaattgtgtcctgtctacgccc

SEQ ID NO: 92830 - DNA, 25 bp, Saccharomyces pastorianus
tgattttgatttttgctgaagtttt

SEQ ID NO: 92831 - DNA, 25 bp, Saccharomyces pastorianus
acattgttcctgttattatggctgg

SEQ ID NO: 92832 - DNA, 25 bp, Saccharomyces pastorianus
gatgcaggtgttagaggttcctctc

SEQ ID NO: 92833 - DNA, 25 bp, Saccharomyces pastorianus
ggctgctaacttgagacaattgaag

SEQ ID NO: 92834 - DNA, 25 bp, Saccharomyces pastorianus
cttggatgtcgttcaacaggctgct

SEQ ID NO: 92835 - DNA, 25 bp, Saccharomyces pastorianus
tgttccatatgtctttgttccatct

SEQ ID NO: 92836 - DNA, 25 bp, Saccharomyces pastorianus
tgtcgttcaacaggctgctaacttg

SEQ ID NO: 92837 - DNA, 25 bp, Saccharomyces pastorianus
atatgtctttgttccatctagagtt

SEQ ID NO: 92838 - DNA, 25 bp, Saccharomyces pastorianus
acaaatcttggatgtcgttcaacag

SEQ ID NO: 92839 - DNA, 25 bp, Saccharomyces pastorianus
aacaggctgctaacttgagacaatt

SEQ ID NO: 92840 - DNA, 25 bp, Saccharomyces pastorianus
gaatgttccatatgtctttgttcca

SEQ ID NO: 92841 - DNA, 25 bp, Saccharomyces pastorianus
ggatgtcgttcaacaggctgctaac

SEQ ID NO: 92842 - DNA, 25 bp, Saccharomyces pastorianus
gtgaagacaagaatgttccatatgt

SEQ ID NO: 92843 - DNA, 25 bp, Saccharomyces pastorianus
tgtctttgttccatctagagttgct

SEQ ID NO: 92844 - DNA, 25 bp, Saccharomyces pastorianus
gcattaacccaacaaatcttggatg

SEQ ID NO: 92845 - DNA, 25 bp, Saccharomyces pastorianus
ctttaggtagagcttgtggtgtttc

SEQ ID NO: 92846 - DNA, 25 bp, Saccharomyces pastorianus
gagcttgtggtgtttctagaccagt

SEQ ID NO: 92847 - DNA, 25 bp, Saccharomyces pastorianus
tgctgactgtgaacctattgaaatc

SEQ ID NO: 92848 - DNA, 25 bp, Saccharomyces pastorianus
gatgcttctgctatcaagacccaaa

SEQ ID NO: 92849 - DNA, 25 bp, Saccharomyces pastorianus
cagttattgctgcttctattaccac

SEQ ID NO: 92850 - DNA, 25 bp, Saccharomyces pastorianus
atggctgctgactgtgaacctattg

SEQ ID NO: 92851 - DNA, 25 bp, Saccharomyces pastorianus
gatgctgcattaacccaacaaatct

SEQ ID NO: 92852 - DNA, 25 bp, Saccharomyces pastorianus
ctgctatcaagacccaaatctacgc

SEQ ID NO: 92853 - DNA, 25 bp, Saccharomyces pastorianus
gtgtttctagaccagttattgctgc

SEQ ID NO: 92854 - DNA, 25 bp, Saccharomyces pastorianus
aacgatgcttctgctatcaagaccc

SEQ ID NO: 92855 - DNA, 25 bp, Saccharomyces pastorianus
atctgcaggtgccaaatcaaccgta

SEQ ID NO: 92856 - DNA, 25 bp, Saccharomyces pastorianus
gggtatttgtactcacttaggttgt

SEQ ID NO: 92857 - DNA, 25 bp, Saccharomyces pastorianus
atttagcggctatcccattgggtaa

SEQ ID NO: 92858 - DNA, 25 bp, Saccharomyces pastorianus
tatgggtcttttgtcatctgcaggt

SEQ ID NO: 92859 - DNA, 25 bp, Saccharomyces pastorianus
gataaaggccgttcttatgcttact

SEQ ID NO: 92860 - DNA, 25 bp, Saccharomyces pastorianus
tatttcatctatgaccgctactgcc

SEQ ID NO: 92861 - DNA, 25 bp, Saccharomyces pastorianus
cgctactgccgatgttttggctatg

SEQ ID NO: 92862 - DNA, 25 bp, Saccharomyces pastorianus
cgtacaggaccccaaattttgatga

SEQ ID NO: 92863 - DNA, 25 bp, Saccharomyces pastorianus
tatgcttactttatggtcggtgcta

SEQ ID NO: 92864 - DNA, 25 bp, Saccharomyces pastorianus
aagccaacagtgtggatatgtccgc

SEQ ID NO: 92865 - DNA, 25 bp, Saccharomyces pastorianus
tggctagcaaatccacgtacaggac

SEQ ID NO: 92866 - DNA, 25 bp, Saccharomyces pastorianus
gtggtgggtattggaactgctcccc

SEQ ID NO: 92867 - DNA, 25 bp, Saccharomyces pastorianus
gtcagtttacattggtcagtctatt

SEQ ID NO: 92868 - DNA, 25 bp, Saccharomyces pastorianus
gtaaggcaattgttccaagatttgg

SEQ ID NO: 92869 - DNA, 25 bp, Saccharomyces pastorianus
ggcaaaattttcatacacctaacct

SEQ ID NO: 92870 - DNA, 25 bp, Saccharomyces pastorianus
gaactgctccccattggaatacgaa

SEQ ID NO: 92871 - DNA, 25 bp, Saccharomyces pastorianus
gaaggatgcttttactcttaaatgt

SEQ ID NO: 92872 - DNA, 25 bp, Saccharomyces pastorianus
cacctaacctcggaagatctcgtta

SEQ ID NO: 92873 - DNA, 25 bp, Saccharomyces pastorianus
gttatgtacccgaatatgtcagttt

SEQ ID NO: 92874 - DNA, 25 bp, Saccharomyces pastorianus
agggcaggaactccacatgggtcaa

SEQ ID NO: 92875 - DNA, 25 bp, Saccharomyces pastorianus
ggactgggatagtaattcctggaca

SEQ ID NO: 92876 - DNA, 25 bp, Saccharomyces pastorianus
tgatcgtaggtatagaccggacaat

SEQ ID NO: 92877 - DNA, 25 bp, Saccharomyces pastorianus
tgggcccaggtattgttagcggttt

SEQ ID NO: 92878 - DNA, 25 bp, Saccharomyces pastorianus
aagggctccctagctactggagaat

SEQ ID NO: 92879 - DNA, 25 bp, Saccharomyces pastorianus
attgcagtactctgcgggtgtatac

SEQ ID NO: 92880 - DNA, 25 bp, Saccharomyces pastorianus
tagaggccttttgatgttagcagaa

SEQ ID NO: 92881 - DNA, 25 bp, Saccharomyces pastorianus
ctaagggtactgttgacattgcgaa

SEQ ID NO: 92882 - DNA, 25 bp, Saccharomyces pastorianus
gtggtctctacaggatctgacatta

SEQ ID NO: 92883 - DNA, 25 bp, Saccharomyces pastorianus
aacacatgtggatatcttgactgat

SEQ ID NO: 92884 - DNA, 25 bp, Saccharomyces pastorianus
ggcattatccgccaagtacaatttt

SEQ ID NO: 92885 - DNA, 25 bp, Saccharomyces pastorianus
agaattgtcatgcaagggctcccta

SEQ ID NO: 92886 - DNA, 25 bp, Saccharomyces pastorianus
gacattacgaatgcacacggtgtgg

SEQ ID NO: 92887 - DNA, 25 bp, Saccharomyces pastorianus
gaaccgtggatgatgtggtctctac

SEQ ID NO: 92888 - DNA, 25 bp, Saccharomyces pastorianus
gaaacatctttctaccagattagag

SEQ ID NO: 92889 - DNA, 25 bp, Saccharomyces pastorianus
attagagtacaaacgcatgaaatcc

SEQ ID NO: 92890 - DNA, 25 bp, Saccharomyces pastorianus
gatgcatgtttgttccttattggtt

SEQ ID NO: 92891 - DNA, 25 bp, Saccharomyces pastorianus
atgatgcatgtttgttccttattgg

SEQ ID NO: 92892 - DNA, 25 bp, Saccharomyces pastorianus
tattggttagctttgatgttgtgaa

SEQ ID NO: 92893 - DNA, 25 bp, Saccharomyces pastorianus
agtctgtgaaacatctttctaccag

SEQ ID NO: 92894 - DNA, 25 bp, Saccharomyces pastorianus
gttagctttgatgttgtgaagtcat

SEQ ID NO: 92895 - DNA, 25 bp, Saccharomyces pastorianus
tgttgtgaagtcattgacacagtct

SEQ ID NO: 92896 - DNA, 25 bp, Saccharomyces pastorianus
accagattagagtacaaacgcatga

SEQ ID NO: 92897 - DNA, 25 bp, Saccharomyces pastorianus
gcatgtttgttccttattggttagc

SEQ ID NO: 92898 - DNA, 25 bp, Saccharomyces pastorianus
gttccttattggttagctttgatgt

SEQ ID NO: 92899 - DNA, 25 bp, Saccharomyces pastorianus
aacatgcatcatgaagtgctcagaa

SEQ ID NO: 92900 - DNA, 25 bp, Saccharomyces pastorianus
ttcttgaagcatagcgaacgtgtag

SEQ ID NO: 92901 - DNA, 25 bp, Saccharomyces pastorianus
ggatttcatgcgtttgtactctaat

SEQ ID NO: 92902 - DNA, 25 bp, Saccharomyces pastorianus
agcgaacgtgtagggcagcgtttcc

SEQ ID NO: 92903 - DNA, 25 bp, Saccharomyces pastorianus
aagtgctcagaaaagttcttgaagc

SEQ ID NO: 92904 - DNA, 25 bp, Saccharomyces pastorianus
agactgtgtcaatgacttcacaaca

SEQ ID NO: 92905 - DNA, 25 bp, Saccharomyces pastorianus
gacttcacaacatcaaagctaacca

SEQ ID NO: 92906 - DNA, 25 bp, Saccharomyces pastorianus
tgtagggcagcgtttccaagaacaa

SEQ ID NO: 92907 - DNA, 25 bp, Saccharomyces pastorianus
ggtagaaagatgtttcacagactgt

SEQ ID NO: 92908 - DNA, 25 bp, Saccharomyces pastorianus
taaccaataaggaacaaacatgcat

SEQ ID NO: 92909 - DNA, 25 bp, Saccharomyces pastorianus
atgcgtttgtactctaatctggtag

SEQ ID NO: 92910 - DNA, 25 bp, Saccharomyces pastorianus
atatcgtaccggagaactcaccgct

SEQ ID NO: 92911 - DNA, 25 bp, Saccharomyces pastorianus
cagcgtgttctcaagtcgtttcaat

SEQ ID NO: 92912 - DNA, 25 bp, Saccharomyces pastorianus
ttcaaacaatcctcagatgcctgtc

SEQ ID NO: 92913 - DNA, 25 bp, Saccharomyces pastorianus
caaatcgacctttctacctgggata

SEQ ID NO: 92914 - DNA, 25 bp, Saccharomyces pastorianus
aattgacttgtcctatcacctgcaa

SEQ ID NO: 92915 - DNA, 25 bp, Saccharomyces pastorianus
gcaaaccttacgaagcaccattgat

SEQ ID NO: 92916 - DNA, 25 bp, Saccharomyces pastorianus
aaactcctctcgacgtacgaatcgg

SEQ ID NO: 92917 - DNA, 25 bp, Saccharomyces pastorianus
gtcgcagatattactagcacctaca

SEQ ID NO: 92918 - DNA, 25 bp, Saccharomyces pastorianus
aacttgtgtaataccggatctgcaa

SEQ ID NO: 92919 - DNA, 25 bp, Saccharomyces pastorianus
gaatcggaatccaactcatttgacg

SEQ ID NO: 92920 - DNA, 25 bp, Saccharomyces pastorianus
agagattgcccgcaagcagcgtgtt

SEQ ID NO: 92921 - DNA, 25 bp, Saccharomyces pastorianus
agttgcgatgcaccggtctttatac

SEQ ID NO: 92922 - DNA, 25 bp, Saccharomyces pastorianus
gttgtccatcgtttagtgttgttct

SEQ ID NO: 92923 - DNA, 25 bp, Saccharomyces pastorianus
gtacttttcgtcaaggagcttctcg

SEQ ID NO: 92924 - DNA, 25 bp, Saccharomyces pastorianus
gtcaggatatcgttgatgcccagtt

SEQ ID NO: 92925 - DNA, 25 bp, Saccharomyces pastorianus
agtttcctgtttccatttgccacgt

SEQ ID NO: 92926 - DNA, 25 bp, Saccharomyces pastorianus
acgttgctttgccttcttaaatttg

SEQ ID NO: 92927 - DNA, 25 bp, Saccharomyces pastorianus
agatccacttttgccagcatttgca

SEQ ID NO: 92928 - DNA, 25 bp, Saccharomyces pastorianus
gacctgcgttttcttgaatcgatcg

SEQ ID NO: 92929 - DNA, 25 bp, Saccharomyces pastorianus
ataccgttcttcaatatctcatcct

SEQ ID NO: 92930 - DNA, 25 bp, Saccharomyces pastorianus
gatatcatgcatttccaaaccgtgt

SEQ ID NO: 92931 - DNA, 25 bp, Saccharomyces pastorianus
atcatccttatttgttcgacctgcg

SEQ ID NO: 92932 - DNA, 25 bp, Saccharomyces pastorianus
gtgctactataactacgactacgcc

SEQ ID NO: 92933 - DNA, 25 bp, Saccharomyces pastorianus
ggatctgctggtaccagtgctacta

SEQ ID NO: 92934 - DNA, 25 bp, Saccharomyces pastorianus
ataaagaccggtgcatcgcaactgc

SEQ ID NO: 92935 - DNA, 25 bp, Saccharomyces pastorianus
gaagctattcaagagtcccgatggt

SEQ ID NO: 92936 - DNA, 25 bp, Saccharomyces pastorianus
gacaacttagtctacacggtttgga

SEQ ID NO: 92937 - DNA, 25 bp, Saccharomyces pastorianus
gatatcgagaagctccttgacgaaa

SEQ ID NO: 92938 - DNA, 25 bp, Saccharomyces pastorianus
cgaaaggtcattggcacggacgact

SEQ ID NO: 92939 - DNA, 25 bp, Saccharomyces pastorianus
caacgatatcctgaccatagttaag

SEQ ID NO: 92940 - DNA, 25 bp, Saccharomyces pastorianus
gagtcccgatggtagcattatcaag

SEQ ID NO: 92941 - DNA, 25 bp, Saccharomyces pastorianus
agcgttcatgaactgcagctgattc

SEQ ID NO: 92942 - DNA, 25 bp, Saccharomyces pastorianus
acatggcgcattcaatggacccaaa

SEQ ID NO: 92943 - DNA, 25 bp, Saccharomyces pastorianus
gttgatgagcacgttaccaggtggt

SEQ ID NO: 92944 - DNA, 25 bp, Saccharomyces pastorianus
ggtgttatcttagtttttattctag

SEQ ID NO: 92945 - DNA, 25 bp, Saccharomyces pastorianus
gtatcgccatcatttctaccattat

SEQ ID NO: 92946 - DNA, 25 bp, Saccharomyces pastorianus
tatcttagtttttattctagtcggt

SEQ ID NO: 92947 - DNA, 25 bp, Saccharomyces pastorianus
tgatgagcacgttaccaggtggtgt

SEQ ID NO: 92948 - DNA, 25 bp, Saccharomyces pastorianus
cgccatcatttctaccattatctac

SEQ ID NO: 92949 - DNA, 25 bp, Saccharomyces pastorianus
ttgtatcgccatcatttctaccatt

SEQ ID NO: 92950 - DNA, 25 bp, Saccharomyces pastorianus
gatgagcacgttaccaggtggtgtt

SEQ ID NO: 92951 - DNA, 25 bp, Saccharomyces pastorianus
atcgccatcatttctaccattatct

SEQ ID NO: 92952 - DNA, 25 bp, Saccharomyces pastorianus
ggtttggcttgtatcgccatcattt

SEQ ID NO: 92953 - DNA, 25 bp, Saccharomyces pastorianus
ttgatgagcacgttaccaggtggtg

SEQ ID NO: 92954 - DNA, 25 bp, Saccharomyces pastorianus
tggtacctctagtattctccatggt

SEQ ID NO: 92955 - DNA, 25 bp, Saccharomyces pastorianus
gtttaccaatactcacgtggctgct

SEQ ID NO: 92956 - DNA, 25 bp, Saccharomyces pastorianus
tacagtgaaccgttcccttggtatg

SEQ ID NO: 92957 - DNA, 25 bp, Saccharomyces pastorianus
tatttccgccgtcgatacgattttt

SEQ ID NO: 92958 - DNA, 25 bp, Saccharomyces pastorianus
ttggacccgatgactttcaatctca

SEQ ID NO: 92959 - DNA, 25 bp, Saccharomyces pastorianus
ctttcaggaatacctctccgatatt

SEQ ID NO: 92960 - DNA, 25 bp, Saccharomyces pastorianus
gccgttgccgcccataataaatatc

SEQ ID NO: 92961 - DNA, 25 bp, Saccharomyces pastorianus
gtgagaaacatattagccgccgggc

SEQ ID NO: 92962 - DNA, 25 bp, Saccharomyces pastorianus
aggattatctttccactatttccgc

SEQ ID NO: 92963 - DNA, 25 bp, Saccharomyces pastorianus
ccacctctgcgtttactaagttcaa

SEQ ID NO: 92964 - DNA, 25 bp, Saccharomyces pastorianus
tacacgctcgatttctgtttaccaa

SEQ ID NO: 92965 - DNA, 25 bp, Saccharomyces pastorianus
aaaaccctcgagacaagcaatggat

SEQ ID NO: 92966 - DNA, 25 bp, Saccharomyces pastorianus
tgctgatcaaggcaagtgcgctttt

SEQ ID NO: 92967 - DNA, 25 bp, Saccharomyces pastorianus
ggattcgtgacttgattgaagctca

SEQ ID NO: 92968 - DNA, 25 bp, Saccharomyces pastorianus
agaagatttcgacccgagctggaaa

SEQ ID NO: 92969 - DNA, 25 bp, Saccharomyces pastorianus
gaagtcgtacctccatttgaaaaca

SEQ ID NO: 92970 - DNA, 25 bp, Saccharomyces pastorianus
tagggtcggcgatatctggattctc

SEQ ID NO: 92971 - DNA, 25 bp, Saccharomyces pastorianus
atgggcacacatggatacaacttta

SEQ ID NO: 92972 - DNA, 25 bp, Saccharomyces pastorianus
gaccgcatttatatcgcatctttat

SEQ ID NO: 92973 - DNA, 25 bp, Saccharomyces pastorianus
aaatgggtgatgtgcctatcggcat

SEQ ID NO: 92974 - DNA, 25 bp, Saccharomyces pastorianus
ttctcgcagatgaacactacgccat

SEQ ID NO: 92975 - DNA, 25 bp, Saccharomyces pastorianus
ggccgacgcaatgaccgcatttata

SEQ ID NO: 92976 - DNA, 25 bp, Saccharomyces pastorianus
gtgagagccaacacattattgcatt

SEQ ID NO: 92977 - DNA, 25 bp, Saccharomyces pastorianus
tgcattaccgctacagatcccactt

SEQ ID NO: 92978 - DNA, 25 bp, Saccharomyces pastorianus
taagggctcattacccgggaaagag

SEQ ID NO: 92979 - DNA, 25 bp, Saccharomyces pastorianus
gatgttcgcagttttcatatttgtg

SEQ ID NO: 92980 - DNA, 25 bp, Saccharomyces pastorianus
atgacagcactattctgccttgaat

SEQ ID NO: 92981 - DNA, 25 bp, Saccharomyces pastorianus
attattgcattaccgctacagatcc

SEQ ID NO: 92982 - DNA, 25 bp, Saccharomyces pastorianus
accgttaccttatatagatgttcgc

SEQ ID NO: 92983 - DNA, 25 bp, Saccharomyces pastorianus
gcactattctgccttgaattgagaa

SEQ ID NO: 92984 - DNA, 25 bp, Saccharomyces pastorianus
tattatcaattactggaaagggttc

SEQ ID NO: 92985 - DNA, 25 bp, Saccharomyces pastorianus
tcagatttttctgttataccgttac

SEQ ID NO: 92986 - DNA, 25 bp, Saccharomyces pastorianus
gcagttttcatatttgtgagagcca

SEQ ID NO: 92987 - DNA, 25 bp, Saccharomyces pastorianus
aagtttctggtaatgctgctgctgc

SEQ ID NO: 92988 - DNA, 25 bp, Saccharomyces pastorianus
aaggcattcgtggatttctgattag

SEQ ID NO: 92989 - DNA, 25 bp, Saccharomyces pastorianus
agagttcttcgaaagtggtgctgtc

SEQ ID NO: 92990 - DNA, 25 bp, Saccharomyces pastorianus
gatgtctccaaattggatctactgg

SEQ ID NO: 92991 - DNA, 25 bp, Saccharomyces pastorianus
aatccctatgactttttctcagaac

SEQ ID NO: 92992 - DNA, 25 bp, Saccharomyces pastorianus
tccgcatgttttgctattttagccc

SEQ ID NO: 92993 - DNA, 25 bp, Saccharomyces pastorianus
attttagccctagcagatgtctcca

SEQ ID NO: 92994 - DNA, 25 bp, Saccharomyces pastorianus
tatcttagatgctttaatccctatg

SEQ ID NO: 92995 - DNA, 25 bp, Saccharomyces pastorianus
gaactggctctagattcacctgtta

SEQ ID NO: 92996 - DNA, 25 bp, Saccharomyces pastorianus
agatgcgacctttgagcgtttacaa

SEQ ID NO: 92997 - DNA, 25 bp, Saccharomyces pastorianus
ggatctgaacatcaacctgtagagg

SEQ ID NO: 92998 - DNA, 25 bp, Saccharomyces pastorianus
tgagttcggtcatccagaatggttg

SEQ ID NO: 92999 - DNA, 25 bp, Saccharomyces pastorianus
atcgtgttgaactcagatcgtgctg

SEQ ID NO: 93000 - DNA, 25 bp, Saccharomyces pastorianus
tattgaccgtggtattgctctacac

SEQ ID NO: 93001 - DNA, 25 bp, Saccharomyces pastorianus
tgatcccttactgcgttaccagaat

SEQ ID NO: 93002 - DNA, 25 bp, Saccharomyces pastorianus
gggaggcgaggcttatttgaacttc

SEQ ID NO: 93003 - DNA, 25 bp, Saccharomyces pastorianus
ttttcaacttccatcctacaaacag

SEQ ID NO: 93004 - DNA, 25 bp, Saccharomyces pastorianus
aatttggctgatgatcccttactgc

SEQ ID NO: 93005 - DNA, 25 bp, Saccharomyces pastorianus
ggaaccatccatcgttattgaccgt

SEQ ID NO: 93006 - DNA, 25 bp, Saccharomyces pastorianus
atgattaggctgatcactcactcgc

SEQ ID NO: 93007 - DNA, 25 bp, Saccharomyces pastorianus
gaattctttaccaccgatttggaat

SEQ ID NO: 93008 - DNA, 25 bp, Saccharomyces pastorianus
gatgccgctatgtacaccgatatga

SEQ ID NO: 93009 - DNA, 25 bp, Saccharomyces pastorianus
ttcagcacgaaatgtcgagcgatct

SEQ ID NO: 93010 - DNA, 25 bp, Saccharomyces pastorianus
gacgaggcttcgagcttttctatta

SEQ ID NO: 93011 - DNA, 25 bp, Saccharomyces pastorianus
atcactttattatttcttcagcacg

SEQ ID NO: 93012 - DNA, 25 bp, Saccharomyces pastorianus
taatgcggaaagtctcagttgcgag

SEQ ID NO: 93013 - DNA, 25 bp, Saccharomyces pastorianus
gcgagtgattgcagacagttgtatg

SEQ ID NO: 93014 - DNA, 25 bp, Saccharomyces pastorianus
aaagtctcagttgcgagtgattgca

SEQ ID NO: 93015 - DNA, 25 bp, Saccharomyces pastorianus
attcgatatatctggtatcacttta

SEQ ID NO: 93016 - DNA, 25 bp, Saccharomyces pastorianus
caaacggaggttagagacgaggctt

SEQ ID NO: 93017 - DNA, 25 bp, Saccharomyces pastorianus
caggaaccaggaataagtagcgata

SEQ ID NO: 93018 - DNA, 25 bp, Saccharomyces pastorianus
cgagcgatctcgatgcaggaaccag

SEQ ID NO: 93019 - DNA, 25 bp, Saccharomyces pastorianus
tttttctctctttttaataatgcgg

SEQ ID NO: 93020 - DNA, 25 bp, Saccharomyces pastorianus
gcaaacagcgttcgattccactttc

SEQ ID NO: 93021 - DNA, 25 bp, Saccharomyces pastorianus
gttttgccaattccggagctagatg

SEQ ID NO: 93022 - DNA, 25 bp, Saccharomyces pastorianus
aagtctcgacaacttcattcttacc

SEQ ID NO: 93023 - DNA, 25 bp, Saccharomyces pastorianus
ggatcatctaggtgttgttgcttac

SEQ ID NO: 93024 - DNA, 25 bp, Saccharomyces pastorianus
aattgtgcccgaatccagtgatcct

SEQ ID NO: 93025 - DNA, 25 bp, Saccharomyces pastorianus
ttacccacgcctgttctagaagatg

SEQ ID NO: 93026 - DNA, 25 bp, Saccharomyces pastorianus
agtggaatctttcttttcgtcaagc

SEQ ID NO: 93027 - DNA, 25 bp, Saccharomyces pastorianus
agctagatgccgctgtagtggaatc

SEQ ID NO: 93028 - DNA, 25 bp, Saccharomyces pastorianus
gaatggacatccttgtttgacaatg

SEQ ID NO: 93029 - DNA, 25 bp, Saccharomyces pastorianus
accactgacgatgtttcattggctg

SEQ ID NO: 93030 - DNA, 25 bp, Saccharomyces pastorianus
ttctctggtaccatccaatctggaa

SEQ ID NO: 93031 - DNA, 25 bp, Saccharomyces pastorianus
caacgcccggacaaataattctaat

SEQ ID NO: 93032 - DNA, 25 bp, Saccharomyces pastorianus
gcgtggcaagtcgacacagcaacgt

SEQ ID NO: 93033 - DNA, 25 bp, Saccharomyces pastorianus
tgttctccggtaacggaacacggca

SEQ ID NO: 93034 - DNA, 25 bp, Saccharomyces pastorianus
atgggtgctttgtgcgtccatgcat

SEQ ID NO: 93035 - DNA, 25 bp, Saccharomyces pastorianus
gttctacagcttgaatacatgccgt

SEQ ID NO: 93036 - DNA, 25 bp, Saccharomyces pastorianus
ggcatcatcgattgttctccggtaa

SEQ ID NO: 93037 - DNA, 25 bp, Saccharomyces pastorianus
cacggcaatatttctgttctacagc

SEQ ID NO: 93038 - DNA, 25 bp, Saccharomyces pastorianus
acatgccgtggatctgtttatcaaa

SEQ ID NO: 93039 - DNA, 25 bp, Saccharomyces pastorianus
atgcactttattccccgaagatctt

SEQ ID NO: 93040 - DNA, 25 bp, Saccharomyces pastorianus
gaaaggcattgtcaacgcccggaca

SEQ ID NO: 93041 - DNA, 25 bp, Saccharomyces pastorianus
gataatgtcatgtagcgtggcaagt

SEQ ID NO: 93042 - DNA, 25 bp, Saccharomyces pastorianus
taaacagatccacggcatgtattca

SEQ ID NO: 93043 - DNA, 25 bp, Saccharomyces pastorianus
tttgataaacagatccacggcatgt

SEQ ID NO: 93044 - DNA, 25 bp, Saccharomyces pastorianus
acggcatgtattcaagctgtagaac

SEQ ID NO: 93045 - DNA, 25 bp, Saccharomyces pastorianus
gataaacagatccacggcatgtatt

SEQ ID NO: 93046 - DNA, 25 bp, Saccharomyces pastorianus
tctttgataaacagatccacggcat

SEQ ID NO: 93047 - DNA, 25 bp, Saccharomyces pastorianus
acagatccacggcatgtattcaagc

SEQ ID NO: 93048 - DNA, 25 bp, Saccharomyces pastorianus
gcatgtattcaagctgtagaacaga

SEQ ID NO: 93049 - DNA, 25 bp, Saccharomyces pastorianus
tccacggcatgtattcaagctgtag

SEQ ID NO: 93050 - DNA, 25 bp, Saccharomyces pastorianus
gatccacggcatgtattcaagctgt

SEQ ID NO: 93051 - DNA, 25 bp, Saccharomyces pastorianus
agatccacggcatgtattcaagctg

SEQ ID NO: 93052 - DNA, 25 bp, Saccharomyces pastorianus
ccacggcatgtattcaagctgtaga

SEQ ID NO: 93053 - DNA, 25 bp, Saccharomyces pastorianus
tgctaaggctctttatgccggctta

SEQ ID NO: 93054 - DNA, 25 bp, Saccharomyces pastorianus
atattttcccacatagtccgtttct

SEQ ID NO: 93055 - DNA, 25 bp, Saccharomyces pastorianus
gatgtgacgagctcaaactttcaaa

SEQ ID NO: 93056 - DNA, 25 bp, Saccharomyces pastorianus
gtgccatctctacagttgcgacaaa

SEQ ID NO: 93057 - DNA, 25 bp, Saccharomyces pastorianus
cgccatctccttccattgattaaaa

SEQ ID NO: 93058 - DNA, 25 bp, Saccharomyces pastorianus
ggcttttactctgggtttgcaacta

SEQ ID NO: 93059 - DNA, 25 bp, Saccharomyces pastorianus
aatattggcctctatgctatctaaa

SEQ ID NO: 93060 - DNA, 25 bp, Saccharomyces pastorianus
gatcttccaaatactgttcaacgcc

SEQ ID NO: 93061 - DNA, 25 bp, Saccharomyces pastorianus
caaacgcttcttctgcaattactgc

SEQ ID NO: 93062 - DNA, 25 bp, Saccharomyces pastorianus
gacagtacctgctgctgtggtaaca

SEQ ID NO: 93063 - DNA, 25 bp, Saccharomyces pastorianus
tgaacgttgctatacagtttccttt

SEQ ID NO: 93064 - DNA, 25 bp, Saccharomyces pastorianus
attgaatgcaaacctcccgaagaag

SEQ ID NO: 93065 - DNA, 25 bp, Saccharomyces pastorianus
gagtgattctttagctccacttcaa

SEQ ID NO: 93066 - DNA, 25 bp, Saccharomyces pastorianus
atggaaatgatcgtctattggccaa

SEQ ID NO: 93067 - DNA, 25 bp, Saccharomyces pastorianus
ttgcccgaagagtattatcgctact

SEQ ID NO: 93068 - DNA, 25 bp, Saccharomyces pastorianus
gaacacgatgaattaccagcagaga

SEQ ID NO: 93069 - DNA, 25 bp, Saccharomyces pastorianus
gcaaagggcttctactaattgtatc

SEQ ID NO: 93070 - DNA, 25 bp, Saccharomyces pastorianus
ccctctcctcttttagaacacgatg

SEQ ID NO: 93071 - DNA, 25 bp, Saccharomyces pastorianus
ggcacattatccacttctttttgat

SEQ ID NO: 93072 - DNA, 25 bp, Saccharomyces pastorianus
gctccacttcaaactcatgacgata

SEQ ID NO: 93073 - DNA, 25 bp, Saccharomyces pastorianus
aacacaacaagtggcccttcaattg

SEQ ID NO: 93074 - DNA, 25 bp, Saccharomyces pastorianus
atttcctgcataaatcttgcccgaa

SEQ ID NO: 93075 - DNA, 25 bp, Saccharomyces pastorianus
gtctacctagtcttttttggtgcct

SEQ ID NO: 93076 - DNA, 25 bp, Saccharomyces pastorianus
tactgagcgtccgacttttcgataa

SEQ ID NO: 93077 - DNA, 25 bp, Saccharomyces pastorianus
gtagatctcacttttatttttggca

SEQ ID NO: 93078 - DNA, 25 bp, Saccharomyces pastorianus
ggaagattctagtcccgcgagaaga

SEQ ID NO: 93079 - DNA, 25 bp, Saccharomyces pastorianus
gaaactctccttcttttcaatgtgt

SEQ ID NO: 93080 - DNA, 25 bp, Saccharomyces pastorianus
attacctctctttctatttagtcga

SEQ ID NO: 93081 - DNA, 25 bp, Saccharomyces pastorianus
aaagatgctgattttcggtaccaag

SEQ ID NO: 93082 - DNA, 25 bp, Saccharomyces pastorianus
gtgcctttatatactcgctgggatc

SEQ ID NO: 93083 - DNA, 25 bp, Saccharomyces pastorianus
aacgctctgacactttccataacat

SEQ ID NO: 93084 - DNA, 25 bp, Saccharomyces pastorianus
agggtgttaatatcctcgccagtaa

SEQ ID NO: 93085 - DNA, 25 bp, Saccharomyces pastorianus
gggatcaattcaccccaggcaaaat

SEQ ID NO: 93086 - DNA, 25 bp, Saccharomyces pastorianus
gatgttcaaacgagtttgcctattc

SEQ ID NO: 93087 - DNA, 25 bp, Saccharomyces pastorianus
aaaacactgaaagacgctgagccga

SEQ ID NO: 93088 - DNA, 25 bp, Saccharomyces pastorianus
gagtttgcctattcttgaaaccaag

SEQ ID NO: 93089 - DNA, 25 bp, Saccharomyces pastorianus
ggtcatgacaaagatgaacacacta

SEQ ID NO: 93090 - DNA, 25 bp, Saccharomyces pastorianus
ctctgtgtatagtctttcaagcaaa

SEQ ID NO: 93091 - DNA, 25 bp, Saccharomyces pastorianus
ttacaggatgataggtggcgcactt

SEQ ID NO: 93092 - DNA, 25 bp, Saccharomyces pastorianus
agccgacgagaaaatgttacaggat

SEQ ID NO: 93093 - DNA, 25 bp, Saccharomyces pastorianus
gttttctctgtgtatagtctttcaa

SEQ ID NO: 93094 - DNA, 25 bp, Saccharomyces pastorianus
gacgctgagccgacgagaaaatgtt

SEQ ID NO: 93095 - DNA, 25 bp, Saccharomyces pastorianus
gataggtggcgcacttgttgaaagt

SEQ ID NO: 93096 - DNA, 25 bp, Saccharomyces pastorianus
caatctttgtgttttctctgtgtat

SEQ ID NO: 93097 - DNA, 25 bp, Saccharomyces pastorianus
gatactaccgaggagaccgaagtgg

SEQ ID NO: 93098 - DNA, 25 bp, Saccharomyces pastorianus
gcggctaccgtggagctcgatgaaa

SEQ ID NO: 93099 - DNA, 25 bp, Saccharomyces pastorianus
gggactattcactgacaatggcaca

SEQ ID NO: 93100 - DNA, 25 bp, Saccharomyces pastorianus
gatgctgatgaggatgttaacgaaa

SEQ ID NO: 93101 - DNA, 25 bp, Saccharomyces pastorianus
aaatgattataatgcggctaccgtg

SEQ ID NO: 93102 - DNA, 25 bp, Saccharomyces pastorianus
attaacatccagtctaatccgatta

SEQ ID NO: 93103 - DNA, 25 bp, Saccharomyces pastorianus
aattacaaacaccagcaggaggcaa

SEQ ID NO: 93104 - DNA, 25 bp, Saccharomyces pastorianus
gaagaacttgcgtctagaccagtta

SEQ ID NO: 93105 - DNA, 25 bp, Saccharomyces pastorianus
gaacatctaccagcaatctgagggt

SEQ ID NO: 93106 - DNA, 25 bp, Saccharomyces pastorianus
gaattccattaacgaagcctgtgtt

SEQ ID NO: 93107 - DNA, 25 bp, Saccharomyces pastorianus
gtctaatccgattattgcagcaaat

SEQ ID NO: 93108 - DNA, 25 bp, Saccharomyces pastorianus
gaggttgctaggctatccagtttat

SEQ ID NO: 93109 - DNA, 25 bp, Saccharomyces pastorianus
atgaatccgcaggtgctattcaccg

SEQ ID NO: 93110 - DNA, 25 bp, Saccharomyces pastorianus
gcgtgtaccgttctagattccagag

SEQ ID NO: 93111 - DNA, 25 bp, Saccharomyces pastorianus
agcacactataattttacgcccagg

SEQ ID NO: 93112 - DNA, 25 bp, Saccharomyces pastorianus
tattcaccgcactggcaacgacaag

SEQ ID NO: 93113 - DNA, 25 bp, Saccharomyces pastorianus
atttggcgttgaatccttctgggaa

SEQ ID NO: 93114 - DNA, 25 bp, Saccharomyces pastorianus
caaggttcagtttgtctccagcaag

SEQ ID NO: 93115 - DNA, 25 bp, Saccharomyces pastorianus
ttaaacttacaattggcccgggctg

SEQ ID NO: 93116 - DNA, 25 bp, Saccharomyces pastorianus
gatttggcggcaatctgactgctgc

SEQ ID NO: 93117 - DNA, 25 bp, Saccharomyces pastorianus
ggccctctcctaggtgaacggacaa

SEQ ID NO: 93118 - DNA, 25 bp, Saccharomyces pastorianus
aggcaccccagttctctaaggtata

SEQ ID NO: 93119 - DNA, 25 bp, Saccharomyces pastorianus
atgacttcatggtgggtattgcgcc

SEQ ID NO: 93120 - DNA, 25 bp, Saccharomyces pastorianus
tatcgtggacactaggcagaatttt

SEQ ID NO: 93121 - DNA, 25 bp, Saccharomyces pastorianus
acttgatctttcataggtcacacat

SEQ ID NO: 93122 - DNA, 25 bp, Saccharomyces pastorianus
gcaagcaaagttccagcctttctaa

SEQ ID NO: 93123 - DNA, 25 bp, Saccharomyces pastorianus
aatgtcaatgacaggcccttatttc

SEQ ID NO: 93124 - DNA, 25 bp, Saccharomyces pastorianus
cagaattttactttatgcctcaggt

SEQ ID NO: 93125 - DNA, 25 bp, Saccharomyces pastorianus
ggagcctgatcaactacgcaagcaa

SEQ ID NO: 93126 - DNA, 25 bp, Saccharomyces pastorianus
gacgtttttccggtctgtacaacat

SEQ ID NO: 93127 - DNA, 25 bp, Saccharomyces pastorianus
atacctggcaagttactggagcctg

SEQ ID NO: 93128 - DNA, 25 bp, Saccharomyces pastorianus
acgacctgcgttttctatggctgat

SEQ ID NO: 93129 - DNA, 25 bp, Saccharomyces pastorianus
ggtaagagttcagccacaatgcaaa

SEQ ID NO: 93130 - DNA, 25 bp, Saccharomyces pastorianus
aaggcggtattccaaatcttgccag

SEQ ID NO: 93131 - DNA, 25 bp, Saccharomyces pastorianus
gtgctggtctttcggtacttaatga

SEQ ID NO: 93132 - DNA, 25 bp, Saccharomyces pastorianus
atcggcagctgcatctcaacaagat

SEQ ID NO: 93133 - DNA, 25 bp, Saccharomyces pastorianus
gggttttaccaaatgcatcggcagc

SEQ ID NO: 93134 - DNA, 25 bp, Saccharomyces pastorianus
gatccgtatccagctgtcttaatgt

SEQ ID NO: 93135 - DNA, 25 bp, Saccharomyces pastorianus
gaagcaggtgttactacctctctga

SEQ ID NO: 93136 - DNA, 25 bp, Saccharomyces pastorianus
atgaatccaccattgtatccgagtg

SEQ ID NO: 93137 - DNA, 25 bp, Saccharomyces pastorianus
attgtttagctctcttgacaaggcc

SEQ ID NO: 93138 - DNA, 25 bp, Saccharomyces pastorianus
gttgaagattctagattctcctggt

SEQ ID NO: 93139 - DNA, 25 bp, Saccharomyces pastorianus
aattcctcctattcctgctaatgat

SEQ ID NO: 93140 - DNA, 25 bp, Saccharomyces pastorianus
aacatttcttaattcacgtcgctcg

SEQ ID NO: 93141 - DNA, 25 bp, Saccharomyces pastorianus
atatccaccaatcttgagtctgtcc

SEQ ID NO: 93142 - DNA, 25 bp, Saccharomyces pastorianus
gagtctgtccccaatttcataagtc

SEQ ID NO: 93143 - DNA, 25 bp, Saccharomyces pastorianus
tttttaatgatttctttgtccaaag

SEQ ID NO: 93144 - DNA, 25 bp, Saccharomyces pastorianus
caattcgttttgcattttgtatttt

SEQ ID NO: 93145 - DNA, 25 bp, Saccharomyces pastorianus
gtcatgctatctctgcaattcgttt

SEQ ID NO: 93146 - DNA, 25 bp, Saccharomyces pastorianus
atttcataagtcatgctatctctgc

SEQ ID NO: 93147 - DNA, 25 bp, Saccharomyces pastorianus
aacacctatgaatttgatggtgcaa

SEQ ID NO: 93148 - DNA, 25 bp, Saccharomyces pastorianus
tccaccccataagcttttaccgaag

SEQ ID NO: 93149 - DNA, 25 bp, Saccharomyces pastorianus
taccgaaggccacggcttaataaca

SEQ ID NO: 93150 - DNA, 25 bp, Saccharomyces pastorianus
ggccacggcttaataacacctatga

SEQ ID NO: 93151 - DNA, 25 bp, Saccharomyces pastorianus
tttccccggctgtgatcgtcccatt

SEQ ID NO: 93152 - DNA, 25 bp, Saccharomyces pastorianus
gaggctgagatgttttttgtttcca

SEQ ID NO: 93153 - DNA, 25 bp, Saccharomyces pastorianus
taacgtcgaagaacaggctactttt

SEQ ID NO: 93154 - DNA, 25 bp, Saccharomyces pastorianus
ttgagctatgacaccaatctgccgc

SEQ ID NO: 93155 - DNA, 25 bp, Saccharomyces pastorianus
tatccatctgagtggcaacgaattc

SEQ ID NO: 93156 - DNA, 25 bp, Saccharomyces pastorianus
tattgggtccttcccagttttacag

SEQ ID NO: 93157 - DNA, 25 bp, Saccharomyces pastorianus
aagtataattttcgccccatttcag

SEQ ID NO: 93158 - DNA, 25 bp, Saccharomyces pastorianus
tgccgcgttggtcaagcctcataaa

SEQ ID NO: 93159 - DNA, 25 bp, Saccharomyces pastorianus
gaaacacggcaatctcttgtcttaa

SEQ ID NO: 93160 - DNA, 25 bp, Saccharomyces pastorianus
gatattattcatgtttcgtctccag

SEQ ID NO: 93161 - DNA, 25 bp, Saccharomyces pastorianus
tactggctaggtttgatcgtgtgat

SEQ ID NO: 93162 - DNA, 25 bp, Saccharomyces pastorianus
gaataagacatttccctctttgaaa

SEQ ID NO: 93163 - DNA, 25 bp, Saccharomyces pastorianus
gttgagaaattagtatctttgccat

SEQ ID NO: 93164 - DNA, 25 bp, Saccharomyces pastorianus
atgtctctcgactttaacactttgg

SEQ ID NO: 93165 - DNA, 25 bp, Saccharomyces pastorianus
gaaattagtatctttgccatttcaa

SEQ ID NO: 93166 - DNA, 25 bp, Saccharomyces pastorianus
tctcgactttaacactttggcccaa

SEQ ID NO: 93167 - DNA, 25 bp, Saccharomyces pastorianus
tgtctctcgactttaacactttggc

SEQ ID NO: 93168 - DNA, 25 bp, Saccharomyces pastorianus
tgagaaattagtatctttgccattt

SEQ ID NO: 93169 - DNA, 25 bp, Saccharomyces pastorianus
ctctcgactttaacactttggccca

SEQ ID NO: 93170 - DNA, 25 bp, Saccharomyces pastorianus
aaattagtatctttgccatttcaaa

SEQ ID NO: 93171 - DNA, 25 bp, Saccharomyces pastorianus
cactttggcccaaaacttcacccag

SEQ ID NO: 93172 - DNA, 25 bp, Saccharomyces pastorianus
tctctcgactttaacactttggccc

SEQ ID NO: 93173 - DNA, 25 bp, Saccharomyces pastorianus
gtctctcgactttaacactttggcc

SEQ ID NO: 93174 - DNA, 25 bp, Saccharomyces pastorianus
agcgtttctctcaagtgttccattt

SEQ ID NO: 93175 - DNA, 25 bp, Saccharomyces pastorianus
tgatggaaactcttactacgtgttt

SEQ ID NO: 93176 - DNA, 25 bp, Saccharomyces pastorianus
tcgagactagtcaattgcaaggtgc

SEQ ID NO: 93177 - DNA, 25 bp, Saccharomyces pastorianus
gaatctatgctaacattcgagacta

SEQ ID NO: 93178 - DNA, 25 bp, Saccharomyces pastorianus
ggcgatgtcttagtcatgatcactg

SEQ ID NO: 93179 - DNA, 25 bp, Saccharomyces pastorianus
cactggtgatctgttgattgacgaa

SEQ ID NO: 93180 - DNA, 25 bp, Saccharomyces pastorianus
atcactactttggatgcgcaacctg

SEQ ID NO: 93181 - DNA, 25 bp, Saccharomyces pastorianus
atccacagcgtttctctcaagtgtt

SEQ ID NO: 93182 - DNA, 25 bp, Saccharomyces pastorianus
caaggtgcaaaggacattgttgaga

SEQ ID NO: 93183 - DNA, 25 bp, Saccharomyces pastorianus
tttggatgcgcaacctgcttcccca

SEQ ID NO: 93184 - DNA, 25 bp, Saccharomyces pastorianus
aggtccaacatcgtatcactacttt

SEQ ID NO: 93185 - DNA, 25 bp, Saccharomyces pastorianus
taacagcaatttctccaccgcaaaa

SEQ ID NO: 93186 - DNA, 25 bp, Saccharomyces pastorianus
caaagtcagttccacccatttatta

SEQ ID NO: 93187 - DNA, 25 bp, Saccharomyces pastorianus
aaagccgtaggcactaacgtacagt

SEQ ID NO: 93188 - DNA, 25 bp, Saccharomyces pastorianus
ggatgaacaccggactttaaaccat

SEQ ID NO: 93189 - DNA, 25 bp, Saccharomyces pastorianus
catcccgtttttgcttacggtgttg

SEQ ID NO: 93190 - DNA, 25 bp, Saccharomyces pastorianus
acagtactgtttgcacccattgatg

SEQ ID NO: 93191 - DNA, 25 bp, Saccharomyces pastorianus
ttgatgatccaagacctgccgtgaa

SEQ ID NO: 93192 - DNA, 25 bp, Saccharomyces pastorianus
ttgcgctccaaaggctgtcgttaaa

SEQ ID NO: 93193 - DNA, 25 bp, Saccharomyces pastorianus
tggagccccatttgcaaagtcagtt

SEQ ID NO: 93194 - DNA, 25 bp, Saccharomyces pastorianus
gtgaactatatagactctgtccctc

SEQ ID NO: 93195 - DNA, 25 bp, Saccharomyces pastorianus
gggacagtagtctttggacgcataa

SEQ ID NO: 93196 - DNA, 25 bp, Saccharomyces pastorianus
attggaaccagctttaaagtctttg

SEQ ID NO: 93197 - DNA, 25 bp, Saccharomyces pastorianus
aaggctgtttctgagcaaactgaaa

SEQ ID NO: 93198 - DNA, 25 bp, Saccharomyces pastorianus
gaacgatgtcaaatctcacttacaa

SEQ ID NO: 93199 - DNA, 25 bp, Saccharomyces pastorianus
aaagtctttggatggtgatgctact

SEQ ID NO: 93200 - DNA, 25 bp, Saccharomyces pastorianus
taagacaacttctgctgctccaagc

SEQ ID NO: 93201 - DNA, 25 bp, Saccharomyces pastorianus
atccaagctaccaaggctgtttctg

SEQ ID NO: 93202 - DNA, 25 bp, Saccharomyces pastorianus
atatcggtatggctttagcttccgc

SEQ ID NO: 93203 - DNA, 25 bp, Saccharomyces pastorianus
tccaagctccactgaagctaagaca

SEQ ID NO: 93204 - DNA, 25 bp, Saccharomyces pastorianus
caagatccttcctctggattttcct

SEQ ID NO: 93205 - DNA, 25 bp, Saccharomyces pastorianus
gagtttggctcaagatccttcctct

SEQ ID NO: 93206 - DNA, 25 bp, Saccharomyces pastorianus
tggtgccaagacctctgccatctct

SEQ ID NO: 93207 - DNA, 25 bp, Saccharomyces pastorianus
ctctctccacaagcagtatctagtt

SEQ ID NO: 93208 - DNA, 25 bp, Saccharomyces pastorianus
aattatcgccacatacattgatgag

SEQ ID NO: 93209 - DNA, 25 bp, Saccharomyces pastorianus
tggtgacaccgttcaattcgccgag

SEQ ID NO: 93210 - DNA, 25 bp, Saccharomyces pastorianus
cctatggtgctcatggttactcggg

SEQ ID NO: 93211 - DNA, 25 bp, Saccharomyces pastorianus
gccaatggacttcaagggcgtcatt

SEQ ID NO: 93212 - DNA, 25 bp, Saccharomyces pastorianus
gggttttacacattctctttactag

SEQ ID NO: 93213 - DNA, 25 bp, Saccharomyces pastorianus
tcaattcgccgagtacattcaagcc

SEQ ID NO: 93214 - DNA, 25 bp, Saccharomyces pastorianus
attattctgggcatccgtgtacagg

SEQ ID NO: 93215 - DNA, 25 bp, Saccharomyces pastorianus
ctaaagtcgaattaccctatggtgc

SEQ ID NO: 93216 - DNA, 25 bp, Saccharomyces pastorianus
ttatagacctggcatgactactgag

SEQ ID NO: 93217 - DNA, 25 bp, Saccharomyces pastorianus
agattatgagctctctccacaagca

SEQ ID NO: 93218 - DNA, 25 bp, Saccharomyces pastorianus
ccggtgtccctgacgttattgtaga

SEQ ID NO: 93219 - DNA, 25 bp, Saccharomyces pastorianus
tagatgccgatctacaaggctttgg

SEQ ID NO: 93220 - DNA, 25 bp, Saccharomyces pastorianus
aatcttacggccaaacagtttctgt

SEQ ID NO: 93221 - DNA, 25 bp, Saccharomyces pastorianus
tatcgccgatagatgtctgccaaga

SEQ ID NO: 93222 - DNA, 25 bp, Saccharomyces pastorianus
taacacctcccaaaatcgctaaatt

SEQ ID NO: 93223 - DNA, 25 bp, Saccharomyces pastorianus
aaggatgcgctgaacaaccacctcg

SEQ ID NO: 93224 - DNA, 25 bp, Saccharomyces pastorianus
caaggctttggatacttggttccca

SEQ ID NO: 93225 - DNA, 25 bp, Saccharomyces pastorianus
gtcagtgggaattcactatcgccga

SEQ ID NO: 93226 - DNA, 25 bp, Saccharomyces pastorianus
gggaggtaaccattagtgcagtcaa

SEQ ID NO: 93227 - DNA, 25 bp, Saccharomyces pastorianus
aaccacctcggcatcagtaacaagg

SEQ ID NO: 93228 - DNA, 25 bp, Saccharomyces pastorianus
gaacacggtgttcctgtagtgccat

SEQ ID NO: 93229 - DNA, 25 bp, Saccharomyces pastorianus
cgtggcccacaggtttttgaaagat

SEQ ID NO: 93230 - DNA, 25 bp, Saccharomyces pastorianus
gaactttttcaagctagcacatggt

SEQ ID NO: 93231 - DNA, 25 bp, Saccharomyces pastorianus
gatgatgttgtgacgccaactttta

SEQ ID NO: 93232 - DNA, 25 bp, Saccharomyces pastorianus
tgatgcagcgcaaccgattttagct

SEQ ID NO: 93233 - DNA, 25 bp, Saccharomyces pastorianus
gattttagctgccaagcacccagag

SEQ ID NO: 93234 - DNA, 25 bp, Saccharomyces pastorianus
gtgaactgcaaattcgtggcccaca

SEQ ID NO: 93235 - DNA, 25 bp, Saccharomyces pastorianus
aaggtcgcatcagcgtcattgatcg

SEQ ID NO: 93236 - DNA, 25 bp, Saccharomyces pastorianus
atttatttatcatcatgcccctata

SEQ ID NO: 93237 - DNA, 25 bp, Saccharomyces pastorianus
gcacatggtgaatatgttgctccag

SEQ ID NO: 93238 - DNA, 25 bp, Saccharomyces pastorianus
aaatgcaccgatgggctacaaggat

SEQ ID NO: 93239 - DNA, 25 bp, Saccharomyces pastorianus
gacatttttagttggcatcgttggt

SEQ ID NO: 93240 - DNA, 25 bp, Saccharomyces pastorianus
tcgcaggaaacgatcggttcattga

SEQ ID NO: 93241 - DNA, 25 bp, Saccharomyces pastorianus
accagtgttacccaaggtcagttgg

SEQ ID NO: 93242 - DNA, 25 bp, Saccharomyces pastorianus
atcagggcggctatgcgaacagcaa

SEQ ID NO: 93243 - DNA, 25 bp, Saccharomyces pastorianus
aaagaggtcatcaagcacaggcact

SEQ ID NO: 93244 - DNA, 25 bp, Saccharomyces pastorianus
gggagcattattacggttcgtcaag

SEQ ID NO: 93245 - DNA, 25 bp, Saccharomyces pastorianus
ggtccataccactcaagatttaata

SEQ ID NO: 93246 - DNA, 25 bp, Saccharomyces pastorianus
aatgatgagaccatcaccggccatg

SEQ ID NO: 93247 - DNA, 25 bp, Saccharomyces pastorianus
ggtgaacatggaactgtgccgaatc

SEQ ID NO: 93248 - DNA, 25 bp, Saccharomyces pastorianus
gcgacatagaaatcctggtccatac

SEQ ID NO: 93249 - DNA, 25 bp, Saccharomyces pastorianus
gcaacaagacattcttcgctgggaa

SEQ ID NO: 93250 - DNA, 25 bp, Saccharomyces pastorianus
tttacttcaacaaactacgcgacat

SEQ ID NO: 93251 - DNA, 25 bp, Saccharomyces pastorianus
gagctggaccccaagagtcgggcaa

SEQ ID NO: 93252 - DNA, 25 bp, Saccharomyces pastorianus
tctagacggcagtcgaccttagcag

SEQ ID NO: 93253 - DNA, 25 bp, Saccharomyces pastorianus
ttgcagcttcgtgtactacccggag

SEQ ID NO: 93254 - DNA, 25 bp, Saccharomyces pastorianus
gtaacgatgccgcagaggtcgcact

SEQ ID NO: 93255 - DNA, 25 bp, Saccharomyces pastorianus
gggcaacacttgagcacgtgcttac

SEQ ID NO: 93256 - DNA, 25 bp, Saccharomyces pastorianus
gccagcgatgtgcatgacgtacgtt

SEQ ID NO: 93257 - DNA, 25 bp, Saccharomyces pastorianus
gatgattcacgctgctggatcgaag

SEQ ID NO: 93258 - DNA, 25 bp, Saccharomyces pastorianus
gacgtacgtttcgtattcggcgatg

SEQ ID NO: 93259 - DNA, 25 bp, Saccharomyces pastorianus
cggagaccacgtgatcggaaactct

SEQ ID NO: 93260 - DNA, 25 bp, Saccharomyces pastorianus
agagtgtgtccaattacgcgcacgt

SEQ ID NO: 93261 - DNA, 25 bp, Saccharomyces pastorianus
aggtcgcactgtacgaacggctgtt

SEQ ID NO: 93262 - DNA, 25 bp, Saccharomyces pastorianus
tgcgattcgctgctcaacacatgga

SEQ ID NO: 93263 - DNA, 25 bp, Saccharomyces pastorianus
tgggcctcaatacttctcctaatag

SEQ ID NO: 93264 - DNA, 25 bp, Saccharomyces pastorianus
caagggctgtaccacgtgcgattcg

SEQ ID NO: 93265 - DNA, 25 bp, Saccharomyces pastorianus
acagaaatttttccgtggcctacat

SEQ ID NO: 93266 - DNA, 25 bp, Saccharomyces pastorianus
tatcgaccctgatttcttgcaaaca

SEQ ID NO: 93267 - DNA, 25 bp, Saccharomyces pastorianus
gttggattatgctcttatcgaccct

SEQ ID NO: 93268 - DNA, 25 bp, Saccharomyces pastorianus
atcagagccctcatcgaagtcgaac

SEQ ID NO: 93269 - DNA, 25 bp, Saccharomyces pastorianus
gtgtctctgaccattttgcatactc

SEQ ID NO: 93270 - DNA, 25 bp, Saccharomyces pastorianus
gtccttttcgctattgctgtctcaa

SEQ ID NO: 93271 - DNA, 25 bp, Saccharomyces pastorianus
ctcctaatagcgtcgttggtcgtga

SEQ ID NO: 93272 - DNA, 25 bp, Saccharomyces pastorianus
atgcatccacacgtacttgaagaca

SEQ ID NO: 93273 - DNA, 25 bp, Saccharomyces pastorianus
gtattgttcctatctgtcggtttca

SEQ ID NO: 93274 - DNA, 25 bp, Saccharomyces pastorianus
agcaagcaaaacaaacgcccacttc

SEQ ID NO: 93275 - DNA, 25 bp, Saccharomyces pastorianus
ttccaccagacaggctggttacggt

SEQ ID NO: 93276 - DNA, 25 bp, Saccharomyces pastorianus
ggttacggtgggtcttcaagctcaa

SEQ ID NO: 93277 - DNA, 25 bp, Saccharomyces pastorianus
agcttcagttccaccaggaggtcag

SEQ ID NO: 93278 - DNA, 25 bp, Saccharomyces pastorianus
tatacggacgaagccaatggattca

SEQ ID NO: 93279 - DNA, 25 bp, Saccharomyces pastorianus
caggaggtcagcgtatcttgcagaa

SEQ ID NO: 93280 - DNA, 25 bp, Saccharomyces pastorianus
gactcccttgtcgtattgttcctat

SEQ ID NO: 93281 - DNA, 25 bp, Saccharomyces pastorianus
aatggattcagagtcgactcccttg

SEQ ID NO: 93282 - DNA, 25 bp, Saccharomyces pastorianus
tcatcttctccgtgattgctttgca

SEQ ID NO: 93283 - DNA, 25 bp, Saccharomyces pastorianus
gaagagaagacaggcacaatccatt

SEQ ID NO: 93284 - DNA, 25 bp, Saccharomyces pastorianus
cgtctgtcgtactctttctgaataa

SEQ ID NO: 93285 - DNA, 25 bp, Saccharomyces pastorianus
taagattagtatttgccgccatcaa

SEQ ID NO: 93286 - DNA, 25 bp, Saccharomyces pastorianus
gactcgactccttacttcatggaaa

SEQ ID NO: 93287 - DNA, 25 bp, Saccharomyces pastorianus
aacagtagatggttcgcgcgcacgt

SEQ ID NO: 93288 - DNA, 25 bp, Saccharomyces pastorianus
gtcactctggtcatattttgcgttt

SEQ ID NO: 93289 - DNA, 25 bp, Saccharomyces pastorianus
gagtcgctggtgcttttcgataata

SEQ ID NO: 93290 - DNA, 25 bp, Saccharomyces pastorianus
gaaaatttcaccaggatcacttcgc

SEQ ID NO: 93291 - DNA, 25 bp, Saccharomyces pastorianus
taagcatatatcctcacgtgacaca

SEQ ID NO: 93292 - DNA, 25 bp, Saccharomyces pastorianus
ttgcgtttctctatcggagtacgac

SEQ ID NO: 93293 - DNA, 25 bp, Saccharomyces pastorianus
aaggccgccaagtacatactctgga

SEQ ID NO: 93294 - DNA, 25 bp, Saccharomyces pastorianus
gggtcagacatcaacaaggccgcca

SEQ ID NO: 93295 - DNA, 25 bp, Saccharomyces pastorianus
ctggctgctggctggacaattgacc

SEQ ID NO: 93296 - DNA, 25 bp, Saccharomyces pastorianus
cccgcttttgttctcttgatgttag

SEQ ID NO: 93297 - DNA, 25 bp, Saccharomyces pastorianus
ggtgctcatccatccgttttaaagc

SEQ ID NO: 93298 - DNA, 25 bp, Saccharomyces pastorianus
gggtaaatacgttgagcttccagaa

SEQ ID NO: 93299 - DNA, 25 bp, Saccharomyces pastorianus
gaaagctacttatttccctggctgc

SEQ ID NO: 93300 - DNA, 25 bp, Saccharomyces pastorianus
gaacatggatgctgctacggcttta

SEQ ID NO: 93301 - DNA, 25 bp, Saccharomyces pastorianus
ttatgacgaacacacctgccaagta

SEQ ID NO: 93302 - DNA, 25 bp, Saccharomyces pastorianus
atggttgtgcggtggtgtcctactc

SEQ ID NO: 93303 - DNA, 25 bp, Saccharomyces pastorianus
aactattgccgggttgtgcgtaatg

SEQ ID NO: 93304 - DNA, 25 bp, Saccharomyces pastorianus
gtcctactcagctgatgtttccaaa

SEQ ID NO: 93305 - DNA, 25 bp, Saccharomyces pastorianus
aaagcatcaagtttgcacaccaggt

SEQ ID NO: 93306 - DNA, 25 bp, Saccharomyces pastorianus
tcaacgtatttacccacttggctaa

SEQ ID NO: 93307 - DNA, 25 bp, Saccharomyces pastorianus
ggaagctcaacgtatttacccactt

SEQ ID NO: 93308 - DNA, 25 bp, Saccharomyces pastorianus
gcagcatccatgttcttttctggaa

SEQ ID NO: 93309 - DNA, 25 bp, Saccharomyces pastorianus
gctaatcaattcgttgaccagtggc

SEQ ID NO: 93310 - DNA, 25 bp, Saccharomyces pastorianus
gggcctgaaccgactaaagccgtag

SEQ ID NO: 93311 - DNA, 25 bp, Saccharomyces pastorianus
aaagccgtagcagcatccatgttct

SEQ ID NO: 93312 - DNA, 25 bp, Saccharomyces pastorianus
tcaaggattctaacatcaagagaac

SEQ ID NO: 93313 - DNA, 25 bp, Saccharomyces pastorianus
gttcttttctggaagctcaacgtat

SEQ ID NO: 93314 - DNA, 25 bp, Saccharomyces pastorianus
actctcttgtaatgggattcccaat

SEQ ID NO: 93315 - DNA, 25 bp, Saccharomyces pastorianus
tacccacttggctaatcaattcgtt

SEQ ID NO: 93316 - DNA, 25 bp, Saccharomyces pastorianus
gcacattccttactctcttgtaatg

SEQ ID NO: 93317 - DNA, 25 bp, Saccharomyces pastorianus
atggcttgaccatgagcgcagacaa

SEQ ID NO: 93318 - DNA, 25 bp, Saccharomyces pastorianus
tgcagtcaataatcctccgaaacgt

SEQ ID NO: 93319 - DNA, 25 bp, Saccharomyces pastorianus
tgatcattcaagttccgcagtttcc

SEQ ID NO: 93320 - DNA, 25 bp, Saccharomyces pastorianus
gctggcaatgctgatggcacatcct

SEQ ID NO: 93321 - DNA, 25 bp, Saccharomyces pastorianus
gcaaaacatcttcttcatcacaggt

SEQ ID NO: 93322 - DNA, 25 bp, Saccharomyces pastorianus
tcacgcggcacttctcataataaaa

SEQ ID NO: 93323 - DNA, 25 bp, Saccharomyces pastorianus
gcagtttccgttcccacagaaaagg

SEQ ID NO: 93324 - DNA, 25 bp, Saccharomyces pastorianus
ggcgaaattcgttcctactggagga

SEQ ID NO: 93325 - DNA, 25 bp, Saccharomyces pastorianus
tactggaggatgtcacgcggcactt

SEQ ID NO: 93326 - DNA, 25 bp, Saccharomyces pastorianus
gtcatacagtcaatggttcccgcaa

SEQ ID NO: 93327 - DNA, 25 bp, Saccharomyces pastorianus
gaaattttacagatccaaccgcggg

SEQ ID NO: 93328 - DNA, 25 bp, Saccharomyces pastorianus
gacttaaagtttgctgttcccggtg

SEQ ID NO: 93329 - DNA, 25 bp, Saccharomyces pastorianus
tcaacattggttctaccgctacggg

SEQ ID NO: 93330 - DNA, 25 bp, Saccharomyces pastorianus
aagattacagttaacgtcgcccgct

SEQ ID NO: 93331 - DNA, 25 bp, Saccharomyces pastorianus
ttgtcggtcaagtcgtcggtgctaa

SEQ ID NO: 93332 - DNA, 25 bp, Saccharomyces pastorianus
gtcgcccgcttgtactgaaattaac

SEQ ID NO: 93333 - DNA, 25 bp, Saccharomyces pastorianus
tcggtgctaagggtcatttgccaaa

SEQ ID NO: 93334 - DNA, 25 bp, Saccharomyces pastorianus
aactactttttgctacgtcgtctat

SEQ ID NO: 93335 - DNA, 25 bp, Saccharomyces pastorianus
aacattgtctccttatttgccgaac

SEQ ID NO: 93336 - DNA, 25 bp, Saccharomyces pastorianus
tagagctgatcgtcttgtcggtcaa

SEQ ID NO: 93337 - DNA, 25 bp, Saccharomyces pastorianus
gttgatcctaccttgtgtagagctg

SEQ ID NO: 93338 - DNA, 25 bp, Saccharomyces pastorianus
gttgccggtggttctatcttgaatg

SEQ ID NO: 93339 - DNA, 25 bp, Saccharomyces pastorianus
ggaactggactctttggccgacttg

SEQ ID NO: 93340 - DNA, 25 bp, Saccharomyces pastorianus
ggattttctgggttttactctattg

SEQ ID NO: 93341 - DNA, 25 bp, Saccharomyces pastorianus
aataggtcttccttaatgggtcagg

SEQ ID NO: 93342 - DNA, 25 bp, Saccharomyces pastorianus
gccgacttggtttcctttggtgtgg

SEQ ID NO: 93343 - DNA, 25 bp, Saccharomyces pastorianus
gataacatcccattcggcattttta

SEQ ID NO: 93344 - DNA, 25 bp, Saccharomyces pastorianus
actactctagctttggtgttgggta

SEQ ID NO: 93345 - DNA, 25 bp, Saccharomyces pastorianus
attttatctttctttgtcctttgcg

SEQ ID NO: 93346 - DNA, 25 bp, Saccharomyces pastorianus
aagttgtctgagatttacgcttaca

SEQ ID NO: 93347 - DNA, 25 bp, Saccharomyces pastorianus
ggctgcaattgcttttgccattgga

SEQ ID NO: 93348 - DNA, 25 bp, Saccharomyces pastorianus
tgtcctttgcggcttagcgagatta

SEQ ID NO: 93349 - DNA, 25 bp, Saccharomyces pastorianus
ggtttaatgtcaccgttgctcaatt

SEQ ID NO: 93350 - DNA, 25 bp, Saccharomyces pastorianus
gaacagatcctatccacagtggtgg

SEQ ID NO: 93351 - DNA, 25 bp, Saccharomyces pastorianus
agatcgctaaacctaacacggccaa

SEQ ID NO: 93352 - DNA, 25 bp, Saccharomyces pastorianus
acaggtggcacatagcagccgacta

SEQ ID NO: 93353 - DNA, 25 bp, Saccharomyces pastorianus
gagtgttgggactgactatactaag

SEQ ID NO: 93354 - DNA, 25 bp, Saccharomyces pastorianus
gagggtacccaaaactcaactagat

SEQ ID NO: 93355 - DNA, 25 bp, Saccharomyces pastorianus
agatggccgcgtttacatcgggcaa

SEQ ID NO: 93356 - DNA, 25 bp, Saccharomyces pastorianus
gccgactagccaaccttattgatta

SEQ ID NO: 93357 - DNA, 25 bp, Saccharomyces pastorianus
taagccgctactatccaagaaggaa

SEQ ID NO: 93358 - DNA, 25 bp, Saccharomyces pastorianus
gggagattgcccaaccatcgtcgag

SEQ ID NO: 93359 - DNA, 25 bp, Saccharomyces pastorianus
gagggttctcactcaagatggccgc

SEQ ID NO: 93360 - DNA, 25 bp, Saccharomyces pastorianus
gtggtggaggataagccgctactat

SEQ ID NO: 93361 - DNA, 25 bp, Saccharomyces pastorianus
ttcatttactaaacccacaccggag

SEQ ID NO: 93362 - DNA, 25 bp, Saccharomyces pastorianus
ttttcatctgtgtcatcgtctttca

SEQ ID NO: 93363 - DNA, 25 bp, Saccharomyces pastorianus
gttcgttcgccacaacatcaaatat

SEQ ID NO: 93364 - DNA, 25 bp, Saccharomyces pastorianus
gatttcgaccactacgacatcgatg

SEQ ID NO: 93365 - DNA, 25 bp, Saccharomyces pastorianus
agaaccttcaagtgttcgttcgcca

SEQ ID NO: 93366 - DNA, 25 bp, Saccharomyces pastorianus
aagactgtcaccttctttaacagta

SEQ ID NO: 93367 - DNA, 25 bp, Saccharomyces pastorianus
atcgtcgtacactgaaatctccttt

SEQ ID NO: 93368 - DNA, 25 bp, Saccharomyces pastorianus
ttatgactgcaattcactctcccga

SEQ ID NO: 93369 - DNA, 25 bp, Saccharomyces pastorianus
tctcccgaaaaacttcatcccaaat

SEQ ID NO: 93370 - DNA, 25 bp, Saccharomyces pastorianus
gactactcattaagccctattcagg

SEQ ID NO: 93371 - DNA, 25 bp, Saccharomyces pastorianus
aagccctattcaggagacaccatct

SEQ ID NO: 93372 - DNA, 25 bp, Saccharomyces pastorianus
gagaacctagggaacgcacctcgaa

SEQ ID NO: 93373 - DNA, 25 bp, Saccharomyces pastorianus
cgacgcagagtttgcccaatggcaa

SEQ ID NO: 93374 - DNA, 25 bp, Saccharomyces pastorianus
gttaacatagatgccttcctacatg

SEQ ID NO: 93375 - DNA, 25 bp, Saccharomyces pastorianus
gtcacaagggaaagtcctccttccg

SEQ ID NO: 93376 - DNA, 25 bp, Saccharomyces pastorianus
gggttccgagacaaaacattctgca

SEQ ID NO: 93377 - DNA, 25 bp, Saccharomyces pastorianus
aaatattagttccaccgacgcagag

SEQ ID NO: 93378 - DNA, 25 bp, Saccharomyces pastorianus
gatcgattcgaaaccgcacgtagct

SEQ ID NO: 93379 - DNA, 25 bp, Saccharomyces pastorianus
atgcgccccactaaaactcaaatat

SEQ ID NO: 93380 - DNA, 25 bp, Saccharomyces pastorianus
acgtagctggtcatacggcctttgc

SEQ ID NO: 93381 - DNA, 25 bp, Saccharomyces pastorianus
gccggtgcttcgttcacaacagata

SEQ ID NO: 93382 - DNA, 25 bp, Saccharomyces pastorianus
aggcaacgatggtcactgttaacat

SEQ ID NO: 93383 - DNA, 25 bp, Saccharomyces pastorianus
ggttgtcgagctttgcaaatgcctg

SEQ ID NO: 93384 - DNA, 25 bp, Saccharomyces pastorianus
tattgccactacgatagacccatcg

SEQ ID NO: 93385 - DNA, 25 bp, Saccharomyces pastorianus
ttgaagtttaccgtccatcctctat

SEQ ID NO: 93386 - DNA, 25 bp, Saccharomyces pastorianus
aaatgcctggtttattgatgacaac

SEQ ID NO: 93387 - DNA, 25 bp, Saccharomyces pastorianus
aagatatccttgagattccattgat

SEQ ID NO: 93388 - DNA, 25 bp, Saccharomyces pastorianus
gaagctcggcaaatttgacaaacta

SEQ ID NO: 93389 - DNA, 25 bp, Saccharomyces pastorianus
atggctgtttacaaactcgtacaaa

SEQ ID NO: 93390 - DNA, 25 bp, Saccharomyces pastorianus
attcatcgatgattccttacctttg

SEQ ID NO: 93391 - DNA, 25 bp, Saccharomyces pastorianus
gctgatctatttgacggcataacct

SEQ ID NO: 93392 - DNA, 25 bp, Saccharomyces pastorianus
agggagctgctgatcaatttaaaga

SEQ ID NO: 93393 - DNA, 25 bp, Saccharomyces pastorianus
acgtaagcaatgtgcggagcgcgtt

SEQ ID NO: 93394 - DNA, 25 bp, Saccharomyces pastorianus
gatgttgaaatttctatcctgaagg

SEQ ID NO: 93395 - DNA, 25 bp, Saccharomyces pastorianus
ataggctactacaaatcttccctca

SEQ ID NO: 93396 - DNA, 25 bp, Saccharomyces pastorianus
gactgtgttttaaggtcctggaatt

SEQ ID NO: 93397 - DNA, 25 bp, Saccharomyces pastorianus
gagaattctttctgaaagccttcat

SEQ ID NO: 93398 - DNA, 25 bp, Saccharomyces pastorianus
agccttcatatgtttaatcttggat

SEQ ID NO: 93399 - DNA, 25 bp, Saccharomyces pastorianus
aaatcttccctcatttacaaagcgc

SEQ ID NO: 93400 - DNA, 25 bp, Saccharomyces pastorianus
tatgcacaattttccccgttaacaa

SEQ ID NO: 93401 - DNA, 25 bp, Saccharomyces pastorianus
ggaatcggaccatagactgtgtttt

SEQ ID NO: 93402 - DNA, 25 bp, Saccharomyces pastorianus
aggtcggactgaaactatacagcaa

SEQ ID NO: 93403 - DNA, 25 bp, Saccharomyces pastorianus
ttacaaagcgccttgctcaggagac

SEQ ID NO: 93404 - DNA, 25 bp, Saccharomyces pastorianus
cttgctcaggagacgctttagtgaa

SEQ ID NO: 93405 - DNA, 25 bp, Saccharomyces pastorianus
gtacgatatccccacggacatgagc

SEQ ID NO: 93406 - DNA, 25 bp, Saccharomyces pastorianus
gagtcggcggacaagttcacagaca

SEQ ID NO: 93407 - DNA, 25 bp, Saccharomyces pastorianus
aactctttgtggaccaatcttccat

SEQ ID NO: 93408 - DNA, 25 bp, Saccharomyces pastorianus
atgaccattgctgccagtgagtcgg

SEQ ID NO: 93409 - DNA, 25 bp, Saccharomyces pastorianus
gtatctttttctgtttagccacagc

SEQ ID NO: 93410 - DNA, 25 bp, Saccharomyces pastorianus
tagccacagcgtacagcaggccaga

SEQ ID NO: 93411 - DNA, 25 bp, Saccharomyces pastorianus
ggacatgagcccactgatgaccatt

SEQ ID NO: 93412 - DNA, 25 bp, Saccharomyces pastorianus
gctgctagaactttttgctgttgta

SEQ ID NO: 93413 - DNA, 25 bp, Saccharomyces pastorianus
ggaagttacacgaacacaccagccg

SEQ ID NO: 93414 - DNA, 25 bp, Saccharomyces pastorianus
ccgccaacgctatgggcaatttgtt

SEQ ID NO: 93415 - DNA, 25 bp, Saccharomyces pastorianus
acaccagccggaacagtacgatatc

SEQ ID NO: 93416 - DNA, 25 bp, Saccharomyces pastorianus
taagattgccacagttattgaacca

SEQ ID NO: 93417 - DNA, 25 bp, Saccharomyces pastorianus
gaatccatgatcctactacatctaa

SEQ ID NO: 93418 - DNA, 25 bp, Saccharomyces pastorianus
atgtcgtcgcttatttcaaaaacca

SEQ ID NO: 93419 - DNA, 25 bp, Saccharomyces pastorianus
attgttcgcccattcagatgctgat

SEQ ID NO: 93420 - DNA, 25 bp, Saccharomyces pastorianus
gagtctaaaaaggatagcccctcta

SEQ ID NO: 93421 - DNA, 25 bp, Saccharomyces pastorianus
ggtgacacagattttgcggaggttt

SEQ ID NO: 93422 - DNA, 25 bp, Saccharomyces pastorianus
agcccctctagtgtctcttataaga

SEQ ID NO: 93423 - DNA, 25 bp, Saccharomyces pastorianus
ccattaagtatgatccagccaagga

SEQ ID NO: 93424 - DNA, 25 bp, Saccharomyces pastorianus
agtatcgcagtggattgttcgccca

SEQ ID NO: 93425 - DNA, 25 bp, Saccharomyces pastorianus
gcggaggttttacaagtatcctata

SEQ ID NO: 93426 - DNA, 25 bp, Saccharomyces pastorianus
tactacatctaattcacaaggacct

SEQ ID NO: 93427 - DNA, 25 bp, Saccharomyces pastorianus
ggtcaagttttcgttaccaccactg

SEQ ID NO: 93428 - DNA, 25 bp, Saccharomyces pastorianus
acgctttacaagctgccatggaagg

SEQ ID NO: 93429 - DNA, 25 bp, Saccharomyces pastorianus
tccttctctaaccaagtcttagctc

SEQ ID NO: 93430 - DNA, 25 bp, Saccharomyces pastorianus
tggtgtccacgttttgccaaagatc

SEQ ID NO: 93431 - DNA, 25 bp, Saccharomyces pastorianus
gatgcatcccacattggtcaagttt

SEQ ID NO: 93432 - DNA, 25 bp, Saccharomyces pastorianus
ggaaggctaccaagttgttaccatg

SEQ ID NO: 93433 - DNA, 25 bp, Saccharomyces pastorianus
atctttcgttatgtcttgttccttc

SEQ ID NO: 93434 - DNA, 25 bp, Saccharomyces pastorianus
agatcttggatgaagctgtcgctaa

SEQ ID NO: 93435 - DNA, 25 bp, Saccharomyces pastorianus
aggcccattcgaagttggtgtccac

SEQ ID NO: 93436 - DNA, 25 bp, Saccharomyces pastorianus
tgtcgctaagttccacttgggcaac

SEQ ID NO: 93437 - DNA, 25 bp, Saccharomyces pastorianus
gaaattgacccaatcaacgctttac

SEQ ID NO: 93438 - DNA, 25 bp, Saccharomyces pastorianus
gtctcaaccacctctttggtttgga

SEQ ID NO: 93439 - DNA, 25 bp, Saccharomyces pastorianus
gtcttcatgtcttatatggttgccc

SEQ ID NO: 93440 - DNA, 25 bp, Saccharomyces pastorianus
aacccactgaaacaacccatttgag

SEQ ID NO: 93441 - DNA, 25 bp, Saccharomyces pastorianus
tcatgggtccattggttgtctcaac

SEQ ID NO: 93442 - DNA, 25 bp, Saccharomyces pastorianus
atttcctgtgttatcagattctatg

SEQ ID NO: 93443 - DNA, 25 bp, Saccharomyces pastorianus
gtatcagtcttcaattctatccaga

SEQ ID NO: 93444 - DNA, 25 bp, Saccharomyces pastorianus
tttgagtgcaagaactttcggtact

SEQ ID NO: 93445 - DNA, 25 bp, Saccharomyces pastorianus
ggtacttggacctttatttcctgtg

SEQ ID NO: 93446 - DNA, 25 bp, Saccharomyces pastorianus
ttccacttcggctctgaattattga

SEQ ID NO: 93447 - DNA, 25 bp, Saccharomyces pastorianus
aattctatccagacttacgtttctg

SEQ ID NO: 93448 - DNA, 25 bp, Saccharomyces pastorianus
tatatggttgccctattccacttcg

SEQ ID NO: 93449 - DNA, 25 bp, Saccharomyces pastorianus
atatttcaagcagccttccatacga

SEQ ID NO: 93450 - DNA, 25 bp, Saccharomyces pastorianus
gaattgccacttccaagtgtcgaca

SEQ ID NO: 93451 - DNA, 25 bp, Saccharomyces pastorianus
atggcgttaatcaccacactgttaa

SEQ ID NO: 93452 - DNA, 25 bp, Saccharomyces pastorianus
gaaaatttcgaggttgcacatgcaa

SEQ ID NO: 93453 - DNA, 25 bp, Saccharomyces pastorianus
tctcttctatgcacactacagcaac

SEQ ID NO: 93454 - DNA, 25 bp, Saccharomyces pastorianus
cattcttcaatttcccatggcgtta

SEQ ID NO: 93455 - DNA, 25 bp, Saccharomyces pastorianus
ataattcctgccaaaatgccaagtt

SEQ ID NO: 93456 - DNA, 25 bp, Saccharomyces pastorianus
gagaaagacgtacataccgcgccct

SEQ ID NO: 93457 - DNA, 25 bp, Saccharomyces pastorianus
acgaatcgaaatgccctgatgtcaa

SEQ ID NO: 93458 - DNA, 25 bp, Saccharomyces pastorianus
acacatgccaactcaaaaccacaat

SEQ ID NO: 93459 - DNA, 25 bp, Saccharomyces pastorianus
aaggatgccacttctgcactgaaaa

SEQ ID NO: 93460 - DNA, 25 bp, Saccharomyces pastorianus
cgttgacccaccacaatttcaaaga

SEQ ID NO: 93461 - DNA, 25 bp, Saccharomyces pastorianus
gcaggcagtagcagttcacagatga

SEQ ID NO: 93462 - DNA, 25 bp, Saccharomyces pastorianus
tgctttaccggaggacgtactcata

SEQ ID NO: 93463 - DNA, 25 bp, Saccharomyces pastorianus
ttacccactattttctcccaagatt

SEQ ID NO: 93464 - DNA, 25 bp, Saccharomyces pastorianus
aaaatggctcgttgattgccctgtc

SEQ ID NO: 93465 - DNA, 25 bp, Saccharomyces pastorianus
gcataactttacttggttacccact

SEQ ID NO: 93466 - DNA, 25 bp, Saccharomyces pastorianus
gagtactgaacgcactgcaggcagt

SEQ ID NO: 93467 - DNA, 25 bp, Saccharomyces pastorianus
tatcctatcgatctgagtactgaac

SEQ ID NO: 93468 - DNA, 25 bp, Saccharomyces pastorianus
tgaaggatttctctgctttaccgga

SEQ ID NO: 93469 - DNA, 25 bp, Saccharomyces pastorianus
tttctcccaagattttactgcccca

SEQ ID NO: 93470 - DNA, 25 bp, Saccharomyces pastorianus
gattgccctgtcgaaaaatactgta

SEQ ID NO: 93471 - DNA, 25 bp, Saccharomyces pastorianus
gctaagaacgacttaggtgtcttga

SEQ ID NO: 93472 - DNA, 25 bp, Saccharomyces pastorianus
atgcctggatttacagctccaacaa

SEQ ID NO: 93473 - DNA, 25 bp, Saccharomyces pastorianus
gttatttctcagatgtacacatttg

SEQ ID NO: 93474 - DNA, 25 bp, Saccharomyces pastorianus
aagacagtctgttatttctcagatg

SEQ ID NO: 93475 - DNA, 25 bp, Saccharomyces pastorianus
taaaacaaggactactttcagaaat

SEQ ID NO: 93476 - DNA, 25 bp, Saccharomyces pastorianus
gaaggcaggtgttgtctttatacaa

SEQ ID NO: 93477 - DNA, 25 bp, Saccharomyces pastorianus
gtctttatacaaggaattcatcaag

SEQ ID NO: 93478 - DNA, 25 bp, Saccharomyces pastorianus
tcagatgtacacatttgacaggctg

SEQ ID NO: 93479 - DNA, 25 bp, Saccharomyces pastorianus
taattacaacttcagggaatacttt

SEQ ID NO: 93480 - DNA, 25 bp, Saccharomyces pastorianus
gaatcagcaagacccaaaagtgtta

SEQ ID NO: 93481 - DNA, 25 bp, Saccharomyces pastorianus
gttaatgaacctatttaaggaagct

SEQ ID NO: 93482 - DNA, 25 bp, Saccharomyces pastorianus
ttgacaccttctgccggttgggaat

SEQ ID NO: 93483 - DNA, 25 bp, Saccharomyces pastorianus
aggtactttgtgcttgacaccttct

SEQ ID NO: 93484 - DNA, 25 bp, Saccharomyces pastorianus
aaattatctccgatgcttccggaaa

SEQ ID NO: 93485 - DNA, 25 bp, Saccharomyces pastorianus
aatccggagagcttggtggttacga

SEQ ID NO: 93486 - DNA, 25 bp, Saccharomyces pastorianus
attggccaccaaatgtcgctttaat

SEQ ID NO: 93487 - DNA, 25 bp, Saccharomyces pastorianus
atacctagctcttctaacttctttg

SEQ ID NO: 93488 - DNA, 25 bp, Saccharomyces pastorianus
gtacgtcagctggagcgctaaatct

SEQ ID NO: 93489 - DNA, 25 bp, Saccharomyces pastorianus
gtgcccagtcagtgagcaaatcctt

SEQ ID NO: 93490 - DNA, 25 bp, Saccharomyces pastorianus
aagacgcttctgtttatcgtgcgga

SEQ ID NO: 93491 - DNA, 25 bp, Saccharomyces pastorianus
attgattaatgatccacctgcttgg

SEQ ID NO: 93492 - DNA, 25 bp, Saccharomyces pastorianus
gcgttgattgacctagctgtatttc

SEQ ID NO: 93493 - DNA, 25 bp, Saccharomyces pastorianus
atagtgttttcctcggtgatattct

SEQ ID NO: 93494 - DNA, 25 bp, Saccharomyces pastorianus
gatttgtttatgattccagctggat

SEQ ID NO: 93495 - DNA, 25 bp, Saccharomyces pastorianus
tgccggtacctctgtttattataac

SEQ ID NO: 93496 - DNA, 25 bp, Saccharomyces pastorianus
ttattatttccacctacccaatcaa

SEQ ID NO: 93497 - DNA, 25 bp, Saccharomyces pastorianus
ttcatttggattttgccggtacctc

SEQ ID NO: 93498 - DNA, 25 bp, Saccharomyces pastorianus
atgaccccaagccaaaagtgaccaa

SEQ ID NO: 93499 - DNA, 25 bp, Saccharomyces pastorianus
taccttcccgaagtttgatcaagtg

SEQ ID NO: 93500 - DNA, 25 bp, Saccharomyces pastorianus
tatgcgagtatcttgcgcttgataa

SEQ ID NO: 93501 - DNA, 25 bp, Saccharomyces pastorianus
gggatttgctttccaggaccactaa

SEQ ID NO: 93502 - DNA, 25 bp, Saccharomyces pastorianus
gaggcaactttttaaccatccgtga

SEQ ID NO: 93503 - DNA, 25 bp, Saccharomyces pastorianus
ccgtgatttggagacacaccttaaa

SEQ ID NO: 93504 - DNA, 25 bp, Saccharomyces pastorianus
gaaacaatacatcggcattgctggt

SEQ ID NO: 93505 - DNA, 25 bp, Saccharomyces pastorianus
gaatctgactccataaaagcgctac

SEQ ID NO: 93506 - DNA, 25 bp, Saccharomyces pastorianus
atatcctgcgttatcaatgaatctg

SEQ ID NO: 93507 - DNA, 25 bp, Saccharomyces pastorianus
tcatgtttcgatggctttgcccatt

SEQ ID NO: 93508 - DNA, 25 bp, Saccharomyces pastorianus
ggtaccatgtttactactcttgctg

SEQ ID NO: 93509 - DNA, 25 bp, Saccharomyces pastorianus
tatcccatggtttcctagctcaaat

SEQ ID NO: 93510 - DNA, 25 bp, Saccharomyces pastorianus
tttgcccattccagatgcagactca

SEQ ID NO: 93511 - DNA, 25 bp, Saccharomyces pastorianus
gagaacttatcctcatctttctatg

SEQ ID NO: 93512 - DNA, 25 bp, Saccharomyces pastorianus
gagcggacaaatacttcaaaccaat

SEQ ID NO: 93513 - DNA, 25 bp, Saccharomyces pastorianus
gcgctacaatgtattcatgccaagt

SEQ ID NO: 93514 - DNA, 25 bp, Saccharomyces pastorianus
ctagctcaaatattcaccatcctgg

SEQ ID NO: 93515 - DNA, 25 bp, Saccharomyces pastorianus
tcatgttgtgcccatttgaagctat

SEQ ID NO: 93516 - DNA, 25 bp, Saccharomyces pastorianus
gaaaggccaacgagtccatgtctgt

SEQ ID NO: 93517 - DNA, 25 bp, Saccharomyces pastorianus
agtccatgtctgtagcctctaaaag

SEQ ID NO: 93518 - DNA, 25 bp, Saccharomyces pastorianus
gaattcctcgctgatatcatgttgt

SEQ ID NO: 93519 - DNA, 25 bp, Saccharomyces pastorianus
ggtgcagacagattccttacacaat

SEQ ID NO: 93520 - DNA, 25 bp, Saccharomyces pastorianus
ctagttggttaagtcctggtgtcac

SEQ ID NO: 93521 - DNA, 25 bp, Saccharomyces pastorianus
tgtcactgtgtacttgatggcctca

SEQ ID NO: 93522 - DNA, 25 bp, Saccharomyces pastorianus
gaaacagcagactactatgccgccc

SEQ ID NO: 93523 - DNA, 25 bp, Saccharomyces pastorianus
attatgtgctgcagtctcacatcct

SEQ ID NO: 93524 - DNA, 25 bp, Saccharomyces pastorianus
ctcacatcctgcagacgttatggtt

SEQ ID NO: 93525 - DNA, 25 bp, Saccharomyces pastorianus
atgccgcccttttgcaataacgttg

SEQ ID NO: 93526 - DNA, 25 bp, Saccharomyces pastorianus
tttttgagtattttcgctttcattt

SEQ ID NO: 93527 - DNA, 25 bp, Saccharomyces pastorianus
ttcgttttctactttggtgctcata

SEQ ID NO: 93528 - DNA, 25 bp, Saccharomyces pastorianus
ttcgctttcattttcgttttctact

SEQ ID NO: 93529 - DNA, 25 bp, Saccharomyces pastorianus
tcattttcgttttctactttggtgc

SEQ ID NO: 93530 - DNA, 25 bp, Saccharomyces pastorianus
ttcattttcgttttctactttggtg

SEQ ID NO: 93531 - DNA, 25 bp, Saccharomyces pastorianus
tttgagtattttcgctttcattttc

SEQ ID NO: 93532 - DNA, 25 bp, Saccharomyces pastorianus
ggtgctcatagaacagtcatgaaca

SEQ ID NO: 93533 - DNA, 25 bp, Saccharomyces pastorianus
gctttcattttcgttttctactttg

SEQ ID NO: 93534 - DNA, 25 bp, Saccharomyces pastorianus
gagtattttcgctttcattttcgtt

SEQ ID NO: 93535 - DNA, 25 bp, Saccharomyces pastorianus
tgagtattttcgctttcattttcgt

SEQ ID NO: 93536 - DNA, 25 bp, Saccharomyces pastorianus
cattttcgttttctactttggtgct

SEQ ID NO: 93537 - DNA, 25 bp, Saccharomyces pastorianus
aactgttgaaggtgacgcctggccg

SEQ ID NO: 93538 - DNA, 25 bp, Saccharomyces pastorianus
gtttagttgatattgccaccgtcct

SEQ ID NO: 93539 - DNA, 25 bp, Saccharomyces pastorianus
gtaaattgcaggtacaagtccccgt

SEQ ID NO: 93540 - DNA, 25 bp, Saccharomyces pastorianus
gtcagtggttccgtggaggcatcat

SEQ ID NO: 93541 - DNA, 25 bp, Saccharomyces pastorianus
gggttgctgttagttccatgattga

SEQ ID NO: 93542 - DNA, 25 bp, Saccharomyces pastorianus
aagactcggcgcatctgatatcatg

SEQ ID NO: 93543 - DNA, 25 bp, Saccharomyces pastorianus
gtcatgaccgctcaaaggttcgttt

SEQ ID NO: 93544 - DNA, 25 bp, Saccharomyces pastorianus
acaagtccccgtaaatggcgagtat

SEQ ID NO: 93545 - DNA, 25 bp, Saccharomyces pastorianus
atgtatttataacgcacctgaagac

SEQ ID NO: 93546 - DNA, 25 bp, Saccharomyces pastorianus
ggcatcatgtgctctgggaattggt

SEQ ID NO: 93547 - DNA, 25 bp, Saccharomyces pastorianus
aagacaagctgcctgaactgttgaa

SEQ ID NO: 93548 - DNA, 25 bp, Saccharomyces pastorianus
tgcgttgctgttgcagcattgccat

SEQ ID NO: 93549 - DNA, 25 bp, Saccharomyces pastorianus
gctgagtttaactccgtttacgcca

SEQ ID NO: 93550 - DNA, 25 bp, Saccharomyces pastorianus
ggcagatatcaatcactttgctgag

SEQ ID NO: 93551 - DNA, 25 bp, Saccharomyces pastorianus
aaggttccattgctgataaggctga

SEQ ID NO: 93552 - DNA, 25 bp, Saccharomyces pastorianus
gcaattcctcattggacagggtcgt

SEQ ID NO: 93553 - DNA, 25 bp, Saccharomyces pastorianus
tccagtgaccccagacaacaagtta

SEQ ID NO: 93554 - DNA, 25 bp, Saccharomyces pastorianus
ctccgtttacgccaagtacttcaat

SEQ ID NO: 93555 - DNA, 25 bp, Saccharomyces pastorianus
ttcctttctggccaaattccagtga

SEQ ID NO: 93556 - DNA, 25 bp, Saccharomyces pastorianus
aaacctgccagatcatgcgttgctg

SEQ ID NO: 93557 - DNA, 25 bp, Saccharomyces pastorianus
gtacttcaatactcacaaacctgcc

SEQ ID NO: 93558 - DNA, 25 bp, Saccharomyces pastorianus
aactcccgttatttgtgaatccgct

SEQ ID NO: 93559 - DNA, 25 bp, Saccharomyces pastorianus
gaagtatgagactatgcaaccgctt

SEQ ID NO: 93560 - DNA, 25 bp, Saccharomyces pastorianus
tagtgggcgtgcattatgtgcaaga

SEQ ID NO: 93561 - DNA, 25 bp, Saccharomyces pastorianus
accgcttagtggagaagttgtgacc

SEQ ID NO: 93562 - DNA, 25 bp, Saccharomyces pastorianus
tctgataacggcagcgacggtagtg

SEQ ID NO: 93563 - DNA, 25 bp, Saccharomyces pastorianus
gcagcttcctgtctgataacggcag

SEQ ID NO: 93564 - DNA, 25 bp, Saccharomyces pastorianus
gaaagacaaacggagctgcatcatt

SEQ ID NO: 93565 - DNA, 25 bp, Saccharomyces pastorianus
gagactatgcaaccgcttagtggag

SEQ ID NO: 93566 - DNA, 25 bp, Saccharomyces pastorianus
gagctgcatcattagatcccacaaa

SEQ ID NO: 93567 - DNA, 25 bp, Saccharomyces pastorianus
ggtacttcaatatgagtgaacacga

SEQ ID NO: 93568 - DNA, 25 bp, Saccharomyces pastorianus
gagtagggctagcaagataacgttt

SEQ ID NO: 93569 - DNA, 25 bp, Saccharomyces pastorianus
aagataacgtttgcagcttcctgtc

SEQ ID NO: 93570 - DNA, 25 bp, Saccharomyces pastorianus
gatacgcggacttactatacaggtt

SEQ ID NO: 93571 - DNA, 25 bp, Saccharomyces pastorianus
gaactcaaccatttggaactgcagt

SEQ ID NO: 93572 - DNA, 25 bp, Saccharomyces pastorianus
gatgtatttttatcgctcctcgtgt

SEQ ID NO: 93573 - DNA, 25 bp, Saccharomyces pastorianus
tcgctcctcgtgtactttgatagaa

SEQ ID NO: 93574 - DNA, 25 bp, Saccharomyces pastorianus
agtttctgagcgatttcttctatag

SEQ ID NO: 93575 - DNA, 25 bp, Saccharomyces pastorianus
tattgccccacaacgaatgatgtat

SEQ ID NO: 93576 - DNA, 25 bp, Saccharomyces pastorianus
tggtcttgaccaatatttccagagg

SEQ ID NO: 93577 - DNA, 25 bp, Saccharomyces pastorianus
agggctcatcctcaaatgttcgtaa

SEQ ID NO: 93578 - DNA, 25 bp, Saccharomyces pastorianus
gagggaagcacgtaccacaaattgg

SEQ ID NO: 93579 - DNA, 25 bp, Saccharomyces pastorianus
gaggatccagaaatattgccccaca

SEQ ID NO: 93580 - DNA, 25 bp, Saccharomyces pastorianus
caatagtgtcactacgacccctaaa

SEQ ID NO: 93581 - DNA, 25 bp, Saccharomyces pastorianus
tcacggattcggtcagttctgttgc

SEQ ID NO: 93582 - DNA, 25 bp, Saccharomyces pastorianus
cacgtgggaacctcttgcgaaagtc

SEQ ID NO: 93583 - DNA, 25 bp, Saccharomyces pastorianus
gcaatggcagctatcggcgatccag

SEQ ID NO: 93584 - DNA, 25 bp, Saccharomyces pastorianus
tttattaggcaatgcggccgcactg

SEQ ID NO: 93585 - DNA, 25 bp, Saccharomyces pastorianus
tgctactatttttctgccttcatga

SEQ ID NO: 93586 - DNA, 25 bp, Saccharomyces pastorianus
ttctgttgcgtgttattgtctctgt

SEQ ID NO: 93587 - DNA, 25 bp, Saccharomyces pastorianus
tcttgtccctaattctgttcacgga

SEQ ID NO: 93588 - DNA, 25 bp, Saccharomyces pastorianus
tgggtattgccattcctgcctgcta

SEQ ID NO: 93589 - DNA, 25 bp, Saccharomyces pastorianus
tctctgtccactatcgctaataatg

SEQ ID NO: 93590 - DNA, 25 bp, Saccharomyces pastorianus
atccagcctggaagacgtattatga

SEQ ID NO: 93591 - DNA, 25 bp, Saccharomyces pastorianus
attgctttatcggtgcaagccacgt

SEQ ID NO: 93592 - DNA, 25 bp, Saccharomyces pastorianus
aacgggatctctagaccctttgata

SEQ ID NO: 93593 - DNA, 25 bp, Saccharomyces pastorianus
gcagctggcgccgtagaaagtatat

SEQ ID NO: 93594 - DNA, 25 bp, Saccharomyces pastorianus
gaccctttgatacacaacgttctgg

SEQ ID NO: 93595 - DNA, 25 bp, Saccharomyces pastorianus
aacctggacaatgttctgactctag

SEQ ID NO: 93596 - DNA, 25 bp, Saccharomyces pastorianus
gaggccgataagctacatttcataa

SEQ ID NO: 93597 - DNA, 25 bp, Saccharomyces pastorianus
acgttctggattcgtacttggtgaa

SEQ ID NO: 93598 - DNA, 25 bp, Saccharomyces pastorianus
agatgccgcataccttaaacctgga

SEQ ID NO: 93599 - DNA, 25 bp, Saccharomyces pastorianus
aacataatttctgagctcgtgggct

SEQ ID NO: 93600 - DNA, 25 bp, Saccharomyces pastorianus
gttgactacgtcaatgcacatgcta

SEQ ID NO: 93601 - DNA, 25 bp, Saccharomyces pastorianus
gcctcagcactcttaccaggaagat

SEQ ID NO: 93602 - DNA, 25 bp, Saccharomyces pastorianus
agagtgtctggcagtagcctcagca

SEQ ID NO: 93603 - DNA, 25 bp, Saccharomyces pastorianus
aatccatcagagttggcggctacaa

SEQ ID NO: 93604 - DNA, 25 bp, Saccharomyces pastorianus
tgcaacgctttgaacgctctaccaa

SEQ ID NO: 93605 - DNA, 25 bp, Saccharomyces pastorianus
tccagcaggtattgccgccggaaaa

SEQ ID NO: 93606 - DNA, 25 bp, Saccharomyces pastorianus
tattgccactactttcgacttggac

SEQ ID NO: 93607 - DNA, 25 bp, Saccharomyces pastorianus
gaagtcccaggtgcagttaagctgt

SEQ ID NO: 93608 - DNA, 25 bp, Saccharomyces pastorianus
gaccaaagtacttcattaccgctaa

SEQ ID NO: 93609 - DNA, 25 bp, Saccharomyces pastorianus
ttgatgccattgctaagttcgctcc

SEQ ID NO: 93610 - DNA, 25 bp, Saccharomyces pastorianus
gaaatgggctgtggcaacttccggt

SEQ ID NO: 93611 - DNA, 25 bp, Saccharomyces pastorianus
aaagccgccggttgtaagatcattg

SEQ ID NO: 93612 - DNA, 25 bp, Saccharomyces pastorianus
gatcaatgagcaagacccttccaaa

SEQ ID NO: 93613 - DNA, 25 bp, Saccharomyces pastorianus
gaacacgttatccaagtctcgcatg

SEQ ID NO: 93614 - DNA, 25 bp, Saccharomyces pastorianus
gcgatagaagaaccagcctcccaga

SEQ ID NO: 93615 - DNA, 25 bp, Saccharomyces pastorianus
gaaatctgtctgtaggcggattgaa

SEQ ID NO: 93616 - DNA, 25 bp, Saccharomyces pastorianus
aacaagggtcagaacctgcggcgat

SEQ ID NO: 93617 - DNA, 25 bp, Saccharomyces pastorianus
gctcccgctttgtcaccagaagaaa

SEQ ID NO: 93618 - DNA, 25 bp, Saccharomyces pastorianus
ttggctgaagaactgggccttgtca

SEQ ID NO: 93619 - DNA, 25 bp, Saccharomyces pastorianus
ggacgttcaaaagccctctgatgga

SEQ ID NO: 93620 - DNA, 25 bp, Saccharomyces pastorianus
aaatgcaaacaaccgctccagagta

SEQ ID NO: 93621 - DNA, 25 bp, Saccharomyces pastorianus
gaacaagctgctgcttccactgctg

SEQ ID NO: 93622 - DNA, 25 bp, Saccharomyces pastorianus
gaaagtgaagtttctccacaggaac

SEQ ID NO: 93623 - DNA, 25 bp, Saccharomyces pastorianus
ttaaataagaaactgcaccgcgcta

SEQ ID NO: 93624 - DNA, 25 bp, Saccharomyces pastorianus
gaccttctgctactgcttcagagaa

SEQ ID NO: 93625 - DNA, 25 bp, Saccharomyces pastorianus
aagatgcaagcactcccggtaaaga

SEQ ID NO: 93626 - DNA, 25 bp, Saccharomyces pastorianus
ctaatactgggatctcttgtcaaag

SEQ ID NO: 93627 - DNA, 25 bp, Saccharomyces pastorianus
gcttccatttcccttgtggtagaaa

SEQ ID NO: 93628 - DNA, 25 bp, Saccharomyces pastorianus
aactattcgctgacctatcacaaga

SEQ ID NO: 93629 - DNA, 25 bp, Saccharomyces pastorianus
gaacggctgtcatcaatcgaatttt

SEQ ID NO: 93630 - DNA, 25 bp, Saccharomyces pastorianus
gggtttgatgcatctttggcaccaa

SEQ ID NO: 93631 - DNA, 25 bp, Saccharomyces pastorianus
ctgaggtcttgagtgcacattcttc

SEQ ID NO: 93632 - DNA, 25 bp, Saccharomyces pastorianus
aacagcttttcacatttaccgtctt

SEQ ID NO: 93633 - DNA, 25 bp, Saccharomyces pastorianus
gacgaggtcaagcacatcggcagat

SEQ ID NO: 93634 - DNA, 25 bp, Saccharomyces pastorianus
aaaggctatttatgcccgctacacg

SEQ ID NO: 93635 - DNA, 25 bp, Saccharomyces pastorianus
tgacactccatcaatatcccttggt

SEQ ID NO: 93636 - DNA, 25 bp, Saccharomyces pastorianus
aattttcttcgactgggagctacca

SEQ ID NO: 93637 - DNA, 25 bp, Saccharomyces pastorianus
gtctccatcctttaactggccaaaa

SEQ ID NO: 93638 - DNA, 25 bp, Saccharomyces pastorianus
tcacattggccggtttacacactaa

SEQ ID NO: 93639 - DNA, 25 bp, Saccharomyces pastorianus
ggtgatctaggttacatctggcaat

SEQ ID NO: 93640 - DNA, 25 bp, Saccharomyces pastorianus
tggctagcttacaacttgtctccat

SEQ ID NO: 93641 - DNA, 25 bp, Saccharomyces pastorianus
ataacttctctcgtgactttgccaa

SEQ ID NO: 93642 - DNA, 25 bp, Saccharomyces pastorianus
aacgctttagctgtccataacttct

SEQ ID NO: 93643 - DNA, 25 bp, Saccharomyces pastorianus
atgttctatcatgagggcccgtgca

SEQ ID NO: 93644 - DNA, 25 bp, Saccharomyces pastorianus
agctgctatgggaaccggtgtcaca

SEQ ID NO: 93645 - DNA, 25 bp, Saccharomyces pastorianus
gagaaattccctgaccaatggctag

SEQ ID NO: 93646 - DNA, 25 bp, Saccharomyces pastorianus
gaggtgggacgcaatgttctatcat

SEQ ID NO: 93647 - DNA, 25 bp, Saccharomyces pastorianus
ccttcttatccttctttgtcattta

SEQ ID NO: 93648 - DNA, 25 bp, Saccharomyces pastorianus
gcaggtcttcaaaaactttcacggt

SEQ ID NO: 93649 - DNA, 25 bp, Saccharomyces pastorianus
acttgtatttttccacccagcaata

SEQ ID NO: 93650 - DNA, 25 bp, Saccharomyces pastorianus
tttcaccatcctccgtggtaaccgt

SEQ ID NO: 93651 - DNA, 25 bp, Saccharomyces pastorianus
aatgcagaacttgtccctttatgaa

SEQ ID NO: 93652 - DNA, 25 bp, Saccharomyces pastorianus
agcaataccccttaagaacgctgcc

SEQ ID NO: 93653 - DNA, 25 bp, Saccharomyces pastorianus
aagtcaattgccgagagccgtccac

SEQ ID NO: 93654 - DNA, 25 bp, Saccharomyces pastorianus
agtttcaaaaccctgcaggtcttca

SEQ ID NO: 93655 - DNA, 25 bp, Saccharomyces pastorianus
atacgctagaaatcttttgccttat

SEQ ID NO: 93656 - DNA, 25 bp, Saccharomyces pastorianus
taatacccctgattacaggatgcat

SEQ ID NO: 93657 - DNA, 25 bp, Saccharomyces pastorianus
gacgaaaacagtcgatacctaattt

SEQ ID NO: 93658 - DNA, 25 bp, Saccharomyces pastorianus
aaattactacccaccatttgtgcta

SEQ ID NO: 93659 - DNA, 25 bp, Saccharomyces pastorianus
cgtcacctgcaccagcatattgaaa

SEQ ID NO: 93660 - DNA, 25 bp, Saccharomyces pastorianus
taagcaagccgttaggaaacctgag

SEQ ID NO: 93661 - DNA, 25 bp, Saccharomyces pastorianus
gtgatgctgcaaattctcattctaa

SEQ ID NO: 93662 - DNA, 25 bp, Saccharomyces pastorianus
ttctaagaagttcgtgcgtcacctg

SEQ ID NO: 93663 - DNA, 25 bp, Saccharomyces pastorianus
gacctgcagggttttgaaactttca

SEQ ID NO: 93664 - DNA, 25 bp, Saccharomyces pastorianus
gaataccatggtagacctttcaaga

SEQ ID NO: 93665 - DNA, 25 bp, Saccharomyces pastorianus
acgagtcgcacgaggaccctgaaaa

SEQ ID NO: 93666 - DNA, 25 bp, Saccharomyces pastorianus
ttgataaaatcacctggcattacgg

SEQ ID NO: 93667 - DNA, 25 bp, Saccharomyces pastorianus
tgatttcgatcatttgcactgtaaa

SEQ ID NO: 93668 - DNA, 25 bp, Saccharomyces pastorianus
gttcaaacggttaccacggaggatg

SEQ ID NO: 93669 - DNA, 25 bp, Saccharomyces pastorianus
ctaccatggtattcagtttcctcac

SEQ ID NO: 93670 - DNA, 25 bp, Saccharomyces pastorianus
tcaggtttcctaacggcttgcttaa

SEQ ID NO: 93671 - DNA, 25 bp, Saccharomyces pastorianus
gatgcttttcaatatgctggtgcag

SEQ ID NO: 93672 - DNA, 25 bp, Saccharomyces pastorianus
gcgcctacaggatgtgttttgtaat

SEQ ID NO: 93673 - DNA, 25 bp, Saccharomyces pastorianus
tcgacaaataccatagcatcttcat

SEQ ID NO: 93674 - DNA, 25 bp, Saccharomyces pastorianus
agtttcctcaccgtaatgccaggtg

SEQ ID NO: 93675 - DNA, 25 bp, Saccharomyces pastorianus
gtctcttccttcgatttttcgtgaa

SEQ ID NO: 93676 - DNA, 25 bp, Saccharomyces pastorianus
ttttatcaaatgtctcttccttcga

SEQ ID NO: 93677 - DNA, 25 bp, Saccharomyces pastorianus
catcttcatgtgtgcaaactacttg

SEQ ID NO: 93678 - DNA, 25 bp, Saccharomyces pastorianus
aggtgacgcacgaacttcttagaat

SEQ ID NO: 93679 - DNA, 25 bp, Saccharomyces pastorianus
cacaacctttaatttgcgcctacag

SEQ ID NO: 93680 - DNA, 25 bp, Saccharomyces pastorianus
accgggtatctttggtccacaacat

SEQ ID NO: 93681 - DNA, 25 bp, Saccharomyces pastorianus
gaagcgccctatatctatcaaatcc

SEQ ID NO: 93682 - DNA, 25 bp, Saccharomyces pastorianus
cactagggaatgctgttgacttttt

SEQ ID NO: 93683 - DNA, 25 bp, Saccharomyces pastorianus
aagatccttatgacgcactagggaa

SEQ ID NO: 93684 - DNA, 25 bp, Saccharomyces pastorianus
ataaggtgcctattcagcagcaaca

SEQ ID NO: 93685 - DNA, 25 bp, Saccharomyces pastorianus
agaagcaatctcttgctgcagagga

SEQ ID NO: 93686 - DNA, 25 bp, Saccharomyces pastorianus
aaacttgtggagatcctggctataa

SEQ ID NO: 93687 - DNA, 25 bp, Saccharomyces pastorianus
aatgctacaagtcactcccatggta

SEQ ID NO: 93688 - DNA, 25 bp, Saccharomyces pastorianus
gactgcaaaccgtctcacagcaaat

SEQ ID NO: 93689 - DNA, 25 bp, Saccharomyces pastorianus
agactacactgcttctgtcgttcaa

SEQ ID NO: 93690 - DNA, 25 bp, Saccharomyces pastorianus
gtcgttcaattcttgcagagtgtca

SEQ ID NO: 93691 - DNA, 25 bp, Saccharomyces pastorianus
gagctctcaagggtacagatgcaaa

SEQ ID NO: 93692 - DNA, 25 bp, Saccharomyces pastorianus
gttcaacctctctttttgtgctgat

SEQ ID NO: 93693 - DNA, 25 bp, Saccharomyces pastorianus
gatgcagacttatttctcacttcag

SEQ ID NO: 93694 - DNA, 25 bp, Saccharomyces pastorianus
atgcaacggatggtggagctctcaa

SEQ ID NO: 93695 - DNA, 25 bp, Saccharomyces pastorianus
gagtatccgactttctttctcgtaa

SEQ ID NO: 93696 - DNA, 25 bp, Saccharomyces pastorianus
tatttctcacttcagatctctcttt

SEQ ID NO: 93697 - DNA, 25 bp, Saccharomyces pastorianus
cagatgcaaatcctgctatggtgga

SEQ ID NO: 93698 - DNA, 25 bp, Saccharomyces pastorianus
gttcaacagttggatcacagtggat

SEQ ID NO: 93699 - DNA, 25 bp, Saccharomyces pastorianus
cacccaccttgatcacagcaaattg

SEQ ID NO: 93700 - DNA, 25 bp, Saccharomyces pastorianus
ggaagcgttaagtctctttgtcgag

SEQ ID NO: 93701 - DNA, 25 bp, Saccharomyces pastorianus
gaaacatacctctttgagtatccga

SEQ ID NO: 93702 - DNA, 25 bp, Saccharomyces pastorianus
gctgccaaaattgctaatcccggtt

SEQ ID NO: 93703 - DNA, 25 bp, Saccharomyces pastorianus
tctttgaccgtctctattccaataa

SEQ ID NO: 93704 - DNA, 25 bp, Saccharomyces pastorianus
gaaatctcagctcgcattgggcaca

SEQ ID NO: 93705 - DNA, 25 bp, Saccharomyces pastorianus
gccgctactcaatgtctgcaaaata

SEQ ID NO: 93706 - DNA, 25 bp, Saccharomyces pastorianus
gggcagtggtttcaaggtatctctt

SEQ ID NO: 93707 - DNA, 25 bp, Saccharomyces pastorianus
gtcatcgatgatatcccactggtta

SEQ ID NO: 93708 - DNA, 25 bp, Saccharomyces pastorianus
aatcccggttgttatgctactggtt

SEQ ID NO: 93709 - DNA, 25 bp, Saccharomyces pastorianus
taacttacttaaaggcgccgctact

SEQ ID NO: 93710 - DNA, 25 bp, Saccharomyces pastorianus
aatgttgcattcatgccccatgttg

SEQ ID NO: 93711 - DNA, 25 bp, Saccharomyces pastorianus
ttgcgcaaccatcgataacttactt

SEQ ID NO: 93712 - DNA, 25 bp, Saccharomyces pastorianus
ggttcgcaattaactatttctccgt

SEQ ID NO: 93713 - DNA, 25 bp, Saccharomyces pastorianus
agagaggcatctccagctccaacag

SEQ ID NO: 93714 - DNA, 25 bp, Saccharomyces pastorianus
atggcagccgatcgttctgtctata

SEQ ID NO: 93715 - DNA, 25 bp, Saccharomyces pastorianus
gcatctgctgcaattcaatttacta

SEQ ID NO: 93716 - DNA, 25 bp, Saccharomyces pastorianus
atttgagaacccaagctgcatctgc

SEQ ID NO: 93717 - DNA, 25 bp, Saccharomyces pastorianus
gatagctcctcggaagcttcaagag

SEQ ID NO: 93718 - DNA, 25 bp, Saccharomyces pastorianus
caaacgcaactattccatctctaga

SEQ ID NO: 93719 - DNA, 25 bp, Saccharomyces pastorianus
gatatttccaacttgaagcgtccat

SEQ ID NO: 93720 - DNA, 25 bp, Saccharomyces pastorianus
aagcgtccatcatatatgccttcca

SEQ ID NO: 93721 - DNA, 25 bp, Saccharomyces pastorianus
gtacctgccccaactaagaatgaag

SEQ ID NO: 93722 - DNA, 25 bp, Saccharomyces pastorianus
tatatgccttccagtgcaagctacg

SEQ ID NO: 93723 - DNA, 25 bp, Saccharomyces pastorianus
gctccaacaggtagccactcattaa

SEQ ID NO: 93724 - DNA, 25 bp, Saccharomyces pastorianus
tgaagaacgatataggcgcatcctg

SEQ ID NO: 93725 - DNA, 25 bp, Saccharomyces pastorianus
gtataaatatattgcctcggtaacg

SEQ ID NO: 93726 - DNA, 25 bp, Saccharomyces pastorianus
ttatcgaccgaatcaacttccaacc

SEQ ID NO: 93727 - DNA, 25 bp, Saccharomyces pastorianus
atgaaatcaatttatcgaccgaatc

SEQ ID NO: 93728 - DNA, 25 bp, Saccharomyces pastorianus
tattgcctcggtaacgacgttgaac

SEQ ID NO: 93729 - DNA, 25 bp, Saccharomyces pastorianus
gaaggactcaacgaagaaaacgcta

SEQ ID NO: 93730 - DNA, 25 bp, Saccharomyces pastorianus
gaaaacgctaatttctcattgaaga

SEQ ID NO: 93731 - DNA, 25 bp, Saccharomyces pastorianus
tctcctctgcccgaaagaaaactag

SEQ ID NO: 93732 - DNA, 25 bp, Saccharomyces pastorianus
gaaaagcactcttctttgtataaat

SEQ ID NO: 93733 - DNA, 25 bp, Saccharomyces pastorianus
ataggcgcatcctgggaatctaaaa

SEQ ID NO: 93734 - DNA, 25 bp, Saccharomyces pastorianus
gaatcaacttccaaccttcttataa

SEQ ID NO: 93735 - DNA, 25 bp, Saccharomyces pastorianus
gggtcagtgcaggactatttacttt

SEQ ID NO: 93736 - DNA, 25 bp, Saccharomyces pastorianus
ataccactggagagctgctgcgatt

SEQ ID NO: 93737 - DNA, 25 bp, Saccharomyces pastorianus
ggaaaaagatcgctttgcccacacg

SEQ ID NO: 93738 - DNA, 25 bp, Saccharomyces pastorianus
gaggatcaggtccttatgatgacag

SEQ ID NO: 93739 - DNA, 25 bp, Saccharomyces pastorianus
gcccactttgttgtgctttttctta

SEQ ID NO: 93740 - DNA, 25 bp, Saccharomyces pastorianus
gctttttcttattggttgctgtcat

SEQ ID NO: 93741 - DNA, 25 bp, Saccharomyces pastorianus
gagcgtacctttttgtcgtggttga

SEQ ID NO: 93742 - DNA, 25 bp, Saccharomyces pastorianus
ttgcccacacgagttgagccaaaag

SEQ ID NO: 93743 - DNA, 25 bp, Saccharomyces pastorianus
ctttacagttatgctgggaggcctt

SEQ ID NO: 93744 - DNA, 25 bp, Saccharomyces pastorianus
atacgcgcttgtaacataccactgg

SEQ ID NO: 93745 - DNA, 25 bp, Saccharomyces pastorianus
aaaagtgttctttgccaatgagcgt

SEQ ID NO: 93746 - DNA, 25 bp, Saccharomyces pastorianus
ctgtatccaagttttctactgttga

SEQ ID NO: 93747 - DNA, 25 bp, Saccharomyces pastorianus
aagtttgctgcgctggttccagaat

SEQ ID NO: 93748 - DNA, 25 bp, Saccharomyces pastorianus
aaggattacaccgagtcactaaagg

SEQ ID NO: 93749 - DNA, 25 bp, Saccharomyces pastorianus
gtttggtcccattgtaactgtatcc

SEQ ID NO: 93750 - DNA, 25 bp, Saccharomyces pastorianus
gattctcaatatgggttagccgcag

SEQ ID NO: 93751 - DNA, 25 bp, Saccharomyces pastorianus
ggtcggtgacccatttgatgaggaa

SEQ ID NO: 93752 - DNA, 25 bp, Saccharomyces pastorianus
agccaacagtgtttgctgatgtcaa

SEQ ID NO: 93753 - DNA, 25 bp, Saccharomyces pastorianus
ggctgctttaagtaactacactcaa

SEQ ID NO: 93754 - DNA, 25 bp, Saccharomyces pastorianus
cgcaggtattcacactaacgatatt

SEQ ID NO: 93755 - DNA, 25 bp, Saccharomyces pastorianus
caaaatgttcctttcggtggcttcg

SEQ ID NO: 93756 - DNA, 25 bp, Saccharomyces pastorianus
aacaaggctgttgatgtgtccaaaa

SEQ ID NO: 93757 - DNA, 25 bp, Saccharomyces pastorianus
gattccattctatccaatttcgaaa

SEQ ID NO: 93758 - DNA, 25 bp, Saccharomyces pastorianus
gtggaaggactggtactttgtgtac

SEQ ID NO: 93759 - DNA, 25 bp, Saccharomyces pastorianus
tttgggcactttactcaatcctatc

SEQ ID NO: 93760 - DNA, 25 bp, Saccharomyces pastorianus
atgactgcttgctattttactttag

SEQ ID NO: 93761 - DNA, 25 bp, Saccharomyces pastorianus
actcaatcctatctcaatcttacaa

SEQ ID NO: 93762 - DNA, 25 bp, Saccharomyces pastorianus
actgctgctgcttgtgatgatgatg

SEQ ID NO: 93763 - DNA, 25 bp, Saccharomyces pastorianus
tactatcaaaacgaccaacttccta

SEQ ID NO: 93764 - DNA, 25 bp, Saccharomyces pastorianus
ctttgtgtaccattgattccattct

SEQ ID NO: 93765 - DNA, 25 bp, Saccharomyces pastorianus
aaaattggcctgatttgggcacttt

SEQ ID NO: 93766 - DNA, 25 bp, Saccharomyces pastorianus
acccggcaaagttattcgatccaat

SEQ ID NO: 93767 - DNA, 25 bp, Saccharomyces pastorianus
aacttcctaccattttggttcattg

SEQ ID NO: 93768 - DNA, 25 bp, Saccharomyces pastorianus
aaggcaccttttgaggctgaagcaa

SEQ ID NO: 93769 - DNA, 25 bp, Saccharomyces pastorianus
agcgtagaggccacatactcatcaa

SEQ ID NO: 93770 - DNA, 25 bp, Saccharomyces pastorianus
tggaagttcctgtttcctatcgtta

SEQ ID NO: 93771 - DNA, 25 bp, Saccharomyces pastorianus
aatcaagcttccgtcactggacagt

SEQ ID NO: 93772 - DNA, 25 bp, Saccharomyces pastorianus
agcgcatcatggaggacttggccga

SEQ ID NO: 93773 - DNA, 25 bp, Saccharomyces pastorianus
tggtgtacaacgcattccaaagaca

SEQ ID NO: 93774 - DNA, 25 bp, Saccharomyces pastorianus
gaagtttcttgccagaaggcacctt

SEQ ID NO: 93775 - DNA, 25 bp, Saccharomyces pastorianus
aaatgctgaagctactttgcacaag

SEQ ID NO: 93776 - DNA, 25 bp, Saccharomyces pastorianus
agacaaagtctcaaggccgttataa

SEQ ID NO: 93777 - DNA, 25 bp, Saccharomyces pastorianus
gtcggcacaaatctcaataaccagg

SEQ ID NO: 93778 - DNA, 25 bp, Saccharomyces pastorianus
tacaagtaccagtgaagagcgcatc

SEQ ID NO: 93779 - DNA, 25 bp, Saccharomyces pastorianus
agctagcaataactattccctccac

SEQ ID NO: 93780 - DNA, 25 bp, Saccharomyces pastorianus
gagtatcacactcatgaaacaggaa

SEQ ID NO: 93781 - DNA, 25 bp, Saccharomyces pastorianus
gtatccgcactatattggacacaat

SEQ ID NO: 93782 - DNA, 25 bp, Saccharomyces pastorianus
aatggttcttgtagacgccgctggc

SEQ ID NO: 93783 - DNA, 25 bp, Saccharomyces pastorianus
actggttcgaattctttgtgtattc

SEQ ID NO: 93784 - DNA, 25 bp, Saccharomyces pastorianus
tgttcacgatgtgcctaaagtttcc

SEQ ID NO: 93785 - DNA, 25 bp, Saccharomyces pastorianus
ttccctccacgacatccatgaaaag

SEQ ID NO: 93786 - DNA, 25 bp, Saccharomyces pastorianus
ggaatcatttccatcttactttaga

SEQ ID NO: 93787 - DNA, 25 bp, Saccharomyces pastorianus
gatgtttgacgacgaaatggttctt

SEQ ID NO: 93788 - DNA, 25 bp, Saccharomyces pastorianus
agagatctctacgaagctgtattaa

SEQ ID NO: 93789 - DNA, 25 bp, Saccharomyces pastorianus
ttgggcatagataaagtctccggtt

SEQ ID NO: 93790 - DNA, 25 bp, Saccharomyces pastorianus
atatctaccattaccttccagcatt

SEQ ID NO: 93791 - DNA, 25 bp, Saccharomyces pastorianus
ttgtcagaactctctagcttggcga

SEQ ID NO: 93792 - DNA, 25 bp, Saccharomyces pastorianus
ttcttatatctaccattaccttcca

SEQ ID NO: 93793 - DNA, 25 bp, Saccharomyces pastorianus
ccattaccttccagcattttttcaa

SEQ ID NO: 93794 - DNA, 25 bp, Saccharomyces pastorianus
agaactctctagcttggcgattctc

SEQ ID NO: 93795 - DNA, 25 bp, Saccharomyces pastorianus
gtgcggctttcgtatctgcgtctca

SEQ ID NO: 93796 - DNA, 25 bp, Saccharomyces pastorianus
ggcgattctctatcaacctgttatt

SEQ ID NO: 93797 - DNA, 25 bp, Saccharomyces pastorianus
tctagcttggcgattctctatcaac

SEQ ID NO: 93798 - DNA, 25 bp, Saccharomyces pastorianus
cttgccgcttgtcagaactctctag

SEQ ID NO: 93799 - DNA, 25 bp, Saccharomyces pastorianus
tcaacctgttattccaattcttata

SEQ ID NO: 93800 - DNA, 25 bp, Saccharomyces pastorianus
gctttcgtatctgcgtctcatcctt

SEQ ID NO: 93801 - DNA, 25 bp, Saccharomyces pastorianus
tctactacttcgttatcggaccagt

SEQ ID NO: 93802 - DNA, 25 bp, Saccharomyces pastorianus
aatctcacctctgattctactactt

SEQ ID NO: 93803 - DNA, 25 bp, Saccharomyces pastorianus
agacaatgcaaattacccactctcc

SEQ ID NO: 93804 - DNA, 25 bp, Saccharomyces pastorianus
gtgcctccatgattgccacgaagga

SEQ ID NO: 93805 - DNA, 25 bp, Saccharomyces pastorianus
aagtaacgctgattctgctccatta

SEQ ID NO: 93806 - DNA, 25 bp, Saccharomyces pastorianus
ttttacaaactcaacaccacttcca

SEQ ID NO: 93807 - DNA, 25 bp, Saccharomyces pastorianus
agaacgaactcaggttgctccatca

SEQ ID NO: 93808 - DNA, 25 bp, Saccharomyces pastorianus
tccaatattgcctctggtgaagata

SEQ ID NO: 93809 - DNA, 25 bp, Saccharomyces pastorianus
aagatgttgcatctgccatctctct

SEQ ID NO: 93810 - DNA, 25 bp, Saccharomyces pastorianus
catctctctctatgatcagtccatt

SEQ ID NO: 93811 - DNA, 25 bp, Saccharomyces pastorianus
tggaacaaagtctcctaccccgaag

SEQ ID NO: 93812 - DNA, 25 bp, Saccharomyces pastorianus
gaatggccagcaacagtgtacctaa

SEQ ID NO: 93813 - DNA, 25 bp, Saccharomyces pastorianus
ttggtcttcgtattgctgtcttgct

SEQ ID NO: 93814 - DNA, 25 bp, Saccharomyces pastorianus
gataaatctcttggtggcggcgacg

SEQ ID NO: 93815 - DNA, 25 bp, Saccharomyces pastorianus
aacttcgtttggcttattggagata

SEQ ID NO: 93816 - DNA, 25 bp, Saccharomyces pastorianus
gtacctaatcatgcttggtcttcgt

SEQ ID NO: 93817 - DNA, 25 bp, Saccharomyces pastorianus
ttaattgcacccactcttttcgaag

SEQ ID NO: 93818 - DNA, 25 bp, Saccharomyces pastorianus
gccatgagccccacgtatatttgaa

SEQ ID NO: 93819 - DNA, 25 bp, Saccharomyces pastorianus
aggcatctctctttggatcattgtc

SEQ ID NO: 93820 - DNA, 25 bp, Saccharomyces pastorianus
tactacacaccttctggaatggcca

SEQ ID NO: 93821 - DNA, 25 bp, Saccharomyces pastorianus
gatcattgtcattcgttagcttggt

SEQ ID NO: 93822 - DNA, 25 bp, Saccharomyces pastorianus
ggcggcgacggtgatacatttaatt

SEQ ID NO: 93823 - DNA, 25 bp, Saccharomyces pastorianus
cactcaagggtggattcctcaagat

SEQ ID NO: 93824 - DNA, 25 bp, Saccharomyces pastorianus
gaagtttgggacatctttgcccaga

SEQ ID NO: 93825 - DNA, 25 bp, Saccharomyces pastorianus
atcagttcatgtacaagcgcacccg

SEQ ID NO: 93826 - DNA, 25 bp, Saccharomyces pastorianus
gccccacctgttaagctactgagaa

SEQ ID NO: 93827 - DNA, 25 bp, Saccharomyces pastorianus
agcgcacccgtaatcaacatcaatg

SEQ ID NO: 93828 - DNA, 25 bp, Saccharomyces pastorianus
aaattccggcagtattgttaagcaa

SEQ ID NO: 93829 - DNA, 25 bp, Saccharomyces pastorianus
aattaattactgcagttgccccacc

SEQ ID NO: 93830 - DNA, 25 bp, Saccharomyces pastorianus
gatgggcccaagatttatgacttaa

SEQ ID NO: 93831 - DNA, 25 bp, Saccharomyces pastorianus
aattcatcgcctatgatgggcccaa

SEQ ID NO: 93832 - DNA, 25 bp, Saccharomyces pastorianus
tacaccatttgctgccactcaaggg

SEQ ID NO: 93833 - DNA, 25 bp, Saccharomyces pastorianus
ggagcatgcacaaaacctttcattt

SEQ ID NO: 93834 - DNA, 25 bp, Saccharomyces pastorianus
gaagaccgtcaatgatattttatcg

SEQ ID NO: 93835 - DNA, 25 bp, Saccharomyces pastorianus
tccatctttgatccaagccgtgaaa

SEQ ID NO: 93836 - DNA, 25 bp, Saccharomyces pastorianus
atatcatcttgacaccacacattgg

SEQ ID NO: 93837 - DNA, 25 bp, Saccharomyces pastorianus
gtgcgtgtgttatacattcaccaaa

SEQ ID NO: 93838 - DNA, 25 bp, Saccharomyces pastorianus
tcgaaaagcaattttccgattcaaa

SEQ ID NO: 93839 - DNA, 25 bp, Saccharomyces pastorianus
tctcttctgttgaccaaagcgatat

SEQ ID NO: 93840 - DNA, 25 bp, Saccharomyces pastorianus
gatattttatcgaaccataacatcg

SEQ ID NO: 93841 - DNA, 25 bp, Saccharomyces pastorianus
atggctgatatctcttctgttgacc

SEQ ID NO: 93842 - DNA, 25 bp, Saccharomyces pastorianus
gaaattgcttatttaatggctgata

SEQ ID NO: 93843 - DNA, 25 bp, Saccharomyces pastorianus
tttgctgctatgaaggatggcgctt

SEQ ID NO: 93844 - DNA, 25 bp, Saccharomyces pastorianus
ttgatccaagccgtgaaagccaaca

SEQ ID NO: 93845 - DNA, 25 bp, Saccharomyces pastorianus
gaaccctattgaacaaactgccagc

SEQ ID NO: 93846 - DNA, 25 bp, Saccharomyces pastorianus
aggtgtaggccatcaaacgggtatt

SEQ ID NO: 93847 - DNA, 25 bp, Saccharomyces pastorianus
aactgccagcagatacaattacttt

SEQ ID NO: 93848 - DNA, 25 bp, Saccharomyces pastorianus
atgtcacatttgtttgccggaaaca

SEQ ID NO: 93849 - DNA, 25 bp, Saccharomyces pastorianus
acgaatttgattgtacctggtgcag

SEQ ID NO: 93850 - DNA, 25 bp, Saccharomyces pastorianus
aaaaccaacagcgacattccagatg

SEQ ID NO: 93851 - DNA, 25 bp, Saccharomyces pastorianus
gatccgaattccatcggttcagtgg

SEQ ID NO: 93852 - DNA, 25 bp, Saccharomyces pastorianus
gatttggcgcaaactacaatggatg

SEQ ID NO: 93853 - DNA, 25 bp, Saccharomyces pastorianus
gggtccatgggagggaacccacata

SEQ ID NO: 93854 - DNA, 25 bp, Saccharomyces pastorianus
gacagtaaaccgtgcttcgggtcca

SEQ ID NO: 93855 - DNA, 25 bp, Saccharomyces pastorianus
ggtgaagccaattacgatgccttag

SEQ ID NO: 93856 - DNA, 25 bp, Saccharomyces pastorianus
aagttagtttcactggtgcccgagg

SEQ ID NO: 93857 - DNA, 25 bp, Saccharomyces pastorianus
tggccggcctatgcatttactcaat

SEQ ID NO: 93858 - DNA, 25 bp, Saccharomyces pastorianus
actcaatcagcttggtttgcacctt

SEQ ID NO: 93859 - DNA, 25 bp, Saccharomyces pastorianus
gaatttttgccacgtttgagttcct

SEQ ID NO: 93860 - DNA, 25 bp, Saccharomyces pastorianus
aagaccaaattcctctgtgtggccg

SEQ ID NO: 93861 - DNA, 25 bp, Saccharomyces pastorianus
aagcctggaccattcttgtgaagtg

SEQ ID NO: 93862 - DNA, 25 bp, Saccharomyces pastorianus
aatcaagctgctttggactaccatg

SEQ ID NO: 93863 - DNA, 25 bp, Saccharomyces pastorianus
gggaagctaattacccttttgcaat

SEQ ID NO: 93864 - DNA, 25 bp, Saccharomyces pastorianus
ttgagttcctttccatatccatcta

SEQ ID NO: 93865 - DNA, 25 bp, Saccharomyces pastorianus
ggacctattgaaacagctcgctgcc

SEQ ID NO: 93866 - DNA, 25 bp, Saccharomyces pastorianus
tttgcggaacccatcgaatttcact

SEQ ID NO: 93867 - DNA, 25 bp, Saccharomyces pastorianus
ctttcccaaagatatagcgcagaga

SEQ ID NO: 93868 - DNA, 25 bp, Saccharomyces pastorianus
aatccaaggactcattctgtttccc

SEQ ID NO: 93869 - DNA, 25 bp, Saccharomyces pastorianus
gattccgataagattcaaacctatt

SEQ ID NO: 93870 - DNA, 25 bp, Saccharomyces pastorianus
gccttgattgcaaatctttcccaaa

SEQ ID NO: 93871 - DNA, 25 bp, Saccharomyces pastorianus
gagagactgtttagcgagaatccaa

SEQ ID NO: 93872 - DNA, 25 bp, Saccharomyces pastorianus
ttctgtttcccgtatcgtggtggaa

SEQ ID NO: 93873 - DNA, 25 bp, Saccharomyces pastorianus
caaggagccgctagtgaatttttta

SEQ ID NO: 93874 - DNA, 25 bp, Saccharomyces pastorianus
aagcgggtgtttgccttgattgcaa

SEQ ID NO: 93875 - DNA, 25 bp, Saccharomyces pastorianus
caattgcagctgttgcgggaaacaa

SEQ ID NO: 93876 - DNA, 25 bp, Saccharomyces pastorianus
taaactcggcattttcgcataggat

SEQ ID NO: 93877 - DNA, 25 bp, Saccharomyces pastorianus
gaacgaattccaggtgattccgata

SEQ ID NO: 93878 - DNA, 25 bp, Saccharomyces pastorianus
atttacacttctttcagcgtcgttg

SEQ ID NO: 93879 - DNA, 25 bp, Saccharomyces pastorianus
agatttgtttccgaacgtgctgttc

SEQ ID NO: 93880 - DNA, 25 bp, Saccharomyces pastorianus
tactgaattctcttaccgttacaat

SEQ ID NO: 93881 - DNA, 25 bp, Saccharomyces pastorianus
gtgcccaaggcttacatttacactt

SEQ ID NO: 93882 - DNA, 25 bp, Saccharomyces pastorianus
tggtggtgcttctaaggttcctaat

SEQ ID NO: 93883 - DNA, 25 bp, Saccharomyces pastorianus
atgagtcctctagtgaagtgcccaa

SEQ ID NO: 93884 - DNA, 25 bp, Saccharomyces pastorianus
gacgtccctggtgcgttcaagaaaa

SEQ ID NO: 93885 - DNA, 25 bp, Saccharomyces pastorianus
tcatgttagttactttacccgacgt

SEQ ID NO: 93886 - DNA, 25 bp, Saccharomyces pastorianus
ttccttggaggcctaagcgattctt

SEQ ID NO: 93887 - DNA, 25 bp, Saccharomyces pastorianus
aggtgccttgactaggttccttgga

SEQ ID NO: 93888 - DNA, 25 bp, Saccharomyces pastorianus
ttagctggtatttccgttcctccaa

SEQ ID NO: 93889 - DNA, 25 bp, Saccharomyces pastorianus
caatggatttagatggcccgctata

SEQ ID NO: 93890 - DNA, 25 bp, Saccharomyces pastorianus
tgtccatatgggttgctacggcatt

SEQ ID NO: 93891 - DNA, 25 bp, Saccharomyces pastorianus
gaaacatactgttccaatccagcat

SEQ ID NO: 93892 - DNA, 25 bp, Saccharomyces pastorianus
cattatgtgttatcgtgggctcaaa

SEQ ID NO: 93893 - DNA, 25 bp, Saccharomyces pastorianus
agaatgacatccttgaccagttcaa

SEQ ID NO: 93894 - DNA, 25 bp, Saccharomyces pastorianus
atactcgaagccgttaaatgtcaag

SEQ ID NO: 93895 - DNA, 25 bp, Saccharomyces pastorianus
ggcccgctataatggctccatacaa

SEQ ID NO: 93896 - DNA, 25 bp, Saccharomyces pastorianus
agaataaaattatcccatgccatgg

SEQ ID NO: 93897 - DNA, 25 bp, Saccharomyces pastorianus
aaagctgctgaatgatcctaccatg

SEQ ID NO: 93898 - DNA, 25 bp, Saccharomyces pastorianus
actagggcgtgattccaatggattt

SEQ ID NO: 93899 - DNA, 25 bp, Saccharomyces pastorianus
gtaggccacatatttttgctgggta

SEQ ID NO: 93900 - DNA, 25 bp, Saccharomyces pastorianus
catggtaggatcattcagcagcttt

SEQ ID NO: 93901 - DNA, 25 bp, Saccharomyces pastorianus
tatagcgggccatctaaatccattg

SEQ ID NO: 93902 - DNA, 25 bp, Saccharomyces pastorianus
gcacctatacccagtttttcattga

SEQ ID NO: 93903 - DNA, 25 bp, Saccharomyces pastorianus
ggccaactttttgagcccacgataa

SEQ ID NO: 93904 - DNA, 25 bp, Saccharomyces pastorianus
aaatccattggaatcacgccctagt

SEQ ID NO: 93905 - DNA, 25 bp, Saccharomyces pastorianus
gtatgtttctcaattccatgttcat

SEQ ID NO: 93906 - DNA, 25 bp, Saccharomyces pastorianus
tagcaatacgccaatgacttccact

SEQ ID NO: 93907 - DNA, 25 bp, Saccharomyces pastorianus
ggtacacttccattgcagttcgcta

SEQ ID NO: 93908 - DNA, 25 bp, Saccharomyces pastorianus
tttttcaaactgctttctccacagg

SEQ ID NO: 93909 - DNA, 25 bp, Saccharomyces pastorianus
aacatcctgtaacctctgtgagttt

SEQ ID NO: 93910 - DNA, 25 bp, Saccharomyces pastorianus
gaaatggcttgctttgtggctacat

SEQ ID NO: 93911 - DNA, 25 bp, Saccharomyces pastorianus
gctacgggactaagagtagatccct

SEQ ID NO: 93912 - DNA, 25 bp, Saccharomyces pastorianus
ggtttcatcttttctgttgttgcat

SEQ ID NO: 93913 - DNA, 25 bp, Saccharomyces pastorianus
gcggcatccgctccaaagaaaaaca

SEQ ID NO: 93914 - DNA, 25 bp, Saccharomyces pastorianus
gagtagatcccttagttgtgttgtt

SEQ ID NO: 93915 - DNA, 25 bp, Saccharomyces pastorianus
attctgatgaggctacgggactaag

SEQ ID NO: 93916 - DNA, 25 bp, Saccharomyces pastorianus
aaaaagttgcggcatccgctccaaa

SEQ ID NO: 93917 - DNA, 25 bp, Saccharomyces pastorianus
tgtgttgtttctagcggtcggtttc

SEQ ID NO: 93918 - DNA, 25 bp, Saccharomyces pastorianus
gatcccttagttgtgttgtttctag

SEQ ID NO: 93919 - DNA, 25 bp, Saccharomyces pastorianus
cttttctgttgttgcattacatgtt

SEQ ID NO: 93920 - DNA, 25 bp, Saccharomyces pastorianus
gaacagcaataattcgattttgaag

SEQ ID NO: 93921 - DNA, 25 bp, Saccharomyces pastorianus
tagcggtcggtttcatcttttctgt

SEQ ID NO: 93922 - DNA, 25 bp, Saccharomyces pastorianus
attgcaagtgggaacggccggcctt

SEQ ID NO: 93923 - DNA, 25 bp, Saccharomyces pastorianus
ttactgtcattctcgggatgggagg

SEQ ID NO: 93924 - DNA, 25 bp, Saccharomyces pastorianus
gccttgtggtcagtgttactgtcat

SEQ ID NO: 93925 - DNA, 25 bp, Saccharomyces pastorianus
tcatggcctatggtttggagcagtt

SEQ ID NO: 93926 - DNA, 25 bp, Saccharomyces pastorianus
tgttactgtcattctcgggatggga

SEQ ID NO: 93927 - DNA, 25 bp, Saccharomyces pastorianus
aacggccggccttgtggtcagtgtt

SEQ ID NO: 93928 - DNA, 25 bp, Saccharomyces pastorianus
gaagccgggtcatggcctatggttt

SEQ ID NO: 93929 - DNA, 25 bp, Saccharomyces pastorianus
aagatccttcattgcaagtgggaac

SEQ ID NO: 93930 - DNA, 25 bp, Saccharomyces pastorianus
ggatggaagatccttcattgcaagt

SEQ ID NO: 93931 - DNA, 25 bp, Saccharomyces pastorianus
tcagtgttactgtcattctcgggat

SEQ ID NO: 93932 - DNA, 25 bp, Saccharomyces pastorianus
ccggccttgtggtcagtgttactgt

SEQ ID NO: 93933 - DNA, 25 bp, Saccharomyces pastorianus
agagtcattacccatccaattgctg

SEQ ID NO: 93934 - DNA, 25 bp, Saccharomyces pastorianus
gtgttctccgcccagaaaagacaag

SEQ ID NO: 93935 - DNA, 25 bp, Saccharomyces pastorianus
tggctcgttaaaagaccgtgcagaa

SEQ ID NO: 93936 - DNA, 25 bp, Saccharomyces pastorianus
aggcgccgtaggtcattggtcatac

SEQ ID NO: 93937 - DNA, 25 bp, Saccharomyces pastorianus
tagcggaccaattacgtggctcgtt

SEQ ID NO: 93938 - DNA, 25 bp, Saccharomyces pastorianus
agccatggaattgattgccgaacta

SEQ ID NO: 93939 - DNA, 25 bp, Saccharomyces pastorianus
cttacttgcaagctggcggtggtat

SEQ ID NO: 93940 - DNA, 25 bp, Saccharomyces pastorianus
ggtttctcaagtcagcggtgttctc

SEQ ID NO: 93941 - DNA, 25 bp, Saccharomyces pastorianus
tgcaggtactgtcagtggtgctcca

SEQ ID NO: 93942 - DNA, 25 bp, Saccharomyces pastorianus
ttcagatcgattttccctgcaggta

SEQ ID NO: 93943 - DNA, 25 bp, Saccharomyces pastorianus
aattttctcatgtccaacatctggt

SEQ ID NO: 93944 - DNA, 25 bp, Saccharomyces pastorianus
ccacattggtctaggtttattcgat

SEQ ID NO: 93945 - DNA, 25 bp, Saccharomyces pastorianus
gccagctttaagagaaggtttacca

SEQ ID NO: 93946 - DNA, 25 bp, Saccharomyces pastorianus
gtttattcgatattcattctccaag

SEQ ID NO: 93947 - DNA, 25 bp, Saccharomyces pastorianus
gtcaatgatttggaagctgccggta

SEQ ID NO: 93948 - DNA, 25 bp, Saccharomyces pastorianus
aagctgccggtatcaaggttatcca

SEQ ID NO: 93949 - DNA, 25 bp, Saccharomyces pastorianus
caaaggatgaatttatcgccaagat

SEQ ID NO: 93950 - DNA, 25 bp, Saccharomyces pastorianus
gttatccaagttgatgagccagctt

SEQ ID NO: 93951 - DNA, 25 bp, Saccharomyces pastorianus
taaagggtatgttgactggtccaat

SEQ ID NO: 93952 - DNA, 25 bp, Saccharomyces pastorianus
agagctacccagctgaaaagttctg

SEQ ID NO: 93953 - DNA, 25 bp, Saccharomyces pastorianus
accatcttgaagagctacccagctg

SEQ ID NO: 93954 - DNA, 25 bp, Saccharomyces pastorianus
tgagagatctgcttactacacctgg

SEQ ID NO: 93955 - DNA, 25 bp, Saccharomyces pastorianus
ggtagtcatagctcgttctgctcaa

SEQ ID NO: 93956 - DNA, 25 bp, Saccharomyces pastorianus
gtcgcgaacgtgcaaaaggccaata

SEQ ID NO: 93957 - DNA, 25 bp, Saccharomyces pastorianus
gaaacgggactactatcgaactcgt

SEQ ID NO: 93958 - DNA, 25 bp, Saccharomyces pastorianus
atagctcgttctgctcaattgagaa

SEQ ID NO: 93959 - DNA, 25 bp, Saccharomyces pastorianus
agtcatggcagctctttcgctctat

SEQ ID NO: 93960 - DNA, 25 bp, Saccharomyces pastorianus
aaggccaatatttttcgctagagtc

SEQ ID NO: 93961 - DNA, 25 bp, Saccharomyces pastorianus
tcccggtcgcaaaactgtggtagtc

SEQ ID NO: 93962 - DNA, 25 bp, Saccharomyces pastorianus
tagagtcatcgcagtcatggcagct

SEQ ID NO: 93963 - DNA, 25 bp, Saccharomyces pastorianus
atcgaactcgtttagtcgcgaacgt

SEQ ID NO: 93964 - DNA, 25 bp, Saccharomyces pastorianus
tttcgctagagtcatcgcagtcatg

SEQ ID NO: 93965 - DNA, 25 bp, Saccharomyces pastorianus
ttcgctctatctcccggtcgcaaaa

SEQ ID NO: 93966 - DNA, 25 bp, Saccharomyces pastorianus
aagatattgaggttcccgaggagct

SEQ ID NO: 93967 - DNA, 25 bp, Saccharomyces pastorianus
atggatgcttatactctgtacaagg

SEQ ID NO: 93968 - DNA, 25 bp, Saccharomyces pastorianus
gaactcccacgcttaatatctcaag

SEQ ID NO: 93969 - DNA, 25 bp, Saccharomyces pastorianus
gttcccgaggagctaatggatgctt

SEQ ID NO: 93970 - DNA, 25 bp, Saccharomyces pastorianus
aagggaatacactacattattgaga

SEQ ID NO: 93971 - DNA, 25 bp, Saccharomyces pastorianus
agatactggttctgctgaaacggaa

SEQ ID NO: 93972 - DNA, 25 bp, Saccharomyces pastorianus
gcaacagtagagaaagtacccgaat

SEQ ID NO: 93973 - DNA, 25 bp, Saccharomyces pastorianus
tgaaacggaactcccacgcttaata

SEQ ID NO: 93974 - DNA, 25 bp, Saccharomyces pastorianus
gtatcgagcgtgataacggtactga

SEQ ID NO: 93975 - DNA, 25 bp, Saccharomyces pastorianus
gcttatcaaacaggatgggactcta

SEQ ID NO: 93976 - DNA, 25 bp, Saccharomyces pastorianus
aagatccagagagcgttatagacaa

SEQ ID NO: 93977 - DNA, 25 bp, Saccharomyces pastorianus
gtaagtcagctaggcaatcatatcc

SEQ ID NO: 93978 - DNA, 25 bp, Saccharomyces pastorianus
aataccgcaatgacgatgactccat

SEQ ID NO: 93979 - DNA, 25 bp, Saccharomyces pastorianus
aaatgcttacccatcgaatttgatt

SEQ ID NO: 93980 - DNA, 25 bp, Saccharomyces pastorianus
ggaagtttctttgcggactatttat

SEQ ID NO: 93981 - DNA, 25 bp, Saccharomyces pastorianus
ctttcttctccctatgttacacaat

SEQ ID NO: 93982 - DNA, 25 bp, Saccharomyces pastorianus
gtcgaagtatcggtttaagccacat

SEQ ID NO: 93983 - DNA, 25 bp, Saccharomyces pastorianus
tagtcttttcgcaaacgaaggcctt

SEQ ID NO: 93984 - DNA, 25 bp, Saccharomyces pastorianus
caaatggtccgcatttagcgagtat

SEQ ID NO: 93985 - DNA, 25 bp, Saccharomyces pastorianus
tatcgggatcgcactaccaaatagg

SEQ ID NO: 93986 - DNA, 25 bp, Saccharomyces pastorianus
tcatatcctttcaaatcacgcagtg

SEQ ID NO: 93987 - DNA, 25 bp, Saccharomyces pastorianus
agtcaaactatcactgtttcaggtg

SEQ ID NO: 93988 - DNA, 25 bp, Saccharomyces pastorianus
agagcctataatgccgaccatcagt

SEQ ID NO: 93989 - DNA, 25 bp, Saccharomyces pastorianus
atattatggcacattcttccaccac

SEQ ID NO: 93990 - DNA, 25 bp, Saccharomyces pastorianus
ctgttatggctctataccgtacgga

SEQ ID NO: 93991 - DNA, 25 bp, Saccharomyces pastorianus
ttccttgattgtggtcgattctgtt

SEQ ID NO: 93992 - DNA, 25 bp, Saccharomyces pastorianus
agacccggatgatgctttgaacaac

SEQ ID NO: 93993 - DNA, 25 bp, Saccharomyces pastorianus
aaagttgttgactcaccttgcttac

SEQ ID NO: 93994 - DNA, 25 bp, Saccharomyces pastorianus
aagtcccagctatgtcacactttgg

SEQ ID NO: 93995 - DNA, 25 bp, Saccharomyces pastorianus
aatttggtgttgcagtcgtcgttac

SEQ ID NO: 93996 - DNA, 25 bp, Saccharomyces pastorianus
aaaggctggccgaccaatttggtgt

SEQ ID NO: 93997 - DNA, 25 bp, Saccharomyces pastorianus
ttaagacttctggatgctgctgccc

SEQ ID NO: 93998 - DNA, 25 bp, Saccharomyces pastorianus
attggtatccatagctcagcggttc

SEQ ID NO: 93999 - DNA, 25 bp, Saccharomyces pastorianus
atggtcggactgaagcaactgcccc

SEQ ID NO: 94000 - DNA, 25 bp, Saccharomyces pastorianus
atggtcattacgtatgcatttgcag

SEQ ID NO: 94001 - DNA, 25 bp, Saccharomyces pastorianus
cccatattctgtcattgcacctaaa

SEQ ID NO: 94002 - DNA, 25 bp, Saccharomyces pastorianus
ggagcggtccacagcatggtcatta

SEQ ID NO: 94003 - DNA, 25 bp, Saccharomyces pastorianus
gtgttacaattcacaggtcatccag

SEQ ID NO: 94004 - DNA, 25 bp, Saccharomyces pastorianus
ggtcatccaggtgatcaaactacag

SEQ ID NO: 94005 - DNA, 25 bp, Saccharomyces pastorianus
ggatgtttcttccacttttaataca

SEQ ID NO: 94006 - DNA, 25 bp, Saccharomyces pastorianus
actacagcctacgttttattctata

SEQ ID NO: 94007 - DNA, 25 bp, Saccharomyces pastorianus
gactgcagaaaccaagacgccatta

SEQ ID NO: 94008 - DNA, 25 bp, Saccharomyces pastorianus
gatcgtaaattgagggcagctgcaa

SEQ ID NO: 94009 - DNA, 25 bp, Saccharomyces pastorianus
taagcggcgtcgtcatccatatggg

SEQ ID NO: 94010 - DNA, 25 bp, Saccharomyces pastorianus
tcgtgttggacttcatcggtggtta

SEQ ID NO: 94011 - DNA, 25 bp, Saccharomyces pastorianus
ctgtcagaacatttcccggatttga

SEQ ID NO: 94012 - DNA, 25 bp, Saccharomyces pastorianus
tagtaaaccactcagacgtatgttg

SEQ ID NO: 94013 - DNA, 25 bp, Saccharomyces pastorianus
tttcctacatggctacacaacgtgc

SEQ ID NO: 94014 - DNA, 25 bp, Saccharomyces pastorianus
ggttatgatatcttgagtcactcga

SEQ ID NO: 94015 - DNA, 25 bp, Saccharomyces pastorianus
ttgggataaccctagcgccaatgca

SEQ ID NO: 94016 - DNA, 25 bp, Saccharomyces pastorianus
gtcactcgagttctttaattcacgc

SEQ ID NO: 94017 - DNA, 25 bp, Saccharomyces pastorianus
ttctcatttttactttgaccccaat

SEQ ID NO: 94018 - DNA, 25 bp, Saccharomyces pastorianus
acatgaatgcggcaagctgctaaat

SEQ ID NO: 94019 - DNA, 25 bp, Saccharomyces pastorianus
gacgtctttgattcttgggataacc

SEQ ID NO: 94020 - DNA, 25 bp, Saccharomyces pastorianus
aatggtgcagcagtcctgtcagaac

SEQ ID NO: 94021 - DNA, 25 bp, Saccharomyces pastorianus
acagcgtacaggtgtttcttttgac

SEQ ID NO: 94022 - DNA, 25 bp, Saccharomyces pastorianus
acttccccttctgtggtttcagata

SEQ ID NO: 94023 - DNA, 25 bp, Saccharomyces pastorianus
tggcactatgcacattgacacttcc

SEQ ID NO: 94024 - DNA, 25 bp, Saccharomyces pastorianus
cagagatcacggttggagtccatga

SEQ ID NO: 94025 - DNA, 25 bp, Saccharomyces pastorianus
tctaccctctgacatggctgaatat

SEQ ID NO: 94026 - DNA, 25 bp, Saccharomyces pastorianus
gaaggccgcagaactacagcgtaca

SEQ ID NO: 94027 - DNA, 25 bp, Saccharomyces pastorianus
gatgagttgcttgcctttattgaaa

SEQ ID NO: 94028 - DNA, 25 bp, Saccharomyces pastorianus
gaccggagtttaacacctcaatctt

SEQ ID NO: 94029 - DNA, 25 bp, Saccharomyces pastorianus
gacgagatcgttcacaggatttttt

SEQ ID NO: 94030 - DNA, 25 bp, Saccharomyces pastorianus
aatgaccaaagtacgcggtggccta

SEQ ID NO: 94031 - DNA, 25 bp, Saccharomyces pastorianus
ggatgactgttgcttcgattggaat

SEQ ID NO: 94032 - DNA, 25 bp, Saccharomyces pastorianus
tgtgcagacccattagattactacg

SEQ ID NO: 94033 - DNA, 25 bp, Saccharomyces pastorianus
aagggtgctcccattatcagatctc

SEQ ID NO: 94034 - DNA, 25 bp, Saccharomyces pastorianus
aagaatcctttctttcctcgatatc

SEQ ID NO: 94035 - DNA, 25 bp, Saccharomyces pastorianus
atgaaaaatgctccatcgcctgacg

SEQ ID NO: 94036 - DNA, 25 bp, Saccharomyces pastorianus
atatgatccgaataccgatcccgtt

SEQ ID NO: 94037 - DNA, 25 bp, Saccharomyces pastorianus
atgttcaatgttcttgcttgccgga

SEQ ID NO: 94038 - DNA, 25 bp, Saccharomyces pastorianus
gatttacgcggttcaattgcgccag

SEQ ID NO: 94039 - DNA, 25 bp, Saccharomyces pastorianus
gctgctgatggatctgtatgttcaa

SEQ ID NO: 94040 - DNA, 25 bp, Saccharomyces pastorianus
ttcctcgatatccaacacactaatt

SEQ ID NO: 94041 - DNA, 25 bp, Saccharomyces pastorianus
gcttgccggagtttctcatttaaaa

SEQ ID NO: 94042 - DNA, 25 bp, Saccharomyces pastorianus
tacggacgttgttttccctgtacat

SEQ ID NO: 94043 - DNA, 25 bp, Saccharomyces pastorianus
gatttttaaggcaaccacgtcacct

SEQ ID NO: 94044 - DNA, 25 bp, Saccharomyces pastorianus
aatagcattgcatttcatccattat

SEQ ID NO: 94045 - DNA, 25 bp, Saccharomyces pastorianus
agccgatggatatgcgattggttca

SEQ ID NO: 94046 - DNA, 25 bp, Saccharomyces pastorianus
atggcaaactcgatgcgtggcatgt

SEQ ID NO: 94047 - DNA, 25 bp, Saccharomyces pastorianus
gtatccaccgtaatgatgcctgaaa

SEQ ID NO: 94048 - DNA, 25 bp, Saccharomyces pastorianus
ggctactgccgaaagacatatcgct

SEQ ID NO: 94049 - DNA, 25 bp, Saccharomyces pastorianus
atgggcaacagacccgactatccaa

SEQ ID NO: 94050 - DNA, 25 bp, Saccharomyces pastorianus
aacagtctctgttagtagtggctac

SEQ ID NO: 94051 - DNA, 25 bp, Saccharomyces pastorianus
atctctagtgtaccctgtaaatagc

SEQ ID NO: 94052 - DNA, 25 bp, Saccharomyces pastorianus
acggctggtggtgatggtaccttca

SEQ ID NO: 94053 - DNA, 25 bp, Saccharomyces pastorianus
gactatccaaacgtcattaggctac

SEQ ID NO: 94054 - DNA, 25 bp, Saccharomyces pastorianus
gctgaggttgtatttgatcgattaa

SEQ ID NO: 94055 - DNA, 25 bp, Saccharomyces pastorianus
ttcattcgccattgcagtactcgtt

SEQ ID NO: 94056 - DNA, 25 bp, Saccharomyces pastorianus
gagtcctctgctgggctattaatga

SEQ ID NO: 94057 - DNA, 25 bp, Saccharomyces pastorianus
ggtatggtaagcttgcccaattctt

SEQ ID NO: 94058 - DNA, 25 bp, Saccharomyces pastorianus
ttgatcaaggtggatgtgccggaat

SEQ ID NO: 94059 - DNA, 25 bp, Saccharomyces pastorianus
gcttgcccaattcttataagtcagt

SEQ ID NO: 94060 - DNA, 25 bp, Saccharomyces pastorianus
ttcctcttcttacgtatttctttat

SEQ ID NO: 94061 - DNA, 25 bp, Saccharomyces pastorianus
aatatccgatattgagtcctctgct

SEQ ID NO: 94062 - DNA, 25 bp, Saccharomyces pastorianus
gacaatatcattggccaaatccttt

SEQ ID NO: 94063 - DNA, 25 bp, Saccharomyces pastorianus
aaatccttttcattcgccattgcag

SEQ ID NO: 94064 - DNA, 25 bp, Saccharomyces pastorianus
gtactcgttcccaaagctgaggttg

SEQ ID NO: 94065 - DNA, 25 bp, Saccharomyces pastorianus
ttgggtcctcagcaaaccagtacta

SEQ ID NO: 94066 - DNA, 25 bp, Saccharomyces pastorianus
acctcggtctggtgacgctcagaag

SEQ ID NO: 94067 - DNA, 25 bp, Saccharomyces pastorianus
gaccaaggaccggattacgatctca

SEQ ID NO: 94068 - DNA, 25 bp, Saccharomyces pastorianus
ataacacattaattcagccctcatc

SEQ ID NO: 94069 - DNA, 25 bp, Saccharomyces pastorianus
gaaacctctgcatctacaaatagtg

SEQ ID NO: 94070 - DNA, 25 bp, Saccharomyces pastorianus
ttaagcatagcaacacctcggtctg

SEQ ID NO: 94071 - DNA, 25 bp, Saccharomyces pastorianus
gaatgtacactctcagaacttgaag

SEQ ID NO: 94072 - DNA, 25 bp, Saccharomyces pastorianus
aaggatatgattttgacgccctcaa

SEQ ID NO: 94073 - DNA, 25 bp, Saccharomyces pastorianus
gtaacacattatctactccagagga

SEQ ID NO: 94074 - DNA, 25 bp, Saccharomyces pastorianus
caagttctttgttgtttcctaatca

SEQ ID NO: 94075 - DNA, 25 bp, Saccharomyces pastorianus
taaagccgccacatgggttttcaac

SEQ ID NO: 94076 - DNA, 25 bp, Saccharomyces pastorianus
cgaagccaccagagagattattgat

SEQ ID NO: 94077 - DNA, 25 bp, Saccharomyces pastorianus
gaaaatagtcccgttatcacaaacg

SEQ ID NO: 94078 - DNA, 25 bp, Saccharomyces pastorianus
atctcagccgtttatgaacctgttt

SEQ ID NO: 94079 - DNA, 25 bp, Saccharomyces pastorianus
aatgctagtggatgtgtggccagaa

SEQ ID NO: 94080 - DNA, 25 bp, Saccharomyces pastorianus
ttttcagtgctgtgtttaccaaaga

SEQ ID NO: 94081 - DNA, 25 bp, Saccharomyces pastorianus
ttgaaggcgctttatgagttactaa

SEQ ID NO: 94082 - DNA, 25 bp, Saccharomyces pastorianus
tatgcttctatggacatctcagccg

SEQ ID NO: 94083 - DNA, 25 bp, Saccharomyces pastorianus
aaggccttagcagccgaagatgacg

SEQ ID NO: 94084 - DNA, 25 bp, Saccharomyces pastorianus
gagttactaagtgctgctgaccaaa

SEQ ID NO: 94085 - DNA, 25 bp, Saccharomyces pastorianus
gatcatcgagattttcagtgctgtg

SEQ ID NO: 94086 - DNA, 25 bp, Saccharomyces pastorianus
agtgctgctgaccaaaaggccttag

SEQ ID NO: 94087 - DNA, 25 bp, Saccharomyces pastorianus
gggatattgaccaacgtagataact

SEQ ID NO: 94088 - DNA, 25 bp, Saccharomyces pastorianus
ggatgaaccttactttatctaatgt

SEQ ID NO: 94089 - DNA, 25 bp, Saccharomyces pastorianus
aggtgggtccgtccaacatcatttt

SEQ ID NO: 94090 - DNA, 25 bp, Saccharomyces pastorianus
aatgctgagagcagtaaagccgtaa

SEQ ID NO: 94091 - DNA, 25 bp, Saccharomyces pastorianus
gagggacttttatcaagtttatcaa

SEQ ID NO: 94092 - DNA, 25 bp, Saccharomyces pastorianus
ggtcaagcagcaaattaactccaac

SEQ ID NO: 94093 - DNA, 25 bp, Saccharomyces pastorianus
acggccctgggcataaaagatacta

SEQ ID NO: 94094 - DNA, 25 bp, Saccharomyces pastorianus
gtccatactctcaaaaccgtcaata

SEQ ID NO: 94095 - DNA, 25 bp, Saccharomyces pastorianus
tgaacaatggtttaggtgggtccgt

SEQ ID NO: 94096 - DNA, 25 bp, Saccharomyces pastorianus
actctaatagtaacggccctgggca

SEQ ID NO: 94097 - DNA, 25 bp, Saccharomyces pastorianus
gcaacagcagtaacattaacaacag

SEQ ID NO: 94098 - DNA, 25 bp, Saccharomyces pastorianus
gctaataatatacctttgcctcaat

SEQ ID NO: 94099 - DNA, 25 bp, Saccharomyces pastorianus
gagcatttatttcatcgtctgtata

SEQ ID NO: 94100 - DNA, 25 bp, Saccharomyces pastorianus
ttcgcagtgctaaacatccatgggt

SEQ ID NO: 94101 - DNA, 25 bp, Saccharomyces pastorianus
taatgtgcagtttagggcttggcgc

SEQ ID NO: 94102 - DNA, 25 bp, Saccharomyces pastorianus
acgtttacaaatctctctggttgga

SEQ ID NO: 94103 - DNA, 25 bp, Saccharomyces pastorianus
tatgtggtattttccccttgttagt

SEQ ID NO: 94104 - DNA, 25 bp, Saccharomyces pastorianus
ttcaacccgttggtttactgcggca

SEQ ID NO: 94105 - DNA, 25 bp, Saccharomyces pastorianus
gggttttcatctatcttaatttcca

SEQ ID NO: 94106 - DNA, 25 bp, Saccharomyces pastorianus
gtctgtataccactcagcttgtttg

SEQ ID NO: 94107 - DNA, 25 bp, Saccharomyces pastorianus
gggcttggcgcattaagttacttaa

SEQ ID NO: 94108 - DNA, 25 bp, Saccharomyces pastorianus
aaatcacgagccaagttcaacccgt

SEQ ID NO: 94109 - DNA, 25 bp, Saccharomyces pastorianus
aagggcaagctgatcgcacaatatc

SEQ ID NO: 94110 - DNA, 25 bp, Saccharomyces pastorianus
atcagtgccaattatcagttcctat

SEQ ID NO: 94111 - DNA, 25 bp, Saccharomyces pastorianus
gttcttactagcttccggattgtta

SEQ ID NO: 94112 - DNA, 25 bp, Saccharomyces pastorianus
acctcgcacgcactattttgcagta

SEQ ID NO: 94113 - DNA, 25 bp, Saccharomyces pastorianus
ttatcgcctggagtggctcgcaata

SEQ ID NO: 94114 - DNA, 25 bp, Saccharomyces pastorianus
gtttgacatttacacaacctcgcac

SEQ ID NO: 94115 - DNA, 25 bp, Saccharomyces pastorianus
aaactattacctccgcaaccaggat

SEQ ID NO: 94116 - DNA, 25 bp, Saccharomyces pastorianus
atatcagcgtcaacccaacgaactt

SEQ ID NO: 94117 - DNA, 25 bp, Saccharomyces pastorianus
atatctactccgaatttgtcctctg

SEQ ID NO: 94118 - DNA, 25 bp, Saccharomyces pastorianus
tggattttccagtccgttcttacta

SEQ ID NO: 94119 - DNA, 25 bp, Saccharomyces pastorianus
atacaacacctacggtttccttgag

SEQ ID NO: 94120 - DNA, 25 bp, Saccharomyces pastorianus
tatacgagactcaggctacgcgaca

SEQ ID NO: 94121 - DNA, 25 bp, Saccharomyces pastorianus
aagccgttaatcttcacttgaacac

SEQ ID NO: 94122 - DNA, 25 bp, Saccharomyces pastorianus
gtacccatacgacgctgatgacgat

SEQ ID NO: 94123 - DNA, 25 bp, Saccharomyces pastorianus
attaagggtatcaggccttcgccat

SEQ ID NO: 94124 - DNA, 25 bp, Saccharomyces pastorianus
gcagcaaccttctcacacaaattat

SEQ ID NO: 94125 - DNA, 25 bp, Saccharomyces pastorianus
ggccttcgccattagagaattctct

SEQ ID NO: 94126 - DNA, 25 bp, Saccharomyces pastorianus
gaattctcttcatagagctcgtcga

SEQ ID NO: 94127 - DNA, 25 bp, Saccharomyces pastorianus
ggctacgcgacacagtttgatggat

SEQ ID NO: 94128 - DNA, 25 bp, Saccharomyces pastorianus
aactacgatgggagacactttgggt

SEQ ID NO: 94129 - DNA, 25 bp, Saccharomyces pastorianus
tttgggtctgtatagcgatatcggt

SEQ ID NO: 94130 - DNA, 25 bp, Saccharomyces pastorianus
cttctacggcattggctggttttga

SEQ ID NO: 94131 - DNA, 25 bp, Saccharomyces pastorianus
gataagtccagatgtacacccagca

SEQ ID NO: 94132 - DNA, 25 bp, Saccharomyces pastorianus
ggaggtccctgctgaaccggaaact

SEQ ID NO: 94133 - DNA, 25 bp, Saccharomyces pastorianus
gtgccgtgacaagttcctggttatc

SEQ ID NO: 94134 - DNA, 25 bp, Saccharomyces pastorianus
ggtccgacttggaggctgagttcaa

SEQ ID NO: 94135 - DNA, 25 bp, Saccharomyces pastorianus
tgtcgttcagaaaaccgttcctcat

SEQ ID NO: 94136 - DNA, 25 bp, Saccharomyces pastorianus
aagttatcttcctgggtttgactga

SEQ ID NO: 94137 - DNA, 25 bp, Saccharomyces pastorianus
gccgcagttgttgctccaggtgaaa

SEQ ID NO: 94138 - DNA, 25 bp, Saccharomyces pastorianus
gaagtgcctgctgtggtaaacgaaa

SEQ ID NO: 94139 - DNA, 25 bp, Saccharomyces pastorianus
gaaagaagaggtcccacctgtcgtt

SEQ ID NO: 94140 - DNA, 25 bp, Saccharomyces pastorianus
gctgttgcagatgtttggtccgact

SEQ ID NO: 94141 - DNA, 25 bp, Saccharomyces pastorianus
agccccaaagttttactgcgtgaga

SEQ ID NO: 94142 - DNA, 25 bp, Saccharomyces pastorianus
gatgtcgaaaataacttaccttctt

SEQ ID NO: 94143 - DNA, 25 bp, Saccharomyces pastorianus
ttatcgcgctggcacgacatgaatt

SEQ ID NO: 94144 - DNA, 25 bp, Saccharomyces pastorianus
attttcaaccgcttcatacgcacat

SEQ ID NO: 94145 - DNA, 25 bp, Saccharomyces pastorianus
gacatgaattcaaggccagcagagg

SEQ ID NO: 94146 - DNA, 25 bp, Saccharomyces pastorianus
tactacgcccttgcggcaagtgata

SEQ ID NO: 94147 - DNA, 25 bp, Saccharomyces pastorianus
gtttaaatgcaagtgtttctaacga

SEQ ID NO: 94148 - DNA, 25 bp, Saccharomyces pastorianus
tccctatgtggacgatgaagcaatt

SEQ ID NO: 94149 - DNA, 25 bp, Saccharomyces pastorianus
aatgctacctcgtctgcattttcaa

SEQ ID NO: 94150 - DNA, 25 bp, Saccharomyces pastorianus
gggtatagactatccctatgtggac

SEQ ID NO: 94151 - DNA, 25 bp, Saccharomyces pastorianus
aatgaaccaaatgctacctcgtctg

SEQ ID NO: 94152 - DNA, 25 bp, Saccharomyces pastorianus
atgcaacaggatgcgcactactacg

SEQ ID NO: 94153 - DNA, 25 bp, Saccharomyces pastorianus
aatagctcagggaccaagatatacg

SEQ ID NO: 94154 - DNA, 25 bp, Saccharomyces pastorianus
atacccagcctgatgaattcaatga

SEQ ID NO: 94155 - DNA, 25 bp, Saccharomyces pastorianus
tacatcaatttcctcttcttcatat

SEQ ID NO: 94156 - DNA, 25 bp, Saccharomyces pastorianus
atttggtcgtggctcatttgatgaa

SEQ ID NO: 94157 - DNA, 25 bp, Saccharomyces pastorianus
atgcctccgcagatgatgaattgca

SEQ ID NO: 94158 - DNA, 25 bp, Saccharomyces pastorianus
gacacttcaaacagcttcgacacaa

SEQ ID NO: 94159 - DNA, 25 bp, Saccharomyces pastorianus
gatactttaacacccaagtttgcca

SEQ ID NO: 94160 - DNA, 25 bp, Saccharomyces pastorianus
aatcgcggaaaggtacggcacacaa

SEQ ID NO: 94161 - DNA, 25 bp, Saccharomyces pastorianus
gagcaggtaattttgatggccgtaa

SEQ ID NO: 94162 - DNA, 25 bp, Saccharomyces pastorianus
gtggacgaatttggtaatcccatca

SEQ ID NO: 94163 - DNA, 25 bp, Saccharomyces pastorianus
ttcatcgattttaatgcctccgcag

SEQ ID NO: 94164 - DNA, 25 bp, Saccharomyces pastorianus
gtacgactccatcagtcatacacaa

SEQ ID NO: 94165 - DNA, 25 bp, Saccharomyces pastorianus
tcgaacccgcagagctttactaaac

SEQ ID NO: 94166 - DNA, 25 bp, Saccharomyces pastorianus
gagctaacttgcatggttacggaaa

SEQ ID NO: 94167 - DNA, 25 bp, Saccharomyces pastorianus
aatccagaatttcttcgaacccgca

SEQ ID NO: 94168 - DNA, 25 bp, Saccharomyces pastorianus
atgagcacaacttaccaaaccacta

SEQ ID NO: 94169 - DNA, 25 bp, Saccharomyces pastorianus
aacgccagttgcgacacctaagcaa

SEQ ID NO: 94170 - DNA, 25 bp, Saccharomyces pastorianus
aaatgatgcttattctgatgacgag

SEQ ID NO: 94171 - DNA, 25 bp, Saccharomyces pastorianus
ggacactatgactggatggatttga

SEQ ID NO: 94172 - DNA, 25 bp, Saccharomyces pastorianus
aagacacgaaatacaacgccagttg

SEQ ID NO: 94173 - DNA, 25 bp, Saccharomyces pastorianus
tgtaccatattcaagttctaaagct

SEQ ID NO: 94174 - DNA, 25 bp, Saccharomyces pastorianus
ccaagagtcaatggcaatactgcaa

SEQ ID NO: 94175 - DNA, 25 bp, Saccharomyces pastorianus
aaagagcccgtttattgcagttcac

SEQ ID NO: 94176 - DNA, 25 bp, Saccharomyces pastorianus
gagttgatttgccacaatacgttga

SEQ ID NO: 94177 - DNA, 25 bp, Saccharomyces pastorianus
atttgcaaggctctgatggtccaag

SEQ ID NO: 94178 - DNA, 25 bp, Saccharomyces pastorianus
aattgccaaaatctcacacatgttt

SEQ ID NO: 94179 - DNA, 25 bp, Saccharomyces pastorianus
gtcagacgaggtcattcaatggttt

SEQ ID NO: 94180 - DNA, 25 bp, Saccharomyces pastorianus
tctgacgttcagtgccgacgatgaa

SEQ ID NO: 94181 - DNA, 25 bp, Saccharomyces pastorianus
gatggtgtcttggatctgacgttca

SEQ ID NO: 94182 - DNA, 25 bp, Saccharomyces pastorianus
tagaactattgatcggtggtattgc

SEQ ID NO: 94183 - DNA, 25 bp, Saccharomyces pastorianus
acacactgattatcgtggttaccaa

SEQ ID NO: 94184 - DNA, 25 bp, Saccharomyces pastorianus
aactgtgtttgatgagcgtgaacta

SEQ ID NO: 94185 - DNA, 25 bp, Saccharomyces pastorianus
atgtcgaattatatacccaatggag

SEQ ID NO: 94186 - DNA, 25 bp, Saccharomyces pastorianus
gaaggtttcactagaagaccagtta

SEQ ID NO: 94187 - DNA, 25 bp, Saccharomyces pastorianus
aagaatcatcagaccaagtgcgttg

SEQ ID NO: 94188 - DNA, 25 bp, Saccharomyces pastorianus
gatggtgatgctttgccgacatatc

SEQ ID NO: 94189 - DNA, 25 bp, Saccharomyces pastorianus
gtgttttgactaaaggtaccattat

SEQ ID NO: 94190 - DNA, 25 bp, Saccharomyces pastorianus
tcagttccgttaccaaaggttcgtg

SEQ ID NO: 94191 - DNA, 25 bp, Saccharomyces pastorianus
catccggaattaggtgtaactgtct

SEQ ID NO: 94192 - DNA, 25 bp, Saccharomyces pastorianus
aggtcaagggttcatccaaaccatt

SEQ ID NO: 94193 - DNA, 25 bp, Saccharomyces pastorianus
gtaactgtcttcttgccaattttgg

SEQ ID NO: 94194 - DNA, 25 bp, Saccharomyces pastorianus
aaggcaaacgtcactcatccggaat

SEQ ID NO: 94195 - DNA, 25 bp, Saccharomyces pastorianus
gggtaagtatgctcaggtcacaaac

SEQ ID NO: 94196 - DNA, 25 bp, Saccharomyces pastorianus
gctttgccgacatatctattggaca

SEQ ID NO: 94197 - DNA, 25 bp, Saccharomyces pastorianus
gagactggcgtgtataaaccaccaa

SEQ ID NO: 94198 - DNA, 25 bp, Saccharomyces pastorianus
gagagtcatcggaccaaccggactg

SEQ ID NO: 94199 - DNA, 25 bp, Saccharomyces pastorianus
ctaccaccgcaacaaacgcattttg

SEQ ID NO: 94200 - DNA, 25 bp, Saccharomyces pastorianus
atcatagcggcaacgacgatagcga

SEQ ID NO: 94201 - DNA, 25 bp, Saccharomyces pastorianus
caaagattacggctgttctaccacc

SEQ ID NO: 94202 - DNA, 25 bp, Saccharomyces pastorianus
aaatcatcagcatacagggtggagg

SEQ ID NO: 94203 - DNA, 25 bp, Saccharomyces pastorianus
gcatacaggccaaatacctctggaa

SEQ ID NO: 94204 - DNA, 25 bp, Saccharomyces pastorianus
aaccggactggagtgcatctattgg

SEQ ID NO: 94205 - DNA, 25 bp, Saccharomyces pastorianus
ggaacgtagagtcacttcattcgaa

SEQ ID NO: 94206 - DNA, 25 bp, Saccharomyces pastorianus
aggcggtatcaaatcttcgagagac

SEQ ID NO: 94207 - DNA, 25 bp, Saccharomyces pastorianus
ggtgctgacattgtgaaccatggaa

SEQ ID NO: 94208 - DNA, 25 bp, Saccharomyces pastorianus
taactctaaagaccctgatccaact

SEQ ID NO: 94209 - DNA, 25 bp, Saccharomyces pastorianus
gaagccgtggctcaattaaaactag

SEQ ID NO: 94210 - DNA, 25 bp, Saccharomyces pastorianus
gtacgttgccagaaaggtcgctctc

SEQ ID NO: 94211 - DNA, 25 bp, Saccharomyces pastorianus
aaggtcgctctcaaggacatgcaac

SEQ ID NO: 94212 - DNA, 25 bp, Saccharomyces pastorianus
gaattactctaatacggatcctgaa

SEQ ID NO: 94213 - DNA, 25 bp, Saccharomyces pastorianus
ttgtcattcccctctatagtacaga

SEQ ID NO: 94214 - DNA, 25 bp, Saccharomyces pastorianus
gacatcagctcaaacccaattaggg

SEQ ID NO: 94215 - DNA, 25 bp, Saccharomyces pastorianus
gtgcgatctgtagcaaaccatccac

SEQ ID NO: 94216 - DNA, 25 bp, Saccharomyces pastorianus
tacaaccgactctactgatacatct

SEQ ID NO: 94217 - DNA, 25 bp, Saccharomyces pastorianus
aatcgcgaacgatacctcaaggagc

SEQ ID NO: 94218 - DNA, 25 bp, Saccharomyces pastorianus
gatacatctccacaggctaagaacg

SEQ ID NO: 94219 - DNA, 25 bp, Saccharomyces pastorianus
aacaagttgcactactgtgtctcct

SEQ ID NO: 94220 - DNA, 25 bp, Saccharomyces pastorianus
agaatacgccttgccaaagacttac

SEQ ID NO: 94221 - DNA, 25 bp, Saccharomyces pastorianus
gctcctccacaaagaccaagattta

SEQ ID NO: 94222 - DNA, 25 bp, Saccharomyces pastorianus
acaagttgcactactgtgtctcctg

SEQ ID NO: 94223 - DNA, 25 bp, Saccharomyces pastorianus
ttgcactactgtgtctcctgtgcta

SEQ ID NO: 94224 - DNA, 25 bp, Saccharomyces pastorianus
gaagcttctgtctacccagaatacg

SEQ ID NO: 94225 - DNA, 25 bp, Saccharomyces pastorianus
caagttgcactactgtgtctcctgt

SEQ ID NO: 94226 - DNA, 25 bp, Saccharomyces pastorianus
gcactactgtgtctcctgtgctatt

SEQ ID NO: 94227 - DNA, 25 bp, Saccharomyces pastorianus
aagttgcactactgtgtctcctgtg

SEQ ID NO: 94228 - DNA, 25 bp, Saccharomyces pastorianus
acgtcaagccagtgagatgtgttaa

SEQ ID NO: 94229 - DNA, 25 bp, Saccharomyces pastorianus
agttgcactactgtgtctcctgtgc

SEQ ID NO: 94230 - DNA, 25 bp, Saccharomyces pastorianus
gatgtcgcgacaccgttaaaacagc

SEQ ID NO: 94231 - DNA, 25 bp, Saccharomyces pastorianus
attccacatctgctctattcatgaa

SEQ ID NO: 94232 - DNA, 25 bp, Saccharomyces pastorianus
gatttcactgcatctcaacaacgga

SEQ ID NO: 94233 - DNA, 25 bp, Saccharomyces pastorianus
aggacttccgttacagatttcactg

SEQ ID NO: 94234 - DNA, 25 bp, Saccharomyces pastorianus
gacagtaacttgatgacgcgcacga

SEQ ID NO: 94235 - DNA, 25 bp, Saccharomyces pastorianus
aatcgtccatcaaattctcacaggc

SEQ ID NO: 94236 - DNA, 25 bp, Saccharomyces pastorianus
agtaggcagcactctgatgtcgcga

SEQ ID NO: 94237 - DNA, 25 bp, Saccharomyces pastorianus
agtacgcagacgacacattccacat

SEQ ID NO: 94238 - DNA, 25 bp, Saccharomyces pastorianus
attcatgaatcctgcctttatgcct

SEQ ID NO: 94239 - DNA, 25 bp, Saccharomyces pastorianus
aaccaatttttgcacgcggatcttc

SEQ ID NO: 94240 - DNA, 25 bp, Saccharomyces pastorianus
tttatgcctcctgcagtgaatactg

SEQ ID NO: 94241 - DNA, 25 bp, Saccharomyces pastorianus
ttctccccactgaaattcatcgaac

SEQ ID NO: 94242 - DNA, 25 bp, Saccharomyces pastorianus
atgatgctctgtgaactaagtgcgc

SEQ ID NO: 94243 - DNA, 25 bp, Saccharomyces pastorianus
tccgtatttctccacttctttgttt

SEQ ID NO: 94244 - DNA, 25 bp, Saccharomyces pastorianus
taaatggccaattttacttctttct

SEQ ID NO: 94245 - DNA, 25 bp, Saccharomyces pastorianus
aaacctttccactcaggtaatcttg

SEQ ID NO: 94246 - DNA, 25 bp, Saccharomyces pastorianus
taagtgcgcagtccttcaaaccttt

SEQ ID NO: 94247 - DNA, 25 bp, Saccharomyces pastorianus
gtaatgacttcttcttatgctcaga

SEQ ID NO: 94248 - DNA, 25 bp, Saccharomyces pastorianus
aaagtttccaagatggtccattctc

SEQ ID NO: 94249 - DNA, 25 bp, Saccharomyces pastorianus
taaacaaacttcactccgtatttct

SEQ ID NO: 94250 - DNA, 25 bp, Saccharomyces pastorianus
ccattctctgggtctcttacataaa

SEQ ID NO: 94251 - DNA, 25 bp, Saccharomyces pastorianus
tcaaaccgtcccttaaatggccaat

SEQ ID NO: 94252 - DNA, 25 bp, Saccharomyces pastorianus
atttggccctgctattgtgataccc

SEQ ID NO: 94253 - DNA, 25 bp, Saccharomyces pastorianus
cgtcacgaacgtgggcacctgagat

SEQ ID NO: 94254 - DNA, 25 bp, Saccharomyces pastorianus
tgcacggtccctttaagccagttaa

SEQ ID NO: 94255 - DNA, 25 bp, Saccharomyces pastorianus
gatttggactacaccatttggccct

SEQ ID NO: 94256 - DNA, 25 bp, Saccharomyces pastorianus
ggagttaagttaatgaccgcgtcac

SEQ ID NO: 94257 - DNA, 25 bp, Saccharomyces pastorianus
tgactggataccctgacgtggccgc

SEQ ID NO: 94258 - DNA, 25 bp, Saccharomyces pastorianus
attgtgatacccatttgcacggtcc

SEQ ID NO: 94259 - DNA, 25 bp, Saccharomyces pastorianus
gttggccaacctgttcgatgaattt

SEQ ID NO: 94260 - DNA, 25 bp, Saccharomyces pastorianus
caaagatatcccacgtatactaggt

SEQ ID NO: 94261 - DNA, 25 bp, Saccharomyces pastorianus
acgtggccgccttcgatttggacta

SEQ ID NO: 94262 - DNA, 25 bp, Saccharomyces pastorianus
aagtatgctggtgtcgtaaccccgt

SEQ ID NO: 94263 - DNA, 25 bp, Saccharomyces pastorianus
gtactctatactaccgttacatcaa

SEQ ID NO: 94264 - DNA, 25 bp, Saccharomyces pastorianus
taatatgcctcgctagttggaaaga

SEQ ID NO: 94265 - DNA, 25 bp, Saccharomyces pastorianus
actctttttctaatatgcctcgcta

SEQ ID NO: 94266 - DNA, 25 bp, Saccharomyces pastorianus
acaatttggttagcactttctccat

SEQ ID NO: 94267 - DNA, 25 bp, Saccharomyces pastorianus
gaaacaaatttcgtacccattcgca

SEQ ID NO: 94268 - DNA, 25 bp, Saccharomyces pastorianus
agcactttctccatacggtgacatg

SEQ ID NO: 94269 - DNA, 25 bp, Saccharomyces pastorianus
atcggcgaatattataggtactcta

SEQ ID NO: 94270 - DNA, 25 bp, Saccharomyces pastorianus
gaaaaaggtcttggtcgatattaca

SEQ ID NO: 94271 - DNA, 25 bp, Saccharomyces pastorianus
ggtgacatggcgttatttacaagtt

SEQ ID NO: 94272 - DNA, 25 bp, Saccharomyces pastorianus
gtgtgcaacaagctaaattctcctg

SEQ ID NO: 94273 - DNA, 25 bp, Saccharomyces pastorianus
acccattcgcacctcagtgaataag

SEQ ID NO: 94274 - DNA, 25 bp, Saccharomyces pastorianus
ttacttcagagtaacaggccaccca

SEQ ID NO: 94275 - DNA, 25 bp, Saccharomyces pastorianus
tgctgatccaacttattttcccgaa

SEQ ID NO: 94276 - DNA, 25 bp, Saccharomyces pastorianus
agctgggaactttcaaggccccatt

SEQ ID NO: 94277 - DNA, 25 bp, Saccharomyces pastorianus
gtattcttaaccatccagttccgaa

SEQ ID NO: 94278 - DNA, 25 bp, Saccharomyces pastorianus
aggccccattggttattgctgatcc

SEQ ID NO: 94279 - DNA, 25 bp, Saccharomyces pastorianus
ggtacttacatgctagacactccaa

SEQ ID NO: 94280 - DNA, 25 bp, Saccharomyces pastorianus
gagccatctgtattcttaaccatcc

SEQ ID NO: 94281 - DNA, 25 bp, Saccharomyces pastorianus
ttatccagatcatacgacgcatcct

SEQ ID NO: 94282 - DNA, 25 bp, Saccharomyces pastorianus
taacgtttgctccaagggtcactat

SEQ ID NO: 94283 - DNA, 25 bp, Saccharomyces pastorianus
atcctctcatttcgaatccatgact

SEQ ID NO: 94284 - DNA, 25 bp, Saccharomyces pastorianus
agagcctgctttcaaacttctggga

SEQ ID NO: 94285 - DNA, 25 bp, Saccharomyces pastorianus
aatccgtatgcatatttgtcgcact

SEQ ID NO: 94286 - DNA, 25 bp, Saccharomyces pastorianus
agttccattttagatgttcccaatt

SEQ ID NO: 94287 - DNA, 25 bp, Saccharomyces pastorianus
ataggcctattatgtgattcagaat

SEQ ID NO: 94288 - DNA, 25 bp, Saccharomyces pastorianus
gggttcacctatttgaagatcctga

SEQ ID NO: 94289 - DNA, 25 bp, Saccharomyces pastorianus
tgacttatcgaagtggttggcacaa

SEQ ID NO: 94290 - DNA, 25 bp, Saccharomyces pastorianus
atgcggatatcctctttgcggtaaa

SEQ ID NO: 94291 - DNA, 25 bp, Saccharomyces pastorianus
aaatcctgacagtgggactacagaa

SEQ ID NO: 94292 - DNA, 25 bp, Saccharomyces pastorianus
aatatttgggccgatttctcacacc

SEQ ID NO: 94293 - DNA, 25 bp, Saccharomyces pastorianus
gccgatttctcacaccggatatgta

SEQ ID NO: 94294 - DNA, 25 bp, Saccharomyces pastorianus
gtcgcactattgcagtaagttccat

SEQ ID NO: 94295 - DNA, 25 bp, Saccharomyces pastorianus
aaatcattgatatccggtctcaaaa

SEQ ID NO: 94296 - DNA, 25 bp, Saccharomyces pastorianus
gggcatccgtgtttttactagcatt

SEQ ID NO: 94297 - DNA, 25 bp, Saccharomyces pastorianus
tacctgcattcgttgtcctttttat

SEQ ID NO: 94298 - DNA, 25 bp, Saccharomyces pastorianus
ttaactgctgaatgtactcctccta

SEQ ID NO: 94299 - DNA, 25 bp, Saccharomyces pastorianus
agaccaagctctcaataccgttgta

SEQ ID NO: 94300 - DNA, 25 bp, Saccharomyces pastorianus
cgctatttaggatcctcttcatggg

SEQ ID NO: 94301 - DNA, 25 bp, Saccharomyces pastorianus
gattgggattacctttacctgcatt

SEQ ID NO: 94302 - DNA, 25 bp, Saccharomyces pastorianus
agattccaagaatccacgatcgctt

SEQ ID NO: 94303 - DNA, 25 bp, Saccharomyces pastorianus
tgtactcctcctagcctaaatgata

SEQ ID NO: 94304 - DNA, 25 bp, Saccharomyces pastorianus
taaatcatcggaaccttcttacctt

SEQ ID NO: 94305 - DNA, 25 bp, Saccharomyces pastorianus
ggtgaggccaacactttttaaatca

SEQ ID NO: 94306 - DNA, 25 bp, Saccharomyces pastorianus
agaatacgtcccaggtttactctcg

SEQ ID NO: 94307 - DNA, 25 bp, Saccharomyces pastorianus
aacgatggttccctagttctcgtga

SEQ ID NO: 94308 - DNA, 25 bp, Saccharomyces pastorianus
ttagctttgttagcggtgtctttcc

SEQ ID NO: 94309 - DNA, 25 bp, Saccharomyces pastorianus
aggacatgtgcgtacgttgcgttta

SEQ ID NO: 94310 - DNA, 25 bp, Saccharomyces pastorianus
ggttgggtctataacacctggccaa

SEQ ID NO: 94311 - DNA, 25 bp, Saccharomyces pastorianus
gtgtctttccttaccgctatgagtg

SEQ ID NO: 94312 - DNA, 25 bp, Saccharomyces pastorianus
gtacctagtcccaatatcgttagct

SEQ ID NO: 94313 - DNA, 25 bp, Saccharomyces pastorianus
gctgctcatatgtacgctatcaaaa

SEQ ID NO: 94314 - DNA, 25 bp, Saccharomyces pastorianus
agttctttggtgtttgcctctcaat

SEQ ID NO: 94315 - DNA, 25 bp, Saccharomyces pastorianus
gatgggcgtcgttactttacaagca

SEQ ID NO: 94316 - DNA, 25 bp, Saccharomyces pastorianus
aacgcgatgacctctttgcatgtta

SEQ ID NO: 94317 - DNA, 25 bp, Saccharomyces pastorianus
tagataatcccgcaattggcccaat

SEQ ID NO: 94318 - DNA, 25 bp, Saccharomyces pastorianus
ggatatcgaaaagctcttcggtcaa

SEQ ID NO: 94319 - DNA, 25 bp, Saccharomyces pastorianus
agtctcttgctgtctactttactga

SEQ ID NO: 94320 - DNA, 25 bp, Saccharomyces pastorianus
gtataggcccatggagtgccaaaat

SEQ ID NO: 94321 - DNA, 25 bp, Saccharomyces pastorianus
gttgtcagtctttatggcggtgcat

SEQ ID NO: 94322 - DNA, 25 bp, Saccharomyces pastorianus
aacattttctccgtataggtctgtg

SEQ ID NO: 94323 - DNA, 25 bp, Saccharomyces pastorianus
tggcggtgcatttcctgattacaaa

SEQ ID NO: 94324 - DNA, 25 bp, Saccharomyces pastorianus
tgtctcaacagatcagtggccaagc

SEQ ID NO: 94325 - DNA, 25 bp, Saccharomyces pastorianus
ggatgtatttgctcctgaagatcta

SEQ ID NO: 94326 - DNA, 25 bp, Saccharomyces pastorianus
tttcgaagacttcaaagacccagca

SEQ ID NO: 94327 - DNA, 25 bp, Saccharomyces pastorianus
aaatgttcttgatctccggattgaa

SEQ ID NO: 94328 - DNA, 25 bp, Saccharomyces pastorianus
gcatcaaggcaagggttgtcagtct

SEQ ID NO: 94329 - DNA, 25 bp, Saccharomyces pastorianus
caagaaggacttccagcaccaacgt

SEQ ID NO: 94330 - DNA, 25 bp, Saccharomyces pastorianus
aagctcgtggcgtaggaaccggcaa

SEQ ID NO: 94331 - DNA, 25 bp, Saccharomyces pastorianus
attccctagggatgctgtggtaaag

SEQ ID NO: 94332 - DNA, 25 bp, Saccharomyces pastorianus
gactagttcaagtctaccaccacaa

SEQ ID NO: 94333 - DNA, 25 bp, Saccharomyces pastorianus
gaaaactggcctgtcgagaatgatt

SEQ ID NO: 94334 - DNA, 25 bp, Saccharomyces pastorianus
agcaccaacgtcagttacaacttcg

SEQ ID NO: 94335 - DNA, 25 bp, Saccharomyces pastorianus
ggaagaagtacagccggtgctacaa

SEQ ID NO: 94336 - DNA, 25 bp, Saccharomyces pastorianus
attccatgcagttttaccgtcttag

SEQ ID NO: 94337 - DNA, 25 bp, Saccharomyces pastorianus
tacaacttcgtctgataagccccta

SEQ ID NO: 94338 - DNA, 25 bp, Saccharomyces pastorianus
aacgattatgtccaccaggttagcg

SEQ ID NO: 94339 - DNA, 25 bp, Saccharomyces pastorianus
cagcttatggatctaggattcccta

SEQ ID NO: 94340 - DNA, 25 bp, Saccharomyces pastorianus
tgccagtggtggtgatgcttccgaa

SEQ ID NO: 94341 - DNA, 25 bp, Saccharomyces pastorianus
tactatggtgcttcgaaatcctcgc

SEQ ID NO: 94342 - DNA, 25 bp, Saccharomyces pastorianus
ttgtctacttcgatcttgtacctga

SEQ ID NO: 94343 - DNA, 25 bp, Saccharomyces pastorianus
attacagattcaaccttgccagtgg

SEQ ID NO: 94344 - DNA, 25 bp, Saccharomyces pastorianus
gagcaaactaccagtcattcctcgt

SEQ ID NO: 94345 - DNA, 25 bp, Saccharomyces pastorianus
tggatggcagaacaccggctacttg

SEQ ID NO: 94346 - DNA, 25 bp, Saccharomyces pastorianus
agaaaggccgtttaccatgtcaatt

SEQ ID NO: 94347 - DNA, 25 bp, Saccharomyces pastorianus
gtggtcacttgcctttcaccaaaaa

SEQ ID NO: 94348 - DNA, 25 bp, Saccharomyces pastorianus
gctacttgtcatccatgctttgtta

SEQ ID NO: 94349 - DNA, 25 bp, Saccharomyces pastorianus
gtcaattgttgcaacccagaactgg

SEQ ID NO: 94350 - DNA, 25 bp, Saccharomyces pastorianus
gagaactacgaacttcccgagcaaa

SEQ ID NO: 94351 - DNA, 25 bp, Saccharomyces pastorianus
caagtattctgttttgctacccgga

SEQ ID NO: 94352 - DNA, 25 bp, Saccharomyces pastorianus
tccggtagactcattttgcgcgctt

SEQ ID NO: 94353 - DNA, 25 bp, Saccharomyces pastorianus
aaggaagcctttttcgctttctctg

SEQ ID NO: 94354 - DNA, 25 bp, Saccharomyces pastorianus
tcgactgcagcacaatcaacacttt

SEQ ID NO: 94355 - DNA, 25 bp, Saccharomyces pastorianus
tcgtcctcaggatcgataagccact

SEQ ID NO: 94356 - DNA, 25 bp, Saccharomyces pastorianus
aagcattctgccatggtgctgcata

SEQ ID NO: 94357 - DNA, 25 bp, Saccharomyces pastorianus
atacgctatgcttgttgtgagacca

SEQ ID NO: 94358 - DNA, 25 bp, Saccharomyces pastorianus
gtgctgcataactttctcatttctg

SEQ ID NO: 94359 - DNA, 25 bp, Saccharomyces pastorianus
gtgagaccatctatccgccaaggaa

SEQ ID NO: 94360 - DNA, 25 bp, Saccharomyces pastorianus
gacagcgtcttccagtataacgttg

SEQ ID NO: 94361 - DNA, 25 bp, Saccharomyces pastorianus
gcgcgcttctgtgtatgcttgtgag

SEQ ID NO: 94362 - DNA, 25 bp, Saccharomyces pastorianus
acgctgtcgagtggcttatcgatcc

SEQ ID NO: 94363 - DNA, 25 bp, Saccharomyces pastorianus
gcacgttagttggtttcgacgactt

SEQ ID NO: 94364 - DNA, 25 bp, Saccharomyces pastorianus
gaatgcttttaagcggcaacaatat

SEQ ID NO: 94365 - DNA, 25 bp, Saccharomyces pastorianus
gagtggcttatcgatcctgaggacg

SEQ ID NO: 94366 - DNA, 25 bp, Saccharomyces pastorianus
tcgatcctgaggacgagagcagaaa

SEQ ID NO: 94367 - DNA, 25 bp, Saccharomyces pastorianus
gcagcaccatggcagaatgctttta

SEQ ID NO: 94368 - DNA, 25 bp, Saccharomyces pastorianus
gaaagttatgcagcaccatggcaga

SEQ ID NO: 94369 - DNA, 25 bp, Saccharomyces pastorianus
caacaatattgccatccttgtgcca

SEQ ID NO: 94370 - DNA, 25 bp, Saccharomyces pastorianus
gaaatgagaaagttatgcagcacca

SEQ ID NO: 94371 - DNA, 25 bp, Saccharomyces pastorianus
accgcgagttcgagggcacgttagt

SEQ ID NO: 94372 - DNA, 25 bp, Saccharomyces pastorianus
aaagtgttgattgtgctgcagtcga

SEQ ID NO: 94373 - DNA, 25 bp, Saccharomyces pastorianus
actacttaggcggtcgaatgctcga

SEQ ID NO: 94374 - DNA, 25 bp, Saccharomyces pastorianus
agaaacggatctgcagttcaacccc

SEQ ID NO: 94375 - DNA, 25 bp, Saccharomyces pastorianus
gaacccgctgccatgtagtgacaag

SEQ ID NO: 94376 - DNA, 25 bp, Saccharomyces pastorianus
gatatcgcttctgaattgctacaca

SEQ ID NO: 94377 - DNA, 25 bp, Saccharomyces pastorianus
gcggcatgcgcaaggtccaatacgt

SEQ ID NO: 94378 - DNA, 25 bp, Saccharomyces pastorianus
ttttcagccatttcgagccgttcag

SEQ ID NO: 94379 - DNA, 25 bp, Saccharomyces pastorianus
aagcggcttgcacaatctggcggta

SEQ ID NO: 94380 - DNA, 25 bp, Saccharomyces pastorianus
aagtgtttcgatatgtgccgccagc

SEQ ID NO: 94381 - DNA, 25 bp, Saccharomyces pastorianus
gggaaaagacgtcgctctcacgaac

SEQ ID NO: 94382 - DNA, 25 bp, Saccharomyces pastorianus
tagtgacaagcagcgcgccgagtac

SEQ ID NO: 94383 - DNA, 25 bp, Saccharomyces pastorianus
gtaacgatcctatggcttttcagcc

SEQ ID NO: 94384 - DNA, 25 bp, Saccharomyces pastorianus
tggttttcccatacttgtctggtat

SEQ ID NO: 94385 - DNA, 25 bp, Saccharomyces pastorianus
gtcacagttgccacaatgttttgta

SEQ ID NO: 94386 - DNA, 25 bp, Saccharomyces pastorianus
tacgggcatgtagcgcaactgtttt

SEQ ID NO: 94387 - DNA, 25 bp, Saccharomyces pastorianus
gggttatattctgcattacgggcat

SEQ ID NO: 94388 - DNA, 25 bp, Saccharomyces pastorianus
taaacgttcctcatcggccataatt

SEQ ID NO: 94389 - DNA, 25 bp, Saccharomyces pastorianus
ggcagctctttttatgtcctcttca

SEQ ID NO: 94390 - DNA, 25 bp, Saccharomyces pastorianus
aactgttttcagatctaacctgcac

SEQ ID NO: 94391 - DNA, 25 bp, Saccharomyces pastorianus
gttgctggttttgtaccatctcgat

SEQ ID NO: 94392 - DNA, 25 bp, Saccharomyces pastorianus
aagtttctcttgatacacctgttta

SEQ ID NO: 94393 - DNA, 25 bp, Saccharomyces pastorianus
tgtcctcttcactctggaaagtagt

SEQ ID NO: 94394 - DNA, 25 bp, Saccharomyces pastorianus
acactatcttgtttgcctctttaaa

SEQ ID NO: 94395 - DNA, 25 bp, Saccharomyces pastorianus
cacatcaggtattgttccaacacta

SEQ ID NO: 94396 - DNA, 25 bp, Saccharomyces pastorianus
accagcaactactttccagagtgaa

SEQ ID NO: 94397 - DNA, 25 bp, Saccharomyces pastorianus
ctactttccagagtgaagaggacat

SEQ ID NO: 94398 - DNA, 25 bp, Saccharomyces pastorianus
gaatctgaaaaagacacctccgcca

SEQ ID NO: 94399 - DNA, 25 bp, Saccharomyces pastorianus
acctccgccacatcaggtattgttc

SEQ ID NO: 94400 - DNA, 25 bp, Saccharomyces pastorianus
cataaaaagagctgccccagaatct

SEQ ID NO: 94401 - DNA, 25 bp, Saccharomyces pastorianus
acactacaaaacattgtggcaactg

SEQ ID NO: 94402 - DNA, 25 bp, Saccharomyces pastorianus
ggacataaaaagagctgccccagaa

SEQ ID NO: 94403 - DNA, 25 bp, Saccharomyces pastorianus
caaaaccagcaactactttccagag

SEQ ID NO: 94404 - DNA, 25 bp, Saccharomyces pastorianus
ggtattgttccaacactacaaaaca

SEQ ID NO: 94405 - DNA, 25 bp, Saccharomyces pastorianus
gaatcgagatggtacaaaaccagca

SEQ ID NO: 94406 - DNA, 25 bp, Saccharomyces pastorianus
ttttgctgctgtcatcatgcgtatt

SEQ ID NO: 94407 - DNA, 25 bp, Saccharomyces pastorianus
ggttgttaccggtgcaaaaagtgag

SEQ ID NO: 94408 - DNA, 25 bp, Saccharomyces pastorianus
tgaggatgactcaaagctggccagt

SEQ ID NO: 94409 - DNA, 25 bp, Saccharomyces pastorianus
atgcagaatataaccccaagcgttt

SEQ ID NO: 94410 - DNA, 25 bp, Saccharomyces pastorianus
agttgcgctacatgcccgtaatgca

SEQ ID NO: 94411 - DNA, 25 bp, Saccharomyces pastorianus
tgctgctgtcatcatgcgtattaga

SEQ ID NO: 94412 - DNA, 25 bp, Saccharomyces pastorianus
ataaccccaagcgttttgctgctgt

SEQ ID NO: 94413 - DNA, 25 bp, Saccharomyces pastorianus
atgactcaaagctggccagtagaaa

SEQ ID NO: 94414 - DNA, 25 bp, Saccharomyces pastorianus
gctacatgcccgtaatgcagaatat

SEQ ID NO: 94415 - DNA, 25 bp, Saccharomyces pastorianus
aagcgttttgctgctgtcatcatgc

SEQ ID NO: 94416 - DNA, 25 bp, Saccharomyces pastorianus
gaatataaccccaagcgttttgctg

SEQ ID NO: 94417 - DNA, 25 bp, Saccharomyces pastorianus
aagattgttcttactggtgcaaagc

SEQ ID NO: 94418 - DNA, 25 bp, Saccharomyces pastorianus
tggtactttctcctcctatgagcca

SEQ ID NO: 94419 - DNA, 25 bp, Saccharomyces pastorianus
cagaattgtttcctggtttgatcta

SEQ ID NO: 94420 - DNA, 25 bp, Saccharomyces pastorianus
ctcctatgagccagaattgtttcct

SEQ ID NO: 94421 - DNA, 25 bp, Saccharomyces pastorianus
gaaatttaccaagcttttgaagcta

SEQ ID NO: 94422 - DNA, 25 bp, Saccharomyces pastorianus
gtttcctggtttgatctatagaatg

SEQ ID NO: 94423 - DNA, 25 bp, Saccharomyces pastorianus
tttctcctcctatgagccagaattg

SEQ ID NO: 94424 - DNA, 25 bp, Saccharomyces pastorianus
tatacgtctagaagggttagcattc

SEQ ID NO: 94425 - DNA, 25 bp, Saccharomyces pastorianus
gtctagaagggttagcattcagtca

SEQ ID NO: 94426 - DNA, 25 bp, Saccharomyces pastorianus
ggtgaagccgaaaattgtgttgtta

SEQ ID NO: 94427 - DNA, 25 bp, Saccharomyces pastorianus
ttgttcttactggtgcaaagcaaag

SEQ ID NO: 94428 - DNA, 25 bp, Saccharomyces pastorianus
ttaagcgccatcgaggtgtttgcct

SEQ ID NO: 94429 - DNA, 25 bp, Saccharomyces pastorianus
gtgtttgcctctgcatttttcagca

SEQ ID NO: 94430 - DNA, 25 bp, Saccharomyces pastorianus
atcttgtacatattcggcacggtca

SEQ ID NO: 94431 - DNA, 25 bp, Saccharomyces pastorianus
aagttctttattttcctgctccaat

SEQ ID NO: 94432 - DNA, 25 bp, Saccharomyces pastorianus
taattctctgttagtccgcgttagc

SEQ ID NO: 94433 - DNA, 25 bp, Saccharomyces pastorianus
atctggtggatcgtctctattaagc

SEQ ID NO: 94434 - DNA, 25 bp, Saccharomyces pastorianus
gtgaacgtgatccagaaccgcttgt

SEQ ID NO: 94435 - DNA, 25 bp, Saccharomyces pastorianus
cggcgaactcgctggtgatgacatg

SEQ ID NO: 94436 - DNA, 25 bp, Saccharomyces pastorianus
cgcgttagcttctcgatatcttgta

SEQ ID NO: 94437 - DNA, 25 bp, Saccharomyces pastorianus
tgaatctatgttcacgctcatccga

SEQ ID NO: 94438 - DNA, 25 bp, Saccharomyces pastorianus
ggcacggtcattctcgaattgctta

SEQ ID NO: 94439 - DNA, 25 bp, Saccharomyces pastorianus
agaggcaaacacctcgatggcgctt

SEQ ID NO: 94440 - DNA, 25 bp, Saccharomyces pastorianus
aaaatacgtcatcaccacctatttc

SEQ ID NO: 94441 - DNA, 25 bp, Saccharomyces pastorianus
acctaacgccgctgcaattcaagag

SEQ ID NO: 94442 - DNA, 25 bp, Saccharomyces pastorianus
aagcggttctggatcacgttcactt

SEQ ID NO: 94443 - DNA, 25 bp, Saccharomyces pastorianus
ccaagttcaccttcctctgtaggaa

SEQ ID NO: 94444 - DNA, 25 bp, Saccharomyces pastorianus
aatgaccgtgccgaatatgtacaag

SEQ ID NO: 94445 - DNA, 25 bp, Saccharomyces pastorianus
ataatttcggcatgtcatcaccagc

SEQ ID NO: 94446 - DNA, 25 bp, Saccharomyces pastorianus
gaaagggagcttgctttgctgaaaa

SEQ ID NO: 94447 - DNA, 25 bp, Saccharomyces pastorianus
ggatacgtgcgtcagtctagaaaaa

SEQ ID NO: 94448 - DNA, 25 bp, Saccharomyces pastorianus
agttcgccggtgacttgggatccaa

SEQ ID NO: 94449 - DNA, 25 bp, Saccharomyces pastorianus
tgtaggaagccccacaagcggttct

SEQ ID NO: 94450 - DNA, 25 bp, Saccharomyces pastorianus
taagctccttctatcattggccatg

SEQ ID NO: 94451 - DNA, 25 bp, Saccharomyces pastorianus
atggcgctacattcactgttactgc

SEQ ID NO: 94452 - DNA, 25 bp, Saccharomyces pastorianus
attgccggtaacgatacagccacgc

SEQ ID NO: 94453 - DNA, 25 bp, Saccharomyces pastorianus
gaaacatcggtttcttctacacatg

SEQ ID NO: 94454 - DNA, 25 bp, Saccharomyces pastorianus
tgttactgccccaactacgttaata

SEQ ID NO: 94455 - DNA, 25 bp, Saccharomyces pastorianus
taattaccaactgtccttgcactat

SEQ ID NO: 94456 - DNA, 25 bp, Saccharomyces pastorianus
agttcctctgtaatcgtggtaccat

SEQ ID NO: 94457 - DNA, 25 bp, Saccharomyces pastorianus
ctacggctctcggattggtatctaa

SEQ ID NO: 94458 - DNA, 25 bp, Saccharomyces pastorianus
tcaagcgatgctactattgccggta

SEQ ID NO: 94459 - DNA, 25 bp, Saccharomyces pastorianus
tgaattcactacttactgcccagaa

SEQ ID NO: 94460 - DNA, 25 bp, Saccharomyces pastorianus
atattctacaactcgactgctactg

SEQ ID NO: 94461 - DNA, 25 bp, Saccharomyces pastorianus
aattgccgcaagttcttttaatcca

SEQ ID NO: 94462 - DNA, 25 bp, Saccharomyces pastorianus
ttaccgaactagaggacgatgacgt

SEQ ID NO: 94463 - DNA, 25 bp, Saccharomyces pastorianus
taagtcctcgtcagggaatgatgtc

SEQ ID NO: 94464 - DNA, 25 bp, Saccharomyces pastorianus
ggcggtcattacacagcggatgttt

SEQ ID NO: 94465 - DNA, 25 bp, Saccharomyces pastorianus
gatcacgagttaatcatacctgaag

SEQ ID NO: 94466 - DNA, 25 bp, Saccharomyces pastorianus
gcggatgtttatcatagcgagcaca

SEQ ID NO: 94467 - DNA, 25 bp, Saccharomyces pastorianus
agaagcttctgattcgaggactgcc

SEQ ID NO: 94468 - DNA, 25 bp, Saccharomyces pastorianus
tacgaattgctaccctttaagtcct

SEQ ID NO: 94469 - DNA, 25 bp, Saccharomyces pastorianus
ggtaagttccgatggcggtcattac

SEQ ID NO: 94470 - DNA, 25 bp, Saccharomyces pastorianus
aaccggagttatataccatcatggg

SEQ ID NO: 94471 - DNA, 25 bp, Saccharomyces pastorianus
tggacatttcagatgctggcgtgaa

SEQ ID NO: 94472 - DNA, 25 bp, Saccharomyces pastorianus
gacggctccaatttcgaggtcatcg

SEQ ID NO: 94473 - DNA, 25 bp, Saccharomyces pastorianus
gggcggctattttacttggatcact

SEQ ID NO: 94474 - DNA, 25 bp, Saccharomyces pastorianus
gtggtgcaaacgtctctggcggaac

SEQ ID NO: 94475 - DNA, 25 bp, Saccharomyces pastorianus
ggagatatccactattcttgccaag

SEQ ID NO: 94476 - DNA, 25 bp, Saccharomyces pastorianus
ggtcagtcatgctttaggctctcaa

SEQ ID NO: 94477 - DNA, 25 bp, Saccharomyces pastorianus
atagacagaagtacagcgccctccg

SEQ ID NO: 94478 - DNA, 25 bp, Saccharomyces pastorianus
gaatctcgccagacagctatctaaa

SEQ ID NO: 94479 - DNA, 25 bp, Saccharomyces pastorianus
aacgcaactttctccaagctgatcg

SEQ ID NO: 94480 - DNA, 25 bp, Saccharomyces pastorianus
agatccgtatactccgagagggcca

SEQ ID NO: 94481 - DNA, 25 bp, Saccharomyces pastorianus
atacatgcccctaggaaccgagatt

SEQ ID NO: 94482 - DNA, 25 bp, Saccharomyces pastorianus
aatttaatgtcatccttgccgacgg

SEQ ID NO: 94483 - DNA, 25 bp, Saccharomyces pastorianus
gaagcgccgctattcagattcaaat

SEQ ID NO: 94484 - DNA, 25 bp, Saccharomyces pastorianus
ggaacgtacaaatctgctctcgcac

SEQ ID NO: 94485 - DNA, 25 bp, Saccharomyces pastorianus
cctggtatacccgttatgtggcaag

SEQ ID NO: 94486 - DNA, 25 bp, Saccharomyces pastorianus
gatgatgaacgcctgcctggtatac

SEQ ID NO: 94487 - DNA, 25 bp, Saccharomyces pastorianus
tgtatttcattaccgcttgctagca

SEQ ID NO: 94488 - DNA, 25 bp, Saccharomyces pastorianus
gaatcccgcatctgtgaagcaattg

SEQ ID NO: 94489 - DNA, 25 bp, Saccharomyces pastorianus
aacctcgagcttggatggcccttga

SEQ ID NO: 94490 - DNA, 25 bp, Saccharomyces pastorianus
aaatcaatcgagtcgtggccctgct

SEQ ID NO: 94491 - DNA, 25 bp, Saccharomyces pastorianus
gtacgtcagcggatgcctgttacag

SEQ ID NO: 94492 - DNA, 25 bp, Saccharomyces pastorianus
agattcaaatagtctgcccgtgtcc

SEQ ID NO: 94493 - DNA, 25 bp, Saccharomyces pastorianus
aaggatgttcagcatgccatacgaa

SEQ ID NO: 94494 - DNA, 25 bp, Saccharomyces pastorianus
ggacgacagcccctagtgataaaga

SEQ ID NO: 94495 - DNA, 25 bp, Saccharomyces pastorianus
attgtaccaggacaggctcttctta

SEQ ID NO: 94496 - DNA, 25 bp, Saccharomyces pastorianus
gacttcccgcaaatgaccaaggcta

SEQ ID NO: 94497 - DNA, 25 bp, Saccharomyces pastorianus
tgccctggcgttgtttggacgacag

SEQ ID NO: 94498 - DNA, 25 bp, Saccharomyces pastorianus
tactactggctggtgtcctttggca

SEQ ID NO: 94499 - DNA, 25 bp, Saccharomyces pastorianus
aagatgagcaagcagctgccctggc

SEQ ID NO: 94500 - DNA, 25 bp, Saccharomyces pastorianus
agagggccgcctgctatgtgaaatg

SEQ ID NO: 94501 - DNA, 25 bp, Saccharomyces pastorianus
atgccacgccggttgccagtagagg

SEQ ID NO: 94502 - DNA, 25 bp, Saccharomyces pastorianus
gaatggtcactaccgctactactgg

SEQ ID NO: 94503 - DNA, 25 bp, Saccharomyces pastorianus
aagcgtttgcgcgtggcacaatgca

SEQ ID NO: 94504 - DNA, 25 bp, Saccharomyces pastorianus
agatggatacgctaccagggcagcc

SEQ ID NO: 94505 - DNA, 25 bp, Saccharomyces pastorianus
gccgctgtgttcatctcatttacaa

SEQ ID NO: 94506 - DNA, 25 bp, Saccharomyces pastorianus
ttgcaagtaatcactgccgctgtgt

SEQ ID NO: 94507 - DNA, 25 bp, Saccharomyces pastorianus
aatgaacttatcgtccgctgtggtc

SEQ ID NO: 94508 - DNA, 25 bp, Saccharomyces pastorianus
atcgcccttgggtttttcaacgcat

SEQ ID NO: 94509 - DNA, 25 bp, Saccharomyces pastorianus
atttgactcaagcagacccttactt

SEQ ID NO: 94510 - DNA, 25 bp, Saccharomyces pastorianus
aagcgtcttttcactattctaccga

SEQ ID NO: 94511 - DNA, 25 bp, Saccharomyces pastorianus
tggtgctcaacaattcagttctccc

SEQ ID NO: 94512 - DNA, 25 bp, Saccharomyces pastorianus
cgatcatttctataccggccacaat

SEQ ID NO: 94513 - DNA, 25 bp, Saccharomyces pastorianus
gggttcgctaatcaaggtgtcgctt

SEQ ID NO: 94514 - DNA, 25 bp, Saccharomyces pastorianus
gagaacatgggcatcttccaatcat

SEQ ID NO: 94515 - DNA, 25 bp, Saccharomyces pastorianus
ggtcctctactttgcctttaatggt

SEQ ID NO: 94516 - DNA, 25 bp, Saccharomyces pastorianus
tgtacagaattcctggttccatcgg

SEQ ID NO: 94517 - DNA, 25 bp, Saccharomyces pastorianus
cagttcagacaatcctgcaagattt

SEQ ID NO: 94518 - DNA, 25 bp, Saccharomyces pastorianus
ttcctggttccatcggcagtataaa

SEQ ID NO: 94519 - DNA, 25 bp, Saccharomyces pastorianus
ggacgcatcaaacttggctattgta

SEQ ID NO: 94520 - DNA, 25 bp, Saccharomyces pastorianus
gggtccagattaggtgcagttcaga

SEQ ID NO: 94521 - DNA, 25 bp, Saccharomyces pastorianus
aaagttacctacatgctattaccaa

SEQ ID NO: 94522 - DNA, 25 bp, Saccharomyces pastorianus
gattctttattttctcatgctatgg

SEQ ID NO: 94523 - DNA, 25 bp, Saccharomyces pastorianus
gtgaacgactttaccgatttggcga

SEQ ID NO: 94524 - DNA, 25 bp, Saccharomyces pastorianus
ggtgcaacagataattcctttacat

SEQ ID NO: 94525 - DNA, 25 bp, Saccharomyces pastorianus
gagagaataccttgatacctacaat

SEQ ID NO: 94526 - DNA, 25 bp, Saccharomyces pastorianus
gaatgcgatcgcaggctgttttaag

SEQ ID NO: 94527 - DNA, 25 bp, Saccharomyces pastorianus
gacacttccgatgagtcttttgaca

SEQ ID NO: 94528 - DNA, 25 bp, Saccharomyces pastorianus
ggtgcctggagggtatctactgtac

SEQ ID NO: 94529 - DNA, 25 bp, Saccharomyces pastorianus
ttaggagaggtttgccggagccatt

SEQ ID NO: 94530 - DNA, 25 bp, Saccharomyces pastorianus
aggctacggtcaatcgtggttgcca

SEQ ID NO: 94531 - DNA, 25 bp, Saccharomyces pastorianus
gcggtgtgccaggatgtatcttcat

SEQ ID NO: 94532 - DNA, 25 bp, Saccharomyces pastorianus
gcattcccgggattatttcaggtat

SEQ ID NO: 94533 - DNA, 25 bp, Saccharomyces pastorianus
agatgctttgctcgcgcaagtgagt

SEQ ID NO: 94534 - DNA, 25 bp, Saccharomyces pastorianus
aaaatcattgtcttgccccaattct

SEQ ID NO: 94535 - DNA, 25 bp, Saccharomyces pastorianus
aatcgagtttgttcttttcacagac

SEQ ID NO: 94536 - DNA, 25 bp, Saccharomyces pastorianus
gtatcttcattcatgcagcaggttt

SEQ ID NO: 94537 - DNA, 25 bp, Saccharomyces pastorianus
ttcacagactcttcaggtgcctgga

SEQ ID NO: 94538 - DNA, 25 bp, Saccharomyces pastorianus
ctaatttattagacgctgtgcaaga

SEQ ID NO: 94539 - DNA, 25 bp, Saccharomyces pastorianus
acaatatggtggacgcccgtacgga

SEQ ID NO: 94540 - DNA, 25 bp, Saccharomyces pastorianus
gttgatgttacgtgattccatacag

SEQ ID NO: 94541 - DNA, 25 bp, Saccharomyces pastorianus
gtcatcttcaatattgaccctggca

SEQ ID NO: 94542 - DNA, 25 bp, Saccharomyces pastorianus
gcccgtacggaactcatatctgaat

SEQ ID NO: 94543 - DNA, 25 bp, Saccharomyces pastorianus
gtacttggacgtcttcacagatttt

SEQ ID NO: 94544 - DNA, 25 bp, Saccharomyces pastorianus
ttgccaaagaggtggcggatctttt

SEQ ID NO: 94545 - DNA, 25 bp, Saccharomyces pastorianus
agtcgcagacgtaatgtacttggac

SEQ ID NO: 94546 - DNA, 25 bp, Saccharomyces pastorianus
gcacttctttggagcttattgatga

SEQ ID NO: 94547 - DNA, 25 bp, Saccharomyces pastorianus
gaccctggcaagagagctggttcca

SEQ ID NO: 94548 - DNA, 25 bp, Saccharomyces pastorianus
gtttgctaaggatcaagtcgcagac

SEQ ID NO: 94549 - DNA, 25 bp, Saccharomyces pastorianus
gttggtttcccgtggaccaatgcaa

SEQ ID NO: 94550 - DNA, 25 bp, Saccharomyces pastorianus
aatgcaatccatatcttcttctcca

SEQ ID NO: 94551 - DNA, 25 bp, Saccharomyces pastorianus
gtcagtaataatctctcatccacaa

SEQ ID NO: 94552 - DNA, 25 bp, Saccharomyces pastorianus
aaattgcctttgactgcttctgtgc

SEQ ID NO: 94553 - DNA, 25 bp, Saccharomyces pastorianus
atgtaaacgatacgtggtccgccgc

SEQ ID NO: 94554 - DNA, 25 bp, Saccharomyces pastorianus
aactcttccttcataaactcttcaa

SEQ ID NO: 94555 - DNA, 25 bp, Saccharomyces pastorianus
gacattaccaatccttctacttttg

SEQ ID NO: 94556 - DNA, 25 bp, Saccharomyces pastorianus
gccgcggactattgcaggtgtgata

SEQ ID NO: 94557 - DNA, 25 bp, Saccharomyces pastorianus
taaactcttcaatatcatcgccggc

SEQ ID NO: 94558 - DNA, 25 bp, Saccharomyces pastorianus
gagcaccgttttcttaaagcgtttg

SEQ ID NO: 94559 - DNA, 25 bp, Saccharomyces pastorianus
aatgccgtcaaatccttacgctttg

SEQ ID NO: 94560 - DNA, 25 bp, Saccharomyces pastorianus
agtatttcggcggttattctcttgg

SEQ ID NO: 94561 - DNA, 25 bp, Saccharomyces pastorianus
ttttacactaagttacatcgccccg

SEQ ID NO: 94562 - DNA, 25 bp, Saccharomyces pastorianus
tagaccttcccttaagaaatcgaat

SEQ ID NO: 94563 - DNA, 25 bp, Saccharomyces pastorianus
actaagttacatcgccccgttctgc

SEQ ID NO: 94564 - DNA, 25 bp, Saccharomyces pastorianus
tccggttgtgtttggccttcttcta

SEQ ID NO: 94565 - DNA, 25 bp, Saccharomyces pastorianus
tggccttcttctacgcatagacctt

SEQ ID NO: 94566 - DNA, 25 bp, Saccharomyces pastorianus
tacgcatagaccttcccttaagaaa

SEQ ID NO: 94567 - DNA, 25 bp, Saccharomyces pastorianus
attctcttggttccttgtcctcttg

SEQ ID NO: 94568 - DNA, 25 bp, Saccharomyces pastorianus
aggcactctcttcctccggttgtgt

SEQ ID NO: 94569 - DNA, 25 bp, Saccharomyces pastorianus
gcggttattctcttggttccttgtc

SEQ ID NO: 94570 - DNA, 25 bp, Saccharomyces pastorianus
tgtttggccttcttctacgcataga

SEQ ID NO: 94571 - DNA, 25 bp, Saccharomyces pastorianus
gaacatgaggtaccacttgatgctg

SEQ ID NO: 94572 - DNA, 25 bp, Saccharomyces pastorianus
ggagtccagtaggtaacatgggtac

SEQ ID NO: 94573 - DNA, 25 bp, Saccharomyces pastorianus
atagcgggcaggtccctagagtttt

SEQ ID NO: 94574 - DNA, 25 bp, Saccharomyces pastorianus
taccacttgatgctggagggagtcc

SEQ ID NO: 94575 - DNA, 25 bp, Saccharomyces pastorianus
gttacaacacaactaccaccaataa

SEQ ID NO: 94576 - DNA, 25 bp, Saccharomyces pastorianus
gaataacaacaacgagctaggtgat

SEQ ID NO: 94577 - DNA, 25 bp, Saccharomyces pastorianus
agtttcacaagccacgcccgtaata

SEQ ID NO: 94578 - DNA, 25 bp, Saccharomyces pastorianus
atttcttaagggaaggtctatgcgt

SEQ ID NO: 94579 - DNA, 25 bp, Saccharomyces pastorianus
acatgggtaccaactcgaataacaa

SEQ ID NO: 94580 - DNA, 25 bp, Saccharomyces pastorianus
gagctaggtgatgtattcgacagaa

SEQ ID NO: 94581 - DNA, 25 bp, Saccharomyces pastorianus
gcagatcaagtaccagttacaacac

SEQ ID NO: 94582 - DNA, 25 bp, Saccharomyces pastorianus
aaaagaaagcatcccctggcgcaac

SEQ ID NO: 94583 - DNA, 25 bp, Saccharomyces pastorianus
gcgtggagtatcttctggaggcaat

SEQ ID NO: 94584 - DNA, 25 bp, Saccharomyces pastorianus
taagtcatcggaacccgtaactaag

SEQ ID NO: 94585 - DNA, 25 bp, Saccharomyces pastorianus
gtcaagctcaacttgtccacaaatg

SEQ ID NO: 94586 - DNA, 25 bp, Saccharomyces pastorianus
taaggaacgcccacattttaacaag

SEQ ID NO: 94587 - DNA, 25 bp, Saccharomyces pastorianus
acaaatggatttgctcaacctaata

SEQ ID NO: 94588 - DNA, 25 bp, Saccharomyces pastorianus
cgcaacattgcgtggagtatcttct

SEQ ID NO: 94589 - DNA, 25 bp, Saccharomyces pastorianus
taaaatcatcagactcacccaagcc

SEQ ID NO: 94590 - DNA, 25 bp, Saccharomyces pastorianus
cgaaacacagcaatggtcccggata

SEQ ID NO: 94591 - DNA, 25 bp, Saccharomyces pastorianus
atgaaggttaccacagcaaatcgaa

SEQ ID NO: 94592 - DNA, 25 bp, Saccharomyces pastorianus
gaagcggtcagaatacgattacgat

SEQ ID NO: 94593 - DNA, 25 bp, Saccharomyces pastorianus
aagcgctagcgcaaatgcccatcat

SEQ ID NO: 94594 - DNA, 25 bp, Saccharomyces pastorianus
ttgcctcggcacaacaaatcgggta

SEQ ID NO: 94595 - DNA, 25 bp, Saccharomyces pastorianus
gtggccacactaatcccgtatgagg

SEQ ID NO: 94596 - DNA, 25 bp, Saccharomyces pastorianus
gtgaaagtgcacctatccaggatcc

SEQ ID NO: 94597 - DNA, 25 bp, Saccharomyces pastorianus
agataatgaggccttcgtcggacca

SEQ ID NO: 94598 - DNA, 25 bp, Saccharomyces pastorianus
ataattcacggttttgctcgtcggt

SEQ ID NO: 94599 - DNA, 25 bp, Saccharomyces pastorianus
aaacgggtacactctacatgaggtt

SEQ ID NO: 94600 - DNA, 25 bp, Saccharomyces pastorianus
gagcgagggcgtattaccgatcatt

SEQ ID NO: 94601 - DNA, 25 bp, Saccharomyces pastorianus
gggtactacttacttcggtgtacat

SEQ ID NO: 94602 - DNA, 25 bp, Saccharomyces pastorianus
gatcccgacgacttagtcaccatag

SEQ ID NO: 94603 - DNA, 25 bp, Saccharomyces pastorianus
gtcgcatggacctagtggatctaac

SEQ ID NO: 94604 - DNA, 25 bp, Saccharomyces pastorianus
aatggcccgccaagcaaacgtatga

SEQ ID NO: 94605 - DNA, 25 bp, Saccharomyces pastorianus
caacttttggcctgccgacgttaag

SEQ ID NO: 94606 - DNA, 25 bp, Saccharomyces pastorianus
tccctactggtccttccaaaaagag

SEQ ID NO: 94607 - DNA, 25 bp, Saccharomyces pastorianus
aagttctgagcctgcaaatggcccg

SEQ ID NO: 94608 - DNA, 25 bp, Saccharomyces pastorianus
gtacaaggcaatcaagcaaccccag

SEQ ID NO: 94609 - DNA, 25 bp, Saccharomyces pastorianus
atatcgcaagcacctttggtcttac

SEQ ID NO: 94610 - DNA, 25 bp, Saccharomyces pastorianus
tatgaaagccctcccaaaaggtcct

SEQ ID NO: 94611 - DNA, 25 bp, Saccharomyces pastorianus
ggtcctgccgccttaataaataaca

SEQ ID NO: 94612 - DNA, 25 bp, Saccharomyces pastorianus
gagtgcaatacgtacttctttgaag

SEQ ID NO: 94613 - DNA, 25 bp, Saccharomyces pastorianus
gtcccagtgctgacataggctcgaa

SEQ ID NO: 94614 - DNA, 25 bp, Saccharomyces pastorianus
gaggcggcaaaggtcttgatcgtaa

SEQ ID NO: 94615 - DNA, 25 bp, Saccharomyces pastorianus
caattcagaaatggtccggtttacg

SEQ ID NO: 94616 - DNA, 25 bp, Saccharomyces pastorianus
tcaaatgagataccagcaagctact

SEQ ID NO: 94617 - DNA, 25 bp, Saccharomyces pastorianus
caaagaacggcatgccacctcaatt

SEQ ID NO: 94618 - DNA, 25 bp, Saccharomyces pastorianus
aggccattacagaaaagaaccaaca

SEQ ID NO: 94619 - DNA, 25 bp, Saccharomyces pastorianus
ttctgctgcctatgagtctttcaaa

SEQ ID NO: 94620 - DNA, 25 bp, Saccharomyces pastorianus
ggcatgccacctcaattcagaaatg

SEQ ID NO: 94621 - DNA, 25 bp, Saccharomyces pastorianus
gaggaagctactaaggccattacag

SEQ ID NO: 94622 - DNA, 25 bp, Saccharomyces pastorianus
gaattgttcgaacaacactacaaag

SEQ ID NO: 94623 - DNA, 25 bp, Saccharomyces pastorianus
tgtttctcaactccagaggaagcta

SEQ ID NO: 94624 - DNA, 25 bp, Saccharomyces pastorianus
tacaaagaagcttctgctgcctatg

SEQ ID NO: 94625 - DNA, 25 bp, Saccharomyces pastorianus
gaaagtgatgaattgttcgaacaac

SEQ ID NO: 94626 - DNA, 25 bp, Saccharomyces pastorianus
atcattgaagctgacctgtggccgg

SEQ ID NO: 94627 - DNA, 25 bp, Saccharomyces pastorianus
gttgcttgttgcaccatcatcaaaa

SEQ ID NO: 94628 - DNA, 25 bp, Saccharomyces pastorianus
gtgtatcttcattactgctattatc

SEQ ID NO: 94629 - DNA, 25 bp, Saccharomyces pastorianus
ccggctgtatttgttgcttgttgca

SEQ ID NO: 94630 - DNA, 25 bp, Saccharomyces pastorianus
attgtcatattctgtgtcatcgtta

SEQ ID NO: 94631 - DNA, 25 bp, Saccharomyces pastorianus
tcttcaaagggcgacatgggagcat

SEQ ID NO: 94632 - DNA, 25 bp, Saccharomyces pastorianus
gagcatgcccatcgccatgaaaagt

SEQ ID NO: 94633 - DNA, 25 bp, Saccharomyces pastorianus
ggtaggtgcaatatgtgtatcttca

SEQ ID NO: 94634 - DNA, 25 bp, Saccharomyces pastorianus
ataaaggatttctgttacggttgct

SEQ ID NO: 94635 - DNA, 25 bp, Saccharomyces pastorianus
aattcttctgcatcttcacgtttat

SEQ ID NO: 94636 - DNA, 25 bp, Saccharomyces pastorianus
tgcgtttttatttcacttccaggag

SEQ ID NO: 94637 - DNA, 25 bp, Saccharomyces pastorianus
gatgatcgccactaaccaactagat

SEQ ID NO: 94638 - DNA, 25 bp, Saccharomyces pastorianus
gaaggcatagcactttccgacaact

SEQ ID NO: 94639 - DNA, 25 bp, Saccharomyces pastorianus
gagcaccttcattttgggctgtttt

SEQ ID NO: 94640 - DNA, 25 bp, Saccharomyces pastorianus
gcagcgcgtatctatggagcacctt

SEQ ID NO: 94641 - DNA, 25 bp, Saccharomyces pastorianus
gaaacctggatgacttcacccaagg

SEQ ID NO: 94642 - DNA, 25 bp, Saccharomyces pastorianus
tttcagcaggcccaaacgttcggaa

SEQ ID NO: 94643 - DNA, 25 bp, Saccharomyces pastorianus
agaatttttcaaagctgcagcgcgt

SEQ ID NO: 94644 - DNA, 25 bp, Saccharomyces pastorianus
aacatctctagatctaccaggcgta

SEQ ID NO: 94645 - DNA, 25 bp, Saccharomyces pastorianus
ttactaccccgtttcacatatgaca

SEQ ID NO: 94646 - DNA, 25 bp, Saccharomyces pastorianus
atttcgatcattatcctcctggtta

SEQ ID NO: 94647 - DNA, 25 bp, Saccharomyces pastorianus
tagataaccgctactctgtggaaag

SEQ ID NO: 94648 - DNA, 25 bp, Saccharomyces pastorianus
cagcaacagcgccatcaacatgaat

SEQ ID NO: 94649 - DNA, 25 bp, Saccharomyces pastorianus
gcaacgcgaccggaaactactttca

SEQ ID NO: 94650 - DNA, 25 bp, Saccharomyces pastorianus
atggaaacacgcttctcgatcagaa

SEQ ID NO: 94651 - DNA, 25 bp, Saccharomyces pastorianus
agcaactgtttcattaggcgacctg

SEQ ID NO: 94652 - DNA, 25 bp, Saccharomyces pastorianus
cccagagtcgtttttccatgagcaa

SEQ ID NO: 94653 - DNA, 25 bp, Saccharomyces pastorianus
gaacccaagtctgcggatacataca

SEQ ID NO: 94654 - DNA, 25 bp, Saccharomyces pastorianus
aggcgacctgatgggctcaaacgtt

SEQ ID NO: 94655 - DNA, 25 bp, Saccharomyces pastorianus
ttgcaagtgtataccgagttcgatt

SEQ ID NO: 94656 - DNA, 25 bp, Saccharomyces pastorianus
atggtcatactttcgttccacagta

SEQ ID NO: 94657 - DNA, 25 bp, Saccharomyces pastorianus
aaatcgcgtttcttacagtggctca

SEQ ID NO: 94658 - DNA, 25 bp, Saccharomyces pastorianus
atatctccggatacttcagcaactg

SEQ ID NO: 94659 - DNA, 25 bp, Saccharomyces pastorianus
agttattgccaagaccgtagattca

SEQ ID NO: 94660 - DNA, 25 bp, Saccharomyces pastorianus
taacaacctggtttcggtgacagaa

SEQ ID NO: 94661 - DNA, 25 bp, Saccharomyces pastorianus
ggaaacagcacattttgcatctcta

SEQ ID NO: 94662 - DNA, 25 bp, Saccharomyces pastorianus
ttgctaagtttgcagatcgctccca

SEQ ID NO: 94663 - DNA, 25 bp, Saccharomyces pastorianus
tttatattgagtgcgatcctgtccc

SEQ ID NO: 94664 - DNA, 25 bp, Saccharomyces pastorianus
ggtcgttcgccaggatttcagcaaa

SEQ ID NO: 94665 - DNA, 25 bp, Saccharomyces pastorianus
ttgcagatcgctcccagctaaaaaa

SEQ ID NO: 94666 - DNA, 25 bp, Saccharomyces pastorianus
gaagccaggtccatggctgggtaaa

SEQ ID NO: 94667 - DNA, 25 bp, Saccharomyces pastorianus
gagaagcttcctatcttaagggaaa

SEQ ID NO: 94668 - DNA, 25 bp, Saccharomyces pastorianus
ggcagtttgataatcctacagggac

SEQ ID NO: 94669 - DNA, 25 bp, Saccharomyces pastorianus
gatgcgtttttaaagattcccaagc

SEQ ID NO: 94670 - DNA, 25 bp, Saccharomyces pastorianus
aagaaagttctcttctggtcaccat

SEQ ID NO: 94671 - DNA, 25 bp, Saccharomyces pastorianus
gaaacctcattcttgtcccaaatgt

SEQ ID NO: 94672 - DNA, 25 bp, Saccharomyces pastorianus
tgctcgggccactgagtgacacaaa

SEQ ID NO: 94673 - DNA, 25 bp, Saccharomyces pastorianus
agagatcacgttctgcagcacttga

SEQ ID NO: 94674 - DNA, 25 bp, Saccharomyces pastorianus
aaggaatctcctgtcgagacatcaa

SEQ ID NO: 94675 - DNA, 25 bp, Saccharomyces pastorianus
gtgtcaaatctctctacttctgtgc

SEQ ID NO: 94676 - DNA, 25 bp, Saccharomyces pastorianus
aaaatccgtccactctggtgagaaa

SEQ ID NO: 94677 - DNA, 25 bp, Saccharomyces pastorianus
taaactctaagtttgcgcccgaaga

SEQ ID NO: 94678 - DNA, 25 bp, Saccharomyces pastorianus
ataatgaaccctacagtgcaaccgc

SEQ ID NO: 94679 - DNA, 25 bp, Saccharomyces pastorianus
aaggctcttctccattaaactctaa

SEQ ID NO: 94680 - DNA, 25 bp, Saccharomyces pastorianus
aaaggttgcatccactcgccaagag

SEQ ID NO: 94681 - DNA, 25 bp, Saccharomyces pastorianus
attgctcaaggtttgtctgacgccg

SEQ ID NO: 94682 - DNA, 25 bp, Saccharomyces pastorianus
agaaaggcttgctcaaatgggcgtg

SEQ ID NO: 94683 - DNA, 25 bp, Saccharomyces pastorianus
ggtactagcagaccgtaggttttca

SEQ ID NO: 94684 - DNA, 25 bp, Saccharomyces pastorianus
gagactcctgatgctcaagaaactt

SEQ ID NO: 94685 - DNA, 25 bp, Saccharomyces pastorianus
tgaaagctcgcctagaattcatgag

SEQ ID NO: 94686 - DNA, 25 bp, Saccharomyces pastorianus
gagggagaactatcgcatcagagaa

SEQ ID NO: 94687 - DNA, 25 bp, Saccharomyces pastorianus
gagaacaatggcacaacccacagac

SEQ ID NO: 94688 - DNA, 25 bp, Saccharomyces pastorianus
tctgacgccgatttgaacctttcga

SEQ ID NO: 94689 - DNA, 25 bp, Saccharomyces pastorianus
gaacctttcgactgacatggccata

SEQ ID NO: 94690 - DNA, 25 bp, Saccharomyces pastorianus
gctgatgataggtatcccgtttcaa

SEQ ID NO: 94691 - DNA, 25 bp, Saccharomyces pastorianus
ttcgatgcgatgagacatgcagctc

SEQ ID NO: 94692 - DNA, 25 bp, Saccharomyces pastorianus
tccgttgagacagattccacacttc

SEQ ID NO: 94693 - DNA, 25 bp, Saccharomyces pastorianus
gaatttgacactccgacatctggta

SEQ ID NO: 94694 - DNA, 25 bp, Saccharomyces pastorianus
gacggtctatgatataatggccctt

SEQ ID NO: 94695 - DNA, 25 bp, Saccharomyces pastorianus
atttgaatgctactaccgccatgga

SEQ ID NO: 94696 - DNA, 25 bp, Saccharomyces pastorianus
caggtcgccgcgtttgttaacaatt

SEQ ID NO: 94697 - DNA, 25 bp, Saccharomyces pastorianus
gaaattttaacgcttactgattcac

SEQ ID NO: 94698 - DNA, 25 bp, Saccharomyces pastorianus
acagattccacacttcaacaacaaa

SEQ ID NO: 94699 - DNA, 25 bp, Saccharomyces pastorianus
tactgattcacagcttgcgcaggtc

SEQ ID NO: 94700 - DNA, 25 bp, Saccharomyces pastorianus
gtctgtgattcatatcttgacgcag

SEQ ID NO: 94701 - DNA, 25 bp, Saccharomyces pastorianus
tttggcgcagatgttgattcagggt

SEQ ID NO: 94702 - DNA, 25 bp, Saccharomyces pastorianus
gtagtggttgatatcctttcagcaa

SEQ ID NO: 94703 - DNA, 25 bp, Saccharomyces pastorianus
agtaggatcctatgcttggcgttag

SEQ ID NO: 94704 - DNA, 25 bp, Saccharomyces pastorianus
gaagtcggtctagatgagctccatt

SEQ ID NO: 94705 - DNA, 25 bp, Saccharomyces pastorianus
ttatgtatggccacttgctccaaac

SEQ ID NO: 94706 - DNA, 25 bp, Saccharomyces pastorianus
tcttgccttacgaactggcgaagtc

SEQ ID NO: 94707 - DNA, 25 bp, Saccharomyces pastorianus
aagtcattttcagtgcttcttgcct

SEQ ID NO: 94708 - DNA, 25 bp, Saccharomyces pastorianus
cgacgtcgtcgttgatacttgggag

SEQ ID NO: 94709 - DNA, 25 bp, Saccharomyces pastorianus
gggcttgaacttttcgtaccactgt

SEQ ID NO: 94710 - DNA, 25 bp, Saccharomyces pastorianus
atactagacgtatcttgcttggaaa

SEQ ID NO: 94711 - DNA, 25 bp, Saccharomyces pastorianus
atgagctccattttgttatttgcga

SEQ ID NO: 94712 - DNA, 25 bp, Saccharomyces pastorianus
ggcatctaaagcttcttgtacatct

SEQ ID NO: 94713 - DNA, 25 bp, Saccharomyces pastorianus
ttgcgagcccaatgaactgagacta

SEQ ID NO: 94714 - DNA, 25 bp, Saccharomyces pastorianus
gatgatggctaacgacgatcttgaa

SEQ ID NO: 94715 - DNA, 25 bp, Saccharomyces pastorianus
cgcgtaaagcgccagttatcagtga

SEQ ID NO: 94716 - DNA, 25 bp, Saccharomyces pastorianus
gggcctatcgaagcactatctgtgg

SEQ ID NO: 94717 - DNA, 25 bp, Saccharomyces pastorianus
tagaatttggctactacgcacctct

SEQ ID NO: 94718 - DNA, 25 bp, Saccharomyces pastorianus
gaaacttcttttaatgatgacccta

SEQ ID NO: 94719 - DNA, 25 bp, Saccharomyces pastorianus
gtctctatgtgaaattctgtcccag

SEQ ID NO: 94720 - DNA, 25 bp, Saccharomyces pastorianus
tgtcccagagacagccgcgtaaagc

SEQ ID NO: 94721 - DNA, 25 bp, Saccharomyces pastorianus
ttgaagaatcttccgagtggctcct

SEQ ID NO: 94722 - DNA, 25 bp, Saccharomyces pastorianus
acaacgcggtacattctttcaggaa

SEQ ID NO: 94723 - DNA, 25 bp, Saccharomyces pastorianus
atgaccctattgtcgatagcgatag

SEQ ID NO: 94724 - DNA, 25 bp, Saccharomyces pastorianus
aaggcttcgcatgttgattgaccaa

SEQ ID NO: 94725 - DNA, 25 bp, Saccharomyces pastorianus
gccaagggtcctaaatctacgtctg

SEQ ID NO: 94726 - DNA, 25 bp, Saccharomyces pastorianus
gacctttttgagattgcagccgtac

SEQ ID NO: 94727 - DNA, 25 bp, Saccharomyces pastorianus
gacagttagttggtatcctcagaga

SEQ ID NO: 94728 - DNA, 25 bp, Saccharomyces pastorianus
attggcctacttttcctcagttata

SEQ ID NO: 94729 - DNA, 25 bp, Saccharomyces pastorianus
gaggatgtccggtttttatcaatag

SEQ ID NO: 94730 - DNA, 25 bp, Saccharomyces pastorianus
ggaaagcagcgggtcttccgatgat

SEQ ID NO: 94731 - DNA, 25 bp, Saccharomyces pastorianus
aaattctttcgaatgcttctgcctc

SEQ ID NO: 94732 - DNA, 25 bp, Saccharomyces pastorianus
atcaggcgcagatcctaaggagttt

SEQ ID NO: 94733 - DNA, 25 bp, Saccharomyces pastorianus
cgtaccatacttcgtcttcattcaa

SEQ ID NO: 94734 - DNA, 25 bp, Saccharomyces pastorianus
tgcctcactagcgaacaatgccaag

SEQ ID NO: 94735 - DNA, 25 bp, Saccharomyces pastorianus
gtacaagctgcacctgtgatgctat

SEQ ID NO: 94736 - DNA, 25 bp, Saccharomyces pastorianus
ggaagcaaggactgggaccctattg

SEQ ID NO: 94737 - DNA, 25 bp, Saccharomyces pastorianus
gagatctcgccttcgtaatatgctg

SEQ ID NO: 94738 - DNA, 25 bp, Saccharomyces pastorianus
cctggagcgcttaccatcagtggaa

SEQ ID NO: 94739 - DNA, 25 bp, Saccharomyces pastorianus
tagacccagaacttttccatgatat

SEQ ID NO: 94740 - DNA, 25 bp, Saccharomyces pastorianus
tatgcggacccaattttcccggact

SEQ ID NO: 94741 - DNA, 25 bp, Saccharomyces pastorianus
gattatgtcagaacctggagcgctt

SEQ ID NO: 94742 - DNA, 25 bp, Saccharomyces pastorianus
gtcaccctagtggagtttgcagatt

SEQ ID NO: 94743 - DNA, 25 bp, Saccharomyces pastorianus
tcccggactaccctgaatttgatga

SEQ ID NO: 94744 - DNA, 25 bp, Saccharomyces pastorianus
ttcctaggcgcggattcagtagaca

SEQ ID NO: 94745 - DNA, 25 bp, Saccharomyces pastorianus
gaaagactctcacttagacccagaa

SEQ ID NO: 94746 - DNA, 25 bp, Saccharomyces pastorianus
aatttcagcgatctgcttatgccaa

SEQ ID NO: 94747 - DNA, 25 bp, Saccharomyces pastorianus
attctgcaagaaaatccgcggatga

SEQ ID NO: 94748 - DNA, 25 bp, Saccharomyces pastorianus
tattctgcaagaaaatccgcggatg

SEQ ID NO: 94749 - DNA, 25 bp, Saccharomyces pastorianus
tccgcggatgatatttgagaataaa

SEQ ID NO: 94750 - DNA, 25 bp, Saccharomyces pastorianus
tcataatgatattgaggcagggtat

SEQ ID NO: 94751 - DNA, 25 bp, Saccharomyces pastorianus
gagactacataaaacatttatctgt

SEQ ID NO: 94752 - DNA, 25 bp, Saccharomyces pastorianus
ttagtcaaaacaaacgtggttgtag

SEQ ID NO: 94753 - DNA, 25 bp, Saccharomyces pastorianus
acgtggttgtagaaatattctgcaa

SEQ ID NO: 94754 - DNA, 25 bp, Saccharomyces pastorianus
aaatccgcggatgatatttgagaat

SEQ ID NO: 94755 - DNA, 25 bp, Saccharomyces pastorianus
ctgcaagaaaatccgcggatgatat

SEQ ID NO: 94756 - DNA, 25 bp, Saccharomyces pastorianus
aaacgtggttgtagaaatattctgc

SEQ ID NO: 94757 - DNA, 25 bp, Saccharomyces pastorianus
ttctgcaagaaaatccgcggatgat

SEQ ID NO: 94758 - DNA, 25 bp, Saccharomyces pastorianus
accgccggcagtctacaaaacaatg

SEQ ID NO: 94759 - DNA, 25 bp, Saccharomyces pastorianus
tggcgtgcagcatccgttgtttttt

SEQ ID NO: 94760 - DNA, 25 bp, Saccharomyces pastorianus
agcgtgatctgctgtctgacatctt

SEQ ID NO: 94761 - DNA, 25 bp, Saccharomyces pastorianus
cgtagttatcaaccccaaacagatt

SEQ ID NO: 94762 - DNA, 25 bp, Saccharomyces pastorianus
cacggactaattgtggtgggcaaca

SEQ ID NO: 94763 - DNA, 25 bp, Saccharomyces pastorianus
gaaattgagctatttaacgcggctg

SEQ ID NO: 94764 - DNA, 25 bp, Saccharomyces pastorianus
gaaattggtgtcataacgccctatt

SEQ ID NO: 94765 - DNA, 25 bp, Saccharomyces pastorianus
aacgccctattctgcacagcgtgat

SEQ ID NO: 94766 - DNA, 25 bp, Saccharomyces pastorianus
attaacatcatcaacggcctacacg

SEQ ID NO: 94767 - DNA, 25 bp, Saccharomyces pastorianus
gtagactcctttcaaggccacgaaa

SEQ ID NO: 94768 - DNA, 25 bp, Saccharomyces pastorianus
ttaacgcggctggttctcaaggaac

SEQ ID NO: 94769 - DNA, 25 bp, Saccharomyces pastorianus
gtccgagtccggtcaagctgaagac

SEQ ID NO: 94770 - DNA, 25 bp, Saccharomyces pastorianus
ggctgaattttctagtggcgatgct

SEQ ID NO: 94771 - DNA, 25 bp, Saccharomyces pastorianus
cgtgcctcttggagaattgtttctt

SEQ ID NO: 94772 - DNA, 25 bp, Saccharomyces pastorianus
caaacgcctctttagaagcctacaa

SEQ ID NO: 94773 - DNA, 25 bp, Saccharomyces pastorianus
tgacgacgctattgctgagttggac

SEQ ID NO: 94774 - DNA, 25 bp, Saccharomyces pastorianus
gccaagcaagcttttgacgacgcta

SEQ ID NO: 94775 - DNA, 25 bp, Saccharomyces pastorianus
caatccgtctaggtttggctctaaa

SEQ ID NO: 94776 - DNA, 25 bp, Saccharomyces pastorianus
acaagaccgcttctgaaattgccac

SEQ ID NO: 94777 - DNA, 25 bp, Saccharomyces pastorianus
atattttgtccgtgctagactccca

SEQ ID NO: 94778 - DNA, 25 bp, Saccharomyces pastorianus
agtcgagttgattcgttcgtaccgt

SEQ ID NO: 94779 - DNA, 25 bp, Saccharomyces pastorianus
gctctaaacttctctgtcttctatt

SEQ ID NO: 94780 - DNA, 25 bp, Saccharomyces pastorianus
taccggattccccatctatagagaa

SEQ ID NO: 94781 - DNA, 25 bp, Saccharomyces pastorianus
gtacactagcccgttgaggtatctg

SEQ ID NO: 94782 - DNA, 25 bp, Saccharomyces pastorianus
ggtacccttcaattgcgtacactag

SEQ ID NO: 94783 - DNA, 25 bp, Saccharomyces pastorianus
gatgaggagctccaatcatttgatt

SEQ ID NO: 94784 - DNA, 25 bp, Saccharomyces pastorianus
gaagctcgcgctaacttagattcaa

SEQ ID NO: 94785 - DNA, 25 bp, Saccharomyces pastorianus
aggattctattgttgtaacgccaag

SEQ ID NO: 94786 - DNA, 25 bp, Saccharomyces pastorianus
attatgactgtagccctttttaccg

SEQ ID NO: 94787 - DNA, 25 bp, Saccharomyces pastorianus
aattgctggcacatatccgattttc

SEQ ID NO: 94788 - DNA, 25 bp, Saccharomyces pastorianus
agaattgagcccgatgactacgagg

SEQ ID NO: 94789 - DNA, 25 bp, Saccharomyces pastorianus
atctgaaaccgagcagtttaccggg

SEQ ID NO: 94790 - DNA, 25 bp, Saccharomyces pastorianus
ggcaaagcaagtcccagttaaggca

SEQ ID NO: 94791 - DNA, 25 bp, Saccharomyces pastorianus
gcagcaagaggtgtgtgagcaacta

SEQ ID NO: 94792 - DNA, 25 bp, Saccharomyces pastorianus
atcctctgaagttaatcttggcgaa

SEQ ID NO: 94793 - DNA, 25 bp, Saccharomyces pastorianus
gcaagcagccatcctctgaagttaa

SEQ ID NO: 94794 - DNA, 25 bp, Saccharomyces pastorianus
tcttggcgaaagagaagctggaaca

SEQ ID NO: 94795 - DNA, 25 bp, Saccharomyces pastorianus
gatgcgccaaaccaaacttctgaag

SEQ ID NO: 94796 - DNA, 25 bp, Saccharomyces pastorianus
ttagtactggctcgccgacgggcaa

SEQ ID NO: 94797 - DNA, 25 bp, Saccharomyces pastorianus
agagaaccttagtactggctcgccg

SEQ ID NO: 94798 - DNA, 25 bp, Saccharomyces pastorianus
gtggaataaaaccttagagcagcaa

SEQ ID NO: 94799 - DNA, 25 bp, Saccharomyces pastorianus
tgagaggatgatgcgccaaaccaaa

SEQ ID NO: 94800 - DNA, 25 bp, Saccharomyces pastorianus
gatacattagacttgttgtggaata

SEQ ID NO: 94801 - DNA, 25 bp, Saccharomyces pastorianus
gacgggcaagcagccatcctctgaa

SEQ ID NO: 94802 - DNA, 25 bp, Saccharomyces pastorianus
ctgaggtttgtgtgaattttgtgat

SEQ ID NO: 94803 - DNA, 25 bp, Saccharomyces pastorianus
gattatttttcctatcgttttatat

SEQ ID NO: 94804 - DNA, 25 bp, Saccharomyces pastorianus
aagcttcatttcatcttcctagatc

SEQ ID NO: 94805 - DNA, 25 bp, Saccharomyces pastorianus
gaacttctcctcaagggtataggga

SEQ ID NO: 94806 - DNA, 25 bp, Saccharomyces pastorianus
ccattgttgatagaggcttcaatac

SEQ ID NO: 94807 - DNA, 25 bp, Saccharomyces pastorianus
agggatcctcaaatttaatcggtat

SEQ ID NO: 94808 - DNA, 25 bp, Saccharomyces pastorianus
atttcatcttcctagatctcatatg

SEQ ID NO: 94809 - DNA, 25 bp, Saccharomyces pastorianus
ctaactctttctcaagcttcatttc

SEQ ID NO: 94810 - DNA, 25 bp, Saccharomyces pastorianus
gcttccattaaacttgctaactctt

SEQ ID NO: 94811 - DNA, 25 bp, Saccharomyces pastorianus
tcgttttatatgcttcattttccca

SEQ ID NO: 94812 - DNA, 25 bp, Saccharomyces pastorianus
aatactgttacgtttatctgaggtt

SEQ ID NO: 94813 - DNA, 25 bp, Saccharomyces pastorianus
gagtttactacaaccccagtaggcg

SEQ ID NO: 94814 - DNA, 25 bp, Saccharomyces pastorianus
agatatgatgccctacccaagaacg

SEQ ID NO: 94815 - DNA, 25 bp, Saccharomyces pastorianus
gcgtcgctataccaccaagagttta

SEQ ID NO: 94816 - DNA, 25 bp, Saccharomyces pastorianus
ggtcaaagctaatgccacgttttcc

SEQ ID NO: 94817 - DNA, 25 bp, Saccharomyces pastorianus
ctggttatcctttcttaattcacgg

SEQ ID NO: 94818 - DNA, 25 bp, Saccharomyces pastorianus
gttcacggacctactagcttattgg

SEQ ID NO: 94819 - DNA, 25 bp, Saccharomyces pastorianus
ggcgtgaaactgtcgggctatacca

SEQ ID NO: 94820 - DNA, 25 bp, Saccharomyces pastorianus
gtaagaaccaccgatcttcagcaat

SEQ ID NO: 94821 - DNA, 25 bp, Saccharomyces pastorianus
ccccacgttcgctaatcaatttgtt

SEQ ID NO: 94822 - DNA, 25 bp, Saccharomyces pastorianus
ttgagtatctcgtacaagttcccca

SEQ ID NO: 94823 - DNA, 25 bp, Saccharomyces pastorianus
aatacaccaggtggcgtcgctatac

SEQ ID NO: 94824 - DNA, 25 bp, Saccharomyces pastorianus
aaaagcccctcctagttggactatg

SEQ ID NO: 94825 - DNA, 25 bp, Saccharomyces pastorianus
tctagatgtcgtattggtgcctgga

SEQ ID NO: 94826 - DNA, 25 bp, Saccharomyces pastorianus
tggcctctccaattcctttagaaaa

SEQ ID NO: 94827 - DNA, 25 bp, Saccharomyces pastorianus
ggccaggaggtctttctgccaagat

SEQ ID NO: 94828 - DNA, 25 bp, Saccharomyces pastorianus
gatgtactcatacttctgaatcgaa

SEQ ID NO: 94829 - DNA, 25 bp, Saccharomyces pastorianus
tgtcttatggaacaggtggcctctc

SEQ ID NO: 94830 - DNA, 25 bp, Saccharomyces pastorianus
gatattatcgctgcagagtcgcata

SEQ ID NO: 94831 - DNA, 25 bp, Saccharomyces pastorianus
aaatggttcgtgatttgaagcctca

SEQ ID NO: 94832 - DNA, 25 bp, Saccharomyces pastorianus
gagtcgcatactatttctcaagcag

SEQ ID NO: 94833 - DNA, 25 bp, Saccharomyces pastorianus
agcagtacgctcattgatcgcttcc

SEQ ID NO: 94834 - DNA, 25 bp, Saccharomyces pastorianus
gcttccaccaattctaggcgtgtag

SEQ ID NO: 94835 - DNA, 25 bp, Saccharomyces pastorianus
agatgctggtcaagctgcgctggac

SEQ ID NO: 94836 - DNA, 25 bp, Saccharomyces pastorianus
gtgactgcagaatctctaccagacc

SEQ ID NO: 94837 - DNA, 25 bp, Saccharomyces pastorianus
ctaccagaccttctcaatctatttt

SEQ ID NO: 94838 - DNA, 25 bp, Saccharomyces pastorianus
gcatggacttttgtagcctcgaaaa

SEQ ID NO: 94839 - DNA, 25 bp, Saccharomyces pastorianus
gatgtgccacatgatagcctcatac

SEQ ID NO: 94840 - DNA, 25 bp, Saccharomyces pastorianus
gaacagcagtttctttcatcctaac

SEQ ID NO: 94841 - DNA, 25 bp, Saccharomyces pastorianus
gcagcaccagtgtttcagttggcat

SEQ ID NO: 94842 - DNA, 25 bp, Saccharomyces pastorianus
ggcaacaacgccttctctaaaaagt

SEQ ID NO: 94843 - DNA, 25 bp, Saccharomyces pastorianus
tgagaaattgtcacccagcagcacc

SEQ ID NO: 94844 - DNA, 25 bp, Saccharomyces pastorianus
atatggccaggcttgctcagatgct

SEQ ID NO: 94845 - DNA, 25 bp, Saccharomyces pastorianus
gaattttatcgagacccctagaagg

SEQ ID NO: 94846 - DNA, 25 bp, Saccharomyces pastorianus
gatcctactacgttcaattgtccga

SEQ ID NO: 94847 - DNA, 25 bp, Saccharomyces pastorianus
ttgatttctgcacgctttggtacga

SEQ ID NO: 94848 - DNA, 25 bp, Saccharomyces pastorianus
gggagggctctatccagttccaatc

SEQ ID NO: 94849 - DNA, 25 bp, Saccharomyces pastorianus
tagtgtgggatcctttttcggcaac

SEQ ID NO: 94850 - DNA, 25 bp, Saccharomyces pastorianus
tatgtcttcgatgctgtacctatgt

SEQ ID NO: 94851 - DNA, 25 bp, Saccharomyces pastorianus
gaacgaccccatatattatccaatc

SEQ ID NO: 94852 - DNA, 25 bp, Saccharomyces pastorianus
ttacaagctgcaggtggcggactaa

SEQ ID NO: 94853 - DNA, 25 bp, Saccharomyces pastorianus
ggtacgactttctttgttgtgggag

SEQ ID NO: 94854 - DNA, 25 bp, Saccharomyces pastorianus
ggatctttgtgaatgctaccctatt

SEQ ID NO: 94855 - DNA, 25 bp, Saccharomyces pastorianus
ataactgcgggcctttttgtacagg

SEQ ID NO: 94856 - DNA, 25 bp, Saccharomyces pastorianus
tgttcttttattagtcgctccagca

SEQ ID NO: 94857 - DNA, 25 bp, Saccharomyces pastorianus
aaaaaatagacccacctgcaacgct

SEQ ID NO: 94858 - DNA, 25 bp, Saccharomyces pastorianus
tagatcacatgcaaactacctggcc

SEQ ID NO: 94859 - DNA, 25 bp, Saccharomyces pastorianus
aacgctcaacgaagccgcaggtagt

SEQ ID NO: 94860 - DNA, 25 bp, Saccharomyces pastorianus
tatgcaaacaacatcacaaccaagg

SEQ ID NO: 94861 - DNA, 25 bp, Saccharomyces pastorianus
aacatggtgaacttacaagcggaac

SEQ ID NO: 94862 - DNA, 25 bp, Saccharomyces pastorianus
gtcataagctggtttttagctagct

SEQ ID NO: 94863 - DNA, 25 bp, Saccharomyces pastorianus
actacctggcccaattacaagtgga

SEQ ID NO: 94864 - DNA, 25 bp, Saccharomyces pastorianus
gtggcgttcgaaggaaatcaactgt

SEQ ID NO: 94865 - DNA, 25 bp, Saccharomyces pastorianus
gggtactgcttttactagctgtcat

SEQ ID NO: 94866 - DNA, 25 bp, Saccharomyces pastorianus
gggccaaatcagtcatatctagttt

SEQ ID NO: 94867 - DNA, 25 bp, Saccharomyces pastorianus
gagatattgctttatacttaggtga

SEQ ID NO: 94868 - DNA, 25 bp, Saccharomyces pastorianus
gaaacagctgacaccgaacgaaatt

SEQ ID NO: 94869 - DNA, 25 bp, Saccharomyces pastorianus
tctttgccattaaaatccgccgaga

SEQ ID NO: 94870 - DNA, 25 bp, Saccharomyces pastorianus
ttcctatcggtttgaaacggtctca

SEQ ID NO: 94871 - DNA, 25 bp, Saccharomyces pastorianus
aatccgccgagaattcaggtaaaca

SEQ ID NO: 94872 - DNA, 25 bp, Saccharomyces pastorianus
gttggcgcaaacgagtgttactaca

SEQ ID NO: 94873 - DNA, 25 bp, Saccharomyces pastorianus
gttaataccggtttgcagaacatta

SEQ ID NO: 94874 - DNA, 25 bp, Saccharomyces pastorianus
aaacctccatacatttattctcatg

SEQ ID NO: 94875 - DNA, 25 bp, Saccharomyces pastorianus
cacgatgccgtttttgttaataccg

SEQ ID NO: 94876 - DNA, 25 bp, Saccharomyces pastorianus
aacggctgttaagctggacactgaa

SEQ ID NO: 94877 - DNA, 25 bp, Saccharomyces pastorianus
gtacaaggcaggtattcctatcggt

SEQ ID NO: 94878 - DNA, 25 bp, Saccharomyces pastorianus
taatccagtggtggcgacggatccg

SEQ ID NO: 94879 - DNA, 25 bp, Saccharomyces pastorianus
gacaagatggtcctcaggtcgacga

SEQ ID NO: 94880 - DNA, 25 bp, Saccharomyces pastorianus
gataactaaacagctctcttctaag

SEQ ID NO: 94881 - DNA, 25 bp, Saccharomyces pastorianus
ggtccaacaagagctattatcattc

SEQ ID NO: 94882 - DNA, 25 bp, Saccharomyces pastorianus
agggaacgtccaccgatgatgcaat

SEQ ID NO: 94883 - DNA, 25 bp, Saccharomyces pastorianus
gaagattctttgatccctaatgtga

SEQ ID NO: 94884 - DNA, 25 bp, Saccharomyces pastorianus
attcttgcgaacgatatcaatgctt

SEQ ID NO: 94885 - DNA, 25 bp, Saccharomyces pastorianus
gggaagctaccaaacgtcatggaca

SEQ ID NO: 94886 - DNA, 25 bp, Saccharomyces pastorianus
tctcttctaagccaccagctaataa

SEQ ID NO: 94887 - DNA, 25 bp, Saccharomyces pastorianus
gggtcagccaaaactgatcaccaaa

SEQ ID NO: 94888 - DNA, 25 bp, Saccharomyces pastorianus
tcaggtcgacgaaattgccagaaaa

SEQ ID NO: 94889 - DNA, 25 bp, Saccharomyces pastorianus
tacattgaccaacaaaccggcaaag

SEQ ID NO: 94890 - DNA, 25 bp, Saccharomyces pastorianus
gatgtctctgatattcttcgggtgc

SEQ ID NO: 94891 - DNA, 25 bp, Saccharomyces pastorianus
tttatactactctgtcctctctaag

SEQ ID NO: 94892 - DNA, 25 bp, Saccharomyces pastorianus
aacacatcagcttcgaaacctattg

SEQ ID NO: 94893 - DNA, 25 bp, Saccharomyces pastorianus
gacactagacgctattacgactcat

SEQ ID NO: 94894 - DNA, 25 bp, Saccharomyces pastorianus
aagcaccatcgccagtgttgttaaa

SEQ ID NO: 94895 - DNA, 25 bp, Saccharomyces pastorianus
tcatctcccgagaatcagcaggacg

SEQ ID NO: 94896 - DNA, 25 bp, Saccharomyces pastorianus
ccactaattcccaatgatgtctctg

SEQ ID NO: 94897 - DNA, 25 bp, Saccharomyces pastorianus
gagtttaccgtctcaatttcacaag

SEQ ID NO: 94898 - DNA, 25 bp, Saccharomyces pastorianus
ttgcaaaattctacatcatctcccg

SEQ ID NO: 94899 - DNA, 25 bp, Saccharomyces pastorianus
tattcttcgggtgctttaccttgac

SEQ ID NO: 94900 - DNA, 25 bp, Saccharomyces pastorianus
atactttctacgtccaagttggagc

SEQ ID NO: 94901 - DNA, 25 bp, Saccharomyces pastorianus
gcaatggctgataggtgtctgtaca

SEQ ID NO: 94902 - DNA, 25 bp, Saccharomyces pastorianus
tttgctgggcagtgactttgaaact

SEQ ID NO: 94903 - DNA, 25 bp, Saccharomyces pastorianus
caagcgtattgttggattgcctaca

SEQ ID NO: 94904 - DNA, 25 bp, Saccharomyces pastorianus
gcctacaaggcgttgctttcataga

SEQ ID NO: 94905 - DNA, 25 bp, Saccharomyces pastorianus
gaaactgtgcatattcccaatacga

SEQ ID NO: 94906 - DNA, 25 bp, Saccharomyces pastorianus
tcccaatacgaaccactttaaagat

SEQ ID NO: 94907 - DNA, 25 bp, Saccharomyces pastorianus
gaaagtagtcatcacgatctgcaaa

SEQ ID NO: 94908 - DNA, 25 bp, Saccharomyces pastorianus
aacgccggtttcaaacttgatctgt

SEQ ID NO: 94909 - DNA, 25 bp, Saccharomyces pastorianus
taatcatgtttcacaggatctggca

SEQ ID NO: 94910 - DNA, 25 bp, Saccharomyces pastorianus
atagaacgtcctttttgctgggcag

SEQ ID NO: 94911 - DNA, 25 bp, Saccharomyces pastorianus
gacccaacttagctatcaacagcgt

SEQ ID NO: 94912 - DNA, 25 bp, Saccharomyces pastorianus
aagcaattagaacagttaggcccaa

SEQ ID NO: 94913 - DNA, 25 bp, Saccharomyces pastorianus
agcttctcaatccttcatcaactgg

SEQ ID NO: 94914 - DNA, 25 bp, Saccharomyces pastorianus
atacaataaattggccgtcttcatt

SEQ ID NO: 94915 - DNA, 25 bp, Saccharomyces pastorianus
ggaattagcttctcaatccttcatc

SEQ ID NO: 94916 - DNA, 25 bp, Saccharomyces pastorianus
gatatctatctgaaattgacttgcc

SEQ ID NO: 94917 - DNA, 25 bp, Saccharomyces pastorianus
tggtggccaaatctctttcgacgtt

SEQ ID NO: 94918 - DNA, 25 bp, Saccharomyces pastorianus
tcggtggttctgacttaagcaagca

SEQ ID NO: 94919 - DNA, 25 bp, Saccharomyces pastorianus
ggccgtcttcattttgagatatcta

SEQ ID NO: 94920 - DNA, 25 bp, Saccharomyces pastorianus
ttaggcccaaacgtcttagatgaat

SEQ ID NO: 94921 - DNA, 25 bp, Saccharomyces pastorianus
aagtgctgcattggttttgtcggtg

SEQ ID NO: 94922 - DNA, 25 bp, Saccharomyces pastorianus
aaggaacaccaaatcagagctaagt

SEQ ID NO: 94923 - DNA, 25 bp, Saccharomyces pastorianus
gaaaacgtcctatcagtacatcctg

SEQ ID NO: 94924 - DNA, 25 bp, Saccharomyces pastorianus
attggtatcatatccgatgcactcg

SEQ ID NO: 94925 - DNA, 25 bp, Saccharomyces pastorianus
agatggtctctaaggaggtcctcaa

SEQ ID NO: 94926 - DNA, 25 bp, Saccharomyces pastorianus
atccactatgattccttgaccatga

SEQ ID NO: 94927 - DNA, 25 bp, Saccharomyces pastorianus
gatgcactcgcagtagctatttatg

SEQ ID NO: 94928 - DNA, 25 bp, Saccharomyces pastorianus
acttgccaaatgaccttcgtgggtg

SEQ ID NO: 94929 - DNA, 25 bp, Saccharomyces pastorianus
acaactcgtgtctgttccatgctat

SEQ ID NO: 94930 - DNA, 25 bp, Saccharomyces pastorianus
agcagctttgcaactggcctcaaat

SEQ ID NO: 94931 - DNA, 25 bp, Saccharomyces pastorianus
aaggcccagatcaagtgcaacactt

SEQ ID NO: 94932 - DNA, 25 bp, Saccharomyces pastorianus
atagcgttcgtgacctcagggagat

SEQ ID NO: 94933 - DNA, 25 bp, Saccharomyces pastorianus
tcaacaaccccgtcaagttcaatga

SEQ ID NO: 94934 - DNA, 25 bp, Saccharomyces pastorianus
taacgtgtctgttacgggtatcctt

SEQ ID NO: 94935 - DNA, 25 bp, Saccharomyces pastorianus
gcaaggtctcaaggtcaccatggaa

SEQ ID NO: 94936 - DNA, 25 bp, Saccharomyces pastorianus
agagaagcggttgttacggctcccg

SEQ ID NO: 94937 - DNA, 25 bp, Saccharomyces pastorianus
acttgattgtggtcgttttgctatt

SEQ ID NO: 94938 - DNA, 25 bp, Saccharomyces pastorianus
gagcgtattctttccaagttcatca

SEQ ID NO: 94939 - DNA, 25 bp, Saccharomyces pastorianus
ggctcccgcaattgcagagcagcaa

SEQ ID NO: 94940 - DNA, 25 bp, Saccharomyces pastorianus
atacgttcaattgctgtctcattac

SEQ ID NO: 94941 - DNA, 25 bp, Saccharomyces pastorianus
ggcccaagtccacgacatgttatgt

SEQ ID NO: 94942 - DNA, 25 bp, Saccharomyces pastorianus
gcccagtggtggtagtttctcaact

SEQ ID NO: 94943 - DNA, 25 bp, Saccharomyces pastorianus
gaatggtcaattggaggctgcgcaa

SEQ ID NO: 94944 - DNA, 25 bp, Saccharomyces pastorianus
gttatcagtagcatacgcactccga

SEQ ID NO: 94945 - DNA, 25 bp, Saccharomyces pastorianus
attcaagtatgacgatggtgactac

SEQ ID NO: 94946 - DNA, 25 bp, Saccharomyces pastorianus
aatgtggggaccctcccaacgagat

SEQ ID NO: 94947 - DNA, 25 bp, Saccharomyces pastorianus
gtgactactccttggccattgattt

SEQ ID NO: 94948 - DNA, 25 bp, Saccharomyces pastorianus
aatgtctatgagttgattaccgata

SEQ ID NO: 94949 - DNA, 25 bp, Saccharomyces pastorianus
gattccttcagagagattacatata

SEQ ID NO: 94950 - DNA, 25 bp, Saccharomyces pastorianus
gagttgattaccgataggctactgg

SEQ ID NO: 94951 - DNA, 25 bp, Saccharomyces pastorianus
ccaacgagattccttcagagagatt

SEQ ID NO: 94952 - DNA, 25 bp, Saccharomyces pastorianus
atgtctagggattgtattaatgtct

SEQ ID NO: 94953 - DNA, 25 bp, Saccharomyces pastorianus
atgacgatggtgactactccttggc

SEQ ID NO: 94954 - DNA, 25 bp, Saccharomyces pastorianus
ggccattgatttgatgtctagggat

SEQ ID NO: 94955 - DNA, 25 bp, Saccharomyces pastorianus
taccgataggctactggttgatttc

SEQ ID NO: 94956 - DNA, 25 bp, Saccharomyces pastorianus
gcaaagccgctgatattccggtagt

SEQ ID NO: 94957 - DNA, 25 bp, Saccharomyces pastorianus
gattaccaagacaacctgagccatt

SEQ ID NO: 94958 - DNA, 25 bp, Saccharomyces pastorianus
gattctggcagacatccattccatt

SEQ ID NO: 94959 - DNA, 25 bp, Saccharomyces pastorianus
acaaccctggtgtctggtatttcca

SEQ ID NO: 94960 - DNA, 25 bp, Saccharomyces pastorianus
gagcaagatgaaatgaccgtccctt

SEQ ID NO: 94961 - DNA, 25 bp, Saccharomyces pastorianus
ccttataacgaatctgcgccattac

SEQ ID NO: 94962 - DNA, 25 bp, Saccharomyces pastorianus
ttggcttcggtctttattgaggcac

SEQ ID NO: 94963 - DNA, 25 bp, Saccharomyces pastorianus
tagtccaaaagtcgccagggttcca

SEQ ID NO: 94964 - DNA, 25 bp, Saccharomyces pastorianus
gagatttagagctgacaaccctggt

SEQ ID NO: 94965 - DNA, 25 bp, Saccharomyces pastorianus
gggcctatattccattgctcagtat

SEQ ID NO: 94966 - DNA, 25 bp, Saccharomyces pastorianus
ggcacccgctttacttcaggaaagg

SEQ ID NO: 94967 - DNA, 25 bp, Saccharomyces pastorianus
atcacttcatcttactaccgtggtt

SEQ ID NO: 94968 - DNA, 25 bp, Saccharomyces pastorianus
gaggatgcgtttttaaccatggcta

SEQ ID NO: 94969 - DNA, 25 bp, Saccharomyces pastorianus
gttttcggacgacacatataccaac

SEQ ID NO: 94970 - DNA, 25 bp, Saccharomyces pastorianus
gatcggtatgcaacctcaacagtgt

SEQ ID NO: 94971 - DNA, 25 bp, Saccharomyces pastorianus
agagactagtgctttggactccacc

SEQ ID NO: 94972 - DNA, 25 bp, Saccharomyces pastorianus
gactacatctccacaatcggagtgg

SEQ ID NO: 94973 - DNA, 25 bp, Saccharomyces pastorianus
gaacgtttccgtactatcacttcat

SEQ ID NO: 94974 - DNA, 25 bp, Saccharomyces pastorianus
ggttcgcatgggatcattatcgtgt

SEQ ID NO: 94975 - DNA, 25 bp, Saccharomyces pastorianus
gtacgattacctgttcaaactgctg

SEQ ID NO: 94976 - DNA, 25 bp, Saccharomyces pastorianus
gactgtagaactggacggcaagact

SEQ ID NO: 94977 - DNA, 25 bp, Saccharomyces pastorianus
aaactgctgttgatcgggaattccg

SEQ ID NO: 94978 - DNA, 25 bp, Saccharomyces pastorianus
gctacgctccattgacggcaattgg

SEQ ID NO: 94979 - DNA, 25 bp, Saccharomyces pastorianus
acatttcttcatggtcggctacgct

SEQ ID NO: 94980 - DNA, 25 bp, Saccharomyces pastorianus
cgttgcagccttctttagaggtaaa

SEQ ID NO: 94981 - DNA, 25 bp, Saccharomyces pastorianus
ctttgactgtccctgaattaacaca

SEQ ID NO: 94982 - DNA, 25 bp, Saccharomyces pastorianus
agttggctgttaatcttgtcccatt

SEQ ID NO: 94983 - DNA, 25 bp, Saccharomyces pastorianus
atgatggctgctgccgatccaagaa

SEQ ID NO: 94984 - DNA, 25 bp, Saccharomyces pastorianus
gcaaactgctgtgtgttctgtcgct

SEQ ID NO: 94985 - DNA, 25 bp, Saccharomyces pastorianus
tggatccccaacaatgtgcaaactg

SEQ ID NO: 94986 - DNA, 25 bp, Saccharomyces pastorianus
tcattgctaactccacatctattca

SEQ ID NO: 94987 - DNA, 25 bp, Saccharomyces pastorianus
gtagataccttaccgttgcagcctt

SEQ ID NO: 94988 - DNA, 25 bp, Saccharomyces pastorianus
gtcgctcctcaaggtttggacatgg

SEQ ID NO: 94989 - DNA, 25 bp, Saccharomyces pastorianus
aagagatctacggatttggctcaaa

SEQ ID NO: 94990 - DNA, 25 bp, Saccharomyces pastorianus
atgagtgttcttttaccgttgagat

SEQ ID NO: 94991 - DNA, 25 bp, Saccharomyces pastorianus
aactccatgaggtagatctggtttt

SEQ ID NO: 94992 - DNA, 25 bp, Saccharomyces pastorianus
gagattacctgaaatcccacctaaa

SEQ ID NO: 94993 - DNA, 25 bp, Saccharomyces pastorianus
accgaacttcatccattcgctggat

SEQ ID NO: 94994 - DNA, 25 bp, Saccharomyces pastorianus
gctggatgcttcacatatgttgcta

SEQ ID NO: 94995 - DNA, 25 bp, Saccharomyces pastorianus
ggcaaaaggcaggtcttccaccgaa

SEQ ID NO: 94996 - DNA, 25 bp, Saccharomyces pastorianus
gggaacagtttatcaaactccatga

SEQ ID NO: 94997 - DNA, 25 bp, Saccharomyces pastorianus
cactgacttggacgcacttgaacta

SEQ ID NO: 94998 - DNA, 25 bp, Saccharomyces pastorianus
tcgctgtcaaccctgttaatgcaag

SEQ ID NO: 94999 - DNA, 25 bp, Saccharomyces pastorianus
ggattagattttgcatcagttcatg

SEQ ID NO: 95000 - DNA, 25 bp, Saccharomyces pastorianus
gccccagaagtgctttttggagtaa

SEQ ID NO: 95001 - DNA, 25 bp, Saccharomyces pastorianus
aaagttgggcataccgtccattcag

SEQ ID NO: 95002 - DNA, 25 bp, Saccharomyces pastorianus
gcacgttccggccatgattgatgac

SEQ ID NO: 95003 - DNA, 25 bp, Saccharomyces pastorianus
aacaagtgcggaacccatggacagc

SEQ ID NO: 95004 - DNA, 25 bp, Saccharomyces pastorianus
gcaccgtatccccaaagttgtacat

SEQ ID NO: 95005 - DNA, 25 bp, Saccharomyces pastorianus
acaggaatttacaaggccccagaag

SEQ ID NO: 95006 - DNA, 25 bp, Saccharomyces pastorianus
tttggcatctcttatgacatggcaa

SEQ ID NO: 95007 - DNA, 25 bp, Saccharomyces pastorianus
cggcagcgacgacatgaactcagat

SEQ ID NO: 95008 - DNA, 25 bp, Saccharomyces pastorianus
gggatggtctcattttcaccaaacg

SEQ ID NO: 95009 - DNA, 25 bp, Saccharomyces pastorianus
gataattatttctcagtggttccag

SEQ ID NO: 95010 - DNA, 25 bp, Saccharomyces pastorianus
aacacggctcggttgatgcatttgt

SEQ ID NO: 95011 - DNA, 25 bp, Saccharomyces pastorianus
gagttctctgaagtagtcaatgcta

SEQ ID NO: 95012 - DNA, 25 bp, Saccharomyces pastorianus
gatctcgatgttattgccagagcaa

SEQ ID NO: 95013 - DNA, 25 bp, Saccharomyces pastorianus
acacatatttttgacggcttggcca

SEQ ID NO: 95014 - DNA, 25 bp, Saccharomyces pastorianus
tatctaggtacggaatggtgccata

SEQ ID NO: 95015 - DNA, 25 bp, Saccharomyces pastorianus
gggctcttgaaaccttggagagttt

SEQ ID NO: 95016 - DNA, 25 bp, Saccharomyces pastorianus
ggcctaaccaagtataccatatgaa

SEQ ID NO: 95017 - DNA, 25 bp, Saccharomyces pastorianus
gaggtcactgtggatctcgatgtta

SEQ ID NO: 95018 - DNA, 25 bp, Saccharomyces pastorianus
agggatatcggcgtcttggaactat

SEQ ID NO: 95019 - DNA, 25 bp, Saccharomyces pastorianus
tggacatcgatgtacgttggagaat

SEQ ID NO: 95020 - DNA, 25 bp, Saccharomyces pastorianus
gattggtcagaatcctggacatcga

SEQ ID NO: 95021 - DNA, 25 bp, Saccharomyces pastorianus
gagttttactacttgatgaggtcac

SEQ ID NO: 95022 - DNA, 25 bp, Saccharomyces pastorianus
gagaacgattttgacctgcgccatg

SEQ ID NO: 95023 - DNA, 25 bp, Saccharomyces pastorianus
gggattgtagctatcctgtaccaat

SEQ ID NO: 95024 - DNA, 25 bp, Saccharomyces pastorianus
aaaagtatcatggtgtcgccgccag

SEQ ID NO: 95025 - DNA, 25 bp, Saccharomyces pastorianus
tctacgttacatgatctccacaaag

SEQ ID NO: 95026 - DNA, 25 bp, Saccharomyces pastorianus
agtcacatctgggtggatccgatta

SEQ ID NO: 95027 - DNA, 25 bp, Saccharomyces pastorianus
gcgttggtccaaagacttggccatt

SEQ ID NO: 95028 - DNA, 25 bp, Saccharomyces pastorianus
gcaaaatttctttacttatcgggat

SEQ ID NO: 95029 - DNA, 25 bp, Saccharomyces pastorianus
aagatgcgactactgccagcaagaa

SEQ ID NO: 95030 - DNA, 25 bp, Saccharomyces pastorianus
gagcaccattatcttctatttgagc

SEQ ID NO: 95031 - DNA, 25 bp, Saccharomyces pastorianus
gcgccatggtgctatacaaacagtt

SEQ ID NO: 95032 - DNA, 25 bp, Saccharomyces pastorianus
aaatttgcaccacgttagtcacatc

SEQ ID NO: 95033 - DNA, 25 bp, Saccharomyces pastorianus
gacatgtacactcccgatacggcag

SEQ ID NO: 95034 - DNA, 25 bp, Saccharomyces pastorianus
gaagttgaacccgtcgacatgtaca

SEQ ID NO: 95035 - DNA, 25 bp, Saccharomyces pastorianus
tgtcaatctttgttggttccatcga

SEQ ID NO: 95036 - DNA, 25 bp, Saccharomyces pastorianus
gtgggccacggctgctaataatgca

SEQ ID NO: 95037 - DNA, 25 bp, Saccharomyces pastorianus
gataggttttatccaggcacgctgt

SEQ ID NO: 95038 - DNA, 25 bp, Saccharomyces pastorianus
gcacgctgtctagctttcaaactga

SEQ ID NO: 95039 - DNA, 25 bp, Saccharomyces pastorianus
ggatgtcttgactactgttgcaaca

SEQ ID NO: 95040 - DNA, 25 bp, Saccharomyces pastorianus
ttgcccacacctacgagttcaaaaa

SEQ ID NO: 95041 - DNA, 25 bp, Saccharomyces pastorianus
gtctcaagcagttcgatagtttcca

SEQ ID NO: 95042 - DNA, 25 bp, Saccharomyces pastorianus
aggataggaccgtttgctgatgcaa

SEQ ID NO: 95043 - DNA, 25 bp, Saccharomyces pastorianus
gataatattcatcctcgcatacagt

SEQ ID NO: 95044 - DNA, 25 bp, Saccharomyces pastorianus
ggcatctgtgcttttattactgttg

SEQ ID NO: 95045 - DNA, 25 bp, Saccharomyces pastorianus
gttttcctgcataatgttgccatca

SEQ ID NO: 95046 - DNA, 25 bp, Saccharomyces pastorianus
gtaatccaaattgctacctgcatta

SEQ ID NO: 95047 - DNA, 25 bp, Saccharomyces pastorianus
gaaacttcatttagatcccatcaca

SEQ ID NO: 95048 - DNA, 25 bp, Saccharomyces pastorianus
aatatgacgttgcttctgcttttat

SEQ ID NO: 95049 - DNA, 25 bp, Saccharomyces pastorianus
acctgcattagagtagcgctgttga

SEQ ID NO: 95050 - DNA, 25 bp, Saccharomyces pastorianus
atctgtactggatacaccacttggt

SEQ ID NO: 95051 - DNA, 25 bp, Saccharomyces pastorianus
aaatgccaaacagcgtacctttaga

SEQ ID NO: 95052 - DNA, 25 bp, Saccharomyces pastorianus
gtgccattaacatccctatcattat

SEQ ID NO: 95053 - DNA, 25 bp, Saccharomyces pastorianus
tatttgtgtacttaaccgttttcag

SEQ ID NO: 95054 - DNA, 25 bp, Saccharomyces pastorianus
accagatggcgtttgttatctcatt

SEQ ID NO: 95055 - DNA, 25 bp, Saccharomyces pastorianus
tcttgccgactacaacattactctg

SEQ ID NO: 95056 - DNA, 25 bp, Saccharomyces pastorianus
atttggccgaattccaccaggtgga

SEQ ID NO: 95057 - DNA, 25 bp, Saccharomyces pastorianus
gggtcgaaatcggtaactctggtat

SEQ ID NO: 95058 - DNA, 25 bp, Saccharomyces pastorianus
ggaaatcttttcttggcacgaaggt

SEQ ID NO: 95059 - DNA, 25 bp, Saccharomyces pastorianus
atggacaatatcaaagccgttcacg

SEQ ID NO: 95060 - DNA, 25 bp, Saccharomyces pastorianus
tttgagattcaagcctacctacaat

SEQ ID NO: 95061 - DNA, 25 bp, Saccharomyces pastorianus
gtaacgaagcagttgacgccaccca

SEQ ID NO: 95062 - DNA, 25 bp, Saccharomyces pastorianus
agcccaccagattgttttctatcga

SEQ ID NO: 95063 - DNA, 25 bp, Saccharomyces pastorianus
agaatgctgcacgatttggccaaag

SEQ ID NO: 95064 - DNA, 25 bp, Saccharomyces pastorianus
gattcgggtccatcggttatcgtta

SEQ ID NO: 95065 - DNA, 25 bp, Saccharomyces pastorianus
ttggtcttgagaactcactccacag

SEQ ID NO: 95066 - DNA, 25 bp, Saccharomyces pastorianus
gattgattccaagaccgagcgtatt

SEQ ID NO: 95067 - DNA, 25 bp, Saccharomyces pastorianus
ggccaattcaagagccaagaccaat

SEQ ID NO: 95068 - DNA, 25 bp, Saccharomyces pastorianus
atttaattccaagttcccacacatt

SEQ ID NO: 95069 - DNA, 25 bp, Saccharomyces pastorianus
gaaagaagccggcatcgactataaa

SEQ ID NO: 95070 - DNA, 25 bp, Saccharomyces pastorianus
agttttgctggttgctgttggtaga

SEQ ID NO: 95071 - DNA, 25 bp, Saccharomyces pastorianus
acattccttcggtcatgtattctca

SEQ ID NO: 95072 - DNA, 25 bp, Saccharomyces pastorianus
aactggtcacggtcatgtcaactat

SEQ ID NO: 95073 - DNA, 25 bp, Saccharomyces pastorianus
gccttagaatatggcgcttccgcag

SEQ ID NO: 95074 - DNA, 25 bp, Saccharomyces pastorianus
aagatgttgctagggtctgccatgc

SEQ ID NO: 95075 - DNA, 25 bp, Saccharomyces pastorianus
tggtaagttcccctttgcggccaat

SEQ ID NO: 95076 - DNA, 25 bp, Saccharomyces pastorianus
gattgctgaagctggcttagcctta

SEQ ID NO: 95077 - DNA, 25 bp, Saccharomyces pastorianus
ctgagacgctaaaggttttgaccac

SEQ ID NO: 95078 - DNA, 25 bp, Saccharomyces pastorianus
tgtggacaagcgcaccgagacgatt

SEQ ID NO: 95079 - DNA, 25 bp, Saccharomyces pastorianus
gtttgggcaagctcttgattgacca

SEQ ID NO: 95080 - DNA, 25 bp, Saccharomyces pastorianus
gttttgaccaccgtgggcactatta

SEQ ID NO: 95081 - DNA, 25 bp, Saccharomyces pastorianus
ctatcggctttgactacggttgtta

SEQ ID NO: 95082 - DNA, 25 bp, Saccharomyces pastorianus
tgaccaattggtaactatcggcttt

SEQ ID NO: 95083 - DNA, 25 bp, Saccharomyces pastorianus
cccgaatccttcagcaaactcataa

SEQ ID NO: 95084 - DNA, 25 bp, Saccharomyces pastorianus
ataaccccatggtgattgtggacaa

SEQ ID NO: 95085 - DNA, 25 bp, Saccharomyces pastorianus
atttggaacaggtcactgagacgct

SEQ ID NO: 95086 - DNA, 25 bp, Saccharomyces pastorianus
aactccaagtatcagggccaaggtt

SEQ ID NO: 95087 - DNA, 25 bp, Saccharomyces pastorianus
gaggacattgcagtaaactccaagt

SEQ ID NO: 95088 - DNA, 25 bp, Saccharomyces pastorianus
ttcgtgtcgacaaggatcccaactt

SEQ ID NO: 95089 - DNA, 25 bp, Saccharomyces pastorianus
tcataccctgacatcgctgtagagg

SEQ ID NO: 95090 - DNA, 25 bp, Saccharomyces pastorianus
agctgcacttggtggtactgtcact

SEQ ID NO: 95091 - DNA, 25 bp, Saccharomyces pastorianus
tactgtcactatccctactgtggag

SEQ ID NO: 95092 - DNA, 25 bp, Saccharomyces pastorianus
aaacatcaaccattcgcggtgatat

SEQ ID NO: 95093 - DNA, 25 bp, Saccharomyces pastorianus
acagccgcgggtacagccattaatg

SEQ ID NO: 95094 - DNA, 25 bp, Saccharomyces pastorianus
ggagattcctataaccacagctgca

SEQ ID NO: 95095 - DNA, 25 bp, Saccharomyces pastorianus
cacatggattacaggacggcgacgt

SEQ ID NO: 95096 - DNA, 25 bp, Saccharomyces pastorianus
gataaaggtcgctccagggactcaa

SEQ ID NO: 95097 - DNA, 25 bp, Saccharomyces pastorianus
ggcactggcagatgtcaccaacgat

SEQ ID NO: 95098 - DNA, 25 bp, Saccharomyces pastorianus
aagaaaccgcagtcgctggcagaaa

SEQ ID NO: 95099 - DNA, 25 bp, Saccharomyces pastorianus
gaatcttcttcacccatgacattga

SEQ ID NO: 95100 - DNA, 25 bp, Saccharomyces pastorianus
gactagatcacttttgacgcctacg

SEQ ID NO: 95101 - DNA, 25 bp, Saccharomyces pastorianus
atttcatgaaaaatctcggcgcttc

SEQ ID NO: 95102 - DNA, 25 bp, Saccharomyces pastorianus
agaagaagaaatcacctccgctgct

SEQ ID NO: 95103 - DNA, 25 bp, Saccharomyces pastorianus
gaatttgaagacatccccgtagcgt

SEQ ID NO: 95104 - DNA, 25 bp, Saccharomyces pastorianus
aatcccaggtgccaaacaggttgaa

SEQ ID NO: 95105 - DNA, 25 bp, Saccharomyces pastorianus
gtcagtgcttgggattcgcggtaaa

SEQ ID NO: 95106 - DNA, 25 bp, Saccharomyces pastorianus
aaagtaacgccagcagcaccaacag

SEQ ID NO: 95107 - DNA, 25 bp, Saccharomyces pastorianus
acctccgctgctatcattgacaaaa

SEQ ID NO: 95108 - DNA, 25 bp, Saccharomyces pastorianus
aaaagcccagtatcggtggtgacaa

SEQ ID NO: 95109 - DNA, 25 bp, Saccharomyces pastorianus
aagaggagtttctcgccgatttgaa

SEQ ID NO: 95110 - DNA, 25 bp, Saccharomyces pastorianus
gaattggatcgtatactctcttccc

SEQ ID NO: 95111 - DNA, 25 bp, Saccharomyces pastorianus
gtttccaataccatatcagcattca

SEQ ID NO: 95112 - DNA, 25 bp, Saccharomyces pastorianus
taacctgtttttcgttgtacacgat

SEQ ID NO: 95113 - DNA, 25 bp, Saccharomyces pastorianus
gtgatcccgattttacagattgcat

SEQ ID NO: 95114 - DNA, 25 bp, Saccharomyces pastorianus
gtttcgtcagaattgtcttctcgta

SEQ ID NO: 95115 - DNA, 25 bp, Saccharomyces pastorianus
tagagtgtcgcctttatttagcttt

SEQ ID NO: 95116 - DNA, 25 bp, Saccharomyces pastorianus
ttacttacttgtaccgttaccgcat

SEQ ID NO: 95117 - DNA, 25 bp, Saccharomyces pastorianus
ggagaatctgcttttgtttcgtcag

SEQ ID NO: 95118 - DNA, 25 bp, Saccharomyces pastorianus
actctcttccccatctttaattaga

SEQ ID NO: 95119 - DNA, 25 bp, Saccharomyces pastorianus
taccgcattcgagggtaacctgttt

SEQ ID NO: 95120 - DNA, 25 bp, Saccharomyces pastorianus
ttcattgggcgttctttacttactt

SEQ ID NO: 95121 - DNA, 25 bp, Saccharomyces pastorianus
tattgcccttcaaatgttcttgtag

SEQ ID NO: 95122 - DNA, 25 bp, Saccharomyces pastorianus
tggaactcgtatcacacattgtcat

SEQ ID NO: 95123 - DNA, 25 bp, Saccharomyces pastorianus
gagatcgaaatcctttcccatggaa

SEQ ID NO: 95124 - DNA, 25 bp, Saccharomyces pastorianus
gaagttcacctttccaaaatgatgg

SEQ ID NO: 95125 - DNA, 25 bp, Saccharomyces pastorianus
aactttctagcacagataggatacg

SEQ ID NO: 95126 - DNA, 25 bp, Saccharomyces pastorianus
aaaaaggaccattgcgtcttcctcg

SEQ ID NO: 95127 - DNA, 25 bp, Saccharomyces pastorianus
tcgtcagttttttatggaagttcac

SEQ ID NO: 95128 - DNA, 25 bp, Saccharomyces pastorianus
aaataaatcattcacctaccgcaac

SEQ ID NO: 95129 - DNA, 25 bp, Saccharomyces pastorianus
ttcacctaccgcaacaacggatgaa

SEQ ID NO: 95130 - DNA, 25 bp, Saccharomyces pastorianus
attgatgaggattattgcccttcaa

SEQ ID NO: 95131 - DNA, 25 bp, Saccharomyces pastorianus
gaaccagtttgtaacctcaagaagt

SEQ ID NO: 95132 - DNA, 25 bp, Saccharomyces pastorianus
gctcctatcgcctatgtcattgtgg

SEQ ID NO: 95133 - DNA, 25 bp, Saccharomyces pastorianus
gggctgttaattttgcttctacatt

SEQ ID NO: 95134 - DNA, 25 bp, Saccharomyces pastorianus
atggccattgcggttggtgcgaact

SEQ ID NO: 95135 - DNA, 25 bp, Saccharomyces pastorianus
catgggttgcttaatcttttcgtac

SEQ ID NO: 95136 - DNA, 25 bp, Saccharomyces pastorianus
gagttaaaaatcgtgccatggccat

SEQ ID NO: 95137 - DNA, 25 bp, Saccharomyces pastorianus
ccaccgttggcgtcactagattatg

SEQ ID NO: 95138 - DNA, 25 bp, Saccharomyces pastorianus
aaagaccaaccttcttcgcaaagtg

SEQ ID NO: 95139 - DNA, 25 bp, Saccharomyces pastorianus
tttcgagacttccattgtccttggg

SEQ ID NO: 95140 - DNA, 25 bp, Saccharomyces pastorianus
aatttgtttcgtcatattcgccacc

SEQ ID NO: 95141 - DNA, 25 bp, Saccharomyces pastorianus
cttgattggatttttcacacccttt

SEQ ID NO: 95142 - DNA, 25 bp, Saccharomyces pastorianus
gaagtccggaggttggattcccagt

SEQ ID NO: 95143 - DNA, 25 bp, Saccharomyces pastorianus
tttaacccgtcatttatcaccacca

SEQ ID NO: 95144 - DNA, 25 bp, Saccharomyces pastorianus
ataccattcatcgagtccagtgcta

SEQ ID NO: 95145 - DNA, 25 bp, Saccharomyces pastorianus
ataaagactgtcgatatcaacggta

SEQ ID NO: 95146 - DNA, 25 bp, Saccharomyces pastorianus
gcacagctactgttggttggtaaca

SEQ ID NO: 95147 - DNA, 25 bp, Saccharomyces pastorianus
tgtttctgcttcatccggtaatgga

SEQ ID NO: 95148 - DNA, 25 bp, Saccharomyces pastorianus
gcatgcgaacgatgaagcacagcta

SEQ ID NO: 95149 - DNA, 25 bp, Saccharomyces pastorianus
aacaagcttgttggcgtcggtaacg

SEQ ID NO: 95150 - DNA, 25 bp, Saccharomyces pastorianus
aagctgcaactttgggataccgctg

SEQ ID NO: 95151 - DNA, 25 bp, Saccharomyces pastorianus
taaaaccgttaatgagcatgcgaac

SEQ ID NO: 95152 - DNA, 25 bp, Saccharomyces pastorianus
gacgagagtggtaacagctgatcaa

SEQ ID NO: 95153 - DNA, 25 bp, Saccharomyces pastorianus
tccagtgctaagaacgatgacaatg

SEQ ID NO: 95154 - DNA, 25 bp, Saccharomyces pastorianus
gccattcttttcttagttggtcaat

SEQ ID NO: 95155 - DNA, 25 bp, Saccharomyces pastorianus
agttcgttgcatgatggccattctt

SEQ ID NO: 95156 - DNA, 25 bp, Saccharomyces pastorianus
agctcaaaaattcttcccctttctg

SEQ ID NO: 95157 - DNA, 25 bp, Saccharomyces pastorianus
gtgccggaaattgtcttgcgtctga

SEQ ID NO: 95158 - DNA, 25 bp, Saccharomyces pastorianus
tttaaagatgttttgcccacagcaa

SEQ ID NO: 95159 - DNA, 25 bp, Saccharomyces pastorianus
attgttttgatctcattggttcagc

SEQ ID NO: 95160 - DNA, 25 bp, Saccharomyces pastorianus
gaagcgttatggaacctgtcgaagt

SEQ ID NO: 95161 - DNA, 25 bp, Saccharomyces pastorianus
gctactgaagcattgacgttacact

SEQ ID NO: 95162 - DNA, 25 bp, Saccharomyces pastorianus
gttacactacgaacttaaggccgca

SEQ ID NO: 95163 - DNA, 25 bp, Saccharomyces pastorianus
tgagaaaacccctcaaaggcctgtt

SEQ ID NO: 95164 - DNA, 25 bp, Saccharomyces pastorianus
ggattggcaagaacctactgtagat

SEQ ID NO: 95165 - DNA, 25 bp, Saccharomyces pastorianus
attcattgctgataacgacactctg

SEQ ID NO: 95166 - DNA, 25 bp, Saccharomyces pastorianus
gtcttctgtcgcaaggactatacgt

SEQ ID NO: 95167 - DNA, 25 bp, Saccharomyces pastorianus
ctttggctagactttatggtgcgaa

SEQ ID NO: 95168 - DNA, 25 bp, Saccharomyces pastorianus
ggtgtttcaagattcacaagctagg

SEQ ID NO: 95169 - DNA, 25 bp, Saccharomyces pastorianus
gaaaaatctgcccagcgtaagcctt

SEQ ID NO: 95170 - DNA, 25 bp, Saccharomyces pastorianus
aactagcgaatgttcctcatcttac

SEQ ID NO: 95171 - DNA, 25 bp, Saccharomyces pastorianus
tcaatagagctatcgttccgggtgt

SEQ ID NO: 95172 - DNA, 25 bp, Saccharomyces pastorianus
agaagtcgcaccagaggtgtttcaa

SEQ ID NO: 95173 - DNA, 25 bp, Saccharomyces pastorianus
caagtacgacgatatagctgagagt

SEQ ID NO: 95174 - DNA, 25 bp, Saccharomyces pastorianus
ataacgacactctgactttaaaccg

SEQ ID NO: 95175 - DNA, 25 bp, Saccharomyces pastorianus
gaatattccaacactcaatagagct

SEQ ID NO: 95176 - DNA, 25 bp, Saccharomyces pastorianus
gatatttaagaatccgccgtccttt

SEQ ID NO: 95177 - DNA, 25 bp, Saccharomyces pastorianus
gaaccaggttgctactttaatcaat

SEQ ID NO: 95178 - DNA, 25 bp, Saccharomyces pastorianus
gggacgatttacatgcactgacaca

SEQ ID NO: 95179 - DNA, 25 bp, Saccharomyces pastorianus
aactggtattacttctgaccctgat

SEQ ID NO: 95180 - DNA, 25 bp, Saccharomyces pastorianus
aaacctggtgctaaatgggacgatt

SEQ ID NO: 95181 - DNA, 25 bp, Saccharomyces pastorianus
gaagatgatatccttgttaccaaag

SEQ ID NO: 95182 - DNA, 25 bp, Saccharomyces pastorianus
aagaagagcttcttgcgctttttat

SEQ ID NO: 95183 - DNA, 25 bp, Saccharomyces pastorianus
tatccccatggactagggcatatgt

SEQ ID NO: 95184 - DNA, 25 bp, Saccharomyces pastorianus
gtaacccaaactatgacgacccaga

SEQ ID NO: 95185 - DNA, 25 bp, Saccharomyces pastorianus
tacgaaaccgttcttgacatgcaaa

SEQ ID NO: 95186 - DNA, 25 bp, Saccharomyces pastorianus
gcactgacacacaaggtccttatta

SEQ ID NO: 95187 - DNA, 25 bp, Saccharomyces pastorianus
gttccaggatttaaccatgcactaa

SEQ ID NO: 95188 - DNA, 25 bp, Saccharomyces pastorianus
gacatagactatgaggccaccgaag

SEQ ID NO: 95189 - DNA, 25 bp, Saccharomyces pastorianus
taaattttactccacgtcaagcgtt

SEQ ID NO: 95190 - DNA, 25 bp, Saccharomyces pastorianus
aaattctagccaagacgtccctatg

SEQ ID NO: 95191 - DNA, 25 bp, Saccharomyces pastorianus
ttgcaatcagggttagtcacgacta

SEQ ID NO: 95192 - DNA, 25 bp, Saccharomyces pastorianus
gttcgccctcaacgtttgacagtaa

SEQ ID NO: 95193 - DNA, 25 bp, Saccharomyces pastorianus
gtaaggtctcctcacatcataaatt

SEQ ID NO: 95194 - DNA, 25 bp, Saccharomyces pastorianus
ggatggttttcacttatctcgcaga

SEQ ID NO: 95195 - DNA, 25 bp, Saccharomyces pastorianus
ttatctcgcagatgtctagacctat

SEQ ID NO: 95196 - DNA, 25 bp, Saccharomyces pastorianus
agacccaactccagatcagtactgt

SEQ ID NO: 95197 - DNA, 25 bp, Saccharomyces pastorianus
gatacgggagcacttcttgtttata

SEQ ID NO: 95198 - DNA, 25 bp, Saccharomyces pastorianus
tacattgtcgcccaattaagaggaa

SEQ ID NO: 95199 - DNA, 25 bp, Saccharomyces pastorianus
attgacagacatatctcacacttac

SEQ ID NO: 95200 - DNA, 25 bp, Saccharomyces pastorianus
gcagcaagtctatatgtctcctcaa

SEQ ID NO: 95201 - DNA, 25 bp, Saccharomyces pastorianus
gagcaactaagcaacaatctggatg

SEQ ID NO: 95202 - DNA, 25 bp, Saccharomyces pastorianus
tattgtcttactccgaagactcttt

SEQ ID NO: 95203 - DNA, 25 bp, Saccharomyces pastorianus
acatagacatattatccggaagctt

SEQ ID NO: 95204 - DNA, 25 bp, Saccharomyces pastorianus
aagcaggtaacccttgaatccatgg

SEQ ID NO: 95205 - DNA, 25 bp, Saccharomyces pastorianus
gagggaaagctcctattactgagaa

SEQ ID NO: 95206 - DNA, 25 bp, Saccharomyces pastorianus
gcgccaaaattcaatgctccggaaa

SEQ ID NO: 95207 - DNA, 25 bp, Saccharomyces pastorianus
gaagaacctcacgataccacggaaa

SEQ ID NO: 95208 - DNA, 25 bp, Saccharomyces pastorianus
gacggagacaattcccctcgaagat

SEQ ID NO: 95209 - DNA, 25 bp, Saccharomyces pastorianus
acgtgagtatgataaccaaatggtt

SEQ ID NO: 95210 - DNA, 25 bp, Saccharomyces pastorianus
attgcccgttttggagccacctgaa

SEQ ID NO: 95211 - DNA, 25 bp, Saccharomyces pastorianus
gcacttgcaagagtttattgacaaa

SEQ ID NO: 95212 - DNA, 25 bp, Saccharomyces pastorianus
gttttggagccacctgaacaagaca

SEQ ID NO: 95213 - DNA, 25 bp, Saccharomyces pastorianus
tggagccacctgaacaagacaaaac

SEQ ID NO: 95214 - DNA, 25 bp, Saccharomyces pastorianus
ccaattatccaattgcaagacgttt

SEQ ID NO: 95215 - DNA, 25 bp, Saccharomyces pastorianus
gaatgtgataaattgtctccaccaa

SEQ ID NO: 95216 - DNA, 25 bp, Saccharomyces pastorianus
aaattgcccgttttggagccacctg

SEQ ID NO: 95217 - DNA, 25 bp, Saccharomyces pastorianus
gtctccaccaattatccaattgcaa

SEQ ID NO: 95218 - DNA, 25 bp, Saccharomyces pastorianus
gccacctgaacaagacaaaaccatt

SEQ ID NO: 95219 - DNA, 25 bp, Saccharomyces pastorianus
attgtctccaccaattatccaattg

SEQ ID NO: 95220 - DNA, 25 bp, Saccharomyces pastorianus
ttcccatttcaattagatgttgcag

SEQ ID NO: 95221 - DNA, 25 bp, Saccharomyces pastorianus
atttgacccatcatccagtgaaaat

SEQ ID NO: 95222 - DNA, 25 bp, Saccharomyces pastorianus
gctttcataagggacgaactggacg

SEQ ID NO: 95223 - DNA, 25 bp, Saccharomyces pastorianus
actgttcagtacgttagatttttct

SEQ ID NO: 95224 - DNA, 25 bp, Saccharomyces pastorianus
ttaccccagaatacgcagcagagaa

SEQ ID NO: 95225 - DNA, 25 bp, Saccharomyces pastorianus
cgccaattccatctatagcgtcgaa

SEQ ID NO: 95226 - DNA, 25 bp, Saccharomyces pastorianus
atgttgcagacatgcttaccccaga

SEQ ID NO: 95227 - DNA, 25 bp, Saccharomyces pastorianus
taagaaacattttcctccaaacttg

SEQ ID NO: 95228 - DNA, 25 bp, Saccharomyces pastorianus
gagtctggacactatcaagctttca

SEQ ID NO: 95229 - DNA, 25 bp, Saccharomyces pastorianus
gacacaagtggctcttaacgaaagt

SEQ ID NO: 95230 - DNA, 25 bp, Saccharomyces pastorianus
aggtgaaaacccatcttgtgtttat

SEQ ID NO: 95231 - DNA, 25 bp, Saccharomyces pastorianus
aatggcttgcccttattggccaaaa

SEQ ID NO: 95232 - DNA, 25 bp, Saccharomyces pastorianus
tcttccatctcttcgtaacaattca

SEQ ID NO: 95233 - DNA, 25 bp, Saccharomyces pastorianus
acgagcttcttgaattcttccatct

SEQ ID NO: 95234 - DNA, 25 bp, Saccharomyces pastorianus
gcccttattggccaaaagacactca

SEQ ID NO: 95235 - DNA, 25 bp, Saccharomyces pastorianus
cccataacgagcttcttgaattctt

SEQ ID NO: 95236 - DNA, 25 bp, Saccharomyces pastorianus
aattcttccatctcttcgtaacaat

SEQ ID NO: 95237 - DNA, 25 bp, Saccharomyces pastorianus
tttgcctttatagaaatgctgccgt

SEQ ID NO: 95238 - DNA, 25 bp, Saccharomyces pastorianus
gaaatgctgccgttgtcggtttttt

SEQ ID NO: 95239 - DNA, 25 bp, Saccharomyces pastorianus
agacactcagtcaattttgccttta

SEQ ID NO: 95240 - DNA, 25 bp, Saccharomyces pastorianus
gtaacaattcaatggcttgccctta

SEQ ID NO: 95241 - DNA, 25 bp, Saccharomyces pastorianus
tcttgaattcttccatctcttcgta

SEQ ID NO: 95242 - DNA, 25 bp, Saccharomyces pastorianus
agacgacgacaaggatgccgttgat

SEQ ID NO: 95243 - DNA, 25 bp, Saccharomyces pastorianus
gtctttggtttctcaattggattca

SEQ ID NO: 95244 - DNA, 25 bp, Saccharomyces pastorianus
aaccgacaacggcagcatttctata

SEQ ID NO: 95245 - DNA, 25 bp, Saccharomyces pastorianus
gactatgtcaccaagcaaaatgcag

SEQ ID NO: 95246 - DNA, 25 bp, Saccharomyces pastorianus
gaaggtttcacaaaggctatctaac

SEQ ID NO: 95247 - DNA, 25 bp, Saccharomyces pastorianus
cacttccaaagtgggtgctggtgca

SEQ ID NO: 95248 - DNA, 25 bp, Saccharomyces pastorianus
aattcactattatcagacgacgaca

SEQ ID NO: 95249 - DNA, 25 bp, Saccharomyces pastorianus
gggcaagccattgaattgttacgaa

SEQ ID NO: 95250 - DNA, 25 bp, Saccharomyces pastorianus
ctgagtgtcttttggccaataaggg

SEQ ID NO: 95251 - DNA, 25 bp, Saccharomyces pastorianus
gatcgatttttcacagtctttggtt

SEQ ID NO: 95252 - DNA, 25 bp, Saccharomyces pastorianus
acaagtctatactccgctaacacag

SEQ ID NO: 95253 - DNA, 25 bp, Saccharomyces pastorianus
gagttcttggagttcttggactata

SEQ ID NO: 95254 - DNA, 25 bp, Saccharomyces pastorianus
gaagcgcgcatattggagcagaaat

SEQ ID NO: 95255 - DNA, 25 bp, Saccharomyces pastorianus
tccataaatacaaacccgctaccaa

SEQ ID NO: 95256 - DNA, 25 bp, Saccharomyces pastorianus
tggacaatcgatgagtgcccaattc

SEQ ID NO: 95257 - DNA, 25 bp, Saccharomyces pastorianus
tgttttaccatgacacaccatcgtt

SEQ ID NO: 95258 - DNA, 25 bp, Saccharomyces pastorianus
gaatacaacgcttttacactgtttg

SEQ ID NO: 95259 - DNA, 25 bp, Saccharomyces pastorianus
ctaccactgataataatccctccat

SEQ ID NO: 95260 - DNA, 25 bp, Saccharomyces pastorianus
tatgccacgattcagcaacactgct

SEQ ID NO: 95261 - DNA, 25 bp, Saccharomyces pastorianus
ttggcgcatgatgttgcacgaggca

SEQ ID NO: 95262 - DNA, 25 bp, Saccharomyces pastorianus
gcaacactgctggagttcttggagt

SEQ ID NO: 95263 - DNA, 25 bp, Saccharomyces pastorianus
tgacacaccatcgttggcgcatgat

SEQ ID NO: 95264 - DNA, 25 bp, Saccharomyces pastorianus
gatttccttgacgaatgcacaactg

SEQ ID NO: 95265 - DNA, 25 bp, Saccharomyces pastorianus
tgtagttctgatagcgatctccctg

SEQ ID NO: 95266 - DNA, 25 bp, Saccharomyces pastorianus
gacgcacaatttattgcctgggtta

SEQ ID NO: 95267 - DNA, 25 bp, Saccharomyces pastorianus
gatgctcgtcaaaagttccgtaatt

SEQ ID NO: 95268 - DNA, 25 bp, Saccharomyces pastorianus
gttaacacagtgcttgccgaaaagg

SEQ ID NO: 95269 - DNA, 25 bp, Saccharomyces pastorianus
gaagtccgagttaaccagcgaagct

SEQ ID NO: 95270 - DNA, 25 bp, Saccharomyces pastorianus
aacggttcagttcctccattgaaag

SEQ ID NO: 95271 - DNA, 25 bp, Saccharomyces pastorianus
tgggattccgtttccaataaagcaa

SEQ ID NO: 95272 - DNA, 25 bp, Saccharomyces pastorianus
gatccttcaaagagaccgaccaccg

SEQ ID NO: 95273 - DNA, 25 bp, Saccharomyces pastorianus
gaccaccgcagaactcttggaagat

SEQ ID NO: 95274 - DNA, 25 bp, Saccharomyces pastorianus
aaagcaacggataccagtcaactat

SEQ ID NO: 95275 - DNA, 25 bp, Saccharomyces pastorianus
gacgaaccgccctgtgcacaggaaa

SEQ ID NO: 95276 - DNA, 25 bp, Saccharomyces pastorianus
ctagtgtttctacattcaacctccc

SEQ ID NO: 95277 - DNA, 25 bp, Saccharomyces pastorianus
acggctctcgtccacagttgggcac

SEQ ID NO: 95278 - DNA, 25 bp, Saccharomyces pastorianus
aagtgtagacaagccagtccccatg

SEQ ID NO: 95279 - DNA, 25 bp, Saccharomyces pastorianus
gagcacgtcacccacatttgaaaga

SEQ ID NO: 95280 - DNA, 25 bp, Saccharomyces pastorianus
agacaagccagtccccatgattaga

SEQ ID NO: 95281 - DNA, 25 bp, Saccharomyces pastorianus
ttgaacacgccccaagtgagcacgt

SEQ ID NO: 95282 - DNA, 25 bp, Saccharomyces pastorianus
aagcgctcccgctcaaagtgtagac

SEQ ID NO: 95283 - DNA, 25 bp, Saccharomyces pastorianus
tttgaaagatcacaggacttcctca

SEQ ID NO: 95284 - DNA, 25 bp, Saccharomyces pastorianus
agtccccatgattagacggcggtct

SEQ ID NO: 95285 - DNA, 25 bp, Saccharomyces pastorianus
ctgtgcacaggaaacacctagtgtt

SEQ ID NO: 95286 - DNA, 25 bp, Saccharomyces pastorianus
tcatgctctgctcaacgaggcaatt

SEQ ID NO: 95287 - DNA, 25 bp, Saccharomyces pastorianus
cgaagatcttcctgatttgctgtca

SEQ ID NO: 95288 - DNA, 25 bp, Saccharomyces pastorianus
tttacctggtttgctggcgccaagt

SEQ ID NO: 95289 - DNA, 25 bp, Saccharomyces pastorianus
tgtatagatataccggaccgctcat

SEQ ID NO: 95290 - DNA, 25 bp, Saccharomyces pastorianus
atatattttttccatgtcgaccgtg

SEQ ID NO: 95291 - DNA, 25 bp, Saccharomyces pastorianus
tgatggttggaactcgcgtctttac

SEQ ID NO: 95292 - DNA, 25 bp, Saccharomyces pastorianus
gattcggactccacgttaattgaca

SEQ ID NO: 95293 - DNA, 25 bp, Saccharomyces pastorianus
gtactgatttgatgacacccgaaga

SEQ ID NO: 95294 - DNA, 25 bp, Saccharomyces pastorianus
tgggatattcctttcagtttcttga

SEQ ID NO: 95295 - DNA, 25 bp, Saccharomyces pastorianus
acagaaacgggctcggattcggact

SEQ ID NO: 95296 - DNA, 25 bp, Saccharomyces pastorianus
ggtaccgacggaatagctgtcccag

SEQ ID NO: 95297 - DNA, 25 bp, Saccharomyces pastorianus
gttactaaacgttccagcaccagag

SEQ ID NO: 95298 - DNA, 25 bp, Saccharomyces pastorianus
tataccaactagctttcattcctct

SEQ ID NO: 95299 - DNA, 25 bp, Saccharomyces pastorianus
tgttttactttcaagatccccagcc

SEQ ID NO: 95300 - DNA, 25 bp, Saccharomyces pastorianus
tgccctcgggcttaaattatccaga

SEQ ID NO: 95301 - DNA, 25 bp, Saccharomyces pastorianus
ctcagagtactcttggtcccaatgg

SEQ ID NO: 95302 - DNA, 25 bp, Saccharomyces pastorianus
ctgcttcccctatttccataattaa

SEQ ID NO: 95303 - DNA, 25 bp, Saccharomyces pastorianus
agatcgctatctccgttactaaacg

SEQ ID NO: 95304 - DNA, 25 bp, Saccharomyces pastorianus
gagggctacttctttagctgggttt

SEQ ID NO: 95305 - DNA, 25 bp, Saccharomyces pastorianus
tacattccaggaactcttcgacaac

SEQ ID NO: 95306 - DNA, 25 bp, Saccharomyces pastorianus
atgaagtattaccagtgccctcggg

SEQ ID NO: 95307 - DNA, 25 bp, Saccharomyces pastorianus
tggctctgtgccaggagtacatagt

SEQ ID NO: 95308 - DNA, 25 bp, Saccharomyces pastorianus
gtccgcattaagaaagggcctcgag

SEQ ID NO: 95309 - DNA, 25 bp, Saccharomyces pastorianus
agattttcttctgtcttacttccaa

SEQ ID NO: 95310 - DNA, 25 bp, Saccharomyces pastorianus
gggatcgctattgatttcgaccaac

SEQ ID NO: 95311 - DNA, 25 bp, Saccharomyces pastorianus
tgtagcttcactggacgtcatcagt

SEQ ID NO: 95312 - DNA, 25 bp, Saccharomyces pastorianus
ggtacaattcattgcattccttcaa

SEQ ID NO: 95313 - DNA, 25 bp, Saccharomyces pastorianus
gaaaccggagttcctgtagcttcac

SEQ ID NO: 95314 - DNA, 25 bp, Saccharomyces pastorianus
gttcggtccatcacgtcaacgggat

SEQ ID NO: 95315 - DNA, 25 bp, Saccharomyces pastorianus
gtgggtcacttcgacctttacaaat

SEQ ID NO: 95316 - DNA, 25 bp, Saccharomyces pastorianus
atttttgcccaatgacatgctagta

SEQ ID NO: 95317 - DNA, 25 bp, Saccharomyces pastorianus
gagtacatttgctaccttgaggaaa

SEQ ID NO: 95318 - DNA, 25 bp, Saccharomyces pastorianus
tatagactcctatggcggcgcaatt

SEQ ID NO: 95319 - DNA, 25 bp, Saccharomyces pastorianus
actggctagcaaatacaacggcatt

SEQ ID NO: 95320 - DNA, 25 bp, Saccharomyces pastorianus
gatcgacagggacaataacgccatt

SEQ ID NO: 95321 - DNA, 25 bp, Saccharomyces pastorianus
gttattcctaggtaccaggtagcat

SEQ ID NO: 95322 - DNA, 25 bp, Saccharomyces pastorianus
ggtaaaacatctagtcgtggacgat

SEQ ID NO: 95323 - DNA, 25 bp, Saccharomyces pastorianus
aagtcgaatggtgaagtccgagcca

SEQ ID NO: 95324 - DNA, 25 bp, Saccharomyces pastorianus
aaacaacgagctgaatgcgccacac

SEQ ID NO: 95325 - DNA, 25 bp, Saccharomyces pastorianus
aggtagcatggtcgcaacccacaga

SEQ ID NO: 95326 - DNA, 25 bp, Saccharomyces pastorianus
agtatacaccgagcgaaaccattca

SEQ ID NO: 95327 - DNA, 25 bp, Saccharomyces pastorianus
gacagtgcatctatcaagatcgaca

SEQ ID NO: 95328 - DNA, 25 bp, Saccharomyces pastorianus
aaagtagtccgtctattacccatca

SEQ ID NO: 95329 - DNA, 25 bp, Saccharomyces pastorianus
gccattgaactcgtcacctttgaaa

SEQ ID NO: 95330 - DNA, 25 bp, Saccharomyces pastorianus
gaccgcaacggatcagtttacatca

SEQ ID NO: 95331 - DNA, 25 bp, Saccharomyces pastorianus
aagactttgcatatggcttgcccca

SEQ ID NO: 95332 - DNA, 25 bp, Saccharomyces pastorianus
gtggcacaaccatccatgcttataa

SEQ ID NO: 95333 - DNA, 25 bp, Saccharomyces pastorianus
cggtccatagacacttccttagaat

SEQ ID NO: 95334 - DNA, 25 bp, Saccharomyces pastorianus
attcaattcatctccactggtcata

SEQ ID NO: 95335 - DNA, 25 bp, Saccharomyces pastorianus
aagaaacgacgcaattgccttcctc

SEQ ID NO: 95336 - DNA, 25 bp, Saccharomyces pastorianus
ggacaatcctcgttgaaaccgtggc

SEQ ID NO: 95337 - DNA, 25 bp, Saccharomyces pastorianus
aagtatctgacatgttcgaccgcgc

SEQ ID NO: 95338 - DNA, 25 bp, Saccharomyces pastorianus
atcagctactttgcggtttaaccca

SEQ ID NO: 95339 - DNA, 25 bp, Saccharomyces pastorianus
gggcaacaagctttatattctcgac

SEQ ID NO: 95340 - DNA, 25 bp, Saccharomyces pastorianus
gagtcgcggttcttgatcatatctt

SEQ ID NO: 95341 - DNA, 25 bp, Saccharomyces pastorianus
taggtactggtttggcaccattcaa

SEQ ID NO: 95342 - DNA, 25 bp, Saccharomyces pastorianus
tgaaattaccaccatctccaaagca

SEQ ID NO: 95343 - DNA, 25 bp, Saccharomyces pastorianus
ggttcagaattggtcgttagcgtta

SEQ ID NO: 95344 - DNA, 25 bp, Saccharomyces pastorianus
tatcggcgctgctttctcaagagac

SEQ ID NO: 95345 - DNA, 25 bp, Saccharomyces pastorianus
gtcgttagcgttaaaccatctgtta

SEQ ID NO: 95346 - DNA, 25 bp, Saccharomyces pastorianus
tcaaagtcgacttggatgccgcaat

SEQ ID NO: 95347 - DNA, 25 bp, Saccharomyces pastorianus
tcagaccttgctgtcggttcagaat

SEQ ID NO: 95348 - DNA, 25 bp, Saccharomyces pastorianus
gtattatcacacatatcggcgctgc

SEQ ID NO: 95349 - DNA, 25 bp, Saccharomyces pastorianus
gaagtcttcctatatctaggttcaa

SEQ ID NO: 95350 - DNA, 25 bp, Saccharomyces pastorianus
ggttcattttacttgtgtggcccta

SEQ ID NO: 95351 - DNA, 25 bp, Saccharomyces pastorianus
gacattctggctaaagacgccgagg

SEQ ID NO: 95352 - DNA, 25 bp, Saccharomyces pastorianus
ggacaacttaaccaatgcgcgcgac

SEQ ID NO: 95353 - DNA, 25 bp, Saccharomyces pastorianus
agactctactccagacacggatgta

SEQ ID NO: 95354 - DNA, 25 bp, Saccharomyces pastorianus
ctctactcgcctcaagaaatctgga

SEQ ID NO: 95355 - DNA, 25 bp, Saccharomyces pastorianus
gatacggtttactgtcacgacctgc

SEQ ID NO: 95356 - DNA, 25 bp, Saccharomyces pastorianus
gacagtgtggccaagacagctactt

SEQ ID NO: 95357 - DNA, 25 bp, Saccharomyces pastorianus
gaagacaccagagactgccgcggat

SEQ ID NO: 95358 - DNA, 25 bp, Saccharomyces pastorianus
tagtgaagcccgcttacgtctctaa

SEQ ID NO: 95359 - DNA, 25 bp, Saccharomyces pastorianus
aaattactgccgctttggtcacttt

SEQ ID NO: 95360 - DNA, 25 bp, Saccharomyces pastorianus
aagttacacgttccttacgaggcag

SEQ ID NO: 95361 - DNA, 25 bp, Saccharomyces pastorianus
gtgagatccgtgagttgttccagct

SEQ ID NO: 95362 - DNA, 25 bp, Saccharomyces pastorianus
gaaagtgtattccttttgcaccaca

SEQ ID NO: 95363 - DNA, 25 bp, Saccharomyces pastorianus
gctaagtctaagaaccataccgctc

SEQ ID NO: 95364 - DNA, 25 bp, Saccharomyces pastorianus
agtctaagaaccataccgctcacaa

SEQ ID NO: 95365 - DNA, 25 bp, Saccharomyces pastorianus
ggctcacagaaacggtatcaagaag

SEQ ID NO: 95366 - DNA, 25 bp, Saccharomyces pastorianus
tcaagaagccaaagacctacaagta

SEQ ID NO: 95367 - DNA, 25 bp, Saccharomyces pastorianus
cggtatcaagaagccaaagacctac

SEQ ID NO: 95368 - DNA, 25 bp, Saccharomyces pastorianus
aagtctaagaaccataccgctcaca

SEQ ID NO: 95369 - DNA, 25 bp, Saccharomyces pastorianus
taagtctaagaaccataccgctcac

SEQ ID NO: 95370 - DNA, 25 bp, Saccharomyces pastorianus
aaggctcacagaaacggtatcaaga

SEQ ID NO: 95371 - DNA, 25 bp, Saccharomyces pastorianus
gaaacggtatcaagaagccaaagac

SEQ ID NO: 95372 - DNA, 25 bp, Saccharomyces pastorianus
taagaaccataccgctcacaaccaa

SEQ ID NO: 95373 - DNA, 25 bp, Saccharomyces pastorianus
gtctaagaaccataccgctcacaac

SEQ ID NO: 95374 - DNA, 25 bp, Saccharomyces pastorianus
atgtaggaagtctaccattttccct

SEQ ID NO: 95375 - DNA, 25 bp, Saccharomyces pastorianus
cattttccctttaggctttgccata

SEQ ID NO: 95376 - DNA, 25 bp, Saccharomyces pastorianus
atattatcatgaagtccccatttcg

SEQ ID NO: 95377 - DNA, 25 bp, Saccharomyces pastorianus
tcgctagccgcgctcgggaaaacca

SEQ ID NO: 95378 - DNA, 25 bp, Saccharomyces pastorianus
ttcaatattcaagaaccccggaaca

SEQ ID NO: 95379 - DNA, 25 bp, Saccharomyces pastorianus
ctggatacatacaatttcagaatat

SEQ ID NO: 95380 - DNA, 25 bp, Saccharomyces pastorianus
gccgcgctcgggaaaaccagcgata

SEQ ID NO: 95381 - DNA, 25 bp, Saccharomyces pastorianus
ggctttgccataatctctggataca

SEQ ID NO: 95382 - DNA, 25 bp, Saccharomyces pastorianus
actgcatatttcaagattcaaccca

SEQ ID NO: 95383 - DNA, 25 bp, Saccharomyces pastorianus
aaccagcgatattctcaatgtagga

SEQ ID NO: 95384 - DNA, 25 bp, Saccharomyces pastorianus
caagattcaacccattattttataa

SEQ ID NO: 95385 - DNA, 25 bp, Saccharomyces pastorianus
gaactagttggtgagtactgggaac

SEQ ID NO: 95386 - DNA, 25 bp, Saccharomyces pastorianus
tggccgcggccgaagatgacgataa

SEQ ID NO: 95387 - DNA, 25 bp, Saccharomyces pastorianus
gatacagcaacaacaacccggctac

SEQ ID NO: 95388 - DNA, 25 bp, Saccharomyces pastorianus
gatgacgataacgagcagcatgaag

SEQ ID NO: 95389 - DNA, 25 bp, Saccharomyces pastorianus
ccttgtgcaccactacgaggagtgt

SEQ ID NO: 95390 - DNA, 25 bp, Saccharomyces pastorianus
catttcaagaacacggaggagggta

SEQ ID NO: 95391 - DNA, 25 bp, Saccharomyces pastorianus
agataaccgttgtgcctgttgtggc

SEQ ID NO: 95392 - DNA, 25 bp, Saccharomyces pastorianus
gagtttttccatctacagcactatt

SEQ ID NO: 95393 - DNA, 25 bp, Saccharomyces pastorianus
agggtaaggcccttgtgcaccacta

SEQ ID NO: 95394 - DNA, 25 bp, Saccharomyces pastorianus
acagcactatttggacactaccacg

SEQ ID NO: 95395 - DNA, 25 bp, Saccharomyces pastorianus
cggctacgcggatcttgaacacaag

SEQ ID NO: 95396 - DNA, 25 bp, Saccharomyces pastorianus
ttatattcgccgctaatacacacgc

SEQ ID NO: 95397 - DNA, 25 bp, Saccharomyces pastorianus
gcaaagtgcggttcccgtaaccatt

SEQ ID NO: 95398 - DNA, 25 bp, Saccharomyces pastorianus
atttcgccgaacttggtcgctactg

SEQ ID NO: 95399 - DNA, 25 bp, Saccharomyces pastorianus
aacagcaaaatgtgtcggccgcgcc

SEQ ID NO: 95400 - DNA, 25 bp, Saccharomyces pastorianus
gaattgcccgacagcgttatcccaa

SEQ ID NO: 95401 - DNA, 25 bp, Saccharomyces pastorianus
agcgcgaatcacacaagcatgcaga

SEQ ID NO: 95402 - DNA, 25 bp, Saccharomyces pastorianus
gttattctgccgtcgaacagcacaa

SEQ ID NO: 95403 - DNA, 25 bp, Saccharomyces pastorianus
ggtcgtagcaagtgagtctcctgta

SEQ ID NO: 95404 - DNA, 25 bp, Saccharomyces pastorianus
actgctacaatcaagccgcggctat

SEQ ID NO: 95405 - DNA, 25 bp, Saccharomyces pastorianus
ggcgtaatcgattagcggtcgcgct

SEQ ID NO: 95406 - DNA, 25 bp, Saccharomyces pastorianus
gcgctgcacgaactggcgtctttaa

SEQ ID NO: 95407 - DNA, 25 bp, Saccharomyces pastorianus
ctaccacatattaggcgaggcaaaa

SEQ ID NO: 95408 - DNA, 25 bp, Saccharomyces pastorianus
atttgccaaatatttccgtgcgagc

SEQ ID NO: 95409 - DNA, 25 bp, Saccharomyces pastorianus
acaccgtacgcaaagaaggcaaggc

SEQ ID NO: 95410 - DNA, 25 bp, Saccharomyces pastorianus
tatggtcaagactcatttgccaaat

SEQ ID NO: 95411 - DNA, 25 bp, Saccharomyces pastorianus
ataggaaatacttgcacacagacat

SEQ ID NO: 95412 - DNA, 25 bp, Saccharomyces pastorianus
agcctttcgcctaccacatattagg

SEQ ID NO: 95413 - DNA, 25 bp, Saccharomyces pastorianus
aaatatttccgtgcgagcggccggg

SEQ ID NO: 95414 - DNA, 25 bp, Saccharomyces pastorianus
atacatttttctatggtcaagactc

SEQ ID NO: 95415 - DNA, 25 bp, Saccharomyces pastorianus
atgacttcttccctggttatataca

SEQ ID NO: 95416 - DNA, 25 bp, Saccharomyces pastorianus
atacacatacacaccgtacgcaaag

SEQ ID NO: 95417 - DNA, 25 bp, Saccharomyces pastorianus
gaaaatcgcacttgcagcataggaa

SEQ ID NO: 95418 - DNA, 25 bp, Saccharomyces pastorianus
gtatgtctgtgtgcaagtatttcct

SEQ ID NO: 95419 - DNA, 25 bp, Saccharomyces pastorianus
aagctttcttgaacactttctcgaa

SEQ ID NO: 95420 - DNA, 25 bp, Saccharomyces pastorianus
tgctgcaagtgcgattttctcgttt

SEQ ID NO: 95421 - DNA, 25 bp, Saccharomyces pastorianus
caagtatttcctatgctgcaagtgc

SEQ ID NO: 95422 - DNA, 25 bp, Saccharomyces pastorianus
ggcgccgtaggtacgttcatttcta

SEQ ID NO: 95423 - DNA, 25 bp, Saccharomyces pastorianus
gaaccacaactttcgtaatcacacc

SEQ ID NO: 95424 - DNA, 25 bp, Saccharomyces pastorianus
gtgccaattccctgtgtaaagcttt

SEQ ID NO: 95425 - DNA, 25 bp, Saccharomyces pastorianus
acccgccttccgtgagagagacgat

SEQ ID NO: 95426 - DNA, 25 bp, Saccharomyces pastorianus
tcatttctacgttcccacagttttt

SEQ ID NO: 95427 - DNA, 25 bp, Saccharomyces pastorianus
atgagcaggacatcgcgaaccacaa

SEQ ID NO: 95428 - DNA, 25 bp, Saccharomyces pastorianus
ccttctttgcgtacggtgtgtatgt

SEQ ID NO: 95429 - DNA, 25 bp, Saccharomyces pastorianus
gtagcgcacaccagagtcctcaatt

SEQ ID NO: 95430 - DNA, 25 bp, Saccharomyces pastorianus
aaaaatggcggatcgctgcactcca

SEQ ID NO: 95431 - DNA, 25 bp, Saccharomyces pastorianus
ttgcatctgtccaccgacagcaata

SEQ ID NO: 95432 - DNA, 25 bp, Saccharomyces pastorianus
atcgctgcactccaatacagacttt

SEQ ID NO: 95433 - DNA, 25 bp, Saccharomyces pastorianus
tgacgacatgtcatcttacaacgac

SEQ ID NO: 95434 - DNA, 25 bp, Saccharomyces pastorianus
ttgcagctcagtcacgacgacgtaa

SEQ ID NO: 95435 - DNA, 25 bp, Saccharomyces pastorianus
gcccacgagacgtccaatgcaaacg

SEQ ID NO: 95436 - DNA, 25 bp, Saccharomyces pastorianus
gacaaagcagcctcggtagcgcaca

SEQ ID NO: 95437 - DNA, 25 bp, Saccharomyces pastorianus
agagtcctcaattccttgcatctgt

SEQ ID NO: 95438 - DNA, 25 bp, Saccharomyces pastorianus
taacctctctgatcgatgacctgaa

SEQ ID NO: 95439 - DNA, 25 bp, Saccharomyces pastorianus
acagactttcaggacacatcgcaga

SEQ ID NO: 95440 - DNA, 25 bp, Saccharomyces pastorianus
gtaggcgaaggcgactccattgcaa

SEQ ID NO: 95441 - DNA, 25 bp, Saccharomyces pastorianus
gacgctactgcaaggcgacgacaaa

SEQ ID NO: 95442 - DNA, 25 bp, Saccharomyces pastorianus
cgacagccgcgatggtagtgtgtcc

SEQ ID NO: 95443 - DNA, 25 bp, Saccharomyces pastorianus
caagtttacaaagctgtgcgatcta

SEQ ID NO: 95444 - DNA, 25 bp, Saccharomyces pastorianus
gaatgatgctgtccagacgctactg

SEQ ID NO: 95445 - DNA, 25 bp, Saccharomyces pastorianus
gattcttgacctgaacaagtcgctg

SEQ ID NO: 95446 - DNA, 25 bp, Saccharomyces pastorianus
gtagtgtgtccggttcgaagttgat

SEQ ID NO: 95447 - DNA, 25 bp, Saccharomyces pastorianus
aaaattcctaagcttaccgatcgag

SEQ ID NO: 95448 - DNA, 25 bp, Saccharomyces pastorianus
gaagacggcaatacggccacaggac

SEQ ID NO: 95449 - DNA, 25 bp, Saccharomyces pastorianus
tagactcgggcatacaactagtgga

SEQ ID NO: 95450 - DNA, 25 bp, Saccharomyces pastorianus
gatgctgaacgaccgattatcactg

SEQ ID NO: 95451 - DNA, 25 bp, Saccharomyces pastorianus
attctaccccgactttggacataat

SEQ ID NO: 95452 - DNA, 25 bp, Saccharomyces pastorianus
cagggtggttttactagcatacttc

SEQ ID NO: 95453 - DNA, 25 bp, Saccharomyces pastorianus
ggttgcttagattccacgggttcaa

SEQ ID NO: 95454 - DNA, 25 bp, Saccharomyces pastorianus
atgagcatgcattgatcctgaagaa

SEQ ID NO: 95455 - DNA, 25 bp, Saccharomyces pastorianus
ttacgttgccaattctctacctgag

SEQ ID NO: 95456 - DNA, 25 bp, Saccharomyces pastorianus
gctgcattattgatacggtggctga

SEQ ID NO: 95457 - DNA, 25 bp, Saccharomyces pastorianus
taccgggaggaatccacgaattctt

SEQ ID NO: 95458 - DNA, 25 bp, Saccharomyces pastorianus
tttccttatctttatcacaggcata

SEQ ID NO: 95459 - DNA, 25 bp, Saccharomyces pastorianus
taatgccactggtagggtctcggtt

SEQ ID NO: 95460 - DNA, 25 bp, Saccharomyces pastorianus
tagtcagcgtgatccatttttatga

SEQ ID NO: 95461 - DNA, 25 bp, Saccharomyces pastorianus
gccacaagctttttgtatgctgcat

SEQ ID NO: 95462 - DNA, 25 bp, Saccharomyces pastorianus
ggacatccggcaaacaaaacctcaa

SEQ ID NO: 95463 - DNA, 25 bp, Saccharomyces pastorianus
ggagcaatgcctttacaaacgtcat

SEQ ID NO: 95464 - DNA, 25 bp, Saccharomyces pastorianus
aatactttcgttgtgttggtcaatg

SEQ ID NO: 95465 - DNA, 25 bp, Saccharomyces pastorianus
attcctaatgaaatgcccctcgaac

SEQ ID NO: 95466 - DNA, 25 bp, Saccharomyces pastorianus
gaaccgcttagaaatgtcatggcag

SEQ ID NO: 95467 - DNA, 25 bp, Saccharomyces pastorianus
ataacgcctgaatgtgaaccgctta

SEQ ID NO: 95468 - DNA, 25 bp, Saccharomyces pastorianus
ggagattatagatacccacgactgg

SEQ ID NO: 95469 - DNA, 25 bp, Saccharomyces pastorianus
tgtttcattgctctagcacgggcat

SEQ ID NO: 95470 - DNA, 25 bp, Saccharomyces pastorianus
gatagctgcccatcgaaatactttc

SEQ ID NO: 95471 - DNA, 25 bp, Saccharomyces pastorianus
gaactgctgcaccaattcatgatag

SEQ ID NO: 95472 - DNA, 25 bp, Saccharomyces pastorianus
aattgtgaagttctaccggctacta

SEQ ID NO: 95473 - DNA, 25 bp, Saccharomyces pastorianus
aacgcccaatttactgctgctaaaa

SEQ ID NO: 95474 - DNA, 25 bp, Saccharomyces pastorianus
gaggtatccttcgttgtccattcat

SEQ ID NO: 95475 - DNA, 25 bp, Saccharomyces pastorianus
aactggtctatggtgtcgatcctga

SEQ ID NO: 95476 - DNA, 25 bp, Saccharomyces pastorianus
tcaagtccttgaactctccaaacaa

SEQ ID NO: 95477 - DNA, 25 bp, Saccharomyces pastorianus
gtcattccagctaaggtcttcggta

SEQ ID NO: 95478 - DNA, 25 bp, Saccharomyces pastorianus
gaaactgacctctttggtgcagaag

SEQ ID NO: 95479 - DNA, 25 bp, Saccharomyces pastorianus
aacactagtgtcttattgctgccaa

SEQ ID NO: 95480 - DNA, 25 bp, Saccharomyces pastorianus
actttgactttccaagatgccttga

SEQ ID NO: 95481 - DNA, 25 bp, Saccharomyces pastorianus
attgggtttctgatccattcaacgc

SEQ ID NO: 95482 - DNA, 25 bp, Saccharomyces pastorianus
gaaggtggttccattcctatcactt

SEQ ID NO: 95483 - DNA, 25 bp, Saccharomyces pastorianus
gaattgaacgctgcaactggctcta

SEQ ID NO: 95484 - DNA, 25 bp, Saccharomyces pastorianus
gactcagcccattgacgtcgtaaaa

SEQ ID NO: 95485 - DNA, 25 bp, Saccharomyces pastorianus
gtatcgagaaactacttccagcggt

SEQ ID NO: 95486 - DNA, 25 bp, Saccharomyces pastorianus
ggttagccacatcttttacactcgt

SEQ ID NO: 95487 - DNA, 25 bp, Saccharomyces pastorianus
gaaggcatggccacattctggaagg

SEQ ID NO: 95488 - DNA, 25 bp, Saccharomyces pastorianus
atgtggcgactaaatctactcctgt

SEQ ID NO: 95489 - DNA, 25 bp, Saccharomyces pastorianus
aaaggcaacctttcacaatgtggcg

SEQ ID NO: 95490 - DNA, 25 bp, Saccharomyces pastorianus
aggaggcttaacgttcactgtttat

SEQ ID NO: 95491 - DNA, 25 bp, Saccharomyces pastorianus
atgtatcaaacaagaggccctgctg

SEQ ID NO: 95492 - DNA, 25 bp, Saccharomyces pastorianus
tgctgcgttcgtccagggaacaaca

SEQ ID NO: 95493 - DNA, 25 bp, Saccharomyces pastorianus
ggaagggctccatctttaggtttat

SEQ ID NO: 95494 - DNA, 25 bp, Saccharomyces pastorianus
ctactcctgtggctcgtatcgagaa

SEQ ID NO: 95495 - DNA, 25 bp, Saccharomyces pastorianus
gatgatatgtttgagctcgcgcacg

SEQ ID NO: 95496 - DNA, 25 bp, Saccharomyces pastorianus
ttgccgaaacaaacgtggtctacta

SEQ ID NO: 95497 - DNA, 25 bp, Saccharomyces pastorianus
acgtgatccggtaccaatttccata

SEQ ID NO: 95498 - DNA, 25 bp, Saccharomyces pastorianus
aatgtccctgcggtgagacgttctt

SEQ ID NO: 95499 - DNA, 25 bp, Saccharomyces pastorianus
gcacgaattgcttcccttagaactt

SEQ ID NO: 95500 - DNA, 25 bp, Saccharomyces pastorianus
gatcctatccgtttaaatgtccctg

SEQ ID NO: 95501 - DNA, 25 bp, Saccharomyces pastorianus
tctatggaagttttgcgcacgtcgc

SEQ ID NO: 95502 - DNA, 25 bp, Saccharomyces pastorianus
agatgttcccacgataggacacgag

SEQ ID NO: 95503 - DNA, 25 bp, Saccharomyces pastorianus
gaattgacagtgcactctccagata

SEQ ID NO: 95504 - DNA, 25 bp, Saccharomyces pastorianus
agatgaaccgccagtacgtgatccg

SEQ ID NO: 95505 - DNA, 25 bp, Saccharomyces pastorianus
gacgttcttctataaaaccgctgca

SEQ ID NO: 95506 - DNA, 25 bp, Saccharomyces pastorianus
gtagcattcatcaaggcacaccagt

SEQ ID NO: 95507 - DNA, 25 bp, Saccharomyces pastorianus
gataatcagtttggcgcgttcgact

SEQ ID NO: 95508 - DNA, 25 bp, Saccharomyces pastorianus
ttgccaccgcctcacataagataat

SEQ ID NO: 95509 - DNA, 25 bp, Saccharomyces pastorianus
aacgcagttaagaacgccagggccg

SEQ ID NO: 95510 - DNA, 25 bp, Saccharomyces pastorianus
attccatgcttgtaggtggctgcga

SEQ ID NO: 95511 - DNA, 25 bp, Saccharomyces pastorianus
aaccgccttgaacatccttagtaga

SEQ ID NO: 95512 - DNA, 25 bp, Saccharomyces pastorianus
aaatgtgcgcccaaagtcttaagaa

SEQ ID NO: 95513 - DNA, 25 bp, Saccharomyces pastorianus
tgcgacacgcacagatacgaccttt

SEQ ID NO: 95514 - DNA, 25 bp, Saccharomyces pastorianus
atatttgggctactggttctataac

SEQ ID NO: 95515 - DNA, 25 bp, Saccharomyces pastorianus
aagctggtgcagacgttatcatgtt

SEQ ID NO: 95516 - DNA, 25 bp, Saccharomyces pastorianus
ttactgggcccgctaaaaacattct

SEQ ID NO: 95517 - DNA, 25 bp, Saccharomyces pastorianus
cacattacgttcaggtgaccacatt

SEQ ID NO: 95518 - DNA, 25 bp, Saccharomyces pastorianus
agcattatatggtacccttgggtta

SEQ ID NO: 95519 - DNA, 25 bp, Saccharomyces pastorianus
atatgcgttgactctgttgctgaaa

SEQ ID NO: 95520 - DNA, 25 bp, Saccharomyces pastorianus
gtcgttcgaaccaagtttgcatcca

SEQ ID NO: 95521 - DNA, 25 bp, Saccharomyces pastorianus
tccggccgctggatgaacaggatat

SEQ ID NO: 95522 - DNA, 25 bp, Saccharomyces pastorianus
gaccacattatcgagctgacactat

SEQ ID NO: 95523 - DNA, 25 bp, Saccharomyces pastorianus
ggataccgagagaccgagaattttc

SEQ ID NO: 95524 - DNA, 25 bp, Saccharomyces pastorianus
aagaatttaatgatccggccgctgg

SEQ ID NO: 95525 - DNA, 25 bp, Saccharomyces pastorianus
gattgcgcaatcttcgaaattatca

SEQ ID NO: 95526 - DNA, 25 bp, Saccharomyces pastorianus
ccaccatattggatacacccgagtt

SEQ ID NO: 95527 - DNA, 25 bp, Saccharomyces pastorianus
ggtttgaatccagaatttcgccgat

SEQ ID NO: 95528 - DNA, 25 bp, Saccharomyces pastorianus
gagctacctgctaggtttcggtaca

SEQ ID NO: 95529 - DNA, 25 bp, Saccharomyces pastorianus
caacggaatgttacctggcagcaaa

SEQ ID NO: 95530 - DNA, 25 bp, Saccharomyces pastorianus
ttcatccttgcgctaccaacggaat

SEQ ID NO: 95531 - DNA, 25 bp, Saccharomyces pastorianus
gcaactgaggtcgttgttcatcctt

SEQ ID NO: 95532 - DNA, 25 bp, Saccharomyces pastorianus
gctcgtcaaagacctctgtattcgt

SEQ ID NO: 95533 - DNA, 25 bp, Saccharomyces pastorianus
aaaccattccgtgtagtgccaataa

SEQ ID NO: 95534 - DNA, 25 bp, Saccharomyces pastorianus
gtattcgttaacaggccattgcaaa

SEQ ID NO: 95535 - DNA, 25 bp, Saccharomyces pastorianus
catagcgctaatgctggtctcagct

SEQ ID NO: 95536 - DNA, 25 bp, Saccharomyces pastorianus
gatgagcttgcttccattttcgagc

SEQ ID NO: 95537 - DNA, 25 bp, Saccharomyces pastorianus
aattcgtcggtacaaggcatccctt

SEQ ID NO: 95538 - DNA, 25 bp, Saccharomyces pastorianus
atcccttagtgaagcatgcaactga

SEQ ID NO: 95539 - DNA, 25 bp, Saccharomyces pastorianus
aggcttattcccgtgggtgataaca

SEQ ID NO: 95540 - DNA, 25 bp, Saccharomyces pastorianus
aggttcatatggctctcttctaaga

SEQ ID NO: 95541 - DNA, 25 bp, Saccharomyces pastorianus
tgaatatctagctaccgtcatgtac

SEQ ID NO: 95542 - DNA, 25 bp, Saccharomyces pastorianus
taggtgttacgtattcgtctcccac

SEQ ID NO: 95543 - DNA, 25 bp, Saccharomyces pastorianus
atagagatgcccgttcttctagaaa

SEQ ID NO: 95544 - DNA, 25 bp, Saccharomyces pastorianus
tgaagaagcgctcgaacccagctat

SEQ ID NO: 95545 - DNA, 25 bp, Saccharomyces pastorianus
taacaccgttgtgggcatttcaggt

SEQ ID NO: 95546 - DNA, 25 bp, Saccharomyces pastorianus
atgcgtatgacaatcctctagcgga

SEQ ID NO: 95547 - DNA, 25 bp, Saccharomyces pastorianus
ggcacacatggcaaacccactgtta

SEQ ID NO: 95548 - DNA, 25 bp, Saccharomyces pastorianus
atgccatcattgttgctggtgtaca

SEQ ID NO: 95549 - DNA, 25 bp, Saccharomyces pastorianus
ctagaaacttctcactggccataat

SEQ ID NO: 95550 - DNA, 25 bp, Saccharomyces pastorianus
cgctcccgcagaagatgactcatta

SEQ ID NO: 95551 - DNA, 25 bp, Saccharomyces pastorianus
gtcttctacatgctctgacgctgaa

SEQ ID NO: 95552 - DNA, 25 bp, Saccharomyces pastorianus
agaactcgctgatgtgatcttcacc

SEQ ID NO: 95553 - DNA, 25 bp, Saccharomyces pastorianus
aagatggcgtaaagtcgctcccgca

SEQ ID NO: 95554 - DNA, 25 bp, Saccharomyces pastorianus
agttttccctcaggagccagtagac

SEQ ID NO: 95555 - DNA, 25 bp, Saccharomyces pastorianus
gtgcgctagcattcactatcgaagc

SEQ ID NO: 95556 - DNA, 25 bp, Saccharomyces pastorianus
tgacgttcgcgataaatccttccag

SEQ ID NO: 95557 - DNA, 25 bp, Saccharomyces pastorianus
agagtttcaccggtatggccataca

SEQ ID NO: 95558 - DNA, 25 bp, Saccharomyces pastorianus
tttccttccaagagtccacgaggga

SEQ ID NO: 95559 - DNA, 25 bp, Saccharomyces pastorianus
actaaacttatctccctgcgtgata

SEQ ID NO: 95560 - DNA, 25 bp, Saccharomyces pastorianus
aatgaccacgatcaagagctccctt

SEQ ID NO: 95561 - DNA, 25 bp, Saccharomyces pastorianus
acgattcacttttgtcttaccctat

SEQ ID NO: 95562 - DNA, 25 bp, Saccharomyces pastorianus
tccctctctccaacataaaggcttt

SEQ ID NO: 95563 - DNA, 25 bp, Saccharomyces pastorianus
gaaactggcctattgtcaactcgaa

SEQ ID NO: 95564 - DNA, 25 bp, Saccharomyces pastorianus
gtgcccttgctagcatccaaacttt

SEQ ID NO: 95565 - DNA, 25 bp, Saccharomyces pastorianus
aagcatgggatcttctgcaatcggg

SEQ ID NO: 95566 - DNA, 25 bp, Saccharomyces pastorianus
aaaaataccgagctatcctacgact

SEQ ID NO: 95567 - DNA, 25 bp, Saccharomyces pastorianus
taacacaaccaagtttcactcggaa

SEQ ID NO: 95568 - DNA, 25 bp, Saccharomyces pastorianus
tcgactcttttaccgatatcctaaa

SEQ ID NO: 95569 - DNA, 25 bp, Saccharomyces pastorianus
gacagcttcgagaattacttcaacc

SEQ ID NO: 95570 - DNA, 25 bp, Saccharomyces pastorianus
gaagccttactactttagcaacaat

SEQ ID NO: 95571 - DNA, 25 bp, Saccharomyces pastorianus
aaggctttgctctttttcaacaacg

SEQ ID NO: 95572 - DNA, 25 bp, Saccharomyces pastorianus
gtgacgcaagcaacgatccaattac

SEQ ID NO: 95573 - DNA, 25 bp, Saccharomyces pastorianus
gcaagcaacgatccaattacgattg

SEQ ID NO: 95574 - DNA, 25 bp, Saccharomyces pastorianus
attgctgcattgtccgaaaaaagaa

SEQ ID NO: 95575 - DNA, 25 bp, Saccharomyces pastorianus
cgattgttccagctgaggatggttc

SEQ ID NO: 95576 - DNA, 25 bp, Saccharomyces pastorianus
gatggactggtgacgcaagcaacga

SEQ ID NO: 95577 - DNA, 25 bp, Saccharomyces pastorianus
gatccaattacgattgttccagctg

SEQ ID NO: 95578 - DNA, 25 bp, Saccharomyces pastorianus
cattgtccgaaaaaagaattgccga

SEQ ID NO: 95579 - DNA, 25 bp, Saccharomyces pastorianus
caattacgattgttccagctgagga

SEQ ID NO: 95580 - DNA, 25 bp, Saccharomyces pastorianus
ctgttattgctgcattgtccgaaaa

SEQ ID NO: 95581 - DNA, 25 bp, Saccharomyces pastorianus
gactggtgacgcaagcaacgatcca

SEQ ID NO: 95582 - DNA, 25 bp, Saccharomyces pastorianus
gttattgctgcattgtccgaaaaaa

SEQ ID NO: 95583 - DNA, 25 bp, Saccharomyces pastorianus
gccgctgacggttctgtctataaca

SEQ ID NO: 95584 - DNA, 25 bp, Saccharomyces pastorianus
tgtcaagaccactctgccagaacgt

SEQ ID NO: 95585 - DNA, 25 bp, Saccharomyces pastorianus
gattagctgtttgtggtattgccgc

SEQ ID NO: 95586 - DNA, 25 bp, Saccharomyces pastorianus
agatgacctccggttactacttggg

SEQ ID NO: 95587 - DNA, 25 bp, Saccharomyces pastorianus
ccgccgctaagggtttgagagatat

SEQ ID NO: 95588 - DNA, 25 bp, Saccharomyces pastorianus
acaagactggtcacattgccgctga

SEQ ID NO: 95589 - DNA, 25 bp, Saccharomyces pastorianus
tggatacctcctacccagcaagaat

SEQ ID NO: 95590 - DNA, 25 bp, Saccharomyces pastorianus
aagacctggtcaacaagcttttgaa

SEQ ID NO: 95591 - DNA, 25 bp, Saccharomyces pastorianus
aattgttgcgtctagtgttacttga

SEQ ID NO: 95592 - DNA, 25 bp, Saccharomyces pastorianus
caggtttcaaggaagccgccgctaa

SEQ ID NO: 95593 - DNA, 25 bp, Saccharomyces pastorianus
gatcggtaccagagctgctagatta

SEQ ID NO: 95594 - DNA, 25 bp, Saccharomyces pastorianus
gcccctcaatgcatacctgatatta

SEQ ID NO: 95595 - DNA, 25 bp, Saccharomyces pastorianus
tattcctcgcaaccatctgattata

SEQ ID NO: 95596 - DNA, 25 bp, Saccharomyces pastorianus
tgatgaccaacctgtggctgaacct

SEQ ID NO: 95597 - DNA, 25 bp, Saccharomyces pastorianus
gaatgcatcttccagattcgtcaca

SEQ ID NO: 95598 - DNA, 25 bp, Saccharomyces pastorianus
tgattatattgcatgctccctcagt

SEQ ID NO: 95599 - DNA, 25 bp, Saccharomyces pastorianus
taatctcgagccgtttttcaagtag

SEQ ID NO: 95600 - DNA, 25 bp, Saccharomyces pastorianus
aggtgcctctctaattgtttctttg

SEQ ID NO: 95601 - DNA, 25 bp, Saccharomyces pastorianus
ataacgaacatgtaggtgcctctct

SEQ ID NO: 95602 - DNA, 25 bp, Saccharomyces pastorianus
gaaccttctggatacacacctgttg

SEQ ID NO: 95603 - DNA, 25 bp, Saccharomyces pastorianus
gcttccattccgtgacactgagagt

SEQ ID NO: 95604 - DNA, 25 bp, Saccharomyces pastorianus
tagtagtttcaaggcgcttccattc

SEQ ID NO: 95605 - DNA, 25 bp, Saccharomyces pastorianus
tctttttatatgtccttgtcttcta

SEQ ID NO: 95606 - DNA, 25 bp, Saccharomyces pastorianus
gtatttcttcattgtggtgtcccaa

SEQ ID NO: 95607 - DNA, 25 bp, Saccharomyces pastorianus
aactcggtacgatcaatcattgtag

SEQ ID NO: 95608 - DNA, 25 bp, Saccharomyces pastorianus
gagcaaattggcactttcaacatta

SEQ ID NO: 95609 - DNA, 25 bp, Saccharomyces pastorianus
aacattatttggatgctatggcgcc

SEQ ID NO: 95610 - DNA, 25 bp, Saccharomyces pastorianus
gctatggcgccttacaattgagttg

SEQ ID NO: 95611 - DNA, 25 bp, Saccharomyces pastorianus
tacgtccaataacagacagttgcgt

SEQ ID NO: 95612 - DNA, 25 bp, Saccharomyces pastorianus
gtgtcccaacactagagcagtcttt

SEQ ID NO: 95613 - DNA, 25 bp, Saccharomyces pastorianus
gttgcgtagtaataccaaacttcga

SEQ ID NO: 95614 - DNA, 25 bp, Saccharomyces pastorianus
atggttgaccccttatacaaaggtg

SEQ ID NO: 95615 - DNA, 25 bp, Saccharomyces pastorianus
aaagccactttgttcatctggatta

SEQ ID NO: 95616 - DNA, 25 bp, Saccharomyces pastorianus
tcacttggcccaatactacatgttc

SEQ ID NO: 95617 - DNA, 25 bp, Saccharomyces pastorianus
cagattaaagccagccatctccagt

SEQ ID NO: 95618 - DNA, 25 bp, Saccharomyces pastorianus
aaagccagccatctccagtgctcta

SEQ ID NO: 95619 - DNA, 25 bp, Saccharomyces pastorianus
agattaaagccagccatctccagtg

SEQ ID NO: 95620 - DNA, 25 bp, Saccharomyces pastorianus
attaaagccagccatctccagtgct

SEQ ID NO: 95621 - DNA, 25 bp, Saccharomyces pastorianus
ggaaacctacccagttgaagttgct

SEQ ID NO: 95622 - DNA, 25 bp, Saccharomyces pastorianus
taaagccagccatctccagtgctct

SEQ ID NO: 95623 - DNA, 25 bp, Saccharomyces pastorianus
tgttccaagccgcccacccaacgga

SEQ ID NO: 95624 - DNA, 25 bp, Saccharomyces pastorianus
cgccgctggtgtcgctgccatcgct

SEQ ID NO: 95625 - DNA, 25 bp, Saccharomyces pastorianus
ttaaagccagccatctccagtgctc

SEQ ID NO: 95626 - DNA, 25 bp, Saccharomyces pastorianus
agtgaccagaatgatcaccggtgtt

SEQ ID NO: 95627 - DNA, 25 bp, Saccharomyces pastorianus
ttattgtaccgccattcagctaaag

SEQ ID NO: 95628 - DNA, 25 bp, Saccharomyces pastorianus
atttgatttgactaatgttacctgt

SEQ ID NO: 95629 - DNA, 25 bp, Saccharomyces pastorianus
taaggatgacacattaccagattat

SEQ ID NO: 95630 - DNA, 25 bp, Saccharomyces pastorianus
tggcgccgacgtcttgactgaaagc

SEQ ID NO: 95631 - DNA, 25 bp, Saccharomyces pastorianus
ggcctacatggacctcattgtggta

SEQ ID NO: 95632 - DNA, 25 bp, Saccharomyces pastorianus
atctacgtttgttggcgccgacgtc

SEQ ID NO: 95633 - DNA, 25 bp, Saccharomyces pastorianus
cccaaattttgcttctgttatctta

SEQ ID NO: 95634 - DNA, 25 bp, Saccharomyces pastorianus
gttcaactctaccaattatggcgtt

SEQ ID NO: 95635 - DNA, 25 bp, Saccharomyces pastorianus
cccaactgtgaatattttcggtaag

SEQ ID NO: 95636 - DNA, 25 bp, Saccharomyces pastorianus
gactactattgctagtaacgagaca

SEQ ID NO: 95637 - DNA, 25 bp, Saccharomyces pastorianus
aatgttacctgtaagggcctacatg

SEQ ID NO: 95638 - DNA, 25 bp, Saccharomyces pastorianus
gatttgttctgtgcaactatctcat

SEQ ID NO: 95639 - DNA, 25 bp, Saccharomyces pastorianus
gacgggtccttgctatggctaaacg

SEQ ID NO: 95640 - DNA, 25 bp, Saccharomyces pastorianus
ggtcagttgggcaatgtagtttcaa

SEQ ID NO: 95641 - DNA, 25 bp, Saccharomyces pastorianus
ggctgggcgaattactttcgaacaa

SEQ ID NO: 95642 - DNA, 25 bp, Saccharomyces pastorianus
taaaggaaagcatctcttcagtatg

SEQ ID NO: 95643 - DNA, 25 bp, Saccharomyces pastorianus
ggatgcatcaaacattggtcagttg

SEQ ID NO: 95644 - DNA, 25 bp, Saccharomyces pastorianus
tacgttccatcctgtggatgcatca

SEQ ID NO: 95645 - DNA, 25 bp, Saccharomyces pastorianus
ttcgaacaatcgctttacgttccat

SEQ ID NO: 95646 - DNA, 25 bp, Saccharomyces pastorianus
actcaggagagtgttttttgttcaa

SEQ ID NO: 95647 - DNA, 25 bp, Saccharomyces pastorianus
gagtaccggtgagttttaccagatt

SEQ ID NO: 95648 - DNA, 25 bp, Saccharomyces pastorianus
tctcatacagacagggacgggtcct

SEQ ID NO: 95649 - DNA, 25 bp, Saccharomyces pastorianus
agaggccaacatgcaatgtccaaag

SEQ ID NO: 95650 - DNA, 25 bp, Saccharomyces pastorianus
tcaaggctttgcacgttttaaacag

SEQ ID NO: 95651 - DNA, 25 bp, Saccharomyces pastorianus
ttttggctgaacacgccatgcatga

SEQ ID NO: 95652 - DNA, 25 bp, Saccharomyces pastorianus
aaattgctttgcatttcggtgcttc

SEQ ID NO: 95653 - DNA, 25 bp, Saccharomyces pastorianus
taggttatgttcatgcccttgctca

SEQ ID NO: 95654 - DNA, 25 bp, Saccharomyces pastorianus
atgcatgatgcctgccatttgacta

SEQ ID NO: 95655 - DNA, 25 bp, Saccharomyces pastorianus
agaactgacatgtgttacgctgaat

SEQ ID NO: 95656 - DNA, 25 bp, Saccharomyces pastorianus
ctgccatttgactaacccagttcaa

SEQ ID NO: 95657 - DNA, 25 bp, Saccharomyces pastorianus
aaagcttagtcgctgcatacaaaga

SEQ ID NO: 95658 - DNA, 25 bp, Saccharomyces pastorianus
tgtcttgttgcctcatgttcaagag

SEQ ID NO: 95659 - DNA, 25 bp, Saccharomyces pastorianus
aatcaccgatgcctgtgctttgaag

SEQ ID NO: 95660 - DNA, 25 bp, Saccharomyces pastorianus
actgcccttgttatctctggtgttt

SEQ ID NO: 95661 - DNA, 25 bp, Saccharomyces pastorianus
gtaccagatacgtcagcggttctta

SEQ ID NO: 95662 - DNA, 25 bp, Saccharomyces pastorianus
actggtaaagagttcgccaccctat

SEQ ID NO: 95663 - DNA, 25 bp, Saccharomyces pastorianus
accaatctgtgtggccatcggtttg

SEQ ID NO: 95664 - DNA, 25 bp, Saccharomyces pastorianus
gatcagacgctacatccgtggatgt

SEQ ID NO: 95665 - DNA, 25 bp, Saccharomyces pastorianus
gattgtcagccattgaattccctag

SEQ ID NO: 95666 - DNA, 25 bp, Saccharomyces pastorianus
gtccttcaacgttatatgcactctt

SEQ ID NO: 95667 - DNA, 25 bp, Saccharomyces pastorianus
ataccctgtcttagtgttccatcaa

SEQ ID NO: 95668 - DNA, 25 bp, Saccharomyces pastorianus
ggatgccatttctgctggtatctta

SEQ ID NO: 95669 - DNA, 25 bp, Saccharomyces pastorianus
gccatgggccctatgtgttgcgtat

SEQ ID NO: 95670 - DNA, 25 bp, Saccharomyces pastorianus
tttggtgtgattttccactccgtta

SEQ ID NO: 95671 - DNA, 25 bp, Saccharomyces pastorianus
tgagaaatccagcagcaccgacact

SEQ ID NO: 95672 - DNA, 25 bp, Saccharomyces pastorianus
aagcgttgatagcactacggcacaa

SEQ ID NO: 95673 - DNA, 25 bp, Saccharomyces pastorianus
aagagcttagtccattcgcatctgt

SEQ ID NO: 95674 - DNA, 25 bp, Saccharomyces pastorianus
gtaagcttgttgtaccatctggaga

SEQ ID NO: 95675 - DNA, 25 bp, Saccharomyces pastorianus
catccattccacaactttcatttag

SEQ ID NO: 95676 - DNA, 25 bp, Saccharomyces pastorianus
gatctcattgaccactatgaccaca

SEQ ID NO: 95677 - DNA, 25 bp, Saccharomyces pastorianus
ccttcattcctgagacgctggtaaa

SEQ ID NO: 95678 - DNA, 25 bp, Saccharomyces pastorianus
gaattctcgcaaggtcatttgcctg

SEQ ID NO: 95679 - DNA, 25 bp, Saccharomyces pastorianus
ttccggctctccaatgtgtggtgaa

SEQ ID NO: 95680 - DNA, 25 bp, Saccharomyces pastorianus
gaatcgcttccaacctctgagaaat

SEQ ID NO: 95681 - DNA, 25 bp, Saccharomyces pastorianus
gttactggtcggataaccggtgcaa

SEQ ID NO: 95682 - DNA, 25 bp, Saccharomyces pastorianus
tagagctgctagattgtccgtttgt

SEQ ID NO: 95683 - DNA, 25 bp, Saccharomyces pastorianus
acaagaccggtcacattgctgcaga

SEQ ID NO: 95684 - DNA, 25 bp, Saccharomyces pastorianus
gataccgatgacttgttccagagtg

SEQ ID NO: 95685 - DNA, 25 bp, Saccharomyces pastorianus
tgaagaatctccaagaccaggccaa

SEQ ID NO: 95686 - DNA, 25 bp, Saccharomyces pastorianus
ttcttacccagccagaatcgaggaa

SEQ ID NO: 95687 - DNA, 25 bp, Saccharomyces pastorianus
tggactcaaacctcactagacgact

SEQ ID NO: 95688 - DNA, 25 bp, Saccharomyces pastorianus
tgttattgctgctttggcccaaaaa

SEQ ID NO: 95689 - DNA, 25 bp, Saccharomyces pastorianus
aaattttgcgtttggccttgatgga

SEQ ID NO: 95690 - DNA, 25 bp, Saccharomyces pastorianus
agttcgacaagcctttcgtcatgga

SEQ ID NO: 95691 - DNA, 25 bp, Saccharomyces pastorianus
gaaggacatttacggctggactcaa

SEQ ID NO: 95692 - DNA, 25 bp, Saccharomyces pastorianus
gtggtattgctgctatctgtcaaaa

SEQ ID NO: 95693 - DNA, 25 bp, Saccharomyces pastorianus
gttcgttccagaattatcacgctac

SEQ ID NO: 95694 - DNA, 25 bp, Saccharomyces pastorianus
aaacaagtgcttccgttcgttccag

SEQ ID NO: 95695 - DNA, 25 bp, Saccharomyces pastorianus
tgatttccatgtttctaagcgtagt

SEQ ID NO: 95696 - DNA, 25 bp, Saccharomyces pastorianus
gtaacctagcatttgttcatgcctc

SEQ ID NO: 95697 - DNA, 25 bp, Saccharomyces pastorianus
gggcggcaacattccggaatctgaa

SEQ ID NO: 95698 - DNA, 25 bp, Saccharomyces pastorianus
ttatctcacagagctagagcgctga

SEQ ID NO: 95699 - DNA, 25 bp, Saccharomyces pastorianus
attgctcctgctttatgtaacctag

SEQ ID NO: 95700 - DNA, 25 bp, Saccharomyces pastorianus
tttgcggtgttcatccaggtggtaa

SEQ ID NO: 95701 - DNA, 25 bp, Saccharomyces pastorianus
gttcatgcctcttatccaaaggagt

SEQ ID NO: 95702 - DNA, 25 bp, Saccharomyces pastorianus
aggagttacaaccaacagctgcatt

SEQ ID NO: 95703 - DNA, 25 bp, Saccharomyces pastorianus
atagccggctgtcatggattatctc

SEQ ID NO: 95704 - DNA, 25 bp, Saccharomyces pastorianus
aaggccaagatttgtctctcggtac

SEQ ID NO: 95705 - DNA, 25 bp, Saccharomyces pastorianus
ggacgcccatatacgcaacgtggca

SEQ ID NO: 95706 - DNA, 25 bp, Saccharomyces pastorianus
ttggcaggttggcttttgctacgaa

SEQ ID NO: 95707 - DNA, 25 bp, Saccharomyces pastorianus
ggaggaacaaccatcggacgcccat

SEQ ID NO: 95708 - DNA, 25 bp, Saccharomyces pastorianus
aagcgaattgcccaaagtcaccgtg

SEQ ID NO: 95709 - DNA, 25 bp, Saccharomyces pastorianus
catttctgttgttcacgtcggatga

SEQ ID NO: 95710 - DNA, 25 bp, Saccharomyces pastorianus
gaaaagcctcgatttgaccttgttc

SEQ ID NO: 95711 - DNA, 25 bp, Saccharomyces pastorianus
ataccgacgcacttggctattgaat

SEQ ID NO: 95712 - DNA, 25 bp, Saccharomyces pastorianus
aaagctgctctttatcagcgaccca

SEQ ID NO: 95713 - DNA, 25 bp, Saccharomyces pastorianus
gatgaaacgcatcccttaattgtgg

SEQ ID NO: 95714 - DNA, 25 bp, Saccharomyces pastorianus
ctctcggtacaacgccttggttgaa

SEQ ID NO: 95715 - DNA, 25 bp, Saccharomyces pastorianus
ggatttaacatcctcttagtacgga

SEQ ID NO: 95716 - DNA, 25 bp, Saccharomyces pastorianus
gagactactgacttttttattgatt

SEQ ID NO: 95717 - DNA, 25 bp, Saccharomyces pastorianus
ataacggctcattgcattacgataa

SEQ ID NO: 95718 - DNA, 25 bp, Saccharomyces pastorianus
ctagaccttatcgaacaaccttact

SEQ ID NO: 95719 - DNA, 25 bp, Saccharomyces pastorianus
ttcaggcgagccgatttatgcaact

SEQ ID NO: 95720 - DNA, 25 bp, Saccharomyces pastorianus
aaatgcttacggtttcacaaatgac

SEQ ID NO: 95721 - DNA, 25 bp, Saccharomyces pastorianus
gtaaaaactcccatctagaccttat

SEQ ID NO: 95722 - DNA, 25 bp, Saccharomyces pastorianus
gacgttgatcctgatcttttctgga

SEQ ID NO: 95723 - DNA, 25 bp, Saccharomyces pastorianus
gcaaaatgggccttttcatataacg

SEQ ID NO: 95724 - DNA, 25 bp, Saccharomyces pastorianus
gcaaatgccgatattcttctagatt

SEQ ID NO: 95725 - DNA, 25 bp, Saccharomyces pastorianus
accttactttggagaatgcgatttc

SEQ ID NO: 95726 - DNA, 25 bp, Saccharomyces pastorianus
gaattttggtcttacgttgctgaaa

SEQ ID NO: 95727 - DNA, 25 bp, Saccharomyces pastorianus
acagcaccttctatatcttcagaga

SEQ ID NO: 95728 - DNA, 25 bp, Saccharomyces pastorianus
aatgttcatgcccattatcttccaa

SEQ ID NO: 95729 - DNA, 25 bp, Saccharomyces pastorianus
aagtgcactatctttccttgggatg

SEQ ID NO: 95730 - DNA, 25 bp, Saccharomyces pastorianus
taccgttcaaagttcatcatgggat

SEQ ID NO: 95731 - DNA, 25 bp, Saccharomyces pastorianus
ctcacgttaagtcaacacctgctaa

SEQ ID NO: 95732 - DNA, 25 bp, Saccharomyces pastorianus
agcggtttgaatgttatcgttactc

SEQ ID NO: 95733 - DNA, 25 bp, Saccharomyces pastorianus
agacccaagactaaccatactcgaa

SEQ ID NO: 95734 - DNA, 25 bp, Saccharomyces pastorianus
gttgctgaaaatataccgcttgtgc

SEQ ID NO: 95735 - DNA, 25 bp, Saccharomyces pastorianus
aagcccgagcaattgtatggtcatc

SEQ ID NO: 95736 - DNA, 25 bp, Saccharomyces pastorianus
taccgcttgtgcatctcaagggtat

SEQ ID NO: 95737 - DNA, 25 bp, Saccharomyces pastorianus
taaagcatgggctcgtactctggcg

SEQ ID NO: 95738 - DNA, 25 bp, Saccharomyces pastorianus
agattagcccgacaaagcatttggt

SEQ ID NO: 95739 - DNA, 25 bp, Saccharomyces pastorianus
gaaaaccagtgcgaacctcatatga

SEQ ID NO: 95740 - DNA, 25 bp, Saccharomyces pastorianus
ggactgtctcttgctattaaattca

SEQ ID NO: 95741 - DNA, 25 bp, Saccharomyces pastorianus
ggagtatatacagcttttcttcaat

SEQ ID NO: 95742 - DNA, 25 bp, Saccharomyces pastorianus
ggaaatagtgtctggctccgattac

SEQ ID NO: 95743 - DNA, 25 bp, Saccharomyces pastorianus
acgagtttcggatcatacagggttt

SEQ ID NO: 95744 - DNA, 25 bp, Saccharomyces pastorianus
tagtttttctagacagcctgatggc

SEQ ID NO: 95745 - DNA, 25 bp, Saccharomyces pastorianus
gtatacgatctttccttttcatttt

SEQ ID NO: 95746 - DNA, 25 bp, Saccharomyces pastorianus
atggcatacttgctaccccaagatt

SEQ ID NO: 95747 - DNA, 25 bp, Saccharomyces pastorianus
ctggctccgattaccaatgggctaa

SEQ ID NO: 95748 - DNA, 25 bp, Saccharomyces pastorianus
gcagcaagttgcgaacatatcggat

SEQ ID NO: 95749 - DNA, 25 bp, Saccharomyces pastorianus
gttgcagtatacaccccgtgaagtg

SEQ ID NO: 95750 - DNA, 25 bp, Saccharomyces pastorianus
gagttttcaacggaggaagtacctg

SEQ ID NO: 95751 - DNA, 25 bp, Saccharomyces pastorianus
gttaattcttggtgctgaggtggat

SEQ ID NO: 95752 - DNA, 25 bp, Saccharomyces pastorianus
atatcggatacgcataagtttgagc

SEQ ID NO: 95753 - DNA, 25 bp, Saccharomyces pastorianus
gaggatcctcattctcaaataagag

SEQ ID NO: 95754 - DNA, 25 bp, Saccharomyces pastorianus
ttgagcgtaaactgttccggacctg

SEQ ID NO: 95755 - DNA, 25 bp, Saccharomyces pastorianus
aatgcttcttagttgggatcccaag

SEQ ID NO: 95756 - DNA, 25 bp, Saccharomyces pastorianus
tgagaactggtgtaggtaactgcaa

SEQ ID NO: 95757 - DNA, 25 bp, Saccharomyces pastorianus
ggacctggctgcaatgcttcttagt

SEQ ID NO: 95758 - DNA, 25 bp, Saccharomyces pastorianus
tatggtctccttactgagtggcttt

SEQ ID NO: 95759 - DNA, 25 bp, Saccharomyces pastorianus
gaaggtcattgatccaattgctcca

SEQ ID NO: 95760 - DNA, 25 bp, Saccharomyces pastorianus
cacggatgccattgctgacttgaat

SEQ ID NO: 95761 - DNA, 25 bp, Saccharomyces pastorianus
ggaaggctccgaagctccacaagaa

SEQ ID NO: 95762 - DNA, 25 bp, Saccharomyces pastorianus
agccatatgtcttttttaccatccc

SEQ ID NO: 95763 - DNA, 25 bp, Saccharomyces pastorianus
aattgctccaagacacactgctatc

SEQ ID NO: 95764 - DNA, 25 bp, Saccharomyces pastorianus
gggctactacagattggatgcttta

SEQ ID NO: 95765 - DNA, 25 bp, Saccharomyces pastorianus
aagatgtcgtccctgttgatttagt

SEQ ID NO: 95766 - DNA, 25 bp, Saccharomyces pastorianus
gaagatttcttgactcctcaaacag

SEQ ID NO: 95767 - DNA, 25 bp, Saccharomyces pastorianus
gttgacttcgaccatttgattacca

SEQ ID NO: 95768 - DNA, 25 bp, Saccharomyces pastorianus
gacgatggctctatggttgccaaat

SEQ ID NO: 95769 - DNA, 25 bp, Saccharomyces pastorianus
cactgctatcgtcaacccagttaaa

SEQ ID NO: 95770 - DNA, 25 bp, Saccharomyces pastorianus
aaagagcgatcctttcagcaggcta

SEQ ID NO: 95771 - DNA, 25 bp, Saccharomyces pastorianus
aactacagatgaggttgttcgccat

SEQ ID NO: 95772 - DNA, 25 bp, Saccharomyces pastorianus
tatctggtacgaatgcagtcttgga

SEQ ID NO: 95773 - DNA, 25 bp, Saccharomyces pastorianus
aaccaggaccaaagtttactatcag

SEQ ID NO: 95774 - DNA, 25 bp, Saccharomyces pastorianus
gagaaagagctacttgtggcacaat

SEQ ID NO: 95775 - DNA, 25 bp, Saccharomyces pastorianus
tttcagcaggctaaaaaccaggacc

SEQ ID NO: 95776 - DNA, 25 bp, Saccharomyces pastorianus
ggacattgcaaaatactctgctcag

SEQ ID NO: 95777 - DNA, 25 bp, Saccharomyces pastorianus
aaactaggcgagttgacctctaaga

SEQ ID NO: 95778 - DNA, 25 bp, Saccharomyces pastorianus
ggttgttcgccataggatgcaattc

SEQ ID NO: 95779 - DNA, 25 bp, Saccharomyces pastorianus
gaggttatggattttgtcaatacac

SEQ ID NO: 95780 - DNA, 25 bp, Saccharomyces pastorianus
gtggcacaattcaggcgccttggtg

SEQ ID NO: 95781 - DNA, 25 bp, Saccharomyces pastorianus
gagcaatcatttcacactcgtctac

SEQ ID NO: 95782 - DNA, 25 bp, Saccharomyces pastorianus
gtgtagtgtcaagctctttatggat

SEQ ID NO: 95783 - DNA, 25 bp, Saccharomyces pastorianus
cacactcgtctaccgaatctagata

SEQ ID NO: 95784 - DNA, 25 bp, Saccharomyces pastorianus
gatgactttagcaccgaagaagcga

SEQ ID NO: 95785 - DNA, 25 bp, Saccharomyces pastorianus
aaattcctgaattgcctcaaaccat

SEQ ID NO: 95786 - DNA, 25 bp, Saccharomyces pastorianus
gaacattttatctcccgatggttgg

SEQ ID NO: 95787 - DNA, 25 bp, Saccharomyces pastorianus
gaggatgttcctggtctaatgtgta

SEQ ID NO: 95788 - DNA, 25 bp, Saccharomyces pastorianus
taagccggtttgcacaatgggaact

SEQ ID NO: 95789 - DNA, 25 bp, Saccharomyces pastorianus
actgtcaatcgcaagtaagccggtt

SEQ ID NO: 95790 - DNA, 25 bp, Saccharomyces pastorianus
gaagcgattcttaatggcgtgagga

SEQ ID NO: 95791 - DNA, 25 bp, Saccharomyces pastorianus
caacggtcgtcggtactgaattgtt

SEQ ID NO: 95792 - DNA, 25 bp, Saccharomyces pastorianus
ggaacctgagcatggaacttttatt

SEQ ID NO: 95793 - DNA, 25 bp, Saccharomyces pastorianus
aaagccagttgatttggttcatggt

SEQ ID NO: 95794 - DNA, 25 bp, Saccharomyces pastorianus
gccgagttagcgattgatagtacca

SEQ ID NO: 95795 - DNA, 25 bp, Saccharomyces pastorianus
gacaagattctcgatcaagacggtg

SEQ ID NO: 95796 - DNA, 25 bp, Saccharomyces pastorianus
aattgaccttttgcagggtgccgag

SEQ ID NO: 95797 - DNA, 25 bp, Saccharomyces pastorianus
ggatcctgggaagttctcgacaaga

SEQ ID NO: 95798 - DNA, 25 bp, Saccharomyces pastorianus
caatctggatcttttggagaccgta

SEQ ID NO: 95799 - DNA, 25 bp, Saccharomyces pastorianus
gtgcggatcctagggtgagaaacta

SEQ ID NO: 95800 - DNA, 25 bp, Saccharomyces pastorianus
gcgacactccgttacatgttactgt

SEQ ID NO: 95801 - DNA, 25 bp, Saccharomyces pastorianus
gaaatagacccacaaaacgacgttg

SEQ ID NO: 95802 - DNA, 25 bp, Saccharomyces pastorianus
aaacgacgttgatggcgacactccg

SEQ ID NO: 95803 - DNA, 25 bp, Saccharomyces pastorianus
tttacgagactctatccgacagtga

SEQ ID NO: 95804 - DNA, 25 bp, Saccharomyces pastorianus
ttgtttctgagttaagcttccaaag

SEQ ID NO: 95805 - DNA, 25 bp, Saccharomyces pastorianus
gagtggcttccattgtatttacgag

SEQ ID NO: 95806 - DNA, 25 bp, Saccharomyces pastorianus
acaagttccactttataccaagatc

SEQ ID NO: 95807 - DNA, 25 bp, Saccharomyces pastorianus
gtaaacaaccgaatccagaacaatt

SEQ ID NO: 95808 - DNA, 25 bp, Saccharomyces pastorianus
gccagacaggtatgtacaagttcca

SEQ ID NO: 95809 - DNA, 25 bp, Saccharomyces pastorianus
gaagcagacgacgattcagacgata

SEQ ID NO: 95810 - DNA, 25 bp, Saccharomyces pastorianus
actgatgctttgacattggtgatgc

SEQ ID NO: 95811 - DNA, 25 bp, Saccharomyces pastorianus
gaatctgttgttcagctactggtaa

SEQ ID NO: 95812 - DNA, 25 bp, Saccharomyces pastorianus
tcagacgatataacgggactcatgg

SEQ ID NO: 95813 - DNA, 25 bp, Saccharomyces pastorianus
tttgagcaaccttttcttcctgaac

SEQ ID NO: 95814 - DNA, 25 bp, Saccharomyces pastorianus
gagggcaaccacaccaattggacat

SEQ ID NO: 95815 - DNA, 25 bp, Saccharomyces pastorianus
aggcttttgtttccagtcaaccatg

SEQ ID NO: 95816 - DNA, 25 bp, Saccharomyces pastorianus
gtgtcatggcaatattcttttcgat

SEQ ID NO: 95817 - DNA, 25 bp, Saccharomyces pastorianus
atagggaggacgaccagctgctgaa

SEQ ID NO: 95818 - DNA, 25 bp, Saccharomyces pastorianus
acgtgacacatttagcgctttggaa

SEQ ID NO: 95819 - DNA, 25 bp, Saccharomyces pastorianus
gagtcctatgctccaagcttagtga

SEQ ID NO: 95820 - DNA, 25 bp, Saccharomyces pastorianus
aagatctctacgtgaatgggttcca

SEQ ID NO: 95821 - DNA, 25 bp, Saccharomyces pastorianus
tcctacaccggagaacttgcaacat

SEQ ID NO: 95822 - DNA, 25 bp, Saccharomyces pastorianus
gaatcctgtggactttgctctagat

SEQ ID NO: 95823 - DNA, 25 bp, Saccharomyces pastorianus
gcaacatatgttccaccaaggtatt

SEQ ID NO: 95824 - DNA, 25 bp, Saccharomyces pastorianus
gggcatagtccttctgatgcgaggt

SEQ ID NO: 95825 - DNA, 25 bp, Saccharomyces pastorianus
gaagtgcaagatgggctttttcaac

SEQ ID NO: 95826 - DNA, 25 bp, Saccharomyces pastorianus
gagacagcatcatcacaaagtattg

SEQ ID NO: 95827 - DNA, 25 bp, Saccharomyces pastorianus
gatcctttgcctgaaatcgatgtca

SEQ ID NO: 95828 - DNA, 25 bp, Saccharomyces pastorianus
aaatctccacgtttggttctcattt

SEQ ID NO: 95829 - DNA, 25 bp, Saccharomyces pastorianus
ggttctcatttcagtaagttggtta

SEQ ID NO: 95830 - DNA, 25 bp, Saccharomyces pastorianus
ataccattttgcctcaattgaccca

SEQ ID NO: 95831 - DNA, 25 bp, Saccharomyces pastorianus
gaaccgcttgagaccatatattaaa

SEQ ID NO: 95832 - DNA, 25 bp, Saccharomyces pastorianus
ggctctgattttttgatccacttta

SEQ ID NO: 95833 - DNA, 25 bp, Saccharomyces pastorianus
gaaaaaccattcgatcctttgcctg

SEQ ID NO: 95834 - DNA, 25 bp, Saccharomyces pastorianus
aatataatgctatctctgggaatac

SEQ ID NO: 95835 - DNA, 25 bp, Saccharomyces pastorianus
tattggtaacctgctagatcgtaaa

SEQ ID NO: 95836 - DNA, 25 bp, Saccharomyces pastorianus
atacatcttccagtgtcagtacgat

SEQ ID NO: 95837 - DNA, 25 bp, Saccharomyces pastorianus
atgccaagcagtactaccgaatttt

SEQ ID NO: 95838 - DNA, 25 bp, Saccharomyces pastorianus
aattggtggttcaagcccagtacac

SEQ ID NO: 95839 - DNA, 25 bp, Saccharomyces pastorianus
gggctagcgatgatcctgacgatag

SEQ ID NO: 95840 - DNA, 25 bp, Saccharomyces pastorianus
aagccatacttacacgaatctcgac

SEQ ID NO: 95841 - DNA, 25 bp, Saccharomyces pastorianus
tttctctgcagtgactactttaccg

SEQ ID NO: 95842 - DNA, 25 bp, Saccharomyces pastorianus
gagttatcgactccttggaaccaca

SEQ ID NO: 95843 - DNA, 25 bp, Saccharomyces pastorianus
gatggaaccatctgccgactttact

SEQ ID NO: 95844 - DNA, 25 bp, Saccharomyces pastorianus
gaggttcttgacagccgctgagatc

SEQ ID NO: 95845 - DNA, 25 bp, Saccharomyces pastorianus
gccgactttactagtttctctgcag

SEQ ID NO: 95846 - DNA, 25 bp, Saccharomyces pastorianus
atgcgatgcgaagacctcgtggtga

SEQ ID NO: 95847 - DNA, 25 bp, Saccharomyces pastorianus
agaagatatggtcaaccgcctcctg

SEQ ID NO: 95848 - DNA, 25 bp, Saccharomyces pastorianus
gatgaccacgacctgtgtcttggtt

SEQ ID NO: 95849 - DNA, 25 bp, Saccharomyces pastorianus
gagagcgtcgatttcctttacaagg

SEQ ID NO: 95850 - DNA, 25 bp, Saccharomyces pastorianus
tagatggcgcagctgcagcttcgca

SEQ ID NO: 95851 - DNA, 25 bp, Saccharomyces pastorianus
gggttgcacgaacacttaccaatat

SEQ ID NO: 95852 - DNA, 25 bp, Saccharomyces pastorianus
agcgagatcagttactttgcccatc

SEQ ID NO: 95853 - DNA, 25 bp, Saccharomyces pastorianus
atataactctctgtctatctgggct

SEQ ID NO: 95854 - DNA, 25 bp, Saccharomyces pastorianus
cattttgaattgcactccagcgaga

SEQ ID NO: 95855 - DNA, 25 bp, Saccharomyces pastorianus
tgagagtagtatgcgcaccagtcct

SEQ ID NO: 95856 - DNA, 25 bp, Saccharomyces pastorianus
gttccctttgcatgtatttcttata

SEQ ID NO: 95857 - DNA, 25 bp, Saccharomyces pastorianus
gtcagcaactttgttctgcagcaga

SEQ ID NO: 95858 - DNA, 25 bp, Saccharomyces pastorianus
gtaccccgtgtcttcaaatggtttg

SEQ ID NO: 95859 - DNA, 25 bp, Saccharomyces pastorianus
tgtagcattaccatgggacgctcca

SEQ ID NO: 95860 - DNA, 25 bp, Saccharomyces pastorianus
atatcccaagagctattccagacca

SEQ ID NO: 95861 - DNA, 25 bp, Saccharomyces pastorianus
aaatggccgcaggagatgttcttct

SEQ ID NO: 95862 - DNA, 25 bp, Saccharomyces pastorianus
gcctctagcggtgttcattctaatg

SEQ ID NO: 95863 - DNA, 25 bp, Saccharomyces pastorianus
taagggtaccgctgttggtgctgta

SEQ ID NO: 95864 - DNA, 25 bp, Saccharomyces pastorianus
tatttgggagcttggttctttgcaa

SEQ ID NO: 95865 - DNA, 25 bp, Saccharomyces pastorianus
ctacaggcccgcgttgatatgtcaa

SEQ ID NO: 95866 - DNA, 25 bp, Saccharomyces pastorianus
gcaggtaatgttccacacgatgaca

SEQ ID NO: 95867 - DNA, 25 bp, Saccharomyces pastorianus
ggacgctccatgtccatgggatgaa

SEQ ID NO: 95868 - DNA, 25 bp, Saccharomyces pastorianus
atgtcaacctgggaagtaccccgtg

SEQ ID NO: 95869 - DNA, 25 bp, Saccharomyces pastorianus
gagcaagattcagcacttcgtctca

SEQ ID NO: 95870 - DNA, 25 bp, Saccharomyces pastorianus
aatgccaacggtgttgacgcaccaa

SEQ ID NO: 95871 - DNA, 25 bp, Saccharomyces pastorianus
aatgatgtttgccagcacgctacaa

SEQ ID NO: 95872 - DNA, 25 bp, Saccharomyces pastorianus
aatggataccagtcgccaatgaccc

SEQ ID NO: 95873 - DNA, 25 bp, Saccharomyces pastorianus
ttaccatacagcgtccaaacattat

SEQ ID NO: 95874 - DNA, 25 bp, Saccharomyces pastorianus
agcattattcccagaattttcccct

SEQ ID NO: 95875 - DNA, 25 bp, Saccharomyces pastorianus
ttttccgtgaatttgactccttgac

SEQ ID NO: 95876 - DNA, 25 bp, Saccharomyces pastorianus
gaatcagcgagtgtcattgactcta

SEQ ID NO: 95877 - DNA, 25 bp, Saccharomyces pastorianus
cggcgatgacactagcgtaatggat

SEQ ID NO: 95878 - DNA, 25 bp, Saccharomyces pastorianus
aagatgcggctcttttgttgagcaa

SEQ ID NO: 95879 - DNA, 25 bp, Saccharomyces pastorianus
ggatctattattgcatgacacacca

SEQ ID NO: 95880 - DNA, 25 bp, Saccharomyces pastorianus
gctaccctgggaacgaattgctcat

SEQ ID NO: 95881 - DNA, 25 bp, Saccharomyces pastorianus
gtatatgtccggtacatccttacaa

SEQ ID NO: 95882 - DNA, 25 bp, Saccharomyces pastorianus
gatgctacatctcaaactacttctt

SEQ ID NO: 95883 - DNA, 25 bp, Saccharomyces pastorianus
aatgggtctcattcctaacgctaag

SEQ ID NO: 95884 - DNA, 25 bp, Saccharomyces pastorianus
gttacaaccagccaaatctattccg

SEQ ID NO: 95885 - DNA, 25 bp, Saccharomyces pastorianus
atgtatatcgtattccaaggcgtct

SEQ ID NO: 95886 - DNA, 25 bp, Saccharomyces pastorianus
attcctataatgactgccctcatgc

SEQ ID NO: 95887 - DNA, 25 bp, Saccharomyces pastorianus
caaggagtgcattcaaaccagtgtt

SEQ ID NO: 95888 - DNA, 25 bp, Saccharomyces pastorianus
aatgggctaaacacctattggacac

SEQ ID NO: 95889 - DNA, 25 bp, Saccharomyces pastorianus
attaccttcaccaccaggatttgaa

SEQ ID NO: 95890 - DNA, 25 bp, Saccharomyces pastorianus
atgctactctctggacccattaaag

SEQ ID NO: 95891 - DNA, 25 bp, Saccharomyces pastorianus
ggccagttctgtgccgaaagcgatg

SEQ ID NO: 95892 - DNA, 25 bp, Saccharomyces pastorianus
ttgctccagatatatatgccttctt

SEQ ID NO: 95893 - DNA, 25 bp, Saccharomyces pastorianus
gacttccatattatctctgatttca

SEQ ID NO: 95894 - DNA, 25 bp, Saccharomyces pastorianus
tctgatttcattttacaaggccaca

SEQ ID NO: 95895 - DNA, 25 bp, Saccharomyces pastorianus
gttcaataattcttggtggaggcca

SEQ ID NO: 95896 - DNA, 25 bp, Saccharomyces pastorianus
tgagtaaaccagctcatccatccac

SEQ ID NO: 95897 - DNA, 25 bp, Saccharomyces pastorianus
aaagttgccgagctcatagatgaat

SEQ ID NO: 95898 - DNA, 25 bp, Saccharomyces pastorianus
caaaacctttgtacggcagcaacca

SEQ ID NO: 95899 - DNA, 25 bp, Saccharomyces pastorianus
ataagaccgatctaattgctccaga

SEQ ID NO: 95900 - DNA, 25 bp, Saccharomyces pastorianus
aaggccacaaggattcgtttgaatt

SEQ ID NO: 95901 - DNA, 25 bp, Saccharomyces pastorianus
ggcagcaaccaaaagttacctgtta

SEQ ID NO: 95902 - DNA, 25 bp, Saccharomyces pastorianus
gcagatgatgacactacgcttgatg

SEQ ID NO: 95903 - DNA, 25 bp, Saccharomyces pastorianus
gtgagtacttcaacgagacgcgctc

SEQ ID NO: 95904 - DNA, 25 bp, Saccharomyces pastorianus
gatattatcgttcactcaagagagt

SEQ ID NO: 95905 - DNA, 25 bp, Saccharomyces pastorianus
tgttatcaacgctcacatgggtgca

SEQ ID NO: 95906 - DNA, 25 bp, Saccharomyces pastorianus
tctagagacaagctggctcaccatt

SEQ ID NO: 95907 - DNA, 25 bp, Saccharomyces pastorianus
gaagaagacgtatcctacacctcta

SEQ ID NO: 95908 - DNA, 25 bp, Saccharomyces pastorianus
tgacttatcccgtgttaacgcgttt

SEQ ID NO: 95909 - DNA, 25 bp, Saccharomyces pastorianus
aagcaaagtcttctgttaactggaa

SEQ ID NO: 95910 - DNA, 25 bp, Saccharomyces pastorianus
gcagcaggagctattactacaacag

SEQ ID NO: 95911 - DNA, 25 bp, Saccharomyces pastorianus
aagatcgaaagccaacctgcaattt

SEQ ID NO: 95912 - DNA, 25 bp, Saccharomyces pastorianus
agacgcgctcgacgttagacgaact

SEQ ID NO: 95913 - DNA, 25 bp, Saccharomyces pastorianus
attggagacatataccgctggagga

SEQ ID NO: 95914 - DNA, 25 bp, Saccharomyces pastorianus
tttatttggcggtgcagcgactgca

SEQ ID NO: 95915 - DNA, 25 bp, Saccharomyces pastorianus
atgcggatggtgttcaaccttgttt

SEQ ID NO: 95916 - DNA, 25 bp, Saccharomyces pastorianus
atcagccaccggtagtagagattac

SEQ ID NO: 95917 - DNA, 25 bp, Saccharomyces pastorianus
ggaggagaccaaagcagcgtatttc

SEQ ID NO: 95918 - DNA, 25 bp, Saccharomyces pastorianus
agatctttcagcacttatcagccac

SEQ ID NO: 95919 - DNA, 25 bp, Saccharomyces pastorianus
tataacgaagttatggcccactcta

SEQ ID NO: 95920 - DNA, 25 bp, Saccharomyces pastorianus
atggaccctgtggtggcagatccaa

SEQ ID NO: 95921 - DNA, 25 bp, Saccharomyces pastorianus
gcccactctacgacctgaagttagg

SEQ ID NO: 95922 - DNA, 25 bp, Saccharomyces pastorianus
gcgtatttcttatcttatggaccct

SEQ ID NO: 95923 - DNA, 25 bp, Saccharomyces pastorianus
aacggtattcggctagcactgaaaa

SEQ ID NO: 95924 - DNA, 25 bp, Saccharomyces pastorianus
atcacttctgcattattcgttctta

SEQ ID NO: 95925 - DNA, 25 bp, Saccharomyces pastorianus
ctattgctgttttctttctgtgtgg

SEQ ID NO: 95926 - DNA, 25 bp, Saccharomyces pastorianus
tgttgcctcctttaacccaggttat

SEQ ID NO: 95927 - DNA, 25 bp, Saccharomyces pastorianus
atgttcaccaactgtatcacttctg

SEQ ID NO: 95928 - DNA, 25 bp, Saccharomyces pastorianus
atggtcctttcttctgtcgttgcaa

SEQ ID NO: 95929 - DNA, 25 bp, Saccharomyces pastorianus
aagctgccaattgccttgtctggtt

SEQ ID NO: 95930 - DNA, 25 bp, Saccharomyces pastorianus
ggtgtgttcgtgttacttcgtctac

SEQ ID NO: 95931 - DNA, 25 bp, Saccharomyces pastorianus
caatgttttggctctacctattcta

SEQ ID NO: 95932 - DNA, 25 bp, Saccharomyces pastorianus
aaacttcttatctattctctccatt

SEQ ID NO: 95933 - DNA, 25 bp, Saccharomyces pastorianus
tatttcttactgttccggttggtgt

SEQ ID NO: 95934 - DNA, 25 bp, Saccharomyces pastorianus
gatcatcagtggtgttgcatccgtc

SEQ ID NO: 95935 - DNA, 25 bp, Saccharomyces pastorianus
gagaattcacgatcttatgcaacaa

SEQ ID NO: 95936 - DNA, 25 bp, Saccharomyces pastorianus
ataaccggcttgtggatgattcctt

SEQ ID NO: 95937 - DNA, 25 bp, Saccharomyces pastorianus
tatcacctgaagatgctcacgtttt

SEQ ID NO: 95938 - DNA, 25 bp, Saccharomyces pastorianus
ggcaaacaccagaaggcgctattgt

SEQ ID NO: 95939 - DNA, 25 bp, Saccharomyces pastorianus
tgacatattgtgactactctaggac

SEQ ID NO: 95940 - DNA, 25 bp, Saccharomyces pastorianus
actgaggttctttcaaacacacttg

SEQ ID NO: 95941 - DNA, 25 bp, Saccharomyces pastorianus
aaaccacgcaatacgttgcctgaga

SEQ ID NO: 95942 - DNA, 25 bp, Saccharomyces pastorianus
gaacgcactggaatataaccggctt

SEQ ID NO: 95943 - DNA, 25 bp, Saccharomyces pastorianus
gatacgctggtctgcaaaccacatg

SEQ ID NO: 95944 - DNA, 25 bp, Saccharomyces pastorianus
ggatgattccttaccactacaagat

SEQ ID NO: 95945 - DNA, 25 bp, Saccharomyces pastorianus
gtggcttttcaccaacgcttataaa

SEQ ID NO: 95946 - DNA, 25 bp, Saccharomyces pastorianus
tatatcacagatataccacctcctc

SEQ ID NO: 95947 - DNA, 25 bp, Saccharomyces pastorianus
tgaaccagaaacaatccccgcatgg

SEQ ID NO: 95948 - DNA, 25 bp, Saccharomyces pastorianus
tgttgccatcggctggcaggaacaa

SEQ ID NO: 95949 - DNA, 25 bp, Saccharomyces pastorianus
ctcaaactcttcctaacggtcagaa

SEQ ID NO: 95950 - DNA, 25 bp, Saccharomyces pastorianus
ccgcatggctctcaagggataatac

SEQ ID NO: 95951 - DNA, 25 bp, Saccharomyces pastorianus
gaaacgccacgacagaacaacaaag

SEQ ID NO: 95952 - DNA, 25 bp, Saccharomyces pastorianus
aaactcagtcactcttatgcaggct

SEQ ID NO: 95953 - DNA, 25 bp, Saccharomyces pastorianus
ggtcagaaacctaacttcggccatt

SEQ ID NO: 95954 - DNA, 25 bp, Saccharomyces pastorianus
gggaaatgctgctaagaacgccaat

SEQ ID NO: 95955 - DNA, 25 bp, Saccharomyces pastorianus
ccatgtatttcaacagctccaggct

SEQ ID NO: 95956 - DNA, 25 bp, Saccharomyces pastorianus
actttcgccactaatggtccaaggg

SEQ ID NO: 95957 - DNA, 25 bp, Saccharomyces pastorianus
acgtcgcaaagtcttatgccttgga

SEQ ID NO: 95958 - DNA, 25 bp, Saccharomyces pastorianus
ttacgggttccctatgtacaagtag

SEQ ID NO: 95959 - DNA, 25 bp, Saccharomyces pastorianus
gtacaagtagcatctcttgctgctc

SEQ ID NO: 95960 - DNA, 25 bp, Saccharomyces pastorianus
aaaaaagtcgctgtctgtgccggga

SEQ ID NO: 95961 - DNA, 25 bp, Saccharomyces pastorianus
ggaacagattaagcccacatacaaa

SEQ ID NO: 95962 - DNA, 25 bp, Saccharomyces pastorianus
tagatgccgctcgtggcggtgtaaa

SEQ ID NO: 95963 - DNA, 25 bp, Saccharomyces pastorianus
acggaatatccgtatactgccctca

SEQ ID NO: 95964 - DNA, 25 bp, Saccharomyces pastorianus
gaccgttattgtttgcaaccactca

SEQ ID NO: 95965 - DNA, 25 bp, Saccharomyces pastorianus
actgacgacttgattggctacggta

SEQ ID NO: 95966 - DNA, 25 bp, Saccharomyces pastorianus
gagcgtggattccttcaagacgtta

SEQ ID NO: 95967 - DNA, 25 bp, Saccharomyces pastorianus
agcggttctggcgtgtttaagcaac

SEQ ID NO: 95968 - DNA, 25 bp, Saccharomyces pastorianus
cattgtgacggatctttcgtacggt

SEQ ID NO: 95969 - DNA, 25 bp, Saccharomyces pastorianus
gacactataagatgcccgttactga

SEQ ID NO: 95970 - DNA, 25 bp, Saccharomyces pastorianus
gtggtcagcgacttctttcaaggta

SEQ ID NO: 95971 - DNA, 25 bp, Saccharomyces pastorianus
ttactgaacagggactccgcgagag

SEQ ID NO: 95972 - DNA, 25 bp, Saccharomyces pastorianus
ttcgtacggttgtggtcagtcgttt

SEQ ID NO: 95973 - DNA, 25 bp, Saccharomyces pastorianus
aaatcacatttcctaacaactcagt

SEQ ID NO: 95974 - DNA, 25 bp, Saccharomyces pastorianus
gaggatagaatcagccataccgcaa

SEQ ID NO: 95975 - DNA, 25 bp, Saccharomyces pastorianus
atgcctttagctgcaagtgctacac

SEQ ID NO: 95976 - DNA, 25 bp, Saccharomyces pastorianus
gccataccgcaagtttaccatatca

SEQ ID NO: 95977 - DNA, 25 bp, Saccharomyces pastorianus
gagttgcaggagattcatgccttta

SEQ ID NO: 95978 - DNA, 25 bp, Saccharomyces pastorianus
gaaacaaagcgccaacgacactata

SEQ ID NO: 95979 - DNA, 25 bp, Saccharomyces pastorianus
ggatgccctctttaaacaattacta

SEQ ID NO: 95980 - DNA, 25 bp, Saccharomyces pastorianus
gctatacctggttgcttggaaagac

SEQ ID NO: 95981 - DNA, 25 bp, Saccharomyces pastorianus
ttgaaacagttacgtccacaccggt

SEQ ID NO: 95982 - DNA, 25 bp, Saccharomyces pastorianus
gattcagtctcgacttttcgatagg

SEQ ID NO: 95983 - DNA, 25 bp, Saccharomyces pastorianus
ggtaaagccattctactgttcccac

SEQ ID NO: 95984 - DNA, 25 bp, Saccharomyces pastorianus
ctgttcccacaatctattacctaaa

SEQ ID NO: 95985 - DNA, 25 bp, Saccharomyces pastorianus
caaacaccgatacccgagcttgaag

SEQ ID NO: 95986 - DNA, 25 bp, Saccharomyces pastorianus
tcgcaatcatttccacaaccaaagt

SEQ ID NO: 95987 - DNA, 25 bp, Saccharomyces pastorianus
gtgttagattccagccagtacgatt

SEQ ID NO: 95988 - DNA, 25 bp, Saccharomyces pastorianus
gtgatgaattctctttccgctatac

SEQ ID NO: 95989 - DNA, 25 bp, Saccharomyces pastorianus
attactactcttcgcaatcatttcc

SEQ ID NO: 95990 - DNA, 25 bp, Saccharomyces pastorianus
atgcatggactcttttagccttctc

SEQ ID NO: 95991 - DNA, 25 bp, Saccharomyces pastorianus
atgaaatcttgcaaatccccttggc

SEQ ID NO: 95992 - DNA, 25 bp, Saccharomyces pastorianus
taacttttcccgtattcgttcattg

SEQ ID NO: 95993 - DNA, 25 bp, Saccharomyces pastorianus
aagctgggtgtatcctgttcgttaa

SEQ ID NO: 95994 - DNA, 25 bp, Saccharomyces pastorianus
ggatatcccaattccagggttcttt

SEQ ID NO: 95995 - DNA, 25 bp, Saccharomyces pastorianus
gactctatgactgtctgtatccgca

SEQ ID NO: 95996 - DNA, 25 bp, Saccharomyces pastorianus
agccttctctcaatggtgctttgga

SEQ ID NO: 95997 - DNA, 25 bp, Saccharomyces pastorianus
gttatcaccaaacacagcttcgttg

SEQ ID NO: 95998 - DNA, 25 bp, Saccharomyces pastorianus
tctgtaccttaattccgcttttcaa

SEQ ID NO: 95999 - DNA, 25 bp, Saccharomyces pastorianus
gatggcttctagctcgatggaactg

SEQ ID NO: 96000 - DNA, 25 bp, Saccharomyces pastorianus
tatccgcaacatagcatccttacat

SEQ ID NO: 96001 - DNA, 25 bp, Saccharomyces pastorianus
gggaaagttagcttctgcaccacta

SEQ ID NO: 96002 - DNA, 25 bp, Saccharomyces pastorianus
agggccttactcttatagctacgac

SEQ ID NO: 96003 - DNA, 25 bp, Saccharomyces pastorianus
agcgtctatgtctatatcggagtcg

SEQ ID NO: 96004 - DNA, 25 bp, Saccharomyces pastorianus
tgagcattctatcatccacacaatc

SEQ ID NO: 96005 - DNA, 25 bp, Saccharomyces pastorianus
gtagaaccttcttcagcgtctatgt

SEQ ID NO: 96006 - DNA, 25 bp, Saccharomyces pastorianus
gaggattgtcttgtttcaggcacgt

SEQ ID NO: 96007 - DNA, 25 bp, Saccharomyces pastorianus
tcaggcacgttcatgttagtgtcaa

SEQ ID NO: 96008 - DNA, 25 bp, Saccharomyces pastorianus
tgcaccactagcttcattgaccaat

SEQ ID NO: 96009 - DNA, 25 bp, Saccharomyces pastorianus
tccacaattttacgtataccctccg

SEQ ID NO: 96010 - DNA, 25 bp, Saccharomyces pastorianus
aagctatttcttttgctccgcgtag

SEQ ID NO: 96011 - DNA, 25 bp, Saccharomyces pastorianus
gtctaattacttttctcctcagcaa

SEQ ID NO: 96012 - DNA, 25 bp, Saccharomyces pastorianus
caacttgaagcctacttccacaaac

SEQ ID NO: 96013 - DNA, 25 bp, Saccharomyces pastorianus
aaacaacactcacttttacctgccg

SEQ ID NO: 96014 - DNA, 25 bp, Saccharomyces pastorianus
actcagtttgattacgacttctaca

SEQ ID NO: 96015 - DNA, 25 bp, Saccharomyces pastorianus
atgttttcatcaccatcttatcaga

SEQ ID NO: 96016 - DNA, 25 bp, Saccharomyces pastorianus
gctgatgccgcataacatgttttca

SEQ ID NO: 96017 - DNA, 25 bp, Saccharomyces pastorianus
ttacggtcatcatcttggctggaag

SEQ ID NO: 96018 - DNA, 25 bp, Saccharomyces pastorianus
gcttttctttattttgagttcgtca

SEQ ID NO: 96019 - DNA, 25 bp, Saccharomyces pastorianus
aaatcaactcaaacctgctgtagcg

SEQ ID NO: 96020 - DNA, 25 bp, Saccharomyces pastorianus
cggttcctacgttattatctccaat

SEQ ID NO: 96021 - DNA, 25 bp, Saccharomyces pastorianus
gtccataatcagtcttacggtcatc

SEQ ID NO: 96022 - DNA, 25 bp, Saccharomyces pastorianus
ttccacaaacaacctattatctcca

SEQ ID NO: 96023 - DNA, 25 bp, Saccharomyces pastorianus
gccacttctgtggatatctctgaac

SEQ ID NO: 96024 - DNA, 25 bp, Saccharomyces pastorianus
aatttgcacattctagctgggtcat

SEQ ID NO: 96025 - DNA, 25 bp, Saccharomyces pastorianus
tagctcgcaggcaagtctgggtgaa

SEQ ID NO: 96026 - DNA, 25 bp, Saccharomyces pastorianus
agaactatctacattacgcccgttg

SEQ ID NO: 96027 - DNA, 25 bp, Saccharomyces pastorianus
acgaggactaattgccacaggtttt

SEQ ID NO: 96028 - DNA, 25 bp, Saccharomyces pastorianus
aattcatttggttgcatcactctat

SEQ ID NO: 96029 - DNA, 25 bp, Saccharomyces pastorianus
gattctttagctgaacctggtgtct

SEQ ID NO: 96030 - DNA, 25 bp, Saccharomyces pastorianus
aagaataggctccttatccgtacca

SEQ ID NO: 96031 - DNA, 25 bp, Saccharomyces pastorianus
aaggatccttattagccattgctca

SEQ ID NO: 96032 - DNA, 25 bp, Saccharomyces pastorianus
gctgggtcatgagtctatcgtttaa

SEQ ID NO: 96033 - DNA, 25 bp, Saccharomyces pastorianus
gatcggtgaaattttctcctcaagg

SEQ ID NO: 96034 - DNA, 25 bp, Saccharomyces pastorianus
aagcacggaagtgactcgtcgcgcc

SEQ ID NO: 96035 - DNA, 25 bp, Saccharomyces pastorianus
cagtgacaactcttcaaccacggaa

SEQ ID NO: 96036 - DNA, 25 bp, Saccharomyces pastorianus
atagcgcaagacttcctgcagttgt

SEQ ID NO: 96037 - DNA, 25 bp, Saccharomyces pastorianus
gaatgagctacttacagcacttgaa

SEQ ID NO: 96038 - DNA, 25 bp, Saccharomyces pastorianus
gctctattgaggtccttgctcaagg

SEQ ID NO: 96039 - DNA, 25 bp, Saccharomyces pastorianus
gatgacgtcgataacactggtagga

SEQ ID NO: 96040 - DNA, 25 bp, Saccharomyces pastorianus
taagggcacgtacgaagctccacaa

SEQ ID NO: 96041 - DNA, 25 bp, Saccharomyces pastorianus
acatagctcaggaccgtggacgact

SEQ ID NO: 96042 - DNA, 25 bp, Saccharomyces pastorianus
acaagagttggttgcactgcaccga

SEQ ID NO: 96043 - DNA, 25 bp, Saccharomyces pastorianus
gcaccgaattatccaggcacaacgt

SEQ ID NO: 96044 - DNA, 25 bp, Saccharomyces pastorianus
gcacaacgtggattggccttagaga

SEQ ID NO: 96045 - DNA, 25 bp, Saccharomyces pastorianus
agaactgatcgtagccatcttccaa

SEQ ID NO: 96046 - DNA, 25 bp, Saccharomyces pastorianus
agagcagtaccaaccgatgaagcga

SEQ ID NO: 96047 - DNA, 25 bp, Saccharomyces pastorianus
ggtcaagaacgttacagggccatca

SEQ ID NO: 96048 - DNA, 25 bp, Saccharomyces pastorianus
aaagcacagatttgggacacggcag

SEQ ID NO: 96049 - DNA, 25 bp, Saccharomyces pastorianus
gcgactccggtgtgggtaaatctaa

SEQ ID NO: 96050 - DNA, 25 bp, Saccharomyces pastorianus
aacatgggctctaatggcgctccaa

SEQ ID NO: 96051 - DNA, 25 bp, Saccharomyces pastorianus
agatagttcttatcggcgactccgg

SEQ ID NO: 96052 - DNA, 25 bp, Saccharomyces pastorianus
aaagggtcctaccatcagcttaaca

SEQ ID NO: 96053 - DNA, 25 bp, Saccharomyces pastorianus
aaccactggcttaccgaactgagag

SEQ ID NO: 96054 - DNA, 25 bp, Saccharomyces pastorianus
taagcgggtcgggtaccaacaacat

SEQ ID NO: 96055 - DNA, 25 bp, Saccharomyces pastorianus
gtctgcgtactaccgtggtgctgta

SEQ ID NO: 96056 - DNA, 25 bp, Saccharomyces pastorianus
atatcccacagcagtatcagcatca

SEQ ID NO: 96057 - DNA, 25 bp, Saccharomyces pastorianus
cttgcatctgcattatctaccttac

SEQ ID NO: 96058 - DNA, 25 bp, Saccharomyces pastorianus
ggccaaagaacttgagtccgtctat

SEQ ID NO: 96059 - DNA, 25 bp, Saccharomyces pastorianus
tctgtgccaaactctccgaatgatg

SEQ ID NO: 96060 - DNA, 25 bp, Saccharomyces pastorianus
aagtgattccagtcatacctctgca

SEQ ID NO: 96061 - DNA, 25 bp, Saccharomyces pastorianus
agctctattggctccatacagtcaa

SEQ ID NO: 96062 - DNA, 25 bp, Saccharomyces pastorianus
tgaatgttcgcgtaaacactccacg

SEQ ID NO: 96063 - DNA, 25 bp, Saccharomyces pastorianus
acttttgcacattctcttgcatctg

SEQ ID NO: 96064 - DNA, 25 bp, Saccharomyces pastorianus
tatctctttgcctttcagcaatgct

SEQ ID NO: 96065 - DNA, 25 bp, Saccharomyces pastorianus
gccgcctgtacgtaacctactgaaa

SEQ ID NO: 96066 - DNA, 25 bp, Saccharomyces pastorianus
tatagaatcaccatcctcaccaagt

SEQ ID NO: 96067 - DNA, 25 bp, Saccharomyces pastorianus
gtgtagcctccatcgttcgatataa

SEQ ID NO: 96068 - DNA, 25 bp, Saccharomyces pastorianus
aggaagcatattccatgcgacctcc

SEQ ID NO: 96069 - DNA, 25 bp, Saccharomyces pastorianus
aatatacaacagacattcccgccgt

SEQ ID NO: 96070 - DNA, 25 bp, Saccharomyces pastorianus
aggctgcttccaggcacacatagat

SEQ ID NO: 96071 - DNA, 25 bp, Saccharomyces pastorianus
acaatacgctttgtgtagcctccat

SEQ ID NO: 96072 - DNA, 25 bp, Saccharomyces pastorianus
gatcgatcctcaattgctctacaaa

SEQ ID NO: 96073 - DNA, 25 bp, Saccharomyces pastorianus
tactgacccgtctgtcatggaacga

SEQ ID NO: 96074 - DNA, 25 bp, Saccharomyces pastorianus
gccacgcaagaccagttcaacgaga

SEQ ID NO: 96075 - DNA, 25 bp, Saccharomyces pastorianus
aacgagaacaactcaggcgctctgc

SEQ ID NO: 96076 - DNA, 25 bp, Saccharomyces pastorianus
tcatgaagatctttcacccagacct

SEQ ID NO: 96077 - DNA, 25 bp, Saccharomyces pastorianus
agagtaagtgatttcctgcccacag

SEQ ID NO: 96078 - DNA, 25 bp, Saccharomyces pastorianus
gagatttgggcttccaaggtgtccc

SEQ ID NO: 96079 - DNA, 25 bp, Saccharomyces pastorianus
ggtgtcccaaatagatcggcagttt

SEQ ID NO: 96080 - DNA, 25 bp, Saccharomyces pastorianus
tggatattccttacactgtctcaac

SEQ ID NO: 96081 - DNA, 25 bp, Saccharomyces pastorianus
ggcagttttctgtatgccaactaca

SEQ ID NO: 96082 - DNA, 25 bp, Saccharomyces pastorianus
aaacccgtcactcatatcaatacag

SEQ ID NO: 96083 - DNA, 25 bp, Saccharomyces pastorianus
atgaaagcgcattctctgaagatga

SEQ ID NO: 96084 - DNA, 25 bp, Saccharomyces pastorianus
atacagttccgatcgaatctttaga

SEQ ID NO: 96085 - DNA, 25 bp, Saccharomyces pastorianus
gctggaattttctggctactggttc

SEQ ID NO: 96086 - DNA, 25 bp, Saccharomyces pastorianus
gatgatccatatcagtttttcttag

SEQ ID NO: 96087 - DNA, 25 bp, Saccharomyces pastorianus
tcaattgattgaaccaccatttttg

SEQ ID NO: 96088 - DNA, 25 bp, Saccharomyces pastorianus
agatttcaataaacccgtcactcat

SEQ ID NO: 96089 - DNA, 25 bp, Saccharomyces pastorianus
tctcgaaatccgacaacttgccttt

SEQ ID NO: 96090 - DNA, 25 bp, Saccharomyces pastorianus
atggccaacccttgatgctgatgaa

SEQ ID NO: 96091 - DNA, 25 bp, Saccharomyces pastorianus
gttgctttgctatatgctgcttaca

SEQ ID NO: 96092 - DNA, 25 bp, Saccharomyces pastorianus
gaggctctactcacatatttcgttg

SEQ ID NO: 96093 - DNA, 25 bp, Saccharomyces pastorianus
atagcagccctgttataccgtagaa

SEQ ID NO: 96094 - DNA, 25 bp, Saccharomyces pastorianus
ggaggactacattaagccatttgaa

SEQ ID NO: 96095 - DNA, 25 bp, Saccharomyces pastorianus
attggcatctcgtttggaatctcat

SEQ ID NO: 96096 - DNA, 25 bp, Saccharomyces pastorianus
aagctttgcaagacgctgttgattc

SEQ ID NO: 96097 - DNA, 25 bp, Saccharomyces pastorianus
ggcagcaatctctcaggatccaaag

SEQ ID NO: 96098 - DNA, 25 bp, Saccharomyces pastorianus
aagcctaccacgatctgatgattga

SEQ ID NO: 96099 - DNA, 25 bp, Saccharomyces pastorianus
aagcctttcttgatcaatgtcttac

SEQ ID NO: 96100 - DNA, 25 bp, Saccharomyces pastorianus
gacgcgatgttaaattctcctatag

SEQ ID NO: 96101 - DNA, 25 bp, Saccharomyces pastorianus
agatctctaaagttgtgcagccaca

SEQ ID NO: 96102 - DNA, 25 bp, Saccharomyces pastorianus
gtatccaaatttcatgccttgcgct

SEQ ID NO: 96103 - DNA, 25 bp, Saccharomyces pastorianus
gccacaactattggctcttttgcca

SEQ ID NO: 96104 - DNA, 25 bp, Saccharomyces pastorianus
tcaagatcttcactcctgatcagat

SEQ ID NO: 96105 - DNA, 25 bp, Saccharomyces pastorianus
caagttaaactctcgtgattcacat

SEQ ID NO: 96106 - DNA, 25 bp, Saccharomyces pastorianus
gactcctttgaattacctgacgcga

SEQ ID NO: 96107 - DNA, 25 bp, Saccharomyces pastorianus
gcagcatgctcggtagaggtttcga

SEQ ID NO: 96108 - DNA, 25 bp, Saccharomyces pastorianus
ccttgcgctgcatgttgaaaaccta

SEQ ID NO: 96109 - DNA, 25 bp, Saccharomyces pastorianus
aagccttcttatcatgcgctgttga

SEQ ID NO: 96110 - DNA, 25 bp, Saccharomyces pastorianus
aagtttgccgcaataatccagtgga

SEQ ID NO: 96111 - DNA, 25 bp, Saccharomyces pastorianus
acttataacagcatgccctctgttt

SEQ ID NO: 96112 - DNA, 25 bp, Saccharomyces pastorianus
ggtatcttgccaccatagttatgta

SEQ ID NO: 96113 - DNA, 25 bp, Saccharomyces pastorianus
agcatgccctctgtttgtattagga

SEQ ID NO: 96114 - DNA, 25 bp, Saccharomyces pastorianus
attagttgcatggtatcttgccacc

SEQ ID NO: 96115 - DNA, 25 bp, Saccharomyces pastorianus
tatccttcgttttttgcaatcttcc

SEQ ID NO: 96116 - DNA, 25 bp, Saccharomyces pastorianus
aatggaactgatatccttcgttttt

SEQ ID NO: 96117 - DNA, 25 bp, Saccharomyces pastorianus
gccaccatagttatgtatattgcta

SEQ ID NO: 96118 - DNA, 25 bp, Saccharomyces pastorianus
gccctctgtttgtattaggactatt

SEQ ID NO: 96119 - DNA, 25 bp, Saccharomyces pastorianus
aaatgtggaaatatgcctttgctgt

SEQ ID NO: 96120 - DNA, 25 bp, Saccharomyces pastorianus
gaaatatgcctttgctgtttcgcta

SEQ ID NO: 96121 - DNA, 25 bp, Saccharomyces pastorianus
gtcattgcggcaaagttattagttg

SEQ ID NO: 96122 - DNA, 25 bp, Saccharomyces pastorianus
aagttttggtcaacgctacgctatc

SEQ ID NO: 96123 - DNA, 25 bp, Saccharomyces pastorianus
cagacccttaccagctagaacagag

SEQ ID NO: 96124 - DNA, 25 bp, Saccharomyces pastorianus
gccccagcaggttttacacaagttt

SEQ ID NO: 96125 - DNA, 25 bp, Saccharomyces pastorianus
gatgccctttacaagtatctaccac

SEQ ID NO: 96126 - DNA, 25 bp, Saccharomyces pastorianus
ttggcctgcgtcatgaatacacttt

SEQ ID NO: 96127 - DNA, 25 bp, Saccharomyces pastorianus
tatgcagctgtctctcctgagaaac

SEQ ID NO: 96128 - DNA, 25 bp, Saccharomyces pastorianus
tgaaacgtgactgtgccatcgatgc

SEQ ID NO: 96129 - DNA, 25 bp, Saccharomyces pastorianus
gaaatgacgattcaagccccagcag

SEQ ID NO: 96130 - DNA, 25 bp, Saccharomyces pastorianus
catctgtccaccctgagtttaaaac

SEQ ID NO: 96131 - DNA, 25 bp, Saccharomyces pastorianus
gatgctttcgtgatcaatcctccaa

SEQ ID NO: 96132 - DNA, 25 bp, Saccharomyces pastorianus
tggttcccggttcttggttcaagag

SEQ ID NO: 96133 - DNA, 25 bp, Saccharomyces pastorianus
aaaatgatttgggttcgttagcaga

SEQ ID NO: 96134 - DNA, 25 bp, Saccharomyces pastorianus
ttacgagtgagccaccagcagatat

SEQ ID NO: 96135 - DNA, 25 bp, Saccharomyces pastorianus
gactgggtcaggtgtaattacgagt

SEQ ID NO: 96136 - DNA, 25 bp, Saccharomyces pastorianus
tagagagtcaaagtcacgccgcttc

SEQ ID NO: 96137 - DNA, 25 bp, Saccharomyces pastorianus
atgttattcatccaaactgtgaggt

SEQ ID NO: 96138 - DNA, 25 bp, Saccharomyces pastorianus
ttcattgcagaagcttacgatcttt

SEQ ID NO: 96139 - DNA, 25 bp, Saccharomyces pastorianus
gtcacgccgcttctggaaacaatga

SEQ ID NO: 96140 - DNA, 25 bp, Saccharomyces pastorianus
gaaattactccatcattcattgcag

SEQ ID NO: 96141 - DNA, 25 bp, Saccharomyces pastorianus
gaagctacagctcgtccaggtacaa

SEQ ID NO: 96142 - DNA, 25 bp, Saccharomyces pastorianus
aagctattgcgagggctaattgtgt

SEQ ID NO: 96143 - DNA, 25 bp, Saccharomyces pastorianus
ggagattcatggtaccagacacaat

SEQ ID NO: 96144 - DNA, 25 bp, Saccharomyces pastorianus
taagtttgtcattgcttgcttcctg

SEQ ID NO: 96145 - DNA, 25 bp, Saccharomyces pastorianus
ttatggccgtagatgcttcttcgaa

SEQ ID NO: 96146 - DNA, 25 bp, Saccharomyces pastorianus
ataatgtccttcttccagcttatgg

SEQ ID NO: 96147 - DNA, 25 bp, Saccharomyces pastorianus
gaaatcacattgtctgctccataca

SEQ ID NO: 96148 - DNA, 25 bp, Saccharomyces pastorianus
tagaaaccctcaatccagtagccag

SEQ ID NO: 96149 - DNA, 25 bp, Saccharomyces pastorianus
atggtggtccatcttccaattgggc

SEQ ID NO: 96150 - DNA, 25 bp, Saccharomyces pastorianus
gtaagggtgacgagctctccatttc

SEQ ID NO: 96151 - DNA, 25 bp, Saccharomyces pastorianus
tgactttatcatctacgggccggaa

SEQ ID NO: 96152 - DNA, 25 bp, Saccharomyces pastorianus
atggcctcatttgctactaagtttg

SEQ ID NO: 96153 - DNA, 25 bp, Saccharomyces pastorianus
tccatttcgttccagttcggtgata

SEQ ID NO: 96154 - DNA, 25 bp, Saccharomyces pastorianus
tgggcgtcgttattgcaaactctct

SEQ ID NO: 96155 - DNA, 25 bp, Saccharomyces pastorianus
agtgtttgcagcacagtctcgtcga

SEQ ID NO: 96156 - DNA, 25 bp, Saccharomyces pastorianus
gcccacaggtcgcaattggctgaaa

SEQ ID NO: 96157 - DNA, 25 bp, Saccharomyces pastorianus
atagttccgcctatgttgtcagcaa

SEQ ID NO: 96158 - DNA, 25 bp, Saccharomyces pastorianus
atgtacgaaatcagcgacaccctct

SEQ ID NO: 96159 - DNA, 25 bp, Saccharomyces pastorianus
gcgggtataccacttgtttcagtct

SEQ ID NO: 96160 - DNA, 25 bp, Saccharomyces pastorianus
atctggttctatgaagtcgggctca

SEQ ID NO: 96161 - DNA, 25 bp, Saccharomyces pastorianus
agtcgggctcaatcgtagtgtcttc

SEQ ID NO: 96162 - DNA, 25 bp, Saccharomyces pastorianus
tctgctgcctgaattctgcatagtt

SEQ ID NO: 96163 - DNA, 25 bp, Saccharomyces pastorianus
accacatctcgctttagtgtttgca

SEQ ID NO: 96164 - DNA, 25 bp, Saccharomyces pastorianus
gcagccaaaggtgcatctggttcta

SEQ ID NO: 96165 - DNA, 25 bp, Saccharomyces pastorianus
tgaaatgtcgttatcagccgcccct

SEQ ID NO: 96166 - DNA, 25 bp, Saccharomyces pastorianus
aagccattcagggacaatcgttcat

SEQ ID NO: 96167 - DNA, 25 bp, Saccharomyces pastorianus
aatatggcgtctgcaaatgccctac

SEQ ID NO: 96168 - DNA, 25 bp, Saccharomyces pastorianus
gattctgctgagatcttagacgcaa

SEQ ID NO: 96169 - DNA, 25 bp, Saccharomyces pastorianus
gaaacgcaattacttaccgcatgaa

SEQ ID NO: 96170 - DNA, 25 bp, Saccharomyces pastorianus
agtcccattcgagcatacgggtcta

SEQ ID NO: 96171 - DNA, 25 bp, Saccharomyces pastorianus
gtttgggaatgctttcgctcaataa

SEQ ID NO: 96172 - DNA, 25 bp, Saccharomyces pastorianus
cagactaatggttcgttgcatggat

SEQ ID NO: 96173 - DNA, 25 bp, Saccharomyces pastorianus
atttaaatcatctgctttccctcaa

SEQ ID NO: 96174 - DNA, 25 bp, Saccharomyces pastorianus
ctacctcccgttgattatgtcataa

SEQ ID NO: 96175 - DNA, 25 bp, Saccharomyces pastorianus
gtggacgattctgtagaccctttat

SEQ ID NO: 96176 - DNA, 25 bp, Saccharomyces pastorianus
gtagttcggcttctggaaagccatt

SEQ ID NO: 96177 - DNA, 25 bp, Saccharomyces pastorianus
atctgtattttcttgcttgcgtgat

SEQ ID NO: 96178 - DNA, 25 bp, Saccharomyces pastorianus
ttgagcaaagctgtcttacaaccag

SEQ ID NO: 96179 - DNA, 25 bp, Saccharomyces pastorianus
gttatcccaattaagctcgcagcag

SEQ ID NO: 96180 - DNA, 25 bp, Saccharomyces pastorianus
gttcccctgatgtttacttcggaga

SEQ ID NO: 96181 - DNA, 25 bp, Saccharomyces pastorianus
ttgcgtgatcctgttatcccaatta

SEQ ID NO: 96182 - DNA, 25 bp, Saccharomyces pastorianus
gatgacatgcatactttcaacgagt

SEQ ID NO: 96183 - DNA, 25 bp, Saccharomyces pastorianus
aaggatgctgcagaaccgttcaaaa

SEQ ID NO: 96184 - DNA, 25 bp, Saccharomyces pastorianus
ggtaccacaattcaattacggtctg

SEQ ID NO: 96185 - DNA, 25 bp, Saccharomyces pastorianus
taaaatttcagatcgcggtagcagc

SEQ ID NO: 96186 - DNA, 25 bp, Saccharomyces pastorianus
acaaccagccagtaattctacggat

SEQ ID NO: 96187 - DNA, 25 bp, Saccharomyces pastorianus
ggtagcagcatcgaaactgtcacag

SEQ ID NO: 96188 - DNA, 25 bp, Saccharomyces pastorianus
gatcgcttaggatgcttcaatttaa

SEQ ID NO: 96189 - DNA, 25 bp, Saccharomyces pastorianus
ggattccttaggtcatgatcgctta

SEQ ID NO: 96190 - DNA, 25 bp, Saccharomyces pastorianus
aatgtacccctagaagatggcatag

SEQ ID NO: 96191 - DNA, 25 bp, Saccharomyces pastorianus
attcgggccggattattcactttat

SEQ ID NO: 96192 - DNA, 25 bp, Saccharomyces pastorianus
tgctgaatgcataccgacacaagat

SEQ ID NO: 96193 - DNA, 25 bp, Saccharomyces pastorianus
gtagatcctctaataatgactttca

SEQ ID NO: 96194 - DNA, 25 bp, Saccharomyces pastorianus
atgtatcacggctttggacctacga

SEQ ID NO: 96195 - DNA, 25 bp, Saccharomyces pastorianus
ccaacaatgcggtgcggattcctta

SEQ ID NO: 96196 - DNA, 25 bp, Saccharomyces pastorianus
ttgctaccagaagacatccccgaag

SEQ ID NO: 96197 - DNA, 25 bp, Saccharomyces pastorianus
caagatataagtgccctgacagaag

SEQ ID NO: 96198 - DNA, 25 bp, Saccharomyces pastorianus
gaagatatcccattccgggactcat

SEQ ID NO: 96199 - DNA, 25 bp, Saccharomyces pastorianus
ctggaaccagccacactggtactaa

SEQ ID NO: 96200 - DNA, 25 bp, Saccharomyces pastorianus
aagggatcacaatacgcggcctggc

SEQ ID NO: 96201 - DNA, 25 bp, Saccharomyces pastorianus
tagcagaacggttggcaggcaccca

SEQ ID NO: 96202 - DNA, 25 bp, Saccharomyces pastorianus
gcaaccttcaaaattacagcagcag

SEQ ID NO: 96203 - DNA, 25 bp, Saccharomyces pastorianus
acatactccctttgtatccaaacag

SEQ ID NO: 96204 - DNA, 25 bp, Saccharomyces pastorianus
aaacatattgacgtcgatttgatcg

SEQ ID NO: 96205 - DNA, 25 bp, Saccharomyces pastorianus
gctgaggccaagcagaatcctatga

SEQ ID NO: 96206 - DNA, 25 bp, Saccharomyces pastorianus
ggcctggctggtttaccatcggaaa

SEQ ID NO: 96207 - DNA, 25 bp, Saccharomyces pastorianus
acgggtcattggttaaatcattcta

SEQ ID NO: 96208 - DNA, 25 bp, Saccharomyces pastorianus
ggcaggcacccatgccagaaaacta

SEQ ID NO: 96209 - DNA, 25 bp, Saccharomyces pastorianus
aattgttacaggtcgtacgggtcat

SEQ ID NO: 96210 - DNA, 25 bp, Saccharomyces pastorianus
gtcgccctaccagcaattgctttaa

SEQ ID NO: 96211 - DNA, 25 bp, Saccharomyces pastorianus
tatcaggtctaagccttttttctgg

SEQ ID NO: 96212 - DNA, 25 bp, Saccharomyces pastorianus
tgctttaacagctgtgaacacatac

SEQ ID NO: 96213 - DNA, 25 bp, Saccharomyces pastorianus
taaaatctcagtttgggtcgcccta

SEQ ID NO: 96214 - DNA, 25 bp, Saccharomyces pastorianus
actccgaatggccaagggattacga

SEQ ID NO: 96215 - DNA, 25 bp, Saccharomyces pastorianus
atttgaaacatgtgccagactccga

SEQ ID NO: 96216 - DNA, 25 bp, Saccharomyces pastorianus
ccgcatttggcccaccagataaagt

SEQ ID NO: 96217 - DNA, 25 bp, Saccharomyces pastorianus
aatgctttgaaacccgcatttggcc

SEQ ID NO: 96218 - DNA, 25 bp, Saccharomyces pastorianus
aaagcatgcgaaggacacatctaat

SEQ ID NO: 96219 - DNA, 25 bp, Saccharomyces pastorianus
gcatgctgagcatcgtgaacatttg

SEQ ID NO: 96220 - DNA, 25 bp, Saccharomyces pastorianus
taagacattattctggaatcctgtt

SEQ ID NO: 96221 - DNA, 25 bp, Saccharomyces pastorianus
gattctagtagtaatggcaacagcc

SEQ ID NO: 96222 - DNA, 25 bp, Saccharomyces pastorianus
atcctaatgtagtaacttctggtga

SEQ ID NO: 96223 - DNA, 25 bp, Saccharomyces pastorianus
caaaaggtacggttcgctagcgcaa

SEQ ID NO: 96224 - DNA, 25 bp, Saccharomyces pastorianus
ggttcgctagcgcaaaggtctgcaa

SEQ ID NO: 96225 - DNA, 25 bp, Saccharomyces pastorianus
ggcaacagccacaagcgtaggagta

SEQ ID NO: 96226 - DNA, 25 bp, Saccharomyces pastorianus
gaaatcgtgttacaagctgacaaaa

SEQ ID NO: 96227 - DNA, 25 bp, Saccharomyces pastorianus
atgaacacaacgcacccaatagcaa

SEQ ID NO: 96228 - DNA, 25 bp, Saccharomyces pastorianus
tttacatttctcatggcatccaaga

SEQ ID NO: 96229 - DNA, 25 bp, Saccharomyces pastorianus
catatccggaggattcgggaaccga

SEQ ID NO: 96230 - DNA, 25 bp, Saccharomyces pastorianus
gtaacggacgcaacacaggcatggt

SEQ ID NO: 96231 - DNA, 25 bp, Saccharomyces pastorianus
gtgatacctatgaaaacgatgcgat

SEQ ID NO: 96232 - DNA, 25 bp, Saccharomyces pastorianus
gacagaaagaacagagctccacctc

SEQ ID NO: 96233 - DNA, 25 bp, Saccharomyces pastorianus
gaattgtcagagtcagatccagaga

SEQ ID NO: 96234 - DNA, 25 bp, Saccharomyces pastorianus
gaaacattgttgaagccgctgccgt

SEQ ID NO: 96235 - DNA, 25 bp, Saccharomyces pastorianus
cgctgccgtcagagatttgtccgaa

SEQ ID NO: 96236 - DNA, 25 bp, Saccharomyces pastorianus
tttgtccgaagcttctgtctaccct

SEQ ID NO: 96237 - DNA, 25 bp, Saccharomyces pastorianus
gctttgccaaagacttacaacaagt

SEQ ID NO: 96238 - DNA, 25 bp, Saccharomyces pastorianus
gctccacctcaaagaccaagattca

SEQ ID NO: 96239 - DNA, 25 bp, Saccharomyces pastorianus
accagtcagatgtgtcaactgttcc

SEQ ID NO: 96240 - DNA, 25 bp, Saccharomyces pastorianus
tacactactgtgtttcttgtgctat

SEQ ID NO: 96241 - DNA, 25 bp, Saccharomyces pastorianus
tctaccctgaatacgctttgccaaa

SEQ ID NO: 96242 - DNA, 25 bp, Saccharomyces pastorianus
acgtcaaaccagtcagatgtgtcaa

SEQ ID NO: 96243 - DNA, 25 bp, Saccharomyces pastorianus
gttaacgacacaaaagtgtgaaagt

SEQ ID NO: 96244 - DNA, 25 bp, Saccharomyces pastorianus
agatattattaaaacatggcaaatg

SEQ ID NO: 96245 - DNA, 25 bp, Saccharomyces pastorianus
gacaagatattattaaaacatggca

SEQ ID NO: 96246 - DNA, 25 bp, Saccharomyces pastorianus
agaacgatgagatctttgaattggg

SEQ ID NO: 96247 - DNA, 25 bp, Saccharomyces pastorianus
cgatgagatctttgaattgggagaa

SEQ ID NO: 96248 - DNA, 25 bp, Saccharomyces pastorianus
tagagaagggaagaacgatgagatc

SEQ ID NO: 96249 - DNA, 25 bp, Saccharomyces pastorianus
gggaagaacgatgagatctttgaat

SEQ ID NO: 96250 - DNA, 25 bp, Saccharomyces pastorianus
aacgatgagatctttgaattgggag

SEQ ID NO: 96251 - DNA, 25 bp, Saccharomyces pastorianus
gatgagatctttgaattgggagaaa

SEQ ID NO: 96252 - DNA, 25 bp, Saccharomyces pastorianus
tgggagaaagtaatagtgacaagat

SEQ ID NO: 96253 - DNA, 25 bp, Saccharomyces pastorianus
gagatctttgaattgggagaaagta

SEQ ID NO: 96254 - DNA, 25 bp, Saccharomyces pastorianus
gcatactatttctatctctgtcaga

SEQ ID NO: 96255 - DNA, 25 bp, Saccharomyces pastorianus
gaagagccaaaaaatacataaccaa

SEQ ID NO: 96256 - DNA, 25 bp, Saccharomyces pastorianus
agtactattcatgtcataatggcat

SEQ ID NO: 96257 - DNA, 25 bp, Saccharomyces pastorianus
taatggcatactatttctatctctg

SEQ ID NO: 96258 - DNA, 25 bp, Saccharomyces pastorianus
actattcatgtcataatggcatact

SEQ ID NO: 96259 - DNA, 25 bp, Saccharomyces pastorianus
atactatttctatctctgtcagaga

SEQ ID NO: 96260 - DNA, 25 bp, Saccharomyces pastorianus
ggcatactatttctatctctgtcag

SEQ ID NO: 96261 - DNA, 25 bp, Saccharomyces pastorianus
gaaaaggtcgagatatatttttatt

SEQ ID NO: 96262 - DNA, 25 bp, Saccharomyces pastorianus
atcaatattagtactattcatgtca

SEQ ID NO: 96263 - DNA, 25 bp, Saccharomyces pastorianus
atggcatactatttctatctctgtc

SEQ ID NO: 96264 - DNA, 25 bp, Saccharomyces pastorianus
tctctgtcagagatggctagctaga

SEQ ID NO: 96265 - DNA, 25 bp, Saccharomyces pastorianus
tatgtcggttgtacgggttctcccg

SEQ ID NO: 96266 - DNA, 25 bp, Saccharomyces pastorianus
ataagatttttcaagccagccacaa

SEQ ID NO: 96267 - DNA, 25 bp, Saccharomyces pastorianus
gagggtaccgttccaacagacctag

SEQ ID NO: 96268 - DNA, 25 bp, Saccharomyces pastorianus
tcccgctggttcacatactattatg

SEQ ID NO: 96269 - DNA, 25 bp, Saccharomyces pastorianus
acaccaaaccattagattcgtccag

SEQ ID NO: 96270 - DNA, 25 bp, Saccharomyces pastorianus
aactttgattggtcctggtgctaaa

SEQ ID NO: 96271 - DNA, 25 bp, Saccharomyces pastorianus
gagggtatcgatgttttcgacacca

SEQ ID NO: 96272 - DNA, 25 bp, Saccharomyces pastorianus
attcgtccaggaagggtaccatgaa

SEQ ID NO: 96273 - DNA, 25 bp, Saccharomyces pastorianus
gtagctctagatatctgcttcagca

SEQ ID NO: 96274 - DNA, 25 bp, Saccharomyces pastorianus
atgctttcactacgtcaatctataa

SEQ ID NO: 96275 - DNA, 25 bp, Saccharomyces pastorianus
ctgcttcagcaaaaacccgtggtga

SEQ ID NO: 96276 - DNA, 25 bp, Saccharomyces pastorianus
actataccagtttcatgcaatcgtg

SEQ ID NO: 96277 - DNA, 25 bp, Saccharomyces pastorianus
ttctgacgccttggtaacgggacga

SEQ ID NO: 96278 - DNA, 25 bp, Saccharomyces pastorianus
cgggaactccacaaacagaacattt

SEQ ID NO: 96279 - DNA, 25 bp, Saccharomyces pastorianus
agcggatttgcttttggccatgaac

SEQ ID NO: 96280 - DNA, 25 bp, Saccharomyces pastorianus
gcctacaagttgcaatacgggctag

SEQ ID NO: 96281 - DNA, 25 bp, Saccharomyces pastorianus
aatcgtggtcacattgccgggaact

SEQ ID NO: 96282 - DNA, 25 bp, Saccharomyces pastorianus
aattttggacttgcgggctgtttct

SEQ ID NO: 96283 - DNA, 25 bp, Saccharomyces pastorianus
ggaacactgcaatccaggcctaatt

SEQ ID NO: 96284 - DNA, 25 bp, Saccharomyces pastorianus
ccatctcggtttagacgtctttaat

SEQ ID NO: 96285 - DNA, 25 bp, Saccharomyces pastorianus
acgggacgaatcaaccatctcggtt

SEQ ID NO: 96286 - DNA, 25 bp, Saccharomyces pastorianus
agacttacttcaattactccgcatt

SEQ ID NO: 96287 - DNA, 25 bp, Saccharomyces pastorianus
aattcatgcggattcaaacctacca

SEQ ID NO: 96288 - DNA, 25 bp, Saccharomyces pastorianus
atatgggctgtgacggtatctttcg

SEQ ID NO: 96289 - DNA, 25 bp, Saccharomyces pastorianus
ccaacccggatttcaagctgcataa

SEQ ID NO: 96290 - DNA, 25 bp, Saccharomyces pastorianus
ttcgcttctatctatgccttgcaaa

SEQ ID NO: 96291 - DNA, 25 bp, Saccharomyces pastorianus
ctttcgggtgtgtaaattcgcttct

SEQ ID NO: 96292 - DNA, 25 bp, Saccharomyces pastorianus
catgcttccattgatcccgaattaa

SEQ ID NO: 96293 - DNA, 25 bp, Saccharomyces pastorianus
aggtgccgtgttatccttcgaaacg

SEQ ID NO: 96294 - DNA, 25 bp, Saccharomyces pastorianus
gttcgtctttgctgcggtatcgaaa

SEQ ID NO: 96295 - DNA, 25 bp, Saccharomyces pastorianus
aatcgttcaataatggcccaggtgc

SEQ ID NO: 96296 - DNA, 25 bp, Saccharomyces pastorianus
atcgatgacctgcataagcctttaa

SEQ ID NO: 96297 - DNA, 25 bp, Saccharomyces pastorianus
agctgtgaacactaccatcgatgac

SEQ ID NO: 96298 - DNA, 25 bp, Saccharomyces pastorianus
gtgtcttgccataatttcagcatca

SEQ ID NO: 96299 - DNA, 25 bp, Saccharomyces pastorianus
tctttcctgcttttttatgcgtcga

SEQ ID NO: 96300 - DNA, 25 bp, Saccharomyces pastorianus
tcagcatcatcgtctcaacctaagc

SEQ ID NO: 96301 - DNA, 25 bp, Saccharomyces pastorianus
atataaaaggcgatctcccgtccca

SEQ ID NO: 96302 - DNA, 25 bp, Saccharomyces pastorianus
aataaccgcccagatcacgaaattg

SEQ ID NO: 96303 - DNA, 25 bp, Saccharomyces pastorianus
tcccaccgttattctttgcgatata

SEQ ID NO: 96304 - DNA, 25 bp, Saccharomyces pastorianus
atctttctggctctaaaaatcttga

SEQ ID NO: 96305 - DNA, 25 bp, Saccharomyces pastorianus
aggcacgctcaaatatctttctggc

SEQ ID NO: 96306 - DNA, 25 bp, Saccharomyces pastorianus
gaagaattcgtgtcttgccataatt

SEQ ID NO: 96307 - DNA, 25 bp, Saccharomyces pastorianus
gaaccgaatttaccatctttcctgc

SEQ ID NO: 96308 - DNA, 25 bp, Saccharomyces pastorianus
taagcctcttctcacgaaggcacgc

SEQ ID NO: 96309 - DNA, 25 bp, Saccharomyces pastorianus
aacagcttgctgtcgcacaggctca

SEQ ID NO: 96310 - DNA, 25 bp, Saccharomyces pastorianus
gtgtatcggcagcagcgacaacatc

SEQ ID NO: 96311 - DNA, 25 bp, Saccharomyces pastorianus
gagacgtgcgacaacaagtggccca

SEQ ID NO: 96312 - DNA, 25 bp, Saccharomyces pastorianus
ggcccacagccagctatttttgatg

SEQ ID NO: 96313 - DNA, 25 bp, Saccharomyces pastorianus
gtaatcacgccagattttacttcaa

SEQ ID NO: 96314 - DNA, 25 bp, Saccharomyces pastorianus
agcagttttcgatggtacccttcaa

SEQ ID NO: 96315 - DNA, 25 bp, Saccharomyces pastorianus
aggctcaagcacagcagatccagat

SEQ ID NO: 96316 - DNA, 25 bp, Saccharomyces pastorianus
aacagtattacgatcctgctaccgg

SEQ ID NO: 96317 - DNA, 25 bp, Saccharomyces pastorianus
tacgccatggctatgcaacagcagc

SEQ ID NO: 96318 - DNA, 25 bp, Saccharomyces pastorianus
gcaacaggcgccattatcttttcag

SEQ ID NO: 96319 - DNA, 25 bp, Saccharomyces pastorianus
gtagatcagcagcaatacgccatgg

SEQ ID NO: 96320 - DNA, 25 bp, Saccharomyces pastorianus
taccacgttcggaaatgatccttct

SEQ ID NO: 96321 - DNA, 25 bp, Saccharomyces pastorianus
ctaagatggccgcacatatggaatt

SEQ ID NO: 96322 - DNA, 25 bp, Saccharomyces pastorianus
gaatgcctatggtgactaccctttt

SEQ ID NO: 96323 - DNA, 25 bp, Saccharomyces pastorianus
gatccttctatgtaatgaggccatt

SEQ ID NO: 96324 - DNA, 25 bp, Saccharomyces pastorianus
caagcatgcttctgaggtagctgaa

SEQ ID NO: 96325 - DNA, 25 bp, Saccharomyces pastorianus
gaaggcattatccattttatcaaaa

SEQ ID NO: 96326 - DNA, 25 bp, Saccharomyces pastorianus
tccaactggtggtatgaatctcaag

SEQ ID NO: 96327 - DNA, 25 bp, Saccharomyces pastorianus
gaaacttctctggacgatgatgatt

SEQ ID NO: 96328 - DNA, 25 bp, Saccharomyces pastorianus
tctatgcaggtaacgtccaactggt

SEQ ID NO: 96329 - DNA, 25 bp, Saccharomyces pastorianus
gttaacgtgttggtacagtggctaa

SEQ ID NO: 96330 - DNA, 25 bp, Saccharomyces pastorianus
gcttatgcaacttcactttggatgt

SEQ ID NO: 96331 - DNA, 25 bp, Saccharomyces pastorianus
tagagagtcatcctattcgtccttt

SEQ ID NO: 96332 - DNA, 25 bp, Saccharomyces pastorianus
aagtttgagctctactcttacgcct

SEQ ID NO: 96333 - DNA, 25 bp, Saccharomyces pastorianus
ggtcagcctaccagtgaattcatca

SEQ ID NO: 96334 - DNA, 25 bp, Saccharomyces pastorianus
gaattcatcattcgcctctttagat

SEQ ID NO: 96335 - DNA, 25 bp, Saccharomyces pastorianus
tgagttgaaagtttcaccgccctct

SEQ ID NO: 96336 - DNA, 25 bp, Saccharomyces pastorianus
accgcttttgcatctcagatcagta

SEQ ID NO: 96337 - DNA, 25 bp, Saccharomyces pastorianus
gaagcagacgcatcacttgtatttg

SEQ ID NO: 96338 - DNA, 25 bp, Saccharomyces pastorianus
agatcagtattcaggatgccccagc

SEQ ID NO: 96339 - DNA, 25 bp, Saccharomyces pastorianus
gcagcatccgtatcgaccaatttgg

SEQ ID NO: 96340 - DNA, 25 bp, Saccharomyces pastorianus
tacgcctgtcggtaatgtacctcaa

SEQ ID NO: 96341 - DNA, 25 bp, Saccharomyces pastorianus
atgccccagcaatcggtgatcaaca

SEQ ID NO: 96342 - DNA, 25 bp, Saccharomyces pastorianus
tgacgatggatgtttcttctggagt

SEQ ID NO: 96343 - DNA, 25 bp, Saccharomyces pastorianus
ataacaagatcccaccgtacgagag

SEQ ID NO: 96344 - DNA, 25 bp, Saccharomyces pastorianus
ccaaatgaagatatcgccccggtta

SEQ ID NO: 96345 - DNA, 25 bp, Saccharomyces pastorianus
aaccctgaatctacatcgccaaatt

SEQ ID NO: 96346 - DNA, 25 bp, Saccharomyces pastorianus
attgctctgatactgtaatccacga

SEQ ID NO: 96347 - DNA, 25 bp, Saccharomyces pastorianus
ggagcgattttatgcccaagttgga

SEQ ID NO: 96348 - DNA, 25 bp, Saccharomyces pastorianus
gagcctggattctcgaagactttag

SEQ ID NO: 96349 - DNA, 25 bp, Saccharomyces pastorianus
tgtttgacttcaatacgaacccttt

SEQ ID NO: 96350 - DNA, 25 bp, Saccharomyces pastorianus
ggaatagagctcgagaaccctgaat

SEQ ID NO: 96351 - DNA, 25 bp, Saccharomyces pastorianus
aatggcctcaacaacttaagcgatt

SEQ ID NO: 96352 - DNA, 25 bp, Saccharomyces pastorianus
tggaagactggattttccctccact

SEQ ID NO: 96353 - DNA, 25 bp, Saccharomyces pastorianus
gacgattctagttttagtcgatcta

SEQ ID NO: 96354 - DNA, 25 bp, Saccharomyces pastorianus
aagagccacttgtcacagtagcaga

SEQ ID NO: 96355 - DNA, 25 bp, Saccharomyces pastorianus
aggtttgccattatgcctgggtcaa

SEQ ID NO: 96356 - DNA, 25 bp, Saccharomyces pastorianus
tactgggccgcaagctttatgataa

SEQ ID NO: 96357 - DNA, 25 bp, Saccharomyces pastorianus
gacggtgtccacagatcaaatggct

SEQ ID NO: 96358 - DNA, 25 bp, Saccharomyces pastorianus
aaaacatctttactgggccgcaagc

SEQ ID NO: 96359 - DNA, 25 bp, Saccharomyces pastorianus
aaacaaacgagctttcccatgcaat

SEQ ID NO: 96360 - DNA, 25 bp, Saccharomyces pastorianus
ctgacgatagaagaccctgcaataa

SEQ ID NO: 96361 - DNA, 25 bp, Saccharomyces pastorianus
gagacgctcaaggtcacaagattca

SEQ ID NO: 96362 - DNA, 25 bp, Saccharomyces pastorianus
ttccgcatcgtcaattgctggcaac

SEQ ID NO: 96363 - DNA, 25 bp, Saccharomyces pastorianus
atcaaactgcctcaagtctgacgat

SEQ ID NO: 96364 - DNA, 25 bp, Saccharomyces pastorianus
accagatgccttaccctaatatgaa

SEQ ID NO: 96365 - DNA, 25 bp, Saccharomyces pastorianus
ctccacctcctatgacaaatgtttc

SEQ ID NO: 96366 - DNA, 25 bp, Saccharomyces pastorianus
accagcaccacatgggtttggacaa

SEQ ID NO: 96367 - DNA, 25 bp, Saccharomyces pastorianus
gggtcctattcctggagcgaatgat

SEQ ID NO: 96368 - DNA, 25 bp, Saccharomyces pastorianus
aagcaccgcttgataatccaactgt

SEQ ID NO: 96369 - DNA, 25 bp, Saccharomyces pastorianus
gctggatctattttcaatgccgttg

SEQ ID NO: 96370 - DNA, 25 bp, Saccharomyces pastorianus
acagcacagcaatggttcaactatt

SEQ ID NO: 96371 - DNA, 25 bp, Saccharomyces pastorianus
aatggaatgtctattccgccaccag

SEQ ID NO: 96372 - DNA, 25 bp, Saccharomyces pastorianus
caggttttatgacccatcctaatgg

SEQ ID NO: 96373 - DNA, 25 bp, Saccharomyces pastorianus
gcagatgttggtttgccgtacaata

SEQ ID NO: 96374 - DNA, 25 bp, Saccharomyces pastorianus
gagattaaaccttcttctggcacaa

SEQ ID NO: 96375 - DNA, 25 bp, Saccharomyces pastorianus
tactgccgtattctctctgatatag

SEQ ID NO: 96376 - DNA, 25 bp, Saccharomyces pastorianus
ttagctgccatagtctctactgtca

SEQ ID NO: 96377 - DNA, 25 bp, Saccharomyces pastorianus
attcctcgtgatgttgcatacctac

SEQ ID NO: 96378 - DNA, 25 bp, Saccharomyces pastorianus
gatctcgcaccatttgaaggccgat

SEQ ID NO: 96379 - DNA, 25 bp, Saccharomyces pastorianus
gatgaggaccttctagacacgcaaa

SEQ ID NO: 96380 - DNA, 25 bp, Saccharomyces pastorianus
tacagcaactattaactccgggaag

SEQ ID NO: 96381 - DNA, 25 bp, Saccharomyces pastorianus
gatacagatttatttggcgccccaa

SEQ ID NO: 96382 - DNA, 25 bp, Saccharomyces pastorianus
ggatttccgaattaccacctcaaat

SEQ ID NO: 96383 - DNA, 25 bp, Saccharomyces pastorianus
gcagatctaggttcatccgaagcag

SEQ ID NO: 96384 - DNA, 25 bp, Saccharomyces pastorianus
gaattgatagattccattcctcgtg

SEQ ID NO: 96385 - DNA, 25 bp, Saccharomyces pastorianus
caaactttttcggtgctcttacagc

SEQ ID NO: 96386 - DNA, 25 bp, Saccharomyces pastorianus
aaattacgtgattccgacttacaat

SEQ ID NO: 96387 - DNA, 25 bp, Saccharomyces pastorianus
gcgacctggcggttttacatatgaa

SEQ ID NO: 96388 - DNA, 25 bp, Saccharomyces pastorianus
ttcctcattgcgaaggcgatggcat

SEQ ID NO: 96389 - DNA, 25 bp, Saccharomyces pastorianus
aagtatagacactattccccttcag

SEQ ID NO: 96390 - DNA, 25 bp, Saccharomyces pastorianus
cagactaacttgtttgcagctttaa

SEQ ID NO: 96391 - DNA, 25 bp, Saccharomyces pastorianus
ttcatcatcgaaagacttggccagt

SEQ ID NO: 96392 - DNA, 25 bp, Saccharomyces pastorianus
ataattcttgatggcggagcgtgca

SEQ ID NO: 96393 - DNA, 25 bp, Saccharomyces pastorianus
actattccccttcagctaaagttgt

SEQ ID NO: 96394 - DNA, 25 bp, Saccharomyces pastorianus
gttgttttactagttcctcattgcg

SEQ ID NO: 96395 - DNA, 25 bp, Saccharomyces pastorianus
atgtaatcctcctatgctactgcga

SEQ ID NO: 96396 - DNA, 25 bp, Saccharomyces pastorianus
gatggcattcttaagggcgctgaca

SEQ ID NO: 96397 - DNA, 25 bp, Saccharomyces pastorianus
tctttttcctcgtccacaattttct

SEQ ID NO: 96398 - DNA, 25 bp, Saccharomyces pastorianus
gataccaagtttctcagttttaaag

SEQ ID NO: 96399 - DNA, 25 bp, Saccharomyces pastorianus
cgtccacaattttctcagttcatca

SEQ ID NO: 96400 - DNA, 25 bp, Saccharomyces pastorianus
aacgctactgctgatgagcaataac

SEQ ID NO: 96401 - DNA, 25 bp, Saccharomyces pastorianus
tgttcccattaattagtacatttac

SEQ ID NO: 96402 - DNA, 25 bp, Saccharomyces pastorianus
atacatctacatatgttcccattaa

SEQ ID NO: 96403 - DNA, 25 bp, Saccharomyces pastorianus
caacgatgaaaacgctactgctgat

SEQ ID NO: 96404 - DNA, 25 bp, Saccharomyces pastorianus
atacgttgagtcttcttcattcttt

SEQ ID NO: 96405 - DNA, 25 bp, Saccharomyces pastorianus
gtacatttacctcaatagggttggg

SEQ ID NO: 96406 - DNA, 25 bp, Saccharomyces pastorianus
atgtttatcttagtatccgttgtaa

SEQ ID NO: 96407 - DNA, 25 bp, Saccharomyces pastorianus
gaaatacgttgagtcttcttcattc

SEQ ID NO: 96408 - DNA, 25 bp, Saccharomyces pastorianus
gactgccagcttgccgggagaacaa

SEQ ID NO: 96409 - DNA, 25 bp, Saccharomyces pastorianus
aggtggcttcaaactcggcaatgtg

SEQ ID NO: 96410 - DNA, 25 bp, Saccharomyces pastorianus
tgcgcttcctgtttcattgatacta

SEQ ID NO: 96411 - DNA, 25 bp, Saccharomyces pastorianus
gtatcctgtgcagccttggacaaat

SEQ ID NO: 96412 - DNA, 25 bp, Saccharomyces pastorianus
ggttgtcatgtctacatccgacgag

SEQ ID NO: 96413 - DNA, 25 bp, Saccharomyces pastorianus
agatctgcaacaccgagaccattga

SEQ ID NO: 96414 - DNA, 25 bp, Saccharomyces pastorianus
aagattgtcaatgctgtcggcctta

SEQ ID NO: 96415 - DNA, 25 bp, Saccharomyces pastorianus
gttcgtagttgtatatgcgcttcct

SEQ ID NO: 96416 - DNA, 25 bp, Saccharomyces pastorianus
ggccttaatttctccgttttgcaga

SEQ ID NO: 96417 - DNA, 25 bp, Saccharomyces pastorianus
agaccattgacatgcgctgcttcat

SEQ ID NO: 96418 - DNA, 25 bp, Saccharomyces pastorianus
acgagcgaccatttaggcccaaaag

SEQ ID NO: 96419 - DNA, 25 bp, Saccharomyces pastorianus
gctgtttttcagtgtttccggtaag

SEQ ID NO: 96420 - DNA, 25 bp, Saccharomyces pastorianus
ggctgacgtccttacaaagtaacga

SEQ ID NO: 96421 - DNA, 25 bp, Saccharomyces pastorianus
gacaagggattactcgatgacatta

SEQ ID NO: 96422 - DNA, 25 bp, Saccharomyces pastorianus
ttccggtaagcttctccgattagaa

SEQ ID NO: 96423 - DNA, 25 bp, Saccharomyces pastorianus
gattcgtcgatcacactactggagt

SEQ ID NO: 96424 - DNA, 25 bp, Saccharomyces pastorianus
gaacaagacttcaatgacggtagat

SEQ ID NO: 96425 - DNA, 25 bp, Saccharomyces pastorianus
gaagattgaccggagcgatgacaaa

SEQ ID NO: 96426 - DNA, 25 bp, Saccharomyces pastorianus
tggagtacatcattcggctgacgtc

SEQ ID NO: 96427 - DNA, 25 bp, Saccharomyces pastorianus
aagacacaccacaggaacttgccat

SEQ ID NO: 96428 - DNA, 25 bp, Saccharomyces pastorianus
gaacttgccatagatctgaaccata

SEQ ID NO: 96429 - DNA, 25 bp, Saccharomyces pastorianus
gaacaggattctccagtgttggtat

SEQ ID NO: 96430 - DNA, 25 bp, Saccharomyces pastorianus
atgcgtcatgcactcaaatgtctat

SEQ ID NO: 96431 - DNA, 25 bp, Saccharomyces pastorianus
ctcacaccttgtttaccatgcatta

SEQ ID NO: 96432 - DNA, 25 bp, Saccharomyces pastorianus
gggtacaggctcacgcaagttgatt

SEQ ID NO: 96433 - DNA, 25 bp, Saccharomyces pastorianus
gataagttggttttgctcacacctt

SEQ ID NO: 96434 - DNA, 25 bp, Saccharomyces pastorianus
acaagttgcggtacgtcttgactcc

SEQ ID NO: 96435 - DNA, 25 bp, Saccharomyces pastorianus
aatgtctataatttcgcgctcaacg

SEQ ID NO: 96436 - DNA, 25 bp, Saccharomyces pastorianus
tgcccttgcttccatggtcaatgaa

SEQ ID NO: 96437 - DNA, 25 bp, Saccharomyces pastorianus
atattcggctatatcgaggcacgct

SEQ ID NO: 96438 - DNA, 25 bp, Saccharomyces pastorianus
tcttgactcctgacgatattcggct

SEQ ID NO: 96439 - DNA, 25 bp, Saccharomyces pastorianus
gtttgagtatcatcctcatgccctt

SEQ ID NO: 96440 - DNA, 25 bp, Saccharomyces pastorianus
cacgctgttgcggaatattgccata

SEQ ID NO: 96441 - DNA, 25 bp, Saccharomyces pastorianus
actcaaattcttatgccagcgtgca

SEQ ID NO: 96442 - DNA, 25 bp, Saccharomyces pastorianus
agatgacaccgagttttccagaagt

SEQ ID NO: 96443 - DNA, 25 bp, Saccharomyces pastorianus
gattacgaattcttggcgccatggt

SEQ ID NO: 96444 - DNA, 25 bp, Saccharomyces pastorianus
gtgtggatatcctccgttttacgaa

SEQ ID NO: 96445 - DNA, 25 bp, Saccharomyces pastorianus
gaagtattcacctccaaacgatatt

SEQ ID NO: 96446 - DNA, 25 bp, Saccharomyces pastorianus
ggagtattggctgcgtactattcac

SEQ ID NO: 96447 - DNA, 25 bp, Saccharomyces pastorianus
aatgatccttggttaaattcctacg

SEQ ID NO: 96448 - DNA, 25 bp, Saccharomyces pastorianus
gagcagagaccctacattgtgcatt

SEQ ID NO: 96449 - DNA, 25 bp, Saccharomyces pastorianus
gagtgttttaccttagaccttgcaa

SEQ ID NO: 96450 - DNA, 25 bp, Saccharomyces pastorianus
agaacgcagttacccatcttttgga

SEQ ID NO: 96451 - DNA, 25 bp, Saccharomyces pastorianus
ttgtgcattaagctgccaatctgaa

SEQ ID NO: 96452 - DNA, 25 bp, Saccharomyces pastorianus
gagtttgacagcaacgcgagacgaa

SEQ ID NO: 96453 - DNA, 25 bp, Saccharomyces pastorianus
aaaggctccggatgcgcatgctgat

SEQ ID NO: 96454 - DNA, 25 bp, Saccharomyces pastorianus
agtgctgtcaagtccaactattcat

SEQ ID NO: 96455 - DNA, 25 bp, Saccharomyces pastorianus
gacgtcgctaaatttgaggtttgcc

SEQ ID NO: 96456 - DNA, 25 bp, Saccharomyces pastorianus
gggaatcttttgcttcactaaatac

SEQ ID NO: 96457 - DNA, 25 bp, Saccharomyces pastorianus
attaagatcaccaaaggctccggat

SEQ ID NO: 96458 - DNA, 25 bp, Saccharomyces pastorianus
gatgacatcataagcatttccggag

SEQ ID NO: 96459 - DNA, 25 bp, Saccharomyces pastorianus
tgcgcatgctgatatgggtactcat

SEQ ID NO: 96460 - DNA, 25 bp, Saccharomyces pastorianus
gacactgttaagctcgctcacgaat

SEQ ID NO: 96461 - DNA, 25 bp, Saccharomyces pastorianus
ggagcactatcaagcgacactgtta

SEQ ID NO: 96462 - DNA, 25 bp, Saccharomyces pastorianus
ggtttgccatcacaaatttgctgat

SEQ ID NO: 96463 - DNA, 25 bp, Saccharomyces pastorianus
taagttcgctgatacgtgttacgca

SEQ ID NO: 96464 - DNA, 25 bp, Saccharomyces pastorianus
tgaaccacactcagggtacacatct

SEQ ID NO: 96465 - DNA, 25 bp, Saccharomyces pastorianus
ggtgcttaaattcactacacttact

SEQ ID NO: 96466 - DNA, 25 bp, Saccharomyces pastorianus
ggagcgctgcgttagcattaattga

SEQ ID NO: 96467 - DNA, 25 bp, Saccharomyces pastorianus
atatcacagctgtctagggagcgct

SEQ ID NO: 96468 - DNA, 25 bp, Saccharomyces pastorianus
gtctacgttagctttactctctagt

SEQ ID NO: 96469 - DNA, 25 bp, Saccharomyces pastorianus
ggagctttcggtgcccacaatgaac

SEQ ID NO: 96470 - DNA, 25 bp, Saccharomyces pastorianus
gacaccataacctggctattacata

SEQ ID NO: 96471 - DNA, 25 bp, Saccharomyces pastorianus
gctacatcgcagttgccattctgta

SEQ ID NO: 96472 - DNA, 25 bp, Saccharomyces pastorianus
ttctgtacatatgcggatgccgatc

SEQ ID NO: 96473 - DNA, 25 bp, Saccharomyces pastorianus
acatcttgtgcgctgtctacgttag

SEQ ID NO: 96474 - DNA, 25 bp, Saccharomyces pastorianus
aagtctatgtaaccagctgctgcag

SEQ ID NO: 96475 - DNA, 25 bp, Saccharomyces pastorianus
ttggctgctctatagtaacgggctt

SEQ ID NO: 96476 - DNA, 25 bp, Saccharomyces pastorianus
caatatgtagctatgttcctcgtaa

SEQ ID NO: 96477 - DNA, 25 bp, Saccharomyces pastorianus
ggaactggccttaacacagacttgt

SEQ ID NO: 96478 - DNA, 25 bp, Saccharomyces pastorianus
gattttggcgctatcagcttttttc

SEQ ID NO: 96479 - DNA, 25 bp, Saccharomyces pastorianus
gaaagcgtctgatccatgcacaata

SEQ ID NO: 96480 - DNA, 25 bp, Saccharomyces pastorianus
agggcagcttcggtaagccattatt

SEQ ID NO: 96481 - DNA, 25 bp, Saccharomyces pastorianus
tgagggagcttctatgtgcataact

SEQ ID NO: 96482 - DNA, 25 bp, Saccharomyces pastorianus
gttttcttccatttagcatgaccat

SEQ ID NO: 96483 - DNA, 25 bp, Saccharomyces pastorianus
gaagttccattgattttccattctc

SEQ ID NO: 96484 - DNA, 25 bp, Saccharomyces pastorianus
gaattgatatcgcttctccgtgcaa

SEQ ID NO: 96485 - DNA, 25 bp, Saccharomyces pastorianus
accacctcgagcttaactattctaa

SEQ ID NO: 96486 - DNA, 25 bp, Saccharomyces pastorianus
acactgatctcattggcggcggtat

SEQ ID NO: 96487 - DNA, 25 bp, Saccharomyces pastorianus
aagcgcctgtttcagttcagcaatc

SEQ ID NO: 96488 - DNA, 25 bp, Saccharomyces pastorianus
tttcctttttcctaaactcagcttg

SEQ ID NO: 96489 - DNA, 25 bp, Saccharomyces pastorianus
ataatctattgtcctgcgcattacc

SEQ ID NO: 96490 - DNA, 25 bp, Saccharomyces pastorianus
tctcttgcttttttccacgctggaa

SEQ ID NO: 96491 - DNA, 25 bp, Saccharomyces pastorianus
tgggatggagtcttcgacctgtcca

SEQ ID NO: 96492 - DNA, 25 bp, Saccharomyces pastorianus
gtcatctttattagcatcgctgccg

SEQ ID NO: 96493 - DNA, 25 bp, Saccharomyces pastorianus
gtattttgcatattgaccacctcga

SEQ ID NO: 96494 - DNA, 25 bp, Saccharomyces pastorianus
atttaactcttgcatgccgtcatta

SEQ ID NO: 96495 - DNA, 25 bp, Saccharomyces pastorianus
tctttatcactttcttcttgcatgc

SEQ ID NO: 96496 - DNA, 25 bp, Saccharomyces pastorianus
gtctcggtgagccatgctttgacaa

SEQ ID NO: 96497 - DNA, 25 bp, Saccharomyces pastorianus
aggactctatcggtggtgtcgtcac

SEQ ID NO: 96498 - DNA, 25 bp, Saccharomyces pastorianus
gtgtcgtgagaaacttgcctaccgg

SEQ ID NO: 96499 - DNA, 25 bp, Saccharomyces pastorianus
tattgtggaagccatgaccgctctg

SEQ ID NO: 96500 - DNA, 25 bp, Saccharomyces pastorianus
aatgggtcccatcagatgtccagac

SEQ ID NO: 96501 - DNA, 25 bp, Saccharomyces pastorianus
gttggctcatgctatgttgtccatt

SEQ ID NO: 96502 - DNA, 25 bp, Saccharomyces pastorianus
agaacatctatttctctgtcccatt

SEQ ID NO: 96503 - DNA, 25 bp, Saccharomyces pastorianus
agggtgtctctgttccagggtctaa

SEQ ID NO: 96504 - DNA, 25 bp, Saccharomyces pastorianus
agacgcctccattgctggtttgatg

SEQ ID NO: 96505 - DNA, 25 bp, Saccharomyces pastorianus
tggctgacgcgcttttgatccaaaa

SEQ ID NO: 96506 - DNA, 25 bp, Saccharomyces pastorianus
aattggctcaggttttcagggtgtc

SEQ ID NO: 96507 - DNA, 25 bp, Saccharomyces pastorianus
cttcaccaaggtcaacaaccaattg

SEQ ID NO: 96508 - DNA, 25 bp, Saccharomyces pastorianus
ggtcaacaaccaattgatcaaggtt

SEQ ID NO: 96509 - DNA, 25 bp, Saccharomyces pastorianus
gatgttaccttcaccaaggtcaaca

SEQ ID NO: 96510 - DNA, 25 bp, Saccharomyces pastorianus
aaggtcaacaaccaattgatcaagg

SEQ ID NO: 96511 - DNA, 25 bp, Saccharomyces pastorianus
ttcccaatcaacgtcaacattgttg

SEQ ID NO: 96512 - DNA, 25 bp, Saccharomyces pastorianus
attgatgttaccttcaccaaggtca

SEQ ID NO: 96513 - DNA, 25 bp, Saccharomyces pastorianus
tcaacattgttgaaaaggatggtgc

SEQ ID NO: 96514 - DNA, 25 bp, Saccharomyces pastorianus
gttagagatggtgttactatcgaat

SEQ ID NO: 96515 - DNA, 25 bp, Saccharomyces pastorianus
tgttaccttcaccaaggtcaacaac

SEQ ID NO: 96516 - DNA, 25 bp, Saccharomyces pastorianus
cattgaagtcagaaactttttgggt

SEQ ID NO: 96517 - DNA, 25 bp, Saccharomyces pastorianus
ccagttagagatggtgttactatcg

SEQ ID NO: 96518 - DNA, 25 bp, Saccharomyces pastorianus
gcacattgatgttaccttcaccaag

SEQ ID NO: 96519 - DNA, 25 bp, Saccharomyces pastorianus
tactatcgaattttccaccaacgtt

SEQ ID NO: 96520 - DNA, 25 bp, Saccharomyces pastorianus
gttactatcgaattttccaccaacg

SEQ ID NO: 96521 - DNA, 25 bp, Saccharomyces pastorianus
tgtcaggtaactctgtcgaagacgt

SEQ ID NO: 96522 - DNA, 25 bp, Saccharomyces pastorianus
gaaattgtcttgtcaggtaactctg

SEQ ID NO: 96523 - DNA, 25 bp, Saccharomyces pastorianus
gttgctgctttgagaaccgtcaagt

SEQ ID NO: 96524 - DNA, 25 bp, Saccharomyces pastorianus
tatcgaattttccaccaacgttaag

SEQ ID NO: 96525 - DNA, 25 bp, Saccharomyces pastorianus
agaatcgtcaaggttgttggtccaa

SEQ ID NO: 96526 - DNA, 25 bp, Saccharomyces pastorianus
aatcgaagtcccagaaggtgtcact

SEQ ID NO: 96527 - DNA, 25 bp, Saccharomyces pastorianus
gtcactgtcagcatcaagtccagaa

SEQ ID NO: 96528 - DNA, 25 bp, Saccharomyces pastorianus
aaggtgtcactgtcagcatcaagtc

SEQ ID NO: 96529 - DNA, 25 bp, Saccharomyces pastorianus
aaagcattgaataccgtctctgacg

SEQ ID NO: 96530 - DNA, 25 bp, Saccharomyces pastorianus
gtctatgacggatcgtggagctcga

SEQ ID NO: 96531 - DNA, 25 bp, Saccharomyces pastorianus
tgggaggcaatcactgggcttcagt

SEQ ID NO: 96532 - DNA, 25 bp, Saccharomyces pastorianus
ggtagcacagctgatatccaatatt

SEQ ID NO: 96533 - DNA, 25 bp, Saccharomyces pastorianus
gagcgataccacacttcttcaaatg

SEQ ID NO: 96534 - DNA, 25 bp, Saccharomyces pastorianus
aagaaacagactccagcaggttcgg

SEQ ID NO: 96535 - DNA, 25 bp, Saccharomyces pastorianus
gtctctgacggtcttttccagatag

SEQ ID NO: 96536 - DNA, 25 bp, Saccharomyces pastorianus
aagctcgatcctgacatgttgttgc

SEQ ID NO: 96537 - DNA, 25 bp, Saccharomyces pastorianus
gcgttctgtaccgtgtttaatgcag

SEQ ID NO: 96538 - DNA, 25 bp, Saccharomyces pastorianus
aatgcaggcatgaatgacgcgtcta

SEQ ID NO: 96539 - DNA, 25 bp, Saccharomyces pastorianus
agcgggacgtcggtcatcgaagtta

SEQ ID NO: 96540 - DNA, 25 bp, Saccharomyces pastorianus
caacattagagatgtctgtcgacga

SEQ ID NO: 96541 - DNA, 25 bp, Saccharomyces pastorianus
gtcgtccgtaccaagcgctgagttg

SEQ ID NO: 96542 - DNA, 25 bp, Saccharomyces pastorianus
tctgtcgacgaaaatatcgggccgt

SEQ ID NO: 96543 - DNA, 25 bp, Saccharomyces pastorianus
cttaccgtcacatgctaccaattat

SEQ ID NO: 96544 - DNA, 25 bp, Saccharomyces pastorianus
aagatttcaacttggtcaacattag

SEQ ID NO: 96545 - DNA, 25 bp, Saccharomyces pastorianus
gcagcattttgagcttaccgtcaca

SEQ ID NO: 96546 - DNA, 25 bp, Saccharomyces pastorianus
gaagcttattccattaagtacttga

SEQ ID NO: 96547 - DNA, 25 bp, Saccharomyces pastorianus
gtatgatccaaacaatcagcagttt

SEQ ID NO: 96548 - DNA, 25 bp, Saccharomyces pastorianus
agcgctgagttggtcaattcaatta

SEQ ID NO: 96549 - DNA, 25 bp, Saccharomyces pastorianus
tatgcaaaactccattgtacacagg

SEQ ID NO: 96550 - DNA, 25 bp, Saccharomyces pastorianus
ggatatcccactagctatttcatta

SEQ ID NO: 96551 - DNA, 25 bp, Saccharomyces pastorianus
tgttccattcgtgtcggtgttcatc

SEQ ID NO: 96552 - DNA, 25 bp, Saccharomyces pastorianus
gagacccagaggcttactccaaact

SEQ ID NO: 96553 - DNA, 25 bp, Saccharomyces pastorianus
ggtgttcatcgcattacttttggac

SEQ ID NO: 96554 - DNA, 25 bp, Saccharomyces pastorianus
gtggtcgattacttgtaaccctcca

SEQ ID NO: 96555 - DNA, 25 bp, Saccharomyces pastorianus
catcatttggccttttgagacttga

SEQ ID NO: 96556 - DNA, 25 bp, Saccharomyces pastorianus
aatagattcttcaactctcttgcgc

SEQ ID NO: 96557 - DNA, 25 bp, Saccharomyces pastorianus
gtcaaagctatttacaccgcagtga

SEQ ID NO: 96558 - DNA, 25 bp, Saccharomyces pastorianus
aaaatctttactctggcttgttcca

SEQ ID NO: 96559 - DNA, 25 bp, Saccharomyces pastorianus
aactctcttgcgcactgggattcaa

SEQ ID NO: 96560 - DNA, 25 bp, Saccharomyces pastorianus
tccaccgccttttcgtaaggatcta

SEQ ID NO: 96561 - DNA, 25 bp, Saccharomyces pastorianus
cattgcatttacttggagacccaga

SEQ ID NO: 96562 - DNA, 25 bp, Saccharomyces pastorianus
gaacatgaccactgacgagatcaag

SEQ ID NO: 96563 - DNA, 25 bp, Saccharomyces pastorianus
agatgagcctgaaagttccgcaaaa

SEQ ID NO: 96564 - DNA, 25 bp, Saccharomyces pastorianus
agctcctctgcaaggcttcaaggca

SEQ ID NO: 96565 - DNA, 25 bp, Saccharomyces pastorianus
gttgttgacttaattccgaatggtt

SEQ ID NO: 96566 - DNA, 25 bp, Saccharomyces pastorianus
tttgaaatttgtcacgtccgttccg

SEQ ID NO: 96567 - DNA, 25 bp, Saccharomyces pastorianus
ttcaaaccagtttcggcattccatg

SEQ ID NO: 96568 - DNA, 25 bp, Saccharomyces pastorianus
gaaatacaggctgcctacggcatct

SEQ ID NO: 96569 - DNA, 25 bp, Saccharomyces pastorianus
tcagtgttatcattgccccacattg

SEQ ID NO: 96570 - DNA, 25 bp, Saccharomyces pastorianus
gataatgtgttgctctacgttacta

SEQ ID NO: 96571 - DNA, 25 bp, Saccharomyces pastorianus
gcattccatggagggctcagtgtta

SEQ ID NO: 96572 - DNA, 25 bp, Saccharomyces pastorianus
ctacggcatctacctgtgttaattt

SEQ ID NO: 96573 - DNA, 25 bp, Saccharomyces pastorianus
gatgctctgagagttgaagctccaa

SEQ ID NO: 96574 - DNA, 25 bp, Saccharomyces pastorianus
ttaggctctaaaccttatccaggac

SEQ ID NO: 96575 - DNA, 25 bp, Saccharomyces pastorianus
atgcgcataatggactgatcaattc

SEQ ID NO: 96576 - DNA, 25 bp, Saccharomyces pastorianus
gttcaaataccgatccatttcacga

SEQ ID NO: 96577 - DNA, 25 bp, Saccharomyces pastorianus
acaagatcacagtctgatgcgcata

SEQ ID NO: 96578 - DNA, 25 bp, Saccharomyces pastorianus
gataacaagcctacgttttcagaga

SEQ ID NO: 96579 - DNA, 25 bp, Saccharomyces pastorianus
gaaaacgcaagcacagatgctctga

SEQ ID NO: 96580 - DNA, 25 bp, Saccharomyces pastorianus
gaacgagttgcttgcgttgggcaat

SEQ ID NO: 96581 - DNA, 25 bp, Saccharomyces pastorianus
gtttcctcacaacttaacgaatctt

SEQ ID NO: 96582 - DNA, 25 bp, Saccharomyces pastorianus
ggacgatagaacttctttccaaagg

SEQ ID NO: 96583 - DNA, 25 bp, Saccharomyces pastorianus
tttagatacctcaagttcggacgga

SEQ ID NO: 96584 - DNA, 25 bp, Saccharomyces pastorianus
ggtggtaccttatctacattcgtta

SEQ ID NO: 96585 - DNA, 25 bp, Saccharomyces pastorianus
agctcagtatgtttcaagtttgcaa

SEQ ID NO: 96586 - DNA, 25 bp, Saccharomyces pastorianus
tgcaattcttcaaagacgcatcccc

SEQ ID NO: 96587 - DNA, 25 bp, Saccharomyces pastorianus
tgcactaataagagcgatagccgca

SEQ ID NO: 96588 - DNA, 25 bp, Saccharomyces pastorianus
attcgttaagtattcctatgtccaa

SEQ ID NO: 96589 - DNA, 25 bp, Saccharomyces pastorianus
gatagccgcacataatagaaactct

SEQ ID NO: 96590 - DNA, 25 bp, Saccharomyces pastorianus
gcaatatgatagctctgggaatgaa

SEQ ID NO: 96591 - DNA, 25 bp, Saccharomyces pastorianus
tgttggattcgtatttgtttgcaat

SEQ ID NO: 96592 - DNA, 25 bp, Saccharomyces pastorianus
tagaaaggcctcatgatgcactaat

SEQ ID NO: 96593 - DNA, 25 bp, Saccharomyces pastorianus
tacacagcgtaatgtaaccctttac

SEQ ID NO: 96594 - DNA, 25 bp, Saccharomyces pastorianus
gaaactattccattaacgcctatca

SEQ ID NO: 96595 - DNA, 25 bp, Saccharomyces pastorianus
gttcataagttcaagcctgacgctt

SEQ ID NO: 96596 - DNA, 25 bp, Saccharomyces pastorianus
atggctaatacatctggtgtcagta

SEQ ID NO: 96597 - DNA, 25 bp, Saccharomyces pastorianus
ttatgtgacgcagccttagttacgg

SEQ ID NO: 96598 - DNA, 25 bp, Saccharomyces pastorianus
gtgaaattttcacctctgatgacat

SEQ ID NO: 96599 - DNA, 25 bp, Saccharomyces pastorianus
aagcctgacgcttctagagacgaat

SEQ ID NO: 96600 - DNA, 25 bp, Saccharomyces pastorianus
tttgcataaggaccatggctatttc

SEQ ID NO: 96601 - DNA, 25 bp, Saccharomyces pastorianus
atgtatgaaccctggccccaaacaa

SEQ ID NO: 96602 - DNA, 25 bp, Saccharomyces pastorianus
gaactcatgatcttatacggctctt

SEQ ID NO: 96603 - DNA, 25 bp, Saccharomyces pastorianus
ggctatttccagaacatgctcgagg

SEQ ID NO: 96604 - DNA, 25 bp, Saccharomyces pastorianus
gcaggcagttttcactaacgttcat

SEQ ID NO: 96605 - DNA, 25 bp, Saccharomyces pastorianus
tacggccattaggttcgtttgtttg

SEQ ID NO: 96606 - DNA, 25 bp, Saccharomyces pastorianus
ttgacgctatgtccgtcgatgactt

SEQ ID NO: 96607 - DNA, 25 bp, Saccharomyces pastorianus
tgaaatggaagaagacgttttggtt

SEQ ID NO: 96608 - DNA, 25 bp, Saccharomyces pastorianus
tgacagagctaagtcttgcggtgtt

SEQ ID NO: 96609 - DNA, 25 bp, Saccharomyces pastorianus
cgttttggttaaccaaatcttgatg

SEQ ID NO: 96610 - DNA, 25 bp, Saccharomyces pastorianus
ctaagtcttgcggtgttgacgctat

SEQ ID NO: 96611 - DNA, 25 bp, Saccharomyces pastorianus
acatgtccatctgtatcttcggtga

SEQ ID NO: 96612 - DNA, 25 bp, Saccharomyces pastorianus
aagaccaaacatgtccatctgtatc

SEQ ID NO: 96613 - DNA, 25 bp, Saccharomyces pastorianus
catgtccatctgtatcttcggtgat

SEQ ID NO: 96614 - DNA, 25 bp, Saccharomyces pastorianus
agtcttgcggtgttgacgctatgtc

SEQ ID NO: 96615 - DNA, 25 bp, Saccharomyces pastorianus
ccaaacatgtccatctgtatcttcg

SEQ ID NO: 96616 - DNA, 25 bp, Saccharomyces pastorianus
gtgttgacgctatgtccgtcgatga

SEQ ID NO: 96617 - DNA, 25 bp, Saccharomyces pastorianus
accggttgatgtagaagtgccccac

SEQ ID NO: 96618 - DNA, 25 bp, Saccharomyces pastorianus
gaaattagccgcctccaaattactt

SEQ ID NO: 96619 - DNA, 25 bp, Saccharomyces pastorianus
aagtgccccacatatcggttgatga

SEQ ID NO: 96620 - DNA, 25 bp, Saccharomyces pastorianus
ggaagatttcgttcactcacatgaa

SEQ ID NO: 96621 - DNA, 25 bp, Saccharomyces pastorianus
tgagtaccagccaactgtttacctt

SEQ ID NO: 96622 - DNA, 25 bp, Saccharomyces pastorianus
gaagctctggcgaatttcaaggaaa

SEQ ID NO: 96623 - DNA, 25 bp, Saccharomyces pastorianus
gaaaacccgttgctacatggcatac

SEQ ID NO: 96624 - DNA, 25 bp, Saccharomyces pastorianus
aagtgtaccggtttcaatactggag

SEQ ID NO: 96625 - DNA, 25 bp, Saccharomyces pastorianus
taaacccaccttatcatcagcagat

SEQ ID NO: 96626 - DNA, 25 bp, Saccharomyces pastorianus
atatcagtctaccacacgatgaaga

SEQ ID NO: 96627 - DNA, 25 bp, Saccharomyces pastorianus
gtatgcggtatttcgaaacggcttt

SEQ ID NO: 96628 - DNA, 25 bp, Saccharomyces pastorianus
gtacaggttgatgccgaagagaaga

SEQ ID NO: 96629 - DNA, 25 bp, Saccharomyces pastorianus
ttgcgcgaccatgcactgtcactga

SEQ ID NO: 96630 - DNA, 25 bp, Saccharomyces pastorianus
tgtgatagcttggaaaaacgtttta

SEQ ID NO: 96631 - DNA, 25 bp, Saccharomyces pastorianus
actgtcactgacagcattcaccaaa

SEQ ID NO: 96632 - DNA, 25 bp, Saccharomyces pastorianus
aaacgttttagcaaattcgatatgg

SEQ ID NO: 96633 - DNA, 25 bp, Saccharomyces pastorianus
gcgaggattttagcccgttcagaaa

SEQ ID NO: 96634 - DNA, 25 bp, Saccharomyces pastorianus
tggaggtgattgcagacgaactcat

SEQ ID NO: 96635 - DNA, 25 bp, Saccharomyces pastorianus
caaaatctcccgtggtaataaggtg

SEQ ID NO: 96636 - DNA, 25 bp, Saccharomyces pastorianus
tgatagctcgaaaacacgtaatgtt

SEQ ID NO: 96637 - DNA, 25 bp, Saccharomyces pastorianus
tgcagacgaactcatgaagctagat

SEQ ID NO: 96638 - DNA, 25 bp, Saccharomyces pastorianus
taaattcgcagaggccaggcgcgag

SEQ ID NO: 96639 - DNA, 25 bp, Saccharomyces pastorianus
gggcacctgatctcaaattgcaaga

SEQ ID NO: 96640 - DNA, 25 bp, Saccharomyces pastorianus
aaacatagctggctcaattccttcc

SEQ ID NO: 96641 - DNA, 25 bp, Saccharomyces pastorianus
aaatcgagttcttgggcacctgatc

SEQ ID NO: 96642 - DNA, 25 bp, Saccharomyces pastorianus
ggtaactatcacttactggcttgat

SEQ ID NO: 96643 - DNA, 25 bp, Saccharomyces pastorianus
caattccttccatcaatttctgggt

SEQ ID NO: 96644 - DNA, 25 bp, Saccharomyces pastorianus
tttttgtcggtaccagcttctgaaa

SEQ ID NO: 96645 - DNA, 25 bp, Saccharomyces pastorianus
gcagatgcgctatcaaaatcgagtt

SEQ ID NO: 96646 - DNA, 25 bp, Saccharomyces pastorianus
ggaccatactttctatctaaggtaa

SEQ ID NO: 96647 - DNA, 25 bp, Saccharomyces pastorianus
gactggtaaaccgttatcgttagag

SEQ ID NO: 96648 - DNA, 25 bp, Saccharomyces pastorianus
agccgcgcaagattggaccatactt

SEQ ID NO: 96649 - DNA, 25 bp, Saccharomyces pastorianus
aaataacacaacaaagccgcgcaag

SEQ ID NO: 96650 - DNA, 25 bp, Saccharomyces pastorianus
tatatgtctggcaaggcggagctga

SEQ ID NO: 96651 - DNA, 25 bp, Saccharomyces pastorianus
aaatttgcagagttgagcgtttcag

SEQ ID NO: 96652 - DNA, 25 bp, Saccharomyces pastorianus
gcggagctgatgtcaattcacgttt

SEQ ID NO: 96653 - DNA, 25 bp, Saccharomyces pastorianus
aaatgcgacattatctacctctaag

SEQ ID NO: 96654 - DNA, 25 bp, Saccharomyces pastorianus
gaccactaccgtctcaaagtcaaaa

SEQ ID NO: 96655 - DNA, 25 bp, Saccharomyces pastorianus
tacctctaagccagttcattcacag

SEQ ID NO: 96656 - DNA, 25 bp, Saccharomyces pastorianus
ggtggaagatccttctttgcctaaa

SEQ ID NO: 96657 - DNA, 25 bp, Saccharomyces pastorianus
aaacatttcgaccagcctttcgata

SEQ ID NO: 96658 - DNA, 25 bp, Saccharomyces pastorianus
aacaccgtggacttcaaattgattt

SEQ ID NO: 96659 - DNA, 25 bp, Saccharomyces pastorianus
ttcagtttcattggaggacctcgag

SEQ ID NO: 96660 - DNA, 25 bp, Saccharomyces pastorianus
ggtaatcatacatcggtggtccaga

SEQ ID NO: 96661 - DNA, 25 bp, Saccharomyces pastorianus
gagctcgaatttgtccagtcactgg

SEQ ID NO: 96662 - DNA, 25 bp, Saccharomyces pastorianus
gatcattcaattacaaggcccgcaa

SEQ ID NO: 96663 - DNA, 25 bp, Saccharomyces pastorianus
gtgtatccaaactgtctcttcattt

SEQ ID NO: 96664 - DNA, 25 bp, Saccharomyces pastorianus
catggagtcggcgatcgttaacgaa

SEQ ID NO: 96665 - DNA, 25 bp, Saccharomyces pastorianus
gtcactggcaaacatccaatacgta

SEQ ID NO: 96666 - DNA, 25 bp, Saccharomyces pastorianus
aatggaaacgcaccagcgacacctt

SEQ ID NO: 96667 - DNA, 25 bp, Saccharomyces pastorianus
agcagatctggaagtctcctaactt

SEQ ID NO: 96668 - DNA, 25 bp, Saccharomyces pastorianus
ccccttattcgcaatgcattgtgta

SEQ ID NO: 96669 - DNA, 25 bp, Saccharomyces pastorianus
agcgacaccttcctcggatcaaaat

SEQ ID NO: 96670 - DNA, 25 bp, Saccharomyces pastorianus
gtacttactcactcaacagcagatc

SEQ ID NO: 96671 - DNA, 25 bp, Saccharomyces pastorianus
cgttaacgaagatggcctgctggaa

SEQ ID NO: 96672 - DNA, 25 bp, Saccharomyces pastorianus
ttggtcacgtggttatggcagctgc

SEQ ID NO: 96673 - DNA, 25 bp, Saccharomyces pastorianus
tggcagcttgtacgattggtgaccc

SEQ ID NO: 96674 - DNA, 25 bp, Saccharomyces pastorianus
tgttcttggccaccttgatgtgcat

SEQ ID NO: 96675 - DNA, 25 bp, Saccharomyces pastorianus
ttttcgacactggaccgctatggac

SEQ ID NO: 96676 - DNA, 25 bp, Saccharomyces pastorianus
cacagtgcagacgttttggaggcca

SEQ ID NO: 96677 - DNA, 25 bp, Saccharomyces pastorianus
tgctccgtttgacgcgatgcatagc

SEQ ID NO: 96678 - DNA, 25 bp, Saccharomyces pastorianus
tgccgctgccatcaatacttttatt

SEQ ID NO: 96679 - DNA, 25 bp, Saccharomyces pastorianus
acatgtctggattgctagccgcgta

SEQ ID NO: 96680 - DNA, 25 bp, Saccharomyces pastorianus
gtaatcatactgctgacgctattgg

SEQ ID NO: 96681 - DNA, 25 bp, Saccharomyces pastorianus
actggttcacttgtacgcgcagaaa

SEQ ID NO: 96682 - DNA, 25 bp, Saccharomyces pastorianus
gtgcatgtttcttctaggtgagcta

SEQ ID NO: 96683 - DNA, 25 bp, Saccharomyces pastorianus
gccttcttggtcatcaactacttga

SEQ ID NO: 96684 - DNA, 25 bp, Saccharomyces pastorianus
aggtgacctgctaagtaatcatcca

SEQ ID NO: 96685 - DNA, 25 bp, Saccharomyces pastorianus
gtttaccttggagtgatatccccat

SEQ ID NO: 96686 - DNA, 25 bp, Saccharomyces pastorianus
atagtgcccaattcattcagtcctt

SEQ ID NO: 96687 - DNA, 25 bp, Saccharomyces pastorianus
atcatcactataaactctcaacctc

SEQ ID NO: 96688 - DNA, 25 bp, Saccharomyces pastorianus
gacaatgactacatttctccagatg

SEQ ID NO: 96689 - DNA, 25 bp, Saccharomyces pastorianus
aattcttcaacctaccattgtcgag

SEQ ID NO: 96690 - DNA, 25 bp, Saccharomyces pastorianus
gaaaatctcgttcttagcgtggaag

SEQ ID NO: 96691 - DNA, 25 bp, Saccharomyces pastorianus
gcacacttgattgagctgaaccaac

SEQ ID NO: 96692 - DNA, 25 bp, Saccharomyces pastorianus
gacgattactgcctggtcaatattg

SEQ ID NO: 96693 - DNA, 25 bp, Saccharomyces pastorianus
agttgcccaagttgattgacacctt

SEQ ID NO: 96694 - DNA, 25 bp, Saccharomyces pastorianus
caacagttacatggcacggtagtga

SEQ ID NO: 96695 - DNA, 25 bp, Saccharomyces pastorianus
gaggacttggcgatggacgaaacac

SEQ ID NO: 96696 - DNA, 25 bp, Saccharomyces pastorianus
gcaccaatggttcatcatttcatat

SEQ ID NO: 96697 - DNA, 25 bp, Saccharomyces pastorianus
gcgatataccagcaccaatggttca

SEQ ID NO: 96698 - DNA, 25 bp, Saccharomyces pastorianus
ggatgcattcttttcattgaagtcg

SEQ ID NO: 96699 - DNA, 25 bp, Saccharomyces pastorianus
aatggcaatttgttaagtaggtcta

SEQ ID NO: 96700 - DNA, 25 bp, Saccharomyces pastorianus
gaagacatactaccaacagttacat

SEQ ID NO: 96701 - DNA, 25 bp, Saccharomyces pastorianus
atgttatgccgcacttcgaagtcaa

SEQ ID NO: 96702 - DNA, 25 bp, Saccharomyces pastorianus
acatcgcactggattcttcacaggg

SEQ ID NO: 96703 - DNA, 25 bp, Saccharomyces pastorianus
tcgaagtcaacagtaacatcgcact

SEQ ID NO: 96704 - DNA, 25 bp, Saccharomyces pastorianus
aagggttcaagcttagcgatatacc

SEQ ID NO: 96705 - DNA, 25 bp, Saccharomyces pastorianus
attgacactttgttgccaggtttgc

SEQ ID NO: 96706 - DNA, 25 bp, Saccharomyces pastorianus
ccgccaaggaagttgctggtgccat

SEQ ID NO: 96707 - DNA, 25 bp, Saccharomyces pastorianus
tgctttcgttgctattggtaacaca

SEQ ID NO: 96708 - DNA, 25 bp, Saccharomyces pastorianus
tgcactctttgccagtcaaggaatt

SEQ ID NO: 96709 - DNA, 25 bp, Saccharomyces pastorianus
gccaggtttgcaagacgaagtcatg

SEQ ID NO: 96710 - DNA, 25 bp, Saccharomyces pastorianus
tatcaagaccgccaaggaagttgct

SEQ ID NO: 96711 - DNA, 25 bp, Saccharomyces pastorianus
aggaattccaaatcattgacacttt

SEQ ID NO: 96712 - DNA, 25 bp, Saccharomyces pastorianus
tattgccaagttgtccgttatccca

SEQ ID NO: 96713 - DNA, 25 bp, Saccharomyces pastorianus
tattggtaacacatacggtttcttg

SEQ ID NO: 96714 - DNA, 25 bp, Saccharomyces pastorianus
aagaaatcttcttgcactctttgcc

SEQ ID NO: 96715 - DNA, 25 bp, Saccharomyces pastorianus
ctctttgccagtcaaggaattccaa

SEQ ID NO: 96716 - DNA, 25 bp, Saccharomyces pastorianus
gccttgactaatctacctagtttgg

SEQ ID NO: 96717 - DNA, 25 bp, Saccharomyces pastorianus
ttggtcctcttctgtttggacggcc

SEQ ID NO: 96718 - DNA, 25 bp, Saccharomyces pastorianus
ttttcttcagtgtttcttggtcctc

SEQ ID NO: 96719 - DNA, 25 bp, Saccharomyces pastorianus
agtgtttcttggtcctcttctgttt

SEQ ID NO: 96720 - DNA, 25 bp, Saccharomyces pastorianus
atcccttttcttcagtgtttcttgg

SEQ ID NO: 96721 - DNA, 25 bp, Saccharomyces pastorianus
tcttcagtgtttcttggtcctcttc

SEQ ID NO: 96722 - DNA, 25 bp, Saccharomyces pastorianus
tcttctgtttggacggcctctgtta

SEQ ID NO: 96723 - DNA, 25 bp, Saccharomyces pastorianus
gtttcttggtcctcttctgtttgga

SEQ ID NO: 96724 - DNA, 25 bp, Saccharomyces pastorianus
taatctacctagtttggtaactgga

SEQ ID NO: 96725 - DNA, 25 bp, Saccharomyces pastorianus
accagccttgactaatctacctagt

SEQ ID NO: 96726 - DNA, 25 bp, Saccharomyces pastorianus
tggaacccatcccttttcttcagtg

SEQ ID NO: 96727 - DNA, 25 bp, Saccharomyces pastorianus
gaaaggcccactcttcattgtcgaa

SEQ ID NO: 96728 - DNA, 25 bp, Saccharomyces pastorianus
ttgaaaatgctcctccgcaaaccag

SEQ ID NO: 96729 - DNA, 25 bp, Saccharomyces pastorianus
tattcagacatcctccaggcagagt

SEQ ID NO: 96730 - DNA, 25 bp, Saccharomyces pastorianus
atgtaagttcggtacgcactgcacc

SEQ ID NO: 96731 - DNA, 25 bp, Saccharomyces pastorianus
tagacatgctcgttctcatattatg

SEQ ID NO: 96732 - DNA, 25 bp, Saccharomyces pastorianus
gaaaggccatttgcattgccagaaa

SEQ ID NO: 96733 - DNA, 25 bp, Saccharomyces pastorianus
gtcatgcccatttggtcatccaaca

SEQ ID NO: 96734 - DNA, 25 bp, Saccharomyces pastorianus
accggtacaaactggtatcgttctg

SEQ ID NO: 96735 - DNA, 25 bp, Saccharomyces pastorianus
gcagctccacctccggttgaaaagt

SEQ ID NO: 96736 - DNA, 25 bp, Saccharomyces pastorianus
gggctctgtgttccaatccgtcatg

SEQ ID NO: 96737 - DNA, 25 bp, Saccharomyces pastorianus
aaagaaaggcgctgcacccaattca

SEQ ID NO: 96738 - DNA, 25 bp, Saccharomyces pastorianus
gaactggactgggacatcgacgatt

SEQ ID NO: 96739 - DNA, 25 bp, Saccharomyces pastorianus
aaggaaccaggcgagacgcttatat

SEQ ID NO: 96740 - DNA, 25 bp, Saccharomyces pastorianus
gagagttgcacacacttaccgatcg

SEQ ID NO: 96741 - DNA, 25 bp, Saccharomyces pastorianus
acaacactgccatctttgttagcac

SEQ ID NO: 96742 - DNA, 25 bp, Saccharomyces pastorianus
gggctgaaccaacttataatttctg

SEQ ID NO: 96743 - DNA, 25 bp, Saccharomyces pastorianus
tcgtcaccgttgtcggagagttgca

SEQ ID NO: 96744 - DNA, 25 bp, Saccharomyces pastorianus
ggaagttttgttattctccaatact

SEQ ID NO: 96745 - DNA, 25 bp, Saccharomyces pastorianus
agggaagttactgccacaacactgc

SEQ ID NO: 96746 - DNA, 25 bp, Saccharomyces pastorianus
atactcaagaaaacctcgtcaccgt

SEQ ID NO: 96747 - DNA, 25 bp, Saccharomyces pastorianus
ttaccgatcgtgtggttcattacaa

SEQ ID NO: 96748 - DNA, 25 bp, Saccharomyces pastorianus
gacgcttatatagggatgtgctttc

SEQ ID NO: 96749 - DNA, 25 bp, Saccharomyces pastorianus
gcaaacggatcctaattgggcaaat

SEQ ID NO: 96750 - DNA, 25 bp, Saccharomyces pastorianus
gacgcgcacgtcgatagtgtactta

SEQ ID NO: 96751 - DNA, 25 bp, Saccharomyces pastorianus
actgggctatctcacaggcttagaa

SEQ ID NO: 96752 - DNA, 25 bp, Saccharomyces pastorianus
acaggcttagaatcgcagtccatga

SEQ ID NO: 96753 - DNA, 25 bp, Saccharomyces pastorianus
gtgtacttacacttggtgaaccttt

SEQ ID NO: 96754 - DNA, 25 bp, Saccharomyces pastorianus
tgggcaaatttcctctataacggta

SEQ ID NO: 96755 - DNA, 25 bp, Saccharomyces pastorianus
tgaaagactatgtccgccaccagaa

SEQ ID NO: 96756 - DNA, 25 bp, Saccharomyces pastorianus
ggatttcggtgcatctagacctttt

SEQ ID NO: 96757 - DNA, 25 bp, Saccharomyces pastorianus
agtggcatttttcttttgtgtgcaa

SEQ ID NO: 96758 - DNA, 25 bp, Saccharomyces pastorianus
aatgtctgtacaactgggctatctc

SEQ ID NO: 96759 - DNA, 25 bp, Saccharomyces pastorianus
aacttttaacttacgccacattgag

SEQ ID NO: 96760 - DNA, 25 bp, Saccharomyces pastorianus
caactccttgcggtttttgaatgat

SEQ ID NO: 96761 - DNA, 25 bp, Saccharomyces pastorianus
gataccatattattccacaagcgca

SEQ ID NO: 96762 - DNA, 25 bp, Saccharomyces pastorianus
agacactgttaatcggttcatccac

SEQ ID NO: 96763 - DNA, 25 bp, Saccharomyces pastorianus
gaaaatctcattcacttgtaccatt

SEQ ID NO: 96764 - DNA, 25 bp, Saccharomyces pastorianus
atcctccacgggtatgttactattg

SEQ ID NO: 96765 - DNA, 25 bp, Saccharomyces pastorianus
aaacttttgggtgatctggtcagtc

SEQ ID NO: 96766 - DNA, 25 bp, Saccharomyces pastorianus
atacacaattccaacgcttacacag

SEQ ID NO: 96767 - DNA, 25 bp, Saccharomyces pastorianus
aatttcatgcttgatatcctccacg

SEQ ID NO: 96768 - DNA, 25 bp, Saccharomyces pastorianus
acactctgctttgtttcctttgata

SEQ ID NO: 96769 - DNA, 25 bp, Saccharomyces pastorianus
catcttcattgggtgttggacactc

SEQ ID NO: 96770 - DNA, 25 bp, Saccharomyces pastorianus
gcaattaccaacaccactggtcgat

SEQ ID NO: 96771 - DNA, 25 bp, Saccharomyces pastorianus
agaagacgcatagtgctgctgtaaa

SEQ ID NO: 96772 - DNA, 25 bp, Saccharomyces pastorianus
tattcgccaaatattctagcctctg

SEQ ID NO: 96773 - DNA, 25 bp, Saccharomyces pastorianus
taagctggtgtccatattcgccaaa

SEQ ID NO: 96774 - DNA, 25 bp, Saccharomyces pastorianus
gaatatgctgttctcaattgtcccc

SEQ ID NO: 96775 - DNA, 25 bp, Saccharomyces pastorianus
atcacaggtgcacgagttggctcaa

SEQ ID NO: 96776 - DNA, 25 bp, Saccharomyces pastorianus
gattgttgccacaggaggtaatcca

SEQ ID NO: 96777 - DNA, 25 bp, Saccharomyces pastorianus
aattgtcccctgacggaaccacatt

SEQ ID NO: 96778 - DNA, 25 bp, Saccharomyces pastorianus
tttgggataccagaacgtccttgcc

SEQ ID NO: 96779 - DNA, 25 bp, Saccharomyces pastorianus
gttggctcaatcaataccggatccc

SEQ ID NO: 96780 - DNA, 25 bp, Saccharomyces pastorianus
cgtccttgcctcaattttccaagaa

SEQ ID NO: 96781 - DNA, 25 bp, Saccharomyces pastorianus
gggccaaagtcatacgtcaaccaat

SEQ ID NO: 96782 - DNA, 25 bp, Saccharomyces pastorianus
gcatacgatgtcctaggcttgataa

SEQ ID NO: 96783 - DNA, 25 bp, Saccharomyces pastorianus
ttctttgtagttgatgacgtcggac

SEQ ID NO: 96784 - DNA, 25 bp, Saccharomyces pastorianus
ggaggcatctacaacgacctgtcat

SEQ ID NO: 96785 - DNA, 25 bp, Saccharomyces pastorianus
tttcttccgtccctattattgacga

SEQ ID NO: 96786 - DNA, 25 bp, Saccharomyces pastorianus
gacgtcattcagatgcttacccaag

SEQ ID NO: 96787 - DNA, 25 bp, Saccharomyces pastorianus
gaccactccggtcatagacgtcatt

SEQ ID NO: 96788 - DNA, 25 bp, Saccharomyces pastorianus
agatacagcttcaattcatccttct

SEQ ID NO: 96789 - DNA, 25 bp, Saccharomyces pastorianus
gatgcttacccaaggtcgggtttct

SEQ ID NO: 96790 - DNA, 25 bp, Saccharomyces pastorianus
aattgtcgttagtgttcttacgcaa

SEQ ID NO: 96791 - DNA, 25 bp, Saccharomyces pastorianus
cattgagcgtcggagaagcccttat

SEQ ID NO: 96792 - DNA, 25 bp, Saccharomyces pastorianus
cgggctctcggtgttgatcaactag

SEQ ID NO: 96793 - DNA, 25 bp, Saccharomyces pastorianus
aagagctcagttctgtgcccaattg

SEQ ID NO: 96794 - DNA, 25 bp, Saccharomyces pastorianus
aagggctccctgataaggccttgga

SEQ ID NO: 96795 - DNA, 25 bp, Saccharomyces pastorianus
gtattcagttcagggttggtcttag

SEQ ID NO: 96796 - DNA, 25 bp, Saccharomyces pastorianus
caattgcaagattcatcggcgggtg

SEQ ID NO: 96797 - DNA, 25 bp, Saccharomyces pastorianus
attctcccagttttacaattgcaag

SEQ ID NO: 96798 - DNA, 25 bp, Saccharomyces pastorianus
gcaattcagggtaccgacagcagta

SEQ ID NO: 96799 - DNA, 25 bp, Saccharomyces pastorianus
aggtattgcagaagcctctgcccaa

SEQ ID NO: 96800 - DNA, 25 bp, Saccharomyces pastorianus
cttggagtgctccatgattctcgga

SEQ ID NO: 96801 - DNA, 25 bp, Saccharomyces pastorianus
tatattccgtctggtgtagcggtcg

SEQ ID NO: 96802 - DNA, 25 bp, Saccharomyces pastorianus
ggagtcatatttgccgttttatcat

SEQ ID NO: 96803 - DNA, 25 bp, Saccharomyces pastorianus
attcaatcccgagtgagcaattcag

SEQ ID NO: 96804 - DNA, 25 bp, Saccharomyces pastorianus
gcagaaaatctatagcttcgcccac

SEQ ID NO: 96805 - DNA, 25 bp, Saccharomyces pastorianus
ttcaagccactcctgctgtgaaaaa

SEQ ID NO: 96806 - DNA, 25 bp, Saccharomyces pastorianus
agcatcattgaatcgccgctaaatt

SEQ ID NO: 96807 - DNA, 25 bp, Saccharomyces pastorianus
ggtggacgctaatttgttcagcaga

SEQ ID NO: 96808 - DNA, 25 bp, Saccharomyces pastorianus
accgaattcatcaactatcacactc

SEQ ID NO: 96809 - DNA, 25 bp, Saccharomyces pastorianus
taaagcgcccttcacaattgggaag

SEQ ID NO: 96810 - DNA, 25 bp, Saccharomyces pastorianus
aaaacggcagttttctgtctctgac

SEQ ID NO: 96811 - DNA, 25 bp, Saccharomyces pastorianus
cctttctcgcactcaactattaatg

SEQ ID NO: 96812 - DNA, 25 bp, Saccharomyces pastorianus
aaggcgcaacttcaaagcatcattg

SEQ ID NO: 96813 - DNA, 25 bp, Saccharomyces pastorianus
tattacctctactcccactaataag

SEQ ID NO: 96814 - DNA, 25 bp, Saccharomyces pastorianus
aacgatacgcctacatgaacgtgta

SEQ ID NO: 96815 - DNA, 25 bp, Saccharomyces pastorianus
ttttgggacttactatgggtgctta

SEQ ID NO: 96816 - DNA, 25 bp, Saccharomyces pastorianus
gtggtgtcactattggatttcacat

SEQ ID NO: 96817 - DNA, 25 bp, Saccharomyces pastorianus
attttgccgcatctttgttggacta

SEQ ID NO: 96818 - DNA, 25 bp, Saccharomyces pastorianus
gtgcttaaagggtgtatcggtacta

SEQ ID NO: 96819 - DNA, 25 bp, Saccharomyces pastorianus
tattcattcgttaatgccttccatt

SEQ ID NO: 96820 - DNA, 25 bp, Saccharomyces pastorianus
gccttccattttaaccttgctatta

SEQ ID NO: 96821 - DNA, 25 bp, Saccharomyces pastorianus
aagcatacaaatccctgaagccaag

SEQ ID NO: 96822 - DNA, 25 bp, Saccharomyces pastorianus
gaaacctaaataattgggcgcgctt

SEQ ID NO: 96823 - DNA, 25 bp, Saccharomyces pastorianus
attgggcgcgcttggtattcaatga

SEQ ID NO: 96824 - DNA, 25 bp, Saccharomyces pastorianus
ttgaacgatgactccaatccaacta

SEQ ID NO: 96825 - DNA, 25 bp, Saccharomyces pastorianus
ggacactgctaaagacatttttgga

SEQ ID NO: 96826 - DNA, 25 bp, Saccharomyces pastorianus
aaatcgagatgccactaagtccaag

SEQ ID NO: 96827 - DNA, 25 bp, Saccharomyces pastorianus
gaactgaatgtgattactactgact

SEQ ID NO: 96828 - DNA, 25 bp, Saccharomyces pastorianus
gatttattacctaaccgtgaaccat

SEQ ID NO: 96829 - DNA, 25 bp, Saccharomyces pastorianus
gaactaccagtttgcagccataacc

SEQ ID NO: 96830 - DNA, 25 bp, Saccharomyces pastorianus
tgaaggtttatgttgggtcccgtat

SEQ ID NO: 96831 - DNA, 25 bp, Saccharomyces pastorianus
gaaaaccgttcgctcagatagattt

SEQ ID NO: 96832 - DNA, 25 bp, Saccharomyces pastorianus
taaccgtgaaccattatctcagatg

SEQ ID NO: 96833 - DNA, 25 bp, Saccharomyces pastorianus
ggttcgtcaacctatattcatgtac

SEQ ID NO: 96834 - DNA, 25 bp, Saccharomyces pastorianus
gatgatatcactggttcgtcaacct

SEQ ID NO: 96835 - DNA, 25 bp, Saccharomyces pastorianus
aagtccaagtgcgaaagctgccaaa

SEQ ID NO: 96836 - DNA, 25 bp, Saccharomyces pastorianus
gataggtatgttcgcatcttcgata

SEQ ID NO: 96837 - DNA, 25 bp, Saccharomyces pastorianus
aagaaatgacttcatggtcggatga

SEQ ID NO: 96838 - DNA, 25 bp, Saccharomyces pastorianus
gaagccgatgtgaaccggtccgatc

SEQ ID NO: 96839 - DNA, 25 bp, Saccharomyces pastorianus
tgaaccggtccgatccttcgaaaag

SEQ ID NO: 96840 - DNA, 25 bp, Saccharomyces pastorianus
tatgttcataatcgtgatagccaaa

SEQ ID NO: 96841 - DNA, 25 bp, Saccharomyces pastorianus
gaaacttttatacgaggctgatgaa

SEQ ID NO: 96842 - DNA, 25 bp, Saccharomyces pastorianus
gaagtgcgacaagatcataactatc

SEQ ID NO: 96843 - DNA, 25 bp, Saccharomyces pastorianus
acagggaaaacgtcttatgttcata

SEQ ID NO: 96844 - DNA, 25 bp, Saccharomyces pastorianus
gaaacatgaacctcaatctactgaa

SEQ ID NO: 96845 - DNA, 25 bp, Saccharomyces pastorianus
gaagcttacttgtggaatctattga

SEQ ID NO: 96846 - DNA, 25 bp, Saccharomyces pastorianus
gggccagagctaaccataaccgtaa

SEQ ID NO: 96847 - DNA, 25 bp, Saccharomyces pastorianus
gatctcctacacgagcaagactttt

SEQ ID NO: 96848 - DNA, 25 bp, Saccharomyces pastorianus
aactgatacaagtgatccgagcaaa

SEQ ID NO: 96849 - DNA, 25 bp, Saccharomyces pastorianus
aggccgcaaggttagctgctgagaa

SEQ ID NO: 96850 - DNA, 25 bp, Saccharomyces pastorianus
aagttagcccaaaggaggccgcaag

SEQ ID NO: 96851 - DNA, 25 bp, Saccharomyces pastorianus
aatcgtgatacagtcaagtcaaagc

SEQ ID NO: 96852 - DNA, 25 bp, Saccharomyces pastorianus
gccaagtctcataagactcgcttaa

SEQ ID NO: 96853 - DNA, 25 bp, Saccharomyces pastorianus
gaacaaagccaattaatcgtgatac

SEQ ID NO: 96854 - DNA, 25 bp, Saccharomyces pastorianus
agactcgcttaatggaagaggccga

SEQ ID NO: 96855 - DNA, 25 bp, Saccharomyces pastorianus
actgtcccggttgtgcaaaagaaag

SEQ ID NO: 96856 - DNA, 25 bp, Saccharomyces pastorianus
tgctcaagagcgtgccaagtctcat

SEQ ID NO: 96857 - DNA, 25 bp, Saccharomyces pastorianus
caatgccttcacaaactacgacggt

SEQ ID NO: 96858 - DNA, 25 bp, Saccharomyces pastorianus
agagtacaactgtcccggttgtgca

SEQ ID NO: 96859 - DNA, 25 bp, Saccharomyces pastorianus
agagcatctatctggcacgaacgca

SEQ ID NO: 96860 - DNA, 25 bp, Saccharomyces pastorianus
ggatgcgcagagtcatacccaatat

SEQ ID NO: 96861 - DNA, 25 bp, Saccharomyces pastorianus
gacgacataaaagttccgaagccat

SEQ ID NO: 96862 - DNA, 25 bp, Saccharomyces pastorianus
actttcgcgctaccaagcaagtata

SEQ ID NO: 96863 - DNA, 25 bp, Saccharomyces pastorianus
gacttgagtgccgaggacattcctg

SEQ ID NO: 96864 - DNA, 25 bp, Saccharomyces pastorianus
aaggaacaccagcaacggcaacgac

SEQ ID NO: 96865 - DNA, 25 bp, Saccharomyces pastorianus
tatagccaatgctgatctgtccgct

SEQ ID NO: 96866 - DNA, 25 bp, Saccharomyces pastorianus
aagatatacgccctactttcgcgct

SEQ ID NO: 96867 - DNA, 25 bp, Saccharomyces pastorianus
gtatctgagcggttattctgacttg

SEQ ID NO: 96868 - DNA, 25 bp, Saccharomyces pastorianus
ggatgccactgtcgtatggtcacaa

SEQ ID NO: 96869 - DNA, 25 bp, Saccharomyces pastorianus
atctgtccgctttgagggatgccac

SEQ ID NO: 96870 - DNA, 25 bp, Saccharomyces pastorianus
caggcaaggtatccgttggtgactt

SEQ ID NO: 96871 - DNA, 25 bp, Saccharomyces pastorianus
aggcgccattgccaaggattccttg

SEQ ID NO: 96872 - DNA, 25 bp, Saccharomyces pastorianus
gacgctggaccagattacaggccta

SEQ ID NO: 96873 - DNA, 25 bp, Saccharomyces pastorianus
aaggcattccaggtcttcgacaagg

SEQ ID NO: 96874 - DNA, 25 bp, Saccharomyces pastorianus
caaccagctcgtacaggacatcata

SEQ ID NO: 96875 - DNA, 25 bp, Saccharomyces pastorianus
ggacatcataaacgcggattcgagc

SEQ ID NO: 96876 - DNA, 25 bp, Saccharomyces pastorianus
gagacgcctctagcttgacgctgga

SEQ ID NO: 96877 - DNA, 25 bp, Saccharomyces pastorianus
gtacatgctaactggcttgggtgaa

SEQ ID NO: 96878 - DNA, 25 bp, Saccharomyces pastorianus
gaattggatgcaaccaccaaggcaa

SEQ ID NO: 96879 - DNA, 25 bp, Saccharomyces pastorianus
gacagaagacttcgtcaaggcattc

SEQ ID NO: 96880 - DNA, 25 bp, Saccharomyces pastorianus
gattcgagcttgagagacgcctcta

SEQ ID NO: 96881 - DNA, 25 bp, Saccharomyces pastorianus
tccaccgtcttagtttctgttaccg

SEQ ID NO: 96882 - DNA, 25 bp, Saccharomyces pastorianus
gctaattcatagtttgccacgtaaa

SEQ ID NO: 96883 - DNA, 25 bp, Saccharomyces pastorianus
tctgttaccgccttcattatgggaa

SEQ ID NO: 96884 - DNA, 25 bp, Saccharomyces pastorianus
tatcattgcatataccttccctatt

SEQ ID NO: 96885 - DNA, 25 bp, Saccharomyces pastorianus
ttagtcaactgtatcctcagcacgc

SEQ ID NO: 96886 - DNA, 25 bp, Saccharomyces pastorianus
gttatttggccaacaattctgcggt

SEQ ID NO: 96887 - DNA, 25 bp, Saccharomyces pastorianus
gcatgctcaataagcgcctttatct

SEQ ID NO: 96888 - DNA, 25 bp, Saccharomyces pastorianus
aagtctcgccatgttatcactgtat

SEQ ID NO: 96889 - DNA, 25 bp, Saccharomyces pastorianus
gtcaccatactagtttctctgctaa

SEQ ID NO: 96890 - DNA, 25 bp, Saccharomyces pastorianus
aggatatggtccttgcgcaaagata

SEQ ID NO: 96891 - DNA, 25 bp, Saccharomyces pastorianus
gtaaaccgcttctgatgacgtccac

SEQ ID NO: 96892 - DNA, 25 bp, Saccharomyces pastorianus
gtccaagttcaagactggcttccag

SEQ ID NO: 96893 - DNA, 25 bp, Saccharomyces pastorianus
tggaattctacccttacccaagatc

SEQ ID NO: 96894 - DNA, 25 bp, Saccharomyces pastorianus
gggtgctttctgtgcttaccgatac

SEQ ID NO: 96895 - DNA, 25 bp, Saccharomyces pastorianus
aactggagcagtttccttggaagca

SEQ ID NO: 96896 - DNA, 25 bp, Saccharomyces pastorianus
tgtggtgatgttgaccaccggccat

SEQ ID NO: 96897 - DNA, 25 bp, Saccharomyces pastorianus
accaccagcagctctgattttttct

SEQ ID NO: 96898 - DNA, 25 bp, Saccharomyces pastorianus
gatttcaggtattggtctctcttgt

SEQ ID NO: 96899 - DNA, 25 bp, Saccharomyces pastorianus
gattttttcttcagccaacttggag

SEQ ID NO: 96900 - DNA, 25 bp, Saccharomyces pastorianus
gtctctcttgtcttctgggatcaat

SEQ ID NO: 96901 - DNA, 25 bp, Saccharomyces pastorianus
aagatcttaccgtaaccggcagcca

SEQ ID NO: 96902 - DNA, 25 bp, Saccharomyces pastorianus
aagtatctcataccaaccttaccga

SEQ ID NO: 96903 - DNA, 25 bp, Saccharomyces pastorianus
aatggcgaagtttggtccgtgtctt

SEQ ID NO: 96904 - DNA, 25 bp, Saccharomyces pastorianus
gaaggtacgtttatggaaagccact

SEQ ID NO: 96905 - DNA, 25 bp, Saccharomyces pastorianus
tgcacagggcagatcagactcaaat

SEQ ID NO: 96906 - DNA, 25 bp, Saccharomyces pastorianus
ggtcatggacactgacttctgagat

SEQ ID NO: 96907 - DNA, 25 bp, Saccharomyces pastorianus
gacggtaaacttcacgttgcagcaa

SEQ ID NO: 96908 - DNA, 25 bp, Saccharomyces pastorianus
ggcctcagaggagtctttaactaac

SEQ ID NO: 96909 - DNA, 25 bp, Saccharomyces pastorianus
gaaaaactaagtcccctggcctcag

SEQ ID NO: 96910 - DNA, 25 bp, Saccharomyces pastorianus
gttgcagcaaaacttcccggtcata

SEQ ID NO: 96911 - DNA, 25 bp, Saccharomyces pastorianus
gtagatggtatcaactcattgcaac

SEQ ID NO: 96912 - DNA, 25 bp, Saccharomyces pastorianus
gcaagttgaacttctaagcgagcat

SEQ ID NO: 96913 - DNA, 25 bp, Saccharomyces pastorianus
aaagctcgcagtctctgcattggaa

SEQ ID NO: 96914 - DNA, 25 bp, Saccharomyces pastorianus
ggatgatacaccttacactagagaa

SEQ ID NO: 96915 - DNA, 25 bp, Saccharomyces pastorianus
gaagccaaatctgttacgcacggtg

SEQ ID NO: 96916 - DNA, 25 bp, Saccharomyces pastorianus
caaggttacggttctgctgatgaac

SEQ ID NO: 96917 - DNA, 25 bp, Saccharomyces pastorianus
aagaattgttagtcgcatacgccag

SEQ ID NO: 96918 - DNA, 25 bp, Saccharomyces pastorianus
gtacaatgccgctgaggacttggat

SEQ ID NO: 96919 - DNA, 25 bp, Saccharomyces pastorianus
gcatacgccagagctcgtggttata

SEQ ID NO: 96920 - DNA, 25 bp, Saccharomyces pastorianus
gaaattactgtatgtcaaccctccg

SEQ ID NO: 96921 - DNA, 25 bp, Saccharomyces pastorianus
gttcgacagattaccggacaccaga

SEQ ID NO: 96922 - DNA, 25 bp, Saccharomyces pastorianus
gggatataccaactgctcaagaatt

SEQ ID NO: 96923 - DNA, 25 bp, Saccharomyces pastorianus
aacattttcagctcacactggtggt

SEQ ID NO: 96924 - DNA, 25 bp, Saccharomyces pastorianus
ctccgccccatctagaggatgatac

SEQ ID NO: 96925 - DNA, 25 bp, Saccharomyces pastorianus
tcatttttatgattctcggactggt

SEQ ID NO: 96926 - DNA, 25 bp, Saccharomyces pastorianus
aatggagtcacagtacgaacagtac

SEQ ID NO: 96927 - DNA, 25 bp, Saccharomyces pastorianus
ggatatgagcaaacttgtgggcagt

SEQ ID NO: 96928 - DNA, 25 bp, Saccharomyces pastorianus
gcaaggagctgtggcatttcaatca

SEQ ID NO: 96929 - DNA, 25 bp, Saccharomyces pastorianus
atctgcaaacaaaacatgacgccca

SEQ ID NO: 96930 - DNA, 25 bp, Saccharomyces pastorianus
gcaagttcttggagctgcagagata

SEQ ID NO: 96931 - DNA, 25 bp, Saccharomyces pastorianus
ggtattcaagttgcttctcaaggtt

SEQ ID NO: 96932 - DNA, 25 bp, Saccharomyces pastorianus
gttgacacggaatcgcaaacagaat

SEQ ID NO: 96933 - DNA, 25 bp, Saccharomyces pastorianus
gattctcggactggtatttacattt

SEQ ID NO: 96934 - DNA, 25 bp, Saccharomyces pastorianus
tgaggaccaggacacgttgcaacag

SEQ ID NO: 96935 - DNA, 25 bp, Saccharomyces pastorianus
gattctgtagatgcagttgacacgg

SEQ ID NO: 96936 - DNA, 25 bp, Saccharomyces pastorianus
gttatccagggatcgtttcaaagaa

SEQ ID NO: 96937 - DNA, 25 bp, Saccharomyces pastorianus
tcgtcattactaacagatctctcta

SEQ ID NO: 96938 - DNA, 25 bp, Saccharomyces pastorianus
tagccgccaggataaaatgactcaa

SEQ ID NO: 96939 - DNA, 25 bp, Saccharomyces pastorianus
gagattctgtctcaacaacttcctc

SEQ ID NO: 96940 - DNA, 25 bp, Saccharomyces pastorianus
gagcaacaccgctgaaaacgtctat

SEQ ID NO: 96941 - DNA, 25 bp, Saccharomyces pastorianus
ggacgatatattaaccgaactagca

SEQ ID NO: 96942 - DNA, 25 bp, Saccharomyces pastorianus
tcctccagaggacgtcaactttttc

SEQ ID NO: 96943 - DNA, 25 bp, Saccharomyces pastorianus
aggcaaggctagtccatgatttcaa

SEQ ID NO: 96944 - DNA, 25 bp, Saccharomyces pastorianus
aatctatcagcacacgatgccaatg

SEQ ID NO: 96945 - DNA, 25 bp, Saccharomyces pastorianus
gaggcacctctatactttcaactaa

SEQ ID NO: 96946 - DNA, 25 bp, Saccharomyces pastorianus
tttaaatcgctttttagccgccagg

SEQ ID NO: 96947 - DNA, 25 bp, Saccharomyces pastorianus
gatatctttcattgcgttatctggc

SEQ ID NO: 96948 - DNA, 25 bp, Saccharomyces pastorianus
attgaagatgcccatactgccttga

SEQ ID NO: 96949 - DNA, 25 bp, Saccharomyces pastorianus
agctcggatgcgtatttgttggtca

SEQ ID NO: 96950 - DNA, 25 bp, Saccharomyces pastorianus
ttcctggtgacttggaccctgaaaa

SEQ ID NO: 96951 - DNA, 25 bp, Saccharomyces pastorianus
attgatgccgaatttgtctcattac

SEQ ID NO: 96952 - DNA, 25 bp, Saccharomyces pastorianus
gacctaaaagaactgctttggccag

SEQ ID NO: 96953 - DNA, 25 bp, Saccharomyces pastorianus
atagtgggattcttcctggtgactt

SEQ ID NO: 96954 - DNA, 25 bp, Saccharomyces pastorianus
gtctggcttttaatgcagctcggat

SEQ ID NO: 96955 - DNA, 25 bp, Saccharomyces pastorianus
tatggagtaccatttgtcgatgatt

SEQ ID NO: 96956 - DNA, 25 bp, Saccharomyces pastorianus
cgcgacactgccatatattttctac

SEQ ID NO: 96957 - DNA, 25 bp, Saccharomyces pastorianus
gcgttatctggcatatgtgttgtta

SEQ ID NO: 96958 - DNA, 25 bp, Saccharomyces pastorianus
ggaagcgcttttgcagttcaaggat

SEQ ID NO: 96959 - DNA, 25 bp, Saccharomyces pastorianus
gatagcatgctttcgaacctttttt

SEQ ID NO: 96960 - DNA, 25 bp, Saccharomyces pastorianus
gatcagtggagttcttccttcattt

SEQ ID NO: 96961 - DNA, 25 bp, Saccharomyces pastorianus
gggtacgctttctgaaattctcaaa

SEQ ID NO: 96962 - DNA, 25 bp, Saccharomyces pastorianus
acgggaagtcctctctgacaggata

SEQ ID NO: 96963 - DNA, 25 bp, Saccharomyces pastorianus
tacgttatatcccttgtctcatttg

SEQ ID NO: 96964 - DNA, 25 bp, Saccharomyces pastorianus
gagttaccacttattcacaatgttg

SEQ ID NO: 96965 - DNA, 25 bp, Saccharomyces pastorianus
acaagattgctcaccgtcacgggaa

SEQ ID NO: 96966 - DNA, 25 bp, Saccharomyces pastorianus
ctgttcacacggtttgacttgccaa

SEQ ID NO: 96967 - DNA, 25 bp, Saccharomyces pastorianus
tactaaagctcttgttcccggtgaa

SEQ ID NO: 96968 - DNA, 25 bp, Saccharomyces pastorianus
tttgctcagggcgtattctcggaaa

SEQ ID NO: 96969 - DNA, 25 bp, Saccharomyces pastorianus
ttggacacctgtctatgtgactgat

SEQ ID NO: 96970 - DNA, 25 bp, Saccharomyces pastorianus
ggtctgttccgttagatccgaggat

SEQ ID NO: 96971 - DNA, 25 bp, Saccharomyces pastorianus
attacttggtaatcgacacaccgcc

SEQ ID NO: 96972 - DNA, 25 bp, Saccharomyces pastorianus
acaccgcccggaacatctgatgagc

SEQ ID NO: 96973 - DNA, 25 bp, Saccharomyces pastorianus
tggataactatcctgacagcccagc

SEQ ID NO: 96974 - DNA, 25 bp, Saccharomyces pastorianus
gaaaccgtccatgaatcgaactccg

SEQ ID NO: 96975 - DNA, 25 bp, Saccharomyces pastorianus
gtggtcaccacacctcaggaagtag

SEQ ID NO: 96976 - DNA, 25 bp, Saccharomyces pastorianus
ttccagaagacgattccgccattat

SEQ ID NO: 96977 - DNA, 25 bp, Saccharomyces pastorianus
gataatttagccaccatgtctattc

SEQ ID NO: 96978 - DNA, 25 bp, Saccharomyces pastorianus
gagtcccaaatattcaaggctacca

SEQ ID NO: 96979 - DNA, 25 bp, Saccharomyces pastorianus
gcttcgagtgctgtacttaacgttg

SEQ ID NO: 96980 - DNA, 25 bp, Saccharomyces pastorianus
gagagcttcatgagattctgcgaca

SEQ ID NO: 96981 - DNA, 25 bp, Saccharomyces pastorianus
gatgactttcaatttttcggacttt

SEQ ID NO: 96982 - DNA, 25 bp, Saccharomyces pastorianus
tagattctgcgcttattaatacgga

SEQ ID NO: 96983 - DNA, 25 bp, Saccharomyces pastorianus
gaagacgacgattttgatgactttc

SEQ ID NO: 96984 - DNA, 25 bp, Saccharomyces pastorianus
ttacctcttttggagatgacacaca

SEQ ID NO: 96985 - DNA, 25 bp, Saccharomyces pastorianus
ggttctgaatctgagactgatgcaa

SEQ ID NO: 96986 - DNA, 25 bp, Saccharomyces pastorianus
aaaggccaattattactgctaaaga

SEQ ID NO: 96987 - DNA, 25 bp, Saccharomyces pastorianus
tacggagacatttctggttctgaat

SEQ ID NO: 96988 - DNA, 25 bp, Saccharomyces pastorianus
taatgatagggaaccttgcttgcag

SEQ ID NO: 96989 - DNA, 25 bp, Saccharomyces pastorianus
gaaagacggtagtagagcctcaaaa

SEQ ID NO: 96990 - DNA, 25 bp, Saccharomyces pastorianus
gtgcaaaagccaatttctgagttaa

SEQ ID NO: 96991 - DNA, 25 bp, Saccharomyces pastorianus
aaacttgagaccaggccaaccaatg

SEQ ID NO: 96992 - DNA, 25 bp, Saccharomyces pastorianus
agagagaggccaacgctgatgcttg

SEQ ID NO: 96993 - DNA, 25 bp, Saccharomyces pastorianus
aaattcatttctacctttctcactt

SEQ ID NO: 96994 - DNA, 25 bp, Saccharomyces pastorianus
gaagatatcgctcaggtgccagctg

SEQ ID NO: 96995 - DNA, 25 bp, Saccharomyces pastorianus
aaagagaggctgttgccgacgcttg

SEQ ID NO: 96996 - DNA, 25 bp, Saccharomyces pastorianus
ttctcacttttattttagcggccgt

SEQ ID NO: 96997 - DNA, 25 bp, Saccharomyces pastorianus
gacatagcttttttaccattcagta

SEQ ID NO: 96998 - DNA, 25 bp, Saccharomyces pastorianus
acaccactattgctgaggcggctga

SEQ ID NO: 96999 - DNA, 25 bp, Saccharomyces pastorianus
gctaccgctagtgggctattgttta

SEQ ID NO: 97000 - DNA, 25 bp, Saccharomyces pastorianus
gacgcttggcactggttaaacttga

SEQ ID NO: 97001 - DNA, 25 bp, Saccharomyces pastorianus
ttctgtcactgctagttccgatgaa

SEQ ID NO: 97002 - DNA, 25 bp, Saccharomyces pastorianus
taacccagctcaaccgtttggtaat

SEQ ID NO: 97003 - DNA, 25 bp, Saccharomyces pastorianus
tcgagtgtcatactgggactggttt

SEQ ID NO: 97004 - DNA, 25 bp, Saccharomyces pastorianus
tggattatgcatgggaggtccacca

SEQ ID NO: 97005 - DNA, 25 bp, Saccharomyces pastorianus
gggtcaagcctttatctatagatca

SEQ ID NO: 97006 - DNA, 25 bp, Saccharomyces pastorianus
tggttacgacccgtcccacaaatga

SEQ ID NO: 97007 - DNA, 25 bp, Saccharomyces pastorianus
gctaaaagccagttcttgaagctaa

SEQ ID NO: 97008 - DNA, 25 bp, Saccharomyces pastorianus
aaccgttgtgtagctcgagtgtcat

SEQ ID NO: 97009 - DNA, 25 bp, Saccharomyces pastorianus
ttcatttctttcacatgccaggtgg

SEQ ID NO: 97010 - DNA, 25 bp, Saccharomyces pastorianus
aagattatgtggaatcgatgcccca

SEQ ID NO: 97011 - DNA, 25 bp, Saccharomyces pastorianus
aaacctgccaactattcctataaga

SEQ ID NO: 97012 - DNA, 25 bp, Saccharomyces pastorianus
tctatagatcagtacaaccgttgtg

SEQ ID NO: 97013 - DNA, 25 bp, Saccharomyces pastorianus
cgctgtcggtgctgttttcaacata

SEQ ID NO: 97014 - DNA, 25 bp, Saccharomyces pastorianus
cgttagtttattcatcgcagtacaa

SEQ ID NO: 97015 - DNA, 25 bp, Saccharomyces pastorianus
attttctctcattataccgacgcag

SEQ ID NO: 97016 - DNA, 25 bp, Saccharomyces pastorianus
atctttttggattctgcttgggctc

SEQ ID NO: 97017 - DNA, 25 bp, Saccharomyces pastorianus
tgtgggctttgctagacggaatcga

SEQ ID NO: 97018 - DNA, 25 bp, Saccharomyces pastorianus
cagtcttttccttcgtagctatatg

SEQ ID NO: 97019 - DNA, 25 bp, Saccharomyces pastorianus
actactgattccgtggaggctgttt

SEQ ID NO: 97020 - DNA, 25 bp, Saccharomyces pastorianus
acacctttccagatttccatgattg

SEQ ID NO: 97021 - DNA, 25 bp, Saccharomyces pastorianus
tgcttgggctctgacggtactaaaa

SEQ ID NO: 97022 - DNA, 25 bp, Saccharomyces pastorianus
tatatattcctctaggtggctcaaa

SEQ ID NO: 97023 - DNA, 25 bp, Saccharomyces pastorianus
taatagttttgttcctcttaccaga

SEQ ID NO: 97024 - DNA, 25 bp, Saccharomyces pastorianus
ggttctcgatatccttgcaaccaaa

SEQ ID NO: 97025 - DNA, 25 bp, Saccharomyces pastorianus
aaaggtggctccaacgacgcttcga

SEQ ID NO: 97026 - DNA, 25 bp, Saccharomyces pastorianus
gtcttcagacatccaaaggcaccat

SEQ ID NO: 97027 - DNA, 25 bp, Saccharomyces pastorianus
gcaagtagtaccaatttaccgcctg

SEQ ID NO: 97028 - DNA, 25 bp, Saccharomyces pastorianus
gagacctcaccacaatccaaaagta

SEQ ID NO: 97029 - DNA, 25 bp, Saccharomyces pastorianus
attggcgaagatgcctttcacaaag

SEQ ID NO: 97030 - DNA, 25 bp, Saccharomyces pastorianus
acgacgcttcgagcactaaggtgga

SEQ ID NO: 97031 - DNA, 25 bp, Saccharomyces pastorianus
agtagcagccatgcaaccagttaaa

SEQ ID NO: 97032 - DNA, 25 bp, Saccharomyces pastorianus
ggaccctgagacagttgcagctaaa

SEQ ID NO: 97033 - DNA, 25 bp, Saccharomyces pastorianus
aaaggatggttcttctgatattccc

SEQ ID NO: 97034 - DNA, 25 bp, Saccharomyces pastorianus
aatgcccttgcaactagaggctttc

SEQ ID NO: 97035 - DNA, 25 bp, Saccharomyces pastorianus
aacagaaactactgctaccgggcaa

SEQ ID NO: 97036 - DNA, 25 bp, Saccharomyces pastorianus
taaactggcagtcgcttaaatccgt

SEQ ID NO: 97037 - DNA, 25 bp, Saccharomyces pastorianus
tggcgaattgtttactttggtcacg

SEQ ID NO: 97038 - DNA, 25 bp, Saccharomyces pastorianus
tgagtcctacatttctaacccattc

SEQ ID NO: 97039 - DNA, 25 bp, Saccharomyces pastorianus
gaatatggtctaactcatctcagag

SEQ ID NO: 97040 - DNA, 25 bp, Saccharomyces pastorianus
tttggtcacggatcctacttacaga

SEQ ID NO: 97041 - DNA, 25 bp, Saccharomyces pastorianus
gtttctggcaagatctgccactcaa

SEQ ID NO: 97042 - DNA, 25 bp, Saccharomyces pastorianus
gcaggattcttactacacgggcaac

SEQ ID NO: 97043 - DNA, 25 bp, Saccharomyces pastorianus
gatcgtatgccgtgctttttagaaa

SEQ ID NO: 97044 - DNA, 25 bp, Saccharomyces pastorianus
gtggagcaagcggtgttcaacaaat

SEQ ID NO: 97045 - DNA, 25 bp, Saccharomyces pastorianus
atccaatctgatgcaccttacttaa

SEQ ID NO: 97046 - DNA, 25 bp, Saccharomyces pastorianus
tagccgccaagttaattttccgaat

SEQ ID NO: 97047 - DNA, 25 bp, Saccharomyces pastorianus
atacagtgtcatctttccctattta

SEQ ID NO: 97048 - DNA, 25 bp, Saccharomyces pastorianus
aacgaacaccatattgactcgaggt

SEQ ID NO: 97049 - DNA, 25 bp, Saccharomyces pastorianus
aagaaaattatcacccctcagcact

SEQ ID NO: 97050 - DNA, 25 bp, Saccharomyces pastorianus
gaagtttgcaccgacacagacacca

SEQ ID NO: 97051 - DNA, 25 bp, Saccharomyces pastorianus
ttccctatttattctgcaacatcca

SEQ ID NO: 97052 - DNA, 25 bp, Saccharomyces pastorianus
aaaaaagacgcttacctgcttctcg

SEQ ID NO: 97053 - DNA, 25 bp, Saccharomyces pastorianus
gataaccatcatttagccgccaagt

SEQ ID NO: 97054 - DNA, 25 bp, Saccharomyces pastorianus
aatcatccttttcgcgataaccatc

SEQ ID NO: 97055 - DNA, 25 bp, Saccharomyces pastorianus
gtaggttttctatcctttcgttgag

SEQ ID NO: 97056 - DNA, 25 bp, Saccharomyces pastorianus
gactcgaggtggtaggttttctatc

SEQ ID NO: 97057 - DNA, 25 bp, Saccharomyces pastorianus
tatgctcttgcagtatcacccaaaa

SEQ ID NO: 97058 - DNA, 25 bp, Saccharomyces pastorianus
agctcaaggctataggtttctcaaa

SEQ ID NO: 97059 - DNA, 25 bp, Saccharomyces pastorianus
aatctctggcccaatgacttttgct

SEQ ID NO: 97060 - DNA, 25 bp, Saccharomyces pastorianus
tcaaccggttcaacgtgctgcagca

SEQ ID NO: 97061 - DNA, 25 bp, Saccharomyces pastorianus
ttcggtatcccaattgctgctatat

SEQ ID NO: 97062 - DNA, 25 bp, Saccharomyces pastorianus
aaaagaccctacactaatctctggc

SEQ ID NO: 97063 - DNA, 25 bp, Saccharomyces pastorianus
actacttactgtttggatgccacct

SEQ ID NO: 97064 - DNA, 25 bp, Saccharomyces pastorianus
tatattttcacaacacacttctggg

SEQ ID NO: 97065 - DNA, 25 bp, Saccharomyces pastorianus
gacttttgctttagttacctattca

SEQ ID NO: 97066 - DNA, 25 bp, Saccharomyces pastorianus
agcacgctcattccttcaaaaatac

SEQ ID NO: 97067 - DNA, 25 bp, Saccharomyces pastorianus
ggatgccaccttattaatgaaactg

SEQ ID NO: 97068 - DNA, 25 bp, Saccharomyces pastorianus
gtgccaatcaacctgttcctgaaga

SEQ ID NO: 97069 - DNA, 25 bp, Saccharomyces pastorianus
gtaacacggaccaactaactgctaa

SEQ ID NO: 97070 - DNA, 25 bp, Saccharomyces pastorianus
gcatttggctggtggactggttaac

SEQ ID NO: 97071 - DNA, 25 bp, Saccharomyces pastorianus
aagtctaacttgttactggccaccg

SEQ ID NO: 97072 - DNA, 25 bp, Saccharomyces pastorianus
atagcgcttatggttcattctttaa

SEQ ID NO: 97073 - DNA, 25 bp, Saccharomyces pastorianus
agcacacactctgttcactgaacaa

SEQ ID NO: 97074 - DNA, 25 bp, Saccharomyces pastorianus
ctggccaccgacgttgcagcaagag

SEQ ID NO: 97075 - DNA, 25 bp, Saccharomyces pastorianus
cagattgtcgaagtggtggacccac

SEQ ID NO: 97076 - DNA, 25 bp, Saccharomyces pastorianus
acgggtataacgtcgcagctatcca

SEQ ID NO: 97077 - DNA, 25 bp, Saccharomyces pastorianus
ttaactttcccattgactgtggagg

SEQ ID NO: 97078 - DNA, 25 bp, Saccharomyces pastorianus
agctatccatggtgatttgtcccag

SEQ ID NO: 97079 - DNA, 25 bp, Saccharomyces pastorianus
ttggactgtcttttctgtggtcttt

SEQ ID NO: 97080 - DNA, 25 bp, Saccharomyces pastorianus
aatggtcttccattatcccgtttat

SEQ ID NO: 97081 - DNA, 25 bp, Saccharomyces pastorianus
gcaagttaacccacacactggtgta

SEQ ID NO: 97082 - DNA, 25 bp, Saccharomyces pastorianus
actggtgtacctttgaacgctcatt

SEQ ID NO: 97083 - DNA, 25 bp, Saccharomyces pastorianus
aatgtcatgcgcttggataaccctc

SEQ ID NO: 97084 - DNA, 25 bp, Saccharomyces pastorianus
gtaacatagctcatggtccattctg

SEQ ID NO: 97085 - DNA, 25 bp, Saccharomyces pastorianus
cagtacggcttttcagtccttaatt

SEQ ID NO: 97086 - DNA, 25 bp, Saccharomyces pastorianus
tggcctactttatttggcttccagt

SEQ ID NO: 97087 - DNA, 25 bp, Saccharomyces pastorianus
gttgcgtcattgcttgtcacacttg

SEQ ID NO: 97088 - DNA, 25 bp, Saccharomyces pastorianus
gttatcctacatcattccggttata

SEQ ID NO: 97089 - DNA, 25 bp, Saccharomyces pastorianus
agtcgagaattttccgttgcggcct

SEQ ID NO: 97090 - DNA, 25 bp, Saccharomyces pastorianus
tgaataccgttcaaatgccaatgtg

SEQ ID NO: 97091 - DNA, 25 bp, Saccharomyces pastorianus
atagctccagaacatctgacccagg

SEQ ID NO: 97092 - DNA, 25 bp, Saccharomyces pastorianus
tatgcttccatacaacagcggttca

SEQ ID NO: 97093 - DNA, 25 bp, Saccharomyces pastorianus
tacgtatatgctcatgacacaccat

SEQ ID NO: 97094 - DNA, 25 bp, Saccharomyces pastorianus
acagacaccatatctttcctaaagg

SEQ ID NO: 97095 - DNA, 25 bp, Saccharomyces pastorianus
tatagtctgtttcgctttactggca

SEQ ID NO: 97096 - DNA, 25 bp, Saccharomyces pastorianus
caggatcacctctggtaacgggaat

SEQ ID NO: 97097 - DNA, 25 bp, Saccharomyces pastorianus
gcggttccctccaacatatgggtaa

SEQ ID NO: 97098 - DNA, 25 bp, Saccharomyces pastorianus
aacagcggttcagcgacttacagaa

SEQ ID NO: 97099 - DNA, 25 bp, Saccharomyces pastorianus
ggcaggtgtcctaccatacattaga

SEQ ID NO: 97100 - DNA, 25 bp, Saccharomyces pastorianus
accactgatggtgatgggactttca

SEQ ID NO: 97101 - DNA, 25 bp, Saccharomyces pastorianus
ggtatttcctccacaaatcttttct

SEQ ID NO: 97102 - DNA, 25 bp, Saccharomyces pastorianus
atttcttagctcgtttgggcaggcg

SEQ ID NO: 97103 - DNA, 25 bp, Saccharomyces pastorianus
tactctgtcgggtcctgtatttcga

SEQ ID NO: 97104 - DNA, 25 bp, Saccharomyces pastorianus
caaatcttttcttagcgttctcggg

SEQ ID NO: 97105 - DNA, 25 bp, Saccharomyces pastorianus
tgtatttcgactatagccggttccg

SEQ ID NO: 97106 - DNA, 25 bp, Saccharomyces pastorianus
gccttacgcgatcagcttcgagaac

SEQ ID NO: 97107 - DNA, 25 bp, Saccharomyces pastorianus
cttgccctgtgtactatttcttagc

SEQ ID NO: 97108 - DNA, 25 bp, Saccharomyces pastorianus
agcttggcaggttatcactcacttt

SEQ ID NO: 97109 - DNA, 25 bp, Saccharomyces pastorianus
actttagtgttttcagtggcgctga

SEQ ID NO: 97110 - DNA, 25 bp, Saccharomyces pastorianus
tacgctatttaatgaccttgccctg

SEQ ID NO: 97111 - DNA, 25 bp, Saccharomyces pastorianus
aggcggtgatcgttgtactctgtcg

SEQ ID NO: 97112 - DNA, 25 bp, Saccharomyces pastorianus
gaatgcagaacatgctcgtatgtag

SEQ ID NO: 97113 - DNA, 25 bp, Saccharomyces pastorianus
tggtctacaggcatgaattgattac

SEQ ID NO: 97114 - DNA, 25 bp, Saccharomyces pastorianus
cgatcccactcttccgagatctgat

SEQ ID NO: 97115 - DNA, 25 bp, Saccharomyces pastorianus
agaatgtcccaaatgtcactctcgg

SEQ ID NO: 97116 - DNA, 25 bp, Saccharomyces pastorianus
ccaacattggtgaaactgcgggagt

SEQ ID NO: 97117 - DNA, 25 bp, Saccharomyces pastorianus
aaccggttgttatttgaatgcagaa

SEQ ID NO: 97118 - DNA, 25 bp, Saccharomyces pastorianus
cgtatgtagaagaagcgggcagtcc

SEQ ID NO: 97119 - DNA, 25 bp, Saccharomyces pastorianus
gcaagatattggttccgatcccact

SEQ ID NO: 97120 - DNA, 25 bp, Saccharomyces pastorianus
tcttgctcacacatatttacttcag

SEQ ID NO: 97121 - DNA, 25 bp, Saccharomyces pastorianus
gaatgtgttttttcagtcacaacaa

SEQ ID NO: 97122 - DNA, 25 bp, Saccharomyces pastorianus
ttctttgtgtgcttatcttgctcac

SEQ ID NO: 97123 - DNA, 25 bp, Saccharomyces pastorianus
taccagcttcaccagtggagctagg

SEQ ID NO: 97124 - DNA, 25 bp, Saccharomyces pastorianus
gttcaatacggttttcagctcgttg

SEQ ID NO: 97125 - DNA, 25 bp, Saccharomyces pastorianus
gagtcaattgtgaaatgtcctgtac

SEQ ID NO: 97126 - DNA, 25 bp, Saccharomyces pastorianus
aactggccttacatcatccttatgt

SEQ ID NO: 97127 - DNA, 25 bp, Saccharomyces pastorianus
gagctaggtacattaccagcacctg

SEQ ID NO: 97128 - DNA, 25 bp, Saccharomyces pastorianus
atgaatccgcccataggcatggaaa

SEQ ID NO: 97129 - DNA, 25 bp, Saccharomyces pastorianus
gatggtgctgttgtagtcgtagaat

SEQ ID NO: 97130 - DNA, 25 bp, Saccharomyces pastorianus
gagtccaacttcaccgtaaacacgg

SEQ ID NO: 97131 - DNA, 25 bp, Saccharomyces pastorianus
gtaaacacggtctttgcctcaggct

SEQ ID NO: 97132 - DNA, 25 bp, Saccharomyces pastorianus
tagccttagtcttagtgtcgaacga

SEQ ID NO: 97133 - DNA, 25 bp, Saccharomyces pastorianus
attagcgctggtgtaacgcgcgttt

SEQ ID NO: 97134 - DNA, 25 bp, Saccharomyces pastorianus
aatgtacctagctccactggtgaag

SEQ ID NO: 97135 - DNA, 25 bp, Saccharomyces pastorianus
attctacgactacaacagcaccatc

SEQ ID NO: 97136 - DNA, 25 bp, Saccharomyces pastorianus
ctattactatcacaacccgtttcaa

SEQ ID NO: 97137 - DNA, 25 bp, Saccharomyces pastorianus
tcgttgaagctgcaccaaaggtctt

SEQ ID NO: 97138 - DNA, 25 bp, Saccharomyces pastorianus
ggactcgttcgacactaagactaag

SEQ ID NO: 97139 - DNA, 25 bp, Saccharomyces pastorianus
ggccagttgatcctaaaatttctaa

SEQ ID NO: 97140 - DNA, 25 bp, Saccharomyces pastorianus
taagcctgaggcaaagaccgtgttt

SEQ ID NO: 97141 - DNA, 25 bp, Saccharomyces pastorianus
ttacaccagcgctaatttctcctat

SEQ ID NO: 97142 - DNA, 25 bp, Saccharomyces pastorianus
ggcgcaggtgctggtaatgtaccta

SEQ ID NO: 97143 - DNA, 25 bp, Saccharomyces pastorianus
atgtcgccaaggatgatgctgaaaa

SEQ ID NO: 97144 - DNA, 25 bp, Saccharomyces pastorianus
gaacattccagaaatttccatgcct

SEQ ID NO: 97145 - DNA, 25 bp, Saccharomyces pastorianus
tattgatatagtccggtcacagccc

SEQ ID NO: 97146 - DNA, 25 bp, Saccharomyces pastorianus
agccttgaccaattcggattactct

SEQ ID NO: 97147 - DNA, 25 bp, Saccharomyces pastorianus
gtttgcttcccaagaactgatccaa

SEQ ID NO: 97148 - DNA, 25 bp, Saccharomyces pastorianus
tacaaattctgtcccggttgtgggt

SEQ ID NO: 97149 - DNA, 25 bp, Saccharomyces pastorianus
agtactaccattgccttccaattaa

SEQ ID NO: 97150 - DNA, 25 bp, Saccharomyces pastorianus
gccttacccttgcagtttgatgatt

SEQ ID NO: 97151 - DNA, 25 bp, Saccharomyces pastorianus
gtctccgttattcccagtagaggca

SEQ ID NO: 97152 - DNA, 25 bp, Saccharomyces pastorianus
ggctgtttaggcatagttcaattca

SEQ ID NO: 97153 - DNA, 25 bp, Saccharomyces pastorianus
gcgggtatcgtgttccattcaaaaa

SEQ ID NO: 97154 - DNA, 25 bp, Saccharomyces pastorianus
attactctaagtgttgtctggcaag

SEQ ID NO: 97155 - DNA, 25 bp, Saccharomyces pastorianus
gatccaacggtcattatagccttga

SEQ ID NO: 97156 - DNA, 25 bp, Saccharomyces pastorianus
gacgatgaaagcctccataagctct

SEQ ID NO: 97157 - DNA, 25 bp, Saccharomyces pastorianus
aagctgctgcttcatatttagccaa

SEQ ID NO: 97158 - DNA, 25 bp, Saccharomyces pastorianus
ctaccggtattaatgtctctggcaa

SEQ ID NO: 97159 - DNA, 25 bp, Saccharomyces pastorianus
ggtctcacgccgctggagatacaat

SEQ ID NO: 97160 - DNA, 25 bp, Saccharomyces pastorianus
agtgtcaacagcgtcaatggctccg

SEQ ID NO: 97161 - DNA, 25 bp, Saccharomyces pastorianus
cctactcaaggtatggtgcccaatc

SEQ ID NO: 97162 - DNA, 25 bp, Saccharomyces pastorianus
agatagccatttatctggcacccac

SEQ ID NO: 97163 - DNA, 25 bp, Saccharomyces pastorianus
agagagctctacaggctcagcttct

SEQ ID NO: 97164 - DNA, 25 bp, Saccharomyces pastorianus
ggctcagcttctttctcaacaacag

SEQ ID NO: 97165 - DNA, 25 bp, Saccharomyces pastorianus
ataagctctcccaatactagcgtaa

SEQ ID NO: 97166 - DNA, 25 bp, Saccharomyces pastorianus
atggctccgggcaaggtgtatctac

SEQ ID NO: 97167 - DNA, 25 bp, Saccharomyces pastorianus
ccttcctatttatggccacttttat

SEQ ID NO: 97168 - DNA, 25 bp, Saccharomyces pastorianus
gaatggcccgctaagagtcaagaaa

SEQ ID NO: 97169 - DNA, 25 bp, Saccharomyces pastorianus
acaatggaggtcctttggagactat

SEQ ID NO: 97170 - DNA, 25 bp, Saccharomyces pastorianus
gactatcaaatcttacgttgctggt

SEQ ID NO: 97171 - DNA, 25 bp, Saccharomyces pastorianus
aattctacccaataatccatggccc

SEQ ID NO: 97172 - DNA, 25 bp, Saccharomyces pastorianus
gtatacaccagcatatgagcacttt

SEQ ID NO: 97173 - DNA, 25 bp, Saccharomyces pastorianus
ggtattgttcctttagaagccatga

SEQ ID NO: 97174 - DNA, 25 bp, Saccharomyces pastorianus
gaactttgagaggaatggcccgcta

SEQ ID NO: 97175 - DNA, 25 bp, Saccharomyces pastorianus
aaatgaaagttctgccactgggtgg

SEQ ID NO: 97176 - DNA, 25 bp, Saccharomyces pastorianus
cactgggtggctaaaacctgccgtc

SEQ ID NO: 97177 - DNA, 25 bp, Saccharomyces pastorianus
tgccgtccctattcaatgggctact

SEQ ID NO: 97178 - DNA, 25 bp, Saccharomyces pastorianus
aagtctttgcatgtactcgtaacca

SEQ ID NO: 97179 - DNA, 25 bp, Saccharomyces pastorianus
aaattctgccttaagtcctttcaag

SEQ ID NO: 97180 - DNA, 25 bp, Saccharomyces pastorianus
aattatgccctttttatcaccaccg

SEQ ID NO: 97181 - DNA, 25 bp, Saccharomyces pastorianus
aattcggtcataatgccatcggttt

SEQ ID NO: 97182 - DNA, 25 bp, Saccharomyces pastorianus
gtggttgctcagagtacttcacctc

SEQ ID NO: 97183 - DNA, 25 bp, Saccharomyces pastorianus
aatagacctgatacaccgagtgggc

SEQ ID NO: 97184 - DNA, 25 bp, Saccharomyces pastorianus
gtaaccaccgacctcatggcaagag

SEQ ID NO: 97185 - DNA, 25 bp, Saccharomyces pastorianus
aattctaatggtaccgcacccagta

SEQ ID NO: 97186 - DNA, 25 bp, Saccharomyces pastorianus
gcggccgcgtatttatgctaactga

SEQ ID NO: 97187 - DNA, 25 bp, Saccharomyces pastorianus
gaatgttgttctctacgatgtaccc

SEQ ID NO: 97188 - DNA, 25 bp, Saccharomyces pastorianus
ttccaacatcgtcatcggcaaattg

SEQ ID NO: 97189 - DNA, 25 bp, Saccharomyces pastorianus
aattgccgcctaatattgtacgtaa

SEQ ID NO: 97190 - DNA, 25 bp, Saccharomyces pastorianus
gggatcctagtgctcagcgccatat

SEQ ID NO: 97191 - DNA, 25 bp, Saccharomyces pastorianus
atttgctgtattgcgaaatccgccc

SEQ ID NO: 97192 - DNA, 25 bp, Saccharomyces pastorianus
gaaatacattccgagggcgcccgca

SEQ ID NO: 97193 - DNA, 25 bp, Saccharomyces pastorianus
cgcccggacgatatcactattgagc

SEQ ID NO: 97194 - DNA, 25 bp, Saccharomyces pastorianus
acgggcagtcgtttatgctgcatca

SEQ ID NO: 97195 - DNA, 25 bp, Saccharomyces pastorianus
gaatggtagcgcttgccgtacttgc

SEQ ID NO: 97196 - DNA, 25 bp, Saccharomyces pastorianus
tattgagcgcatgtgccgtttccga

SEQ ID NO: 97197 - DNA, 25 bp, Saccharomyces pastorianus
taacgccgggcctaggaaatacatt

SEQ ID NO: 97198 - DNA, 25 bp, Saccharomyces pastorianus
atatgtgtgcggatccacgggcagt

SEQ ID NO: 97199 - DNA, 25 bp, Saccharomyces pastorianus
aaggttgtagtgtcgcaggcctcac

SEQ ID NO: 97200 - DNA, 25 bp, Saccharomyces pastorianus
gcgcaacttagtgttatacccgtca

SEQ ID NO: 97201 - DNA, 25 bp, Saccharomyces pastorianus
aataataggccttgtgcgggcgccc

SEQ ID NO: 97202 - DNA, 25 bp, Saccharomyces pastorianus
ggcggatttcgcaatacagcaaatt

SEQ ID NO: 97203 - DNA, 25 bp, Saccharomyces pastorianus
gtcaaacacaggtccctctaataat

SEQ ID NO: 97204 - DNA, 25 bp, Saccharomyces pastorianus
aggtccctctaataataggccttgt

SEQ ID NO: 97205 - DNA, 25 bp, Saccharomyces pastorianus
cgctcaatagtgatatcgtccgggc

SEQ ID NO: 97206 - DNA, 25 bp, Saccharomyces pastorianus
tcgtccgggcggatttcgcaataca

SEQ ID NO: 97207 - DNA, 25 bp, Saccharomyces pastorianus
aatagtgatatcgtccgggcggatt

SEQ ID NO: 97208 - DNA, 25 bp, Saccharomyces pastorianus
aataggccttgtgcgggcgccctcg

SEQ ID NO: 97209 - DNA, 25 bp, Saccharomyces pastorianus
cagcaaattgcgcaacttagtgtta

SEQ ID NO: 97210 - DNA, 25 bp, Saccharomyces pastorianus
tgttatacccgtcaaacacaggtcc

SEQ ID NO: 97211 - DNA, 25 bp, Saccharomyces pastorianus
gctacaggctgtgggtgatttgaac

SEQ ID NO: 97212 - DNA, 25 bp, Saccharomyces pastorianus
aaagaagggccagcctgtagccgta

SEQ ID NO: 97213 - DNA, 25 bp, Saccharomyces pastorianus
aaattcgtgttgctgacagatcaca

SEQ ID NO: 97214 - DNA, 25 bp, Saccharomyces pastorianus
gatccattacacattggtgcaccaa

SEQ ID NO: 97215 - DNA, 25 bp, Saccharomyces pastorianus
gattatatcttctccatctgatgga

SEQ ID NO: 97216 - DNA, 25 bp, Saccharomyces pastorianus
ggtgatttatctgtattgccaacaa

SEQ ID NO: 97217 - DNA, 25 bp, Saccharomyces pastorianus
ggaactagagccatttgatctcgaa

SEQ ID NO: 97218 - DNA, 25 bp, Saccharomyces pastorianus
agaagctttttgtctccactagaga

SEQ ID NO: 97219 - DNA, 25 bp, Saccharomyces pastorianus
aatgtggactcttctgatttattag

SEQ ID NO: 97220 - DNA, 25 bp, Saccharomyces pastorianus
gtagccgtattaagcgccatgaaaa

SEQ ID NO: 97221 - DNA, 25 bp, Saccharomyces pastorianus
gaatgcgacgttgcttcttataaca

SEQ ID NO: 97222 - DNA, 25 bp, Saccharomyces pastorianus
gacactcaactaagcttttactttt

SEQ ID NO: 97223 - DNA, 25 bp, Saccharomyces pastorianus
aacggcgacctttcattgcattcaa

SEQ ID NO: 97224 - DNA, 25 bp, Saccharomyces pastorianus
gggagatccttcgaaatacttacga

SEQ ID NO: 97225 - DNA, 25 bp, Saccharomyces pastorianus
agccggaaccaatcatagtaactgt

SEQ ID NO: 97226 - DNA, 25 bp, Saccharomyces pastorianus
tatgaaactcccctaattgaattgt

SEQ ID NO: 97227 - DNA, 25 bp, Saccharomyces pastorianus
acaagcttgggattgggttagccat

SEQ ID NO: 97228 - DNA, 25 bp, Saccharomyces pastorianus
tttactttttgcctacacatttgaa

SEQ ID NO: 97229 - DNA, 25 bp, Saccharomyces pastorianus
caatgcctggatatggtaccgatgt

SEQ ID NO: 97230 - DNA, 25 bp, Saccharomyces pastorianus
gacgaagtacattcccatactaaat

SEQ ID NO: 97231 - DNA, 25 bp, Saccharomyces pastorianus
gtacatgcacacgtcgctagaacca

SEQ ID NO: 97232 - DNA, 25 bp, Saccharomyces pastorianus
gggcgtcctccatgatgatgaaaat

SEQ ID NO: 97233 - DNA, 25 bp, Saccharomyces pastorianus
gaacgccatgattatcgggccagcc

SEQ ID NO: 97234 - DNA, 25 bp, Saccharomyces pastorianus
aagccaccgcatgtcaaatttttga

SEQ ID NO: 97235 - DNA, 25 bp, Saccharomyces pastorianus
gaaatgtttcatcccaatgtctatg

SEQ ID NO: 97236 - DNA, 25 bp, Saccharomyces pastorianus
tccagcttcgccagcaaacgttgaa

SEQ ID NO: 97237 - DNA, 25 bp, Saccharomyces pastorianus
tgtatctgcttcaccattacctgat

SEQ ID NO: 97238 - DNA, 25 bp, Saccharomyces pastorianus
tattttgcagaacagatggactcca

SEQ ID NO: 97239 - DNA, 25 bp, Saccharomyces pastorianus
ggactccaacatatgatgtcgcatc

SEQ ID NO: 97240 - DNA, 25 bp, Saccharomyces pastorianus
ggccagccgatactccatatgaaga

SEQ ID NO: 97241 - DNA, 25 bp, Saccharomyces pastorianus
ttcaacgatccaaatccagcttcgc

SEQ ID NO: 97242 - DNA, 25 bp, Saccharomyces pastorianus
gataacgtcatggtatggaacgcca

SEQ ID NO: 97243 - DNA, 25 bp, Saccharomyces pastorianus
aagaatatcccaataagccaccgca

SEQ ID NO: 97244 - DNA, 25 bp, Saccharomyces pastorianus
cgtcacttaggtcccaattcttgaa

SEQ ID NO: 97245 - DNA, 25 bp, Saccharomyces pastorianus
caaatatactacctgctgatgtgca

SEQ ID NO: 97246 - DNA, 25 bp, Saccharomyces pastorianus
aaacgtggtcaaggtgtttcatctt

SEQ ID NO: 97247 - DNA, 25 bp, Saccharomyces pastorianus
aagagcatagatccattcagcaaag

SEQ ID NO: 97248 - DNA, 25 bp, Saccharomyces pastorianus
acaacggcgagcttggtgtcattat

SEQ ID NO: 97249 - DNA, 25 bp, Saccharomyces pastorianus
ttcattcgtcgtttttgtttccata

SEQ ID NO: 97250 - DNA, 25 bp, Saccharomyces pastorianus
tgacaaactcttctccgtcacttag

SEQ ID NO: 97251 - DNA, 25 bp, Saccharomyces pastorianus
acctcgaactcaatttgtcctgaca

SEQ ID NO: 97252 - DNA, 25 bp, Saccharomyces pastorianus
tcatttggctttcttggacctcgaa

SEQ ID NO: 97253 - DNA, 25 bp, Saccharomyces pastorianus
acaaattcttcaatccgtcttcgac

SEQ ID NO: 97254 - DNA, 25 bp, Saccharomyces pastorianus
gcagccaagtgcaccagatctagat

SEQ ID NO: 97255 - DNA, 25 bp, Saccharomyces pastorianus
acgtttgccaaattggtcgctacca

SEQ ID NO: 97256 - DNA, 25 bp, Saccharomyces pastorianus
gtcaaacacgtcaccagaacttcac

SEQ ID NO: 97257 - DNA, 25 bp, Saccharomyces pastorianus
ggactcatttcctattttccatgtg

SEQ ID NO: 97258 - DNA, 25 bp, Saccharomyces pastorianus
tcgtcattttgtctcggttattttg

SEQ ID NO: 97259 - DNA, 25 bp, Saccharomyces pastorianus
taacgacattgccatcgcttgcgtc

SEQ ID NO: 97260 - DNA, 25 bp, Saccharomyces pastorianus
aagtccaagtaattgtcccgcatct

SEQ ID NO: 97261 - DNA, 25 bp, Saccharomyces pastorianus
atggccaactctcctgttctaaaat

SEQ ID NO: 97262 - DNA, 25 bp, Saccharomyces pastorianus
ttgcgtcgtcataccattcgaacac

SEQ ID NO: 97263 - DNA, 25 bp, Saccharomyces pastorianus
atataaatttgagcggtccctcacc

SEQ ID NO: 97264 - DNA, 25 bp, Saccharomyces pastorianus
gaacacgcaatcttccaggatggcc

SEQ ID NO: 97265 - DNA, 25 bp, Saccharomyces pastorianus
tcttccgaaaaatcctcatctccat

SEQ ID NO: 97266 - DNA, 25 bp, Saccharomyces pastorianus
cttcttctacttgtacagaatgatc

SEQ ID NO: 97267 - DNA, 25 bp, Saccharomyces pastorianus
aatattcagaactttaggcaaacat

SEQ ID NO: 97268 - DNA, 25 bp, Saccharomyces pastorianus
ctatacgctgatttagaagctgact

SEQ ID NO: 97269 - DNA, 25 bp, Saccharomyces pastorianus
gaagctgactatatcaatccaattg

SEQ ID NO: 97270 - DNA, 25 bp, Saccharomyces pastorianus
atttgtttggccaagtgcatttcac

SEQ ID NO: 97271 - DNA, 25 bp, Saccharomyces pastorianus
gttaattacccctgaagccgccttg

SEQ ID NO: 97272 - DNA, 25 bp, Saccharomyces pastorianus
gaagccgccttgcatggtgccttgt

SEQ ID NO: 97273 - DNA, 25 bp, Saccharomyces pastorianus
gttgttgtcaactgtatcaatttgt

SEQ ID NO: 97274 - DNA, 25 bp, Saccharomyces pastorianus
gtgcatttcacaatactatacgctg

SEQ ID NO: 97275 - DNA, 25 bp, Saccharomyces pastorianus
actattcttactgaacggttactgg

SEQ ID NO: 97276 - DNA, 25 bp, Saccharomyces pastorianus
aacttaccagttctagcttacaatc

SEQ ID NO: 97277 - DNA, 25 bp, Saccharomyces pastorianus
agaactcataaattgtgcgccggat

SEQ ID NO: 97278 - DNA, 25 bp, Saccharomyces pastorianus
tgagcctttcatattgcacgttaaa

SEQ ID NO: 97279 - DNA, 25 bp, Saccharomyces pastorianus
attgtgcgccggatgtaaattctaa

SEQ ID NO: 97280 - DNA, 25 bp, Saccharomyces pastorianus
acagccatgtcttgtggtttcagag

SEQ ID NO: 97281 - DNA, 25 bp, Saccharomyces pastorianus
gttttcttttgaactatctggcaag

SEQ ID NO: 97282 - DNA, 25 bp, Saccharomyces pastorianus
aatggctttacgtcactcataatcg

SEQ ID NO: 97283 - DNA, 25 bp, Saccharomyces pastorianus
aatatcaagctggacgtaccgctcg

SEQ ID NO: 97284 - DNA, 25 bp, Saccharomyces pastorianus
gcagagactttcaagcagcatccaa

SEQ ID NO: 97285 - DNA, 25 bp, Saccharomyces pastorianus
gtaccgctcggttatttagatgaga

SEQ ID NO: 97286 - DNA, 25 bp, Saccharomyces pastorianus
atacgtaagcgttctggattcttta

SEQ ID NO: 97287 - DNA, 25 bp, Saccharomyces pastorianus
attggttcgaacaatctggtcgcaa

SEQ ID NO: 97288 - DNA, 25 bp, Saccharomyces pastorianus
ggcaactcttgaaggttcggtacta

SEQ ID NO: 97289 - DNA, 25 bp, Saccharomyces pastorianus
agaagtttctcaagctccaagagct

SEQ ID NO: 97290 - DNA, 25 bp, Saccharomyces pastorianus
aaagagatagttttgcttccacgaa

SEQ ID NO: 97291 - DNA, 25 bp, Saccharomyces pastorianus
gatgtttgagtgcttccggagatta

SEQ ID NO: 97292 - DNA, 25 bp, Saccharomyces pastorianus
ttgcttccacgaaaacaggttcttt

SEQ ID NO: 97293 - DNA, 25 bp, Saccharomyces pastorianus
tgataaatttgttacgccccaggca

SEQ ID NO: 97294 - DNA, 25 bp, Saccharomyces pastorianus
aacatatcattgacggtggcaccat

SEQ ID NO: 97295 - DNA, 25 bp, Saccharomyces pastorianus
aacaacgatccatccgaggagacgt

SEQ ID NO: 97296 - DNA, 25 bp, Saccharomyces pastorianus
acggtggcaccatatcgaacagaat

SEQ ID NO: 97297 - DNA, 25 bp, Saccharomyces pastorianus
ggtactactcgacaatctatttatg

SEQ ID NO: 97298 - DNA, 25 bp, Saccharomyces pastorianus
gacgccggaccaaagacaattcaac

SEQ ID NO: 97299 - DNA, 25 bp, Saccharomyces pastorianus
tagatccagcacttttgagacccgg

SEQ ID NO: 97300 - DNA, 25 bp, Saccharomyces pastorianus
aagacttcgaactcgctgtgggtaa

SEQ ID NO: 97301 - DNA, 25 bp, Saccharomyces pastorianus
gaagattgaatttccacctccaagt

SEQ ID NO: 97302 - DNA, 25 bp, Saccharomyces pastorianus
gtccgtgagctgtttgtgatggcta

SEQ ID NO: 97303 - DNA, 25 bp, Saccharomyces pastorianus
gattctattggctctactcgtgtag

SEQ ID NO: 97304 - DNA, 25 bp, Saccharomyces pastorianus
attggcaagagctgtcgcacatcac

SEQ ID NO: 97305 - DNA, 25 bp, Saccharomyces pastorianus
gaaggttcccgtatggtccgtgagc

SEQ ID NO: 97306 - DNA, 25 bp, Saccharomyces pastorianus
gaacatgctccctcaattatcttta

SEQ ID NO: 97307 - DNA, 25 bp, Saccharomyces pastorianus
aattcatcagggtcagtggtgcgga

SEQ ID NO: 97308 - DNA, 25 bp, Saccharomyces pastorianus
gctgtcgcacatcacactgattgta

SEQ ID NO: 97309 - DNA, 25 bp, Saccharomyces pastorianus
gtgctgatgtcaaaggtgtctgtac

SEQ ID NO: 97310 - DNA, 25 bp, Saccharomyces pastorianus
gatcgggtttgacttttcgaccaag

SEQ ID NO: 97311 - DNA, 25 bp, Saccharomyces pastorianus
gaacgggctctatactagattctct

SEQ ID NO: 97312 - DNA, 25 bp, Saccharomyces pastorianus
gtggcgacaccgcaagacagtatgt

SEQ ID NO: 97313 - DNA, 25 bp, Saccharomyces pastorianus
tcttgtgcacccactgaaacaggtt

SEQ ID NO: 97314 - DNA, 25 bp, Saccharomyces pastorianus
aaagctcgtctcatgtgtgctaagc

SEQ ID NO: 97315 - DNA, 25 bp, Saccharomyces pastorianus
ttgggctacgtatggtcttgtgcac

SEQ ID NO: 97316 - DNA, 25 bp, Saccharomyces pastorianus
aattgaccagtttggctgtggcgac

SEQ ID NO: 97317 - DNA, 25 bp, Saccharomyces pastorianus
atagctggtttacgtgcatctcaaa

SEQ ID NO: 97318 - DNA, 25 bp, Saccharomyces pastorianus
tcaaaccattcccagtttctcataa

SEQ ID NO: 97319 - DNA, 25 bp, Saccharomyces pastorianus
gggcaacggtgccatttccaaagct

SEQ ID NO: 97320 - DNA, 25 bp, Saccharomyces pastorianus
gtgctaagcgacgaattctgccaag

SEQ ID NO: 97321 - DNA, 25 bp, Saccharomyces pastorianus
gaatggacaagagcgcatcctgaag

SEQ ID NO: 97322 - DNA, 25 bp, Saccharomyces pastorianus
aatgggccggactttcaaaacagcg

SEQ ID NO: 97323 - DNA, 25 bp, Saccharomyces pastorianus
atgaccacccctgctatgatgatat

SEQ ID NO: 97324 - DNA, 25 bp, Saccharomyces pastorianus
gcaagaagaggcatcggctacgaat

SEQ ID NO: 97325 - DNA, 25 bp, Saccharomyces pastorianus
gtttcgctattagagctgtgtccac

SEQ ID NO: 97326 - DNA, 25 bp, Saccharomyces pastorianus
gccaaatttctatcttgcccgatga

SEQ ID NO: 97327 - DNA, 25 bp, Saccharomyces pastorianus
gtggtggatccagctgtgcttaaca

SEQ ID NO: 97328 - DNA, 25 bp, Saccharomyces pastorianus
tgatttgatcccgttagcttccagg

SEQ ID NO: 97329 - DNA, 25 bp, Saccharomyces pastorianus
catcctgaagatgctgtttcgctat

SEQ ID NO: 97330 - DNA, 25 bp, Saccharomyces pastorianus
atatatcgggagtttcacaacagca

SEQ ID NO: 97331 - DNA, 25 bp, Saccharomyces pastorianus
agaattgccctctggtatcgacgtt

SEQ ID NO: 97332 - DNA, 25 bp, Saccharomyces pastorianus
acgagtgactctggaactatgcttc

SEQ ID NO: 97333 - DNA, 25 bp, Saccharomyces pastorianus
atctactttctgcttcttgtgttta

SEQ ID NO: 97334 - DNA, 25 bp, Saccharomyces pastorianus
gtagtatctactttctgcttcttgt

SEQ ID NO: 97335 - DNA, 25 bp, Saccharomyces pastorianus
ttattcgtcggttttgttacatctt

SEQ ID NO: 97336 - DNA, 25 bp, Saccharomyces pastorianus
gcttcttgtgtttattctaactttt

SEQ ID NO: 97337 - DNA, 25 bp, Saccharomyces pastorianus
gttctatcgaacgagtgactctgga

SEQ ID NO: 97338 - DNA, 25 bp, Saccharomyces pastorianus
tcgtcggttttgttacatcttaaat

SEQ ID NO: 97339 - DNA, 25 bp, Saccharomyces pastorianus
cattatgtgtggctgtagtatctac

SEQ ID NO: 97340 - DNA, 25 bp, Saccharomyces pastorianus
ctttctgcttcttgtgtttattcta

SEQ ID NO: 97341 - DNA, 25 bp, Saccharomyces pastorianus
ataactcttagcattatgtgtggct

SEQ ID NO: 97342 - DNA, 25 bp, Saccharomyces pastorianus
ggaactatgcttccatataactctt

SEQ ID NO: 97343 - DNA, 25 bp, Saccharomyces pastorianus
tattgttaagccttccactttctac

SEQ ID NO: 97344 - DNA, 25 bp, Saccharomyces pastorianus
gtgtggctcccagtgatatgatcga

SEQ ID NO: 97345 - DNA, 25 bp, Saccharomyces pastorianus
aagaccttcgtgttatcctatgcag

SEQ ID NO: 97346 - DNA, 25 bp, Saccharomyces pastorianus
ttgttcagctccttcgaatggtgat

SEQ ID NO: 97347 - DNA, 25 bp, Saccharomyces pastorianus
tatatgggccattccgtgatgctgc

SEQ ID NO: 97348 - DNA, 25 bp, Saccharomyces pastorianus
gcgcatatcacgtgtcgggcgaata

SEQ ID NO: 97349 - DNA, 25 bp, Saccharomyces pastorianus
agacttaccaatctgcgcatatcac

SEQ ID NO: 97350 - DNA, 25 bp, Saccharomyces pastorianus
aagctggtgcgcactgtgtggctcc

SEQ ID NO: 97351 - DNA, 25 bp, Saccharomyces pastorianus
gcagctgtggcagttaactacgcta

SEQ ID NO: 97352 - DNA, 25 bp, Saccharomyces pastorianus
gtagtgtctctagattagcagctgt

SEQ ID NO: 97353 - DNA, 25 bp, Saccharomyces pastorianus
tgaatacacttctcatggccattgc

SEQ ID NO: 97354 - DNA, 25 bp, Saccharomyces pastorianus
gtagcggctcaacctttttgacaaa

SEQ ID NO: 97355 - DNA, 25 bp, Saccharomyces pastorianus
gttttgctctcaagaagcgctggat

SEQ ID NO: 97356 - DNA, 25 bp, Saccharomyces pastorianus
agttgtcaagctaacgcggtttccg

SEQ ID NO: 97357 - DNA, 25 bp, Saccharomyces pastorianus
acgttcgcgatgtttcaaaagctca

SEQ ID NO: 97358 - DNA, 25 bp, Saccharomyces pastorianus
gtttccgcatactgtggttccaaga

SEQ ID NO: 97359 - DNA, 25 bp, Saccharomyces pastorianus
aggatttgtttttggccctcagcta

SEQ ID NO: 97360 - DNA, 25 bp, Saccharomyces pastorianus
agctatttgccgactctcttagaaa

SEQ ID NO: 97361 - DNA, 25 bp, Saccharomyces pastorianus
aaactgcttgggattttctcgagga

SEQ ID NO: 97362 - DNA, 25 bp, Saccharomyces pastorianus
ctatcaaccatcaacccaggatttg

SEQ ID NO: 97363 - DNA, 25 bp, Saccharomyces pastorianus
tagcaactggcgaacctggtagcgg

SEQ ID NO: 97364 - DNA, 25 bp, Saccharomyces pastorianus
aatgcgctggccaaagactattctt

SEQ ID NO: 97365 - DNA, 25 bp, Saccharomyces pastorianus
taaagcacatgtttagcgggagctg

SEQ ID NO: 97366 - DNA, 25 bp, Saccharomyces pastorianus
atatcagagtctttgcaatcgtcaa

SEQ ID NO: 97367 - DNA, 25 bp, Saccharomyces pastorianus
gggcgcccagtcgagtgacgacaaa

SEQ ID NO: 97368 - DNA, 25 bp, Saccharomyces pastorianus
ggtagtgagagtgccaccacaccag

SEQ ID NO: 97369 - DNA, 25 bp, Saccharomyces pastorianus
gttgataacgatacgctgtccaaat

SEQ ID NO: 97370 - DNA, 25 bp, Saccharomyces pastorianus
gatgagacctacaaacactccgaat

SEQ ID NO: 97371 - DNA, 25 bp, Saccharomyces pastorianus
tcgtcaaattcaatgccctgggaat

SEQ ID NO: 97372 - DNA, 25 bp, Saccharomyces pastorianus
agcgatatcttgttaatcaacccaa

SEQ ID NO: 97373 - DNA, 25 bp, Saccharomyces pastorianus
attactgcaacgactttggcgagcg

SEQ ID NO: 97374 - DNA, 25 bp, Saccharomyces pastorianus
aatgtgctccgatacaatagcgata

SEQ ID NO: 97375 - DNA, 25 bp, Saccharomyces pastorianus
ggcgagcgtacaaaacccaggagtt

SEQ ID NO: 97376 - DNA, 25 bp, Saccharomyces pastorianus
tggttaccagagattggcacccttc

SEQ ID NO: 97377 - DNA, 25 bp, Saccharomyces pastorianus
cattgtcggtgtagctttggagtat

SEQ ID NO: 97378 - DNA, 25 bp, Saccharomyces pastorianus
ccttccagacatatttcgttcgcaa

SEQ ID NO: 97379 - DNA, 25 bp, Saccharomyces pastorianus
ccatcagcgatgatcccgaagtcat

SEQ ID NO: 97380 - DNA, 25 bp, Saccharomyces pastorianus
ggattacacaagacccatcagcgat

SEQ ID NO: 97381 - DNA, 25 bp, Saccharomyces pastorianus
gccatttccgctgcagaactaggtt

SEQ ID NO: 97382 - DNA, 25 bp, Saccharomyces pastorianus
gagggtattttgtggcccgtacact

SEQ ID NO: 97383 - DNA, 25 bp, Saccharomyces pastorianus
ttaggttccttgactgttccaaaag

SEQ ID NO: 97384 - DNA, 25 bp, Saccharomyces pastorianus
aaggccaggcgatgattccacgcaa

SEQ ID NO: 97385 - DNA, 25 bp, Saccharomyces pastorianus
gagtattgtgtcaaagccaccgcca

SEQ ID NO: 97386 - DNA, 25 bp, Saccharomyces pastorianus
ataagaccactgtcctgctggatta

SEQ ID NO: 97387 - DNA, 25 bp, Saccharomyces pastorianus
ctgactctgattttactactggtgg

SEQ ID NO: 97388 - DNA, 25 bp, Saccharomyces pastorianus
caaccccgttattattgtcaccaag

SEQ ID NO: 97389 - DNA, 25 bp, Saccharomyces pastorianus
cacgcccacgacaatgctaagtaga

SEQ ID NO: 97390 - DNA, 25 bp, Saccharomyces pastorianus
ggacccgtctaactctagtatcgat

SEQ ID NO: 97391 - DNA, 25 bp, Saccharomyces pastorianus
aacataccctactgcaatcacaaaa

SEQ ID NO: 97392 - DNA, 25 bp, Saccharomyces pastorianus
ctcatcatctcctgatttccaaaag

SEQ ID NO: 97393 - DNA, 25 bp, Saccharomyces pastorianus
gatggcttccagtagttcgttaagt

SEQ ID NO: 97394 - DNA, 25 bp, Saccharomyces pastorianus
cccatttctcagtcggattcacaag

SEQ ID NO: 97395 - DNA, 25 bp, Saccharomyces pastorianus
attaatactgctatatccacccaac

SEQ ID NO: 97396 - DNA, 25 bp, Saccharomyces pastorianus
ttgaacgacttgttggttggccaaa

SEQ ID NO: 97397 - DNA, 25 bp, Saccharomyces pastorianus
aagaaatctaagacttccacgccca

SEQ ID NO: 97398 - DNA, 25 bp, Saccharomyces pastorianus
gcttgttgcctttgatttcgcgaga

SEQ ID NO: 97399 - DNA, 25 bp, Saccharomyces pastorianus
atggtaaaggccctgcggcgctttc

SEQ ID NO: 97400 - DNA, 25 bp, Saccharomyces pastorianus
atttcgcgagagactgcggactgcc

SEQ ID NO: 97401 - DNA, 25 bp, Saccharomyces pastorianus
tcaggaaacctgtagcggccgggcc

SEQ ID NO: 97402 - DNA, 25 bp, Saccharomyces pastorianus
tgcggcgctttctttcggaaaaact

SEQ ID NO: 97403 - DNA, 25 bp, Saccharomyces pastorianus
tgctagcatgcttgttcgagctcat

SEQ ID NO: 97404 - DNA, 25 bp, Saccharomyces pastorianus
aaactccagagtggcgtaggccggc

SEQ ID NO: 97405 - DNA, 25 bp, Saccharomyces pastorianus
ttttctccacgtgtctgcttgttgc

SEQ ID NO: 97406 - DNA, 25 bp, Saccharomyces pastorianus
gagctcatgagttctcctggctttt

SEQ ID NO: 97407 - DNA, 25 bp, Saccharomyces pastorianus
gttgccattataatagcttctcagg

SEQ ID NO: 97408 - DNA, 25 bp, Saccharomyces pastorianus
aggccggcttgtttagttgctagca

SEQ ID NO: 97409 - DNA, 25 bp, Saccharomyces pastorianus
ttgtcagtaattgcggttctcaccc

SEQ ID NO: 97410 - DNA, 25 bp, Saccharomyces pastorianus
aatattttctgttattgcttcagtt

SEQ ID NO: 97411 - DNA, 25 bp, Saccharomyces pastorianus
gtcaacgactactattttggccaac

SEQ ID NO: 97412 - DNA, 25 bp, Saccharomyces pastorianus
atgcagttacttcgctgtttttcaa

SEQ ID NO: 97413 - DNA, 25 bp, Saccharomyces pastorianus
actatatgcgagcaaatcccctcac

SEQ ID NO: 97414 - DNA, 25 bp, Saccharomyces pastorianus
gacgccgtactctttgtcaacgact

SEQ ID NO: 97415 - DNA, 25 bp, Saccharomyces pastorianus
aactttagaatcgacgccgtactct

SEQ ID NO: 97416 - DNA, 25 bp, Saccharomyces pastorianus
ggaactgacaactatatgcgagcaa

SEQ ID NO: 97417 - DNA, 25 bp, Saccharomyces pastorianus
atcccctcaccaactttagaatcga

SEQ ID NO: 97418 - DNA, 25 bp, Saccharomyces pastorianus
tttggccaacgggaaggcaatgcaa

SEQ ID NO: 97419 - DNA, 25 bp, Saccharomyces pastorianus
attgcttcagttttagcacaggaac

SEQ ID NO: 97420 - DNA, 25 bp, Saccharomyces pastorianus
ctgctggtactcaaagttctaagtt

SEQ ID NO: 97421 - DNA, 25 bp, Saccharomyces pastorianus
taagtctgctggtactcaaagttct

SEQ ID NO: 97422 - DNA, 25 bp, Saccharomyces pastorianus
gctggtactcaaagttctaagttct

SEQ ID NO: 97423 - DNA, 25 bp, Saccharomyces pastorianus
gtctgctggtactcaaagttctaag

SEQ ID NO: 97424 - DNA, 25 bp, Saccharomyces pastorianus
ctggtactcaaagttctaagttctc

SEQ ID NO: 97425 - DNA, 25 bp, Saccharomyces pastorianus
aagtctgctggtactcaaagttcta

SEQ ID NO: 97426 - DNA, 25 bp, Saccharomyces pastorianus
ttcaggtgccaaaatctacccaggc

SEQ ID NO: 97427 - DNA, 25 bp, Saccharomyces pastorianus
ggtgccaaaatctacccaggcagag

SEQ ID NO: 97428 - DNA, 25 bp, Saccharomyces pastorianus
agtctgctggtactcaaagttctaa

SEQ ID NO: 97429 - DNA, 25 bp, Saccharomyces pastorianus
aggtgccaaaatctacccaggcaga

SEQ ID NO: 97430 - DNA, 25 bp, Saccharomyces pastorianus
tgccaaaatctacccaggcagaggt

SEQ ID NO: 97431 - DNA, 25 bp, Saccharomyces pastorianus
taagtctgctggtactcaaagttct

SEQ ID NO: 97432 - DNA, 25 bp, Saccharomyces pastorianus
gctggtactcaaagttctaagttct

SEQ ID NO: 97433 - DNA, 25 bp, Saccharomyces pastorianus
gtctgctggtactcaaagttctaag

SEQ ID NO: 97434 - DNA, 25 bp, Saccharomyces pastorianus
ctggtactcaaagttctaagttctc

SEQ ID NO: 97435 - DNA, 25 bp, Saccharomyces pastorianus
aagtctgctggtactcaaagttcta

SEQ ID NO: 97436 - DNA, 25 bp, Saccharomyces pastorianus
ttcaggtgccaaaatctacccaggc

SEQ ID NO: 97437 - DNA, 25 bp, Saccharomyces pastorianus
atcgattctttttcaggtgccaaaa

SEQ ID NO: 97438 - DNA, 25 bp, Saccharomyces pastorianus
aggtgccaaaatctacccaggcaga

SEQ ID NO: 97439 - DNA, 25 bp, Saccharomyces pastorianus
tgccaaaatctacccaggcagaggt

SEQ ID NO: 97440 - DNA, 25 bp, Saccharomyces pastorianus
aaatcgattctttttcaggtgccaa

SEQ ID NO: 97441 - DNA, 25 bp, Saccharomyces pastorianus
ctgctggtactcaaagttctaagtt

SEQ ID NO: 97442 - DNA, 25 bp, Saccharomyces pastorianus
acaggagaaagtcaaaaagcggcaa

SEQ ID NO: 97443 - DNA, 25 bp, Saccharomyces pastorianus
gaacaagaagttaacatcatgggag

SEQ ID NO: 97444 - DNA, 25 bp, Saccharomyces pastorianus
tatggaaggcagaaaagacaccgct

SEQ ID NO: 97445 - DNA, 25 bp, Saccharomyces pastorianus
gtttggctgctaagatgcatgctaa

SEQ ID NO: 97446 - DNA, 25 bp, Saccharomyces pastorianus
gctcgtcaagctaaaataaccatgt

SEQ ID NO: 97447 - DNA, 25 bp, Saccharomyces pastorianus
agatacgaacgtttggctgctaaga

SEQ ID NO: 97448 - DNA, 25 bp, Saccharomyces pastorianus
tgagaaggaagaagctcgtcaagct

SEQ ID NO: 97449 - DNA, 25 bp, Saccharomyces pastorianus
gaaaagacaccgctgagggccaaaa

SEQ ID NO: 97450 - DNA, 25 bp, Saccharomyces pastorianus
ggcactccagttagtgggaaggtat

SEQ ID NO: 97451 - DNA, 25 bp, Saccharomyces pastorianus
tgagggccaaaagcagagtcgttaa

SEQ ID NO: 97452 - DNA, 25 bp, Saccharomyces pastorianus
aaagcggcaaaaggcactccagtta

SEQ ID NO: 97453 - DNA, 25 bp, Saccharomyces pastorianus
ggtcatggtactggtgctgagcatt

SEQ ID NO: 97454 - DNA, 25 bp, Saccharomyces pastorianus
gacaagatgactatttcggcaagga

SEQ ID NO: 97455 - DNA, 25 bp, Saccharomyces pastorianus
ctccttattgccctttgcattgaag

SEQ ID NO: 97456 - DNA, 25 bp, Saccharomyces pastorianus
gaagcaaatcgctcacgtgttaaag

SEQ ID NO: 97457 - DNA, 25 bp, Saccharomyces pastorianus
attaattacttgtgtcttgacgcaa

SEQ ID NO: 97458 - DNA, 25 bp, Saccharomyces pastorianus
tatggactgttatcactatcgagac

SEQ ID NO: 97459 - DNA, 25 bp, Saccharomyces pastorianus
gtcatgagggttacgtctccttatt

SEQ ID NO: 97460 - DNA, 25 bp, Saccharomyces pastorianus
gtgctgagcatttcacaggctggac

SEQ ID NO: 97461 - DNA, 25 bp, Saccharomyces pastorianus
gagaatctggatttgttacactgga

SEQ ID NO: 97462 - DNA, 25 bp, Saccharomyces pastorianus
actacccagaggtgattctcgacgt

SEQ ID NO: 97463 - DNA, 25 bp, Saccharomyces pastorianus
tagttgctttgatgagtgacccaga

SEQ ID NO: 97464 - DNA, 25 bp, Saccharomyces pastorianus
gtgctcaattcgttgcagctactga

SEQ ID NO: 97465 - DNA, 25 bp, Saccharomyces pastorianus
tctaactgccggtagacctggtgtc

SEQ ID NO: 97466 - DNA, 25 bp, Saccharomyces pastorianus
tactcattctgtttctgctgggtta

SEQ ID NO: 97467 - DNA, 25 bp, Saccharomyces pastorianus
ggaacagtttgctgccatgaacaat

SEQ ID NO: 97468 - DNA, 25 bp, Saccharomyces pastorianus
aagtgtcgctgaagtcttgccgaaa

SEQ ID NO: 97469 - DNA, 25 bp, Saccharomyces pastorianus
ctcaggctctgcttggctttaaatt

SEQ ID NO: 97470 - DNA, 25 bp, Saccharomyces pastorianus
attacctgacgcagttgttgcatgt

SEQ ID NO: 97471 - DNA, 25 bp, Saccharomyces pastorianus
tattcccgctttggaatcttctcat

SEQ ID NO: 97472 - DNA, 25 bp, Saccharomyces pastorianus
ttcaccatttgagcacgatacttcc

SEQ ID NO: 97473 - DNA, 25 bp, Saccharomyces pastorianus
ggtggttccaactctacaggtatgt

SEQ ID NO: 97474 - DNA, 25 bp, Saccharomyces pastorianus
tattggaaatctactggccgtgctc

SEQ ID NO: 97475 - DNA, 25 bp, Saccharomyces pastorianus
cacaaatgttatgggcacgccgctg

SEQ ID NO: 97476 - DNA, 25 bp, Saccharomyces pastorianus
gtcacaattcaatggcagcggcaat

SEQ ID NO: 97477 - DNA, 25 bp, Saccharomyces pastorianus
agaactggattctctagacctgaac

SEQ ID NO: 97478 - DNA, 25 bp, Saccharomyces pastorianus
aataacagcatcgatggcagccgcg

SEQ ID NO: 97479 - DNA, 25 bp, Saccharomyces pastorianus
gaataacgatttccagcagcagcag

SEQ ID NO: 97480 - DNA, 25 bp, Saccharomyces pastorianus
ctaacccctgctaatatcctaaata

SEQ ID NO: 97481 - DNA, 25 bp, Saccharomyces pastorianus
atgattaacagcgtttcgcccacaa

SEQ ID NO: 97482 - DNA, 25 bp, Saccharomyces pastorianus
gcagcctcaaccacagtacaatatg

SEQ ID NO: 97483 - DNA, 25 bp, Saccharomyces pastorianus
ggcaaaggctcaagctcaggctcaa

SEQ ID NO: 97484 - DNA, 25 bp, Saccharomyces pastorianus
ataatagcactgcagctgcaccgat

SEQ ID NO: 97485 - DNA, 25 bp, Saccharomyces pastorianus
tgggaactccaaccgtacataatag

SEQ ID NO: 97486 - DNA, 25 bp, Saccharomyces pastorianus
aaagaagggcgcttcgtcccaagag

SEQ ID NO: 97487 - DNA, 25 bp, Saccharomyces pastorianus
gaggaattcttgtcgttactgccat

SEQ ID NO: 97488 - DNA, 25 bp, Saccharomyces pastorianus
gatgaacgctcttttcagaccaaag

SEQ ID NO: 97489 - DNA, 25 bp, Saccharomyces pastorianus
gagcatgccacggttgatcgagaca

SEQ ID NO: 97490 - DNA, 25 bp, Saccharomyces pastorianus
ggcggtggcactctctgtaaaatat

SEQ ID NO: 97491 - DNA, 25 bp, Saccharomyces pastorianus
ttttgtcaagaccatttgcgccatt

SEQ ID NO: 97492 - DNA, 25 bp, Saccharomyces pastorianus
gccataagccttttaccctgtggga

SEQ ID NO: 97493 - DNA, 25 bp, Saccharomyces pastorianus
gcccatccaggtgaagtcgaacgat

SEQ ID NO: 97494 - DNA, 25 bp, Saccharomyces pastorianus
ttgcgccattggctgtacctggact

SEQ ID NO: 97495 - DNA, 25 bp, Saccharomyces pastorianus
ttttgggcagtgttatcggctctgt

SEQ ID NO: 97496 - DNA, 25 bp, Saccharomyces pastorianus
gagtacgagaacctttcaaccacga

SEQ ID NO: 97497 - DNA, 25 bp, Saccharomyces pastorianus
gtaccccaatttcgttaatctcact

SEQ ID NO: 97498 - DNA, 25 bp, Saccharomyces pastorianus
gattttttggtcttgtgctggtata

SEQ ID NO: 97499 - DNA, 25 bp, Saccharomyces pastorianus
gctagatcatccactcttttttcta

SEQ ID NO: 97500 - DNA, 25 bp, Saccharomyces pastorianus
atcttgttgaacatggacgcgtcag

SEQ ID NO: 97501 - DNA, 25 bp, Saccharomyces pastorianus
tattcaaagatcacggtaccccaat

SEQ ID NO: 97502 - DNA, 25 bp, Saccharomyces pastorianus
ggttatattacctgtcacgcgtttt

SEQ ID NO: 97503 - DNA, 25 bp, Saccharomyces pastorianus
tacctgtcacgcgttttactaaagt

SEQ ID NO: 97504 - DNA, 25 bp, Saccharomyces pastorianus
gatgatgttttatatctacggctag

SEQ ID NO: 97505 - DNA, 25 bp, Saccharomyces pastorianus
gacgcgtcagcttttgagcccatga

SEQ ID NO: 97506 - DNA, 25 bp, Saccharomyces pastorianus
gaacatcgtaatcttactttggata

SEQ ID NO: 97507 - DNA, 25 bp, Saccharomyces pastorianus
gcagtagattgcaaactcctcaaga

SEQ ID NO: 97508 - DNA, 25 bp, Saccharomyces pastorianus
gtctcaaggctggttatatgttctc

SEQ ID NO: 97509 - DNA, 25 bp, Saccharomyces pastorianus
ggatctctaaatttgcaccaggaaa

SEQ ID NO: 97510 - DNA, 25 bp, Saccharomyces pastorianus
tgacggtgccattttttgtgtttaa

SEQ ID NO: 97511 - DNA, 25 bp, Saccharomyces pastorianus
gatgaatgtcatcaacggcgtggaa

SEQ ID NO: 97512 - DNA, 25 bp, Saccharomyces pastorianus
ggaagcacctgcatctgtagagact

SEQ ID NO: 97513 - DNA, 25 bp, Saccharomyces pastorianus
tatgttctcttgcatcctctaagga

SEQ ID NO: 97514 - DNA, 25 bp, Saccharomyces pastorianus
aagttgagttcctcgactagcacct

SEQ ID NO: 97515 - DNA, 25 bp, Saccharomyces pastorianus
gcccatcttcacaaactcaggttat

SEQ ID NO: 97516 - DNA, 25 bp, Saccharomyces pastorianus
gagtgtctctttgggaatctgggtt

SEQ ID NO: 97517 - DNA, 25 bp, Saccharomyces pastorianus
ctccgcccaggataattatgccaaa

SEQ ID NO: 97518 - DNA, 25 bp, Saccharomyces pastorianus
tagcaccttgttccctacgtttgta

SEQ ID NO: 97519 - DNA, 25 bp, Saccharomyces pastorianus
gtactgtcccagttgtcaggacttg

SEQ ID NO: 97520 - DNA, 25 bp, Saccharomyces pastorianus
tgtcaggacttgtatcttccccaat

SEQ ID NO: 97521 - DNA, 25 bp, Saccharomyces pastorianus
tgcaagatttattctgaccaagcca

SEQ ID NO: 97522 - DNA, 25 bp, Saccharomyces pastorianus
gaaacaagtcgccagtggtgaacaa

SEQ ID NO: 97523 - DNA, 25 bp, Saccharomyces pastorianus
gagtattatcgagcacgcagcagaa

SEQ ID NO: 97524 - DNA, 25 bp, Saccharomyces pastorianus
aatggcatgcagttgctgccttgtg

SEQ ID NO: 97525 - DNA, 25 bp, Saccharomyces pastorianus
gctgccttgtgggttgagcgataca

SEQ ID NO: 97526 - DNA, 25 bp, Saccharomyces pastorianus
gatgaggcagtatctggtcctagaa

SEQ ID NO: 97527 - DNA, 25 bp, Saccharomyces pastorianus
ttccccaatcatctagattcctgtg

SEQ ID NO: 97528 - DNA, 25 bp, Saccharomyces pastorianus
acaccgtaaggttgtactgtcccag

SEQ ID NO: 97529 - DNA, 25 bp, Saccharomyces pastorianus
gatacagttgggaaacacaccgtaa

SEQ ID NO: 97530 - DNA, 25 bp, Saccharomyces pastorianus
gaattatcccagatggacgacgaag

SEQ ID NO: 97531 - DNA, 25 bp, Saccharomyces pastorianus
catactctcaaagatccccttagaa

SEQ ID NO: 97532 - DNA, 25 bp, Saccharomyces pastorianus
tttacgagctgttcccaaagacctt

SEQ ID NO: 97533 - DNA, 25 bp, Saccharomyces pastorianus
acttggttcaacgaagattcacttc

SEQ ID NO: 97534 - DNA, 25 bp, Saccharomyces pastorianus
aagctacccatttggactatcgatc

SEQ ID NO: 97535 - DNA, 25 bp, Saccharomyces pastorianus
gattcacttctacattttacgagct

SEQ ID NO: 97536 - DNA, 25 bp, Saccharomyces pastorianus
ttaatcaagcttaccatactctcaa

SEQ ID NO: 97537 - DNA, 25 bp, Saccharomyces pastorianus
ggtagtgaacagtcatcaactctta

SEQ ID NO: 97538 - DNA, 25 bp, Saccharomyces pastorianus
gtaactaccagtgatccacagctat

SEQ ID NO: 97539 - DNA, 25 bp, Saccharomyces pastorianus
aattacaagcacagcaccatccaga

SEQ ID NO: 97540 - DNA, 25 bp, Saccharomyces pastorianus
gacatggcccaacaaggtagtgaac

SEQ ID NO: 97541 - DNA, 25 bp, Saccharomyces pastorianus
attcctaatgtggtgccgggattgc

SEQ ID NO: 97542 - DNA, 25 bp, Saccharomyces pastorianus
gttactaaggagctctacctcgttg

SEQ ID NO: 97543 - DNA, 25 bp, Saccharomyces pastorianus
atatcccattgaaacccattcagga

SEQ ID NO: 97544 - DNA, 25 bp, Saccharomyces pastorianus
tacctcgttgactctgaaaccggaa

SEQ ID NO: 97545 - DNA, 25 bp, Saccharomyces pastorianus
aatctggcaagatcactgacctgga

SEQ ID NO: 97546 - DNA, 25 bp, Saccharomyces pastorianus
gattgctcccgctatgggaattgct

SEQ ID NO: 97547 - DNA, 25 bp, Saccharomyces pastorianus
gacgtgatacggttatttggcttcg

SEQ ID NO: 97548 - DNA, 25 bp, Saccharomyces pastorianus
gcggaagtactggatgtgtgtcaca

SEQ ID NO: 97549 - DNA, 25 bp, Saccharomyces pastorianus
tatagcgaacctccgaatgtcaaga

SEQ ID NO: 97550 - DNA, 25 bp, Saccharomyces pastorianus
gaacacaatggccatgctccaaatg

SEQ ID NO: 97551 - DNA, 25 bp, Saccharomyces pastorianus
ggagggatttcccactgataatgtt

SEQ ID NO: 97552 - DNA, 25 bp, Saccharomyces pastorianus
gttttggacgtgaagccaggcttag

SEQ ID NO: 97553 - DNA, 25 bp, Saccharomyces pastorianus
ggaggagaccttgtgtaccaaatta

SEQ ID NO: 97554 - DNA, 25 bp, Saccharomyces pastorianus
ccaggcttagctattggcagtaaac

SEQ ID NO: 97555 - DNA, 25 bp, Saccharomyces pastorianus
tcgttgctgttttgccccaaatatg

SEQ ID NO: 97556 - DNA, 25 bp, Saccharomyces pastorianus
tccggaccttttacaaatgacaata

SEQ ID NO: 97557 - DNA, 25 bp, Saccharomyces pastorianus
gaagaactcacaactgttaggcaac

SEQ ID NO: 97558 - DNA, 25 bp, Saccharomyces pastorianus
aggcaacaagtttcctctataggag

SEQ ID NO: 97559 - DNA, 25 bp, Saccharomyces pastorianus
ggacatcatttattttacctcaatt

SEQ ID NO: 97560 - DNA, 25 bp, Saccharomyces pastorianus
aaggtccgatctgaatagttacaca

SEQ ID NO: 97561 - DNA, 25 bp, Saccharomyces pastorianus
caagagagtggctcgttgctgtttt

SEQ ID NO: 97562 - DNA, 25 bp, Saccharomyces pastorianus
aagttcacaattgttgcggtggcaa

SEQ ID NO: 97563 - DNA, 25 bp, Saccharomyces pastorianus
ccagagaaaggattcaccattttag

SEQ ID NO: 97564 - DNA, 25 bp, Saccharomyces pastorianus
aagggatcacacatttccagagaaa

SEQ ID NO: 97565 - DNA, 25 bp, Saccharomyces pastorianus
aataagaccgaatcactttcagaaa

SEQ ID NO: 97566 - DNA, 25 bp, Saccharomyces pastorianus
agaaaaccatttgaagcctcctcct

SEQ ID NO: 97567 - DNA, 25 bp, Saccharomyces pastorianus
tcagtaactgctttcaacctgacgc

SEQ ID NO: 97568 - DNA, 25 bp, Saccharomyces pastorianus
gacgtcgactctctatgtttcagta

SEQ ID NO: 97569 - DNA, 25 bp, Saccharomyces pastorianus
gggcccataaaccttcttgagacaa

SEQ ID NO: 97570 - DNA, 25 bp, Saccharomyces pastorianus
agatatcgagaccagcgggcccata

SEQ ID NO: 97571 - DNA, 25 bp, Saccharomyces pastorianus
gtccattaaattacgcagatatcga

SEQ ID NO: 97572 - DNA, 25 bp, Saccharomyces pastorianus
ggagacacgatacgtccattaaatt

SEQ ID NO: 97573 - DNA, 25 bp, Saccharomyces pastorianus
gacgccctgtctggaaatgtatttt

SEQ ID NO: 97574 - DNA, 25 bp, Saccharomyces pastorianus
gataagttgctagcccttgttgata

SEQ ID NO: 97575 - DNA, 25 bp, Saccharomyces pastorianus
gtttatctttgacgcaatctctgat

SEQ ID NO: 97576 - DNA, 25 bp, Saccharomyces pastorianus
gggccccataagaaatacacctcat

SEQ ID NO: 97577 - DNA, 25 bp, Saccharomyces pastorianus
ttgcaacgttgtctagatcatggga

SEQ ID NO: 97578 - DNA, 25 bp, Saccharomyces pastorianus
ggaaattacgttttacagacagcat

SEQ ID NO: 97579 - DNA, 25 bp, Saccharomyces pastorianus
gagccatcgaactttctatccataa

SEQ ID NO: 97580 - DNA, 25 bp, Saccharomyces pastorianus
agacagctattgtttcggagccaat

SEQ ID NO: 97581 - DNA, 25 bp, Saccharomyces pastorianus
actatcagagattgtggcgccttta

SEQ ID NO: 97582 - DNA, 25 bp, Saccharomyces pastorianus
tagacacgggtgttgcgttttgcaa

SEQ ID NO: 97583 - DNA, 25 bp, Saccharomyces pastorianus
gtggcgagacgggtattcaatcatt

SEQ ID NO: 97584 - DNA, 25 bp, Saccharomyces pastorianus
aattgtccacctgttgaaaccaaga

SEQ ID NO: 97585 - DNA, 25 bp, Saccharomyces pastorianus
gagtaaggcatgaagcccattccac

SEQ ID NO: 97586 - DNA, 25 bp, Saccharomyces pastorianus
cattccacccatcatttgtggatgt

SEQ ID NO: 97587 - DNA, 25 bp, Saccharomyces pastorianus
gcaaattgagaatcttgagaaactt

SEQ ID NO: 97588 - DNA, 25 bp, Saccharomyces pastorianus
gggccattagcaaattgagaatctt

SEQ ID NO: 97589 - DNA, 25 bp, Saccharomyces pastorianus
ccacccatcatttgtggatgtggaa

SEQ ID NO: 97590 - DNA, 25 bp, Saccharomyces pastorianus
gagaaactttattcgcaaatgcatt

SEQ ID NO: 97591 - DNA, 25 bp, Saccharomyces pastorianus
gaaacatttgcgacggagggccatt

SEQ ID NO: 97592 - DNA, 25 bp, Saccharomyces pastorianus
cgacggagggccattagcaaattga

SEQ ID NO: 97593 - DNA, 25 bp, Saccharomyces pastorianus
acatttgcgacggagggccattagc

SEQ ID NO: 97594 - DNA, 25 bp, Saccharomyces pastorianus
ttgtggatgtggaaacatttgcgac

SEQ ID NO: 97595 - DNA, 25 bp, Saccharomyces pastorianus
cggagggccattagcaaattgagaa

SEQ ID NO: 97596 - DNA, 25 bp, Saccharomyces pastorianus
gcacaattgccttcatttaggtcat

SEQ ID NO: 97597 - DNA, 25 bp, Saccharomyces pastorianus
tgaatccggatctcccaagtcttaa

SEQ ID NO: 97598 - DNA, 25 bp, Saccharomyces pastorianus
tcagcagcaaatacccacttcagta

SEQ ID NO: 97599 - DNA, 25 bp, Saccharomyces pastorianus
atgatcaatcccgattacgcgcaac

SEQ ID NO: 97600 - DNA, 25 bp, Saccharomyces pastorianus
cactaccggagtttgcacaattgcc

SEQ ID NO: 97601 - DNA, 25 bp, Saccharomyces pastorianus
agcaccttccccagtgagaaacaac

SEQ ID NO: 97602 - DNA, 25 bp, Saccharomyces pastorianus
ggattccatttaacggtctcacaaa

SEQ ID NO: 97603 - DNA, 25 bp, Saccharomyces pastorianus
aagacgggcacttcatgcttactaa

SEQ ID NO: 97604 - DNA, 25 bp, Saccharomyces pastorianus
ttgccattcaatggtcgctcagcac

SEQ ID NO: 97605 - DNA, 25 bp, Saccharomyces pastorianus
atttaggtcattatccgtgtctgat

SEQ ID NO: 97606 - DNA, 25 bp, Saccharomyces pastorianus
gcattgaatcgcctcaattgccatt

SEQ ID NO: 97607 - DNA, 25 bp, Saccharomyces pastorianus
tattcttccttgttgtcctgattca

SEQ ID NO: 97608 - DNA, 25 bp, Saccharomyces pastorianus
ggaagactttcccatttttgccata

SEQ ID NO: 97609 - DNA, 25 bp, Saccharomyces pastorianus
attggactcaatctctcgtttgggc

SEQ ID NO: 97610 - DNA, 25 bp, Saccharomyces pastorianus
tattatgcgcctactacttctttga

SEQ ID NO: 97611 - DNA, 25 bp, Saccharomyces pastorianus
gaatatcactggtctacactgtaca

SEQ ID NO: 97612 - DNA, 25 bp, Saccharomyces pastorianus
aaattcactacactgccgattggac

SEQ ID NO: 97613 - DNA, 25 bp, Saccharomyces pastorianus
tatttgtactaccatgacccatctg

SEQ ID NO: 97614 - DNA, 25 bp, Saccharomyces pastorianus
gattcacagagccttcagagaccaa

SEQ ID NO: 97615 - DNA, 25 bp, Saccharomyces pastorianus
caatgtttcgctgtacgttgttcta

SEQ ID NO: 97616 - DNA, 25 bp, Saccharomyces pastorianus
agctcattggttgtacgcgaacgca

SEQ ID NO: 97617 - DNA, 25 bp, Saccharomyces pastorianus
gaattgattgttccaacctgggaca

SEQ ID NO: 97618 - DNA, 25 bp, Saccharomyces pastorianus
ggtgttatactcacatttgtttcgg

SEQ ID NO: 97619 - DNA, 25 bp, Saccharomyces pastorianus
gtagatgaagaattgggtccctcca

SEQ ID NO: 97620 - DNA, 25 bp, Saccharomyces pastorianus
tgggtccctccatttacaaaactga

SEQ ID NO: 97621 - DNA, 25 bp, Saccharomyces pastorianus
gaccctgcaggttattacgttggct

SEQ ID NO: 97622 - DNA, 25 bp, Saccharomyces pastorianus
gaatggctaacctttcccaaatcta

SEQ ID NO: 97623 - DNA, 25 bp, Saccharomyces pastorianus
tcatatgattgacgcactgggtacc

SEQ ID NO: 97624 - DNA, 25 bp, Saccharomyces pastorianus
gttggatccaactactgtttcgtat

SEQ ID NO: 97625 - DNA, 25 bp, Saccharomyces pastorianus
gttggctacaaagctactgcgacag

SEQ ID NO: 97626 - DNA, 25 bp, Saccharomyces pastorianus
atgcggccctaagagccaaggctga

SEQ ID NO: 97627 - DNA, 25 bp, Saccharomyces pastorianus
ctttaccttgagtgctgagaacatc

SEQ ID NO: 97628 - DNA, 25 bp, Saccharomyces pastorianus
acttggaagtcggtgtcgctacaaa

SEQ ID NO: 97629 - DNA, 25 bp, Saccharomyces pastorianus
ggaggccagcgttaattgacaatct

SEQ ID NO: 97630 - DNA, 25 bp, Saccharomyces pastorianus
tttgatccattccatatttgtcccc

SEQ ID NO: 97631 - DNA, 25 bp, Saccharomyces pastorianus
aatttgttggccatggtgtctttga

SEQ ID NO: 97632 - DNA, 25 bp, Saccharomyces pastorianus
ttacaagttttaccaccacaatcct

SEQ ID NO: 97633 - DNA, 25 bp, Saccharomyces pastorianus
caggagctctcttgcttttgttaaa

SEQ ID NO: 97634 - DNA, 25 bp, Saccharomyces pastorianus
gtatttcattgactgctgtgctaag

SEQ ID NO: 97635 - DNA, 25 bp, Saccharomyces pastorianus
atttgtccccacaatcctatttagt

SEQ ID NO: 97636 - DNA, 25 bp, Saccharomyces pastorianus
aaatcttgcactcatcgatcacagg

SEQ ID NO: 97637 - DNA, 25 bp, Saccharomyces pastorianus
gctgtgctaagcgttttattttcca

SEQ ID NO: 97638 - DNA, 25 bp, Saccharomyces pastorianus
ggtagctgtatgctccacagagtca

SEQ ID NO: 97639 - DNA, 25 bp, Saccharomyces pastorianus
agttcagagcttggtgctggcacca

SEQ ID NO: 97640 - DNA, 25 bp, Saccharomyces pastorianus
gcactgcctagttaacggtcttgat

SEQ ID NO: 97641 - DNA, 25 bp, Saccharomyces pastorianus
gaacacgcaccatgggctctaaaag

SEQ ID NO: 97642 - DNA, 25 bp, Saccharomyces pastorianus
aagctctgcgtcgatttaccaaatc

SEQ ID NO: 97643 - DNA, 25 bp, Saccharomyces pastorianus
gcaatgtgctcgttgatcattttga

SEQ ID NO: 97644 - DNA, 25 bp, Saccharomyces pastorianus
aataagggtggtaagctctgcgtcg

SEQ ID NO: 97645 - DNA, 25 bp, Saccharomyces pastorianus
tttcggatgtggttcttccagagaa

SEQ ID NO: 97646 - DNA, 25 bp, Saccharomyces pastorianus
gaacggcttattacctattagattg

SEQ ID NO: 97647 - DNA, 25 bp, Saccharomyces pastorianus
acatttccagatacgaagctttgag

SEQ ID NO: 97648 - DNA, 25 bp, Saccharomyces pastorianus
tttggattccgatggcaatgtgctc

SEQ ID NO: 97649 - DNA, 25 bp, Saccharomyces pastorianus
tgacaaattgatccctattgctaat

SEQ ID NO: 97650 - DNA, 25 bp, Saccharomyces pastorianus
aaaatccatcattgcaccttcttac

SEQ ID NO: 97651 - DNA, 25 bp, Saccharomyces pastorianus
tgctcccctccattagtttcgatta

SEQ ID NO: 97652 - DNA, 25 bp, Saccharomyces pastorianus
gctcccctccattagtttcgattat

SEQ ID NO: 97653 - DNA, 25 bp, Saccharomyces pastorianus
tcccctccattagtttcgattatat

SEQ ID NO: 97654 - DNA, 25 bp, Saccharomyces pastorianus
taaaaaggccaaatattgtgttatt

SEQ ID NO: 97655 - DNA, 25 bp, Saccharomyces pastorianus
ccctccattagtttcgattatataa

SEQ ID NO: 97656 - DNA, 25 bp, Saccharomyces pastorianus
atgctcccctccattagtttcgatt

SEQ ID NO: 97657 - DNA, 25 bp, Saccharomyces pastorianus
cccctccattagtttcgattatata

SEQ ID NO: 97658 - DNA, 25 bp, Saccharomyces pastorianus
tagtttcgattatataaaaaggcca

SEQ ID NO: 97659 - DNA, 25 bp, Saccharomyces pastorianus
ctccattagtttcgattatataaaa

SEQ ID NO: 97660 - DNA, 25 bp, Saccharomyces pastorianus
cctccattagtttcgattatataaa

SEQ ID NO: 97661 - DNA, 25 bp, Saccharomyces pastorianus
ctcccctccattagtttcgattata

SEQ ID NO: 97662 - DNA, 25 bp, Saccharomyces pastorianus
gtttctccgtttcaggaagcttgtt

SEQ ID NO: 97663 - DNA, 25 bp, Saccharomyces pastorianus
atgtgcggctggttctacgtctcgt

SEQ ID NO: 97664 - DNA, 25 bp, Saccharomyces pastorianus
ggatctccgcttcgagaccgggttt

SEQ ID NO: 97665 - DNA, 25 bp, Saccharomyces pastorianus
atgtcagaggtctcgaggcctggaa

SEQ ID NO: 97666 - DNA, 25 bp, Saccharomyces pastorianus
gcaatgcgcgcgagtttacgaaatt

SEQ ID NO: 97667 - DNA, 25 bp, Saccharomyces pastorianus
caatgcctgtttatgtttctccgtt

SEQ ID NO: 97668 - DNA, 25 bp, Saccharomyces pastorianus
tatgggtgatcccagcaatgcctgt

SEQ ID NO: 97669 - DNA, 25 bp, Saccharomyces pastorianus
gaaattctcgcaggagtttctccgg

SEQ ID NO: 97670 - DNA, 25 bp, Saccharomyces pastorianus
gtctattcctgtcaaaagcatgtca

SEQ ID NO: 97671 - DNA, 25 bp, Saccharomyces pastorianus
tctgcggtaattatcgccggatctc

SEQ ID NO: 97672 - DNA, 25 bp, Saccharomyces pastorianus
cgtgtatgggtttatttctgcggta

SEQ ID NO: 97673 - DNA, 25 bp, Saccharomyces pastorianus
attgcatttaatgggcgccttccaa

SEQ ID NO: 97674 - DNA, 25 bp, Saccharomyces pastorianus
attatcatcgccacctggcattgca

SEQ ID NO: 97675 - DNA, 25 bp, Saccharomyces pastorianus
ctggcattgcatttaatgggcgcct

SEQ ID NO: 97676 - DNA, 25 bp, Saccharomyces pastorianus
aatcttcataattcattatcatcgc

SEQ ID NO: 97677 - DNA, 25 bp, Saccharomyces pastorianus
gcattgcatttaatgggcgccttcc

SEQ ID NO: 97678 - DNA, 25 bp, Saccharomyces pastorianus
atcgccacctggcattgcatttaat

SEQ ID NO: 97679 - DNA, 25 bp, Saccharomyces pastorianus
tttaatgggcgccttccaaaaacat

SEQ ID NO: 97680 - DNA, 25 bp, Saccharomyces pastorianus
gcgccttccaaaaacattcaaatag

SEQ ID NO: 97681 - DNA, 25 bp, Saccharomyces pastorianus
gccacctggcattgcatttaatggg

SEQ ID NO: 97682 - DNA, 25 bp, Saccharomyces pastorianus
aatgggcgccttccaaaaacattca

SEQ ID NO: 97683 - DNA, 25 bp, Saccharomyces pastorianus
gggcgccttccaaaaacattcaaat

SEQ ID NO: 97684 - DNA, 25 bp, Saccharomyces pastorianus
gatgaatctttaagctctgcgattg

SEQ ID NO: 97685 - DNA, 25 bp, Saccharomyces pastorianus
ataccaatgtgaggcaacaactgca

SEQ ID NO: 97686 - DNA, 25 bp, Saccharomyces pastorianus
tctgcgattgataacgaggctaaag

SEQ ID NO: 97687 - DNA, 25 bp, Saccharomyces pastorianus
atctcaaacgttaccaagaacttgg

SEQ ID NO: 97688 - DNA, 25 bp, Saccharomyces pastorianus
gaaggtcttgtttaaaggcctggat

SEQ ID NO: 97689 - DNA, 25 bp, Saccharomyces pastorianus
gggacagatctttcgataacagatt

SEQ ID NO: 97690 - DNA, 25 bp, Saccharomyces pastorianus
gaagcagaacagaacgattcctcat

SEQ ID NO: 97691 - DNA, 25 bp, Saccharomyces pastorianus
aacttggacatcttctaggtatcac

SEQ ID NO: 97692 - DNA, 25 bp, Saccharomyces pastorianus
aacgattcctcattgtattctactg

SEQ ID NO: 97693 - DNA, 25 bp, Saccharomyces pastorianus
gaacatcactgaaagcattagagga

SEQ ID NO: 97694 - DNA, 25 bp, Saccharomyces pastorianus
cttagatacgttggcaagtgctgta

SEQ ID NO: 97695 - DNA, 25 bp, Saccharomyces pastorianus
aaggtcatagtttcagggttctgca

SEQ ID NO: 97696 - DNA, 25 bp, Saccharomyces pastorianus
ggtctccccataaacgaggtgtgct

SEQ ID NO: 97697 - DNA, 25 bp, Saccharomyces pastorianus
gataacgtcgtccatgtttacgaag

SEQ ID NO: 97698 - DNA, 25 bp, Saccharomyces pastorianus
gatgccagatcccttttttgaaact

SEQ ID NO: 97699 - DNA, 25 bp, Saccharomyces pastorianus
agatagcggctctcaaatatgtaat

SEQ ID NO: 97700 - DNA, 25 bp, Saccharomyces pastorianus
agaatcgcacactcaggaagtctgt

SEQ ID NO: 97701 - DNA, 25 bp, Saccharomyces pastorianus
gtcgaaatctccaatcttgacgttt

SEQ ID NO: 97702 - DNA, 25 bp, Saccharomyces pastorianus
gggttctgcatttaacgttatccaa

SEQ ID NO: 97703 - DNA, 25 bp, Saccharomyces pastorianus
gacaacaaacttgcctcaggtggta

SEQ ID NO: 97704 - DNA, 25 bp, Saccharomyces pastorianus
aaccttgtgggactgtaactctatg

SEQ ID NO: 97705 - DNA, 25 bp, Saccharomyces pastorianus
atactaacgagcttgtgacatcaca

SEQ ID NO: 97706 - DNA, 25 bp, Saccharomyces pastorianus
gtgacttcagctttctagctttgga

SEQ ID NO: 97707 - DNA, 25 bp, Saccharomyces pastorianus
atgcgcttcccagttataatgacta

SEQ ID NO: 97708 - DNA, 25 bp, Saccharomyces pastorianus
ttccgcgttttacttctatggttat

SEQ ID NO: 97709 - DNA, 25 bp, Saccharomyces pastorianus
agtctgtgaattctcgcgcaatgtg

SEQ ID NO: 97710 - DNA, 25 bp, Saccharomyces pastorianus
atagggtagtccaccaacagggctc

SEQ ID NO: 97711 - DNA, 25 bp, Saccharomyces pastorianus
aagttggcagattatgcgcttccca

SEQ ID NO: 97712 - DNA, 25 bp, Saccharomyces pastorianus
attaccattcagagtttccgcgttt

SEQ ID NO: 97713 - DNA, 25 bp, Saccharomyces pastorianus
gtaactcaagttactcttctcatta

SEQ ID NO: 97714 - DNA, 25 bp, Saccharomyces pastorianus
gcgcaatgtggtggacggtaactca

SEQ ID NO: 97715 - DNA, 25 bp, Saccharomyces pastorianus
ggaactgtccaaagacactctttta

SEQ ID NO: 97716 - DNA, 25 bp, Saccharomyces pastorianus
gaatcctttagagacatatccgagt

SEQ ID NO: 97717 - DNA, 25 bp, Saccharomyces pastorianus
gagccaggtttgactccattcagag

SEQ ID NO: 97718 - DNA, 25 bp, Saccharomyces pastorianus
agaactgctgtctcgggtgaaactt

SEQ ID NO: 97719 - DNA, 25 bp, Saccharomyces pastorianus
gtgatttctatactgttgctcttcg

SEQ ID NO: 97720 - DNA, 25 bp, Saccharomyces pastorianus
gctgcacagaaacttctcgatccaa

SEQ ID NO: 97721 - DNA, 25 bp, Saccharomyces pastorianus
tgagactaaagctatcgccgaagat

SEQ ID NO: 97722 - DNA, 25 bp, Saccharomyces pastorianus
tatgctggaaatgttgctgacgcgc

SEQ ID NO: 97723 - DNA, 25 bp, Saccharomyces pastorianus
gttgctaggctacacaccaagagtt

SEQ ID NO: 97724 - DNA, 25 bp, Saccharomyces pastorianus
tcttcgtccagctggtatttttggc

SEQ ID NO: 97725 - DNA, 25 bp, Saccharomyces pastorianus
cttggcccgtactgtgtggaaggca

SEQ ID NO: 97726 - DNA, 25 bp, Saccharomyces pastorianus
agttcctatggatgcgtacaatgag

SEQ ID NO: 97727 - DNA, 25 bp, Saccharomyces pastorianus
gacgcgcatgtgttagctgcacaga

SEQ ID NO: 97728 - DNA, 25 bp, Saccharomyces pastorianus
agagaatcattactccgactgttgg

SEQ ID NO: 97729 - DNA, 25 bp, Saccharomyces pastorianus
aattatcaaccttcaaacctgcgct

SEQ ID NO: 97730 - DNA, 25 bp, Saccharomyces pastorianus
ttggactcgccacattcagatcaga

SEQ ID NO: 97731 - DNA, 25 bp, Saccharomyces pastorianus
aattacacaataccttacctctcag

SEQ ID NO: 97732 - DNA, 25 bp, Saccharomyces pastorianus
cctgtgatgccctcatttgatgtaa

SEQ ID NO: 97733 - DNA, 25 bp, Saccharomyces pastorianus
gaagcacgatttgaacatccctgaa

SEQ ID NO: 97734 - DNA, 25 bp, Saccharomyces pastorianus
gaacaaaattctcgccattcttcaa

SEQ ID NO: 97735 - DNA, 25 bp, Saccharomyces pastorianus
ttacctctcagggaatgtctcagtt

SEQ ID NO: 97736 - DNA, 25 bp, Saccharomyces pastorianus
agctatcgccgggtgtatacttaag

SEQ ID NO: 97737 - DNA, 25 bp, Saccharomyces pastorianus
agaattatcgttaccttctcgccct

SEQ ID NO: 97738 - DNA, 25 bp, Saccharomyces pastorianus
gtctcagttatataacgcgcttcta

SEQ ID NO: 97739 - DNA, 25 bp, Saccharomyces pastorianus
tctgtttgaaaaccagcgccgctgg

SEQ ID NO: 97740 - DNA, 25 bp, Saccharomyces pastorianus
aacgtatgacgatgagcccactgta

SEQ ID NO: 97741 - DNA, 25 bp, Saccharomyces pastorianus
aagtgtttactttaccagaggagca

SEQ ID NO: 97742 - DNA, 25 bp, Saccharomyces pastorianus
ttatgagcgcgcatcttggacagat

SEQ ID NO: 97743 - DNA, 25 bp, Saccharomyces pastorianus
gactgtacttttcaaggttgctctg

SEQ ID NO: 97744 - DNA, 25 bp, Saccharomyces pastorianus
gatgggatcattcaacttcctgctt

SEQ ID NO: 97745 - DNA, 25 bp, Saccharomyces pastorianus
aagtgcatatcataccttcctcgga

SEQ ID NO: 97746 - DNA, 25 bp, Saccharomyces pastorianus
tacaccgaattctcatgctctgaag

SEQ ID NO: 97747 - DNA, 25 bp, Saccharomyces pastorianus
accttcctcggacagtagcaaatta

SEQ ID NO: 97748 - DNA, 25 bp, Saccharomyces pastorianus
gcttggcatcgggtggacatcaact

SEQ ID NO: 97749 - DNA, 25 bp, Saccharomyces pastorianus
tggaataatccctctgcaacggaca

SEQ ID NO: 97750 - DNA, 25 bp, Saccharomyces pastorianus
gtatcatattggcacggctgtcctc

SEQ ID NO: 97751 - DNA, 25 bp, Saccharomyces pastorianus
tttgccaccgactcatcctgattat

SEQ ID NO: 97752 - DNA, 25 bp, Saccharomyces pastorianus
gtcctcactgctgccggaaaattca

SEQ ID NO: 97753 - DNA, 25 bp, Saccharomyces pastorianus
gtattaccacaagcgattactcgag

SEQ ID NO: 97754 - DNA, 25 bp, Saccharomyces pastorianus
aattgagtttctattctgtcgccca

SEQ ID NO: 97755 - DNA, 25 bp, Saccharomyces pastorianus
cgcgtcttgagcgttttaagttgta

SEQ ID NO: 97756 - DNA, 25 bp, Saccharomyces pastorianus
atcccaccacccaggaattgagttt

SEQ ID NO: 97757 - DNA, 25 bp, Saccharomyces pastorianus
tgtcgcccaagatgccgtttcaaaa

SEQ ID NO: 97758 - DNA, 25 bp, Saccharomyces pastorianus
gttattatcgatgctgacgccacct

SEQ ID NO: 97759 - DNA, 25 bp, Saccharomyces pastorianus
gccacctcaatgtctcagtataact

SEQ ID NO: 97760 - DNA, 25 bp, Saccharomyces pastorianus
gaaaatggatcttcaccccgataag

SEQ ID NO: 97761 - DNA, 25 bp, Saccharomyces pastorianus
accgaacgtgaaggaaaggctgatc

SEQ ID NO: 97762 - DNA, 25 bp, Saccharomyces pastorianus
catcaagaagcaaggttccggcaag

SEQ ID NO: 97763 - DNA, 25 bp, Saccharomyces pastorianus
tgagattgatgacttaatcgatagt

SEQ ID NO: 97764 - DNA, 25 bp, Saccharomyces pastorianus
gatccaaagtacttttcgcacactg

SEQ ID NO: 97765 - DNA, 25 bp, Saccharomyces pastorianus
aaggctgatccaaagtacttttcgc

SEQ ID NO: 97766 - DNA, 25 bp, Saccharomyces pastorianus
caagaagcaaggttccggcaagggt

SEQ ID NO: 97767 - DNA, 25 bp, Saccharomyces pastorianus
ttaatcgatagtggtgaaatacccc

SEQ ID NO: 97768 - DNA, 25 bp, Saccharomyces pastorianus
tagtggtgaaatacccccagtgttc

SEQ ID NO: 97769 - DNA, 25 bp, Saccharomyces pastorianus
aagaggctcaaatttgcaatcgcat

SEQ ID NO: 97770 - DNA, 25 bp, Saccharomyces pastorianus
taagccaggcgatgagattgatgac

SEQ ID NO: 97771 - DNA, 25 bp, Saccharomyces pastorianus
gagaacaaacaagtggaccgaacgt

SEQ ID NO: 97772 - DNA, 25 bp, Saccharomyces pastorianus
tgacgatctagatatcaatctccat

SEQ ID NO: 97773 - DNA, 25 bp, Saccharomyces pastorianus
tgtttctaatccgtttaattccaag

SEQ ID NO: 97774 - DNA, 25 bp, Saccharomyces pastorianus
gaatttggaccagattcagcaggtt

SEQ ID NO: 97775 - DNA, 25 bp, Saccharomyces pastorianus
tgctgggtcatcaaagtgaacaatt

SEQ ID NO: 97776 - DNA, 25 bp, Saccharomyces pastorianus
cattgaggaaagcactgacgatcta

SEQ ID NO: 97777 - DNA, 25 bp, Saccharomyces pastorianus
aacaattgtctcagtccactcaaag

SEQ ID NO: 97778 - DNA, 25 bp, Saccharomyces pastorianus
aacacattgggtatgctgggtcatc

SEQ ID NO: 97779 - DNA, 25 bp, Saccharomyces pastorianus
gattcagcaggttagcaacagattg

SEQ ID NO: 97780 - DNA, 25 bp, Saccharomyces pastorianus
aatggccttgaccactggtaaagaa

SEQ ID NO: 97781 - DNA, 25 bp, Saccharomyces pastorianus
attggctgtccatgtttctaatccg

SEQ ID NO: 97782 - DNA, 25 bp, Saccharomyces pastorianus
gaaccgtagtatattggctgtccat

SEQ ID NO: 97783 - DNA, 25 bp, Saccharomyces pastorianus
gatcgtggaaaggactggttctgat

SEQ ID NO: 97784 - DNA, 25 bp, Saccharomyces pastorianus
tgcgaattagcatgcgagcggacat

SEQ ID NO: 97785 - DNA, 25 bp, Saccharomyces pastorianus
tgtgtgggctgattcagacctgcac

SEQ ID NO: 97786 - DNA, 25 bp, Saccharomyces pastorianus
tatcgaatccatgggcgagcctcat

SEQ ID NO: 97787 - DNA, 25 bp, Saccharomyces pastorianus
ctatcaaaagcgagggttagcccca

SEQ ID NO: 97788 - DNA, 25 bp, Saccharomyces pastorianus
gcgagcggacatcatcttggttaat

SEQ ID NO: 97789 - DNA, 25 bp, Saccharomyces pastorianus
ggttagccccagcttatcatcgtgt

SEQ ID NO: 97790 - DNA, 25 bp, Saccharomyces pastorianus
aatcaagttatacgaggacagcaaa

SEQ ID NO: 97791 - DNA, 25 bp, Saccharomyces pastorianus
ggttggtggctatttttctccagta

SEQ ID NO: 97792 - DNA, 25 bp, Saccharomyces pastorianus
aaaatcatgttattggcaggcggtg

SEQ ID NO: 97793 - DNA, 25 bp, Saccharomyces pastorianus
gcaggcggtgatcttatcgaatcca

SEQ ID NO: 97794 - DNA, 25 bp, Saccharomyces pastorianus
taccactttcctcttcaaggtgcat

SEQ ID NO: 97795 - DNA, 25 bp, Saccharomyces pastorianus
ctgcagcagttcaaatttaccactt

SEQ ID NO: 97796 - DNA, 25 bp, Saccharomyces pastorianus
tacaactttgatactgcagcagttc

SEQ ID NO: 97797 - DNA, 25 bp, Saccharomyces pastorianus
agcagttcaaatttaccactttcct

SEQ ID NO: 97798 - DNA, 25 bp, Saccharomyces pastorianus
cagttcaaatttaccactttcctct

SEQ ID NO: 97799 - DNA, 25 bp, Saccharomyces pastorianus
tagcaaagagtgagtttattacaac

SEQ ID NO: 97800 - DNA, 25 bp, Saccharomyces pastorianus
gcagcagttcaaatttaccactttc

SEQ ID NO: 97801 - DNA, 25 bp, Saccharomyces pastorianus
attacaactttgatactgcagcagt

SEQ ID NO: 97802 - DNA, 25 bp, Saccharomyces pastorianus
acaactttgatactgcagcagttca

SEQ ID NO: 97803 - DNA, 25 bp, Saccharomyces pastorianus
tactgcagcagttcaaatttaccac

SEQ ID NO: 97804 - DNA, 25 bp, Saccharomyces pastorianus
gtttattacaactttgatactgcag

SEQ ID NO: 97805 - DNA, 25 bp, Saccharomyces pastorianus
ccttcttgctttcccatgatatcat

SEQ ID NO: 97806 - DNA, 25 bp, Saccharomyces pastorianus
ttaatcaaagtgaaccggtcaagca

SEQ ID NO: 97807 - DNA, 25 bp, Saccharomyces pastorianus
gaaagtgcggcttttcatcagacgt

SEQ ID NO: 97808 - DNA, 25 bp, Saccharomyces pastorianus
atttcctctacgaaagtgcggcttt

SEQ ID NO: 97809 - DNA, 25 bp, Saccharomyces pastorianus
gaaccggtcaagcaggtcttggata

SEQ ID NO: 97810 - DNA, 25 bp, Saccharomyces pastorianus
aatgtcagttcaatatcttcttcca

SEQ ID NO: 97811 - DNA, 25 bp, Saccharomyces pastorianus
gacgtggaatgtcagttcaatatct

SEQ ID NO: 97812 - DNA, 25 bp, Saccharomyces pastorianus
ttccaaactctgtcatccgttacat

SEQ ID NO: 97813 - DNA, 25 bp, Saccharomyces pastorianus
tgtcatccgttacatccaagagtat

SEQ ID NO: 97814 - DNA, 25 bp, Saccharomyces pastorianus
ttaggtccttcttgctttcccatga

SEQ ID NO: 97815 - DNA, 25 bp, Saccharomyces pastorianus
tacaatgatatttcctctacgaaag

SEQ ID NO: 97816 - DNA, 25 bp, Saccharomyces pastorianus
aagataccttgccatgtcgttctag

SEQ ID NO: 97817 - DNA, 25 bp, Saccharomyces pastorianus
cttcctcacggctcaaacattgtga

SEQ ID NO: 97818 - DNA, 25 bp, Saccharomyces pastorianus
ttaccagaccacaggcccagaaatt

SEQ ID NO: 97819 - DNA, 25 bp, Saccharomyces pastorianus
tgcgacagcggttcaagacacctaa

SEQ ID NO: 97820 - DNA, 25 bp, Saccharomyces pastorianus
tattgacgcattcattgctggttgc

SEQ ID NO: 97821 - DNA, 25 bp, Saccharomyces pastorianus
agagcagtttttgccgatcagttcg

SEQ ID NO: 97822 - DNA, 25 bp, Saccharomyces pastorianus
ggttgcggtactggtggcaccataa

SEQ ID NO: 97823 - DNA, 25 bp, Saccharomyces pastorianus
gtcgttctagcggatccacaaggat

SEQ ID NO: 97824 - DNA, 25 bp, Saccharomyces pastorianus
gcggtagccgctattcaggttgcaa

SEQ ID NO: 97825 - DNA, 25 bp, Saccharomyces pastorianus
tacctatcggtaaacgacgggctat

SEQ ID NO: 97826 - DNA, 25 bp, Saccharomyces pastorianus
aggttgcaaaaacgcttcctcacgg

SEQ ID NO: 97827 - DNA, 25 bp, Saccharomyces pastorianus
actggcgcctatacaactatcggat

SEQ ID NO: 97828 - DNA, 25 bp, Saccharomyces pastorianus
gaaggctattgatcactcagttgaa

SEQ ID NO: 97829 - DNA, 25 bp, Saccharomyces pastorianus
gaaccagagcaaacaggccctttta

SEQ ID NO: 97830 - DNA, 25 bp, Saccharomyces pastorianus
agagagagcgagctacctccaacaa

SEQ ID NO: 97831 - DNA, 25 bp, Saccharomyces pastorianus
aggaatcgcgctacgtggacgaact

SEQ ID NO: 97832 - DNA, 25 bp, Saccharomyces pastorianus
acgttcattacgaccaccatagatc

SEQ ID NO: 97833 - DNA, 25 bp, Saccharomyces pastorianus
aggagctattacaccttgccaacga

SEQ ID NO: 97834 - DNA, 25 bp, Saccharomyces pastorianus
gaactggtgcgtgaattcctcggcg

SEQ ID NO: 97835 - DNA, 25 bp, Saccharomyces pastorianus
tcttgagaacatccgcgtgaaccag

SEQ ID NO: 97836 - DNA, 25 bp, Saccharomyces pastorianus
cagaggaccgtttgccatttacagc

SEQ ID NO: 97837 - DNA, 25 bp, Saccharomyces pastorianus
atatctgcagggaaggctgccgcca

SEQ ID NO: 97838 - DNA, 25 bp, Saccharomyces pastorianus
aacaatgattattccctcctgaggt

SEQ ID NO: 97839 - DNA, 25 bp, Saccharomyces pastorianus
ggcaccgccagtcgtaaagttttat

SEQ ID NO: 97840 - DNA, 25 bp, Saccharomyces pastorianus
atgtggtggagctgtggcactctac

SEQ ID NO: 97841 - DNA, 25 bp, Saccharomyces pastorianus
ataaattactcaatgcctctctcca

SEQ ID NO: 97842 - DNA, 25 bp, Saccharomyces pastorianus
aaatggccggatctatcgaaccaaa

SEQ ID NO: 97843 - DNA, 25 bp, Saccharomyces pastorianus
tccctgtgctgatgttcgagaattt

SEQ ID NO: 97844 - DNA, 25 bp, Saccharomyces pastorianus
gaaaggcctgcagtctaactttatt

SEQ ID NO: 97845 - DNA, 25 bp, Saccharomyces pastorianus
gaaaccccagaattagatcccatga

SEQ ID NO: 97846 - DNA, 25 bp, Saccharomyces pastorianus
cagcatgccgaacctgttggatgaa

SEQ ID NO: 97847 - DNA, 25 bp, Saccharomyces pastorianus
ggcactctactttgccaacggtttt

SEQ ID NO: 97848 - DNA, 25 bp, Saccharomyces pastorianus
gaggtataactttccctgtgctgat

SEQ ID NO: 97849 - DNA, 25 bp, Saccharomyces pastorianus
agctgtacataaacctgttaagcat

SEQ ID NO: 97850 - DNA, 25 bp, Saccharomyces pastorianus
gtatttgctatatggcggactgcta

SEQ ID NO: 97851 - DNA, 25 bp, Saccharomyces pastorianus
attttgctagtacttatggcttgga

SEQ ID NO: 97852 - DNA, 25 bp, Saccharomyces pastorianus
gttctgactacactcatgacggtga

SEQ ID NO: 97853 - DNA, 25 bp, Saccharomyces pastorianus
gagactaatgctcacatcacaaata

SEQ ID NO: 97854 - DNA, 25 bp, Saccharomyces pastorianus
gaagatgtatccatattaccattag

SEQ ID NO: 97855 - DNA, 25 bp, Saccharomyces pastorianus
ttaccattagatacagaagagcagg

SEQ ID NO: 97856 - DNA, 25 bp, Saccharomyces pastorianus
gcgagggtatattaagttagcactt

SEQ ID NO: 97857 - DNA, 25 bp, Saccharomyces pastorianus
gatcttaagcttgagttctgactac

SEQ ID NO: 97858 - DNA, 25 bp, Saccharomyces pastorianus
ggcggactgctaatgatactcgtaa

SEQ ID NO: 97859 - DNA, 25 bp, Saccharomyces pastorianus
cactcatgacggtgaatctgatcaa

SEQ ID NO: 97860 - DNA, 25 bp, Saccharomyces pastorianus
ggagcagtatcgcttcagtggccaa

SEQ ID NO: 97861 - DNA, 25 bp, Saccharomyces pastorianus
agaggacgctggactggaaaacttt

SEQ ID NO: 97862 - DNA, 25 bp, Saccharomyces pastorianus
gtctgtctttgtgttgattctgttg

SEQ ID NO: 97863 - DNA, 25 bp, Saccharomyces pastorianus
cattgtataggaagccagccccggg

SEQ ID NO: 97864 - DNA, 25 bp, Saccharomyces pastorianus
aatggtcctctctatcaaggcatac

SEQ ID NO: 97865 - DNA, 25 bp, Saccharomyces pastorianus
gatactccaattaacgacgacgacg

SEQ ID NO: 97866 - DNA, 25 bp, Saccharomyces pastorianus
atgaagacgattactaccctcaacc

SEQ ID NO: 97867 - DNA, 25 bp, Saccharomyces pastorianus
ataccggctgagattgtaaccaagt

SEQ ID NO: 97868 - DNA, 25 bp, Saccharomyces pastorianus
cagtggccaatgctttacaatatct

SEQ ID NO: 97869 - DNA, 25 bp, Saccharomyces pastorianus
tttcaccgcggttttcagagacaaa

SEQ ID NO: 97870 - DNA, 25 bp, Saccharomyces pastorianus
gaaaactttggtattgtctgtcttt

SEQ ID NO: 97871 - DNA, 25 bp, Saccharomyces pastorianus
aatgacttggtatgccttgatagag

SEQ ID NO: 97872 - DNA, 25 bp, Saccharomyces pastorianus
ctcctctatggagtttgtccagttg

SEQ ID NO: 97873 - DNA, 25 bp, Saccharomyces pastorianus
ttcagaggtaagtttctggcccggg

SEQ ID NO: 97874 - DNA, 25 bp, Saccharomyces pastorianus
tgtccagttgtttgctagtttcaga

SEQ ID NO: 97875 - DNA, 25 bp, Saccharomyces pastorianus
tgccgtcggttttctggaaaatcca

SEQ ID NO: 97876 - DNA, 25 bp, Saccharomyces pastorianus
acagatcttcgtctttgccgtcggt

SEQ ID NO: 97877 - DNA, 25 bp, Saccharomyces pastorianus
ttagcaccgtcaactcctctatgga

SEQ ID NO: 97878 - DNA, 25 bp, Saccharomyces pastorianus
ggctggcttcctatacaatgacttg

SEQ ID NO: 97879 - DNA, 25 bp, Saccharomyces pastorianus
gattgacatttctcacggacacact

SEQ ID NO: 97880 - DNA, 25 bp, Saccharomyces pastorianus
taccaaagttttccagtccagcgtc

SEQ ID NO: 97881 - DNA, 25 bp, Saccharomyces pastorianus
atttctcacggacacacttcttgtt

SEQ ID NO: 97882 - DNA, 25 bp, Saccharomyces pastorianus
caacgttggtggatgtgcagtccat

SEQ ID NO: 97883 - DNA, 25 bp, Saccharomyces pastorianus
gaagcatgctgatatctttattgaa

SEQ ID NO: 97884 - DNA, 25 bp, Saccharomyces pastorianus
gtggatttagtgaccttttccaaga

SEQ ID NO: 97885 - DNA, 25 bp, Saccharomyces pastorianus
aacaggtgtcggagccaccggtaag

SEQ ID NO: 97886 - DNA, 25 bp, Saccharomyces pastorianus
acattcattgcctgggatttgccta

SEQ ID NO: 97887 - DNA, 25 bp, Saccharomyces pastorianus
gaagtataacgttgtctacatcata

SEQ ID NO: 97888 - DNA, 25 bp, Saccharomyces pastorianus
gagggaggtgataaccacgcttcta

SEQ ID NO: 97889 - DNA, 25 bp, Saccharomyces pastorianus
cctgggatttgcctactggtgagaa

SEQ ID NO: 97890 - DNA, 25 bp, Saccharomyces pastorianus
gagccaccggtaagctatggtgtca

SEQ ID NO: 97891 - DNA, 25 bp, Saccharomyces pastorianus
ctatggtgtcatgagtacgccgata

SEQ ID NO: 97892 - DNA, 25 bp, Saccharomyces pastorianus
tgagtacgccgatattcaaccacct

SEQ ID NO: 97893 - DNA, 25 bp, Saccharomyces pastorianus
gctgacgaagatactacaactggtt

SEQ ID NO: 97894 - DNA, 25 bp, Saccharomyces pastorianus
agatcatccctacgaccctgaaaag

SEQ ID NO: 97895 - DNA, 25 bp, Saccharomyces pastorianus
ttctaatcaaccaacatatcgcgga

SEQ ID NO: 97896 - DNA, 25 bp, Saccharomyces pastorianus
ccaatgcgttccctgctattttaga

SEQ ID NO: 97897 - DNA, 25 bp, Saccharomyces pastorianus
actggtttattgttagccgggattg

SEQ ID NO: 97898 - DNA, 25 bp, Saccharomyces pastorianus
gccgggattggacaaatcactcctg

SEQ ID NO: 97899 - DNA, 25 bp, Saccharomyces pastorianus
gactactaaggaggaaatcactgac

SEQ ID NO: 97900 - DNA, 25 bp, Saccharomyces pastorianus
atatcgcggaaaacataagagctag

SEQ ID NO: 97901 - DNA, 25 bp, Saccharomyces pastorianus
gagagacgatattgccatccttcta

SEQ ID NO: 97902 - DNA, 25 bp, Saccharomyces pastorianus
tattgccatccttctaatcaaccaa

SEQ ID NO: 97903 - DNA, 25 bp, Saccharomyces pastorianus
tccatctaaagatcatccctacgac

SEQ ID NO: 97904 - DNA, 25 bp, Saccharomyces pastorianus
cttctggaagcagcgcatcgggcaa

SEQ ID NO: 97905 - DNA, 25 bp, Saccharomyces pastorianus
agagacttgggcatcggctacaatg

SEQ ID NO: 97906 - DNA, 25 bp, Saccharomyces pastorianus
gatacgttacaatggtacctccgaa

SEQ ID NO: 97907 - DNA, 25 bp, Saccharomyces pastorianus
atcgaagacattgcgcctgtgcagg

SEQ ID NO: 97908 - DNA, 25 bp, Saccharomyces pastorianus
tcgggcaaggactcaaacgcttctg

SEQ ID NO: 97909 - DNA, 25 bp, Saccharomyces pastorianus
acgcttctgagctatgtgtatacga

SEQ ID NO: 97910 - DNA, 25 bp, Saccharomyces pastorianus
tgactccaacgttgtttttcttcga

SEQ ID NO: 97911 - DNA, 25 bp, Saccharomyces pastorianus
gcgtggtttccacatcagagacttg

SEQ ID NO: 97912 - DNA, 25 bp, Saccharomyces pastorianus
aacgccatccggaaagcttctggaa

SEQ ID NO: 97913 - DNA, 25 bp, Saccharomyces pastorianus
gataccaataaggtggccgccctac

SEQ ID NO: 97914 - DNA, 25 bp, Saccharomyces pastorianus
ggtgatggaacctgccgataccaat

SEQ ID NO: 97915 - DNA, 25 bp, Saccharomyces pastorianus
gatgttgtgctattagccggaacca

SEQ ID NO: 97916 - DNA, 25 bp, Saccharomyces pastorianus
taaatgactcaactgcggaaagcga

SEQ ID NO: 97917 - DNA, 25 bp, Saccharomyces pastorianus
ctcgttgcatcggtactggacgtaa

SEQ ID NO: 97918 - DNA, 25 bp, Saccharomyces pastorianus
acacttagcggtagagttgttaacg

SEQ ID NO: 97919 - DNA, 25 bp, Saccharomyces pastorianus
gccggaaccaactcctgcgaaagaa

SEQ ID NO: 97920 - DNA, 25 bp, Saccharomyces pastorianus
gagctgtgctcgatgttgtgctatt

SEQ ID NO: 97921 - DNA, 25 bp, Saccharomyces pastorianus
atcgttctccacatagataggcttg

SEQ ID NO: 97922 - DNA, 25 bp, Saccharomyces pastorianus
gataaacttgcgctgctcgttgcat

SEQ ID NO: 97923 - DNA, 25 bp, Saccharomyces pastorianus
gttaacgccatgagaatcgttctcc

SEQ ID NO: 97924 - DNA, 25 bp, Saccharomyces pastorianus
gatattgaagctatactcggcgttg

SEQ ID NO: 97925 - DNA, 25 bp, Saccharomyces pastorianus
tatactcggcgttgataaacttgcg

SEQ ID NO: 97926 - DNA, 25 bp, Saccharomyces pastorianus
taaagtgtggcttaactccccagga

SEQ ID NO: 97927 - DNA, 25 bp, Saccharomyces pastorianus
ttaactccccaggaatccgagaaga

SEQ ID NO: 97928 - DNA, 25 bp, Saccharomyces pastorianus
ttacgtcgcattatgggccaagttt

SEQ ID NO: 97929 - DNA, 25 bp, Saccharomyces pastorianus
caagcatttgccatatttcgattca

SEQ ID NO: 97930 - DNA, 25 bp, Saccharomyces pastorianus
ttttcccagaaaagccgttgaatat

SEQ ID NO: 97931 - DNA, 25 bp, Saccharomyces pastorianus
gattcaaggtgtgtagcatacccta

SEQ ID NO: 97932 - DNA, 25 bp, Saccharomyces pastorianus
aagttctacgagtttgccaagccaa

SEQ ID NO: 97933 - DNA, 25 bp, Saccharomyces pastorianus
agcttgcgactttatttggttcttt

SEQ ID NO: 97934 - DNA, 25 bp, Saccharomyces pastorianus
ttttttcacgtccaattacgtcgca

SEQ ID NO: 97935 - DNA, 25 bp, Saccharomyces pastorianus
gcatgtgctaagaaccttgtcctca

SEQ ID NO: 97936 - DNA, 25 bp, Saccharomyces pastorianus
tatcctggagatatgtcgatacaca

SEQ ID NO: 97937 - DNA, 25 bp, Saccharomyces pastorianus
caattggctgtgcttcttcaaaaaa

SEQ ID NO: 97938 - DNA, 25 bp, Saccharomyces pastorianus
ttgcacggcgtcaaagtactcaatt

SEQ ID NO: 97939 - DNA, 25 bp, Saccharomyces pastorianus
gcaggacaagggatacttacgccaa

SEQ ID NO: 97940 - DNA, 25 bp, Saccharomyces pastorianus
gtcttcaattaattctccatcagtg

SEQ ID NO: 97941 - DNA, 25 bp, Saccharomyces pastorianus
taagtttttctctatccgcatgtct

SEQ ID NO: 97942 - DNA, 25 bp, Saccharomyces pastorianus
ttctctatccgcatgtcttcaatta

SEQ ID NO: 97943 - DNA, 25 bp, Saccharomyces pastorianus
gaccatgtccattctattataggat

SEQ ID NO: 97944 - DNA, 25 bp, Saccharomyces pastorianus
ttataggatacccacttgcacggcg

SEQ ID NO: 97945 - DNA, 25 bp, Saccharomyces pastorianus
ggctatgagccctttaagtttttct

SEQ ID NO: 97946 - DNA, 25 bp, Saccharomyces pastorianus
ttacgccaaaaaagaccatgtccat

SEQ ID NO: 97947 - DNA, 25 bp, Saccharomyces pastorianus
gtactcaattggctgtgcttcttca

SEQ ID NO: 97948 - DNA, 25 bp, Saccharomyces pastorianus
tggaatgaccttttgtcctctgaga

SEQ ID NO: 97949 - DNA, 25 bp, Saccharomyces pastorianus
aatgctacacttacttgcgtactct

SEQ ID NO: 97950 - DNA, 25 bp, Saccharomyces pastorianus
tcctctgagaactttcatacccttt

SEQ ID NO: 97951 - DNA, 25 bp, Saccharomyces pastorianus
atacccttttgattgcctgtttatg

SEQ ID NO: 97952 - DNA, 25 bp, Saccharomyces pastorianus
tggacttaaccctacttggaatgac

SEQ ID NO: 97953 - DNA, 25 bp, Saccharomyces pastorianus
gaaacttttgagttggagcccacag

SEQ ID NO: 97954 - DNA, 25 bp, Saccharomyces pastorianus
gtctgagtccgtcacaatgcaacag

SEQ ID NO: 97955 - DNA, 25 bp, Saccharomyces pastorianus
tctccatacgcacaagtggctgttt

SEQ ID NO: 97956 - DNA, 25 bp, Saccharomyces pastorianus
gggtacatccggatttatgctcgtt

SEQ ID NO: 97957 - DNA, 25 bp, Saccharomyces pastorianus
gaattacttgttatcttagcgctaa

SEQ ID NO: 97958 - DNA, 25 bp, Saccharomyces pastorianus
ggttgaggttgaacttctctccata

SEQ ID NO: 97959 - DNA, 25 bp, Saccharomyces pastorianus
tttagaccaagagaagtacgacaga

SEQ ID NO: 97960 - DNA, 25 bp, Saccharomyces pastorianus
gtctctgttttggtcgacagattaa

SEQ ID NO: 97961 - DNA, 25 bp, Saccharomyces pastorianus
gtttctgtctctgttttggtcgaca

SEQ ID NO: 97962 - DNA, 25 bp, Saccharomyces pastorianus
ttttagaccaagagaagtacgacag

SEQ ID NO: 97963 - DNA, 25 bp, Saccharomyces pastorianus
ctgtcattttagaccaagagaagta

SEQ ID NO: 97964 - DNA, 25 bp, Saccharomyces pastorianus
acttacagatacgtttctgtctctg

SEQ ID NO: 97965 - DNA, 25 bp, Saccharomyces pastorianus
cgctgtcattttagaccaagagaag

SEQ ID NO: 97966 - DNA, 25 bp, Saccharomyces pastorianus
gaccaagagaagtacgacagaatct

SEQ ID NO: 97967 - DNA, 25 bp, Saccharomyces pastorianus
gctgtcattttagaccaagagaagt

SEQ ID NO: 97968 - DNA, 25 bp, Saccharomyces pastorianus
gtcattttagaccaagagaagtacg

SEQ ID NO: 97969 - DNA, 25 bp, Saccharomyces pastorianus
cattttagaccaagagaagtacgac

SEQ ID NO: 97970 - DNA, 25 bp, Saccharomyces pastorianus
gaggcagctcattgatagtggtaca

SEQ ID NO: 97971 - DNA, 25 bp, Saccharomyces pastorianus
caaaggattttctgggtcggacctg

SEQ ID NO: 97972 - DNA, 25 bp, Saccharomyces pastorianus
attgcctggttctgatcaacgttac

SEQ ID NO: 97973 - DNA, 25 bp, Saccharomyces pastorianus
agaacggtcttctacagatcatgaa

SEQ ID NO: 97974 - DNA, 25 bp, Saccharomyces pastorianus
gacgaattcgacttgcaactgattg

SEQ ID NO: 97975 - DNA, 25 bp, Saccharomyces pastorianus
gggttatgattatcggtgctactaa

SEQ ID NO: 97976 - DNA, 25 bp, Saccharomyces pastorianus
gattcattccttagagaacggtctt

SEQ ID NO: 97977 - DNA, 25 bp, Saccharomyces pastorianus
atgttaatgatacttcttccttgaa

SEQ ID NO: 97978 - DNA, 25 bp, Saccharomyces pastorianus
gggtcggacctgaaagagctttgca

SEQ ID NO: 97979 - DNA, 25 bp, Saccharomyces pastorianus
aaggtttcttgtttcattgcctggt

SEQ ID NO: 97980 - DNA, 25 bp, Saccharomyces pastorianus
gaagttacggcaaccttaaaagctg

SEQ ID NO: 97981 - DNA, 25 bp, Saccharomyces pastorianus
atcaatacagtatcatggcatatcg

SEQ ID NO: 97982 - DNA, 25 bp, Saccharomyces pastorianus
gtttgtatattctcttacggtccac

SEQ ID NO: 97983 - DNA, 25 bp, Saccharomyces pastorianus
agaagtttgggtctacaacaagtag

SEQ ID NO: 97984 - DNA, 25 bp, Saccharomyces pastorianus
cactcaatgtcttcggtttctcaaa

SEQ ID NO: 97985 - DNA, 25 bp, Saccharomyces pastorianus
ggtaacaacagtacatcaatacagt

SEQ ID NO: 97986 - DNA, 25 bp, Saccharomyces pastorianus
attctcttacggtccacatattcaa

SEQ ID NO: 97987 - DNA, 25 bp, Saccharomyces pastorianus
gaagaaaggctcaaggttccaattt

SEQ ID NO: 97988 - DNA, 25 bp, Saccharomyces pastorianus
cacccttgtttctgactcagagatc

SEQ ID NO: 97989 - DNA, 25 bp, Saccharomyces pastorianus
tccaattttggtcacccttgtttct

SEQ ID NO: 97990 - DNA, 25 bp, Saccharomyces pastorianus
agagatttggatatctcttcctcca

SEQ ID NO: 97991 - DNA, 25 bp, Saccharomyces pastorianus
gaaacagttataccatccttagcaa

SEQ ID NO: 97992 - DNA, 25 bp, Saccharomyces pastorianus
tgcgctattcatcagggctactcaa

SEQ ID NO: 97993 - DNA, 25 bp, Saccharomyces pastorianus
gcgccctaacgctgagtttgtcgaa

SEQ ID NO: 97994 - DNA, 25 bp, Saccharomyces pastorianus
gggctactcaatcgcattatgtggt

SEQ ID NO: 97995 - DNA, 25 bp, Saccharomyces pastorianus
agacgagtatcttccgatcatcggc

SEQ ID NO: 97996 - DNA, 25 bp, Saccharomyces pastorianus
cctagatcctgctcgtgaacgatgg

SEQ ID NO: 97997 - DNA, 25 bp, Saccharomyces pastorianus
gttctttccacgctttgaaacacgt

SEQ ID NO: 97998 - DNA, 25 bp, Saccharomyces pastorianus
agggcaaaactatccgcacgctgaa

SEQ ID NO: 97999 - DNA, 25 bp, Saccharomyces pastorianus
attcccctcgcaacactgaaagatg

SEQ ID NO: 98000 - DNA, 25 bp, Saccharomyces pastorianus
attcatcgtttgtgtcgtcatatac

SEQ ID NO: 98001 - DNA, 25 bp, Saccharomyces pastorianus
gaaaaacccgcaactttgttcgatg

SEQ ID NO: 98002 - DNA, 25 bp, Saccharomyces pastorianus
gctagtaaggcggtttctcctaacg

SEQ ID NO: 98003 - DNA, 25 bp, Saccharomyces pastorianus
ttgacgatttccatcagcgctttga

SEQ ID NO: 98004 - DNA, 25 bp, Saccharomyces pastorianus
atcagcctgtttcagcgtgcggata

SEQ ID NO: 98005 - DNA, 25 bp, Saccharomyces pastorianus
tcttgaccttttttagcgccgttag

SEQ ID NO: 98006 - DNA, 25 bp, Saccharomyces pastorianus
cgcggcaatttcacctttgacaatg

SEQ ID NO: 98007 - DNA, 25 bp, Saccharomyces pastorianus
atagttttgcccttgtcgttgacga

SEQ ID NO: 98008 - DNA, 25 bp, Saccharomyces pastorianus
aggagaaaccgccttactagctcat

SEQ ID NO: 98009 - DNA, 25 bp, Saccharomyces pastorianus
gttgcgggtttttcaggaccagcat

SEQ ID NO: 98010 - DNA, 25 bp, Saccharomyces pastorianus
gatcctctctgcaaggtgttcatca

SEQ ID NO: 98011 - DNA, 25 bp, Saccharomyces pastorianus
ggcctccattggtgtttaattcgtg

SEQ ID NO: 98012 - DNA, 25 bp, Saccharomyces pastorianus
accggagcgttctctatacagacta

SEQ ID NO: 98013 - DNA, 25 bp, Saccharomyces pastorianus
agcgttagggcgcaaactcaccgga

SEQ ID NO: 98014 - DNA, 25 bp, Saccharomyces pastorianus
gatacagggttccagatgtctactt

SEQ ID NO: 98015 - DNA, 25 bp, Saccharomyces pastorianus
gataagtttcactccatcatgttat

SEQ ID NO: 98016 - DNA, 25 bp, Saccharomyces pastorianus
tgatcacgctaatactgccttttgg

SEQ ID NO: 98017 - DNA, 25 bp, Saccharomyces pastorianus
gtcattgagctttccgagtttgcag

SEQ ID NO: 98018 - DNA, 25 bp, Saccharomyces pastorianus
gtcctcctatttactctttgaaaca

SEQ ID NO: 98019 - DNA, 25 bp, Saccharomyces pastorianus
gccgttgcttcagcacatgtttcaa

SEQ ID NO: 98020 - DNA, 25 bp, Saccharomyces pastorianus
gttgctgacccgtgagttcaagaat

SEQ ID NO: 98021 - DNA, 25 bp, Saccharomyces pastorianus
gtatgactgtactgttgctgacccg

SEQ ID NO: 98022 - DNA, 25 bp, Saccharomyces pastorianus
atattcgcgggatgcatcgttggcc

SEQ ID NO: 98023 - DNA, 25 bp, Saccharomyces pastorianus
atatggcatggacccaaccgacaag

SEQ ID NO: 98024 - DNA, 25 bp, Saccharomyces pastorianus
gatcttccaactaccagtcatttgt

SEQ ID NO: 98025 - DNA, 25 bp, Saccharomyces pastorianus
aagtttgttacagtgcgacgatggc

SEQ ID NO: 98026 - DNA, 25 bp, Saccharomyces pastorianus
acatgtacgttgatgttcccggaga

SEQ ID NO: 98027 - DNA, 25 bp, Saccharomyces pastorianus
ggtgatacacagcttttcaacagag

SEQ ID NO: 98028 - DNA, 25 bp, Saccharomyces pastorianus
tgttcccggagagaagcgttactat

SEQ ID NO: 98029 - DNA, 25 bp, Saccharomyces pastorianus
ggcctcaagtaaaatccgcttctac

SEQ ID NO: 98030 - DNA, 25 bp, Saccharomyces pastorianus
tacgttcaccttttctggcatactt

SEQ ID NO: 98031 - DNA, 25 bp, Saccharomyces pastorianus
attgcatccggtttctaattcgaag

SEQ ID NO: 98032 - DNA, 25 bp, Saccharomyces pastorianus
aaatagcgttggttcacttagaggc

SEQ ID NO: 98033 - DNA, 25 bp, Saccharomyces pastorianus
atggcactggcgcaacatcaggaaa

SEQ ID NO: 98034 - DNA, 25 bp, Saccharomyces pastorianus
gaaacaggcctatagtatctaccaa

SEQ ID NO: 98035 - DNA, 25 bp, Saccharomyces pastorianus
gtaataactcatacgtcactgctta

SEQ ID NO: 98036 - DNA, 25 bp, Saccharomyces pastorianus
tatgatttaatcaaagctgctgctg

SEQ ID NO: 98037 - DNA, 25 bp, Saccharomyces pastorianus
tagctctccgagtaaaatcacaaga

SEQ ID NO: 98038 - DNA, 25 bp, Saccharomyces pastorianus
ggaagactcagcaaactcaacagat

SEQ ID NO: 98039 - DNA, 25 bp, Saccharomyces pastorianus
agtcacatgcagacaaagttcccat

SEQ ID NO: 98040 - DNA, 25 bp, Saccharomyces pastorianus
atgttactcacaccagccaagacta

SEQ ID NO: 98041 - DNA, 25 bp, Saccharomyces pastorianus
agaaatttttgtggccaatactgct

SEQ ID NO: 98042 - DNA, 25 bp, Saccharomyces pastorianus
taagcccataacatctctgactaat

SEQ ID NO: 98043 - DNA, 25 bp, Saccharomyces pastorianus
acaaagttcccatcacaatagctct

SEQ ID NO: 98044 - DNA, 25 bp, Saccharomyces pastorianus
atgcgtgccatagtttcttccctta

SEQ ID NO: 98045 - DNA, 25 bp, Saccharomyces pastorianus
tttcttcccttatggttaagcccat

SEQ ID NO: 98046 - DNA, 25 bp, Saccharomyces pastorianus
gcagtaattcattcatgcgtgccat

SEQ ID NO: 98047 - DNA, 25 bp, Saccharomyces pastorianus
atcgttcggtgcgtcgttccaaaat

SEQ ID NO: 98048 - DNA, 25 bp, Saccharomyces pastorianus
ctagctttctatttgtcgtggttta

SEQ ID NO: 98049 - DNA, 25 bp, Saccharomyces pastorianus
gggcactgactggatcactttattt

SEQ ID NO: 98050 - DNA, 25 bp, Saccharomyces pastorianus
gattcttacaatctggcgcctttga

SEQ ID NO: 98051 - DNA, 25 bp, Saccharomyces pastorianus
atataataaaacagccacgccccgt

SEQ ID NO: 98052 - DNA, 25 bp, Saccharomyces pastorianus
tagaagcctgcattgtagcctttgg

SEQ ID NO: 98053 - DNA, 25 bp, Saccharomyces pastorianus
agtgcatatttctcgctgatgccca

SEQ ID NO: 98054 - DNA, 25 bp, Saccharomyces pastorianus
ttgcgtttgcttttccagagtttac

SEQ ID NO: 98055 - DNA, 25 bp, Saccharomyces pastorianus
taagatccggttacgggatgcccag

SEQ ID NO: 98056 - DNA, 25 bp, Saccharomyces pastorianus
ggtgcattggctttattatcgtttt

SEQ ID NO: 98057 - DNA, 25 bp, Saccharomyces pastorianus
tgatgcccatcctagtgctagcttt

SEQ ID NO: 98058 - DNA, 25 bp, Saccharomyces pastorianus
gccctccactgatgaattattagaa

SEQ ID NO: 98059 - DNA, 25 bp, Saccharomyces pastorianus
gtacaagcaagccactgtaggtgac

SEQ ID NO: 98060 - DNA, 25 bp, Saccharomyces pastorianus
taaatcccaggaagatgccgaaaag

SEQ ID NO: 98061 - DNA, 25 bp, Saccharomyces pastorianus
attattagaattgtatgctctgtac

SEQ ID NO: 98062 - DNA, 25 bp, Saccharomyces pastorianus
agctaaagccgtcaacgagctacca

SEQ ID NO: 98063 - DNA, 25 bp, Saccharomyces pastorianus
gaagccctccactgatgaattatta

SEQ ID NO: 98064 - DNA, 25 bp, Saccharomyces pastorianus
gaaaaagctaaagccgtcaacgagc

SEQ ID NO: 98065 - DNA, 25 bp, Saccharomyces pastorianus
aacgaagccctccactgatgaatta

SEQ ID NO: 98066 - DNA, 25 bp, Saccharomyces pastorianus
agccactgtaggtgacaacgacaag

SEQ ID NO: 98067 - DNA, 25 bp, Saccharomyces pastorianus
ggtgacaacgacaaggaaaagcctg

SEQ ID NO: 98068 - DNA, 25 bp, Saccharomyces pastorianus
gtatgctctgtacaagcaagccact

SEQ ID NO: 98069 - DNA, 25 bp, Saccharomyces pastorianus
gcaggcagtgcatcttcatcaatta

SEQ ID NO: 98070 - DNA, 25 bp, Saccharomyces pastorianus
gggtcctatgtcatgttccatctga

SEQ ID NO: 98071 - DNA, 25 bp, Saccharomyces pastorianus
gtggtgcttatgacaacttgacgat

SEQ ID NO: 98072 - DNA, 25 bp, Saccharomyces pastorianus
ccgatcgccctattcttagttagta

SEQ ID NO: 98073 - DNA, 25 bp, Saccharomyces pastorianus
gaatggtcgtggactctgactaata

SEQ ID NO: 98074 - DNA, 25 bp, Saccharomyces pastorianus
acaacctttggtgctgttgtcccaa

SEQ ID NO: 98075 - DNA, 25 bp, Saccharomyces pastorianus
gcgttcttccagcataatttcacat

SEQ ID NO: 98076 - DNA, 25 bp, Saccharomyces pastorianus
ggtacccctttcgatttcaatggtg

SEQ ID NO: 98077 - DNA, 25 bp, Saccharomyces pastorianus
aacgcggcgcttggattattcatgt

SEQ ID NO: 98078 - DNA, 25 bp, Saccharomyces pastorianus
atttttgattagtgtcccgatcgcc

SEQ ID NO: 98079 - DNA, 25 bp, Saccharomyces pastorianus
gttccatctgattaagggtacccct

SEQ ID NO: 98080 - DNA, 25 bp, Saccharomyces pastorianus
ttaccttgaattcctcaaccgtttg

SEQ ID NO: 98081 - DNA, 25 bp, Saccharomyces pastorianus
gattttttcacattcaaaacgcgct

SEQ ID NO: 98082 - DNA, 25 bp, Saccharomyces pastorianus
actttttgaacatctttcctccaca

SEQ ID NO: 98083 - DNA, 25 bp, Saccharomyces pastorianus
agcagtatgctcttcaaattcgaac

SEQ ID NO: 98084 - DNA, 25 bp, Saccharomyces pastorianus
ttcctccacattcctgattttttca

SEQ ID NO: 98085 - DNA, 25 bp, Saccharomyces pastorianus
tttaccggcttagtaatactgagct

SEQ ID NO: 98086 - DNA, 25 bp, Saccharomyces pastorianus
aaaacgcgctgtgaagctgttagaa

SEQ ID NO: 98087 - DNA, 25 bp, Saccharomyces pastorianus
gtatgaagcctcagattaccttgaa

SEQ ID NO: 98088 - DNA, 25 bp, Saccharomyces pastorianus
atactgagctacttacttgagggaa

SEQ ID NO: 98089 - DNA, 25 bp, Saccharomyces pastorianus
acagatcgaggcatatttctatata

SEQ ID NO: 98090 - DNA, 25 bp, Saccharomyces pastorianus
gacacccaaagtacttccaatctgt

SEQ ID NO: 98091 - DNA, 25 bp, Saccharomyces pastorianus
gctgaaatggtctccgggaagcctt

SEQ ID NO: 98092 - DNA, 25 bp, Saccharomyces pastorianus
ttgccatgggagaccgtctggtcaa

SEQ ID NO: 98093 - DNA, 25 bp, Saccharomyces pastorianus
caggcagagactatcatcatcaatt

SEQ ID NO: 98094 - DNA, 25 bp, Saccharomyces pastorianus
gggcacccgagataatgctaacttt

SEQ ID NO: 98095 - DNA, 25 bp, Saccharomyces pastorianus
ggcaatgtaccatgacccaagtgat

SEQ ID NO: 98096 - DNA, 25 bp, Saccharomyces pastorianus
aaacttacctatgaggccacccttg

SEQ ID NO: 98097 - DNA, 25 bp, Saccharomyces pastorianus
catgcggatgcattttggctgaaat

SEQ ID NO: 98098 - DNA, 25 bp, Saccharomyces pastorianus
ttgggaactccatctttcgaagact

SEQ ID NO: 98099 - DNA, 25 bp, Saccharomyces pastorianus
taagacacccttacctggcaatgta

SEQ ID NO: 98100 - DNA, 25 bp, Saccharomyces pastorianus
tgatgagccggaatatcctccactt

SEQ ID NO: 98101 - DNA, 25 bp, Saccharomyces pastorianus
tgcaacgcgatggtacagggcaccc

SEQ ID NO: 98102 - DNA, 25 bp, Saccharomyces pastorianus
ctccatacgttcatttgattcccga

SEQ ID NO: 98103 - DNA, 25 bp, Saccharomyces pastorianus
ataactacactgtgcatctgccttt

SEQ ID NO: 98104 - DNA, 25 bp, Saccharomyces pastorianus
aagtccctcttggtatcgcaatgga

SEQ ID NO: 98105 - DNA, 25 bp, Saccharomyces pastorianus
gaaaattcctaatcctcaagtccct

SEQ ID NO: 98106 - DNA, 25 bp, Saccharomyces pastorianus
aaaggatagattcctcctccatacg

SEQ ID NO: 98107 - DNA, 25 bp, Saccharomyces pastorianus
gaaacctctggaactcgaatgcaag

SEQ ID NO: 98108 - DNA, 25 bp, Saccharomyces pastorianus
gattcccgaatatatggcttctccg

SEQ ID NO: 98109 - DNA, 25 bp, Saccharomyces pastorianus
gaatcggcctcctcaaagggtttga

SEQ ID NO: 98110 - DNA, 25 bp, Saccharomyces pastorianus
gcttctccgagatttatagtattcc

SEQ ID NO: 98111 - DNA, 25 bp, Saccharomyces pastorianus
ggacaccatgcgtagtccaaaccaa

SEQ ID NO: 98112 - DNA, 25 bp, Saccharomyces pastorianus
atggttcaggacattgtgctttgta

SEQ ID NO: 98113 - DNA, 25 bp, Saccharomyces pastorianus
ggaagtgacaccacaactacacgaa

SEQ ID NO: 98114 - DNA, 25 bp, Saccharomyces pastorianus
ttatctcagacaatgcaccaagttt

SEQ ID NO: 98115 - DNA, 25 bp, Saccharomyces pastorianus
gacaatgccaccaagggaggattca

SEQ ID NO: 98116 - DNA, 25 bp, Saccharomyces pastorianus
gtttgaatcatatctcaactgcgag

SEQ ID NO: 98117 - DNA, 25 bp, Saccharomyces pastorianus
tcggtgcaaaaacaacgccctctta

SEQ ID NO: 98118 - DNA, 25 bp, Saccharomyces pastorianus
ggcagcaacgcatgttagggcatat

SEQ ID NO: 98119 - DNA, 25 bp, Saccharomyces pastorianus
ataaaagtcacaactcccaatcgca

SEQ ID NO: 98120 - DNA, 25 bp, Saccharomyces pastorianus
aattacgccacgattaccgaagaat

SEQ ID NO: 98121 - DNA, 25 bp, Saccharomyces pastorianus
gtctataagcctttcaagaagccca

SEQ ID NO: 98122 - DNA, 25 bp, Saccharomyces pastorianus
agggcatatccttcaaatttgtcgg

SEQ ID NO: 98123 - DNA, 25 bp, Saccharomyces pastorianus
agcaaacgtactctgaaggtctata

SEQ ID NO: 98124 - DNA, 25 bp, Saccharomyces pastorianus
tatactgcagaaactgatcccggtg

SEQ ID NO: 98125 - DNA, 25 bp, Saccharomyces pastorianus
gacgagcctcatttcagatatgttt

SEQ ID NO: 98126 - DNA, 25 bp, Saccharomyces pastorianus
gatctccccatttgttggaaggatt

SEQ ID NO: 98127 - DNA, 25 bp, Saccharomyces pastorianus
gatcccggtgttctttctgttaaga

SEQ ID NO: 98128 - DNA, 25 bp, Saccharomyces pastorianus
atggacttttacaaggccctttcag

SEQ ID NO: 98129 - DNA, 25 bp, Saccharomyces pastorianus
ggcaaatgtcacattgatctcccca

SEQ ID NO: 98130 - DNA, 25 bp, Saccharomyces pastorianus
gtctcttttatcaacgacgagcctc

SEQ ID NO: 98131 - DNA, 25 bp, Saccharomyces pastorianus
aatggcggcttctttcaggaattta

SEQ ID NO: 98132 - DNA, 25 bp, Saccharomyces pastorianus
gacattactgttttcctttacgcaa

SEQ ID NO: 98133 - DNA, 25 bp, Saccharomyces pastorianus
gcaactgaggtaatggcggcttctt

SEQ ID NO: 98134 - DNA, 25 bp, Saccharomyces pastorianus
tcctttacgcaagcagtagcctgtg

SEQ ID NO: 98135 - DNA, 25 bp, Saccharomyces pastorianus
tatccaggactgaattgcccatttc

SEQ ID NO: 98136 - DNA, 25 bp, Saccharomyces pastorianus
agcacctcaattacggccggatgaa

SEQ ID NO: 98137 - DNA, 25 bp, Saccharomyces pastorianus
agtgtcccatagagcaatgtccctg

SEQ ID NO: 98138 - DNA, 25 bp, Saccharomyces pastorianus
tgccgcgcacttagacgaattcaac

SEQ ID NO: 98139 - DNA, 25 bp, Saccharomyces pastorianus
tgtggccatggtgcataacaacgct

SEQ ID NO: 98140 - DNA, 25 bp, Saccharomyces pastorianus
ttgcccatttcctatctgtcagaaa

SEQ ID NO: 98141 - DNA, 25 bp, Saccharomyces pastorianus
gacattgtgcttcccaacatatagg

SEQ ID NO: 98142 - DNA, 25 bp, Saccharomyces pastorianus
aacgttagttgagtttgccgcgcac

SEQ ID NO: 98143 - DNA, 25 bp, Saccharomyces pastorianus
agtactcagcacaatttccgaaggg

SEQ ID NO: 98144 - DNA, 25 bp, Saccharomyces pastorianus
gttaccactgttctcattgttctga

SEQ ID NO: 98145 - DNA, 25 bp, Saccharomyces pastorianus
acagtgtattctaggctatccccaa

SEQ ID NO: 98146 - DNA, 25 bp, Saccharomyces pastorianus
gccgatttacaaagaagtggtccta

SEQ ID NO: 98147 - DNA, 25 bp, Saccharomyces pastorianus
tgctcagccgtattagtaaatcaag

SEQ ID NO: 98148 - DNA, 25 bp, Saccharomyces pastorianus
gcgcaggcgtatattttaatccatt

SEQ ID NO: 98149 - DNA, 25 bp, Saccharomyces pastorianus
cattctatttagcaggacgactaca

SEQ ID NO: 98150 - DNA, 25 bp, Saccharomyces pastorianus
actttggccaagcattacaccttag

SEQ ID NO: 98151 - DNA, 25 bp, Saccharomyces pastorianus
ttcggttccgagttcgtgtctaaat

SEQ ID NO: 98152 - DNA, 25 bp, Saccharomyces pastorianus
ggagatcactgccttaagttatgca

SEQ ID NO: 98153 - DNA, 25 bp, Saccharomyces pastorianus
aaatttcaacagatcggcgcaggcg

SEQ ID NO: 98154 - DNA, 25 bp, Saccharomyces pastorianus
gatttcaagagtattacaagccgat

SEQ ID NO: 98155 - DNA, 25 bp, Saccharomyces pastorianus
tactcagagacttttgctcagccgt

SEQ ID NO: 98156 - DNA, 25 bp, Saccharomyces pastorianus
aggtgttttcacagctggaatcaca

SEQ ID NO: 98157 - DNA, 25 bp, Saccharomyces pastorianus
aaatgggcaagcttcaattacgaac

SEQ ID NO: 98158 - DNA, 25 bp, Saccharomyces pastorianus
gggtctgtcacatattcatcgtgct

SEQ ID NO: 98159 - DNA, 25 bp, Saccharomyces pastorianus
gcgtgctttccatttaatcggtctg

SEQ ID NO: 98160 - DNA, 25 bp, Saccharomyces pastorianus
aaagtcgtcgccatatttgtactat

SEQ ID NO: 98161 - DNA, 25 bp, Saccharomyces pastorianus
atgctgttcttctctattccagtag

SEQ ID NO: 98162 - DNA, 25 bp, Saccharomyces pastorianus
tttctttcagccctacagtatttaa

SEQ ID NO: 98163 - DNA, 25 bp, Saccharomyces pastorianus
gaccctcttccctgaatattttgag

SEQ ID NO: 98164 - DNA, 25 bp, Saccharomyces pastorianus
gatggtcaatcttttaatgggtctg

SEQ ID NO: 98165 - DNA, 25 bp, Saccharomyces pastorianus
atatcccagatgacccgatggtcaa

SEQ ID NO: 98166 - DNA, 25 bp, Saccharomyces pastorianus
acaacttagggcgtgctttccattt

SEQ ID NO: 98167 - DNA, 25 bp, Saccharomyces pastorianus
tgtattctctatgtcgaggaccctc

SEQ ID NO: 98168 - DNA, 25 bp, Saccharomyces pastorianus
gtgaccatgattcgtccaagtccaa

SEQ ID NO: 98169 - DNA, 25 bp, Saccharomyces pastorianus
ccgccaagctagatctgcctgaagg

SEQ ID NO: 98170 - DNA, 25 bp, Saccharomyces pastorianus
aagaatcgactatgcgggtatcgct

SEQ ID NO: 98171 - DNA, 25 bp, Saccharomyces pastorianus
cagattttgctccacctgtaggata

SEQ ID NO: 98172 - DNA, 25 bp, Saccharomyces pastorianus
gtggaaccggattacaaagcgctga

SEQ ID NO: 98173 - DNA, 25 bp, Saccharomyces pastorianus
aaggccaagggatctcactaaggaa

SEQ ID NO: 98174 - DNA, 25 bp, Saccharomyces pastorianus
ataacgtttgatggcgagcccgcca

SEQ ID NO: 98175 - DNA, 25 bp, Saccharomyces pastorianus
gaaagtgccgctggtagcaaatcca

SEQ ID NO: 98176 - DNA, 25 bp, Saccharomyces pastorianus
tccgaaagcggagcccaagcaagat

SEQ ID NO: 98177 - DNA, 25 bp, Saccharomyces pastorianus
tattctttggtttcccaatggtcct

SEQ ID NO: 98178 - DNA, 25 bp, Saccharomyces pastorianus
gggccaagttttggatccctcggtg

SEQ ID NO: 98179 - DNA, 25 bp, Saccharomyces pastorianus
aagctagccccaaaatgcacacgtg

SEQ ID NO: 98180 - DNA, 25 bp, Saccharomyces pastorianus
tcactgttcaatcacaagctagccc

SEQ ID NO: 98181 - DNA, 25 bp, Saccharomyces pastorianus
ctgcagcctacctatacttagtatc

SEQ ID NO: 98182 - DNA, 25 bp, Saccharomyces pastorianus
gaccaaactaccttttgtgcggact

SEQ ID NO: 98183 - DNA, 25 bp, Saccharomyces pastorianus
gtgatttctattaccaccccaataa

SEQ ID NO: 98184 - DNA, 25 bp, Saccharomyces pastorianus
taggtggtttagctactggtgcctt

SEQ ID NO: 98185 - DNA, 25 bp, Saccharomyces pastorianus
aagtctccccagctattgtaaaagg

SEQ ID NO: 98186 - DNA, 25 bp, Saccharomyces pastorianus
gctactatctagctgcaccaggaga

SEQ ID NO: 98187 - DNA, 25 bp, Saccharomyces pastorianus
tggtgcctttggactcagctactat

SEQ ID NO: 98188 - DNA, 25 bp, Saccharomyces pastorianus
gctgcatgcccattctcaaagatga

SEQ ID NO: 98189 - DNA, 25 bp, Saccharomyces pastorianus
atgtcactcctacatgtcattgcac

SEQ ID NO: 98190 - DNA, 25 bp, Saccharomyces pastorianus
tggcaagatctacccgacatttatg

SEQ ID NO: 98191 - DNA, 25 bp, Saccharomyces pastorianus
agaagacctacacgttagcctgcag

SEQ ID NO: 98192 - DNA, 25 bp, Saccharomyces pastorianus
aatacgtagtaccaaggctctcctg

SEQ ID NO: 98193 - DNA, 25 bp, Saccharomyces pastorianus
acagctgcttctcgtaccaaaataa

SEQ ID NO: 98194 - DNA, 25 bp, Saccharomyces pastorianus
aaggctctcctgtggttacaatgat

SEQ ID NO: 98195 - DNA, 25 bp, Saccharomyces pastorianus
ttacagggcgccagaaactttctct

SEQ ID NO: 98196 - DNA, 25 bp, Saccharomyces pastorianus
ggcgattgcctttttagagtctcca

SEQ ID NO: 98197 - DNA, 25 bp, Saccharomyces pastorianus
tggccgcgttagtaactcttgtttt

SEQ ID NO: 98198 - DNA, 25 bp, Saccharomyces pastorianus
atcggtcatcggctccattgtataa

SEQ ID NO: 98199 - DNA, 25 bp, Saccharomyces pastorianus
aacgacttccagattggtaccgata

SEQ ID NO: 98200 - DNA, 25 bp, Saccharomyces pastorianus
tgggtgccaccatattttatctgat

SEQ ID NO: 98201 - DNA, 25 bp, Saccharomyces pastorianus
tggtgcaggcggttcattttcaatg

SEQ ID NO: 98202 - DNA, 25 bp, Saccharomyces pastorianus
accaaagtgttatctctgagtacct

SEQ ID NO: 98203 - DNA, 25 bp, Saccharomyces pastorianus
gggcgatgaatgtcgcttgcatata

SEQ ID NO: 98204 - DNA, 25 bp, Saccharomyces pastorianus
aaaagagattatcccggctgattaa

SEQ ID NO: 98205 - DNA, 25 bp, Saccharomyces pastorianus
gtaaagattctaacatcgacatcgc

SEQ ID NO: 98206 - DNA, 25 bp, Saccharomyces pastorianus
gcaaagctgcataccggaagaccat

SEQ ID NO: 98207 - DNA, 25 bp, Saccharomyces pastorianus
gatgttgaactgatccattacgaga

SEQ ID NO: 98208 - DNA, 25 bp, Saccharomyces pastorianus
tttacatcctacagccaataatttg

SEQ ID NO: 98209 - DNA, 25 bp, Saccharomyces pastorianus
gagtaccttgaaaatgcagctgaaa

SEQ ID NO: 98210 - DNA, 25 bp, Saccharomyces pastorianus
atgaggtcggtaccagtcatagact

SEQ ID NO: 98211 - DNA, 25 bp, Saccharomyces pastorianus
acatggcttctttgaatgcaatgcg

SEQ ID NO: 98212 - DNA, 25 bp, Saccharomyces pastorianus
gtgccaacaaggacgccaacatcaa

SEQ ID NO: 98213 - DNA, 25 bp, Saccharomyces pastorianus
gtgaaacgtcacctgattctactcc

SEQ ID NO: 98214 - DNA, 25 bp, Saccharomyces pastorianus
caaagaagaccatcccagggctagt

SEQ ID NO: 98215 - DNA, 25 bp, Saccharomyces pastorianus
tgattcgaccacatcttcacttgat

SEQ ID NO: 98216 - DNA, 25 bp, Saccharomyces pastorianus
tagttccgggcatgagtgccaacaa

SEQ ID NO: 98217 - DNA, 25 bp, Saccharomyces pastorianus
agctggaggcgcttataaaccacct

SEQ ID NO: 98218 - DNA, 25 bp, Saccharomyces pastorianus
gagttcctcctggtgcagcaaagaa

SEQ ID NO: 98219 - DNA, 25 bp, Saccharomyces pastorianus
tggacgtattgtccccggagttcct

SEQ ID NO: 98220 - DNA, 25 bp, Saccharomyces pastorianus
ataaaccacctcacgcaagaagaac

SEQ ID NO: 98221 - DNA, 25 bp, Saccharomyces pastorianus
gaaagacaggccgtcggtgacaaat

SEQ ID NO: 98222 - DNA, 25 bp, Saccharomyces pastorianus
aataactgggaaccgctacctgatt

SEQ ID NO: 98223 - DNA, 25 bp, Saccharomyces pastorianus
tgtgttgcccttttctaatttcttt

SEQ ID NO: 98224 - DNA, 25 bp, Saccharomyces pastorianus
aatggcgagtcggtgtattcaagca

SEQ ID NO: 98225 - DNA, 25 bp, Saccharomyces pastorianus
tttgtacagtaaccatcttagcccc

SEQ ID NO: 98226 - DNA, 25 bp, Saccharomyces pastorianus
ctggatccactgtgtaattgcttgg

SEQ ID NO: 98227 - DNA, 25 bp, Saccharomyces pastorianus
tacctgattattgctccttacgttc

SEQ ID NO: 98228 - DNA, 25 bp, Saccharomyces pastorianus
actaggacgtgaaggtgtgttgccc

SEQ ID NO: 98229 - DNA, 25 bp, Saccharomyces pastorianus
gttgtttgggcccaattattgccaa

SEQ ID NO: 98230 - DNA, 25 bp, Saccharomyces pastorianus
cacctccaggtgatgcatatttgct

SEQ ID NO: 98231 - DNA, 25 bp, Saccharomyces pastorianus
taatttctttgcctcttctaagcca

SEQ ID NO: 98232 - DNA, 25 bp, Saccharomyces pastorianus
tacgttccaccttcaaatggcgagt

SEQ ID NO: 98233 - DNA, 25 bp, Saccharomyces pastorianus
acactattggcgatgtcgatacaca

SEQ ID NO: 98234 - DNA, 25 bp, Saccharomyces pastorianus
tcctccgccgagcttgaatttagat

SEQ ID NO: 98235 - DNA, 25 bp, Saccharomyces pastorianus
aatatttttaatcctccgccgagct

SEQ ID NO: 98236 - DNA, 25 bp, Saccharomyces pastorianus
gaaccatccaatcgacagaacgttt

SEQ ID NO: 98237 - DNA, 25 bp, Saccharomyces pastorianus
ccgggtgcatttgtggttcctgtac

SEQ ID NO: 98238 - DNA, 25 bp, Saccharomyces pastorianus
gaaattgaagatatcccgaccacgt

SEQ ID NO: 98239 - DNA, 25 bp, Saccharomyces pastorianus
gcccatcctcgaataactcttctaa

SEQ ID NO: 98240 - DNA, 25 bp, Saccharomyces pastorianus
ggaaccaccaaatgacttcagcgaa

SEQ ID NO: 98241 - DNA, 25 bp, Saccharomyces pastorianus
gatttaaatctaagcccatcctcga

SEQ ID NO: 98242 - DNA, 25 bp, Saccharomyces pastorianus
atattgttattgaagccccgggtgc

SEQ ID NO: 98243 - DNA, 25 bp, Saccharomyces pastorianus
ccgaccacgtctgcttttggcttaa

SEQ ID NO: 98244 - DNA, 25 bp, Saccharomyces pastorianus
aacgctcaaaatctcggtaatactg

SEQ ID NO: 98245 - DNA, 25 bp, Saccharomyces pastorianus
ggatgataaatttctcttcgtgcga

SEQ ID NO: 98246 - DNA, 25 bp, Saccharomyces pastorianus
ggtgcttcatcgaagatgttccgtt

SEQ ID NO: 98247 - DNA, 25 bp, Saccharomyces pastorianus
gaagccatgacgattctatgaaaat

SEQ ID NO: 98248 - DNA, 25 bp, Saccharomyces pastorianus
tcggctgtaatttggtgtctctgac

SEQ ID NO: 98249 - DNA, 25 bp, Saccharomyces pastorianus
ttaacagtcgattccagaagccatg

SEQ ID NO: 98250 - DNA, 25 bp, Saccharomyces pastorianus
ataataacgctttcattggctcata

SEQ ID NO: 98251 - DNA, 25 bp, Saccharomyces pastorianus
tggctcatatttacgtgcaaacaaa

SEQ ID NO: 98252 - DNA, 25 bp, Saccharomyces pastorianus
actggaactttatcatcggtggatt

SEQ ID NO: 98253 - DNA, 25 bp, Saccharomyces pastorianus
actagtgcctgattatccaactgaa

SEQ ID NO: 98254 - DNA, 25 bp, Saccharomyces pastorianus
atattgcgaatcatgtcttttacag

SEQ ID NO: 98255 - DNA, 25 bp, Saccharomyces pastorianus
caactagatcgatgcggtgcttcat

SEQ ID NO: 98256 - DNA, 25 bp, Saccharomyces pastorianus
acgacgacaactcccatttttgtat

SEQ ID NO: 98257 - DNA, 25 bp, Saccharomyces pastorianus
taattcacaatcaagcagtgcctgc

SEQ ID NO: 98258 - DNA, 25 bp, Saccharomyces pastorianus
gccacacagctatttcataaccatg

SEQ ID NO: 98259 - DNA, 25 bp, Saccharomyces pastorianus
gggcaaaaaccgactgacagctgag

SEQ ID NO: 98260 - DNA, 25 bp, Saccharomyces pastorianus
gtacgagacatgcaagtggccacac

SEQ ID NO: 98261 - DNA, 25 bp, Saccharomyces pastorianus
gaattcatcgccctatacaaaagag

SEQ ID NO: 98262 - DNA, 25 bp, Saccharomyces pastorianus
tgatatcaacggatcgctcaccatt

SEQ ID NO: 98263 - DNA, 25 bp, Saccharomyces pastorianus
agaaagttgcacctgcttcgttcga

SEQ ID NO: 98264 - DNA, 25 bp, Saccharomyces pastorianus
gaggaactacagaacttactacaaa

SEQ ID NO: 98265 - DNA, 25 bp, Saccharomyces pastorianus
cagtgcctgcacaactcttgaagaa

SEQ ID NO: 98266 - DNA, 25 bp, Saccharomyces pastorianus
ttcgttgaggcgttagtttggctaa

SEQ ID NO: 98267 - DNA, 25 bp, Saccharomyces pastorianus
acttcattggtaactacgcttcctc

SEQ ID NO: 98268 - DNA, 25 bp, Saccharomyces pastorianus
ggtctttctgctgaatatgctcatc

SEQ ID NO: 98269 - DNA, 25 bp, Saccharomyces pastorianus
gatcaccctaagattattccaagct

SEQ ID NO: 98270 - DNA, 25 bp, Saccharomyces pastorianus
attctttacgtcatgtacactggta

SEQ ID NO: 98271 - DNA, 25 bp, Saccharomyces pastorianus
atttcttggtcgaggccatccctat

SEQ ID NO: 98272 - DNA, 25 bp, Saccharomyces pastorianus
cgaagttccattcccatctttgaaa

SEQ ID NO: 98273 - DNA, 25 bp, Saccharomyces pastorianus
ttctggttatgacttcccatggtct

SEQ ID NO: 98274 - DNA, 25 bp, Saccharomyces pastorianus
atgctcatcctgctgaaactttgtc

SEQ ID NO: 98275 - DNA, 25 bp, Saccharomyces pastorianus
aatctggtccagaagctaaggcctc

SEQ ID NO: 98276 - DNA, 25 bp, Saccharomyces pastorianus
agatacgctgctccattcggtcttt

SEQ ID NO: 98277 - DNA, 25 bp, Saccharomyces pastorianus
tgggctggcgctgaacaccacgatt

SEQ ID NO: 98278 - DNA, 25 bp, Saccharomyces pastorianus
aggtatgtggacaactacggtaacg

SEQ ID NO: 98279 - DNA, 25 bp, Saccharomyces pastorianus
gtatcacgaaggtgtgcgctcgcaa

SEQ ID NO: 98280 - DNA, 25 bp, Saccharomyces pastorianus
tagcgaggaatctgttttcttgaat

SEQ ID NO: 98281 - DNA, 25 bp, Saccharomyces pastorianus
gtgcgctcgcaattttctaagttct

SEQ ID NO: 98282 - DNA, 25 bp, Saccharomyces pastorianus
tagagtgcttgccatgatgccacat

SEQ ID NO: 98283 - DNA, 25 bp, Saccharomyces pastorianus
ggaggccaattcctggtatccagag

SEQ ID NO: 98284 - DNA, 25 bp, Saccharomyces pastorianus
gggttgggctaaatccgtattgtat

SEQ ID NO: 98285 - DNA, 25 bp, Saccharomyces pastorianus
accccaatgggtcgaccaatggtat

SEQ ID NO: 98286 - DNA, 25 bp, Saccharomyces pastorianus
tttcttgaatggcatggcaggatcc

SEQ ID NO: 98287 - DNA, 25 bp, Saccharomyces pastorianus
aggatccaaattgccaattgctgtc

SEQ ID NO: 98288 - DNA, 25 bp, Saccharomyces pastorianus
gatgccacatcctgaaagagtttgc

SEQ ID NO: 98289 - DNA, 25 bp, Saccharomyces pastorianus
aatggccgactgatgtttagctcaa

SEQ ID NO: 98290 - DNA, 25 bp, Saccharomyces pastorianus
actgggtttcagttcctttgatcta

SEQ ID NO: 98291 - DNA, 25 bp, Saccharomyces pastorianus
ccttctttcgctctattggatatca

SEQ ID NO: 98292 - DNA, 25 bp, Saccharomyces pastorianus
aaattcctctttgggtcacagtctc

SEQ ID NO: 98293 - DNA, 25 bp, Saccharomyces pastorianus
gatctaagctcaccgctagtagcaa

SEQ ID NO: 98294 - DNA, 25 bp, Saccharomyces pastorianus
actgccaatggtgcaaattcctctt

SEQ ID NO: 98295 - DNA, 25 bp, Saccharomyces pastorianus
aattagctccaacggttctttcatg

SEQ ID NO: 98296 - DNA, 25 bp, Saccharomyces pastorianus
actcggttgtgtcgttatgctagca

SEQ ID NO: 98297 - DNA, 25 bp, Saccharomyces pastorianus
gtcacagtctccatgggcatcagga

SEQ ID NO: 98298 - DNA, 25 bp, Saccharomyces pastorianus
cagctattctccctggtgcaaaata

SEQ ID NO: 98299 - DNA, 25 bp, Saccharomyces pastorianus
gaaatgccgccagaattagctccaa

SEQ ID NO: 98300 - DNA, 25 bp, Saccharomyces pastorianus
aaagagcctgtatgctgtgtggcat

SEQ ID NO: 98301 - DNA, 25 bp, Saccharomyces pastorianus
ttcgagggcctcgtaggaatgtgta

SEQ ID NO: 98302 - DNA, 25 bp, Saccharomyces pastorianus
atagtgcagaccacaaatgcgttta

SEQ ID NO: 98303 - DNA, 25 bp, Saccharomyces pastorianus
agactaccagctgaggttgtggagc

SEQ ID NO: 98304 - DNA, 25 bp, Saccharomyces pastorianus
agctggtatgtacgccatcaaggtc

SEQ ID NO: 98305 - DNA, 25 bp, Saccharomyces pastorianus
aatggaatgtacgtcgccttctttc

SEQ ID NO: 98306 - DNA, 25 bp, Saccharomyces pastorianus
gatggttgtcccaactgtcagggta

SEQ ID NO: 98307 - DNA, 25 bp, Saccharomyces pastorianus
catcaaggtcgatggtagactacca

SEQ ID NO: 98308 - DNA, 25 bp, Saccharomyces pastorianus
gtgtaagcctactaagtcgtgggta

SEQ ID NO: 98309 - DNA, 25 bp, Saccharomyces pastorianus
gaggcaggtgtttctacaatggaat

SEQ ID NO: 98310 - DNA, 25 bp, Saccharomyces pastorianus
agtggctgagcgtagatcatagtat

SEQ ID NO: 98311 - DNA, 25 bp, Saccharomyces pastorianus
gaaggcgacgtacattccattgtag

SEQ ID NO: 98312 - DNA, 25 bp, Saccharomyces pastorianus
tcactttttcactcgatttcactca

SEQ ID NO: 98313 - DNA, 25 bp, Saccharomyces pastorianus
ttgtagaaacacctgcctcttcaaa

SEQ ID NO: 98314 - DNA, 25 bp, Saccharomyces pastorianus
tcgagccctttcttaaatttcactt

SEQ ID NO: 98315 - DNA, 25 bp, Saccharomyces pastorianus
taggcttacacattcctacgaggcc

SEQ ID NO: 98316 - DNA, 25 bp, Saccharomyces pastorianus
tattacacagtacatccttcgagcc

SEQ ID NO: 98317 - DNA, 25 bp, Saccharomyces pastorianus
ttgctacccacgacttagtaggctt

SEQ ID NO: 98318 - DNA, 25 bp, Saccharomyces pastorianus
ctcgttcgcttttgccaaactgaat

SEQ ID NO: 98319 - DNA, 25 bp, Saccharomyces pastorianus
gggacaaccatctctattaaacgca

SEQ ID NO: 98320 - DNA, 25 bp, Saccharomyces pastorianus
aaacgcatttgtggtctgcactatg

SEQ ID NO: 98321 - DNA, 25 bp, Saccharomyces pastorianus
gcatacaggctctttcactagacat

SEQ ID NO: 98322 - DNA, 25 bp, Saccharomyces pastorianus
cgcatcgccttgtctatggtcgttt

SEQ ID NO: 98323 - DNA, 25 bp, Saccharomyces pastorianus
ataccgtttcttgtgccttacttat

SEQ ID NO: 98324 - DNA, 25 bp, Saccharomyces pastorianus
ggatattcatggtttttgctgctat

SEQ ID NO: 98325 - DNA, 25 bp, Saccharomyces pastorianus
acaaagtactccattgcccaagtga

SEQ ID NO: 98326 - DNA, 25 bp, Saccharomyces pastorianus
acgtatttcagtgtggccgcatcgc

SEQ ID NO: 98327 - DNA, 25 bp, Saccharomyces pastorianus
atttattccttctctcaatccactt

SEQ ID NO: 98328 - DNA, 25 bp, Saccharomyces pastorianus
aagactggttacaccgtgagcttaa

SEQ ID NO: 98329 - DNA, 25 bp, Saccharomyces pastorianus
acctgagtgttatacccgcatgttt

SEQ ID NO: 98330 - DNA, 25 bp, Saccharomyces pastorianus
tttttgtgcctttggtgccgattta

SEQ ID NO: 98331 - DNA, 25 bp, Saccharomyces pastorianus
tggattcctaccttggcgtggccta

SEQ ID NO: 98332 - DNA, 25 bp, Saccharomyces pastorianus
taaatggtacgctttcttcaccacg

SEQ ID NO: 98333 - DNA, 25 bp, Saccharomyces pastorianus
aatcatcatctggaaggcgcgtcat

SEQ ID NO: 98334 - DNA, 25 bp, Saccharomyces pastorianus
tcatcccgcttgtgaattgtttcaa

SEQ ID NO: 98335 - DNA, 25 bp, Saccharomyces pastorianus
attgataccgtaaacttgccacttt

SEQ ID NO: 98336 - DNA, 25 bp, Saccharomyces pastorianus
caaggattcgcgttctttggacccg

SEQ ID NO: 98337 - DNA, 25 bp, Saccharomyces pastorianus
aggcgcgtcatttgagggattttac

SEQ ID NO: 98338 - DNA, 25 bp, Saccharomyces pastorianus
attcccgttatgttcactgcattgg

SEQ ID NO: 98339 - DNA, 25 bp, Saccharomyces pastorianus
attggcccgctgaggagacgctcga

SEQ ID NO: 98340 - DNA, 25 bp, Saccharomyces pastorianus
gatttggcggttcgcaatcgtcaaa

SEQ ID NO: 98341 - DNA, 25 bp, Saccharomyces pastorianus
tcgacccttatatggctcagagaga

SEQ ID NO: 98342 - DNA, 25 bp, Saccharomyces pastorianus
gcatgtcacaggtactttcactatt

SEQ ID NO: 98343 - DNA, 25 bp, Saccharomyces pastorianus
gtggaaggctactactatcatcccg

SEQ ID NO: 98344 - DNA, 25 bp, Saccharomyces pastorianus
gcagggtctgactccaggcgttgaa

SEQ ID NO: 98345 - DNA, 25 bp, Saccharomyces pastorianus
gttattatttatttcgccgcatctg

SEQ ID NO: 98346 - DNA, 25 bp, Saccharomyces pastorianus
ggcgttgaactgaactccactacaa

SEQ ID NO: 98347 - DNA, 25 bp, Saccharomyces pastorianus
actgacagtgccgtcatacgagcag

SEQ ID NO: 98348 - DNA, 25 bp, Saccharomyces pastorianus
caggcatcggcatcgtcttacgtga

SEQ ID NO: 98349 - DNA, 25 bp, Saccharomyces pastorianus
gagagcaccaacgatcatctcatgc

SEQ ID NO: 98350 - DNA, 25 bp, Saccharomyces pastorianus
aattactcatctagcggacttcggc

SEQ ID NO: 98351 - DNA, 25 bp, Saccharomyces pastorianus
tgacgtcgattgtccctttacaatt

SEQ ID NO: 98352 - DNA, 25 bp, Saccharomyces pastorianus
aaaggccgtctagtgttgtttgata

SEQ ID NO: 98353 - DNA, 25 bp, Saccharomyces pastorianus
aaccgccaccgaattatcacgagag

SEQ ID NO: 98354 - DNA, 25 bp, Saccharomyces pastorianus
ggacagcagcgcacaaatttatgat

SEQ ID NO: 98355 - DNA, 25 bp, Saccharomyces pastorianus
agtccctcgattgtttcgcacactt

SEQ ID NO: 98356 - DNA, 25 bp, Saccharomyces pastorianus
taccactttgtagtccctcgattgt

SEQ ID NO: 98357 - DNA, 25 bp, Saccharomyces pastorianus
tgtagtccctcgattgtttcgcaca

SEQ ID NO: 98358 - DNA, 25 bp, Saccharomyces pastorianus
cctcgattgtttcgcacacttctgg

SEQ ID NO: 98359 - DNA, 25 bp, Saccharomyces pastorianus
actttgtagtccctcgattgtttcg

SEQ ID NO: 98360 - DNA, 25 bp, Saccharomyces pastorianus
atgctaccactttgtagtccctcga

SEQ ID NO: 98361 - DNA, 25 bp, Saccharomyces pastorianus
ccactttgtagtccctcgattgttt

SEQ ID NO: 98362 - DNA, 25 bp, Saccharomyces pastorianus
tttgtagtccctcgattgtttcgca

SEQ ID NO: 98363 - DNA, 25 bp, Saccharomyces pastorianus
agtatgctaccactttgtagtccct

SEQ ID NO: 98364 - DNA, 25 bp, Saccharomyces pastorianus
aggaatacagtatgctaccactttg

SEQ ID NO: 98365 - DNA, 25 bp, Saccharomyces pastorianus
gaatacagtatgctaccactttgta

SEQ ID NO: 98366 - DNA, 25 bp, Saccharomyces pastorianus
tgaacctctgtccttttcttttttg

SEQ ID NO: 98367 - DNA, 25 bp, Saccharomyces pastorianus
gtgttcctacccttatattgtggca

SEQ ID NO: 98368 - DNA, 25 bp, Saccharomyces pastorianus
aacttttgcatgttttccagaactc

SEQ ID NO: 98369 - DNA, 25 bp, Saccharomyces pastorianus
gaacttgtccgctgtgtacttggaa

SEQ ID NO: 98370 - DNA, 25 bp, Saccharomyces pastorianus
aaccagaacagttcgcgtgttccta

SEQ ID NO: 98371 - DNA, 25 bp, Saccharomyces pastorianus
agaactctgcttttttctcaataag

SEQ ID NO: 98372 - DNA, 25 bp, Saccharomyces pastorianus
aaacctaaaggcaggcttggtagat

SEQ ID NO: 98373 - DNA, 25 bp, Saccharomyces pastorianus
gagggagcttttaaatctacatgat

SEQ ID NO: 98374 - DNA, 25 bp, Saccharomyces pastorianus
ttagcgttgattctgaacctctgtc

SEQ ID NO: 98375 - DNA, 25 bp, Saccharomyces pastorianus
caaagtagtttccatgtttccgata

SEQ ID NO: 98376 - DNA, 25 bp, Saccharomyces pastorianus
atcattttttgcacaccgtacaatt

SEQ ID NO: 98377 - DNA, 25 bp, Saccharomyces pastorianus
tgcaaacttgctatgttgtcacttg

SEQ ID NO: 98378 - DNA, 25 bp, Saccharomyces pastorianus
gatactgactgcagtgtgccccaaa

SEQ ID NO: 98379 - DNA, 25 bp, Saccharomyces pastorianus
agttctatggtaacctgctcattgc

SEQ ID NO: 98380 - DNA, 25 bp, Saccharomyces pastorianus
aacttcataatctttttctcgacga

SEQ ID NO: 98381 - DNA, 25 bp, Saccharomyces pastorianus
tagggtcaacttcacgtcagttaag

SEQ ID NO: 98382 - DNA, 25 bp, Saccharomyces pastorianus
gtcacttgcagtaggttgctgtcct

SEQ ID NO: 98383 - DNA, 25 bp, Saccharomyces pastorianus
tgctcattgcgcagcttttttaaaa

SEQ ID NO: 98384 - DNA, 25 bp, Saccharomyces pastorianus
gatacttggagtcatctttcttcat

SEQ ID NO: 98385 - DNA, 25 bp, Saccharomyces pastorianus
gtcaagtacagactagccatcgcaa

SEQ ID NO: 98386 - DNA, 25 bp, Saccharomyces pastorianus
gccatcgcaataccattactgttca

SEQ ID NO: 98387 - DNA, 25 bp, Saccharomyces pastorianus
gttgctgtcctccagtcaagtacag

SEQ ID NO: 98388 - DNA, 25 bp, Saccharomyces pastorianus
ttggccacacaggaccatatctggg

SEQ ID NO: 98389 - DNA, 25 bp, Saccharomyces pastorianus
ggtttatgcgcggttacagtattat

SEQ ID NO: 98390 - DNA, 25 bp, Saccharomyces pastorianus
acacatgatggttctcggtggcatt

SEQ ID NO: 98391 - DNA, 25 bp, Saccharomyces pastorianus
agaacggttttgactcgaaatatat

SEQ ID NO: 98392 - DNA, 25 bp, Saccharomyces pastorianus
tagtcgattggttggccacacagga

SEQ ID NO: 98393 - DNA, 25 bp, Saccharomyces pastorianus
aatcagaccgaatttccagcagttg

SEQ ID NO: 98394 - DNA, 25 bp, Saccharomyces pastorianus
atgattggcgcatttggtaccataa

SEQ ID NO: 98395 - DNA, 25 bp, Saccharomyces pastorianus
gcaacgaatctttgagaggcaatac

SEQ ID NO: 98396 - DNA, 25 bp, Saccharomyces pastorianus
gctttgctcactcctataacgaaga

SEQ ID NO: 98397 - DNA, 25 bp, Saccharomyces pastorianus
attgctttgcttctggtttatgcgc

SEQ ID NO: 98398 - DNA, 25 bp, Saccharomyces pastorianus
tacaagtagactgctttgctcactc

SEQ ID NO: 98399 - DNA, 25 bp, Saccharomyces pastorianus
agttggcactgcgttatggagtaga

SEQ ID NO: 98400 - DNA, 25 bp, Saccharomyces pastorianus
cttgcccaagggtcataagcatgaa

SEQ ID NO: 98401 - DNA, 25 bp, Saccharomyces pastorianus
taaagccattaatgccaaccctttc

SEQ ID NO: 98402 - DNA, 25 bp, Saccharomyces pastorianus
atgaaaggtgttctcttgcccaagg

SEQ ID NO: 98403 - DNA, 25 bp, Saccharomyces pastorianus
ggtagatgagttgattgcttccaag

SEQ ID NO: 98404 - DNA, 25 bp, Saccharomyces pastorianus
aaacatccggtcacacaacgatttc

SEQ ID NO: 98405 - DNA, 25 bp, Saccharomyces pastorianus
tagaagagtttttaccaccgatcga

SEQ ID NO: 98406 - DNA, 25 bp, Saccharomyces pastorianus
gtgtctacatctactaaagccatta

SEQ ID NO: 98407 - DNA, 25 bp, Saccharomyces pastorianus
cagtattttgatagtttgcctttga

SEQ ID NO: 98408 - DNA, 25 bp, Saccharomyces pastorianus
gaagggttcgaagtatgccaagaga

SEQ ID NO: 98409 - DNA, 25 bp, Saccharomyces pastorianus
agtattctccagtgtctacatctac

SEQ ID NO: 98410 - DNA, 25 bp, Saccharomyces pastorianus
gcaatcattctttttcggcgacaat

SEQ ID NO: 98411 - DNA, 25 bp, Saccharomyces pastorianus
gcgagagcagtatctttctaccaca

SEQ ID NO: 98412 - DNA, 25 bp, Saccharomyces pastorianus
cgctcatcctctgcaatttctaaaa

SEQ ID NO: 98413 - DNA, 25 bp, Saccharomyces pastorianus
cagtgctgaagccatggaaccctcc

SEQ ID NO: 98414 - DNA, 25 bp, Saccharomyces pastorianus
gtgcggacaatgaactacccatgga

SEQ ID NO: 98415 - DNA, 25 bp, Saccharomyces pastorianus
gtgacgcaaataatacggacttctg

SEQ ID NO: 98416 - DNA, 25 bp, Saccharomyces pastorianus
atcttcctcccttcttgataatttg

SEQ ID NO: 98417 - DNA, 25 bp, Saccharomyces pastorianus
taatttccacgatagcagcgagagc

SEQ ID NO: 98418 - DNA, 25 bp, Saccharomyces pastorianus
aggccatttgcctgcaggagacaag

SEQ ID NO: 98419 - DNA, 25 bp, Saccharomyces pastorianus
gtttttgaagaattccctgcgctca

SEQ ID NO: 98420 - DNA, 25 bp, Saccharomyces pastorianus
aaagaaaatgctccctcgtggctct

SEQ ID NO: 98421 - DNA, 25 bp, Saccharomyces pastorianus
atgtccctccgtagatgaactgtac

SEQ ID NO: 98422 - DNA, 25 bp, Saccharomyces pastorianus
aacacatccgtcaagttggtttctc

SEQ ID NO: 98423 - DNA, 25 bp, Saccharomyces pastorianus
tcgtgcaatctgatacatgtccctc

SEQ ID NO: 98424 - DNA, 25 bp, Saccharomyces pastorianus
aaaattttgatagtgcccgtcctgc

SEQ ID NO: 98425 - DNA, 25 bp, Saccharomyces pastorianus
gaagacagcctcgatcatggatcca

SEQ ID NO: 98426 - DNA, 25 bp, Saccharomyces pastorianus
cttcgcctttatcgttaactttcag

SEQ ID NO: 98427 - DNA, 25 bp, Saccharomyces pastorianus
tgcccgggccaagttacacgatttt

SEQ ID NO: 98428 - DNA, 25 bp, Saccharomyces pastorianus
agtttctttatctactcttgtccct

SEQ ID NO: 98429 - DNA, 25 bp, Saccharomyces pastorianus
tgaactgtacattgacttgcccggg

SEQ ID NO: 98430 - DNA, 25 bp, Saccharomyces pastorianus
ttggtttctcaggacagtgcttcgc

SEQ ID NO: 98431 - DNA, 25 bp, Saccharomyces pastorianus
ttgtccctctggcagcaaagtcaaa

SEQ ID NO: 98432 - DNA, 25 bp, Saccharomyces pastorianus
ggcattggctgctaacgaaactgca

SEQ ID NO: 98433 - DNA, 25 bp, Saccharomyces pastorianus
gatgatgacatcgacatgaattcta

SEQ ID NO: 98434 - DNA, 25 bp, Saccharomyces pastorianus
ggctgctaacgaaactgcaagattc

SEQ ID NO: 98435 - DNA, 25 bp, Saccharomyces pastorianus
gaatcagccaaatatcaggaaccaa

SEQ ID NO: 98436 - DNA, 25 bp, Saccharomyces pastorianus
gatctgctcacttctttggagcaag

SEQ ID NO: 98437 - DNA, 25 bp, Saccharomyces pastorianus
tagaacctggttctgttaggataaa

SEQ ID NO: 98438 - DNA, 25 bp, Saccharomyces pastorianus
tctaaaataaggtttgtggacacaa

SEQ ID NO: 98439 - DNA, 25 bp, Saccharomyces pastorianus
gaatgcaagatctgctcacttcttt

SEQ ID NO: 98440 - DNA, 25 bp, Saccharomyces pastorianus
gcaagattcaatcaggtcctaacca

SEQ ID NO: 98441 - DNA, 25 bp, Saccharomyces pastorianus
caggtcctaaccaatcaagatttcc

SEQ ID NO: 98442 - DNA, 25 bp, Saccharomyces pastorianus
aaagggtgcaaaggcattggctgct

SEQ ID NO: 98443 - DNA, 25 bp, Saccharomyces pastorianus
tctatcctatctaatgggttcctat

SEQ ID NO: 98444 - DNA, 25 bp, Saccharomyces pastorianus
atggttggcaagagttaccttcgtt

SEQ ID NO: 98445 - DNA, 25 bp, Saccharomyces pastorianus
agtgatcactgaattcggcgctttg

SEQ ID NO: 98446 - DNA, 25 bp, Saccharomyces pastorianus
aggagcccattctatcctatctaat

SEQ ID NO: 98447 - DNA, 25 bp, Saccharomyces pastorianus
gacagcaatgttggctatgagcgct

SEQ ID NO: 98448 - DNA, 25 bp, Saccharomyces pastorianus
actggcagatccaaatgacctggtt

SEQ ID NO: 98449 - DNA, 25 bp, Saccharomyces pastorianus
atacctgtattagtctgctgcgaaa

SEQ ID NO: 98450 - DNA, 25 bp, Saccharomyces pastorianus
ggactatgtgtttttaggagcccat

SEQ ID NO: 98451 - DNA, 25 bp, Saccharomyces pastorianus
tgggttcctatattcaagagctggg

SEQ ID NO: 98452 - DNA, 25 bp, Saccharomyces pastorianus
aaatccagtcgagagacgcggtaat

SEQ ID NO: 98453 - DNA, 25 bp, Saccharomyces pastorianus
atcttatacgatttaacaccaccag

SEQ ID NO: 98454 - DNA, 25 bp, Saccharomyces pastorianus
caattcatcaagtggcgcggaacta

SEQ ID NO: 98455 - DNA, 25 bp, Saccharomyces pastorianus
gatgttgactgcgtcatttttcaaa

SEQ ID NO: 98456 - DNA, 25 bp, Saccharomyces pastorianus
tcaaagcgcaaaatccatccgtatt

SEQ ID NO: 98457 - DNA, 25 bp, Saccharomyces pastorianus
gcgctatttggacatacatctcacc

SEQ ID NO: 98458 - DNA, 25 bp, Saccharomyces pastorianus
gacgggcttgcaacctgtagatatt

SEQ ID NO: 98459 - DNA, 25 bp, Saccharomyces pastorianus
agtgaatccagcgatccatacgaca

SEQ ID NO: 98460 - DNA, 25 bp, Saccharomyces pastorianus
tatgcgcacatggtaggactcttat

SEQ ID NO: 98461 - DNA, 25 bp, Saccharomyces pastorianus
agattggatttaccccagagctgac

SEQ ID NO: 98462 - DNA, 25 bp, Saccharomyces pastorianus
agtttaccagatatccccaattcat

SEQ ID NO: 98463 - DNA, 25 bp, Saccharomyces pastorianus
ttgggactgttggaaacaccacctc

SEQ ID NO: 98464 - DNA, 25 bp, Saccharomyces pastorianus
ggacatcgatcaacacaatgctcaa

SEQ ID NO: 98465 - DNA, 25 bp, Saccharomyces pastorianus
attggtgcgtgctgaggctgaatct

SEQ ID NO: 98466 - DNA, 25 bp, Saccharomyces pastorianus
aaaccaggcctgcttacgatgggta

SEQ ID NO: 98467 - DNA, 25 bp, Saccharomyces pastorianus
taaggctctcttggaactattggac

SEQ ID NO: 98468 - DNA, 25 bp, Saccharomyces pastorianus
gctgctttcaactaccaatttgact

SEQ ID NO: 98469 - DNA, 25 bp, Saccharomyces pastorianus
gaaagcgcactgaatgaatggacac

SEQ ID NO: 98470 - DNA, 25 bp, Saccharomyces pastorianus
acgatgggtatgaagcctctaaaca

SEQ ID NO: 98471 - DNA, 25 bp, Saccharomyces pastorianus
aatcgctggttatggtaaggctctc

SEQ ID NO: 98472 - DNA, 25 bp, Saccharomyces pastorianus
tctgcccaagtcaagcctactttaa

SEQ ID NO: 98473 - DNA, 25 bp, Saccharomyces pastorianus
tttgactccatcatcgaacattcag

SEQ ID NO: 98474 - DNA, 25 bp, Saccharomyces pastorianus
gaatggacactagactctgcccaag

SEQ ID NO: 98475 - DNA, 25 bp, Saccharomyces pastorianus
tgaggctgaatctttggtcgctgaa

SEQ ID NO: 98476 - DNA, 25 bp, Saccharomyces pastorianus
gttccttgggaacctgttgaccttg

SEQ ID NO: 98477 - DNA, 25 bp, Saccharomyces pastorianus
cattgcagaaggcttgggagttcct

SEQ ID NO: 98478 - DNA, 25 bp, Saccharomyces pastorianus
cggtcctgagccaaattatatttct

SEQ ID NO: 98479 - DNA, 25 bp, Saccharomyces pastorianus
caacgtcatagattgggagccaact

SEQ ID NO: 98480 - DNA, 25 bp, Saccharomyces pastorianus
gttactacaatttcggtcctgagcc

SEQ ID NO: 98481 - DNA, 25 bp, Saccharomyces pastorianus
gagccaactatcaccaattgcctgt

SEQ ID NO: 98482 - DNA, 25 bp, Saccharomyces pastorianus
gggatgtccatactccaaaggtgat

SEQ ID NO: 98483 - DNA, 25 bp, Saccharomyces pastorianus
aggtgattcccaatacactgccgaa

SEQ ID NO: 98484 - DNA, 25 bp, Saccharomyces pastorianus
agtccactagacttcgaacagccaa

SEQ ID NO: 98485 - DNA, 25 bp, Saccharomyces pastorianus
gaacagtgtccatttaaagcagtga

SEQ ID NO: 98486 - DNA, 25 bp, Saccharomyces pastorianus
tgaacttccaaagggacggcccaat

SEQ ID NO: 98487 - DNA, 25 bp, Saccharomyces pastorianus
gatctgctggtaatcaagccaagct

SEQ ID NO: 98488 - DNA, 25 bp, Saccharomyces pastorianus
aaagtatcactagccgcaagagttg

SEQ ID NO: 98489 - DNA, 25 bp, Saccharomyces pastorianus
gaaagctatcagaagccccgagcat

SEQ ID NO: 98490 - DNA, 25 bp, Saccharomyces pastorianus
gaaggctctacctattccggaggac

SEQ ID NO: 98491 - DNA, 25 bp, Saccharomyces pastorianus
cagaaatttcccgtttctgtccata

SEQ ID NO: 98492 - DNA, 25 bp, Saccharomyces pastorianus
aaactgttcttgattcctatggtga

SEQ ID NO: 98493 - DNA, 25 bp, Saccharomyces pastorianus
gcaagctgacgaattcctaatctcc

SEQ ID NO: 98494 - DNA, 25 bp, Saccharomyces pastorianus
agagcaaccgaatctgtcgccagag

SEQ ID NO: 98495 - DNA, 25 bp, Saccharomyces pastorianus
aagccccgagcatttctgaaacgaa

SEQ ID NO: 98496 - DNA, 25 bp, Saccharomyces pastorianus
gtaggagctacatcaggttccagaa

SEQ ID NO: 98497 - DNA, 25 bp, Saccharomyces pastorianus
gaattcctaatctccttgggtcata

SEQ ID NO: 98498 - DNA, 25 bp, Saccharomyces pastorianus
gatgatgtcaaatcggccaatgctt

SEQ ID NO: 98499 - DNA, 25 bp, Saccharomyces pastorianus
aaagcttcttatccagtttacgtat

SEQ ID NO: 98500 - DNA, 25 bp, Saccharomyces pastorianus
attgtctcgttgatcaaggccatcg

SEQ ID NO: 98501 - DNA, 25 bp, Saccharomyces pastorianus
tgcgtattgcaatctgttaacccag

SEQ ID NO: 98502 - DNA, 25 bp, Saccharomyces pastorianus
ggccatcgacgaagtcactgttgtt

SEQ ID NO: 98503 - DNA, 25 bp, Saccharomyces pastorianus
gccaatgcttacgacttggtcttga

SEQ ID NO: 98504 - DNA, 25 bp, Saccharomyces pastorianus
aagaagctcgttccttgttatctga

SEQ ID NO: 98505 - DNA, 25 bp, Saccharomyces pastorianus
gttcgtgatgcttccgaaattccag

SEQ ID NO: 98506 - DNA, 25 bp, Saccharomyces pastorianus
aagctggataacactgttgccgaaa

SEQ ID NO: 98507 - DNA, 25 bp, Saccharomyces pastorianus
acatcttctcgtcaagggacacgtt

SEQ ID NO: 98508 - DNA, 25 bp, Saccharomyces pastorianus
aagcgttccactgagaaggctgcct

SEQ ID NO: 98509 - DNA, 25 bp, Saccharomyces pastorianus
gtatcatatactcttgcgctaaccc

SEQ ID NO: 98510 - DNA, 25 bp, Saccharomyces pastorianus
gtcaagcccaagtttgattttccaa

SEQ ID NO: 98511 - DNA, 25 bp, Saccharomyces pastorianus
tatactggtctattcttctatccgc

SEQ ID NO: 98512 - DNA, 25 bp, Saccharomyces pastorianus
taacccggtccacgattttgaatct

SEQ ID NO: 98513 - DNA, 25 bp, Saccharomyces pastorianus
aaggatgtcactattgtcggctctg

SEQ ID NO: 98514 - DNA, 25 bp, Saccharomyces pastorianus
atccgctagcacacggttggcttaa

SEQ ID NO: 98515 - DNA, 25 bp, Saccharomyces pastorianus
gatgaaccgcttttcgagcagtgga

SEQ ID NO: 98516 - DNA, 25 bp, Saccharomyces pastorianus
tgtcggctctgggtctttctgcaag

SEQ ID NO: 98517 - DNA, 25 bp, Saccharomyces pastorianus
gctctaacaagcatactggtcgtcc

SEQ ID NO: 98518 - DNA, 25 bp, Saccharomyces pastorianus
gatgatcctactattgtcaagccca

SEQ ID NO: 98519 - DNA, 25 bp, Saccharomyces pastorianus
aggcacgtacaatcagctttttaag

SEQ ID NO: 98520 - DNA, 25 bp, Saccharomyces pastorianus
agcatccaattttttctccttatat

SEQ ID NO: 98521 - DNA, 25 bp, Saccharomyces pastorianus
gggtcatttgattacgctgcgcatt

SEQ ID NO: 98522 - DNA, 25 bp, Saccharomyces pastorianus
tagccattgtcggacctagcttggg

SEQ ID NO: 98523 - DNA, 25 bp, Saccharomyces pastorianus
gtttttcatatctattcccacacgc

SEQ ID NO: 98524 - DNA, 25 bp, Saccharomyces pastorianus
ggactatggcagctacccaaatgct

SEQ ID NO: 98525 - DNA, 25 bp, Saccharomyces pastorianus
gaacatgctagcgttgtggtccttt

SEQ ID NO: 98526 - DNA, 25 bp, Saccharomyces pastorianus
tggtatccaaaactggcacgcctag

SEQ ID NO: 98527 - DNA, 25 bp, Saccharomyces pastorianus
gtgccattgcaggttctttgttttc

SEQ ID NO: 98528 - DNA, 25 bp, Saccharomyces pastorianus
tggtacttcactcgcaacaatgttg

SEQ ID NO: 98529 - DNA, 25 bp, Saccharomyces pastorianus
tagcattcttggcttcagtggcatg

SEQ ID NO: 98530 - DNA, 25 bp, Saccharomyces pastorianus
acgctgcgcatttaggtggctctat

SEQ ID NO: 98531 - DNA, 25 bp, Saccharomyces pastorianus
gccaccgtctgctgaagctgtaaaa

SEQ ID NO: 98532 - DNA, 25 bp, Saccharomyces pastorianus
ggaaaaactagagccaccgtctgct

SEQ ID NO: 98533 - DNA, 25 bp, Saccharomyces pastorianus
aactccataacatacctgtcgaagg

SEQ ID NO: 98534 - DNA, 25 bp, Saccharomyces pastorianus
aggcatcagccaccataagcaggat

SEQ ID NO: 98535 - DNA, 25 bp, Saccharomyces pastorianus
attgttgcggttatcaggtcttccc

SEQ ID NO: 98536 - DNA, 25 bp, Saccharomyces pastorianus
ggtccgtccacgaatatttaggcat

SEQ ID NO: 98537 - DNA, 25 bp, Saccharomyces pastorianus
aacatggcgtctatgcagaacacat

SEQ ID NO: 98538 - DNA, 25 bp, Saccharomyces pastorianus
gaagtcatcggttcgtatctacggg

SEQ ID NO: 98539 - DNA, 25 bp, Saccharomyces pastorianus
gccgcggaatccaaaaatgcatatt

SEQ ID NO: 98540 - DNA, 25 bp, Saccharomyces pastorianus
atcaagacctgtatggtccgtccac

SEQ ID NO: 98541 - DNA, 25 bp, Saccharomyces pastorianus
aaagcaactggacttgccgcggaat

SEQ ID NO: 98542 - DNA, 25 bp, Saccharomyces pastorianus
tagcgttccgcgaggatactgaaga

SEQ ID NO: 98543 - DNA, 25 bp, Saccharomyces pastorianus
ctgtttactgcagcgatggtggtac

SEQ ID NO: 98544 - DNA, 25 bp, Saccharomyces pastorianus
tagatgttcctcgtgcggtgattaa

SEQ ID NO: 98545 - DNA, 25 bp, Saccharomyces pastorianus
gcccgtactcacttttttcattatt

SEQ ID NO: 98546 - DNA, 25 bp, Saccharomyces pastorianus
agcgatggtggtactgcccgtactc

SEQ ID NO: 98547 - DNA, 25 bp, Saccharomyces pastorianus
ttcattattcagcaatttacgccaa

SEQ ID NO: 98548 - DNA, 25 bp, Saccharomyces pastorianus
ttacattgttgtagcgttccgcgag

SEQ ID NO: 98549 - DNA, 25 bp, Saccharomyces pastorianus
tttacgccaaataccttaattagtg

SEQ ID NO: 98550 - DNA, 25 bp, Saccharomyces pastorianus
tcctcgtgcggtgattaataaactt

SEQ ID NO: 98551 - DNA, 25 bp, Saccharomyces pastorianus
gttgttctaatcgtttacattgttg

SEQ ID NO: 98552 - DNA, 25 bp, Saccharomyces pastorianus
atggctgtagatgttcctcgtgcgg

SEQ ID NO: 98553 - DNA, 25 bp, Saccharomyces pastorianus
gattcgcctttgaacatctctcaat

SEQ ID NO: 98554 - DNA, 25 bp, Saccharomyces pastorianus
gaattacctgaaagtgcctctgact

SEQ ID NO: 98555 - DNA, 25 bp, Saccharomyces pastorianus
ttaactctcttggttgggcttttga

SEQ ID NO: 98556 - DNA, 25 bp, Saccharomyces pastorianus
aaatctggcgaccatttgactgtgg

SEQ ID NO: 98557 - DNA, 25 bp, Saccharomyces pastorianus
ttaactgttcatgacgattcgcctt

SEQ ID NO: 98558 - DNA, 25 bp, Saccharomyces pastorianus
acctcgaatgcctacgatttgaaaa

SEQ ID NO: 98559 - DNA, 25 bp, Saccharomyces pastorianus
atctctcaatcattatctcccatta

SEQ ID NO: 98560 - DNA, 25 bp, Saccharomyces pastorianus
gatattttaagctccatctggactg

SEQ ID NO: 98561 - DNA, 25 bp, Saccharomyces pastorianus
gcatcgttttgttcaagtttacctc

SEQ ID NO: 98562 - DNA, 25 bp, Saccharomyces pastorianus
tagtttctgcgttgctattgttcat

SEQ ID NO: 98563 - DNA, 25 bp, Saccharomyces pastorianus
tccgttgacagtgctatcgctgttt

SEQ ID NO: 98564 - DNA, 25 bp, Saccharomyces pastorianus
acttgcctgttcattgcctgtaaat

SEQ ID NO: 98565 - DNA, 25 bp, Saccharomyces pastorianus
gaagccatcatatttagctgcaatg

SEQ ID NO: 98566 - DNA, 25 bp, Saccharomyces pastorianus
gcaatgtccatgtatatcgccagaa

SEQ ID NO: 98567 - DNA, 25 bp, Saccharomyces pastorianus
ggtgctgccactgtcgaaggaatta

SEQ ID NO: 98568 - DNA, 25 bp, Saccharomyces pastorianus
cttttattcattatagtggcggcat

SEQ ID NO: 98569 - DNA, 25 bp, Saccharomyces pastorianus
aataaattcgtccacctgaagccat

SEQ ID NO: 98570 - DNA, 25 bp, Saccharomyces pastorianus
gctgagctattcgttctaagttctt

SEQ ID NO: 98571 - DNA, 25 bp, Saccharomyces pastorianus
gcgtatgtgactgacggtgctgcca

SEQ ID NO: 98572 - DNA, 25 bp, Saccharomyces pastorianus
ttataacatatctctaccaaacccc

SEQ ID NO: 98573 - DNA, 25 bp, Saccharomyces pastorianus
acaactactatgcatcacttgcctg

SEQ ID NO: 98574 - DNA, 25 bp, Saccharomyces pastorianus
gaagatattgctgtacctgatacga

SEQ ID NO: 98575 - DNA, 25 bp, Saccharomyces pastorianus
gaagagcccagcaagatctgttttt

SEQ ID NO: 98576 - DNA, 25 bp, Saccharomyces pastorianus
ggtttcagtatcgtgatctttttat

SEQ ID NO: 98577 - DNA, 25 bp, Saccharomyces pastorianus
gttgcgccagactttgacattttca

SEQ ID NO: 98578 - DNA, 25 bp, Saccharomyces pastorianus
ctcagaaaacggttccatcagtgct

SEQ ID NO: 98579 - DNA, 25 bp, Saccharomyces pastorianus
gacattttcacatggtttcagtatc

SEQ ID NO: 98580 - DNA, 25 bp, Saccharomyces pastorianus
gatctgttttttggatacgcgttga

SEQ ID NO: 98581 - DNA, 25 bp, Saccharomyces pastorianus
tttgtttttaccgttgcgccagact

SEQ ID NO: 98582 - DNA, 25 bp, Saccharomyces pastorianus
caattggaacggtgattctctgatt

SEQ ID NO: 98583 - DNA, 25 bp, Saccharomyces pastorianus
gaacttactgagagatactgtggag

SEQ ID NO: 98584 - DNA, 25 bp, Saccharomyces pastorianus
gtaggactacatgagacacagttca

SEQ ID NO: 98585 - DNA, 25 bp, Saccharomyces pastorianus
caaaggatatacagccgagcaggta

SEQ ID NO: 98586 - DNA, 25 bp, Saccharomyces pastorianus
atcgaagcctcgttctaggcaggaa

SEQ ID NO: 98587 - DNA, 25 bp, Saccharomyces pastorianus
acctctagcctgtggaagttctgga

SEQ ID NO: 98588 - DNA, 25 bp, Saccharomyces pastorianus
cgaggcttcacaaaacaattccacc

SEQ ID NO: 98589 - DNA, 25 bp, Saccharomyces pastorianus
gggtgcacgcccattcaatttcaag

SEQ ID NO: 98590 - DNA, 25 bp, Saccharomyces pastorianus
aatcttcctcattgtggctcttagg

SEQ ID NO: 98591 - DNA, 25 bp, Saccharomyces pastorianus
tttacaccatttgtcgttgcctcaa

SEQ ID NO: 98592 - DNA, 25 bp, Saccharomyces pastorianus
ggcgttgtgtcccaagaccaactaa

SEQ ID NO: 98593 - DNA, 25 bp, Saccharomyces pastorianus
ggccggaagcccactattgatttaa

SEQ ID NO: 98594 - DNA, 25 bp, Saccharomyces pastorianus
ggaaacgagaacctacgactgctgt

SEQ ID NO: 98595 - DNA, 25 bp, Saccharomyces pastorianus
ggcaggtgccagacatatatgacat

SEQ ID NO: 98596 - DNA, 25 bp, Saccharomyces pastorianus
gtatggcctttcgtttttgagcaca

SEQ ID NO: 98597 - DNA, 25 bp, Saccharomyces pastorianus
gataggattatcacccagtaccatg

SEQ ID NO: 98598 - DNA, 25 bp, Saccharomyces pastorianus
atcacccagtaccatgctagttgta

SEQ ID NO: 98599 - DNA, 25 bp, Saccharomyces pastorianus
aatagtttctctgtgtttcttacca

SEQ ID NO: 98600 - DNA, 25 bp, Saccharomyces pastorianus
atattcctggtgaggcaaactcctt

SEQ ID NO: 98601 - DNA, 25 bp, Saccharomyces pastorianus
gcggaatttagcacgtacgctttca

SEQ ID NO: 98602 - DNA, 25 bp, Saccharomyces pastorianus
gctagttgtagccacgtcacataaa

SEQ ID NO: 98603 - DNA, 25 bp, Saccharomyces pastorianus
cgtacgctttcaacattcgagacgt

SEQ ID NO: 98604 - DNA, 25 bp, Saccharomyces pastorianus
ggcaaactccttgcacgacaggata

SEQ ID NO: 98605 - DNA, 25 bp, Saccharomyces pastorianus
gatttctcattaccaattctcggca

SEQ ID NO: 98606 - DNA, 25 bp, Saccharomyces pastorianus
tggtcgctggaacgtctactaagtc

SEQ ID NO: 98607 - DNA, 25 bp, Saccharomyces pastorianus
ctggtgattccaggcttttaaatat

SEQ ID NO: 98608 - DNA, 25 bp, Saccharomyces pastorianus
ttctgacgaatcaacaacgcggtat

SEQ ID NO: 98609 - DNA, 25 bp, Saccharomyces pastorianus
taatggttttcaacgacgatacaaa

SEQ ID NO: 98610 - DNA, 25 bp, Saccharomyces pastorianus
cagactgaaaatgtagcccaagcta

SEQ ID NO: 98611 - DNA, 25 bp, Saccharomyces pastorianus
ccctcagacaattcccattcaaata

SEQ ID NO: 98612 - DNA, 25 bp, Saccharomyces pastorianus
attgggcacacaattggcaaccctg

SEQ ID NO: 98613 - DNA, 25 bp, Saccharomyces pastorianus
ccaaactttactacagcggagcgaa

SEQ ID NO: 98614 - DNA, 25 bp, Saccharomyces pastorianus
gacagcatgtccaaaggcaccggtg

SEQ ID NO: 98615 - DNA, 25 bp, Saccharomyces pastorianus
gcggagcgaagatcctgcaggttta

SEQ ID NO: 98616 - DNA, 25 bp, Saccharomyces pastorianus
atgtggtcgcaattccaaactttac

SEQ ID NO: 98617 - DNA, 25 bp, Saccharomyces pastorianus
tagaggactgccattgggtattgca

SEQ ID NO: 98618 - DNA, 25 bp, Saccharomyces pastorianus
ggacactgcgtccagaattttgaag

SEQ ID NO: 98619 - DNA, 25 bp, Saccharomyces pastorianus
agatgagatttacggctctctgcgt

SEQ ID NO: 98620 - DNA, 25 bp, Saccharomyces pastorianus
aagaaatttgctctggcctgattga

SEQ ID NO: 98621 - DNA, 25 bp, Saccharomyces pastorianus
ctctctgcgtaaccattcacaattg

SEQ ID NO: 98622 - DNA, 25 bp, Saccharomyces pastorianus
tgacagaagcgctctcacttggaaa

SEQ ID NO: 98623 - DNA, 25 bp, Saccharomyces pastorianus
acgacgactatctgactttttccaa

SEQ ID NO: 98624 - DNA, 25 bp, Saccharomyces pastorianus
gcatcacgtcgaatattggagtctt

SEQ ID NO: 98625 - DNA, 25 bp, Saccharomyces pastorianus
aaatctctccatgaaatgtgcggta

SEQ ID NO: 98626 - DNA, 25 bp, Saccharomyces pastorianus
ggagtcttgtgctgattccaattca

SEQ ID NO: 98627 - DNA, 25 bp, Saccharomyces pastorianus
ttcctctcgattcccttattagaga

SEQ ID NO: 98628 - DNA, 25 bp, Saccharomyces pastorianus
aatgactatcaagaccttctgcaag

SEQ ID NO: 98629 - DNA, 25 bp, Saccharomyces pastorianus
attcaccatatattcatcatctgcg

SEQ ID NO: 98630 - DNA, 25 bp, Saccharomyces pastorianus
agggcggctgggtaactcacaatta

SEQ ID NO: 98631 - DNA, 25 bp, Saccharomyces pastorianus
aataatctgctttgtgctcggctac

SEQ ID NO: 98632 - DNA, 25 bp, Saccharomyces pastorianus
gctcaggctgtataaccctttacgg

SEQ ID NO: 98633 - DNA, 25 bp, Saccharomyces pastorianus
gatgccatggacattctagctgagc

SEQ ID NO: 98634 - DNA, 25 bp, Saccharomyces pastorianus
atcaccgggtgaacaacgctcattt

SEQ ID NO: 98635 - DNA, 25 bp, Saccharomyces pastorianus
gactgattttcaatgccctttttgg

SEQ ID NO: 98636 - DNA, 25 bp, Saccharomyces pastorianus
tacattgccgcatccattgggtaca

SEQ ID NO: 98637 - DNA, 25 bp, Saccharomyces pastorianus
tcatttggccgctgaacgtagcagt

SEQ ID NO: 98638 - DNA, 25 bp, Saccharomyces pastorianus
gtagcggtactaatagttcctcgga

SEQ ID NO: 98639 - DNA, 25 bp, Saccharomyces pastorianus
gacgaagattcacaacgctctgatg

SEQ ID NO: 98640 - DNA, 25 bp, Saccharomyces pastorianus
gggtacactgctgctgtaactgcaa

SEQ ID NO: 98641 - DNA, 25 bp, Saccharomyces pastorianus
atgctcccttttgtgcttcagaggt

SEQ ID NO: 98642 - DNA, 25 bp, Saccharomyces pastorianus
gtcaagacacaagtacaagttatgg

SEQ ID NO: 98643 - DNA, 25 bp, Saccharomyces pastorianus
ttgtgcttcagaggttcttgatcaa

SEQ ID NO: 98644 - DNA, 25 bp, Saccharomyces pastorianus
atggatgtgcatcgcaaagggaaaa

SEQ ID NO: 98645 - DNA, 25 bp, Saccharomyces pastorianus
tcccttttgtgcttcagaggttctt

SEQ ID NO: 98646 - DNA, 25 bp, Saccharomyces pastorianus
atacgtttgtccctaagtgctctta

SEQ ID NO: 98647 - DNA, 25 bp, Saccharomyces pastorianus
gtttgtccctaagtgctcttatgct

SEQ ID NO: 98648 - DNA, 25 bp, Saccharomyces pastorianus
taagtgctcttatgctcccttttgt

SEQ ID NO: 98649 - DNA, 25 bp, Saccharomyces pastorianus
gtacaagttatggatgtgcatcgca

SEQ ID NO: 98650 - DNA, 25 bp, Saccharomyces pastorianus
gaaatacgtttgtccctaagtgctc

SEQ ID NO: 98651 - DNA, 25 bp, Saccharomyces pastorianus
ttatgctcccttttgtgcttcagag

SEQ ID NO: 98652 - DNA, 25 bp, Saccharomyces pastorianus
tatctcttcctatcaatcaaccaat

SEQ ID NO: 98653 - DNA, 25 bp, Saccharomyces pastorianus
tgaaggcactgtatggagtttccaa

SEQ ID NO: 98654 - DNA, 25 bp, Saccharomyces pastorianus
cattagacgattttgttaccccact

SEQ ID NO: 98655 - DNA, 25 bp, Saccharomyces pastorianus
atccaaagcgtacatgatgccgtta

SEQ ID NO: 98656 - DNA, 25 bp, Saccharomyces pastorianus
gcggaattgccattgggatgctcca

SEQ ID NO: 98657 - DNA, 25 bp, Saccharomyces pastorianus
gcaagtccagtgtcttttacgctaa

SEQ ID NO: 98658 - DNA, 25 bp, Saccharomyces pastorianus
ggccgtatagtggacgcattattta

SEQ ID NO: 98659 - DNA, 25 bp, Saccharomyces pastorianus
atagcactgcttcgcaatgccaagg

SEQ ID NO: 98660 - DNA, 25 bp, Saccharomyces pastorianus
gagttggacattttatcctcaaccg

SEQ ID NO: 98661 - DNA, 25 bp, Saccharomyces pastorianus
gatggacatcttacatttgcagact

SEQ ID NO: 98662 - DNA, 25 bp, Saccharomyces pastorianus
gtattggatcttatagcactgcttc

SEQ ID NO: 98663 - DNA, 25 bp, Saccharomyces pastorianus
ttggacccgacattacagatagatt

SEQ ID NO: 98664 - DNA, 25 bp, Saccharomyces pastorianus
aaccacctagagatggcgcctttat

SEQ ID NO: 98665 - DNA, 25 bp, Saccharomyces pastorianus
ttaggacatgcttttggacccgaca

SEQ ID NO: 98666 - DNA, 25 bp, Saccharomyces pastorianus
gatggcgcctttatggaacttctat

SEQ ID NO: 98667 - DNA, 25 bp, Saccharomyces pastorianus
accaggccatggtattttacaggct

SEQ ID NO: 98668 - DNA, 25 bp, Saccharomyces pastorianus
gtgttattcatgttgtaccaggcca

SEQ ID NO: 98669 - DNA, 25 bp, Saccharomyces pastorianus
atggaacttctatgggcggacccac

SEQ ID NO: 98670 - DNA, 25 bp, Saccharomyces pastorianus
gatgggtccttctcagcgtggttta

SEQ ID NO: 98671 - DNA, 25 bp, Saccharomyces pastorianus
acaggctggcaggaatgacgaccaa

SEQ ID NO: 98672 - DNA, 25 bp, Saccharomyces pastorianus
gagagccttccattggttaccttaa

SEQ ID NO: 98673 - DNA, 25 bp, Saccharomyces pastorianus
attgatagatttgcccaaccaccta

SEQ ID NO: 98674 - DNA, 25 bp, Saccharomyces pastorianus
gaagtttgatgcttggtttcctcaa

SEQ ID NO: 98675 - DNA, 25 bp, Saccharomyces pastorianus
gctcgtgttcccttcttagacaaag

SEQ ID NO: 98676 - DNA, 25 bp, Saccharomyces pastorianus
gctactcatggattgacggcctaag

SEQ ID NO: 98677 - DNA, 25 bp, Saccharomyces pastorianus
gaaagggtcatttctgacgccatgt

SEQ ID NO: 98678 - DNA, 25 bp, Saccharomyces pastorianus
gatgttaagccatacctacctgaag

SEQ ID NO: 98679 - DNA, 25 bp, Saccharomyces pastorianus
aagactgcggcagacactgtcatga

SEQ ID NO: 98680 - DNA, 25 bp, Saccharomyces pastorianus
tctgctgcagaatttcacaccgaat

SEQ ID NO: 98681 - DNA, 25 bp, Saccharomyces pastorianus
tgacggcctaagagacactgctgaa

SEQ ID NO: 98682 - DNA, 25 bp, Saccharomyces pastorianus
tctttctggtgaaggctcggacgaa

SEQ ID NO: 98683 - DNA, 25 bp, Saccharomyces pastorianus
gacgccatgtttgccaatccaaagg

SEQ ID NO: 98684 - DNA, 25 bp, Saccharomyces pastorianus
ggcgacgatgttccaaccaccaaag

SEQ ID NO: 98685 - DNA, 25 bp, Saccharomyces pastorianus
tgaagctccagaacagcctctttta

SEQ ID NO: 98686 - DNA, 25 bp, Saccharomyces pastorianus
aaactcagctcacgatgctgcattt

SEQ ID NO: 98687 - DNA, 25 bp, Saccharomyces pastorianus
gtagatgatcaacaccgtcattcag

SEQ ID NO: 98688 - DNA, 25 bp, Saccharomyces pastorianus
tattaccgccccagtaacaaactca

SEQ ID NO: 98689 - DNA, 25 bp, Saccharomyces pastorianus
aagaaagctcttccggatattaccg

SEQ ID NO: 98690 - DNA, 25 bp, Saccharomyces pastorianus
aagagggaggactctcgcgtatcct

SEQ ID NO: 98691 - DNA, 25 bp, Saccharomyces pastorianus
ggttactacaaattctcaaggttct

SEQ ID NO: 98692 - DNA, 25 bp, Saccharomyces pastorianus
accgtcattcagatgtgcattctca

SEQ ID NO: 98693 - DNA, 25 bp, Saccharomyces pastorianus
tatgcattcgacacgatccaaggtt

SEQ ID NO: 98694 - DNA, 25 bp, Saccharomyces pastorianus
actctcgcgtatcctcaactaaaaa

SEQ ID NO: 98695 - DNA, 25 bp, Saccharomyces pastorianus
gatggttacccacaatgctttagag

SEQ ID NO: 98696 - DNA, 25 bp, Saccharomyces pastorianus
tgattactacggaactcgctctcaa

SEQ ID NO: 98697 - DNA, 25 bp, Saccharomyces pastorianus
gaataccatatacgtaccaccttta

SEQ ID NO: 98698 - DNA, 25 bp, Saccharomyces pastorianus
tatgacagctccagtataccagggc

SEQ ID NO: 98699 - DNA, 25 bp, Saccharomyces pastorianus
gatgtgttgagttctacctgtagga

SEQ ID NO: 98700 - DNA, 25 bp, Saccharomyces pastorianus
cgtgcgcaagtattcggtaacctca

SEQ ID NO: 98701 - DNA, 25 bp, Saccharomyces pastorianus
ttcccttccaagcactatttcaaac

SEQ ID NO: 98702 - DNA, 25 bp, Saccharomyces pastorianus
aagttgctttcaactcgcctcgaag

SEQ ID NO: 98703 - DNA, 25 bp, Saccharomyces pastorianus
gatcttgattcttacatggttgttt

SEQ ID NO: 98704 - DNA, 25 bp, Saccharomyces pastorianus
agaaagggtcctttatagctcagat

SEQ ID NO: 98705 - DNA, 25 bp, Saccharomyces pastorianus
ttcaaacccagatgtcttgcagatg

SEQ ID NO: 98706 - DNA, 25 bp, Saccharomyces pastorianus
ggtgcctcaattcctgatggtgatt

SEQ ID NO: 98707 - DNA, 25 bp, Saccharomyces pastorianus
agcacgcagctatttcaactcttgt

SEQ ID NO: 98708 - DNA, 25 bp, Saccharomyces pastorianus
gcaggatttcaccagagactctatt

SEQ ID NO: 98709 - DNA, 25 bp, Saccharomyces pastorianus
gaacttctcagaagcgagccttacc

SEQ ID NO: 98710 - DNA, 25 bp, Saccharomyces pastorianus
acccattgtttccattgtgtcgtac

SEQ ID NO: 98711 - DNA, 25 bp, Saccharomyces pastorianus
ttgtcccttgtgctagattctatcg

SEQ ID NO: 98712 - DNA, 25 bp, Saccharomyces pastorianus
aagacagctcaccagaatgcttcaa

SEQ ID NO: 98713 - DNA, 25 bp, Saccharomyces pastorianus
ttgtgtcgtacacgcaacttgctat

SEQ ID NO: 98714 - DNA, 25 bp, Saccharomyces pastorianus
gtttgctagctcaacctctgataac

SEQ ID NO: 98715 - DNA, 25 bp, Saccharomyces pastorianus
gcaacttgctatccttactaagaga

SEQ ID NO: 98716 - DNA, 25 bp, Saccharomyces pastorianus
cgaaaggttttcagcatgggtttgc

SEQ ID NO: 98717 - DNA, 25 bp, Saccharomyces pastorianus
aacgtttttattgacacacccattg

SEQ ID NO: 98718 - DNA, 25 bp, Saccharomyces pastorianus
gcatcctcaagggaagactgggcaa

SEQ ID NO: 98719 - DNA, 25 bp, Saccharomyces pastorianus
tgcgtgggaacgtaggcatcctcaa

SEQ ID NO: 98720 - DNA, 25 bp, Saccharomyces pastorianus
gcagatgacgacaagctagttaata

SEQ ID NO: 98721 - DNA, 25 bp, Saccharomyces pastorianus
gagcaaacaggatagttccgccgat

SEQ ID NO: 98722 - DNA, 25 bp, Saccharomyces pastorianus
gaaagcatttcattacacagtccaa

SEQ ID NO: 98723 - DNA, 25 bp, Saccharomyces pastorianus
ggaatttcctatgatcaacttgcaa

SEQ ID NO: 98724 - DNA, 25 bp, Saccharomyces pastorianus
ggaatctcgctacgcaaacacagaa

SEQ ID NO: 98725 - DNA, 25 bp, Saccharomyces pastorianus
gccgtttctttgcaatctgagtcga

SEQ ID NO: 98726 - DNA, 25 bp, Saccharomyces pastorianus
tgagaagaccttgcggaatctcgct

SEQ ID NO: 98727 - DNA, 25 bp, Saccharomyces pastorianus
aatcggcaaggtacagaaggacact

SEQ ID NO: 98728 - DNA, 25 bp, Saccharomyces pastorianus
ataagttggccgtttctttgcaatc

SEQ ID NO: 98729 - DNA, 25 bp, Saccharomyces pastorianus
cgcggtttatggtctggttacggat

SEQ ID NO: 98730 - DNA, 25 bp, Saccharomyces pastorianus
atgtcatcaatctcaggctgctgtt

SEQ ID NO: 98731 - DNA, 25 bp, Saccharomyces pastorianus
atcagcggcctgataggtacacaga

SEQ ID NO: 98732 - DNA, 25 bp, Saccharomyces pastorianus
ccaccgctttggctgtaggtataag

SEQ ID NO: 98733 - DNA, 25 bp, Saccharomyces pastorianus
atatccataggtctaatcagcggcc

SEQ ID NO: 98734 - DNA, 25 bp, Saccharomyces pastorianus
ggatttggctctaataccggattca

SEQ ID NO: 98735 - DNA, 25 bp, Saccharomyces pastorianus
cttttgtatgtttgccgcggtttat

SEQ ID NO: 98736 - DNA, 25 bp, Saccharomyces pastorianus
tatttacgtttgtagcagccaccgc

SEQ ID NO: 98737 - DNA, 25 bp, Saccharomyces pastorianus
tttcctgttttctattcctcatcaa

SEQ ID NO: 98738 - DNA, 25 bp, Saccharomyces pastorianus
ggtttttggctaatttctggacatc

SEQ ID NO: 98739 - DNA, 25 bp, Saccharomyces pastorianus
ggacatcattaacatacccagcaat

SEQ ID NO: 98740 - DNA, 25 bp, Saccharomyces pastorianus
agaccagaggtcttacagctacccg

SEQ ID NO: 98741 - DNA, 25 bp, Saccharomyces pastorianus
gagtgttaccatctatcggcaatga

SEQ ID NO: 98742 - DNA, 25 bp, Saccharomyces pastorianus
aagagctttctacgagggccaacga

SEQ ID NO: 98743 - DNA, 25 bp, Saccharomyces pastorianus
acagctacccgcaatataccaaaat

SEQ ID NO: 98744 - DNA, 25 bp, Saccharomyces pastorianus
ggaagatgtctctatcactcatatg

SEQ ID NO: 98745 - DNA, 25 bp, Saccharomyces pastorianus
caagtcaacattctggtggtggtaa

SEQ ID NO: 98746 - DNA, 25 bp, Saccharomyces pastorianus
gaaagagccaaattccttgtcgaaa

SEQ ID NO: 98747 - DNA, 25 bp, Saccharomyces pastorianus
gcttctaaggacatcgctcaaacat

SEQ ID NO: 98748 - DNA, 25 bp, Saccharomyces pastorianus
taacagcgagtcttcgggatcacca

SEQ ID NO: 98749 - DNA, 25 bp, Saccharomyces pastorianus
gtttggtcccgaattcacgaaagca

SEQ ID NO: 98750 - DNA, 25 bp, Saccharomyces pastorianus
gcaaactcatctaacgttgtctatt

SEQ ID NO: 98751 - DNA, 25 bp, Saccharomyces pastorianus
agttttatcgctgattactccttcg

SEQ ID NO: 98752 - DNA, 25 bp, Saccharomyces pastorianus
atagttcccctattaacacgttgcg

SEQ ID NO: 98753 - DNA, 25 bp, Saccharomyces pastorianus
taagatcaagacaaggctcgccatg

SEQ ID NO: 98754 - DNA, 25 bp, Saccharomyces pastorianus
gtttccctcaaagcctgcaaacaaa

SEQ ID NO: 98755 - DNA, 25 bp, Saccharomyces pastorianus
agaaaatctccttgtactcccttgg

SEQ ID NO: 98756 - DNA, 25 bp, Saccharomyces pastorianus
aagattttgccattgcccaaagccg

SEQ ID NO: 98757 - DNA, 25 bp, Saccharomyces pastorianus
ggatagtgccgatactatgcagcat

SEQ ID NO: 98758 - DNA, 25 bp, Saccharomyces pastorianus
taagcctatcccacttcatgaatat

SEQ ID NO: 98759 - DNA, 25 bp, Saccharomyces pastorianus
gacatggattggcatccttcctgaa

SEQ ID NO: 98760 - DNA, 25 bp, Saccharomyces pastorianus
aacgctaagccagcttctgaactga

SEQ ID NO: 98761 - DNA, 25 bp, Saccharomyces pastorianus
attactccttcgacacccaggtgaa

SEQ ID NO: 98762 - DNA, 25 bp, Saccharomyces pastorianus
tacggctagaattcacgctcaaaat

SEQ ID NO: 98763 - DNA, 25 bp, Saccharomyces pastorianus
accatttggtgtgtccttcatctac

SEQ ID NO: 98764 - DNA, 25 bp, Saccharomyces pastorianus
tcatctacgccggttatgacgatag

SEQ ID NO: 98765 - DNA, 25 bp, Saccharomyces pastorianus
attgtatacatctaatccatcggga

SEQ ID NO: 98766 - DNA, 25 bp, Saccharomyces pastorianus
tagaacaagacacctctaccgaaaa

SEQ ID NO: 98767 - DNA, 25 bp, Saccharomyces pastorianus
gttgctggactgactgcagatgcag

SEQ ID NO: 98768 - DNA, 25 bp, Saccharomyces pastorianus
aaactatacagggtggaaggccatt

SEQ ID NO: 98769 - DNA, 25 bp, Saccharomyces pastorianus
gacaggttggaatttgctactatca

SEQ ID NO: 98770 - DNA, 25 bp, Saccharomyces pastorianus
aggccattagtgttggcgctaacac

SEQ ID NO: 98771 - DNA, 25 bp, Saccharomyces pastorianus
gtagcgcgctgacttatgacaggtt

SEQ ID NO: 98772 - DNA, 25 bp, Saccharomyces pastorianus
aaaattgcggttgccgttgctggac

SEQ ID NO: 98773 - DNA, 25 bp, Saccharomyces pastorianus
gaaccagccgcatcacagtatcctt

SEQ ID NO: 98774 - DNA, 25 bp, Saccharomyces pastorianus
gcaggtttcagcaccttatgcacct

SEQ ID NO: 98775 - DNA, 25 bp, Saccharomyces pastorianus
gagatcagcctcacctaaatctgcg

SEQ ID NO: 98776 - DNA, 25 bp, Saccharomyces pastorianus
tcacctaaatctgcggaagctgctt

SEQ ID NO: 98777 - DNA, 25 bp, Saccharomyces pastorianus
gatcgccccaaaatgcagatacaga

SEQ ID NO: 98778 - DNA, 25 bp, Saccharomyces pastorianus
agtgttccacctccatcatacgaac

SEQ ID NO: 98779 - DNA, 25 bp, Saccharomyces pastorianus
gactgtttctcgtcccagtgttcca

SEQ ID NO: 98780 - DNA, 25 bp, Saccharomyces pastorianus
gaagctgcttcaagctcgactgttt

SEQ ID NO: 98781 - DNA, 25 bp, Saccharomyces pastorianus
ggatggaaaccaaagatcgccccaa

SEQ ID NO: 98782 - DNA, 25 bp, Saccharomyces pastorianus
gtatccttcacagcaggtttcagca

SEQ ID NO: 98783 - DNA, 25 bp, Saccharomyces pastorianus
gaaacctgctttcacgagatcagcc

SEQ ID NO: 98784 - DNA, 25 bp, Saccharomyces pastorianus
ttacccaatgattttcgtagcttga

SEQ ID NO: 98785 - DNA, 25 bp, Saccharomyces pastorianus
gtattctgtcacgaaatatttgttt

SEQ ID NO: 98786 - DNA, 25 bp, Saccharomyces pastorianus
gcattttttagtattctgtcacgaa

SEQ ID NO: 98787 - DNA, 25 bp, Saccharomyces pastorianus
gtcaacagcattttttagtattctg

SEQ ID NO: 98788 - DNA, 25 bp, Saccharomyces pastorianus
gattttcgtagcttgaaagagagaa

SEQ ID NO: 98789 - DNA, 25 bp, Saccharomyces pastorianus
gaacttacccaatgattttcgtagc

SEQ ID NO: 98790 - DNA, 25 bp, Saccharomyces pastorianus
ctgtcacgaaatatttgtttcagtg

SEQ ID NO: 98791 - DNA, 25 bp, Saccharomyces pastorianus
acccaatgattttcgtagcttgaaa

SEQ ID NO: 98792 - DNA, 25 bp, Saccharomyces pastorianus
gtgatttgaacttacccaatgattt

SEQ ID NO: 98793 - DNA, 25 bp, Saccharomyces pastorianus
tcagtgatttgaacttacccaatga

SEQ ID NO: 98794 - DNA, 25 bp, Saccharomyces pastorianus
gtttcagtgatttgaacttacccaa

SEQ ID NO: 98795 - DNA, 25 bp, Saccharomyces pastorianus
catatcctccacctttcactaatta

SEQ ID NO: 98796 - DNA, 25 bp, Saccharomyces pastorianus
atcaacagcctcagcaacagtacgc

SEQ ID NO: 98797 - DNA, 25 bp, Saccharomyces pastorianus
gccttcaagagttttggtagcaaat

SEQ ID NO: 98798 - DNA, 25 bp, Saccharomyces pastorianus
ttatatgcaagctccgcctccacag

SEQ ID NO: 98799 - DNA, 25 bp, Saccharomyces pastorianus
aacagcaggcgcctttaccatatcc

SEQ ID NO: 98800 - DNA, 25 bp, Saccharomyces pastorianus
tggttctgctattggtagtgatatt

SEQ ID NO: 98801 - DNA, 25 bp, Saccharomyces pastorianus
gcaagcaccggtggaagcacaacca

SEQ ID NO: 98802 - DNA, 25 bp, Saccharomyces pastorianus
aattactatcaacagcctcagcaac

SEQ ID NO: 98803 - DNA, 25 bp, Saccharomyces pastorianus
acctccagccggttatatgcaagct

SEQ ID NO: 98804 - DNA, 25 bp, Saccharomyces pastorianus
ctccacctttcactaattactatca

SEQ ID NO: 98805 - DNA, 25 bp, Saccharomyces pastorianus
ggtagtgatattgtcaacagcattt

SEQ ID NO: 98806 - DNA, 25 bp, Saccharomyces pastorianus
ttcgcgcttggcaaagttcctaagg

SEQ ID NO: 98807 - DNA, 25 bp, Saccharomyces pastorianus
ttgaatggttcaccccaaacgctaa

SEQ ID NO: 98808 - DNA, 25 bp, Saccharomyces pastorianus
gagtctcgacagatacaaagcagtt

SEQ ID NO: 98809 - DNA, 25 bp, Saccharomyces pastorianus
agcaaaaacttggttcacacacggg

SEQ ID NO: 98810 - DNA, 25 bp, Saccharomyces pastorianus
atcgccgtctcctgagcaagatcaa

SEQ ID NO: 98811 - DNA, 25 bp, Saccharomyces pastorianus
tcaggtaacaagtcgtggagagcta

SEQ ID NO: 98812 - DNA, 25 bp, Saccharomyces pastorianus
gaccagtggtaagtacgcagagact

SEQ ID NO: 98813 - DNA, 25 bp, Saccharomyces pastorianus
gtacgccaaccaatgcgtgcattca

SEQ ID NO: 98814 - DNA, 25 bp, Saccharomyces pastorianus
tcaagccatgtcaactactgcatcg

SEQ ID NO: 98815 - DNA, 25 bp, Saccharomyces pastorianus
gaaggttcattttcgcgcttggcaa

SEQ ID NO: 98816 - DNA, 25 bp, Saccharomyces pastorianus
gaggccacaactatacatgacggaa

SEQ ID NO: 98817 - DNA, 25 bp, Saccharomyces pastorianus
aaagtggctgcgtagcatactccgt

SEQ ID NO: 98818 - DNA, 25 bp, Saccharomyces pastorianus
agaatggctatcgttcaaaggcgct

SEQ ID NO: 98819 - DNA, 25 bp, Saccharomyces pastorianus
caattaagacctagggatcccagac

SEQ ID NO: 98820 - DNA, 25 bp, Saccharomyces pastorianus
aaaaatgacaccatgcggcgctgaa

SEQ ID NO: 98821 - DNA, 25 bp, Saccharomyces pastorianus
gtgactttactgatagagggccatt

SEQ ID NO: 98822 - DNA, 25 bp, Saccharomyces pastorianus
ggctgcccggcaagaagatatataa

SEQ ID NO: 98823 - DNA, 25 bp, Saccharomyces pastorianus
gacaattgtggtatcttgctgtaca

SEQ ID NO: 98824 - DNA, 25 bp, Saccharomyces pastorianus
agtcggtcaacatgcgcacgatgtt

SEQ ID NO: 98825 - DNA, 25 bp, Saccharomyces pastorianus
gcacattatgcatcagtcggtcaac

SEQ ID NO: 98826 - DNA, 25 bp, Saccharomyces pastorianus
ctattatgcctatacagtgactgtg

SEQ ID NO: 98827 - DNA, 25 bp, Saccharomyces pastorianus
agcatactccgttttttgacgtgga

SEQ ID NO: 98828 - DNA, 25 bp, Saccharomyces pastorianus
aatcattgcctatctctgagattga

SEQ ID NO: 98829 - DNA, 25 bp, Saccharomyces pastorianus
aataatagcaattctggttcagcag

SEQ ID NO: 98830 - DNA, 25 bp, Saccharomyces pastorianus
atttccgaaggtggcatcaacgaac

SEQ ID NO: 98831 - DNA, 25 bp, Saccharomyces pastorianus
atctctgagattgaggccagcaata

SEQ ID NO: 98832 - DNA, 25 bp, Saccharomyces pastorianus
gcaaaaaaccaagaggtcccagcaa

SEQ ID NO: 98833 - DNA, 25 bp, Saccharomyces pastorianus
aacatgtctgaatctttgaaggagg

SEQ ID NO: 98834 - DNA, 25 bp, Saccharomyces pastorianus
ctttggatttctctgtgtctggtaa

SEQ ID NO: 98835 - DNA, 25 bp, Saccharomyces pastorianus
gtgattctgatacgactttggattt

SEQ ID NO: 98836 - DNA, 25 bp, Saccharomyces pastorianus
gacgagtctcacgatgatgttaaca

SEQ ID NO: 98837 - DNA, 25 bp, Saccharomyces pastorianus
atacaacgagttcctaagcagatct

SEQ ID NO: 98838 - DNA, 25 bp, Saccharomyces pastorianus
aaacacgcttcacccgtattagaag

SEQ ID NO: 98839 - DNA, 25 bp, Saccharomyces pastorianus
atgccgctttgttcatctctactgt

SEQ ID NO: 98840 - DNA, 25 bp, Saccharomyces pastorianus
gtgcatacgccggtgttgacaacat

SEQ ID NO: 98841 - DNA, 25 bp, Saccharomyces pastorianus
acgatgtcgttattcactctggtgc

SEQ ID NO: 98842 - DNA, 25 bp, Saccharomyces pastorianus
ctgcgccaagagaatcgtcgacatt

SEQ ID NO: 98843 - DNA, 25 bp, Saccharomyces pastorianus
tgatggtccatttggtgctttctgc

SEQ ID NO: 98844 - DNA, 25 bp, Saccharomyces pastorianus
tatgttgtcgttaagcatgccgctt

SEQ ID NO: 98845 - DNA, 25 bp, Saccharomyces pastorianus
gttaaactgttcaatgctacctgtg

SEQ ID NO: 98846 - DNA, 25 bp, Saccharomyces pastorianus
tgttgtcaccaactggacgttagtt

SEQ ID NO: 98847 - DNA, 25 bp, Saccharomyces pastorianus
tgtcattttatccactaccggtcat

SEQ ID NO: 98848 - DNA, 25 bp, Saccharomyces pastorianus
ggacgttagttacccaagctcacgg

SEQ ID NO: 98849 - DNA, 25 bp, Saccharomyces pastorianus
ccaagctcacggtactcaatgttgc

SEQ ID NO: 98850 - DNA, 25 bp, Saccharomyces pastorianus
gagtgtaatttaacgtgtgctttct

SEQ ID NO: 98851 - DNA, 25 bp, Saccharomyces pastorianus
tcctccctgagtgtaatttaacgtg

SEQ ID NO: 98852 - DNA, 25 bp, Saccharomyces pastorianus
gctttcttattgcattcgtttacat

SEQ ID NO: 98853 - DNA, 25 bp, Saccharomyces pastorianus
gtgtgctttcttattgcattcgttt

SEQ ID NO: 98854 - DNA, 25 bp, Saccharomyces pastorianus
tcattgcccttctttcagttgggca

SEQ ID NO: 98855 - DNA, 25 bp, Saccharomyces pastorianus
gcccttctttcagttgggcattttt

SEQ ID NO: 98856 - DNA, 25 bp, Saccharomyces pastorianus
aacgtgtgctttcttattgcattcg

SEQ ID NO: 98857 - DNA, 25 bp, Saccharomyces pastorianus
aatttaacgtgtgctttcttattgc

SEQ ID NO: 98858 - DNA, 25 bp, Saccharomyces pastorianus
gttcctccctgagtgtaatttaacg

SEQ ID NO: 98859 - DNA, 25 bp, Saccharomyces pastorianus
ccctgagtgtaatttaacgtgtgct

SEQ ID NO: 98860 - DNA, 25 bp, Saccharomyces pastorianus
attgcccttctttcagttgggcatt

SEQ ID NO: 98861 - DNA, 25 bp, Saccharomyces pastorianus
gagtgtaatttaacgtgtgctttct

SEQ ID NO: 98862 - DNA, 25 bp, Saccharomyces pastorianus
gctttcttattgcattcgtttacat

SEQ ID NO: 98863 - DNA, 25 bp, Saccharomyces pastorianus
gtgtgctttcttattgcattcgttt

SEQ ID NO: 98864 - DNA, 25 bp, Saccharomyces pastorianus
tcattgcccttctttcagttgggca

SEQ ID NO: 98865 - DNA, 25 bp, Saccharomyces pastorianus
gcccttctttcagttgggcattttt

SEQ ID NO: 98866 - DNA, 25 bp, Saccharomyces pastorianus
cctccctgagtgtaatttaacgtgt

SEQ ID NO: 98867 - DNA, 25 bp, Saccharomyces pastorianus
gtttacattccctattgctcattgc

SEQ ID NO: 98868 - DNA, 25 bp, Saccharomyces pastorianus
aacgtgtgctttcttattgcattcg

SEQ ID NO: 98869 - DNA, 25 bp, Saccharomyces pastorianus
aatttaacgtgtgctttcttattgc

SEQ ID NO: 98870 - DNA, 25 bp, Saccharomyces pastorianus
gttcctccctgagtgtaatttaacg

SEQ ID NO: 98871 - DNA, 25 bp, Saccharomyces pastorianus
attgcccttctttcagttgggcatt

SEQ ID NO: 98872 - DNA, 25 bp, Saccharomyces pastorianus
atccttcgtcaagcttctgcagagg

SEQ ID NO: 98873 - DNA, 25 bp, Saccharomyces pastorianus
aaacaggctcatcgcgaagcagtgc

SEQ ID NO: 98874 - DNA, 25 bp, Saccharomyces pastorianus
tgatcatcgttagagtacccctgac

SEQ ID NO: 98875 - DNA, 25 bp, Saccharomyces pastorianus
tatgttttctgggagtccactcact

SEQ ID NO: 98876 - DNA, 25 bp, Saccharomyces pastorianus
tgttggccgaattgctaattgcgta

SEQ ID NO: 98877 - DNA, 25 bp, Saccharomyces pastorianus
gaaggacagcacgttgttggccgaa

SEQ ID NO: 98878 - DNA, 25 bp, Saccharomyces pastorianus
agggcacagcgctcgacattacaaa

SEQ ID NO: 98879 - DNA, 25 bp, Saccharomyces pastorianus
agtatggttattctgcactgatcgt

SEQ ID NO: 98880 - DNA, 25 bp, Saccharomyces pastorianus
atcgtatatatcctcttaacttgtg

SEQ ID NO: 98881 - DNA, 25 bp, Saccharomyces pastorianus
ttctgcagaggtttggcatcgactt

SEQ ID NO: 98882 - DNA, 25 bp, Saccharomyces pastorianus
ggtattccaaacgatggcctctggt

SEQ ID NO: 98883 - DNA, 25 bp, Saccharomyces pastorianus
acaaaaagtcacacgcaaaggccct

SEQ ID NO: 98884 - DNA, 25 bp, Saccharomyces pastorianus
gaagctatctcagtatccaaacctg

SEQ ID NO: 98885 - DNA, 25 bp, Saccharomyces pastorianus
gagaccacggaggacctcaacttaa

SEQ ID NO: 98886 - DNA, 25 bp, Saccharomyces pastorianus
gtcccatacgcgtgaccaaaattca

SEQ ID NO: 98887 - DNA, 25 bp, Saccharomyces pastorianus
taggacgactgtaccgtttctgaaa

SEQ ID NO: 98888 - DNA, 25 bp, Saccharomyces pastorianus
gtattcggacgcaatagctatcata

SEQ ID NO: 98889 - DNA, 25 bp, Saccharomyces pastorianus
aattcttgcgaaggttgacgttctt

SEQ ID NO: 98890 - DNA, 25 bp, Saccharomyces pastorianus
gttcttcactttccaacaacacgaa

SEQ ID NO: 98891 - DNA, 25 bp, Saccharomyces pastorianus
ataccgtaatattccttcgtcccat

SEQ ID NO: 98892 - DNA, 25 bp, Saccharomyces pastorianus
aaatcgcttcaattggacttattcc

SEQ ID NO: 98893 - DNA, 25 bp, Saccharomyces pastorianus
gatggacaccacgttatatgagctg

SEQ ID NO: 98894 - DNA, 25 bp, Saccharomyces pastorianus
aaagcacaaaccgtcacatgccgtt

SEQ ID NO: 98895 - DNA, 25 bp, Saccharomyces pastorianus
ggacaggaattagcgctacttcaca

SEQ ID NO: 98896 - DNA, 25 bp, Saccharomyces pastorianus
aaatcttcacaaggacaagctaaag

SEQ ID NO: 98897 - DNA, 25 bp, Saccharomyces pastorianus
aaatcgagtctccatcaaccaggct

SEQ ID NO: 98898 - DNA, 25 bp, Saccharomyces pastorianus
attagcgctacttcacaacaaaaga

SEQ ID NO: 98899 - DNA, 25 bp, Saccharomyces pastorianus
gttaaacaatctactccggttaatg

SEQ ID NO: 98900 - DNA, 25 bp, Saccharomyces pastorianus
tctggttctagcaacaggacaggaa

SEQ ID NO: 98901 - DNA, 25 bp, Saccharomyces pastorianus
aatttagcaaaatcgagtctccatc

SEQ ID NO: 98902 - DNA, 25 bp, Saccharomyces pastorianus
atgccgttccgaaatctggttctag

SEQ ID NO: 98903 - DNA, 25 bp, Saccharomyces pastorianus
tctactccggttaatgaaaagcaca

SEQ ID NO: 98904 - DNA, 25 bp, Saccharomyces pastorianus
aggctccctagttctgcgaaacagg

SEQ ID NO: 98905 - DNA, 25 bp, Saccharomyces pastorianus
tttagttaggcaaatcattcggaat

SEQ ID NO: 98906 - DNA, 25 bp, Saccharomyces pastorianus
taagagaacaggtccttaggatcaa

SEQ ID NO: 98907 - DNA, 25 bp, Saccharomyces pastorianus
gggttcctgttggtatattcagtaa

SEQ ID NO: 98908 - DNA, 25 bp, Saccharomyces pastorianus
gtatattcagtaacagatcggcaat

SEQ ID NO: 98909 - DNA, 25 bp, Saccharomyces pastorianus
gatcgcgttccaatggttctaatag

SEQ ID NO: 98910 - DNA, 25 bp, Saccharomyces pastorianus
aagtgttcgttgatttagttaggca

SEQ ID NO: 98911 - DNA, 25 bp, Saccharomyces pastorianus
ggatcaaagattccgatcgcgttcc

SEQ ID NO: 98912 - DNA, 25 bp, Saccharomyces pastorianus
aggtaacaaggctgatctaatcaat

SEQ ID NO: 98913 - DNA, 25 bp, Saccharomyces pastorianus
gtagagttcccttttatgaaacaag

SEQ ID NO: 98914 - DNA, 25 bp, Saccharomyces pastorianus
acagatcggcaatctttggaagaat

SEQ ID NO: 98915 - DNA, 25 bp, Saccharomyces pastorianus
gaaacaagcgctttgttgaggagca

SEQ ID NO: 98916 - DNA, 25 bp, Saccharomyces pastorianus
aaccattttttgactggaggcatga

SEQ ID NO: 98917 - DNA, 25 bp, Saccharomyces pastorianus
gagggtggcagtactacctgagaat

SEQ ID NO: 98918 - DNA, 25 bp, Saccharomyces pastorianus
gaagtctgtgttccgtctatacacg

SEQ ID NO: 98919 - DNA, 25 bp, Saccharomyces pastorianus
aagggtccaacgtgagcatacggtt

SEQ ID NO: 98920 - DNA, 25 bp, Saccharomyces pastorianus
gcatacggttattttccttggactt

SEQ ID NO: 98921 - DNA, 25 bp, Saccharomyces pastorianus
agaagtcggcacttacgaatgtgag

SEQ ID NO: 98922 - DNA, 25 bp, Saccharomyces pastorianus
aaccgtgtggttgtcataaatcgag

SEQ ID NO: 98923 - DNA, 25 bp, Saccharomyces pastorianus
gtagggaatacagtcaaccattttt

SEQ ID NO: 98924 - DNA, 25 bp, Saccharomyces pastorianus
ctgtgaaatttaccattccgccaaa

SEQ ID NO: 98925 - DNA, 25 bp, Saccharomyces pastorianus
gatagtttcacgtttgaagggtcca

SEQ ID NO: 98926 - DNA, 25 bp, Saccharomyces pastorianus
tcattttttacctctctctcagata

SEQ ID NO: 98927 - DNA, 25 bp, Saccharomyces pastorianus
ttaagctcttttacatcaggatgga

SEQ ID NO: 98928 - DNA, 25 bp, Saccharomyces pastorianus
aagggatgatttcccgtaccttcat

SEQ ID NO: 98929 - DNA, 25 bp, Saccharomyces pastorianus
gtacgtgcagcacttcaaatgcaat

SEQ ID NO: 98930 - DNA, 25 bp, Saccharomyces pastorianus
gaggagcaattcagtggtaacaaac

SEQ ID NO: 98931 - DNA, 25 bp, Saccharomyces pastorianus
acatcaaatgggttcatccgaagat

SEQ ID NO: 98932 - DNA, 25 bp, Saccharomyces pastorianus
tttgacgtcgtgtacgtgcagcact

SEQ ID NO: 98933 - DNA, 25 bp, Saccharomyces pastorianus
ttcccgtaccttcatttgtggttga

SEQ ID NO: 98934 - DNA, 25 bp, Saccharomyces pastorianus
aatcttggtgtctataaagtcggat

SEQ ID NO: 98935 - DNA, 25 bp, Saccharomyces pastorianus
cagtggcgtgtttgatgaatttatc

SEQ ID NO: 98936 - DNA, 25 bp, Saccharomyces pastorianus
agttccgcatgatttgatagacgag

SEQ ID NO: 98937 - DNA, 25 bp, Saccharomyces pastorianus
aacgtaatcgatctagttccgcatg

SEQ ID NO: 98938 - DNA, 25 bp, Saccharomyces pastorianus
atgccactgaacgtagctatgccaa

SEQ ID NO: 98939 - DNA, 25 bp, Saccharomyces pastorianus
ccatgggacagcctgtgttggcaaa

SEQ ID NO: 98940 - DNA, 25 bp, Saccharomyces pastorianus
aaatcccaagttggcgaggccccat

SEQ ID NO: 98941 - DNA, 25 bp, Saccharomyces pastorianus
gtgacccaagccctactagaaatgg

SEQ ID NO: 98942 - DNA, 25 bp, Saccharomyces pastorianus
agctatgccaatgcctatgtcgaca

SEQ ID NO: 98943 - DNA, 25 bp, Saccharomyces pastorianus
gcgaaactgcaattactacctgaaa

SEQ ID NO: 98944 - DNA, 25 bp, Saccharomyces pastorianus
gccccatctttgctttcgagtaata

SEQ ID NO: 98945 - DNA, 25 bp, Saccharomyces pastorianus
aataacactccgttgcatgtacctt

SEQ ID NO: 98946 - DNA, 25 bp, Saccharomyces pastorianus
gaaggaccctctaacgcgaataaag

SEQ ID NO: 98947 - DNA, 25 bp, Saccharomyces pastorianus
actcggccaggtccagcaacaaaat

SEQ ID NO: 98948 - DNA, 25 bp, Saccharomyces pastorianus
atttatccctttacctctgcaacaa

SEQ ID NO: 98949 - DNA, 25 bp, Saccharomyces pastorianus
gatgccggcatcgaattagtggata

SEQ ID NO: 98950 - DNA, 25 bp, Saccharomyces pastorianus
taacgctagccttagctgatgccgg

SEQ ID NO: 98951 - DNA, 25 bp, Saccharomyces pastorianus
ttaggacaccaaacatcgctcatta

SEQ ID NO: 98952 - DNA, 25 bp, Saccharomyces pastorianus
aatcctcaggacgacgattcgcaaa

SEQ ID NO: 98953 - DNA, 25 bp, Saccharomyces pastorianus
gaggatccttcacatctcaaggtac

SEQ ID NO: 98954 - DNA, 25 bp, Saccharomyces pastorianus
aagtccggcatcgatatcttcgttt

SEQ ID NO: 98955 - DNA, 25 bp, Saccharomyces pastorianus
acaggaactttctctacataccggt

SEQ ID NO: 98956 - DNA, 25 bp, Saccharomyces pastorianus
tcattaccgctgtctatggaccaca

SEQ ID NO: 98957 - DNA, 25 bp, Saccharomyces pastorianus
gaccacactccattagaggatcctt

SEQ ID NO: 98958 - DNA, 25 bp, Saccharomyces pastorianus
atatcatctctcataccacattgta

SEQ ID NO: 98959 - DNA, 25 bp, Saccharomyces pastorianus
gaggccaatggcactgtcgtatcat

SEQ ID NO: 98960 - DNA, 25 bp, Saccharomyces pastorianus
gaaattcggtgataccccatctgaa

SEQ ID NO: 98961 - DNA, 25 bp, Saccharomyces pastorianus
tcgaattattcgctaaacacggtga

SEQ ID NO: 98962 - DNA, 25 bp, Saccharomyces pastorianus
catctggttctggtgctaatactgc

SEQ ID NO: 98963 - DNA, 25 bp, Saccharomyces pastorianus
ggtgctaatactgctccattgggca

SEQ ID NO: 98964 - DNA, 25 bp, Saccharomyces pastorianus
gacagagacgctattttcgaattat

SEQ ID NO: 98965 - DNA, 25 bp, Saccharomyces pastorianus
gttcttgggtaacttatctttcaat

SEQ ID NO: 98966 - DNA, 25 bp, Saccharomyces pastorianus
gtggcggtttcagaccatctggttc

SEQ ID NO: 98967 - DNA, 25 bp, Saccharomyces pastorianus
tgatatgtccacaagcaagccagct

SEQ ID NO: 98968 - DNA, 25 bp, Saccharomyces pastorianus
gtttcggttatgttcaattctccaa

SEQ ID NO: 98969 - DNA, 25 bp, Saccharomyces pastorianus
aagccagctggtaacaacgatcgtg

SEQ ID NO: 98970 - DNA, 25 bp, Saccharomyces pastorianus
tagattagacttctcttctccaaga

SEQ ID NO: 98971 - DNA, 25 bp, Saccharomyces pastorianus
agctttttcttctttggcttgtttg

SEQ ID NO: 98972 - DNA, 25 bp, Saccharomyces pastorianus
gacaccaccgatgtgttcgaattcc

SEQ ID NO: 98973 - DNA, 25 bp, Saccharomyces pastorianus
ccttttcgctttcgctatcagaaga

SEQ ID NO: 98974 - DNA, 25 bp, Saccharomyces pastorianus
tttgattcttccttcttggtttctt

SEQ ID NO: 98975 - DNA, 25 bp, Saccharomyces pastorianus
ggcgtcctcagatttacgtttctta

SEQ ID NO: 98976 - DNA, 25 bp, Saccharomyces pastorianus
ttccttcttggtttcagcttcactt

SEQ ID NO: 98977 - DNA, 25 bp, Saccharomyces pastorianus
aatagtagctggttcttcggtttct

SEQ ID NO: 98978 - DNA, 25 bp, Saccharomyces pastorianus
cagcttcactttcgctgtcagaaga

SEQ ID NO: 98979 - DNA, 25 bp, Saccharomyces pastorianus
gaatccttggattcttccttcttgg

SEQ ID NO: 98980 - DNA, 25 bp, Saccharomyces pastorianus
gtttcttatcgttagactcttcctt

SEQ ID NO: 98981 - DNA, 25 bp, Saccharomyces pastorianus
gaagaggcggccttagctttttctt

SEQ ID NO: 98982 - DNA, 25 bp, Saccharomyces pastorianus
gataaatcctcgtaatgagctacag

SEQ ID NO: 98983 - DNA, 25 bp, Saccharomyces pastorianus
gtatcacaattagctaatggcgtca

SEQ ID NO: 98984 - DNA, 25 bp, Saccharomyces pastorianus
aaactgataccggagctgtcttttc

SEQ ID NO: 98985 - DNA, 25 bp, Saccharomyces pastorianus
accggagctgtcttttctggagaat

SEQ ID NO: 98986 - DNA, 25 bp, Saccharomyces pastorianus
gatatttgggcaaacgcaagagcca

SEQ ID NO: 98987 - DNA, 25 bp, Saccharomyces pastorianus
gctccgagttcatagatgtgacgat

SEQ ID NO: 98988 - DNA, 25 bp, Saccharomyces pastorianus
gatttatataaagcgcctgttctaa

SEQ ID NO: 98989 - DNA, 25 bp, Saccharomyces pastorianus
atgtatgaggtatgctccgagttca

SEQ ID NO: 98990 - DNA, 25 bp, Saccharomyces pastorianus
gatggtgttcaggtttctttttatt

SEQ ID NO: 98991 - DNA, 25 bp, Saccharomyces pastorianus
gcttaacggtcgcagattacaatat

SEQ ID NO: 98992 - DNA, 25 bp, Saccharomyces pastorianus
ggcttggcattggtggcgattataa

SEQ ID NO: 98993 - DNA, 25 bp, Saccharomyces pastorianus
agtcagaaccttttgggcctgttga

SEQ ID NO: 98994 - DNA, 25 bp, Saccharomyces pastorianus
ttaagcgaaattcctgttccgcaaa

SEQ ID NO: 98995 - DNA, 25 bp, Saccharomyces pastorianus
gacgaattacgtattaagcccgcaa

SEQ ID NO: 98996 - DNA, 25 bp, Saccharomyces pastorianus
ttagagcctgctgtagagaccttaa

SEQ ID NO: 98997 - DNA, 25 bp, Saccharomyces pastorianus
gggaacattctagtggccatcaaca

SEQ ID NO: 98998 - DNA, 25 bp, Saccharomyces pastorianus
gatttctcaccattgcagagtcaga

SEQ ID NO: 98999 - DNA, 25 bp, Saccharomyces pastorianus
gactttggcgtcaagatttctcacc

SEQ ID NO: 99000 - DNA, 25 bp, Saccharomyces pastorianus
gtggaaggactttctacccaacaag

SEQ ID NO: 99001 - DNA, 25 bp, Saccharomyces pastorianus
gttgatgcagcccatgttttagaat

SEQ ID NO: 99002 - DNA, 25 bp, Saccharomyces pastorianus
gactcagatgcctcttttaaacggg

SEQ ID NO: 99003 - DNA, 25 bp, Saccharomyces pastorianus
tatagaatgtttcccgtcttcgact

SEQ ID NO: 99004 - DNA, 25 bp, Saccharomyces pastorianus
gtagtgctactgtacctagtggtaa

SEQ ID NO: 99005 - DNA, 25 bp, Saccharomyces pastorianus
aggtgcgcctgccaatcagagtaca

SEQ ID NO: 99006 - DNA, 25 bp, Saccharomyces pastorianus
gtcaagacaatacgacctgggatcg

SEQ ID NO: 99007 - DNA, 25 bp, Saccharomyces pastorianus
acctgggatcgtgcacttcaattaa

SEQ ID NO: 99008 - DNA, 25 bp, Saccharomyces pastorianus
tttttccacattcgaaggtgcgcct

SEQ ID NO: 99009 - DNA, 25 bp, Saccharomyces pastorianus
gacatattggaaacggaggcttccc

SEQ ID NO: 99010 - DNA, 25 bp, Saccharomyces pastorianus
gcgaggcagatgatgatttttccac

SEQ ID NO: 99011 - DNA, 25 bp, Saccharomyces pastorianus
gcaatttccagatatcaactccgca

SEQ ID NO: 99012 - DNA, 25 bp, Saccharomyces pastorianus
attgacgatttttacgattcttaca

SEQ ID NO: 99013 - DNA, 25 bp, Saccharomyces pastorianus
aatggcgcggtctcgagcgatcaaa

SEQ ID NO: 99014 - DNA, 25 bp, Saccharomyces pastorianus
aacaacgtcgtgctgtagagattca

SEQ ID NO: 99015 - DNA, 25 bp, Saccharomyces pastorianus
atcaatgccattttcacagttttgg

SEQ ID NO: 99016 - DNA, 25 bp, Saccharomyces pastorianus
atgtcggcggccatgaagtcaggaa

SEQ ID NO: 99017 - DNA, 25 bp, Saccharomyces pastorianus
cacagttttggcagtatatcacaga

SEQ ID NO: 99018 - DNA, 25 bp, Saccharomyces pastorianus
aaaggcgcagattaatgggcaacaa

SEQ ID NO: 99019 - DNA, 25 bp, Saccharomyces pastorianus
ttgaccataggccatttttaataga

SEQ ID NO: 99020 - DNA, 25 bp, Saccharomyces pastorianus
tgatgcttcttacattcaccttcgt

SEQ ID NO: 99021 - DNA, 25 bp, Saccharomyces pastorianus
cattccgtgtgctttttgaccatag

SEQ ID NO: 99022 - DNA, 25 bp, Saccharomyces pastorianus
attctttgcgaagtccttggttaat

SEQ ID NO: 99023 - DNA, 25 bp, Saccharomyces pastorianus
caaattgcgatgcatcgtgatgctt

SEQ ID NO: 99024 - DNA, 25 bp, Saccharomyces pastorianus
acaggagttcgttaccattccgtgt

SEQ ID NO: 99025 - DNA, 25 bp, Saccharomyces pastorianus
cattcaccttcgtggatccaacaag

SEQ ID NO: 99026 - DNA, 25 bp, Saccharomyces pastorianus
ttgtcctgaatgtcatactgttgat

SEQ ID NO: 99027 - DNA, 25 bp, Saccharomyces pastorianus
aagatacttctctcatgctgatgaa

SEQ ID NO: 99028 - DNA, 25 bp, Saccharomyces pastorianus
gaagatttcctcactccgaattgat

SEQ ID NO: 99029 - DNA, 25 bp, Saccharomyces pastorianus
gacacccatatattctatcgatcca

SEQ ID NO: 99030 - DNA, 25 bp, Saccharomyces pastorianus
cgatccaaagagacagtttccagtt

SEQ ID NO: 99031 - DNA, 25 bp, Saccharomyces pastorianus
gaaacgacttttgaggacacttcca

SEQ ID NO: 99032 - DNA, 25 bp, Saccharomyces pastorianus
gaatccatttagctaggctcggtca

SEQ ID NO: 99033 - DNA, 25 bp, Saccharomyces pastorianus
gtttccagttggtttatcggcatcg

SEQ ID NO: 99034 - DNA, 25 bp, Saccharomyces pastorianus
gggatcctgtgctatcagacctaga

SEQ ID NO: 99035 - DNA, 25 bp, Saccharomyces pastorianus
tcggtcatcccatcgtcaacgatag

SEQ ID NO: 99036 - DNA, 25 bp, Saccharomyces pastorianus
gctgatgaaactgtcgtcgcttgta

SEQ ID NO: 99037 - DNA, 25 bp, Saccharomyces pastorianus
agcgcgatgcgttgctagccgcaga

SEQ ID NO: 99038 - DNA, 25 bp, Saccharomyces pastorianus
aagagcacaaatggagcagctagaa

SEQ ID NO: 99039 - DNA, 25 bp, Saccharomyces pastorianus
tgctagccgcagaggaggagcaact

SEQ ID NO: 99040 - DNA, 25 bp, Saccharomyces pastorianus
aaagattttcagaatccgccgcaaa

SEQ ID NO: 99041 - DNA, 25 bp, Saccharomyces pastorianus
caaggttcgaggaaagagaatgcca

SEQ ID NO: 99042 - DNA, 25 bp, Saccharomyces pastorianus
gattttcagaatccgccgcaaagaa

SEQ ID NO: 99043 - DNA, 25 bp, Saccharomyces pastorianus
gaaagcagctggcttagcaagaaaa

SEQ ID NO: 99044 - DNA, 25 bp, Saccharomyces pastorianus
aaaggagcgcgatgcgttgctagcc

SEQ ID NO: 99045 - DNA, 25 bp, Saccharomyces pastorianus
gcttctaaatgggaacaaggttcga

SEQ ID NO: 99046 - DNA, 25 bp, Saccharomyces pastorianus
agaaaaagagatcaggcacatgcta

SEQ ID NO: 99047 - DNA, 25 bp, Saccharomyces pastorianus
tccgccgcaaagaaagcagctggct

SEQ ID NO: 99048 - DNA, 25 bp, Saccharomyces pastorianus
ggaaacgtctagaatcctctccatt

SEQ ID NO: 99049 - DNA, 25 bp, Saccharomyces pastorianus
atgccaatccattataccatctctc

SEQ ID NO: 99050 - DNA, 25 bp, Saccharomyces pastorianus
gacggcgattttcaagaagccaaat

SEQ ID NO: 99051 - DNA, 25 bp, Saccharomyces pastorianus
atagccatattccagtatcctcaac

SEQ ID NO: 99052 - DNA, 25 bp, Saccharomyces pastorianus
gtatcctcaactgctaaggcatgtt

SEQ ID NO: 99053 - DNA, 25 bp, Saccharomyces pastorianus
tataccatctctctcacaaagtttc

SEQ ID NO: 99054 - DNA, 25 bp, Saccharomyces pastorianus
agaatcctctccattttatgccaat

SEQ ID NO: 99055 - DNA, 25 bp, Saccharomyces pastorianus
gaatctggctaaactactcaacaaa

SEQ ID NO: 99056 - DNA, 25 bp, Saccharomyces pastorianus
atgaaccaatagtctccgaacgaat

SEQ ID NO: 99057 - DNA, 25 bp, Saccharomyces pastorianus
caacagatgttgtggctcgaaatcc

SEQ ID NO: 99058 - DNA, 25 bp, Saccharomyces pastorianus
aattatgctagattgggttccgata

SEQ ID NO: 99059 - DNA, 25 bp, Saccharomyces pastorianus
gggatatgcacatgaacctccatta

SEQ ID NO: 99060 - DNA, 25 bp, Saccharomyces pastorianus
actgggcattttccatggtttgaac

SEQ ID NO: 99061 - DNA, 25 bp, Saccharomyces pastorianus
ggtattttacatgctctttcaacta

SEQ ID NO: 99062 - DNA, 25 bp, Saccharomyces pastorianus
ttgcctacccactgttgattttcta

SEQ ID NO: 99063 - DNA, 25 bp, Saccharomyces pastorianus
tttcaatacagcgtccatcttagga

SEQ ID NO: 99064 - DNA, 25 bp, Saccharomyces pastorianus
gtgtcgctttgtttggtaccatttc

SEQ ID NO: 99065 - DNA, 25 bp, Saccharomyces pastorianus
ttaggatactgctttttgcctctgt

SEQ ID NO: 99066 - DNA, 25 bp, Saccharomyces pastorianus
aagattgctaattgcctacccactg

SEQ ID NO: 99067 - DNA, 25 bp, Saccharomyces pastorianus
attcggactttttctattgatggct

SEQ ID NO: 99068 - DNA, 25 bp, Saccharomyces pastorianus
gctgggcctttgatattctttttgt

SEQ ID NO: 99069 - DNA, 25 bp, Saccharomyces pastorianus
tacttggacctcgtctggattttta

SEQ ID NO: 99070 - DNA, 25 bp, Saccharomyces pastorianus
gtgacttatgtcatggtatccacag

SEQ ID NO: 99071 - DNA, 25 bp, Saccharomyces pastorianus
ttgccagagagccaaacaccgttgt

SEQ ID NO: 99072 - DNA, 25 bp, Saccharomyces pastorianus
agaccaatttaaccgaacaggcaat

SEQ ID NO: 99073 - DNA, 25 bp, Saccharomyces pastorianus
gaaataattccactattggtgactt

SEQ ID NO: 99074 - DNA, 25 bp, Saccharomyces pastorianus
gtgcggcttaaaccacaggattgat

SEQ ID NO: 99075 - DNA, 25 bp, Saccharomyces pastorianus
acattctcctcagaagtgcggctta

SEQ ID NO: 99076 - DNA, 25 bp, Saccharomyces pastorianus
aatttggtaccagctgaacttgagt

SEQ ID NO: 99077 - DNA, 25 bp, Saccharomyces pastorianus
gctgaacttgagtcgtgtgtataca

SEQ ID NO: 99078 - DNA, 25 bp, Saccharomyces pastorianus
gggttcttctgccaaacattctcct

SEQ ID NO: 99079 - DNA, 25 bp, Saccharomyces pastorianus
gaccagtatttgatgatcctctagt

SEQ ID NO: 99080 - DNA, 25 bp, Saccharomyces pastorianus
ggaaaatgtaggcatcaggcttaat

SEQ ID NO: 99081 - DNA, 25 bp, Saccharomyces pastorianus
aaaaactacgtcagtcggagcagca

SEQ ID NO: 99082 - DNA, 25 bp, Saccharomyces pastorianus
cagtgcgcgataactcccagagagg

SEQ ID NO: 99083 - DNA, 25 bp, Saccharomyces pastorianus
ggatcagaaatgaactgtctcagct

SEQ ID NO: 99084 - DNA, 25 bp, Saccharomyces pastorianus
gccagctttccccagaattacgttt

SEQ ID NO: 99085 - DNA, 25 bp, Saccharomyces pastorianus
gcgggtttctgcttttcaagtacac

SEQ ID NO: 99086 - DNA, 25 bp, Saccharomyces pastorianus
gtcggagcagcaggctttgatgaaa

SEQ ID NO: 99087 - DNA, 25 bp, Saccharomyces pastorianus
gatcaacagttaatcagccagcttt

SEQ ID NO: 99088 - DNA, 25 bp, Saccharomyces pastorianus
tgatccaatttggaagacgggcccc

SEQ ID NO: 99089 - DNA, 25 bp, Saccharomyces pastorianus
agcagagatcactttgctaaggtga

SEQ ID NO: 99090 - DNA, 25 bp, Saccharomyces pastorianus
ggtctatgcaattggtggcgctatt

SEQ ID NO: 99091 - DNA, 25 bp, Saccharomyces pastorianus
gtacacaacgccaacagatcaacag

SEQ ID NO: 99092 - DNA, 25 bp, Saccharomyces pastorianus
gagctatacgaaggcccgctacggc

SEQ ID NO: 99093 - DNA, 25 bp, Saccharomyces pastorianus
tttgtggagcaaacgtttaggccga

SEQ ID NO: 99094 - DNA, 25 bp, Saccharomyces pastorianus
agagcttgcagaacgattcccattc

SEQ ID NO: 99095 - DNA, 25 bp, Saccharomyces pastorianus
taaatcccgaacgtagtacggcttg

SEQ ID NO: 99096 - DNA, 25 bp, Saccharomyces pastorianus
gaaccacgctcatgtccatgttcat

SEQ ID NO: 99097 - DNA, 25 bp, Saccharomyces pastorianus
gtttaggccgaacgcaaatctcaag

SEQ ID NO: 99098 - DNA, 25 bp, Saccharomyces pastorianus
tcaaggcgcctgcagactgcgagaa

SEQ ID NO: 99099 - DNA, 25 bp, Saccharomyces pastorianus
agcgacgcaaattcgccgatggttt

SEQ ID NO: 99100 - DNA, 25 bp, Saccharomyces pastorianus
gatacactgcttgccttttgtacga

SEQ ID NO: 99101 - DNA, 25 bp, Saccharomyces pastorianus
ccgctacggcagtatcgcattaaag

SEQ ID NO: 99102 - DNA, 25 bp, Saccharomyces pastorianus
gtccatgttcataccattcacgttt

SEQ ID NO: 99103 - DNA, 25 bp, Saccharomyces pastorianus
gaggcggtgcaatcatcagtaatac

SEQ ID NO: 99104 - DNA, 25 bp, Saccharomyces pastorianus
aagcgtgctttcttgtagccctgta

SEQ ID NO: 99105 - DNA, 25 bp, Saccharomyces pastorianus
aagtctcttctcgagtatgggttcg

SEQ ID NO: 99106 - DNA, 25 bp, Saccharomyces pastorianus
gatgtggctattccaagcaacgcaa

SEQ ID NO: 99107 - DNA, 25 bp, Saccharomyces pastorianus
tatctaatctcctcattcgacattc

SEQ ID NO: 99108 - DNA, 25 bp, Saccharomyces pastorianus
ggaggttcgcattacgcctatctaa

SEQ ID NO: 99109 - DNA, 25 bp, Saccharomyces pastorianus
gaccgctttttagaatcgtacgaca

SEQ ID NO: 99110 - DNA, 25 bp, Saccharomyces pastorianus
tgccaactcttatttgcaccagcaa

SEQ ID NO: 99111 - DNA, 25 bp, Saccharomyces pastorianus
gatttaatcttctcgcagtctgcag

SEQ ID NO: 99112 - DNA, 25 bp, Saccharomyces pastorianus
atgggaatcgttctgcaagctcttc

SEQ ID NO: 99113 - DNA, 25 bp, Saccharomyces pastorianus
aatatagacagccttcttgccaact

SEQ ID NO: 99114 - DNA, 25 bp, Saccharomyces pastorianus
ggcaatgcacagtcatggccatagt

SEQ ID NO: 99115 - DNA, 25 bp, Saccharomyces pastorianus
aatgttttatcacccatctatgcct

SEQ ID NO: 99116 - DNA, 25 bp, Saccharomyces pastorianus
actaggttccaacaacgccaattga

SEQ ID NO: 99117 - DNA, 25 bp, Saccharomyces pastorianus
aaattaccatcaaactagccaccat

SEQ ID NO: 99118 - DNA, 25 bp, Saccharomyces pastorianus
atgaatggctttgctgctgggtcaa

SEQ ID NO: 99119 - DNA, 25 bp, Saccharomyces pastorianus
ttttactgcgccaacctggttaaat

SEQ ID NO: 99120 - DNA, 25 bp, Saccharomyces pastorianus
atgtacatgccatttcaacctcagc

SEQ ID NO: 99121 - DNA, 25 bp, Saccharomyces pastorianus
gcaatgctgtgcctggtatgaatcc

SEQ ID NO: 99122 - DNA, 25 bp, Saccharomyces pastorianus
atgggaggtccatcggcatcaccaa

SEQ ID NO: 99123 - DNA, 25 bp, Saccharomyces pastorianus
ggaggaaatatttcgccccatgtcc

SEQ ID NO: 99124 - DNA, 25 bp, Saccharomyces pastorianus
tgcaggttttatggcagctggccct

SEQ ID NO: 99125 - DNA, 25 bp, Saccharomyces pastorianus
gggtcaaatgatttcggattcacat

SEQ ID NO: 99126 - DNA, 25 bp, Saccharomyces pastorianus
gaacctgatgttgaacgaccccata

SEQ ID NO: 99127 - DNA, 25 bp, Saccharomyces pastorianus
ggaagcaattctttcacgtgaacaa

SEQ ID NO: 99128 - DNA, 25 bp, Saccharomyces pastorianus
ctgatggcccagtaacttttagaaa

SEQ ID NO: 99129 - DNA, 25 bp, Saccharomyces pastorianus
aagaggtttttgtaccgcaccatga

SEQ ID NO: 99130 - DNA, 25 bp, Saccharomyces pastorianus
gatagccacgaattgaacctgatgt

SEQ ID NO: 99131 - DNA, 25 bp, Saccharomyces pastorianus
cgaccccataaaaagtacagccgat

SEQ ID NO: 99132 - DNA, 25 bp, Saccharomyces pastorianus
gatctgcatccagtacttaacaaag

SEQ ID NO: 99133 - DNA, 25 bp, Saccharomyces pastorianus
gatttatgcatcctgatggcccagt

SEQ ID NO: 99134 - DNA, 25 bp, Saccharomyces pastorianus
tactgtcgttgttaccttctttgaa

SEQ ID NO: 99135 - DNA, 25 bp, Saccharomyces pastorianus
aagacaggccaaatttccctctagg

SEQ ID NO: 99136 - DNA, 25 bp, Saccharomyces pastorianus
cagtgacatgtctaagtccgctacc

SEQ ID NO: 99137 - DNA, 25 bp, Saccharomyces pastorianus
actatgcttctatgttctggttgac

SEQ ID NO: 99138 - DNA, 25 bp, Saccharomyces pastorianus
gaatactactcaaactctttgccag

SEQ ID NO: 99139 - DNA, 25 bp, Saccharomyces pastorianus
tcatgcttgctatttgcccatttga

SEQ ID NO: 99140 - DNA, 25 bp, Saccharomyces pastorianus
ataaggctgctttcatcgagagatg

SEQ ID NO: 99141 - DNA, 25 bp, Saccharomyces pastorianus
gaaattgccaatttgcctgaagtca

SEQ ID NO: 99142 - DNA, 25 bp, Saccharomyces pastorianus
aatcattaccgaagccgtggaaatt

SEQ ID NO: 99143 - DNA, 25 bp, Saccharomyces pastorianus
aatttgtcgctgacggtctattaca

SEQ ID NO: 99144 - DNA, 25 bp, Saccharomyces pastorianus
tggatttccaacgatggcagcttgt

SEQ ID NO: 99145 - DNA, 25 bp, Saccharomyces pastorianus
agaggtgcctacactgacttttcat

SEQ ID NO: 99146 - DNA, 25 bp, Saccharomyces pastorianus
aaggaccctaagaacatccctctat

SEQ ID NO: 99147 - DNA, 25 bp, Saccharomyces pastorianus
acgatgcgtgcattgaccagtgttt

SEQ ID NO: 99148 - DNA, 25 bp, Saccharomyces pastorianus
gtgcattgaccagtgtttggctaaa

SEQ ID NO: 99149 - DNA, 25 bp, Saccharomyces pastorianus
ttcgccatacgctaccagaaacgat

SEQ ID NO: 99150 - DNA, 25 bp, Saccharomyces pastorianus
aattgctcaagaactggctgtggct

SEQ ID NO: 99151 - DNA, 25 bp, Saccharomyces pastorianus
gtctatcatctatctttggcggtgg

SEQ ID NO: 99152 - DNA, 25 bp, Saccharomyces pastorianus
ggcggtggtgcaccatcacaacaaa

SEQ ID NO: 99153 - DNA, 25 bp, Saccharomyces pastorianus
aaatgcttaacttcgccatacgcta

SEQ ID NO: 99154 - DNA, 25 bp, Saccharomyces pastorianus
aaaccctatagccaaggagctgaaa

SEQ ID NO: 99155 - DNA, 25 bp, Saccharomyces pastorianus
catatcaaaggcttacatctccaga

SEQ ID NO: 99156 - DNA, 25 bp, Saccharomyces pastorianus
tggctgtggctaatgcgactgaatt

SEQ ID NO: 99157 - DNA, 25 bp, Saccharomyces pastorianus
ggaagcagccactactgcaaagaca

SEQ ID NO: 99158 - DNA, 25 bp, Saccharomyces pastorianus
ttatccagttgccacaccacaaaag

SEQ ID NO: 99159 - DNA, 25 bp, Saccharomyces pastorianus
taaaatgtctgcctctgatccgaat

SEQ ID NO: 99160 - DNA, 25 bp, Saccharomyces pastorianus
gaatggtttactgtcatttgtccaa

SEQ ID NO: 99161 - DNA, 25 bp, Saccharomyces pastorianus
gtccaattacctacaaatccttcga

SEQ ID NO: 99162 - DNA, 25 bp, Saccharomyces pastorianus
gaaccctatggttccaggtttggct

SEQ ID NO: 99163 - DNA, 25 bp, Saccharomyces pastorianus
aggcgctactaagaccaacgagatt

SEQ ID NO: 99164 - DNA, 25 bp, Saccharomyces pastorianus
ttgtagccccggtaacgtcgaagag

SEQ ID NO: 99165 - DNA, 25 bp, Saccharomyces pastorianus
gaggcctccgaaaagggttatccag

SEQ ID NO: 99166 - DNA, 25 bp, Saccharomyces pastorianus
ggtacaaatcacttcgaattcttca

SEQ ID NO: 99167 - DNA, 25 bp, Saccharomyces pastorianus
gtactaagtacccaggcgctactaa

SEQ ID NO: 99168 - DNA, 25 bp, Saccharomyces pastorianus
aaattggtgttgctgacgctatcaa

SEQ ID NO: 99169 - DNA, 25 bp, Saccharomyces pastorianus
gagacaagtccgtttatccactagt

SEQ ID NO: 99170 - DNA, 25 bp, Saccharomyces pastorianus
tatccactagtgagggagctgcata

SEQ ID NO: 99171 - DNA, 25 bp, Saccharomyces pastorianus
gaagatatgttcaatttaccagatg

SEQ ID NO: 99172 - DNA, 25 bp, Saccharomyces pastorianus
ttttgcggatatctcgaggtttaaa

SEQ ID NO: 99173 - DNA, 25 bp, Saccharomyces pastorianus
atcctgctacctattgctagtgcta

SEQ ID NO: 99174 - DNA, 25 bp, Saccharomyces pastorianus
tttgctatgtacaacgcatgctgga

SEQ ID NO: 99175 - DNA, 25 bp, Saccharomyces pastorianus
agagacccgattcctgcaattatat

SEQ ID NO: 99176 - DNA, 25 bp, Saccharomyces pastorianus
aatacgatggagttgttcctatttc

SEQ ID NO: 99177 - DNA, 25 bp, Saccharomyces pastorianus
gatgaacttcaattattaccagagg

SEQ ID NO: 99178 - DNA, 25 bp, Saccharomyces pastorianus
aaacttgttaccttacatcctgcta

SEQ ID NO: 99179 - DNA, 25 bp, Saccharomyces pastorianus
aattccctatttgattctgaaactc

SEQ ID NO: 99180 - DNA, 25 bp, Saccharomyces pastorianus
tgcgggcaagccatggagttatgaa

SEQ ID NO: 99181 - DNA, 25 bp, Saccharomyces pastorianus
gatatgacactgttaccacctggaa

SEQ ID NO: 99182 - DNA, 25 bp, Saccharomyces pastorianus
gaacccctgggtgctcattatatgc

SEQ ID NO: 99183 - DNA, 25 bp, Saccharomyces pastorianus
gaaagccatctggaacagcacgcag

SEQ ID NO: 99184 - DNA, 25 bp, Saccharomyces pastorianus
gaacagcacgcagaaaatcacttaa

SEQ ID NO: 99185 - DNA, 25 bp, Saccharomyces pastorianus
atagaaacaatccagctgcagaatg

SEQ ID NO: 99186 - DNA, 25 bp, Saccharomyces pastorianus
tatggattagcaggcgtcatacatt

SEQ ID NO: 99187 - DNA, 25 bp, Saccharomyces pastorianus
gggcgttatatttgatttactgtta

SEQ ID NO: 99188 - DNA, 25 bp, Saccharomyces pastorianus
aatagcggtcaagcttccaatcaag

SEQ ID NO: 99189 - DNA, 25 bp, Saccharomyces pastorianus
agcaagattgctgggaaatgcgtgc

SEQ ID NO: 99190 - DNA, 25 bp, Saccharomyces pastorianus
caatcaagctttgccgatgactgaa

SEQ ID NO: 99191 - DNA, 25 bp, Saccharomyces pastorianus
gtagtagattctttttcattctcga

SEQ ID NO: 99192 - DNA, 25 bp, Saccharomyces pastorianus
ggcttgaatccgtcaactacatctg

SEQ ID NO: 99193 - DNA, 25 bp, Saccharomyces pastorianus
tattcctttttcaatgggtttctag

SEQ ID NO: 99194 - DNA, 25 bp, Saccharomyces pastorianus
gctctgtgtcttcattacgacggaa

SEQ ID NO: 99195 - DNA, 25 bp, Saccharomyces pastorianus
atgtcttcctgctctgtgtcttcat

SEQ ID NO: 99196 - DNA, 25 bp, Saccharomyces pastorianus
ggtgaatccttgctacttaatggaa

SEQ ID NO: 99197 - DNA, 25 bp, Saccharomyces pastorianus
actacatctgcccaatattcctttt

SEQ ID NO: 99198 - DNA, 25 bp, Saccharomyces pastorianus
tacgacggaagcgatctgaagaggt

SEQ ID NO: 99199 - DNA, 25 bp, Saccharomyces pastorianus
tatcgtttgtggtttggtttatgcc

SEQ ID NO: 99200 - DNA, 25 bp, Saccharomyces pastorianus
gaagtagccggcttgaatccgtcaa

SEQ ID NO: 99201 - DNA, 25 bp, Saccharomyces pastorianus
ggtttatgccaggtgaatccttgct

SEQ ID NO: 99202 - DNA, 25 bp, Saccharomyces pastorianus
gacttctctgttcccattaggtggt

SEQ ID NO: 99203 - DNA, 25 bp, Saccharomyces pastorianus
attacccttcatttctcaaactggc

SEQ ID NO: 99204 - DNA, 25 bp, Saccharomyces pastorianus
aggagccagcgcagaatcattcttt

SEQ ID NO: 99205 - DNA, 25 bp, Saccharomyces pastorianus
gagtgccttatctggtttatcgaca

SEQ ID NO: 99206 - DNA, 25 bp, Saccharomyces pastorianus
cttatagcatcgttttggacttctc

SEQ ID NO: 99207 - DNA, 25 bp, Saccharomyces pastorianus
ggtagaccaatgaacgctatcttgt

SEQ ID NO: 99208 - DNA, 25 bp, Saccharomyces pastorianus
atcctggtatggttttatcgttcta

SEQ ID NO: 99209 - DNA, 25 bp, Saccharomyces pastorianus
tggccattaatctttcccatattag

SEQ ID NO: 99210 - DNA, 25 bp, Saccharomyces pastorianus
ttatcgttctatttctggttcttat

SEQ ID NO: 99211 - DNA, 25 bp, Saccharomyces pastorianus
caaactggcgttaagggatcctggt

SEQ ID NO: 99212 - DNA, 25 bp, Saccharomyces pastorianus
ggtcgccatggctcatattggtaat

SEQ ID NO: 99213 - DNA, 25 bp, Saccharomyces pastorianus
gccgacaagccaaagattactcctg

SEQ ID NO: 99214 - DNA, 25 bp, Saccharomyces pastorianus
attttcgaggaccttgtcaccttga

SEQ ID NO: 99215 - DNA, 25 bp, Saccharomyces pastorianus
tgagcccaagagagccaagatttaa

SEQ ID NO: 99216 - DNA, 25 bp, Saccharomyces pastorianus
tgcctcatcagtaagacccgttgaa

SEQ ID NO: 99217 - DNA, 25 bp, Saccharomyces pastorianus
ttctcacacggaacaccactaatgg

SEQ ID NO: 99218 - DNA, 25 bp, Saccharomyces pastorianus
aagaagcttaccagttctcacacgg

SEQ ID NO: 99219 - DNA, 25 bp, Saccharomyces pastorianus
taacatgcaagacacgtacggtcaa

SEQ ID NO: 99220 - DNA, 25 bp, Saccharomyces pastorianus
agcaattagtgttccatgctcccgc

SEQ ID NO: 99221 - DNA, 25 bp, Saccharomyces pastorianus
ttaacaggttcagacgcgactgcct

SEQ ID NO: 99222 - DNA, 25 bp, Saccharomyces pastorianus
gaaatactttgaccctattttcgag

SEQ ID NO: 99223 - DNA, 25 bp, Saccharomyces pastorianus
cgcctctattccgtttgacaaactg

SEQ ID NO: 99224 - DNA, 25 bp, Saccharomyces pastorianus
tatccgtcgggctgtacgatactac

SEQ ID NO: 99225 - DNA, 25 bp, Saccharomyces pastorianus
taatcaacggtattaccctcgcttt

SEQ ID NO: 99226 - DNA, 25 bp, Saccharomyces pastorianus
tagagaacgttcttgccatcggcat

SEQ ID NO: 99227 - DNA, 25 bp, Saccharomyces pastorianus
gacggttcatcctacatggaacaag

SEQ ID NO: 99228 - DNA, 25 bp, Saccharomyces pastorianus
gatgccggtatatcaatgttcgatt

SEQ ID NO: 99229 - DNA, 25 bp, Saccharomyces pastorianus
gtcatgctgaatatctaccccagaa

SEQ ID NO: 99230 - DNA, 25 bp, Saccharomyces pastorianus
ttaccctcgctttaatagatgccgg

SEQ ID NO: 99231 - DNA, 25 bp, Saccharomyces pastorianus
ttgagatacaaacctccctggtgag

SEQ ID NO: 99232 - DNA, 25 bp, Saccharomyces pastorianus
gctgtacgatactaccccattatta

SEQ ID NO: 99233 - DNA, 25 bp, Saccharomyces pastorianus
atcggcatcgcaggtgctcataggg

SEQ ID NO: 99234 - DNA, 25 bp, Saccharomyces pastorianus
atcgagatccatgtccttgagcaag

SEQ ID NO: 99235 - DNA, 25 bp, Saccharomyces pastorianus
taagcagcatagtcacgttagggaa

SEQ ID NO: 99236 - DNA, 25 bp, Saccharomyces pastorianus
taccgatggacgcacaggaacaatt

SEQ ID NO: 99237 - DNA, 25 bp, Saccharomyces pastorianus
gggcagcagaataacttaccgaaat

SEQ ID NO: 99238 - DNA, 25 bp, Saccharomyces pastorianus
atactgtcattaatacggttgctag

SEQ ID NO: 99239 - DNA, 25 bp, Saccharomyces pastorianus
gaacagtaagacttcgcacgccggt

SEQ ID NO: 99240 - DNA, 25 bp, Saccharomyces pastorianus
aatgatttggcagcgcgcagtgcat

SEQ ID NO: 99241 - DNA, 25 bp, Saccharomyces pastorianus
atgcgaacgcggacgatttgagtaa

SEQ ID NO: 99242 - DNA, 25 bp, Saccharomyces pastorianus
agcgtccatgaacccagtactgaag

SEQ ID NO: 99243 - DNA, 25 bp, Saccharomyces pastorianus
agcgcgcagtgcatctttcaaaagt

SEQ ID NO: 99244 - DNA, 25 bp, Saccharomyces pastorianus
tcgcacgccggtaagatagaacagt

SEQ ID NO: 99245 - DNA, 25 bp, Saccharomyces pastorianus
aatcaaatttgccacctctaccgat

SEQ ID NO: 99246 - DNA, 25 bp, Saccharomyces pastorianus
tggtggtgccaatgaaaacgttctc

SEQ ID NO: 99247 - DNA, 25 bp, Saccharomyces pastorianus
tgccctccatacctgagtatttggt

SEQ ID NO: 99248 - DNA, 25 bp, Saccharomyces pastorianus
acggtattctcgtggcatgggttgc

SEQ ID NO: 99249 - DNA, 25 bp, Saccharomyces pastorianus
ttagttatagcttactgccctccat

SEQ ID NO: 99250 - DNA, 25 bp, Saccharomyces pastorianus
gcaatttttaggatcgatttcaccc

SEQ ID NO: 99251 - DNA, 25 bp, Saccharomyces pastorianus
atatttctgcttcattctacccaat

SEQ ID NO: 99252 - DNA, 25 bp, Saccharomyces pastorianus
ggttgccctcaatacatccttgatg

SEQ ID NO: 99253 - DNA, 25 bp, Saccharomyces pastorianus
tttccattggattctgtaccgtatc

SEQ ID NO: 99254 - DNA, 25 bp, Saccharomyces pastorianus
ataatgccaatccataatgccgtgg

SEQ ID NO: 99255 - DNA, 25 bp, Saccharomyces pastorianus
gggcaacttattttcttctttccat

SEQ ID NO: 99256 - DNA, 25 bp, Saccharomyces pastorianus
aggcttctaatttcctgggcaactt

SEQ ID NO: 99257 - DNA, 25 bp, Saccharomyces pastorianus
ggaagctaatcagggaggcctctcc

SEQ ID NO: 99258 - DNA, 25 bp, Saccharomyces pastorianus
aacgcctcccagtgaagatgacgac

SEQ ID NO: 99259 - DNA, 25 bp, Saccharomyces pastorianus
gattcaaacactaactcaacgcctc

SEQ ID NO: 99260 - DNA, 25 bp, Saccharomyces pastorianus
agacaggagctgaacgtttcttggt

SEQ ID NO: 99261 - DNA, 25 bp, Saccharomyces pastorianus
atacaagttccgattcagattcaaa

SEQ ID NO: 99262 - DNA, 25 bp, Saccharomyces pastorianus
cttcgaagtccgtgaaatcttgcta

SEQ ID NO: 99263 - DNA, 25 bp, Saccharomyces pastorianus
taccgctaagtcaccggatgacaat

SEQ ID NO: 99264 - DNA, 25 bp, Saccharomyces pastorianus
tacgggcgaaaactctaccgctaag

SEQ ID NO: 99265 - DNA, 25 bp, Saccharomyces pastorianus
cgcctccagagacttgtacttcgaa

SEQ ID NO: 99266 - DNA, 25 bp, Saccharomyces pastorianus
gaaccgatggtgtctctacaagtga

SEQ ID NO: 99267 - DNA, 25 bp, Saccharomyces pastorianus
ctccggctacagagtttgccaacga

SEQ ID NO: 99268 - DNA, 25 bp, Saccharomyces pastorianus
gagcgctgaacgtgattttccattg

SEQ ID NO: 99269 - DNA, 25 bp, Saccharomyces pastorianus
tacgctgagggagcctttccaggta

SEQ ID NO: 99270 - DNA, 25 bp, Saccharomyces pastorianus
attcgcgccttaagcaggatccgga

SEQ ID NO: 99271 - DNA, 25 bp, Saccharomyces pastorianus
gcttcggtcgcttgacacggcggaa

SEQ ID NO: 99272 - DNA, 25 bp, Saccharomyces pastorianus
ggatccggagtacttacgtgagcta

SEQ ID NO: 99273 - DNA, 25 bp, Saccharomyces pastorianus
gtaaagtacctggacccgactgaat

SEQ ID NO: 99274 - DNA, 25 bp, Saccharomyces pastorianus
aactttctcgctgtcgtctatgggt

SEQ ID NO: 99275 - DNA, 25 bp, Saccharomyces pastorianus
agaaggacacactactacgctgagg

SEQ ID NO: 99276 - DNA, 25 bp, Saccharomyces pastorianus
tcgcgctggcaatccgtatacggtg

SEQ ID NO: 99277 - DNA, 25 bp, Saccharomyces pastorianus
ttccattgtatgttatcgcagcagc

SEQ ID NO: 99278 - DNA, 25 bp, Saccharomyces pastorianus
aaggacggatggcactacgcctatt

SEQ ID NO: 99279 - DNA, 25 bp, Saccharomyces pastorianus
tgctggatacttatacgctcttgcc

SEQ ID NO: 99280 - DNA, 25 bp, Saccharomyces pastorianus
aaaggtgccgcaaacatgtgtaaac

SEQ ID NO: 99281 - DNA, 25 bp, Saccharomyces pastorianus
tatgacgttaactcctccgttgaag

SEQ ID NO: 99282 - DNA, 25 bp, Saccharomyces pastorianus
gaagccgtaacctctaaccattggg

SEQ ID NO: 99283 - DNA, 25 bp, Saccharomyces pastorianus
ttggccaaggccgtcatcgaagctt

SEQ ID NO: 99284 - DNA, 25 bp, Saccharomyces pastorianus
gaagcttccaaccaaccagtggact

SEQ ID NO: 99285 - DNA, 25 bp, Saccharomyces pastorianus
tccccgtcgttgtcgcaattaacaa

SEQ ID NO: 99286 - DNA, 25 bp, Saccharomyces pastorianus
gtggacttccatttcctatatgacg

SEQ ID NO: 99287 - DNA, 25 bp, Saccharomyces pastorianus
gtaacttgccaatttgtatcgccaa

SEQ ID NO: 99288 - DNA, 25 bp, Saccharomyces pastorianus
aaccattcctggtttggctacctat

SEQ ID NO: 99289 - DNA, 25 bp, Saccharomyces pastorianus
aaagccgctttggaagctggtgcat

SEQ ID NO: 99290 - DNA, 25 bp, Saccharomyces pastorianus
cctttgtgtcttatgtatatcttcg

SEQ ID NO: 99291 - DNA, 25 bp, Saccharomyces pastorianus
tcgttccgcccaaatattgtgctag

SEQ ID NO: 99292 - DNA, 25 bp, Saccharomyces pastorianus
gtgtcttatgtatatcttcgttatt

SEQ ID NO: 99293 - DNA, 25 bp, Saccharomyces pastorianus
gtatatcttcgttattttatttcgt

SEQ ID NO: 99294 - DNA, 25 bp, Saccharomyces pastorianus
atggaacgctttttcctttgtgtct

SEQ ID NO: 99295 - DNA, 25 bp, Saccharomyces pastorianus
ttgtgtcttatgtatatcttcgtta

SEQ ID NO: 99296 - DNA, 25 bp, Saccharomyces pastorianus
tgcgatggaacgctttttcctttgt

SEQ ID NO: 99297 - DNA, 25 bp, Saccharomyces pastorianus
tttcgttccgcccaaatattgtgct

SEQ ID NO: 99298 - DNA, 25 bp, Saccharomyces pastorianus
tttcctttgtgtcttatgtatatct

SEQ ID NO: 99299 - DNA, 25 bp, Saccharomyces pastorianus
gatggaacgctttttcctttgtgtc

SEQ ID NO: 99300 - DNA, 25 bp, Saccharomyces pastorianus
gttccgcccaaatattgtgctagcc

SEQ ID NO: 99301 - DNA, 25 bp, Saccharomyces pastorianus
ttgaagaactcctacggcgtattcc

SEQ ID NO: 99302 - DNA, 25 bp, Saccharomyces pastorianus
gggacttattatgcccttggtacga

SEQ ID NO: 99303 - DNA, 25 bp, Saccharomyces pastorianus
atgcccttggtacgaagaatgtgac

SEQ ID NO: 99304 - DNA, 25 bp, Saccharomyces pastorianus
agcgctacaaccaacaagggactta

SEQ ID NO: 99305 - DNA, 25 bp, Saccharomyces pastorianus
cgtattcccctctacaacaaatatg

SEQ ID NO: 99306 - DNA, 25 bp, Saccharomyces pastorianus
caatatcaccaaagtctgtcagtta

SEQ ID NO: 99307 - DNA, 25 bp, Saccharomyces pastorianus
gtctgtcagttacatgattcttcta

SEQ ID NO: 99308 - DNA, 25 bp, Saccharomyces pastorianus
tgaatttaagttaccagcgctacaa

SEQ ID NO: 99309 - DNA, 25 bp, Saccharomyces pastorianus
tcgaccagtggtacaaggagcaata

SEQ ID NO: 99310 - DNA, 25 bp, Saccharomyces pastorianus
ggattttccacaagaaacagtgact

SEQ ID NO: 99311 - DNA, 25 bp, Saccharomyces pastorianus
agtgactaggtttcagatgcctgaa

SEQ ID NO: 99312 - DNA, 25 bp, Saccharomyces pastorianus
gagtgaaacccttctgcaactatgt

SEQ ID NO: 99313 - DNA, 25 bp, Saccharomyces pastorianus
ggatcgcatggaacgccaagccaaa

SEQ ID NO: 99314 - DNA, 25 bp, Saccharomyces pastorianus
aaaattgcaagctcgctgttttaag

SEQ ID NO: 99315 - DNA, 25 bp, Saccharomyces pastorianus
gaggtcatcgaattgattgccgctt

SEQ ID NO: 99316 - DNA, 25 bp, Saccharomyces pastorianus
taagcggtggttttattcagtttgc

SEQ ID NO: 99317 - DNA, 25 bp, Saccharomyces pastorianus
aacactgggtcctattgtagacgga

SEQ ID NO: 99318 - DNA, 25 bp, Saccharomyces pastorianus
ctaccgccgggtttgggatcgcatg

SEQ ID NO: 99319 - DNA, 25 bp, Saccharomyces pastorianus
aaggcctccaagtcgatacactata

SEQ ID NO: 99320 - DNA, 25 bp, Saccharomyces pastorianus
gattgccgcttatgctggtgttgaa

SEQ ID NO: 99321 - DNA, 25 bp, Saccharomyces pastorianus
ttcagtttgccggttttatcaagga

SEQ ID NO: 99322 - DNA, 25 bp, Saccharomyces pastorianus
gtgacggtggtaacgacctgccagc

SEQ ID NO: 99323 - DNA, 25 bp, Saccharomyces pastorianus
atgcctaccctgatcttctacaagg

SEQ ID NO: 99324 - DNA, 25 bp, Saccharomyces pastorianus
gaacaatattctgatgctgcttttt

SEQ ID NO: 99325 - DNA, 25 bp, Saccharomyces pastorianus
gatgaagtctcagatgttgctcaaa

SEQ ID NO: 99326 - DNA, 25 bp, Saccharomyces pastorianus
aggttaccagagtcgtcggtgccaa

SEQ ID NO: 99327 - DNA, 25 bp, Saccharomyces pastorianus
atccgcttctgaatacgacagtgct

SEQ ID NO: 99328 - DNA, 25 bp, Saccharomyces pastorianus
cctgatcttctacaagggcggtaag

SEQ ID NO: 99329 - DNA, 25 bp, Saccharomyces pastorianus
tggcgacaagttagtcgttgttgac

SEQ ID NO: 99330 - DNA, 25 bp, Saccharomyces pastorianus
agtcgttgttgacttttttgccaca

SEQ ID NO: 99331 - DNA, 25 bp, Saccharomyces pastorianus
gatgctgctttttacaagttggatg

SEQ ID NO: 99332 - DNA, 25 bp, Saccharomyces pastorianus
cagtgctttagcatctggcgacaag

SEQ ID NO: 99333 - DNA, 25 bp, Saccharomyces pastorianus
aagctgaagtttcttccatgcctac

SEQ ID NO: 99334 - DNA, 25 bp, Saccharomyces pastorianus
tgaccaccctgacgccgataaaaat

SEQ ID NO: 99335 - DNA, 25 bp, Saccharomyces pastorianus
gcagcaacggacattcttggtctaa

SEQ ID NO: 99336 - DNA, 25 bp, Saccharomyces pastorianus
acatccagacttttacgggtggcaa

SEQ ID NO: 99337 - DNA, 25 bp, Saccharomyces pastorianus
atcactcgagtggtcaagtccttta

SEQ ID NO: 99338 - DNA, 25 bp, Saccharomyces pastorianus
gcgaggaacccctgttggcaaagtt

SEQ ID NO: 99339 - DNA, 25 bp, Saccharomyces pastorianus
gttgacacatttgaggacgagccag

SEQ ID NO: 99340 - DNA, 25 bp, Saccharomyces pastorianus
gaagaaagtcttgttgagcccggta

SEQ ID NO: 99341 - DNA, 25 bp, Saccharomyces pastorianus
ggcgaggtcaccattgcaagcattg

SEQ ID NO: 99342 - DNA, 25 bp, Saccharomyces pastorianus
ctacgggtgttgttcaggttctgca

SEQ ID NO: 99343 - DNA, 25 bp, Saccharomyces pastorianus
gagggcacggaatttgttgacacat

SEQ ID NO: 99344 - DNA, 25 bp, Saccharomyces pastorianus
gtatcctgacaccaaagctgtactg

SEQ ID NO: 99345 - DNA, 25 bp, Saccharomyces pastorianus
gttggccgggtcgtacatacaaaat

SEQ ID NO: 99346 - DNA, 25 bp, Saccharomyces pastorianus
gaagcaacgaaagcccgctgggtag

SEQ ID NO: 99347 - DNA, 25 bp, Saccharomyces pastorianus
ggccatcgctgggaaagtcaagttc

SEQ ID NO: 99348 - DNA, 25 bp, Saccharomyces pastorianus
actagaatcccgtattttcactcaa

SEQ ID NO: 99349 - DNA, 25 bp, Saccharomyces pastorianus
gatgcagctgacttgtcccgtgata

SEQ ID NO: 99350 - DNA, 25 bp, Saccharomyces pastorianus
gacggtctgcgatcattgtggttat

SEQ ID NO: 99351 - DNA, 25 bp, Saccharomyces pastorianus
ttcactcaaacttcggattccatgg

SEQ ID NO: 99352 - DNA, 25 bp, Saccharomyces pastorianus
gaagccagtaaatatcccacacttt

SEQ ID NO: 99353 - DNA, 25 bp, Saccharomyces pastorianus
gtcattatcatgtcgacggtctgcg

SEQ ID NO: 99354 - DNA, 25 bp, Saccharomyces pastorianus
gtggtgccatccctgacaaaggaag

SEQ ID NO: 99355 - DNA, 25 bp, Saccharomyces pastorianus
gacgccaccgacatcgaaaacttta

SEQ ID NO: 99356 - DNA, 25 bp, Saccharomyces pastorianus
agctcgccgtgggaaattttattgc

SEQ ID NO: 99357 - DNA, 25 bp, Saccharomyces pastorianus
ggaggttatttcttctcaacaatac

SEQ ID NO: 99358 - DNA, 25 bp, Saccharomyces pastorianus
taacggaccttcttccacatttgaa

SEQ ID NO: 99359 - DNA, 25 bp, Saccharomyces pastorianus
ttgacttcccttttaggtgccctgg

SEQ ID NO: 99360 - DNA, 25 bp, Saccharomyces pastorianus
aagcgtaatctctactcctggtaac

SEQ ID NO: 99361 - DNA, 25 bp, Saccharomyces pastorianus
gaaagccttttgaacgagtcttgaa

SEQ ID NO: 99362 - DNA, 25 bp, Saccharomyces pastorianus
ggatgctacattcaacgagccgcaa

SEQ ID NO: 99363 - DNA, 25 bp, Saccharomyces pastorianus
taccttcagatgataagctcgccgt

SEQ ID NO: 99364 - DNA, 25 bp, Saccharomyces pastorianus
ggaatatgggatatcgcttctcaaa

SEQ ID NO: 99365 - DNA, 25 bp, Saccharomyces pastorianus
atagctgcacatgagtataccggat

SEQ ID NO: 99366 - DNA, 25 bp, Saccharomyces pastorianus
gatgcatgcaacaccagtttaccgt

SEQ ID NO: 99367 - DNA, 25 bp, Saccharomyces pastorianus
caattggtggtgctatgatgtctaa

SEQ ID NO: 99368 - DNA, 25 bp, Saccharomyces pastorianus
ggtgacaagtgcatcttctggttct

SEQ ID NO: 99369 - DNA, 25 bp, Saccharomyces pastorianus
tcagcaagatttgacggcaccgact

SEQ ID NO: 99370 - DNA, 25 bp, Saccharomyces pastorianus
tgcctcgcacgagtggtatctttat

SEQ ID NO: 99371 - DNA, 25 bp, Saccharomyces pastorianus
ggcaccgactatcctgacgttgagg

SEQ ID NO: 99372 - DNA, 25 bp, Saccharomyces pastorianus
tagaatggctactctgctgttcgca

SEQ ID NO: 99373 - DNA, 25 bp, Saccharomyces pastorianus
gtggcgttcccactaattaacattt

SEQ ID NO: 99374 - DNA, 25 bp, Saccharomyces pastorianus
atcttctggttctcatctcgttaca

SEQ ID NO: 99375 - DNA, 25 bp, Saccharomyces pastorianus
gatggtttaccaatgtttttactcg

SEQ ID NO: 99376 - DNA, 25 bp, Saccharomyces pastorianus
ttaggtcgatcgtcagagctgttga

SEQ ID NO: 99377 - DNA, 25 bp, Saccharomyces pastorianus
ggcgatgtaggcagtcttctattac

SEQ ID NO: 99378 - DNA, 25 bp, Saccharomyces pastorianus
gaggagcaatatcgattatctatgg

SEQ ID NO: 99379 - DNA, 25 bp, Saccharomyces pastorianus
aggcgagactcctaaaagtagcaga

SEQ ID NO: 99380 - DNA, 25 bp, Saccharomyces pastorianus
ggcaatccggatatcctgaagttca

SEQ ID NO: 99381 - DNA, 25 bp, Saccharomyces pastorianus
attgaatttgtagaccttgaggagc

SEQ ID NO: 99382 - DNA, 25 bp, Saccharomyces pastorianus
aggtgctcctaagaagatgaagaag

SEQ ID NO: 99383 - DNA, 25 bp, Saccharomyces pastorianus
gatcaaaatttcaacccatcaggta

SEQ ID NO: 99384 - DNA, 25 bp, Saccharomyces pastorianus
aatgagcgattaaagggcccttctg

SEQ ID NO: 99385 - DNA, 25 bp, Saccharomyces pastorianus
taaagggcccttctgtggcaagcta

SEQ ID NO: 99386 - DNA, 25 bp, Saccharomyces pastorianus
gtggcaagctactacggcaatccgg

SEQ ID NO: 99387 - DNA, 25 bp, Saccharomyces pastorianus
gaacgtaccaaaggcgagactccta

SEQ ID NO: 99388 - DNA, 25 bp, Saccharomyces pastorianus
accggttctaagattctaaatgagc

SEQ ID NO: 99389 - DNA, 25 bp, Saccharomyces pastorianus
tattctagtgttcttgactcccaca

SEQ ID NO: 99390 - DNA, 25 bp, Saccharomyces pastorianus
ggctagtctttttaacctgttctgc

SEQ ID NO: 99391 - DNA, 25 bp, Saccharomyces pastorianus
gatcctaaacgtctacccggtggca

SEQ ID NO: 99392 - DNA, 25 bp, Saccharomyces pastorianus
aattgagctcaaaaccacggtttct

SEQ ID NO: 99393 - DNA, 25 bp, Saccharomyces pastorianus
aaccattttccattgttcgcattat

SEQ ID NO: 99394 - DNA, 25 bp, Saccharomyces pastorianus
atgttctttattcttcactgcctag

SEQ ID NO: 99395 - DNA, 25 bp, Saccharomyces pastorianus
atttctcgtttgctactgtacgaaa

SEQ ID NO: 99396 - DNA, 25 bp, Saccharomyces pastorianus
gactcccacagtgatggcattctat

SEQ ID NO: 99397 - DNA, 25 bp, Saccharomyces pastorianus
tctcggaggctgtgattgcactcat

SEQ ID NO: 99398 - DNA, 25 bp, Saccharomyces pastorianus
acccggtggcatttcaattgagctc

SEQ ID NO: 99399 - DNA, 25 bp, Saccharomyces pastorianus
ttcactgcctagtaagccattgagt

SEQ ID NO: 99400 - DNA, 25 bp, Saccharomyces pastorianus
gtttcccatatgaccaggcatcttt

SEQ ID NO: 99401 - DNA, 25 bp, Saccharomyces pastorianus
aggcatctttcttcctggcagtacc

SEQ ID NO: 99402 - DNA, 25 bp, Saccharomyces pastorianus
gttttgaccataagaaccaccgtgt

SEQ ID NO: 99403 - DNA, 25 bp, Saccharomyces pastorianus
gaaccaccgtgtctatgcataatag

SEQ ID NO: 99404 - DNA, 25 bp, Saccharomyces pastorianus
aacattattttcatcgtcgactttc

SEQ ID NO: 99405 - DNA, 25 bp, Saccharomyces pastorianus
gatagtaacatgctcgtttcccata

SEQ ID NO: 99406 - DNA, 25 bp, Saccharomyces pastorianus
gaaactgtttttgggcccagccaca

SEQ ID NO: 99407 - DNA, 25 bp, Saccharomyces pastorianus
tcaaacccttgaatccatacctttt

SEQ ID NO: 99408 - DNA, 25 bp, Saccharomyces pastorianus
gccacagagcctttaacccaaataa

SEQ ID NO: 99409 - DNA, 25 bp, Saccharomyces pastorianus
ctacctgggtcttggttttgaccat

SEQ ID NO: 99410 - DNA, 25 bp, Saccharomyces pastorianus
aatacttatacgttttatgctcaag

SEQ ID NO: 99411 - DNA, 25 bp, Saccharomyces pastorianus
gaaatgttttacagttcgcctacga

SEQ ID NO: 99412 - DNA, 25 bp, Saccharomyces pastorianus
acaaccgccgtcaacgttatcaaat

SEQ ID NO: 99413 - DNA, 25 bp, Saccharomyces pastorianus
ttcgcattccttgacgtcattcaaa

SEQ ID NO: 99414 - DNA, 25 bp, Saccharomyces pastorianus
tgaccaacccatcagaactttctat

SEQ ID NO: 99415 - DNA, 25 bp, Saccharomyces pastorianus
gaaacctcgctataagcctgcagga

SEQ ID NO: 99416 - DNA, 25 bp, Saccharomyces pastorianus
aattcatttattccacctcttcgca

SEQ ID NO: 99417 - DNA, 25 bp, Saccharomyces pastorianus
ggatgacactgacatcttgcagcct

SEQ ID NO: 99418 - DNA, 25 bp, Saccharomyces pastorianus
aacatcatcttctttatcacaaccg

SEQ ID NO: 99419 - DNA, 25 bp, Saccharomyces pastorianus
taaaggcccaatatctccctggtaa

SEQ ID NO: 99420 - DNA, 25 bp, Saccharomyces pastorianus
tggtaactcatccactacaacatca

SEQ ID NO: 99421 - DNA, 25 bp, Saccharomyces pastorianus
gaacatcggagatttgcctacgcct

SEQ ID NO: 99422 - DNA, 25 bp, Saccharomyces pastorianus
gggaccctaaatacttccagttcag

SEQ ID NO: 99423 - DNA, 25 bp, Saccharomyces pastorianus
gcatgacgcctaccgctttaaaaga

SEQ ID NO: 99424 - DNA, 25 bp, Saccharomyces pastorianus
gaattcactaccaatcagttacgga

SEQ ID NO: 99425 - DNA, 25 bp, Saccharomyces pastorianus
gatgcagctgactattcgctcgaaa

SEQ ID NO: 99426 - DNA, 25 bp, Saccharomyces pastorianus
ggctaaagagctattgaccctgtca

SEQ ID NO: 99427 - DNA, 25 bp, Saccharomyces pastorianus
ccagttcagggatcagtattacgtg

SEQ ID NO: 99428 - DNA, 25 bp, Saccharomyces pastorianus
tacggagtatccttgattcggtgga

SEQ ID NO: 99429 - DNA, 25 bp, Saccharomyces pastorianus
aacgcattccgatcatctgagcaat

SEQ ID NO: 99430 - DNA, 25 bp, Saccharomyces pastorianus
aatgagcttgactttcagttgatga

SEQ ID NO: 99431 - DNA, 25 bp, Saccharomyces pastorianus
atacccactaaattacggtcgcacg

SEQ ID NO: 99432 - DNA, 25 bp, Saccharomyces pastorianus
tctttcgaaaactcgcatgacgcct

SEQ ID NO: 99433 - DNA, 25 bp, Saccharomyces pastorianus
gagatgagtttcagccccaatggta

SEQ ID NO: 99434 - DNA, 25 bp, Saccharomyces pastorianus
agaattggctggtgtcaagactcta

SEQ ID NO: 99435 - DNA, 25 bp, Saccharomyces pastorianus
ctgtgtggtcgatatgcaatgctca

SEQ ID NO: 99436 - DNA, 25 bp, Saccharomyces pastorianus
ggttcgagccatcccttgaaaaatt

SEQ ID NO: 99437 - DNA, 25 bp, Saccharomyces pastorianus
gaccactctcgtgccaatggttcga

SEQ ID NO: 99438 - DNA, 25 bp, Saccharomyces pastorianus
atggtagtaagttggccgtattgtc

SEQ ID NO: 99439 - DNA, 25 bp, Saccharomyces pastorianus
agaacccaatctttgacgctcatag

SEQ ID NO: 99440 - DNA, 25 bp, Saccharomyces pastorianus
cagaaacgaatacgccagaccactc

SEQ ID NO: 99441 - DNA, 25 bp, Saccharomyces pastorianus
gttccgtccagggtacacttataag

SEQ ID NO: 99442 - DNA, 25 bp, Saccharomyces pastorianus
aaatcagcgggtgagcccaccagat

SEQ ID NO: 99443 - DNA, 25 bp, Saccharomyces pastorianus
aagaatcttcagtacgcataacggt

SEQ ID NO: 99444 - DNA, 25 bp, Saccharomyces pastorianus
tatctctcatttttgctgtttctgc

SEQ ID NO: 99445 - DNA, 25 bp, Saccharomyces pastorianus
gctcacatcggccttttgatattac

SEQ ID NO: 99446 - DNA, 25 bp, Saccharomyces pastorianus
agaccaatttcgatggctctcattc

SEQ ID NO: 99447 - DNA, 25 bp, Saccharomyces pastorianus
aatttacaatgattccgcctggaga

SEQ ID NO: 99448 - DNA, 25 bp, Saccharomyces pastorianus
gaagagcccaacttttcgatcagat

SEQ ID NO: 99449 - DNA, 25 bp, Saccharomyces pastorianus
gaatctctcactgacgtcttttata

SEQ ID NO: 99450 - DNA, 25 bp, Saccharomyces pastorianus
taatgccaataactctgctcacatc

SEQ ID NO: 99451 - DNA, 25 bp, Saccharomyces pastorianus
ctgttttcagtgctgctgctatcaa

SEQ ID NO: 99452 - DNA, 25 bp, Saccharomyces pastorianus
ggaggtgtcatctctaacactgttt

SEQ ID NO: 99453 - DNA, 25 bp, Saccharomyces pastorianus
ggttgcttgcattatttctacagtc

SEQ ID NO: 99454 - DNA, 25 bp, Saccharomyces pastorianus
ttggcacaaagttccatgctcgctt

SEQ ID NO: 99455 - DNA, 25 bp, Saccharomyces pastorianus
tatattgccctatttcttttggaga

SEQ ID NO: 99456 - DNA, 25 bp, Saccharomyces pastorianus
aatctatcatttctccactttcgca

SEQ ID NO: 99457 - DNA, 25 bp, Saccharomyces pastorianus
cctgcagctgcgaacctttgataaa

SEQ ID NO: 99458 - DNA, 25 bp, Saccharomyces pastorianus
ggttcatgctcttcaatgtcgttac

SEQ ID NO: 99459 - DNA, 25 bp, Saccharomyces pastorianus
tacacgttctacctcttcagaagat

SEQ ID NO: 99460 - DNA, 25 bp, Saccharomyces pastorianus
ggccttaataacgtgcaccatggta

SEQ ID NO: 99461 - DNA, 25 bp, Saccharomyces pastorianus
ttgaagtgatgagacccaaccagct

SEQ ID NO: 99462 - DNA, 25 bp, Saccharomyces pastorianus
gaacctcgttactatatattgccct

SEQ ID NO: 99463 - DNA, 25 bp, Saccharomyces pastorianus
taactatcgttccatcacccttatt

SEQ ID NO: 99464 - DNA, 25 bp, Saccharomyces pastorianus
gttatcttttccaaggtctcatttc

SEQ ID NO: 99465 - DNA, 25 bp, Saccharomyces pastorianus
gacacatgtatcgtggacggcctta

SEQ ID NO: 99466 - DNA, 25 bp, Saccharomyces pastorianus
gtcgccgtcagacaatttgctttca

SEQ ID NO: 99467 - DNA, 25 bp, Saccharomyces pastorianus
gacatgtgcaaagcattgccttcat

SEQ ID NO: 99468 - DNA, 25 bp, Saccharomyces pastorianus
atacgtctgtgtcttgcaccaagag

SEQ ID NO: 99469 - DNA, 25 bp, Saccharomyces pastorianus
aggcaaaaatttgcgtcgccgtcag

SEQ ID NO: 99470 - DNA, 25 bp, Saccharomyces pastorianus
attggcatcccaagatatagtgaca

SEQ ID NO: 99471 - DNA, 25 bp, Saccharomyces pastorianus
aacttgaacacgcaacttaggcaaa

SEQ ID NO: 99472 - DNA, 25 bp, Saccharomyces pastorianus
ttgccttcatcgacaggtattcaag

SEQ ID NO: 99473 - DNA, 25 bp, Saccharomyces pastorianus
gagtcttaaagttgcgcataacacg

SEQ ID NO: 99474 - DNA, 25 bp, Saccharomyces pastorianus
tcatacggcggattggcatcccaag

SEQ ID NO: 99475 - DNA, 25 bp, Saccharomyces pastorianus
aatcgcaacccaaaacactggagtt

SEQ ID NO: 99476 - DNA, 25 bp, Saccharomyces pastorianus
aaacttttctcagccaaatcgcaac

SEQ ID NO: 99477 - DNA, 25 bp, Saccharomyces pastorianus
ggaaaagtcacctgcgcatgccgat

SEQ ID NO: 99478 - DNA, 25 bp, Saccharomyces pastorianus
gttccattggtgttactatcgtctg

SEQ ID NO: 99479 - DNA, 25 bp, Saccharomyces pastorianus
acgacgctttaagacactactctct

SEQ ID NO: 99480 - DNA, 25 bp, Saccharomyces pastorianus
ggccaatttactggattcaatcttc

SEQ ID NO: 99481 - DNA, 25 bp, Saccharomyces pastorianus
gttacaccacttttagctatgttag

SEQ ID NO: 99482 - DNA, 25 bp, Saccharomyces pastorianus
ttttcctgcaggattagtctctgaa

SEQ ID NO: 99483 - DNA, 25 bp, Saccharomyces pastorianus
aaattaagcttagtgctccggctgg

SEQ ID NO: 99484 - DNA, 25 bp, Saccharomyces pastorianus
actctctttgttctgcttcaactaa

SEQ ID NO: 99485 - DNA, 25 bp, Saccharomyces pastorianus
acacttgcggctctgtagcttttat

SEQ ID NO: 99486 - DNA, 25 bp, Saccharomyces pastorianus
ctgaaccactgattgatgctgcatt

SEQ ID NO: 99487 - DNA, 25 bp, Saccharomyces pastorianus
ctccggctggtgatttcgcaataaa

SEQ ID NO: 99488 - DNA, 25 bp, Saccharomyces pastorianus
tagtaaaatgctgtactccaccgcc

SEQ ID NO: 99489 - DNA, 25 bp, Saccharomyces pastorianus
aagacgcttcgacagcaacgccaag

SEQ ID NO: 99490 - DNA, 25 bp, Saccharomyces pastorianus
gttccgcagttctcgtctatgaaga

SEQ ID NO: 99491 - DNA, 25 bp, Saccharomyces pastorianus
aattacgagtcacagcagcgcctga

SEQ ID NO: 99492 - DNA, 25 bp, Saccharomyces pastorianus
cgagttattctcgtccaacaacggg

SEQ ID NO: 99493 - DNA, 25 bp, Saccharomyces pastorianus
gattccagtgattgggttccgcagt

SEQ ID NO: 99494 - DNA, 25 bp, Saccharomyces pastorianus
ggtacgagcccataacacgtcggga

SEQ ID NO: 99495 - DNA, 25 bp, Saccharomyces pastorianus
tttcctcctctgtcgaatcaaaact

SEQ ID NO: 99496 - DNA, 25 bp, Saccharomyces pastorianus
gtttcaattcgacgcggagttccaa

SEQ ID NO: 99497 - DNA, 25 bp, Saccharomyces pastorianus
aaagacaagttgcacttacccacct

SEQ ID NO: 99498 - DNA, 25 bp, Saccharomyces pastorianus
gggacaacccaacggatgcgtttca

SEQ ID NO: 99499 - DNA, 25 bp, Saccharomyces pastorianus
attgttggctgacatcatctctgaa

SEQ ID NO: 99500 - DNA, 25 bp, Saccharomyces pastorianus
aatgaagcttctccaaacactgacg

SEQ ID NO: 99501 - DNA, 25 bp, Saccharomyces pastorianus
aagcttctagcgtatatagcactca

SEQ ID NO: 99502 - DNA, 25 bp, Saccharomyces pastorianus
gattcaagttcgatactcacggtga

SEQ ID NO: 99503 - DNA, 25 bp, Saccharomyces pastorianus
gtgacatcctgtccggtagattaaa

SEQ ID NO: 99504 - DNA, 25 bp, Saccharomyces pastorianus
accgcttccagatttgctgtcaaat

SEQ ID NO: 99505 - DNA, 25 bp, Saccharomyces pastorianus
atcttctaaagaccgtgtcaccgct

SEQ ID NO: 99506 - DNA, 25 bp, Saccharomyces pastorianus
gtaccaactgttgagcacgaagatg

SEQ ID NO: 99507 - DNA, 25 bp, Saccharomyces pastorianus
gggttttgaagttcactgggctgaa

SEQ ID NO: 99508 - DNA, 25 bp, Saccharomyces pastorianus
gtttaatcactggtgctgtttccgt

SEQ ID NO: 99509 - DNA, 25 bp, Saccharomyces pastorianus
tgctgtttccgtgtacactccagaa

SEQ ID NO: 99510 - DNA, 25 bp, Saccharomyces pastorianus
gcatgcctggtacaatctacgggtt

SEQ ID NO: 99511 - DNA, 25 bp, Saccharomyces pastorianus
gtaccatacatataacctcatctat

SEQ ID NO: 99512 - DNA, 25 bp, Saccharomyces pastorianus
gaaaaacatatcgagattcctcaat

SEQ ID NO: 99513 - DNA, 25 bp, Saccharomyces pastorianus
ctttggcatgcctggtacaatctac

SEQ ID NO: 99514 - DNA, 25 bp, Saccharomyces pastorianus
aatctacgggttacagccatcgttg

SEQ ID NO: 99515 - DNA, 25 bp, Saccharomyces pastorianus
gatctaactaactttggcatgcctg

SEQ ID NO: 99516 - DNA, 25 bp, Saccharomyces pastorianus
gggttacagccatcgttgaaaacga

SEQ ID NO: 99517 - DNA, 25 bp, Saccharomyces pastorianus
tttaccctgatctaactaactttgg

SEQ ID NO: 99518 - DNA, 25 bp, Saccharomyces pastorianus
aacctcatctataatttttaccctg

SEQ ID NO: 99519 - DNA, 25 bp, Saccharomyces pastorianus
gatactatccaaacatgtaaatttt

SEQ ID NO: 99520 - DNA, 25 bp, Saccharomyces pastorianus
gattcctcaatccatacaccattat

SEQ ID NO: 99521 - DNA, 25 bp, Saccharomyces pastorianus
ggtctaacaacccattttcgctaga

SEQ ID NO: 99522 - DNA, 25 bp, Saccharomyces pastorianus
gtggccggtcaacttcagtatgcct

SEQ ID NO: 99523 - DNA, 25 bp, Saccharomyces pastorianus
taatcccttcttgataccgcaacaa

SEQ ID NO: 99524 - DNA, 25 bp, Saccharomyces pastorianus
ggtaatccatttcaggctcaaaacg

SEQ ID NO: 99525 - DNA, 25 bp, Saccharomyces pastorianus
gatgaccggcactttagatccaaca

SEQ ID NO: 99526 - DNA, 25 bp, Saccharomyces pastorianus
ggcacatacatgacgagtcccgtgg

SEQ ID NO: 99527 - DNA, 25 bp, Saccharomyces pastorianus
gtttgtccccatcaatcaacaacag

SEQ ID NO: 99528 - DNA, 25 bp, Saccharomyces pastorianus
ggtatgttatggttcccactgcgtt

SEQ ID NO: 99529 - DNA, 25 bp, Saccharomyces pastorianus
gggatgtatgcttctaaccttcaat

SEQ ID NO: 99530 - DNA, 25 bp, Saccharomyces pastorianus
gttgacatctgcgtctacaatgcca

SEQ ID NO: 99531 - DNA, 25 bp, Saccharomyces pastorianus
agtatgcctctactggtgcgcagca

SEQ ID NO: 99532 - DNA, 25 bp, Saccharomyces pastorianus
cacaaacacgcctctatatctatta

SEQ ID NO: 99533 - DNA, 25 bp, Saccharomyces pastorianus
ccaatgcgtgggtaatctcttgcaa

SEQ ID NO: 99534 - DNA, 25 bp, Saccharomyces pastorianus
atgcttgatattgttactctcgtag

SEQ ID NO: 99535 - DNA, 25 bp, Saccharomyces pastorianus
atagggtccacatatttttgctttg

SEQ ID NO: 99536 - DNA, 25 bp, Saccharomyces pastorianus
ttgcaatcctcttgcgctcgaagtg

SEQ ID NO: 99537 - DNA, 25 bp, Saccharomyces pastorianus
gtccaggctgtatcagacaacctta

SEQ ID NO: 99538 - DNA, 25 bp, Saccharomyces pastorianus
cagtcgcgcttgtatgcttgatatt

SEQ ID NO: 99539 - DNA, 25 bp, Saccharomyces pastorianus
ggccatctttattttggtcgcccct

SEQ ID NO: 99540 - DNA, 25 bp, Saccharomyces pastorianus
gacaaccttatatccaatgcgtggg

SEQ ID NO: 99541 - DNA, 25 bp, Saccharomyces pastorianus
actctcgtagatgttagcaagcgta

SEQ ID NO: 99542 - DNA, 25 bp, Saccharomyces pastorianus
ggtagccgagacagtcgcgcttgta

SEQ ID NO: 99543 - DNA, 25 bp, Saccharomyces pastorianus
gaactatctgttagcttccgtcaat

SEQ ID NO: 99544 - DNA, 25 bp, Saccharomyces pastorianus
gcgacggcactgatttggacgcgtt

SEQ ID NO: 99545 - DNA, 25 bp, Saccharomyces pastorianus
aatttatctttattagcgacggcac

SEQ ID NO: 99546 - DNA, 25 bp, Saccharomyces pastorianus
ggttgcactgcaggctatcatctaa

SEQ ID NO: 99547 - DNA, 25 bp, Saccharomyces pastorianus
gctggtcttcgcagggctaaatgat

SEQ ID NO: 99548 - DNA, 25 bp, Saccharomyces pastorianus
tgcagccgtcgcagcaaagcaaact

SEQ ID NO: 99549 - DNA, 25 bp, Saccharomyces pastorianus
gtcatcaagcccaagaactatctgt

SEQ ID NO: 99550 - DNA, 25 bp, Saccharomyces pastorianus
taaaacagtacacttctgggcccca

SEQ ID NO: 99551 - DNA, 25 bp, Saccharomyces pastorianus
tccgtcaattttttcctgggttgca

SEQ ID NO: 99552 - DNA, 25 bp, Saccharomyces pastorianus
aagcaaactgcatccacatcgatga

SEQ ID NO: 99553 - DNA, 25 bp, Saccharomyces pastorianus
catcagcttttaattttgcctttag

SEQ ID NO: 99554 - DNA, 25 bp, Saccharomyces pastorianus
gaaggccgcgacattatcaataagt

SEQ ID NO: 99555 - DNA, 25 bp, Saccharomyces pastorianus
attgtggcacgtttgcaaggtacca

SEQ ID NO: 99556 - DNA, 25 bp, Saccharomyces pastorianus
agaagttagggtccccattgtggca

SEQ ID NO: 99557 - DNA, 25 bp, Saccharomyces pastorianus
tattcctggagggacttatcacaag

SEQ ID NO: 99558 - DNA, 25 bp, Saccharomyces pastorianus
tcgtcaatattttcggcggtatcgt

SEQ ID NO: 99559 - DNA, 25 bp, Saccharomyces pastorianus
aatggaggcgatcctgcgaactttt

SEQ ID NO: 99560 - DNA, 25 bp, Saccharomyces pastorianus
atggtgctggtttggctatggctac

SEQ ID NO: 99561 - DNA, 25 bp, Saccharomyces pastorianus
atcatgtgtacagacgccaaatttg

SEQ ID NO: 99562 - DNA, 25 bp, Saccharomyces pastorianus
aaggtttcgaattgatcttatccaa

SEQ ID NO: 99563 - DNA, 25 bp, Saccharomyces pastorianus
taagatgtgactatgttgccctggg

SEQ ID NO: 99564 - DNA, 25 bp, Saccharomyces pastorianus
gaagccgccagagaactagaagtta

SEQ ID NO: 99565 - DNA, 25 bp, Saccharomyces pastorianus
caacggacacatacctttcgaaagt

SEQ ID NO: 99566 - DNA, 25 bp, Saccharomyces pastorianus
agtctggtttacacgctgcattgaa

SEQ ID NO: 99567 - DNA, 25 bp, Saccharomyces pastorianus
tgaggagttaaacgcgcacctatta

SEQ ID NO: 99568 - DNA, 25 bp, Saccharomyces pastorianus
ttacacttgttacccacaacggaca

SEQ ID NO: 99569 - DNA, 25 bp, Saccharomyces pastorianus
gatgcagcagcagctatcggattga

SEQ ID NO: 99570 - DNA, 25 bp, Saccharomyces pastorianus
gatattgccacaggtaacacatcag

SEQ ID NO: 99571 - DNA, 25 bp, Saccharomyces pastorianus
agacccatattgtcctcgcaattta

SEQ ID NO: 99572 - DNA, 25 bp, Saccharomyces pastorianus
ggttactctctagaaacagacccat

SEQ ID NO: 99573 - DNA, 25 bp, Saccharomyces pastorianus
gtctgaacgcagatttcttacttga

SEQ ID NO: 99574 - DNA, 25 bp, Saccharomyces pastorianus
gaaagttagtgacgacccagataat

SEQ ID NO: 99575 - DNA, 25 bp, Saccharomyces pastorianus
tggtgatttcacaactgctgatagt

SEQ ID NO: 99576 - DNA, 25 bp, Saccharomyces pastorianus
aagggacaggcatcccatactgttg

SEQ ID NO: 99577 - DNA, 25 bp, Saccharomyces pastorianus
gacgtatcttcatcgctatcttgga

SEQ ID NO: 99578 - DNA, 25 bp, Saccharomyces pastorianus
gggtgcacgaggaattccatccgca

SEQ ID NO: 99579 - DNA, 25 bp, Saccharomyces pastorianus
ggtaacgtcccatttggtgtgcaat

SEQ ID NO: 99580 - DNA, 25 bp, Saccharomyces pastorianus
aaaattttgacctcctgtgttgctg

SEQ ID NO: 99581 - DNA, 25 bp, Saccharomyces pastorianus
attcatccggtaagtcaggcgtcat

SEQ ID NO: 99582 - DNA, 25 bp, Saccharomyces pastorianus
gctcccttggtatctttcaatggat

SEQ ID NO: 99583 - DNA, 25 bp, Saccharomyces pastorianus
aggcgtcattgcgagtagttcaaca

SEQ ID NO: 99584 - DNA, 25 bp, Saccharomyces pastorianus
gattcaccagtttttgaacctcatg

SEQ ID NO: 99585 - DNA, 25 bp, Saccharomyces pastorianus
gttccggaaacgctgatgggtccaa

SEQ ID NO: 99586 - DNA, 25 bp, Saccharomyces pastorianus
acgtctcattgctttattcggatat

SEQ ID NO: 99587 - DNA, 25 bp, Saccharomyces pastorianus
acaggatcacctttacattagcagt

SEQ ID NO: 99588 - DNA, 25 bp, Saccharomyces pastorianus
tgcatcattcgacctaatcttactc

SEQ ID NO: 99589 - DNA, 25 bp, Saccharomyces pastorianus
gcgaactacctagtgtgctggttaa

SEQ ID NO: 99590 - DNA, 25 bp, Saccharomyces pastorianus
gattggttccatttgaggatccgca

SEQ ID NO: 99591 - DNA, 25 bp, Saccharomyces pastorianus
aaacagttttggacccgctagtgca

SEQ ID NO: 99592 - DNA, 25 bp, Saccharomyces pastorianus
tggagaatcttcttctgtgacgaaa

SEQ ID NO: 99593 - DNA, 25 bp, Saccharomyces pastorianus
gaagaatacgcttccttgctgcctg

SEQ ID NO: 99594 - DNA, 25 bp, Saccharomyces pastorianus
agtaacatggtttctcgacgacgaa

SEQ ID NO: 99595 - DNA, 25 bp, Saccharomyces pastorianus
aaccaattgaacttaggccccactg

SEQ ID NO: 99596 - DNA, 25 bp, Saccharomyces pastorianus
taggccccactgtatacactatcaa

SEQ ID NO: 99597 - DNA, 25 bp, Saccharomyces pastorianus
tggacatacatgctcgttgtttccc

SEQ ID NO: 99598 - DNA, 25 bp, Saccharomyces pastorianus
tacggtcccgccatatagcagttac

SEQ ID NO: 99599 - DNA, 25 bp, Saccharomyces pastorianus
ttaacttctctgacgtccagcataa

SEQ ID NO: 99600 - DNA, 25 bp, Saccharomyces pastorianus
aaaacatattaacagcgcatcgcaa

SEQ ID NO: 99601 - DNA, 25 bp, Saccharomyces pastorianus
ggagcttttgcccagcagcagcagc

SEQ ID NO: 99602 - DNA, 25 bp, Saccharomyces pastorianus
gcttctaactcacctgctttaggag

SEQ ID NO: 99603 - DNA, 25 bp, Saccharomyces pastorianus
atatagcagttactccactccattt

SEQ ID NO: 99604 - DNA, 25 bp, Saccharomyces pastorianus
aatacatcatcgaccttaacttctc

SEQ ID NO: 99605 - DNA, 25 bp, Saccharomyces pastorianus
agaccttcgaacaagcttatcccta

SEQ ID NO: 99606 - DNA, 25 bp, Saccharomyces pastorianus
gacgtccagcataattcccaagagt

SEQ ID NO: 99607 - DNA, 25 bp, Saccharomyces pastorianus
aatgccgtatcatcctggagctttt

SEQ ID NO: 99608 - DNA, 25 bp, Saccharomyces pastorianus
tgatgaactctctttcgaactctgc

SEQ ID NO: 99609 - DNA, 25 bp, Saccharomyces pastorianus
ggttttgtttcttctgaaagtccat

SEQ ID NO: 99610 - DNA, 25 bp, Saccharomyces pastorianus
ggtgccgccagtgccctatataata

SEQ ID NO: 99611 - DNA, 25 bp, Saccharomyces pastorianus
tcagataatgatctcccagtgggat

SEQ ID NO: 99612 - DNA, 25 bp, Saccharomyces pastorianus
ttatttcataccactgcagtaccct

SEQ ID NO: 99613 - DNA, 25 bp, Saccharomyces pastorianus
aaagtccattggatgctgctaaggc

SEQ ID NO: 99614 - DNA, 25 bp, Saccharomyces pastorianus
aatcctgcagcaaatcatattccta

SEQ ID NO: 99615 - DNA, 25 bp, Saccharomyces pastorianus
aatgccttgatgactcagaaccaat

SEQ ID NO: 99616 - DNA, 25 bp, Saccharomyces pastorianus
gatgccaatgttcccatcatttggg

SEQ ID NO: 99617 - DNA, 25 bp, Saccharomyces pastorianus
aagtgttatctgtttcttttgctca

SEQ ID NO: 99618 - DNA, 25 bp, Saccharomyces pastorianus
tttgggtttattccacaggtgccgc

SEQ ID NO: 99619 - DNA, 25 bp, Saccharomyces pastorianus
tatataatacctccgcagaatcctg

SEQ ID NO: 99620 - DNA, 25 bp, Saccharomyces pastorianus
gagcatagcaaaagcagcgtttcga

SEQ ID NO: 99621 - DNA, 25 bp, Saccharomyces pastorianus
ttgcagattggatcgggcctacact

SEQ ID NO: 99622 - DNA, 25 bp, Saccharomyces pastorianus
acaagatgacgcttccgccaaagaa

SEQ ID NO: 99623 - DNA, 25 bp, Saccharomyces pastorianus
gtaacaatactgctgccgttttgga

SEQ ID NO: 99624 - DNA, 25 bp, Saccharomyces pastorianus
agcgtttcgaactcatatagtgcca

SEQ ID NO: 99625 - DNA, 25 bp, Saccharomyces pastorianus
gaaggcatttttcaagcttcccgtt

SEQ ID NO: 99626 - DNA, 25 bp, Saccharomyces pastorianus
aagcttcccgttttgcagattggat

SEQ ID NO: 99627 - DNA, 25 bp, Saccharomyces pastorianus
tacacttccgcacacaagatgacgc

SEQ ID NO: 99628 - DNA, 25 bp, Saccharomyces pastorianus
gcgaaactccagtctactttcagta

SEQ ID NO: 99629 - DNA, 25 bp, Saccharomyces pastorianus
gtgacccagggttgcaacgaaataa

SEQ ID NO: 99630 - DNA, 25 bp, Saccharomyces pastorianus
ctgccgttttggactggctgaaaga

SEQ ID NO: 99631 - DNA, 25 bp, Saccharomyces pastorianus
atcaaggctgctcaagactctttcg

SEQ ID NO: 99632 - DNA, 25 bp, Saccharomyces pastorianus
gaaccaattgttgagaatcgaagaa

SEQ ID NO: 99633 - DNA, 25 bp, Saccharomyces pastorianus
aagacactttcattgctgacttggt

SEQ ID NO: 99634 - DNA, 25 bp, Saccharomyces pastorianus
ggtcaaatcaagactggtgctccag

SEQ ID NO: 99635 - DNA, 25 bp, Saccharomyces pastorianus
ggtgctccagctagatccgaaagat

SEQ ID NO: 99636 - DNA, 25 bp, Saccharomyces pastorianus
atggtttcccacagatctggtgaaa

SEQ ID NO: 99637 - DNA, 25 bp, Saccharomyces pastorianus
aaccaaatcggtaccttgtctgaat

SEQ ID NO: 99638 - DNA, 25 bp, Saccharomyces pastorianus
aattgttgctgatgacttgactgtc

SEQ ID NO: 99639 - DNA, 25 bp, Saccharomyces pastorianus
gatctggtgaaactgaagacacttt

SEQ ID NO: 99640 - DNA, 25 bp, Saccharomyces pastorianus
tgatgacttgactgtcaccaaccca

SEQ ID NO: 99641 - DNA, 25 bp, Saccharomyces pastorianus
gtcggtttgagaactggtcaaatca

SEQ ID NO: 99642 - DNA, 25 bp, Saccharomyces pastorianus
tgaaatttacccaccaagagtcgtt

SEQ ID NO: 99643 - DNA, 25 bp, Saccharomyces pastorianus
gttgtcattacctccagaatcattc

SEQ ID NO: 99644 - DNA, 25 bp, Saccharomyces pastorianus
atcaatgctgcttttgtcttggaag

SEQ ID NO: 99645 - DNA, 25 bp, Saccharomyces pastorianus
gaagatggctctatggacaccgata

SEQ ID NO: 99646 - DNA, 25 bp, Saccharomyces pastorianus
gatatccgtcgaacaacgttctatt

SEQ ID NO: 99647 - DNA, 25 bp, Saccharomyces pastorianus
tttcctcctgtggtagccctaagaa

SEQ ID NO: 99648 - DNA, 25 bp, Saccharomyces pastorianus
agaatcattcactgcacttatcaat

SEQ ID NO: 99649 - DNA, 25 bp, Saccharomyces pastorianus
cattgagcttagaacccttttgggc

SEQ ID NO: 99650 - DNA, 25 bp, Saccharomyces pastorianus
ttatatcacactaattttcctcctg

SEQ ID NO: 99651 - DNA, 25 bp, Saccharomyces pastorianus
ttatcgaggcttttgttgtcattac

SEQ ID NO: 99652 - DNA, 25 bp, Saccharomyces pastorianus
ggtttagacattggctcttcattga

SEQ ID NO: 99653 - DNA, 25 bp, Saccharomyces pastorianus
tgctcaaggtttcatgctgatccgc

SEQ ID NO: 99654 - DNA, 25 bp, Saccharomyces pastorianus
agaagaactattgcccttgctgcta

SEQ ID NO: 99655 - DNA, 25 bp, Saccharomyces pastorianus
agagcttcgaaacttctggcagcac

SEQ ID NO: 99656 - DNA, 25 bp, Saccharomyces pastorianus
tgctgctacttacggtattccaact

SEQ ID NO: 99657 - DNA, 25 bp, Saccharomyces pastorianus
atgctgatccgcgaagctgccagat

SEQ ID NO: 99658 - DNA, 25 bp, Saccharomyces pastorianus
gaggctaccagcaaacttgttacaa

SEQ ID NO: 99659 - DNA, 25 bp, Saccharomyces pastorianus
gcaacgtgattattttggcgctcat

SEQ ID NO: 99660 - DNA, 25 bp, Saccharomyces pastorianus
agttcttcgcttctgcagttaccaa

SEQ ID NO: 99661 - DNA, 25 bp, Saccharomyces pastorianus
ttctgcccatttgccagtagacaag

SEQ ID NO: 99662 - DNA, 25 bp, Saccharomyces pastorianus
ttcgctcgttgtttgtcagccataa

SEQ ID NO: 99663 - DNA, 25 bp, Saccharomyces pastorianus
actgcgttagcgttttacgacggct

SEQ ID NO: 99664 - DNA, 25 bp, Saccharomyces pastorianus
gacgcaaactgggtccattttataa

SEQ ID NO: 99665 - DNA, 25 bp, Saccharomyces pastorianus
gtacagaaggtcttgcggccctcta

SEQ ID NO: 99666 - DNA, 25 bp, Saccharomyces pastorianus
atcactctgtggagagacgttccgt

SEQ ID NO: 99667 - DNA, 25 bp, Saccharomyces pastorianus
gatagctgctatatgcacacaccct

SEQ ID NO: 99668 - DNA, 25 bp, Saccharomyces pastorianus
agacgttccgtttagtgcaatatat

SEQ ID NO: 99669 - DNA, 25 bp, Saccharomyces pastorianus
gttcctagagactatatggcgtaca

SEQ ID NO: 99670 - DNA, 25 bp, Saccharomyces pastorianus
tcgggccctcttcaaaggtttggag

SEQ ID NO: 99671 - DNA, 25 bp, Saccharomyces pastorianus
gcacacacccttttgatgtcggtaa

SEQ ID NO: 99672 - DNA, 25 bp, Saccharomyces pastorianus
ttgcgccatcatgatatctagttat

SEQ ID NO: 99673 - DNA, 25 bp, Saccharomyces pastorianus
ggctagattctactcgatttgcatc

SEQ ID NO: 99674 - DNA, 25 bp, Saccharomyces pastorianus
cccctcttttgtggtgcaattgcga

SEQ ID NO: 99675 - DNA, 25 bp, Saccharomyces pastorianus
aatgggcagtttgataagcgtaagc

SEQ ID NO: 99676 - DNA, 25 bp, Saccharomyces pastorianus
gatgattttcctagcgtcatggttt

SEQ ID NO: 99677 - DNA, 25 bp, Saccharomyces pastorianus
gaatatgattgagttggcacagctt

SEQ ID NO: 99678 - DNA, 25 bp, Saccharomyces pastorianus
gggagcgattacacgaatggattga

SEQ ID NO: 99679 - DNA, 25 bp, Saccharomyces pastorianus
atctcgatatgcttcgttcattcat

SEQ ID NO: 99680 - DNA, 25 bp, Saccharomyces pastorianus
atcacgataccacgccgtttgtttg

SEQ ID NO: 99681 - DNA, 25 bp, Saccharomyces pastorianus
gaaattctcattcccttaattagag

SEQ ID NO: 99682 - DNA, 25 bp, Saccharomyces pastorianus
tgagaccagaagtcgatcacgatac

SEQ ID NO: 99683 - DNA, 25 bp, Saccharomyces pastorianus
gactcaactaggttggccacacgaa

SEQ ID NO: 99684 - DNA, 25 bp, Saccharomyces pastorianus
tatgggccccgtttcaagcattgaa

SEQ ID NO: 99685 - DNA, 25 bp, Saccharomyces pastorianus
ttggcacagcttttagggagcgatt

SEQ ID NO: 99686 - DNA, 25 bp, Saccharomyces pastorianus
atgccgtcatcatccgtggtagtag

SEQ ID NO: 99687 - DNA, 25 bp, Saccharomyces pastorianus
gtatatatccattttgcgcaagaca

SEQ ID NO: 99688 - DNA, 25 bp, Saccharomyces pastorianus
agacacgcttttccattggatggga

SEQ ID NO: 99689 - DNA, 25 bp, Saccharomyces pastorianus
cgacttcttgtcatggctgcgatta

SEQ ID NO: 99690 - DNA, 25 bp, Saccharomyces pastorianus
ggatagacctgcaacttctgcgtta

SEQ ID NO: 99691 - DNA, 25 bp, Saccharomyces pastorianus
atggccttcatcttcctggaacgtg

SEQ ID NO: 99692 - DNA, 25 bp, Saccharomyces pastorianus
ctggaacgtgacttccgtaggcttt

SEQ ID NO: 99693 - DNA, 25 bp, Saccharomyces pastorianus
ttatgcaagctagcgtcatggcctt

SEQ ID NO: 99694 - DNA, 25 bp, Saccharomyces pastorianus
acacatgtgttatattgcgttccta

SEQ ID NO: 99695 - DNA, 25 bp, Saccharomyces pastorianus
gtagtagccataatttcccgttcgg

SEQ ID NO: 99696 - DNA, 25 bp, Saccharomyces pastorianus
gtaggcttttcttctgatccatcat

SEQ ID NO: 99697 - DNA, 25 bp, Saccharomyces pastorianus
tgtgccgtttggtctgatcgtataa

SEQ ID NO: 99698 - DNA, 25 bp, Saccharomyces pastorianus
taatgctgcctgtaactgtttatgg

SEQ ID NO: 99699 - DNA, 25 bp, Saccharomyces pastorianus
attacttcaagagagccaccgcttt

SEQ ID NO: 99700 - DNA, 25 bp, Saccharomyces pastorianus
gttcagggttggtctctggtcaaat

SEQ ID NO: 99701 - DNA, 25 bp, Saccharomyces pastorianus
atcctgggtgcttgtctgacgactt

SEQ ID NO: 99702 - DNA, 25 bp, Saccharomyces pastorianus
ttggtctaacagtcttcttgccgat

SEQ ID NO: 99703 - DNA, 25 bp, Saccharomyces pastorianus
gctgtcgattagtctggcctttcaa

SEQ ID NO: 99704 - DNA, 25 bp, Saccharomyces pastorianus
cccatctatttccttacagcaattg

SEQ ID NO: 99705 - DNA, 25 bp, Saccharomyces pastorianus
gggagagcctattccatacgacgaa

SEQ ID NO: 99706 - DNA, 25 bp, Saccharomyces pastorianus
atagctatcgtccttggttctcaag

SEQ ID NO: 99707 - DNA, 25 bp, Saccharomyces pastorianus
agttgagatctccattcatcctggg

SEQ ID NO: 99708 - DNA, 25 bp, Saccharomyces pastorianus
agaacttcctttggatgcatgacca

SEQ ID NO: 99709 - DNA, 25 bp, Saccharomyces pastorianus
gaatgagtcgcgtttattggccaaa

SEQ ID NO: 99710 - DNA, 25 bp, Saccharomyces pastorianus
tgttgcactggaatgactactgtca

SEQ ID NO: 99711 - DNA, 25 bp, Saccharomyces pastorianus
gagatggacgcctcatttgattgat

SEQ ID NO: 99712 - DNA, 25 bp, Saccharomyces pastorianus
agttctaacattgttctcgtgcgag

SEQ ID NO: 99713 - DNA, 25 bp, Saccharomyces pastorianus
gtgtccctcaactgatagcgtgtga

SEQ ID NO: 99714 - DNA, 25 bp, Saccharomyces pastorianus
gcgccaaattgggttgttgcactgg

SEQ ID NO: 99715 - DNA, 25 bp, Saccharomyces pastorianus
gtctgggctcagtttcaaacctggt

SEQ ID NO: 99716 - DNA, 25 bp, Saccharomyces pastorianus
tatacttgattccagggctatgtgt

SEQ ID NO: 99717 - DNA, 25 bp, Saccharomyces pastorianus
taggccaccaaagcgttatagacat

SEQ ID NO: 99718 - DNA, 25 bp, Saccharomyces pastorianus
tggagaagatcttcccggagggcac

SEQ ID NO: 99719 - DNA, 25 bp, Saccharomyces pastorianus
accaaggttatcatacgggcccaat

SEQ ID NO: 99720 - DNA, 25 bp, Saccharomyces pastorianus
actctcgtaatatggatcgctggac

SEQ ID NO: 99721 - DNA, 25 bp, Saccharomyces pastorianus
tcgattttaccagcgacccttttgt

SEQ ID NO: 99722 - DNA, 25 bp, Saccharomyces pastorianus
atgtgctggtcgaacaccaaggtta

SEQ ID NO: 99723 - DNA, 25 bp, Saccharomyces pastorianus
gagggatgtaaccactttaccgcca

SEQ ID NO: 99724 - DNA, 25 bp, Saccharomyces pastorianus
gattctgctggtggcaatgctgttt

SEQ ID NO: 99725 - DNA, 25 bp, Saccharomyces pastorianus
atgaccagtcgaaaaagtaccctct

SEQ ID NO: 99726 - DNA, 25 bp, Saccharomyces pastorianus
tgtaggaaacaacccaaacgtcgat

SEQ ID NO: 99727 - DNA, 25 bp, Saccharomyces pastorianus
gggcccaatattaaactactctcgt

SEQ ID NO: 99728 - DNA, 25 bp, Saccharomyces pastorianus
atgtggccatttttgattacgttgt

SEQ ID NO: 99729 - DNA, 25 bp, Saccharomyces pastorianus
aatgccactttcttccacgagggag

SEQ ID NO: 99730 - DNA, 25 bp, Saccharomyces pastorianus
atgggatgactttgttgctagaaac

SEQ ID NO: 99731 - DNA, 25 bp, Saccharomyces pastorianus
tacgctgttagctctattatcacac

SEQ ID NO: 99732 - DNA, 25 bp, Saccharomyces pastorianus
gatagattccatttggcaatcctag

SEQ ID NO: 99733 - DNA, 25 bp, Saccharomyces pastorianus
agtgattctcatttctcatgggatg

SEQ ID NO: 99734 - DNA, 25 bp, Saccharomyces pastorianus
atgctgttgtcgcagttggtttgaa

SEQ ID NO: 99735 - DNA, 25 bp, Saccharomyces pastorianus
gaccccaagaaggtttccaattatg

SEQ ID NO: 99736 - DNA, 25 bp, Saccharomyces pastorianus
tgttgttccaaaattcgaccccaag

SEQ ID NO: 99737 - DNA, 25 bp, Saccharomyces pastorianus
agtgctcgtggtaaccagtttttgc

SEQ ID NO: 99738 - DNA, 25 bp, Saccharomyces pastorianus
aataccttgttttcacagtccccag

SEQ ID NO: 99739 - DNA, 25 bp, Saccharomyces pastorianus
tattatcacaccatatatgccagaa

SEQ ID NO: 99740 - DNA, 25 bp, Saccharomyces pastorianus
attgccatgtcgttaagtgctcgtg

SEQ ID NO: 99741 - DNA, 25 bp, Saccharomyces pastorianus
gaaattttttctgcctccgaaatca

SEQ ID NO: 99742 - DNA, 25 bp, Saccharomyces pastorianus
tatcattgtcaacttcaggctttaa

SEQ ID NO: 99743 - DNA, 25 bp, Saccharomyces pastorianus
gttttctctttcgataagttgcgta

SEQ ID NO: 99744 - DNA, 25 bp, Saccharomyces pastorianus
gaaaggttcctttgtattgcgcaat

SEQ ID NO: 99745 - DNA, 25 bp, Saccharomyces pastorianus
atgggcaggatgtttcttcgattta

SEQ ID NO: 99746 - DNA, 25 bp, Saccharomyces pastorianus
ttgcgcaattccatggcagcattat

SEQ ID NO: 99747 - DNA, 25 bp, Saccharomyces pastorianus
gttttattcctccacaaagatgcat

SEQ ID NO: 99748 - DNA, 25 bp, Saccharomyces pastorianus
agggcaatcttcaaattgttcgcta

SEQ ID NO: 99749 - DNA, 25 bp, Saccharomyces pastorianus
gacatgcttgttgtaaatttccgct

SEQ ID NO: 99750 - DNA, 25 bp, Saccharomyces pastorianus
attgttcgctaactgcaaatgggca

SEQ ID NO: 99751 - DNA, 25 bp, Saccharomyces pastorianus
caggctttaaatttttgcttgcata

SEQ ID NO: 99752 - DNA, 25 bp, Saccharomyces pastorianus
agttacctgcgaacggttgtctcac

SEQ ID NO: 99753 - DNA, 25 bp, Saccharomyces pastorianus
actgtgagctactgtttacccattc

SEQ ID NO: 99754 - DNA, 25 bp, Saccharomyces pastorianus
tatagtcattcctggtatcatcaca

SEQ ID NO: 99755 - DNA, 25 bp, Saccharomyces pastorianus
gacaccatctcatcatgtctgagga

SEQ ID NO: 99756 - DNA, 25 bp, Saccharomyces pastorianus
aatggccacgctattgcaaaaaaga

SEQ ID NO: 99757 - DNA, 25 bp, Saccharomyces pastorianus
cagtaacttctggtggcttgtttac

SEQ ID NO: 99758 - DNA, 25 bp, Saccharomyces pastorianus
tttaatatcattgctagcgccatag

SEQ ID NO: 99759 - DNA, 25 bp, Saccharomyces pastorianus
tagcgccatagtaaataccccaccg

SEQ ID NO: 99760 - DNA, 25 bp, Saccharomyces pastorianus
atgtcgcttgcatcatttcgatttg

SEQ ID NO: 99761 - DNA, 25 bp, Saccharomyces pastorianus
gtttacccattccagagttaacagt

SEQ ID NO: 99762 - DNA, 25 bp, Saccharomyces pastorianus
gcttgtttaccaccattcatgttga

SEQ ID NO: 99763 - DNA, 25 bp, Saccharomyces pastorianus
aacagaatcctagcttgccctggac

SEQ ID NO: 99764 - DNA, 25 bp, Saccharomyces pastorianus
ctcccaggttttactgttccaagtg

SEQ ID NO: 99765 - DNA, 25 bp, Saccharomyces pastorianus
tcacactcttatacgcctacaagtt

SEQ ID NO: 99766 - DNA, 25 bp, Saccharomyces pastorianus
gaatgcagagggtccggacgcacca

SEQ ID NO: 99767 - DNA, 25 bp, Saccharomyces pastorianus
gacgcaccagattcctgttggacga

SEQ ID NO: 99768 - DNA, 25 bp, Saccharomyces pastorianus
catgatgatgaactgccgagctacg

SEQ ID NO: 99769 - DNA, 25 bp, Saccharomyces pastorianus
taataggcccttgtacgttcaacca

SEQ ID NO: 99770 - DNA, 25 bp, Saccharomyces pastorianus
ataacgttgtttctgcaccgacata

SEQ ID NO: 99771 - DNA, 25 bp, Saccharomyces pastorianus
aaggccctctacaataccagcaatg

SEQ ID NO: 99772 - DNA, 25 bp, Saccharomyces pastorianus
gatatatgtcctctttgtcatggtg

SEQ ID NO: 99773 - DNA, 25 bp, Saccharomyces pastorianus
aagaccagcagctaacttggcgcaa

SEQ ID NO: 99774 - DNA, 25 bp, Saccharomyces pastorianus
gttcttgacttgaagcctctttatt

SEQ ID NO: 99775 - DNA, 25 bp, Saccharomyces pastorianus
gaggcggaggctataccgtagaaaa

SEQ ID NO: 99776 - DNA, 25 bp, Saccharomyces pastorianus
tatgtttgtatgttctgctctcttc

SEQ ID NO: 99777 - DNA, 25 bp, Saccharomyces pastorianus
tatggtttatactcgttttatgggt

SEQ ID NO: 99778 - DNA, 25 bp, Saccharomyces pastorianus
ctgctctcttccctctattaaaagg

SEQ ID NO: 99779 - DNA, 25 bp, Saccharomyces pastorianus
tcccttgatggaagtgtcactatta

SEQ ID NO: 99780 - DNA, 25 bp, Saccharomyces pastorianus
aaagcatcagataggcaggcaggag

SEQ ID NO: 99781 - DNA, 25 bp, Saccharomyces pastorianus
tatgggtattttttgggactgctta

SEQ ID NO: 99782 - DNA, 25 bp, Saccharomyces pastorianus
acactcttgtggtggcaaagcatca

SEQ ID NO: 99783 - DNA, 25 bp, Saccharomyces pastorianus
gggactgcttagttcttgacttgaa

SEQ ID NO: 99784 - DNA, 25 bp, Saccharomyces pastorianus
taagccatagggaaaacactcttgt

SEQ ID NO: 99785 - DNA, 25 bp, Saccharomyces pastorianus
aggagcttattttgacgcccgaaca

SEQ ID NO: 99786 - DNA, 25 bp, Saccharomyces pastorianus
aaggagattcctgcggcaattccat

SEQ ID NO: 99787 - DNA, 25 bp, Saccharomyces pastorianus
gaagactctttgcaaacgcaggtta

SEQ ID NO: 99788 - DNA, 25 bp, Saccharomyces pastorianus
gcatgcttaatcgaacactgtcaga

SEQ ID NO: 99789 - DNA, 25 bp, Saccharomyces pastorianus
gaagatgttcattcgtccgttgcaa

SEQ ID NO: 99790 - DNA, 25 bp, Saccharomyces pastorianus
gatacaggccacatggacgtcagag

SEQ ID NO: 99791 - DNA, 25 bp, Saccharomyces pastorianus
gttaataacagcgaggtccctcaac

SEQ ID NO: 99792 - DNA, 25 bp, Saccharomyces pastorianus
gacgtcagagataaccaccgatgat

SEQ ID NO: 99793 - DNA, 25 bp, Saccharomyces pastorianus
gcggcaattccatctgcagtagata

SEQ ID NO: 99794 - DNA, 25 bp, Saccharomyces pastorianus
gaaaaagcggtcatccctgaggata

SEQ ID NO: 99795 - DNA, 25 bp, Saccharomyces pastorianus
tatcaatacagcctctatcgttaat

SEQ ID NO: 99796 - DNA, 25 bp, Saccharomyces pastorianus
aatctgtgtttcatacccaaccttt

SEQ ID NO: 99797 - DNA, 25 bp, Saccharomyces pastorianus
atgccattttcgtctttaatctgtg

SEQ ID NO: 99798 - DNA, 25 bp, Saccharomyces pastorianus
actagtaacctcaacgggcgtctca

SEQ ID NO: 99799 - DNA, 25 bp, Saccharomyces pastorianus
gatgttcatcactagtaacctcaac

SEQ ID NO: 99800 - DNA, 25 bp, Saccharomyces pastorianus
gcgagttgttgtatggattatgcca

SEQ ID NO: 99801 - DNA, 25 bp, Saccharomyces pastorianus
aacgggcgtctcatctttgtccatg

SEQ ID NO: 99802 - DNA, 25 bp, Saccharomyces pastorianus
ttctgcgtagtttatttttctcaaa

SEQ ID NO: 99803 - DNA, 25 bp, Saccharomyces pastorianus
tcatacccaacctttgcgttgcttg

SEQ ID NO: 99804 - DNA, 25 bp, Saccharomyces pastorianus
catgacctggtcatcttccaaaaaa

SEQ ID NO: 99805 - DNA, 25 bp, Saccharomyces pastorianus
aaacactttctcaatttctgcgtag

SEQ ID NO: 99806 - DNA, 25 bp, Saccharomyces pastorianus
tcatctttgtccatgacctggtcat

SEQ ID NO: 99807 - DNA, 25 bp, Saccharomyces pastorianus
agacgatcctgttagtgtacttcca

SEQ ID NO: 99808 - DNA, 25 bp, Saccharomyces pastorianus
ggcgaagaattgcaattttccctta

SEQ ID NO: 99809 - DNA, 25 bp, Saccharomyces pastorianus
aaaacgtttcgtcagtgtctgccaa

SEQ ID NO: 99810 - DNA, 25 bp, Saccharomyces pastorianus
aagattacacttttagcgagcaggg

SEQ ID NO: 99811 - DNA, 25 bp, Saccharomyces pastorianus
aaaggcgatgaactgctgatgatta

SEQ ID NO: 99812 - DNA, 25 bp, Saccharomyces pastorianus
gtgtctgccaaagattaccggtttt

SEQ ID NO: 99813 - DNA, 25 bp, Saccharomyces pastorianus
tagcaagcacctttctagtaagcat

SEQ ID NO: 99814 - DNA, 25 bp, Saccharomyces pastorianus
ttttcccttattaatgacgctttag

SEQ ID NO: 99815 - DNA, 25 bp, Saccharomyces pastorianus
gttcattgaaatgacgccgcagcaa

SEQ ID NO: 99816 - DNA, 25 bp, Saccharomyces pastorianus
gtgtacttccaggattacaactgag

SEQ ID NO: 99817 - DNA, 25 bp, Saccharomyces pastorianus
cattgtgatctatttattcccgaag

SEQ ID NO: 99818 - DNA, 25 bp, Saccharomyces pastorianus
ttaaacctagacctggatttgccgt

SEQ ID NO: 99819 - DNA, 25 bp, Saccharomyces pastorianus
aaggccattggatgcaatacgtgga

SEQ ID NO: 99820 - DNA, 25 bp, Saccharomyces pastorianus
tccaatcctcgaggctgttcaagaa

SEQ ID NO: 99821 - DNA, 25 bp, Saccharomyces pastorianus
aatcaagactcacaggcttcaataa

SEQ ID NO: 99822 - DNA, 25 bp, Saccharomyces pastorianus
gaagaagccactttctctaacttac

SEQ ID NO: 99823 - DNA, 25 bp, Saccharomyces pastorianus
gaagcccagccttttgaagaagcca

SEQ ID NO: 99824 - DNA, 25 bp, Saccharomyces pastorianus
ttaaattacgctcttcttctttggc

SEQ ID NO: 99825 - DNA, 25 bp, Saccharomyces pastorianus
gaaaactcaacttgcaatggttatg

SEQ ID NO: 99826 - DNA, 25 bp, Saccharomyces pastorianus
ggatttgccgtcattaatcaagact

SEQ ID NO: 99827 - DNA, 25 bp, Saccharomyces pastorianus
tactccataacaaaagatccccgct

SEQ ID NO: 99828 - DNA, 25 bp, Saccharomyces pastorianus
atccccgctggttgcaagagctaga

SEQ ID NO: 99829 - DNA, 25 bp, Saccharomyces pastorianus
tacatgcggacaaatcgggcacatt

SEQ ID NO: 99830 - DNA, 25 bp, Saccharomyces pastorianus
gaccttgccggtgtaactgacggga

SEQ ID NO: 99831 - DNA, 25 bp, Saccharomyces pastorianus
aaactctgtggataatggtagcgac

SEQ ID NO: 99832 - DNA, 25 bp, Saccharomyces pastorianus
caaggagatgtgctacatgcggaca

SEQ ID NO: 99833 - DNA, 25 bp, Saccharomyces pastorianus
gcgaagacctggtatacacatacaa

SEQ ID NO: 99834 - DNA, 25 bp, Saccharomyces pastorianus
atcgttgagcataagcaatcctttt

SEQ ID NO: 99835 - DNA, 25 bp, Saccharomyces pastorianus
gattaatcagaccaacaagcatgtt

SEQ ID NO: 99836 - DNA, 25 bp, Saccharomyces pastorianus
aatcacagcaacgtagagcagcaag

SEQ ID NO: 99837 - DNA, 25 bp, Saccharomyces pastorianus
ggaaatgaccaatcctgatgagatt

SEQ ID NO: 99838 - DNA, 25 bp, Saccharomyces pastorianus
aatggtagcgaccttgccggtgtaa

SEQ ID NO: 99839 - DNA, 25 bp, Saccharomyces pastorianus
ggtggtgccacgagaacagaaaact

SEQ ID NO: 99840 - DNA, 25 bp, Saccharomyces pastorianus
gcaggcacgtacatcaattcatcaa

SEQ ID NO: 99841 - DNA, 25 bp, Saccharomyces pastorianus
aattacgtgcgatgagctcttgcaa

SEQ ID NO: 99842 - DNA, 25 bp, Saccharomyces pastorianus
gttcgaccacattcacgatggacat

SEQ ID NO: 99843 - DNA, 25 bp, Saccharomyces pastorianus
aatcagacgcctacttaagtcctct

SEQ ID NO: 99844 - DNA, 25 bp, Saccharomyces pastorianus
aaatttcatgtcaccgcattgggcg

SEQ ID NO: 99845 - DNA, 25 bp, Saccharomyces pastorianus
ttaagggacgtgtgcggccccacag

SEQ ID NO: 99846 - DNA, 25 bp, Saccharomyces pastorianus
aaggcatgagcccattggtagtaca

SEQ ID NO: 99847 - DNA, 25 bp, Saccharomyces pastorianus
ttgagcgtctctacattcatcacgt

SEQ ID NO: 99848 - DNA, 25 bp, Saccharomyces pastorianus
gcattgggcggaacgttcgaccaca

SEQ ID NO: 99849 - DNA, 25 bp, Saccharomyces pastorianus
ggttttattgccacaggaatccact

SEQ ID NO: 99850 - DNA, 25 bp, Saccharomyces pastorianus
ggatctctccgtagaactagttccc

SEQ ID NO: 99851 - DNA, 25 bp, Saccharomyces pastorianus
atggctgttaatgcccatgcttact

SEQ ID NO: 99852 - DNA, 25 bp, Saccharomyces pastorianus
attgactctggtagatctgccttga

SEQ ID NO: 99853 - DNA, 25 bp, Saccharomyces pastorianus
ggtgctgataccttcttattcactg

SEQ ID NO: 99854 - DNA, 25 bp, Saccharomyces pastorianus
gttatcactgaatctggttggccat

SEQ ID NO: 99855 - DNA, 25 bp, Saccharomyces pastorianus
tcaaaaggacgctgtttccgccatt

SEQ ID NO: 99856 - DNA, 25 bp, Saccharomyces pastorianus
gactactccgactacatggctgtta

SEQ ID NO: 99857 - DNA, 25 bp, Saccharomyces pastorianus
agacttacggtgttgctgttccatc

SEQ ID NO: 99858 - DNA, 25 bp, Saccharomyces pastorianus
gtctgctgttgaatcttacggttct

SEQ ID NO: 99859 - DNA, 25 bp, Saccharomyces pastorianus
attaccagctcctgtggtgctgata

SEQ ID NO: 99860 - DNA, 25 bp, Saccharomyces pastorianus
aaccctgaattgtgtgactactccg

SEQ ID NO: 99861 - DNA, 25 bp, Saccharomyces pastorianus
gaaggctgccgattacactggtcca

SEQ ID NO: 99862 - DNA, 25 bp, Saccharomyces pastorianus
ggatgtcttccagcgaattcttggt

SEQ ID NO: 99863 - DNA, 25 bp, Saccharomyces pastorianus
tccccgatgcggtaaacacaagact

SEQ ID NO: 99864 - DNA, 25 bp, Saccharomyces pastorianus
acacaagactatcggtgcgctccaa

SEQ ID NO: 99865 - DNA, 25 bp, Saccharomyces pastorianus
gaatgcgcagggttggatgtcttcc

SEQ ID NO: 99866 - DNA, 25 bp, Saccharomyces pastorianus
gttttagcaagcacgtgggatccaa

SEQ ID NO: 99867 - DNA, 25 bp, Saccharomyces pastorianus
cgaattcttggtaggctgaacggaa

SEQ ID NO: 99868 - DNA, 25 bp, Saccharomyces pastorianus
tgggatccaaagactcacaagttaa

SEQ ID NO: 99869 - DNA, 25 bp, Saccharomyces pastorianus
agagggccgcgttgatggactccaa

SEQ ID NO: 99870 - DNA, 25 bp, Saccharomyces pastorianus
ttaagaaattactccaacgcgaaga

SEQ ID NO: 99871 - DNA, 25 bp, Saccharomyces pastorianus
acaacgttgggctcggtgctaaatt

SEQ ID NO: 99872 - DNA, 25 bp, Saccharomyces pastorianus
tagtgaatctgcatccaatatcccc

SEQ ID NO: 99873 - DNA, 25 bp, Saccharomyces pastorianus
cgatacaccatggacgttgtttagt

SEQ ID NO: 99874 - DNA, 25 bp, Saccharomyces pastorianus
tggtgctatcgccaaggatgacttg

SEQ ID NO: 99875 - DNA, 25 bp, Saccharomyces pastorianus
ttaacaagggcattggtccgccaat

SEQ ID NO: 99876 - DNA, 25 bp, Saccharomyces pastorianus
gtattgctcacagactgaagaccat

SEQ ID NO: 99877 - DNA, 25 bp, Saccharomyces pastorianus
gatccatttaatgagcgtacagatg

SEQ ID NO: 99878 - DNA, 25 bp, Saccharomyces pastorianus
ttagccatcattccacaagatccag

SEQ ID NO: 99879 - DNA, 25 bp, Saccharomyces pastorianus
aagcatgtgttctagatctggtatt

SEQ ID NO: 99880 - DNA, 25 bp, Saccharomyces pastorianus
gtcagctgggacttttcgatttaag

SEQ ID NO: 99881 - DNA, 25 bp, Saccharomyces pastorianus
gaagtcgcagaattcgatacaccat

SEQ ID NO: 99882 - DNA, 25 bp, Saccharomyces pastorianus
gggtacgattcgcaagaacttagat

SEQ ID NO: 99883 - DNA, 25 bp, Saccharomyces pastorianus
ggctacatcctcagtggactacgaa

SEQ ID NO: 99884 - DNA, 25 bp, Saccharomyces pastorianus
gaaggtatctgttccatgagagctt

SEQ ID NO: 99885 - DNA, 25 bp, Saccharomyces pastorianus
aagtcggtactgtcgattcctggaa

SEQ ID NO: 99886 - DNA, 25 bp, Saccharomyces pastorianus
ttgttatggctaacgcgttctccta

SEQ ID NO: 99887 - DNA, 25 bp, Saccharomyces pastorianus
taatgacgtccgtagtgtcgttgct

SEQ ID NO: 99888 - DNA, 25 bp, Saccharomyces pastorianus
ggctctgaagccttataccgtaacg

SEQ ID NO: 99889 - DNA, 25 bp, Saccharomyces pastorianus
gttgctgacatttccgattctgacg

SEQ ID NO: 99890 - DNA, 25 bp, Saccharomyces pastorianus
ggttctaccgatattaccttctggg

SEQ ID NO: 99891 - DNA, 25 bp, Saccharomyces pastorianus
aaagaatccactgttgctggtttct

SEQ ID NO: 99892 - DNA, 25 bp, Saccharomyces pastorianus
gttgctggttacaattctgccgtta

SEQ ID NO: 99893 - DNA, 25 bp, Saccharomyces pastorianus
atgcaagctctacaggttatccaat

SEQ ID NO: 99894 - DNA, 25 bp, Saccharomyces pastorianus
gtaacgatttgactgcctctcaatt

SEQ ID NO: 99895 - DNA, 25 bp, Saccharomyces pastorianus
gtagtgtcacccatagattcttaca

SEQ ID NO: 99896 - DNA, 25 bp, Saccharomyces pastorianus
ttttctggtcaactgcaattccctg

SEQ ID NO: 99897 - DNA, 25 bp, Saccharomyces pastorianus
gagatctgacttagaatcctcttct

SEQ ID NO: 99898 - DNA, 25 bp, Saccharomyces pastorianus
aaaccactcggctatcatgttcgaa

SEQ ID NO: 99899 - DNA, 25 bp, Saccharomyces pastorianus
gaaaaaccctgtaatatcctgctta

SEQ ID NO: 99900 - DNA, 25 bp, Saccharomyces pastorianus
ggtgacttccactacgacgaagagt

SEQ ID NO: 99901 - DNA, 25 bp, Saccharomyces pastorianus
atattcccaatactgcgcgtgtaac

SEQ ID NO: 99902 - DNA, 25 bp, Saccharomyces pastorianus
aggaaggcttatcaatcgcacgaga

SEQ ID NO: 99903 - DNA, 25 bp, Saccharomyces pastorianus
tacctttccgccattgaagcagcta

SEQ ID NO: 99904 - DNA, 25 bp, Saccharomyces pastorianus
gcagctaccttttatgaacgcatct

SEQ ID NO: 99905 - DNA, 25 bp, Saccharomyces pastorianus
tatacccattcaagatagcctaccc

SEQ ID NO: 99906 - DNA, 25 bp, Saccharomyces pastorianus
gtcgttgtgtttctagtggttgtta

SEQ ID NO: 99907 - DNA, 25 bp, Saccharomyces pastorianus
gttgttaccgtttccatgttgattg

SEQ ID NO: 99908 - DNA, 25 bp, Saccharomyces pastorianus
gaagggttacctgttgtttgctggt

SEQ ID NO: 99909 - DNA, 25 bp, Saccharomyces pastorianus
accggtgtgttatgtgcttgcgtta

SEQ ID NO: 99910 - DNA, 25 bp, Saccharomyces pastorianus
gattggcgccagtttgttagtttta

SEQ ID NO: 99911 - DNA, 25 bp, Saccharomyces pastorianus
tagttactaatactggcgctggtga

SEQ ID NO: 99912 - DNA, 25 bp, Saccharomyces pastorianus
ttggtgggcttctattagttactaa

SEQ ID NO: 99913 - DNA, 25 bp, Saccharomyces pastorianus
tatgggttgtttacgggttcatcat

SEQ ID NO: 99914 - DNA, 25 bp, Saccharomyces pastorianus
agcattacccatacttctttgtcgt

SEQ ID NO: 99915 - DNA, 25 bp, Saccharomyces pastorianus
gggttgttaattgcattcagcgatt

SEQ ID NO: 99916 - DNA, 25 bp, Saccharomyces pastorianus
tactgttgttttgaccattatcggc

SEQ ID NO: 99917 - DNA, 25 bp, Saccharomyces pastorianus
aagccggtgccagagctgaagctga

SEQ ID NO: 99918 - DNA, 25 bp, Saccharomyces pastorianus
gagccatccgtaactctgctaagga

SEQ ID NO: 99919 - DNA, 25 bp, Saccharomyces pastorianus
aaggccgccacgattgacgaacaag

SEQ ID NO: 99920 - DNA, 25 bp, Saccharomyces pastorianus
ggcacagatttgactcctggagaac

SEQ ID NO: 99921 - DNA, 25 bp, Saccharomyces pastorianus
taaggaagctgctaaggccgccaag

SEQ ID NO: 99922 - DNA, 25 bp, Saccharomyces pastorianus
gtgtccaccgccgataagatcaagg

SEQ ID NO: 99923 - DNA, 25 bp, Saccharomyces pastorianus
acgaagagttagtgtccaccgccga

SEQ ID NO: 99924 - DNA, 25 bp, Saccharomyces pastorianus
taacgcctccgcaaaagctgacaaa

SEQ ID NO: 99925 - DNA, 25 bp, Saccharomyces pastorianus
gatgtcccagatgactcttctaaca

SEQ ID NO: 99926 - DNA, 25 bp, Saccharomyces pastorianus
tcaaggccaatgctgctggtgccaa

SEQ ID NO: 99927 - DNA, 25 bp, Saccharomyces pastorianus
gtcagtgaagatccccgtattaaaa

SEQ ID NO: 99928 - DNA, 25 bp, Saccharomyces pastorianus
cagaagcttatgtttaagcccatat

SEQ ID NO: 99929 - DNA, 25 bp, Saccharomyces pastorianus
gtttaagcccatattcaatttgctg

SEQ ID NO: 99930 - DNA, 25 bp, Saccharomyces pastorianus
tattatccctctcctgatagtttaa

SEQ ID NO: 99931 - DNA, 25 bp, Saccharomyces pastorianus
tccctctcctgatagtttaattaaa

SEQ ID NO: 99932 - DNA, 25 bp, Saccharomyces pastorianus
taaacggcctccaatggaagaggta

SEQ ID NO: 99933 - DNA, 25 bp, Saccharomyces pastorianus
atttgctgtaaacggcctccaatgg

SEQ ID NO: 99934 - DNA, 25 bp, Saccharomyces pastorianus
gctatattatccctctcctgatagt

SEQ ID NO: 99935 - DNA, 25 bp, Saccharomyces pastorianus
taatgctatattatccctctcctga

SEQ ID NO: 99936 - DNA, 25 bp, Saccharomyces pastorianus
gctgtaaacggcctccaatggaaga

SEQ ID NO: 99937 - DNA, 25 bp, Saccharomyces pastorianus
ggtaatgctatattatccctctcct

SEQ ID NO: 99938 - DNA, 25 bp, Saccharomyces pastorianus
ttcaatttgctgtaaacggcctcca

SEQ ID NO: 99939 - DNA, 25 bp, Saccharomyces pastorianus
tactcctcttaccttacttaaactg

SEQ ID NO: 99940 - DNA, 25 bp, Saccharomyces pastorianus
tatgaccgtcgtatatgtgcagata

SEQ ID NO: 99941 - DNA, 25 bp, Saccharomyces pastorianus
ccataatcttaaaccgcctggcatt

SEQ ID NO: 99942 - DNA, 25 bp, Saccharomyces pastorianus
ggcagttcttgctatcaggttttta

SEQ ID NO: 99943 - DNA, 25 bp, Saccharomyces pastorianus
cctggcattatctgcacacggtaat

SEQ ID NO: 99944 - DNA, 25 bp, Saccharomyces pastorianus
gagcacatgggaccgtattgcatat

SEQ ID NO: 99945 - DNA, 25 bp, Saccharomyces pastorianus
gatcttttttctacgatggcagttc

SEQ ID NO: 99946 - DNA, 25 bp, Saccharomyces pastorianus
agcattggccgttttcaggaactct

SEQ ID NO: 99947 - DNA, 25 bp, Saccharomyces pastorianus
caatttcactattccttttactcct

SEQ ID NO: 99948 - DNA, 25 bp, Saccharomyces pastorianus
ttgattgttatcttagcggctttac

SEQ ID NO: 99949 - DNA, 25 bp, Saccharomyces pastorianus
ctaccccgtatcttgtgaattccaa

SEQ ID NO: 99950 - DNA, 25 bp, Saccharomyces pastorianus
tagaattggttctgctgtcggttcc

SEQ ID NO: 99951 - DNA, 25 bp, Saccharomyces pastorianus
atgggtgatgttgctctagccacaa

SEQ ID NO: 99952 - DNA, 25 bp, Saccharomyces pastorianus
gtgtgggcactactttgttcactta

SEQ ID NO: 99953 - DNA, 25 bp, Saccharomyces pastorianus
ataatgtttggatgcgcgctatgga

SEQ ID NO: 99954 - DNA, 25 bp, Saccharomyces pastorianus
aactgcctacgaatctccatatact

SEQ ID NO: 99955 - DNA, 25 bp, Saccharomyces pastorianus
ggtgccatttggactcagactttgt

SEQ ID NO: 99956 - DNA, 25 bp, Saccharomyces pastorianus
gtgttccattaattgcattctcctt

SEQ ID NO: 99957 - DNA, 25 bp, Saccharomyces pastorianus
gtggaagtcagtcccattcaggtat

SEQ ID NO: 99958 - DNA, 25 bp, Saccharomyces pastorianus
atccgccgtctctcatgaaaacatg

SEQ ID NO: 99959 - DNA, 25 bp, Saccharomyces pastorianus
gactgatactgttgctgtggaatac

SEQ ID NO: 99960 - DNA, 25 bp, Saccharomyces pastorianus
acatggcgacagttacagctttaaa

SEQ ID NO: 99961 - DNA, 25 bp, Saccharomyces pastorianus
ttgccaattctctcttactggtatt

SEQ ID NO: 99962 - DNA, 25 bp, Saccharomyces pastorianus
gtagtatcccagagattgctgtttt

SEQ ID NO: 99963 - DNA, 25 bp, Saccharomyces pastorianus
aggagttttctctgtcattcaagac

SEQ ID NO: 99964 - DNA, 25 bp, Saccharomyces pastorianus
acgcattgttgctctggatagtcaa

SEQ ID NO: 99965 - DNA, 25 bp, Saccharomyces pastorianus
aagacagttcattgtggcagatact

SEQ ID NO: 99966 - DNA, 25 bp, Saccharomyces pastorianus
gccactactgagaaattgtccgttt

SEQ ID NO: 99967 - DNA, 25 bp, Saccharomyces pastorianus
aaaaattctgaacgccactactgag

SEQ ID NO: 99968 - DNA, 25 bp, Saccharomyces pastorianus
gttatggagtttttgccgttctata

SEQ ID NO: 99969 - DNA, 25 bp, Saccharomyces pastorianus
attacgccctcatgttattaaacta

SEQ ID NO: 99970 - DNA, 25 bp, Saccharomyces pastorianus
aatacttccctaatttatcggagag

SEQ ID NO: 99971 - DNA, 25 bp, Saccharomyces pastorianus
tcttcgactcaaaaattacgccctc

SEQ ID NO: 99972 - DNA, 25 bp, Saccharomyces pastorianus
ttttcggacccagagttggtggcaa

SEQ ID NO: 99973 - DNA, 25 bp, Saccharomyces pastorianus
agcatctaatattctggtcgtcatt

SEQ ID NO: 99974 - DNA, 25 bp, Saccharomyces pastorianus
aattggccatttgatgcacctctac

SEQ ID NO: 99975 - DNA, 25 bp, Saccharomyces pastorianus
gaagtcccagagattcgtgcatcta

SEQ ID NO: 99976 - DNA, 25 bp, Saccharomyces pastorianus
tgttgatggcaccattctttgccga

SEQ ID NO: 99977 - DNA, 25 bp, Saccharomyces pastorianus
gcacctctaccatctatttctttat

SEQ ID NO: 99978 - DNA, 25 bp, Saccharomyces pastorianus
gccgaccctagcctaaacagagttg

SEQ ID NO: 99979 - DNA, 25 bp, Saccharomyces pastorianus
tatcgccatttctgcagcatctaat

SEQ ID NO: 99980 - DNA, 25 bp, Saccharomyces pastorianus
tagttgcatgcttctttttctggtt

SEQ ID NO: 99981 - DNA, 25 bp, Saccharomyces pastorianus
attattggtcgctattgggctcttt

SEQ ID NO: 99982 - DNA, 25 bp, Saccharomyces pastorianus
gcaaattcattgctttttctatcgc

SEQ ID NO: 99983 - DNA, 25 bp, Saccharomyces pastorianus
accttgcctttaaattcttcagctt

SEQ ID NO: 99984 - DNA, 25 bp, Saccharomyces pastorianus
gaaaaattcagcgacctcctctttg

SEQ ID NO: 99985 - DNA, 25 bp, Saccharomyces pastorianus
agcttcaatatcaacgttttcacca

SEQ ID NO: 99986 - DNA, 25 bp, Saccharomyces pastorianus
ttaactccctgtcatcgaaaacctt

SEQ ID NO: 99987 - DNA, 25 bp, Saccharomyces pastorianus
gtgacaaatgccatacctctattag

SEQ ID NO: 99988 - DNA, 25 bp, Saccharomyces pastorianus
gatgtgaagatcctaccagtgtgtt

SEQ ID NO: 99989 - DNA, 25 bp, Saccharomyces pastorianus
tttttgtccattgaaaccacctctg

SEQ ID NO: 99990 - DNA, 25 bp, Saccharomyces pastorianus
cctcctctttggtagctttgaatgg

SEQ ID NO: 99991 - DNA, 25 bp, Saccharomyces pastorianus
gaaccagtttcttgctcaatttctt

SEQ ID NO: 99992 - DNA, 25 bp, Saccharomyces pastorianus
ggtctctcatttttctcattggcaa

SEQ ID NO: 99993 - DNA, 25 bp, Saccharomyces pastorianus
ttcttcttcatcattttctggtcta

SEQ ID NO: 99994 - DNA, 25 bp, Saccharomyces pastorianus
aacttcagaggtagaggcggcgcca

SEQ ID NO: 99995 - DNA, 25 bp, Saccharomyces pastorianus
agagagctagaactccaggccaaat

SEQ ID NO: 99996 - DNA, 25 bp, Saccharomyces pastorianus
ctgtagatgttgctgttattagacc

SEQ ID NO: 99997 - DNA, 25 bp, Saccharomyces pastorianus
taataacgtcccattcaaagctacc

SEQ ID NO: 99998 - DNA, 25 bp, Saccharomyces pastorianus
ggaggtcgctgaatttttcggtact

SEQ ID NO: 99999 - DNA, 25 bp, Saccharomyces pastorianus
aaagctaccaaagaggaggtcgctg

SEQ ID NO: 100000 - DNA, 25 bp, Saccharomyces pastorianus
gcgccagaggtggtttcaatggaca

SEQ ID NO: 100001 - DNA, 25 bp, Saccharomyces pastorianus
gaatttttcggtactgacgccgact

SEQ ID NO: 100002 - DNA, 25 bp, Saccharomyces pastorianus
ggatcttcacatccgattctgctaa

SEQ ID NO: 100003 - DNA, 25 bp, Saccharomyces pastorianus
aacacactggtaggatcttcacatc

SEQ ID NO: 100004 - DNA, 25 bp, Saccharomyces pastorianus
gtatggcatttgtcactttcagtgg

SEQ ID NO: 100005 - DNA, 25 bp, Saccharomyces pastorianus
tgtctttttgccagctttgtgtaag

SEQ ID NO: 100006 - DNA, 25 bp, Saccharomyces pastorianus
ctctgccgttgccgctttgactgaa

SEQ ID NO: 100007 - DNA, 25 bp, Saccharomyces pastorianus
ttgtctttttgccagctttgtgtaa

SEQ ID NO: 100008 - DNA, 25 bp, Saccharomyces pastorianus
gacctctgccgttgccgctttgact

SEQ ID NO: 100009 - DNA, 25 bp, Saccharomyces pastorianus
aattggttgtctttttgccagcttt

SEQ ID NO: 100010 - DNA, 25 bp, Saccharomyces pastorianus
attggttgtctttttgccagctttg

SEQ ID NO: 100011 - DNA, 25 bp, Saccharomyces pastorianus
gaattggttgtctttttgccagctt

SEQ ID NO: 100012 - DNA, 25 bp, Saccharomyces pastorianus
tgaattggttgtctttttgccagct

SEQ ID NO: 100013 - DNA, 25 bp, Saccharomyces pastorianus
ggttgtctttttgccagctttgtgt

SEQ ID NO: 100014 - DNA, 25 bp, Saccharomyces pastorianus
ttgaattggttgtctttttgccagc

SEQ ID NO: 100015 - DNA, 25 bp, Saccharomyces pastorianus
aattgaattggttgtctttttgcca

SEQ ID NO: 100016 - DNA, 25 bp, Saccharomyces pastorianus
cttctccaaagccatacgctgttaa

SEQ ID NO: 100017 - DNA, 25 bp, Saccharomyces pastorianus
cgctatcgctgaaggtaagtctaag

SEQ ID NO: 100018 - DNA, 25 bp, Saccharomyces pastorianus
gccatacgctgttaagtacggtttg

SEQ ID NO: 100019 - DNA, 25 bp, Saccharomyces pastorianus
tctccaaagccatacgctgttaagt

SEQ ID NO: 100020 - DNA, 25 bp, Saccharomyces pastorianus
catacgctgttaagtacggtttgaa

SEQ ID NO: 100021 - DNA, 25 bp, Saccharomyces pastorianus
cgctgaaggtaagtctaagcaagac

SEQ ID NO: 100022 - DNA, 25 bp, Saccharomyces pastorianus
agctgccgctatcgctgaaggtaag

SEQ ID NO: 100023 - DNA, 25 bp, Saccharomyces pastorianus
ctgccgctatcgctgaaggtaagtc

SEQ ID NO: 100024 - DNA, 25 bp, Saccharomyces pastorianus
gccgctatcgctgaaggtaagtcta

SEQ ID NO: 100025 - DNA, 25 bp, Saccharomyces pastorianus
aagccatacgctgttaagtacggtt

SEQ ID NO: 100026 - DNA, 25 bp, Saccharomyces pastorianus
tatcgctgaaggtaagtctaagcaa

SEQ ID NO: 100027 - DNA, 25 bp, Saccharomyces pastorianus
aagccgatatcttaggtccctgtgt

SEQ ID NO: 100028 - DNA, 25 bp, Saccharomyces pastorianus
agaagtcaatccgacgatgctgaaa

SEQ ID NO: 100029 - DNA, 25 bp, Saccharomyces pastorianus
ggatgtgaacgagcgcccattatgg

SEQ ID NO: 100030 - DNA, 25 bp, Saccharomyces pastorianus
gggatgtctcaattcactactgcct

SEQ ID NO: 100031 - DNA, 25 bp, Saccharomyces pastorianus
tattgggacccagatgccagagcca

SEQ ID NO: 100032 - DNA, 25 bp, Saccharomyces pastorianus
catatgaaaagtcgccgctgtcggt

SEQ ID NO: 100033 - DNA, 25 bp, Saccharomyces pastorianus
gtgtttgctttcaagccagggctat

SEQ ID NO: 100034 - DNA, 25 bp, Saccharomyces pastorianus
gaggaaatttccgacgtcacatatg

SEQ ID NO: 100035 - DNA, 25 bp, Saccharomyces pastorianus
agtcagaaggtctccgacagcggaa

SEQ ID NO: 100036 - DNA, 25 bp, Saccharomyces pastorianus
gaaggcaatgagttctgacgcgttt

SEQ ID NO: 100037 - DNA, 25 bp, Saccharomyces pastorianus
accagaggctcatccaaaccttaag

SEQ ID NO: 100038 - DNA, 25 bp, Saccharomyces pastorianus
ttcaccgactacttctacaatggcg

SEQ ID NO: 100039 - DNA, 25 bp, Saccharomyces pastorianus
gtttcttaataacgttcctctgcta

SEQ ID NO: 100040 - DNA, 25 bp, Saccharomyces pastorianus
agcataaccagtttgccttcttcac

SEQ ID NO: 100041 - DNA, 25 bp, Saccharomyces pastorianus
ggacaacacagtaccatctcctggt

SEQ ID NO: 100042 - DNA, 25 bp, Saccharomyces pastorianus
atgctaaggcttcccattgttttga

SEQ ID NO: 100043 - DNA, 25 bp, Saccharomyces pastorianus
agttccaattcgagtgcccatatct

SEQ ID NO: 100044 - DNA, 25 bp, Saccharomyces pastorianus
taatgatccgttttggttccccgat

SEQ ID NO: 100045 - DNA, 25 bp, Saccharomyces pastorianus
cattttcatcgcgattttgcagttt

SEQ ID NO: 100046 - DNA, 25 bp, Saccharomyces pastorianus
gttccccgatctggatagcatggca

SEQ ID NO: 100047 - DNA, 25 bp, Saccharomyces pastorianus
gcgtcattacaatccagttccaatt

SEQ ID NO: 100048 - DNA, 25 bp, Saccharomyces pastorianus
gcccatatctcgaactatcacatgt

SEQ ID NO: 100049 - DNA, 25 bp, Saccharomyces pastorianus
gccttcaccatcttcaaattcaact

SEQ ID NO: 100050 - DNA, 25 bp, Saccharomyces pastorianus
aaaccactctaccatttcgttatca

SEQ ID NO: 100051 - DNA, 25 bp, Saccharomyces pastorianus
gatactgggattcgcccgggaaaat

SEQ ID NO: 100052 - DNA, 25 bp, Saccharomyces pastorianus
tgaagttaccactaccacgttacac

SEQ ID NO: 100053 - DNA, 25 bp, Saccharomyces pastorianus
agacccgctcggaaggctcaagatt

SEQ ID NO: 100054 - DNA, 25 bp, Saccharomyces pastorianus
aaaatagccgctactttcgtcgtgg

SEQ ID NO: 100055 - DNA, 25 bp, Saccharomyces pastorianus
attatgtctgaatcaccatctccac

SEQ ID NO: 100056 - DNA, 25 bp, Saccharomyces pastorianus
atctacgtattccttgactgcaggc

SEQ ID NO: 100057 - DNA, 25 bp, Saccharomyces pastorianus
gaacttctacttttcttcattcgcc

SEQ ID NO: 100058 - DNA, 25 bp, Saccharomyces pastorianus
aattcaactttctcgaccccaagat

SEQ ID NO: 100059 - DNA, 25 bp, Saccharomyces pastorianus
aaacacgttggcaagcccatttcac

SEQ ID NO: 100060 - DNA, 25 bp, Saccharomyces pastorianus
ggagattattccaatgagccgttca

SEQ ID NO: 100061 - DNA, 25 bp, Saccharomyces pastorianus
gcggactactggacgcatgcttata

SEQ ID NO: 100062 - DNA, 25 bp, Saccharomyces pastorianus
atgttttggcgcaataccacgaggc

SEQ ID NO: 100063 - DNA, 25 bp, Saccharomyces pastorianus
tcgcaaagtcctcatgcaactgcaa

SEQ ID NO: 100064 - DNA, 25 bp, Saccharomyces pastorianus
aagagaagcctctgacgccgcttaa

SEQ ID NO: 100065 - DNA, 25 bp, Saccharomyces pastorianus
tcatttgaggtaccagccggacggc

SEQ ID NO: 100066 - DNA, 25 bp, Saccharomyces pastorianus
agtagtgactacagttgcctcgcaa

SEQ ID NO: 100067 - DNA, 25 bp, Saccharomyces pastorianus
ggaaaaggagccagtacccgccgtg

SEQ ID NO: 100068 - DNA, 25 bp, Saccharomyces pastorianus
gctagtgggtaaactccgcggagat

SEQ ID NO: 100069 - DNA, 25 bp, Saccharomyces pastorianus
atgagccgttcaacaccaatttcga

SEQ ID NO: 100070 - DNA, 25 bp, Saccharomyces pastorianus
acatcgtgacgatccagcgctagtg

SEQ ID NO: 100071 - DNA, 25 bp, Saccharomyces pastorianus
atgatccctcctccaataaatgtgg

SEQ ID NO: 100072 - DNA, 25 bp, Saccharomyces pastorianus
caaggaggtcaagctacggatacaa

SEQ ID NO: 100073 - DNA, 25 bp, Saccharomyces pastorianus
acctccgccttctgggttagatgga

SEQ ID NO: 100074 - DNA, 25 bp, Saccharomyces pastorianus
gtcatccccttcttcaaagagtgtg

SEQ ID NO: 100075 - DNA, 25 bp, Saccharomyces pastorianus
gagaattccgaattgccttccgaaa

SEQ ID NO: 100076 - DNA, 25 bp, Saccharomyces pastorianus
cccaagttactccacgtttatgaag

SEQ ID NO: 100077 - DNA, 25 bp, Saccharomyces pastorianus
atgatggtttatcccatgtcaccac

SEQ ID NO: 100078 - DNA, 25 bp, Saccharomyces pastorianus
atctatgcccaattcttggtcatcc

SEQ ID NO: 100079 - DNA, 25 bp, Saccharomyces pastorianus
atccttctcaaggttctgctggaaa

SEQ ID NO: 100080 - DNA, 25 bp, Saccharomyces pastorianus
atggcagtacccatgttcatgcgaa

SEQ ID NO: 100081 - DNA, 25 bp, Saccharomyces pastorianus
tgggccaatcacatgctgctaatca

SEQ ID NO: 100082 - DNA, 25 bp, Saccharomyces pastorianus
atagatgtatttatggtcagccttc

SEQ ID NO: 100083 - DNA, 25 bp, Saccharomyces pastorianus
gactaatactgctagaaggcccagc

SEQ ID NO: 100084 - DNA, 25 bp, Saccharomyces pastorianus
gaaggcccagcatggactacaaaaa

SEQ ID NO: 100085 - DNA, 25 bp, Saccharomyces pastorianus
gtccccatggaattggttatcatca

SEQ ID NO: 100086 - DNA, 25 bp, Saccharomyces pastorianus
ggaacctgaaagagccactgcgatt

SEQ ID NO: 100087 - DNA, 25 bp, Saccharomyces pastorianus
gtagagatgcaaacgccagcgaagc

SEQ ID NO: 100088 - DNA, 25 bp, Saccharomyces pastorianus
aacgcgttagcgtggttaatacagt

SEQ ID NO: 100089 - DNA, 25 bp, Saccharomyces pastorianus
gccagcgaagcgtgttcaggaaaga

SEQ ID NO: 100090 - DNA, 25 bp, Saccharomyces pastorianus
atggtcagccttcagatatccagat

SEQ ID NO: 100091 - DNA, 25 bp, Saccharomyces pastorianus
atgaaggcatgcagtccaacgacaa

SEQ ID NO: 100092 - DNA, 25 bp, Saccharomyces pastorianus
agttgctcaagtacttcaatggaaa

SEQ ID NO: 100093 - DNA, 25 bp, Saccharomyces pastorianus
tgcggacccctatgggattagcata

SEQ ID NO: 100094 - DNA, 25 bp, Saccharomyces pastorianus
gaagctgtcttcaccaaattagtaa

SEQ ID NO: 100095 - DNA, 25 bp, Saccharomyces pastorianus
caacgcttatatttgcacgatggca

SEQ ID NO: 100096 - DNA, 25 bp, Saccharomyces pastorianus
aagggatttccagatttcttgacaa

SEQ ID NO: 100097 - DNA, 25 bp, Saccharomyces pastorianus
cattttcccaagatgatgcggtcat

SEQ ID NO: 100098 - DNA, 25 bp, Saccharomyces pastorianus
tgttctatatttaccgatgcggacc

SEQ ID NO: 100099 - DNA, 25 bp, Saccharomyces pastorianus
gcgactactccttagccaagaattt

SEQ ID NO: 100100 - DNA, 25 bp, Saccharomyces pastorianus
gggatattgcaacttcaccattaaa

SEQ ID NO: 100101 - DNA, 25 bp, Saccharomyces pastorianus
gtaagccctgtctaattccattttc

SEQ ID NO: 100102 - DNA, 25 bp, Saccharomyces pastorianus
ttgagtttgaatcagcgcgactact

SEQ ID NO: 100103 - DNA, 25 bp, Saccharomyces pastorianus
tgatagcatctctgactgccaacag

SEQ ID NO: 100104 - DNA, 25 bp, Saccharomyces pastorianus
ggaatttatgataagccctcagatc

SEQ ID NO: 100105 - DNA, 25 bp, Saccharomyces pastorianus
ttctgggtaattatgaggccttgat

SEQ ID NO: 100106 - DNA, 25 bp, Saccharomyces pastorianus
ttgcccgaaaactgttgtgttatct

SEQ ID NO: 100107 - DNA, 25 bp, Saccharomyces pastorianus
ccatgaattacttcgtggacgcatt

SEQ ID NO: 100108 - DNA, 25 bp, Saccharomyces pastorianus
gattctacaatctctacctgctaca

SEQ ID NO: 100109 - DNA, 25 bp, Saccharomyces pastorianus
gacgcattttatgctacccgtaatg

SEQ ID NO: 100110 - DNA, 25 bp, Saccharomyces pastorianus
gaacttgttcgagagtcatatcaat

SEQ ID NO: 100111 - DNA, 25 bp, Saccharomyces pastorianus
taaatgcattaactactctccacca

SEQ ID NO: 100112 - DNA, 25 bp, Saccharomyces pastorianus
cttgaatttaattaccaccccagca

SEQ ID NO: 100113 - DNA, 25 bp, Saccharomyces pastorianus
aacgaggacaatactcttctgggta

SEQ ID NO: 100114 - DNA, 25 bp, Saccharomyces pastorianus
agggttgctatttcgattctgatac

SEQ ID NO: 100115 - DNA, 25 bp, Saccharomyces pastorianus
gatgcctcagagcaggtcaacgcca

SEQ ID NO: 100116 - DNA, 25 bp, Saccharomyces pastorianus
aaattggttcgacagcgtccacagt

SEQ ID NO: 100117 - DNA, 25 bp, Saccharomyces pastorianus
atcagggagcgtttcttgcaacagc

SEQ ID NO: 100118 - DNA, 25 bp, Saccharomyces pastorianus
aatgtcatgggcgtagtcgactcca

SEQ ID NO: 100119 - DNA, 25 bp, Saccharomyces pastorianus
catgcgtcgtttcattatgccaact

SEQ ID NO: 100120 - DNA, 25 bp, Saccharomyces pastorianus
ggagcccgcaagatctcaggttcgg

SEQ ID NO: 100121 - DNA, 25 bp, Saccharomyces pastorianus
acaaggatggcgacgactcagcctc

SEQ ID NO: 100122 - DNA, 25 bp, Saccharomyces pastorianus
gtggtcggcacagtcaagaaagtct

SEQ ID NO: 100123 - DNA, 25 bp, Saccharomyces pastorianus
tcaacgccagcgagcagtctattgt

SEQ ID NO: 100124 - DNA, 25 bp, Saccharomyces pastorianus
gggaaagtactcattctcgccaaag

SEQ ID NO: 100125 - DNA, 25 bp, Saccharomyces pastorianus
tcctcctccgtaactgcgaatggga

SEQ ID NO: 100126 - DNA, 25 bp, Saccharomyces pastorianus
gaggttttcatttcttcttgcaggc

SEQ ID NO: 100127 - DNA, 25 bp, Saccharomyces pastorianus
aagtactcaactttcaggccactgc

SEQ ID NO: 100128 - DNA, 25 bp, Saccharomyces pastorianus
tgttgaccaacttatctcgaggagt

SEQ ID NO: 100129 - DNA, 25 bp, Saccharomyces pastorianus
tgttggtcgtgcacttgtctatata

SEQ ID NO: 100130 - DNA, 25 bp, Saccharomyces pastorianus
gccaccatggatgcacacgtatttg

SEQ ID NO: 100131 - DNA, 25 bp, Saccharomyces pastorianus
tggatcatcttcgtcactgttgtac

SEQ ID NO: 100132 - DNA, 25 bp, Saccharomyces pastorianus
tgtctatatagttcttccagcctgg

SEQ ID NO: 100133 - DNA, 25 bp, Saccharomyces pastorianus
actgttgtactgtgagctcttgttt

SEQ ID NO: 100134 - DNA, 25 bp, Saccharomyces pastorianus
aatatatgcgtactcttcgtcgctg

SEQ ID NO: 100135 - DNA, 25 bp, Saccharomyces pastorianus
cttgccgatgtttgccttgaatcta

SEQ ID NO: 100136 - DNA, 25 bp, Saccharomyces pastorianus
aagttaaacacgaccttgccgatgt

SEQ ID NO: 100137 - DNA, 25 bp, Saccharomyces pastorianus
ggactacgaaaccacatgggccttt

SEQ ID NO: 100138 - DNA, 25 bp, Saccharomyces pastorianus
tcgagaagctaaaacccttgacccg

SEQ ID NO: 100139 - DNA, 25 bp, Saccharomyces pastorianus
gttcacacaagttacacctgggtca

SEQ ID NO: 100140 - DNA, 25 bp, Saccharomyces pastorianus
ggctcacagccagcttagcgatata

SEQ ID NO: 100141 - DNA, 25 bp, Saccharomyces pastorianus
gactcgtgtatcgatgagatctcat

SEQ ID NO: 100142 - DNA, 25 bp, Saccharomyces pastorianus
ccttgacccgttgggaagttcaatg

SEQ ID NO: 100143 - DNA, 25 bp, Saccharomyces pastorianus
acctgggtcaagctggaacttcata

SEQ ID NO: 100144 - DNA, 25 bp, Saccharomyces pastorianus
gcgatatagacgtccggatggccaa

SEQ ID NO: 100145 - DNA, 25 bp, Saccharomyces pastorianus
gttagaatcgcgtccagtgcactca

SEQ ID NO: 100146 - DNA, 25 bp, Saccharomyces pastorianus
ttcatacgcatgacatagacccgaa

SEQ ID NO: 100147 - DNA, 25 bp, Saccharomyces pastorianus
acatgggcctttttgactcgtgtat

SEQ ID NO: 100148 - DNA, 25 bp, Saccharomyces pastorianus
agaaacaaattctctggtctcagat

SEQ ID NO: 100149 - DNA, 25 bp, Saccharomyces pastorianus
ttttcgctttggcatttttggtagt

SEQ ID NO: 100150 - DNA, 25 bp, Saccharomyces pastorianus
gtatatataccactttgcgaggcct

SEQ ID NO: 100151 - DNA, 25 bp, Saccharomyces pastorianus
ctgggatctatctggtcaaacttat

SEQ ID NO: 100152 - DNA, 25 bp, Saccharomyces pastorianus
ttgagcctaacctcggtgttgtgat

SEQ ID NO: 100153 - DNA, 25 bp, Saccharomyces pastorianus
ttgcgaggcctttactgggatctat

SEQ ID NO: 100154 - DNA, 25 bp, Saccharomyces pastorianus
gatcatctggcttttcttcagtgca

SEQ ID NO: 100155 - DNA, 25 bp, Saccharomyces pastorianus
gaccctgatatccagctttacgatg

SEQ ID NO: 100156 - DNA, 25 bp, Saccharomyces pastorianus
taccggttgggttgttgtgatgatc

SEQ ID NO: 100157 - DNA, 25 bp, Saccharomyces pastorianus
gtgcgagagcacatagacaatcatc

SEQ ID NO: 100158 - DNA, 25 bp, Saccharomyces pastorianus
tgcagagttagttcaggctgaccct

SEQ ID NO: 100159 - DNA, 25 bp, Saccharomyces pastorianus
gtctcttccaacattgtcaagaacg

SEQ ID NO: 100160 - DNA, 25 bp, Saccharomyces pastorianus
gaaagcgtctcttccaacattgtca

SEQ ID NO: 100161 - DNA, 25 bp, Saccharomyces pastorianus
aattggaaagcgtctcttccaacat

SEQ ID NO: 100162 - DNA, 25 bp, Saccharomyces pastorianus
aagcaattggaaagcgtctcttcca

SEQ ID NO: 100163 - DNA, 25 bp, Saccharomyces pastorianus
aaagcgtctcttccaacattgtcaa

SEQ ID NO: 100164 - DNA, 25 bp, Saccharomyces pastorianus
ttaagcaattggaaagcgtctcttc

SEQ ID NO: 100165 - DNA, 25 bp, Saccharomyces pastorianus
aagcgtctcttccaacattgtcaag

SEQ ID NO: 100166 - DNA, 25 bp, Saccharomyces pastorianus
gcgtctcttccaacattgtcaagaa

SEQ ID NO: 100167 - DNA, 25 bp, Saccharomyces pastorianus
tggaaagcgtctcttccaacattgt

SEQ ID NO: 100168 - DNA, 25 bp, Saccharomyces pastorianus
agcgtctcttccaacattgtcaaga

SEQ ID NO: 100169 - DNA, 25 bp, Saccharomyces pastorianus
ctcttccaacattgtcaagaacgct

SEQ ID NO: 100170 - DNA, 25 bp, Saccharomyces pastorianus
atgtctgactttcaaaaggaaaagg

SEQ ID NO: 100171 - DNA, 25 bp, Saccharomyces pastorianus
aacttggtcaagaagggtccagtca

SEQ ID NO: 100172 - DNA, 25 bp, Saccharomyces pastorianus
gtcaagaacgctgaacaacacaact

SEQ ID NO: 100173 - DNA, 25 bp, Saccharomyces pastorianus
gaaagactccaaatggtgaaggttc

SEQ ID NO: 100174 - DNA, 25 bp, Saccharomyces pastorianus
agagatacatcgacttggaagctcc

SEQ ID NO: 100175 - DNA, 25 bp, Saccharomyces pastorianus
tacgaaatgagaatccacaagagat

SEQ ID NO: 100176 - DNA, 25 bp, Saccharomyces pastorianus
cttggtcaagaagggtccagtcaga

SEQ ID NO: 100177 - DNA, 25 bp, Saccharomyces pastorianus
gctgaacaacacaacttggtcaaga

SEQ ID NO: 100178 - DNA, 25 bp, Saccharomyces pastorianus
tcatcaagattagaatcactttgac

SEQ ID NO: 100179 - DNA, 25 bp, Saccharomyces pastorianus
gaacgctgaacaacacaacttggtc

SEQ ID NO: 100180 - DNA, 25 bp, Saccharomyces pastorianus
gaatccacaagagatacatcgactt

SEQ ID NO: 100181 - DNA, 25 bp, Saccharomyces pastorianus
gtctcttccaacattgtcaagaacg

SEQ ID NO: 100182 - DNA, 25 bp, Saccharomyces pastorianus
ggaagctcctgttcaaatcgttaag

SEQ ID NO: 100183 - DNA, 25 bp, Saccharomyces pastorianus
aagcaattggaaagcgtctcttcca

SEQ ID NO: 100184 - DNA, 25 bp, Saccharomyces pastorianus
aaagcgtctcttccaacattgtcaa

SEQ ID NO: 100185 - DNA, 25 bp, Saccharomyces pastorianus
gattagaatcactttgacctccacc

SEQ ID NO: 100186 - DNA, 25 bp, Saccharomyces pastorianus
ttaagcaattggaaagcgtctcttc

SEQ ID NO: 100187 - DNA, 25 bp, Saccharomyces pastorianus
gcgtctcttccaacattgtcaagaa

SEQ ID NO: 100188 - DNA, 25 bp, Saccharomyces pastorianus
gatacatcgacttggaagctcctgt

SEQ ID NO: 100189 - DNA, 25 bp, Saccharomyces pastorianus
ggaaagcgtctcttccaacattgtc

SEQ ID NO: 100190 - DNA, 25 bp, Saccharomyces pastorianus
agcgtctcttccaacattgtcaaga

SEQ ID NO: 100191 - DNA, 25 bp, Saccharomyces pastorianus
ctcttccaacattgtcaagaacgct

SEQ ID NO: 100192 - DNA, 25 bp, Saccharomyces pastorianus
acagttagtttctgcgataccgcaa

SEQ ID NO: 100193 - DNA, 25 bp, Saccharomyces pastorianus
tggaaccaccgctaaatgagtcttt

SEQ ID NO: 100194 - DNA, 25 bp, Saccharomyces pastorianus
aagaggccgcgggtgtaatccatag

SEQ ID NO: 100195 - DNA, 25 bp, Saccharomyces pastorianus
taattagcttctttacatgcggccc

SEQ ID NO: 100196 - DNA, 25 bp, Saccharomyces pastorianus
taagggagggaaccaccgctcaaga

SEQ ID NO: 100197 - DNA, 25 bp, Saccharomyces pastorianus
gataaattcctacttttcagtgcag

SEQ ID NO: 100198 - DNA, 25 bp, Saccharomyces pastorianus
gtaatccatagcgacttgcgtgaaa

SEQ ID NO: 100199 - DNA, 25 bp, Saccharomyces pastorianus
ggattaacgaattttcaccaggaga

SEQ ID NO: 100200 - DNA, 25 bp, Saccharomyces pastorianus
gggacttatcaaacgtgcaggcaaa

SEQ ID NO: 100201 - DNA, 25 bp, Saccharomyces pastorianus
ttgcgtgaaacatttatcagcgctg

SEQ ID NO: 100202 - DNA, 25 bp, Saccharomyces pastorianus
atgtttcacctcaagattacgttag

SEQ ID NO: 100203 - DNA, 25 bp, Saccharomyces pastorianus
agattttggctctctctcacgtttt

SEQ ID NO: 100204 - DNA, 25 bp, Saccharomyces pastorianus
gtggaagacctattcaagtgtacaa

SEQ ID NO: 100205 - DNA, 25 bp, Saccharomyces pastorianus
gccactgtctctttgcatctatatt

SEQ ID NO: 100206 - DNA, 25 bp, Saccharomyces pastorianus
gaagcatccaaacaaccggacttga

SEQ ID NO: 100207 - DNA, 25 bp, Saccharomyces pastorianus
gagcacagggatgatttcattccat

SEQ ID NO: 100208 - DNA, 25 bp, Saccharomyces pastorianus
gactgccccattagcattctgatga

SEQ ID NO: 100209 - DNA, 25 bp, Saccharomyces pastorianus
gtaattacgtacaggagcacaggga

SEQ ID NO: 100210 - DNA, 25 bp, Saccharomyces pastorianus
gagtctatagatcagttatgcgagt

SEQ ID NO: 100211 - DNA, 25 bp, Saccharomyces pastorianus
gaatgttcccgttcaacaacagcaa

SEQ ID NO: 100212 - DNA, 25 bp, Saccharomyces pastorianus
aagaggctgctttagaagcatccaa

SEQ ID NO: 100213 - DNA, 25 bp, Saccharomyces pastorianus
attcgatatacaacccgatggccac

SEQ ID NO: 100214 - DNA, 25 bp, Saccharomyces pastorianus
gttcttcgacgtcccagtagataat

SEQ ID NO: 100215 - DNA, 25 bp, Saccharomyces pastorianus
aaatctgttattgctattgtcacgc

SEQ ID NO: 100216 - DNA, 25 bp, Saccharomyces pastorianus
ggccgatacttgtggtactttagct

SEQ ID NO: 100217 - DNA, 25 bp, Saccharomyces pastorianus
attcaagggttcttcgacgtcccag

SEQ ID NO: 100218 - DNA, 25 bp, Saccharomyces pastorianus
caacagccgggtgtgatcatgttat

SEQ ID NO: 100219 - DNA, 25 bp, Saccharomyces pastorianus
tattgctattgtcacgcacggtgtt

SEQ ID NO: 100220 - DNA, 25 bp, Saccharomyces pastorianus
tgatggccgatatgttaacaacagc

SEQ ID NO: 100221 - DNA, 25 bp, Saccharomyces pastorianus
ccaagcgtagttaggtatatcaagg

SEQ ID NO: 100222 - DNA, 25 bp, Saccharomyces pastorianus
cacggtgttttatcaggcagagcta

SEQ ID NO: 100223 - DNA, 25 bp, Saccharomyces pastorianus
gaagtgcccaaaactggcagtcatt

SEQ ID NO: 100224 - DNA, 25 bp, Saccharomyces pastorianus
cattgacatcagtagtgtgctggct

SEQ ID NO: 100225 - DNA, 25 bp, Saccharomyces pastorianus
aaggcatagggagtatcatctagaa

SEQ ID NO: 100226 - DNA, 25 bp, Saccharomyces pastorianus
aatggcccagaaatctaagcttgag

SEQ ID NO: 100227 - DNA, 25 bp, Saccharomyces pastorianus
gagctggcggcaaattttttaaggc

SEQ ID NO: 100228 - DNA, 25 bp, Saccharomyces pastorianus
gatataggcaactccgatgaactac

SEQ ID NO: 100229 - DNA, 25 bp, Saccharomyces pastorianus
gggcagcacaggcatccaaaagcaa

SEQ ID NO: 100230 - DNA, 25 bp, Saccharomyces pastorianus
gaaggtaccatcctaatacagcaac

SEQ ID NO: 100231 - DNA, 25 bp, Saccharomyces pastorianus
gactacaagcgaacctagatcactt

SEQ ID NO: 100232 - DNA, 25 bp, Saccharomyces pastorianus
tatgtgcaagtcctaatatctcaat

SEQ ID NO: 100233 - DNA, 25 bp, Saccharomyces pastorianus
aaactgcgtctgattcgtcgaatgt

SEQ ID NO: 100234 - DNA, 25 bp, Saccharomyces pastorianus
aaactccaatttcaggtcactcaaa

SEQ ID NO: 100235 - DNA, 25 bp, Saccharomyces pastorianus
ggacctaatgttttatctagattct

SEQ ID NO: 100236 - DNA, 25 bp, Saccharomyces pastorianus
cagattgctactgcggagtggtaat

SEQ ID NO: 100237 - DNA, 25 bp, Saccharomyces pastorianus
ggactccctcagttgctcataatga

SEQ ID NO: 100238 - DNA, 25 bp, Saccharomyces pastorianus
agagccgcccaaaaagccttcagag

SEQ ID NO: 100239 - DNA, 25 bp, Saccharomyces pastorianus
atatctccaagttcgaggactccct

SEQ ID NO: 100240 - DNA, 25 bp, Saccharomyces pastorianus
gaattttttacctctatggtcctgg

SEQ ID NO: 100241 - DNA, 25 bp, Saccharomyces pastorianus
atggtcctggaaagcaaactgaatc

SEQ ID NO: 100242 - DNA, 25 bp, Saccharomyces pastorianus
aatagcggtatatctccaagttcga

SEQ ID NO: 100243 - DNA, 25 bp, Saccharomyces pastorianus
gaatgttccagatgactctaaggca

SEQ ID NO: 100244 - DNA, 25 bp, Saccharomyces pastorianus
aatgttgtcatacccatggacctgc

SEQ ID NO: 100245 - DNA, 25 bp, Saccharomyces pastorianus
gatagggactttgatgtgacatacg

SEQ ID NO: 100246 - DNA, 25 bp, Saccharomyces pastorianus
gacctgcgtatccaagaagtttaat

SEQ ID NO: 100247 - DNA, 25 bp, Saccharomyces pastorianus
ttggtaatcgtaatccatcgccgcc

SEQ ID NO: 100248 - DNA, 25 bp, Saccharomyces pastorianus
ggatttgtatccaccagcttcatgg

SEQ ID NO: 100249 - DNA, 25 bp, Saccharomyces pastorianus
gggcagcattagtgcctttttgtaa

SEQ ID NO: 100250 - DNA, 25 bp, Saccharomyces pastorianus
gttccgatacagcagatggatcatt

SEQ ID NO: 100251 - DNA, 25 bp, Saccharomyces pastorianus
gtccttgtctggtagttccgataca

SEQ ID NO: 100252 - DNA, 25 bp, Saccharomyces pastorianus
gacgttcaaagttccagtggtcctt

SEQ ID NO: 100253 - DNA, 25 bp, Saccharomyces pastorianus
acctcgctctaattgtacgtacgga

SEQ ID NO: 100254 - DNA, 25 bp, Saccharomyces pastorianus
attgctcatttcttgtattagtcga

SEQ ID NO: 100255 - DNA, 25 bp, Saccharomyces pastorianus
aagtttgggttgcttgctacctcgc

SEQ ID NO: 100256 - DNA, 25 bp, Saccharomyces pastorianus
gataccgttatcaagactgtccttg

SEQ ID NO: 100257 - DNA, 25 bp, Saccharomyces pastorianus
ggccctttcattgtcattgctgata

SEQ ID NO: 100258 - DNA, 25 bp, Saccharomyces pastorianus
atagcagtgacctacgacatacaaa

SEQ ID NO: 100259 - DNA, 25 bp, Saccharomyces pastorianus
aggctctcgagcgtatgtacacttg

SEQ ID NO: 100260 - DNA, 25 bp, Saccharomyces pastorianus
tcgaatcacctgtatttgtgccccg

SEQ ID NO: 100261 - DNA, 25 bp, Saccharomyces pastorianus
gacatacaaatttcatctctcggat

SEQ ID NO: 100262 - DNA, 25 bp, Saccharomyces pastorianus
tcatctctcggattcacttaccgaa

SEQ ID NO: 100263 - DNA, 25 bp, Saccharomyces pastorianus
gtatgtacacttgccagaactgatt

SEQ ID NO: 100264 - DNA, 25 bp, Saccharomyces pastorianus
ttgtgccccgcgataatcaggctct

SEQ ID NO: 100265 - DNA, 25 bp, Saccharomyces pastorianus
ttttttcttgcactcttttctgacc

SEQ ID NO: 100266 - DNA, 25 bp, Saccharomyces pastorianus
gcacggccttttcttaccgagataa

SEQ ID NO: 100267 - DNA, 25 bp, Saccharomyces pastorianus
agcgggtgagtattcgtttcattac

SEQ ID NO: 100268 - DNA, 25 bp, Saccharomyces pastorianus
tctcactttttatttctcgaatcac

SEQ ID NO: 100269 - DNA, 25 bp, Saccharomyces pastorianus
ggtcagtcttaacagaattccgtca

SEQ ID NO: 100270 - DNA, 25 bp, Saccharomyces pastorianus
acaggcttgtgttcttgttctacaa

SEQ ID NO: 100271 - DNA, 25 bp, Saccharomyces pastorianus
cattttgggcgcaacaggcttgtgt

SEQ ID NO: 100272 - DNA, 25 bp, Saccharomyces pastorianus
ggatttcgttgccaattgtatttgt

SEQ ID NO: 100273 - DNA, 25 bp, Saccharomyces pastorianus
gcttgttcgtgttcttttggatcta

SEQ ID NO: 100274 - DNA, 25 bp, Saccharomyces pastorianus
gatataaccaatccgttcttgttta

SEQ ID NO: 100275 - DNA, 25 bp, Saccharomyces pastorianus
gaattctgtatttactccctttgtg

SEQ ID NO: 100276 - DNA, 25 bp, Saccharomyces pastorianus
atctatctgcgccatgtcgtgaata

SEQ ID NO: 100277 - DNA, 25 bp, Saccharomyces pastorianus
attttacttgggtcaagcggcattt

SEQ ID NO: 100278 - DNA, 25 bp, Saccharomyces pastorianus
gtatttgtactaattgctgcgttac

SEQ ID NO: 100279 - DNA, 25 bp, Saccharomyces pastorianus
ggaattggtttttcatcacattgtg

SEQ ID NO: 100280 - DNA, 25 bp, Saccharomyces pastorianus
gccttcaacagtgcattccttattt

SEQ ID NO: 100281 - DNA, 25 bp, Saccharomyces pastorianus
ggagcctttcttttaattttgtcat

SEQ ID NO: 100282 - DNA, 25 bp, Saccharomyces pastorianus
tgtccattatcttcgggatcttcct

SEQ ID NO: 100283 - DNA, 25 bp, Saccharomyces pastorianus
tgacaacatcagtcaccgctttttt

SEQ ID NO: 100284 - DNA, 25 bp, Saccharomyces pastorianus
agatcacgttagcatcctgttgttc

SEQ ID NO: 100285 - DNA, 25 bp, Saccharomyces pastorianus
ttgccagttatcacttctcaacttg

SEQ ID NO: 100286 - DNA, 25 bp, Saccharomyces pastorianus
atgcttctctggtacattaggctgt

SEQ ID NO: 100287 - DNA, 25 bp, Saccharomyces pastorianus
atatagatctcccatggcgcgtaat

SEQ ID NO: 100288 - DNA, 25 bp, Saccharomyces pastorianus
ggatcttccttcaccaaatcgcaaa

SEQ ID NO: 100289 - DNA, 25 bp, Saccharomyces pastorianus
aacttgggatctgttgccttcaaca

SEQ ID NO: 100290 - DNA, 25 bp, Saccharomyces pastorianus
gagacataacctcttgtccattatc

SEQ ID NO: 100291 - DNA, 25 bp, Saccharomyces pastorianus
ttacccttctaatttgccaatccaa

SEQ ID NO: 100292 - DNA, 25 bp, Saccharomyces pastorianus
taatactccagtaatgccacctcag

SEQ ID NO: 100293 - DNA, 25 bp, Saccharomyces pastorianus
tcaactaatggatcgtgcagctaac

SEQ ID NO: 100294 - DNA, 25 bp, Saccharomyces pastorianus
gcactctacgcaggaatgactcatg

SEQ ID NO: 100295 - DNA, 25 bp, Saccharomyces pastorianus
agcaatgagtactcaccttaccctt

SEQ ID NO: 100296 - DNA, 25 bp, Saccharomyces pastorianus
aaggaagccatagtattctctcaaa

SEQ ID NO: 100297 - DNA, 25 bp, Saccharomyces pastorianus
attcgcttaatgcagcttctaaaac

SEQ ID NO: 100298 - DNA, 25 bp, Saccharomyces pastorianus
gaagacatgttatccctgcgtcaag

SEQ ID NO: 100299 - DNA, 25 bp, Saccharomyces pastorianus
tacggatctgtaacgcctttgaggc

SEQ ID NO: 100300 - DNA, 25 bp, Saccharomyces pastorianus
tgccaatccaacatcctacgaatag

SEQ ID NO: 100301 - DNA, 25 bp, Saccharomyces pastorianus
gtaacaccgattgttgagccatcga

SEQ ID NO: 100302 - DNA, 25 bp, Saccharomyces pastorianus
aaaggctttatttctggtacctatg

SEQ ID NO: 100303 - DNA, 25 bp, Saccharomyces pastorianus
taaagtccgcccattggaggaacag

SEQ ID NO: 100304 - DNA, 25 bp, Saccharomyces pastorianus
gatcacatggtcattatgggtccta

SEQ ID NO: 100305 - DNA, 25 bp, Saccharomyces pastorianus
tgcgctggctgtacgtgaccatgaa

SEQ ID NO: 100306 - DNA, 25 bp, Saccharomyces pastorianus
atttacaagcacatccctgaaggga

SEQ ID NO: 100307 - DNA, 25 bp, Saccharomyces pastorianus
gagcattttggaaactgccccgatt

SEQ ID NO: 100308 - DNA, 25 bp, Saccharomyces pastorianus
tgccccgattttaccaggacagaca

SEQ ID NO: 100309 - DNA, 25 bp, Saccharomyces pastorianus
agcattttcctctagctcctaaagt

SEQ ID NO: 100310 - DNA, 25 bp, Saccharomyces pastorianus
cgaagacggcgttgaatttcattca

SEQ ID NO: 100311 - DNA, 25 bp, Saccharomyces pastorianus
aaggttacggatgcgctggctgtac

SEQ ID NO: 100312 - DNA, 25 bp, Saccharomyces pastorianus
agactgttctcttcgatactcatca

SEQ ID NO: 100313 - DNA, 25 bp, Saccharomyces pastorianus
gtgcactgtcaccaaaaactatgta

SEQ ID NO: 100314 - DNA, 25 bp, Saccharomyces pastorianus
tgtttccttttttgctcacgattta

SEQ ID NO: 100315 - DNA, 25 bp, Saccharomyces pastorianus
gattatattcctaactggttttgtc

SEQ ID NO: 100316 - DNA, 25 bp, Saccharomyces pastorianus
atataaggaaccagcttcagccacg

SEQ ID NO: 100317 - DNA, 25 bp, Saccharomyces pastorianus
ggttatgttccaactgtacttggca

SEQ ID NO: 100318 - DNA, 25 bp, Saccharomyces pastorianus
gaattgatctctggtggtctagctg

SEQ ID NO: 100319 - DNA, 25 bp, Saccharomyces pastorianus
aaacggcagcatatccatttgaaat

SEQ ID NO: 100320 - DNA, 25 bp, Saccharomyces pastorianus
catatccgttagatctcgtgagggt

SEQ ID NO: 100321 - DNA, 25 bp, Saccharomyces pastorianus
ggtctagctggtatggcctcccaaa

SEQ ID NO: 100322 - DNA, 25 bp, Saccharomyces pastorianus
gataccatatgcaggtgtttccttt

SEQ ID NO: 100323 - DNA, 25 bp, Saccharomyces pastorianus
ttctttgccccttattcagtattag

SEQ ID NO: 100324 - DNA, 25 bp, Saccharomyces pastorianus
gatacggacttactgaacctgttac

SEQ ID NO: 100325 - DNA, 25 bp, Saccharomyces pastorianus
aaggcagctcctcttctttggatga

SEQ ID NO: 100326 - DNA, 25 bp, Saccharomyces pastorianus
gtaattcttctcagggtcacttggt

SEQ ID NO: 100327 - DNA, 25 bp, Saccharomyces pastorianus
ggcttctcgaagtacaacgcatagt

SEQ ID NO: 100328 - DNA, 25 bp, Saccharomyces pastorianus
gattggttagaaagctccttcccat

SEQ ID NO: 100329 - DNA, 25 bp, Saccharomyces pastorianus
attaccgttctgattgcgttctaag

SEQ ID NO: 100330 - DNA, 25 bp, Saccharomyces pastorianus
ggattgagcggaattcgtacactat

SEQ ID NO: 100331 - DNA, 25 bp, Saccharomyces pastorianus
tgagaccttaattcactcggcttct

SEQ ID NO: 100332 - DNA, 25 bp, Saccharomyces pastorianus
gaacctgttacctttcttggaggct

SEQ ID NO: 100333 - DNA, 25 bp, Saccharomyces pastorianus
gaagctgatacctaaatccgtactt

SEQ ID NO: 100334 - DNA, 25 bp, Saccharomyces pastorianus
ataacagcccggtaagttacgcaat

SEQ ID NO: 100335 - DNA, 25 bp, Saccharomyces pastorianus
ttgagaccaatgttcaagtcggtga

SEQ ID NO: 100336 - DNA, 25 bp, Saccharomyces pastorianus
attcaagctgcggaagctgaactag

SEQ ID NO: 100337 - DNA, 25 bp, Saccharomyces pastorianus
aagaatgaatcttcgtgcctagaca

SEQ ID NO: 100338 - DNA, 25 bp, Saccharomyces pastorianus
tcttcgtgcctagacagatgtgtgg

SEQ ID NO: 100339 - DNA, 25 bp, Saccharomyces pastorianus
gaagctgaactagatttggtcacag

SEQ ID NO: 100340 - DNA, 25 bp, Saccharomyces pastorianus
tcttaggtttcggtggtggtcagcc

SEQ ID NO: 100341 - DNA, 25 bp, Saccharomyces pastorianus
ttggtcacagacatgttcaataaat

SEQ ID NO: 100342 - DNA, 25 bp, Saccharomyces pastorianus
gtggtcagcctcaattatcatctca

SEQ ID NO: 100343 - DNA, 25 bp, Saccharomyces pastorianus
gtgtggccaaatattttgagaccaa

SEQ ID NO: 100344 - DNA, 25 bp, Saccharomyces pastorianus
aatacttcttattccgagggtgagc

SEQ ID NO: 100345 - DNA, 25 bp, Saccharomyces pastorianus
tcaagtcggtgaaaacatgcagaaa

SEQ ID NO: 100346 - DNA, 25 bp, Saccharomyces pastorianus
tagttgccattgacgcctgggaaca

SEQ ID NO: 100347 - DNA, 25 bp, Saccharomyces pastorianus
attggaaccttatatctccggtcaa

SEQ ID NO: 100348 - DNA, 25 bp, Saccharomyces pastorianus
ggagaaccaaagtcaccttgccaga

SEQ ID NO: 100349 - DNA, 25 bp, Saccharomyces pastorianus
aggataccgtcacaggcccactagt

SEQ ID NO: 100350 - DNA, 25 bp, Saccharomyces pastorianus
gaaagccgactacttcaaagccatt

SEQ ID NO: 100351 - DNA, 25 bp, Saccharomyces pastorianus
ggcaatcgacgagcagtttggcagt

SEQ ID NO: 100352 - DNA, 25 bp, Saccharomyces pastorianus
agttccatggcggtggtttcacaaa

SEQ ID NO: 100353 - DNA, 25 bp, Saccharomyces pastorianus
gatgggccttcattgtgaaaaacct

SEQ ID NO: 100354 - DNA, 25 bp, Saccharomyces pastorianus
gtttcacaaaccactgtctattctg

SEQ ID NO: 100355 - DNA, 25 bp, Saccharomyces pastorianus
gtttggcagtctggacgagctgatt

SEQ ID NO: 100356 - DNA, 25 bp, Saccharomyces pastorianus
tagttcctctagttgccattgacgc

SEQ ID NO: 100357 - DNA, 25 bp, Saccharomyces pastorianus
tatcgcgttcatgagtttactaaag

SEQ ID NO: 100358 - DNA, 25 bp, Saccharomyces pastorianus
atttacgctcttcaagacaccaatt

SEQ ID NO: 100359 - DNA, 25 bp, Saccharomyces pastorianus
gataagtagtgcctccaattgtacc

SEQ ID NO: 100360 - DNA, 25 bp, Saccharomyces pastorianus
gaatatgtgcacacgctgaatggca

SEQ ID NO: 100361 - DNA, 25 bp, Saccharomyces pastorianus
gcaccggtaagatatctgttcctga

SEQ ID NO: 100362 - DNA, 25 bp, Saccharomyces pastorianus
atggcacagcaatggctatcccaag

SEQ ID NO: 100363 - DNA, 25 bp, Saccharomyces pastorianus
atttaggattggtggctaccgcgga

SEQ ID NO: 100364 - DNA, 25 bp, Saccharomyces pastorianus
gccagaaaccagtgcaaaagtcctt

SEQ ID NO: 100365 - DNA, 25 bp, Saccharomyces pastorianus
acgaaaggtctctatcgcgttcatg

SEQ ID NO: 100366 - DNA, 25 bp, Saccharomyces pastorianus
gctaccgcggagatacctttggcag

SEQ ID NO: 100367 - DNA, 25 bp, Saccharomyces pastorianus
aaaatttctatgacccaagcaccgg

SEQ ID NO: 100368 - DNA, 25 bp, Saccharomyces pastorianus
aaattagttggatacgttctcgtga

SEQ ID NO: 100369 - DNA, 25 bp, Saccharomyces pastorianus
gagcagctttacacttgtacaggga

SEQ ID NO: 100370 - DNA, 25 bp, Saccharomyces pastorianus
gaggcttcgtttgttgctactacca

SEQ ID NO: 100371 - DNA, 25 bp, Saccharomyces pastorianus
caacatacttggctccgggcgaaaa

SEQ ID NO: 100372 - DNA, 25 bp, Saccharomyces pastorianus
gaatatgtttccttgcatgtgagac

SEQ ID NO: 100373 - DNA, 25 bp, Saccharomyces pastorianus
tactaccaccactttggactgtgaa

SEQ ID NO: 100374 - DNA, 25 bp, Saccharomyces pastorianus
gtacagggacacattggcgtttgag

SEQ ID NO: 100375 - DNA, 25 bp, Saccharomyces pastorianus
gaccagcaaaacgagccaccaaatg

SEQ ID NO: 100376 - DNA, 25 bp, Saccharomyces pastorianus
cacccatcgccgtttgaaagagaat

SEQ ID NO: 100377 - DNA, 25 bp, Saccharomyces pastorianus
tatgtatcatattctctcgtggccg

SEQ ID NO: 100378 - DNA, 25 bp, Saccharomyces pastorianus
tgcagataagcaacttcacccatcg

SEQ ID NO: 100379 - DNA, 25 bp, Saccharomyces pastorianus
caaaatctacttcaacgccggttct

SEQ ID NO: 100380 - DNA, 25 bp, Saccharomyces pastorianus
tattgctccttctcctatgtataat

SEQ ID NO: 100381 - DNA, 25 bp, Saccharomyces pastorianus
gttaacgtatacgattcgccattgt

SEQ ID NO: 100382 - DNA, 25 bp, Saccharomyces pastorianus
agagaagcacccatgtttccagttc

SEQ ID NO: 100383 - DNA, 25 bp, Saccharomyces pastorianus
aagagacaccaagggcagcaccaaa

SEQ ID NO: 100384 - DNA, 25 bp, Saccharomyces pastorianus
atagagcgcccctcatttgataatt

SEQ ID NO: 100385 - DNA, 25 bp, Saccharomyces pastorianus
acggccggagttgctttatccgaat

SEQ ID NO: 100386 - DNA, 25 bp, Saccharomyces pastorianus
caacgttcctgacgccaagtcataa

SEQ ID NO: 100387 - DNA, 25 bp, Saccharomyces pastorianus
agttccttactatattgctccttct

SEQ ID NO: 100388 - DNA, 25 bp, Saccharomyces pastorianus
aagactgccccatcagaccaaaagt

SEQ ID NO: 100389 - DNA, 25 bp, Saccharomyces pastorianus
tatcttccaatatatccggtctcga

SEQ ID NO: 100390 - DNA, 25 bp, Saccharomyces pastorianus
ttcaacaagtagtttccccattctc

SEQ ID NO: 100391 - DNA, 25 bp, Saccharomyces pastorianus
attagttccatgatgcgtttccgca

SEQ ID NO: 100392 - DNA, 25 bp, Saccharomyces pastorianus
aaatctgcgcagcatttccgagttt

SEQ ID NO: 100393 - DNA, 25 bp, Saccharomyces pastorianus
tgcgtttccgcacacaagagttatc

SEQ ID NO: 100394 - DNA, 25 bp, Saccharomyces pastorianus
gcatgactcagaaaggctatcgcac

SEQ ID NO: 100395 - DNA, 25 bp, Saccharomyces pastorianus
ttgacgtattttgggagcatgactc

SEQ ID NO: 100396 - DNA, 25 bp, Saccharomyces pastorianus
ggctatcgcactttttattaatgac

SEQ ID NO: 100397 - DNA, 25 bp, Saccharomyces pastorianus
gaaacctcatccagcatttaattta

SEQ ID NO: 100398 - DNA, 25 bp, Saccharomyces pastorianus
gggattaacgtcacagtttcaacaa

SEQ ID NO: 100399 - DNA, 25 bp, Saccharomyces pastorianus
aaacatgaactctctcgtagctacg

SEQ ID NO: 100400 - DNA, 25 bp, Saccharomyces pastorianus
cgtagctacgccgatgaaacctcat

SEQ ID NO: 100401 - DNA, 25 bp, Saccharomyces pastorianus
gctccaaaggctccattcatgagat

SEQ ID NO: 100402 - DNA, 25 bp, Saccharomyces pastorianus
cactgtcagagactgttccttgtat

SEQ ID NO: 100403 - DNA, 25 bp, Saccharomyces pastorianus
aattggccttcttgactttcgacga

SEQ ID NO: 100404 - DNA, 25 bp, Saccharomyces pastorianus
atcggcgtcccaatctttttgacga

SEQ ID NO: 100405 - DNA, 25 bp, Saccharomyces pastorianus
catgaaacgttgttctgacgacccc

SEQ ID NO: 100406 - DNA, 25 bp, Saccharomyces pastorianus
aatccgttgacgttttgatgccaaa

SEQ ID NO: 100407 - DNA, 25 bp, Saccharomyces pastorianus
tgctggcccactcgtaaaacaattg

SEQ ID NO: 100408 - DNA, 25 bp, Saccharomyces pastorianus
acggtacttgcccacatggtggtta

SEQ ID NO: 100409 - DNA, 25 bp, Saccharomyces pastorianus
ttacctggttgaacgagcacgacat

SEQ ID NO: 100410 - DNA, 25 bp, Saccharomyces pastorianus
taccgaacgtattttggcctggttg

SEQ ID NO: 100411 - DNA, 25 bp, Saccharomyces pastorianus
ttggaagacccaattgctggcccac

SEQ ID NO: 100412 - DNA, 25 bp, Saccharomyces pastorianus
tattttcacattaagcagcaggcta

SEQ ID NO: 100413 - DNA, 25 bp, Saccharomyces pastorianus
gtggtagcgttttcagccaagcacg

SEQ ID NO: 100414 - DNA, 25 bp, Saccharomyces pastorianus
gaacagatcttttcactttctaata

SEQ ID NO: 100415 - DNA, 25 bp, Saccharomyces pastorianus
gatacatcttgcttataaacccttg

SEQ ID NO: 100416 - DNA, 25 bp, Saccharomyces pastorianus
caagcacgttttcgttggcgtttgt

SEQ ID NO: 100417 - DNA, 25 bp, Saccharomyces pastorianus
ggctttcgaagcttgtattacctcc

SEQ ID NO: 100418 - DNA, 25 bp, Saccharomyces pastorianus
aacccttgcaaaagtttcctgcgat

SEQ ID NO: 100419 - DNA, 25 bp, Saccharomyces pastorianus
ggtcttccctttgtcacgtaagaga

SEQ ID NO: 100420 - DNA, 25 bp, Saccharomyces pastorianus
gaggcgaattctccagcggatacat

SEQ ID NO: 100421 - DNA, 25 bp, Saccharomyces pastorianus
ggactttcatttgaccttcgagtgg

SEQ ID NO: 100422 - DNA, 25 bp, Saccharomyces pastorianus
tcctccagtttcaataacaccggtc

SEQ ID NO: 100423 - DNA, 25 bp, Saccharomyces pastorianus
gctcgattttcagcgaccttttctt

SEQ ID NO: 100424 - DNA, 25 bp, Saccharomyces pastorianus
tcgattttcagcgaccttttctttt

SEQ ID NO: 100425 - DNA, 25 bp, Saccharomyces pastorianus
ggctcgattttcagcgaccttttct

SEQ ID NO: 100426 - DNA, 25 bp, Saccharomyces pastorianus
cgattttcagcgaccttttcttttg

SEQ ID NO: 100427 - DNA, 25 bp, Saccharomyces pastorianus
gattttcagcgaccttttcttttga

SEQ ID NO: 100428 - DNA, 25 bp, Saccharomyces pastorianus
attttcagcgaccttttcttttgat

SEQ ID NO: 100429 - DNA, 25 bp, Saccharomyces pastorianus
cagcgaccttttcttttgataagta

SEQ ID NO: 100430 - DNA, 25 bp, Saccharomyces pastorianus
aatcaaattctcaagaggggctcga

SEQ ID NO: 100431 - DNA, 25 bp, Saccharomyces pastorianus
ttcagcgaccttttcttttgataag

SEQ ID NO: 100432 - DNA, 25 bp, Saccharomyces pastorianus
ttttcagcgaccttttcttttgata

SEQ ID NO: 100433 - DNA, 25 bp, Saccharomyces pastorianus
gggctcgattttcagcgaccttttc

SEQ ID NO: 100434 - DNA, 25 bp, Saccharomyces pastorianus
gaggctcaaatctctgacttagaaa

SEQ ID NO: 100435 - DNA, 25 bp, Saccharomyces pastorianus
ttcttaccgcgacaaagtgcaggaa

SEQ ID NO: 100436 - DNA, 25 bp, Saccharomyces pastorianus
ataattcttcttaccgcgacaaagt

SEQ ID NO: 100437 - DNA, 25 bp, Saccharomyces pastorianus
aacaccgacttacagcttcaactaa

SEQ ID NO: 100438 - DNA, 25 bp, Saccharomyces pastorianus
agtacatttctcaacaagagcttga

SEQ ID NO: 100439 - DNA, 25 bp, Saccharomyces pastorianus
cattacaggccagctgcaatggata

SEQ ID NO: 100440 - DNA, 25 bp, Saccharomyces pastorianus
ggttaagacattacaggccagctgc

SEQ ID NO: 100441 - DNA, 25 bp, Saccharomyces pastorianus
actttacaaaagctcaacaccgact

SEQ ID NO: 100442 - DNA, 25 bp, Saccharomyces pastorianus
ctaagaactcccaacaaacagatgt

SEQ ID NO: 100443 - DNA, 25 bp, Saccharomyces pastorianus
tatggtaagcctagaaacggacttg

SEQ ID NO: 100444 - DNA, 25 bp, Saccharomyces pastorianus
ggaggaaacactacaactgcaaatg

SEQ ID NO: 100445 - DNA, 25 bp, Saccharomyces pastorianus
atggtcgcaaaatcccagtcaacga

SEQ ID NO: 100446 - DNA, 25 bp, Saccharomyces pastorianus
agatgatatctcacgtgttgccgaa

SEQ ID NO: 100447 - DNA, 25 bp, Saccharomyces pastorianus
ttacttggaggtggtggttctttca

SEQ ID NO: 100448 - DNA, 25 bp, Saccharomyces pastorianus
atggattgggtaacagctcctcctc

SEQ ID NO: 100449 - DNA, 25 bp, Saccharomyces pastorianus
gacaagttctcatgcatggtcgcaa

SEQ ID NO: 100450 - DNA, 25 bp, Saccharomyces pastorianus
tgtatacccacgttttgaaccagta

SEQ ID NO: 100451 - DNA, 25 bp, Saccharomyces pastorianus
gcaggcagctcctcaagcggttgag

SEQ ID NO: 100452 - DNA, 25 bp, Saccharomyces pastorianus
gatgtattctcgtttgtatacccac

SEQ ID NO: 100453 - DNA, 25 bp, Saccharomyces pastorianus
attcggattctggtattttcggtat

SEQ ID NO: 100454 - DNA, 25 bp, Saccharomyces pastorianus
attatcttgtataccgcaggcagct

SEQ ID NO: 100455 - DNA, 25 bp, Saccharomyces pastorianus
gttgcgttcaaccattcttattcgg

SEQ ID NO: 100456 - DNA, 25 bp, Saccharomyces pastorianus
ttttgcggttcattcctaagggact

SEQ ID NO: 100457 - DNA, 25 bp, Saccharomyces pastorianus
atcatcccacagttcgagttgtcca

SEQ ID NO: 100458 - DNA, 25 bp, Saccharomyces pastorianus
aaacggcatcaagtgctcctggaaa

SEQ ID NO: 100459 - DNA, 25 bp, Saccharomyces pastorianus
taatgccgacttaatctaccctgct

SEQ ID NO: 100460 - DNA, 25 bp, Saccharomyces pastorianus
ataaccgctgctatgatgggaggct

SEQ ID NO: 100461 - DNA, 25 bp, Saccharomyces pastorianus
tgctatgcaagatcgtgtccaccaa

SEQ ID NO: 100462 - DNA, 25 bp, Saccharomyces pastorianus
gatcccaggtctcacggaaatctta

SEQ ID NO: 100463 - DNA, 25 bp, Saccharomyces pastorianus
ggaaatcttatcatgtgtcacccca

SEQ ID NO: 100464 - DNA, 25 bp, Saccharomyces pastorianus
aaagattggccgtcttgaccacagc

SEQ ID NO: 100465 - DNA, 25 bp, Saccharomyces pastorianus
ggctttggccactgagaatttcgaa

SEQ ID NO: 100466 - DNA, 25 bp, Saccharomyces pastorianus
agattccattggctgaggtgcttcc

SEQ ID NO: 100467 - DNA, 25 bp, Saccharomyces pastorianus
aagtggttgccatttacggtctgat

SEQ ID NO: 100468 - DNA, 25 bp, Saccharomyces pastorianus
gctactgctgagaacatgtactcga

SEQ ID NO: 100469 - DNA, 25 bp, Saccharomyces pastorianus
cgaaattgactgtggctactgctga

SEQ ID NO: 100470 - DNA, 25 bp, Saccharomyces pastorianus
gggtattttcattactggttcatcc

SEQ ID NO: 100471 - DNA, 25 bp, Saccharomyces pastorianus
tcatccatgattggtgccggtgtgc

SEQ ID NO: 100472 - DNA, 25 bp, Saccharomyces pastorianus
gccggtgtgcgtgctccaaggatta

SEQ ID NO: 100473 - DNA, 25 bp, Saccharomyces pastorianus
gctgattccgcattgtttgttaaaa

SEQ ID NO: 100474 - DNA, 25 bp, Saccharomyces pastorianus
acggtctgattattgccattgtctt

SEQ ID NO: 100475 - DNA, 25 bp, Saccharomyces pastorianus
ctgtacactggttattctcttttct

SEQ ID NO: 100476 - DNA, 25 bp, Saccharomyces pastorianus
atcgctgtcggtatcaccggtgcga

SEQ ID NO: 100477 - DNA, 25 bp, Saccharomyces pastorianus
gctccaaggattaccaccaagaatt

SEQ ID NO: 100478 - DNA, 25 bp, Saccharomyces pastorianus
caagacgctttgtttatcaccagat

SEQ ID NO: 100479 - DNA, 25 bp, Saccharomyces pastorianus
aactcgtttttcacatgacgccgat

SEQ ID NO: 100480 - DNA, 25 bp, Saccharomyces pastorianus
gaaggtgttcgataccttaactcgt

SEQ ID NO: 100481 - DNA, 25 bp, Saccharomyces pastorianus
aagattactggctggattacgcaat

SEQ ID NO: 100482 - DNA, 25 bp, Saccharomyces pastorianus
catgacgccgatttagaagtttcaa

SEQ ID NO: 100483 - DNA, 25 bp, Saccharomyces pastorianus
actaccgcagttggtttagtatcgc

SEQ ID NO: 100484 - DNA, 25 bp, Saccharomyces pastorianus
gcaatccactcctgttttactaaat

SEQ ID NO: 100485 - DNA, 25 bp, Saccharomyces pastorianus
aaactgtcggccaagcaggcagacc

SEQ ID NO: 100486 - DNA, 25 bp, Saccharomyces pastorianus
ttttcgctatgggtctatgtggtgc

SEQ ID NO: 100487 - DNA, 25 bp, Saccharomyces pastorianus
taaggccaaagtttattctagcatt

SEQ ID NO: 100488 - DNA, 25 bp, Saccharomyces pastorianus
aaaggttaatgtgcgcgttggtcaa

SEQ ID NO: 100489 - DNA, 25 bp, Saccharomyces pastorianus
gaagccgccatcaaaaactcctacg

SEQ ID NO: 100490 - DNA, 25 bp, Saccharomyces pastorianus
gagttcaccaaaaacaccactgcga

SEQ ID NO: 100491 - DNA, 25 bp, Saccharomyces pastorianus
gggaattatcctagcaggccctaaa

SEQ ID NO: 100492 - DNA, 25 bp, Saccharomyces pastorianus
cgacttctctcgtccaggaatgtaa

SEQ ID NO: 100493 - DNA, 25 bp, Saccharomyces pastorianus
ataaagcctcctgctcttttacata

SEQ ID NO: 100494 - DNA, 25 bp, Saccharomyces pastorianus
tagcttcaaagctccgatggctgat

SEQ ID NO: 100495 - DNA, 25 bp, Saccharomyces pastorianus
aaccacggatattaccatttctgag

SEQ ID NO: 100496 - DNA, 25 bp, Saccharomyces pastorianus
attttgctatgcttgcacaccagac

SEQ ID NO: 100497 - DNA, 25 bp, Saccharomyces pastorianus
aaatgagggcgtttgctccggtgat

SEQ ID NO: 100498 - DNA, 25 bp, Saccharomyces pastorianus
aagatcctgtttgtggtagtggttc

SEQ ID NO: 100499 - DNA, 25 bp, Saccharomyces pastorianus
tagtggttctgtagcccttgcaaga

SEQ ID NO: 100500 - DNA, 25 bp, Saccharomyces pastorianus
ggctgtttgtgagacaaccgctatt

SEQ ID NO: 100501 - DNA, 25 bp, Saccharomyces pastorianus
ggagatgagacctgccactggaaat

SEQ ID NO: 100502 - DNA, 25 bp, Saccharomyces pastorianus
aaggcatgatgcagatttcccacct

SEQ ID NO: 100503 - DNA, 25 bp, Saccharomyces pastorianus
gaaataccgcagatattccgcctca

SEQ ID NO: 100504 - DNA, 25 bp, Saccharomyces pastorianus
agatggccacgtctaattctgttgc

SEQ ID NO: 100505 - DNA, 25 bp, Saccharomyces pastorianus
attaccgtggatgaggccctggagc

SEQ ID NO: 100506 - DNA, 25 bp, Saccharomyces pastorianus
gcaacagcagccttcagatgtggat

SEQ ID NO: 100507 - DNA, 25 bp, Saccharomyces pastorianus
gtggataatggcaacgccgcagcga

SEQ ID NO: 100508 - DNA, 25 bp, Saccharomyces pastorianus
attccgcctcagaatgataacggca

SEQ ID NO: 100509 - DNA, 25 bp, Saccharomyces pastorianus
gcatccttacttgtccatatggcat

SEQ ID NO: 100510 - DNA, 25 bp, Saccharomyces pastorianus
taacggcacgcttctagaccttgaa

SEQ ID NO: 100511 - DNA, 25 bp, Saccharomyces pastorianus
atgcgtccgctccaattatacgagt

SEQ ID NO: 100512 - DNA, 25 bp, Saccharomyces pastorianus
gggcgccattatcatcgacgagaac

SEQ ID NO: 100513 - DNA, 25 bp, Saccharomyces pastorianus
caaaataggccagcggttacccaat

SEQ ID NO: 100514 - DNA, 25 bp, Saccharomyces pastorianus
gagtacgtcccgaagatcgttgact

SEQ ID NO: 100515 - DNA, 25 bp, Saccharomyces pastorianus
cagcagtttctcgatcttcaggata

SEQ ID NO: 100516 - DNA, 25 bp, Saccharomyces pastorianus
aacgccgtgatcgaagtccgagaca

SEQ ID NO: 100517 - DNA, 25 bp, Saccharomyces pastorianus
agagctcgaacagttgcgtcgctac

SEQ ID NO: 100518 - DNA, 25 bp, Saccharomyces pastorianus
ggactcattaccaagggcgccatta

SEQ ID NO: 100519 - DNA, 25 bp, Saccharomyces pastorianus
ctctaatgccggtatcgagactatt

SEQ ID NO: 100520 - DNA, 25 bp, Saccharomyces pastorianus
aattttggattctgcacggactcat

SEQ ID NO: 100521 - DNA, 25 bp, Saccharomyces pastorianus
gattcagtctgttggatgcgtccgc

SEQ ID NO: 100522 - DNA, 25 bp, Saccharomyces pastorianus
taacgatatctttttccgtgcaaga

SEQ ID NO: 100523 - DNA, 25 bp, Saccharomyces pastorianus
attcacatccggcatcaagagcgtc

SEQ ID NO: 100524 - DNA, 25 bp, Saccharomyces pastorianus
aaatcgttgtaaccagacgcctggc

SEQ ID NO: 100525 - DNA, 25 bp, Saccharomyces pastorianus
ggtgtttcagttcgaatttcttact

SEQ ID NO: 100526 - DNA, 25 bp, Saccharomyces pastorianus
gaagctttcaagttgcctaaaccat

SEQ ID NO: 100527 - DNA, 25 bp, Saccharomyces pastorianus
agagcgtcatatgccctaatgtcat

SEQ ID NO: 100528 - DNA, 25 bp, Saccharomyces pastorianus
gagcagtacctcacaaatcgttgta

SEQ ID NO: 100529 - DNA, 25 bp, Saccharomyces pastorianus
taaaccatggtcacccaattcacat

SEQ ID NO: 100530 - DNA, 25 bp, Saccharomyces pastorianus
tactctcatttatcatagcgcttca

SEQ ID NO: 100531 - DNA, 25 bp, Saccharomyces pastorianus
atcaaaacatatcccttgccatctt

SEQ ID NO: 100532 - DNA, 25 bp, Saccharomyces pastorianus
cggctctgggcgaacaatgtgctat

SEQ ID NO: 100533 - DNA, 25 bp, Saccharomyces pastorianus
gtgtttggcccaattttagtcatga

SEQ ID NO: 100534 - DNA, 25 bp, Saccharomyces pastorianus
ttcaaggtggttcccgcttcaaaca

SEQ ID NO: 100535 - DNA, 25 bp, Saccharomyces pastorianus
ggttctgtgtttggtgcggatatca

SEQ ID NO: 100536 - DNA, 25 bp, Saccharomyces pastorianus
gagcttatacgaattccacatggca

SEQ ID NO: 100537 - DNA, 25 bp, Saccharomyces pastorianus
caactcttttggtggatgtcactcc

SEQ ID NO: 100538 - DNA, 25 bp, Saccharomyces pastorianus
aggtcttttgggtttgtgcaatgcc

SEQ ID NO: 100539 - DNA, 25 bp, Saccharomyces pastorianus
tagactaccctattcgtaacaatgc

SEQ ID NO: 100540 - DNA, 25 bp, Saccharomyces pastorianus
ttgtgtacaactagccaactctgcg

SEQ ID NO: 100541 - DNA, 25 bp, Saccharomyces pastorianus
gcaattacgtcgcaaatagcctaca

SEQ ID NO: 100542 - DNA, 25 bp, Saccharomyces pastorianus
agggagctcgtttacttcaaggtgg

SEQ ID NO: 100543 - DNA, 25 bp, Saccharomyces pastorianus
tgcgccatttggtctaggtggttct

SEQ ID NO: 100544 - DNA, 25 bp, Saccharomyces pastorianus
aaccgcattggttggcatcttatcc

SEQ ID NO: 100545 - DNA, 25 bp, Saccharomyces pastorianus
tggcccacgtaaacttttcgccaat

SEQ ID NO: 100546 - DNA, 25 bp, Saccharomyces pastorianus
gtcgcgttcctcgaatcacaaaaga

SEQ ID NO: 100547 - DNA, 25 bp, Saccharomyces pastorianus
aacattgccgaaactaacctacctg

SEQ ID NO: 100548 - DNA, 25 bp, Saccharomyces pastorianus
cggtgcatttatctacgtctgtggt

SEQ ID NO: 100549 - DNA, 25 bp, Saccharomyces pastorianus
gatgatttcttgtaccaggacgaat

SEQ ID NO: 100550 - DNA, 25 bp, Saccharomyces pastorianus
ggatcccgtaacactgatgatttct

SEQ ID NO: 100551 - DNA, 25 bp, Saccharomyces pastorianus
gttcactacgatttaaatggcccac

SEQ ID NO: 100552 - DNA, 25 bp, Saccharomyces pastorianus
gttcgttcgaaatggtcgtggccca

SEQ ID NO: 100553 - DNA, 25 bp, Saccharomyces pastorianus
gttctaacttcagattgccttccaa

SEQ ID NO: 100554 - DNA, 25 bp, Saccharomyces pastorianus
ttatcagagagcgtgtcgcgttcct

SEQ ID NO: 100555 - DNA, 25 bp, Saccharomyces pastorianus
tcacaagaggttttgagaaggtttt

SEQ ID NO: 100556 - DNA, 25 bp, Saccharomyces pastorianus
ttgctcatagttacttggacacagt

SEQ ID NO: 100557 - DNA, 25 bp, Saccharomyces pastorianus
tcatagttacttggacacagtaagc

SEQ ID NO: 100558 - DNA, 25 bp, Saccharomyces pastorianus
gatccttccgagttatttaagcatt

SEQ ID NO: 100559 - DNA, 25 bp, Saccharomyces pastorianus
cttgctctagaaaaagatattgctc

SEQ ID NO: 100560 - DNA, 25 bp, Saccharomyces pastorianus
gcaagatcacaagaggttttgagaa

SEQ ID NO: 100561 - DNA, 25 bp, Saccharomyces pastorianus
agatattgctcatagttacttggac

SEQ ID NO: 100562 - DNA, 25 bp, Saccharomyces pastorianus
cgagttatttaagcattctcatggt

SEQ ID NO: 100563 - DNA, 25 bp, Saccharomyces pastorianus
tgatacagacaataaaggtgttctt

SEQ ID NO: 100564 - DNA, 25 bp, Saccharomyces pastorianus
aaaggtgttcttgctctagaaaaag

SEQ ID NO: 100565 - DNA, 25 bp, Saccharomyces pastorianus
ttccctaaattggatgatacagaca

SEQ ID NO: 100566 - DNA, 25 bp, Saccharomyces pastorianus
aagcccaaagttttcattactggat

SEQ ID NO: 100567 - DNA, 25 bp, Saccharomyces pastorianus
actgtgggtataacatcctcgtatg

SEQ ID NO: 100568 - DNA, 25 bp, Saccharomyces pastorianus
tgtctttgaagatgcacccgtgggc

SEQ ID NO: 100569 - DNA, 25 bp, Saccharomyces pastorianus
gaacggtaagcctgatcccgagggt

SEQ ID NO: 100570 - DNA, 25 bp, Saccharomyces pastorianus
ggttctccatatttggcattttcat

SEQ ID NO: 100571 - DNA, 25 bp, Saccharomyces pastorianus
gatcccgagggttactcaagagctc

SEQ ID NO: 100572 - DNA, 25 bp, Saccharomyces pastorianus
tatcgttacctctggttctccatat

SEQ ID NO: 100573 - DNA, 25 bp, Saccharomyces pastorianus
cacccgtgggcataaaggccggcaa

SEQ ID NO: 100574 - DNA, 25 bp, Saccharomyces pastorianus
aagagctcgtgatttattgcgtcaa

SEQ ID NO: 100575 - DNA, 25 bp, Saccharomyces pastorianus
gcaatgggcgcaattactgtgggta

SEQ ID NO: 100576 - DNA, 25 bp, Saccharomyces pastorianus
ggcattttcatggttcgagacaata

SEQ ID NO: 100577 - DNA, 25 bp, Saccharomyces pastorianus
cagaatcgagccacattctcttgaa

SEQ ID NO: 100578 - DNA, 25 bp, Saccharomyces pastorianus
gaatcaccccaagtactgaacaatt

SEQ ID NO: 100579 - DNA, 25 bp, Saccharomyces pastorianus
gaaaattgccagaatcgagccacat

SEQ ID NO: 100580 - DNA, 25 bp, Saccharomyces pastorianus
aagatgcgtttatttggcagataat

SEQ ID NO: 100581 - DNA, 25 bp, Saccharomyces pastorianus
taagagcccaattaggatcccgtgt

SEQ ID NO: 100582 - DNA, 25 bp, Saccharomyces pastorianus
ggccacgaacttactgagcgagggt

SEQ ID NO: 100583 - DNA, 25 bp, Saccharomyces pastorianus
aaatctacttatcctgggccacgaa

SEQ ID NO: 100584 - DNA, 25 bp, Saccharomyces pastorianus
gtgggctgctgaataaaatctactt

SEQ ID NO: 100585 - DNA, 25 bp, Saccharomyces pastorianus
tctaattctagaagtgggctgctga

SEQ ID NO: 100586 - DNA, 25 bp, Saccharomyces pastorianus
agactaaccggagaatcaccccaag

SEQ ID NO: 100587 - DNA, 25 bp, Saccharomyces pastorianus
gaggttatttcgacatttcctgaaa

SEQ ID NO: 100588 - DNA, 25 bp, Saccharomyces pastorianus
ctcacattaatcttctggtatccgc

SEQ ID NO: 100589 - DNA, 25 bp, Saccharomyces pastorianus
gatttcccatttagctgtacctctc

SEQ ID NO: 100590 - DNA, 25 bp, Saccharomyces pastorianus
ggcgttatatataatcctcacatta

SEQ ID NO: 100591 - DNA, 25 bp, Saccharomyces pastorianus
tacaaactttgttcatgatttccca

SEQ ID NO: 100592 - DNA, 25 bp, Saccharomyces pastorianus
aatctatgggttctctaatactaaa

SEQ ID NO: 100593 - DNA, 25 bp, Saccharomyces pastorianus
ctatcatgtgattacggttttgttc

SEQ ID NO: 100594 - DNA, 25 bp, Saccharomyces pastorianus
atcttctggtatccgcttctaaagg

SEQ ID NO: 100595 - DNA, 25 bp, Saccharomyces pastorianus
tgtacctctcttgggctcacagtaa

SEQ ID NO: 100596 - DNA, 25 bp, Saccharomyces pastorianus
attacagccaggttccgctagagag

SEQ ID NO: 100597 - DNA, 25 bp, Saccharomyces pastorianus
caaagagcccgtagtaggcgttata

SEQ ID NO: 100598 - DNA, 25 bp, Saccharomyces pastorianus
atccgtagtggcattacagccaggt

SEQ ID NO: 100599 - DNA, 25 bp, Saccharomyces pastorianus
agttgggctcttcatttttgcattc

SEQ ID NO: 100600 - DNA, 25 bp, Saccharomyces pastorianus
ctgtcccatttctgtttaccaagta

SEQ ID NO: 100601 - DNA, 25 bp, Saccharomyces pastorianus
gtagcgtttccttacgtgttcaaga

SEQ ID NO: 100602 - DNA, 25 bp, Saccharomyces pastorianus
gctcctacttgcttgttattccaaa

SEQ ID NO: 100603 - DNA, 25 bp, Saccharomyces pastorianus
aatggtgaccgtagcgatgattcct

SEQ ID NO: 100604 - DNA, 25 bp, Saccharomyces pastorianus
gaaactttacaactttgggcccatg

SEQ ID NO: 100605 - DNA, 25 bp, Saccharomyces pastorianus
gtgtgctttgcttctatactggatt

SEQ ID NO: 100606 - DNA, 25 bp, Saccharomyces pastorianus
gagattgcatgctcctatatcggta

SEQ ID NO: 100607 - DNA, 25 bp, Saccharomyces pastorianus
atgcggcttctggaatggcttgtaa

SEQ ID NO: 100608 - DNA, 25 bp, Saccharomyces pastorianus
ttatggtcggcatgatactctcggc

SEQ ID NO: 100609 - DNA, 25 bp, Saccharomyces pastorianus
aatgagattcgagcctctgttctac

SEQ ID NO: 100610 - DNA, 25 bp, Saccharomyces pastorianus
caagccaccctagatgcggatgtta

SEQ ID NO: 100611 - DNA, 25 bp, Saccharomyces pastorianus
tcagagttagttccagaccatccac

SEQ ID NO: 100612 - DNA, 25 bp, Saccharomyces pastorianus
atattgatgcaccagtccttttaga

SEQ ID NO: 100613 - DNA, 25 bp, Saccharomyces pastorianus
aagtgtagtcatttccggctattcc

SEQ ID NO: 100614 - DNA, 25 bp, Saccharomyces pastorianus
gttggcttacgaacaccctggtgga

SEQ ID NO: 100615 - DNA, 25 bp, Saccharomyces pastorianus
tgtcctctatcatcaccaacaagat

SEQ ID NO: 100616 - DNA, 25 bp, Saccharomyces pastorianus
cagagcctggttctatcacagcgaa

SEQ ID NO: 100617 - DNA, 25 bp, Saccharomyces pastorianus
atcacagcgaaatctctcacgaatt

SEQ ID NO: 100618 - DNA, 25 bp, Saccharomyces pastorianus
aggccaatggtccatacgacggcat

SEQ ID NO: 100619 - DNA, 25 bp, Saccharomyces pastorianus
acggcattgtcggtttctctcaagg

SEQ ID NO: 100620 - DNA, 25 bp, Saccharomyces pastorianus
gatcttcatctatggtgcttctgac

SEQ ID NO: 100621 - DNA, 25 bp, Saccharomyces pastorianus
gattatgcgtgtacagcttaaccgt

SEQ ID NO: 100622 - DNA, 25 bp, Saccharomyces pastorianus
cagagtgccggtatcgtgtgtacgt

SEQ ID NO: 100623 - DNA, 25 bp, Saccharomyces pastorianus
ccgtgctcgcaatcatagtatggtt

SEQ ID NO: 100624 - DNA, 25 bp, Saccharomyces pastorianus
aatggaatgatcgtcaccgtgctcg

SEQ ID NO: 100625 - DNA, 25 bp, Saccharomyces pastorianus
aaattggactgtttctccggcattg

SEQ ID NO: 100626 - DNA, 25 bp, Saccharomyces pastorianus
actctgtagtactctttccaaggga

SEQ ID NO: 100627 - DNA, 25 bp, Saccharomyces pastorianus
tagcggcctctctggtgcactaaat

SEQ ID NO: 100628 - DNA, 25 bp, Saccharomyces pastorianus
tagtttctcctgctccagaatacaa

SEQ ID NO: 100629 - DNA, 25 bp, Saccharomyces pastorianus
cgtggccgaccgaaccgaagatgat

SEQ ID NO: 100630 - DNA, 25 bp, Saccharomyces pastorianus
gattatctccggactgaacttttat

SEQ ID NO: 100631 - DNA, 25 bp, Saccharomyces pastorianus
gtttctgcacctttactttacttca

SEQ ID NO: 100632 - DNA, 25 bp, Saccharomyces pastorianus
ggttacctcatttctttacatttca

SEQ ID NO: 100633 - DNA, 25 bp, Saccharomyces pastorianus
gtgccagatctcaaggttacctcat

SEQ ID NO: 100634 - DNA, 25 bp, Saccharomyces pastorianus
attgctcttgcttatcaaggtgcca

SEQ ID NO: 100635 - DNA, 25 bp, Saccharomyces pastorianus
ccacattttagcacacttatttatt

SEQ ID NO: 100636 - DNA, 25 bp, Saccharomyces pastorianus
ggtccggtcaaagcattaataaaga

SEQ ID NO: 100637 - DNA, 25 bp, Saccharomyces pastorianus
cctcatttctttacatttcatccac

SEQ ID NO: 100638 - DNA, 25 bp, Saccharomyces pastorianus
ctaattggtccggtcaaagcattaa

SEQ ID NO: 100639 - DNA, 25 bp, Saccharomyces pastorianus
agatcaacaattgctcttgcttatc

SEQ ID NO: 100640 - DNA, 25 bp, Saccharomyces pastorianus
tgcttatcaaggtgccagatctcaa

SEQ ID NO: 100641 - DNA, 25 bp, Saccharomyces pastorianus
tacatttcatccacattttagcaca

SEQ ID NO: 100642 - DNA, 25 bp, Saccharomyces pastorianus
ttcatccacattttagcacacttat

SEQ ID NO: 100643 - DNA, 25 bp, Saccharomyces pastorianus
gaagtattctgacgcacatgatgaa

SEQ ID NO: 100644 - DNA, 25 bp, Saccharomyces pastorianus
gaagcctatgatttgtttgaagtgc

SEQ ID NO: 100645 - DNA, 25 bp, Saccharomyces pastorianus
ttcctgctcctgctgttattgagaa

SEQ ID NO: 100646 - DNA, 25 bp, Saccharomyces pastorianus
gagtgctcaacaactgtttttccta

SEQ ID NO: 100647 - DNA, 25 bp, Saccharomyces pastorianus
gtgcttatcatgcaactagattgac

SEQ ID NO: 100648 - DNA, 25 bp, Saccharomyces pastorianus
acctaccgcaattagagtatttgag

SEQ ID NO: 100649 - DNA, 25 bp, Saccharomyces pastorianus
gccagacctggtgcttatcatgcaa

SEQ ID NO: 100650 - DNA, 25 bp, Saccharomyces pastorianus
tcagacaagaattgggcgttccctt

SEQ ID NO: 100651 - DNA, 25 bp, Saccharomyces pastorianus
ttcctatgatttagttcctgctcct

SEQ ID NO: 100652 - DNA, 25 bp, Saccharomyces pastorianus
gagaaagctttgagggccgccagaa

SEQ ID NO: 100653 - DNA, 25 bp, Saccharomyces pastorianus
gaactttattgagagccagacctgg

SEQ ID NO: 100654 - DNA, 25 bp, Saccharomyces pastorianus
gttttctttgattttggctgacgac

SEQ ID NO: 100655 - DNA, 25 bp, Saccharomyces pastorianus
atacatgaatcagttgcccgttaaa

SEQ ID NO: 100656 - DNA, 25 bp, Saccharomyces pastorianus
gaggtaccacgttgaatgtccattt

SEQ ID NO: 100657 - DNA, 25 bp, Saccharomyces pastorianus
tcaagaccaataagtcgcccgtatt

SEQ ID NO: 100658 - DNA, 25 bp, Saccharomyces pastorianus
ggctagaaacgcttttatatctcag

SEQ ID NO: 100659 - DNA, 25 bp, Saccharomyces pastorianus
aaagagatcttctagcgagcttgaa

SEQ ID NO: 100660 - DNA, 25 bp, Saccharomyces pastorianus
tataaccaggacgttcttgatgaac

SEQ ID NO: 100661 - DNA, 25 bp, Saccharomyces pastorianus
caatccttccgaattgggttcaatt

SEQ ID NO: 100662 - DNA, 25 bp, Saccharomyces pastorianus
gtcgcccgtattgccattatactat

SEQ ID NO: 100663 - DNA, 25 bp, Saccharomyces pastorianus
caagttcatttgtctaccttcaaca

SEQ ID NO: 100664 - DNA, 25 bp, Saccharomyces pastorianus
gatggaaatcgccaatccttccgaa

SEQ ID NO: 100665 - DNA, 25 bp, Saccharomyces pastorianus
gggcagctacatgatttttggcatt

SEQ ID NO: 100666 - DNA, 25 bp, Saccharomyces pastorianus
tgttacaccccgttgggcagctaca

SEQ ID NO: 100667 - DNA, 25 bp, Saccharomyces pastorianus
ttggtttcttcagacttgttaccgc

SEQ ID NO: 100668 - DNA, 25 bp, Saccharomyces pastorianus
accccgttgggcagctacatgattt

SEQ ID NO: 100669 - DNA, 25 bp, Saccharomyces pastorianus
atttgtcgtcgctgttacaccccgt

SEQ ID NO: 100670 - DNA, 25 bp, Saccharomyces pastorianus
ggcattgttcattatttttgcagct

SEQ ID NO: 100671 - DNA, 25 bp, Saccharomyces pastorianus
tttttgcagctaccacattggcatt

SEQ ID NO: 100672 - DNA, 25 bp, Saccharomyces pastorianus
gttcattatttttgcagctaccaca

SEQ ID NO: 100673 - DNA, 25 bp, Saccharomyces pastorianus
gctacatgatttttggcattgttca

SEQ ID NO: 100674 - DNA, 25 bp, Saccharomyces pastorianus
tttcttcagacttgttaccgcaggg

SEQ ID NO: 100675 - DNA, 25 bp, Saccharomyces pastorianus
gggcatttgtcgtcgctgttacacc

SEQ ID NO: 100676 - DNA, 25 bp, Saccharomyces pastorianus
gaaggtcatgagtgccaatgccaat

SEQ ID NO: 100677 - DNA, 25 bp, Saccharomyces pastorianus
ggtcatgagtgccaatgccaatgtg

SEQ ID NO: 100678 - DNA, 25 bp, Saccharomyces pastorianus
gttcagcgaattaattaacttccaa

SEQ ID NO: 100679 - DNA, 25 bp, Saccharomyces pastorianus
gccaatgtggtagctgcaaaaataa

SEQ ID NO: 100680 - DNA, 25 bp, Saccharomyces pastorianus
aaaaatcatgtagctgcccaacggg

SEQ ID NO: 100681 - DNA, 25 bp, Saccharomyces pastorianus
attaacttccaaaatgaaggtcatg

SEQ ID NO: 100682 - DNA, 25 bp, Saccharomyces pastorianus
agcgacgacaaatgcccctgcggta

SEQ ID NO: 100683 - DNA, 25 bp, Saccharomyces pastorianus
tgtaacagcgacgacaaatgcccct

SEQ ID NO: 100684 - DNA, 25 bp, Saccharomyces pastorianus
gccaatgccaatgtggtagctgcaa

SEQ ID NO: 100685 - DNA, 25 bp, Saccharomyces pastorianus
tgccaaaaatcatgtagctgcccaa

SEQ ID NO: 100686 - DNA, 25 bp, Saccharomyces pastorianus
cgacaaatgcccctgcggtaacaag

SEQ ID NO: 100687 - DNA, 25 bp, Saccharomyces pastorianus
gaactacatacagcacgtgtccaga

SEQ ID NO: 100688 - DNA, 25 bp, Saccharomyces pastorianus
atgacaaacctctcgaggcggtcaa

SEQ ID NO: 100689 - DNA, 25 bp, Saccharomyces pastorianus
gggtgattcccaacttcatggtaca

SEQ ID NO: 100690 - DNA, 25 bp, Saccharomyces pastorianus
aagcgtcgtggctcgatggaaagca

SEQ ID NO: 100691 - DNA, 25 bp, Saccharomyces pastorianus
atggagatactttccctgacgaaaa

SEQ ID NO: 100692 - DNA, 25 bp, Saccharomyces pastorianus
ttaagcaccaccactaattccaaaa

SEQ ID NO: 100693 - DNA, 25 bp, Saccharomyces pastorianus
gcaagggcagactatcgatggctaa

SEQ ID NO: 100694 - DNA, 25 bp, Saccharomyces pastorianus
tggttgttattattccttagcgtta

SEQ ID NO: 100695 - DNA, 25 bp, Saccharomyces pastorianus
atcgggtccactttccatagggtga

SEQ ID NO: 100696 - DNA, 25 bp, Saccharomyces pastorianus
aatggatctcagttcttcatcacca

SEQ ID NO: 100697 - DNA, 25 bp, Saccharomyces pastorianus
acggcactggcgttggtggcaaatc

SEQ ID NO: 100698 - DNA, 25 bp, Saccharomyces pastorianus
agatcggtcgaaattgcaacgaatt

SEQ ID NO: 100699 - DNA, 25 bp, Saccharomyces pastorianus
taccttcccggattagccacaaatt

SEQ ID NO: 100700 - DNA, 25 bp, Saccharomyces pastorianus
aaagctgcctatcgtttcagttcga

SEQ ID NO: 100701 - DNA, 25 bp, Saccharomyces pastorianus
tatcgtaacaataggccaattcatg

SEQ ID NO: 100702 - DNA, 25 bp, Saccharomyces pastorianus
caggtacctgacgtagatgcatttc

SEQ ID NO: 100703 - DNA, 25 bp, Saccharomyces pastorianus
tatcgtttcagttcgaccatcccca

SEQ ID NO: 100704 - DNA, 25 bp, Saccharomyces pastorianus
gatgcatttctaaacaagatcggtc

SEQ ID NO: 100705 - DNA, 25 bp, Saccharomyces pastorianus
gccacaaatttcctctattcttaag

SEQ ID NO: 100706 - DNA, 25 bp, Saccharomyces pastorianus
atccccaaaccaagcgatcaggtac

SEQ ID NO: 100707 - DNA, 25 bp, Saccharomyces pastorianus
ctggaacaaccttttccaatgggat

SEQ ID NO: 100708 - DNA, 25 bp, Saccharomyces pastorianus
tattcttaaggagctcgctggccgc

SEQ ID NO: 100709 - DNA, 25 bp, Saccharomyces pastorianus
agtgcgctacatacgcccgaattag

SEQ ID NO: 100710 - DNA, 25 bp, Saccharomyces pastorianus
agtcgctaaattcccctggtaacag

SEQ ID NO: 100711 - DNA, 25 bp, Saccharomyces pastorianus
agtcaaattcacgtctttggcaccg

SEQ ID NO: 100712 - DNA, 25 bp, Saccharomyces pastorianus
gagacatgggtctgccaaaaccgca

SEQ ID NO: 100713 - DNA, 25 bp, Saccharomyces pastorianus
agcagaatagtgtcttcctccacaa

SEQ ID NO: 100714 - DNA, 25 bp, Saccharomyces pastorianus
aacgatggattctcaccacgatgat

SEQ ID NO: 100715 - DNA, 25 bp, Saccharomyces pastorianus
atacatttccttctgttcttggaga

SEQ ID NO: 100716 - DNA, 25 bp, Saccharomyces pastorianus
agaatatctgtggacgacgtgctaa

SEQ ID NO: 100717 - DNA, 25 bp, Saccharomyces pastorianus
cctctgtttcatcattttctggcaa

SEQ ID NO: 100718 - DNA, 25 bp, Saccharomyces pastorianus
gggaagacaaccctcttgagtcgca

SEQ ID NO: 100719 - DNA, 25 bp, Saccharomyces pastorianus
gattttcaccatatttcgcatgcta

SEQ ID NO: 100720 - DNA, 25 bp, Saccharomyces pastorianus
atggctatgctttgcgtgacgtaca

SEQ ID NO: 100721 - DNA, 25 bp, Saccharomyces pastorianus
aaggccatgggagacctagcttcac

SEQ ID NO: 100722 - DNA, 25 bp, Saccharomyces pastorianus
aagctcggaggcagttcgtatccaa

SEQ ID NO: 100723 - DNA, 25 bp, Saccharomyces pastorianus
gacgacgtccagaccatcaaggtag

SEQ ID NO: 100724 - DNA, 25 bp, Saccharomyces pastorianus
gcctgcctactttccttaagcataa

SEQ ID NO: 100725 - DNA, 25 bp, Saccharomyces pastorianus
atgttcaaggcatcgacgacgtcca

SEQ ID NO: 100726 - DNA, 25 bp, Saccharomyces pastorianus
attgacttgttgacctttcagtacg

SEQ ID NO: 100727 - DNA, 25 bp, Saccharomyces pastorianus
gtccagaggcattgttatcggcagt

SEQ ID NO: 100728 - DNA, 25 bp, Saccharomyces pastorianus
gaagggacagtctctttccaagata

SEQ ID NO: 100729 - DNA, 25 bp, Saccharomyces pastorianus
gggccttactttatcaactaccaat

SEQ ID NO: 100730 - DNA, 25 bp, Saccharomyces pastorianus
taggtcttccgagcgataggtgttc

SEQ ID NO: 100731 - DNA, 25 bp, Saccharomyces pastorianus
acggctattctagattgtgtcaatg

SEQ ID NO: 100732 - DNA, 25 bp, Saccharomyces pastorianus
ggacgatgcagccaataactcatta

SEQ ID NO: 100733 - DNA, 25 bp, Saccharomyces pastorianus
atgcatgaatccagttacggctatt

SEQ ID NO: 100734 - DNA, 25 bp, Saccharomyces pastorianus
gataacatggtctccgaagtcacta

SEQ ID NO: 100735 - DNA, 25 bp, Saccharomyces pastorianus
aatgcagtactgacaaccgataaca

SEQ ID NO: 100736 - DNA, 25 bp, Saccharomyces pastorianus
gagttgcttataggccattgtttca

SEQ ID NO: 100737 - DNA, 25 bp, Saccharomyces pastorianus
gatgaaggccagttgcggtccagtt

SEQ ID NO: 100738 - DNA, 25 bp, Saccharomyces pastorianus
tatcggagaattggccactatgaga

SEQ ID NO: 100739 - DNA, 25 bp, Saccharomyces pastorianus
gcggtccagttttcacatctattat

SEQ ID NO: 100740 - DNA, 25 bp, Saccharomyces pastorianus
agacccaaactgctgcaaggttaat

SEQ ID NO: 100741 - DNA, 25 bp, Saccharomyces pastorianus
aatggctatgtcgtcaaattggctg

SEQ ID NO: 100742 - DNA, 25 bp, Saccharomyces pastorianus
gtatagtttttctctgacgacttca

SEQ ID NO: 100743 - DNA, 25 bp, Saccharomyces pastorianus
gacttcaggttcatcgtcggaccat

SEQ ID NO: 100744 - DNA, 25 bp, Saccharomyces pastorianus
agagcgctctataattcacccttta

SEQ ID NO: 100745 - DNA, 25 bp, Saccharomyces pastorianus
gtcctcttcagcattttcttctttt

SEQ ID NO: 100746 - DNA, 25 bp, Saccharomyces pastorianus
aaatctctagcggtgactcttaaag

SEQ ID NO: 100747 - DNA, 25 bp, Saccharomyces pastorianus
gtgactcttaaagcaccgtctttgt

SEQ ID NO: 100748 - DNA, 25 bp, Saccharomyces pastorianus
ttaccagttttcaaatctctagcgg

SEQ ID NO: 100749 - DNA, 25 bp, Saccharomyces pastorianus
tcaccctttacagcattaccagttt

SEQ ID NO: 100750 - DNA, 25 bp, Saccharomyces pastorianus
agggctgtatagttccatcatgtat

SEQ ID NO: 100751 - DNA, 25 bp, Saccharomyces pastorianus
aattccatcaacttggtacccaaag

SEQ ID NO: 100752 - DNA, 25 bp, Saccharomyces pastorianus
cataccgtttttcttagagcgctct

SEQ ID NO: 100753 - DNA, 25 bp, Saccharomyces pastorianus
gttatcgtcaatactccacatttaa

SEQ ID NO: 100754 - DNA, 25 bp, Saccharomyces pastorianus
gctttaagagtcaccgctagagatt

SEQ ID NO: 100755 - DNA, 25 bp, Saccharomyces pastorianus
tgaaacttcgttccctgtacaaaag

SEQ ID NO: 100756 - DNA, 25 bp, Saccharomyces pastorianus
attacgatgctgacgaattggctga

SEQ ID NO: 100757 - DNA, 25 bp, Saccharomyces pastorianus
atcagtcgaaattcttggtccacag

SEQ ID NO: 100758 - DNA, 25 bp, Saccharomyces pastorianus
attgttggctgaaacttcgttccct

SEQ ID NO: 100759 - DNA, 25 bp, Saccharomyces pastorianus
atggtccgacgatgaacctgaagtc

SEQ ID NO: 100760 - DNA, 25 bp, Saccharomyces pastorianus
gtgctaagggcgaattccacccagt

SEQ ID NO: 100761 - DNA, 25 bp, Saccharomyces pastorianus
gcctattggtttgattggtgctaag

SEQ ID NO: 100762 - DNA, 25 bp, Saccharomyces pastorianus
gaattccacccagtattgttggctg

SEQ ID NO: 100763 - DNA, 25 bp, Saccharomyces pastorianus
gaatacactttaccagaatcagtcg

SEQ ID NO: 100764 - DNA, 25 bp, Saccharomyces pastorianus
tgatggtcgttccaggtggtcttaa

SEQ ID NO: 100765 - DNA, 25 bp, Saccharomyces pastorianus
attccaagtcctacattcatcgtgt

SEQ ID NO: 100766 - DNA, 25 bp, Saccharomyces pastorianus
cgtggctacagatgtcgctgcgaga

SEQ ID NO: 100767 - DNA, 25 bp, Saccharomyces pastorianus
aagagattccgtcgataaggctaat

SEQ ID NO: 100768 - DNA, 25 bp, Saccharomyces pastorianus
atttgctggagtttagtgccactgc

SEQ ID NO: 100769 - DNA, 25 bp, Saccharomyces pastorianus
gtgccactgcgctacatggtgattt

SEQ ID NO: 100770 - DNA, 25 bp, Saccharomyces pastorianus
gggagctttggatcttttcaaggca

SEQ ID NO: 100771 - DNA, 25 bp, Saccharomyces pastorianus
acgatattcctgtggattccaagtc

SEQ ID NO: 100772 - DNA, 25 bp, Saccharomyces pastorianus
gtggtcttaagaacacatacctaat

SEQ ID NO: 100773 - DNA, 25 bp, Saccharomyces pastorianus
agaggtctattctcgtggctacaga

SEQ ID NO: 100774 - DNA, 25 bp, Saccharomyces pastorianus
tacaagaaccaaggccaacgcggaa

SEQ ID NO: 100775 - DNA, 25 bp, Saccharomyces pastorianus
atgcgatgagcgatgatgagtcttc

SEQ ID NO: 100776 - DNA, 25 bp, Saccharomyces pastorianus
ttatggtagcgtaccagaggatcta

SEQ ID NO: 100777 - DNA, 25 bp, Saccharomyces pastorianus
gcattctcaaagtttgaagtcccaa

SEQ ID NO: 100778 - DNA, 25 bp, Saccharomyces pastorianus
tcaaagtttgaagtcccaaagaaca

SEQ ID NO: 100779 - DNA, 25 bp, Saccharomyces pastorianus
cccacgtaagaaagctatcaaacta

SEQ ID NO: 100780 - DNA, 25 bp, Saccharomyces pastorianus
atgagtcttcatcaagtgacagcga

SEQ ID NO: 100781 - DNA, 25 bp, Saccharomyces pastorianus
acagcgaacattatggtagcgtacc

SEQ ID NO: 100782 - DNA, 25 bp, Saccharomyces pastorianus
gtcttcatcaagtgacagcgaacat

SEQ ID NO: 100783 - DNA, 25 bp, Saccharomyces pastorianus
gaagatgtggaaatggaggaaccta

SEQ ID NO: 100784 - DNA, 25 bp, Saccharomyces pastorianus
tgaaggcaaagcattctcaaagttt

SEQ ID NO: 100785 - DNA, 25 bp, Saccharomyces pastorianus
tgcaaccaaccccacgtaagaaagc

SEQ ID NO: 100786 - DNA, 25 bp, Saccharomyces pastorianus
atgcgatgagcgatgatgagtcttc

SEQ ID NO: 100787 - DNA, 25 bp, Saccharomyces pastorianus
ttatggtagcgtaccagaggatcta

SEQ ID NO: 100788 - DNA, 25 bp, Saccharomyces pastorianus
gcattctcaaagtttgaagtcccaa

SEQ ID NO: 100789 - DNA, 25 bp, Saccharomyces pastorianus
cccacgtaagaaagctatcaaacta

SEQ ID NO: 100790 - DNA, 25 bp, Saccharomyces pastorianus
atgagtcttcatcaagtgacagcga

SEQ ID NO: 100791 - DNA, 25 bp, Saccharomyces pastorianus
acagcgaacattatggtagcgtacc

SEQ ID NO: 100792 - DNA, 25 bp, Saccharomyces pastorianus
tagatcacgacttaggcgcctatac

SEQ ID NO: 100793 - DNA, 25 bp, Saccharomyces pastorianus
gtcttcatcaagtgacagcgaacat

SEQ ID NO: 100794 - DNA, 25 bp, Saccharomyces pastorianus
tgaagtcccaaagaacaccggtcga

SEQ ID NO: 100795 - DNA, 25 bp, Saccharomyces pastorianus
tgaaggcaaagcattctcaaagttt

SEQ ID NO: 100796 - DNA, 25 bp, Saccharomyces pastorianus
tgcaaccaaccccacgtaagaaagc

SEQ ID NO: 100797 - DNA, 25 bp, Saccharomyces pastorianus
cggtgacatgttgtttttccatact

SEQ ID NO: 100798 - DNA, 25 bp, Saccharomyces pastorianus
tacgatggttccgatgcaggtgcaa

SEQ ID NO: 100799 - DNA, 25 bp, Saccharomyces pastorianus
ggctgaagccaaatccgtcaaactt

SEQ ID NO: 100800 - DNA, 25 bp, Saccharomyces pastorianus
catggtgctgactgtttagaggcta

SEQ ID NO: 100801 - DNA, 25 bp, Saccharomyces pastorianus
ggtttgatcaagcaccacattgcca

SEQ ID NO: 100802 - DNA, 25 bp, Saccharomyces pastorianus
caatctggaccccatctaagatgat

SEQ ID NO: 100803 - DNA, 25 bp, Saccharomyces pastorianus
gttcttccattgattgttgctgcta

SEQ ID NO: 100804 - DNA, 25 bp, Saccharomyces pastorianus
agacgtggattcaccaatctggacc

SEQ ID NO: 100805 - DNA, 25 bp, Saccharomyces pastorianus
aatcaattcaatgtccatggccgct

SEQ ID NO: 100806 - DNA, 25 bp, Saccharomyces pastorianus
gacgaatcctccgtattgtactggg

SEQ ID NO: 100807 - DNA, 25 bp, Saccharomyces pastorianus
ggtgcaagacctgacgaagctgtgt

SEQ ID NO: 100808 - DNA, 25 bp, Saccharomyces pastorianus
caaagcgttagcgttctgtgaaata

SEQ ID NO: 100809 - DNA, 25 bp, Saccharomyces pastorianus
aatccataggcagtgacattcttac

SEQ ID NO: 100810 - DNA, 25 bp, Saccharomyces pastorianus
caattaaatcaactgggcccactgg

SEQ ID NO: 100811 - DNA, 25 bp, Saccharomyces pastorianus
gttttgccaagtcccgagttcatta

SEQ ID NO: 100812 - DNA, 25 bp, Saccharomyces pastorianus
gggcccactggtgcggtatcattaa

SEQ ID NO: 100813 - DNA, 25 bp, Saccharomyces pastorianus
gagggatacgccgtctgcaaataac

SEQ ID NO: 100814 - DNA, 25 bp, Saccharomyces pastorianus
gtgcctctttacatacaaggtctct

SEQ ID NO: 100815 - DNA, 25 bp, Saccharomyces pastorianus
tagttctcggagtcaatggttacat

SEQ ID NO: 100816 - DNA, 25 bp, Saccharomyces pastorianus
atttgcccggcaacataaccgtagt

SEQ ID NO: 100817 - DNA, 25 bp, Saccharomyces pastorianus
ggaaggtgacctcctgaatgcagaa

SEQ ID NO: 100818 - DNA, 25 bp, Saccharomyces pastorianus
ttgccggtatgcgaacgtgatcaaa

SEQ ID NO: 100819 - DNA, 25 bp, Saccharomyces pastorianus
ctatacattgaaaaaggtcaccgaa

SEQ ID NO: 100820 - DNA, 25 bp, Saccharomyces pastorianus
cccagctagattttctccagacgac

SEQ ID NO: 100821 - DNA, 25 bp, Saccharomyces pastorianus
gaaatcacgaagtctgctcacccag

SEQ ID NO: 100822 - DNA, 25 bp, Saccharomyces pastorianus
cggcaagagaatctatacattgaaa

SEQ ID NO: 100823 - DNA, 25 bp, Saccharomyces pastorianus
tgaaatcacgaagtctgctcaccca

SEQ ID NO: 100824 - DNA, 25 bp, Saccharomyces pastorianus
acgaagtctgctcacccagctagat

SEQ ID NO: 100825 - DNA, 25 bp, Saccharomyces pastorianus
cattgaaaaaggtcaccgaaagtgg

SEQ ID NO: 100826 - DNA, 25 bp, Saccharomyces pastorianus
gtggtgaaatcacgaagtctgctca

SEQ ID NO: 100827 - DNA, 25 bp, Saccharomyces pastorianus
gaagtctgctcacccagctagattt

SEQ ID NO: 100828 - DNA, 25 bp, Saccharomyces pastorianus
tcacccagctagattttctccagac

SEQ ID NO: 100829 - DNA, 25 bp, Saccharomyces pastorianus
acccagctagattttctccagacga

SEQ ID NO: 100830 - DNA, 25 bp, Saccharomyces pastorianus
tttgatgtacactttgggcccagac

SEQ ID NO: 100831 - DNA, 25 bp, Saccharomyces pastorianus
cccagctagattttctccagacgac

SEQ ID NO: 100832 - DNA, 25 bp, Saccharomyces pastorianus
gaaatcacgaagtctgctcacccag

SEQ ID NO: 100833 - DNA, 25 bp, Saccharomyces pastorianus
cggcaagagaatctatacattgaaa

SEQ ID NO: 100834 - DNA, 25 bp, Saccharomyces pastorianus
tgaaatcacgaagtctgctcaccca

SEQ ID NO: 100835 - DNA, 25 bp, Saccharomyces pastorianus
tatacattgaaaaaggtcaccgaaa

SEQ ID NO: 100836 - DNA, 25 bp, Saccharomyces pastorianus
acgaagtctgctcacccagctagat

SEQ ID NO: 100837 - DNA, 25 bp, Saccharomyces pastorianus
gtggtgaaatcacgaagtctgctca

SEQ ID NO: 100838 - DNA, 25 bp, Saccharomyces pastorianus
gaagtctgctcacccagctagattt

SEQ ID NO: 100839 - DNA, 25 bp, Saccharomyces pastorianus
tcacccagctagattttctccagac

SEQ ID NO: 100840 - DNA, 25 bp, Saccharomyces pastorianus
acccagctagattttctccagacga

SEQ ID NO: 100841 - DNA, 25 bp, Saccharomyces pastorianus
tggacgcaaccaacaactattttaa

SEQ ID NO: 100842 - DNA, 25 bp, Saccharomyces pastorianus
gaaggaaactctagctggtaaatgg

SEQ ID NO: 100843 - DNA, 25 bp, Saccharomyces pastorianus
tgaaaagggcaatttaccacctacg

SEQ ID NO: 100844 - DNA, 25 bp, Saccharomyces pastorianus
tcacacatcctgttcgataaggcag

SEQ ID NO: 100845 - DNA, 25 bp, Saccharomyces pastorianus
gaccagatattagagcttacgagga

SEQ ID NO: 100846 - DNA, 25 bp, Saccharomyces pastorianus
gggagacaaatcacacatcctgttc

SEQ ID NO: 100847 - DNA, 25 bp, Saccharomyces pastorianus
taccacctacggactcaagattaag

SEQ ID NO: 100848 - DNA, 25 bp, Saccharomyces pastorianus
gatgtggagcctaaatatttcgaaa

SEQ ID NO: 100849 - DNA, 25 bp, Saccharomyces pastorianus
atatatggagcctgtcaacgaattc

SEQ ID NO: 100850 - DNA, 25 bp, Saccharomyces pastorianus
taaggtttcgataatcccaccacct

SEQ ID NO: 100851 - DNA, 25 bp, Saccharomyces pastorianus
aagtacattcttcgaagggagacaa

SEQ ID NO: 100852 - DNA, 25 bp, Saccharomyces pastorianus
ttcttcactgtccattagcggcata

SEQ ID NO: 100853 - DNA, 25 bp, Saccharomyces pastorianus
cactgtccattagcggcatacagca

SEQ ID NO: 100854 - DNA, 25 bp, Saccharomyces pastorianus
tcatattcttcactgtccattagcg

SEQ ID NO: 100855 - DNA, 25 bp, Saccharomyces pastorianus
gcgtcaggattcactttggtcaaga

SEQ ID NO: 100856 - DNA, 25 bp, Saccharomyces pastorianus
tacgtgaaaaactctctgcgtcagg

SEQ ID NO: 100857 - DNA, 25 bp, Saccharomyces pastorianus
tggtcaagagggtcggcaacgtttc

SEQ ID NO: 100858 - DNA, 25 bp, Saccharomyces pastorianus
ttcactttggtcaagagggtcggca

SEQ ID NO: 100859 - DNA, 25 bp, Saccharomyces pastorianus
tctgcgtcaggattcactttggtca

SEQ ID NO: 100860 - DNA, 25 bp, Saccharomyces pastorianus
aaactctctgcgtcaggattcactt

SEQ ID NO: 100861 - DNA, 25 bp, Saccharomyces pastorianus
agcagcaatcccaggaaatacccct

SEQ ID NO: 100862 - DNA, 25 bp, Saccharomyces pastorianus
atacccctacgtgaaaaactctctg

SEQ ID NO: 100863 - DNA, 25 bp, Saccharomyces pastorianus
gagtgctcacgtgggtatctaacaa

SEQ ID NO: 100864 - DNA, 25 bp, Saccharomyces pastorianus
tgactttttaaacgctacaccaact

SEQ ID NO: 100865 - DNA, 25 bp, Saccharomyces pastorianus
tgacttacgtcctttcttaatcaac

SEQ ID NO: 100866 - DNA, 25 bp, Saccharomyces pastorianus
gattgttagtacttggtagcgcaaa

SEQ ID NO: 100867 - DNA, 25 bp, Saccharomyces pastorianus
gaaaagattcattgcctacgcatca

SEQ ID NO: 100868 - DNA, 25 bp, Saccharomyces pastorianus
gtggtatcccaaactcgggtggatt

SEQ ID NO: 100869 - DNA, 25 bp, Saccharomyces pastorianus
ctccgcagatatcaaccctattggg

SEQ ID NO: 100870 - DNA, 25 bp, Saccharomyces pastorianus
gcaaactgttttaactcctagctat

SEQ ID NO: 100871 - DNA, 25 bp, Saccharomyces pastorianus
taacaaaatatgactgctcctccgc

SEQ ID NO: 100872 - DNA, 25 bp, Saccharomyces pastorianus
atttttcttcttctatgccatcaac

SEQ ID NO: 100873 - DNA, 25 bp, Saccharomyces pastorianus
gtggtccttattctatgttcttaaa

SEQ ID NO: 100874 - DNA, 25 bp, Saccharomyces pastorianus
tgcgcaagagatttccaagctaact

SEQ ID NO: 100875 - DNA, 25 bp, Saccharomyces pastorianus
attaccccagtgtttttgcgcaaga

SEQ ID NO: 100876 - DNA, 25 bp, Saccharomyces pastorianus
gaagttgccaacttgggtgattctt

SEQ ID NO: 100877 - DNA, 25 bp, Saccharomyces pastorianus
ggtgattcttggtgtggagtcttca

SEQ ID NO: 100878 - DNA, 25 bp, Saccharomyces pastorianus
agaaaattattggtgctgcatacgc

SEQ ID NO: 100879 - DNA, 25 bp, Saccharomyces pastorianus
gtcagtttaagcaaggaccccaatt

SEQ ID NO: 100880 - DNA, 25 bp, Saccharomyces pastorianus
gagttacagctattatcccagaagt

SEQ ID NO: 100881 - DNA, 25 bp, Saccharomyces pastorianus
tggctcacttcccatctaatggaaa

SEQ ID NO: 100882 - DNA, 25 bp, Saccharomyces pastorianus
ctttttctgaaggataacgctgcga

SEQ ID NO: 100883 - DNA, 25 bp, Saccharomyces pastorianus
ggatttaatgctccttaccaattgt

SEQ ID NO: 100884 - DNA, 25 bp, Saccharomyces pastorianus
attggctaccgatggtgtaaccgat

SEQ ID NO: 100885 - DNA, 25 bp, Saccharomyces pastorianus
tgctgtctttctgctgtcaatacca

SEQ ID NO: 100886 - DNA, 25 bp, Saccharomyces pastorianus
gtcccatctcccttttgaagtatca

SEQ ID NO: 100887 - DNA, 25 bp, Saccharomyces pastorianus
actggcgtctacgttttggctacaa

SEQ ID NO: 100888 - DNA, 25 bp, Saccharomyces pastorianus
acgcttttgcatgtgtgtttacctt

SEQ ID NO: 100889 - DNA, 25 bp, Saccharomyces pastorianus
gaaaatgcagcatccgatcctttag

SEQ ID NO: 100890 - DNA, 25 bp, Saccharomyces pastorianus
agttccagattcttgcacttttcgc

SEQ ID NO: 100891 - DNA, 25 bp, Saccharomyces pastorianus
gttgtgacccttttgcccataaagt

SEQ ID NO: 100892 - DNA, 25 bp, Saccharomyces pastorianus
taccactcgctcaaatatccagatg

SEQ ID NO: 100893 - DNA, 25 bp, Saccharomyces pastorianus
gttcaattaccagcacgatctcgat

SEQ ID NO: 100894 - DNA, 25 bp, Saccharomyces pastorianus
agtttaccgtcccaaacattgtcat

SEQ ID NO: 100895 - DNA, 25 bp, Saccharomyces pastorianus
aatttctctctttctttgctgtctt

SEQ ID NO: 100896 - DNA, 25 bp, Saccharomyces pastorianus
agatatgtctcctatactcggcgaa

SEQ ID NO: 100897 - DNA, 25 bp, Saccharomyces pastorianus
gaactggcagagagtacaacgacta

SEQ ID NO: 100898 - DNA, 25 bp, Saccharomyces pastorianus
aattcgagccctctataagcaggag

SEQ ID NO: 100899 - DNA, 25 bp, Saccharomyces pastorianus
gagttctctgatgtttgctaatatg

SEQ ID NO: 100900 - DNA, 25 bp, Saccharomyces pastorianus
agaactaattaatcgttacgcgtat

SEQ ID NO: 100901 - DNA, 25 bp, Saccharomyces pastorianus
caggagcaactttcaagggaagcat

SEQ ID NO: 100902 - DNA, 25 bp, Saccharomyces pastorianus
gaaactaacgtcgaagtcactggat

SEQ ID NO: 100903 - DNA, 25 bp, Saccharomyces pastorianus
agctgttgctattatctgatgagag

SEQ ID NO: 100904 - DNA, 25 bp, Saccharomyces pastorianus
gtcctaggcgtcaaagatatgtctc

SEQ ID NO: 100905 - DNA, 25 bp, Saccharomyces pastorianus
tacgcgtatgtattgagttctctga

SEQ ID NO: 100906 - DNA, 25 bp, Saccharomyces pastorianus
gtcactggatgaacagctgttgcta

SEQ ID NO: 100907 - DNA, 25 bp, Saccharomyces pastorianus
gtgacgaagattctgctcatcctga

SEQ ID NO: 100908 - DNA, 25 bp, Saccharomyces pastorianus
atcctcctagcacattttattctca

SEQ ID NO: 100909 - DNA, 25 bp, Saccharomyces pastorianus
agaaatttcgatgcctactccggat

SEQ ID NO: 100910 - DNA, 25 bp, Saccharomyces pastorianus
gttcgagagcaccatctacaactgc

SEQ ID NO: 100911 - DNA, 25 bp, Saccharomyces pastorianus
gctgtatccacaaactgcaacttca

SEQ ID NO: 100912 - DNA, 25 bp, Saccharomyces pastorianus
ctgctgtttcaccttatagttcgag

SEQ ID NO: 100913 - DNA, 25 bp, Saccharomyces pastorianus
tgggagaccatacacaccgaattat

SEQ ID NO: 100914 - DNA, 25 bp, Saccharomyces pastorianus
tatagatcgacaccaggttccgcga

SEQ ID NO: 100915 - DNA, 25 bp, Saccharomyces pastorianus
ttccgcgatgttcccatacatgcaa

SEQ ID NO: 100916 - DNA, 25 bp, Saccharomyces pastorianus
tatggcgcggacgattttttctttc

SEQ ID NO: 100917 - DNA, 25 bp, Saccharomyces pastorianus
gatggtgctcattcacttgaggtag

SEQ ID NO: 100918 - DNA, 25 bp, Saccharomyces pastorianus
tactaaatttctctctcatctgttg

SEQ ID NO: 100919 - DNA, 25 bp, Saccharomyces pastorianus
ttaatcccagattatccgcagccgt

SEQ ID NO: 100920 - DNA, 25 bp, Saccharomyces pastorianus
gtaaatgccacactactgtcattgg

SEQ ID NO: 100921 - DNA, 25 bp, Saccharomyces pastorianus
ggcaacacaggatatcgatactcga

SEQ ID NO: 100922 - DNA, 25 bp, Saccharomyces pastorianus
aacaattcctgcctatagtacgtaa

SEQ ID NO: 100923 - DNA, 25 bp, Saccharomyces pastorianus
aatgctctgtacactcttgttgaat

SEQ ID NO: 100924 - DNA, 25 bp, Saccharomyces pastorianus
gtcactattcatctcaatgctctgt

SEQ ID NO: 100925 - DNA, 25 bp, Saccharomyces pastorianus
aacggtgtctttggagtgctcggtt

SEQ ID NO: 100926 - DNA, 25 bp, Saccharomyces pastorianus
gaaagttcaggatgctacctccagt

SEQ ID NO: 100927 - DNA, 25 bp, Saccharomyces pastorianus
agcggtacgctacgaaacccatatt

SEQ ID NO: 100928 - DNA, 25 bp, Saccharomyces pastorianus
tccgcagccgtttgagcacttgaaa

SEQ ID NO: 100929 - DNA, 25 bp, Saccharomyces pastorianus
tgaggctgccattgctgggatgcaa

SEQ ID NO: 100930 - DNA, 25 bp, Saccharomyces pastorianus
gcacgggtggccaacaagttatcat

SEQ ID NO: 100931 - DNA, 25 bp, Saccharomyces pastorianus
gatacattccatccagtacgtgtga

SEQ ID NO: 100932 - DNA, 25 bp, Saccharomyces pastorianus
aaaggttgcgggtttgtccagtatg

SEQ ID NO: 100933 - DNA, 25 bp, Saccharomyces pastorianus
atgcttcctggatgtcaaattctga

SEQ ID NO: 100934 - DNA, 25 bp, Saccharomyces pastorianus
tgaagcacctgttctgccagataat

SEQ ID NO: 100935 - DNA, 25 bp, Saccharomyces pastorianus
atgttgatcggctatcggctgaggc

SEQ ID NO: 100936 - DNA, 25 bp, Saccharomyces pastorianus
agacgaattacgtgcttatttccaa

SEQ ID NO: 100937 - DNA, 25 bp, Saccharomyces pastorianus
gcgaagcggttgttaacagcactaa

SEQ ID NO: 100938 - DNA, 25 bp, Saccharomyces pastorianus
aagggttccccattgcaaattcaag

SEQ ID NO: 100939 - DNA, 25 bp, Saccharomyces pastorianus
gtttactggctgacactagctctat

SEQ ID NO: 100940 - DNA, 25 bp, Saccharomyces pastorianus
atctttacaccaaatttggcccatt

SEQ ID NO: 100941 - DNA, 25 bp, Saccharomyces pastorianus
ctcttctcctatatctttacaccaa

SEQ ID NO: 100942 - DNA, 25 bp, Saccharomyces pastorianus
gggcacggcgaattcctactccgtg

SEQ ID NO: 100943 - DNA, 25 bp, Saccharomyces pastorianus
gtctctctattcatgttgtctctgt

SEQ ID NO: 100944 - DNA, 25 bp, Saccharomyces pastorianus
tacaccaaatttggcccattttcat

SEQ ID NO: 100945 - DNA, 25 bp, Saccharomyces pastorianus
tcattcccctttacgtagtagcggt

SEQ ID NO: 100946 - DNA, 25 bp, Saccharomyces pastorianus
ctattcatgttgtctctgtataggg

SEQ ID NO: 100947 - DNA, 25 bp, Saccharomyces pastorianus
gtgtctcttctcctatatctttaca

SEQ ID NO: 100948 - DNA, 25 bp, Saccharomyces pastorianus
cgtttgtctctctattcatgttgtc

SEQ ID NO: 100949 - DNA, 25 bp, Saccharomyces pastorianus
tttcattcccctttacgtagtagcg

SEQ ID NO: 100950 - DNA, 25 bp, Saccharomyces pastorianus
ggcgaattcctactccgtgtctctt

SEQ ID NO: 100951 - DNA, 25 bp, Saccharomyces pastorianus
tcttcgaagttttcactcctcagga

SEQ ID NO: 100952 - DNA, 25 bp, Saccharomyces pastorianus
agatttgattgtcttcgctgcatcc

SEQ ID NO: 100953 - DNA, 25 bp, Saccharomyces pastorianus
gattgtcttcgctgcatccgaagag

SEQ ID NO: 100954 - DNA, 25 bp, Saccharomyces pastorianus
gcatccgaagagcttgtagacgaat

SEQ ID NO: 100955 - DNA, 25 bp, Saccharomyces pastorianus
gaagttgtcgaactcttcgaagttt

SEQ ID NO: 100956 - DNA, 25 bp, Saccharomyces pastorianus
taccacctctagtctcaaaaccaaa

SEQ ID NO: 100957 - DNA, 25 bp, Saccharomyces pastorianus
gtaagctatctgaagttgtcgaact

SEQ ID NO: 100958 - DNA, 25 bp, Saccharomyces pastorianus
gagcttgtagacgaatatttgaaaa

SEQ ID NO: 100959 - DNA, 25 bp, Saccharomyces pastorianus
atccatcaattggtaagctatctga

SEQ ID NO: 100960 - DNA, 25 bp, Saccharomyces pastorianus
atggtaagccaaactctaccacctc

SEQ ID NO: 100961 - DNA, 25 bp, Saccharomyces pastorianus
gttttcactcctcaggacggtaggg

SEQ ID NO: 100962 - DNA, 25 bp, Saccharomyces pastorianus
taatttccagaccagattgggtcaa

SEQ ID NO: 100963 - DNA, 25 bp, Saccharomyces pastorianus
ggtccacaatttaccctcaagttga

SEQ ID NO: 100964 - DNA, 25 bp, Saccharomyces pastorianus
gaccaactagccatattccagaatt

SEQ ID NO: 100965 - DNA, 25 bp, Saccharomyces pastorianus
actggcctaacattcatacatctgc

SEQ ID NO: 100966 - DNA, 25 bp, Saccharomyces pastorianus
taatgagccaccaaagatctttctg

SEQ ID NO: 100967 - DNA, 25 bp, Saccharomyces pastorianus
aaggcatcggtatgtcttcaaagat

SEQ ID NO: 100968 - DNA, 25 bp, Saccharomyces pastorianus
aattgtcggtcatggtagaccaact

SEQ ID NO: 100969 - DNA, 25 bp, Saccharomyces pastorianus
tcgaaattttaccaaacgtcacatt

SEQ ID NO: 100970 - DNA, 25 bp, Saccharomyces pastorianus
gtaggtaggttgtttcagtccattt

SEQ ID NO: 100971 - DNA, 25 bp, Saccharomyces pastorianus
agtccattttacctcagaatcctga

SEQ ID NO: 100972 - DNA, 25 bp, Saccharomyces pastorianus
ggtcgacaagttatcaccctacata

SEQ ID NO: 100973 - DNA, 25 bp, Saccharomyces pastorianus
ggtggatctcgtggcggatcattta

SEQ ID NO: 100974 - DNA, 25 bp, Saccharomyces pastorianus
tgtttcccgttctatcaacactaag

SEQ ID NO: 100975 - DNA, 25 bp, Saccharomyces pastorianus
gatttttgcctaagcctaaggtggt

SEQ ID NO: 100976 - DNA, 25 bp, Saccharomyces pastorianus
tagttctttcagaggaggccgtggt

SEQ ID NO: 100977 - DNA, 25 bp, Saccharomyces pastorianus
gtgacggtgtccaagcaaccagttt

SEQ ID NO: 100978 - DNA, 25 bp, Saccharomyces pastorianus
gataaattctacattgccgctgaca

SEQ ID NO: 100979 - DNA, 25 bp, Saccharomyces pastorianus
agggtgatattgtttcccgttctat

SEQ ID NO: 100980 - DNA, 25 bp, Saccharomyces pastorianus
gccgctgacaaactattgcctattg

SEQ ID NO: 100981 - DNA, 25 bp, Saccharomyces pastorianus
gtacaggcggtgctagatcatttca

SEQ ID NO: 100982 - DNA, 25 bp, Saccharomyces pastorianus
tgggagcttttctacatccatgtga

SEQ ID NO: 100983 - DNA, 25 bp, Saccharomyces pastorianus
ggcagttctttcagaggtggatctc

SEQ ID NO: 100984 - DNA, 25 bp, Saccharomyces pastorianus
tgcatcaagctcaggatccgttcca

SEQ ID NO: 100985 - DNA, 25 bp, Saccharomyces pastorianus
aaatggttgcatgtgatggacccaa

SEQ ID NO: 100986 - DNA, 25 bp, Saccharomyces pastorianus
acactgccttgtttctaattgctag

SEQ ID NO: 100987 - DNA, 25 bp, Saccharomyces pastorianus
gaggacaaaactttatactgcttct

SEQ ID NO: 100988 - DNA, 25 bp, Saccharomyces pastorianus
aaggaacatggtactgtcccgaatg

SEQ ID NO: 100989 - DNA, 25 bp, Saccharomyces pastorianus
aaagtctgttactccagtgagccca

SEQ ID NO: 100990 - DNA, 25 bp, Saccharomyces pastorianus
aaaatgcgttctggcgaacactgcc

SEQ ID NO: 100991 - DNA, 25 bp, Saccharomyces pastorianus
atggagacatggatagcgctgctga

SEQ ID NO: 100992 - DNA, 25 bp, Saccharomyces pastorianus
actgcttctgtcaaagagtttcgtt

SEQ ID NO: 100993 - DNA, 25 bp, Saccharomyces pastorianus
atagcgctgctgaagcctctagaga

SEQ ID NO: 100994 - DNA, 25 bp, Saccharomyces pastorianus
tggaggaagatggtgttctagcccc

SEQ ID NO: 100995 - DNA, 25 bp, Saccharomyces pastorianus
ttcaaagtttgccatcaggtctcct

SEQ ID NO: 100996 - DNA, 25 bp, Saccharomyces pastorianus
gaaggtgacacagggccctatttac

SEQ ID NO: 100997 - DNA, 25 bp, Saccharomyces pastorianus
gagccggccacgattgtaacatatt

SEQ ID NO: 100998 - DNA, 25 bp, Saccharomyces pastorianus
tggcgtatctgctatcattattcaa

SEQ ID NO: 100999 - DNA, 25 bp, Saccharomyces pastorianus
gcgactcgccgtatattcagcaagt

SEQ ID NO: 101000 - DNA, 25 bp, Saccharomyces pastorianus
gttgctagcgcagtatccagatgtc

SEQ ID NO: 101001 - DNA, 25 bp, Saccharomyces pastorianus
gcgactttacgacggacatgctaat

SEQ ID NO: 101002 - DNA, 25 bp, Saccharomyces pastorianus
tcaggtctcctcgtgctataaaaaa

SEQ ID NO: 101003 - DNA, 25 bp, Saccharomyces pastorianus
tagaaaggacctccagcgactttac

SEQ ID NO: 101004 - DNA, 25 bp, Saccharomyces pastorianus
ggataatccacagcgtgttgcagat

SEQ ID NO: 101005 - DNA, 25 bp, Saccharomyces pastorianus
tgcagatattgccataccgcgactc

SEQ ID NO: 101006 - DNA, 25 bp, Saccharomyces pastorianus
gaaatggttccggtttgggcattat

SEQ ID NO: 101007 - DNA, 25 bp, Saccharomyces pastorianus
agctgactcggatatttttcttcct

SEQ ID NO: 101008 - DNA, 25 bp, Saccharomyces pastorianus
ctttacgaaggccaagcgtttcttg

SEQ ID NO: 101009 - DNA, 25 bp, Saccharomyces pastorianus
cgctatgctgctgcaagtgacttta

SEQ ID NO: 101010 - DNA, 25 bp, Saccharomyces pastorianus
aaaaatcccggaaccagctgactcg

SEQ ID NO: 101011 - DNA, 25 bp, Saccharomyces pastorianus
agagcttcttgaccgtttttatccg

SEQ ID NO: 101012 - DNA, 25 bp, Saccharomyces pastorianus
tactgggtttcgttggaggcccagc

SEQ ID NO: 101013 - DNA, 25 bp, Saccharomyces pastorianus
tttccccaagttttcctgcaggcgg

SEQ ID NO: 101014 - DNA, 25 bp, Saccharomyces pastorianus
tgggcattatttttcctattgggca

SEQ ID NO: 101015 - DNA, 25 bp, Saccharomyces pastorianus
ttttcttccttgtttccgctatgct

SEQ ID NO: 101016 - DNA, 25 bp, Saccharomyces pastorianus
gaaggtggcactaaatcgtcgaaga

SEQ ID NO: 101017 - DNA, 25 bp, Saccharomyces pastorianus
gccgttagtcttgttgaggcctaat

SEQ ID NO: 101018 - DNA, 25 bp, Saccharomyces pastorianus
gagcctcacactctaatttcattaa

SEQ ID NO: 101019 - DNA, 25 bp, Saccharomyces pastorianus
gtcaacaagtcatcattgccgttag

SEQ ID NO: 101020 - DNA, 25 bp, Saccharomyces pastorianus
ggaacattgcctgagacgggcacta

SEQ ID NO: 101021 - DNA, 25 bp, Saccharomyces pastorianus
acggcggttgctacttgattttcca

SEQ ID NO: 101022 - DNA, 25 bp, Saccharomyces pastorianus
gcccgtcagccaaatttcgttattt

SEQ ID NO: 101023 - DNA, 25 bp, Saccharomyces pastorianus
tcattaaagtctcgactgccgcaac

SEQ ID NO: 101024 - DNA, 25 bp, Saccharomyces pastorianus
agaatgctcttgcaagacctgctgt

SEQ ID NO: 101025 - DNA, 25 bp, Saccharomyces pastorianus
agtggatgaatccttgcccgtcagc

SEQ ID NO: 101026 - DNA, 25 bp, Saccharomyces pastorianus
attgctttgcgaggacaagaccgtc

SEQ ID NO: 101027 - DNA, 25 bp, Saccharomyces pastorianus
actgatctgaccttttacgatgcta

SEQ ID NO: 101028 - DNA, 25 bp, Saccharomyces pastorianus
taacccatcattgtgtaaacctagt

SEQ ID NO: 101029 - DNA, 25 bp, Saccharomyces pastorianus
ataccgccggttccaattctgataa

SEQ ID NO: 101030 - DNA, 25 bp, Saccharomyces pastorianus
aggtatacctgttttgcggcactct

SEQ ID NO: 101031 - DNA, 25 bp, Saccharomyces pastorianus
gctccggttgctttataacccatca

SEQ ID NO: 101032 - DNA, 25 bp, Saccharomyces pastorianus
cgattctataaaggccgtggtcttg

SEQ ID NO: 101033 - DNA, 25 bp, Saccharomyces pastorianus
gatcttcctataccaatccacgatt

SEQ ID NO: 101034 - DNA, 25 bp, Saccharomyces pastorianus
ttgattgttagcaataccgccggtt

SEQ ID NO: 101035 - DNA, 25 bp, Saccharomyces pastorianus
atcgccttccctcatgatgacaaaa

SEQ ID NO: 101036 - DNA, 25 bp, Saccharomyces pastorianus
agtggcaccttaaatacgctccggt

SEQ ID NO: 101037 - DNA, 25 bp, Saccharomyces pastorianus
atatggccagattacttgcaacact

SEQ ID NO: 101038 - DNA, 25 bp, Saccharomyces pastorianus
aggctttttactgacatcttgatgg

SEQ ID NO: 101039 - DNA, 25 bp, Saccharomyces pastorianus
gtctcacaaaaccatccaggcagta

SEQ ID NO: 101040 - DNA, 25 bp, Saccharomyces pastorianus
gaacaccatccttatttgactcaag

SEQ ID NO: 101041 - DNA, 25 bp, Saccharomyces pastorianus
gaaaggtcacatcaccgaagcacat

SEQ ID NO: 101042 - DNA, 25 bp, Saccharomyces pastorianus
gtaccacttcccaagtattgcttag

SEQ ID NO: 101043 - DNA, 25 bp, Saccharomyces pastorianus
tggttgtagaatcaagcccgtggct

SEQ ID NO: 101044 - DNA, 25 bp, Saccharomyces pastorianus
aagtagttgcttactcctccttcgg

SEQ ID NO: 101045 - DNA, 25 bp, Saccharomyces pastorianus
agcccgtggctttgcaaattgaaca

SEQ ID NO: 101046 - DNA, 25 bp, Saccharomyces pastorianus
catagatacgtaccgggctctggaa

SEQ ID NO: 101047 - DNA, 25 bp, Saccharomyces pastorianus
tccttcggtcctcaatcattcattg

SEQ ID NO: 101048 - DNA, 25 bp, Saccharomyces pastorianus
tccaggattctatacgggcgcagat

SEQ ID NO: 101049 - DNA, 25 bp, Saccharomyces pastorianus
aaccacgccaactctgttcgagaat

SEQ ID NO: 101050 - DNA, 25 bp, Saccharomyces pastorianus
gaacccatccaactacttgacgaag

SEQ ID NO: 101051 - DNA, 25 bp, Saccharomyces pastorianus
gaacccaacttgaaggcttttgcgg

SEQ ID NO: 101052 - DNA, 25 bp, Saccharomyces pastorianus
ggagcctgaactcgacattgactca

SEQ ID NO: 101053 - DNA, 25 bp, Saccharomyces pastorianus
aggctcatgtcagcgattgcaccat

SEQ ID NO: 101054 - DNA, 25 bp, Saccharomyces pastorianus
acagcagcctcgtagaaatgaccaa

SEQ ID NO: 101055 - DNA, 25 bp, Saccharomyces pastorianus
tcaatcacatcatccttaacagcag

SEQ ID NO: 101056 - DNA, 25 bp, Saccharomyces pastorianus
ccttcagtgcagtggtacagttctt

SEQ ID NO: 101057 - DNA, 25 bp, Saccharomyces pastorianus
taactgtttgcagattccacacctt

SEQ ID NO: 101058 - DNA, 25 bp, Saccharomyces pastorianus
gattgcggtgccacaattaccagaa

SEQ ID NO: 101059 - DNA, 25 bp, Saccharomyces pastorianus
gatactccgatttcgtcagattacg

SEQ ID NO: 101060 - DNA, 25 bp, Saccharomyces pastorianus
atgagggacccatcagtgcgtcaaa

SEQ ID NO: 101061 - DNA, 25 bp, Saccharomyces pastorianus
cacagccctgccacagatatagtta

SEQ ID NO: 101062 - DNA, 25 bp, Saccharomyces pastorianus
atggtgcagtccctatctttagaaa

SEQ ID NO: 101063 - DNA, 25 bp, Saccharomyces pastorianus
ttccggatgcattgctgctttggat

SEQ ID NO: 101064 - DNA, 25 bp, Saccharomyces pastorianus
aaaaactgtgcctggatcgtctctg

SEQ ID NO: 101065 - DNA, 25 bp, Saccharomyces pastorianus
ggtgacgttcaggactctaggtata

SEQ ID NO: 101066 - DNA, 25 bp, Saccharomyces pastorianus
gaatatctgcctgtgctgtatgtga

SEQ ID NO: 101067 - DNA, 25 bp, Saccharomyces pastorianus
agttacttctgctggttccggatgc

SEQ ID NO: 101068 - DNA, 25 bp, Saccharomyces pastorianus
tataatcttggccacgggtgcttcc

SEQ ID NO: 101069 - DNA, 25 bp, Saccharomyces pastorianus
atcgtctctgacttctgtgccaggt

SEQ ID NO: 101070 - DNA, 25 bp, Saccharomyces pastorianus
aggatcattttcgtgcatctgtaat

SEQ ID NO: 101071 - DNA, 25 bp, Saccharomyces pastorianus
ttttacgcaataggtcacagccctg

SEQ ID NO: 101072 - DNA, 25 bp, Saccharomyces pastorianus
cagtaattcagattctgccgctgtt

SEQ ID NO: 101073 - DNA, 25 bp, Saccharomyces pastorianus
gattctgccgctgttgaacatgcaa

SEQ ID NO: 101074 - DNA, 25 bp, Saccharomyces pastorianus
gaagtatttcactgaccaagtcaaa

SEQ ID NO: 101075 - DNA, 25 bp, Saccharomyces pastorianus
gacttgaaggtcacgagaacaccgg

SEQ ID NO: 101076 - DNA, 25 bp, Saccharomyces pastorianus
cagagccctgttactgaggacttat

SEQ ID NO: 101077 - DNA, 25 bp, Saccharomyces pastorianus
cgattctcattgtgatttccgtaag

SEQ ID NO: 101078 - DNA, 25 bp, Saccharomyces pastorianus
gcaccagcaaggaaattgtcacaca

SEQ ID NO: 101079 - DNA, 25 bp, Saccharomyces pastorianus
tttcacgcctccattagacgctgat

SEQ ID NO: 101080 - DNA, 25 bp, Saccharomyces pastorianus
gaatcagactgaacggtgacttgga

SEQ ID NO: 101081 - DNA, 25 bp, Saccharomyces pastorianus
agatttgatttctaccacccaagaa

SEQ ID NO: 101082 - DNA, 25 bp, Saccharomyces pastorianus
aaggcactcaggtagttgcaaggaa

SEQ ID NO: 101083 - DNA, 25 bp, Saccharomyces pastorianus
ttgaaaatgcgccagctaacccttc

SEQ ID NO: 101084 - DNA, 25 bp, Saccharomyces pastorianus
agaaccctagtcaatcagtctccta

SEQ ID NO: 101085 - DNA, 25 bp, Saccharomyces pastorianus
tttgggactttcaactcctcaatcg

SEQ ID NO: 101086 - DNA, 25 bp, Saccharomyces pastorianus
ttgggcgatttgaccgatttatcta

SEQ ID NO: 101087 - DNA, 25 bp, Saccharomyces pastorianus
gatttatctatttcgaacccttcaa

SEQ ID NO: 101088 - DNA, 25 bp, Saccharomyces pastorianus
cttagtgttcttattagcagtccct

SEQ ID NO: 101089 - DNA, 25 bp, Saccharomyces pastorianus
ttgcaaccccaatcgagtaacttta

SEQ ID NO: 101090 - DNA, 25 bp, Saccharomyces pastorianus
gtcaccgatctccaacttagtgttc

SEQ ID NO: 101091 - DNA, 25 bp, Saccharomyces pastorianus
gcagtccctaagtcaatgtctttga

SEQ ID NO: 101092 - DNA, 25 bp, Saccharomyces pastorianus
aagcatcctttggtctgggaggcga

SEQ ID NO: 101093 - DNA, 25 bp, Saccharomyces pastorianus
aggtcaactattctgtcaactccac

SEQ ID NO: 101094 - DNA, 25 bp, Saccharomyces pastorianus
ttaggcctaccagtgattcaaaagt

SEQ ID NO: 101095 - DNA, 25 bp, Saccharomyces pastorianus
gataaatcccgaggccaacgaacat

SEQ ID NO: 101096 - DNA, 25 bp, Saccharomyces pastorianus
ggatctttcttattatacacccagc

SEQ ID NO: 101097 - DNA, 25 bp, Saccharomyces pastorianus
gaaaactaccgctctctcattaaag

SEQ ID NO: 101098 - DNA, 25 bp, Saccharomyces pastorianus
ggataagcaggagccaagcccaatt

SEQ ID NO: 101099 - DNA, 25 bp, Saccharomyces pastorianus
gctatcgatagcagctctaccattt

SEQ ID NO: 101100 - DNA, 25 bp, Saccharomyces pastorianus
ttcataaatttaccgccactagctt

SEQ ID NO: 101101 - DNA, 25 bp, Saccharomyces pastorianus
agatgcggtcgctgtacttaaacaa

SEQ ID NO: 101102 - DNA, 25 bp, Saccharomyces pastorianus
agcccaatttgtgaggatctttctt

SEQ ID NO: 101103 - DNA, 25 bp, Saccharomyces pastorianus
tacacccagcaggtttactgatttt

SEQ ID NO: 101104 - DNA, 25 bp, Saccharomyces pastorianus
ccactagcttggtcattgcgttaca

SEQ ID NO: 101105 - DNA, 25 bp, Saccharomyces pastorianus
gttccaacttctcatattgctgggc

SEQ ID NO: 101106 - DNA, 25 bp, Saccharomyces pastorianus
tgcttctatgaacacttatcccggg

SEQ ID NO: 101107 - DNA, 25 bp, Saccharomyces pastorianus
tcaaaggctatcttctattcgtaag

SEQ ID NO: 101108 - DNA, 25 bp, Saccharomyces pastorianus
ttcgataacgaccatcgtgtcctaa

SEQ ID NO: 101109 - DNA, 25 bp, Saccharomyces pastorianus
gggctgtccatttttatgcgaagtc

SEQ ID NO: 101110 - DNA, 25 bp, Saccharomyces pastorianus
gaggaccctgaatccagtctgacaa

SEQ ID NO: 101111 - DNA, 25 bp, Saccharomyces pastorianus
catagattttgcttcactccattct

SEQ ID NO: 101112 - DNA, 25 bp, Saccharomyces pastorianus
ggcaatgttgaagcgcttgacagca

SEQ ID NO: 101113 - DNA, 25 bp, Saccharomyces pastorianus
aatgacgtggtctgtgttccaactt

SEQ ID NO: 101114 - DNA, 25 bp, Saccharomyces pastorianus
tatttgctattacccaagctgtagg

SEQ ID NO: 101115 - DNA, 25 bp, Saccharomyces pastorianus
ggtaggccagttgactcaaaggcta

SEQ ID NO: 101116 - DNA, 25 bp, Saccharomyces pastorianus
agagcctgcgcactttcaaaatgag

SEQ ID NO: 101117 - DNA, 25 bp, Saccharomyces pastorianus
tacgaactgttttgtggcgcacgaa

SEQ ID NO: 101118 - DNA, 25 bp, Saccharomyces pastorianus
tacggtaacgactctcagctagcta

SEQ ID NO: 101119 - DNA, 25 bp, Saccharomyces pastorianus
gaatcagtgtggacgcatttcagcg

SEQ ID NO: 101120 - DNA, 25 bp, Saccharomyces pastorianus
gaaactttgaagcttatcctaggaa

SEQ ID NO: 101121 - DNA, 25 bp, Saccharomyces pastorianus
gaaactataatgtatgcgagcctga

SEQ ID NO: 101122 - DNA, 25 bp, Saccharomyces pastorianus
atatagtgattctttgccgctacgg

SEQ ID NO: 101123 - DNA, 25 bp, Saccharomyces pastorianus
ggaccttgcattggactagttggaa

SEQ ID NO: 101124 - DNA, 25 bp, Saccharomyces pastorianus
gagatatctcatttccctgaagcag

SEQ ID NO: 101125 - DNA, 25 bp, Saccharomyces pastorianus
taggccatcccatcattacgagata

SEQ ID NO: 101126 - DNA, 25 bp, Saccharomyces pastorianus
gttatattcaggtttcccacagcag

SEQ ID NO: 101127 - DNA, 25 bp, Saccharomyces pastorianus
aagtttcatgttgttgcgatccctg

SEQ ID NO: 101128 - DNA, 25 bp, Saccharomyces pastorianus
ttgcgatccctgagaacctacgaaa

SEQ ID NO: 101129 - DNA, 25 bp, Saccharomyces pastorianus
taagtactttggtggtcattctgac

SEQ ID NO: 101130 - DNA, 25 bp, Saccharomyces pastorianus
atcatgcgacctcactgggtggaat

SEQ ID NO: 101131 - DNA, 25 bp, Saccharomyces pastorianus
gacgatttaccactcttctttacaa

SEQ ID NO: 101132 - DNA, 25 bp, Saccharomyces pastorianus
gactgacccatatatcgaccaaact

SEQ ID NO: 101133 - DNA, 25 bp, Saccharomyces pastorianus
atctgtgggctgtgaatccgctaat

SEQ ID NO: 101134 - DNA, 25 bp, Saccharomyces pastorianus
tagtggattccacattcgcatctcc

SEQ ID NO: 101135 - DNA, 25 bp, Saccharomyces pastorianus
gatattgtcctatactctgctacta

SEQ ID NO: 101136 - DNA, 25 bp, Saccharomyces pastorianus
gttaagtggcgtccttgtagtcaaa

SEQ ID NO: 101137 - DNA, 25 bp, Saccharomyces pastorianus
tatggtcccgtttttgctatcactt

SEQ ID NO: 101138 - DNA, 25 bp, Saccharomyces pastorianus
gatagaggccctgcaccagaagtac

SEQ ID NO: 101139 - DNA, 25 bp, Saccharomyces pastorianus
gtaatggcaacggaggacccttgca

SEQ ID NO: 101140 - DNA, 25 bp, Saccharomyces pastorianus
acgcgatacgggttctggatggact

SEQ ID NO: 101141 - DNA, 25 bp, Saccharomyces pastorianus
aaatctctttggttgcacgcgatac

SEQ ID NO: 101142 - DNA, 25 bp, Saccharomyces pastorianus
gacgaaatcaccattacgccaggag

SEQ ID NO: 101143 - DNA, 25 bp, Saccharomyces pastorianus
atatattcgcatatctagcgcggct

SEQ ID NO: 101144 - DNA, 25 bp, Saccharomyces pastorianus
gaagaactaggctaggctctgcccc

SEQ ID NO: 101145 - DNA, 25 bp, Saccharomyces pastorianus
gaaggagtacactacctgttaggac

SEQ ID NO: 101146 - DNA, 25 bp, Saccharomyces pastorianus
aacatcttgaacgtcgactcgaagc

SEQ ID NO: 101147 - DNA, 25 bp, Saccharomyces pastorianus
tgcccctaacaacgctggtgaagat

SEQ ID NO: 101148 - DNA, 25 bp, Saccharomyces pastorianus
aattctatacgcaccactagtacca

SEQ ID NO: 101149 - DNA, 25 bp, Saccharomyces pastorianus
gtgatatccaggacccatgggtgtt

SEQ ID NO: 101150 - DNA, 25 bp, Saccharomyces pastorianus
caattcatgtgtccgaactgtagga

SEQ ID NO: 101151 - DNA, 25 bp, Saccharomyces pastorianus
gatgtcaagtcttccagtgggacct

SEQ ID NO: 101152 - DNA, 25 bp, Saccharomyces pastorianus
tatatcaccatgtgcccatagttgg

SEQ ID NO: 101153 - DNA, 25 bp, Saccharomyces pastorianus
ggactaccttttacatgacggagat

SEQ ID NO: 101154 - DNA, 25 bp, Saccharomyces pastorianus
tgggacctttttgaaccaccagcgt

SEQ ID NO: 101155 - DNA, 25 bp, Saccharomyces pastorianus
gacggagatatcatacagctgggta

SEQ ID NO: 101156 - DNA, 25 bp, Saccharomyces pastorianus
gtatcatcccgtagtgttcaaatca

SEQ ID NO: 101157 - DNA, 25 bp, Saccharomyces pastorianus
gactaccttggaatccgaatctgaa

SEQ ID NO: 101158 - DNA, 25 bp, Saccharomyces pastorianus
aactgtgatttggagactaccttgg

SEQ ID NO: 101159 - DNA, 25 bp, Saccharomyces pastorianus
tgcgtctaccacttctaaggactac

SEQ ID NO: 101160 - DNA, 25 bp, Saccharomyces pastorianus
attacgaccgatccaagtgccaaga

SEQ ID NO: 101161 - DNA, 25 bp, Saccharomyces pastorianus
taccaacagtggctctacaagcagc

SEQ ID NO: 101162 - DNA, 25 bp, Saccharomyces pastorianus
agcagcaacaattcacaaccatctt

SEQ ID NO: 101163 - DNA, 25 bp, Saccharomyces pastorianus
gacagtcagtactatgatccttgtg

SEQ ID NO: 101164 - DNA, 25 bp, Saccharomyces pastorianus
aagaatattttgacgcataccgcga

SEQ ID NO: 101165 - DNA, 25 bp, Saccharomyces pastorianus
cggtatgaccatgaccaacgataat

SEQ ID NO: 101166 - DNA, 25 bp, Saccharomyces pastorianus
acgatccgtcgtcatttcaatacta

SEQ ID NO: 101167 - DNA, 25 bp, Saccharomyces pastorianus
tgaggagtcctccaagctcagtttt

SEQ ID NO: 101168 - DNA, 25 bp, Saccharomyces pastorianus
aattcgcgttaaaggctgacagtca

SEQ ID NO: 101169 - DNA, 25 bp, Saccharomyces pastorianus
ggcaaactagtagtctctccactat

SEQ ID NO: 101170 - DNA, 25 bp, Saccharomyces pastorianus
tatgtaccaaagagcgacgatccgt

SEQ ID NO: 101171 - DNA, 25 bp, Saccharomyces pastorianus
gcaaggatccaagaattgaccattt

SEQ ID NO: 101172 - DNA, 25 bp, Saccharomyces pastorianus
agatgtgcagcttgatgttgacgtc

SEQ ID NO: 101173 - DNA, 25 bp, Saccharomyces pastorianus
aaggcagttggaaaaccgcaatcag

SEQ ID NO: 101174 - DNA, 25 bp, Saccharomyces pastorianus
gggcagaataccaaattctttgtta

SEQ ID NO: 101175 - DNA, 25 bp, Saccharomyces pastorianus
ttaggtatgatgactttgatggcat

SEQ ID NO: 101176 - DNA, 25 bp, Saccharomyces pastorianus
gaggaagagccattaggtgtgcaaa

SEQ ID NO: 101177 - DNA, 25 bp, Saccharomyces pastorianus
tttgcccatggcaattagtgtgtgg

SEQ ID NO: 101178 - DNA, 25 bp, Saccharomyces pastorianus
gaagacggcaaaagccctgaggaaa

SEQ ID NO: 101179 - DNA, 25 bp, Saccharomyces pastorianus
gtcacagacgaccagtacaatattt

SEQ ID NO: 101180 - DNA, 25 bp, Saccharomyces pastorianus
taatacggctttgcaacgattttga

SEQ ID NO: 101181 - DNA, 25 bp, Saccharomyces pastorianus
gggatcgatgttacaaaccaccaat

SEQ ID NO: 101182 - DNA, 25 bp, Saccharomyces pastorianus
gagtacacacctgaactttgtcaaa

SEQ ID NO: 101183 - DNA, 25 bp, Saccharomyces pastorianus
cactgcgtgatatcgcggcaagcga

SEQ ID NO: 101184 - DNA, 25 bp, Saccharomyces pastorianus
gttcctcaagaagtttcatcctcta

SEQ ID NO: 101185 - DNA, 25 bp, Saccharomyces pastorianus
gaaccttcagactcagttcctcaag

SEQ ID NO: 101186 - DNA, 25 bp, Saccharomyces pastorianus
ggtatagcccgtttcattaatcatt

SEQ ID NO: 101187 - DNA, 25 bp, Saccharomyces pastorianus
gaattgttatctatgcactgcgtga

SEQ ID NO: 101188 - DNA, 25 bp, Saccharomyces pastorianus
gggtttatatgctctagactctatc

SEQ ID NO: 101189 - DNA, 25 bp, Saccharomyces pastorianus
cgctcgttcagcaattcacaactgg

SEQ ID NO: 101190 - DNA, 25 bp, Saccharomyces pastorianus
acggaatctgagctgctatcactaa

SEQ ID NO: 101191 - DNA, 25 bp, Saccharomyces pastorianus
gattggatccagttacctttttagg

SEQ ID NO: 101192 - DNA, 25 bp, Saccharomyces pastorianus
aagccagttatgttcgctcgttcag

SEQ ID NO: 101193 - DNA, 25 bp, Saccharomyces pastorianus
gaagtcattggtgataagccctcgt

SEQ ID NO: 101194 - DNA, 25 bp, Saccharomyces pastorianus
gataagccctcgtttaactcattca

SEQ ID NO: 101195 - DNA, 25 bp, Saccharomyces pastorianus
aacaacactcttactatccaaacaa

SEQ ID NO: 101196 - DNA, 25 bp, Saccharomyces pastorianus
tcgttcaattcatccaacaacactc

SEQ ID NO: 101197 - DNA, 25 bp, Saccharomyces pastorianus
gtcgaagatatcaaagtgctacatg

SEQ ID NO: 101198 - DNA, 25 bp, Saccharomyces pastorianus
gagggtcagttcattttcgatcaaa

SEQ ID NO: 101199 - DNA, 25 bp, Saccharomyces pastorianus
gacgttaaggtgcaatctccataca

SEQ ID NO: 101200 - DNA, 25 bp, Saccharomyces pastorianus
gggtggctaaggacatcattattct

SEQ ID NO: 101201 - DNA, 25 bp, Saccharomyces pastorianus
gaatcaatctccacaaaatttcaag

SEQ ID NO: 101202 - DNA, 25 bp, Saccharomyces pastorianus
ggtgcaatctccatacaaggtcgaa

SEQ ID NO: 101203 - DNA, 25 bp, Saccharomyces pastorianus
caaaccctcatatgtcaacgtggaa

SEQ ID NO: 101204 - DNA, 25 bp, Saccharomyces pastorianus
aggaccttctgttaggcgggttcag

SEQ ID NO: 101205 - DNA, 25 bp, Saccharomyces pastorianus
aattacccattgttctctggcaacg

SEQ ID NO: 101206 - DNA, 25 bp, Saccharomyces pastorianus
ttctttccattcgaattccaccaga

SEQ ID NO: 101207 - DNA, 25 bp, Saccharomyces pastorianus
agcctgatctcattgatgctcaaga

SEQ ID NO: 101208 - DNA, 25 bp, Saccharomyces pastorianus
gcgggttcagcaacgaagctacgct

SEQ ID NO: 101209 - DNA, 25 bp, Saccharomyces pastorianus
tttgatagctcatatttccgaccct

SEQ ID NO: 101210 - DNA, 25 bp, Saccharomyces pastorianus
ataaggaacgtgtagcagctgcatg

SEQ ID NO: 101211 - DNA, 25 bp, Saccharomyces pastorianus
gaggtcttagacaagcttctttcca

SEQ ID NO: 101212 - DNA, 25 bp, Saccharomyces pastorianus
ctgagcacccgttaagtctgggaca

SEQ ID NO: 101213 - DNA, 25 bp, Saccharomyces pastorianus
ttccaccagaactgacttccgatga

SEQ ID NO: 101214 - DNA, 25 bp, Saccharomyces pastorianus
gtctgggacaactctctgttgtaaa

SEQ ID NO: 101215 - DNA, 25 bp, Saccharomyces pastorianus
gataggctcacgttctgaatgcaaa

SEQ ID NO: 101216 - DNA, 25 bp, Saccharomyces pastorianus
atatccgagttcatcttcaagaggt

SEQ ID NO: 101217 - DNA, 25 bp, Saccharomyces pastorianus
tatggtaacgaactctccctttcaa

SEQ ID NO: 101218 - DNA, 25 bp, Saccharomyces pastorianus
aagcggtactctaccatctggtata

SEQ ID NO: 101219 - DNA, 25 bp, Saccharomyces pastorianus
gagactcttgaacatatccagaaca

SEQ ID NO: 101220 - DNA, 25 bp, Saccharomyces pastorianus
agttgattgcaagcggtactctacc

SEQ ID NO: 101221 - DNA, 25 bp, Saccharomyces pastorianus
ttctctatactacctaattcagcag

SEQ ID NO: 101222 - DNA, 25 bp, Saccharomyces pastorianus
atcaatgtccagattcctctctgaa

SEQ ID NO: 101223 - DNA, 25 bp, Saccharomyces pastorianus
aaatcgaactgaaaccggcacgctc

SEQ ID NO: 101224 - DNA, 25 bp, Saccharomyces pastorianus
tgcacttttcccagctacggaagag

SEQ ID NO: 101225 - DNA, 25 bp, Saccharomyces pastorianus
accggcacgctcttttgaacatgag

SEQ ID NO: 101226 - DNA, 25 bp, Saccharomyces pastorianus
gaacatcatcatccatcaactagta

SEQ ID NO: 101227 - DNA, 25 bp, Saccharomyces pastorianus
attatcttcaattcggcttcagtac

SEQ ID NO: 101228 - DNA, 25 bp, Saccharomyces pastorianus
aaacgtcaaacgtggcgcacattaa

SEQ ID NO: 101229 - DNA, 25 bp, Saccharomyces pastorianus
atacgatgtatgcatttggcttgac

SEQ ID NO: 101230 - DNA, 25 bp, Saccharomyces pastorianus
gtactgcatgaaatactcgctaata

SEQ ID NO: 101231 - DNA, 25 bp, Saccharomyces pastorianus
gatactatcctctgtaatatttcta

SEQ ID NO: 101232 - DNA, 25 bp, Saccharomyces pastorianus
tagcacagtgacacttaaacgtcaa

SEQ ID NO: 101233 - DNA, 25 bp, Saccharomyces pastorianus
gcatttggcttgacactgctgtaat

SEQ ID NO: 101234 - DNA, 25 bp, Saccharomyces pastorianus
ggtagttgccaaacatttgatacta

SEQ ID NO: 101235 - DNA, 25 bp, Saccharomyces pastorianus
tcacagcaacgttcaattatcttca

SEQ ID NO: 101236 - DNA, 25 bp, Saccharomyces pastorianus
aattcggcttcagtactgcatgaaa

SEQ ID NO: 101237 - DNA, 25 bp, Saccharomyces pastorianus
gaacagggccaagaactctcagaat

SEQ ID NO: 101238 - DNA, 25 bp, Saccharomyces pastorianus
catttctcaggtgcagatagctcaa

SEQ ID NO: 101239 - DNA, 25 bp, Saccharomyces pastorianus
gaaaactgtttcatggcgctctagt

SEQ ID NO: 101240 - DNA, 25 bp, Saccharomyces pastorianus
ggcaatgcccacagaggaaccgatt

SEQ ID NO: 101241 - DNA, 25 bp, Saccharomyces pastorianus
gctaaggtccgtctggcatatccta

SEQ ID NO: 101242 - DNA, 25 bp, Saccharomyces pastorianus
tggcatatcctacaacacagtcttt

SEQ ID NO: 101243 - DNA, 25 bp, Saccharomyces pastorianus
taagcagcaatgacgtcggtgtact

SEQ ID NO: 101244 - DNA, 25 bp, Saccharomyces pastorianus
aattgcagcgacaacattttggcga

SEQ ID NO: 101245 - DNA, 25 bp, Saccharomyces pastorianus
ggttagagacctgccttcaggatct

SEQ ID NO: 101246 - DNA, 25 bp, Saccharomyces pastorianus
ggtggcagccagcttgtgatatcta

SEQ ID NO: 101247 - DNA, 25 bp, Saccharomyces pastorianus
atgctattcaacctaactttgggag

SEQ ID NO: 101248 - DNA, 25 bp, Saccharomyces pastorianus
agaattgttactggtgccctcgaca

SEQ ID NO: 101249 - DNA, 25 bp, Saccharomyces pastorianus
gttgtaggtctgtgcgtatcggtaa

SEQ ID NO: 101250 - DNA, 25 bp, Saccharomyces pastorianus
tattagacccaatgctggccaccgg

SEQ ID NO: 101251 - DNA, 25 bp, Saccharomyces pastorianus
aggtatgtcttcctattagacccaa

SEQ ID NO: 101252 - DNA, 25 bp, Saccharomyces pastorianus
gggtttgtacaccatcatcagaaat

SEQ ID NO: 101253 - DNA, 25 bp, Saccharomyces pastorianus
tggccaccggtggtagtgctatcat

SEQ ID NO: 101254 - DNA, 25 bp, Saccharomyces pastorianus
aagggacgaggagactgctttacca

SEQ ID NO: 101255 - DNA, 25 bp, Saccharomyces pastorianus
caagtatctagttccagggttgggt

SEQ ID NO: 101256 - DNA, 25 bp, Saccharomyces pastorianus
cgaaggtgtctcattcatgggtaaa

SEQ ID NO: 101257 - DNA, 25 bp, Saccharomyces pastorianus
tggtgccctcgacagaggtctagat

SEQ ID NO: 101258 - DNA, 25 bp, Saccharomyces pastorianus
cgccttcccagaggtcagaattgtt

SEQ ID NO: 101259 - DNA, 25 bp, Saccharomyces pastorianus
taagtggcggaactacaacgcttaa

SEQ ID NO: 101260 - DNA, 25 bp, Saccharomyces pastorianus
ggagcagatatcacagagcagttac

SEQ ID NO: 101261 - DNA, 25 bp, Saccharomyces pastorianus
aaggaaacctttactgtcatcgata

SEQ ID NO: 101262 - DNA, 25 bp, Saccharomyces pastorianus
aaaggctttggagaccgaatgctat

SEQ ID NO: 101263 - DNA, 25 bp, Saccharomyces pastorianus
gataaagattatagccccttcagaa

SEQ ID NO: 101264 - DNA, 25 bp, Saccharomyces pastorianus
ttttcacctcaaatcatcggcttag

SEQ ID NO: 101265 - DNA, 25 bp, Saccharomyces pastorianus
atggttttgcattacctgcgtctat

SEQ ID NO: 101266 - DNA, 25 bp, Saccharomyces pastorianus
aatcagctggtgtttcgttgttttc

SEQ ID NO: 101267 - DNA, 25 bp, Saccharomyces pastorianus
tgtcatcgataatcctaagtggcgg

SEQ ID NO: 101268 - DNA, 25 bp, Saccharomyces pastorianus
gtttcgttgttttccagcagtgaac

SEQ ID NO: 101269 - DNA, 25 bp, Saccharomyces pastorianus
cggcttagggtacgatggattatct

SEQ ID NO: 101270 - DNA, 25 bp, Saccharomyces pastorianus
attttgacaccgatgtttacataaa

SEQ ID NO: 101271 - DNA, 25 bp, Saccharomyces pastorianus
atattttgcattttctcgaattgag

SEQ ID NO: 101272 - DNA, 25 bp, Saccharomyces pastorianus
ttgcacttaagtttcttttcaacat

SEQ ID NO: 101273 - DNA, 25 bp, Saccharomyces pastorianus
gctacatgatgaggagtttttctat

SEQ ID NO: 101274 - DNA, 25 bp, Saccharomyces pastorianus
tgttaaagcatttccgattggcatc

SEQ ID NO: 101275 - DNA, 25 bp, Saccharomyces pastorianus
atttccgattggcatcattgatgta

SEQ ID NO: 101276 - DNA, 25 bp, Saccharomyces pastorianus
atttcattctatacactttggattg

SEQ ID NO: 101277 - DNA, 25 bp, Saccharomyces pastorianus
attatcatcggatatatgctacatg

SEQ ID NO: 101278 - DNA, 25 bp, Saccharomyces pastorianus
tatatttcacgattttgacaccgat

SEQ ID NO: 101279 - DNA, 25 bp, Saccharomyces pastorianus
ggattgtgttttttcttttgcactt

SEQ ID NO: 101280 - DNA, 25 bp, Saccharomyces pastorianus
aacattatcattcggtatatttcac

SEQ ID NO: 101281 - DNA, 25 bp, Saccharomyces pastorianus
aggttctgcgttggacttcatgtac

SEQ ID NO: 101282 - DNA, 25 bp, Saccharomyces pastorianus
ttatccaaggccatccgttcaaaat

SEQ ID NO: 101283 - DNA, 25 bp, Saccharomyces pastorianus
ggactcatgttcctcaatgtcttgg

SEQ ID NO: 101284 - DNA, 25 bp, Saccharomyces pastorianus
atacgcatatacgtggtcgcatgac

SEQ ID NO: 101285 - DNA, 25 bp, Saccharomyces pastorianus
gatgccttgcccagagacttagaaa

SEQ ID NO: 101286 - DNA, 25 bp, Saccharomyces pastorianus
tacgcatactcgtgtgatgccttgc

SEQ ID NO: 101287 - DNA, 25 bp, Saccharomyces pastorianus
ggagattttatatccctacgcatac

SEQ ID NO: 101288 - DNA, 25 bp, Saccharomyces pastorianus
acagagcacattgggcattccagtt

SEQ ID NO: 101289 - DNA, 25 bp, Saccharomyces pastorianus
gggaaccatggatttttattgcctc

SEQ ID NO: 101290 - DNA, 25 bp, Saccharomyces pastorianus
aaactacgacgtaatctccgcatgt

SEQ ID NO: 101291 - DNA, 25 bp, Saccharomyces pastorianus
ttgatcattcctttggtttccagtg

SEQ ID NO: 101292 - DNA, 25 bp, Saccharomyces pastorianus
ggatttatcgaagctgtcaccacaa

SEQ ID NO: 101293 - DNA, 25 bp, Saccharomyces pastorianus
gaagctgtcaccacaagaactaaaa

SEQ ID NO: 101294 - DNA, 25 bp, Saccharomyces pastorianus
agcagcagggtggatttgagcaatc

SEQ ID NO: 101295 - DNA, 25 bp, Saccharomyces pastorianus
aggccggagtcattaagtcggatga

SEQ ID NO: 101296 - DNA, 25 bp, Saccharomyces pastorianus
tgagcaatcctcatgggtttaccaa

SEQ ID NO: 101297 - DNA, 25 bp, Saccharomyces pastorianus
tgacagcggagattatgcattgaaa

SEQ ID NO: 101298 - DNA, 25 bp, Saccharomyces pastorianus
ttatgcattgaaaaaggccggagtc

SEQ ID NO: 101299 - DNA, 25 bp, Saccharomyces pastorianus
gatctttcacctacaagcagcaggg

SEQ ID NO: 101300 - DNA, 25 bp, Saccharomyces pastorianus
aaatgtatgggaagcttccatccaa

SEQ ID NO: 101301 - DNA, 25 bp, Saccharomyces pastorianus
agatgcaggatcgtcaatattttga

SEQ ID NO: 101302 - DNA, 25 bp, Saccharomyces pastorianus
ggaagcttccatccaaaaaagatct

SEQ ID NO: 101303 - DNA, 25 bp, Saccharomyces pastorianus
tattgctgcattttttattctattc

SEQ ID NO: 101304 - DNA, 25 bp, Saccharomyces pastorianus
attaagaacaagatcgtcgcggaac

SEQ ID NO: 101305 - DNA, 25 bp, Saccharomyces pastorianus
gtaccattcattgactctttcgttc

SEQ ID NO: 101306 - DNA, 25 bp, Saccharomyces pastorianus
tagcaggaatactcttccccatgat

SEQ ID NO: 101307 - DNA, 25 bp, Saccharomyces pastorianus
tttcgttcgttatcaacaccagcca

SEQ ID NO: 101308 - DNA, 25 bp, Saccharomyces pastorianus
tccgcgactgcgagacacgaaaggt

SEQ ID NO: 101309 - DNA, 25 bp, Saccharomyces pastorianus
gatgttccaatactcttttgggctt

SEQ ID NO: 101310 - DNA, 25 bp, Saccharomyces pastorianus
aaacaccctaggatcatttataaga

SEQ ID NO: 101311 - DNA, 25 bp, Saccharomyces pastorianus
gcctgattgggctgtatttggtact

SEQ ID NO: 101312 - DNA, 25 bp, Saccharomyces pastorianus
aaggtgttatctttggttccatagt

SEQ ID NO: 101313 - DNA, 25 bp, Saccharomyces pastorianus
gcggaacgtgacatggtgcctgatt

SEQ ID NO: 101314 - DNA, 25 bp, Saccharomyces pastorianus
gagatcgcttctctattgaggctca

SEQ ID NO: 101315 - DNA, 25 bp, Saccharomyces pastorianus
ggaggctcaatcctgctagttacta

SEQ ID NO: 101316 - DNA, 25 bp, Saccharomyces pastorianus
gctagttactatactccacgtagaa

SEQ ID NO: 101317 - DNA, 25 bp, Saccharomyces pastorianus
acaatctctcagtggatcaactttt

SEQ ID NO: 101318 - DNA, 25 bp, Saccharomyces pastorianus
tagaacatcgcagtcacaatctctc

SEQ ID NO: 101319 - DNA, 25 bp, Saccharomyces pastorianus
aacgctgccgccgttttaagcaagc

SEQ ID NO: 101320 - DNA, 25 bp, Saccharomyces pastorianus
aagattcaagtagagcgcagcgtca

SEQ ID NO: 101321 - DNA, 25 bp, Saccharomyces pastorianus
gacagatgtctccacgcggcaaaat

SEQ ID NO: 101322 - DNA, 25 bp, Saccharomyces pastorianus
aagctcgcccatgacttttgggaga

SEQ ID NO: 101323 - DNA, 25 bp, Saccharomyces pastorianus
ggagaacgactgtgtcattgacgaa

SEQ ID NO: 101324 - DNA, 25 bp, Saccharomyces pastorianus
aacaacttaaagatggtcaccagca

SEQ ID NO: 101325 - DNA, 25 bp, Saccharomyces pastorianus
agattttctaagactcaccatcgcc

SEQ ID NO: 101326 - DNA, 25 bp, Saccharomyces pastorianus
gtggtacctcacaagctattgttta

SEQ ID NO: 101327 - DNA, 25 bp, Saccharomyces pastorianus
ttatcgtcctctctttctatgaaag

SEQ ID NO: 101328 - DNA, 25 bp, Saccharomyces pastorianus
atgcccgtgtcatccgtttggagac

SEQ ID NO: 101329 - DNA, 25 bp, Saccharomyces pastorianus
aaatggctgtttgcccaaattattc

SEQ ID NO: 101330 - DNA, 25 bp, Saccharomyces pastorianus
taaggttatccttcatcgttgctaa

SEQ ID NO: 101331 - DNA, 25 bp, Saccharomyces pastorianus
aaatcttggatttggccgacattac

SEQ ID NO: 101332 - DNA, 25 bp, Saccharomyces pastorianus
ttaccaagctggtcagtttaccgtt

SEQ ID NO: 101333 - DNA, 25 bp, Saccharomyces pastorianus
gatagacctgacgatttgccgcaac

SEQ ID NO: 101334 - DNA, 25 bp, Saccharomyces pastorianus
ctccgcgggtatgttcatcattatt

SEQ ID NO: 101335 - DNA, 25 bp, Saccharomyces pastorianus
atggctgagtccaacttatcgtcct

SEQ ID NO: 101336 - DNA, 25 bp, Saccharomyces pastorianus
aaaaatctctcgtttggcattccac

SEQ ID NO: 101337 - DNA, 25 bp, Saccharomyces pastorianus
ggctgggcgattaattctggacaca

SEQ ID NO: 101338 - DNA, 25 bp, Saccharomyces pastorianus
accagctagctcaatgacgtcatct

SEQ ID NO: 101339 - DNA, 25 bp, Saccharomyces pastorianus
taaacccttggtttctgcgtattgg

SEQ ID NO: 101340 - DNA, 25 bp, Saccharomyces pastorianus
aacattgaatcgttggacccgccag

SEQ ID NO: 101341 - DNA, 25 bp, Saccharomyces pastorianus
gggatgacttttgctcctgtagcct

SEQ ID NO: 101342 - DNA, 25 bp, Saccharomyces pastorianus
gactctctgtcgaaggtcaggttca

SEQ ID NO: 101343 - DNA, 25 bp, Saccharomyces pastorianus
ggatgacatcccagttagactccgt

SEQ ID NO: 101344 - DNA, 25 bp, Saccharomyces pastorianus
gatctattttctactcttctggaga

SEQ ID NO: 101345 - DNA, 25 bp, Saccharomyces pastorianus
atcacagtggtcgattcgtcgcaaa

SEQ ID NO: 101346 - DNA, 25 bp, Saccharomyces pastorianus
attcgacatcaataccctgggactc

SEQ ID NO: 101347 - DNA, 25 bp, Saccharomyces pastorianus
aagggctttacagtggacttacctg

SEQ ID NO: 101348 - DNA, 25 bp, Saccharomyces pastorianus
ggctacggaccagaatagcattatt

SEQ ID NO: 101349 - DNA, 25 bp, Saccharomyces pastorianus
tttcattagcatattctccatggca

SEQ ID NO: 101350 - DNA, 25 bp, Saccharomyces pastorianus
gccagttacttagttttgattttca

SEQ ID NO: 101351 - DNA, 25 bp, Saccharomyces pastorianus
aagacggataatatggctacggacc

SEQ ID NO: 101352 - DNA, 25 bp, Saccharomyces pastorianus
aggcatcttccttatcatcatacat

SEQ ID NO: 101353 - DNA, 25 bp, Saccharomyces pastorianus
ggacttacctgatagcgaccaaatt

SEQ ID NO: 101354 - DNA, 25 bp, Saccharomyces pastorianus
cggtctgaaagaacgtttgagctat

SEQ ID NO: 101355 - DNA, 25 bp, Saccharomyces pastorianus
gcgaccaaattttggacggtctgaa

SEQ ID NO: 101356 - DNA, 25 bp, Saccharomyces pastorianus
tcatacatcgtaactttccccaaga

SEQ ID NO: 101357 - DNA, 25 bp, Saccharomyces pastorianus
gcgagtacggtgctaaatgcaattt

SEQ ID NO: 101358 - DNA, 25 bp, Saccharomyces pastorianus
aatggttctttgatgcctgtgagcc

SEQ ID NO: 101359 - DNA, 25 bp, Saccharomyces pastorianus
ctgtgggcgttttgtctggtcagaa

SEQ ID NO: 101360 - DNA, 25 bp, Saccharomyces pastorianus
aactttgttgtctattgctatccat

SEQ ID NO: 101361 - DNA, 25 bp, Saccharomyces pastorianus
atgttgtgtattctggtgttttccc

SEQ ID NO: 101362 - DNA, 25 bp, Saccharomyces pastorianus
gacttccctgtcgtttatgcaagtg

SEQ ID NO: 101363 - DNA, 25 bp, Saccharomyces pastorianus
gtgagccaactctgattgccagcaa

SEQ ID NO: 101364 - DNA, 25 bp, Saccharomyces pastorianus
aatttctgctgggtacttgtcacca

SEQ ID NO: 101365 - DNA, 25 bp, Saccharomyces pastorianus
tggcatcatggacatcggtcgactt

SEQ ID NO: 101366 - DNA, 25 bp, Saccharomyces pastorianus
cacaaatatcttctaatgcctcctc

SEQ ID NO: 101367 - DNA, 25 bp, Saccharomyces pastorianus
gtcagctctggtacaagtcacaaca

SEQ ID NO: 101368 - DNA, 25 bp, Saccharomyces pastorianus
ttgtcaccaatccaagcgcaaactt

SEQ ID NO: 101369 - DNA, 25 bp, Saccharomyces pastorianus
gcatttgttcaaatagatggacgct

SEQ ID NO: 101370 - DNA, 25 bp, Saccharomyces pastorianus
acctcttatagaatttgtatcccca

SEQ ID NO: 101371 - DNA, 25 bp, Saccharomyces pastorianus
gacattcacgtcagaaaagaggcca

SEQ ID NO: 101372 - DNA, 25 bp, Saccharomyces pastorianus
taatccgcggatcttgtcaaattta

SEQ ID NO: 101373 - DNA, 25 bp, Saccharomyces pastorianus
gttaacatgtgacattcacgtcaga

SEQ ID NO: 101374 - DNA, 25 bp, Saccharomyces pastorianus
atatgtcacttctgcatgcgtttca

SEQ ID NO: 101375 - DNA, 25 bp, Saccharomyces pastorianus
tagatggacgctatttgacaaaaat

SEQ ID NO: 101376 - DNA, 25 bp, Saccharomyces pastorianus
aagcgcagacttctctaatccgcgg

SEQ ID NO: 101377 - DNA, 25 bp, Saccharomyces pastorianus
gatgctgcaaacaggaacctcttat

SEQ ID NO: 101378 - DNA, 25 bp, Saccharomyces pastorianus
cacgctctgtttttagatgctgcaa

SEQ ID NO: 101379 - DNA, 25 bp, Saccharomyces pastorianus
tgcgtttcacgctctgtttttagat

SEQ ID NO: 101380 - DNA, 25 bp, Saccharomyces pastorianus
gaacgagccgtacaagtctattata

SEQ ID NO: 101381 - DNA, 25 bp, Saccharomyces pastorianus
tggccgcttagattgttttttgtca

SEQ ID NO: 101382 - DNA, 25 bp, Saccharomyces pastorianus
tatccatacccgtttctagacgtga

SEQ ID NO: 101383 - DNA, 25 bp, Saccharomyces pastorianus
caaagacaccttttcctatgacagt

SEQ ID NO: 101384 - DNA, 25 bp, Saccharomyces pastorianus
ggcaatccacttatatcctatttta

SEQ ID NO: 101385 - DNA, 25 bp, Saccharomyces pastorianus
attgttgctaccgtttattggccgc

SEQ ID NO: 101386 - DNA, 25 bp, Saccharomyces pastorianus
gttgctactattacgtgggcttatt

SEQ ID NO: 101387 - DNA, 25 bp, Saccharomyces pastorianus
agcatgcatggctcattgtaaccag

SEQ ID NO: 101388 - DNA, 25 bp, Saccharomyces pastorianus
tgtagtcttgcctccaagtttgagt

SEQ ID NO: 101389 - DNA, 25 bp, Saccharomyces pastorianus
agacatgtcactttgccagtttctt

SEQ ID NO: 101390 - DNA, 25 bp, Saccharomyces pastorianus
actacttatcgggatctggcacgaa

SEQ ID NO: 101391 - DNA, 25 bp, Saccharomyces pastorianus
tgctgctgggccttattgataatcg

SEQ ID NO: 101392 - DNA, 25 bp, Saccharomyces pastorianus
actggtatccctattggtagttcga

SEQ ID NO: 101393 - DNA, 25 bp, Saccharomyces pastorianus
tatttttctttgtagcaggccaggt

SEQ ID NO: 101394 - DNA, 25 bp, Saccharomyces pastorianus
ttggtttatgccttctctacacaaa

SEQ ID NO: 101395 - DNA, 25 bp, Saccharomyces pastorianus
gggtcatatccatacttcgtggcta

SEQ ID NO: 101396 - DNA, 25 bp, Saccharomyces pastorianus
atatgactaccgacgacgacttgga

SEQ ID NO: 101397 - DNA, 25 bp, Saccharomyces pastorianus
tcaagcactacttagatggcctctt

SEQ ID NO: 101398 - DNA, 25 bp, Saccharomyces pastorianus
acaaagtccatgctgttggtccgtg

SEQ ID NO: 101399 - DNA, 25 bp, Saccharomyces pastorianus
atggcctcttttttggaagcatctg

SEQ ID NO: 101400 - DNA, 25 bp, Saccharomyces pastorianus
gtggtagactgtggtgtatctcccc

SEQ ID NO: 101401 - DNA, 25 bp, Saccharomyces pastorianus
tatgggtcacaggagctatcttttt

SEQ ID NO: 101402 - DNA, 25 bp, Saccharomyces pastorianus
tgtctacttaactaacccgtctcaa

SEQ ID NO: 101403 - DNA, 25 bp, Saccharomyces pastorianus
agctcggatggcacttgttacgttt

SEQ ID NO: 101404 - DNA, 25 bp, Saccharomyces pastorianus
gcagttgagtcatcccaaacagggt

SEQ ID NO: 101405 - DNA, 25 bp, Saccharomyces pastorianus
ttgtttcatctattgcacctttctc

SEQ ID NO: 101406 - DNA, 25 bp, Saccharomyces pastorianus
gagcaacgacatccatgccattaga

SEQ ID NO: 101407 - DNA, 25 bp, Saccharomyces pastorianus
ggtaccctcttctagcgtagataca

SEQ ID NO: 101408 - DNA, 25 bp, Saccharomyces pastorianus
gaatcgtcaggtacatcttccgcta

SEQ ID NO: 101409 - DNA, 25 bp, Saccharomyces pastorianus
gacttctagttctgcttttgtttca

SEQ ID NO: 101410 - DNA, 25 bp, Saccharomyces pastorianus
tcaactaactttggcgtcatcgtct

SEQ ID NO: 101411 - DNA, 25 bp, Saccharomyces pastorianus
gtcttcaggttttcgtttgacttct

SEQ ID NO: 101412 - DNA, 25 bp, Saccharomyces pastorianus
cactattattaccttggcaccatcg

SEQ ID NO: 101413 - DNA, 25 bp, Saccharomyces pastorianus
ggtacttctcaagctagaacggcaa

SEQ ID NO: 101414 - DNA, 25 bp, Saccharomyces pastorianus
agctagaacggcaactttgaagtat

SEQ ID NO: 101415 - DNA, 25 bp, Saccharomyces pastorianus
gtaaattatctttatccagaactga

SEQ ID NO: 101416 - DNA, 25 bp, Saccharomyces pastorianus
gctgcaggtacttctcaagctagaa

SEQ ID NO: 101417 - DNA, 25 bp, Saccharomyces pastorianus
ggtcatagaatcctgttgaaggcta

SEQ ID NO: 101418 - DNA, 25 bp, Saccharomyces pastorianus
atccagaactgatgcagtccgttgt

SEQ ID NO: 101419 - DNA, 25 bp, Saccharomyces pastorianus
gcagctgcaggtacttctcaagcta

SEQ ID NO: 101420 - DNA, 25 bp, Saccharomyces pastorianus
gactgtggtcatagaatcctgttga

SEQ ID NO: 101421 - DNA, 25 bp, Saccharomyces pastorianus
aactttgaagtatatttgtgctgaa

SEQ ID NO: 101422 - DNA, 25 bp, Saccharomyces pastorianus
tccaacaaatttagacgccgcagct

SEQ ID NO: 101423 - DNA, 25 bp, Saccharomyces pastorianus
atttagacgccgcagctgcaggtac

SEQ ID NO: 101424 - DNA, 25 bp, Saccharomyces pastorianus
gaaatctgcacacttgcttatgctt

SEQ ID NO: 101425 - DNA, 25 bp, Saccharomyces pastorianus
ctggcagggatcgtgtaggtcaaaa

SEQ ID NO: 101426 - DNA, 25 bp, Saccharomyces pastorianus
ttgcccttgcttaacatgttctgta

SEQ ID NO: 101427 - DNA, 25 bp, Saccharomyces pastorianus
ttatactgtgatacttgcccttgct

SEQ ID NO: 101428 - DNA, 25 bp, Saccharomyces pastorianus
agcatctcgttccaattgcatgaaa

SEQ ID NO: 101429 - DNA, 25 bp, Saccharomyces pastorianus
tgcccacgttgcaatgacggtgatt

SEQ ID NO: 101430 - DNA, 25 bp, Saccharomyces pastorianus
gatcaacatgactttcagcctgaag

SEQ ID NO: 101431 - DNA, 25 bp, Saccharomyces pastorianus
gggaataaccgtccggcaattcagc

SEQ ID NO: 101432 - DNA, 25 bp, Saccharomyces pastorianus
gttagcgacactagcagcatctcgt

SEQ ID NO: 101433 - DNA, 25 bp, Saccharomyces pastorianus
gaattgtttcaatggcggttgccca

SEQ ID NO: 101434 - DNA, 25 bp, Saccharomyces pastorianus
atgggactcctcgacatttaacgaa

SEQ ID NO: 101435 - DNA, 25 bp, Saccharomyces pastorianus
ggcatcttgctgtccttagatttgt

SEQ ID NO: 101436 - DNA, 25 bp, Saccharomyces pastorianus
gctcccacgtctctgattattgaag

SEQ ID NO: 101437 - DNA, 25 bp, Saccharomyces pastorianus
aaggtgggtgcatctatcaaacaag

SEQ ID NO: 101438 - DNA, 25 bp, Saccharomyces pastorianus
gtgaattgtccgtggaggtccccga

SEQ ID NO: 101439 - DNA, 25 bp, Saccharomyces pastorianus
aaatgcattatccatgcccaggatt

SEQ ID NO: 101440 - DNA, 25 bp, Saccharomyces pastorianus
aaacactttttctgcgctctcaagt

SEQ ID NO: 101441 - DNA, 25 bp, Saccharomyces pastorianus
tgcaataagcagcaggtccttcttt

SEQ ID NO: 101442 - DNA, 25 bp, Saccharomyces pastorianus
aggtccttctttttgctgccaaatt

SEQ ID NO: 101443 - DNA, 25 bp, Saccharomyces pastorianus
gggtctttaccactttatatatctc

SEQ ID NO: 101444 - DNA, 25 bp, Saccharomyces pastorianus
gaggtccccgattttttgcacttgg

SEQ ID NO: 101445 - DNA, 25 bp, Saccharomyces pastorianus
tgagaaaattccatccaccagagcc

SEQ ID NO: 101446 - DNA, 25 bp, Saccharomyces pastorianus
gtgccatctgtaggaggcgattacc

SEQ ID NO: 101447 - DNA, 25 bp, Saccharomyces pastorianus
tacttgggtggacaactctaagatc

SEQ ID NO: 101448 - DNA, 25 bp, Saccharomyces pastorianus
acaagggcatgttcgcgtgggtcca

SEQ ID NO: 101449 - DNA, 25 bp, Saccharomyces pastorianus
gtgatattcgtcgtcttgccaataa

SEQ ID NO: 101450 - DNA, 25 bp, Saccharomyces pastorianus
aaattatcattattacctcccaccg

SEQ ID NO: 101451 - DNA, 25 bp, Saccharomyces pastorianus
aaagttactgttagtgccatctgta

SEQ ID NO: 101452 - DNA, 25 bp, Saccharomyces pastorianus
aaggccaccgggacactcaggtcat

SEQ ID NO: 101453 - DNA, 25 bp, Saccharomyces pastorianus
agctatacgctatgggtgtcctgac

SEQ ID NO: 101454 - DNA, 25 bp, Saccharomyces pastorianus
ccgatccatttcgtcgcaaacatga

SEQ ID NO: 101455 - DNA, 25 bp, Saccharomyces pastorianus
gatccagcctacctcgtaacgagaa

SEQ ID NO: 101456 - DNA, 25 bp, Saccharomyces pastorianus
gggtccaaatttgatcaacgatcca

SEQ ID NO: 101457 - DNA, 25 bp, Saccharomyces pastorianus
gagacagatgttgtacagccaccaa

SEQ ID NO: 101458 - DNA, 25 bp, Saccharomyces pastorianus
tggtaatgaccaacccttcggattt

SEQ ID NO: 101459 - DNA, 25 bp, Saccharomyces pastorianus
aaacgatgcctattatgctccacag

SEQ ID NO: 101460 - DNA, 25 bp, Saccharomyces pastorianus
tttagctcaatcagcttcttcgcat

SEQ ID NO: 101461 - DNA, 25 bp, Saccharomyces pastorianus
gaactgcgttaaatccggtcgatca

SEQ ID NO: 101462 - DNA, 25 bp, Saccharomyces pastorianus
ggttccttcaccttatcaacttaga

SEQ ID NO: 101463 - DNA, 25 bp, Saccharomyces pastorianus
taagccagcaggttctttcagaagt

SEQ ID NO: 101464 - DNA, 25 bp, Saccharomyces pastorianus
ataatcatcctcagaccctggaaac

SEQ ID NO: 101465 - DNA, 25 bp, Saccharomyces pastorianus
aagtgtaagcgcaaccaattcaaga

SEQ ID NO: 101466 - DNA, 25 bp, Saccharomyces pastorianus
tcttcgcattcattgacctctttta

SEQ ID NO: 101467 - DNA, 25 bp, Saccharomyces pastorianus
gaattaccaactcccgcatatttag

SEQ ID NO: 101468 - DNA, 25 bp, Saccharomyces pastorianus
tagaagagcacagcaattcccaccg

SEQ ID NO: 101469 - DNA, 25 bp, Saccharomyces pastorianus
attcccaccgggagtagattctttg

SEQ ID NO: 101470 - DNA, 25 bp, Saccharomyces pastorianus
accggcgaattcttatttgatccaa

SEQ ID NO: 101471 - DNA, 25 bp, Saccharomyces pastorianus
acaggatttcttttgattgctttct

SEQ ID NO: 101472 - DNA, 25 bp, Saccharomyces pastorianus
gaggcaatcaatagttttcttcgta

SEQ ID NO: 101473 - DNA, 25 bp, Saccharomyces pastorianus
ccacaggctggtcatttgatcctaa

SEQ ID NO: 101474 - DNA, 25 bp, Saccharomyces pastorianus
ggccttactgccgaacgactggaag

SEQ ID NO: 101475 - DNA, 25 bp, Saccharomyces pastorianus
tgaatctgccaattaccggcgaatt

SEQ ID NO: 101476 - DNA, 25 bp, Saccharomyces pastorianus
gaattttcgatcctcaagatccgta

SEQ ID NO: 101477 - DNA, 25 bp, Saccharomyces pastorianus
tattcgcctggtgcttactgatata

SEQ ID NO: 101478 - DNA, 25 bp, Saccharomyces pastorianus
gaagagtgctccactaaacgttttt

SEQ ID NO: 101479 - DNA, 25 bp, Saccharomyces pastorianus
gtggtccttatgctagttgcccata

SEQ ID NO: 101480 - DNA, 25 bp, Saccharomyces pastorianus
gggatagcgaccaaccttcagttac

SEQ ID NO: 101481 - DNA, 25 bp, Saccharomyces pastorianus
attgttgggtcagtggtggtcctta

SEQ ID NO: 101482 - DNA, 25 bp, Saccharomyces pastorianus
gtcaacttctaaatctggcagctca

SEQ ID NO: 101483 - DNA, 25 bp, Saccharomyces pastorianus
tcatccgggaccttagaggcttaca

SEQ ID NO: 101484 - DNA, 25 bp, Saccharomyces pastorianus
aattgcgttctcttgtactactttg

SEQ ID NO: 101485 - DNA, 25 bp, Saccharomyces pastorianus
atgaggaattcctccttctctgaca

SEQ ID NO: 101486 - DNA, 25 bp, Saccharomyces pastorianus
tttgtaacaatgatggtccccgcgt

SEQ ID NO: 101487 - DNA, 25 bp, Saccharomyces pastorianus
cttgagtgtattgagggtccccatt

SEQ ID NO: 101488 - DNA, 25 bp, Saccharomyces pastorianus
gaagcccattggaccagagatcgtt

SEQ ID NO: 101489 - DNA, 25 bp, Saccharomyces pastorianus
tttgccctactgtgtattgtcgttt

SEQ ID NO: 101490 - DNA, 25 bp, Saccharomyces pastorianus
tgcatcaccgactgacaggctggta

SEQ ID NO: 101491 - DNA, 25 bp, Saccharomyces pastorianus
acacaatcaccagaagcagcagcag

SEQ ID NO: 101492 - DNA, 25 bp, Saccharomyces pastorianus
ggatccgaagaggaaactccaacta

SEQ ID NO: 101493 - DNA, 25 bp, Saccharomyces pastorianus
gagattgcggcctttcgaattttta

SEQ ID NO: 101494 - DNA, 25 bp, Saccharomyces pastorianus
ggcttccatcctcaagactgatatt

SEQ ID NO: 101495 - DNA, 25 bp, Saccharomyces pastorianus
tcgtcacacaccactagcaatttgg

SEQ ID NO: 101496 - DNA, 25 bp, Saccharomyces pastorianus
gcagcaacaacgacaactaccatca

SEQ ID NO: 101497 - DNA, 25 bp, Saccharomyces pastorianus
aaacttgaagtcgtcacacaccact

SEQ ID NO: 101498 - DNA, 25 bp, Saccharomyces pastorianus
ggctggtatcaccatgctcattgaa

SEQ ID NO: 101499 - DNA, 25 bp, Saccharomyces pastorianus
agtgaccaatcagcacgcacggctt

SEQ ID NO: 101500 - DNA, 25 bp, Saccharomyces pastorianus
aaccttgctgccgattcagaggatg

SEQ ID NO: 101501 - DNA, 25 bp, Saccharomyces pastorianus
gaagccattttatcaaggtttcata

SEQ ID NO: 101502 - DNA, 25 bp, Saccharomyces pastorianus
atgtctgaattcttttgggatgtac

SEQ ID NO: 101503 - DNA, 25 bp, Saccharomyces pastorianus
attgttacacagctgcaattactga

SEQ ID NO: 101504 - DNA, 25 bp, Saccharomyces pastorianus
tacagaaaggccctggagttcccgc

SEQ ID NO: 101505 - DNA, 25 bp, Saccharomyces pastorianus
gcaaataattttcgacctcttcaaa

SEQ ID NO: 101506 - DNA, 25 bp, Saccharomyces pastorianus
ggtgcccgctactttattacagagg

SEQ ID NO: 101507 - DNA, 25 bp, Saccharomyces pastorianus
cgagcaggttaatttcgcagcttaa

SEQ ID NO: 101508 - DNA, 25 bp, Saccharomyces pastorianus
cccgcacatcgttctctgatgataa

SEQ ID NO: 101509 - DNA, 25 bp, Saccharomyces pastorianus
aagctaaccagcgtttgacacggaa

SEQ ID NO: 101510 - DNA, 25 bp, Saccharomyces pastorianus
ggaccatcgaaaacgggtgcccgct

SEQ ID NO: 101511 - DNA, 25 bp, Saccharomyces pastorianus
ttcacgcgcttgaaattctcaatag

SEQ ID NO: 101512 - DNA, 25 bp, Saccharomyces pastorianus
tagtcaatgatataccgggtggtgt

SEQ ID NO: 101513 - DNA, 25 bp, Saccharomyces pastorianus
ttttgaaccgttaaaattcgcattg

SEQ ID NO: 101514 - DNA, 25 bp, Saccharomyces pastorianus
gtacttatcgtcaccaaagcttcac

SEQ ID NO: 101515 - DNA, 25 bp, Saccharomyces pastorianus
aatcccaaatgacgtttctaagcag

SEQ ID NO: 101516 - DNA, 25 bp, Saccharomyces pastorianus
ggcatttttaaatacgtacttatcg

SEQ ID NO: 101517 - DNA, 25 bp, Saccharomyces pastorianus
gaatcaatttttcatctcaatgttg

SEQ ID NO: 101518 - DNA, 25 bp, Saccharomyces pastorianus
ggctctgttctaaaggcacatggta

SEQ ID NO: 101519 - DNA, 25 bp, Saccharomyces pastorianus
atgcacatttgaagacataatccca

SEQ ID NO: 101520 - DNA, 25 bp, Saccharomyces pastorianus
tctaagcaggaaaacggaggcattt

SEQ ID NO: 101521 - DNA, 25 bp, Saccharomyces pastorianus
ggtgtagatacaataggctctgttc

SEQ ID NO: 101522 - DNA, 25 bp, Saccharomyces pastorianus
atcgtcaccaaagcttcacaggtta

SEQ ID NO: 101523 - DNA, 25 bp, Saccharomyces pastorianus
atgatacctgtcttctgtatagcga

SEQ ID NO: 101524 - DNA, 25 bp, Saccharomyces pastorianus
gacgacccagtatgcatgccgaaga

SEQ ID NO: 101525 - DNA, 25 bp, Saccharomyces pastorianus
agactttcttcaccaatactttgta

SEQ ID NO: 101526 - DNA, 25 bp, Saccharomyces pastorianus
aaatcagacccatatcttcgtccag

SEQ ID NO: 101527 - DNA, 25 bp, Saccharomyces pastorianus
cttccgtttatcttagacgacccag

SEQ ID NO: 101528 - DNA, 25 bp, Saccharomyces pastorianus
ggacaaactatcctaagcctgggtt

SEQ ID NO: 101529 - DNA, 25 bp, Saccharomyces pastorianus
aatctgcaacagtatctcttccgtt

SEQ ID NO: 101530 - DNA, 25 bp, Saccharomyces pastorianus
gcaccgtccaaatactgcaatcgga

SEQ ID NO: 101531 - DNA, 25 bp, Saccharomyces pastorianus
atcacatgtacgcaagactttcttc

SEQ ID NO: 101532 - DNA, 25 bp, Saccharomyces pastorianus
gaacagcttcaacgtacctcttaag

SEQ ID NO: 101533 - DNA, 25 bp, Saccharomyces pastorianus
tgcaatcggactattctgcgctgat

SEQ ID NO: 101534 - DNA, 25 bp, Saccharomyces pastorianus
gtcgtcaccaccgtgtagtaattaa

SEQ ID NO: 101535 - DNA, 25 bp, Saccharomyces pastorianus
aactatcttctgaataccatgcttt

SEQ ID NO: 101536 - DNA, 25 bp, Saccharomyces pastorianus
tcagaagcaccgaggagagttccaa

SEQ ID NO: 101537 - DNA, 25 bp, Saccharomyces pastorianus
ggaacacagctcattaagtcaagat

SEQ ID NO: 101538 - DNA, 25 bp, Saccharomyces pastorianus
gtaaggcactaatggtttcacaaag

SEQ ID NO: 101539 - DNA, 25 bp, Saccharomyces pastorianus
gtatcagttctatggacagtgcaag

SEQ ID NO: 101540 - DNA, 25 bp, Saccharomyces pastorianus
gaaccctatggtgatcaaagtcgtc

SEQ ID NO: 101541 - DNA, 25 bp, Saccharomyces pastorianus
agattggacgatttgctggagagaa

SEQ ID NO: 101542 - DNA, 25 bp, Saccharomyces pastorianus
gaagttcaaaaatggcgtctgcagt

SEQ ID NO: 101543 - DNA, 25 bp, Saccharomyces pastorianus
gaaaactgtcggtgaaccctatggt

SEQ ID NO: 101544 - DNA, 25 bp, Saccharomyces pastorianus
gaaagcggaactcttcatcactaat

SEQ ID NO: 101545 - DNA, 25 bp, Saccharomyces pastorianus
gaactctgaattgggatgactctct

SEQ ID NO: 101546 - DNA, 25 bp, Saccharomyces pastorianus
caggtcgctttggagctttgttagc

SEQ ID NO: 101547 - DNA, 25 bp, Saccharomyces pastorianus
tagcgatgtcaaggccggattactc

SEQ ID NO: 101548 - DNA, 25 bp, Saccharomyces pastorianus
ggagcaaaccattagctctgtttaa

SEQ ID NO: 101549 - DNA, 25 bp, Saccharomyces pastorianus
agtggcgacgattctagtttaaaca

SEQ ID NO: 101550 - DNA, 25 bp, Saccharomyces pastorianus
gtccgcgcaacagtacgataatgaa

SEQ ID NO: 101551 - DNA, 25 bp, Saccharomyces pastorianus
taatgaagcacctggagctcgccaa

SEQ ID NO: 101552 - DNA, 25 bp, Saccharomyces pastorianus
atgactctctttcaggtacgcctga

SEQ ID NO: 101553 - DNA, 25 bp, Saccharomyces pastorianus
tagtaatagcgagtcgtccgcgcaa

SEQ ID NO: 101554 - DNA, 25 bp, Saccharomyces pastorianus
gggacgactcgtcagattcatccaa

SEQ ID NO: 101555 - DNA, 25 bp, Saccharomyces pastorianus
gcaaggatcagtctccaggtcgctt

SEQ ID NO: 101556 - DNA, 25 bp, Saccharomyces pastorianus
taagaatgttgaaccgcccatcgca

SEQ ID NO: 101557 - DNA, 25 bp, Saccharomyces pastorianus
gacaatgaaacttcttgggccaagg

SEQ ID NO: 101558 - DNA, 25 bp, Saccharomyces pastorianus
gggcagcattagtgacggttctata

SEQ ID NO: 101559 - DNA, 25 bp, Saccharomyces pastorianus
aactttaacattgcttccttccctg

SEQ ID NO: 101560 - DNA, 25 bp, Saccharomyces pastorianus
ctcagacagattttcccttaggctt

SEQ ID NO: 101561 - DNA, 25 bp, Saccharomyces pastorianus
tttcccttaggcttttattcacaga

SEQ ID NO: 101562 - DNA, 25 bp, Saccharomyces pastorianus
aacgggctacggacatctcagacag

SEQ ID NO: 101563 - DNA, 25 bp, Saccharomyces pastorianus
cttccctgtggttgaccatcagata

SEQ ID NO: 101564 - DNA, 25 bp, Saccharomyces pastorianus
tagaacatcctatcaacagccacat

SEQ ID NO: 101565 - DNA, 25 bp, Saccharomyces pastorianus
gaaaggtttggcttccgatataatt

SEQ ID NO: 101566 - DNA, 25 bp, Saccharomyces pastorianus
gaattcaggaaactgggctggtctt

SEQ ID NO: 101567 - DNA, 25 bp, Saccharomyces pastorianus
ggaggatactccgtttcacaggata

SEQ ID NO: 101568 - DNA, 25 bp, Saccharomyces pastorianus
ggagccaaccctgttacaaatataa

SEQ ID NO: 101569 - DNA, 25 bp, Saccharomyces pastorianus
aaaaatgcctttgagctcgatcaat

SEQ ID NO: 101570 - DNA, 25 bp, Saccharomyces pastorianus
tggttctaacaacccgttcacattg

SEQ ID NO: 101571 - DNA, 25 bp, Saccharomyces pastorianus
atagcgttatgacaacccctactag

SEQ ID NO: 101572 - DNA, 25 bp, Saccharomyces pastorianus
gacagttcaacctcaaaatttccct

SEQ ID NO: 101573 - DNA, 25 bp, Saccharomyces pastorianus
tggaatttcaggctcactacactca

SEQ ID NO: 101574 - DNA, 25 bp, Saccharomyces pastorianus
aaatttccctttctatccacaacag

SEQ ID NO: 101575 - DNA, 25 bp, Saccharomyces pastorianus
acaggatacaactgccgcttctaat

SEQ ID NO: 101576 - DNA, 25 bp, Saccharomyces pastorianus
gatcgatgaatattcctcagcgttt

SEQ ID NO: 101577 - DNA, 25 bp, Saccharomyces pastorianus
cagggaatcctgcacacgaaaatgt

SEQ ID NO: 101578 - DNA, 25 bp, Saccharomyces pastorianus
tcatccgtacgttttgcatttaggc

SEQ ID NO: 101579 - DNA, 25 bp, Saccharomyces pastorianus
gaaacatcttgttggcttctgtcaa

SEQ ID NO: 101580 - DNA, 25 bp, Saccharomyces pastorianus
aactcgtttctttgtctgaccgctg

SEQ ID NO: 101581 - DNA, 25 bp, Saccharomyces pastorianus
tgcatttaggcggttctggcaaagt

SEQ ID NO: 101582 - DNA, 25 bp, Saccharomyces pastorianus
gtagctatattctcagcggcgccga

SEQ ID NO: 101583 - DNA, 25 bp, Saccharomyces pastorianus
tgagacaggccccaagacggtgcat

SEQ ID NO: 101584 - DNA, 25 bp, Saccharomyces pastorianus
acaggatacggaatggcgactctat

SEQ ID NO: 101585 - DNA, 25 bp, Saccharomyces pastorianus
ctgctatctactgcgctgatttgga

SEQ ID NO: 101586 - DNA, 25 bp, Saccharomyces pastorianus
tggtcctttgtcatcaagccaagaa

SEQ ID NO: 101587 - DNA, 25 bp, Saccharomyces pastorianus
gctcaaaatttgtcgctgctatcta

SEQ ID NO: 101588 - DNA, 25 bp, Saccharomyces pastorianus
ctgaccgctggctatcaattgggta

SEQ ID NO: 101589 - DNA, 25 bp, Saccharomyces pastorianus
gaagcacagcttttggaggatacaa

SEQ ID NO: 101590 - DNA, 25 bp, Saccharomyces pastorianus
gatcagatcaaaatggcacgtgcca

SEQ ID NO: 101591 - DNA, 25 bp, Saccharomyces pastorianus
gaaacttcagggtattctcgagcag

SEQ ID NO: 101592 - DNA, 25 bp, Saccharomyces pastorianus
gtattctcgagcagtactgtgcgcc

SEQ ID NO: 101593 - DNA, 25 bp, Saccharomyces pastorianus
actgtgcgcctgatactgatatacg

SEQ ID NO: 101594 - DNA, 25 bp, Saccharomyces pastorianus
gtggtgtagacgctcaaatcaagaa

SEQ ID NO: 101595 - DNA, 25 bp, Saccharomyces pastorianus
ggaagtgtctgatccatcagtgaca

SEQ ID NO: 101596 - DNA, 25 bp, Saccharomyces pastorianus
aagcggctttctgttgatttggcaa

SEQ ID NO: 101597 - DNA, 25 bp, Saccharomyces pastorianus
aatgggttccatctgagaaacttca

SEQ ID NO: 101598 - DNA, 25 bp, Saccharomyces pastorianus
ggaaagactctccactttgacaaag

SEQ ID NO: 101599 - DNA, 25 bp, Saccharomyces pastorianus
tgataaatagttccatccgcctgcg

SEQ ID NO: 101600 - DNA, 25 bp, Saccharomyces pastorianus
ggatgaagacgctccacaaatcaat

SEQ ID NO: 101601 - DNA, 25 bp, Saccharomyces pastorianus
gatatcgatgcatccttagattaca

SEQ ID NO: 101602 - DNA, 25 bp, Saccharomyces pastorianus
agttcattgttctggacgtggattc

SEQ ID NO: 101603 - DNA, 25 bp, Saccharomyces pastorianus
ttatgtgcctgatgtagttcttgtg

SEQ ID NO: 101604 - DNA, 25 bp, Saccharomyces pastorianus
gggttatttcattgcaaactcgaat

SEQ ID NO: 101605 - DNA, 25 bp, Saccharomyces pastorianus
gttgctagaacatctgacttgggtg

SEQ ID NO: 101606 - DNA, 25 bp, Saccharomyces pastorianus
gatgtgacccagttggtggagttca

SEQ ID NO: 101607 - DNA, 25 bp, Saccharomyces pastorianus
gtgtcttagctgacattactgttgc

SEQ ID NO: 101608 - DNA, 25 bp, Saccharomyces pastorianus
gtctcatctcggtggtatttgtcat

SEQ ID NO: 101609 - DNA, 25 bp, Saccharomyces pastorianus
aaccgcgaagcaaatgtacctcctg

SEQ ID NO: 101610 - DNA, 25 bp, Saccharomyces pastorianus
aagtctactacgtcaggtctcatct

SEQ ID NO: 101611 - DNA, 25 bp, Saccharomyces pastorianus
gagtacagtcactttgagaaccttc

SEQ ID NO: 101612 - DNA, 25 bp, Saccharomyces pastorianus
agaccctgcctggactgattttaag

SEQ ID NO: 101613 - DNA, 25 bp, Saccharomyces pastorianus
tgaccaagatcaaccaagccgacaa

SEQ ID NO: 101614 - DNA, 25 bp, Saccharomyces pastorianus
atgctattttcgtggtcatacaaga

SEQ ID NO: 101615 - DNA, 25 bp, Saccharomyces pastorianus
acgtgtgtcgtctttgaatggtggc

SEQ ID NO: 101616 - DNA, 25 bp, Saccharomyces pastorianus
agcaatttttggtctagcctacctc

SEQ ID NO: 101617 - DNA, 25 bp, Saccharomyces pastorianus
gctggcgtacttcgtatagtcctga

SEQ ID NO: 101618 - DNA, 25 bp, Saccharomyces pastorianus
ccttcaatcagctggtaacgtctac

SEQ ID NO: 101619 - DNA, 25 bp, Saccharomyces pastorianus
gtctagcctacctctatgagtactt

SEQ ID NO: 101620 - DNA, 25 bp, Saccharomyces pastorianus
gtttgcaagtgggattctcattcat

SEQ ID NO: 101621 - DNA, 25 bp, Saccharomyces pastorianus
atgcgggccacgaccacagtgatat

SEQ ID NO: 101622 - DNA, 25 bp, Saccharomyces pastorianus
gtacgttactagtctttgacacaag

SEQ ID NO: 101623 - DNA, 25 bp, Saccharomyces pastorianus
gttatcgtttattggctacagcctc

SEQ ID NO: 101624 - DNA, 25 bp, Saccharomyces pastorianus
gttactagtctttgacacaagttta

SEQ ID NO: 101625 - DNA, 25 bp, Saccharomyces pastorianus
taaactacgttaacattacatgtat

SEQ ID NO: 101626 - DNA, 25 bp, Saccharomyces pastorianus
gtttattggctacagcctcagtaat

SEQ ID NO: 101627 - DNA, 25 bp, Saccharomyces pastorianus
tgacacaagtttatatatccccccc

SEQ ID NO: 101628 - DNA, 25 bp, Saccharomyces pastorianus
tatatccccccctttatgttatcgt

SEQ ID NO: 101629 - DNA, 25 bp, Saccharomyces pastorianus
gcactcgtacgttactagtctttga

SEQ ID NO: 101630 - DNA, 25 bp, Saccharomyces pastorianus
gtataatatttagcactcgtacgtt

SEQ ID NO: 101631 - DNA, 25 bp, Saccharomyces pastorianus
ctcgtacgttactagtctttgacac

SEQ ID NO: 101632 - DNA, 25 bp, Saccharomyces pastorianus
atttagcactcgtacgttactagtc

SEQ ID NO: 101633 - DNA, 25 bp, Saccharomyces pastorianus
gaatacccttcttcttcaattcttc

SEQ ID NO: 101634 - DNA, 25 bp, Saccharomyces pastorianus
cttcttcaattcttcgtaacgtcta

SEQ ID NO: 101635 - DNA, 25 bp, Saccharomyces pastorianus
aaccgtggtcagcagcgttcaagat

SEQ ID NO: 101636 - DNA, 25 bp, Saccharomyces pastorianus
aatggtcgaccttggattgagttct

SEQ ID NO: 101637 - DNA, 25 bp, Saccharomyces pastorianus
tgggaagtgagagttaccaccatcg

SEQ ID NO: 101638 - DNA, 25 bp, Saccharomyces pastorianus
ttgcccttagcttcattggccaaga

SEQ ID NO: 101639 - DNA, 25 bp, Saccharomyces pastorianus
gatgataatatcacccttttccaaa

SEQ ID NO: 101640 - DNA, 25 bp, Saccharomyces pastorianus
gattgagttctgttgtaagcacaaa

SEQ ID NO: 101641 - DNA, 25 bp, Saccharomyces pastorianus
aagcttcttcagaaccacctggcat

SEQ ID NO: 101642 - DNA, 25 bp, Saccharomyces pastorianus
caccgatgatagatttgcccttagc

SEQ ID NO: 101643 - DNA, 25 bp, Saccharomyces pastorianus
atcaaattttgacccatgacggcca

SEQ ID NO: 101644 - DNA, 25 bp, Saccharomyces pastorianus
atgtgcttctgacaacttgccagta

SEQ ID NO: 101645 - DNA, 25 bp, Saccharomyces pastorianus
cgctttgtctttctacgatgggtac

SEQ ID NO: 101646 - DNA, 25 bp, Saccharomyces pastorianus
caacaagttcttcgctgatgccgtc

SEQ ID NO: 101647 - DNA, 25 bp, Saccharomyces pastorianus
gatctgttttcttgggtcaaatcac

SEQ ID NO: 101648 - DNA, 25 bp, Saccharomyces pastorianus
aaagtcaattgcgttggctaccacc

SEQ ID NO: 101649 - DNA, 25 bp, Saccharomyces pastorianus
tgatgccgtcaccaaggctcaatct

SEQ ID NO: 101650 - DNA, 25 bp, Saccharomyces pastorianus
actactttggtgctcacactttcag

SEQ ID NO: 101651 - DNA, 25 bp, Saccharomyces pastorianus
attagagcctccaaggtcttaccag

SEQ ID NO: 101652 - DNA, 25 bp, Saccharomyces pastorianus
gttgatccgtgaagctgctgctact

SEQ ID NO: 101653 - DNA, 25 bp, Saccharomyces pastorianus
tgctgctacttatggctggaaacta

SEQ ID NO: 101654 - DNA, 25 bp, Saccharomyces pastorianus
cagagtgtcgccagaatgtgcttct

SEQ ID NO: 101655 - DNA, 25 bp, Saccharomyces pastorianus
ttttctggaggcacaaagctttgga

SEQ ID NO: 101656 - DNA, 25 bp, Saccharomyces pastorianus
aggtttttgtctgagatcgcctctc

SEQ ID NO: 101657 - DNA, 25 bp, Saccharomyces pastorianus
gtggtattaacaggcactctcgata

SEQ ID NO: 101658 - DNA, 25 bp, Saccharomyces pastorianus
gactttactgcagtttatggccact

SEQ ID NO: 101659 - DNA, 25 bp, Saccharomyces pastorianus
aaagtccggcaggtcattggaatac

SEQ ID NO: 101660 - DNA, 25 bp, Saccharomyces pastorianus
ctgcacgatggttgcgacttatcat

SEQ ID NO: 101661 - DNA, 25 bp, Saccharomyces pastorianus
aagcacatggtcattatcgattcat

SEQ ID NO: 101662 - DNA, 25 bp, Saccharomyces pastorianus
gtagtaacggactggagacacccga

SEQ ID NO: 101663 - DNA, 25 bp, Saccharomyces pastorianus
gaagctggccaaagatcaagtcgca

SEQ ID NO: 101664 - DNA, 25 bp, Saccharomyces pastorianus
tcaagtcgcattgccttttctggag

SEQ ID NO: 101665 - DNA, 25 bp, Saccharomyces pastorianus
gagacacccgaaatgttgcaaggat

SEQ ID NO: 101666 - DNA, 25 bp, Saccharomyces pastorianus
aatccagagcctcagtacgctggta

SEQ ID NO: 101667 - DNA, 25 bp, Saccharomyces pastorianus
aagcccgacacgttgttattcatga

SEQ ID NO: 101668 - DNA, 25 bp, Saccharomyces pastorianus
ggagaacttattcccctgtgcctaa

SEQ ID NO: 101669 - DNA, 25 bp, Saccharomyces pastorianus
aatggagactagtgctgaccgggat

SEQ ID NO: 101670 - DNA, 25 bp, Saccharomyces pastorianus
aaatgcagtggaggccgtgtaccct

SEQ ID NO: 101671 - DNA, 25 bp, Saccharomyces pastorianus
ggaactacaaaccttgcttacacag

SEQ ID NO: 101672 - DNA, 25 bp, Saccharomyces pastorianus
gctggagctgctacgaaagcggctt

SEQ ID NO: 101673 - DNA, 25 bp, Saccharomyces pastorianus
gggctgcgaagcctgctaaaatgca

SEQ ID NO: 101674 - DNA, 25 bp, Saccharomyces pastorianus
gggagctctaactccgcaggaacta

SEQ ID NO: 101675 - DNA, 25 bp, Saccharomyces pastorianus
acgctggtacccgtcacaatgtagg

SEQ ID NO: 101676 - DNA, 25 bp, Saccharomyces pastorianus
gagaacctgggtcccgctctagaga

SEQ ID NO: 101677 - DNA, 25 bp, Saccharomyces pastorianus
cgagcaatccactttccaattttgt

SEQ ID NO: 101678 - DNA, 25 bp, Saccharomyces pastorianus
gcaaccttggctttggtattcaaca

SEQ ID NO: 101679 - DNA, 25 bp, Saccharomyces pastorianus
ggactgtataaaccacctcgtctta

SEQ ID NO: 101680 - DNA, 25 bp, Saccharomyces pastorianus
aacaaccgtgaagtgctacatggca

SEQ ID NO: 101681 - DNA, 25 bp, Saccharomyces pastorianus
taaattacctcctaacgtgaagcca

SEQ ID NO: 101682 - DNA, 25 bp, Saccharomyces pastorianus
ttatttggccagtatccacgagcaa

SEQ ID NO: 101683 - DNA, 25 bp, Saccharomyces pastorianus
actttgcgtggctgtgtcgagattt

SEQ ID NO: 101684 - DNA, 25 bp, Saccharomyces pastorianus
gggtactacctgctatttaattttg

SEQ ID NO: 101685 - DNA, 25 bp, Saccharomyces pastorianus
ttatctatcatcttgtccgttcttc

SEQ ID NO: 101686 - DNA, 25 bp, Saccharomyces pastorianus
gtcacaatacgctcctcagttgaag

SEQ ID NO: 101687 - DNA, 25 bp, Saccharomyces pastorianus
aattttgtgccattccccaagttat

SEQ ID NO: 101688 - DNA, 25 bp, Saccharomyces pastorianus
cgatttgggtcgttacagattgacg

SEQ ID NO: 101689 - DNA, 25 bp, Saccharomyces pastorianus
cagattgacggagagagggccacat

SEQ ID NO: 101690 - DNA, 25 bp, Saccharomyces pastorianus
cgtcgctggcgaggagagattctcc

SEQ ID NO: 101691 - DNA, 25 bp, Saccharomyces pastorianus
gtaccgatgggtataatgcatttca

SEQ ID NO: 101692 - DNA, 25 bp, Saccharomyces pastorianus
gagttgcctaaggactttgcgtcgc

SEQ ID NO: 101693 - DNA, 25 bp, Saccharomyces pastorianus
gaaaagcagaccacggtgataacac

SEQ ID NO: 101694 - DNA, 25 bp, Saccharomyces pastorianus
aacaccgcttgggatgatgatgctg

SEQ ID NO: 101695 - DNA, 25 bp, Saccharomyces pastorianus
gacggcgaaactttaatacgatttg

SEQ ID NO: 101696 - DNA, 25 bp, Saccharomyces pastorianus
agggccacattgtttgtcggcaaga

SEQ ID NO: 101697 - DNA, 25 bp, Saccharomyces pastorianus
ggttcagtgaacaggacggcgaaac

SEQ ID NO: 101698 - DNA, 25 bp, Saccharomyces pastorianus
gtgacaaagctagacgtaccgatgg

SEQ ID NO: 101699 - DNA, 25 bp, Saccharomyces pastorianus
tgcgctactatgcataggctcgcta

SEQ ID NO: 101700 - DNA, 25 bp, Saccharomyces pastorianus
gtaagccaatcatctttatctgtcc

SEQ ID NO: 101701 - DNA, 25 bp, Saccharomyces pastorianus
ggaagagacccactataatgctaca

SEQ ID NO: 101702 - DNA, 25 bp, Saccharomyces pastorianus
gcaagttggcaaaactccgtgcaat

SEQ ID NO: 101703 - DNA, 25 bp, Saccharomyces pastorianus
ataccttgtggtgactgcgctacta

SEQ ID NO: 101704 - DNA, 25 bp, Saccharomyces pastorianus
taggctcgctaatcttgttcaaatg

SEQ ID NO: 101705 - DNA, 25 bp, Saccharomyces pastorianus
tcatccaacggttttcttccggtga

SEQ ID NO: 101706 - DNA, 25 bp, Saccharomyces pastorianus
ttatctgtcctcactgtaaccacaa

SEQ ID NO: 101707 - DNA, 25 bp, Saccharomyces pastorianus
aatcatcagcgtactggcaggcggt

SEQ ID NO: 101708 - DNA, 25 bp, Saccharomyces pastorianus
attggactcaacaagttcgctctct

SEQ ID NO: 101709 - DNA, 25 bp, Saccharomyces pastorianus
acgacgatgccatggtacttctaga

SEQ ID NO: 101710 - DNA, 25 bp, Saccharomyces pastorianus
aaagtactgcagagcctgactctct

SEQ ID NO: 101711 - DNA, 25 bp, Saccharomyces pastorianus
aaaccagccttcatcattgttgcat

SEQ ID NO: 101712 - DNA, 25 bp, Saccharomyces pastorianus
gggaacatgagtttacctccaaaga

SEQ ID NO: 101713 - DNA, 25 bp, Saccharomyces pastorianus
gaacaacctcttcccttaaatcaag

SEQ ID NO: 101714 - DNA, 25 bp, Saccharomyces pastorianus
agggctcgatagaccttaagtcgtt

SEQ ID NO: 101715 - DNA, 25 bp, Saccharomyces pastorianus
gaggaacacagtaacagccatttga

SEQ ID NO: 101716 - DNA, 25 bp, Saccharomyces pastorianus
cggtgatcgcgagaccacgctagaa

SEQ ID NO: 101717 - DNA, 25 bp, Saccharomyces pastorianus
tctctctcacgggataccagaacaa

SEQ ID NO: 101718 - DNA, 25 bp, Saccharomyces pastorianus
tacatcattccccatatcattcaag

SEQ ID NO: 101719 - DNA, 25 bp, Saccharomyces pastorianus
gattgcagctccagttcagaagttg

SEQ ID NO: 101720 - DNA, 25 bp, Saccharomyces pastorianus
aacatttgttaggttgtcacctgga

SEQ ID NO: 101721 - DNA, 25 bp, Saccharomyces pastorianus
gagaggatcttgcacaactatctat

SEQ ID NO: 101722 - DNA, 25 bp, Saccharomyces pastorianus
gaaattgctaatattctctcatcgc

SEQ ID NO: 101723 - DNA, 25 bp, Saccharomyces pastorianus
gatgtctggaagttggacagaacca

SEQ ID NO: 101724 - DNA, 25 bp, Saccharomyces pastorianus
acaactatctatgcaagagggtgaa

SEQ ID NO: 101725 - DNA, 25 bp, Saccharomyces pastorianus
ctgttgaaaagcttgaaccagattc

SEQ ID NO: 101726 - DNA, 25 bp, Saccharomyces pastorianus
gaaccagattcaattgtttatgcaa

SEQ ID NO: 101727 - DNA, 25 bp, Saccharomyces pastorianus
tctctcatcgcatttagaagctaat

SEQ ID NO: 101728 - DNA, 25 bp, Saccharomyces pastorianus
tgaagaaaatttacttccgttgtgg

SEQ ID NO: 101729 - DNA, 25 bp, Saccharomyces pastorianus
ttgcctgttctactcggtatacaag

SEQ ID NO: 101730 - DNA, 25 bp, Saccharomyces pastorianus
agaggagatcttgcctgttctactc

SEQ ID NO: 101731 - DNA, 25 bp, Saccharomyces pastorianus
caggatcaagcatcgcctgttgaaa

SEQ ID NO: 101732 - DNA, 25 bp, Saccharomyces pastorianus
tggcgaaaaatctccttctccacaa

SEQ ID NO: 101733 - DNA, 25 bp, Saccharomyces pastorianus
atgccttgggtctttatctagctga

SEQ ID NO: 101734 - DNA, 25 bp, Saccharomyces pastorianus
ggatatggtcaaaggcacgtcacgt

SEQ ID NO: 101735 - DNA, 25 bp, Saccharomyces pastorianus
tcatcgaattattagccaacggcgc

SEQ ID NO: 101736 - DNA, 25 bp, Saccharomyces pastorianus
atgccttttcacgtaagggatccgt

SEQ ID NO: 101737 - DNA, 25 bp, Saccharomyces pastorianus
aatgctagccaagataactcccgta

SEQ ID NO: 101738 - DNA, 25 bp, Saccharomyces pastorianus
ggcacgtcacgtttttgaggttcaa

SEQ ID NO: 101739 - DNA, 25 bp, Saccharomyces pastorianus
aacatcccgatgtggccaataataa

SEQ ID NO: 101740 - DNA, 25 bp, Saccharomyces pastorianus
ccaacggcgctttacaattttcata

SEQ ID NO: 101741 - DNA, 25 bp, Saccharomyces pastorianus
gaaaaccttgtttcagacactctaa

SEQ ID NO: 101742 - DNA, 25 bp, Saccharomyces pastorianus
agcatcttaaggagggcctggtcaa

SEQ ID NO: 101743 - DNA, 25 bp, Saccharomyces pastorianus
gtctcatcgatcactttcaaagcat

SEQ ID NO: 101744 - DNA, 25 bp, Saccharomyces pastorianus
gtgcggctttgaacgatcctgctaa

SEQ ID NO: 101745 - DNA, 25 bp, Saccharomyces pastorianus
aagagcgtcctaaagaacccagatt

SEQ ID NO: 101746 - DNA, 25 bp, Saccharomyces pastorianus
tcaggcgttcatcgacactgcggca

SEQ ID NO: 101747 - DNA, 25 bp, Saccharomyces pastorianus
aagcaggttccttcaagttattgat

SEQ ID NO: 101748 - DNA, 25 bp, Saccharomyces pastorianus
aagggtgtacgttgtgtctcatcga

SEQ ID NO: 101749 - DNA, 25 bp, Saccharomyces pastorianus
catcaggataatttgcgtgcggctt

SEQ ID NO: 101750 - DNA, 25 bp, Saccharomyces pastorianus
aacatctggtctctgaagtgctgga

SEQ ID NO: 101751 - DNA, 25 bp, Saccharomyces pastorianus
tggaaagctcttatttgcccactac

SEQ ID NO: 101752 - DNA, 25 bp, Saccharomyces pastorianus
gaacccagattctcagtctcaagac

SEQ ID NO: 101753 - DNA, 25 bp, Saccharomyces pastorianus
tgtggccgctgaagacaaacatctg

SEQ ID NO: 101754 - DNA, 25 bp, Saccharomyces pastorianus
agcagatttcgtcaaccaatgcaga

SEQ ID NO: 101755 - DNA, 25 bp, Saccharomyces pastorianus
tgaacattgcaccacttttgatggg

SEQ ID NO: 101756 - DNA, 25 bp, Saccharomyces pastorianus
ttgggagactctaacgtggtacgtg

SEQ ID NO: 101757 - DNA, 25 bp, Saccharomyces pastorianus
gggttagcgacaagctccaacttca

SEQ ID NO: 101758 - DNA, 25 bp, Saccharomyces pastorianus
gaacgtcgaggccaccagaaagcaa

SEQ ID NO: 101759 - DNA, 25 bp, Saccharomyces pastorianus
ggctcgatgtattggttctgttgac

SEQ ID NO: 101760 - DNA, 25 bp, Saccharomyces pastorianus
ctatcgagagatgccaagctgttct

SEQ ID NO: 101761 - DNA, 25 bp, Saccharomyces pastorianus
gggccatcttaatagacacttcaaa

SEQ ID NO: 101762 - DNA, 25 bp, Saccharomyces pastorianus
aatgaagtgtctgcgcaaggtttag

SEQ ID NO: 101763 - DNA, 25 bp, Saccharomyces pastorianus
aagctgttcttagtggtgcggttaa

SEQ ID NO: 101764 - DNA, 25 bp, Saccharomyces pastorianus
cagaaagcaagtcgtcccctattta

SEQ ID NO: 101765 - DNA, 25 bp, Saccharomyces pastorianus
ttggtcgttgcctccagggtggaaa

SEQ ID NO: 101766 - DNA, 25 bp, Saccharomyces pastorianus
ggccctgtcattgcctcattaggaa

SEQ ID NO: 101767 - DNA, 25 bp, Saccharomyces pastorianus
gaaccttcgatgagtcgtttcattt

SEQ ID NO: 101768 - DNA, 25 bp, Saccharomyces pastorianus
ttggcggttttcagaagtgtccctt

SEQ ID NO: 101769 - DNA, 25 bp, Saccharomyces pastorianus
ggctctgtcaggtacgatctttaca

SEQ ID NO: 101770 - DNA, 25 bp, Saccharomyces pastorianus
gagaacttgaccaccaatgactgct

SEQ ID NO: 101771 - DNA, 25 bp, Saccharomyces pastorianus
taggaataccatcatcgtctcatca

SEQ ID NO: 101772 - DNA, 25 bp, Saccharomyces pastorianus
aatgattggcgcttcatcacagttc

SEQ ID NO: 101773 - DNA, 25 bp, Saccharomyces pastorianus
gatatccccaatgtagtgcaatgta

SEQ ID NO: 101774 - DNA, 25 bp, Saccharomyces pastorianus
ggttcatgttatcttctattccttt

SEQ ID NO: 101775 - DNA, 25 bp, Saccharomyces pastorianus
gtgtcccttcatcaataatccaaat

SEQ ID NO: 101776 - DNA, 25 bp, Saccharomyces pastorianus
ggagacttaatcactgcatcgacat

SEQ ID NO: 101777 - DNA, 25 bp, Saccharomyces pastorianus
tattgcctcgccatggaagtgtaca

SEQ ID NO: 101778 - DNA, 25 bp, Saccharomyces pastorianus
tactattcgaccttcctggatatca

SEQ ID NO: 101779 - DNA, 25 bp, Saccharomyces pastorianus
ttattcgagattgactcccggttcg

SEQ ID NO: 101780 - DNA, 25 bp, Saccharomyces pastorianus
atgaccattcccaactcatgttaga

SEQ ID NO: 101781 - DNA, 25 bp, Saccharomyces pastorianus
tgcagtggcaagcttgtattctccc

SEQ ID NO: 101782 - DNA, 25 bp, Saccharomyces pastorianus
gtattctcccacttatctttacaga

SEQ ID NO: 101783 - DNA, 25 bp, Saccharomyces pastorianus
aggtggtccaatccgcaatttagca

SEQ ID NO: 101784 - DNA, 25 bp, Saccharomyces pastorianus
agacgtctcccgcaaggatattttc

SEQ ID NO: 101785 - DNA, 25 bp, Saccharomyces pastorianus
gtagtagccatcaacggacgcatat

SEQ ID NO: 101786 - DNA, 25 bp, Saccharomyces pastorianus
agaaacatagtcctgtgctcacttc

SEQ ID NO: 101787 - DNA, 25 bp, Saccharomyces pastorianus
cagtcgttagccatgttaccacaag

SEQ ID NO: 101788 - DNA, 25 bp, Saccharomyces pastorianus
aggtgcctctatatcttctgcacag

SEQ ID NO: 101789 - DNA, 25 bp, Saccharomyces pastorianus
ggaccgtattcctttatgcgaacag

SEQ ID NO: 101790 - DNA, 25 bp, Saccharomyces pastorianus
gtaccacattcctcaatgggttcca

SEQ ID NO: 101791 - DNA, 25 bp, Saccharomyces pastorianus
gtcagacgtagccataccgaatttg

SEQ ID NO: 101792 - DNA, 25 bp, Saccharomyces pastorianus
tagatggtgccacagcgacatccat

SEQ ID NO: 101793 - DNA, 25 bp, Saccharomyces pastorianus
caagataatccgtcaactactaccc

SEQ ID NO: 101794 - DNA, 25 bp, Saccharomyces pastorianus
aacgccattgctaatgctaggtcag

SEQ ID NO: 101795 - DNA, 25 bp, Saccharomyces pastorianus
ttggccaaaccattcacgagggatg

SEQ ID NO: 101796 - DNA, 25 bp, Saccharomyces pastorianus
ttctgcacagcatgttcaacaaggt

SEQ ID NO: 101797 - DNA, 25 bp, Saccharomyces pastorianus
aattttccatgctcagcagcagcag

SEQ ID NO: 101798 - DNA, 25 bp, Saccharomyces pastorianus
aaagaataccctacactactcaaag

SEQ ID NO: 101799 - DNA, 25 bp, Saccharomyces pastorianus
ttcaactggaaagcccgtcaattgg

SEQ ID NO: 101800 - DNA, 25 bp, Saccharomyces pastorianus
gcacgttacctcatatggctatcga

SEQ ID NO: 101801 - DNA, 25 bp, Saccharomyces pastorianus
ttggattatccaaaggccccaataa

SEQ ID NO: 101802 - DNA, 25 bp, Saccharomyces pastorianus
gacaccgtgatagcgaatttcaact

SEQ ID NO: 101803 - DNA, 25 bp, Saccharomyces pastorianus
gaaatcgaacaatgcattcacacct

SEQ ID NO: 101804 - DNA, 25 bp, Saccharomyces pastorianus
gacagactccggtaagatttctttg

SEQ ID NO: 101805 - DNA, 25 bp, Saccharomyces pastorianus
gcattcacaccttatccgattttaa

SEQ ID NO: 101806 - DNA, 25 bp, Saccharomyces pastorianus
agattcctcttacatggacaccgtg

SEQ ID NO: 101807 - DNA, 25 bp, Saccharomyces pastorianus
acctcatatggctatcgaatctccc

SEQ ID NO: 101808 - DNA, 25 bp, Saccharomyces pastorianus
aatgaacctaaacctgtgactggag

SEQ ID NO: 101809 - DNA, 25 bp, Saccharomyces pastorianus
aagcatcaggcctgcctttatcaaa

SEQ ID NO: 101810 - DNA, 25 bp, Saccharomyces pastorianus
gggttcctcctgaaatcatgggtgt

SEQ ID NO: 101811 - DNA, 25 bp, Saccharomyces pastorianus
catcccttgggttgtactagcgcaa

SEQ ID NO: 101812 - DNA, 25 bp, Saccharomyces pastorianus
taaatgaagcattcgcggcccaagc

SEQ ID NO: 101813 - DNA, 25 bp, Saccharomyces pastorianus
taaatctgcctgtgctaggtcgcta

SEQ ID NO: 101814 - DNA, 25 bp, Saccharomyces pastorianus
aagtcctggaagctactggcttgca

SEQ ID NO: 101815 - DNA, 25 bp, Saccharomyces pastorianus
caggtccgtagccaaccagttaaat

SEQ ID NO: 101816 - DNA, 25 bp, Saccharomyces pastorianus
gaggaaccacaactgcgggcaatgc

SEQ ID NO: 101817 - DNA, 25 bp, Saccharomyces pastorianus
aacgtcactgcggagtcgctttcaa

SEQ ID NO: 101818 - DNA, 25 bp, Saccharomyces pastorianus
ggcccaagcattatactgcatccat

SEQ ID NO: 101819 - DNA, 25 bp, Saccharomyces pastorianus
gcaggtgtcttgttagcccgcaggt

SEQ ID NO: 101820 - DNA, 25 bp, Saccharomyces pastorianus
gaagatttagttactcagtttcaag

SEQ ID NO: 101821 - DNA, 25 bp, Saccharomyces pastorianus
tattacggtgaagatcccaacgata

SEQ ID NO: 101822 - DNA, 25 bp, Saccharomyces pastorianus
cacgttgaatcagagtgtcatgaat

SEQ ID NO: 101823 - DNA, 25 bp, Saccharomyces pastorianus
acagggatgctgttgatctactcat

SEQ ID NO: 101824 - DNA, 25 bp, Saccharomyces pastorianus
gatctactcatatctaaattacgcg

SEQ ID NO: 101825 - DNA, 25 bp, Saccharomyces pastorianus
ttacgcgaagtaaagaaggacccag

SEQ ID NO: 101826 - DNA, 25 bp, Saccharomyces pastorianus
agccatgtttaagaaatgtgccaag

SEQ ID NO: 101827 - DNA, 25 bp, Saccharomyces pastorianus
gtcaagtttaagattaatcgggcca

SEQ ID NO: 101828 - DNA, 25 bp, Saccharomyces pastorianus
gaaggacccagaacctctaagaaga

SEQ ID NO: 101829 - DNA, 25 bp, Saccharomyces pastorianus
gatgaagatcacgttttactagaga

SEQ ID NO: 101830 - DNA, 25 bp, Saccharomyces pastorianus
ggagaacttagaccccagagatcaa

SEQ ID NO: 101831 - DNA, 25 bp, Saccharomyces pastorianus
ttcatgaatggagcgtcactgccgc

SEQ ID NO: 101832 - DNA, 25 bp, Saccharomyces pastorianus
gttttctgtggccattgggtccgca

SEQ ID NO: 101833 - DNA, 25 bp, Saccharomyces pastorianus
ccattatctccaacacgctgtatta

SEQ ID NO: 101834 - DNA, 25 bp, Saccharomyces pastorianus
gaaagtgacaccttctgtagctaag

SEQ ID NO: 101835 - DNA, 25 bp, Saccharomyces pastorianus
aattgcctgacccaaccacggagag

SEQ ID NO: 101836 - DNA, 25 bp, Saccharomyces pastorianus
taagacggtctccagcaactaaaaa

SEQ ID NO: 101837 - DNA, 25 bp, Saccharomyces pastorianus
taaggctgtgctagtgcgtggttcc

SEQ ID NO: 101838 - DNA, 25 bp, Saccharomyces pastorianus
ggtccgcactatctttgatcttcaa

SEQ ID NO: 101839 - DNA, 25 bp, Saccharomyces pastorianus
cattctctaccagcgctagattcaa

SEQ ID NO: 101840 - DNA, 25 bp, Saccharomyces pastorianus
gtcactgccgctggccaaaagattg

SEQ ID NO: 101841 - DNA, 25 bp, Saccharomyces pastorianus
tcatcccttgggtttacggtgaact

SEQ ID NO: 101842 - DNA, 25 bp, Saccharomyces pastorianus
gacaagaaggcgctttctttctctc

SEQ ID NO: 101843 - DNA, 25 bp, Saccharomyces pastorianus
cttttacttttatgtcgtggactgg

SEQ ID NO: 101844 - DNA, 25 bp, Saccharomyces pastorianus
gcctcatcttcagcgacactattat

SEQ ID NO: 101845 - DNA, 25 bp, Saccharomyces pastorianus
aatggcctgttcttgtctttcaaaa

SEQ ID NO: 101846 - DNA, 25 bp, Saccharomyces pastorianus
tcggcaaccctttagttactagtct

SEQ ID NO: 101847 - DNA, 25 bp, Saccharomyces pastorianus
ctttctttctctccacaatgatcaa

SEQ ID NO: 101848 - DNA, 25 bp, Saccharomyces pastorianus
ggttgggtcaggcaattctctgtca

SEQ ID NO: 101849 - DNA, 25 bp, Saccharomyces pastorianus
agaaggtgtcactttcggcaaccct

SEQ ID NO: 101850 - DNA, 25 bp, Saccharomyces pastorianus
agcaaggaaccacgcactagcacag

SEQ ID NO: 101851 - DNA, 25 bp, Saccharomyces pastorianus
ttctctgtcaattctcaatggcctg

SEQ ID NO: 101852 - DNA, 25 bp, Saccharomyces pastorianus
ttcaaaacgatcttggcctcatctt

SEQ ID NO: 101853 - DNA, 25 bp, Saccharomyces pastorianus
caggcacattaatcagtggccatta

SEQ ID NO: 101854 - DNA, 25 bp, Saccharomyces pastorianus
aacaccgtcgtaacatatccattga

SEQ ID NO: 101855 - DNA, 25 bp, Saccharomyces pastorianus
aagaggtccagttccagtacaccgt

SEQ ID NO: 101856 - DNA, 25 bp, Saccharomyces pastorianus
gagacggtattactgagggccataa

SEQ ID NO: 101857 - DNA, 25 bp, Saccharomyces pastorianus
tattgggcgttctaaatggtactat

SEQ ID NO: 101858 - DNA, 25 bp, Saccharomyces pastorianus
atacaggaaccaagcgtcgtcatct

SEQ ID NO: 101859 - DNA, 25 bp, Saccharomyces pastorianus
gaaaggtccagatcacccttcagga

SEQ ID NO: 101860 - DNA, 25 bp, Saccharomyces pastorianus
agtggttaaccatacaggcacatta

SEQ ID NO: 101861 - DNA, 25 bp, Saccharomyces pastorianus
gtcggttttttacattacatacagg

SEQ ID NO: 101862 - DNA, 25 bp, Saccharomyces pastorianus
gtggccattacacgtcactggtaaa

SEQ ID NO: 101863 - DNA, 25 bp, Saccharomyces pastorianus
gtacaccgttcagtactggtggtaa

SEQ ID NO: 101864 - DNA, 25 bp, Saccharomyces pastorianus
aaactatgtggctttattggctcaa

SEQ ID NO: 101865 - DNA, 25 bp, Saccharomyces pastorianus
gaatattgtagaactcccttggact

SEQ ID NO: 101866 - DNA, 25 bp, Saccharomyces pastorianus
ccgttcctctatcatttgcgaattt

SEQ ID NO: 101867 - DNA, 25 bp, Saccharomyces pastorianus
aataaactgcctttgtccttagccg

SEQ ID NO: 101868 - DNA, 25 bp, Saccharomyces pastorianus
ggcctaattactattgcaggtggta

SEQ ID NO: 101869 - DNA, 25 bp, Saccharomyces pastorianus
ccacttcttgttcacttcggataat

SEQ ID NO: 101870 - DNA, 25 bp, Saccharomyces pastorianus
ggcggattccataacctgaaacctt

SEQ ID NO: 101871 - DNA, 25 bp, Saccharomyces pastorianus
tcagatatccattcacaatcggtga

SEQ ID NO: 101872 - DNA, 25 bp, Saccharomyces pastorianus
ataacgtaatctactctagcgagga

SEQ ID NO: 101873 - DNA, 25 bp, Saccharomyces pastorianus
gtgcatgccaccgtcaaagttatgg

SEQ ID NO: 101874 - DNA, 25 bp, Saccharomyces pastorianus
aagttgtcgaagttggcggattcca

SEQ ID NO: 101875 - DNA, 25 bp, Saccharomyces pastorianus
atttccacttggtgtacatcctggg

SEQ ID NO: 101876 - DNA, 25 bp, Saccharomyces pastorianus
ggatcgcccggtcgagaacagactt

SEQ ID NO: 101877 - DNA, 25 bp, Saccharomyces pastorianus
tctttccctgggtcaacattcaaaa

SEQ ID NO: 101878 - DNA, 25 bp, Saccharomyces pastorianus
ggcactgatcttccagtctttgaag

SEQ ID NO: 101879 - DNA, 25 bp, Saccharomyces pastorianus
tactggataagtctctggtgcgcga

SEQ ID NO: 101880 - DNA, 25 bp, Saccharomyces pastorianus
atcctatacgatattgccgtcaccg

SEQ ID NO: 101881 - DNA, 25 bp, Saccharomyces pastorianus
gaacagacttcaacacgattcccaa

SEQ ID NO: 101882 - DNA, 25 bp, Saccharomyces pastorianus
gcgttccgccgtcaggtaacaatat

SEQ ID NO: 101883 - DNA, 25 bp, Saccharomyces pastorianus
gtaccacgctggtccaaagtgtgta

SEQ ID NO: 101884 - DNA, 25 bp, Saccharomyces pastorianus
tctgaagaagttccccgtggtgcaa

SEQ ID NO: 101885 - DNA, 25 bp, Saccharomyces pastorianus
cgtggtgcaacatttctggttcggc

SEQ ID NO: 101886 - DNA, 25 bp, Saccharomyces pastorianus
gcagtggacgagctccgcaagtaat

SEQ ID NO: 101887 - DNA, 25 bp, Saccharomyces pastorianus
agtgcctcgttagtgatcgattcaa

SEQ ID NO: 101888 - DNA, 25 bp, Saccharomyces pastorianus
aattattcgcgatttctctcaagca

SEQ ID NO: 101889 - DNA, 25 bp, Saccharomyces pastorianus
tttctcaactgcatagctccgtgaa

SEQ ID NO: 101890 - DNA, 25 bp, Saccharomyces pastorianus
atgcccatttcattgctagttctga

SEQ ID NO: 101891 - DNA, 25 bp, Saccharomyces pastorianus
gagttactcatcaaacttccgaagg

SEQ ID NO: 101892 - DNA, 25 bp, Saccharomyces pastorianus
agatcttttctaaccttgtgtaaca

SEQ ID NO: 101893 - DNA, 25 bp, Saccharomyces pastorianus
agctccgtgaaggacctggatgcca

SEQ ID NO: 101894 - DNA, 25 bp, Saccharomyces pastorianus
aaagcagccgcaaacattctacaac

SEQ ID NO: 101895 - DNA, 25 bp, Saccharomyces pastorianus
aggttaatgaccctagtgcctcgtt

SEQ ID NO: 101896 - DNA, 25 bp, Saccharomyces pastorianus
gcagcgccagaatatccgatcacaa

SEQ ID NO: 101897 - DNA, 25 bp, Saccharomyces pastorianus
gccaacaacaacttgagcctgcatt

SEQ ID NO: 101898 - DNA, 25 bp, Saccharomyces pastorianus
gatgctatcgccaaactgaaccaaa

SEQ ID NO: 101899 - DNA, 25 bp, Saccharomyces pastorianus
attgccgccgcgtctaaaggcagtg

SEQ ID NO: 101900 - DNA, 25 bp, Saccharomyces pastorianus
aattacttggaagacgcacgtcgat

SEQ ID NO: 101901 - DNA, 25 bp, Saccharomyces pastorianus
attttgtcatcgatgctacctcatg

SEQ ID NO: 101902 - DNA, 25 bp, Saccharomyces pastorianus
aaggtcggtaatcactattcgccag

SEQ ID NO: 101903 - DNA, 25 bp, Saccharomyces pastorianus
aaatttgcgatttgtctgaccacat

SEQ ID NO: 101904 - DNA, 25 bp, Saccharomyces pastorianus
gatactgtcgtcgaagcagcaacaa

SEQ ID NO: 101905 - DNA, 25 bp, Saccharomyces pastorianus
aattgtacgctttattttgtcatcg

SEQ ID NO: 101906 - DNA, 25 bp, Saccharomyces pastorianus
ctacctcatggttaagacactttgc

SEQ ID NO: 101907 - DNA, 25 bp, Saccharomyces pastorianus
attcttcgataaaattgccgccgcg

SEQ ID NO: 101908 - DNA, 25 bp, Saccharomyces pastorianus
gaaatcgacagcactgagccgcgaa

SEQ ID NO: 101909 - DNA, 25 bp, Saccharomyces pastorianus
gaaagtgccctccagacagggctta

SEQ ID NO: 101910 - DNA, 25 bp, Saccharomyces pastorianus
gtggactctcaaccaagcctatata

SEQ ID NO: 101911 - DNA, 25 bp, Saccharomyces pastorianus
gtcttctgtatcagggagcgaacct

SEQ ID NO: 101912 - DNA, 25 bp, Saccharomyces pastorianus
gaaaaagtcattctcgcaccttcaa

SEQ ID NO: 101913 - DNA, 25 bp, Saccharomyces pastorianus
aaggtactcgtaagcgcctgtcaga

SEQ ID NO: 101914 - DNA, 25 bp, Saccharomyces pastorianus
gcctaggatttgatcccactcatgg

SEQ ID NO: 101915 - DNA, 25 bp, Saccharomyces pastorianus
atttcccaagtactcaagtcttctg

SEQ ID NO: 101916 - DNA, 25 bp, Saccharomyces pastorianus
aattctgccaaagcatttttcgacg

SEQ ID NO: 101917 - DNA, 25 bp, Saccharomyces pastorianus
gttataaacgatctcttgcattaca

SEQ ID NO: 101918 - DNA, 25 bp, Saccharomyces pastorianus
acagggcttatccaacgcctaggat

SEQ ID NO: 101919 - DNA, 25 bp, Saccharomyces pastorianus
ggaagtacatctaaacggccaattg

SEQ ID NO: 101920 - DNA, 25 bp, Saccharomyces pastorianus
gtcggctgtcactggctttataaat

SEQ ID NO: 101921 - DNA, 25 bp, Saccharomyces pastorianus
gttttcagaacccattcacagcatc

SEQ ID NO: 101922 - DNA, 25 bp, Saccharomyces pastorianus
attcttctcctctaatacatcatct

SEQ ID NO: 101923 - DNA, 25 bp, Saccharomyces pastorianus
agagcggtacatcttctgatccaga

SEQ ID NO: 101924 - DNA, 25 bp, Saccharomyces pastorianus
cgcgggaagcttaacgtttcttgat

SEQ ID NO: 101925 - DNA, 25 bp, Saccharomyces pastorianus
gtcaaagcggcgattaacttttcca

SEQ ID NO: 101926 - DNA, 25 bp, Saccharomyces pastorianus
agcgctgctggtaacaaggccattc

SEQ ID NO: 101927 - DNA, 25 bp, Saccharomyces pastorianus
gacgtttccttcaatgacagccagt

SEQ ID NO: 101928 - DNA, 25 bp, Saccharomyces pastorianus
aatatcgtggatagtagcgctgctg

SEQ ID NO: 101929 - DNA, 25 bp, Saccharomyces pastorianus
tcacagcatcccaatctaatatcaa

SEQ ID NO: 101930 - DNA, 25 bp, Saccharomyces pastorianus
ggtctaggttctgtcaatcttgata

SEQ ID NO: 101931 - DNA, 25 bp, Saccharomyces pastorianus
gagtagaaacatccccacagtcaaa

SEQ ID NO: 101932 - DNA, 25 bp, Saccharomyces pastorianus
ctggtacagccacatcgagtagaaa

SEQ ID NO: 101933 - DNA, 25 bp, Saccharomyces pastorianus
aaggcgcgatttaggttatacctca

SEQ ID NO: 101934 - DNA, 25 bp, Saccharomyces pastorianus
tggagggcttgaacaactgcaggaa

SEQ ID NO: 101935 - DNA, 25 bp, Saccharomyces pastorianus
gctctaaccgcttttgctgacgata

SEQ ID NO: 101936 - DNA, 25 bp, Saccharomyces pastorianus
gcatcgttctcgacatgaaggtcta

SEQ ID NO: 101937 - DNA, 25 bp, Saccharomyces pastorianus
ttaggttatacctcacccattgtcg

SEQ ID NO: 101938 - DNA, 25 bp, Saccharomyces pastorianus
gcgatggccaagaagcattcgacaa

SEQ ID NO: 101939 - DNA, 25 bp, Saccharomyces pastorianus
cttctatatgtcttacaggtgctga

SEQ ID NO: 101940 - DNA, 25 bp, Saccharomyces pastorianus
attccttgtcttctaagcatcgttc

SEQ ID NO: 101941 - DNA, 25 bp, Saccharomyces pastorianus
tgcatctccttcttcaactgagcag

SEQ ID NO: 101942 - DNA, 25 bp, Saccharomyces pastorianus
gaagttcttcacaagctggttcact

SEQ ID NO: 101943 - DNA, 25 bp, Saccharomyces pastorianus
agtctcggtcctattgtcgtaacaa

SEQ ID NO: 101944 - DNA, 25 bp, Saccharomyces pastorianus
gctatacatacaaagtctcggtcct

SEQ ID NO: 101945 - DNA, 25 bp, Saccharomyces pastorianus
gacatactttgttactgcagcatac

SEQ ID NO: 101946 - DNA, 25 bp, Saccharomyces pastorianus
aaagctctgaattttccattgatga

SEQ ID NO: 101947 - DNA, 25 bp, Saccharomyces pastorianus
gaatacttttgtcttgcatgctctt

SEQ ID NO: 101948 - DNA, 25 bp, Saccharomyces pastorianus
ttggcctctttactttccttagatt

SEQ ID NO: 101949 - DNA, 25 bp, Saccharomyces pastorianus
agtctttaagtttgcggccctccat

SEQ ID NO: 101950 - DNA, 25 bp, Saccharomyces pastorianus
tagattcctctagcgacacaatcaa

SEQ ID NO: 101951 - DNA, 25 bp, Saccharomyces pastorianus
cttcagataaacttccactccgatg

SEQ ID NO: 101952 - DNA, 25 bp, Saccharomyces pastorianus
ggcccttttgttagtgttcttggat

SEQ ID NO: 101953 - DNA, 25 bp, Saccharomyces pastorianus
aatatctttgtccagagtctttaaa

SEQ ID NO: 101954 - DNA, 25 bp, Saccharomyces pastorianus
agatctctgaaaacctttaccgcgg

SEQ ID NO: 101955 - DNA, 25 bp, Saccharomyces pastorianus
gggcgtggcaactgtcgtgactaaa

SEQ ID NO: 101956 - DNA, 25 bp, Saccharomyces pastorianus
aagactcttgatgaactctccgatg

SEQ ID NO: 101957 - DNA, 25 bp, Saccharomyces pastorianus
aaatcgactatgtttccttagcaga

SEQ ID NO: 101958 - DNA, 25 bp, Saccharomyces pastorianus
tcaaatatgggcaccctacgttgat

SEQ ID NO: 101959 - DNA, 25 bp, Saccharomyces pastorianus
aaaacaccagcgaacagcagccaat

SEQ ID NO: 101960 - DNA, 25 bp, Saccharomyces pastorianus
gggacgtctctccagatcagaaatc

SEQ ID NO: 101961 - DNA, 25 bp, Saccharomyces pastorianus
tgtatccacagggaattccgctcga

SEQ ID NO: 101962 - DNA, 25 bp, Saccharomyces pastorianus
gactgaccgcgaaaaacccgatacg

SEQ ID NO: 101963 - DNA, 25 bp, Saccharomyces pastorianus
gaattggaattatccgaagcgaatt

SEQ ID NO: 101964 - DNA, 25 bp, Saccharomyces pastorianus
tgaggaattggtaacttcaacggaa

SEQ ID NO: 101965 - DNA, 25 bp, Saccharomyces pastorianus
gagcaattgtttccaaagggatctg

SEQ ID NO: 101966 - DNA, 25 bp, Saccharomyces pastorianus
agggatctggaattaacgagtctat

SEQ ID NO: 101967 - DNA, 25 bp, Saccharomyces pastorianus
gcgaattccaaatttgagctctcta

SEQ ID NO: 101968 - DNA, 25 bp, Saccharomyces pastorianus
attccagagaacttattagacagag

SEQ ID NO: 101969 - DNA, 25 bp, Saccharomyces pastorianus
atctcctacgagcaattgtttccaa

SEQ ID NO: 101970 - DNA, 25 bp, Saccharomyces pastorianus
tcaatcgtcattggaaaactctgaa

SEQ ID NO: 101971 - DNA, 25 bp, Saccharomyces pastorianus
gaaacgatacaagctacaccaacaa

SEQ ID NO: 101972 - DNA, 25 bp, Saccharomyces pastorianus
acgaacgattattagtagcccaaag

SEQ ID NO: 101973 - DNA, 25 bp, Saccharomyces pastorianus
gattttcatgaaggtatctcctacg

SEQ ID NO: 101974 - DNA, 25 bp, Saccharomyces pastorianus
caatgcgttcttttattctctggtt

SEQ ID NO: 101975 - DNA, 25 bp, Saccharomyces pastorianus
gttggtgatacttccatcgatttac

SEQ ID NO: 101976 - DNA, 25 bp, Saccharomyces pastorianus
aagagcgtatgaacattctgcaaaa

SEQ ID NO: 101977 - DNA, 25 bp, Saccharomyces pastorianus
gagacaagcgtttttggtagatcaa

SEQ ID NO: 101978 - DNA, 25 bp, Saccharomyces pastorianus
tcgatttaccagaagctacctgttt

SEQ ID NO: 101979 - DNA, 25 bp, Saccharomyces pastorianus
aggttcattgtctggtcttgctggc

SEQ ID NO: 101980 - DNA, 25 bp, Saccharomyces pastorianus
atgacgaaggtttcaatgcgttctt

SEQ ID NO: 101981 - DNA, 25 bp, Saccharomyces pastorianus
aggtcggtgatgacgctgacaattc

SEQ ID NO: 101982 - DNA, 25 bp, Saccharomyces pastorianus
atttggcatatgcttcacccagaga

SEQ ID NO: 101983 - DNA, 25 bp, Saccharomyces pastorianus
gggagaggttcaaatggccacaaaa

SEQ ID NO: 101984 - DNA, 25 bp, Saccharomyces pastorianus
ttctctggtttctaaggatacgcaa

SEQ ID NO: 101985 - DNA, 25 bp, Saccharomyces pastorianus
agctttgtacgactgactcttcttg

SEQ ID NO: 101986 - DNA, 25 bp, Saccharomyces pastorianus
taatttatccatcccttttgggcct

SEQ ID NO: 101987 - DNA, 25 bp, Saccharomyces pastorianus
cctggtctccaaatatctgtacact

SEQ ID NO: 101988 - DNA, 25 bp, Saccharomyces pastorianus
ttggctgccggattatccagcggaa

SEQ ID NO: 101989 - DNA, 25 bp, Saccharomyces pastorianus
ctgtacactcatcctgaatcttttg

SEQ ID NO: 101990 - DNA, 25 bp, Saccharomyces pastorianus
tttcttctgtaacctggtctccaaa

SEQ ID NO: 101991 - DNA, 25 bp, Saccharomyces pastorianus
ttgacttcagaatcgtagcaccatc

SEQ ID NO: 101992 - DNA, 25 bp, Saccharomyces pastorianus
agcaccatcgtttgttaccatgcaa

SEQ ID NO: 101993 - DNA, 25 bp, Saccharomyces pastorianus
gggcctaatgtgcttttcaccaaat

SEQ ID NO: 101994 - DNA, 25 bp, Saccharomyces pastorianus
atgttcaccaacactttggctgccg

SEQ ID NO: 101995 - DNA, 25 bp, Saccharomyces pastorianus
agtgttactggacgcactttgcaat

SEQ ID NO: 101996 - DNA, 25 bp, Saccharomyces pastorianus
tctgaagccgctgaagttctactaa

SEQ ID NO: 101997 - DNA, 25 bp, Saccharomyces pastorianus
gtgctctgagacaactgccaaccat

SEQ ID NO: 101998 - DNA, 25 bp, Saccharomyces pastorianus
ggtatctccacctcaggtttagatc

SEQ ID NO: 101999 - DNA, 25 bp, Saccharomyces pastorianus
aagaactgttcttggcggcggttgc

SEQ ID NO: 102000 - DNA, 25 bp, Saccharomyces pastorianus
gtagtcagctctgcatctgaagccg

SEQ ID NO: 102001 - DNA, 25 bp, Saccharomyces pastorianus
ggaaccattgccgacatgagacagt

SEQ ID NO: 102002 - DNA, 25 bp, Saccharomyces pastorianus
aaagaagtcccttgccgtggaggct

SEQ ID NO: 102003 - DNA, 25 bp, Saccharomyces pastorianus
gaagctgagagatccctgcatgacg

SEQ ID NO: 102004 - DNA, 25 bp, Saccharomyces pastorianus
atgacgcattgtccgtgttgtcaca

SEQ ID NO: 102005 - DNA, 25 bp, Saccharomyces pastorianus
gaagcttgtaccgtcgtcctaagag

SEQ ID NO: 102006 - DNA, 25 bp, Saccharomyces pastorianus
gtgctaccgaccaaacgcttgatga

SEQ ID NO: 102007 - DNA, 25 bp, Saccharomyces pastorianus
gcaacagccaccatcactagaagaa

SEQ ID NO: 102008 - DNA, 25 bp, Saccharomyces pastorianus
agatagcatctccacaacctcaaag

SEQ ID NO: 102009 - DNA, 25 bp, Saccharomyces pastorianus
tcctgcttccaacatctacgtatat

SEQ ID NO: 102010 - DNA, 25 bp, Saccharomyces pastorianus
agtcgccctcctttgtcgagtaatt

SEQ ID NO: 102011 - DNA, 25 bp, Saccharomyces pastorianus
gagcagtactcgagccctgtctcaa

SEQ ID NO: 102012 - DNA, 25 bp, Saccharomyces pastorianus
tttcttattctttactctcacatcc

SEQ ID NO: 102013 - DNA, 25 bp, Saccharomyces pastorianus
gtgattgacactgcaacagccacca

SEQ ID NO: 102014 - DNA, 25 bp, Saccharomyces pastorianus
tttctcgaaacgatttcctgcttcc

SEQ ID NO: 102015 - DNA, 25 bp, Saccharomyces pastorianus
gcattcacttaccatgacacagctt

SEQ ID NO: 102016 - DNA, 25 bp, Saccharomyces pastorianus
ctcaaagctccttgccgagagtcgc

SEQ ID NO: 102017 - DNA, 25 bp, Saccharomyces pastorianus
tactctcacatcctgtagtgattga

SEQ ID NO: 102018 - DNA, 25 bp, Saccharomyces pastorianus
tctgacgattttgttccggttaaag

SEQ ID NO: 102019 - DNA, 25 bp, Saccharomyces pastorianus
aacgaagcatcgtaaccgccactta

SEQ ID NO: 102020 - DNA, 25 bp, Saccharomyces pastorianus
agtacagccttcagagagcccgttc

SEQ ID NO: 102021 - DNA, 25 bp, Saccharomyces pastorianus
ggaacagcaatattagcccttctcc

SEQ ID NO: 102022 - DNA, 25 bp, Saccharomyces pastorianus
gggatgtcactatgtcttcactgga

SEQ ID NO: 102023 - DNA, 25 bp, Saccharomyces pastorianus
aatcctggcgatatactggcaacct

SEQ ID NO: 102024 - DNA, 25 bp, Saccharomyces pastorianus
ttcactggacccttggaacagcaat

SEQ ID NO: 102025 - DNA, 25 bp, Saccharomyces pastorianus
gaataggtcttcttctgtgtatatg

SEQ ID NO: 102026 - DNA, 25 bp, Saccharomyces pastorianus
agcccttctcccgtaagaaaatcag

SEQ ID NO: 102027 - DNA, 25 bp, Saccharomyces pastorianus
cggaattactcccacaacaatgtca

SEQ ID NO: 102028 - DNA, 25 bp, Saccharomyces pastorianus
aacctgtcaccagtctctgatattg

SEQ ID NO: 102029 - DNA, 25 bp, Saccharomyces pastorianus
aatgcgatcgaattggaactaggac

SEQ ID NO: 102030 - DNA, 25 bp, Saccharomyces pastorianus
ttaacgcacgtttacagattttcca

SEQ ID NO: 102031 - DNA, 25 bp, Saccharomyces pastorianus
tcgttcccattaataggcatcctgc

SEQ ID NO: 102032 - DNA, 25 bp, Saccharomyces pastorianus
gaaactgaagtgttcgacgaattcc

SEQ ID NO: 102033 - DNA, 25 bp, Saccharomyces pastorianus
aacttatactggatgttctttctaa

SEQ ID NO: 102034 - DNA, 25 bp, Saccharomyces pastorianus
gacgaattccgatcttccttaaata

SEQ ID NO: 102035 - DNA, 25 bp, Saccharomyces pastorianus
gggcctttgattattcatcagttta

SEQ ID NO: 102036 - DNA, 25 bp, Saccharomyces pastorianus
gacagtaatggttttcaacctccta

SEQ ID NO: 102037 - DNA, 25 bp, Saccharomyces pastorianus
aggcatcctgctttaattgactata

SEQ ID NO: 102038 - DNA, 25 bp, Saccharomyces pastorianus
aactcacttctttagtcggttctga

SEQ ID NO: 102039 - DNA, 25 bp, Saccharomyces pastorianus
gtcattcaacttgccgcagttcgtt

SEQ ID NO: 102040 - DNA, 25 bp, Saccharomyces pastorianus
attagaatctgagtcatggcaagaa

SEQ ID NO: 102041 - DNA, 25 bp, Saccharomyces pastorianus
gtctgatacaaagcaattggctgaa

SEQ ID NO: 102042 - DNA, 25 bp, Saccharomyces pastorianus
gtgaagccaaactgaaggaagcaat

SEQ ID NO: 102043 - DNA, 25 bp, Saccharomyces pastorianus
agttagagagtcaattgtctgatac

SEQ ID NO: 102044 - DNA, 25 bp, Saccharomyces pastorianus
ggctgaagactccaataacttgaga

SEQ ID NO: 102045 - DNA, 25 bp, Saccharomyces pastorianus
aaaaccaggatctagaacaacagct

SEQ ID NO: 102046 - DNA, 25 bp, Saccharomyces pastorianus
agaggccgatttgaactctgagcaa

SEQ ID NO: 102047 - DNA, 25 bp, Saccharomyces pastorianus
cgagattaaatctttgtccgctaaa

SEQ ID NO: 102048 - DNA, 25 bp, Saccharomyces pastorianus
acgagcaactcgacagtgaagtgga

SEQ ID NO: 102049 - DNA, 25 bp, Saccharomyces pastorianus
ttgtccgctaaaaacgagcaactcg

SEQ ID NO: 102050 - DNA, 25 bp, Saccharomyces pastorianus
aatgggtagaaggatcgttgctttg

SEQ ID NO: 102051 - DNA, 25 bp, Saccharomyces pastorianus
gggatcatctacacaaggcgttaag

SEQ ID NO: 102052 - DNA, 25 bp, Saccharomyces pastorianus
ttgtcgtcgtattgcaacattgtgc

SEQ ID NO: 102053 - DNA, 25 bp, Saccharomyces pastorianus
gaaacctcaagaccaagtcgttcgt

SEQ ID NO: 102054 - DNA, 25 bp, Saccharomyces pastorianus
acgcagttcctgtactggtatcaca

SEQ ID NO: 102055 - DNA, 25 bp, Saccharomyces pastorianus
ttcgatttggtgaaacgcagttcct

SEQ ID NO: 102056 - DNA, 25 bp, Saccharomyces pastorianus
agtgaactcaatccttgtcgtcgta

SEQ ID NO: 102057 - DNA, 25 bp, Saccharomyces pastorianus
tagcgaaaccgccatgttgattcaa

SEQ ID NO: 102058 - DNA, 25 bp, Saccharomyces pastorianus
aggagtatttccctgataatctttc

SEQ ID NO: 102059 - DNA, 25 bp, Saccharomyces pastorianus
tgggcctctgtccagcaagatgaag

SEQ ID NO: 102060 - DNA, 25 bp, Saccharomyces pastorianus
ttatctttggacgacatctgggcct

SEQ ID NO: 102061 - DNA, 25 bp, Saccharomyces pastorianus
atgtttgtagcagacgagccacaga

SEQ ID NO: 102062 - DNA, 25 bp, Saccharomyces pastorianus
gatgccatggactcgttatctaagg

SEQ ID NO: 102063 - DNA, 25 bp, Saccharomyces pastorianus
gaagccgctgcaagaagtgtccaag

SEQ ID NO: 102064 - DNA, 25 bp, Saccharomyces pastorianus
agccgctcaactttccaaggacgaa

SEQ ID NO: 102065 - DNA, 25 bp, Saccharomyces pastorianus
gcgaggcgcaaaaacgtcttgacga

SEQ ID NO: 102066 - DNA, 25 bp, Saccharomyces pastorianus
acaagaacgtgtccgatgccatgga

SEQ ID NO: 102067 - DNA, 25 bp, Saccharomyces pastorianus
acacgggtgacgctaatactgaaga

SEQ ID NO: 102068 - DNA, 25 bp, Saccharomyces pastorianus
agtaatcctttgaaacgcctgttga

SEQ ID NO: 102069 - DNA, 25 bp, Saccharomyces pastorianus
gatggacttccaaggtcgacaatga

SEQ ID NO: 102070 - DNA, 25 bp, Saccharomyces pastorianus
gacttgaaacagtacggcagccact

SEQ ID NO: 102071 - DNA, 25 bp, Saccharomyces pastorianus
ttgctgaacgggtagccagaggttt

SEQ ID NO: 102072 - DNA, 25 bp, Saccharomyces pastorianus
gaaatgcttcttcagagccaagcga

SEQ ID NO: 102073 - DNA, 25 bp, Saccharomyces pastorianus
agcgaatttaacaacactgcagatg

SEQ ID NO: 102074 - DNA, 25 bp, Saccharomyces pastorianus
cactgcagatgtagatgtcgtagct

SEQ ID NO: 102075 - DNA, 25 bp, Saccharomyces pastorianus
ttgttattaagcaacgccttgttag

SEQ ID NO: 102076 - DNA, 25 bp, Saccharomyces pastorianus
gaatgctgactattttgttattaag

SEQ ID NO: 102077 - DNA, 25 bp, Saccharomyces pastorianus
atggttgttggcagcgaatttaaca

SEQ ID NO: 102078 - DNA, 25 bp, Saccharomyces pastorianus
acgccttgttagtgcttgttttaca

SEQ ID NO: 102079 - DNA, 25 bp, Saccharomyces pastorianus
ggtattttatttatgctatcgcttt

SEQ ID NO: 102080 - DNA, 25 bp, Saccharomyces pastorianus
atgctatcgctttattatctttatt

SEQ ID NO: 102081 - DNA, 25 bp, Saccharomyces pastorianus
gtagatgtcgtagctatccttctca

SEQ ID NO: 102082 - DNA, 25 bp, Saccharomyces pastorianus
cttctcacgttgttgaatgctgact

SEQ ID NO: 102083 - DNA, 25 bp, Saccharomyces pastorianus
tagctatccttctcacgttgttgaa

SEQ ID NO: 102084 - DNA, 25 bp, Saccharomyces pastorianus
tatggaagggccttgtacccgcact

SEQ ID NO: 102085 - DNA, 25 bp, Saccharomyces pastorianus
acccgcactgtttggtgtttcgcaa

SEQ ID NO: 102086 - DNA, 25 bp, Saccharomyces pastorianus
aagggcctatctgcaaacttagtac

SEQ ID NO: 102087 - DNA, 25 bp, Saccharomyces pastorianus
cttccagtgggttgatgacagctat

SEQ ID NO: 102088 - DNA, 25 bp, Saccharomyces pastorianus
aggtgccttctattttgcagtttac

SEQ ID NO: 102089 - DNA, 25 bp, Saccharomyces pastorianus
tgtacaacggtgtccaacaactgtt

SEQ ID NO: 102090 - DNA, 25 bp, Saccharomyces pastorianus
tgacagctatcctaacaaaccctat

SEQ ID NO: 102091 - DNA, 25 bp, Saccharomyces pastorianus
gcccaaggagcgtacacttctatgt

SEQ ID NO: 102092 - DNA, 25 bp, Saccharomyces pastorianus
gaactgatggcttccagggcctatg

SEQ ID NO: 102093 - DNA, 25 bp, Saccharomyces pastorianus
aatgatctccgtcactttggtttac

SEQ ID NO: 102094 - DNA, 25 bp, Saccharomyces pastorianus
ttatttatttgtctgccggtgcttc

SEQ ID NO: 102095 - DNA, 25 bp, Saccharomyces pastorianus
gggatacattgctcaagttacgtgt

SEQ ID NO: 102096 - DNA, 25 bp, Saccharomyces pastorianus
acgctgtgacagaacccctaaagat

SEQ ID NO: 102097 - DNA, 25 bp, Saccharomyces pastorianus
aagaacgtcatctgtgcgtagcaag

SEQ ID NO: 102098 - DNA, 25 bp, Saccharomyces pastorianus
tgattaccatttggtcttccccgac

SEQ ID NO: 102099 - DNA, 25 bp, Saccharomyces pastorianus
ttattgatgccacaagctcattccc

SEQ ID NO: 102100 - DNA, 25 bp, Saccharomyces pastorianus
gaagaactcagtgccataacggtga

SEQ ID NO: 102101 - DNA, 25 bp, Saccharomyces pastorianus
gaacactgctagaattccctaagga

SEQ ID NO: 102102 - DNA, 25 bp, Saccharomyces pastorianus
tcccctcaaaggtcacacgaactgt

SEQ ID NO: 102103 - DNA, 25 bp, Saccharomyces pastorianus
atcaacacttgccttgatctcgaag

SEQ ID NO: 102104 - DNA, 25 bp, Saccharomyces pastorianus
gaaggagcatgttgttacccagtta

SEQ ID NO: 102105 - DNA, 25 bp, Saccharomyces pastorianus
gccaacccttccagaaaacgtcaga

SEQ ID NO: 102106 - DNA, 25 bp, Saccharomyces pastorianus
aatttctactacgacatccatggac

SEQ ID NO: 102107 - DNA, 25 bp, Saccharomyces pastorianus
ttatgcatcgatgatcacccaggcc

SEQ ID NO: 102108 - DNA, 25 bp, Saccharomyces pastorianus
gacgaggtgcttctgtgacaagaca

SEQ ID NO: 102109 - DNA, 25 bp, Saccharomyces pastorianus
gtccctaacgataatgtaccccata

SEQ ID NO: 102110 - DNA, 25 bp, Saccharomyces pastorianus
aactccgtgaggcataatctgtccc

SEQ ID NO: 102111 - DNA, 25 bp, Saccharomyces pastorianus
gatatatcaaaccaccgcagtctta

SEQ ID NO: 102112 - DNA, 25 bp, Saccharomyces pastorianus
agaactcaactcactggccaaattt

SEQ ID NO: 102113 - DNA, 25 bp, Saccharomyces pastorianus
gattttaggtgaaagcgccccgcaa

SEQ ID NO: 102114 - DNA, 25 bp, Saccharomyces pastorianus
tagcaacaatgctgtccctaacgat

SEQ ID NO: 102115 - DNA, 25 bp, Saccharomyces pastorianus
gaatcttcatcaattgacccgaggg

SEQ ID NO: 102116 - DNA, 25 bp, Saccharomyces pastorianus
gaaatacctgctcctgaatcttcat

SEQ ID NO: 102117 - DNA, 25 bp, Saccharomyces pastorianus
aacaattcaccgtcttatgaagggt

SEQ ID NO: 102118 - DNA, 25 bp, Saccharomyces pastorianus
gtatcccaaggaacgactaacatgt

SEQ ID NO: 102119 - DNA, 25 bp, Saccharomyces pastorianus
gatccgaacaatttcttatctactg

SEQ ID NO: 102120 - DNA, 25 bp, Saccharomyces pastorianus
aggaatgacggcgacatccctacta

SEQ ID NO: 102121 - DNA, 25 bp, Saccharomyces pastorianus
attcgatcagttagatgctcagcta

SEQ ID NO: 102122 - DNA, 25 bp, Saccharomyces pastorianus
gactgactcaaacgatattcttgga

SEQ ID NO: 102123 - DNA, 25 bp, Saccharomyces pastorianus
tcttgatgccacagatgacgtcttt

SEQ ID NO: 102124 - DNA, 25 bp, Saccharomyces pastorianus
aatgcatcaaataactccaacccag

SEQ ID NO: 102125 - DNA, 25 bp, Saccharomyces pastorianus
acatccctactaacagtgcattcga

SEQ ID NO: 102126 - DNA, 25 bp, Saccharomyces pastorianus
tccaacccagataccattaacaaca

SEQ ID NO: 102127 - DNA, 25 bp, Saccharomyces pastorianus
tccccagttacaaataccgctttca

SEQ ID NO: 102128 - DNA, 25 bp, Saccharomyces pastorianus
gatggtgactatgaactcggcagaa

SEQ ID NO: 102129 - DNA, 25 bp, Saccharomyces pastorianus
gagtctgctccacagttgtatgaca

SEQ ID NO: 102130 - DNA, 25 bp, Saccharomyces pastorianus
aaatgtgccaaatatctcctctaaa

SEQ ID NO: 102131 - DNA, 25 bp, Saccharomyces pastorianus
aatgacggcggctacgacaaggcat

SEQ ID NO: 102132 - DNA, 25 bp, Saccharomyces pastorianus
gagcttatctagaacaccgtccaat

SEQ ID NO: 102133 - DNA, 25 bp, Saccharomyces pastorianus
gaaaccactcgcacagatcaaactt

SEQ ID NO: 102134 - DNA, 25 bp, Saccharomyces pastorianus
tgaagtatctgctcacggatcggat

SEQ ID NO: 102135 - DNA, 25 bp, Saccharomyces pastorianus
aatgctaccactaccttgtttggtt

SEQ ID NO: 102136 - DNA, 25 bp, Saccharomyces pastorianus
ggcataacgttcacgcagtttttat

SEQ ID NO: 102137 - DNA, 25 bp, Saccharomyces pastorianus
attccacatggacgttctgattcga

SEQ ID NO: 102138 - DNA, 25 bp, Saccharomyces pastorianus
acaaacgattccatttctgttgcgg

SEQ ID NO: 102139 - DNA, 25 bp, Saccharomyces pastorianus
gttccattattactatctctttcgc

SEQ ID NO: 102140 - DNA, 25 bp, Saccharomyces pastorianus
gaagcatactccaagccaatcggtt

SEQ ID NO: 102141 - DNA, 25 bp, Saccharomyces pastorianus
aggacgatgttctaagcgctttaat

SEQ ID NO: 102142 - DNA, 25 bp, Saccharomyces pastorianus
gaaactctgaaggacactacggata

SEQ ID NO: 102143 - DNA, 25 bp, Saccharomyces pastorianus
gattacgactgtagtacctctaaac

SEQ ID NO: 102144 - DNA, 25 bp, Saccharomyces pastorianus
gccaatcggttggtccttttatcaa

SEQ ID NO: 102145 - DNA, 25 bp, Saccharomyces pastorianus
atcaacgatttattcccgcttttat

SEQ ID NO: 102146 - DNA, 25 bp, Saccharomyces pastorianus
atctctttcgcttccgcaaaaatat

SEQ ID NO: 102147 - DNA, 25 bp, Saccharomyces pastorianus
ggttaatagccttacagcttctaga

SEQ ID NO: 102148 - DNA, 25 bp, Saccharomyces pastorianus
gattggctcacttgtatcgaagcta

SEQ ID NO: 102149 - DNA, 25 bp, Saccharomyces pastorianus
cccgcttttattgcaggctttggat

SEQ ID NO: 102150 - DNA, 25 bp, Saccharomyces pastorianus
gactgctatcaaaccttttgcctgg

SEQ ID NO: 102151 - DNA, 25 bp, Saccharomyces pastorianus
caccgggtttggcacctgtaggact

SEQ ID NO: 102152 - DNA, 25 bp, Saccharomyces pastorianus
atgtcatcttcgctgagccaaacat

SEQ ID NO: 102153 - DNA, 25 bp, Saccharomyces pastorianus
gaaggatacagtttccactgcgaac

SEQ ID NO: 102154 - DNA, 25 bp, Saccharomyces pastorianus
gaagacattcagcaatccatcttga

SEQ ID NO: 102155 - DNA, 25 bp, Saccharomyces pastorianus
ttgcctggcgttcccaaaatcagag

SEQ ID NO: 102156 - DNA, 25 bp, Saccharomyces pastorianus
atgagggcacattaacggaccatga

SEQ ID NO: 102157 - DNA, 25 bp, Saccharomyces pastorianus
aaacatctaaataccaggccacctc

SEQ ID NO: 102158 - DNA, 25 bp, Saccharomyces pastorianus
tagatatcctggtctgacaccgggt

SEQ ID NO: 102159 - DNA, 25 bp, Saccharomyces pastorianus
atgggtcaaaagctcagttaatcga

SEQ ID NO: 102160 - DNA, 25 bp, Saccharomyces pastorianus
aggccacctcggttgttaatggact

SEQ ID NO: 102161 - DNA, 25 bp, Saccharomyces pastorianus
aaggcaagccttacaaacgatgttt

SEQ ID NO: 102162 - DNA, 25 bp, Saccharomyces pastorianus
agaaaccgaaactgaccgtcaagat

SEQ ID NO: 102163 - DNA, 25 bp, Saccharomyces pastorianus
tcctgggtttacgttgatgctgaca

SEQ ID NO: 102164 - DNA, 25 bp, Saccharomyces pastorianus
aaagccagagagtaaatcgcccgcg

SEQ ID NO: 102165 - DNA, 25 bp, Saccharomyces pastorianus
gtaattgaaaaacccatggccattg

SEQ ID NO: 102166 - DNA, 25 bp, Saccharomyces pastorianus
ggaccattagcgttgttacggcaga

SEQ ID NO: 102167 - DNA, 25 bp, Saccharomyces pastorianus
aatcgcccgcgaagaagactgcagc

SEQ ID NO: 102168 - DNA, 25 bp, Saccharomyces pastorianus
caagtcgcttgggatttttcccacg

SEQ ID NO: 102169 - DNA, 25 bp, Saccharomyces pastorianus
tgaaaagcttccttcgaaacgcgac

SEQ ID NO: 102170 - DNA, 25 bp, Saccharomyces pastorianus
gaaacgcgactatccggactatttt

SEQ ID NO: 102171 - DNA, 25 bp, Saccharomyces pastorianus
atgaggtagactcccatccaaggac

SEQ ID NO: 102172 - DNA, 25 bp, Saccharomyces pastorianus
acgcctgctaatttattccacattc

SEQ ID NO: 102173 - DNA, 25 bp, Saccharomyces pastorianus
agatcatctctttccgaattcactg

SEQ ID NO: 102174 - DNA, 25 bp, Saccharomyces pastorianus
attcttttctaaacagctgctgcgt

SEQ ID NO: 102175 - DNA, 25 bp, Saccharomyces pastorianus
ggtgctgttgctgccggtagcaaat

SEQ ID NO: 102176 - DNA, 25 bp, Saccharomyces pastorianus
aagattgaagagctgcacccattcc

SEQ ID NO: 102177 - DNA, 25 bp, Saccharomyces pastorianus
attcccatttgctcagctacgtgat

SEQ ID NO: 102178 - DNA, 25 bp, Saccharomyces pastorianus
ttgtttatccaactacgcctgctaa

SEQ ID NO: 102179 - DNA, 25 bp, Saccharomyces pastorianus
gagtggccaagtgtacactgcccta

SEQ ID NO: 102180 - DNA, 25 bp, Saccharomyces pastorianus
gtcaattccgtaaaccattggcgtt

SEQ ID NO: 102181 - DNA, 25 bp, Saccharomyces pastorianus
gggcatacacagaaccacgcttaca

SEQ ID NO: 102182 - DNA, 25 bp, Saccharomyces pastorianus
tgggtgataagaccactgctttctt

SEQ ID NO: 102183 - DNA, 25 bp, Saccharomyces pastorianus
ggtagcatttattccgcttctaaag

SEQ ID NO: 102184 - DNA, 25 bp, Saccharomyces pastorianus
gatatttgttccttactggctattg

SEQ ID NO: 102185 - DNA, 25 bp, Saccharomyces pastorianus
gagttgtacattccctgcattggat

SEQ ID NO: 102186 - DNA, 25 bp, Saccharomyces pastorianus
gtgtggctactgatatcgctgataa

SEQ ID NO: 102187 - DNA, 25 bp, Saccharomyces pastorianus
gttcgccaacatcatgcgttttgtc

SEQ ID NO: 102188 - DNA, 25 bp, Saccharomyces pastorianus
atgaagcccttcaacgtgagagtga

SEQ ID NO: 102189 - DNA, 25 bp, Saccharomyces pastorianus
attgtcttcactggttccttggcag

SEQ ID NO: 102190 - DNA, 25 bp, Saccharomyces pastorianus
gagcactagtgaccctgtagatgtt

SEQ ID NO: 102191 - DNA, 25 bp, Saccharomyces pastorianus
tgccgtgaattgtcggagttcctta

SEQ ID NO: 102192 - DNA, 25 bp, Saccharomyces pastorianus
ataagcccatgccagctgatgcgta

SEQ ID NO: 102193 - DNA, 25 bp, Saccharomyces pastorianus
tgtcattcccctttggtagcattta

SEQ ID NO: 102194 - DNA, 25 bp, Saccharomyces pastorianus
gtaccgttctaacactgacgcggat

SEQ ID NO: 102195 - DNA, 25 bp, Saccharomyces pastorianus
gccattgaccgttgttgaccaagat

SEQ ID NO: 102196 - DNA, 25 bp, Saccharomyces pastorianus
attaaactttggtgctggctccact

SEQ ID NO: 102197 - DNA, 25 bp, Saccharomyces pastorianus
aacgccggcgtctcagttgaagatg

SEQ ID NO: 102198 - DNA, 25 bp, Saccharomyces pastorianus
atccgatcaaccatctgacggtaga

SEQ ID NO: 102199 - DNA, 25 bp, Saccharomyces pastorianus
caagggtgtcgccatttgcagaacc

SEQ ID NO: 102200 - DNA, 25 bp, Saccharomyces pastorianus
ggatctggtattggtaactgggcac

SEQ ID NO: 102201 - DNA, 25 bp, Saccharomyces pastorianus
cgaggctgcctatgttgtttctaaa

SEQ ID NO: 102202 - DNA, 25 bp, Saccharomyces pastorianus
aaaatggtgagttctctggcggtgc

SEQ ID NO: 102203 - DNA, 25 bp, Saccharomyces pastorianus
gactacccgggcactgaaaacatgg

SEQ ID NO: 102204 - DNA, 25 bp, Saccharomyces pastorianus
atagttgctgctgatgattcatcca

SEQ ID NO: 102205 - DNA, 25 bp, Saccharomyces pastorianus
gaacttgcaagtccacgaggccata

SEQ ID NO: 102206 - DNA, 25 bp, Saccharomyces pastorianus
agtttctttccttgaaccagcatgg

SEQ ID NO: 102207 - DNA, 25 bp, Saccharomyces pastorianus
aagataaacgcctccgaacttgcaa

SEQ ID NO: 102208 - DNA, 25 bp, Saccharomyces pastorianus
gggatgggaccacaagctcagcttc

SEQ ID NO: 102209 - DNA, 25 bp, Saccharomyces pastorianus
atgagctcaaactcggagtcccaga

SEQ ID NO: 102210 - DNA, 25 bp, Saccharomyces pastorianus
atccggtaatgagtatgggcccaca

SEQ ID NO: 102211 - DNA, 25 bp, Saccharomyces pastorianus
tgatgagctcacagtttctttcctt

SEQ ID NO: 102212 - DNA, 25 bp, Saccharomyces pastorianus
atgccgcagtatttatatccaccag

SEQ ID NO: 102213 - DNA, 25 bp, Saccharomyces pastorianus
gcaaattttaggtcgcccatgcgaa

SEQ ID NO: 102214 - DNA, 25 bp, Saccharomyces pastorianus
ttacgataccgtctccgataacgac

SEQ ID NO: 102215 - DNA, 25 bp, Saccharomyces pastorianus
atatactttacctatgcctgcaaat

SEQ ID NO: 102216 - DNA, 25 bp, Saccharomyces pastorianus
tttagatgtctcctatccgcaattt

SEQ ID NO: 102217 - DNA, 25 bp, Saccharomyces pastorianus
gtgacacttcttctcagtagcattg

SEQ ID NO: 102218 - DNA, 25 bp, Saccharomyces pastorianus
caagtattatctctgctggtcggta

SEQ ID NO: 102219 - DNA, 25 bp, Saccharomyces pastorianus
atcccttttattattctatctcctg

SEQ ID NO: 102220 - DNA, 25 bp, Saccharomyces pastorianus
aaaacaccgcttgctgctgtattat

SEQ ID NO: 102221 - DNA, 25 bp, Saccharomyces pastorianus
attttgaccttctctactactttga

SEQ ID NO: 102222 - DNA, 25 bp, Saccharomyces pastorianus
agtagcattggctttactgcctttg

SEQ ID NO: 102223 - DNA, 25 bp, Saccharomyces pastorianus
gaggcaaggttgcatccagcatttg

SEQ ID NO: 102224 - DNA, 25 bp, Saccharomyces pastorianus
ctaaggcttctaccgcaacaggttg

SEQ ID NO: 102225 - DNA, 25 bp, Saccharomyces pastorianus
agatctctttccgtctaaggcttct

SEQ ID NO: 102226 - DNA, 25 bp, Saccharomyces pastorianus
tataacttcatcttcatccctttta

SEQ ID NO: 102227 - DNA, 25 bp, Saccharomyces pastorianus
gacaatctaatcctgcaaactccac

SEQ ID NO: 102228 - DNA, 25 bp, Saccharomyces pastorianus
gctcaattttcccttttgtcatcag

SEQ ID NO: 102229 - DNA, 25 bp, Saccharomyces pastorianus
agtacaccagagcatattcagtcaa

SEQ ID NO: 102230 - DNA, 25 bp, Saccharomyces pastorianus
catcgccatttttccagcaaacaat

SEQ ID NO: 102231 - DNA, 25 bp, Saccharomyces pastorianus
tattcagtcaagtatcaacctcgat

SEQ ID NO: 102232 - DNA, 25 bp, Saccharomyces pastorianus
gaatctttgccagctttggatacca

SEQ ID NO: 102233 - DNA, 25 bp, Saccharomyces pastorianus
aacaatgcctatacagctaccgcgc

SEQ ID NO: 102234 - DNA, 25 bp, Saccharomyces pastorianus
aaaggagaaccatcctccattagcc

SEQ ID NO: 102235 - DNA, 25 bp, Saccharomyces pastorianus
gctaccgcgcgatgcacaacaagaa

SEQ ID NO: 102236 - DNA, 25 bp, Saccharomyces pastorianus
catcagcaccggcagacaatctaat

SEQ ID NO: 102237 - DNA, 25 bp, Saccharomyces pastorianus
aatttccccagttttctctacagat

SEQ ID NO: 102238 - DNA, 25 bp, Saccharomyces pastorianus
gggcccagtagcaaccgaagtgaaa

SEQ ID NO: 102239 - DNA, 25 bp, Saccharomyces pastorianus
agagttgctttaaccgcgggcccag

SEQ ID NO: 102240 - DNA, 25 bp, Saccharomyces pastorianus
atatccatgatattttcgttgacag

SEQ ID NO: 102241 - DNA, 25 bp, Saccharomyces pastorianus
tattttcccgaagtttatgagccta

SEQ ID NO: 102242 - DNA, 25 bp, Saccharomyces pastorianus
gatcggtgcgctacgttatttggaa

SEQ ID NO: 102243 - DNA, 25 bp, Saccharomyces pastorianus
aaggtgtcaacgaagctttcacaga

SEQ ID NO: 102244 - DNA, 25 bp, Saccharomyces pastorianus
tgaatctaacgcaatcacaccgaac

SEQ ID NO: 102245 - DNA, 25 bp, Saccharomyces pastorianus
agtattgattcacgcgattctttag

SEQ ID NO: 102246 - DNA, 25 bp, Saccharomyces pastorianus
tgctgaatgttttcaccagaggtta

SEQ ID NO: 102247 - DNA, 25 bp, Saccharomyces pastorianus
gtgcctgtggtaaaacttcgttgct

SEQ ID NO: 102248 - DNA, 25 bp, Saccharomyces pastorianus
ggcgtcaagttagtcttagttgcac

SEQ ID NO: 102249 - DNA, 25 bp, Saccharomyces pastorianus
cgcatcgtcgctcgataacggtaat

SEQ ID NO: 102250 - DNA, 25 bp, Saccharomyces pastorianus
gtaatttcgaaaggccgctatcctc

SEQ ID NO: 102251 - DNA, 25 bp, Saccharomyces pastorianus
agttttacggcgattccccatatat

SEQ ID NO: 102252 - DNA, 25 bp, Saccharomyces pastorianus
tggtgtctacaatctcttcatcatc

SEQ ID NO: 102253 - DNA, 25 bp, Saccharomyces pastorianus
gaaaacctacaccttcgacttatct

SEQ ID NO: 102254 - DNA, 25 bp, Saccharomyces pastorianus
aattgcatcttcaccaagtcgaaag

SEQ ID NO: 102255 - DNA, 25 bp, Saccharomyces pastorianus
ttttccacacaacatacccagtttt

SEQ ID NO: 102256 - DNA, 25 bp, Saccharomyces pastorianus
atcaggtccatatcagcgagtccga

SEQ ID NO: 102257 - DNA, 25 bp, Saccharomyces pastorianus
gtatctacaaattctctggtgtcta

SEQ ID NO: 102258 - DNA, 25 bp, Saccharomyces pastorianus
tatcctctcttgtatccgaatccaa

SEQ ID NO: 102259 - DNA, 25 bp, Saccharomyces pastorianus
attcacttttcatttcaccaacagg

SEQ ID NO: 102260 - DNA, 25 bp, Saccharomyces pastorianus
gatttttgtggtggctctacagctc

SEQ ID NO: 102261 - DNA, 25 bp, Saccharomyces pastorianus
tatccaagtcattcggtttagccgg

SEQ ID NO: 102262 - DNA, 25 bp, Saccharomyces pastorianus
aattaggctgttccggatgtttgag

SEQ ID NO: 102263 - DNA, 25 bp, Saccharomyces pastorianus
ggttactttgcaaactctatccaag

SEQ ID NO: 102264 - DNA, 25 bp, Saccharomyces pastorianus
tgagaattaccgttggaacccatga

SEQ ID NO: 102265 - DNA, 25 bp, Saccharomyces pastorianus
actgctttggattacgttgatgacc

SEQ ID NO: 102266 - DNA, 25 bp, Saccharomyces pastorianus
ggcgccttataatatttcctcccta

SEQ ID NO: 102267 - DNA, 25 bp, Saccharomyces pastorianus
ggaacccatgaggagaacacacatt

SEQ ID NO: 102268 - DNA, 25 bp, Saccharomyces pastorianus
tttaaatgcaatgaaggcgccttat

SEQ ID NO: 102269 - DNA, 25 bp, Saccharomyces pastorianus
ttaccaattggctactcaatctggg

SEQ ID NO: 102270 - DNA, 25 bp, Saccharomyces pastorianus
tccctagcctctgaatatgcactaa

SEQ ID NO: 102271 - DNA, 25 bp, Saccharomyces pastorianus
aatcctttcatgtcctttgttattg

SEQ ID NO: 102272 - DNA, 25 bp, Saccharomyces pastorianus
tacctttctcctccaattgtaacct

SEQ ID NO: 102273 - DNA, 25 bp, Saccharomyces pastorianus
ttcttttagtaaaccgtcacgtgca

SEQ ID NO: 102274 - DNA, 25 bp, Saccharomyces pastorianus
aaatcaccaatttgctttttcgtat

SEQ ID NO: 102275 - DNA, 25 bp, Saccharomyces pastorianus
aaccgtcacgtgcaagagattcttt

SEQ ID NO: 102276 - DNA, 25 bp, Saccharomyces pastorianus
gttttgccactaatggattatcgtc

SEQ ID NO: 102277 - DNA, 25 bp, Saccharomyces pastorianus
aatatcactattttgccatgttcaa

SEQ ID NO: 102278 - DNA, 25 bp, Saccharomyces pastorianus
tttttcgtattcatggccaacccaa

SEQ ID NO: 102279 - DNA, 25 bp, Saccharomyces pastorianus
gtccaatctcttattctttacagtg

SEQ ID NO: 102280 - DNA, 25 bp, Saccharomyces pastorianus
aattgtaacctactcacttgctcac

SEQ ID NO: 102281 - DNA, 25 bp, Saccharomyces pastorianus
gatgcatcgaacgacgaagcctttt

SEQ ID NO: 102282 - DNA, 25 bp, Saccharomyces pastorianus
aagatctcagcacgcatcaatttag

SEQ ID NO: 102283 - DNA, 25 bp, Saccharomyces pastorianus
gtgtccgccaaaattaatcatactg

SEQ ID NO: 102284 - DNA, 25 bp, Saccharomyces pastorianus
gatgatgcttcgagtggatacgtta

SEQ ID NO: 102285 - DNA, 25 bp, Saccharomyces pastorianus
aaaaaggcttcgtcgttcgatgcat

SEQ ID NO: 102286 - DNA, 25 bp, Saccharomyces pastorianus
aagaatctcttgcacgtgacggttt

SEQ ID NO: 102287 - DNA, 25 bp, Saccharomyces pastorianus
gttcgatgcatcctcttcaataaca

SEQ ID NO: 102288 - DNA, 25 bp, Saccharomyces pastorianus
ttgggttggccatgaatacgaaaaa

SEQ ID NO: 102289 - DNA, 25 bp, Saccharomyces pastorianus
ggacgataatccattagtggcaaaa

SEQ ID NO: 102290 - DNA, 25 bp, Saccharomyces pastorianus
agtgcggtctatcaataatctgtat

SEQ ID NO: 102291 - DNA, 25 bp, Saccharomyces pastorianus
aaaagctattcgatgtgtccgccaa

SEQ ID NO: 102292 - DNA, 25 bp, Saccharomyces pastorianus
gaggagtatctgtttttaatgcatt

SEQ ID NO: 102293 - DNA, 25 bp, Saccharomyces pastorianus
gagctacgcccaaaaatcgtttgca

SEQ ID NO: 102294 - DNA, 25 bp, Saccharomyces pastorianus
atgtcaacgcatttttgactcccca

SEQ ID NO: 102295 - DNA, 25 bp, Saccharomyces pastorianus
gcatatgacacagctgcgggtttat

SEQ ID NO: 102296 - DNA, 25 bp, Saccharomyces pastorianus
gtcaatcgggtatcttgccagagaa

SEQ ID NO: 102297 - DNA, 25 bp, Saccharomyces pastorianus
gatacgtaccagattctatttcgca

SEQ ID NO: 102298 - DNA, 25 bp, Saccharomyces pastorianus
aaacgttaaccgctatttgcaagtg

SEQ ID NO: 102299 - DNA, 25 bp, Saccharomyces pastorianus
aggcaatgcgcaactgcttcatttt

SEQ ID NO: 102300 - DNA, 25 bp, Saccharomyces pastorianus
tgcacgctatgctatgtcaatcggg

SEQ ID NO: 102301 - DNA, 25 bp, Saccharomyces pastorianus
gattcaggcctgactacattgtcgt

SEQ ID NO: 102302 - DNA, 25 bp, Saccharomyces pastorianus
ggaagtgttactttgggccaccgcg

SEQ ID NO: 102303 - DNA, 25 bp, Saccharomyces pastorianus
gggtatgtctttcaatgcgctacaa

SEQ ID NO: 102304 - DNA, 25 bp, Saccharomyces pastorianus
aggttcctgctgtcgagtaccatca

SEQ ID NO: 102305 - DNA, 25 bp, Saccharomyces pastorianus
ggacgtgcgcagaatctacccaaaa

SEQ ID NO: 102306 - DNA, 25 bp, Saccharomyces pastorianus
gatgtggtcatcaacgttgctgaag

SEQ ID NO: 102307 - DNA, 25 bp, Saccharomyces pastorianus
aagactgtgaattcgtgccttgttc

SEQ ID NO: 102308 - DNA, 25 bp, Saccharomyces pastorianus
agatctacctttattcagagcccac

SEQ ID NO: 102309 - DNA, 25 bp, Saccharomyces pastorianus
aatgggaggttgctcttaacgcgaa

SEQ ID NO: 102310 - DNA, 25 bp, Saccharomyces pastorianus
aatgtgggctgtcgagatccgcaac

SEQ ID NO: 102311 - DNA, 25 bp, Saccharomyces pastorianus
gcagattgcgttggacttgccatca

SEQ ID NO: 102312 - DNA, 25 bp, Saccharomyces pastorianus
gcatcatacacgcagctacgactaa

SEQ ID NO: 102313 - DNA, 25 bp, Saccharomyces pastorianus
cttccatagggcttattttccagtt

SEQ ID NO: 102314 - DNA, 25 bp, Saccharomyces pastorianus
gagcttttaccctttgatgtggtca

SEQ ID NO: 102315 - DNA, 25 bp, Saccharomyces pastorianus
aaacgaatttgcacgatggagaaac

SEQ ID NO: 102316 - DNA, 25 bp, Saccharomyces pastorianus
atttttgccgctatattattttgta

SEQ ID NO: 102317 - DNA, 25 bp, Saccharomyces pastorianus
ggatatcgacttgctctcaaaggac

SEQ ID NO: 102318 - DNA, 25 bp, Saccharomyces pastorianus
aacaccgtatgagcatatcctccgt

SEQ ID NO: 102319 - DNA, 25 bp, Saccharomyces pastorianus
tgaacaaagcgcagcagccgacgcg

SEQ ID NO: 102320 - DNA, 25 bp, Saccharomyces pastorianus
aacttctgagaagattcccgtcgat

SEQ ID NO: 102321 - DNA, 25 bp, Saccharomyces pastorianus
aaatttgtgctcgacttgcaagtaa

SEQ ID NO: 102322 - DNA, 25 bp, Saccharomyces pastorianus
aaatttgttagtttgcccatggcgt

SEQ ID NO: 102323 - DNA, 25 bp, Saccharomyces pastorianus
aacagcgttctctaaaaatacctcg

SEQ ID NO: 102324 - DNA, 25 bp, Saccharomyces pastorianus
agggacttatatccgttaggactga

SEQ ID NO: 102325 - DNA, 25 bp, Saccharomyces pastorianus
tcgcacctgactccattgtggaata

SEQ ID NO: 102326 - DNA, 25 bp, Saccharomyces pastorianus
agcgtcactcttatatcaggatcgt

SEQ ID NO: 102327 - DNA, 25 bp, Saccharomyces pastorianus
gcaggaatatcagcgtcactcttat

SEQ ID NO: 102328 - DNA, 25 bp, Saccharomyces pastorianus
aaaagtcctttcattatcctcagaa

SEQ ID NO: 102329 - DNA, 25 bp, Saccharomyces pastorianus
ttttcagatctgctcttctacggaa

SEQ ID NO: 102330 - DNA, 25 bp, Saccharomyces pastorianus
ggaacaatggtacgccttacagaaa

SEQ ID NO: 102331 - DNA, 25 bp, Saccharomyces pastorianus
gatgtcaaaacttacgtagccgcaa

SEQ ID NO: 102332 - DNA, 25 bp, Saccharomyces pastorianus
actccgaacatctaccaattcattc

SEQ ID NO: 102333 - DNA, 25 bp, Saccharomyces pastorianus
tagctgccttttacgacgatgtaca

SEQ ID NO: 102334 - DNA, 25 bp, Saccharomyces pastorianus
aggaactgcttcttacctcaaagct

SEQ ID NO: 102335 - DNA, 25 bp, Saccharomyces pastorianus
tatcaacctgacaatttgcccgtta

SEQ ID NO: 102336 - DNA, 25 bp, Saccharomyces pastorianus
gatccatgaagtactctcaggtagc

SEQ ID NO: 102337 - DNA, 25 bp, Saccharomyces pastorianus
ttgagcgagcccgttaaccatgcat

SEQ ID NO: 102338 - DNA, 25 bp, Saccharomyces pastorianus
tgaagctactggcacaattgttttg

SEQ ID NO: 102339 - DNA, 25 bp, Saccharomyces pastorianus
gcctcggccttgaacaacttagaat

SEQ ID NO: 102340 - DNA, 25 bp, Saccharomyces pastorianus
atcaatgctacctcttcgttgtttg

SEQ ID NO: 102341 - DNA, 25 bp, Saccharomyces pastorianus
ggtattgtcccaagtgaccatcgcg

SEQ ID NO: 102342 - DNA, 25 bp, Saccharomyces pastorianus
aagactatgggcttctagcacctta

SEQ ID NO: 102343 - DNA, 25 bp, Saccharomyces pastorianus
gctgtaccagcgctagtattcgatg

SEQ ID NO: 102344 - DNA, 25 bp, Saccharomyces pastorianus
tggaacacaggatatctttgacatt

SEQ ID NO: 102345 - DNA, 25 bp, Saccharomyces pastorianus
tgaggctgggttaccagtgcaaact

SEQ ID NO: 102346 - DNA, 25 bp, Saccharomyces pastorianus
tctaccctgatgtttattcgctgca

SEQ ID NO: 102347 - DNA, 25 bp, Saccharomyces pastorianus
aattgttttgcctcaacccatcaat

SEQ ID NO: 102348 - DNA, 25 bp, Saccharomyces pastorianus
gatgttcagccattagacatgtcga

SEQ ID NO: 102349 - DNA, 25 bp, Saccharomyces pastorianus
atatatcctaggtgtgactggcaga

SEQ ID NO: 102350 - DNA, 25 bp, Saccharomyces pastorianus
actggaacaaaggatgctcccgcat

SEQ ID NO: 102351 - DNA, 25 bp, Saccharomyces pastorianus
ttctgttaatgcaccggaaaccgag

SEQ ID NO: 102352 - DNA, 25 bp, Saccharomyces pastorianus
ggttcgctgaattgcagccacctaa

SEQ ID NO: 102353 - DNA, 25 bp, Saccharomyces pastorianus
gcgtcgtcgcttttgatgttagatt

SEQ ID NO: 102354 - DNA, 25 bp, Saccharomyces pastorianus
ggatgctacactagaaccgggtgaa

SEQ ID NO: 102355 - DNA, 25 bp, Saccharomyces pastorianus
gttcgacaagttcccatctttgtta

SEQ ID NO: 102356 - DNA, 25 bp, Saccharomyces pastorianus
gcggagcttgggttgatgctatcca

SEQ ID NO: 102357 - DNA, 25 bp, Saccharomyces pastorianus
cattgggtttaatctgaggtgcgga

SEQ ID NO: 102358 - DNA, 25 bp, Saccharomyces pastorianus
aatcaccactttatggtcgcagcga

SEQ ID NO: 102359 - DNA, 25 bp, Saccharomyces pastorianus
tagcgttagtgctcaaactggcagc

SEQ ID NO: 102360 - DNA, 25 bp, Saccharomyces pastorianus
aagcggcttctaatgtacctaatgt

SEQ ID NO: 102361 - DNA, 25 bp, Saccharomyces pastorianus
gaataccattatttgcaccacttat

SEQ ID NO: 102362 - DNA, 25 bp, Saccharomyces pastorianus
ctgcatcttcatcccagagtgaatt

SEQ ID NO: 102363 - DNA, 25 bp, Saccharomyces pastorianus
ataccactctcattgggagcaactt

SEQ ID NO: 102364 - DNA, 25 bp, Saccharomyces pastorianus
gtggaggtacctcaatttcgataca

SEQ ID NO: 102365 - DNA, 25 bp, Saccharomyces pastorianus
accacttatggccactaatacttct

SEQ ID NO: 102366 - DNA, 25 bp, Saccharomyces pastorianus
aagtcagcggctacaccaaggcaaa

SEQ ID NO: 102367 - DNA, 25 bp, Saccharomyces pastorianus
caacgtgaatcctcttttggctaac

SEQ ID NO: 102368 - DNA, 25 bp, Saccharomyces pastorianus
gatctaatcctacttctgcatcttc

SEQ ID NO: 102369 - DNA, 25 bp, Saccharomyces pastorianus
tcgtcccagggttgttccaaatcaa

SEQ ID NO: 102370 - DNA, 25 bp, Saccharomyces pastorianus
gctaagtttgtgttgcatgctaagc

SEQ ID NO: 102371 - DNA, 25 bp, Saccharomyces pastorianus
tcacaattgggtttttaaagccgat

SEQ ID NO: 102372 - DNA, 25 bp, Saccharomyces pastorianus
acatgaattcaagaccgcggacaga

SEQ ID NO: 102373 - DNA, 25 bp, Saccharomyces pastorianus
tacatccatgtcttcattacctgat

SEQ ID NO: 102374 - DNA, 25 bp, Saccharomyces pastorianus
gaaacccaagctaaccaataaccat

SEQ ID NO: 102375 - DNA, 25 bp, Saccharomyces pastorianus
agtatcagctgagtaatgccaatag

SEQ ID NO: 102376 - DNA, 25 bp, Saccharomyces pastorianus
agatttagtaccagtgatgtcgtta

SEQ ID NO: 102377 - DNA, 25 bp, Saccharomyces pastorianus
gtgctgacaccgaactttttacatg

SEQ ID NO: 102378 - DNA, 25 bp, Saccharomyces pastorianus
gtactgtgacggaacattcccggaa

SEQ ID NO: 102379 - DNA, 25 bp, Saccharomyces pastorianus
aagggtattatgtgctgacaccgaa

SEQ ID NO: 102380 - DNA, 25 bp, Saccharomyces pastorianus
gatcttaacatctacttcgaatata

SEQ ID NO: 102381 - DNA, 25 bp, Saccharomyces pastorianus
ggaccccacataattactatttata

SEQ ID NO: 102382 - DNA, 25 bp, Saccharomyces pastorianus
aagacatggatgtattcgtatttgt

SEQ ID NO: 102383 - DNA, 25 bp, Saccharomyces pastorianus
tttggtgttaccgtggaccccacat

SEQ ID NO: 102384 - DNA, 25 bp, Saccharomyces pastorianus
cgtggaccccacataattactattt

SEQ ID NO: 102385 - DNA, 25 bp, Saccharomyces pastorianus
actatttatatcatcgttttcatca

SEQ ID NO: 102386 - DNA, 25 bp, Saccharomyces pastorianus
gtattcgtatttgtttgattgtcca

SEQ ID NO: 102387 - DNA, 25 bp, Saccharomyces pastorianus
gattgtccaattttggtgttaccgt

SEQ ID NO: 102388 - DNA, 25 bp, Saccharomyces pastorianus
attcgtatttgtttgattgtccaat

SEQ ID NO: 102389 - DNA, 25 bp, Saccharomyces pastorianus
atatcatcgttttcatcattttcta

SEQ ID NO: 102390 - DNA, 25 bp, Saccharomyces pastorianus
gtgttaccgtggaccccacataatt

SEQ ID NO: 102391 - DNA, 25 bp, Saccharomyces pastorianus
atcatcgttttcatcattttctacc

SEQ ID NO: 102392 - DNA, 25 bp, Saccharomyces pastorianus
gtttccatgatgtttactacgtcta

SEQ ID NO: 102393 - DNA, 25 bp, Saccharomyces pastorianus
actgcgtggttcatttctcagggta

SEQ ID NO: 102394 - DNA, 25 bp, Saccharomyces pastorianus
aagggcgcttttggacattcatgaa

SEQ ID NO: 102395 - DNA, 25 bp, Saccharomyces pastorianus
ttgtgccctcaaatatcattcttag

SEQ ID NO: 102396 - DNA, 25 bp, Saccharomyces pastorianus
gttctcttggatgatctgactgcgt

SEQ ID NO: 102397 - DNA, 25 bp, Saccharomyces pastorianus
cacagagagtgcttggaccatggga

SEQ ID NO: 102398 - DNA, 25 bp, Saccharomyces pastorianus
gacagctctctcatcaagattgcaa

SEQ ID NO: 102399 - DNA, 25 bp, Saccharomyces pastorianus
gagagccctgagttatccactacat

SEQ ID NO: 102400 - DNA, 25 bp, Saccharomyces pastorianus
tacgtctacgacaaagttctcttgg

SEQ ID NO: 102401 - DNA, 25 bp, Saccharomyces pastorianus
atgtcactatactcagcgttctttt

SEQ ID NO: 102402 - DNA, 25 bp, Saccharomyces pastorianus
gcaagagtcactttccaagcaggat

SEQ ID NO: 102403 - DNA, 25 bp, Saccharomyces pastorianus
attgatgtttttgttcaggtcgcat

SEQ ID NO: 102404 - DNA, 25 bp, Saccharomyces pastorianus
atccggaaattcctgcattcaagta

SEQ ID NO: 102405 - DNA, 25 bp, Saccharomyces pastorianus
acacatgctgtatattattccacca

SEQ ID NO: 102406 - DNA, 25 bp, Saccharomyces pastorianus
cagaggccattgaagtcgctcggaa

SEQ ID NO: 102407 - DNA, 25 bp, Saccharomyces pastorianus
gagtctgcaatgatacataatccgg

SEQ ID NO: 102408 - DNA, 25 bp, Saccharomyces pastorianus
ggtagatttcatttggagtctgcaa

SEQ ID NO: 102409 - DNA, 25 bp, Saccharomyces pastorianus
caccacaaatcaagcctctatcgag

SEQ ID NO: 102410 - DNA, 25 bp, Saccharomyces pastorianus
gatgccatggtattcatcggtgatg

SEQ ID NO: 102411 - DNA, 25 bp, Saccharomyces pastorianus
gtttttggtctgatcttaggtgcat

SEQ ID NO: 102412 - DNA, 25 bp, Saccharomyces pastorianus
tttccccaaaagctcgcaatgttcg

SEQ ID NO: 102413 - DNA, 25 bp, Saccharomyces pastorianus
aggtcgcatgtcctagactgtccat

SEQ ID NO: 102414 - DNA, 25 bp, Saccharomyces pastorianus
gaaatattcctgcagtataacaact

SEQ ID NO: 102415 - DNA, 25 bp, Saccharomyces pastorianus
ttacacaactaaccctatcgcaggt

SEQ ID NO: 102416 - DNA, 25 bp, Saccharomyces pastorianus
tgagcaatggttcagcaagcttgtt

SEQ ID NO: 102417 - DNA, 25 bp, Saccharomyces pastorianus
ggtcactgttttacctcttacacaa

SEQ ID NO: 102418 - DNA, 25 bp, Saccharomyces pastorianus
gaagcgattcgaggtctattattgt

SEQ ID NO: 102419 - DNA, 25 bp, Saccharomyces pastorianus
gggaagaattaacacctggtcactg

SEQ ID NO: 102420 - DNA, 25 bp, Saccharomyces pastorianus
gactatggtttgaatgcatcagcaa

SEQ ID NO: 102421 - DNA, 25 bp, Saccharomyces pastorianus
ccctatcgcaggtgactatggtttg

SEQ ID NO: 102422 - DNA, 25 bp, Saccharomyces pastorianus
agcaagcttgttgatgaactgggaa

SEQ ID NO: 102423 - DNA, 25 bp, Saccharomyces pastorianus
atcagcaatagacggccacacggaa

SEQ ID NO: 102424 - DNA, 25 bp, Saccharomyces pastorianus
cacggaagagttagtggcgacccac

SEQ ID NO: 102425 - DNA, 25 bp, Saccharomyces pastorianus
caacatcttctccaatagggccaag

SEQ ID NO: 102426 - DNA, 25 bp, Saccharomyces pastorianus
aaacttgttattgaggacgccttgc

SEQ ID NO: 102427 - DNA, 25 bp, Saccharomyces pastorianus
aacttgggcctttcctcaaatgata

SEQ ID NO: 102428 - DNA, 25 bp, Saccharomyces pastorianus
tttgtcaaacctagcatccttctac

SEQ ID NO: 102429 - DNA, 25 bp, Saccharomyces pastorianus
aatatggacagctcttcttcgccaa

SEQ ID NO: 102430 - DNA, 25 bp, Saccharomyces pastorianus
aaagatctacttccatgtcccattc

SEQ ID NO: 102431 - DNA, 25 bp, Saccharomyces pastorianus
actttccctcaaccttatggtgatg

SEQ ID NO: 102432 - DNA, 25 bp, Saccharomyces pastorianus
acaaaaccaacgaccagctcataat

SEQ ID NO: 102433 - DNA, 25 bp, Saccharomyces pastorianus
tagggccaagagatccaacggtgca

SEQ ID NO: 102434 - DNA, 25 bp, Saccharomyces pastorianus
acagcggcagctaaactatacttac

SEQ ID NO: 102435 - DNA, 25 bp, Saccharomyces pastorianus
tgccctcattcgactcatttgtaga

SEQ ID NO: 102436 - DNA, 25 bp, Saccharomyces pastorianus
ttgcacatgcgttcgatatacccca

SEQ ID NO: 102437 - DNA, 25 bp, Saccharomyces pastorianus
tatggctttggcgagggaaatccct

SEQ ID NO: 102438 - DNA, 25 bp, Saccharomyces pastorianus
gagcagcatgacttggttgtcccaa

SEQ ID NO: 102439 - DNA, 25 bp, Saccharomyces pastorianus
aatgcaacgggtattgccctgggcc

SEQ ID NO: 102440 - DNA, 25 bp, Saccharomyces pastorianus
acagggtttatgcagggtgcccaac

SEQ ID NO: 102441 - DNA, 25 bp, Saccharomyces pastorianus
ttacctggtcctatacttcattctg

SEQ ID NO: 102442 - DNA, 25 bp, Saccharomyces pastorianus
ggacatatccactttattagctgcg

SEQ ID NO: 102443 - DNA, 25 bp, Saccharomyces pastorianus
tttggagttcaatacacctgccttc

SEQ ID NO: 102444 - DNA, 25 bp, Saccharomyces pastorianus
cctgaacacgttgcaccatttgatg

SEQ ID NO: 102445 - DNA, 25 bp, Saccharomyces pastorianus
gtgtgccgcttcaacaacgctttat

SEQ ID NO: 102446 - DNA, 25 bp, Saccharomyces pastorianus
tcttccgttcgatatcaatgaccct

SEQ ID NO: 102447 - DNA, 25 bp, Saccharomyces pastorianus
atacaatcctggcaacaagttgaca

SEQ ID NO: 102448 - DNA, 25 bp, Saccharomyces pastorianus
gactctaagtcattacgttccatat

SEQ ID NO: 102449 - DNA, 25 bp, Saccharomyces pastorianus
cattacgcacatatagaggactcat

SEQ ID NO: 102450 - DNA, 25 bp, Saccharomyces pastorianus
ggagctggtcgacagatacaatcct

SEQ ID NO: 102451 - DNA, 25 bp, Saccharomyces pastorianus
gagagactcgcatgagaacatcaac

SEQ ID NO: 102452 - DNA, 25 bp, Saccharomyces pastorianus
gaatttgtttattgccgactctaag

SEQ ID NO: 102453 - DNA, 25 bp, Saccharomyces pastorianus
ggacatcatcaagttcttggacaac

SEQ ID NO: 102454 - DNA, 25 bp, Saccharomyces pastorianus
ggatagaccaagaacattacgcaca

SEQ ID NO: 102455 - DNA, 25 bp, Saccharomyces pastorianus
gatattcgaacacgctttggacatc

SEQ ID NO: 102456 - DNA, 25 bp, Saccharomyces pastorianus
gaggactcataagagccattctgaa

SEQ ID NO: 102457 - DNA, 25 bp, Saccharomyces pastorianus
atccggtaagcgacagatctttgaa

SEQ ID NO: 102458 - DNA, 25 bp, Saccharomyces pastorianus
gtcccgtttgcagtgagactttcaa

SEQ ID NO: 102459 - DNA, 25 bp, Saccharomyces pastorianus
ttacaactctttacgctacattcac

SEQ ID NO: 102460 - DNA, 25 bp, Saccharomyces pastorianus
gaagacaagagattgcctgcaccct

SEQ ID NO: 102461 - DNA, 25 bp, Saccharomyces pastorianus
agagacggaaactgccacaacagca

SEQ ID NO: 102462 - DNA, 25 bp, Saccharomyces pastorianus
tagaattacctccaaacctgcggtg

SEQ ID NO: 102463 - DNA, 25 bp, Saccharomyces pastorianus
acaggcattaccatttgctcatcac

SEQ ID NO: 102464 - DNA, 25 bp, Saccharomyces pastorianus
gagcgacttttattccatgtatggc

SEQ ID NO: 102465 - DNA, 25 bp, Saccharomyces pastorianus
tgctcatcacattcagtctcaatta

SEQ ID NO: 102466 - DNA, 25 bp, Saccharomyces pastorianus
aaatgacttattcttgagcgacttt

SEQ ID NO: 102467 - DNA, 25 bp, Saccharomyces pastorianus
aatgaccctttattgatatacctgt

SEQ ID NO: 102468 - DNA, 25 bp, Saccharomyces pastorianus
aggaaaaattgtcccgtttgcagtg

SEQ ID NO: 102469 - DNA, 25 bp, Saccharomyces pastorianus
attttccaggatatcatcaccggag

SEQ ID NO: 102470 - DNA, 25 bp, Saccharomyces pastorianus
gagcagatcgagcaaattccaatgg

SEQ ID NO: 102471 - DNA, 25 bp, Saccharomyces pastorianus
ttgaccgccgaaggttatggtaaca

SEQ ID NO: 102472 - DNA, 25 bp, Saccharomyces pastorianus
tggtaacatcatactgtcccttttc

SEQ ID NO: 102473 - DNA, 25 bp, Saccharomyces pastorianus
taatgaggatactccccaggctaaa

SEQ ID NO: 102474 - DNA, 25 bp, Saccharomyces pastorianus
tgtcccttttcgatggagagcccta

SEQ ID NO: 102475 - DNA, 25 bp, Saccharomyces pastorianus
gaacgtgatgctaggttctacatct

SEQ ID NO: 102476 - DNA, 25 bp, Saccharomyces pastorianus
tattccgatatttttccagattgac

SEQ ID NO: 102477 - DNA, 25 bp, Saccharomyces pastorianus
aaatgatactcttcgttatacgcaa

SEQ ID NO: 102478 - DNA, 25 bp, Saccharomyces pastorianus
atcaacaggcttagcgatcatcgtt

SEQ ID NO: 102479 - DNA, 25 bp, Saccharomyces pastorianus
gagagccctatgattcatggcaaat

SEQ ID NO: 102480 - DNA, 25 bp, Saccharomyces pastorianus
aaagcctactttgataccagataat

SEQ ID NO: 102481 - DNA, 25 bp, Saccharomyces pastorianus
gagttctgatgatccggtaacgtat

SEQ ID NO: 102482 - DNA, 25 bp, Saccharomyces pastorianus
gtaacgtataaatccgcatccgggt

SEQ ID NO: 102483 - DNA, 25 bp, Saccharomyces pastorianus
ttatcagattttgaccagcatgaga

SEQ ID NO: 102484 - DNA, 25 bp, Saccharomyces pastorianus
gtatgcctccttcaattttatcaga

SEQ ID NO: 102485 - DNA, 25 bp, Saccharomyces pastorianus
atccgcatccgggtatggtaaatat

SEQ ID NO: 102486 - DNA, 25 bp, Saccharomyces pastorianus
gaaacttccaatcggcattcaagtg

SEQ ID NO: 102487 - DNA, 25 bp, Saccharomyces pastorianus
gaaaaacgtcgcagtatgcctcctt

SEQ ID NO: 102488 - DNA, 25 bp, Saccharomyces pastorianus
ttcgagaactggatcaagggactat

SEQ ID NO: 102489 - DNA, 25 bp, Saccharomyces pastorianus
attacaggtctcattctccagtgaa

SEQ ID NO: 102490 - DNA, 25 bp, Saccharomyces pastorianus
aaagaatttccagcgaagccacaga

SEQ ID NO: 102491 - DNA, 25 bp, Saccharomyces pastorianus
tatattatctgacggtgctgctgct

SEQ ID NO: 102492 - DNA, 25 bp, Saccharomyces pastorianus
tgctgctgctttagtcggttcatta

SEQ ID NO: 102493 - DNA, 25 bp, Saccharomyces pastorianus
ggtacaagagttgctgatgccacaa

SEQ ID NO: 102494 - DNA, 25 bp, Saccharomyces pastorianus
gagggttctatcaagacaccagatt

SEQ ID NO: 102495 - DNA, 25 bp, Saccharomyces pastorianus
cattaggtgttgttccaagcgccaa

SEQ ID NO: 102496 - DNA, 25 bp, Saccharomyces pastorianus
ttgctaacccaattgccactataag

SEQ ID NO: 102497 - DNA, 25 bp, Saccharomyces pastorianus
caagcgccaacgtaggtccagaaat

SEQ ID NO: 102498 - DNA, 25 bp, Saccharomyces pastorianus
gattccatggtttataggctgttca

SEQ ID NO: 102499 - DNA, 25 bp, Saccharomyces pastorianus
gatagtggcaccaaacctatacggg

SEQ ID NO: 102500 - DNA, 25 bp, Saccharomyces pastorianus
gaagctgcccaagatatctacaagg

SEQ ID NO: 102501 - DNA, 25 bp, Saccharomyces pastorianus
agaggccaagccactttgacagtga

SEQ ID NO: 102502 - DNA, 25 bp, Saccharomyces pastorianus
gacaagacccaactcgagcgacaaa

SEQ ID NO: 102503 - DNA, 25 bp, Saccharomyces pastorianus
aagcggagatgttcggatccctctt

SEQ ID NO: 102504 - DNA, 25 bp, Saccharomyces pastorianus
gtaacagaacaaccgcatgccaaca

SEQ ID NO: 102505 - DNA, 25 bp, Saccharomyces pastorianus
caaggacaagtaaccctgcagggtc

SEQ ID NO: 102506 - DNA, 25 bp, Saccharomyces pastorianus
gacgacactacattgaatacggcgc

SEQ ID NO: 102507 - DNA, 25 bp, Saccharomyces pastorianus
gtcgaagcatatgaccatgccagat

SEQ ID NO: 102508 - DNA, 25 bp, Saccharomyces pastorianus
gatccctctttggagtttctgccat

SEQ ID NO: 102509 - DNA, 25 bp, Saccharomyces pastorianus
gtgttatccagcgaactatgtactt

SEQ ID NO: 102510 - DNA, 25 bp, Saccharomyces pastorianus
gaaaaggctgtacaggccacctaaa

SEQ ID NO: 102511 - DNA, 25 bp, Saccharomyces pastorianus
acatccatgggagttgtcgagacct

SEQ ID NO: 102512 - DNA, 25 bp, Saccharomyces pastorianus
ataggctcagatcgctcttttacaa

SEQ ID NO: 102513 - DNA, 25 bp, Saccharomyces pastorianus
tatcgcgggcctcagaaatattcca

SEQ ID NO: 102514 - DNA, 25 bp, Saccharomyces pastorianus
gactctcagatcacgtgcaagcttt

SEQ ID NO: 102515 - DNA, 25 bp, Saccharomyces pastorianus
atatcgaatagcttctcctcaacag

SEQ ID NO: 102516 - DNA, 25 bp, Saccharomyces pastorianus
gcccacaagctctgcgacagttagt

SEQ ID NO: 102517 - DNA, 25 bp, Saccharomyces pastorianus
gcttcaaaagccctggagtgtctat

SEQ ID NO: 102518 - DNA, 25 bp, Saccharomyces pastorianus
gcataactttgctgtgcgcacgagg

SEQ ID NO: 102519 - DNA, 25 bp, Saccharomyces pastorianus
gaaagtgctacccactgcataactt

SEQ ID NO: 102520 - DNA, 25 bp, Saccharomyces pastorianus
aacagagtatatgtttccgcccaca

SEQ ID NO: 102521 - DNA, 25 bp, Saccharomyces pastorianus
gccaggttaaagatattgcccagtt

SEQ ID NO: 102522 - DNA, 25 bp, Saccharomyces pastorianus
attgcccagtttaatccgttcatga

SEQ ID NO: 102523 - DNA, 25 bp, Saccharomyces pastorianus
taaatagcctaagccgtatcgcggg

SEQ ID NO: 102524 - DNA, 25 bp, Saccharomyces pastorianus
aactccagtattgggcaatccggtt

SEQ ID NO: 102525 - DNA, 25 bp, Saccharomyces pastorianus
gatttacattcctgattacactgac

SEQ ID NO: 102526 - DNA, 25 bp, Saccharomyces pastorianus
gagcgtcgttttttataagcctcca

SEQ ID NO: 102527 - DNA, 25 bp, Saccharomyces pastorianus
aagtgtcattattcctggtattgtc

SEQ ID NO: 102528 - DNA, 25 bp, Saccharomyces pastorianus
gcaagcttgatggtctttcactcga

SEQ ID NO: 102529 - DNA, 25 bp, Saccharomyces pastorianus
atcaagggtgtcaagagcgtcgttt

SEQ ID NO: 102530 - DNA, 25 bp, Saccharomyces pastorianus
taagcctccaaacaatcctgaattt

SEQ ID NO: 102531 - DNA, 25 bp, Saccharomyces pastorianus
gtatacggaaagactgcaccattat

SEQ ID NO: 102532 - DNA, 25 bp, Saccharomyces pastorianus
gtattgtcaaatccaccgggtatga

SEQ ID NO: 102533 - DNA, 25 bp, Saccharomyces pastorianus
gaacgcctttctaggtaataccgat

SEQ ID NO: 102534 - DNA, 25 bp, Saccharomyces pastorianus
gagtactctagccaaagacagctca

SEQ ID NO: 102535 - DNA, 25 bp, Saccharomyces pastorianus
gaatttcacctttagtgttccgcta

SEQ ID NO: 102536 - DNA, 25 bp, Saccharomyces pastorianus
gttctgatgttttactcggcaacga

SEQ ID NO: 102537 - DNA, 25 bp, Saccharomyces pastorianus
tagtgttccgctatccattaatgaa

SEQ ID NO: 102538 - DNA, 25 bp, Saccharomyces pastorianus
agatggcaagcgaatcagtttcccc

SEQ ID NO: 102539 - DNA, 25 bp, Saccharomyces pastorianus
gtattggtacagtccttgcatatta

SEQ ID NO: 102540 - DNA, 25 bp, Saccharomyces pastorianus
atcagtttccccagctatagtaatc

SEQ ID NO: 102541 - DNA, 25 bp, Saccharomyces pastorianus
gaggattattccagcattacaaaga

SEQ ID NO: 102542 - DNA, 25 bp, Saccharomyces pastorianus
atccttgatatctaaaccattttgg

SEQ ID NO: 102543 - DNA, 25 bp, Saccharomyces pastorianus
aattgctatgtatactcacctgatt

SEQ ID NO: 102544 - DNA, 25 bp, Saccharomyces pastorianus
aagaaatctgcccacagctgacaat

SEQ ID NO: 102545 - DNA, 25 bp, Saccharomyces pastorianus
gacaatcttttgtgctactttcata

SEQ ID NO: 102546 - DNA, 25 bp, Saccharomyces pastorianus
ggtgcagcttattgctagtcttcta

SEQ ID NO: 102547 - DNA, 25 bp, Saccharomyces pastorianus
aagtttcggaatacactcgtgcttc

SEQ ID NO: 102548 - DNA, 25 bp, Saccharomyces pastorianus
atcatgcgccatttgttaagtctag

SEQ ID NO: 102549 - DNA, 25 bp, Saccharomyces pastorianus
cgtgcttccaacctaagaccaatta

SEQ ID NO: 102550 - DNA, 25 bp, Saccharomyces pastorianus
gtctatttcattcactttacctgga

SEQ ID NO: 102551 - DNA, 25 bp, Saccharomyces pastorianus
gtgatgcactagacgcaacttctta

SEQ ID NO: 102552 - DNA, 25 bp, Saccharomyces pastorianus
ggcgttgtctgtccagtcatttgca

SEQ ID NO: 102553 - DNA, 25 bp, Saccharomyces pastorianus
aagcatgtataccttggcgttgtct

SEQ ID NO: 102554 - DNA, 25 bp, Saccharomyces pastorianus
ggctcggattctttggctattggga

SEQ ID NO: 102555 - DNA, 25 bp, Saccharomyces pastorianus
gggctacaggttcaacgtctatttc

SEQ ID NO: 102556 - DNA, 25 bp, Saccharomyces pastorianus
tcttctacggactatctgtgatgtt

SEQ ID NO: 102557 - DNA, 25 bp, Saccharomyces pastorianus
acatggtccgccttatatttgattg

SEQ ID NO: 102558 - DNA, 25 bp, Saccharomyces pastorianus
ggctggcttcattgctacatggtcc

SEQ ID NO: 102559 - DNA, 25 bp, Saccharomyces pastorianus
acccgctactgacgatgccaaagat

SEQ ID NO: 102560 - DNA, 25 bp, Saccharomyces pastorianus
gatgaacttctatcaccatttcgcc

SEQ ID NO: 102561 - DNA, 25 bp, Saccharomyces pastorianus
tttaaagtgcctccaacgcaatctc

SEQ ID NO: 102562 - DNA, 25 bp, Saccharomyces pastorianus
gggtattctctaaatcttctactgc

SEQ ID NO: 102563 - DNA, 25 bp, Saccharomyces pastorianus
ggtgctatccccaagctttaaagtg

SEQ ID NO: 102564 - DNA, 25 bp, Saccharomyces pastorianus
ttgacaaggacaccttatcctgcgc

SEQ ID NO: 102565 - DNA, 25 bp, Saccharomyces pastorianus
tgctatcctcggtttcattggccaa

SEQ ID NO: 102566 - DNA, 25 bp, Saccharomyces pastorianus
catttcgccggctatatgcattgac

SEQ ID NO: 102567 - DNA, 25 bp, Saccharomyces pastorianus
aaacgcagcactattagcatccact

SEQ ID NO: 102568 - DNA, 25 bp, Saccharomyces pastorianus
ggttgggattcttcgtccaacgaat

SEQ ID NO: 102569 - DNA, 25 bp, Saccharomyces pastorianus
atggatgtggccaatgtgcactcct

SEQ ID NO: 102570 - DNA, 25 bp, Saccharomyces pastorianus
agcaccacctttacagtctttgaaa

SEQ ID NO: 102571 - DNA, 25 bp, Saccharomyces pastorianus
aaccgtggtgctcaacgatattcta

SEQ ID NO: 102572 - DNA, 25 bp, Saccharomyces pastorianus
actctgactcagattttctacaagg

SEQ ID NO: 102573 - DNA, 25 bp, Saccharomyces pastorianus
agtgctactgacacgggagctggaa

SEQ ID NO: 102574 - DNA, 25 bp, Saccharomyces pastorianus
atggccatggttctagacaagggtc

SEQ ID NO: 102575 - DNA, 25 bp, Saccharomyces pastorianus
ggtactgatctatatgcatttttgt

SEQ ID NO: 102576 - DNA, 25 bp, Saccharomyces pastorianus
caatgtgcactcctatgccatgaat

SEQ ID NO: 102577 - DNA, 25 bp, Saccharomyces pastorianus
gatattctaccaaaacagcaccacc

SEQ ID NO: 102578 - DNA, 25 bp, Saccharomyces pastorianus
tagcagaccgcaataccagaagaac

SEQ ID NO: 102579 - DNA, 25 bp, Saccharomyces pastorianus
acttagctgctgctgtcagtgattt

SEQ ID NO: 102580 - DNA, 25 bp, Saccharomyces pastorianus
gttccatattcaagactacctcagc

SEQ ID NO: 102581 - DNA, 25 bp, Saccharomyces pastorianus
tgaccctgtccctaagtttttgaga

SEQ ID NO: 102582 - DNA, 25 bp, Saccharomyces pastorianus
actgatgaatccatgctgctttaca

SEQ ID NO: 102583 - DNA, 25 bp, Saccharomyces pastorianus
aagcgatgatcgtttcgttcaaatt

SEQ ID NO: 102584 - DNA, 25 bp, Saccharomyces pastorianus
caaatgtacacaagccctggataga

SEQ ID NO: 102585 - DNA, 25 bp, Saccharomyces pastorianus
gtggttgcttgttttacttagctgc

SEQ ID NO: 102586 - DNA, 25 bp, Saccharomyces pastorianus
ggactacgcctgatggtaaactgat

SEQ ID NO: 102587 - DNA, 25 bp, Saccharomyces pastorianus
gaagtcatcgcacgccatgacaaat

SEQ ID NO: 102588 - DNA, 25 bp, Saccharomyces pastorianus
gaggagaaactacttttactaccat

SEQ ID NO: 102589 - DNA, 25 bp, Saccharomyces pastorianus
tgattgtgaatcttgaccctgtccc

SEQ ID NO: 102590 - DNA, 25 bp, Saccharomyces pastorianus
gtgaagcttcacaaaggcaacactt

SEQ ID NO: 102591 - DNA, 25 bp, Saccharomyces pastorianus
tataactgtgggaatgccggtcatt

SEQ ID NO: 102592 - DNA, 25 bp, Saccharomyces pastorianus
tataacgacgatgcatacgacctcc

SEQ ID NO: 102593 - DNA, 25 bp, Saccharomyces pastorianus
agaagtcaccatttagcgcacagaa

SEQ ID NO: 102594 - DNA, 25 bp, Saccharomyces pastorianus
acctccctggctcaaggacttatag

SEQ ID NO: 102595 - DNA, 25 bp, Saccharomyces pastorianus
aaggtcatcgagagtgccgaacact

SEQ ID NO: 102596 - DNA, 25 bp, Saccharomyces pastorianus
cattttggcgatgactgtgctgaaa

SEQ ID NO: 102597 - DNA, 25 bp, Saccharomyces pastorianus
tagatttccccagaagtagccaaaa

SEQ ID NO: 102598 - DNA, 25 bp, Saccharomyces pastorianus
aaaagagttcagacacaccccttag

SEQ ID NO: 102599 - DNA, 25 bp, Saccharomyces pastorianus
gcattttgcggtgataacttagcca

SEQ ID NO: 102600 - DNA, 25 bp, Saccharomyces pastorianus
gattattcgagccagttcagctata

SEQ ID NO: 102601 - DNA, 25 bp, Saccharomyces pastorianus
ttggttatcaccacgtcaagttttg

SEQ ID NO: 102602 - DNA, 25 bp, Saccharomyces pastorianus
ttctatgccgatgtcgatttgaccg

SEQ ID NO: 102603 - DNA, 25 bp, Saccharomyces pastorianus
ttgaccgagcattttgctggtaaat

SEQ ID NO: 102604 - DNA, 25 bp, Saccharomyces pastorianus
gtaaaaatgctactgtttctgttga

SEQ ID NO: 102605 - DNA, 25 bp, Saccharomyces pastorianus
ttttggttgtgccagttggtgtcaa

SEQ ID NO: 102606 - DNA, 25 bp, Saccharomyces pastorianus
cgatttgaccggtaacactctgcaa

SEQ ID NO: 102607 - DNA, 25 bp, Saccharomyces pastorianus
gggtatgctgaagacgtccgtaaca

SEQ ID NO: 102608 - DNA, 25 bp, Saccharomyces pastorianus
gaaagaccggtcatgatccatcgtg

SEQ ID NO: 102609 - DNA, 25 bp, Saccharomyces pastorianus
aattgcacgatgctggcttctatgc

SEQ ID NO: 102610 - DNA, 25 bp, Saccharomyces pastorianus
aaatggccattttggttatcaccac

SEQ ID NO: 102611 - DNA, 25 bp, Saccharomyces pastorianus
atccatcgtgccattttagggtctg

SEQ ID NO: 102612 - DNA, 25 bp, Saccharomyces pastorianus
aggaacggcgacaacagctcgtctt

SEQ ID NO: 102613 - DNA, 25 bp, Saccharomyces pastorianus
ccctcaaggtggtcgatgtactttt

SEQ ID NO: 102614 - DNA, 25 bp, Saccharomyces pastorianus
tcctgttctgtcttcctgggaaaaa

SEQ ID NO: 102615 - DNA, 25 bp, Saccharomyces pastorianus
gaacgtgaccccacaggtgttttga

SEQ ID NO: 102616 - DNA, 25 bp, Saccharomyces pastorianus
ttgctggtaggtccatgtatacacg

SEQ ID NO: 102617 - DNA, 25 bp, Saccharomyces pastorianus
gagaagattgccagacccgaaagtc

SEQ ID NO: 102618 - DNA, 25 bp, Saccharomyces pastorianus
atgcgcttattagattcaggctccc

SEQ ID NO: 102619 - DNA, 25 bp, Saccharomyces pastorianus
gtagaaaatctcctgacccaattga

SEQ ID NO: 102620 - DNA, 25 bp, Saccharomyces pastorianus
gacaacgactttggagcctttcaac

SEQ ID NO: 102621 - DNA, 25 bp, Saccharomyces pastorianus
atgctaccgataattcctcttctga

SEQ ID NO: 102622 - DNA, 25 bp, Saccharomyces pastorianus
taacggctcgccctttatgaaccaa

SEQ ID NO: 102623 - DNA, 25 bp, Saccharomyces pastorianus
caactgtcattggtattcgtggtag

SEQ ID NO: 102624 - DNA, 25 bp, Saccharomyces pastorianus
aatatgacccgtatactaccacaac

SEQ ID NO: 102625 - DNA, 25 bp, Saccharomyces pastorianus
tccctttcttttacaccaacaactg

SEQ ID NO: 102626 - DNA, 25 bp, Saccharomyces pastorianus
agtgatcaagctatacccaaatttc

SEQ ID NO: 102627 - DNA, 25 bp, Saccharomyces pastorianus
tactaccacaacaatcgagatatat

SEQ ID NO: 102628 - DNA, 25 bp, Saccharomyces pastorianus
ggaacctgtagcactaattgaaact

SEQ ID NO: 102629 - DNA, 25 bp, Saccharomyces pastorianus
gttctttccacgacagcaagggcaa

SEQ ID NO: 102630 - DNA, 25 bp, Saccharomyces pastorianus
ggtagcaacagctgttctttccacg

SEQ ID NO: 102631 - DNA, 25 bp, Saccharomyces pastorianus
gatagggaacccaaggaacctgtag

SEQ ID NO: 102632 - DNA, 25 bp, Saccharomyces pastorianus
gaagatgcattcagttatccgaaga

SEQ ID NO: 102633 - DNA, 25 bp, Saccharomyces pastorianus
gcaaatgaaagatgttaacgctcca

SEQ ID NO: 102634 - DNA, 25 bp, Saccharomyces pastorianus
tcgcttatctaatggcagacatctc

SEQ ID NO: 102635 - DNA, 25 bp, Saccharomyces pastorianus
aacagttttctgattctcacggcga

SEQ ID NO: 102636 - DNA, 25 bp, Saccharomyces pastorianus
cccagaagtcagtttgaagtctttg

SEQ ID NO: 102637 - DNA, 25 bp, Saccharomyces pastorianus
atataatcctgacaccacatattgg

SEQ ID NO: 102638 - DNA, 25 bp, Saccharomyces pastorianus
ttctcacggcgagatcgcttatcta

SEQ ID NO: 102639 - DNA, 25 bp, Saccharomyces pastorianus
acaattcgctgctatgaaggacggg

SEQ ID NO: 102640 - DNA, 25 bp, Saccharomyces pastorianus
cagctggacttctgagttggtttca

SEQ ID NO: 102641 - DNA, 25 bp, Saccharomyces pastorianus
gaccgttaatgatatcttatccgat

SEQ ID NO: 102642 - DNA, 25 bp, Saccharomyces pastorianus
atctctgatccaagccgtcaaggcc

SEQ ID NO: 102643 - DNA, 25 bp, Saccharomyces pastorianus
taacgatgaacttaacagctggact

SEQ ID NO: 102644 - DNA, 25 bp, Saccharomyces pastorianus
gaagtctttggactacgatcaagag

SEQ ID NO: 102645 - DNA, 25 bp, Saccharomyces pastorianus
gaaactatagccacttactgctgga

SEQ ID NO: 102646 - DNA, 25 bp, Saccharomyces pastorianus
gaaagcgccttaatcatgcctgatc

SEQ ID NO: 102647 - DNA, 25 bp, Saccharomyces pastorianus
tactgctggaatatcggcgtcaatt

SEQ ID NO: 102648 - DNA, 25 bp, Saccharomyces pastorianus
gaatgttttctggaggcgttgacta

SEQ ID NO: 102649 - DNA, 25 bp, Saccharomyces pastorianus
gaggtcgaactacgcatattggata

SEQ ID NO: 102650 - DNA, 25 bp, Saccharomyces pastorianus
gcgctacttattgatatctcgtcga

SEQ ID NO: 102651 - DNA, 25 bp, Saccharomyces pastorianus
acacagatggtgtccttcaaacaga

SEQ ID NO: 102652 - DNA, 25 bp, Saccharomyces pastorianus
ttgactatacatctggaaagcgcct

SEQ ID NO: 102653 - DNA, 25 bp, Saccharomyces pastorianus
agctggctgcgaattttactggaaa

SEQ ID NO: 102654 - DNA, 25 bp, Saccharomyces pastorianus
aagatagccgcgtggatgcgctact

SEQ ID NO: 102655 - DNA, 25 bp, Saccharomyces pastorianus
gaacgggaactctgtagctggctgc

SEQ ID NO: 102656 - DNA, 25 bp, Saccharomyces pastorianus
ggatttccggcctctataacagaac

SEQ ID NO: 102657 - DNA, 25 bp, Saccharomyces pastorianus
agtctattctgaagctctttctccg

SEQ ID NO: 102658 - DNA, 25 bp, Saccharomyces pastorianus
agtcgagtcgtggttacaggatatc

SEQ ID NO: 102659 - DNA, 25 bp, Saccharomyces pastorianus
gagagttgcattcgccttatttgta

SEQ ID NO: 102660 - DNA, 25 bp, Saccharomyces pastorianus
gttcccctaaatccgagagcttcta

SEQ ID NO: 102661 - DNA, 25 bp, Saccharomyces pastorianus
taggtacgttacgagctctgtactc

SEQ ID NO: 102662 - DNA, 25 bp, Saccharomyces pastorianus
ttgatcttaactcaagcttgcccac

SEQ ID NO: 102663 - DNA, 25 bp, Saccharomyces pastorianus
gagcttctatcaagaggttctgcct

SEQ ID NO: 102664 - DNA, 25 bp, Saccharomyces pastorianus
gtcgtcaaccctacaggagcttgat

SEQ ID NO: 102665 - DNA, 25 bp, Saccharomyces pastorianus
taaatggcactttaccaccagttcc

SEQ ID NO: 102666 - DNA, 25 bp, Saccharomyces pastorianus
agatgaaacactatgcctcgataat

SEQ ID NO: 102667 - DNA, 25 bp, Saccharomyces pastorianus
aatttcgaaatttaactgccctgat

SEQ ID NO: 102668 - DNA, 25 bp, Saccharomyces pastorianus
aaagtgtatcacgtccccgtcaatt

SEQ ID NO: 102669 - DNA, 25 bp, Saccharomyces pastorianus
aagagtgatcgctccgtaaatctag

SEQ ID NO: 102670 - DNA, 25 bp, Saccharomyces pastorianus
gccatttctgctaatttcgttaaca

SEQ ID NO: 102671 - DNA, 25 bp, Saccharomyces pastorianus
ttttctgcctgtcatggtctgtcat

SEQ ID NO: 102672 - DNA, 25 bp, Saccharomyces pastorianus
atatcgcttctatcgttaacttcat

SEQ ID NO: 102673 - DNA, 25 bp, Saccharomyces pastorianus
aaacctccctctgaatcactaatat

SEQ ID NO: 102674 - DNA, 25 bp, Saccharomyces pastorianus
atagttgctgtattgtttccaccgc

SEQ ID NO: 102675 - DNA, 25 bp, Saccharomyces pastorianus
ataacctcgtttatcatggtgccat

SEQ ID NO: 102676 - DNA, 25 bp, Saccharomyces pastorianus
taatgtctttcaaatccgtgttttc

SEQ ID NO: 102677 - DNA, 25 bp, Saccharomyces pastorianus
tgtttccaccgctatacatcagtga

SEQ ID NO: 102678 - DNA, 25 bp, Saccharomyces pastorianus
gaggatagttccattttacaaagta

SEQ ID NO: 102679 - DNA, 25 bp, Saccharomyces pastorianus
tcgtcggctgctgttatcatgaggt

SEQ ID NO: 102680 - DNA, 25 bp, Saccharomyces pastorianus
tttttcagatgacacccttattggt

SEQ ID NO: 102681 - DNA, 25 bp, Saccharomyces pastorianus
cattatccaaggtaattcactgatg

SEQ ID NO: 102682 - DNA, 25 bp, Saccharomyces pastorianus
gttttcttatttatcatctacacta

SEQ ID NO: 102683 - DNA, 25 bp, Saccharomyces pastorianus
gttaattgtctcgaactgttgataa

SEQ ID NO: 102684 - DNA, 25 bp, Saccharomyces pastorianus
tttttggaacctagctggtcgtcgt

SEQ ID NO: 102685 - DNA, 25 bp, Saccharomyces pastorianus
gcggtggaaacaatacagcaactat

SEQ ID NO: 102686 - DNA, 25 bp, Saccharomyces pastorianus
atatcagggcagttaaatttcgaaa

SEQ ID NO: 102687 - DNA, 25 bp, Saccharomyces pastorianus
gaaattagcagaaatggcaccatga

SEQ ID NO: 102688 - DNA, 25 bp, Saccharomyces pastorianus
cacccttattggttaattgtctcga

SEQ ID NO: 102689 - DNA, 25 bp, Saccharomyces pastorianus
ctcattagtagagacacccggtaag

SEQ ID NO: 102690 - DNA, 25 bp, Saccharomyces pastorianus
catggcccacctttttcaaacttgg

SEQ ID NO: 102691 - DNA, 25 bp, Saccharomyces pastorianus
gttaccagagtcaacgtcgttagac

SEQ ID NO: 102692 - DNA, 25 bp, Saccharomyces pastorianus
gattgctaatctgccttacaacaac

SEQ ID NO: 102693 - DNA, 25 bp, Saccharomyces pastorianus
gaaagcgcaagcgaacctgcagtct

SEQ ID NO: 102694 - DNA, 25 bp, Saccharomyces pastorianus
atcagtctgctgaggccgaaataac

SEQ ID NO: 102695 - DNA, 25 bp, Saccharomyces pastorianus
gcgaacctgcagtctcatttgaatt

SEQ ID NO: 102696 - DNA, 25 bp, Saccharomyces pastorianus
aggtgtcaatgaagagctagcctct

SEQ ID NO: 102697 - DNA, 25 bp, Saccharomyces pastorianus
gaattggtataccatggcccacctt

SEQ ID NO: 102698 - DNA, 25 bp, Saccharomyces pastorianus
atgttgatagtgctactccataccc

SEQ ID NO: 102699 - DNA, 25 bp, Saccharomyces pastorianus
atcagacaactttgccaacgttaat

SEQ ID NO: 102700 - DNA, 25 bp, Saccharomyces pastorianus
gtagcctgttgtacgatcttctttc

SEQ ID NO: 102701 - DNA, 25 bp, Saccharomyces pastorianus
taatatgctatctatcggctcacag

SEQ ID NO: 102702 - DNA, 25 bp, Saccharomyces pastorianus
tcacatctttcctacacttcaatat

SEQ ID NO: 102703 - DNA, 25 bp, Saccharomyces pastorianus
gaattctaatacaaaccgcctcatc

SEQ ID NO: 102704 - DNA, 25 bp, Saccharomyces pastorianus
aagtaggttcgcgatctacaccgtt

SEQ ID NO: 102705 - DNA, 25 bp, Saccharomyces pastorianus
cagtaaatctatgcgcgagtcccag

SEQ ID NO: 102706 - DNA, 25 bp, Saccharomyces pastorianus
ttcatgtaacatttccgtagcctgt

SEQ ID NO: 102707 - DNA, 25 bp, Saccharomyces pastorianus
cggctcacagcttaggtccatgaag

SEQ ID NO: 102708 - DNA, 25 bp, Saccharomyces pastorianus
gcgagtcccagtatacttcaagata

SEQ ID NO: 102709 - DNA, 25 bp, Saccharomyces pastorianus
atcttctttctttctgagctactca

SEQ ID NO: 102710 - DNA, 25 bp, Saccharomyces pastorianus
gcctccatgttacggcggtattcat

SEQ ID NO: 102711 - DNA, 25 bp, Saccharomyces pastorianus
gaattctgtgctgttcgtgaacttc

SEQ ID NO: 102712 - DNA, 25 bp, Saccharomyces pastorianus
aatggagttcttcatggacctaagc

SEQ ID NO: 102713 - DNA, 25 bp, Saccharomyces pastorianus
gaaatgttacatgaataccgccgta

SEQ ID NO: 102714 - DNA, 25 bp, Saccharomyces pastorianus
gatgatctgagaaaaccctaccaag

SEQ ID NO: 102715 - DNA, 25 bp, Saccharomyces pastorianus
taccgccgtaacatggaggccaacg

SEQ ID NO: 102716 - DNA, 25 bp, Saccharomyces pastorianus
ggactcgcgcatagatttactggta

SEQ ID NO: 102717 - DNA, 25 bp, Saccharomyces pastorianus
ttttatcagctctttgtcaaggtgc

SEQ ID NO: 102718 - DNA, 25 bp, Saccharomyces pastorianus
gaggccaacggtgtagatcgcgaac

SEQ ID NO: 102719 - DNA, 25 bp, Saccharomyces pastorianus
gaagtatactgggactcgcgcatag

SEQ ID NO: 102720 - DNA, 25 bp, Saccharomyces pastorianus
ggacctaagctgtgagccgatagat

SEQ ID NO: 102721 - DNA, 25 bp, Saccharomyces pastorianus
atttttgactgctttatcgttcgag

SEQ ID NO: 102722 - DNA, 25 bp, Saccharomyces pastorianus
gatcatctgcatatctgttccaagg

SEQ ID NO: 102723 - DNA, 25 bp, Saccharomyces pastorianus
agtcgggttaattctgtctggtgta

SEQ ID NO: 102724 - DNA, 25 bp, Saccharomyces pastorianus
gaggatacatcactacatcttaggt

SEQ ID NO: 102725 - DNA, 25 bp, Saccharomyces pastorianus
tgcaggagttttacagtggccgaac

SEQ ID NO: 102726 - DNA, 25 bp, Saccharomyces pastorianus
gatgctcttgatgcctctaacggga

SEQ ID NO: 102727 - DNA, 25 bp, Saccharomyces pastorianus
atagctttgggatctttgccgggac

SEQ ID NO: 102728 - DNA, 25 bp, Saccharomyces pastorianus
cttaggttctatactggttccaggc

SEQ ID NO: 102729 - DNA, 25 bp, Saccharomyces pastorianus
aaaaccattctctgtcgtggcatct

SEQ ID NO: 102730 - DNA, 25 bp, Saccharomyces pastorianus
aggctgtgccacgagaggatcatct

SEQ ID NO: 102731 - DNA, 25 bp, Saccharomyces pastorianus
gatggagaatccagcacttgctcaa

SEQ ID NO: 102732 - DNA, 25 bp, Saccharomyces pastorianus
ctctgtacggtctccaacgaataga

SEQ ID NO: 102733 - DNA, 25 bp, Saccharomyces pastorianus
ttttgacttactgttttctctccct

SEQ ID NO: 102734 - DNA, 25 bp, Saccharomyces pastorianus
ggtgctgtccatcgcaatcacttga

SEQ ID NO: 102735 - DNA, 25 bp, Saccharomyces pastorianus
taggcggttcatcacttggctcaac

SEQ ID NO: 102736 - DNA, 25 bp, Saccharomyces pastorianus
cagccatccccaacgtttaggaaag

SEQ ID NO: 102737 - DNA, 25 bp, Saccharomyces pastorianus
ggcttcccacgttgtgttagcatta

SEQ ID NO: 102738 - DNA, 25 bp, Saccharomyces pastorianus
aatcacttgaaacgccagggtctgt

SEQ ID NO: 102739 - DNA, 25 bp, Saccharomyces pastorianus
atagactcagtcacacggtgctgtc

SEQ ID NO: 102740 - DNA, 25 bp, Saccharomyces pastorianus
atcaagcatactttccatgtctgta

SEQ ID NO: 102741 - DNA, 25 bp, Saccharomyces pastorianus
tagttttgaatctagtctgcggaaa

SEQ ID NO: 102742 - DNA, 25 bp, Saccharomyces pastorianus
aaatcatctatcttcttcagccatc

SEQ ID NO: 102743 - DNA, 25 bp, Saccharomyces pastorianus
gcaacagtcgtatcaacttacttgg

SEQ ID NO: 102744 - DNA, 25 bp, Saccharomyces pastorianus
gtaatatagccgaggccaccggtgt

SEQ ID NO: 102745 - DNA, 25 bp, Saccharomyces pastorianus
acattggtgcgtacagaatttctga

SEQ ID NO: 102746 - DNA, 25 bp, Saccharomyces pastorianus
ggactgttggtttagcgatagcgat

SEQ ID NO: 102747 - DNA, 25 bp, Saccharomyces pastorianus
aggccaccggtgttgacaatttcat

SEQ ID NO: 102748 - DNA, 25 bp, Saccharomyces pastorianus
aatgcttctgttgtagacctcggta

SEQ ID NO: 102749 - DNA, 25 bp, Saccharomyces pastorianus
gaactgcatcaaacggaattccaag

SEQ ID NO: 102750 - DNA, 25 bp, Saccharomyces pastorianus
aatttcatcagtttccagcaagcag

SEQ ID NO: 102751 - DNA, 25 bp, Saccharomyces pastorianus
gtatgccctggagctggagaatttc

SEQ ID NO: 102752 - DNA, 25 bp, Saccharomyces pastorianus
acatctttagtggtgactggaaccc

SEQ ID NO: 102753 - DNA, 25 bp, Saccharomyces pastorianus
tgtagtcgatgtatacgccggagta

SEQ ID NO: 102754 - DNA, 25 bp, Saccharomyces pastorianus
aaagggaccctagatgccatttcat

SEQ ID NO: 102755 - DNA, 25 bp, Saccharomyces pastorianus
gatgataacggtgatcctgcacagt

SEQ ID NO: 102756 - DNA, 25 bp, Saccharomyces pastorianus
gcagcggcttcaacatactgaaaaa

SEQ ID NO: 102757 - DNA, 25 bp, Saccharomyces pastorianus
gacgcgtattgttatgaggtctcgt

SEQ ID NO: 102758 - DNA, 25 bp, Saccharomyces pastorianus
gatcctgcacagtacgccataaaga

SEQ ID NO: 102759 - DNA, 25 bp, Saccharomyces pastorianus
ggatttacaggttctttgcaaagcg

SEQ ID NO: 102760 - DNA, 25 bp, Saccharomyces pastorianus
gtcattttaaacatccaactggtca

SEQ ID NO: 102761 - DNA, 25 bp, Saccharomyces pastorianus
tgaaagtttaccagcctctgacagc

SEQ ID NO: 102762 - DNA, 25 bp, Saccharomyces pastorianus
atgaggtctcgtggtatcttaaaag

SEQ ID NO: 102763 - DNA, 25 bp, Saccharomyces pastorianus
gaaacccctcaaattgcagaaacag

SEQ ID NO: 102764 - DNA, 25 bp, Saccharomyces pastorianus
gatccgaacaactagcgaatgcctc

SEQ ID NO: 102765 - DNA, 25 bp, Saccharomyces pastorianus
gaagctgtaccaactttccaacata

SEQ ID NO: 102766 - DNA, 25 bp, Saccharomyces pastorianus
gacgtgctggtaaagtatctctaca

SEQ ID NO: 102767 - DNA, 25 bp, Saccharomyces pastorianus
ttgacacaagtcaggcaagccgata

SEQ ID NO: 102768 - DNA, 25 bp, Saccharomyces pastorianus
gatcctccatacagtgcagatgctc

SEQ ID NO: 102769 - DNA, 25 bp, Saccharomyces pastorianus
tggtaccaccatacgaaactactgt

SEQ ID NO: 102770 - DNA, 25 bp, Saccharomyces pastorianus
agtggtgattctttgggagccgttc

SEQ ID NO: 102771 - DNA, 25 bp, Saccharomyces pastorianus
ggagccgttcaattacttacaaccg

SEQ ID NO: 102772 - DNA, 25 bp, Saccharomyces pastorianus
aattgcgctcgcttgccacaagtgg

SEQ ID NO: 102773 - DNA, 25 bp, Saccharomyces pastorianus
tactcaagtcagtggtgtcacacct

SEQ ID NO: 102774 - DNA, 25 bp, Saccharomyces pastorianus
gacatcgatgcatttgatccagaga

SEQ ID NO: 102775 - DNA, 25 bp, Saccharomyces pastorianus
agactaaccgctgccgatctggtac

SEQ ID NO: 102776 - DNA, 25 bp, Saccharomyces pastorianus
tgtcttgcttgcgtggctggaaaga

SEQ ID NO: 102777 - DNA, 25 bp, Saccharomyces pastorianus
cttccaggaaggtttgcaagcgcaa

SEQ ID NO: 102778 - DNA, 25 bp, Saccharomyces pastorianus
aagtacatcaaatcccgccgaaaga

SEQ ID NO: 102779 - DNA, 25 bp, Saccharomyces pastorianus
ggtaccgtggaaacaggcccttgct

SEQ ID NO: 102780 - DNA, 25 bp, Saccharomyces pastorianus
agggaaacttcttcctccgcatata

SEQ ID NO: 102781 - DNA, 25 bp, Saccharomyces pastorianus
ttccaacagagacagcaggcttcca

SEQ ID NO: 102782 - DNA, 25 bp, Saccharomyces pastorianus
aagaaattatgctcccaggctgcca

SEQ ID NO: 102783 - DNA, 25 bp, Saccharomyces pastorianus
ctactgctgctgttacttctgtata

SEQ ID NO: 102784 - DNA, 25 bp, Saccharomyces pastorianus
attggaatcctaacgttgaccctca

SEQ ID NO: 102785 - DNA, 25 bp, Saccharomyces pastorianus
gggaggttaccatacgatcttgacg

SEQ ID NO: 102786 - DNA, 25 bp, Saccharomyces pastorianus
aggctacgccttcatagttttcaaa

SEQ ID NO: 102787 - DNA, 25 bp, Saccharomyces pastorianus
tagatacggcagttccacattggac

SEQ ID NO: 102788 - DNA, 25 bp, Saccharomyces pastorianus
attcctatgtcccatgtggttggtt

SEQ ID NO: 102789 - DNA, 25 bp, Saccharomyces pastorianus
gaaggttgcattatatccctggcag

SEQ ID NO: 102790 - DNA, 25 bp, Saccharomyces pastorianus
tatccctggcagttttcccggcaat

SEQ ID NO: 102791 - DNA, 25 bp, Saccharomyces pastorianus
gagaaaaccactcattcctatgtcc

SEQ ID NO: 102792 - DNA, 25 bp, Saccharomyces pastorianus
tacgacttggctgtagagagatcta

SEQ ID NO: 102793 - DNA, 25 bp, Saccharomyces pastorianus
gagatctacgtaggatgtgcccact

SEQ ID NO: 102794 - DNA, 25 bp, Saccharomyces pastorianus
gctgctatatatacgacttggctgt

SEQ ID NO: 102795 - DNA, 25 bp, Saccharomyces pastorianus
ttcccggccgcttataatagtcatg

SEQ ID NO: 102796 - DNA, 25 bp, Saccharomyces pastorianus
tacgtaggatgtgcccactatcaag

SEQ ID NO: 102797 - DNA, 25 bp, Saccharomyces pastorianus
gtggttggttgcaatttgctgctat

SEQ ID NO: 102798 - DNA, 25 bp, Saccharomyces pastorianus
atggacggccacgttcagggtctga

SEQ ID NO: 102799 - DNA, 25 bp, Saccharomyces pastorianus
aggacatcaaaaccgctatcaacaa

SEQ ID NO: 102800 - DNA, 25 bp, Saccharomyces pastorianus
ttcgccatttacaccagcatgttga

SEQ ID NO: 102801 - DNA, 25 bp, Saccharomyces pastorianus
gcaggaatcctttgaccggattgtt

SEQ ID NO: 102802 - DNA, 25 bp, Saccharomyces pastorianus
aactgaagtactatccaccctttgt

SEQ ID NO: 102803 - DNA, 25 bp, Saccharomyces pastorianus
gaccatgtccattgccaactgaagt

SEQ ID NO: 102804 - DNA, 25 bp, Saccharomyces pastorianus
accctttgtcctgcatgatgcgcat

SEQ ID NO: 102805 - DNA, 25 bp, Saccharomyces pastorianus
aaggtgtctgtcgaagttgtatgta

SEQ ID NO: 102806 - DNA, 25 bp, Saccharomyces pastorianus
agatcaagagttcgaccatgtccat

SEQ ID NO: 102807 - DNA, 25 bp, Saccharomyces pastorianus
gcactctaagaagtttgttcgccat

SEQ ID NO: 102808 - DNA, 25 bp, Saccharomyces pastorianus
aaagggtcctaagatgtccaccatc

SEQ ID NO: 102809 - DNA, 25 bp, Saccharomyces pastorianus
catgatgcgcatgatgatccggaaa

SEQ ID NO: 102810 - DNA, 25 bp, Saccharomyces pastorianus
tatgccttctattccattggtacca

SEQ ID NO: 102811 - DNA, 25 bp, Saccharomyces pastorianus
atttccaccattccactacaagatg

SEQ ID NO: 102812 - DNA, 25 bp, Saccharomyces pastorianus
accacccacggtgtctgaagttttg

SEQ ID NO: 102813 - DNA, 25 bp, Saccharomyces pastorianus
agttgagcaatggaccacccacggt

SEQ ID NO: 102814 - DNA, 25 bp, Saccharomyces pastorianus
gcgaaattcgtctcgtaatcaagga

SEQ ID NO: 102815 - DNA, 25 bp, Saccharomyces pastorianus
tgtgccagcgccatacgttacaaag

SEQ ID NO: 102816 - DNA, 25 bp, Saccharomyces pastorianus
aaaaataccagtgcccattacgttg

SEQ ID NO: 102817 - DNA, 25 bp, Saccharomyces pastorianus
gttatttgattccttttccacgagc

SEQ ID NO: 102818 - DNA, 25 bp, Saccharomyces pastorianus
atgaccacaacgagtctgtgccagc

SEQ ID NO: 102819 - DNA, 25 bp, Saccharomyces pastorianus
cctttactttccaccagttgagcaa

SEQ ID NO: 102820 - DNA, 25 bp, Saccharomyces pastorianus
aggtgaaaacccctctatgccttct

SEQ ID NO: 102821 - DNA, 25 bp, Saccharomyces pastorianus
gcgggcctcgaacatctatcaataa

SEQ ID NO: 102822 - DNA, 25 bp, Saccharomyces pastorianus
gggttccacgataaagagctgtctg

SEQ ID NO: 102823 - DNA, 25 bp, Saccharomyces pastorianus
ataatgccattgttgggttccacga

SEQ ID NO: 102824 - DNA, 25 bp, Saccharomyces pastorianus
gaaacgtctctgactccgaaggtga

SEQ ID NO: 102825 - DNA, 25 bp, Saccharomyces pastorianus
aattcaggtaatggaactgccacca

SEQ ID NO: 102826 - DNA, 25 bp, Saccharomyces pastorianus
tttggcaggctaagatggacagttc

SEQ ID NO: 102827 - DNA, 25 bp, Saccharomyces pastorianus
ctcaatgaatctatggacgctctaa

SEQ ID NO: 102828 - DNA, 25 bp, Saccharomyces pastorianus
gagctgtctgatttgacgttcgaat

SEQ ID NO: 102829 - DNA, 25 bp, Saccharomyces pastorianus
gaaatttgccaactacttttgcaca

SEQ ID NO: 102830 - DNA, 25 bp, Saccharomyces pastorianus
gcacatacacaaatggcgggcctcg

SEQ ID NO: 102831 - DNA, 25 bp, Saccharomyces pastorianus
gaaatgccccaagctattaagacta

SEQ ID NO: 102832 - DNA, 25 bp, Saccharomyces pastorianus
tcaccattatcactgttactcttgc

SEQ ID NO: 102833 - DNA, 25 bp, Saccharomyces pastorianus
accccgccacgcgttaatagtgaga

SEQ ID NO: 102834 - DNA, 25 bp, Saccharomyces pastorianus
ggaaatccgtatcattttctcgcat

SEQ ID NO: 102835 - DNA, 25 bp, Saccharomyces pastorianus
cttactcaccttttcctttgtgtct

SEQ ID NO: 102836 - DNA, 25 bp, Saccharomyces pastorianus
ttaacgctgtttgatgatggtatgt

SEQ ID NO: 102837 - DNA, 25 bp, Saccharomyces pastorianus
tttgtctgtcttccttgggtcttac

SEQ ID NO: 102838 - DNA, 25 bp, Saccharomyces pastorianus
gatggtatgtgcttttattgttcct

SEQ ID NO: 102839 - DNA, 25 bp, Saccharomyces pastorianus
actgttactcttgcgatcatcatca

SEQ ID NO: 102840 - DNA, 25 bp, Saccharomyces pastorianus
tgcaggattctcattgtccggtttt

SEQ ID NO: 102841 - DNA, 25 bp, Saccharomyces pastorianus
tgcttttattgttccttactcacct

SEQ ID NO: 102842 - DNA, 25 bp, Saccharomyces pastorianus
ttttctcgcatacacgaacccgcgt

SEQ ID NO: 102843 - DNA, 25 bp, Saccharomyces pastorianus
gacccatccaaatctaaggttgttg

SEQ ID NO: 102844 - DNA, 25 bp, Saccharomyces pastorianus
cgctccagactttgctgatgaagaa

SEQ ID NO: 102845 - DNA, 25 bp, Saccharomyces pastorianus
ggctgctggctgtaaaatcgttggt

SEQ ID NO: 102846 - DNA, 25 bp, Saccharomyces pastorianus
aatcgttggtattgctaccactttc

SEQ ID NO: 102847 - DNA, 25 bp, Saccharomyces pastorianus
ttaatgaacaagacccatccaaatc

SEQ ID NO: 102848 - DNA, 25 bp, Saccharomyces pastorianus
caagttgtgtaatgctttgaacgcc

SEQ ID NO: 102849 - DNA, 25 bp, Saccharomyces pastorianus
atggttcgacattttgaagatcaag

SEQ ID NO: 102850 - DNA, 25 bp, Saccharomyces pastorianus
ttgggtttcccaattaatgaacaag

SEQ ID NO: 102851 - DNA, 25 bp, Saccharomyces pastorianus
ttacgatgccattgccaagttcgct

SEQ ID NO: 102852 - DNA, 25 bp, Saccharomyces pastorianus
ggagaacttacgatgccattgccaa

SEQ ID NO: 102853 - DNA, 25 bp, Saccharomyces pastorianus
tgctggtaaggctgctggctgtaaa

SEQ ID NO: 102854 - DNA, 25 bp, Saccharomyces pastorianus
aagatcctgtgttggtgttgcttcc

SEQ ID NO: 102855 - DNA, 25 bp, Saccharomyces pastorianus
gttttgagaacagcaccagtcttga

SEQ ID NO: 102856 - DNA, 25 bp, Saccharomyces pastorianus
tcaactctgtatacgccaagcactt

SEQ ID NO: 102857 - DNA, 25 bp, Saccharomyces pastorianus
gtataacaacattgactccggtcag

SEQ ID NO: 102858 - DNA, 25 bp, Saccharomyces pastorianus
ccataagcctgcaagatcctgtgtt

SEQ ID NO: 102859 - DNA, 25 bp, Saccharomyces pastorianus
gcctcttactcccaagctatgaagg

SEQ ID NO: 102860 - DNA, 25 bp, Saccharomyces pastorianus
tcaacgtattcttggctgacatgaa

SEQ ID NO: 102861 - DNA, 25 bp, Saccharomyces pastorianus
caattttgtgtacgtgtctggtcaa

SEQ ID NO: 102862 - DNA, 25 bp, Saccharomyces pastorianus
gttgcttccttacctttgaatgttg

SEQ ID NO: 102863 - DNA, 25 bp, Saccharomyces pastorianus
aaaactttgccgaattcaactctgt

SEQ ID NO: 102864 - DNA, 25 bp, Saccharomyces pastorianus
ggtcaaatcccttatactccagata

SEQ ID NO: 102865 - DNA, 25 bp, Saccharomyces pastorianus
ggtgtcacaatttgcacgaagttct

SEQ ID NO: 102866 - DNA, 25 bp, Saccharomyces pastorianus
aattatgggcattcttctgagcgta

SEQ ID NO: 102867 - DNA, 25 bp, Saccharomyces pastorianus
tgatatttttctttctctccttgta

SEQ ID NO: 102868 - DNA, 25 bp, Saccharomyces pastorianus
aaacatagcagactttcccacagat

SEQ ID NO: 102869 - DNA, 25 bp, Saccharomyces pastorianus
cagatgtctcacaacaagtgtcgga

SEQ ID NO: 102870 - DNA, 25 bp, Saccharomyces pastorianus
tagattgctcataacaggtgtcaca

SEQ ID NO: 102871 - DNA, 25 bp, Saccharomyces pastorianus
gtaactctcgatacgccaaggttgg

SEQ ID NO: 102872 - DNA, 25 bp, Saccharomyces pastorianus
tggactccgggaacattcatagatt

SEQ ID NO: 102873 - DNA, 25 bp, Saccharomyces pastorianus
aactccaatccttgctttctatgga

SEQ ID NO: 102874 - DNA, 25 bp, Saccharomyces pastorianus
aagacgaactcttaactccaatcct

SEQ ID NO: 102875 - DNA, 25 bp, Saccharomyces pastorianus
gcaaaaacgcatagcctggacgagg

SEQ ID NO: 102876 - DNA, 25 bp, Saccharomyces pastorianus
tggctacttttctatccttagtcac

SEQ ID NO: 102877 - DNA, 25 bp, Saccharomyces pastorianus
ttgcgccgactttatgaaacgcttt

SEQ ID NO: 102878 - DNA, 25 bp, Saccharomyces pastorianus
tattcgctgccaacaggaaggcttt

SEQ ID NO: 102879 - DNA, 25 bp, Saccharomyces pastorianus
atatttggacactcattgcgccgac

SEQ ID NO: 102880 - DNA, 25 bp, Saccharomyces pastorianus
aagtttgactatatccgcattggaa

SEQ ID NO: 102881 - DNA, 25 bp, Saccharomyces pastorianus
aatcatttattctaccctgttgccc

SEQ ID NO: 102882 - DNA, 25 bp, Saccharomyces pastorianus
atgctgtcctcattatctcgatgaa

SEQ ID NO: 102883 - DNA, 25 bp, Saccharomyces pastorianus
ttccccatcgtttggatcatatttg

SEQ ID NO: 102884 - DNA, 25 bp, Saccharomyces pastorianus
tattactatcctaaattccccatcg

SEQ ID NO: 102885 - DNA, 25 bp, Saccharomyces pastorianus
aatcatgttattctggccaatctgg

SEQ ID NO: 102886 - DNA, 25 bp, Saccharomyces pastorianus
tttcaggttggtatgctgtcctcat

SEQ ID NO: 102887 - DNA, 25 bp, Saccharomyces pastorianus
actggctttcacaacatggttataa

SEQ ID NO: 102888 - DNA, 25 bp, Saccharomyces pastorianus
aatgcgtgtatttttctaatgccaa

SEQ ID NO: 102889 - DNA, 25 bp, Saccharomyces pastorianus
tgctaaatcaggagccaacttgttt

SEQ ID NO: 102890 - DNA, 25 bp, Saccharomyces pastorianus
ggcgttgatcgttctaggaaggaat

SEQ ID NO: 102891 - DNA, 25 bp, Saccharomyces pastorianus
atttttaagttctccattgatgata

SEQ ID NO: 102892 - DNA, 25 bp, Saccharomyces pastorianus
agggcccacaacagacgtcaatgat

SEQ ID NO: 102893 - DNA, 25 bp, Saccharomyces pastorianus
catgggatgcatggagaacttttca

SEQ ID NO: 102894 - DNA, 25 bp, Saccharomyces pastorianus
ttctgaatctttcccgtggaaggcc

SEQ ID NO: 102895 - DNA, 25 bp, Saccharomyces pastorianus
attacgctactaactggctttcaca

SEQ ID NO: 102896 - DNA, 25 bp, Saccharomyces pastorianus
gaatgaaacgaggacagggcccaca

SEQ ID NO: 102897 - DNA, 25 bp, Saccharomyces pastorianus
atgccaatggcatcttaccaggaag

SEQ ID NO: 102898 - DNA, 25 bp, Saccharomyces pastorianus
tgtaatactccgtcaccattcgtga

SEQ ID NO: 102899 - DNA, 25 bp, Saccharomyces pastorianus
ttatactcaaaaccttctgcccaga

SEQ ID NO: 102900 - DNA, 25 bp, Saccharomyces pastorianus
gaaccagttctgcataaaccgtctg

SEQ ID NO: 102901 - DNA, 25 bp, Saccharomyces pastorianus
gaacactggaattaccgctacaaat

SEQ ID NO: 102902 - DNA, 25 bp, Saccharomyces pastorianus
ttcgttgcctgcttcgaatgcaaga

SEQ ID NO: 102903 - DNA, 25 bp, Saccharomyces pastorianus
aacctacaggtttcatcgctttcta

SEQ ID NO: 102904 - DNA, 25 bp, Saccharomyces pastorianus
tactacgaagctactttggctgatg

SEQ ID NO: 102905 - DNA, 25 bp, Saccharomyces pastorianus
ggtgctgctaataccaagactggca

SEQ ID NO: 102906 - DNA, 25 bp, Saccharomyces pastorianus
ggaccagagctcaaattcattacaa

SEQ ID NO: 102907 - DNA, 25 bp, Saccharomyces pastorianus
aaaccgtctgcgaatcattcgttgc

SEQ ID NO: 102908 - DNA, 25 bp, Saccharomyces pastorianus
gattggtgacctctccagtattgaa

SEQ ID NO: 102909 - DNA, 25 bp, Saccharomyces pastorianus
ttcaactactcttactctacacata

SEQ ID NO: 102910 - DNA, 25 bp, Saccharomyces pastorianus
tgagtctacagatctgcccggcgag

SEQ ID NO: 102911 - DNA, 25 bp, Saccharomyces pastorianus
gctgtacttacggatacgggaccat

SEQ ID NO: 102912 - DNA, 25 bp, Saccharomyces pastorianus
atgattggaatcttgcaccgggacc

SEQ ID NO: 102913 - DNA, 25 bp, Saccharomyces pastorianus
cggcatgggctttggtctaccaatg

SEQ ID NO: 102914 - DNA, 25 bp, Saccharomyces pastorianus
cattccgcccattctggagtatatt

SEQ ID NO: 102915 - DNA, 25 bp, Saccharomyces pastorianus
gtgcaagacgtacctagaactgttt

SEQ ID NO: 102916 - DNA, 25 bp, Saccharomyces pastorianus
ggcacggacgtgtacatcaagctca

SEQ ID NO: 102917 - DNA, 25 bp, Saccharomyces pastorianus
gaagctgcttgtgacgcactatttg

SEQ ID NO: 102918 - DNA, 25 bp, Saccharomyces pastorianus
agacatcacattcacgtgcattccg

SEQ ID NO: 102919 - DNA, 25 bp, Saccharomyces pastorianus
ggtagaggccctcatgttcaactac

SEQ ID NO: 102920 - DNA, 25 bp, Saccharomyces pastorianus
gaggaacaacccttggcttcggcac

SEQ ID NO: 102921 - DNA, 25 bp, Saccharomyces pastorianus
aagtgccgcaaggatgtccattcca

SEQ ID NO: 102922 - DNA, 25 bp, Saccharomyces pastorianus
gaaaggctctcttttgagatcggta

SEQ ID NO: 102923 - DNA, 25 bp, Saccharomyces pastorianus
ggaagaccagtttgctcaagtcact

SEQ ID NO: 102924 - DNA, 25 bp, Saccharomyces pastorianus
ggttatttctcacgctaacttcagt

SEQ ID NO: 102925 - DNA, 25 bp, Saccharomyces pastorianus
gtggctttgaactccagtgaatgtt

SEQ ID NO: 102926 - DNA, 25 bp, Saccharomyces pastorianus
ttcggcactcttgcaattcagtgat

SEQ ID NO: 102927 - DNA, 25 bp, Saccharomyces pastorianus
tattttgaaacctcggctggcctaa

SEQ ID NO: 102928 - DNA, 25 bp, Saccharomyces pastorianus
aagacgttgaactacgccctcagta

SEQ ID NO: 102929 - DNA, 25 bp, Saccharomyces pastorianus
caaaacatcttagttgctccaggcc

SEQ ID NO: 102930 - DNA, 25 bp, Saccharomyces pastorianus
agttcctatccaactcatttgcgga

SEQ ID NO: 102931 - DNA, 25 bp, Saccharomyces pastorianus
gaatttctacaatttcgtcatgtca

SEQ ID NO: 102932 - DNA, 25 bp, Saccharomyces pastorianus
taaagtctgccattgacgtcatcca

SEQ ID NO: 102933 - DNA, 25 bp, Saccharomyces pastorianus
ctatccgtagtcacacaatgcctaa

SEQ ID NO: 102934 - DNA, 25 bp, Saccharomyces pastorianus
catccaatggttgattcctactatt

SEQ ID NO: 102935 - DNA, 25 bp, Saccharomyces pastorianus
taagttcagccaatcacacccgtta

SEQ ID NO: 102936 - DNA, 25 bp, Saccharomyces pastorianus
tactcaaccgcaatacgaactatcc

SEQ ID NO: 102937 - DNA, 25 bp, Saccharomyces pastorianus
gactgtggacctgttgaatttctac

SEQ ID NO: 102938 - DNA, 25 bp, Saccharomyces pastorianus
atcggtatttatatgcgtggttcgc

SEQ ID NO: 102939 - DNA, 25 bp, Saccharomyces pastorianus
tcacacccgttagttttccaactat

SEQ ID NO: 102940 - DNA, 25 bp, Saccharomyces pastorianus
agattcctgtatttgacgttggtag

SEQ ID NO: 102941 - DNA, 25 bp, Saccharomyces pastorianus
atactctgtttattaatgccctgga

SEQ ID NO: 102942 - DNA, 25 bp, Saccharomyces pastorianus
ggttatgcgttgatggcccagacac

SEQ ID NO: 102943 - DNA, 25 bp, Saccharomyces pastorianus
tgcccatgccccagaatcatataaa

SEQ ID NO: 102944 - DNA, 25 bp, Saccharomyces pastorianus
gtggttcgctaaagtgtccctgctc

SEQ ID NO: 102945 - DNA, 25 bp, Saccharomyces pastorianus
aacactacccatccttggagaattg

SEQ ID NO: 102946 - DNA, 25 bp, Saccharomyces pastorianus
aagctacttggatcttcttaaacca

SEQ ID NO: 102947 - DNA, 25 bp, Saccharomyces pastorianus
tagaaggtcccgctttacaaccaga

SEQ ID NO: 102948 - DNA, 25 bp, Saccharomyces pastorianus
tggtagtactgttttgttgacgcat

SEQ ID NO: 102949 - DNA, 25 bp, Saccharomyces pastorianus
gatcttttactagaaggtcccgctt

SEQ ID NO: 102950 - DNA, 25 bp, Saccharomyces pastorianus
gttacaggacacttcaacacagatt

SEQ ID NO: 102951 - DNA, 25 bp, Saccharomyces pastorianus
aatctgggcttttgagatcccaaaa

SEQ ID NO: 102952 - DNA, 25 bp, Saccharomyces pastorianus
aaatctgcatctacttgggaagcga

SEQ ID NO: 102953 - DNA, 25 bp, Saccharomyces pastorianus
gcgtgatattattataggctccgaa

SEQ ID NO: 102954 - DNA, 25 bp, Saccharomyces pastorianus
atttccaggctggtcgaagtaccgc

SEQ ID NO: 102955 - DNA, 25 bp, Saccharomyces pastorianus
gtaccgcaaggagttaatccaccat

SEQ ID NO: 102956 - DNA, 25 bp, Saccharomyces pastorianus
agccaccggtagatacagcgtctga

SEQ ID NO: 102957 - DNA, 25 bp, Saccharomyces pastorianus
aaaggtctcgtgatatgtgtgaaat

SEQ ID NO: 102958 - DNA, 25 bp, Saccharomyces pastorianus
agaaatttctcacggcaagcagctc

SEQ ID NO: 102959 - DNA, 25 bp, Saccharomyces pastorianus
ttatgcgttgttcgttgcgtgatat

SEQ ID NO: 102960 - DNA, 25 bp, Saccharomyces pastorianus
gatctactcaacagtgggacgttat

SEQ ID NO: 102961 - DNA, 25 bp, Saccharomyces pastorianus
ttattcatttttgcagccaccggta

SEQ ID NO: 102962 - DNA, 25 bp, Saccharomyces pastorianus
gaagattcatcgtcaatttatgcca

SEQ ID NO: 102963 - DNA, 25 bp, Saccharomyces pastorianus
atacagcgtctgaggtccgtgatat

SEQ ID NO: 102964 - DNA, 25 bp, Saccharomyces pastorianus
aaagtgcaatcaacggacatcctaa

SEQ ID NO: 102965 - DNA, 25 bp, Saccharomyces pastorianus
gggacttttagcagtttgcctgact

SEQ ID NO: 102966 - DNA, 25 bp, Saccharomyces pastorianus
gcctctgttaggcagcgattcaatt

SEQ ID NO: 102967 - DNA, 25 bp, Saccharomyces pastorianus
aaacctgcaggttgagcctctgtta

SEQ ID NO: 102968 - DNA, 25 bp, Saccharomyces pastorianus
gagttcctgggtcagtatttcctac

SEQ ID NO: 102969 - DNA, 25 bp, Saccharomyces pastorianus
aagagcgggaccttcgctatacaaa

SEQ ID NO: 102970 - DNA, 25 bp, Saccharomyces pastorianus
tgaagtacccagtttgcctacattc

SEQ ID NO: 102971 - DNA, 25 bp, Saccharomyces pastorianus
tagcggcattgtcttcactgtcaaa

SEQ ID NO: 102972 - DNA, 25 bp, Saccharomyces pastorianus
taaccaacgcatcggtagcggcatt

SEQ ID NO: 102973 - DNA, 25 bp, Saccharomyces pastorianus
aattcttcatttgcactggacattc

SEQ ID NO: 102974 - DNA, 25 bp, Saccharomyces pastorianus
gatttaagccttcaaactgacccca

SEQ ID NO: 102975 - DNA, 25 bp, Saccharomyces pastorianus
ctctaatcctagcttcacttcaaaa

SEQ ID NO: 102976 - DNA, 25 bp, Saccharomyces pastorianus
gggcaaatctgcacttagggaatct

SEQ ID NO: 102977 - DNA, 25 bp, Saccharomyces pastorianus
atagccatcaagcacgagccatact

SEQ ID NO: 102978 - DNA, 25 bp, Saccharomyces pastorianus
ggatctcatttaaatttagcggcga

SEQ ID NO: 102979 - DNA, 25 bp, Saccharomyces pastorianus
gaaatccaatccctggtactacggc

SEQ ID NO: 102980 - DNA, 25 bp, Saccharomyces pastorianus
gatatagatctcaagcccgtagaag

SEQ ID NO: 102981 - DNA, 25 bp, Saccharomyces pastorianus
gggaatctcactctaatcctagctt

SEQ ID NO: 102982 - DNA, 25 bp, Saccharomyces pastorianus
ttagcggcgaacacacagggaaatc

SEQ ID NO: 102983 - DNA, 25 bp, Saccharomyces pastorianus
agccatactctcaacgtttcggaag

SEQ ID NO: 102984 - DNA, 25 bp, Saccharomyces pastorianus
gcagctgcagctccaaaaggaattt

SEQ ID NO: 102985 - DNA, 25 bp, Saccharomyces pastorianus
aaaaaggttgcgcagctgcagctcc

SEQ ID NO: 102986 - DNA, 25 bp, Saccharomyces pastorianus
ttgaccttattgacaatcttttgag

SEQ ID NO: 102987 - DNA, 25 bp, Saccharomyces pastorianus
tagacttgtggtcgtttgggacaat

SEQ ID NO: 102988 - DNA, 25 bp, Saccharomyces pastorianus
aaggccttagactattgtcattcaa

SEQ ID NO: 102989 - DNA, 25 bp, Saccharomyces pastorianus
ggacaatgttggcttctatgatctt

SEQ ID NO: 102990 - DNA, 25 bp, Saccharomyces pastorianus
gctaaggaagcgatgggacacccgt

SEQ ID NO: 102991 - DNA, 25 bp, Saccharomyces pastorianus
aagatcgtcaaagtacttggtacaa

SEQ ID NO: 102992 - DNA, 25 bp, Saccharomyces pastorianus
ggaacgagtaacacagaccagcttg

SEQ ID NO: 102993 - DNA, 25 bp, Saccharomyces pastorianus
tttaagggtcctgaactactagttg

SEQ ID NO: 102994 - DNA, 25 bp, Saccharomyces pastorianus
cagaccagcttgtcaagatcgtcaa

SEQ ID NO: 102995 - DNA, 25 bp, Saccharomyces pastorianus
tatgaaattaccttaccgagagaat

SEQ ID NO: 102996 - DNA, 25 bp, Saccharomyces pastorianus
acaatgttcgtgttgcgtcgaggtt

SEQ ID NO: 102997 - DNA, 25 bp, Saccharomyces pastorianus
ttattacccagaactatccccaaag

SEQ ID NO: 102998 - DNA, 25 bp, Saccharomyces pastorianus
gaagttacaacatctccttcttctc

SEQ ID NO: 102999 - DNA, 25 bp, Saccharomyces pastorianus
gatatgtcccgtccattagatgtta

SEQ ID NO: 103000 - DNA, 25 bp, Saccharomyces pastorianus
aaagaacgcagccattgcttcctct

SEQ ID NO: 103001 - DNA, 25 bp, Saccharomyces pastorianus
gtgtacctctgggacctcaatgaag

SEQ ID NO: 103002 - DNA, 25 bp, Saccharomyces pastorianus
tgttatccgggaacctgacaagaca

SEQ ID NO: 103003 - DNA, 25 bp, Saccharomyces pastorianus
acatgtcgctaatttgggttcctta

SEQ ID NO: 103004 - DNA, 25 bp, Saccharomyces pastorianus
aaggatctacaagacagcccctttc

SEQ ID NO: 103005 - DNA, 25 bp, Saccharomyces pastorianus
tatgaaggcggtatctccagcgtgt

SEQ ID NO: 103006 - DNA, 25 bp, Saccharomyces pastorianus
agccaatgactctttcgacgtttac

SEQ ID NO: 103007 - DNA, 25 bp, Saccharomyces pastorianus
tcttctcccgacagtttcaactata

SEQ ID NO: 103008 - DNA, 25 bp, Saccharomyces pastorianus
aacaaggtcaactcttccgggccag

SEQ ID NO: 103009 - DNA, 25 bp, Saccharomyces pastorianus
gccaaacttgccgatgcactggata

SEQ ID NO: 103010 - DNA, 25 bp, Saccharomyces pastorianus
gggactacttctatgtcgtcgaaaa

SEQ ID NO: 103011 - DNA, 25 bp, Saccharomyces pastorianus
ttgtagcaacctccgactgtttgtt

SEQ ID NO: 103012 - DNA, 25 bp, Saccharomyces pastorianus
aagggtactgttgacttctacgtca

SEQ ID NO: 103013 - DNA, 25 bp, Saccharomyces pastorianus
gggaacttgctcttatgtacaacag

SEQ ID NO: 103014 - DNA, 25 bp, Saccharomyces pastorianus
ttttcaacgtttactgggtcctgca

SEQ ID NO: 103015 - DNA, 25 bp, Saccharomyces pastorianus
tttgactacgtacgaccgtgccaaa

SEQ ID NO: 103016 - DNA, 25 bp, Saccharomyces pastorianus
agtacggagctgtggacgtctctaa

SEQ ID NO: 103017 - DNA, 25 bp, Saccharomyces pastorianus
ttgttgtgggctctagacaggctca

SEQ ID NO: 103018 - DNA, 25 bp, Saccharomyces pastorianus
accaagatctaccagccgggtgaaa

SEQ ID NO: 103019 - DNA, 25 bp, Saccharomyces pastorianus
actcagcttttttctatctttcaaa

SEQ ID NO: 103020 - DNA, 25 bp, Saccharomyces pastorianus
tgaaacaagccatacgtgagaaagt

SEQ ID NO: 103021 - DNA, 25 bp, Saccharomyces pastorianus
ccgccacttttgttctgtctgataa

SEQ ID NO: 103022 - DNA, 25 bp, Saccharomyces pastorianus
catgccaccacgacgagcggaaaaa

SEQ ID NO: 103023 - DNA, 25 bp, Saccharomyces pastorianus
gccgacgattttacttactcagctt

SEQ ID NO: 103024 - DNA, 25 bp, Saccharomyces pastorianus
ggcggctaatcttcacccaagaaaa

SEQ ID NO: 103025 - DNA, 25 bp, Saccharomyces pastorianus
tatacttttcagattagccgccgac

SEQ ID NO: 103026 - DNA, 25 bp, Saccharomyces pastorianus
aaaacaaaagcacccaatcaccact

SEQ ID NO: 103027 - DNA, 25 bp, Saccharomyces pastorianus
aaaaaagcgcatgccaccacgacga

SEQ ID NO: 103028 - DNA, 25 bp, Saccharomyces pastorianus
ctcttccttctttcttcatgttata

SEQ ID NO: 103029 - DNA, 25 bp, Saccharomyces pastorianus
ttcttcatgttatacccgccacttt

SEQ ID NO: 103030 - DNA, 25 bp, Saccharomyces pastorianus
atgatattatgatgccgtcgcctaa

SEQ ID NO: 103031 - DNA, 25 bp, Saccharomyces pastorianus
ctaagcagtttgaaggcgtttcgtc

SEQ ID NO: 103032 - DNA, 25 bp, Saccharomyces pastorianus
gatgccgtcgcctaaacctaaaagg

SEQ ID NO: 103033 - DNA, 25 bp, Saccharomyces pastorianus
gaacgccaatctagtcccaataata

SEQ ID NO: 103034 - DNA, 25 bp, Saccharomyces pastorianus
ctgtcatccacccatgatattatga

SEQ ID NO: 103035 - DNA, 25 bp, Saccharomyces pastorianus
aaaaaacgatcaagccctgtcatcc

SEQ ID NO: 103036 - DNA, 25 bp, Saccharomyces pastorianus
tgttaacagggatgactcggacgtc

SEQ ID NO: 103037 - DNA, 25 bp, Saccharomyces pastorianus
gcatgttcaatctctatcgactgat

SEQ ID NO: 103038 - DNA, 25 bp, Saccharomyces pastorianus
aaaaatcccacaactttcctcgcat

SEQ ID NO: 103039 - DNA, 25 bp, Saccharomyces pastorianus
gtagttcactacctaatgtagcgga

SEQ ID NO: 103040 - DNA, 25 bp, Saccharomyces pastorianus
atcgactgattctatggaacgccaa

SEQ ID NO: 103041 - DNA, 25 bp, Saccharomyces pastorianus
tggtctaatccacgtcaagctgttt

SEQ ID NO: 103042 - DNA, 25 bp, Saccharomyces pastorianus
taaaagtatgcagcgcagccgtgac

SEQ ID NO: 103043 - DNA, 25 bp, Saccharomyces pastorianus
tgacctcccggatagttgccaattg

SEQ ID NO: 103044 - DNA, 25 bp, Saccharomyces pastorianus
aagggtttttactcgctagcaacag

SEQ ID NO: 103045 - DNA, 25 bp, Saccharomyces pastorianus
acgcgttgtttgtatgccatttcca

SEQ ID NO: 103046 - DNA, 25 bp, Saccharomyces pastorianus
atggccagtatgttttccaaacgta

SEQ ID NO: 103047 - DNA, 25 bp, Saccharomyces pastorianus
aacggtcactgatgggtttacggtg

SEQ ID NO: 103048 - DNA, 25 bp, Saccharomyces pastorianus
attgcagctttgacgttatacttac

SEQ ID NO: 103049 - DNA, 25 bp, Saccharomyces pastorianus
atacgggttttctctattcacctga

SEQ ID NO: 103050 - DNA, 25 bp, Saccharomyces pastorianus
gagattctacagttgattgcagctt

SEQ ID NO: 103051 - DNA, 25 bp, Saccharomyces pastorianus
tatacttacaccttggataatggcc

SEQ ID NO: 103052 - DNA, 25 bp, Saccharomyces pastorianus
ccaagctttgttgacgttcatatga

SEQ ID NO: 103053 - DNA, 25 bp, Saccharomyces pastorianus
gatcatatttactccaagctttgtt

SEQ ID NO: 103054 - DNA, 25 bp, Saccharomyces pastorianus
gaagtaaccctaatggtgagatcat

SEQ ID NO: 103055 - DNA, 25 bp, Saccharomyces pastorianus
caagctatgagtttcatcacttatt

SEQ ID NO: 103056 - DNA, 25 bp, Saccharomyces pastorianus
tgcagtgttcacttcgttcgagaaa

SEQ ID NO: 103057 - DNA, 25 bp, Saccharomyces pastorianus
cagtctctgcattggtgttatttca

SEQ ID NO: 103058 - DNA, 25 bp, Saccharomyces pastorianus
ggattgatactctttgttcttgcag

SEQ ID NO: 103059 - DNA, 25 bp, Saccharomyces pastorianus
gttatttcattctggtttctcaagc

SEQ ID NO: 103060 - DNA, 25 bp, Saccharomyces pastorianus
aagcttctctatacagtctctgcat

SEQ ID NO: 103061 - DNA, 25 bp, Saccharomyces pastorianus
atgtcgtttgtttccaagcttctct

SEQ ID NO: 103062 - DNA, 25 bp, Saccharomyces pastorianus
gtgcaatcagcaagttacctaaaga

SEQ ID NO: 103063 - DNA, 25 bp, Saccharomyces pastorianus
agatgaacgatttgcttcccgtgtg

SEQ ID NO: 103064 - DNA, 25 bp, Saccharomyces pastorianus
gacgccaacctaaatgatttgccgg

SEQ ID NO: 103065 - DNA, 25 bp, Saccharomyces pastorianus
caatttccattttaccttcacgata

SEQ ID NO: 103066 - DNA, 25 bp, Saccharomyces pastorianus
ttgaggaacacccaaccgtggtaga

SEQ ID NO: 103067 - DNA, 25 bp, Saccharomyces pastorianus
atttgagctcaaattgcctgcagac

SEQ ID NO: 103068 - DNA, 25 bp, Saccharomyces pastorianus
aaagcgcctttacaacccaacagtg

SEQ ID NO: 103069 - DNA, 25 bp, Saccharomyces pastorianus
ttttcgctaagcaagttgacgtcca

SEQ ID NO: 103070 - DNA, 25 bp, Saccharomyces pastorianus
gatattcccatgacaatcgatctag

SEQ ID NO: 103071 - DNA, 25 bp, Saccharomyces pastorianus
gcctgcagacgctacaacatggaga

SEQ ID NO: 103072 - DNA, 25 bp, Saccharomyces pastorianus
gagaaaccgaccatgcaaatactga

SEQ ID NO: 103073 - DNA, 25 bp, Saccharomyces pastorianus
aaagaaaagcttggcccgctgttca

SEQ ID NO: 103074 - DNA, 25 bp, Saccharomyces pastorianus
aagcatttattgtctatcctcatca

SEQ ID NO: 103075 - DNA, 25 bp, Saccharomyces pastorianus
ctcatcctacgaagctctgttttta

SEQ ID NO: 103076 - DNA, 25 bp, Saccharomyces pastorianus
aaacgtctaatcgactcatcctacg

SEQ ID NO: 103077 - DNA, 25 bp, Saccharomyces pastorianus
gcgtattggtacattgcaagcaact

SEQ ID NO: 103078 - DNA, 25 bp, Saccharomyces pastorianus
gaggtacacaggctccaacagacaa

SEQ ID NO: 103079 - DNA, 25 bp, Saccharomyces pastorianus
agatctggcattattactacttatg

SEQ ID NO: 103080 - DNA, 25 bp, Saccharomyces pastorianus
gtgagcatctcatttcgtggaataa

SEQ ID NO: 103081 - DNA, 25 bp, Saccharomyces pastorianus
gatttattccttttcacttatatca

SEQ ID NO: 103082 - DNA, 25 bp, Saccharomyces pastorianus
aattttctcttttctatctagctat

SEQ ID NO: 103083 - DNA, 25 bp, Saccharomyces pastorianus
gtctatcctcatcaaagcaaagttt

SEQ ID NO: 103084 - DNA, 25 bp, Saccharomyces pastorianus
gaataatcatcgctgttagccgccg

SEQ ID NO: 103085 - DNA, 25 bp, Saccharomyces pastorianus
gtgatttccatcaggcgttcaatag

SEQ ID NO: 103086 - DNA, 25 bp, Saccharomyces pastorianus
gaagacgtgatcaagggctgctcca

SEQ ID NO: 103087 - DNA, 25 bp, Saccharomyces pastorianus
gaaagggccaacgtagcaccatgtt

SEQ ID NO: 103088 - DNA, 25 bp, Saccharomyces pastorianus
gacattccgattatgttctgcagta

SEQ ID NO: 103089 - DNA, 25 bp, Saccharomyces pastorianus
gatgcaaccatccagtgtgatttcc

SEQ ID NO: 103090 - DNA, 25 bp, Saccharomyces pastorianus
tggatatacctctatcaccacatac

SEQ ID NO: 103091 - DNA, 25 bp, Saccharomyces pastorianus
aattttctacttgtgatccctgaag

SEQ ID NO: 103092 - DNA, 25 bp, Saccharomyces pastorianus
gaggccagtcaactcatggatatac

SEQ ID NO: 103093 - DNA, 25 bp, Saccharomyces pastorianus
atgacggcagcacacagaactacag

SEQ ID NO: 103094 - DNA, 25 bp, Saccharomyces pastorianus
aaaaatgggtcactctcaactactt

SEQ ID NO: 103095 - DNA, 25 bp, Saccharomyces pastorianus
atgattatgtcaacttgtcgtcaca

SEQ ID NO: 103096 - DNA, 25 bp, Saccharomyces pastorianus
ggtttacgttcccacaagcgataag

SEQ ID NO: 103097 - DNA, 25 bp, Saccharomyces pastorianus
aagaagtgggccttgcagctagtct

SEQ ID NO: 103098 - DNA, 25 bp, Saccharomyces pastorianus
atccgcgaacgcatctgaacttatg

SEQ ID NO: 103099 - DNA, 25 bp, Saccharomyces pastorianus
atgagctaggtgacttcgccattct

SEQ ID NO: 103100 - DNA, 25 bp, Saccharomyces pastorianus
tgacggcagcatacattctcattct

SEQ ID NO: 103101 - DNA, 25 bp, Saccharomyces pastorianus
aaacgatgcgtattctgtcagggac

SEQ ID NO: 103102 - DNA, 25 bp, Saccharomyces pastorianus
agcatagctgtcactttccatgaga

SEQ ID NO: 103103 - DNA, 25 bp, Saccharomyces pastorianus
ataaagcaacgtcttcatccgcgaa

SEQ ID NO: 103104 - DNA, 25 bp, Saccharomyces pastorianus
tagcgctggctacgtcattctatag

SEQ ID NO: 103105 - DNA, 25 bp, Saccharomyces pastorianus
gggctttaacatgtctgcgtatctg

SEQ ID NO: 103106 - DNA, 25 bp, Saccharomyces pastorianus
atagccactactagcgttgtaccgc

SEQ ID NO: 103107 - DNA, 25 bp, Saccharomyces pastorianus
ctttgcagaaacagaatcctcccgt

SEQ ID NO: 103108 - DNA, 25 bp, Saccharomyces pastorianus
aatcctcccgtgtttacagtcaatt

SEQ ID NO: 103109 - DNA, 25 bp, Saccharomyces pastorianus
tttacgccgcccaacagaaaatctt

SEQ ID NO: 103110 - DNA, 25 bp, Saccharomyces pastorianus
gccgatggccgtatcctagatatca

SEQ ID NO: 103111 - DNA, 25 bp, Saccharomyces pastorianus
aaagttattggctccccaagacatc

SEQ ID NO: 103112 - DNA, 25 bp, Saccharomyces pastorianus
gtggttggccgttctatacaatctt

SEQ ID NO: 103113 - DNA, 25 bp, Saccharomyces pastorianus
tcagcgaggcgccattcaatgttta

SEQ ID NO: 103114 - DNA, 25 bp, Saccharomyces pastorianus
gaatacattgttcccgagattctcg

SEQ ID NO: 103115 - DNA, 25 bp, Saccharomyces pastorianus
cttgatgagctcttatgccatggtt

SEQ ID NO: 103116 - DNA, 25 bp, Saccharomyces pastorianus
gaacaggatgtttacgccgatggcc

SEQ ID NO: 103117 - DNA, 25 bp, Saccharomyces pastorianus
gaaaaccccttaattgttgtcatga

SEQ ID NO: 103118 - DNA, 25 bp, Saccharomyces pastorianus
ttatcataccctcctgatccagtat

SEQ ID NO: 103119 - DNA, 25 bp, Saccharomyces pastorianus
attacccatttgagatgcattggag

SEQ ID NO: 103120 - DNA, 25 bp, Saccharomyces pastorianus
caagcattatcataccctcctgatc

SEQ ID NO: 103121 - DNA, 25 bp, Saccharomyces pastorianus
gcccacttgagaactaccaagcatt

SEQ ID NO: 103122 - DNA, 25 bp, Saccharomyces pastorianus
ggagtaaggatcttgctcagcgccc

SEQ ID NO: 103123 - DNA, 25 bp, Saccharomyces pastorianus
gcaaggttagcccttcctttcattt

SEQ ID NO: 103124 - DNA, 25 bp, Saccharomyces pastorianus
aaggatcttgctcagcgcccgtcat

SEQ ID NO: 103125 - DNA, 25 bp, Saccharomyces pastorianus
gcccgtcatcattacgtcttcgtta

SEQ ID NO: 103126 - DNA, 25 bp, Saccharomyces pastorianus
tattacgcccacttgagaactacca

SEQ ID NO: 103127 - DNA, 25 bp, Saccharomyces pastorianus
tctcttattattttcggttcgttca

SEQ ID NO: 103128 - DNA, 25 bp, Saccharomyces pastorianus
tcttcgttacttcccggcatatttg

SEQ ID NO: 103129 - DNA, 25 bp, Saccharomyces pastorianus
ttatcataccctcctgatccagtat

SEQ ID NO: 103130 - DNA, 25 bp, Saccharomyces pastorianus
attacccatttgagatgcattggag

SEQ ID NO: 103131 - DNA, 25 bp, Saccharomyces pastorianus
caagcattatcataccctcctgatc

SEQ ID NO: 103132 - DNA, 25 bp, Saccharomyces pastorianus
gcccacttgagaactaccaagcatt

SEQ ID NO: 103133 - DNA, 25 bp, Saccharomyces pastorianus
ggagtaaggatcttgctcagcgccc

SEQ ID NO: 103134 - DNA, 25 bp, Saccharomyces pastorianus
gcaaggttagcccttcctttcattt

SEQ ID NO: 103135 - DNA, 25 bp, Saccharomyces pastorianus
aaggatcttgctcagcgcccgtcat

SEQ ID NO: 103136 - DNA, 25 bp, Saccharomyces pastorianus
gcccgtcatcattacgtcttcgtta

SEQ ID NO: 103137 - DNA, 25 bp, Saccharomyces pastorianus
tattacgcccacttgagaactacca

SEQ ID NO: 103138 - DNA, 25 bp, Saccharomyces pastorianus
tctcttattattttcggttcgttca

SEQ ID NO: 103139 - DNA, 25 bp, Saccharomyces pastorianus
tcttcgttacttcccggcatatttg

SEQ ID NO: 103140 - DNA, 25 bp, Saccharomyces pastorianus
gatcttgagcttaatgctgacactt

SEQ ID NO: 103141 - DNA, 25 bp, Saccharomyces pastorianus
gggacctaacaatgacgacgctgca

SEQ ID NO: 103142 - DNA, 25 bp, Saccharomyces pastorianus
aatggcaaactctaactgatcttga

SEQ ID NO: 103143 - DNA, 25 bp, Saccharomyces pastorianus
acaatttctacaagtgggcggagga

SEQ ID NO: 103144 - DNA, 25 bp, Saccharomyces pastorianus
gatgtccaaggatgtcatgttatca

SEQ ID NO: 103145 - DNA, 25 bp, Saccharomyces pastorianus
gagtttctaattcacgctgcagacg

SEQ ID NO: 103146 - DNA, 25 bp, Saccharomyces pastorianus
gtcatgttatcaagttgggacctaa

SEQ ID NO: 103147 - DNA, 25 bp, Saccharomyces pastorianus
gggaaagaccgcattgttgtagact

SEQ ID NO: 103148 - DNA, 25 bp, Saccharomyces pastorianus
cgctgcagacgttgaaggtttgtgt

SEQ ID NO: 103149 - DNA, 25 bp, Saccharomyces pastorianus
gaggcactccaagagtcaccacaat

SEQ ID NO: 103150 - DNA, 25 bp, Saccharomyces pastorianus
acggtcgttggattgtggccatgaa

SEQ ID NO: 103151 - DNA, 25 bp, Saccharomyces pastorianus
aaaaagcagctagtcatcgaacaag

SEQ ID NO: 103152 - DNA, 25 bp, Saccharomyces pastorianus
aatattggtagaaacaacgactgat

SEQ ID NO: 103153 - DNA, 25 bp, Saccharomyces pastorianus
aatgtacaagtaacacgtgccacgg

SEQ ID NO: 103154 - DNA, 25 bp, Saccharomyces pastorianus
tattatcgtgaatctagcggcagtc

SEQ ID NO: 103155 - DNA, 25 bp, Saccharomyces pastorianus
gtacaagtaacacgtgccacggtgg

SEQ ID NO: 103156 - DNA, 25 bp, Saccharomyces pastorianus
aacaacgactgatagttcaagttat

SEQ ID NO: 103157 - DNA, 25 bp, Saccharomyces pastorianus
gcagctagtcatcgaacaagacgaa

SEQ ID NO: 103158 - DNA, 25 bp, Saccharomyces pastorianus
ggaaggcatcctatatattatcgtg

SEQ ID NO: 103159 - DNA, 25 bp, Saccharomyces pastorianus
caatcgggtataatgaatcagtggc

SEQ ID NO: 103160 - DNA, 25 bp, Saccharomyces pastorianus
gaatctagcggcagtcaatgagaat

SEQ ID NO: 103161 - DNA, 25 bp, Saccharomyces pastorianus
gttcaagttatggtaatgacagcaa

SEQ ID NO: 103162 - DNA, 25 bp, Saccharomyces pastorianus
gaggtaggattatacgatctggtta

SEQ ID NO: 103163 - DNA, 25 bp, Saccharomyces pastorianus
atgcctctgggtactcaataactta

SEQ ID NO: 103164 - DNA, 25 bp, Saccharomyces pastorianus
ggtctggaaccagggcattcaccaa

SEQ ID NO: 103165 - DNA, 25 bp, Saccharomyces pastorianus
ggaaccagggcattcaccaagtgat

SEQ ID NO: 103166 - DNA, 25 bp, Saccharomyces pastorianus
caatctacggtgacaatcgggtata

SEQ ID NO: 103167 - DNA, 25 bp, Saccharomyces pastorianus
accaagtgattcagaaaaccctcaa

SEQ ID NO: 103168 - DNA, 25 bp, Saccharomyces pastorianus
aaaccctcaatctacggtgacaatc

SEQ ID NO: 103169 - DNA, 25 bp, Saccharomyces pastorianus
gcaatctgaaattggcatgcctctg

SEQ ID NO: 103170 - DNA, 25 bp, Saccharomyces pastorianus
aattggcatgcctctgggtactcaa

SEQ ID NO: 103171 - DNA, 25 bp, Saccharomyces pastorianus
aagatgtagaaaactcgtggaggta

SEQ ID NO: 103172 - DNA, 25 bp, Saccharomyces pastorianus
gtactcaataacttactttggaatt

SEQ ID NO: 103173 - DNA, 25 bp, Saccharomyces pastorianus
aatgtgtccgctataaatggctgca

SEQ ID NO: 103174 - DNA, 25 bp, Saccharomyces pastorianus
agcaactcatctagtgccaactttg

SEQ ID NO: 103175 - DNA, 25 bp, Saccharomyces pastorianus
gaatgccacgcctgatattagctat

SEQ ID NO: 103176 - DNA, 25 bp, Saccharomyces pastorianus
actatgttttaaatgtgtccgctat

SEQ ID NO: 103177 - DNA, 25 bp, Saccharomyces pastorianus
gggacaattattcctttactgatga

SEQ ID NO: 103178 - DNA, 25 bp, Saccharomyces pastorianus
gaactatcccagtataactactttg

SEQ ID NO: 103179 - DNA, 25 bp, Saccharomyces pastorianus
gccaactttggagaatgcaacccag

SEQ ID NO: 103180 - DNA, 25 bp, Saccharomyces pastorianus
gacattgacatgaactatcccagta

SEQ ID NO: 103181 - DNA, 25 bp, Saccharomyces pastorianus
aatggctgcacggaggaattaatag

SEQ ID NO: 103182 - DNA, 25 bp, Saccharomyces pastorianus
gattatttgggagaatgccacgcct

SEQ ID NO: 103183 - DNA, 25 bp, Saccharomyces pastorianus
caacccagtgggtttatgatgcggg

SEQ ID NO: 103184 - DNA, 25 bp, Saccharomyces pastorianus
ttgtgcatatgctacgggtgacgga

SEQ ID NO: 103185 - DNA, 25 bp, Saccharomyces pastorianus
gggcaattatatgctggccaggatt

SEQ ID NO: 103186 - DNA, 25 bp, Saccharomyces pastorianus
ggatatatgatgcttcgttgaacgt

SEQ ID NO: 103187 - DNA, 25 bp, Saccharomyces pastorianus
gttctacgcagattgcacacagtga

SEQ ID NO: 103188 - DNA, 25 bp, Saccharomyces pastorianus
tgacgtttctgttcatccatggatg

SEQ ID NO: 103189 - DNA, 25 bp, Saccharomyces pastorianus
gaaggtcgtctaatcacgtttactg

SEQ ID NO: 103190 - DNA, 25 bp, Saccharomyces pastorianus
ggacctgttaatgaagagcctgaaa

SEQ ID NO: 103191 - DNA, 25 bp, Saccharomyces pastorianus
tgacggacacacaaactctgaactt

SEQ ID NO: 103192 - DNA, 25 bp, Saccharomyces pastorianus
gagggactaatcgttcctgacgttt

SEQ ID NO: 103193 - DNA, 25 bp, Saccharomyces pastorianus
gatgtactacatttgttctacgcag

SEQ ID NO: 103194 - DNA, 25 bp, Saccharomyces pastorianus
aatcccgttgatggcagtattattg

SEQ ID NO: 103195 - DNA, 25 bp, Saccharomyces pastorianus
aatttggccttctgtgattgatggt

SEQ ID NO: 103196 - DNA, 25 bp, Saccharomyces pastorianus
tatgcaaccatactcgttattccca

SEQ ID NO: 103197 - DNA, 25 bp, Saccharomyces pastorianus
gtcatttgggttgtggcttctatat

SEQ ID NO: 103198 - DNA, 25 bp, Saccharomyces pastorianus
gtatcccatcaatgaggcggtccaa

SEQ ID NO: 103199 - DNA, 25 bp, Saccharomyces pastorianus
gtaagcttacttctccatgacaggg

SEQ ID NO: 103200 - DNA, 25 bp, Saccharomyces pastorianus
cgatttacaaactgccgctgtcttt

SEQ ID NO: 103201 - DNA, 25 bp, Saccharomyces pastorianus
ttcgtttgctttaacattgccgcca

SEQ ID NO: 103202 - DNA, 25 bp, Saccharomyces pastorianus
gttgccttcctctatagtttcacag

SEQ ID NO: 103203 - DNA, 25 bp, Saccharomyces pastorianus
atcaataacacatacaccgtctgcg

SEQ ID NO: 103204 - DNA, 25 bp, Saccharomyces pastorianus
aatgggtcaaacctgcggtcagttt

SEQ ID NO: 103205 - DNA, 25 bp, Saccharomyces pastorianus
gcttctacctaacctacatcaaaaa

SEQ ID NO: 103206 - DNA, 25 bp, Saccharomyces pastorianus
attcctacaccagttatttcaccga

SEQ ID NO: 103207 - DNA, 25 bp, Saccharomyces pastorianus
taggtcaatccgtttccgaatctgg

SEQ ID NO: 103208 - DNA, 25 bp, Saccharomyces pastorianus
gcagctatggacatgggcttcttct

SEQ ID NO: 103209 - DNA, 25 bp, Saccharomyces pastorianus
gtttaccaacatatgaccactgcca

SEQ ID NO: 103210 - DNA, 25 bp, Saccharomyces pastorianus
aaaatctactaatagctcctcctct

SEQ ID NO: 103211 - DNA, 25 bp, Saccharomyces pastorianus
tcaagtgccttggtactcttctaga

SEQ ID NO: 103212 - DNA, 25 bp, Saccharomyces pastorianus
gaatctggttccgaatctgccactg

SEQ ID NO: 103213 - DNA, 25 bp, Saccharomyces pastorianus
gtatcagtgttacctccttaggtca

SEQ ID NO: 103214 - DNA, 25 bp, Saccharomyces pastorianus
ggaacctgaaatcatcgctgcttta

SEQ ID NO: 103215 - DNA, 25 bp, Saccharomyces pastorianus
aaggcctcctcttctgcagaaaaat

SEQ ID NO: 103216 - DNA, 25 bp, Saccharomyces pastorianus
gaagctgctaagtcttctagctctg

SEQ ID NO: 103217 - DNA, 25 bp, Saccharomyces pastorianus
gaaatatgctgctgtctttggactg

SEQ ID NO: 103218 - DNA, 25 bp, Saccharomyces pastorianus
gataatgactctatctccttgaaga

SEQ ID NO: 103219 - DNA, 25 bp, Saccharomyces pastorianus
taggcgatcctattcctgatttgag

SEQ ID NO: 103220 - DNA, 25 bp, Saccharomyces pastorianus
aaacgccactttctggttctattag

SEQ ID NO: 103221 - DNA, 25 bp, Saccharomyces pastorianus
gaggaagagtccaaactggccccta

SEQ ID NO: 103222 - DNA, 25 bp, Saccharomyces pastorianus
caagcacgcctggttgtactagaca

SEQ ID NO: 103223 - DNA, 25 bp, Saccharomyces pastorianus
gtgcagattctgtgacatcccagaa

SEQ ID NO: 103224 - DNA, 25 bp, Saccharomyces pastorianus
gtgttttttgtgtatcccagggcaa

SEQ ID NO: 103225 - DNA, 25 bp, Saccharomyces pastorianus
gacaggcctgtggatttcgtgacaa

SEQ ID NO: 103226 - DNA, 25 bp, Saccharomyces pastorianus
gacaggtcctaaacataacgctaaa

SEQ ID NO: 103227 - DNA, 25 bp, Saccharomyces pastorianus
atttcgacaccggaagtgcctaaga

SEQ ID NO: 103228 - DNA, 25 bp, Saccharomyces pastorianus
ggtgatattgttgaatggactccca

SEQ ID NO: 103229 - DNA, 25 bp, Saccharomyces pastorianus
aagagatgatcgcaacagccaaatc

SEQ ID NO: 103230 - DNA, 25 bp, Saccharomyces pastorianus
tggctggtttcgtactggtgatatt

SEQ ID NO: 103231 - DNA, 25 bp, Saccharomyces pastorianus
atagaaacggcggtctctttcactt

SEQ ID NO: 103232 - DNA, 25 bp, Saccharomyces pastorianus
aattgcttctaaagggtgcgccggt

SEQ ID NO: 103233 - DNA, 25 bp, Saccharomyces pastorianus
aatggcttagtcacatctgctcaaa

SEQ ID NO: 103234 - DNA, 25 bp, Saccharomyces pastorianus
gtttacaggtcaaactcctatgtga

SEQ ID NO: 103235 - DNA, 25 bp, Saccharomyces pastorianus
tgcgccggtctgttctgaatattat

SEQ ID NO: 103236 - DNA, 25 bp, Saccharomyces pastorianus
gaagagaaatcttagccgctgttaa

SEQ ID NO: 103237 - DNA, 25 bp, Saccharomyces pastorianus
ctctttcacttacgatggctggttt

SEQ ID NO: 103238 - DNA, 25 bp, Saccharomyces pastorianus
ggacccctatctaaatttgctgtca

SEQ ID NO: 103239 - DNA, 25 bp, Saccharomyces pastorianus
gaagatcctgtcacagtgggcgatt

SEQ ID NO: 103240 - DNA, 25 bp, Saccharomyces pastorianus
ggtggacttgatgctatttttggaa

SEQ ID NO: 103241 - DNA, 25 bp, Saccharomyces pastorianus
gggcgatttgattgaccacattgta

SEQ ID NO: 103242 - DNA, 25 bp, Saccharomyces pastorianus
gacccggtatcatcacattaatcaa

SEQ ID NO: 103243 - DNA, 25 bp, Saccharomyces pastorianus
gagtttctaggtggacttgatgcta

SEQ ID NO: 103244 - DNA, 25 bp, Saccharomyces pastorianus
catattggaagacggtgacatcatc

SEQ ID NO: 103245 - DNA, 25 bp, Saccharomyces pastorianus
aatgacgttagtatcttcatcgaag

SEQ ID NO: 103246 - DNA, 25 bp, Saccharomyces pastorianus
agatgattctataagacccggtatc

SEQ ID NO: 103247 - DNA, 25 bp, Saccharomyces pastorianus
gctcgaaggcgaaaaagactacata

SEQ ID NO: 103248 - DNA, 25 bp, Saccharomyces pastorianus
tatgatcaataaccctaatgacgtt

SEQ ID NO: 103249 - DNA, 25 bp, Saccharomyces pastorianus
gaccacattgtatctactatgatca

SEQ ID NO: 103250 - DNA, 25 bp, Saccharomyces pastorianus
gatcacacgtcttactaaaccagca

SEQ ID NO: 103251 - DNA, 25 bp, Saccharomyces pastorianus
tagtacccggtagcccttcagataa

SEQ ID NO: 103252 - DNA, 25 bp, Saccharomyces pastorianus
accatcccttttgcatttatcagtg

SEQ ID NO: 103253 - DNA, 25 bp, Saccharomyces pastorianus
aggcgtatttcagtgtgcttgagca

SEQ ID NO: 103254 - DNA, 25 bp, Saccharomyces pastorianus
agctattcagtataccatccctttt

SEQ ID NO: 103255 - DNA, 25 bp, Saccharomyces pastorianus
tgtgcatgcggcaaaccactctaaa

SEQ ID NO: 103256 - DNA, 25 bp, Saccharomyces pastorianus
agatagatccgagcctaacatcaag

SEQ ID NO: 103257 - DNA, 25 bp, Saccharomyces pastorianus
gatgtcgatgtattgcaagtcacta

SEQ ID NO: 103258 - DNA, 25 bp, Saccharomyces pastorianus
aaggcatcggcatggactctgcgtt

SEQ ID NO: 103259 - DNA, 25 bp, Saccharomyces pastorianus
agacgggtatcctcgttcggatgtc

SEQ ID NO: 103260 - DNA, 25 bp, Saccharomyces pastorianus
aagacatcgctaacaccttcgagaa

SEQ ID NO: 103261 - DNA, 25 bp, Saccharomyces pastorianus
ttttgttgctcagtcatgtgctgca

SEQ ID NO: 103262 - DNA, 25 bp, Saccharomyces pastorianus
atttcactgctattctcgggagaac

SEQ ID NO: 103263 - DNA, 25 bp, Saccharomyces pastorianus
ataccagattccattcaacgacgtc

SEQ ID NO: 103264 - DNA, 25 bp, Saccharomyces pastorianus
gcaacggttgatcatggcatcgtcc

SEQ ID NO: 103265 - DNA, 25 bp, Saccharomyces pastorianus
tatgctgcaatcaaaccttggtgag

SEQ ID NO: 103266 - DNA, 25 bp, Saccharomyces pastorianus
gtgagcaccccacacattacaaagg

SEQ ID NO: 103267 - DNA, 25 bp, Saccharomyces pastorianus
ggcatcttcccacagtttgattttg

SEQ ID NO: 103268 - DNA, 25 bp, Saccharomyces pastorianus
ggcatcgtccgtctctaagatgatt

SEQ ID NO: 103269 - DNA, 25 bp, Saccharomyces pastorianus
gctggtcccctcattattagggcta

SEQ ID NO: 103270 - DNA, 25 bp, Saccharomyces pastorianus
aaaggcactttcgatgcattcagaa

SEQ ID NO: 103271 - DNA, 25 bp, Saccharomyces pastorianus
agggctatttcatgtggctatccat

SEQ ID NO: 103272 - DNA, 25 bp, Saccharomyces pastorianus
taccccacagagtgttgcaacagct

SEQ ID NO: 103273 - DNA, 25 bp, Saccharomyces pastorianus
aagacactacaacccctgttgtgga

SEQ ID NO: 103274 - DNA, 25 bp, Saccharomyces pastorianus
acatgtcagggtttgtatgcccgca

SEQ ID NO: 103275 - DNA, 25 bp, Saccharomyces pastorianus
aaaacaattcatctctgacgtcgcc

SEQ ID NO: 103276 - DNA, 25 bp, Saccharomyces pastorianus
gtcgatttaaagatcctcggtataa

SEQ ID NO: 103277 - DNA, 25 bp, Saccharomyces pastorianus
gagaatcatctctttgtcccatttt

SEQ ID NO: 103278 - DNA, 25 bp, Saccharomyces pastorianus
cataccttggtaacgttcctataga

SEQ ID NO: 103279 - DNA, 25 bp, Saccharomyces pastorianus
gattacttactgatcgatacccctc

SEQ ID NO: 103280 - DNA, 25 bp, Saccharomyces pastorianus
actctactggctctcttagtgtaat

SEQ ID NO: 103281 - DNA, 25 bp, Saccharomyces pastorianus
tatgcccgcattgtgctgagtgtac

SEQ ID NO: 103282 - DNA, 25 bp, Saccharomyces pastorianus
ggagcaattttctgtcccatacctt

SEQ ID NO: 103283 - DNA, 25 bp, Saccharomyces pastorianus
tacacccgaagatgtcagtactgca

SEQ ID NO: 103284 - DNA, 25 bp, Saccharomyces pastorianus
aagatgtcagtactgcaggcgcaaa

SEQ ID NO: 103285 - DNA, 25 bp, Saccharomyces pastorianus
cgtgatacacccgaagatgtcagta

SEQ ID NO: 103286 - DNA, 25 bp, Saccharomyces pastorianus
gatattttagatgttttgaacctac

SEQ ID NO: 103287 - DNA, 25 bp, Saccharomyces pastorianus
gagaaaatctcggaagtcgaactta

SEQ ID NO: 103288 - DNA, 25 bp, Saccharomyces pastorianus
actgcaggcgcaaaggatattttag

SEQ ID NO: 103289 - DNA, 25 bp, Saccharomyces pastorianus
agaagatctacacagggacaacaat

SEQ ID NO: 103290 - DNA, 25 bp, Saccharomyces pastorianus
actctctgttagttcagttagaaga

SEQ ID NO: 103291 - DNA, 25 bp, Saccharomyces pastorianus
tgtcagtactgcaggcgcaaaggat

SEQ ID NO: 103292 - DNA, 25 bp, Saccharomyces pastorianus
ctcggaagtcgaacttaagttggat

SEQ ID NO: 103293 - DNA, 25 bp, Saccharomyces pastorianus
gttagaagatctacacagggacaac

SEQ ID NO: 103294 - DNA, 25 bp, Saccharomyces pastorianus
ggtgagtcttttccatatttccatg

SEQ ID NO: 103295 - DNA, 25 bp, Saccharomyces pastorianus
catcggcccgtatatgccatattta

SEQ ID NO: 103296 - DNA, 25 bp, Saccharomyces pastorianus
gatatactattttccgatcatcggc

SEQ ID NO: 103297 - DNA, 25 bp, Saccharomyces pastorianus
ctttgggtacgcaaatctacgagaa

SEQ ID NO: 103298 - DNA, 25 bp, Saccharomyces pastorianus
gtagttcttgacgtagacccggccg

SEQ ID NO: 103299 - DNA, 25 bp, Saccharomyces pastorianus
gacccggccgtttacatgattaatc

SEQ ID NO: 103300 - DNA, 25 bp, Saccharomyces pastorianus
aaatgatcgcaggtgagtcttttcc

SEQ ID NO: 103301 - DNA, 25 bp, Saccharomyces pastorianus
caccaattcccgagcccaaaagagg

SEQ ID NO: 103302 - DNA, 25 bp, Saccharomyces pastorianus
aagagatcccaatccattcgttgag

SEQ ID NO: 103303 - DNA, 25 bp, Saccharomyces pastorianus
aaatggcgattgatttcccacctac

SEQ ID NO: 103304 - DNA, 25 bp, Saccharomyces pastorianus
agtgattcgatagctggccctacgc

SEQ ID NO: 103305 - DNA, 25 bp, Saccharomyces pastorianus
gagttcacaacgaatttctctccgc

SEQ ID NO: 103306 - DNA, 25 bp, Saccharomyces pastorianus
gctgacactacccaattgtgagttt

SEQ ID NO: 103307 - DNA, 25 bp, Saccharomyces pastorianus
aaagccaagcacgttacaggaaagt

SEQ ID NO: 103308 - DNA, 25 bp, Saccharomyces pastorianus
aatcgtatcattccacagctgacac

SEQ ID NO: 103309 - DNA, 25 bp, Saccharomyces pastorianus
ggttgccgaaattattctccgctac

SEQ ID NO: 103310 - DNA, 25 bp, Saccharomyces pastorianus
gaccgcttaaaaactatcgcttcta

SEQ ID NO: 103311 - DNA, 25 bp, Saccharomyces pastorianus
atttctctccgccaggaaactgata

SEQ ID NO: 103312 - DNA, 25 bp, Saccharomyces pastorianus
gtgatgttcacaaacgacttcaagg

SEQ ID NO: 103313 - DNA, 25 bp, Saccharomyces pastorianus
attattctccgctacttatatgcag

SEQ ID NO: 103314 - DNA, 25 bp, Saccharomyces pastorianus
gacattaggtactatttgctccgaa

SEQ ID NO: 103315 - DNA, 25 bp, Saccharomyces pastorianus
atattccttggatgtatgccgtcga

SEQ ID NO: 103316 - DNA, 25 bp, Saccharomyces pastorianus
aaaaacctgttgtcatgccgtctga

SEQ ID NO: 103317 - DNA, 25 bp, Saccharomyces pastorianus
ggcactccacaggtgtcgcaaaagc

SEQ ID NO: 103318 - DNA, 25 bp, Saccharomyces pastorianus
gaccatttcaaagactgtggccaga

SEQ ID NO: 103319 - DNA, 25 bp, Saccharomyces pastorianus
tggaattatcccttaatggcctacc

SEQ ID NO: 103320 - DNA, 25 bp, Saccharomyces pastorianus
ttagatctacttcccaaaaacctgt

SEQ ID NO: 103321 - DNA, 25 bp, Saccharomyces pastorianus
tttgtcggtaacatcactccggatg

SEQ ID NO: 103322 - DNA, 25 bp, Saccharomyces pastorianus
aacttgaagctgactcgcgttctat

SEQ ID NO: 103323 - DNA, 25 bp, Saccharomyces pastorianus
gggaacaccaaaaggctacggctat

SEQ ID NO: 103324 - DNA, 25 bp, Saccharomyces pastorianus
ggatgtcaccccagagcaaatagaa

SEQ ID NO: 103325 - DNA, 25 bp, Saccharomyces pastorianus
actcgcgttctatctttgtcggtaa

SEQ ID NO: 103326 - DNA, 25 bp, Saccharomyces pastorianus
ataggcattacaactcgcaaaacca

SEQ ID NO: 103327 - DNA, 25 bp, Saccharomyces pastorianus
acagtgtcaaccatgattcatccca

SEQ ID NO: 103328 - DNA, 25 bp, Saccharomyces pastorianus
gctatatcccagaaggtgtttcctt

SEQ ID NO: 103329 - DNA, 25 bp, Saccharomyces pastorianus
attcatcccaatcttttaccttatc

SEQ ID NO: 103330 - DNA, 25 bp, Saccharomyces pastorianus
agttccgcattgtcacaaagtttca

SEQ ID NO: 103331 - DNA, 25 bp, Saccharomyces pastorianus
gtgtttccttcgatgtggagcccaa

SEQ ID NO: 103332 - DNA, 25 bp, Saccharomyces pastorianus
ttttttcagaaaccgctatatccca

SEQ ID NO: 103333 - DNA, 25 bp, Saccharomyces pastorianus
ccaatcttttaccttatcgaacgca

SEQ ID NO: 103334 - DNA, 25 bp, Saccharomyces pastorianus
gtggagcccaattttgtacaataca

SEQ ID NO: 103335 - DNA, 25 bp, Saccharomyces pastorianus
atgtttggcgagaggcatgttacga

SEQ ID NO: 103336 - DNA, 25 bp, Saccharomyces pastorianus
agtcaagtcgataacaacagtgtca

SEQ ID NO: 103337 - DNA, 25 bp, Saccharomyces pastorianus
atccgaggaaatcaacacaaccttg

SEQ ID NO: 103338 - DNA, 25 bp, Saccharomyces pastorianus
tagcacgaataatgagcctttgttt

SEQ ID NO: 103339 - DNA, 25 bp, Saccharomyces pastorianus
aaccactgaggaactggcgcagcaa

SEQ ID NO: 103340 - DNA, 25 bp, Saccharomyces pastorianus
aactggcgcagcaagagcagctatt

SEQ ID NO: 103341 - DNA, 25 bp, Saccharomyces pastorianus
gatacactaagaactgtttcggcag

SEQ ID NO: 103342 - DNA, 25 bp, Saccharomyces pastorianus
ttacacacaataggcgacgtttact

SEQ ID NO: 103343 - DNA, 25 bp, Saccharomyces pastorianus
aacatccactttacgtggcgtttgt

SEQ ID NO: 103344 - DNA, 25 bp, Saccharomyces pastorianus
gatggaatcatttggtctggacata

SEQ ID NO: 103345 - DNA, 25 bp, Saccharomyces pastorianus
ttcggcagccatagacgctcagaat

SEQ ID NO: 103346 - DNA, 25 bp, Saccharomyces pastorianus
gaaatttttcttgcatcccagaacc

SEQ ID NO: 103347 - DNA, 25 bp, Saccharomyces pastorianus
ttgcatcccagaacctgttcggaat

SEQ ID NO: 103348 - DNA, 25 bp, Saccharomyces pastorianus
gatgggcaaagtattgtcggctgct

SEQ ID NO: 103349 - DNA, 25 bp, Saccharomyces pastorianus
aattggcggtagagccctcaaaatt

SEQ ID NO: 103350 - DNA, 25 bp, Saccharomyces pastorianus
gaggatcaacggtcaacgattctag

SEQ ID NO: 103351 - DNA, 25 bp, Saccharomyces pastorianus
acacaggagaatcgcaaggttttgc

SEQ ID NO: 103352 - DNA, 25 bp, Saccharomyces pastorianus
ggtcaacgattctagcagtcgataa

SEQ ID NO: 103353 - DNA, 25 bp, Saccharomyces pastorianus
ggtgacatattgacagtcttttctg

SEQ ID NO: 103354 - DNA, 25 bp, Saccharomyces pastorianus
ttgatcatactttttataggccaaa

SEQ ID NO: 103355 - DNA, 25 bp, Saccharomyces pastorianus
gtcttttctgaatatggagtccctg

SEQ ID NO: 103356 - DNA, 25 bp, Saccharomyces pastorianus
atatggagtccctgtagatgtaatt

SEQ ID NO: 103357 - DNA, 25 bp, Saccharomyces pastorianus
agcccgcatcaatcatggcataatg

SEQ ID NO: 103358 - DNA, 25 bp, Saccharomyces pastorianus
ggtagagccctcaaaattgatcata

SEQ ID NO: 103359 - DNA, 25 bp, Saccharomyces pastorianus
tagatgtaattcttagcagggatga

SEQ ID NO: 103360 - DNA, 25 bp, Saccharomyces pastorianus
tacaccaagccggttgtcaattcgt

SEQ ID NO: 103361 - DNA, 25 bp, Saccharomyces pastorianus
gtcaattcgttcatcatcaggtcat

SEQ ID NO: 103362 - DNA, 25 bp, Saccharomyces pastorianus
gagcctggccatcagttcattgaaa

SEQ ID NO: 103363 - DNA, 25 bp, Saccharomyces pastorianus
ttataccacggcactattttacacc

SEQ ID NO: 103364 - DNA, 25 bp, Saccharomyces pastorianus
cgacttgtcagggttcagagctctt

SEQ ID NO: 103365 - DNA, 25 bp, Saccharomyces pastorianus
ttcggtatccacttctacatctaaa

SEQ ID NO: 103366 - DNA, 25 bp, Saccharomyces pastorianus
taaatcgggttcttcacaaccacca

SEQ ID NO: 103367 - DNA, 25 bp, Saccharomyces pastorianus
gatttttcgatttggtccccggatg

SEQ ID NO: 103368 - DNA, 25 bp, Saccharomyces pastorianus
ggatgacaaaccactctatcacgat

SEQ ID NO: 103369 - DNA, 25 bp, Saccharomyces pastorianus
gatagtccctcgtgcactttaaaga

SEQ ID NO: 103370 - DNA, 25 bp, Saccharomyces pastorianus
ttgaatggtttcacgagcctggcca

SEQ ID NO: 103371 - DNA, 25 bp, Saccharomyces pastorianus
tggctttgaagaggccttatcaccc

SEQ ID NO: 103372 - DNA, 25 bp, Saccharomyces pastorianus
cttcaaaggccccaagcaagactct

SEQ ID NO: 103373 - DNA, 25 bp, Saccharomyces pastorianus
tgatgaatcctttgcacctgaaaaa

SEQ ID NO: 103374 - DNA, 25 bp, Saccharomyces pastorianus
gatcagatagctacatcgctcttca

SEQ ID NO: 103375 - DNA, 25 bp, Saccharomyces pastorianus
gcacctaagctaattgatcttcaaa

SEQ ID NO: 103376 - DNA, 25 bp, Saccharomyces pastorianus
tgatgactctttatccgaagctgga

SEQ ID NO: 103377 - DNA, 25 bp, Saccharomyces pastorianus
gatgaccaacatgctatccaaactt

SEQ ID NO: 103378 - DNA, 25 bp, Saccharomyces pastorianus
tgtctgtgtgcctattgatgaatcc

SEQ ID NO: 103379 - DNA, 25 bp, Saccharomyces pastorianus
aggaagatctcgtattgatgactct

SEQ ID NO: 103380 - DNA, 25 bp, Saccharomyces pastorianus
aaggcccctttttgtattcatcctg

SEQ ID NO: 103381 - DNA, 25 bp, Saccharomyces pastorianus
accctcatcttgctcgttctttgga

SEQ ID NO: 103382 - DNA, 25 bp, Saccharomyces pastorianus
atcaccatgagaaccatcgaccagg

SEQ ID NO: 103383 - DNA, 25 bp, Saccharomyces pastorianus
gtctggcccagatttcattaaacgg

SEQ ID NO: 103384 - DNA, 25 bp, Saccharomyces pastorianus
aatacgctgtacgtgagccagctta

SEQ ID NO: 103385 - DNA, 25 bp, Saccharomyces pastorianus
tgatcacgatactcatcacgctgtg

SEQ ID NO: 103386 - DNA, 25 bp, Saccharomyces pastorianus
ggccaagcctttatcaccatgagaa

SEQ ID NO: 103387 - DNA, 25 bp, Saccharomyces pastorianus
taaacggcgagcgattctttggtaa

SEQ ID NO: 103388 - DNA, 25 bp, Saccharomyces pastorianus
gcgattctttggtaagcctttgaaa

SEQ ID NO: 103389 - DNA, 25 bp, Saccharomyces pastorianus
gcaacgactgcgagtaaaccttttt

SEQ ID NO: 103390 - DNA, 25 bp, Saccharomyces pastorianus
gaggtactgaaggttagcatgaatt

SEQ ID NO: 103391 - DNA, 25 bp, Saccharomyces pastorianus
ttttactctttgctacgtttggaga

SEQ ID NO: 103392 - DNA, 25 bp, Saccharomyces pastorianus
atcacgctgtggctgaaccagtaac

SEQ ID NO: 103393 - DNA, 25 bp, Saccharomyces pastorianus
accactggaaccgttgtcggataca

SEQ ID NO: 103394 - DNA, 25 bp, Saccharomyces pastorianus
agtgattaatcctcaacagctgttg

SEQ ID NO: 103395 - DNA, 25 bp, Saccharomyces pastorianus
gacgatgaggtggactactcggaaa

SEQ ID NO: 103396 - DNA, 25 bp, Saccharomyces pastorianus
aagagccagaccttgcgattgcaga

SEQ ID NO: 103397 - DNA, 25 bp, Saccharomyces pastorianus
atcattctcatcacaaccactggaa

SEQ ID NO: 103398 - DNA, 25 bp, Saccharomyces pastorianus
tgacacggaactgcgacaactgttt

SEQ ID NO: 103399 - DNA, 25 bp, Saccharomyces pastorianus
aacggacgatgaccactcacaagtg

SEQ ID NO: 103400 - DNA, 25 bp, Saccharomyces pastorianus
gatgagctaaggtaccagtcgcata

SEQ ID NO: 103401 - DNA, 25 bp, Saccharomyces pastorianus
ttagacacttcgagaccagatcttg

SEQ ID NO: 103402 - DNA, 25 bp, Saccharomyces pastorianus
gaatgggcagtcactttagacactt

SEQ ID NO: 103403 - DNA, 25 bp, Saccharomyces pastorianus
atattaaactcgcactcactagcct

SEQ ID NO: 103404 - DNA, 25 bp, Saccharomyces pastorianus
tggataacattccaccacgtttgga

SEQ ID NO: 103405 - DNA, 25 bp, Saccharomyces pastorianus
aaactgtttggtggatttcatactg

SEQ ID NO: 103406 - DNA, 25 bp, Saccharomyces pastorianus
atatgggtagcccttcagcagcatc

SEQ ID NO: 103407 - DNA, 25 bp, Saccharomyces pastorianus
tcagcagcatcgtcatcaacattat

SEQ ID NO: 103408 - DNA, 25 bp, Saccharomyces pastorianus
attgcccagatttgaattagctagt

SEQ ID NO: 103409 - DNA, 25 bp, Saccharomyces pastorianus
atgggttattggaacgcccactcca

SEQ ID NO: 103410 - DNA, 25 bp, Saccharomyces pastorianus
gcagataatagctccgtctggaaaa

SEQ ID NO: 103411 - DNA, 25 bp, Saccharomyces pastorianus
tattgaacatattgcccgtgacagg

SEQ ID NO: 103412 - DNA, 25 bp, Saccharomyces pastorianus
ccactccagctgttcaaatctttag

SEQ ID NO: 103413 - DNA, 25 bp, Saccharomyces pastorianus
tagatgactatgctttcgtgagaat

SEQ ID NO: 103414 - DNA, 25 bp, Saccharomyces pastorianus
gtctcacgtatggtgtacgcttatt

SEQ ID NO: 103415 - DNA, 25 bp, Saccharomyces pastorianus
atgcctccattgaatccatttcttg

SEQ ID NO: 103416 - DNA, 25 bp, Saccharomyces pastorianus
gtgtcgtggcatgtgggtccaacaa

SEQ ID NO: 103417 - DNA, 25 bp, Saccharomyces pastorianus
attagctccggcaactttgaccaag

SEQ ID NO: 103418 - DNA, 25 bp, Saccharomyces pastorianus
ggtccaacaatggtcttctggcagt

SEQ ID NO: 103419 - DNA, 25 bp, Saccharomyces pastorianus
aacaagacgaactagatgcctccat

SEQ ID NO: 103420 - DNA, 25 bp, Saccharomyces pastorianus
ggcatggaattgcttcactggccaa

SEQ ID NO: 103421 - DNA, 25 bp, Saccharomyces pastorianus
ttggtcatccaaattctcccttatg

SEQ ID NO: 103422 - DNA, 25 bp, Saccharomyces pastorianus
tgacttattcgcatcgtgtatcaat

SEQ ID NO: 103423 - DNA, 25 bp, Saccharomyces pastorianus
atggcggtgcgattttacatttatc

SEQ ID NO: 103424 - DNA, 25 bp, Saccharomyces pastorianus
agaagctccatggatttccctatca

SEQ ID NO: 103425 - DNA, 25 bp, Saccharomyces pastorianus
tgcatcctgtggcaaataccggcac

SEQ ID NO: 103426 - DNA, 25 bp, Saccharomyces pastorianus
atgtccactaagttgcctattgtga

SEQ ID NO: 103427 - DNA, 25 bp, Saccharomyces pastorianus
ggcattactaggacatgtgggcaat

SEQ ID NO: 103428 - DNA, 25 bp, Saccharomyces pastorianus
ttcattacaatggagggagggccct

SEQ ID NO: 103429 - DNA, 25 bp, Saccharomyces pastorianus
tgtgatttcaaacggaacagccttc

SEQ ID NO: 103430 - DNA, 25 bp, Saccharomyces pastorianus
atagcggatcagaggcacaacatgg

SEQ ID NO: 103431 - DNA, 25 bp, Saccharomyces pastorianus
taacggtgctgcttgcctgtgtaat

SEQ ID NO: 103432 - DNA, 25 bp, Saccharomyces pastorianus
aaaagtccccgttcaattgctgttg

SEQ ID NO: 103433 - DNA, 25 bp, Saccharomyces pastorianus
aacatggcctccctaggaacgctga

SEQ ID NO: 103434 - DNA, 25 bp, Saccharomyces pastorianus
cctgtgtaatgcttgtgggttgttt

SEQ ID NO: 103435 - DNA, 25 bp, Saccharomyces pastorianus
aaaattgattctgcgcttcggtaga

SEQ ID NO: 103436 - DNA, 25 bp, Saccharomyces pastorianus
agcctgctcgaccaagaacgggcat

SEQ ID NO: 103437 - DNA, 25 bp, Saccharomyces pastorianus
aactacttagaggtgggccgcgaca

SEQ ID NO: 103438 - DNA, 25 bp, Saccharomyces pastorianus
gacatatgtcccaaaccgtacggat

SEQ ID NO: 103439 - DNA, 25 bp, Saccharomyces pastorianus
caagctacttctggtactactcgat

SEQ ID NO: 103440 - DNA, 25 bp, Saccharomyces pastorianus
cgcagggtttcctagcaagctactt

SEQ ID NO: 103441 - DNA, 25 bp, Saccharomyces pastorianus
tctcaaacttaatacctggcgcatg

SEQ ID NO: 103442 - DNA, 25 bp, Saccharomyces pastorianus
aagagggcgcactcaacattctcaa

SEQ ID NO: 103443 - DNA, 25 bp, Saccharomyces pastorianus
acggctcactgagttcgagtcttca

SEQ ID NO: 103444 - DNA, 25 bp, Saccharomyces pastorianus
caaccggaccggaactcatagtact

SEQ ID NO: 103445 - DNA, 25 bp, Saccharomyces pastorianus
tgacaagtcgattcctcaacaggca

SEQ ID NO: 103446 - DNA, 25 bp, Saccharomyces pastorianus
gtggataatttcatcgctctgtgat

SEQ ID NO: 103447 - DNA, 25 bp, Saccharomyces pastorianus
gaatttacttgtccggtacccgcag

SEQ ID NO: 103448 - DNA, 25 bp, Saccharomyces pastorianus
gatcgacgaaaatggtactctgcta

SEQ ID NO: 103449 - DNA, 25 bp, Saccharomyces pastorianus
aggacgattgcgaaccaggaccatt

SEQ ID NO: 103450 - DNA, 25 bp, Saccharomyces pastorianus
gcgaaccaggaccatttccatagat

SEQ ID NO: 103451 - DNA, 25 bp, Saccharomyces pastorianus
aatggtactctgctagtaccgccac

SEQ ID NO: 103452 - DNA, 25 bp, Saccharomyces pastorianus
tatccgcttaccaaacaagagcaag

SEQ ID NO: 103453 - DNA, 25 bp, Saccharomyces pastorianus
gcaagaaagcacacggaggaaagat

SEQ ID NO: 103454 - DNA, 25 bp, Saccharomyces pastorianus
aagaacagacgcacatacgcctttg

SEQ ID NO: 103455 - DNA, 25 bp, Saccharomyces pastorianus
tacgcctttggcacgcaattatatc

SEQ ID NO: 103456 - DNA, 25 bp, Saccharomyces pastorianus
ctctaccaaatatccgcttaccaaa

SEQ ID NO: 103457 - DNA, 25 bp, Saccharomyces pastorianus
aaagatgaaacctgagatcgacgaa

SEQ ID NO: 103458 - DNA, 25 bp, Saccharomyces pastorianus
tagtaccgccaccaaggacgattgc

SEQ ID NO: 103459 - DNA, 25 bp, Saccharomyces pastorianus
agccgcccagattccgagagattta

SEQ ID NO: 103460 - DNA, 25 bp, Saccharomyces pastorianus
aagacgctcagtacgctcgagttat

SEQ ID NO: 103461 - DNA, 25 bp, Saccharomyces pastorianus
aagcctcgagtattttctttcgaag

SEQ ID NO: 103462 - DNA, 25 bp, Saccharomyces pastorianus
tataggatggtgctctcccagcgag

SEQ ID NO: 103463 - DNA, 25 bp, Saccharomyces pastorianus
gaaggaacagtatgcccagagacaa

SEQ ID NO: 103464 - DNA, 25 bp, Saccharomyces pastorianus
gacagttccatgtcgcgagacctat

SEQ ID NO: 103465 - DNA, 25 bp, Saccharomyces pastorianus
gacgcctcaaggaacgacgacgacg

SEQ ID NO: 103466 - DNA, 25 bp, Saccharomyces pastorianus
atccatgctccgtcattagtcgaag

SEQ ID NO: 103467 - DNA, 25 bp, Saccharomyces pastorianus
agatttatcgtcacatctgcagccg

SEQ ID NO: 103468 - DNA, 25 bp, Saccharomyces pastorianus
tttgcgccgccaacaacaactggaa

SEQ ID NO: 103469 - DNA, 25 bp, Saccharomyces pastorianus
atacacattcagtatgtcccgctag

SEQ ID NO: 103470 - DNA, 25 bp, Saccharomyces pastorianus
gaactgtctagctctgtcaaatgcg

SEQ ID NO: 103471 - DNA, 25 bp, Saccharomyces pastorianus
taacgacaacactacttgcgtttgt

SEQ ID NO: 103472 - DNA, 25 bp, Saccharomyces pastorianus
aagtgacgacggtgtggccacagaa

SEQ ID NO: 103473 - DNA, 25 bp, Saccharomyces pastorianus
aattggagacccttactctgaaaca

SEQ ID NO: 103474 - DNA, 25 bp, Saccharomyces pastorianus
aaccgcctccaaaatgaacttcaag

SEQ ID NO: 103475 - DNA, 25 bp, Saccharomyces pastorianus
gataaccccaatgggctctgtagta

SEQ ID NO: 103476 - DNA, 25 bp, Saccharomyces pastorianus
gaatcggaaaatcatgcccttaaac

SEQ ID NO: 103477 - DNA, 25 bp, Saccharomyces pastorianus
ggaccctatcctgcagaatttgatc

SEQ ID NO: 103478 - DNA, 25 bp, Saccharomyces pastorianus
gtacaataccgctatcaagcgccac

SEQ ID NO: 103479 - DNA, 25 bp, Saccharomyces pastorianus
tatgtcgatgccacatgcagagtgc

SEQ ID NO: 103480 - DNA, 25 bp, Saccharomyces pastorianus
tgaaacaagcctctgtgcctgctca

SEQ ID NO: 103481 - DNA, 25 bp, Saccharomyces pastorianus
gggattccgtaattaggtgcaacaa

SEQ ID NO: 103482 - DNA, 25 bp, Saccharomyces pastorianus
atcgcatgccttgggattccgtaat

SEQ ID NO: 103483 - DNA, 25 bp, Saccharomyces pastorianus
attgcctatcggtggtgtgattaac

SEQ ID NO: 103484 - DNA, 25 bp, Saccharomyces pastorianus
gacagaacttctattgcctatcggt

SEQ ID NO: 103485 - DNA, 25 bp, Saccharomyces pastorianus
gatcgtactgggacatcgcatgcct

SEQ ID NO: 103486 - DNA, 25 bp, Saccharomyces pastorianus
aacaatacgggcacaactcattctg

SEQ ID NO: 103487 - DNA, 25 bp, Saccharomyces pastorianus
tgttgtctttttaacgatcgtactg

SEQ ID NO: 103488 - DNA, 25 bp, Saccharomyces pastorianus
gtcaggcattgcacaaactttttta

SEQ ID NO: 103489 - DNA, 25 bp, Saccharomyces pastorianus
cagatcagtcattcatgttgtcttt

SEQ ID NO: 103490 - DNA, 25 bp, Saccharomyces pastorianus
tgcgctatcttcacggacagaactt

SEQ ID NO: 103491 - DNA, 25 bp, Saccharomyces pastorianus
ttatttctgcctatactcttaaaca

SEQ ID NO: 103492 - DNA, 25 bp, Saccharomyces pastorianus
aacaagttgactttgccatcttcaa

SEQ ID NO: 103493 - DNA, 25 bp, Saccharomyces pastorianus
tttgccatcttcaacgagacgaccc

SEQ ID NO: 103494 - DNA, 25 bp, Saccharomyces pastorianus
gtcaggaaaacactaaacaagttga

SEQ ID NO: 103495 - DNA, 25 bp, Saccharomyces pastorianus
actttgccatcttcaacgagacgac

SEQ ID NO: 103496 - DNA, 25 bp, Saccharomyces pastorianus
gatattctgtcttctgtcagtggca

SEQ ID NO: 103497 - DNA, 25 bp, Saccharomyces pastorianus
gctcgaaaatgccacatcgagagac

SEQ ID NO: 103498 - DNA, 25 bp, Saccharomyces pastorianus
gagacgacccctcaactgctcgaaa

SEQ ID NO: 103499 - DNA, 25 bp, Saccharomyces pastorianus
tgactttgccatcttcaacgagacg

SEQ ID NO: 103500 - DNA, 25 bp, Saccharomyces pastorianus
ctcaactgctcgaaaatgccacatc

SEQ ID NO: 103501 - DNA, 25 bp, Saccharomyces pastorianus
gagtcgtttgtcaggaaaacactaa

SEQ ID NO: 103502 - DNA, 25 bp, Saccharomyces pastorianus
gaaaatgagtcgtttgtcaggaaaa

SEQ ID NO: 103503 - DNA, 25 bp, Saccharomyces pastorianus
ggcgtctttttagtgtcataccatt

SEQ ID NO: 103504 - DNA, 25 bp, Saccharomyces pastorianus
ataccaacctatacttccattgctg

SEQ ID NO: 103505 - DNA, 25 bp, Saccharomyces pastorianus
ttactacctaggatcatcgacaatg

SEQ ID NO: 103506 - DNA, 25 bp, Saccharomyces pastorianus
gtaaccacagatattcaataccaac

SEQ ID NO: 103507 - DNA, 25 bp, Saccharomyces pastorianus
ttctcaatggcgtctttttagtgtc

SEQ ID NO: 103508 - DNA, 25 bp, Saccharomyces pastorianus
gtcataccattcttttttactacct

SEQ ID NO: 103509 - DNA, 25 bp, Saccharomyces pastorianus
tacaaatctatagccgggatcaccg

SEQ ID NO: 103510 - DNA, 25 bp, Saccharomyces pastorianus
ggagacatctttagagtaaccacag

SEQ ID NO: 103511 - DNA, 25 bp, Saccharomyces pastorianus
gggatcaccgaccttgttatattct

SEQ ID NO: 103512 - DNA, 25 bp, Saccharomyces pastorianus
gagttttaaaatttgctttgcggca

SEQ ID NO: 103513 - DNA, 25 bp, Saccharomyces pastorianus
gaccttgttatattcttcggagaca

SEQ ID NO: 103514 - DNA, 25 bp, Saccharomyces pastorianus
ttcttcgtacgtatagcaacctcgc

SEQ ID NO: 103515 - DNA, 25 bp, Saccharomyces pastorianus
caatctacaacattttcaggccggt

SEQ ID NO: 103516 - DNA, 25 bp, Saccharomyces pastorianus
gacccgctaatgtgtcttcatttgg

SEQ ID NO: 103517 - DNA, 25 bp, Saccharomyces pastorianus
gcaacctcgctgatattgtgatgaa

SEQ ID NO: 103518 - DNA, 25 bp, Saccharomyces pastorianus
gaaggattgtctttccctggacaca

SEQ ID NO: 103519 - DNA, 25 bp, Saccharomyces pastorianus
gacagaggtgtttctcgctactatg

SEQ ID NO: 103520 - DNA, 25 bp, Saccharomyces pastorianus
tgcgatccgccttcgataatgacat

SEQ ID NO: 103521 - DNA, 25 bp, Saccharomyces pastorianus
gggcctaaacttctccctgaaggat

SEQ ID NO: 103522 - DNA, 25 bp, Saccharomyces pastorianus
ggtaggttggactcaggcgtcctaa

SEQ ID NO: 103523 - DNA, 25 bp, Saccharomyces pastorianus
atactatcctcgacaacgggcctaa

SEQ ID NO: 103524 - DNA, 25 bp, Saccharomyces pastorianus
gaggttgtcaccaagcgattgctgc

SEQ ID NO: 103525 - DNA, 25 bp, Saccharomyces pastorianus
atacgtatacttttttccattggca

SEQ ID NO: 103526 - DNA, 25 bp, Saccharomyces pastorianus
aatggtgcagaaacaatatactaca

SEQ ID NO: 103527 - DNA, 25 bp, Saccharomyces pastorianus
ctgttgctcttattattattaccat

SEQ ID NO: 103528 - DNA, 25 bp, Saccharomyces pastorianus
ttccattggcaaaagcgatttcaaa

SEQ ID NO: 103529 - DNA, 25 bp, Saccharomyces pastorianus
gctggtatcttctatttcagagagc

SEQ ID NO: 103530 - DNA, 25 bp, Saccharomyces pastorianus
tttttccattggcaaaagcgatttc

SEQ ID NO: 103531 - DNA, 25 bp, Saccharomyces pastorianus
tgctggtatcttctatttcagagag

SEQ ID NO: 103532 - DNA, 25 bp, Saccharomyces pastorianus
tacgtatacttttttccattggcaa

SEQ ID NO: 103533 - DNA, 25 bp, Saccharomyces pastorianus
ttaccatacgtatacttttttccat

SEQ ID NO: 103534 - DNA, 25 bp, Saccharomyces pastorianus
gtatacttttttccattggcaaaag

SEQ ID NO: 103535 - DNA, 25 bp, Saccharomyces pastorianus
accatacgtatacttttttccattg

SEQ ID NO: 103536 - DNA, 25 bp, Saccharomyces pastorianus
atacgtatacttttttccattggca

SEQ ID NO: 103537 - DNA, 25 bp, Saccharomyces pastorianus
aatggtgcagaaacaatatactaca

SEQ ID NO: 103538 - DNA, 25 bp, Saccharomyces pastorianus
ctgttgctcttattattattaccat

SEQ ID NO: 103539 - DNA, 25 bp, Saccharomyces pastorianus
ttccattggcaaaagcgatttcaaa

SEQ ID NO: 103540 - DNA, 25 bp, Saccharomyces pastorianus
gctggtatcttctatttcagagagc

SEQ ID NO: 103541 - DNA, 25 bp, Saccharomyces pastorianus
tttttccattggcaaaagcgatttc

SEQ ID NO: 103542 - DNA, 25 bp, Saccharomyces pastorianus
tgctggtatcttctatttcagagag

SEQ ID NO: 103543 - DNA, 25 bp, Saccharomyces pastorianus
tacgtatacttttttccattggcaa

SEQ ID NO: 103544 - DNA, 25 bp, Saccharomyces pastorianus
ttaccatacgtatacttttttccat

SEQ ID NO: 103545 - DNA, 25 bp, Saccharomyces pastorianus
gtatacttttttccattggcaaaag

SEQ ID NO: 103546 - DNA, 25 bp, Saccharomyces pastorianus
accatacgtatacttttttccattg

SEQ ID NO: 103547 - DNA, 25 bp, Saccharomyces pastorianus
tccacaactagggtacattacgatt

SEQ ID NO: 103548 - DNA, 25 bp, Saccharomyces pastorianus
tactttccacaactagggtacatta

SEQ ID NO: 103549 - DNA, 25 bp, Saccharomyces pastorianus
tggattagcgagaacaaatatgcca

SEQ ID NO: 103550 - DNA, 25 bp, Saccharomyces pastorianus
ttacttgaacaagtcaaaggagatt

SEQ ID NO: 103551 - DNA, 25 bp, Saccharomyces pastorianus
tttccacaactagggtacattacga

SEQ ID NO: 103552 - DNA, 25 bp, Saccharomyces pastorianus
caaatatgccaagtttgcattgtta

SEQ ID NO: 103553 - DNA, 25 bp, Saccharomyces pastorianus
tcaagggttactttccacaactagg

SEQ ID NO: 103554 - DNA, 25 bp, Saccharomyces pastorianus
gaacaaatatgccaagtttgcattg

SEQ ID NO: 103555 - DNA, 25 bp, Saccharomyces pastorianus
gagttttgagacaacataacaatca

SEQ ID NO: 103556 - DNA, 25 bp, Saccharomyces pastorianus
ttactttccacaactagggtacatt

SEQ ID NO: 103557 - DNA, 25 bp, Saccharomyces pastorianus
gttactttccacaactagggtacat

SEQ ID NO: 103558 - DNA, 25 bp, Saccharomyces pastorianus
acgcctttaccatttgcgccaaata

SEQ ID NO: 103559 - DNA, 25 bp, Saccharomyces pastorianus
cttcaccaagagtcaattccagcac

SEQ ID NO: 103560 - DNA, 25 bp, Saccharomyces pastorianus
gtcaggtgtacaatcgcaaatccca

SEQ ID NO: 103561 - DNA, 25 bp, Saccharomyces pastorianus
tcttgcaacaactaaactcctttcc

SEQ ID NO: 103562 - DNA, 25 bp, Saccharomyces pastorianus
acaatcttcaccaaatgttacgccc

SEQ ID NO: 103563 - DNA, 25 bp, Saccharomyces pastorianus
gaatcgcagggaagtccagccataa

SEQ ID NO: 103564 - DNA, 25 bp, Saccharomyces pastorianus
gaatctgccccaggaaatcttgcaa

SEQ ID NO: 103565 - DNA, 25 bp, Saccharomyces pastorianus
tttaacgtgggatcacctgccatga

SEQ ID NO: 103566 - DNA, 25 bp, Saccharomyces pastorianus
tgttacgccctctcatatgagcaga

SEQ ID NO: 103567 - DNA, 25 bp, Saccharomyces pastorianus
taatagcaacaacacgcctttacca

SEQ ID NO: 103568 - DNA, 25 bp, Saccharomyces pastorianus
catgaccgagcaaggatctccttta

SEQ ID NO: 103569 - DNA, 25 bp, Saccharomyces pastorianus
gacatttgtgctggaattgactctt

SEQ ID NO: 103570 - DNA, 25 bp, Saccharomyces pastorianus
ggttcgagtttggattatcgtcctt

SEQ ID NO: 103571 - DNA, 25 bp, Saccharomyces pastorianus
gtctggtttcgttaattgaggtcaa

SEQ ID NO: 103572 - DNA, 25 bp, Saccharomyces pastorianus
agttgcgcttgtttcctggttcgag

SEQ ID NO: 103573 - DNA, 25 bp, Saccharomyces pastorianus
ctgactcttgtctggtttcgttaat

SEQ ID NO: 103574 - DNA, 25 bp, Saccharomyces pastorianus
tttctcttcctgctgttttttcatc

SEQ ID NO: 103575 - DNA, 25 bp, Saccharomyces pastorianus
ttttttcatctgcagcgtcacctga

SEQ ID NO: 103576 - DNA, 25 bp, Saccharomyces pastorianus
tagtttggttaccagttgcgcttgt

SEQ ID NO: 103577 - DNA, 25 bp, Saccharomyces pastorianus
ttgagttccgttgatgattcctcgt

SEQ ID NO: 103578 - DNA, 25 bp, Saccharomyces pastorianus
atgattcctcgttggcggttctttc

SEQ ID NO: 103579 - DNA, 25 bp, Saccharomyces pastorianus
tatcgtccttgagttccgttgatga

SEQ ID NO: 103580 - DNA, 25 bp, Saccharomyces pastorianus
aaaactccagatgctggcgttaaga

SEQ ID NO: 103581 - DNA, 25 bp, Saccharomyces pastorianus
tgttgcatcagcaaatgcgggcatt

SEQ ID NO: 103582 - DNA, 25 bp, Saccharomyces pastorianus
aaaggtagacttcgacgcaggtgat

SEQ ID NO: 103583 - DNA, 25 bp, Saccharomyces pastorianus
gataaccgctagaactgttgcatca

SEQ ID NO: 103584 - DNA, 25 bp, Saccharomyces pastorianus
gaatttgcgtttaggaatcgtcggc

SEQ ID NO: 103585 - DNA, 25 bp, Saccharomyces pastorianus
gagactgatattgtggttcctaagg

SEQ ID NO: 103586 - DNA, 25 bp, Saccharomyces pastorianus
atttgggtcgatattaaacgcagta

SEQ ID NO: 103587 - DNA, 25 bp, Saccharomyces pastorianus
ggtttacctaagtggtgatgtccat

SEQ ID NO: 103588 - DNA, 25 bp, Saccharomyces pastorianus
agaagccttgctcccataaagataa

SEQ ID NO: 103589 - DNA, 25 bp, Saccharomyces pastorianus
aatcgtcggcaagaacgcaactggg

SEQ ID NO: 103590 - DNA, 25 bp, Saccharomyces pastorianus
gtccatatgatgatgaaccaaccag

SEQ ID NO: 103591 - DNA, 25 bp, Saccharomyces pastorianus
gggattacacctgatctagcgagta

SEQ ID NO: 103592 - DNA, 25 bp, Saccharomyces pastorianus
gaattgtgccggatgacttattaat

SEQ ID NO: 103593 - DNA, 25 bp, Saccharomyces pastorianus
agcgaatacagccaagagccgactt

SEQ ID NO: 103594 - DNA, 25 bp, Saccharomyces pastorianus
tacaggattgcgtagcatgccaaat

SEQ ID NO: 103595 - DNA, 25 bp, Saccharomyces pastorianus
aatggctctataggacgcgtgatac

SEQ ID NO: 103596 - DNA, 25 bp, Saccharomyces pastorianus
acagtttgtggaagaggctcatcat

SEQ ID NO: 103597 - DNA, 25 bp, Saccharomyces pastorianus
gcgtgatactgcctcatattctaca

SEQ ID NO: 103598 - DNA, 25 bp, Saccharomyces pastorianus
gtatggccatacttgcgaataacag

SEQ ID NO: 103599 - DNA, 25 bp, Saccharomyces pastorianus
gagccgacttcttatggtgggatta

SEQ ID NO: 103600 - DNA, 25 bp, Saccharomyces pastorianus
tcacgctccctacaacagtttgtgg

SEQ ID NO: 103601 - DNA, 25 bp, Saccharomyces pastorianus
ttaatgagacccacttcactgtcac

SEQ ID NO: 103602 - DNA, 25 bp, Saccharomyces pastorianus
gatcaatttcccttacaatccactg

SEQ ID NO: 103603 - DNA, 25 bp, Saccharomyces pastorianus
atcgggcagcgaattggtctccaat

SEQ ID NO: 103604 - DNA, 25 bp, Saccharomyces pastorianus
tatcaagttagatccatcgggcagc

SEQ ID NO: 103605 - DNA, 25 bp, Saccharomyces pastorianus
aagagcaaggtcaccgcagtcagat

SEQ ID NO: 103606 - DNA, 25 bp, Saccharomyces pastorianus
acaaccccgcctataagcagtggaa

SEQ ID NO: 103607 - DNA, 25 bp, Saccharomyces pastorianus
ttggcgttatctacatctttcatcg

SEQ ID NO: 103608 - DNA, 25 bp, Saccharomyces pastorianus
cgccaactcccatcgtattattgat

SEQ ID NO: 103609 - DNA, 25 bp, Saccharomyces pastorianus
gaagttttcatgtccaggctgttca

SEQ ID NO: 103610 - DNA, 25 bp, Saccharomyces pastorianus
tgtggtaagtgggtcatccccgcta

SEQ ID NO: 103611 - DNA, 25 bp, Saccharomyces pastorianus
ttgctctcattttttcatcgaacct

SEQ ID NO: 103612 - DNA, 25 bp, Saccharomyces pastorianus
gagggacacttcatcaagcgggccg

SEQ ID NO: 103613 - DNA, 25 bp, Saccharomyces pastorianus
gagccacccactttaaatgttgtcc

SEQ ID NO: 103614 - DNA, 25 bp, Saccharomyces pastorianus
gccatgcacccctgagttgaagaac

SEQ ID NO: 103615 - DNA, 25 bp, Saccharomyces pastorianus
cattgatgtttacccaaggctgctc

SEQ ID NO: 103616 - DNA, 25 bp, Saccharomyces pastorianus
gtcagggctaccagtcacaacagag

SEQ ID NO: 103617 - DNA, 25 bp, Saccharomyces pastorianus
atcgccaaggcctatgggacgcttt

SEQ ID NO: 103618 - DNA, 25 bp, Saccharomyces pastorianus
ccgtcggactaggtttgccattgat

SEQ ID NO: 103619 - DNA, 25 bp, Saccharomyces pastorianus
ggatgacggtcaagggcacagtttt

SEQ ID NO: 103620 - DNA, 25 bp, Saccharomyces pastorianus
atccgctctgagtctaatcgccaag

SEQ ID NO: 103621 - DNA, 25 bp, Saccharomyces pastorianus
aaggctgctctttggtcgatatcgt

SEQ ID NO: 103622 - DNA, 25 bp, Saccharomyces pastorianus
aattgactgcctacaacgggatgac

SEQ ID NO: 103623 - DNA, 25 bp, Saccharomyces pastorianus
agaaaggcacgtgcgtcagggctac

SEQ ID NO: 103624 - DNA, 25 bp, Saccharomyces pastorianus
gagggcctttgttgcgtatatttgc

SEQ ID NO: 103625 - DNA, 25 bp, Saccharomyces pastorianus
actcccgtaaccaattttctgacag

SEQ ID NO: 103626 - DNA, 25 bp, Saccharomyces pastorianus
gttcaagtaagttcaccagcgcttt

SEQ ID NO: 103627 - DNA, 25 bp, Saccharomyces pastorianus
aatttggtgccaattggagggcctt

SEQ ID NO: 103628 - DNA, 25 bp, Saccharomyces pastorianus
tgtccgtggaacttaatggccagtt

SEQ ID NO: 103629 - DNA, 25 bp, Saccharomyces pastorianus
cagcgctttgggtgcttatgcaatt

SEQ ID NO: 103630 - DNA, 25 bp, Saccharomyces pastorianus
gtatcgctccaaatttaccaggttt

SEQ ID NO: 103631 - DNA, 25 bp, Saccharomyces pastorianus
gtcatttgcgcggattatttcgtag

SEQ ID NO: 103632 - DNA, 25 bp, Saccharomyces pastorianus
attcctggcacagaagggttccttt

SEQ ID NO: 103633 - DNA, 25 bp, Saccharomyces pastorianus
ttatgttacttttttcctgtccctg

SEQ ID NO: 103634 - DNA, 25 bp, Saccharomyces pastorianus
gtagggatgatctctgcgatgacac

SEQ ID NO: 103635 - DNA, 25 bp, Saccharomyces pastorianus
gagtgtggtccttcgcaaaggcatc

SEQ ID NO: 103636 - DNA, 25 bp, Saccharomyces pastorianus
gataatttgctactaccaggacgag

SEQ ID NO: 103637 - DNA, 25 bp, Saccharomyces pastorianus
agaaaggtttactcacatcaagctg

SEQ ID NO: 103638 - DNA, 25 bp, Saccharomyces pastorianus
acttccctcagttcattaccgtgga

SEQ ID NO: 103639 - DNA, 25 bp, Saccharomyces pastorianus
aactgggcagggagtcttctttcat

SEQ ID NO: 103640 - DNA, 25 bp, Saccharomyces pastorianus
gtattctgatcaacacttcggttca

SEQ ID NO: 103641 - DNA, 25 bp, Saccharomyces pastorianus
aaaggcatcttttcgttagaggcaa

SEQ ID NO: 103642 - DNA, 25 bp, Saccharomyces pastorianus
gagtctcccatgtcaaattaacgat

SEQ ID NO: 103643 - DNA, 25 bp, Saccharomyces pastorianus
accaggtcatactgattgggcggta

SEQ ID NO: 103644 - DNA, 25 bp, Saccharomyces pastorianus
gcaatggtgctgtcgctttaaagta

SEQ ID NO: 103645 - DNA, 25 bp, Saccharomyces pastorianus
gaagagttgttcctccagaactcaa

SEQ ID NO: 103646 - DNA, 25 bp, Saccharomyces pastorianus
agaagttctctattattacctcaaa

SEQ ID NO: 103647 - DNA, 25 bp, Saccharomyces pastorianus
gcacgctgtttctggacacgattga

SEQ ID NO: 103648 - DNA, 25 bp, Saccharomyces pastorianus
gattgagatcggcttacagattcta

SEQ ID NO: 103649 - DNA, 25 bp, Saccharomyces pastorianus
tttcagatcatcctttggtagcaaa

SEQ ID NO: 103650 - DNA, 25 bp, Saccharomyces pastorianus
taggttgtgcaggattctcgggatt

SEQ ID NO: 103651 - DNA, 25 bp, Saccharomyces pastorianus
ttaaaagtatggaggcctgccttcc

SEQ ID NO: 103652 - DNA, 25 bp, Saccharomyces pastorianus
attccaaagggatggcacgctgttt

SEQ ID NO: 103653 - DNA, 25 bp, Saccharomyces pastorianus
gaaacgtcgccaccacaaattgatg

SEQ ID NO: 103654 - DNA, 25 bp, Saccharomyces pastorianus
ttcccctcttaattgatgaccagga

SEQ ID NO: 103655 - DNA, 25 bp, Saccharomyces pastorianus
atcagttatttcacagggccagaaa

SEQ ID NO: 103656 - DNA, 25 bp, Saccharomyces pastorianus
gatttacaggtcctcgacttacata

SEQ ID NO: 103657 - DNA, 25 bp, Saccharomyces pastorianus
acagcgcctaaaattcttcgaatat

SEQ ID NO: 103658 - DNA, 25 bp, Saccharomyces pastorianus
atatcttagcggtcaattctggagt

SEQ ID NO: 103659 - DNA, 25 bp, Saccharomyces pastorianus
ttgttcttttcacccagcggacttg

SEQ ID NO: 103660 - DNA, 25 bp, Saccharomyces pastorianus
ggctgccaaggcaaacttgttcttt

SEQ ID NO: 103661 - DNA, 25 bp, Saccharomyces pastorianus
agcggacttgctgaagccaattttg

SEQ ID NO: 103662 - DNA, 25 bp, Saccharomyces pastorianus
gccaattttgcagtctcttcattta

SEQ ID NO: 103663 - DNA, 25 bp, Saccharomyces pastorianus
ggagttactttgtcaccggtatcac

SEQ ID NO: 103664 - DNA, 25 bp, Saccharomyces pastorianus
atcaggccttatcagctcaaatttg

SEQ ID NO: 103665 - DNA, 25 bp, Saccharomyces pastorianus
agattttaccagtgacttcaggcaa

SEQ ID NO: 103666 - DNA, 25 bp, Saccharomyces pastorianus
tcaatttgtcataccttatcaggcc

SEQ ID NO: 103667 - DNA, 25 bp, Saccharomyces pastorianus
caactggtttggcacttggcttaat

SEQ ID NO: 103668 - DNA, 25 bp, Saccharomyces pastorianus
ttttgtcccggatgtacatgttaca

SEQ ID NO: 103669 - DNA, 25 bp, Saccharomyces pastorianus
gataccggtgacaaagtaactccag

SEQ ID NO: 103670 - DNA, 25 bp, Saccharomyces pastorianus
actgcggaagtatcacgttgtcaat

SEQ ID NO: 103671 - DNA, 25 bp, Saccharomyces pastorianus
gtgttgtcttaagtgataccggtga

SEQ ID NO: 103672 - DNA, 25 bp, Saccharomyces pastorianus
ttgatggaagatgccgctactgcgg

SEQ ID NO: 103673 - DNA, 25 bp, Saccharomyces pastorianus
aattggcttcagcaagtccgctggg

SEQ ID NO: 103674 - DNA, 25 bp, Saccharomyces pastorianus
gcgacttcttgaccactttattgta

SEQ ID NO: 103675 - DNA, 25 bp, Saccharomyces pastorianus
gtaactccagaattgaccgctaaga

SEQ ID NO: 103676 - DNA, 25 bp, Saccharomyces pastorianus
gtattttttgcctgaagtcactggt

SEQ ID NO: 103677 - DNA, 25 bp, Saccharomyces pastorianus
gattcaagatgctcaagtcactact

SEQ ID NO: 103678 - DNA, 25 bp, Saccharomyces pastorianus
gaacaagtttgccttggcagccaag

SEQ ID NO: 103679 - DNA, 25 bp, Saccharomyces pastorianus
atgcgcccatgatagtacttggcaa

SEQ ID NO: 103680 - DNA, 25 bp, Saccharomyces pastorianus
aatcaggccgttacctatggcttag

SEQ ID NO: 103681 - DNA, 25 bp, Saccharomyces pastorianus
ggcgatttctcattctatcaaagtc

SEQ ID NO: 103682 - DNA, 25 bp, Saccharomyces pastorianus
gtagtacgcagacgtttgtgcctat

SEQ ID NO: 103683 - DNA, 25 bp, Saccharomyces pastorianus
agtcctcgaaaagcatccgtgtagt

SEQ ID NO: 103684 - DNA, 25 bp, Saccharomyces pastorianus
aaggctccaatcaggcgatttctca

SEQ ID NO: 103685 - DNA, 25 bp, Saccharomyces pastorianus
tatggcttaggtacctggcatgcgc

SEQ ID NO: 103686 - DNA, 25 bp, Saccharomyces pastorianus
gacttgtctacgttgagggctttta

SEQ ID NO: 103687 - DNA, 25 bp, Saccharomyces pastorianus
agagtattcactcaaggctccaatc

SEQ ID NO: 103688 - DNA, 25 bp, Saccharomyces pastorianus
ttaatctacgaaagtctggaccctg

SEQ ID NO: 103689 - DNA, 25 bp, Saccharomyces pastorianus
ttggaacctattccgttgctttcca

SEQ ID NO: 103690 - DNA, 25 bp, Saccharomyces pastorianus
ggaacaaagcgaactccttgatatt

SEQ ID NO: 103691 - DNA, 25 bp, Saccharomyces pastorianus
ccttgatattggatctagcgccaac

SEQ ID NO: 103692 - DNA, 25 bp, Saccharomyces pastorianus
gatgaagatctgttcgtcactgacg

SEQ ID NO: 103693 - DNA, 25 bp, Saccharomyces pastorianus
aaaaaccaggtgttgcatgcaggga

SEQ ID NO: 103694 - DNA, 25 bp, Saccharomyces pastorianus
ttctggatacccttaacactactac

SEQ ID NO: 103695 - DNA, 25 bp, Saccharomyces pastorianus
tattgtggagcagtcagcatctaat

SEQ ID NO: 103696 - DNA, 25 bp, Saccharomyces pastorianus
tagcgccaacgaacccgaagaggat

SEQ ID NO: 103697 - DNA, 25 bp, Saccharomyces pastorianus
atggtagtacatctctctggaatag

SEQ ID NO: 103698 - DNA, 25 bp, Saccharomyces pastorianus
atatgaggatctgttcccgttgtct

SEQ ID NO: 103699 - DNA, 25 bp, Saccharomyces pastorianus
acactactacttttgacatggttca

SEQ ID NO: 103700 - DNA, 25 bp, Saccharomyces pastorianus
tggcaaccaagatagttccatcaat

SEQ ID NO: 103701 - DNA, 25 bp, Saccharomyces pastorianus
gtggacgtatcagcagacactacca

SEQ ID NO: 103702 - DNA, 25 bp, Saccharomyces pastorianus
gcgccagaaagccaaccgtgttaat

SEQ ID NO: 103703 - DNA, 25 bp, Saccharomyces pastorianus
aggaagatgtggttccggtgccatc

SEQ ID NO: 103704 - DNA, 25 bp, Saccharomyces pastorianus
cggtgccatcgatctgttgcacaaa

SEQ ID NO: 103705 - DNA, 25 bp, Saccharomyces pastorianus
tatcgaagccaattgctcctttcac

SEQ ID NO: 103706 - DNA, 25 bp, Saccharomyces pastorianus
cttttaccatctttagagctcctac

SEQ ID NO: 103707 - DNA, 25 bp, Saccharomyces pastorianus
agtgtcgccttaccccaatgaaaag

SEQ ID NO: 103708 - DNA, 25 bp, Saccharomyces pastorianus
ccgtgttaatcattggtgcgctagg

SEQ ID NO: 103709 - DNA, 25 bp, Saccharomyces pastorianus
gtcatctctattgatcacttgcctt

SEQ ID NO: 103710 - DNA, 25 bp, Saccharomyces pastorianus
acttgccttctttgctgccaagaga

SEQ ID NO: 103711 - DNA, 25 bp, Saccharomyces pastorianus
agaaaaactgctcctgtctgggtta

SEQ ID NO: 103712 - DNA, 25 bp, Saccharomyces pastorianus
gtcgccccaggtattgtggacacag

SEQ ID NO: 103713 - DNA, 25 bp, Saccharomyces pastorianus
gtatgacatcaacttcttcagcatt

SEQ ID NO: 103714 - DNA, 25 bp, Saccharomyces pastorianus
gtgccagctacagtttatgccaaat

SEQ ID NO: 103715 - DNA, 25 bp, Saccharomyces pastorianus
gttcggacgcctgtaacatgtactt

SEQ ID NO: 103716 - DNA, 25 bp, Saccharomyces pastorianus
aaattggcccttcatggtattcctg

SEQ ID NO: 103717 - DNA, 25 bp, Saccharomyces pastorianus
gttggcattgcgttacctgaattga

SEQ ID NO: 103718 - DNA, 25 bp, Saccharomyces pastorianus
aagatcgactccttggttgccaacg

SEQ ID NO: 103719 - DNA, 25 bp, Saccharomyces pastorianus
ttcagcattgtttccttggttggca

SEQ ID NO: 103720 - DNA, 25 bp, Saccharomyces pastorianus
tggtgtcctagagcccgtgcaaaat

SEQ ID NO: 103721 - DNA, 25 bp, Saccharomyces pastorianus
acggttcttcaaaagccgctctgaa

SEQ ID NO: 103722 - DNA, 25 bp, Saccharomyces pastorianus
aacgctgctgttaagggccacggca

SEQ ID NO: 103723 - DNA, 25 bp, Saccharomyces pastorianus
ctagcgcaactcgtcctgaaaggta

SEQ ID NO: 103724 - DNA, 25 bp, Saccharomyces pastorianus
aacattgggtcctcagggcatgaca

SEQ ID NO: 103725 - DNA, 25 bp, Saccharomyces pastorianus
gaagagctcgccatttgtaggcaac

SEQ ID NO: 103726 - DNA, 25 bp, Saccharomyces pastorianus
tgtgtttacccctcttgaagagctc

SEQ ID NO: 103727 - DNA, 25 bp, Saccharomyces pastorianus
acattgccagtgaagagcccagtga

SEQ ID NO: 103728 - DNA, 25 bp, Saccharomyces pastorianus
ttcagcattgtctctttggtggcac

SEQ ID NO: 103729 - DNA, 25 bp, Saccharomyces pastorianus
gctagaaccggtgaagtccatctcc

SEQ ID NO: 103730 - DNA, 25 bp, Saccharomyces pastorianus
aaaccactttgccatggacattgcc

SEQ ID NO: 103731 - DNA, 25 bp, Saccharomyces pastorianus
gtaggcaacattgtcttcgtcagct

SEQ ID NO: 103732 - DNA, 25 bp, Saccharomyces pastorianus
tgacacccaaggctctcgagaggtt

SEQ ID NO: 103733 - DNA, 25 bp, Saccharomyces pastorianus
gtattcccgactctttgaacggtca

SEQ ID NO: 103734 - DNA, 25 bp, Saccharomyces pastorianus
aatcccacgggaggcacctgtaatc

SEQ ID NO: 103735 - DNA, 25 bp, Saccharomyces pastorianus
cgtcctcttcgataacagttttcac

SEQ ID NO: 103736 - DNA, 25 bp, Saccharomyces pastorianus
cagttttcaccaattgcaggccaat

SEQ ID NO: 103737 - DNA, 25 bp, Saccharomyces pastorianus
cccatatcccttctttgacagatta

SEQ ID NO: 103738 - DNA, 25 bp, Saccharomyces pastorianus
gcattatcatttttagccactttac

SEQ ID NO: 103739 - DNA, 25 bp, Saccharomyces pastorianus
gctacgccgtagacgatgcattcat

SEQ ID NO: 103740 - DNA, 25 bp, Saccharomyces pastorianus
aaatttgtctgcaccgtattctctt

SEQ ID NO: 103741 - DNA, 25 bp, Saccharomyces pastorianus
attcgagacctgtccgtgatgtcga

SEQ ID NO: 103742 - DNA, 25 bp, Saccharomyces pastorianus
agttgtttctcttgttgctgttcgc

SEQ ID NO: 103743 - DNA, 25 bp, Saccharomyces pastorianus
aaagactgcagaccagcttccgttc

SEQ ID NO: 103744 - DNA, 25 bp, Saccharomyces pastorianus
ttatttcctgtattccttcttcttt

SEQ ID NO: 103745 - DNA, 25 bp, Saccharomyces pastorianus
gtggcaatgaggaccctgtttacaa

SEQ ID NO: 103746 - DNA, 25 bp, Saccharomyces pastorianus
tggcgtgactttccccattatgaaa

SEQ ID NO: 103747 - DNA, 25 bp, Saccharomyces pastorianus
aggatttaccatcatcgggttccca

SEQ ID NO: 103748 - DNA, 25 bp, Saccharomyces pastorianus
atgtggattcactcctcaatacaaa

SEQ ID NO: 103749 - DNA, 25 bp, Saccharomyces pastorianus
atgcaaccagtttggccaccaagaa

SEQ ID NO: 103750 - DNA, 25 bp, Saccharomyces pastorianus
gaactagaggccttgtacaaacgtt

SEQ ID NO: 103751 - DNA, 25 bp, Saccharomyces pastorianus
gaagaaattgcccagttctgccaac

SEQ ID NO: 103752 - DNA, 25 bp, Saccharomyces pastorianus
tataagctagcacctgttgacaaga

SEQ ID NO: 103753 - DNA, 25 bp, Saccharomyces pastorianus
ggtgcttatcgttaatgttgcctcc

SEQ ID NO: 103754 - DNA, 25 bp, Saccharomyces pastorianus
agatactcttcactaaccaaaccct

SEQ ID NO: 103755 - DNA, 25 bp, Saccharomyces pastorianus
aaaatccggtatgttgggcttgaga

SEQ ID NO: 103756 - DNA, 25 bp, Saccharomyces pastorianus
gatcagtcaggcatactctagtggt

SEQ ID NO: 103757 - DNA, 25 bp, Saccharomyces pastorianus
agtccggtttcatcttccaatatgt

SEQ ID NO: 103758 - DNA, 25 bp, Saccharomyces pastorianus
aagagatgctaacttccgtgctcca

SEQ ID NO: 103759 - DNA, 25 bp, Saccharomyces pastorianus
gaggattatcctgccatttccaaat

SEQ ID NO: 103760 - DNA, 25 bp, Saccharomyces pastorianus
cttccctatttcgtacttggcaaga

SEQ ID NO: 103761 - DNA, 25 bp, Saccharomyces pastorianus
tgcagcattttgaccattcacacgt

SEQ ID NO: 103762 - DNA, 25 bp, Saccharomyces pastorianus
cagaggagtcgtatgctgcttctaa

SEQ ID NO: 103763 - DNA, 25 bp, Saccharomyces pastorianus
gagcggtgccgatatcttgatgtct

SEQ ID NO: 103764 - DNA, 25 bp, Saccharomyces pastorianus
gttccttgcaaccacctttaatgat

SEQ ID NO: 103765 - DNA, 25 bp, Saccharomyces pastorianus
tgatgtctttccctttgcagatggc

SEQ ID NO: 103766 - DNA, 25 bp, Saccharomyces pastorianus
aagtttgccgcaccagaggattatc

SEQ ID NO: 103767 - DNA, 25 bp, Saccharomyces pastorianus
gaacgatactttactgtccgtcgac

SEQ ID NO: 103768 - DNA, 25 bp, Saccharomyces pastorianus
atataagcccggtagtcccatcgga

SEQ ID NO: 103769 - DNA, 25 bp, Saccharomyces pastorianus
atccgagtccacttatatgctggga

SEQ ID NO: 103770 - DNA, 25 bp, Saccharomyces pastorianus
gacgaccaaggctacatctttgatt

SEQ ID NO: 103771 - DNA, 25 bp, Saccharomyces pastorianus
tacaaataccgttcttctttctcct

SEQ ID NO: 103772 - DNA, 25 bp, Saccharomyces pastorianus
ttgaggttatctccgatactgtccc

SEQ ID NO: 103773 - DNA, 25 bp, Saccharomyces pastorianus
ctgctcccggatactttagtacatg

SEQ ID NO: 103774 - DNA, 25 bp, Saccharomyces pastorianus
ttctttctcaagtagtggcggctct

SEQ ID NO: 103775 - DNA, 25 bp, Saccharomyces pastorianus
agtacaaatcattgcttgccaccgc

SEQ ID NO: 103776 - DNA, 25 bp, Saccharomyces pastorianus
cagctggacctcgtattcggaattt

SEQ ID NO: 103777 - DNA, 25 bp, Saccharomyces pastorianus
tcctatttacccaccgaaattgcag

SEQ ID NO: 103778 - DNA, 25 bp, Saccharomyces pastorianus
ccttttctgtgcctgtgacatttcc

SEQ ID NO: 103779 - DNA, 25 bp, Saccharomyces pastorianus
gtgcctgtgacatttcctttttcgg

SEQ ID NO: 103780 - DNA, 25 bp, Saccharomyces pastorianus
tttctgtgcctgtgacatttccttt

SEQ ID NO: 103781 - DNA, 25 bp, Saccharomyces pastorianus
tgtgcctgtgacatttcctttttcg

SEQ ID NO: 103782 - DNA, 25 bp, Saccharomyces pastorianus
ttctgtgcctgtgacatttcctttt

SEQ ID NO: 103783 - DNA, 25 bp, Saccharomyces pastorianus
cttttctgtgcctgtgacatttcct

SEQ ID NO: 103784 - DNA, 25 bp, Saccharomyces pastorianus
tctgtgcctgtgacatttccttttt

SEQ ID NO: 103785 - DNA, 25 bp, Saccharomyces pastorianus
ctgtgcctgtgacatttcctttttc

SEQ ID NO: 103786 - DNA, 25 bp, Saccharomyces pastorianus
aaacccttttctgtgcctgtgacat

SEQ ID NO: 103787 - DNA, 25 bp, Saccharomyces pastorianus
ttttctgtgcctgtgacatttcctt

SEQ ID NO: 103788 - DNA, 25 bp, Saccharomyces pastorianus
tgtgacatttcctttttcggtcaaa

SEQ ID NO: 103789 - DNA, 25 bp, Saccharomyces pastorianus
aaatagtcattgtacgttgctttct

SEQ ID NO: 103790 - DNA, 25 bp, Saccharomyces pastorianus
tagtcattgtacgttgctttctttt

SEQ ID NO: 103791 - DNA, 25 bp, Saccharomyces pastorianus
gattgtggcctctttccaccacttg

SEQ ID NO: 103792 - DNA, 25 bp, Saccharomyces pastorianus
gaagaaatagtcattgtacgttgct

SEQ ID NO: 103793 - DNA, 25 bp, Saccharomyces pastorianus
agaaatagtcattgtacgttgcttt

SEQ ID NO: 103794 - DNA, 25 bp, Saccharomyces pastorianus
ctggatgtgcagaagaaatagtcat

SEQ ID NO: 103795 - DNA, 25 bp, Saccharomyces pastorianus
aatagtcattgtacgttgctttctt

SEQ ID NO: 103796 - DNA, 25 bp, Saccharomyces pastorianus
atagtcattgtacgttgctttcttt

SEQ ID NO: 103797 - DNA, 25 bp, Saccharomyces pastorianus
attgtggcctctttccaccacttgg

SEQ ID NO: 103798 - DNA, 25 bp, Saccharomyces pastorianus
tgtggcctctttccaccacttgggt

SEQ ID NO: 103799 - DNA, 25 bp, Saccharomyces pastorianus
agattgtggcctctttccaccactt

SEQ ID NO: 103800 - DNA, 25 bp, Saccharomyces pastorianus
gaaatcggcctcatgggtgccaccg

SEQ ID NO: 103801 - DNA, 25 bp, Saccharomyces pastorianus
tatgattgtgtttactatgttcttc

SEQ ID NO: 103802 - DNA, 25 bp, Saccharomyces pastorianus
tttttctcttcattcatagcggtat

SEQ ID NO: 103803 - DNA, 25 bp, Saccharomyces pastorianus
gtgccagcatggaaatcggcctcat

SEQ ID NO: 103804 - DNA, 25 bp, Saccharomyces pastorianus
gtattcttaggctgtctggtttttg

SEQ ID NO: 103805 - DNA, 25 bp, Saccharomyces pastorianus
gtcaccaagacattacttctcaggg

SEQ ID NO: 103806 - DNA, 25 bp, Saccharomyces pastorianus
ccgcagattacgatgctgatgcaat

SEQ ID NO: 103807 - DNA, 25 bp, Saccharomyces pastorianus
gctgtctggtttttgcatactttta

SEQ ID NO: 103808 - DNA, 25 bp, Saccharomyces pastorianus
atactatgtggctggaaggtgtgcc

SEQ ID NO: 103809 - DNA, 25 bp, Saccharomyces pastorianus
gaatggcaatcgcaacagctgcaaa

SEQ ID NO: 103810 - DNA, 25 bp, Saccharomyces pastorianus
tagcggtatacaccattgagaggtt

SEQ ID NO: 103811 - DNA, 25 bp, Saccharomyces pastorianus
ggagacaacttttacgccaatcaca

SEQ ID NO: 103812 - DNA, 25 bp, Saccharomyces pastorianus
tagagtatgccatgcctgtgaccat

SEQ ID NO: 103813 - DNA, 25 bp, Saccharomyces pastorianus
attgccgccggtagtgttgtgattc

SEQ ID NO: 103814 - DNA, 25 bp, Saccharomyces pastorianus
ggtaaaaactccgtgattgccgccg

SEQ ID NO: 103815 - DNA, 25 bp, Saccharomyces pastorianus
gtacctggtgagctttatgatgcga

SEQ ID NO: 103816 - DNA, 25 bp, Saccharomyces pastorianus
gtgacaacgtatttatcgcccctaa

SEQ ID NO: 103817 - DNA, 25 bp, Saccharomyces pastorianus
aacacccttagtcccgctgatgaga

SEQ ID NO: 103818 - DNA, 25 bp, Saccharomyces pastorianus
gataactttataattgaaccgccgt

SEQ ID NO: 103819 - DNA, 25 bp, Saccharomyces pastorianus
tgaaccgccgttttactgtgattac

SEQ ID NO: 103820 - DNA, 25 bp, Saccharomyces pastorianus
gtatttatacggcaggtcatccaat

SEQ ID NO: 103821 - DNA, 25 bp, Saccharomyces pastorianus
gatgcgaactatgatccagatcttt

SEQ ID NO: 103822 - DNA, 25 bp, Saccharomyces pastorianus
atttctgatggccacgcaatgctaa

SEQ ID NO: 103823 - DNA, 25 bp, Saccharomyces pastorianus
aaatgctcgcgatttctggcttcgt

SEQ ID NO: 103824 - DNA, 25 bp, Saccharomyces pastorianus
gcacacctgagcgtggcggattgaa

SEQ ID NO: 103825 - DNA, 25 bp, Saccharomyces pastorianus
ttggaccaatggcttgcacacctga

SEQ ID NO: 103826 - DNA, 25 bp, Saccharomyces pastorianus
gaggcttcaggtgtcttttgataaa

SEQ ID NO: 103827 - DNA, 25 bp, Saccharomyces pastorianus
atcaggctggtatcatggttcgtat

SEQ ID NO: 103828 - DNA, 25 bp, Saccharomyces pastorianus
ttactgcacaagtccgtgttcaggg

SEQ ID NO: 103829 - DNA, 25 bp, Saccharomyces pastorianus
gttagtacgtttggctccatttcca

SEQ ID NO: 103830 - DNA, 25 bp, Saccharomyces pastorianus
ttctggcttcgtgttactgttgaaa

SEQ ID NO: 103831 - DNA, 25 bp, Saccharomyces pastorianus
ctgaccattaccttgttggaccaat

SEQ ID NO: 103832 - DNA, 25 bp, Saccharomyces pastorianus
ggatttacccgtgatagcggtcatt

SEQ ID NO: 103833 - DNA, 25 bp, Saccharomyces pastorianus
atgcttccattatctggtctttgcc

SEQ ID NO: 103834 - DNA, 25 bp, Saccharomyces pastorianus
aagtatcttttctcatcagggcgca

SEQ ID NO: 103835 - DNA, 25 bp, Saccharomyces pastorianus
gggcgcatttataatccgctgatgt

SEQ ID NO: 103836 - DNA, 25 bp, Saccharomyces pastorianus
aaccaaatggcttcacttgtgctaa

SEQ ID NO: 103837 - DNA, 25 bp, Saccharomyces pastorianus
atggtcgcacggttttcaatgcttc

SEQ ID NO: 103838 - DNA, 25 bp, Saccharomyces pastorianus
gatggcttatgtaccaccgatcaac

SEQ ID NO: 103839 - DNA, 25 bp, Saccharomyces pastorianus
ttgaagcaggcgtggcaatctccgt

SEQ ID NO: 103840 - DNA, 25 bp, Saccharomyces pastorianus
ttgattggtttgctattcccactag

SEQ ID NO: 103841 - DNA, 25 bp, Saccharomyces pastorianus
tgtatttttcacaggcccaggcaat

SEQ ID NO: 103842 - DNA, 25 bp, Saccharomyces pastorianus
gtcatcatcttcttgtgtgtacagt

SEQ ID NO: 103843 - DNA, 25 bp, Saccharomyces pastorianus
ccactagccgtttatgctgttcaat

SEQ ID NO: 103844 - DNA, 25 bp, Saccharomyces pastorianus
tacgtcttctcagttatctcggcaa

SEQ ID NO: 103845 - DNA, 25 bp, Saccharomyces pastorianus
tttcccaccaaccttatcgatagaa

SEQ ID NO: 103846 - DNA, 25 bp, Saccharomyces pastorianus
cttcactcatcccttataatgcgtt

SEQ ID NO: 103847 - DNA, 25 bp, Saccharomyces pastorianus
gaatgctgcattgaactcggaccaa

SEQ ID NO: 103848 - DNA, 25 bp, Saccharomyces pastorianus
atagtgtggcaggaacctcgtcgcg

SEQ ID NO: 103849 - DNA, 25 bp, Saccharomyces pastorianus
attcctctttgtgttcactcgtatt

SEQ ID NO: 103850 - DNA, 25 bp, Saccharomyces pastorianus
tatcaagcgctatcgagtcgagctg

SEQ ID NO: 103851 - DNA, 25 bp, Saccharomyces pastorianus
gacatgctgcgttgcctttagatta

SEQ ID NO: 103852 - DNA, 25 bp, Saccharomyces pastorianus
tgtgcaactcgagacatgctgcgtt

SEQ ID NO: 103853 - DNA, 25 bp, Saccharomyces pastorianus
gtgcggatccatacgtacagctaga

SEQ ID NO: 103854 - DNA, 25 bp, Saccharomyces pastorianus
gaaaagccacgccactgagtgcgga

SEQ ID NO: 103855 - DNA, 25 bp, Saccharomyces pastorianus
gatggttctgcaattgcctctgaat

SEQ ID NO: 103856 - DNA, 25 bp, Saccharomyces pastorianus
gaactctgtattcgctgggttagaa

SEQ ID NO: 103857 - DNA, 25 bp, Saccharomyces pastorianus
ttaatgggccgcactgtgggaacca

SEQ ID NO: 103858 - DNA, 25 bp, Saccharomyces pastorianus
taccgggcttttaatgtccattcca

SEQ ID NO: 103859 - DNA, 25 bp, Saccharomyces pastorianus
actcttttccaatacactacttacg

SEQ ID NO: 103860 - DNA, 25 bp, Saccharomyces pastorianus
ttgtatgtcgtcactgtcttggcag

SEQ ID NO: 103861 - DNA, 25 bp, Saccharomyces pastorianus
aacttcctgaggtttctagcagcgg

SEQ ID NO: 103862 - DNA, 25 bp, Saccharomyces pastorianus
cataccagatcgcttgttgtcgtgc

SEQ ID NO: 103863 - DNA, 25 bp, Saccharomyces pastorianus
aaggtctcgttctacgactacttat

SEQ ID NO: 103864 - DNA, 25 bp, Saccharomyces pastorianus
tgcgaactactgttacgtgtgcgtt

SEQ ID NO: 103865 - DNA, 25 bp, Saccharomyces pastorianus
ggctgtgatgtaaccaacttcctga

SEQ ID NO: 103866 - DNA, 25 bp, Saccharomyces pastorianus
gttgacgaaggcacatgattttgat

SEQ ID NO: 103867 - DNA, 25 bp, Saccharomyces pastorianus
gtcaaattactcgatactatacccc

SEQ ID NO: 103868 - DNA, 25 bp, Saccharomyces pastorianus
tgatcctaaccacagaaactctctt

SEQ ID NO: 103869 - DNA, 25 bp, Saccharomyces pastorianus
cagacatttttctttgggcgtgcgc

SEQ ID NO: 103870 - DNA, 25 bp, Saccharomyces pastorianus
aactgtaacccattcattgcatcct

SEQ ID NO: 103871 - DNA, 25 bp, Saccharomyces pastorianus
caagcaatgttagcctatgggtcaa

SEQ ID NO: 103872 - DNA, 25 bp, Saccharomyces pastorianus
ggaatgtggtttccgctttatacat

SEQ ID NO: 103873 - DNA, 25 bp, Saccharomyces pastorianus
ggtaaatttgttgccaatgccaagg

SEQ ID NO: 103874 - DNA, 25 bp, Saccharomyces pastorianus
gatggcacttgtaaacgatttgttg

SEQ ID NO: 103875 - DNA, 25 bp, Saccharomyces pastorianus
atcctccccatgtgatgtcaaatta

SEQ ID NO: 103876 - DNA, 25 bp, Saccharomyces pastorianus
gggcgtgcgcagaattataccagaa

SEQ ID NO: 103877 - DNA, 25 bp, Saccharomyces pastorianus
gaagttattggcaatccacccagta

SEQ ID NO: 103878 - DNA, 25 bp, Saccharomyces pastorianus
gagagatttctctaacgcggcgatc

SEQ ID NO: 103879 - DNA, 25 bp, Saccharomyces pastorianus
gactggtccattgtatctacccaaa

SEQ ID NO: 103880 - DNA, 25 bp, Saccharomyces pastorianus
aagtactgggctagaacttctgcaa

SEQ ID NO: 103881 - DNA, 25 bp, Saccharomyces pastorianus
gtcgggctatgatcgaggccatcaa

SEQ ID NO: 103882 - DNA, 25 bp, Saccharomyces pastorianus
ggccatggatgatacattctactta

SEQ ID NO: 103883 - DNA, 25 bp, Saccharomyces pastorianus
accaacagccaatcctgctagagag

SEQ ID NO: 103884 - DNA, 25 bp, Saccharomyces pastorianus
aaattttctcaacaggccatggatg

SEQ ID NO: 103885 - DNA, 25 bp, Saccharomyces pastorianus
gtgtaagaatcgtgactggtccatt

SEQ ID NO: 103886 - DNA, 25 bp, Saccharomyces pastorianus
agaggatattgctgtcgcggcattt

SEQ ID NO: 103887 - DNA, 25 bp, Saccharomyces pastorianus
ctacttatccaatatgtgtcctcaa

SEQ ID NO: 103888 - DNA, 25 bp, Saccharomyces pastorianus
gagtcttcgttccattctgaatctt

SEQ ID NO: 103889 - DNA, 25 bp, Saccharomyces pastorianus
ttagtgccccagttgcagacaaata

SEQ ID NO: 103890 - DNA, 25 bp, Saccharomyces pastorianus
agagtattacctgatgtcatcgatt

SEQ ID NO: 103891 - DNA, 25 bp, Saccharomyces pastorianus
atcttttttagtgttgcttgcctca

SEQ ID NO: 103892 - DNA, 25 bp, Saccharomyces pastorianus
ggccaagattcttctgccaacaatc

SEQ ID NO: 103893 - DNA, 25 bp, Saccharomyces pastorianus
atttttcagcactaattggccaaga

SEQ ID NO: 103894 - DNA, 25 bp, Saccharomyces pastorianus
agtagtggagctttagtgccccagt

SEQ ID NO: 103895 - DNA, 25 bp, Saccharomyces pastorianus
aagggtgcttcaaatgcgagtaaac

SEQ ID NO: 103896 - DNA, 25 bp, Saccharomyces pastorianus
tttataacgctacgcagcttggcag

SEQ ID NO: 103897 - DNA, 25 bp, Saccharomyces pastorianus
gccatacaacgacagctgcacaaga

SEQ ID NO: 103898 - DNA, 25 bp, Saccharomyces pastorianus
gcttgcctcaaattttatgtctacc

SEQ ID NO: 103899 - DNA, 25 bp, Saccharomyces pastorianus
atcagggtagtcgagttactttcta

SEQ ID NO: 103900 - DNA, 25 bp, Saccharomyces pastorianus
tggtgccacagacaagggtactatt

SEQ ID NO: 103901 - DNA, 25 bp, Saccharomyces pastorianus
ccaccctctaggaattctccaataa

SEQ ID NO: 103902 - DNA, 25 bp, Saccharomyces pastorianus
aagactcttcaattgcctgacgatt

SEQ ID NO: 103903 - DNA, 25 bp, Saccharomyces pastorianus
cgatgattttgtagccgaaggttta

SEQ ID NO: 103904 - DNA, 25 bp, Saccharomyces pastorianus
gaagtgcttcatatctacggagggc

SEQ ID NO: 103905 - DNA, 25 bp, Saccharomyces pastorianus
tacggagggcgcaatttggttaatc

SEQ ID NO: 103906 - DNA, 25 bp, Saccharomyces pastorianus
tgggcttaagtctattggccagtta

SEQ ID NO: 103907 - DNA, 25 bp, Saccharomyces pastorianus
tacatcatttcaggcaaggactcga

SEQ ID NO: 103908 - DNA, 25 bp, Saccharomyces pastorianus
tgttgttccctattttgttgggctt

SEQ ID NO: 103909 - DNA, 25 bp, Saccharomyces pastorianus
attgctttctactgactggtgccac

SEQ ID NO: 103910 - DNA, 25 bp, Saccharomyces pastorianus
aactttatgaacagctcacatccgc

SEQ ID NO: 103911 - DNA, 25 bp, Saccharomyces pastorianus
gcgagtatattcttttactggtcaa

SEQ ID NO: 103912 - DNA, 25 bp, Saccharomyces pastorianus
ttgacagcacgctactatgcaaagg

SEQ ID NO: 103913 - DNA, 25 bp, Saccharomyces pastorianus
gtggcaaaattttctatccctgaag

SEQ ID NO: 103914 - DNA, 25 bp, Saccharomyces pastorianus
cagaaatcttcgaaggctctctaga

SEQ ID NO: 103915 - DNA, 25 bp, Saccharomyces pastorianus
gacattcactgattttgtcgcccag

SEQ ID NO: 103916 - DNA, 25 bp, Saccharomyces pastorianus
atacaatttgcagccattccatggg

SEQ ID NO: 103917 - DNA, 25 bp, Saccharomyces pastorianus
atagcaaggccaccggattttctgt

SEQ ID NO: 103918 - DNA, 25 bp, Saccharomyces pastorianus
aaaccgggaacatgataagctcgta

SEQ ID NO: 103919 - DNA, 25 bp, Saccharomyces pastorianus
gattttctgttctctcaatacgata

SEQ ID NO: 103920 - DNA, 25 bp, Saccharomyces pastorianus
gctcacatccgctacataagacatt

SEQ ID NO: 103921 - DNA, 25 bp, Saccharomyces pastorianus
tttacgctttttgcccttactatct

SEQ ID NO: 103922 - DNA, 25 bp, Saccharomyces pastorianus
taataccagtttgtactcttcgcag

SEQ ID NO: 103923 - DNA, 25 bp, Saccharomyces pastorianus
atgtgctcaattacggtccatcatc

SEQ ID NO: 103924 - DNA, 25 bp, Saccharomyces pastorianus
gcttaccttggtcggatactatctt

SEQ ID NO: 103925 - DNA, 25 bp, Saccharomyces pastorianus
tacgtacgccgttaatagtgataca

SEQ ID NO: 103926 - DNA, 25 bp, Saccharomyces pastorianus
tagagagccttcgaagatttctgtg

SEQ ID NO: 103927 - DNA, 25 bp, Saccharomyces pastorianus
ttcttcttcatttgtcggcttgata

SEQ ID NO: 103928 - DNA, 25 bp, Saccharomyces pastorianus
tgtctctcccacagctctaatttta

SEQ ID NO: 103929 - DNA, 25 bp, Saccharomyces pastorianus
gtccatcatcaacctttacatactt

SEQ ID NO: 103930 - DNA, 25 bp, Saccharomyces pastorianus
cgcagcctcatctgttctaaatcta

SEQ ID NO: 103931 - DNA, 25 bp, Saccharomyces pastorianus
ttactatctcctcctttttgcttac

SEQ ID NO: 103932 - DNA, 25 bp, Saccharomyces pastorianus
agcatgctgctttgtcaccaagatt

SEQ ID NO: 103933 - DNA, 25 bp, Saccharomyces pastorianus
ggcttatgaccttgacggaactgaa

SEQ ID NO: 103934 - DNA, 25 bp, Saccharomyces pastorianus
aacagatcatatttccgctgcgggc

SEQ ID NO: 103935 - DNA, 25 bp, Saccharomyces pastorianus
gctgcgggcgtctggttgaaatata

SEQ ID NO: 103936 - DNA, 25 bp, Saccharomyces pastorianus
gaaacgttgaacctagttgacatga

SEQ ID NO: 103937 - DNA, 25 bp, Saccharomyces pastorianus
gtgtgttgccattgacttttgccaa

SEQ ID NO: 103938 - DNA, 25 bp, Saccharomyces pastorianus
gacttttgccaacgaatctgactat

SEQ ID NO: 103939 - DNA, 25 bp, Saccharomyces pastorianus
aaccggtgaagtcaacaaggcttat

SEQ ID NO: 103940 - DNA, 25 bp, Saccharomyces pastorianus
caccaagatttttaggcggagagat

SEQ ID NO: 103941 - DNA, 25 bp, Saccharomyces pastorianus
gtgaatcgttcaccatcaaggcaaa

SEQ ID NO: 103942 - DNA, 25 bp, Saccharomyces pastorianus
ggttccgcaagagagcatgctgctt

SEQ ID NO: 103943 - DNA, 25 bp, Saccharomyces pastorianus
acagcttacgatttacttaacagag

SEQ ID NO: 103944 - DNA, 25 bp, Saccharomyces pastorianus
ttactcgtgacgcagctttaacagc

SEQ ID NO: 103945 - DNA, 25 bp, Saccharomyces pastorianus
tactaggaactatctttttaccata

SEQ ID NO: 103946 - DNA, 25 bp, Saccharomyces pastorianus
tcagctttccgggagccactattca

SEQ ID NO: 103947 - DNA, 25 bp, Saccharomyces pastorianus
gtatgactcgtcttctactaggaac

SEQ ID NO: 103948 - DNA, 25 bp, Saccharomyces pastorianus
aagtacgctttacgtcttgatagag

SEQ ID NO: 103949 - DNA, 25 bp, Saccharomyces pastorianus
tccagcggtgcttgtttacgagtat

SEQ ID NO: 103950 - DNA, 25 bp, Saccharomyces pastorianus
aagtacagcgatcagaggccaaact

SEQ ID NO: 103951 - DNA, 25 bp, Saccharomyces pastorianus
gaggtggcgagttcacaactctcag

SEQ ID NO: 103952 - DNA, 25 bp, Saccharomyces pastorianus
atagagaagagtatccagcggtgct

SEQ ID NO: 103953 - DNA, 25 bp, Saccharomyces pastorianus
caaactggcagctcattactcgtga

SEQ ID NO: 103954 - DNA, 25 bp, Saccharomyces pastorianus
agtatccgctattatcatcattccc

SEQ ID NO: 103955 - DNA, 25 bp, Saccharomyces pastorianus
ggtactttcgtctcgcatacagtat

SEQ ID NO: 103956 - DNA, 25 bp, Saccharomyces pastorianus
gatttaaatgcctttccgtggtcaa

SEQ ID NO: 103957 - DNA, 25 bp, Saccharomyces pastorianus
ggctttcctatgtgtcattactcta

SEQ ID NO: 103958 - DNA, 25 bp, Saccharomyces pastorianus
gaaggtgcttttgggtcatcaggtc

SEQ ID NO: 103959 - DNA, 25 bp, Saccharomyces pastorianus
ctatccttgttttcggttgtgcatt

SEQ ID NO: 103960 - DNA, 25 bp, Saccharomyces pastorianus
gtcactgtggccactattttgttgt

SEQ ID NO: 103961 - DNA, 25 bp, Saccharomyces pastorianus
aatgtcactgccatctctaaagtag

SEQ ID NO: 103962 - DNA, 25 bp, Saccharomyces pastorianus
aagggcgatcgctatttaagtgtca

SEQ ID NO: 103963 - DNA, 25 bp, Saccharomyces pastorianus
cctgtggtatgggactagcttcttc

SEQ ID NO: 103964 - DNA, 25 bp, Saccharomyces pastorianus
gcaatcattcccatcgttttgtttt

SEQ ID NO: 103965 - DNA, 25 bp, Saccharomyces pastorianus
tgtaatgaagatgtgcaggcccctg

SEQ ID NO: 103966 - DNA, 25 bp, Saccharomyces pastorianus
attcaggcttgggttcatcgagtac

SEQ ID NO: 103967 - DNA, 25 bp, Saccharomyces pastorianus
gatggcaatggattaggcagctcta

SEQ ID NO: 103968 - DNA, 25 bp, Saccharomyces pastorianus
gtgggcactataccgcgtacgtaaa

SEQ ID NO: 103969 - DNA, 25 bp, Saccharomyces pastorianus
gtatagctggatcggcttatttgct

SEQ ID NO: 103970 - DNA, 25 bp, Saccharomyces pastorianus
aaaagtcacgccacggatatgatga

SEQ ID NO: 103971 - DNA, 25 bp, Saccharomyces pastorianus
aactcaggactgcaacgacgaagat

SEQ ID NO: 103972 - DNA, 25 bp, Saccharomyces pastorianus
gtttaatctatgacctgtatgcagt

SEQ ID NO: 103973 - DNA, 25 bp, Saccharomyces pastorianus
gcaggcccctgaatatagtaatcgt

SEQ ID NO: 103974 - DNA, 25 bp, Saccharomyces pastorianus
gggatgcccagaaaacgaagtcgct

SEQ ID NO: 103975 - DNA, 25 bp, Saccharomyces pastorianus
gtctgaaatatctgagggatgccca

SEQ ID NO: 103976 - DNA, 25 bp, Saccharomyces pastorianus
tattgttcaaattcaacatctggat

SEQ ID NO: 103977 - DNA, 25 bp, Saccharomyces pastorianus
ggacaaacctgttttgcaatttcat

SEQ ID NO: 103978 - DNA, 25 bp, Saccharomyces pastorianus
atcggttcgatttcctacaggttca

SEQ ID NO: 103979 - DNA, 25 bp, Saccharomyces pastorianus
aaaagcatcagcaaaatcggttcga

SEQ ID NO: 103980 - DNA, 25 bp, Saccharomyces pastorianus
aacatctggatatttttctactaat

SEQ ID NO: 103981 - DNA, 25 bp, Saccharomyces pastorianus
gatttatccttgtcagtcaccttaa

SEQ ID NO: 103982 - DNA, 25 bp, Saccharomyces pastorianus
gcacctggattattcaattcatctt

SEQ ID NO: 103983 - DNA, 25 bp, Saccharomyces pastorianus
ttcaattcatcttcttttaacgtaa

SEQ ID NO: 103984 - DNA, 25 bp, Saccharomyces pastorianus
aatttcattcttattgcacctggat

SEQ ID NO: 103985 - DNA, 25 bp, Saccharomyces pastorianus
gggatatacccaccacttaaatgga

SEQ ID NO: 103986 - DNA, 25 bp, Saccharomyces pastorianus
tcaccttaatagacgtatactgtag

SEQ ID NO: 103987 - DNA, 25 bp, Saccharomyces pastorianus
aaaatgcttgtactccacagtgtga

SEQ ID NO: 103988 - DNA, 25 bp, Saccharomyces pastorianus
gttcatgcttgatctcattgtcgtt

SEQ ID NO: 103989 - DNA, 25 bp, Saccharomyces pastorianus
atcgccatgggctgtattttgctgt

SEQ ID NO: 103990 - DNA, 25 bp, Saccharomyces pastorianus
ttacacagcagttacatgggttcct

SEQ ID NO: 103991 - DNA, 25 bp, Saccharomyces pastorianus
gttgactttcctacatacataccat

SEQ ID NO: 103992 - DNA, 25 bp, Saccharomyces pastorianus
ttgtggagttcgcagacactgtctt

SEQ ID NO: 103993 - DNA, 25 bp, Saccharomyces pastorianus
agccattcttacatcctacttgttt

SEQ ID NO: 103994 - DNA, 25 bp, Saccharomyces pastorianus
acttagctgttcacgttcttatgta

SEQ ID NO: 103995 - DNA, 25 bp, Saccharomyces pastorianus
agatgctacccatagtgtatcgcca

SEQ ID NO: 103996 - DNA, 25 bp, Saccharomyces pastorianus
tgggttcctgtcaccttaaacttag

SEQ ID NO: 103997 - DNA, 25 bp, Saccharomyces pastorianus
ttcaatgacggctattgctgctggt

SEQ ID NO: 103998 - DNA, 25 bp, Saccharomyces pastorianus
ttaatactggttaccgccacggatt

SEQ ID NO: 103999 - DNA, 25 bp, Saccharomyces pastorianus
gaggcgttgctggagcatcgtcaaa

SEQ ID NO: 104000 - DNA, 25 bp, Saccharomyces pastorianus
gatttcttctgatacgcttagttgg

SEQ ID NO: 104001 - DNA, 25 bp, Saccharomyces pastorianus
gtgttcagaaattgccttcgccaaa

SEQ ID NO: 104002 - DNA, 25 bp, Saccharomyces pastorianus
tcataacttgttcgtactctgctgt

SEQ ID NO: 104003 - DNA, 25 bp, Saccharomyces pastorianus
cttccgtcgggcaattcaaaccagg

SEQ ID NO: 104004 - DNA, 25 bp, Saccharomyces pastorianus
gcaaaagtgcctttgtcctcaaaaa

SEQ ID NO: 104005 - DNA, 25 bp, Saccharomyces pastorianus
gtaacatctgtgaactgcaactttt

SEQ ID NO: 104006 - DNA, 25 bp, Saccharomyces pastorianus
ggcggacccgtgatgtacagtgaat

SEQ ID NO: 104007 - DNA, 25 bp, Saccharomyces pastorianus
accatcgctgctattcaagttgact

SEQ ID NO: 104008 - DNA, 25 bp, Saccharomyces pastorianus
aagttcggattcgtatgtctcagta

SEQ ID NO: 104009 - DNA, 25 bp, Saccharomyces pastorianus
tgtgctggaaatacgggtgaccttc

SEQ ID NO: 104010 - DNA, 25 bp, Saccharomyces pastorianus
gacgccaactacttctccggtaaag

SEQ ID NO: 104011 - DNA, 25 bp, Saccharomyces pastorianus
gtgtagtctgcccactattatcttc

SEQ ID NO: 104012 - DNA, 25 bp, Saccharomyces pastorianus
gaggatcattgaactctgcgcaagt

SEQ ID NO: 104013 - DNA, 25 bp, Saccharomyces pastorianus
tattatcttccaaccgatggccatc

SEQ ID NO: 104014 - DNA, 25 bp, Saccharomyces pastorianus
tgcgcaagttcctttgacgccaact

SEQ ID NO: 104015 - DNA, 25 bp, Saccharomyces pastorianus
gaactacatagccaaggtcttctca

SEQ ID NO: 104016 - DNA, 25 bp, Saccharomyces pastorianus
gatggccatcaaattcgcagcaaag

SEQ ID NO: 104017 - DNA, 25 bp, Saccharomyces pastorianus
ggtttctgctttcaccaacaagagg

SEQ ID NO: 104018 - DNA, 25 bp, Saccharomyces pastorianus
aacttgtgggctggtttcaatcaaa

SEQ ID NO: 104019 - DNA, 25 bp, Saccharomyces pastorianus
aaactgatactttagcaccattgca

SEQ ID NO: 104020 - DNA, 25 bp, Saccharomyces pastorianus
atcgtttggctggtttatcactcta

SEQ ID NO: 104021 - DNA, 25 bp, Saccharomyces pastorianus
caaattaacagctcttctacagtaa

SEQ ID NO: 104022 - DNA, 25 bp, Saccharomyces pastorianus
gagaattctctaaatacggcgtaat

SEQ ID NO: 104023 - DNA, 25 bp, Saccharomyces pastorianus
ggcaagaatcacctttacccttata

SEQ ID NO: 104024 - DNA, 25 bp, Saccharomyces pastorianus
tcatttactgggtgaggtctcaact

SEQ ID NO: 104025 - DNA, 25 bp, Saccharomyces pastorianus
gcgctttgccattattgcggttagt

SEQ ID NO: 104026 - DNA, 25 bp, Saccharomyces pastorianus
gaatctgatgaagcgctttgccatt

SEQ ID NO: 104027 - DNA, 25 bp, Saccharomyces pastorianus
aatgatttatatttcccttgttgga

SEQ ID NO: 104028 - DNA, 25 bp, Saccharomyces pastorianus
gtttatcactctagaatttcctgta

SEQ ID NO: 104029 - DNA, 25 bp, Saccharomyces pastorianus
ggacattccacttcattcaggcaat

SEQ ID NO: 104030 - DNA, 25 bp, Saccharomyces pastorianus
tatatggcaagaccgtgttcacgta

SEQ ID NO: 104031 - DNA, 25 bp, Saccharomyces pastorianus
aactcacgttggaaactggcgggcg

SEQ ID NO: 104032 - DNA, 25 bp, Saccharomyces pastorianus
gtacccagcatctatggacttcaat

SEQ ID NO: 104033 - DNA, 25 bp, Saccharomyces pastorianus
gttattaccttaattgcccttgtcg

SEQ ID NO: 104034 - DNA, 25 bp, Saccharomyces pastorianus
gcaactttgaattcgctaatctccc

SEQ ID NO: 104035 - DNA, 25 bp, Saccharomyces pastorianus
gaatggcaccttacaattgaacgcg

SEQ ID NO: 104036 - DNA, 25 bp, Saccharomyces pastorianus
aaggtgcacccttatattacagtgg

SEQ ID NO: 104037 - DNA, 25 bp, Saccharomyces pastorianus
aggccccgattagatcttatttaca

SEQ ID NO: 104038 - DNA, 25 bp, Saccharomyces pastorianus
gaatatccttacacatctacgacca

SEQ ID NO: 104039 - DNA, 25 bp, Saccharomyces pastorianus
aagggtcgcttagacttagcagcaa

SEQ ID NO: 104040 - DNA, 25 bp, Saccharomyces pastorianus
gctaatctccctttaaacgacggtg

SEQ ID NO: 104041 - DNA, 25 bp, Saccharomyces pastorianus
aaacgtcagtatcttttctacaggt

SEQ ID NO: 104042 - DNA, 25 bp, Saccharomyces pastorianus
gattgaacaagtgtggtgttatttc

SEQ ID NO: 104043 - DNA, 25 bp, Saccharomyces pastorianus
agaccatcctccaaggtcattatca

SEQ ID NO: 104044 - DNA, 25 bp, Saccharomyces pastorianus
agctgatgctttgaatgccattaac

SEQ ID NO: 104045 - DNA, 25 bp, Saccharomyces pastorianus
aattcggttacgtcatcttgaccac

SEQ ID NO: 104046 - DNA, 25 bp, Saccharomyces pastorianus
tgatgctttgaatgccattaacaac

SEQ ID NO: 104047 - DNA, 25 bp, Saccharomyces pastorianus
ggtcattatcaagtttttgcaagtt

SEQ ID NO: 104048 - DNA, 25 bp, Saccharomyces pastorianus
cagccagacaattcggttacgtcat

SEQ ID NO: 104049 - DNA, 25 bp, Saccharomyces pastorianus
atcctccaaggtcattatcaagttt

SEQ ID NO: 104050 - DNA, 25 bp, Saccharomyces pastorianus
gttttagctgatgctttgaatgcca

SEQ ID NO: 104051 - DNA, 25 bp, Saccharomyces pastorianus
tcggttacgtcatcttgaccacctc

SEQ ID NO: 104052 - DNA, 25 bp, Saccharomyces pastorianus
gacaattcggttacgtcatcttgac

SEQ ID NO: 104053 - DNA, 25 bp, Saccharomyces pastorianus
cagatatcttttccctgggcctgat

SEQ ID NO: 104054 - DNA, 25 bp, Saccharomyces pastorianus
ggcccacggcaaatcaaatcttaca

SEQ ID NO: 104055 - DNA, 25 bp, Saccharomyces pastorianus
gtgttacctgacaatggcaacgcat

SEQ ID NO: 104056 - DNA, 25 bp, Saccharomyces pastorianus
tggcacctccactgttcataacaat

SEQ ID NO: 104057 - DNA, 25 bp, Saccharomyces pastorianus
tgccgctaccaagaatcgtcttatt

SEQ ID NO: 104058 - DNA, 25 bp, Saccharomyces pastorianus
ggtaatagtaccaacgctggcacct

SEQ ID NO: 104059 - DNA, 25 bp, Saccharomyces pastorianus
ccctgggcctgatgattgttgaaat

SEQ ID NO: 104060 - DNA, 25 bp, Saccharomyces pastorianus
caatgcaggtgctattatccaagaa

SEQ ID NO: 104061 - DNA, 25 bp, Saccharomyces pastorianus
aattgcagcgaacgttgtgttacct

SEQ ID NO: 104062 - DNA, 25 bp, Saccharomyces pastorianus
ataatgtcaatactgccgctaccaa

SEQ ID NO: 104063 - DNA, 25 bp, Saccharomyces pastorianus
taaaagttctaaaattcccgcatgg

SEQ ID NO: 104064 - DNA, 25 bp, Saccharomyces pastorianus
agatgatttctcaaggcactgccgg

SEQ ID NO: 104065 - DNA, 25 bp, Saccharomyces pastorianus
gttcattcatgccagtttctacaag

SEQ ID NO: 104066 - DNA, 25 bp, Saccharomyces pastorianus
gatttatcggtccaaatggcgaaca

SEQ ID NO: 104067 - DNA, 25 bp, Saccharomyces pastorianus
ggcagatccatggactctttatcat

SEQ ID NO: 104068 - DNA, 25 bp, Saccharomyces pastorianus
ttctgtaccactccgaaaagccaag

SEQ ID NO: 104069 - DNA, 25 bp, Saccharomyces pastorianus
cgccttgctccagcatgattttgaa

SEQ ID NO: 104070 - DNA, 25 bp, Saccharomyces pastorianus
aaagatgattacaagggtctcgcct

SEQ ID NO: 104071 - DNA, 25 bp, Saccharomyces pastorianus
tcaggaagccgcatcgctatggaat

SEQ ID NO: 104072 - DNA, 25 bp, Saccharomyces pastorianus
tgcccatgccttgaatatgccatac

SEQ ID NO: 104073 - DNA, 25 bp, Saccharomyces pastorianus
aaggcactgccggtgaaggtgacaa

SEQ ID NO: 104074 - DNA, 25 bp, Saccharomyces pastorianus
tgacaaagacactttcgtcgctgct

SEQ ID NO: 104075 - DNA, 25 bp, Saccharomyces pastorianus
aatgtccctcaatcaagcgacggtg

SEQ ID NO: 104076 - DNA, 25 bp, Saccharomyces pastorianus
gccttcgaagttccttctgacgaaa

SEQ ID NO: 104077 - DNA, 25 bp, Saccharomyces pastorianus
agcaataaaaattctccgccctcag

SEQ ID NO: 104078 - DNA, 25 bp, Saccharomyces pastorianus
gagaactttatacctctgcgaaatt

SEQ ID NO: 104079 - DNA, 25 bp, Saccharomyces pastorianus
gcagcgtcttcgtcgttggaaaaca

SEQ ID NO: 104080 - DNA, 25 bp, Saccharomyces pastorianus
agcgacggtgtcaatcatggatttc

SEQ ID NO: 104081 - DNA, 25 bp, Saccharomyces pastorianus
tgacgatataccatcttttttcccc

SEQ ID NO: 104082 - DNA, 25 bp, Saccharomyces pastorianus
tctagtaactctgaccggatcgatg

SEQ ID NO: 104083 - DNA, 25 bp, Saccharomyces pastorianus
gatatagattcgtcatcgcggtcac

SEQ ID NO: 104084 - DNA, 25 bp, Saccharomyces pastorianus
acacatcttggtttggctggacttt

SEQ ID NO: 104085 - DNA, 25 bp, Saccharomyces pastorianus
aattactactcgatgcctcttgaat

SEQ ID NO: 104086 - DNA, 25 bp, Saccharomyces pastorianus
gttttgcaccaatacgcgatgaccc

SEQ ID NO: 104087 - DNA, 25 bp, Saccharomyces pastorianus
atacttaggccagctgcgcacgcag

SEQ ID NO: 104088 - DNA, 25 bp, Saccharomyces pastorianus
aactgggcccagtgaccatgtgcta

SEQ ID NO: 104089 - DNA, 25 bp, Saccharomyces pastorianus
aaactaccggtagcacagtacagtg

SEQ ID NO: 104090 - DNA, 25 bp, Saccharomyces pastorianus
cacagtacagtgcaccagatggtgt

SEQ ID NO: 104091 - DNA, 25 bp, Saccharomyces pastorianus
atgaccctcgatacatgaccacaga

SEQ ID NO: 104092 - DNA, 25 bp, Saccharomyces pastorianus
ggaacgcacgaaagatggctcacaa

SEQ ID NO: 104093 - DNA, 25 bp, Saccharomyces pastorianus
gagacaaaccttcagaaccggaacg

SEQ ID NO: 104094 - DNA, 25 bp, Saccharomyces pastorianus
gatggctcacaactgacatacttag

SEQ ID NO: 104095 - DNA, 25 bp, Saccharomyces pastorianus
aacgctggccaaatcgatagagaca

SEQ ID NO: 104096 - DNA, 25 bp, Saccharomyces pastorianus
gaccatgtgctaaacgctggccaaa

SEQ ID NO: 104097 - DNA, 25 bp, Saccharomyces pastorianus
gtcagtacgatgcatccttggatca

SEQ ID NO: 104098 - DNA, 25 bp, Saccharomyces pastorianus
gatccgttactgagaaatttcccat

SEQ ID NO: 104099 - DNA, 25 bp, Saccharomyces pastorianus
aaagaacgtccctgttgtggcgaat

SEQ ID NO: 104100 - DNA, 25 bp, Saccharomyces pastorianus
agtggcatcctacattactgggtaa

SEQ ID NO: 104101 - DNA, 25 bp, Saccharomyces pastorianus
gatgcgtcctcatttgttattgcca

SEQ ID NO: 104102 - DNA, 25 bp, Saccharomyces pastorianus
ttggctgcctccttcaagggatgta

SEQ ID NO: 104103 - DNA, 25 bp, Saccharomyces pastorianus
gtgagtctggaaacggtgcttctaa

SEQ ID NO: 104104 - DNA, 25 bp, Saccharomyces pastorianus
cggtgcttctaatggcgatgtttac

SEQ ID NO: 104105 - DNA, 25 bp, Saccharomyces pastorianus
gatgaatctcgatctttctttacaa

SEQ ID NO: 104106 - DNA, 25 bp, Saccharomyces pastorianus
aagttgagtgctgctatcggtcata

SEQ ID NO: 104107 - DNA, 25 bp, Saccharomyces pastorianus
atcggtcatattttacagtggcatc

SEQ ID NO: 104108 - DNA, 25 bp, Saccharomyces pastorianus
taagcttttataccactgaccacac

SEQ ID NO: 104109 - DNA, 25 bp, Saccharomyces pastorianus
gtctctattatccaactgcgcatgg

SEQ ID NO: 104110 - DNA, 25 bp, Saccharomyces pastorianus
gacgctgacaagttacttcgggtat

SEQ ID NO: 104111 - DNA, 25 bp, Saccharomyces pastorianus
tcaaggtgctactgcaagtccactt

SEQ ID NO: 104112 - DNA, 25 bp, Saccharomyces pastorianus
atacaaatacgtgtcccgctcggag

SEQ ID NO: 104113 - DNA, 25 bp, Saccharomyces pastorianus
acacggaagctgtatcgcactcaaa

SEQ ID NO: 104114 - DNA, 25 bp, Saccharomyces pastorianus
aagtccactttcgtcagtttcatca

SEQ ID NO: 104115 - DNA, 25 bp, Saccharomyces pastorianus
caaccagtcacctcattatttttca

SEQ ID NO: 104116 - DNA, 25 bp, Saccharomyces pastorianus
atgtgcagcgtcactggtatcttga

SEQ ID NO: 104117 - DNA, 25 bp, Saccharomyces pastorianus
tgttcctctacaataatgccccaag

SEQ ID NO: 104118 - DNA, 25 bp, Saccharomyces pastorianus
gtcggtggtcaaattactcatggca

SEQ ID NO: 104119 - DNA, 25 bp, Saccharomyces pastorianus
ttacgcaacttttcatccgagtcta

SEQ ID NO: 104120 - DNA, 25 bp, Saccharomyces pastorianus
ggtaatcagcagtcggatatcgtta

SEQ ID NO: 104121 - DNA, 25 bp, Saccharomyces pastorianus
ggataatattgtacgtgccgccacc

SEQ ID NO: 104122 - DNA, 25 bp, Saccharomyces pastorianus
tattggtcttttcccctatgaatga

SEQ ID NO: 104123 - DNA, 25 bp, Saccharomyces pastorianus
attttagatgccgacatccatgggt

SEQ ID NO: 104124 - DNA, 25 bp, Saccharomyces pastorianus
tactgcgaacttaattcctgccttg

SEQ ID NO: 104125 - DNA, 25 bp, Saccharomyces pastorianus
gtgccgccaccttagaaacaatctt

SEQ ID NO: 104126 - DNA, 25 bp, Saccharomyces pastorianus
gacaaatgagcctggctgtgaccct

SEQ ID NO: 104127 - DNA, 25 bp, Saccharomyces pastorianus
ggctgtgaccctcaattagttgcaa

SEQ ID NO: 104128 - DNA, 25 bp, Saccharomyces pastorianus
caccatgggatcttgcaattcttga

SEQ ID NO: 104129 - DNA, 25 bp, Saccharomyces pastorianus
aaagtccttcatttgcggcgtgcta

SEQ ID NO: 104130 - DNA, 25 bp, Saccharomyces pastorianus
gtgagcttaagaaacgccaggacgc

SEQ ID NO: 104131 - DNA, 25 bp, Saccharomyces pastorianus
gcggtaaatcgtttatcttacagga

SEQ ID NO: 104132 - DNA, 25 bp, Saccharomyces pastorianus
gaaacgccaggacgcaattggatat

SEQ ID NO: 104133 - DNA, 25 bp, Saccharomyces pastorianus
ggagatcttgcggtaaatcgtttat

SEQ ID NO: 104134 - DNA, 25 bp, Saccharomyces pastorianus
gacgaaactgttcttctggatcaaa

SEQ ID NO: 104135 - DNA, 25 bp, Saccharomyces pastorianus
gatttatcacatgacgaaactgttc

SEQ ID NO: 104136 - DNA, 25 bp, Saccharomyces pastorianus
ctagagtcttatccaacggacaaaa

SEQ ID NO: 104137 - DNA, 25 bp, Saccharomyces pastorianus
aatcagcagctagcatatttggaca

SEQ ID NO: 104138 - DNA, 25 bp, Saccharomyces pastorianus
gaaaagcttgctgaattgacaaaga

SEQ ID NO: 104139 - DNA, 25 bp, Saccharomyces pastorianus
acaggataaatccaaatacgttaat

SEQ ID NO: 104140 - DNA, 25 bp, Saccharomyces pastorianus
gatatggtcaatcagcagctagcat

SEQ ID NO: 104141 - DNA, 25 bp, Saccharomyces pastorianus
ccatgggcggtgttacggcttatac

SEQ ID NO: 104142 - DNA, 25 bp, Saccharomyces pastorianus
aacattgactgtgtggccgtacttg

SEQ ID NO: 104143 - DNA, 25 bp, Saccharomyces pastorianus
aactcctggctggtcttatacgata

SEQ ID NO: 104144 - DNA, 25 bp, Saccharomyces pastorianus
gacggtcaaggttacactatccatt

SEQ ID NO: 104145 - DNA, 25 bp, Saccharomyces pastorianus
aagtgaccgctaccacatggacaag

SEQ ID NO: 104146 - DNA, 25 bp, Saccharomyces pastorianus
gaaatttgccactagtgctgtgaca

SEQ ID NO: 104147 - DNA, 25 bp, Saccharomyces pastorianus
gcgtttcgctccaatgcaaatgcag

SEQ ID NO: 104148 - DNA, 25 bp, Saccharomyces pastorianus
cagctgagtttgcttcgactttaac

SEQ ID NO: 104149 - DNA, 25 bp, Saccharomyces pastorianus
aagcagactggtacgtcgcgtttcg

SEQ ID NO: 104150 - DNA, 25 bp, Saccharomyces pastorianus
gtgacatattactctacctttgggt

SEQ ID NO: 104151 - DNA, 25 bp, Saccharomyces pastorianus
attcaagtttttgcccaggtggacg

SEQ ID NO: 104152 - DNA, 25 bp, Saccharomyces pastorianus
aaatcacaacccactgaatctcagt

SEQ ID NO: 104153 - DNA, 25 bp, Saccharomyces pastorianus
gattctagacgctgtactatgcaaa

SEQ ID NO: 104154 - DNA, 25 bp, Saccharomyces pastorianus
caacgtcaatgctcctgtgtttagg

SEQ ID NO: 104155 - DNA, 25 bp, Saccharomyces pastorianus
gaaacaccaagagttgaccccacag

SEQ ID NO: 104156 - DNA, 25 bp, Saccharomyces pastorianus
gagttgaccccacagaaatctccaa

SEQ ID NO: 104157 - DNA, 25 bp, Saccharomyces pastorianus
gcaggaacaatgatgacggcgagct

SEQ ID NO: 104158 - DNA, 25 bp, Saccharomyces pastorianus
gcttaaacggtgtggttgctttaca

SEQ ID NO: 104159 - DNA, 25 bp, Saccharomyces pastorianus
acggcgagctaggatttttgattct

SEQ ID NO: 104160 - DNA, 25 bp, Saccharomyces pastorianus
aaacatttgagatcgactcgtggta

SEQ ID NO: 104161 - DNA, 25 bp, Saccharomyces pastorianus
agaaatctccaacgtcaatgctcct

SEQ ID NO: 104162 - DNA, 25 bp, Saccharomyces pastorianus
ttttacaatcgccaaccatatcatc

SEQ ID NO: 104163 - DNA, 25 bp, Saccharomyces pastorianus
ctgcccgaaactaccagattcttga

SEQ ID NO: 104164 - DNA, 25 bp, Saccharomyces pastorianus
ggtcacattgacattactctcttga

SEQ ID NO: 104165 - DNA, 25 bp, Saccharomyces pastorianus
ggtgacgattacattatccctgaaa

SEQ ID NO: 104166 - DNA, 25 bp, Saccharomyces pastorianus
gacaagcttgttgagtacatttcca

SEQ ID NO: 104167 - DNA, 25 bp, Saccharomyces pastorianus
aacacgtggatgtcccaggtcattt

SEQ ID NO: 104168 - DNA, 25 bp, Saccharomyces pastorianus
gggacattttggcaggtactattca

SEQ ID NO: 104169 - DNA, 25 bp, Saccharomyces pastorianus
gttaaagctaatgctctgcccgaaa

SEQ ID NO: 104170 - DNA, 25 bp, Saccharomyces pastorianus
tttccaaccaatcacatttgcgcag

SEQ ID NO: 104171 - DNA, 25 bp, Saccharomyces pastorianus
aggtttgttggctctatcattgata

SEQ ID NO: 104172 - DNA, 25 bp, Saccharomyces pastorianus
aggtcatttatctgccattgccttt

SEQ ID NO: 104173 - DNA, 25 bp, Saccharomyces pastorianus
taatttacattcttctgtggctgaa

SEQ ID NO: 104174 - DNA, 25 bp, Saccharomyces pastorianus
gaagacatccttgttgatgctgatg

SEQ ID NO: 104175 - DNA, 25 bp, Saccharomyces pastorianus
tgccttttttctttggttaagtcat

SEQ ID NO: 104176 - DNA, 25 bp, Saccharomyces pastorianus
gtacaagacttcctttgggacagaa

SEQ ID NO: 104177 - DNA, 25 bp, Saccharomyces pastorianus
tgatgataatgccaacgcctttttt

SEQ ID NO: 104178 - DNA, 25 bp, Saccharomyces pastorianus
aaacgtgaaacaagccccaactatg

SEQ ID NO: 104179 - DNA, 25 bp, Saccharomyces pastorianus
agccccaactatgcatgtctggtta

SEQ ID NO: 104180 - DNA, 25 bp, Saccharomyces pastorianus
ttggttaagtcatcaggcggcgctc

SEQ ID NO: 104181 - DNA, 25 bp, Saccharomyces pastorianus
gatgctgatgataatgccaacgcct

SEQ ID NO: 104182 - DNA, 25 bp, Saccharomyces pastorianus
tgaattctttaactttatgcctttt

SEQ ID NO: 104183 - DNA, 25 bp, Saccharomyces pastorianus
tttttgcttcttcttgaggataatc

SEQ ID NO: 104184 - DNA, 25 bp, Saccharomyces pastorianus
ggcggcgctcttgaagaatcttttt

SEQ ID NO: 104185 - DNA, 25 bp, Saccharomyces pastorianus
cgccgcctgatgacttaaccaaaga

SEQ ID NO: 104186 - DNA, 25 bp, Saccharomyces pastorianus
gaggacattatagcggaggccaaca

SEQ ID NO: 104187 - DNA, 25 bp, Saccharomyces pastorianus
gacatcgtgaaaatcctaactacaa

SEQ ID NO: 104188 - DNA, 25 bp, Saccharomyces pastorianus
gcatcttttgtacccaacttaataa

SEQ ID NO: 104189 - DNA, 25 bp, Saccharomyces pastorianus
gtctcccagtcccaaagactagagc

SEQ ID NO: 104190 - DNA, 25 bp, Saccharomyces pastorianus
ggcattatcatcagcatcaacaagg

SEQ ID NO: 104191 - DNA, 25 bp, Saccharomyces pastorianus
aaattctttgcatcttttgtaccca

SEQ ID NO: 104192 - DNA, 25 bp, Saccharomyces pastorianus
cgcctggcgctttagactctaagaa

SEQ ID NO: 104193 - DNA, 25 bp, Saccharomyces pastorianus
aaagattcttcaagagcgccgcctg

SEQ ID NO: 104194 - DNA, 25 bp, Saccharomyces pastorianus
gaaaaagcgttttggaggacattat

SEQ ID NO: 104195 - DNA, 25 bp, Saccharomyces pastorianus
ggaataccaaaaacgcctggcgctt

SEQ ID NO: 104196 - DNA, 25 bp, Saccharomyces pastorianus
agttctccctaaagaagcactcctt

SEQ ID NO: 104197 - DNA, 25 bp, Saccharomyces pastorianus
ggtcgatgagtctcgtggcttcaaa

SEQ ID NO: 104198 - DNA, 25 bp, Saccharomyces pastorianus
gactgcttactattctttctacttg

SEQ ID NO: 104199 - DNA, 25 bp, Saccharomyces pastorianus
gctatgtacgttgccggtatcacag

SEQ ID NO: 104200 - DNA, 25 bp, Saccharomyces pastorianus
aggccaaaatttctcaggtcgatga

SEQ ID NO: 104201 - DNA, 25 bp, Saccharomyces pastorianus
gtcgacttgagtaagttctccctaa

SEQ ID NO: 104202 - DNA, 25 bp, Saccharomyces pastorianus
gaaggactcagtcgcagaagccaaa

SEQ ID NO: 104203 - DNA, 25 bp, Saccharomyces pastorianus
aagccagagatgtcttgattccatt

SEQ ID NO: 104204 - DNA, 25 bp, Saccharomyces pastorianus
aggcattagaacttgcttccgcaga

SEQ ID NO: 104205 - DNA, 25 bp, Saccharomyces pastorianus
ttgcctgtcgcattggctatgtacg

SEQ ID NO: 104206 - DNA, 25 bp, Saccharomyces pastorianus
tgaagtcaccttccaaaccgaattg

SEQ ID NO: 104207 - DNA, 25 bp, Saccharomyces pastorianus
tatgtattaatacctgcgggaattt

SEQ ID NO: 104208 - DNA, 25 bp, Saccharomyces pastorianus
aagccattacaaggtattttccata

SEQ ID NO: 104209 - DNA, 25 bp, Saccharomyces pastorianus
atgctgtgtctccatatgctcaaaa

SEQ ID NO: 104210 - DNA, 25 bp, Saccharomyces pastorianus
gatttaagtctcaatttctatatgt

SEQ ID NO: 104211 - DNA, 25 bp, Saccharomyces pastorianus
cctgcgggaatttattggtactggt

SEQ ID NO: 104212 - DNA, 25 bp, Saccharomyces pastorianus
gtctccatatgctcaaaagccatta

SEQ ID NO: 104213 - DNA, 25 bp, Saccharomyces pastorianus
aaggtataacctcatatgctgtgtc

SEQ ID NO: 104214 - DNA, 25 bp, Saccharomyces pastorianus
aacgctgtattcaatagttttagaa

SEQ ID NO: 104215 - DNA, 25 bp, Saccharomyces pastorianus
ataacctcatatgctgtgtctccat

SEQ ID NO: 104216 - DNA, 25 bp, Saccharomyces pastorianus
gtattttccataacgctgtattcaa

SEQ ID NO: 104217 - DNA, 25 bp, Saccharomyces pastorianus
gagtataatgaatttctgtacagca

SEQ ID NO: 104218 - DNA, 25 bp, Saccharomyces pastorianus
gaaggttctgggagtccattgcacc

SEQ ID NO: 104219 - DNA, 25 bp, Saccharomyces pastorianus
tggagccatgggttcagagccatat

SEQ ID NO: 104220 - DNA, 25 bp, Saccharomyces pastorianus
gcacccattagaggcagactgtttt

SEQ ID NO: 104221 - DNA, 25 bp, Saccharomyces pastorianus
aattactacaaagctcctggatgag

SEQ ID NO: 104222 - DNA, 25 bp, Saccharomyces pastorianus
gagaaacacgtccacttccagagtg

SEQ ID NO: 104223 - DNA, 25 bp, Saccharomyces pastorianus
gaccccacgaagagaatcaccattg

SEQ ID NO: 104224 - DNA, 25 bp, Saccharomyces pastorianus
gcatgatcatggtatagcacactgt

SEQ ID NO: 104225 - DNA, 25 bp, Saccharomyces pastorianus
catatgtggcgcctgaagaatttat

SEQ ID NO: 104226 - DNA, 25 bp, Saccharomyces pastorianus
agcacactgtgatctgaaacccgaa

SEQ ID NO: 104227 - DNA, 25 bp, Saccharomyces pastorianus
atacgatccgcgtctggtagattgt

SEQ ID NO: 104228 - DNA, 25 bp, Saccharomyces pastorianus
tagttcagttttccagactgcctgg

SEQ ID NO: 104229 - DNA, 25 bp, Saccharomyces pastorianus
ggtggagtttcggtattctgattta

SEQ ID NO: 104230 - DNA, 25 bp, Saccharomyces pastorianus
gtatgaaccgcccattcaacaggga

SEQ ID NO: 104231 - DNA, 25 bp, Saccharomyces pastorianus
gaaaccggaaaatatcttgcttgat

SEQ ID NO: 104232 - DNA, 25 bp, Saccharomyces pastorianus
gtgacacctcacagttcgataagta

SEQ ID NO: 104233 - DNA, 25 bp, Saccharomyces pastorianus
gttcctgacgtcacatatacattat

SEQ ID NO: 104234 - DNA, 25 bp, Saccharomyces pastorianus
atacattatgcggtactcccgacta

SEQ ID NO: 104235 - DNA, 25 bp, Saccharomyces pastorianus
tgccgaattgagatttccaccattt

SEQ ID NO: 104236 - DNA, 25 bp, Saccharomyces pastorianus
agaagacatcaactacggtgttcaa

SEQ ID NO: 104237 - DNA, 25 bp, Saccharomyces pastorianus
atagcacccgaggtcgttagtacta

SEQ ID NO: 104238 - DNA, 25 bp, Saccharomyces pastorianus
atgctagcaggatacacgccatttt

SEQ ID NO: 104239 - DNA, 25 bp, Saccharomyces pastorianus
gggtttgccaaatacgttcctgacg

SEQ ID NO: 104240 - DNA, 25 bp, Saccharomyces pastorianus
tagtaccccggcataccgtaatatt

SEQ ID NO: 104241 - DNA, 25 bp, Saccharomyces pastorianus
gccatcttgttgacattcttcctaa

SEQ ID NO: 104242 - DNA, 25 bp, Saccharomyces pastorianus
acactgagtctctttgtcatgatac

SEQ ID NO: 104243 - DNA, 25 bp, Saccharomyces pastorianus
gtctccgttaatcctagtctgttta

SEQ ID NO: 104244 - DNA, 25 bp, Saccharomyces pastorianus
gagaaaactcccacatccatgataa

SEQ ID NO: 104245 - DNA, 25 bp, Saccharomyces pastorianus
aaggtcctgtgttatgcttgtcatc

SEQ ID NO: 104246 - DNA, 25 bp, Saccharomyces pastorianus
atattcgcccttttacaggcattga

SEQ ID NO: 104247 - DNA, 25 bp, Saccharomyces pastorianus
gcattgagcgcgttttgttcaccaa

SEQ ID NO: 104248 - DNA, 25 bp, Saccharomyces pastorianus
ggaacgacatcgtgtatgccagcat

SEQ ID NO: 104249 - DNA, 25 bp, Saccharomyces pastorianus
gtgttactggtcgtatcacctacat

SEQ ID NO: 104250 - DNA, 25 bp, Saccharomyces pastorianus
gatatactatttgtctgcggaacga

SEQ ID NO: 104251 - DNA, 25 bp, Saccharomyces pastorianus
gtccatgacgctcccaatagaatat

SEQ ID NO: 104252 - DNA, 25 bp, Saccharomyces pastorianus
agggtttccaccgttgatttatatg

SEQ ID NO: 104253 - DNA, 25 bp, Saccharomyces pastorianus
gggtttctcattcaactttcgagcc

SEQ ID NO: 104254 - DNA, 25 bp, Saccharomyces pastorianus
agagcaagaagatccccatgccatc

SEQ ID NO: 104255 - DNA, 25 bp, Saccharomyces pastorianus
aataggcaattccaccttaggcaaa

SEQ ID NO: 104256 - DNA, 25 bp, Saccharomyces pastorianus
atgccatcgcagaagacgacattgt

SEQ ID NO: 104257 - DNA, 25 bp, Saccharomyces pastorianus
ttacgtcacaactcacaattcacca

SEQ ID NO: 104258 - DNA, 25 bp, Saccharomyces pastorianus
gagtgacctccataaagtacttcat

SEQ ID NO: 104259 - DNA, 25 bp, Saccharomyces pastorianus
atgggacaggtctggcatgcctata

SEQ ID NO: 104260 - DNA, 25 bp, Saccharomyces pastorianus
ttcaccaagttttcaggcacatcgc

SEQ ID NO: 104261 - DNA, 25 bp, Saccharomyces pastorianus
gacgtacagtgatgtctctcaattt

SEQ ID NO: 104262 - DNA, 25 bp, Saccharomyces pastorianus
gtgacagtgacgttttctacccatg

SEQ ID NO: 104263 - DNA, 25 bp, Saccharomyces pastorianus
atctcttgtggtgctgccgaataca

SEQ ID NO: 104264 - DNA, 25 bp, Saccharomyces pastorianus
atctactaatgccacatcatcttct

SEQ ID NO: 104265 - DNA, 25 bp, Saccharomyces pastorianus
gctgttcaagctattacctcttcaa

SEQ ID NO: 104266 - DNA, 25 bp, Saccharomyces pastorianus
ttgtatgatcaaaacgtcgccgaac

SEQ ID NO: 104267 - DNA, 25 bp, Saccharomyces pastorianus
gtctatccggcaatttctacaactt

SEQ ID NO: 104268 - DNA, 25 bp, Saccharomyces pastorianus
gcttctgctgaaggttacactccag

SEQ ID NO: 104269 - DNA, 25 bp, Saccharomyces pastorianus
aaaagatctcttcctctgcatctaa

SEQ ID NO: 104270 - DNA, 25 bp, Saccharomyces pastorianus
aaggacggtgttttgactgatgcca

SEQ ID NO: 104271 - DNA, 25 bp, Saccharomyces pastorianus
accacctttggtattgctgttcaag

SEQ ID NO: 104272 - DNA, 25 bp, Saccharomyces pastorianus
agatggttacttggctttgggtgac

SEQ ID NO: 104273 - DNA, 25 bp, Saccharomyces pastorianus
aggcctttgaccagttatcttacca

SEQ ID NO: 104274 - DNA, 25 bp, Saccharomyces pastorianus
tacgaaatttcgcaacgccgcatga

SEQ ID NO: 104275 - DNA, 25 bp, Saccharomyces pastorianus
gcatgactccattgaacgctagcat

SEQ ID NO: 104276 - DNA, 25 bp, Saccharomyces pastorianus
ggagctgcacactaagcgttatcta

SEQ ID NO: 104277 - DNA, 25 bp, Saccharomyces pastorianus
gatccggtgtagtaggcccatttgg

SEQ ID NO: 104278 - DNA, 25 bp, Saccharomyces pastorianus
agatgtaactcttcgtctaccacaa

SEQ ID NO: 104279 - DNA, 25 bp, Saccharomyces pastorianus
aagcaaatcttggtcctcaacggga

SEQ ID NO: 104280 - DNA, 25 bp, Saccharomyces pastorianus
gatgaacacccgcattctagtttga

SEQ ID NO: 104281 - DNA, 25 bp, Saccharomyces pastorianus
gaccatattgcaactggatacgcca

SEQ ID NO: 104282 - DNA, 25 bp, Saccharomyces pastorianus
tggttaatccaaacgtcttccgcga

SEQ ID NO: 104283 - DNA, 25 bp, Saccharomyces pastorianus
catttggcaccttcatcggaatgat

SEQ ID NO: 104284 - DNA, 25 bp, Saccharomyces pastorianus
gaaagaggctttcagtacgctaaaa

SEQ ID NO: 104285 - DNA, 25 bp, Saccharomyces pastorianus
caaacggcaaattatcttccctata

SEQ ID NO: 104286 - DNA, 25 bp, Saccharomyces pastorianus
tagacgctggcgtttgtgacggaat

SEQ ID NO: 104287 - DNA, 25 bp, Saccharomyces pastorianus
gtaaatttgaccgtgtggacttcca

SEQ ID NO: 104288 - DNA, 25 bp, Saccharomyces pastorianus
aaacatccctgcagtgagtacatat

SEQ ID NO: 104289 - DNA, 25 bp, Saccharomyces pastorianus
gatcaagctggaacctagggcctat

SEQ ID NO: 104290 - DNA, 25 bp, Saccharomyces pastorianus
gggcctatggcacaaaggtcaccaa

SEQ ID NO: 104291 - DNA, 25 bp, Saccharomyces pastorianus
gttccacaggaggaatccccttgga

SEQ ID NO: 104292 - DNA, 25 bp, Saccharomyces pastorianus
atcccactacacacattgatcaagc

SEQ ID NO: 104293 - DNA, 25 bp, Saccharomyces pastorianus
gcatattttatgaacgttccacagg

SEQ ID NO: 104294 - DNA, 25 bp, Saccharomyces pastorianus
ataactcatcaagccgtacttcggt

SEQ ID NO: 104295 - DNA, 25 bp, Saccharomyces pastorianus
ggtatcacagacaacttctacagag

SEQ ID NO: 104296 - DNA, 25 bp, Saccharomyces pastorianus
agtaatgctgacgatggctctgtaa

SEQ ID NO: 104297 - DNA, 25 bp, Saccharomyces pastorianus
gaatgtctacaaaggtctctccgtg

SEQ ID NO: 104298 - DNA, 25 bp, Saccharomyces pastorianus
ccgtgtggcggattctataatggat

SEQ ID NO: 104299 - DNA, 25 bp, Saccharomyces pastorianus
tgtttatttatgctcccacctctgg

SEQ ID NO: 104300 - DNA, 25 bp, Saccharomyces pastorianus
ggtcgtagcaactgcttcaggtagt

SEQ ID NO: 104301 - DNA, 25 bp, Saccharomyces pastorianus
atcagtgatttgcacatcaccggag

SEQ ID NO: 104302 - DNA, 25 bp, Saccharomyces pastorianus
atgcctctactattttattcacggg

SEQ ID NO: 104303 - DNA, 25 bp, Saccharomyces pastorianus
agcagtgcctctatgattaccaact

SEQ ID NO: 104304 - DNA, 25 bp, Saccharomyces pastorianus
gaagtatatcccgatccaccatttt

SEQ ID NO: 104305 - DNA, 25 bp, Saccharomyces pastorianus
actgaacggatcttccacgctaata

SEQ ID NO: 104306 - DNA, 25 bp, Saccharomyces pastorianus
gttcaccagagtattctttctcatt

SEQ ID NO: 104307 - DNA, 25 bp, Saccharomyces pastorianus
tctcaaaatgcacctgttcaccaga

SEQ ID NO: 104308 - DNA, 25 bp, Saccharomyces pastorianus
tagttcctatttccctctcaaaatg

SEQ ID NO: 104309 - DNA, 25 bp, Saccharomyces pastorianus
tctacttgtttttcttagttcctat

SEQ ID NO: 104310 - DNA, 25 bp, Saccharomyces pastorianus
agctcatattcatatcatgccattt

SEQ ID NO: 104311 - DNA, 25 bp, Saccharomyces pastorianus
acagtgcttacaactcagctcatat

SEQ ID NO: 104312 - DNA, 25 bp, Saccharomyces pastorianus
tccaggacgtctatacacagtgctt

SEQ ID NO: 104313 - DNA, 25 bp, Saccharomyces pastorianus
tggagatctgatttccgtgcaaaat

SEQ ID NO: 104314 - DNA, 25 bp, Saccharomyces pastorianus
atgcaacgctttactgcactgcact

SEQ ID NO: 104315 - DNA, 25 bp, Saccharomyces pastorianus
tattaccctactttatcgtcccaca

SEQ ID NO: 104316 - DNA, 25 bp, Saccharomyces pastorianus
tttctcattgcaagtattaccctac

SEQ ID NO: 104317 - DNA, 25 bp, Saccharomyces pastorianus
tgtgttatcacgctcttatccatca

SEQ ID NO: 104318 - DNA, 25 bp, Saccharomyces pastorianus
actgacctggaacttcctcatgaat

SEQ ID NO: 104319 - DNA, 25 bp, Saccharomyces pastorianus
gaaatacctatctttgttaccatac

SEQ ID NO: 104320 - DNA, 25 bp, Saccharomyces pastorianus
ttctaaatcccagttggtgcccaaa

SEQ ID NO: 104321 - DNA, 25 bp, Saccharomyces pastorianus
gatgaaattaatgcggccatccctc

SEQ ID NO: 104322 - DNA, 25 bp, Saccharomyces pastorianus
aagatgaaccgcaaccttttggaat

SEQ ID NO: 104323 - DNA, 25 bp, Saccharomyces pastorianus
ggccatccctccaagtagtgatgac

SEQ ID NO: 104324 - DNA, 25 bp, Saccharomyces pastorianus
ctcttatccatcacttcaagtcgat

SEQ ID NO: 104325 - DNA, 25 bp, Saccharomyces pastorianus
gatgcttatccgagcgttagaacac

SEQ ID NO: 104326 - DNA, 25 bp, Saccharomyces pastorianus
gttaccatactctaaagcttgtgat

SEQ ID NO: 104327 - DNA, 25 bp, Saccharomyces pastorianus
atgacacggcagctacaatttccac

SEQ ID NO: 104328 - DNA, 25 bp, Saccharomyces pastorianus
aaaccaaatcctgcttgttcgtatt

SEQ ID NO: 104329 - DNA, 25 bp, Saccharomyces pastorianus
tcctctgcgacgtcttttgtggaga

SEQ ID NO: 104330 - DNA, 25 bp, Saccharomyces pastorianus
gtccgactacagtgatctaccgttt

SEQ ID NO: 104331 - DNA, 25 bp, Saccharomyces pastorianus
acgagcctcgttggttgtccgacta

SEQ ID NO: 104332 - DNA, 25 bp, Saccharomyces pastorianus
agatgatggtttctctttcacccaa

SEQ ID NO: 104333 - DNA, 25 bp, Saccharomyces pastorianus
attgcctgatttaacggtcctgaac

SEQ ID NO: 104334 - DNA, 25 bp, Saccharomyces pastorianus
cattacattaagcttttaggcgcaa

SEQ ID NO: 104335 - DNA, 25 bp, Saccharomyces pastorianus
tacggagtatccatcggacgtgcca

SEQ ID NO: 104336 - DNA, 25 bp, Saccharomyces pastorianus
ggacgtgccaggataaactaatctt

SEQ ID NO: 104337 - DNA, 25 bp, Saccharomyces pastorianus
aatgctggagtcaccgaagaaaccg

SEQ ID NO: 104338 - DNA, 25 bp, Saccharomyces pastorianus
gaagaaaccgtccacaccaataatg

SEQ ID NO: 104339 - DNA, 25 bp, Saccharomyces pastorianus
gctgccggtcaacatcgagaatcta

SEQ ID NO: 104340 - DNA, 25 bp, Saccharomyces pastorianus
gatactgtgctgttcccatagctag

SEQ ID NO: 104341 - DNA, 25 bp, Saccharomyces pastorianus
agttcgcaatcgaccgaaaccaagg

SEQ ID NO: 104342 - DNA, 25 bp, Saccharomyces pastorianus
tgacgaccctcaaattattatactg

SEQ ID NO: 104343 - DNA, 25 bp, Saccharomyces pastorianus
tgaaccaagaccaatcttccgctga

SEQ ID NO: 104344 - DNA, 25 bp, Saccharomyces pastorianus
ccctacatgcctggtactgcaaaat

SEQ ID NO: 104345 - DNA, 25 bp, Saccharomyces pastorianus
gagcactgaagtatctgacgagatt

SEQ ID NO: 104346 - DNA, 25 bp, Saccharomyces pastorianus
acaaaactacattgctgccggtcaa

SEQ ID NO: 104347 - DNA, 25 bp, Saccharomyces pastorianus
gaagatctcgttagcgtgaaccaag

SEQ ID NO: 104348 - DNA, 25 bp, Saccharomyces pastorianus
attgatttgctatttatcccctaca

SEQ ID NO: 104349 - DNA, 25 bp, Saccharomyces pastorianus
catagctagcgtgccagcggataga

SEQ ID NO: 104350 - DNA, 25 bp, Saccharomyces pastorianus
aacccattgagttgtgcctacaagg

SEQ ID NO: 104351 - DNA, 25 bp, Saccharomyces pastorianus
ttattagatttcaccagctccgaca

SEQ ID NO: 104352 - DNA, 25 bp, Saccharomyces pastorianus
aagttcgtggtattgaccgacggca

SEQ ID NO: 104353 - DNA, 25 bp, Saccharomyces pastorianus
gctccgacaacaactatatgaccca

SEQ ID NO: 104354 - DNA, 25 bp, Saccharomyces pastorianus
accgacggcagcaagttgggtcaat

SEQ ID NO: 104355 - DNA, 25 bp, Saccharomyces pastorianus
tgtccatccaacagaatacggcctt

SEQ ID NO: 104356 - DNA, 25 bp, Saccharomyces pastorianus
gacattcgatgcaaacggcgacgca

SEQ ID NO: 104357 - DNA, 25 bp, Saccharomyces pastorianus
atgacccaagtccacgattataaag

SEQ ID NO: 104358 - DNA, 25 bp, Saccharomyces pastorianus
tataaaggcgtctccgtgtggcgaa

SEQ ID NO: 104359 - DNA, 25 bp, Saccharomyces pastorianus
ggctgtcacttggaacttatacggc

SEQ ID NO: 104360 - DNA, 25 bp, Saccharomyces pastorianus
tacgctacagaatcgggctcatgga

SEQ ID NO: 104361 - DNA, 25 bp, Saccharomyces pastorianus
gtatactcaggagccagcgggacca

SEQ ID NO: 104362 - DNA, 25 bp, Saccharomyces pastorianus
aggcatacaggaaaacacaagcagt

SEQ ID NO: 104363 - DNA, 25 bp, Saccharomyces pastorianus
aggagtctcccatgggcgatttcgg

SEQ ID NO: 104364 - DNA, 25 bp, Saccharomyces pastorianus
gatttcgggatcaataaccagccta

SEQ ID NO: 104365 - DNA, 25 bp, Saccharomyces pastorianus
gggaccagactagagtggattcctt

SEQ ID NO: 104366 - DNA, 25 bp, Saccharomyces pastorianus
gcaacagtagtatactcaggagcca

SEQ ID NO: 104367 - DNA, 25 bp, Saccharomyces pastorianus
gaactgactaatttaggcatacagg

SEQ ID NO: 104368 - DNA, 25 bp, Saccharomyces pastorianus
aaaacggcagtcgatacggccgcgg

SEQ ID NO: 104369 - DNA, 25 bp, Saccharomyces pastorianus
acagcctggcgtgatatactacttt

SEQ ID NO: 104370 - DNA, 25 bp, Saccharomyces pastorianus
gattccttggtagaggagtctccca

SEQ ID NO: 104371 - DNA, 25 bp, Saccharomyces pastorianus
ataaccagcctacacagcctggcgt

SEQ ID NO: 104372 - DNA, 25 bp, Saccharomyces pastorianus
gagaggacccatggaatgctatcat

SEQ ID NO: 104373 - DNA, 25 bp, Saccharomyces pastorianus
gattgcgctgtgaaggccgttagaa

SEQ ID NO: 104374 - DNA, 25 bp, Saccharomyces pastorianus
ggaggcatacaaggaacagttcgat

SEQ ID NO: 104375 - DNA, 25 bp, Saccharomyces pastorianus
cactggtggcgctttagctgtaaga

SEQ ID NO: 104376 - DNA, 25 bp, Saccharomyces pastorianus
gatccatgtcctatagtcatattaa

SEQ ID NO: 104377 - DNA, 25 bp, Saccharomyces pastorianus
cattgcagggtttttcactggtggc

SEQ ID NO: 104378 - DNA, 25 bp, Saccharomyces pastorianus
atgtcagccgatcattcgagagatc

SEQ ID NO: 104379 - DNA, 25 bp, Saccharomyces pastorianus
attaaagcgcgtgctcccgtactgg

SEQ ID NO: 104380 - DNA, 25 bp, Saccharomyces pastorianus
tgctcccgtactgggtggtaatttt

SEQ ID NO: 104381 - DNA, 25 bp, Saccharomyces pastorianus
ggttcaggagctatgagcgccatta

SEQ ID NO: 104382 - DNA, 25 bp, Saccharomyces pastorianus
gaaggtgtgggactaatgtttcaaa

SEQ ID NO: 104383 - DNA, 25 bp, Saccharomyces pastorianus
gggcagttatacagcttctgaaaag

SEQ ID NO: 104384 - DNA, 25 bp, Saccharomyces pastorianus
gttggagtctatcgacgttctgtta

SEQ ID NO: 104385 - DNA, 25 bp, Saccharomyces pastorianus
agatgacgtcaacgctgatgatgat

SEQ ID NO: 104386 - DNA, 25 bp, Saccharomyces pastorianus
agctactctacaactgggccaggaa

SEQ ID NO: 104387 - DNA, 25 bp, Saccharomyces pastorianus
acatccttttgaagtggcacaacta

SEQ ID NO: 104388 - DNA, 25 bp, Saccharomyces pastorianus
ggcacaactaggttctttggcctgt

SEQ ID NO: 104389 - DNA, 25 bp, Saccharomyces pastorianus
gcctgtgacacagctgatgaagcaa

SEQ ID NO: 104390 - DNA, 25 bp, Saccharomyces pastorianus
aagcactgggttacatccttttgaa

SEQ ID NO: 104391 - DNA, 25 bp, Saccharomyces pastorianus
aatttctcccgatttagagaccaag

SEQ ID NO: 104392 - DNA, 25 bp, Saccharomyces pastorianus
tgggccaggaattccagctgaaaca

SEQ ID NO: 104393 - DNA, 25 bp, Saccharomyces pastorianus
ggaattgattgccttgaacctaagt

SEQ ID NO: 104394 - DNA, 25 bp, Saccharomyces pastorianus
gtttaagccatggtcccgtaataca

SEQ ID NO: 104395 - DNA, 25 bp, Saccharomyces pastorianus
tatgacgaccactattaccagctgt

SEQ ID NO: 104396 - DNA, 25 bp, Saccharomyces pastorianus
gatggtgctgatcaaggaatcttca

SEQ ID NO: 104397 - DNA, 25 bp, Saccharomyces pastorianus
gcacgttgacctggatataacctca

SEQ ID NO: 104398 - DNA, 25 bp, Saccharomyces pastorianus
ctacttcacacacttgcaattgggc

SEQ ID NO: 104399 - DNA, 25 bp, Saccharomyces pastorianus
tcatggaatggatacgcctcccctt

SEQ ID NO: 104400 - DNA, 25 bp, Saccharomyces pastorianus
gaacctccttgtcttcaagacctgt

SEQ ID NO: 104401 - DNA, 25 bp, Saccharomyces pastorianus
gcataaggtgtctccactcatggaa

SEQ ID NO: 104402 - DNA, 25 bp, Saccharomyces pastorianus
aactacggataccagtcttcaccag

SEQ ID NO: 104403 - DNA, 25 bp, Saccharomyces pastorianus
gagaaaccgacatctaagccgcaat

SEQ ID NO: 104404 - DNA, 25 bp, Saccharomyces pastorianus
agccgcaatctgcttttaaatttga

SEQ ID NO: 104405 - DNA, 25 bp, Saccharomyces pastorianus
aaaatgcttttggaggtggatgcgc

SEQ ID NO: 104406 - DNA, 25 bp, Saccharomyces pastorianus
atgcttttggaggtggatgcgctat

SEQ ID NO: 104407 - DNA, 25 bp, Saccharomyces pastorianus
atgacacgatgtataagtaaaaaaa

SEQ ID NO: 104408 - DNA, 25 bp, Saccharomyces pastorianus
tgacacgatgtataagtaaaaaaat

SEQ ID NO: 104409 - DNA, 25 bp, Saccharomyces pastorianus
tgcttttggaggtggatgcgctatc

SEQ ID NO: 104410 - DNA, 25 bp, Saccharomyces pastorianus
aaaaatgcttttggaggtggatgcg

SEQ ID NO: 104411 - DNA, 25 bp, Saccharomyces pastorianus
aatgcttttggaggtggatgcgcta

SEQ ID NO: 104412 - DNA, 25 bp, Saccharomyces pastorianus
aaatgcttttggaggtggatgcgct

SEQ ID NO: 104413 - DNA, 25 bp, Saccharomyces pastorianus
gcttttggaggtggatgcgctatcc

SEQ ID NO: 104414 - DNA, 25 bp, Saccharomyces pastorianus
gacacgatgtataagtaaaaaaatg

SEQ ID NO: 104415 - DNA, 25 bp, Saccharomyces pastorianus
acacgatgtataagtaaaaaaatgc

SEQ ID NO: 104416 - DNA, 25 bp, Saccharomyces pastorianus
atatcgccagatattcatttcacga

SEQ ID NO: 104417 - DNA, 25 bp, Saccharomyces pastorianus
atgtgactgaactacgcttggctgt

SEQ ID NO: 104418 - DNA, 25 bp, Saccharomyces pastorianus
gttcaaccagctattgttggaacca

SEQ ID NO: 104419 - DNA, 25 bp, Saccharomyces pastorianus
gtttacatacaaccatcacgtagag

SEQ ID NO: 104420 - DNA, 25 bp, Saccharomyces pastorianus
cttgcgctaaagttgtcgtcacatt

SEQ ID NO: 104421 - DNA, 25 bp, Saccharomyces pastorianus
ttttccctcaccttgcgctaaagtt

SEQ ID NO: 104422 - DNA, 25 bp, Saccharomyces pastorianus
gttgtcgtcacattataagggcagt

SEQ ID NO: 104423 - DNA, 25 bp, Saccharomyces pastorianus
actactgcctttatcatgtgactga

SEQ ID NO: 104424 - DNA, 25 bp, Saccharomyces pastorianus
aattcttcaaacctaccagaccagc

SEQ ID NO: 104425 - DNA, 25 bp, Saccharomyces pastorianus
gtaccaaattgaactactgccttta

SEQ ID NO: 104426 - DNA, 25 bp, Saccharomyces pastorianus
gcttggctgttttgtttttccctca

SEQ ID NO: 104427 - DNA, 25 bp, Saccharomyces pastorianus
atatggtcccttgagtgcctcacta

SEQ ID NO: 104428 - DNA, 25 bp, Saccharomyces pastorianus
cttgagtgcctcactagctaccaga

SEQ ID NO: 104429 - DNA, 25 bp, Saccharomyces pastorianus
ctcgttcaactcttttaaggaatat

SEQ ID NO: 104430 - DNA, 25 bp, Saccharomyces pastorianus
aagacatatggtcccttgagtgcct

SEQ ID NO: 104431 - DNA, 25 bp, Saccharomyces pastorianus
gagtctcaaggatagccgctagcgc

SEQ ID NO: 104432 - DNA, 25 bp, Saccharomyces pastorianus
gaaaatgccaagacatatggtccct

SEQ ID NO: 104433 - DNA, 25 bp, Saccharomyces pastorianus
gggcaactcgttcaactcttttaag

SEQ ID NO: 104434 - DNA, 25 bp, Saccharomyces pastorianus
gcctccgcgggagtctcaaggatag

SEQ ID NO: 104435 - DNA, 25 bp, Saccharomyces pastorianus
ggccagcactattttcaagagatct

SEQ ID NO: 104436 - DNA, 25 bp, Saccharomyces pastorianus
aggatagccgctagcgccatggcca

SEQ ID NO: 104437 - DNA, 25 bp, Saccharomyces pastorianus
gccatggccagcactattttcaaga

SEQ ID NO: 104438 - DNA, 25 bp, Saccharomyces pastorianus
gctggaccgctctcaaaaaggtgaa

SEQ ID NO: 104439 - DNA, 25 bp, Saccharomyces pastorianus
gatcctgttctgctaggtaacatga

SEQ ID NO: 104440 - DNA, 25 bp, Saccharomyces pastorianus
gttggactcagtattgttaatgtag

SEQ ID NO: 104441 - DNA, 25 bp, Saccharomyces pastorianus
gaaaattttgaggagctggaccgct

SEQ ID NO: 104442 - DNA, 25 bp, Saccharomyces pastorianus
aggcagaaggctcacgaaatagttt

SEQ ID NO: 104443 - DNA, 25 bp, Saccharomyces pastorianus
aaattccacttgttaagatagtcga

SEQ ID NO: 104444 - DNA, 25 bp, Saccharomyces pastorianus
aggctaccagaatcagttttccaga

SEQ ID NO: 104445 - DNA, 25 bp, Saccharomyces pastorianus
gatagtcgaaagtcgtgtagcctta

SEQ ID NO: 104446 - DNA, 25 bp, Saccharomyces pastorianus
aaaagagctgctgtcttggagacat

SEQ ID NO: 104447 - DNA, 25 bp, Saccharomyces pastorianus
atatgctaatgatcctgttctgcta

SEQ ID NO: 104448 - DNA, 25 bp, Saccharomyces pastorianus
aaaggtgaaccacccaggctaccag

SEQ ID NO: 104449 - DNA, 25 bp, Saccharomyces pastorianus
gaagacctacatacgcagctttaac

SEQ ID NO: 104450 - DNA, 25 bp, Saccharomyces pastorianus
gcagctttaacagagcatccttggt

SEQ ID NO: 104451 - DNA, 25 bp, Saccharomyces pastorianus
ccgtaaagctgtgcgatttcggtgt

SEQ ID NO: 104452 - DNA, 25 bp, Saccharomyces pastorianus
agcgctattgttgatgggccgccac

SEQ ID NO: 104453 - DNA, 25 bp, Saccharomyces pastorianus
aattcagttctgacgcacaagattt

SEQ ID NO: 104454 - DNA, 25 bp, Saccharomyces pastorianus
cctcagctagcgtttattgccaatg

SEQ ID NO: 104455 - DNA, 25 bp, Saccharomyces pastorianus
gatatccgtatccaccagaaacata

SEQ ID NO: 104456 - DNA, 25 bp, Saccharomyces pastorianus
gatagagccacctataccgtacagt

SEQ ID NO: 104457 - DNA, 25 bp, Saccharomyces pastorianus
tgttcagccaaccaaggcaccgtaa

SEQ ID NO: 104458 - DNA, 25 bp, Saccharomyces pastorianus
gccaccgagattaccttcagataaa

SEQ ID NO: 104459 - DNA, 25 bp, Saccharomyces pastorianus
agtcatacatggcacctgaacgaat

SEQ ID NO: 104460 - DNA, 25 bp, Saccharomyces pastorianus
acaatagcagctacccttgtcttct

SEQ ID NO: 104461 - DNA, 25 bp, Saccharomyces pastorianus
gtagttctgtgaaacgtgtacccac

SEQ ID NO: 104462 - DNA, 25 bp, Saccharomyces pastorianus
agtagttctgtgaaacgtgtaccca

SEQ ID NO: 104463 - DNA, 25 bp, Saccharomyces pastorianus
tacccacaatagcagctacccttgt

SEQ ID NO: 104464 - DNA, 25 bp, Saccharomyces pastorianus
acgttgatgtctggagaaggacaag

SEQ ID NO: 104465 - DNA, 25 bp, Saccharomyces pastorianus
agcagctacccttgtcttctttttt

SEQ ID NO: 104466 - DNA, 25 bp, Saccharomyces pastorianus
gtgtacccacaatagcagctaccct

SEQ ID NO: 104467 - DNA, 25 bp, Saccharomyces pastorianus
atagcagctacccttgtcttctttt

SEQ ID NO: 104468 - DNA, 25 bp, Saccharomyces pastorianus
aacgtgtacccacaatagcagctac

SEQ ID NO: 104469 - DNA, 25 bp, Saccharomyces pastorianus
gaaacgtgtacccacaatagcagct

SEQ ID NO: 104470 - DNA, 25 bp, Saccharomyces pastorianus
gttctgtgaaacgtgtacccacaat

SEQ ID NO: 104471 - DNA, 25 bp, Saccharomyces pastorianus
aatatttacagctttgcatacgcca

SEQ ID NO: 104472 - DNA, 25 bp, Saccharomyces pastorianus
tttccaattcttaggctatttgggt

SEQ ID NO: 104473 - DNA, 25 bp, Saccharomyces pastorianus
accagatccgttcaatatttacagc

SEQ ID NO: 104474 - DNA, 25 bp, Saccharomyces pastorianus
tttgcatacgccaactcaacagatc

SEQ ID NO: 104475 - DNA, 25 bp, Saccharomyces pastorianus
gatccgttcaatatttacagctttg

SEQ ID NO: 104476 - DNA, 25 bp, Saccharomyces pastorianus
acgccaactcaacagatccaattat

SEQ ID NO: 104477 - DNA, 25 bp, Saccharomyces pastorianus
tttttcaaccagatccgttcaatat

SEQ ID NO: 104478 - DNA, 25 bp, Saccharomyces pastorianus
atacgccaactcaacagatccaatt

SEQ ID NO: 104479 - DNA, 25 bp, Saccharomyces pastorianus
tttcaaccagatccgttcaatattt

SEQ ID NO: 104480 - DNA, 25 bp, Saccharomyces pastorianus
ctatttgggtagttgtgttgtgatt

SEQ ID NO: 104481 - DNA, 25 bp, Saccharomyces pastorianus
gatccaattatcaagaagggccttt

SEQ ID NO: 104482 - DNA, 25 bp, Saccharomyces pastorianus
aagatccgagtttctttcctcaata

SEQ ID NO: 104483 - DNA, 25 bp, Saccharomyces pastorianus
gaatagtcccgcaacaacagctgaa

SEQ ID NO: 104484 - DNA, 25 bp, Saccharomyces pastorianus
ggccgctctagaaatggtccaaaag

SEQ ID NO: 104485 - DNA, 25 bp, Saccharomyces pastorianus
gatgtgactggccaacaaatcgatt

SEQ ID NO: 104486 - DNA, 25 bp, Saccharomyces pastorianus
gaagataacgtcatggccgctctag

SEQ ID NO: 104487 - DNA, 25 bp, Saccharomyces pastorianus
agagcacgccactattggacgacga

SEQ ID NO: 104488 - DNA, 25 bp, Saccharomyces pastorianus
taatatcgtacaacccacattccag

SEQ ID NO: 104489 - DNA, 25 bp, Saccharomyces pastorianus
ggatgttgcctccaacggaattgta

SEQ ID NO: 104490 - DNA, 25 bp, Saccharomyces pastorianus
gatgtggagggtgaacccactccgc

SEQ ID NO: 104491 - DNA, 25 bp, Saccharomyces pastorianus
aaccattcagttcccgatttagata

SEQ ID NO: 104492 - DNA, 25 bp, Saccharomyces pastorianus
gaaccccgtcaaccgtgatgaacga

SEQ ID NO: 104493 - DNA, 25 bp, Saccharomyces pastorianus
atcttatgttttcccagtgcgttca

SEQ ID NO: 104494 - DNA, 25 bp, Saccharomyces pastorianus
ttggaccacaactaattctcgctga

SEQ ID NO: 104495 - DNA, 25 bp, Saccharomyces pastorianus
aaataatagcgcatgccgatccctc

SEQ ID NO: 104496 - DNA, 25 bp, Saccharomyces pastorianus
gaatgcacgatctcagtgatccaga

SEQ ID NO: 104497 - DNA, 25 bp, Saccharomyces pastorianus
atgctatgtgctcatgccagggcag

SEQ ID NO: 104498 - DNA, 25 bp, Saccharomyces pastorianus
tttgttatgatattcgctttcccga

SEQ ID NO: 104499 - DNA, 25 bp, Saccharomyces pastorianus
tgacgtagacgtgccaaatggaccg

SEQ ID NO: 104500 - DNA, 25 bp, Saccharomyces pastorianus
aacaatcacatatgagcgctctcga

SEQ ID NO: 104501 - DNA, 25 bp, Saccharomyces pastorianus
gaatcaaaatctgtccagcctggca

SEQ ID NO: 104502 - DNA, 25 bp, Saccharomyces pastorianus
ctggcaaagccattcctgacattat

SEQ ID NO: 104503 - DNA, 25 bp, Saccharomyces pastorianus
aattctcgctgatttggatcgtaag

SEQ ID NO: 104504 - DNA, 25 bp, Saccharomyces pastorianus
gtagtgtttttagatctgccggctc

SEQ ID NO: 104505 - DNA, 25 bp, Saccharomyces pastorianus
cttttggcaagggttctcgaatcaa

SEQ ID NO: 104506 - DNA, 25 bp, Saccharomyces pastorianus
aaggtcggattgtgttgcttctccc

SEQ ID NO: 104507 - DNA, 25 bp, Saccharomyces pastorianus
agaggcacaaactccagggtgtaga

SEQ ID NO: 104508 - DNA, 25 bp, Saccharomyces pastorianus
atctcatacctcatatttgactttg

SEQ ID NO: 104509 - DNA, 25 bp, Saccharomyces pastorianus
gacactacatcttacgaatttggca

SEQ ID NO: 104510 - DNA, 25 bp, Saccharomyces pastorianus
gctatacctcatctggattctgtta

SEQ ID NO: 104511 - DNA, 25 bp, Saccharomyces pastorianus
gattctgttattgccgtagacgaaa

SEQ ID NO: 104512 - DNA, 25 bp, Saccharomyces pastorianus
gtcagatcactcaatgatgccctgg

SEQ ID NO: 104513 - DNA, 25 bp, Saccharomyces pastorianus
cttctccccatgcattgagcaagta

SEQ ID NO: 104514 - DNA, 25 bp, Saccharomyces pastorianus
gaaaccgccgcttcattgaatgcaa

SEQ ID NO: 104515 - DNA, 25 bp, Saccharomyces pastorianus
gctcagtagaccgtaaaatcttcgt

SEQ ID NO: 104516 - DNA, 25 bp, Saccharomyces pastorianus
tgaggccatggaacgcataccattt

SEQ ID NO: 104517 - DNA, 25 bp, Saccharomyces pastorianus
gaggccgatttatatctcgaccagt

SEQ ID NO: 104518 - DNA, 25 bp, Saccharomyces pastorianus
taccaccgctgctattgtaagctca

SEQ ID NO: 104519 - DNA, 25 bp, Saccharomyces pastorianus
ggaagaatgctattcggtgtactaa

SEQ ID NO: 104520 - DNA, 25 bp, Saccharomyces pastorianus
gaaatcagtccaatcaggatgcgaa

SEQ ID NO: 104521 - DNA, 25 bp, Saccharomyces pastorianus
catttaaggaggcttggctgaccaa

SEQ ID NO: 104522 - DNA, 25 bp, Saccharomyces pastorianus
aaatcttcgttcttttgcgtgatgg

SEQ ID NO: 104523 - DNA, 25 bp, Saccharomyces pastorianus
ggtgtactaagaacctttgaccaat

SEQ ID NO: 104524 - DNA, 25 bp, Saccharomyces pastorianus
gacaacagcagaatttcccaaagaa

SEQ ID NO: 104525 - DNA, 25 bp, Saccharomyces pastorianus
tcgaccagtataacttcactaccac

SEQ ID NO: 104526 - DNA, 25 bp, Saccharomyces pastorianus
ccgactccaatacgccaggcaattt

SEQ ID NO: 104527 - DNA, 25 bp, Saccharomyces pastorianus
ggaaaatgcagtcaaactcttcaat

SEQ ID NO: 104528 - DNA, 25 bp, Saccharomyces pastorianus
actcttcaatactgcacatgaggaa

SEQ ID NO: 104529 - DNA, 25 bp, Saccharomyces pastorianus
atcttaccaattgccattccgcaaa

SEQ ID NO: 104530 - DNA, 25 bp, Saccharomyces pastorianus
aaaagccttcagttgcagacggtga

SEQ ID NO: 104531 - DNA, 25 bp, Saccharomyces pastorianus
gacggtgagaaactggcatttgcaa

SEQ ID NO: 104532 - DNA, 25 bp, Saccharomyces pastorianus
agaggctgatgccactccagatgac

SEQ ID NO: 104533 - DNA, 25 bp, Saccharomyces pastorianus
aaggattccctgtcaaatgggtcaa

SEQ ID NO: 104534 - DNA, 25 bp, Saccharomyces pastorianus
tacagtttaatctattcgacggcaa

SEQ ID NO: 104535 - DNA, 25 bp, Saccharomyces pastorianus
agatgccgacggtgactttcaagtg

SEQ ID NO: 104536 - DNA, 25 bp, Saccharomyces pastorianus
gtgactttcaagtgaccgactccaa

SEQ ID NO: 104537 - DNA, 25 bp, Saccharomyces pastorianus
caacgttattgtcgctggtaccagt

SEQ ID NO: 104538 - DNA, 25 bp, Saccharomyces pastorianus
aaagccggtgccaacgttattgtcg

SEQ ID NO: 104539 - DNA, 25 bp, Saccharomyces pastorianus
agagccaagtttccccatttgaata

SEQ ID NO: 104540 - DNA, 25 bp, Saccharomyces pastorianus
gctcctcatttggatatggctcttg

SEQ ID NO: 104541 - DNA, 25 bp, Saccharomyces pastorianus
gtggtgctgaccaatttacgttcca

SEQ ID NO: 104542 - DNA, 25 bp, Saccharomyces pastorianus
ccacacaagaccctttgcatttagt

SEQ ID NO: 104543 - DNA, 25 bp, Saccharomyces pastorianus
ggacggccattttgttccaaacatt

SEQ ID NO: 104544 - DNA, 25 bp, Saccharomyces pastorianus
caaacctggtacttctgttgacgtt

SEQ ID NO: 104545 - DNA, 25 bp, Saccharomyces pastorianus
agggcatcaaagctgcatgcgccat

SEQ ID NO: 104546 - DNA, 25 bp, Saccharomyces pastorianus
gaaaagaagcccactgcgttcttcg

SEQ ID NO: 104547 - DNA, 25 bp, Saccharomyces pastorianus
atggctcttgttatgactgtggaac

SEQ ID NO: 104548 - DNA, 25 bp, Saccharomyces pastorianus
ttggaattagcaaatggccttcttg

SEQ ID NO: 104549 - DNA, 25 bp, Saccharomyces pastorianus
ctcgacttggatagctgttcttgtt

SEQ ID NO: 104550 - DNA, 25 bp, Saccharomyces pastorianus
agaagttccagcttacggatcaaga

SEQ ID NO: 104551 - DNA, 25 bp, Saccharomyces pastorianus
attctttctattctggctttcctat

SEQ ID NO: 104552 - DNA, 25 bp, Saccharomyces pastorianus
ggccttcttgcatgaaattgtatcg

SEQ ID NO: 104553 - DNA, 25 bp, Saccharomyces pastorianus
ggtttgaccattttttcttgtgtgt

SEQ ID NO: 104554 - DNA, 25 bp, Saccharomyces pastorianus
aaatctgattactttcccagctcga

SEQ ID NO: 104555 - DNA, 25 bp, Saccharomyces pastorianus
acccaagttggcgaagtcagaagca

SEQ ID NO: 104556 - DNA, 25 bp, Saccharomyces pastorianus
ggctttcctataacagagatcatga

SEQ ID NO: 104557 - DNA, 25 bp, Saccharomyces pastorianus
tttacgggcggattctttctattct

SEQ ID NO: 104558 - DNA, 25 bp, Saccharomyces pastorianus
gtgtttacctcgctcttggaattag

SEQ ID NO: 104559 - DNA, 25 bp, Saccharomyces pastorianus
gtctattcattcgatagcacgctta

SEQ ID NO: 104560 - DNA, 25 bp, Saccharomyces pastorianus
ggatccagtggtgaacaatacgcat

SEQ ID NO: 104561 - DNA, 25 bp, Saccharomyces pastorianus
ttctctcacgtgtatctgattcgta

SEQ ID NO: 104562 - DNA, 25 bp, Saccharomyces pastorianus
gcattgatttcgttagcccctaaca

SEQ ID NO: 104563 - DNA, 25 bp, Saccharomyces pastorianus
tcgtcctcagcggtttagtgttcac

SEQ ID NO: 104564 - DNA, 25 bp, Saccharomyces pastorianus
ataagaaggtcgtcctcagcggttt

SEQ ID NO: 104565 - DNA, 25 bp, Saccharomyces pastorianus
gattgattgggctatgctacactcc

SEQ ID NO: 104566 - DNA, 25 bp, Saccharomyces pastorianus
tactactgtgggttgtcgtcgtgta

SEQ ID NO: 104567 - DNA, 25 bp, Saccharomyces pastorianus
ggagaccatgaaactcttgattgat

SEQ ID NO: 104568 - DNA, 25 bp, Saccharomyces pastorianus
ggttctaccagctggctcgtattaa

SEQ ID NO: 104569 - DNA, 25 bp, Saccharomyces pastorianus
gttagcccctaacatgacattaagt

SEQ ID NO: 104570 - DNA, 25 bp, Saccharomyces pastorianus
gtacttctggttcggatgtcggcaa

SEQ ID NO: 104571 - DNA, 25 bp, Saccharomyces pastorianus
gataccagcgatttatgttctacgg

SEQ ID NO: 104572 - DNA, 25 bp, Saccharomyces pastorianus
cggcaactgggctccattagtgtta

SEQ ID NO: 104573 - DNA, 25 bp, Saccharomyces pastorianus
aatctgttggtggtctttactgtaa

SEQ ID NO: 104574 - DNA, 25 bp, Saccharomyces pastorianus
ttccgatggttgcacagtttctgtt

SEQ ID NO: 104575 - DNA, 25 bp, Saccharomyces pastorianus
taacaacgccggtgtatctgcagaa

SEQ ID NO: 104576 - DNA, 25 bp, Saccharomyces pastorianus
tgaagatggctctttcaccggagat

SEQ ID NO: 104577 - DNA, 25 bp, Saccharomyces pastorianus
atccgatggcgctaacgttcagggc

SEQ ID NO: 104578 - DNA, 25 bp, Saccharomyces pastorianus
agtgttaggtgctggttccactaat

SEQ ID NO: 104579 - DNA, 25 bp, Saccharomyces pastorianus
aaaagtctgactccattgctctatg

SEQ ID NO: 104580 - DNA, 25 bp, Saccharomyces pastorianus
aaacatggtgattcccacagtggtt

SEQ ID NO: 104581 - DNA, 25 bp, Saccharomyces pastorianus
agtttcatgcgtacagtgcgccagt

SEQ ID NO: 104582 - DNA, 25 bp, Saccharomyces pastorianus
cttgcaaaccattgatctgagcttt

SEQ ID NO: 104583 - DNA, 25 bp, Saccharomyces pastorianus
gatcctagtttcttggtgagtggtt

SEQ ID NO: 104584 - DNA, 25 bp, Saccharomyces pastorianus
tgaaagctggtcttgtgtcgaacaa

SEQ ID NO: 104585 - DNA, 25 bp, Saccharomyces pastorianus
tacgttccgggaagtgcttgcaaac

SEQ ID NO: 104586 - DNA, 25 bp, Saccharomyces pastorianus
agaacgctgcagtcgttgtcgcaga

SEQ ID NO: 104587 - DNA, 25 bp, Saccharomyces pastorianus
gcctggtcacaggttcatacgacag

SEQ ID NO: 104588 - DNA, 25 bp, Saccharomyces pastorianus
gatgcagcgctagcaacgggtacaa

SEQ ID NO: 104589 - DNA, 25 bp, Saccharomyces pastorianus
gttctttcgttagatctcttccaag

SEQ ID NO: 104590 - DNA, 25 bp, Saccharomyces pastorianus
ttaggcaatgggacttacgttccgg

SEQ ID NO: 104591 - DNA, 25 bp, Saccharomyces pastorianus
ttaaaatttgattccgcgtgcctgg

SEQ ID NO: 104592 - DNA, 25 bp, Saccharomyces pastorianus
aaccagagcatttgggtacttgtgc

SEQ ID NO: 104593 - DNA, 25 bp, Saccharomyces pastorianus
aaatgctgggtttgatgctatagaa

SEQ ID NO: 104594 - DNA, 25 bp, Saccharomyces pastorianus
aatgcaaatcgggtcagaacgctac

SEQ ID NO: 104595 - DNA, 25 bp, Saccharomyces pastorianus
gttgagagatcattgcacgatgcaa

SEQ ID NO: 104596 - DNA, 25 bp, Saccharomyces pastorianus
gccaaattcgtatgggaacctgctt

SEQ ID NO: 104597 - DNA, 25 bp, Saccharomyces pastorianus
ggtacttgtgctttgtttgaggaaa

SEQ ID NO: 104598 - DNA, 25 bp, Saccharomyces pastorianus
atgataatcaatgccttcgctaagg

SEQ ID NO: 104599 - DNA, 25 bp, Saccharomyces pastorianus
agaacgctacaatttattccaaggt

SEQ ID NO: 104600 - DNA, 25 bp, Saccharomyces pastorianus
ttttatctgttgacgagacgatcat

SEQ ID NO: 104601 - DNA, 25 bp, Saccharomyces pastorianus
tcaatgctttgaacagtgccacaga

SEQ ID NO: 104602 - DNA, 25 bp, Saccharomyces pastorianus
tattccaaggcaactctgtgaaaat

SEQ ID NO: 104603 - DNA, 25 bp, Saccharomyces pastorianus
taatatctgctaatcgtaacgaccc

SEQ ID NO: 104604 - DNA, 25 bp, Saccharomyces pastorianus
taatccatccgaggtaccgaatcaa

SEQ ID NO: 104605 - DNA, 25 bp, Saccharomyces pastorianus
ttagatcgacgatgtcttccccaga

SEQ ID NO: 104606 - DNA, 25 bp, Saccharomyces pastorianus
ggcttctattaacgacatgcttgag

SEQ ID NO: 104607 - DNA, 25 bp, Saccharomyces pastorianus
ataccgtttctacaatcttctaaag

SEQ ID NO: 104608 - DNA, 25 bp, Saccharomyces pastorianus
aataatggtattgcctctaccgccg

SEQ ID NO: 104609 - DNA, 25 bp, Saccharomyces pastorianus
ttctagttctgatgtttctggacga

SEQ ID NO: 104610 - DNA, 25 bp, Saccharomyces pastorianus
ctttatctttccacatggcttctat

SEQ ID NO: 104611 - DNA, 25 bp, Saccharomyces pastorianus
tcttctaaagctccctgtatatcca

SEQ ID NO: 104612 - DNA, 25 bp, Saccharomyces pastorianus
ttcttcacggacgactgactctaat

SEQ ID NO: 104613 - DNA, 25 bp, Saccharomyces pastorianus
gggaaatgtcgagctcttgaggaac

SEQ ID NO: 104614 - DNA, 25 bp, Saccharomyces pastorianus
ggtataattacttcctatttcacgt

SEQ ID NO: 104615 - DNA, 25 bp, Saccharomyces pastorianus
cgagttaatttctgtatccttggtc

SEQ ID NO: 104616 - DNA, 25 bp, Saccharomyces pastorianus
actctctaacctcttcgctaaagtt

SEQ ID NO: 104617 - DNA, 25 bp, Saccharomyces pastorianus
gttagttctattgccacagctcgtt

SEQ ID NO: 104618 - DNA, 25 bp, Saccharomyces pastorianus
aacagtggcgttgatgagcataacc

SEQ ID NO: 104619 - DNA, 25 bp, Saccharomyces pastorianus
gacgtttggtaatcaactctctaac

SEQ ID NO: 104620 - DNA, 25 bp, Saccharomyces pastorianus
tggcgctctggcttctaacaacagt

SEQ ID NO: 104621 - DNA, 25 bp, Saccharomyces pastorianus
ttcccgtcatcgctgagttattgga

SEQ ID NO: 104622 - DNA, 25 bp, Saccharomyces pastorianus
gtatccttggtcaatcaactatcta

SEQ ID NO: 104623 - DNA, 25 bp, Saccharomyces pastorianus
aaagcttcctgttcctccaatgaaa

SEQ ID NO: 104624 - DNA, 25 bp, Saccharomyces pastorianus
acctggtcaaggcaattggcgctct

SEQ ID NO: 104625 - DNA, 25 bp, Saccharomyces pastorianus
tggaaaagcattcgccgaggcgtat

SEQ ID NO: 104626 - DNA, 25 bp, Saccharomyces pastorianus
ggtggaagcttctacttacagagca

SEQ ID NO: 104627 - DNA, 25 bp, Saccharomyces pastorianus
acaatcagtgaaacaaggtgctaca

SEQ ID NO: 104628 - DNA, 25 bp, Saccharomyces pastorianus
cgaggcgtatagacaagcggcttca

SEQ ID NO: 104629 - DNA, 25 bp, Saccharomyces pastorianus
gaaacctcctccgaattcaacaaat

SEQ ID NO: 104630 - DNA, 25 bp, Saccharomyces pastorianus
aaggtgctacaaatgcatctagaag

SEQ ID NO: 104631 - DNA, 25 bp, Saccharomyces pastorianus
caagggcgatttaaacatggacaag

SEQ ID NO: 104632 - DNA, 25 bp, Saccharomyces pastorianus
aacaggtttaactatctatttgagg

SEQ ID NO: 104633 - DNA, 25 bp, Saccharomyces pastorianus
cgaatatggtggtattacgttggat

SEQ ID NO: 104634 - DNA, 25 bp, Saccharomyces pastorianus
gctcacagggctttcatacaggtta

SEQ ID NO: 104635 - DNA, 25 bp, Saccharomyces pastorianus
ggacgcttcaacagcgaaacctcct

SEQ ID NO: 104636 - DNA, 25 bp, Saccharomyces pastorianus
aatttactattagaccgcacctcct

SEQ ID NO: 104637 - DNA, 25 bp, Saccharomyces pastorianus
gcatgttcttctacctcgtcaaaaa

SEQ ID NO: 104638 - DNA, 25 bp, Saccharomyces pastorianus
gacgaacacagtacccaaaagcata

SEQ ID NO: 104639 - DNA, 25 bp, Saccharomyces pastorianus
gtaagctgcacaccgatgtgcatct

SEQ ID NO: 104640 - DNA, 25 bp, Saccharomyces pastorianus
atatttaacgaattgctggcatttg

SEQ ID NO: 104641 - DNA, 25 bp, Saccharomyces pastorianus
caggcgagatttgttttgtcagtaa

SEQ ID NO: 104642 - DNA, 25 bp, Saccharomyces pastorianus
atctggatcataaaagcgtttcgaa

SEQ ID NO: 104643 - DNA, 25 bp, Saccharomyces pastorianus
gactcgtttaatatcccaattctcg

SEQ ID NO: 104644 - DNA, 25 bp, Saccharomyces pastorianus
gaccgcacctcctttatttttgaat

SEQ ID NO: 104645 - DNA, 25 bp, Saccharomyces pastorianus
gaagttaccttgcaaagggctttat

SEQ ID NO: 104646 - DNA, 25 bp, Saccharomyces pastorianus
ttatttgaagtgtgcctgttgttgg

SEQ ID NO: 104647 - DNA, 25 bp, Saccharomyces pastorianus
aaatacaaccttctggaacccatca

SEQ ID NO: 104648 - DNA, 25 bp, Saccharomyces pastorianus
tgatctaacaatccctcaatctgat

SEQ ID NO: 104649 - DNA, 25 bp, Saccharomyces pastorianus
gcaagttgcattgtgggacttcaaa

SEQ ID NO: 104650 - DNA, 25 bp, Saccharomyces pastorianus
agctaactttcccttatatgcatgc

SEQ ID NO: 104651 - DNA, 25 bp, Saccharomyces pastorianus
aatagcgattggtcagtcccacctg

SEQ ID NO: 104652 - DNA, 25 bp, Saccharomyces pastorianus
aagcgtgtcaaattctggcgcatcc

SEQ ID NO: 104653 - DNA, 25 bp, Saccharomyces pastorianus
tgatgctgttacaaccctacacgca

SEQ ID NO: 104654 - DNA, 25 bp, Saccharomyces pastorianus
gatatatattccctctgatgctgtt

SEQ ID NO: 104655 - DNA, 25 bp, Saccharomyces pastorianus
ggaacccatcatgaatcttgatcta

SEQ ID NO: 104656 - DNA, 25 bp, Saccharomyces pastorianus
tggcgcatccacttgtaattctcca

SEQ ID NO: 104657 - DNA, 25 bp, Saccharomyces pastorianus
gaaattaccacctacaccaataagc

SEQ ID NO: 104658 - DNA, 25 bp, Saccharomyces pastorianus
gaattcacctatgtttcaacaccag

SEQ ID NO: 104659 - DNA, 25 bp, Saccharomyces pastorianus
agcgaagttttacggatgcatgcaa

SEQ ID NO: 104660 - DNA, 25 bp, Saccharomyces pastorianus
attccgccgcatatgcattgtgtag

SEQ ID NO: 104661 - DNA, 25 bp, Saccharomyces pastorianus
atagccccaccgatgaatttggagg

SEQ ID NO: 104662 - DNA, 25 bp, Saccharomyces pastorianus
taaacttcaatcctggttctgacgc

SEQ ID NO: 104663 - DNA, 25 bp, Saccharomyces pastorianus
taattctatacccaagcgtgcttct

SEQ ID NO: 104664 - DNA, 25 bp, Saccharomyces pastorianus
tttggattatgctgattccgccgca

SEQ ID NO: 104665 - DNA, 25 bp, Saccharomyces pastorianus
gcgcggaaggccatgactacgacat

SEQ ID NO: 104666 - DNA, 25 bp, Saccharomyces pastorianus
ggcaaacgtgaccaagagcagcttt

SEQ ID NO: 104667 - DNA, 25 bp, Saccharomyces pastorianus
ggttctgacgccacggaacaagttc

SEQ ID NO: 104668 - DNA, 25 bp, Saccharomyces pastorianus
ggagtcatcaccttctaattctata

SEQ ID NO: 104669 - DNA, 25 bp, Saccharomyces pastorianus
agttggacagccagcattcttctac

SEQ ID NO: 104670 - DNA, 25 bp, Saccharomyces pastorianus
tatttgctttacttggtcatctcct

SEQ ID NO: 104671 - DNA, 25 bp, Saccharomyces pastorianus
taatagcggccatgctcgcttatat

SEQ ID NO: 104672 - DNA, 25 bp, Saccharomyces pastorianus
ttaggagttgtacgttccccattgc

SEQ ID NO: 104673 - DNA, 25 bp, Saccharomyces pastorianus
gtgttgccagcgaactacgcattat

SEQ ID NO: 104674 - DNA, 25 bp, Saccharomyces pastorianus
cattgctgaccactgttgcacaagt

SEQ ID NO: 104675 - DNA, 25 bp, Saccharomyces pastorianus
gtcatctccttgtacccaaaagttg

SEQ ID NO: 104676 - DNA, 25 bp, Saccharomyces pastorianus
aatgctcttcctacacatggtagca

SEQ ID NO: 104677 - DNA, 25 bp, Saccharomyces pastorianus
tacccctttataatttgctttctgc

SEQ ID NO: 104678 - DNA, 25 bp, Saccharomyces pastorianus
ttgttctggattttgtaccccactg

SEQ ID NO: 104679 - DNA, 25 bp, Saccharomyces pastorianus
aaaaatgtcgctacccttgttcaat

SEQ ID NO: 104680 - DNA, 25 bp, Saccharomyces pastorianus
attgaggagtacacacgcggacccg

SEQ ID NO: 104681 - DNA, 25 bp, Saccharomyces pastorianus
gtttcttctgctgaatatgcactac

SEQ ID NO: 104682 - DNA, 25 bp, Saccharomyces pastorianus
tttggatatcacctgatacgcccct

SEQ ID NO: 104683 - DNA, 25 bp, Saccharomyces pastorianus
tacacacttagtttttccgactggt

SEQ ID NO: 104684 - DNA, 25 bp, Saccharomyces pastorianus
aatgattctggagtgacatcccctc

SEQ ID NO: 104685 - DNA, 25 bp, Saccharomyces pastorianus
cacgcggacccgaattttggatatc

SEQ ID NO: 104686 - DNA, 25 bp, Saccharomyces pastorianus
gaacctcattttgcttttatgatgc

SEQ ID NO: 104687 - DNA, 25 bp, Saccharomyces pastorianus
aatacaacgagctcacaatccagtc

SEQ ID NO: 104688 - DNA, 25 bp, Saccharomyces pastorianus
caaaagcatctagcccagagggaat

SEQ ID NO: 104689 - DNA, 25 bp, Saccharomyces pastorianus
tccgactggtcgtacattcataaac

SEQ ID NO: 104690 - DNA, 25 bp, Saccharomyces pastorianus
actacatcggatatgtctggcggat

SEQ ID NO: 104691 - DNA, 25 bp, Saccharomyces pastorianus
ccggtagttactccagcatttattt

SEQ ID NO: 104692 - DNA, 25 bp, Saccharomyces pastorianus
ggatcaagttggagtcactgccaaa

SEQ ID NO: 104693 - DNA, 25 bp, Saccharomyces pastorianus
aaaagcgtagtgtctcatcgagtat

SEQ ID NO: 104694 - DNA, 25 bp, Saccharomyces pastorianus
gtattatctgcccaagaggacacaa

SEQ ID NO: 104695 - DNA, 25 bp, Saccharomyces pastorianus
actcaagttacctatggctccattc

SEQ ID NO: 104696 - DNA, 25 bp, Saccharomyces pastorianus
aattcctcattatcggagcactcta

SEQ ID NO: 104697 - DNA, 25 bp, Saccharomyces pastorianus
gcagccgactgcaatttctaatcca

SEQ ID NO: 104698 - DNA, 25 bp, Saccharomyces pastorianus
gataagaaacgtactgcctctttag

SEQ ID NO: 104699 - DNA, 25 bp, Saccharomyces pastorianus
gtatcatggatgtttcttcagagag

SEQ ID NO: 104700 - DNA, 25 bp, Saccharomyces pastorianus
attattgtccgctgcatctggagaa

SEQ ID NO: 104701 - DNA, 25 bp, Saccharomyces pastorianus
aaatgtgcctacagagcagccgact

SEQ ID NO: 104702 - DNA, 25 bp, Saccharomyces pastorianus
aattacttccttttgagacaatcca

SEQ ID NO: 104703 - DNA, 25 bp, Saccharomyces pastorianus
gatgcgtcaccatacgattttaata

SEQ ID NO: 104704 - DNA, 25 bp, Saccharomyces pastorianus
aaatttaaaccctgattcgccatca

SEQ ID NO: 104705 - DNA, 25 bp, Saccharomyces pastorianus
ggtcaatacccagctgaaccttttg

SEQ ID NO: 104706 - DNA, 25 bp, Saccharomyces pastorianus
aactccaatttcctagatgcgtcac

SEQ ID NO: 104707 - DNA, 25 bp, Saccharomyces pastorianus
cgccatcagttacgtcttctaagaa

SEQ ID NO: 104708 - DNA, 25 bp, Saccharomyces pastorianus
gtcgaatttcgcgtctaaggtcaat

SEQ ID NO: 104709 - DNA, 25 bp, Saccharomyces pastorianus
atcgttagcaaccatgactccagta

SEQ ID NO: 104710 - DNA, 25 bp, Saccharomyces pastorianus
gatgccgtatcgagctttaattcaa

SEQ ID NO: 104711 - DNA, 25 bp, Saccharomyces pastorianus
gcaattcggtagatttcaacacaga

SEQ ID NO: 104712 - DNA, 25 bp, Saccharomyces pastorianus
gctgaaccttttgcaacactcgagt

SEQ ID NO: 104713 - DNA, 25 bp, Saccharomyces pastorianus
gaactggtcaagaggtgtattgcta

SEQ ID NO: 104714 - DNA, 25 bp, Saccharomyces pastorianus
tattgctagcgatgcagagctgact

SEQ ID NO: 104715 - DNA, 25 bp, Saccharomyces pastorianus
aagtgctgaaattggacaactcgaa

SEQ ID NO: 104716 - DNA, 25 bp, Saccharomyces pastorianus
gaaaatgcacaaggctctggtaata

SEQ ID NO: 104717 - DNA, 25 bp, Saccharomyces pastorianus
aaattcctcatattacgctgtgcaa

SEQ ID NO: 104718 - DNA, 25 bp, Saccharomyces pastorianus
taaacctacatatatctcagctaaa

SEQ ID NO: 104719 - DNA, 25 bp, Saccharomyces pastorianus
tacactgaccagataacggagtaca

SEQ ID NO: 104720 - DNA, 25 bp, Saccharomyces pastorianus
ggagtacaataacaaccgcatagaa

SEQ ID NO: 104721 - DNA, 25 bp, Saccharomyces pastorianus
aaggctgtttattccaatgttctat

SEQ ID NO: 104722 - DNA, 25 bp, Saccharomyces pastorianus
tcatgtcatgtcgtcccgtgaaaaa

SEQ ID NO: 104723 - DNA, 25 bp, Saccharomyces pastorianus
gacaaactgaattttaggctcgaaa

SEQ ID NO: 104724 - DNA, 25 bp, Saccharomyces pastorianus
ggccgcgtacttttccattgataaa

SEQ ID NO: 104725 - DNA, 25 bp, Saccharomyces pastorianus
ttctgttgagaattgcttcgagcaa

SEQ ID NO: 104726 - DNA, 25 bp, Saccharomyces pastorianus
gagcatctaattcattccattctgt

SEQ ID NO: 104727 - DNA, 25 bp, Saccharomyces pastorianus
atgtcaatttcagcgggcatttcta

SEQ ID NO: 104728 - DNA, 25 bp, Saccharomyces pastorianus
aattatctttatgttccagcgggcc

SEQ ID NO: 104729 - DNA, 25 bp, Saccharomyces pastorianus
taatggacctttgctattcactgcc

SEQ ID NO: 104730 - DNA, 25 bp, Saccharomyces pastorianus
gctattcactgccagcactttaagg

SEQ ID NO: 104731 - DNA, 25 bp, Saccharomyces pastorianus
gcactttaagggtacattcaccttg

SEQ ID NO: 104732 - DNA, 25 bp, Saccharomyces pastorianus
atttgcatagtctttctttctttga

SEQ ID NO: 104733 - DNA, 25 bp, Saccharomyces pastorianus
aatacgtttaagcacactgtttcag

SEQ ID NO: 104734 - DNA, 25 bp, Saccharomyces pastorianus
atttcactatgagtttatcccaaag

SEQ ID NO: 104735 - DNA, 25 bp, Saccharomyces pastorianus
gttcaagataatttaccgtccacaa

SEQ ID NO: 104736 - DNA, 25 bp, Saccharomyces pastorianus
acgattgatatcactgcgccgtacg

SEQ ID NO: 104737 - DNA, 25 bp, Saccharomyces pastorianus
aatgacattttcacacagggctcag

SEQ ID NO: 104738 - DNA, 25 bp, Saccharomyces pastorianus
ctctgcttggcatcctttacaaaac

SEQ ID NO: 104739 - DNA, 25 bp, Saccharomyces pastorianus
tcttcacccgagaaagtactgatta

SEQ ID NO: 104740 - DNA, 25 bp, Saccharomyces pastorianus
acgttgatctacttgaaccctcagt

SEQ ID NO: 104741 - DNA, 25 bp, Saccharomyces pastorianus
gacacgataatccttttttcacaga

SEQ ID NO: 104742 - DNA, 25 bp, Saccharomyces pastorianus
acacagggctcaggattaacggaaa

SEQ ID NO: 104743 - DNA, 25 bp, Saccharomyces pastorianus
gtacgctagaaattcctctgcttgg

SEQ ID NO: 104744 - DNA, 25 bp, Saccharomyces pastorianus
gctagatcctcttttgactattcag

SEQ ID NO: 104745 - DNA, 25 bp, Saccharomyces pastorianus
acaatcagttttctccacttttggg

SEQ ID NO: 104746 - DNA, 25 bp, Saccharomyces pastorianus
ggtacatcctctattcctggattaa

SEQ ID NO: 104747 - DNA, 25 bp, Saccharomyces pastorianus
agcggatcttgtttattcgtctata

SEQ ID NO: 104748 - DNA, 25 bp, Saccharomyces pastorianus
aattggcctcgctcgaactctggag

SEQ ID NO: 104749 - DNA, 25 bp, Saccharomyces pastorianus
gtaagcaaatctacttctccggctg

SEQ ID NO: 104750 - DNA, 25 bp, Saccharomyces pastorianus
cagggcacactatcgaaaggcaata

SEQ ID NO: 104751 - DNA, 25 bp, Saccharomyces pastorianus
gatgacatcccagcaaattggcctc

SEQ ID NO: 104752 - DNA, 25 bp, Saccharomyces pastorianus
gcaaatagcgcagacactccaaatg

SEQ ID NO: 104753 - DNA, 25 bp, Saccharomyces pastorianus
gcggaatgattacgtgccactaaaa

SEQ ID NO: 104754 - DNA, 25 bp, Saccharomyces pastorianus
gtctgggaacatttcaccaactgtg

SEQ ID NO: 104755 - DNA, 25 bp, Saccharomyces pastorianus
gcaataccagtcatggcttggcggt

SEQ ID NO: 104756 - DNA, 25 bp, Saccharomyces pastorianus
aatgttgtccttacaggcggtacat

SEQ ID NO: 104757 - DNA, 25 bp, Saccharomyces pastorianus
gtaacactggccactttactcaagt

SEQ ID NO: 104758 - DNA, 25 bp, Saccharomyces pastorianus
acgaccacgttgacatcttctgaat

SEQ ID NO: 104759 - DNA, 25 bp, Saccharomyces pastorianus
tgacaactatgattgctccggcact

SEQ ID NO: 104760 - DNA, 25 bp, Saccharomyces pastorianus
ttggctcaagctactacgacttcta

SEQ ID NO: 104761 - DNA, 25 bp, Saccharomyces pastorianus
atctacatcgcaatcgttggctcaa

SEQ ID NO: 104762 - DNA, 25 bp, Saccharomyces pastorianus
tagctcagcatcgtcttcggatagt

SEQ ID NO: 104763 - DNA, 25 bp, Saccharomyces pastorianus
gacttctcgaatccaggcttttcaa

SEQ ID NO: 104764 - DNA, 25 bp, Saccharomyces pastorianus
agtgacctgtcagattttgcctctt

SEQ ID NO: 104765 - DNA, 25 bp, Saccharomyces pastorianus
ttgtggcatcaaaacctgtggcggt

SEQ ID NO: 104766 - DNA, 25 bp, Saccharomyces pastorianus
gaaatttccaactacgacttctcga

SEQ ID NO: 104767 - DNA, 25 bp, Saccharomyces pastorianus
tgccgtcgacgcttggtacaatgaa

SEQ ID NO: 104768 - DNA, 25 bp, Saccharomyces pastorianus
ttgtagcactttgaacggcgcctca

SEQ ID NO: 104769 - DNA, 25 bp, Saccharomyces pastorianus
tccgctgcttcttctacagatgaga

SEQ ID NO: 104770 - DNA, 25 bp, Saccharomyces pastorianus
acaagacgggtctgccatgcatcag

SEQ ID NO: 104771 - DNA, 25 bp, Saccharomyces pastorianus
gatgagacggccttcactagaacaa

SEQ ID NO: 104772 - DNA, 25 bp, Saccharomyces pastorianus
actactggtagcaacggtcgttcaa

SEQ ID NO: 104773 - DNA, 25 bp, Saccharomyces pastorianus
acctctttctattttccagtgcaat

SEQ ID NO: 104774 - DNA, 25 bp, Saccharomyces pastorianus
tgagctaaccacatcgcctatgaaa

SEQ ID NO: 104775 - DNA, 25 bp, Saccharomyces pastorianus
atagtctagctggaacgattgccgc

SEQ ID NO: 104776 - DNA, 25 bp, Saccharomyces pastorianus
tatctacactgaagtcaacgccgca

SEQ ID NO: 104777 - DNA, 25 bp, Saccharomyces pastorianus
agactgttgctacactgtatgccaa

SEQ ID NO: 104778 - DNA, 25 bp, Saccharomyces pastorianus
gacactgccttttctagtatctaca

SEQ ID NO: 104779 - DNA, 25 bp, Saccharomyces pastorianus
acagtggcaaggaacgactatttct

SEQ ID NO: 104780 - DNA, 25 bp, Saccharomyces pastorianus
gtattgccttaaccatgcttttcct

SEQ ID NO: 104781 - DNA, 25 bp, Saccharomyces pastorianus
gtacacgtacatatcaaataggctt

SEQ ID NO: 104782 - DNA, 25 bp, Saccharomyces pastorianus
aatcttattttcgaatacgtacacg

SEQ ID NO: 104783 - DNA, 25 bp, Saccharomyces pastorianus
gtatcgctccctacgagaaacaaat

SEQ ID NO: 104784 - DNA, 25 bp, Saccharomyces pastorianus
aacgctatccctggcatgtatctga

SEQ ID NO: 104785 - DNA, 25 bp, Saccharomyces pastorianus
gtgactctttaccaatcagggacat

SEQ ID NO: 104786 - DNA, 25 bp, Saccharomyces pastorianus
atgcttttcctcttgaacgctatcc

SEQ ID NO: 104787 - DNA, 25 bp, Saccharomyces pastorianus
gtatctgataattgctttccctcgt

SEQ ID NO: 104788 - DNA, 25 bp, Saccharomyces pastorianus
taaagttcaggtcgtacagtggcaa

SEQ ID NO: 104789 - DNA, 25 bp, Saccharomyces pastorianus
taggcttatatcattgtgactcttt

SEQ ID NO: 104790 - DNA, 25 bp, Saccharomyces pastorianus
gccagggatagcgttcaagaggaaa

SEQ ID NO: 104791 - DNA, 25 bp, Saccharomyces pastorianus
agcgttcaagaggaaaagcatggtt

SEQ ID NO: 104792 - DNA, 25 bp, Saccharomyces pastorianus
ccagggatagcgttcaagaggaaaa

SEQ ID NO: 104793 - DNA, 25 bp, Saccharomyces pastorianus
gcatggttaaggcaatacagttttt

SEQ ID NO: 104794 - DNA, 25 bp, Saccharomyces pastorianus
gttcaagaggaaaagcatggttaag

SEQ ID NO: 104795 - DNA, 25 bp, Saccharomyces pastorianus
aaagcatggttaaggcaatacagtt

SEQ ID NO: 104796 - DNA, 25 bp, Saccharomyces pastorianus
catggttaaggcaatacagttttta

SEQ ID NO: 104797 - DNA, 25 bp, Saccharomyces pastorianus
ggatagcgttcaagaggaaaagcat

SEQ ID NO: 104798 - DNA, 25 bp, Saccharomyces pastorianus
gaaaagcatggttaaggcaatacag

SEQ ID NO: 104799 - DNA, 25 bp, Saccharomyces pastorianus
aagcatggttaaggcaatacagttt

SEQ ID NO: 104800 - DNA, 25 bp, Saccharomyces pastorianus
atgccagggatagcgttcaagagga

SEQ ID NO: 104801 - DNA, 25 bp, Saccharomyces pastorianus
ataaaactttttccatcatcagatg

SEQ ID NO: 104802 - DNA, 25 bp, Saccharomyces pastorianus
tagaagttttttcctttacatctgg

SEQ ID NO: 104803 - DNA, 25 bp, Saccharomyces pastorianus
cttggcttcttcttcttacctaaag

SEQ ID NO: 104804 - DNA, 25 bp, Saccharomyces pastorianus
gaatctgaactggaatccgatacgg

SEQ ID NO: 104805 - DNA, 25 bp, Saccharomyces pastorianus
gactttctggtatcattttttcttg

SEQ ID NO: 104806 - DNA, 25 bp, Saccharomyces pastorianus
taaagcagcactagcggatttcgca

SEQ ID NO: 104807 - DNA, 25 bp, Saccharomyces pastorianus
agatgaatcccctgagtcatccgaa

SEQ ID NO: 104808 - DNA, 25 bp, Saccharomyces pastorianus
tacatctgggatgcctcttgaaaca

SEQ ID NO: 104809 - DNA, 25 bp, Saccharomyces pastorianus
ggcttttgtttgtgacttctcattc

SEQ ID NO: 104810 - DNA, 25 bp, Saccharomyces pastorianus
atgatgcaaatccaccacttggctt

SEQ ID NO: 104811 - DNA, 25 bp, Saccharomyces pastorianus
agctagattcatcatcactgcttga

SEQ ID NO: 104812 - DNA, 25 bp, Saccharomyces pastorianus
actgctaagttgattattcaccgta

SEQ ID NO: 104813 - DNA, 25 bp, Saccharomyces pastorianus
gatgcagaatccaatgaaagccaaa

SEQ ID NO: 104814 - DNA, 25 bp, Saccharomyces pastorianus
tagttcccagaggtactgctaagtt

SEQ ID NO: 104815 - DNA, 25 bp, Saccharomyces pastorianus
gttgcagacaaatttttccgtgtta

SEQ ID NO: 104816 - DNA, 25 bp, Saccharomyces pastorianus
gttgctacacttctaaaagaactgt

SEQ ID NO: 104817 - DNA, 25 bp, Saccharomyces pastorianus
agatttccacggttattgaggtcaa

SEQ ID NO: 104818 - DNA, 25 bp, Saccharomyces pastorianus
ataacgctaacgaccatgatgaaag

SEQ ID NO: 104819 - DNA, 25 bp, Saccharomyces pastorianus
gattctactttccaaaaggtttctg

SEQ ID NO: 104820 - DNA, 25 bp, Saccharomyces pastorianus
ggtttctgaaaactttgaagctgtt

SEQ ID NO: 104821 - DNA, 25 bp, Saccharomyces pastorianus
gctgtttttgaaagattagttccca

SEQ ID NO: 104822 - DNA, 25 bp, Saccharomyces pastorianus
tgcccagtttatttgtacgacgttc

SEQ ID NO: 104823 - DNA, 25 bp, Saccharomyces pastorianus
gagttgaggccgttcattactgaaa

SEQ ID NO: 104824 - DNA, 25 bp, Saccharomyces pastorianus
tatggtagccatgcgttctacagaa

SEQ ID NO: 104825 - DNA, 25 bp, Saccharomyces pastorianus
agaagtggttctttggatcgcccta

SEQ ID NO: 104826 - DNA, 25 bp, Saccharomyces pastorianus
tgagttgccgtggaactggcttgtc

SEQ ID NO: 104827 - DNA, 25 bp, Saccharomyces pastorianus
cacccgctggcaacttattactaca

SEQ ID NO: 104828 - DNA, 25 bp, Saccharomyces pastorianus
gatcgccctattactgaagcaacaa

SEQ ID NO: 104829 - DNA, 25 bp, Saccharomyces pastorianus
ggatgattttcatgaccccattcac

SEQ ID NO: 104830 - DNA, 25 bp, Saccharomyces pastorianus
gaggaactggaaaccacacccgctg

SEQ ID NO: 104831 - DNA, 25 bp, Saccharomyces pastorianus
gaaattcacacagcatctcttaccg

SEQ ID NO: 104832 - DNA, 25 bp, Saccharomyces pastorianus
tttgcagcagactttctcaccagaa

SEQ ID NO: 104833 - DNA, 25 bp, Saccharomyces pastorianus
aactggcttgtcttggcacgtatac

SEQ ID NO: 104834 - DNA, 25 bp, Saccharomyces pastorianus
gttctaccacacttgaaaggctcgc

SEQ ID NO: 104835 - DNA, 25 bp, Saccharomyces pastorianus
gacgctgactcaattcaactcaatt

SEQ ID NO: 104836 - DNA, 25 bp, Saccharomyces pastorianus
gatctttggatttgcatgactacat

SEQ ID NO: 104837 - DNA, 25 bp, Saccharomyces pastorianus
gaaaggctcgctgggtatatctgat

SEQ ID NO: 104838 - DNA, 25 bp, Saccharomyces pastorianus
gaaggcattgcaattcttacctatg

SEQ ID NO: 104839 - DNA, 25 bp, Saccharomyces pastorianus
tacggtaaccctcaatacgctaaga

SEQ ID NO: 104840 - DNA, 25 bp, Saccharomyces pastorianus
acttagaccccgaacactgtgatga

SEQ ID NO: 104841 - DNA, 25 bp, Saccharomyces pastorianus
gcaaaaccctcgagcaatagtccaa

SEQ ID NO: 104842 - DNA, 25 bp, Saccharomyces pastorianus
gggcttccaaaggagttccacgtat

SEQ ID NO: 104843 - DNA, 25 bp, Saccharomyces pastorianus
gtttatctcgataagttcgccgttc

SEQ ID NO: 104844 - DNA, 25 bp, Saccharomyces pastorianus
aaatccatcatcgaccagagcttta

SEQ ID NO: 104845 - DNA, 25 bp, Saccharomyces pastorianus
gtatcgattatcaacctatttcacg

SEQ ID NO: 104846 - DNA, 25 bp, Saccharomyces pastorianus
attttacattccacttccggactat

SEQ ID NO: 104847 - DNA, 25 bp, Saccharomyces pastorianus
gaaataatgctatgacctcgtcgac

SEQ ID NO: 104848 - DNA, 25 bp, Saccharomyces pastorianus
gaccagctaacaactaccatttcta

SEQ ID NO: 104849 - DNA, 25 bp, Saccharomyces pastorianus
atctacaattttcccctgatggtca

SEQ ID NO: 104850 - DNA, 25 bp, Saccharomyces pastorianus
tgtagcgtgttcagcaactggccta

SEQ ID NO: 104851 - DNA, 25 bp, Saccharomyces pastorianus
aaagttaccagtgtcgcattttcgc

SEQ ID NO: 104852 - DNA, 25 bp, Saccharomyces pastorianus
ctacttgtccggctcttcaaataag

SEQ ID NO: 104853 - DNA, 25 bp, Saccharomyces pastorianus
caaatactgtgcatggcatcccgtg

SEQ ID NO: 104854 - DNA, 25 bp, Saccharomyces pastorianus
ttgagactagttcatctgccttctt

SEQ ID NO: 104855 - DNA, 25 bp, Saccharomyces pastorianus
ggctactggccgtgggtaacgaaca

SEQ ID NO: 104856 - DNA, 25 bp, Saccharomyces pastorianus
ggaagcgtacgacccatgtttatta

SEQ ID NO: 104857 - DNA, 25 bp, Saccharomyces pastorianus
ctgagggctcctgggattttggaca

SEQ ID NO: 104858 - DNA, 25 bp, Saccharomyces pastorianus
atgttgccatcacaggtcattcgat

SEQ ID NO: 104859 - DNA, 25 bp, Saccharomyces pastorianus
ggagactccgatccctttttggaag

SEQ ID NO: 104860 - DNA, 25 bp, Saccharomyces pastorianus
gatcactcctattactttgtcagca

SEQ ID NO: 104861 - DNA, 25 bp, Saccharomyces pastorianus
gggcgacgacagaattttgatccat

SEQ ID NO: 104862 - DNA, 25 bp, Saccharomyces pastorianus
aaagttcacggctttgatcactcct

SEQ ID NO: 104863 - DNA, 25 bp, Saccharomyces pastorianus
gatacaaatcttgttctgccttcgc

SEQ ID NO: 104864 - DNA, 25 bp, Saccharomyces pastorianus
gctggacttcttggacaatgttgcc

SEQ ID NO: 104865 - DNA, 25 bp, Saccharomyces pastorianus
ggattctatctaaatgccacccaag

SEQ ID NO: 104866 - DNA, 25 bp, Saccharomyces pastorianus
ttgtcagcactttcgttccagaaca

SEQ ID NO: 104867 - DNA, 25 bp, Saccharomyces pastorianus
gagttctagccagaggctctacggc

SEQ ID NO: 104868 - DNA, 25 bp, Saccharomyces pastorianus
tgtgcccttccaacaattttcttgg

SEQ ID NO: 104869 - DNA, 25 bp, Saccharomyces pastorianus
acatgaggtcttctggagttctagc

SEQ ID NO: 104870 - DNA, 25 bp, Saccharomyces pastorianus
tcttggatccatctgcagaagcata

SEQ ID NO: 104871 - DNA, 25 bp, Saccharomyces pastorianus
tcattggaatccttcgtggtactaa

SEQ ID NO: 104872 - DNA, 25 bp, Saccharomyces pastorianus
gcaagtcgtcccaattcaacatgag

SEQ ID NO: 104873 - DNA, 25 bp, Saccharomyces pastorianus
gtggtactaatggactgtgcccttc

SEQ ID NO: 104874 - DNA, 25 bp, Saccharomyces pastorianus
tgacggtgctgggttttgcatcatt

SEQ ID NO: 104875 - DNA, 25 bp, Saccharomyces pastorianus
taattgtcttcgtcaacactcacca

SEQ ID NO: 104876 - DNA, 25 bp, Saccharomyces pastorianus
tagtaatgtctaccgtgccatcgtc

SEQ ID NO: 104877 - DNA, 25 bp, Saccharomyces pastorianus
aagcatattcagcatcgttgcccag

SEQ ID NO: 104878 - DNA, 25 bp, Saccharomyces pastorianus
actgcccttcaatttcaacttcaga

SEQ ID NO: 104879 - DNA, 25 bp, Saccharomyces pastorianus
ttaagggccagtctgcatggaccac

SEQ ID NO: 104880 - DNA, 25 bp, Saccharomyces pastorianus
ggctagaactccagaagacctcatg

SEQ ID NO: 104881 - DNA, 25 bp, Saccharomyces pastorianus
gaatccctacggtgaagcagtttga

SEQ ID NO: 104882 - DNA, 25 bp, Saccharomyces pastorianus
atatgcttctgcagatggatccaag

SEQ ID NO: 104883 - DNA, 25 bp, Saccharomyces pastorianus
ggcacagtccattagtaccacgaag

SEQ ID NO: 104884 - DNA, 25 bp, Saccharomyces pastorianus
ggacgacttgcatctgggcaacgat

SEQ ID NO: 104885 - DNA, 25 bp, Saccharomyces pastorianus
caagggttccagtccccaggtgaag

SEQ ID NO: 104886 - DNA, 25 bp, Saccharomyces pastorianus
gcactctcatgggttgttcttcaat

SEQ ID NO: 104887 - DNA, 25 bp, Saccharomyces pastorianus
gagatagtgcacttgccatggcgtc

SEQ ID NO: 104888 - DNA, 25 bp, Saccharomyces pastorianus
aaatctactttgacgatggcacggt

SEQ ID NO: 104889 - DNA, 25 bp, Saccharomyces pastorianus
taaagaaacggcgtctgcacctctg

SEQ ID NO: 104890 - DNA, 25 bp, Saccharomyces pastorianus
ctgacggccatctgcagtttttgaa

SEQ ID NO: 104891 - DNA, 25 bp, Saccharomyces pastorianus
tcccagatgaactcacgctgtcgta

SEQ ID NO: 104892 - DNA, 25 bp, Saccharomyces pastorianus
tacgatgacatctctgccgcaattg

SEQ ID NO: 104893 - DNA, 25 bp, Saccharomyces pastorianus
agaattcttcgtccaggtgctgaca

SEQ ID NO: 104894 - DNA, 25 bp, Saccharomyces pastorianus
ggtgctgacacatgagtccctacat

SEQ ID NO: 104895 - DNA, 25 bp, Saccharomyces pastorianus
atatatggacacttcggatgacgca

SEQ ID NO: 104896 - DNA, 25 bp, Saccharomyces pastorianus
tatgtggtgaacgatacggctccga

SEQ ID NO: 104897 - DNA, 25 bp, Saccharomyces pastorianus
aatgaagtttactccgcctatgtgg

SEQ ID NO: 104898 - DNA, 25 bp, Saccharomyces pastorianus
aattgtgcactcttctgacggccat

SEQ ID NO: 104899 - DNA, 25 bp, Saccharomyces pastorianus
gtgttcgcccaagttacctgtagaa

SEQ ID NO: 104900 - DNA, 25 bp, Saccharomyces pastorianus
tgcgtcatccgaagtgtccatatat

SEQ ID NO: 104901 - DNA, 25 bp, Saccharomyces pastorianus
gatggccgtcagaagagtgcacaat

SEQ ID NO: 104902 - DNA, 25 bp, Saccharomyces pastorianus
gaagcctcaaattctttgttgtcgg

SEQ ID NO: 104903 - DNA, 25 bp, Saccharomyces pastorianus
ttggctattctctgcactttttcta

SEQ ID NO: 104904 - DNA, 25 bp, Saccharomyces pastorianus
tctacaggtaacttgggcgaacaca

SEQ ID NO: 104905 - DNA, 25 bp, Saccharomyces pastorianus
atatctaactcggttttcttccact

SEQ ID NO: 104906 - DNA, 25 bp, Saccharomyces pastorianus
ttgttgtcggtatcacatcattcaa

SEQ ID NO: 104907 - DNA, 25 bp, Saccharomyces pastorianus
tagggactcatgtgtcagcacctgg

SEQ ID NO: 104908 - DNA, 25 bp, Saccharomyces pastorianus
aacacagaggtgcagacgccgtttc

SEQ ID NO: 104909 - DNA, 25 bp, Saccharomyces pastorianus
gctgctgctgttgcctatgtaggga

SEQ ID NO: 104910 - DNA, 25 bp, Saccharomyces pastorianus
agttcatctgggagcggcggtacct

SEQ ID NO: 104911 - DNA, 25 bp, Saccharomyces pastorianus
ttggaactagtcgactctcccgtga

SEQ ID NO: 104912 - DNA, 25 bp, Saccharomyces pastorianus
gaatctatagtgtcaacgcatgcca

SEQ ID NO: 104913 - DNA, 25 bp, Saccharomyces pastorianus
gaaatgtcccttccctatgatgagg

SEQ ID NO: 104914 - DNA, 25 bp, Saccharomyces pastorianus
agagcggatcattacctggacaaag

SEQ ID NO: 104915 - DNA, 25 bp, Saccharomyces pastorianus
aaggaggtctactcttcgtcattgc

SEQ ID NO: 104916 - DNA, 25 bp, Saccharomyces pastorianus
tagggctaacgactcagcgctgcaa

SEQ ID NO: 104917 - DNA, 25 bp, Saccharomyces pastorianus
gcgctgcaatccgtcttggaactag

SEQ ID NO: 104918 - DNA, 25 bp, Saccharomyces pastorianus
gatcgcaccgcggtacttggaaagg

SEQ ID NO: 104919 - DNA, 25 bp, Saccharomyces pastorianus
tgctgcggttagagcctagggctaa

SEQ ID NO: 104920 - DNA, 25 bp, Saccharomyces pastorianus
taacccactcacattgcagaatctt

SEQ ID NO: 104921 - DNA, 25 bp, Saccharomyces pastorianus
aaagaggcttccagggtcgcagagc

SEQ ID NO: 104922 - DNA, 25 bp, Saccharomyces pastorianus
tctttcactagaattgccacactct

SEQ ID NO: 104923 - DNA, 25 bp, Saccharomyces pastorianus
attttgtcctcgttgatttctctaa

SEQ ID NO: 104924 - DNA, 25 bp, Saccharomyces pastorianus
aggactatccctacccagaggagat

SEQ ID NO: 104925 - DNA, 25 bp, Saccharomyces pastorianus
ggactcccatatacagctccagagg

SEQ ID NO: 104926 - DNA, 25 bp, Saccharomyces pastorianus
ttaggtgtggttgccattccaccaa

SEQ ID NO: 104927 - DNA, 25 bp, Saccharomyces pastorianus
aagattttcgcatttctcactggtt

SEQ ID NO: 104928 - DNA, 25 bp, Saccharomyces pastorianus
agaatttgttttgcatctccatccc

SEQ ID NO: 104929 - DNA, 25 bp, Saccharomyces pastorianus
gttgggtcttatccttgaacgcaga

SEQ ID NO: 104930 - DNA, 25 bp, Saccharomyces pastorianus
acctttacttcactgattctttcac

SEQ ID NO: 104931 - DNA, 25 bp, Saccharomyces pastorianus
gatctttgatgaattgggactccca

SEQ ID NO: 104932 - DNA, 25 bp, Saccharomyces pastorianus
tctgccggtaaatcgtttgctgcta

SEQ ID NO: 104933 - DNA, 25 bp, Saccharomyces pastorianus
catggttttatgtcacacgttcgcc

SEQ ID NO: 104934 - DNA, 25 bp, Saccharomyces pastorianus
tgtgtccatcgctgattcgtttggc

SEQ ID NO: 104935 - DNA, 25 bp, Saccharomyces pastorianus
cttcgcaatccctgtattctacaag

SEQ ID NO: 104936 - DNA, 25 bp, Saccharomyces pastorianus
gctccgaccctattatttccgatta

SEQ ID NO: 104937 - DNA, 25 bp, Saccharomyces pastorianus
atgaaacagagttcgccatgggtgc

SEQ ID NO: 104938 - DNA, 25 bp, Saccharomyces pastorianus
atacatggttccattgaccaccgtc

SEQ ID NO: 104939 - DNA, 25 bp, Saccharomyces pastorianus
gaccaccgtctacttattcgaatat

SEQ ID NO: 104940 - DNA, 25 bp, Saccharomyces pastorianus
tttacacataccaacgcttcgcaat

SEQ ID NO: 104941 - DNA, 25 bp, Saccharomyces pastorianus
ggaacgctctaccaattaggtgtct

SEQ ID NO: 104942 - DNA, 25 bp, Saccharomyces pastorianus
gtcgatgccatttttcttccataaa

SEQ ID NO: 104943 - DNA, 25 bp, Saccharomyces pastorianus
gcataacggtactgcaatcatggtt

SEQ ID NO: 104944 - DNA, 25 bp, Saccharomyces pastorianus
gaaagtcggactcacattaatggta

SEQ ID NO: 104945 - DNA, 25 bp, Saccharomyces pastorianus
gattcaatagtcttaccttgttatg

SEQ ID NO: 104946 - DNA, 25 bp, Saccharomyces pastorianus
gacattactgcagtgttttggcata

SEQ ID NO: 104947 - DNA, 25 bp, Saccharomyces pastorianus
attaccgttggatcagagtatcaga

SEQ ID NO: 104948 - DNA, 25 bp, Saccharomyces pastorianus
ttctacggttttaaagtcaggcaat

SEQ ID NO: 104949 - DNA, 25 bp, Saccharomyces pastorianus
tggttagttccctatacaatttaga

SEQ ID NO: 104950 - DNA, 25 bp, Saccharomyces pastorianus
tccaagagtcacacatagcggcatg

SEQ ID NO: 104951 - DNA, 25 bp, Saccharomyces pastorianus
agattaggcgttatatggcggatat

SEQ ID NO: 104952 - DNA, 25 bp, Saccharomyces pastorianus
agccgctgtgttattaccgttggat

SEQ ID NO: 104953 - DNA, 25 bp, Saccharomyces pastorianus
attccattgggtttcttttgcttat

SEQ ID NO: 104954 - DNA, 25 bp, Saccharomyces pastorianus
gtatattatgatttagccgctgtgt

SEQ ID NO: 104955 - DNA, 25 bp, Saccharomyces pastorianus
ggagcccttttccataagctgggat

SEQ ID NO: 104956 - DNA, 25 bp, Saccharomyces pastorianus
tccagagggccgtttcaatttgaat

SEQ ID NO: 104957 - DNA, 25 bp, Saccharomyces pastorianus
gaaatcattcaagttgcctccactc

SEQ ID NO: 104958 - DNA, 25 bp, Saccharomyces pastorianus
ctatgcctggtggatacgggacttt

SEQ ID NO: 104959 - DNA, 25 bp, Saccharomyces pastorianus
gaagtacgtcgttccagagggccgt

SEQ ID NO: 104960 - DNA, 25 bp, Saccharomyces pastorianus
ctccactccgcaggaagttgttgat

SEQ ID NO: 104961 - DNA, 25 bp, Saccharomyces pastorianus
agcggacaggttcacggtatcattc

SEQ ID NO: 104962 - DNA, 25 bp, Saccharomyces pastorianus
ggcgccactcctatttctgaagagt

SEQ ID NO: 104963 - DNA, 25 bp, Saccharomyces pastorianus
gaatgtatcacgtggtcgcaactgg

SEQ ID NO: 104964 - DNA, 25 bp, Saccharomyces pastorianus
gaggcactactggtttgatgggcaa

SEQ ID NO: 104965 - DNA, 25 bp, Saccharomyces pastorianus
gagtgacgcgtttgttgctatgcct

SEQ ID NO: 104966 - DNA, 25 bp, Saccharomyces pastorianus
taatcagccgttattggtcattcca

SEQ ID NO: 104967 - DNA, 25 bp, Saccharomyces pastorianus
tgacctgcaaatcgcttcggaatta

SEQ ID NO: 104968 - DNA, 25 bp, Saccharomyces pastorianus
gataggttttactaccattccaagg

SEQ ID NO: 104969 - DNA, 25 bp, Saccharomyces pastorianus
tggtcattccaatacctaacttgat

SEQ ID NO: 104970 - DNA, 25 bp, Saccharomyces pastorianus
gattggccacagaactgggtcaaac

SEQ ID NO: 104971 - DNA, 25 bp, Saccharomyces pastorianus
ttaactgtgttcgacaaacccgtat

SEQ ID NO: 104972 - DNA, 25 bp, Saccharomyces pastorianus
aaatatcccgcttctgattaatcag

SEQ ID NO: 104973 - DNA, 25 bp, Saccharomyces pastorianus
aagccatttatttcttcagaccaat

SEQ ID NO: 104974 - DNA, 25 bp, Saccharomyces pastorianus
gaaaccccaatacaaatatcccgct

SEQ ID NO: 104975 - DNA, 25 bp, Saccharomyces pastorianus
aggatccactgagcctaagatgact

SEQ ID NO: 104976 - DNA, 25 bp, Saccharomyces pastorianus
atacatcgtttttaccagaagcgtt

SEQ ID NO: 104977 - DNA, 25 bp, Saccharomyces pastorianus
tatgccaaatcccagtacagcttaa

SEQ ID NO: 104978 - DNA, 25 bp, Saccharomyces pastorianus
ataatgagcccaagcctgttagatt

SEQ ID NO: 104979 - DNA, 25 bp, Saccharomyces pastorianus
aagattattcttgagcggctatgac

SEQ ID NO: 104980 - DNA, 25 bp, Saccharomyces pastorianus
gctatgacctgacgcccaatatgag

SEQ ID NO: 104981 - DNA, 25 bp, Saccharomyces pastorianus
agtgtaactactgcgccaaataccc

SEQ ID NO: 104982 - DNA, 25 bp, Saccharomyces pastorianus
agattccactgctatccgatacgaa

SEQ ID NO: 104983 - DNA, 25 bp, Saccharomyces pastorianus
gagctgcaactacttcaacgtcaag

SEQ ID NO: 104984 - DNA, 25 bp, Saccharomyces pastorianus
acattgctggtggtaactatgctgc

SEQ ID NO: 104985 - DNA, 25 bp, Saccharomyces pastorianus
ccaaataccctttccgcaaatgaga

SEQ ID NO: 104986 - DNA, 25 bp, Saccharomyces pastorianus
acaagagaatcttccggcctacaaa

SEQ ID NO: 104987 - DNA, 25 bp, Saccharomyces pastorianus
tcaagttttgccgatatcacattca

SEQ ID NO: 104988 - DNA, 25 bp, Saccharomyces pastorianus
tctgcgaccactccgaaggtcgaaa

SEQ ID NO: 104989 - DNA, 25 bp, Saccharomyces pastorianus
ggcttgccttactgtattgtaaaga

SEQ ID NO: 104990 - DNA, 25 bp, Saccharomyces pastorianus
cagatggtggcttgccttactgtat

SEQ ID NO: 104991 - DNA, 25 bp, Saccharomyces pastorianus
gaagcagatggtggcttgccttact

SEQ ID NO: 104992 - DNA, 25 bp, Saccharomyces pastorianus
gccttactgtattgtaaagatccag

SEQ ID NO: 104993 - DNA, 25 bp, Saccharomyces pastorianus
gtggcttgccttactgtattgtaaa

SEQ ID NO: 104994 - DNA, 25 bp, Saccharomyces pastorianus
ggtggcttgccttactgtattgtaa

SEQ ID NO: 104995 - DNA, 25 bp, Saccharomyces pastorianus
agcagatggtggcttgccttactgt

SEQ ID NO: 104996 - DNA, 25 bp, Saccharomyces pastorianus
atggtggcttgccttactgtattgt

SEQ ID NO: 104997 - DNA, 25 bp, Saccharomyces pastorianus
agatctgcgaccactccgaaggtcg

SEQ ID NO: 104998 - DNA, 25 bp, Saccharomyces pastorianus
tccagatctgcgaccactccgaagg

SEQ ID NO: 104999 - DNA, 25 bp, Saccharomyces pastorianus
aagatgccgttgtctcctctgattt

SEQ ID NO: 105000 - DNA, 25 bp, Saccharomyces pastorianus
gctacttacgaccaaatcaagaagg

SEQ ID NO: 105001 - DNA, 25 bp, Saccharomyces pastorianus
gactgtcaagttggcaaaggaagct

SEQ ID NO: 105002 - DNA, 25 bp, Saccharomyces pastorianus
taaatacactccagacaagaagatt

SEQ ID NO: 105003 - DNA, 25 bp, Saccharomyces pastorianus
cgaagatgccgttgtctcctctgat

SEQ ID NO: 105004 - DNA, 25 bp, Saccharomyces pastorianus
tgccgttgtctcctctgatttcttg

SEQ ID NO: 105005 - DNA, 25 bp, Saccharomyces pastorianus
gaagctacttacgaccaaatcaaga

SEQ ID NO: 105006 - DNA, 25 bp, Saccharomyces pastorianus
accacactaaatacactccagacaa

SEQ ID NO: 105007 - DNA, 25 bp, Saccharomyces pastorianus
aggaagctacttacgaccaaatcaa

SEQ ID NO: 105008 - DNA, 25 bp, Saccharomyces pastorianus
ggcaaaggaagctacttacgaccaa

SEQ ID NO: 105009 - DNA, 25 bp, Saccharomyces pastorianus
gttggcaaaggaagctacttacgac

SEQ ID NO: 105010 - DNA, 25 bp, Saccharomyces pastorianus
cattcatctccaaccaagtcgttga

SEQ ID NO: 105011 - DNA, 25 bp, Saccharomyces pastorianus
atcggcgggatctggttctggctat

SEQ ID NO: 105012 - DNA, 25 bp, Saccharomyces pastorianus
aaactactcgtttggccatggtcac

SEQ ID NO: 105013 - DNA, 25 bp, Saccharomyces pastorianus
atcaacctcgggaaattctcgtcgg

SEQ ID NO: 105014 - DNA, 25 bp, Saccharomyces pastorianus
gagccagttctggacacaccacaat

SEQ ID NO: 105015 - DNA, 25 bp, Saccharomyces pastorianus
gagcgcttagaactgcaagtacatt

SEQ ID NO: 105016 - DNA, 25 bp, Saccharomyces pastorianus
agctattacagggttcttcttctaa

SEQ ID NO: 105017 - DNA, 25 bp, Saccharomyces pastorianus
acagtcatcatcaagcggttctgag

SEQ ID NO: 105018 - DNA, 25 bp, Saccharomyces pastorianus
gtacattattctatctccagcacaa

SEQ ID NO: 105019 - DNA, 25 bp, Saccharomyces pastorianus
tttgcaaagcagtcattcacctaca

SEQ ID NO: 105020 - DNA, 25 bp, Saccharomyces pastorianus
ttctcgtcgggattctttaaacaat

SEQ ID NO: 105021 - DNA, 25 bp, Saccharomyces pastorianus
ggtgattcaatgactccttcagcat

SEQ ID NO: 105022 - DNA, 25 bp, Saccharomyces pastorianus
taatggtacttctcaattgcgacaa

SEQ ID NO: 105023 - DNA, 25 bp, Saccharomyces pastorianus
cttcagcatatactaccccaaggat

SEQ ID NO: 105024 - DNA, 25 bp, Saccharomyces pastorianus
ggaacaatcttctcttctacacaag

SEQ ID NO: 105025 - DNA, 25 bp, Saccharomyces pastorianus
gcaagagttggatctgttgcccaga

SEQ ID NO: 105026 - DNA, 25 bp, Saccharomyces pastorianus
gatgatggaactccttaccttttcc

SEQ ID NO: 105027 - DNA, 25 bp, Saccharomyces pastorianus
actgcccaatggttacacaatctct

SEQ ID NO: 105028 - DNA, 25 bp, Saccharomyces pastorianus
cagcgccaactactctttacaaaaa

SEQ ID NO: 105029 - DNA, 25 bp, Saccharomyces pastorianus
gtgtctgaactaaacttgtcttcca

SEQ ID NO: 105030 - DNA, 25 bp, Saccharomyces pastorianus
caggtttgacatctttttgggcgaa

SEQ ID NO: 105031 - DNA, 25 bp, Saccharomyces pastorianus
gactcttatcttagaaccgctggaa

SEQ ID NO: 105032 - DNA, 25 bp, Saccharomyces pastorianus
agtggagtcgccttatatcatacag

SEQ ID NO: 105033 - DNA, 25 bp, Saccharomyces pastorianus
gagctatatccgatgtggaacttgc

SEQ ID NO: 105034 - DNA, 25 bp, Saccharomyces pastorianus
gagacattgacaacacatacagtat

SEQ ID NO: 105035 - DNA, 25 bp, Saccharomyces pastorianus
gtggaacttgcaccactgcgaagtg

SEQ ID NO: 105036 - DNA, 25 bp, Saccharomyces pastorianus
gtatcaacgagagcttcaaacctga

SEQ ID NO: 105037 - DNA, 25 bp, Saccharomyces pastorianus
gaaagcgatcatttgaccttgcaag

SEQ ID NO: 105038 - DNA, 25 bp, Saccharomyces pastorianus
gcgtacaaagacttagcgctagttt

SEQ ID NO: 105039 - DNA, 25 bp, Saccharomyces pastorianus
atgtgtgctgactttattcaacgaa

SEQ ID NO: 105040 - DNA, 25 bp, Saccharomyces pastorianus
gacccttttccaaacatgtgtgctg

SEQ ID NO: 105041 - DNA, 25 bp, Saccharomyces pastorianus
tagttttaaaatccttctgcaatta

SEQ ID NO: 105042 - DNA, 25 bp, Saccharomyces pastorianus
ggatggaactaacctaatatttgaa

SEQ ID NO: 105043 - DNA, 25 bp, Saccharomyces pastorianus
atcacccttttgttatccatttacg

SEQ ID NO: 105044 - DNA, 25 bp, Saccharomyces pastorianus
tgctaatcatttgggaccacgtcct

SEQ ID NO: 105045 - DNA, 25 bp, Saccharomyces pastorianus
gtgagccaaggtgactatgaacata

SEQ ID NO: 105046 - DNA, 25 bp, Saccharomyces pastorianus
gatttgcttgccagacttgttttca

SEQ ID NO: 105047 - DNA, 25 bp, Saccharomyces pastorianus
tgattcactccaacctaatctggct

SEQ ID NO: 105048 - DNA, 25 bp, Saccharomyces pastorianus
attgcatgcactatcatcacccttt

SEQ ID NO: 105049 - DNA, 25 bp, Saccharomyces pastorianus
tatccatttacgatgagcttcacga

SEQ ID NO: 105050 - DNA, 25 bp, Saccharomyces pastorianus
cctgacgttcaattatcccttggat

SEQ ID NO: 105051 - DNA, 25 bp, Saccharomyces pastorianus
taatctggctcatccgatggacaag

SEQ ID NO: 105052 - DNA, 25 bp, Saccharomyces pastorianus
aacgtagaccatctgattcactcca

SEQ ID NO: 105053 - DNA, 25 bp, Saccharomyces pastorianus
gagcttcacgaactagtgagccaag

SEQ ID NO: 105054 - DNA, 25 bp, Saccharomyces pastorianus
tactttggacgtcgtcaccggagtt

SEQ ID NO: 105055 - DNA, 25 bp, Saccharomyces pastorianus
acaccgcatgttgacgactacgaca

SEQ ID NO: 105056 - DNA, 25 bp, Saccharomyces pastorianus
atgctaggctcttggatgactggtc

SEQ ID NO: 105057 - DNA, 25 bp, Saccharomyces pastorianus
tggagatttccctggcaacagtcac

SEQ ID NO: 105058 - DNA, 25 bp, Saccharomyces pastorianus
tcatccccatgctgtttattggcga

SEQ ID NO: 105059 - DNA, 25 bp, Saccharomyces pastorianus
tgtatcgacctcctgcagaaatgca

SEQ ID NO: 105060 - DNA, 25 bp, Saccharomyces pastorianus
gcaacaccataatacccatcgagat

SEQ ID NO: 105061 - DNA, 25 bp, Saccharomyces pastorianus
aagactttgctagtggccgtactgc

SEQ ID NO: 105062 - DNA, 25 bp, Saccharomyces pastorianus
gtttgctatggcgatgaccctacac

SEQ ID NO: 105063 - DNA, 25 bp, Saccharomyces pastorianus
ggacctaaggtctgtgctgcatgat

SEQ ID NO: 105064 - DNA, 25 bp, Saccharomyces pastorianus
tcgcgctacgggtctgattacaaca

SEQ ID NO: 105065 - DNA, 25 bp, Saccharomyces pastorianus
agggtaccacttgcatcatattttc

SEQ ID NO: 105066 - DNA, 25 bp, Saccharomyces pastorianus
cgaccgatgcgcctggatttgataa

SEQ ID NO: 105067 - DNA, 25 bp, Saccharomyces pastorianus
agtcctcccaatccaatgattcaag

SEQ ID NO: 105068 - DNA, 25 bp, Saccharomyces pastorianus
agaatgacgtctctactatccttgg

SEQ ID NO: 105069 - DNA, 25 bp, Saccharomyces pastorianus
actatccttggcgtcattgatgaac

SEQ ID NO: 105070 - DNA, 25 bp, Saccharomyces pastorianus
tgattcaagtgctaatgcgtcccct

SEQ ID NO: 105071 - DNA, 25 bp, Saccharomyces pastorianus
ggaaaatgccattgacgctgcttat

SEQ ID NO: 105072 - DNA, 25 bp, Saccharomyces pastorianus
gaaatcttaaatcgtgccgcacaat

SEQ ID NO: 105073 - DNA, 25 bp, Saccharomyces pastorianus
tccacaggctccaatacttctagaa

SEQ ID NO: 105074 - DNA, 25 bp, Saccharomyces pastorianus
acgataatgctcatattcctccgac

SEQ ID NO: 105075 - DNA, 25 bp, Saccharomyces pastorianus
gaactgcatagccaagggtaccact

SEQ ID NO: 105076 - DNA, 25 bp, Saccharomyces pastorianus
gacagttggaagcatcggtttcata

SEQ ID NO: 105077 - DNA, 25 bp, Saccharomyces pastorianus
gaagtctccagggacaaggtagtta

SEQ ID NO: 105078 - DNA, 25 bp, Saccharomyces pastorianus
gaaggtgcctattatcgagggacaa

SEQ ID NO: 105079 - DNA, 25 bp, Saccharomyces pastorianus
accattgttgtgattgcaggaacta

SEQ ID NO: 105080 - DNA, 25 bp, Saccharomyces pastorianus
agtagcaccttttgcgtgtcttctt

SEQ ID NO: 105081 - DNA, 25 bp, Saccharomyces pastorianus
gcgggcgataggttaatcacatcat

SEQ ID NO: 105082 - DNA, 25 bp, Saccharomyces pastorianus
gagaatcctaactgtaagtctgtta

SEQ ID NO: 105083 - DNA, 25 bp, Saccharomyces pastorianus
caacagttcagcgatgcgggcgata

SEQ ID NO: 105084 - DNA, 25 bp, Saccharomyces pastorianus
gtctagctcaaggagtggccgattt

SEQ ID NO: 105085 - DNA, 25 bp, Saccharomyces pastorianus
gatgcggctttgaatgtttcaccat

SEQ ID NO: 105086 - DNA, 25 bp, Saccharomyces pastorianus
tggccgatttatgtgcagtagcacc

SEQ ID NO: 105087 - DNA, 25 bp, Saccharomyces pastorianus
gataaaaacacgtttccgcctatgg

SEQ ID NO: 105088 - DNA, 25 bp, Saccharomyces pastorianus
cattaactggagtagcacatgctga

SEQ ID NO: 105089 - DNA, 25 bp, Saccharomyces pastorianus
ctcccgaggagttgttgacgtgttc

SEQ ID NO: 105090 - DNA, 25 bp, Saccharomyces pastorianus
gattacaggacttgttttgcgaata

SEQ ID NO: 105091 - DNA, 25 bp, Saccharomyces pastorianus
gatttgtccagtaatagcgtcgatt

SEQ ID NO: 105092 - DNA, 25 bp, Saccharomyces pastorianus
ggcgccaaagccacggtccaagagt

SEQ ID NO: 105093 - DNA, 25 bp, Saccharomyces pastorianus
ggaggcaacggtactgtcttgtcag

SEQ ID NO: 105094 - DNA, 25 bp, Saccharomyces pastorianus
gatcaaggcgatgttgggctcccga

SEQ ID NO: 105095 - DNA, 25 bp, Saccharomyces pastorianus
aatgtgtgcatctgctctcaagcaa

SEQ ID NO: 105096 - DNA, 25 bp, Saccharomyces pastorianus
gatacgtgtacattagtgcccaaga

SEQ ID NO: 105097 - DNA, 25 bp, Saccharomyces pastorianus
ggatttgattgactcccaccaagat

SEQ ID NO: 105098 - DNA, 25 bp, Saccharomyces pastorianus
gacgatttcatttctgtcaagcgta

SEQ ID NO: 105099 - DNA, 25 bp, Saccharomyces pastorianus
aggcgaagcccatccagtttatgaa

SEQ ID NO: 105100 - DNA, 25 bp, Saccharomyces pastorianus
agctgagttaccagctctaactctt

SEQ ID NO: 105101 - DNA, 25 bp, Saccharomyces pastorianus
aaagaaggcatctctggcctccaag

SEQ ID NO: 105102 - DNA, 25 bp, Saccharomyces pastorianus
taactcttccaacttcaaggcgagc

SEQ ID NO: 105103 - DNA, 25 bp, Saccharomyces pastorianus
gagcgacggtgatatgtctgactcg

SEQ ID NO: 105104 - DNA, 25 bp, Saccharomyces pastorianus
tggcctccaagggtaacgctagcaa

SEQ ID NO: 105105 - DNA, 25 bp, Saccharomyces pastorianus
tagaactgttgactattcccacggc

SEQ ID NO: 105106 - DNA, 25 bp, Saccharomyces pastorianus
gtctgactcggaaggccacttgaaa

SEQ ID NO: 105107 - DNA, 25 bp, Saccharomyces pastorianus
gccacaatccatccaattcagttga

SEQ ID NO: 105108 - DNA, 25 bp, Saccharomyces pastorianus
gcgagcacagaagaaagcgctttca

SEQ ID NO: 105109 - DNA, 25 bp, Saccharomyces pastorianus
gagcttctttccgttagagcttcct

SEQ ID NO: 105110 - DNA, 25 bp, Saccharomyces pastorianus
gctgctccaggagatgtaggtatct

SEQ ID NO: 105111 - DNA, 25 bp, Saccharomyces pastorianus
taacggatccgcatctattaattgg

SEQ ID NO: 105112 - DNA, 25 bp, Saccharomyces pastorianus
agagcttccttttcttccagaatat

SEQ ID NO: 105113 - DNA, 25 bp, Saccharomyces pastorianus
tgcttcccggaaaattcaatttcgt

SEQ ID NO: 105114 - DNA, 25 bp, Saccharomyces pastorianus
tttaaggtactcttgttcgtccaga

SEQ ID NO: 105115 - DNA, 25 bp, Saccharomyces pastorianus
atatcatcacttatgctgctccagg

SEQ ID NO: 105116 - DNA, 25 bp, Saccharomyces pastorianus
gaatgttttctctcaagtctttcaa

SEQ ID NO: 105117 - DNA, 25 bp, Saccharomyces pastorianus
gcaccaaatattttgcttcccggaa

SEQ ID NO: 105118 - DNA, 25 bp, Saccharomyces pastorianus
aaatattgttccgagcttctttccg

SEQ ID NO: 105119 - DNA, 25 bp, Saccharomyces pastorianus
gtaggtatctattctttcttaacgg

SEQ ID NO: 105120 - DNA, 25 bp, Saccharomyces pastorianus
gttcccctaaagtgtggcaaactga

SEQ ID NO: 105121 - DNA, 25 bp, Saccharomyces pastorianus
attaccacggatggcattaccgcag

SEQ ID NO: 105122 - DNA, 25 bp, Saccharomyces pastorianus
aaactgaacttgctgtcgtgaataa

SEQ ID NO: 105123 - DNA, 25 bp, Saccharomyces pastorianus
aacgctatgtttaccgacgccgaag

SEQ ID NO: 105124 - DNA, 25 bp, Saccharomyces pastorianus
ggcattaccgcagaatagttgttgg

SEQ ID NO: 105125 - DNA, 25 bp, Saccharomyces pastorianus
cgacgccgaagaccaatccgtatgg

SEQ ID NO: 105126 - DNA, 25 bp, Saccharomyces pastorianus
tttcaaattattctgcatggcacca

SEQ ID NO: 105127 - DNA, 25 bp, Saccharomyces pastorianus
ccaattaatagatgcggatccgtta

SEQ ID NO: 105128 - DNA, 25 bp, Saccharomyces pastorianus
gaagctcggaacaatatttggtcca

SEQ ID NO: 105129 - DNA, 25 bp, Saccharomyces pastorianus
atccgtatggttttatatcaagtgg

SEQ ID NO: 105130 - DNA, 25 bp, Saccharomyces pastorianus
tggcaccaaagagtacagatcataa

SEQ ID NO: 105131 - DNA, 25 bp, Saccharomyces pastorianus
gaatgggccgactccaatagtaaag

SEQ ID NO: 105132 - DNA, 25 bp, Saccharomyces pastorianus
ttcacaggtggcttcttggtggaaa

SEQ ID NO: 105133 - DNA, 25 bp, Saccharomyces pastorianus
tcaagcgttacctttctgcccgaac

SEQ ID NO: 105134 - DNA, 25 bp, Saccharomyces pastorianus
agatggtccttcaatgtgcaacaca

SEQ ID NO: 105135 - DNA, 25 bp, Saccharomyces pastorianus
gtgggtacacattcacagtacttgc

SEQ ID NO: 105136 - DNA, 25 bp, Saccharomyces pastorianus
tcgagtacagcattaattccatttt

SEQ ID NO: 105137 - DNA, 25 bp, Saccharomyces pastorianus
gtacttgcatatacagacgcggatg

SEQ ID NO: 105138 - DNA, 25 bp, Saccharomyces pastorianus
aggcgtatacccagcagaagatttc

SEQ ID NO: 105139 - DNA, 25 bp, Saccharomyces pastorianus
acatttctggcaatagcaacgggca

SEQ ID NO: 105140 - DNA, 25 bp, Saccharomyces pastorianus
ttcttctacaagttcacaggtggct

SEQ ID NO: 105141 - DNA, 25 bp, Saccharomyces pastorianus
caaaacattttctaccaacgatcat

SEQ ID NO: 105142 - DNA, 25 bp, Saccharomyces pastorianus
ctctggattccgctgatgactatta

SEQ ID NO: 105143 - DNA, 25 bp, Saccharomyces pastorianus
tatggtcttttgtcctcgctttaaa

SEQ ID NO: 105144 - DNA, 25 bp, Saccharomyces pastorianus
aaccctgattcagcggtatggtctt

SEQ ID NO: 105145 - DNA, 25 bp, Saccharomyces pastorianus
aaagctatggagtgcctacaactta

SEQ ID NO: 105146 - DNA, 25 bp, Saccharomyces pastorianus
cgagcagcttctccttgatttagaa

SEQ ID NO: 105147 - DNA, 25 bp, Saccharomyces pastorianus
aagtaaccattctgacttgcgagaa

SEQ ID NO: 105148 - DNA, 25 bp, Saccharomyces pastorianus
tattaaacttctagtggcgcctctg

SEQ ID NO: 105149 - DNA, 25 bp, Saccharomyces pastorianus
gagacctactccaaattgaccaata

SEQ ID NO: 105150 - DNA, 25 bp, Saccharomyces pastorianus
aggagatttttcacactttaccaga

SEQ ID NO: 105151 - DNA, 25 bp, Saccharomyces pastorianus
aggccagacagtaatcgcgatcttt

SEQ ID NO: 105152 - DNA, 25 bp, Saccharomyces pastorianus
agaggatagtatccacccctcaaat

SEQ ID NO: 105153 - DNA, 25 bp, Saccharomyces pastorianus
tcccctcctttgctttgctaagaaa

SEQ ID NO: 105154 - DNA, 25 bp, Saccharomyces pastorianus
gtaacgcgcaaacactaccgctata

SEQ ID NO: 105155 - DNA, 25 bp, Saccharomyces pastorianus
tgtgcgacctcgttgccatggcgat

SEQ ID NO: 105156 - DNA, 25 bp, Saccharomyces pastorianus
tacaaaactctcattctctcatttc

SEQ ID NO: 105157 - DNA, 25 bp, Saccharomyces pastorianus
atcgcgcgtgggtgtggtctttccc

SEQ ID NO: 105158 - DNA, 25 bp, Saccharomyces pastorianus
ctgtgctacgaagtggtctctgtgg

SEQ ID NO: 105159 - DNA, 25 bp, Saccharomyces pastorianus
gggtatggtacggtgctatctgccc

SEQ ID NO: 105160 - DNA, 25 bp, Saccharomyces pastorianus
tacgctctgcgctgtgctacgaagt

SEQ ID NO: 105161 - DNA, 25 bp, Saccharomyces pastorianus
tcatttcctgcttcgttcatttcga

SEQ ID NO: 105162 - DNA, 25 bp, Saccharomyces pastorianus
gttcatttcgagtttccaagggtat

SEQ ID NO: 105163 - DNA, 25 bp, Saccharomyces pastorianus
ttgctccggatttcgcatagttgtc

SEQ ID NO: 105164 - DNA, 25 bp, Saccharomyces pastorianus
gacgctgacgccttgtttggtgaaa

SEQ ID NO: 105165 - DNA, 25 bp, Saccharomyces pastorianus
gaaagactagttgcctttgcctcca

SEQ ID NO: 105166 - DNA, 25 bp, Saccharomyces pastorianus
gagagtttctgactaccaaaaggct

SEQ ID NO: 105167 - DNA, 25 bp, Saccharomyces pastorianus
tcgccgacagactgttggttgcttt

SEQ ID NO: 105168 - DNA, 25 bp, Saccharomyces pastorianus
aaaccagacccagccattgttgaaa

SEQ ID NO: 105169 - DNA, 25 bp, Saccharomyces pastorianus
aagatacttcttggacgccttacca

SEQ ID NO: 105170 - DNA, 25 bp, Saccharomyces pastorianus
gccttaccagttgctttgctaggta

SEQ ID NO: 105171 - DNA, 25 bp, Saccharomyces pastorianus
gatggattcaagacgctgacgcctt

SEQ ID NO: 105172 - DNA, 25 bp, Saccharomyces pastorianus
gctggtgttatgtccaagtcgacta

SEQ ID NO: 105173 - DNA, 25 bp, Saccharomyces pastorianus
cattgaaggtgtctttttctccggt

SEQ ID NO: 105174 - DNA, 25 bp, Saccharomyces pastorianus
aatacgttgagttcgtcgccgacag

SEQ ID NO: 105175 - DNA, 25 bp, Saccharomyces pastorianus
gtctctacagatcaattcgttggaa

SEQ ID NO: 105176 - DNA, 25 bp, Saccharomyces pastorianus
ctctacagatcaattcgttggaaaa

SEQ ID NO: 105177 - DNA, 25 bp, Saccharomyces pastorianus
gacaccttcaatggaggcaaaggca

SEQ ID NO: 105178 - DNA, 25 bp, Saccharomyces pastorianus
ccagaaaatggaggcaaaggaaccg

SEQ ID NO: 105179 - DNA, 25 bp, Saccharomyces pastorianus
accttcaatggaggcaaaggcaact

SEQ ID NO: 105180 - DNA, 25 bp, Saccharomyces pastorianus
accggagaaaaagacaccttcaatg

SEQ ID NO: 105181 - DNA, 25 bp, Saccharomyces pastorianus
aaaagacaccttcaatggaggcaaa

SEQ ID NO: 105182 - DNA, 25 bp, Saccharomyces pastorianus
gaaaaagacaccttcaatggaggca

SEQ ID NO: 105183 - DNA, 25 bp, Saccharomyces pastorianus
aaagacaccttcaatggaggcaaag

SEQ ID NO: 105184 - DNA, 25 bp, Saccharomyces pastorianus
ggagaaaaagacaccttcaatggag

SEQ ID NO: 105185 - DNA, 25 bp, Saccharomyces pastorianus
tggaaaaggttaaaccgggcatcat

SEQ ID NO: 105186 - DNA, 25 bp, Saccharomyces pastorianus
gtctctacagatcaattcgttggaa

SEQ ID NO: 105187 - DNA, 25 bp, Saccharomyces pastorianus
ggtgtgcaaaccttcgtctctacag

SEQ ID NO: 105188 - DNA, 25 bp, Saccharomyces pastorianus
ctctacagatcaattcgttggaaaa

SEQ ID NO: 105189 - DNA, 25 bp, Saccharomyces pastorianus
gacaccttcaatggaggcaaaggca

SEQ ID NO: 105190 - DNA, 25 bp, Saccharomyces pastorianus
gctgggtctggtttgttcttcaaat

SEQ ID NO: 105191 - DNA, 25 bp, Saccharomyces pastorianus
ccagaaaatggaggcaaaggaaccg

SEQ ID NO: 105192 - DNA, 25 bp, Saccharomyces pastorianus
accttcaatggaggcaaaggcaact

SEQ ID NO: 105193 - DNA, 25 bp, Saccharomyces pastorianus
accggagaaaaagacaccttcaatg

SEQ ID NO: 105194 - DNA, 25 bp, Saccharomyces pastorianus
catacctctctttttcaaccagaaa

SEQ ID NO: 105195 - DNA, 25 bp, Saccharomyces pastorianus
aaaagacaccttcaatggaggcaaa

SEQ ID NO: 105196 - DNA, 25 bp, Saccharomyces pastorianus
tggaaaaggttaaaccgggcatcat

SEQ ID NO: 105197 - DNA, 25 bp, Saccharomyces pastorianus
acattgttagcatatttcctgataa

SEQ ID NO: 105198 - DNA, 25 bp, Saccharomyces pastorianus
aaggccattcgagagtacgttaatc

SEQ ID NO: 105199 - DNA, 25 bp, Saccharomyces pastorianus
gatactcgagatcaacaagtttcca

SEQ ID NO: 105200 - DNA, 25 bp, Saccharomyces pastorianus
aatcctgctagcatgaagggcaagc

SEQ ID NO: 105201 - DNA, 25 bp, Saccharomyces pastorianus
gtagaagtactgtgggaaccgcaaa

SEQ ID NO: 105202 - DNA, 25 bp, Saccharomyces pastorianus
attccctctgaatttgcgtacttga

SEQ ID NO: 105203 - DNA, 25 bp, Saccharomyces pastorianus
gcaaaggacggctattatttataca

SEQ ID NO: 105204 - DNA, 25 bp, Saccharomyces pastorianus
gatctccaaatattaatcctgctag

SEQ ID NO: 105205 - DNA, 25 bp, Saccharomyces pastorianus
aacagcgatgacacggcttacaaat

SEQ ID NO: 105206 - DNA, 25 bp, Saccharomyces pastorianus
gaagcgttcaaaaggttgccaattt

SEQ ID NO: 105207 - DNA, 25 bp, Saccharomyces pastorianus
gattgggatgggttcttgaccccaa

SEQ ID NO: 105208 - DNA, 25 bp, Saccharomyces pastorianus
ttgcctttaggtttttgcgataaga

SEQ ID NO: 105209 - DNA, 25 bp, Saccharomyces pastorianus
gaaaagggatcactactatgtatag

SEQ ID NO: 105210 - DNA, 25 bp, Saccharomyces pastorianus
actggatcccagtttctttcttctt

SEQ ID NO: 105211 - DNA, 25 bp, Saccharomyces pastorianus
aaagaggctcggtattcttcgtcac

SEQ ID NO: 105212 - DNA, 25 bp, Saccharomyces pastorianus
ctatgtatagtggttgatggtcgaa

SEQ ID NO: 105213 - DNA, 25 bp, Saccharomyces pastorianus
gctcggtattcttcgtcactataaa

SEQ ID NO: 105214 - DNA, 25 bp, Saccharomyces pastorianus
aagcacacagctgaatttcctgaat

SEQ ID NO: 105215 - DNA, 25 bp, Saccharomyces pastorianus
attacacctcgaagtttaccagcaa

SEQ ID NO: 105216 - DNA, 25 bp, Saccharomyces pastorianus
gtattttcagcatttaagcacacag

SEQ ID NO: 105217 - DNA, 25 bp, Saccharomyces pastorianus
ggtcgaattaccagtttgcctttag

SEQ ID NO: 105218 - DNA, 25 bp, Saccharomyces pastorianus
gaatcgctttttcgaaggtcaccaa

SEQ ID NO: 105219 - DNA, 25 bp, Saccharomyces pastorianus
tccaactccagaagccataccgaag

SEQ ID NO: 105220 - DNA, 25 bp, Saccharomyces pastorianus
atggcacgaggtagttcttggagct

SEQ ID NO: 105221 - DNA, 25 bp, Saccharomyces pastorianus
tttttcggctcttctgatggtttat

SEQ ID NO: 105222 - DNA, 25 bp, Saccharomyces pastorianus
gatggtttatttccaactccagaag

SEQ ID NO: 105223 - DNA, 25 bp, Saccharomyces pastorianus
agttcttggagctgttcaggttcct

SEQ ID NO: 105224 - DNA, 25 bp, Saccharomyces pastorianus
gagcaccgaatctactagcgccaga

SEQ ID NO: 105225 - DNA, 25 bp, Saccharomyces pastorianus
tcttcactatcttcctcttcttttt

SEQ ID NO: 105226 - DNA, 25 bp, Saccharomyces pastorianus
tatgctgtttctttttcggctcttc

SEQ ID NO: 105227 - DNA, 25 bp, Saccharomyces pastorianus
tagcgccagatagtttagccattct

SEQ ID NO: 105228 - DNA, 25 bp, Saccharomyces pastorianus
gttaaaaccaacaggagcaccgaat

SEQ ID NO: 105229 - DNA, 25 bp, Saccharomyces pastorianus
ttagccattctttctctcaatgcgg

SEQ ID NO: 105230 - DNA, 25 bp, Saccharomyces pastorianus
gagttccctgttttactgggtgaca

SEQ ID NO: 105231 - DNA, 25 bp, Saccharomyces pastorianus
gaaagttctcctatcaaagcctcct

SEQ ID NO: 105232 - DNA, 25 bp, Saccharomyces pastorianus
tactagtaccaagtttcatcccgct

SEQ ID NO: 105233 - DNA, 25 bp, Saccharomyces pastorianus
ggagtgacaccgcaggatttgcaaa

SEQ ID NO: 105234 - DNA, 25 bp, Saccharomyces pastorianus
tttcgtacatgcatggccgttttac

SEQ ID NO: 105235 - DNA, 25 bp, Saccharomyces pastorianus
aaatcaatacggtttcgggcagcat

SEQ ID NO: 105236 - DNA, 25 bp, Saccharomyces pastorianus
caacaaatgtatctggccccatggt

SEQ ID NO: 105237 - DNA, 25 bp, Saccharomyces pastorianus
ttacgcgtcttcatctactagtacc

SEQ ID NO: 105238 - DNA, 25 bp, Saccharomyces pastorianus
gtacgctcaattgtctttcaagtgg

SEQ ID NO: 105239 - DNA, 25 bp, Saccharomyces pastorianus
gaacctgggtgttcatgggccataa

SEQ ID NO: 105240 - DNA, 25 bp, Saccharomyces pastorianus
gttaaaaccactcgtacgctcaatt

SEQ ID NO: 105241 - DNA, 25 bp, Saccharomyces pastorianus
aaaagtttggctgcgctgaagaaaa

SEQ ID NO: 105242 - DNA, 25 bp, Saccharomyces pastorianus
tggtccacctttactccatagtgga

SEQ ID NO: 105243 - DNA, 25 bp, Saccharomyces pastorianus
ggctgaaaaactgcagattgtcaat

SEQ ID NO: 105244 - DNA, 25 bp, Saccharomyces pastorianus
aggtaagcagaataggccctacaat

SEQ ID NO: 105245 - DNA, 25 bp, Saccharomyces pastorianus
taggccctacaatcatcctgaattg

SEQ ID NO: 105246 - DNA, 25 bp, Saccharomyces pastorianus
gaaaagtcgctcgaaaggtaagcag

SEQ ID NO: 105247 - DNA, 25 bp, Saccharomyces pastorianus
tgagcgatgaaagctttgctgagtt

SEQ ID NO: 105248 - DNA, 25 bp, Saccharomyces pastorianus
cgcaatgtggttaactatctcagta

SEQ ID NO: 105249 - DNA, 25 bp, Saccharomyces pastorianus
tcaacttcctgccaatatggtccac

SEQ ID NO: 105250 - DNA, 25 bp, Saccharomyces pastorianus
gaagtcttgaagttcctaacagatc

SEQ ID NO: 105251 - DNA, 25 bp, Saccharomyces pastorianus
gcaaggtattactcgcaatgtggtt

SEQ ID NO: 105252 - DNA, 25 bp, Saccharomyces pastorianus
agcatgttggctctgcctgaggaaa

SEQ ID NO: 105253 - DNA, 25 bp, Saccharomyces pastorianus
gtgttaccatggagtattttcgcat

SEQ ID NO: 105254 - DNA, 25 bp, Saccharomyces pastorianus
gttgcctgttgttgagtgcatcgac

SEQ ID NO: 105255 - DNA, 25 bp, Saccharomyces pastorianus
tattaccattgacagcatgttggct

SEQ ID NO: 105256 - DNA, 25 bp, Saccharomyces pastorianus
gagcacgtactacaaactactaggg

SEQ ID NO: 105257 - DNA, 25 bp, Saccharomyces pastorianus
gaagacgatcagttttcttggaaca

SEQ ID NO: 105258 - DNA, 25 bp, Saccharomyces pastorianus
gtgcatcgactttgggcaataccag

SEQ ID NO: 105259 - DNA, 25 bp, Saccharomyces pastorianus
ttttcgcatgttgttgagcacgtac

SEQ ID NO: 105260 - DNA, 25 bp, Saccharomyces pastorianus
ttggcatgcaatgtgtatggctctc

SEQ ID NO: 105261 - DNA, 25 bp, Saccharomyces pastorianus
gagatgactggccaacagcagaaga

SEQ ID NO: 105262 - DNA, 25 bp, Saccharomyces pastorianus
ttccaaattctaaaccgctacagcc

SEQ ID NO: 105263 - DNA, 25 bp, Saccharomyces pastorianus
aaaaattgaggtgggcacagccaaa

SEQ ID NO: 105264 - DNA, 25 bp, Saccharomyces pastorianus
agcgtgtatattgggatttgcacaa

SEQ ID NO: 105265 - DNA, 25 bp, Saccharomyces pastorianus
gatcggagctttggtagcgtgtata

SEQ ID NO: 105266 - DNA, 25 bp, Saccharomyces pastorianus
ggatttgcacaacagtccctgaaag

SEQ ID NO: 105267 - DNA, 25 bp, Saccharomyces pastorianus
tactgactgcgtatggcattagttg

SEQ ID NO: 105268 - DNA, 25 bp, Saccharomyces pastorianus
tggtttttccaatagattttcccag

SEQ ID NO: 105269 - DNA, 25 bp, Saccharomyces pastorianus
ttaatatgtgttttgccagcttacc

SEQ ID NO: 105270 - DNA, 25 bp, Saccharomyces pastorianus
agctatcgctcatgatcggagcttt

SEQ ID NO: 105271 - DNA, 25 bp, Saccharomyces pastorianus
tccctgaaagttttactgactgcgt

SEQ ID NO: 105272 - DNA, 25 bp, Saccharomyces pastorianus
aaatttcaacagctatcgctcatga

SEQ ID NO: 105273 - DNA, 25 bp, Saccharomyces pastorianus
ggcattagttgtgtgattactttaa

SEQ ID NO: 105274 - DNA, 25 bp, Saccharomyces pastorianus
gacaggattccgcttattattggat

SEQ ID NO: 105275 - DNA, 25 bp, Saccharomyces pastorianus
atgtatgtcttgtattatctggctc

SEQ ID NO: 105276 - DNA, 25 bp, Saccharomyces pastorianus
gttagatcactttgaaactcctgga

SEQ ID NO: 105277 - DNA, 25 bp, Saccharomyces pastorianus
gaaactcctggaaaatgccggcatt

SEQ ID NO: 105278 - DNA, 25 bp, Saccharomyces pastorianus
gtaaactatttaacgagctctctaa

SEQ ID NO: 105279 - DNA, 25 bp, Saccharomyces pastorianus
gaaggttctagtcacctccatttat

SEQ ID NO: 105280 - DNA, 25 bp, Saccharomyces pastorianus
aaccattctggcacatttatttcac

SEQ ID NO: 105281 - DNA, 25 bp, Saccharomyces pastorianus
atttttgaacaagatccctatgagt

SEQ ID NO: 105282 - DNA, 25 bp, Saccharomyces pastorianus
atcaggattcgttaatctctacaaa

SEQ ID NO: 105283 - DNA, 25 bp, Saccharomyces pastorianus
agctctctaaggataagggcctgat

SEQ ID NO: 105284 - DNA, 25 bp, Saccharomyces pastorianus
tgccggcatttgatcgagaaggttc

SEQ ID NO: 105285 - DNA, 25 bp, Saccharomyces pastorianus
tcgccagtcatctttcaactttatc

SEQ ID NO: 105286 - DNA, 25 bp, Saccharomyces pastorianus
agcatggcagcaggtggtgaactta

SEQ ID NO: 105287 - DNA, 25 bp, Saccharomyces pastorianus
ttatcaccttttaccttgcttgtca

SEQ ID NO: 105288 - DNA, 25 bp, Saccharomyces pastorianus
ggcatgacctcattaacaaggctgt

SEQ ID NO: 105289 - DNA, 25 bp, Saccharomyces pastorianus
gctgcagcatcaatctcgtcaagga

SEQ ID NO: 105290 - DNA, 25 bp, Saccharomyces pastorianus
ggaggtgcccaatgttacgctggat

SEQ ID NO: 105291 - DNA, 25 bp, Saccharomyces pastorianus
aaagagctccacatgtttcggttta

SEQ ID NO: 105292 - DNA, 25 bp, Saccharomyces pastorianus
gaggccaagacctaggccctgggaa

SEQ ID NO: 105293 - DNA, 25 bp, Saccharomyces pastorianus
gagggtttagctagtactccttcat

SEQ ID NO: 105294 - DNA, 25 bp, Saccharomyces pastorianus
gccctgggaaggtcagctgcagcat

SEQ ID NO: 105295 - DNA, 25 bp, Saccharomyces pastorianus
gtactccttcattgaggccaagacc

SEQ ID NO: 105296 - DNA, 25 bp, Saccharomyces pastorianus
tacccaccagagtactgcgagtttt

SEQ ID NO: 105297 - DNA, 25 bp, Saccharomyces pastorianus
ctattgtggaatttgctcctaccca

SEQ ID NO: 105298 - DNA, 25 bp, Saccharomyces pastorianus
cacagggtgctcagtctcgaaaaat

SEQ ID NO: 105299 - DNA, 25 bp, Saccharomyces pastorianus
gaaaaccacgcagacctttatgcaa

SEQ ID NO: 105300 - DNA, 25 bp, Saccharomyces pastorianus
tatctctgggctggaagttttcgac

SEQ ID NO: 105301 - DNA, 25 bp, Saccharomyces pastorianus
ggtggaagccgtgaccaacaaactg

SEQ ID NO: 105302 - DNA, 25 bp, Saccharomyces pastorianus
ggctgaatccagtattggcgaagct

SEQ ID NO: 105303 - DNA, 25 bp, Saccharomyces pastorianus
aaacttacatacattccttgctgga

SEQ ID NO: 105304 - DNA, 25 bp, Saccharomyces pastorianus
gaagctgtcatcgaaagtgatcatt

SEQ ID NO: 105305 - DNA, 25 bp, Saccharomyces pastorianus
gaaagtttatcgtcgctatctctgg

SEQ ID NO: 105306 - DNA, 25 bp, Saccharomyces pastorianus
ttatgcaaagctatacggtactgac

SEQ ID NO: 105307 - DNA, 25 bp, Saccharomyces pastorianus
aagatgcctgcacattctcatcaag

SEQ ID NO: 105308 - DNA, 25 bp, Saccharomyces pastorianus
tgacgactctaagacgaactccttc

SEQ ID NO: 105309 - DNA, 25 bp, Saccharomyces pastorianus
agcctagctttgaagacgctgcctt

SEQ ID NO: 105310 - DNA, 25 bp, Saccharomyces pastorianus
tgagggcaccaacaaggaccagcta

SEQ ID NO: 105311 - DNA, 25 bp, Saccharomyces pastorianus
ttccagctcaaggtcggcgaggtaa

SEQ ID NO: 105312 - DNA, 25 bp, Saccharomyces pastorianus
atctgacgtagcatcgagcaccggg

SEQ ID NO: 105313 - DNA, 25 bp, Saccharomyces pastorianus
ggattcaagaagacccgcatcgcat

SEQ ID NO: 105314 - DNA, 25 bp, Saccharomyces pastorianus
ttaagagaccatccagtgcgtgtaa

SEQ ID NO: 105315 - DNA, 25 bp, Saccharomyces pastorianus
gagatcagattgctcttcatacaag

SEQ ID NO: 105316 - DNA, 25 bp, Saccharomyces pastorianus
attgtggtacttattcccacgcata

SEQ ID NO: 105317 - DNA, 25 bp, Saccharomyces pastorianus
cgaggccctggctaaagagagatca

SEQ ID NO: 105318 - DNA, 25 bp, Saccharomyces pastorianus
gatctatgcgatgcgggtcttcttg

SEQ ID NO: 105319 - DNA, 25 bp, Saccharomyces pastorianus
gagtgcttcgtctctggattgaaaa

SEQ ID NO: 105320 - DNA, 25 bp, Saccharomyces pastorianus
gacttactatacctgacggtccacg

SEQ ID NO: 105321 - DNA, 25 bp, Saccharomyces pastorianus
taagtgcttgtgtagctggtccttg

SEQ ID NO: 105322 - DNA, 25 bp, Saccharomyces pastorianus
agaatgtgcaggcatcttacacgca

SEQ ID NO: 105323 - DNA, 25 bp, Saccharomyces pastorianus
ccgtagtcggttatgcgtgggaata

SEQ ID NO: 105324 - DNA, 25 bp, Saccharomyces pastorianus
tcagatggcattggtgcgtcgttgt

SEQ ID NO: 105325 - DNA, 25 bp, Saccharomyces pastorianus
ttacacgcactggatggtctcttaa

SEQ ID NO: 105326 - DNA, 25 bp, Saccharomyces pastorianus
ggtcttcttgaatccttgtgcttga

SEQ ID NO: 105327 - DNA, 25 bp, Saccharomyces pastorianus
ggtgctcgatgctacgtcagatggc

SEQ ID NO: 105328 - DNA, 25 bp, Saccharomyces pastorianus
aatactctcttttcttggacttact

SEQ ID NO: 105329 - DNA, 25 bp, Saccharomyces pastorianus
tcatggcaagcgtctctcaggaggg

SEQ ID NO: 105330 - DNA, 25 bp, Saccharomyces pastorianus
gacacaccgacgagctggattattt

SEQ ID NO: 105331 - DNA, 25 bp, Saccharomyces pastorianus
ggagtcatggagtaccaattcccca

SEQ ID NO: 105332 - DNA, 25 bp, Saccharomyces pastorianus
ggatcccgaagagcattactcctga

SEQ ID NO: 105333 - DNA, 25 bp, Saccharomyces pastorianus
attccccaaggacatgttctactcg

SEQ ID NO: 105334 - DNA, 25 bp, Saccharomyces pastorianus
gatttactttcaccagttgcctcat

SEQ ID NO: 105335 - DNA, 25 bp, Saccharomyces pastorianus
gggcgacgagtcttctttacacaaa

SEQ ID NO: 105336 - DNA, 25 bp, Saccharomyces pastorianus
ggccacttcgcttttccagaaagaa

SEQ ID NO: 105337 - DNA, 25 bp, Saccharomyces pastorianus
ttaagatttcgaatcccaggtccca

SEQ ID NO: 105338 - DNA, 25 bp, Saccharomyces pastorianus
agggcaagtatttcgacacacagtc

SEQ ID NO: 105339 - DNA, 25 bp, Saccharomyces pastorianus
gagcaggtatgcctcattgtccgac

SEQ ID NO: 105340 - DNA, 25 bp, Saccharomyces pastorianus
ggaaccagttccaatattttctcta

SEQ ID NO: 105341 - DNA, 25 bp, Saccharomyces pastorianus
gaagaagttcaatggcacagtatgc

SEQ ID NO: 105342 - DNA, 25 bp, Saccharomyces pastorianus
accacccttgatgaaatacgaatgt

SEQ ID NO: 105343 - DNA, 25 bp, Saccharomyces pastorianus
cagcgattgtgataccagcgttcca

SEQ ID NO: 105344 - DNA, 25 bp, Saccharomyces pastorianus
gcgcggcaggcagatactttgtgac

SEQ ID NO: 105345 - DNA, 25 bp, Saccharomyces pastorianus
agcgttccaccaaaagtgcccttag

SEQ ID NO: 105346 - DNA, 25 bp, Saccharomyces pastorianus
attttctctaggttggacatggcca

SEQ ID NO: 105347 - DNA, 25 bp, Saccharomyces pastorianus
tggccattttggaagcactcatttt

SEQ ID NO: 105348 - DNA, 25 bp, Saccharomyces pastorianus
ccgtttctcagattctgcacatggt

SEQ ID NO: 105349 - DNA, 25 bp, Saccharomyces pastorianus
atgcaatgacgccagcagcgattgt

SEQ ID NO: 105350 - DNA, 25 bp, Saccharomyces pastorianus
cactcatttttatgcaatcttgtct

SEQ ID NO: 105351 - DNA, 25 bp, Saccharomyces pastorianus
agagagacataaccctcaagaatgt

SEQ ID NO: 105352 - DNA, 25 bp, Saccharomyces pastorianus
tatgtttgcagagatcgccctgtgt

SEQ ID NO: 105353 - DNA, 25 bp, Saccharomyces pastorianus
gattgtaagcgaggaatcgtcgaca

SEQ ID NO: 105354 - DNA, 25 bp, Saccharomyces pastorianus
agatcgccctgtgtcatgatagaga

SEQ ID NO: 105355 - DNA, 25 bp, Saccharomyces pastorianus
gaatgtcttgacaatccagagctga

SEQ ID NO: 105356 - DNA, 25 bp, Saccharomyces pastorianus
taagcggttcacaggtaacgcacct

SEQ ID NO: 105357 - DNA, 25 bp, Saccharomyces pastorianus
acctctgtcgactggcaagtacgat

SEQ ID NO: 105358 - DNA, 25 bp, Saccharomyces pastorianus
agaaggctgtcgctatatgtttgca

SEQ ID NO: 105359 - DNA, 25 bp, Saccharomyces pastorianus
atctgcccgaactttgtattgctca

SEQ ID NO: 105360 - DNA, 25 bp, Saccharomyces pastorianus
gagctgaataaggatctgcccgaac

SEQ ID NO: 105361 - DNA, 25 bp, Saccharomyces pastorianus
atcgtcgacatgactaagcggttca

SEQ ID NO: 105362 - DNA, 25 bp, Saccharomyces pastorianus
tgacaagcggtatagcactccctgt

SEQ ID NO: 105363 - DNA, 25 bp, Saccharomyces pastorianus
ggccatttgagttgtatcatgtgca

SEQ ID NO: 105364 - DNA, 25 bp, Saccharomyces pastorianus
gtccgattcatcaaacactggccaa

SEQ ID NO: 105365 - DNA, 25 bp, Saccharomyces pastorianus
atctggctcacttccttacaggaat

SEQ ID NO: 105366 - DNA, 25 bp, Saccharomyces pastorianus
ttactacccactattcgatattttg

SEQ ID NO: 105367 - DNA, 25 bp, Saccharomyces pastorianus
tttgatctttttgcttgccccaata

SEQ ID NO: 105368 - DNA, 25 bp, Saccharomyces pastorianus
tccctgttgttttctatcattgcca

SEQ ID NO: 105369 - DNA, 25 bp, Saccharomyces pastorianus
ctcgcattgggattccttttggtca

SEQ ID NO: 105370 - DNA, 25 bp, Saccharomyces pastorianus
tatttctctgtcaggattcctcgca

SEQ ID NO: 105371 - DNA, 25 bp, Saccharomyces pastorianus
tgccccaataccaaacacaattttc

SEQ ID NO: 105372 - DNA, 25 bp, Saccharomyces pastorianus
atcacacatctgacttcatgtccga

SEQ ID NO: 105373 - DNA, 25 bp, Saccharomyces pastorianus
ggccgcattgctttctcaaaggcaa

SEQ ID NO: 105374 - DNA, 25 bp, Saccharomyces pastorianus
gtctaggactttggcattcgtggaa

SEQ ID NO: 105375 - DNA, 25 bp, Saccharomyces pastorianus
agagagagacgttcggccgcattgc

SEQ ID NO: 105376 - DNA, 25 bp, Saccharomyces pastorianus
gattatgactgatgtacccgctttc

SEQ ID NO: 105377 - DNA, 25 bp, Saccharomyces pastorianus
gagacatatctaagctcgctaatcg

SEQ ID NO: 105378 - DNA, 25 bp, Saccharomyces pastorianus
caaaccttatggacagactgcgtga

SEQ ID NO: 105379 - DNA, 25 bp, Saccharomyces pastorianus
gaaggtccagctctaattctaaaac

SEQ ID NO: 105380 - DNA, 25 bp, Saccharomyces pastorianus
gaagatgcctgattcgcaagcaaac

SEQ ID NO: 105381 - DNA, 25 bp, Saccharomyces pastorianus
tagctgggctacaaggtatcctacc

SEQ ID NO: 105382 - DNA, 25 bp, Saccharomyces pastorianus
aacgttaccagcagtttctagcgat

SEQ ID NO: 105383 - DNA, 25 bp, Saccharomyces pastorianus
agagctctaatgctaatgccttgaa

SEQ ID NO: 105384 - DNA, 25 bp, Saccharomyces pastorianus
aatggctcaagcagtctcaaaggca

SEQ ID NO: 105385 - DNA, 25 bp, Saccharomyces pastorianus
gtggcacattgaccatacacttatg

SEQ ID NO: 105386 - DNA, 25 bp, Saccharomyces pastorianus
gaatttgaggctaactggacatcca

SEQ ID NO: 105387 - DNA, 25 bp, Saccharomyces pastorianus
ttaccatggcaaagtcacagccgcc

SEQ ID NO: 105388 - DNA, 25 bp, Saccharomyces pastorianus
aagagccctggaattgcctgaagta

SEQ ID NO: 105389 - DNA, 25 bp, Saccharomyces pastorianus
gattgcggaacttaacgacgaactt

SEQ ID NO: 105390 - DNA, 25 bp, Saccharomyces pastorianus
gaaatccatgtaccaactctggcag

SEQ ID NO: 105391 - DNA, 25 bp, Saccharomyces pastorianus
accagaggcccaggaacgtgtctaa

SEQ ID NO: 105392 - DNA, 25 bp, Saccharomyces pastorianus
tggacatccattttgaaagcacatt

SEQ ID NO: 105393 - DNA, 25 bp, Saccharomyces pastorianus
ggattattcacgttaccagaggccc

SEQ ID NO: 105394 - DNA, 25 bp, Saccharomyces pastorianus
acagccgccttaaccgaatttgagg

SEQ ID NO: 105395 - DNA, 25 bp, Saccharomyces pastorianus
gatctgatccgacaatatgacctac

SEQ ID NO: 105396 - DNA, 25 bp, Saccharomyces pastorianus
tatgacctacaaactacagcttctg

SEQ ID NO: 105397 - DNA, 25 bp, Saccharomyces pastorianus
gggaagttacaccagttgttcattt

SEQ ID NO: 105398 - DNA, 25 bp, Saccharomyces pastorianus
acagcttctgaactggtgactgaac

SEQ ID NO: 105399 - DNA, 25 bp, Saccharomyces pastorianus
gagcacttttggtaatgagcgacaa

SEQ ID NO: 105400 - DNA, 25 bp, Saccharomyces pastorianus
ggatacgtttgataggccattgatt

SEQ ID NO: 105401 - DNA, 25 bp, Saccharomyces pastorianus
atttgctgctggtgaagtttcgggt

SEQ ID NO: 105402 - DNA, 25 bp, Saccharomyces pastorianus
tattgcatcccaccactggaagaag

SEQ ID NO: 105403 - DNA, 25 bp, Saccharomyces pastorianus
ttcgggtggtgttcatggagccaac

SEQ ID NO: 105404 - DNA, 25 bp, Saccharomyces pastorianus
gtttaggcggcatcttattgcatcc

SEQ ID NO: 105405 - DNA, 25 bp, Saccharomyces pastorianus
cggaaagcgttctatctaatgggat

SEQ ID NO: 105406 - DNA, 25 bp, Saccharomyces pastorianus
gaacccatatatttgtgccacatcc

SEQ ID NO: 105407 - DNA, 25 bp, Saccharomyces pastorianus
tacacagttcggatcctcagcgtag

SEQ ID NO: 105408 - DNA, 25 bp, Saccharomyces pastorianus
tgagatggttcgatgtacacagttc

SEQ ID NO: 105409 - DNA, 25 bp, Saccharomyces pastorianus
caatgtctgtgaactggatatcgta

SEQ ID NO: 105410 - DNA, 25 bp, Saccharomyces pastorianus
gactcatatcttccagagaccataa

SEQ ID NO: 105411 - DNA, 25 bp, Saccharomyces pastorianus
gaggtatgcgggtctgtattttgtc

SEQ ID NO: 105412 - DNA, 25 bp, Saccharomyces pastorianus
cttcgtagagttttccgattcgacg

SEQ ID NO: 105413 - DNA, 25 bp, Saccharomyces pastorianus
tcagcgtagccaggatgccattgcg

SEQ ID NO: 105414 - DNA, 25 bp, Saccharomyces pastorianus
atttgtgccacatccatctgtttgt

SEQ ID NO: 105415 - DNA, 25 bp, Saccharomyces pastorianus
tgccattgcgcagatttatagactc

SEQ ID NO: 105416 - DNA, 25 bp, Saccharomyces pastorianus
ggacttacttaacgatgaacccata

SEQ ID NO: 105417 - DNA, 25 bp, Saccharomyces pastorianus
gacctcctgcccgtgagagaatcaa

SEQ ID NO: 105418 - DNA, 25 bp, Saccharomyces pastorianus
atgatgacgctgacattgatctcaa

SEQ ID NO: 105419 - DNA, 25 bp, Saccharomyces pastorianus
aatcaacgttttaagcgacctcctg

SEQ ID NO: 105420 - DNA, 25 bp, Saccharomyces pastorianus
aatattggcgcgtgccgctgaatac

SEQ ID NO: 105421 - DNA, 25 bp, Saccharomyces pastorianus
aaacctactactttggccacaacag

SEQ ID NO: 105422 - DNA, 25 bp, Saccharomyces pastorianus
ataccattggcagaacacgatcgtg

SEQ ID NO: 105423 - DNA, 25 bp, Saccharomyces pastorianus
gatcgtgggccagaacaccaacagg

SEQ ID NO: 105424 - DNA, 25 bp, Saccharomyces pastorianus
ggaatgacgtcttcaccaatggaat

SEQ ID NO: 105425 - DNA, 25 bp, Saccharomyces pastorianus
gtcgccgcgaaaacatcaacactgc

SEQ ID NO: 105426 - DNA, 25 bp, Saccharomyces pastorianus
aacgcatcgcaattagccagtgcaa

SEQ ID NO: 105427 - DNA, 25 bp, Saccharomyces pastorianus
atataagcatgcagccgggtcgtcg

SEQ ID NO: 105428 - DNA, 25 bp, Saccharomyces pastorianus
agggcttaaatctctttggtgataa

SEQ ID NO: 105429 - DNA, 25 bp, Saccharomyces pastorianus
aagagtttgttgaacggtcccagca

SEQ ID NO: 105430 - DNA, 25 bp, Saccharomyces pastorianus
aagaaactttgacggcttcagactt

SEQ ID NO: 105431 - DNA, 25 bp, Saccharomyces pastorianus
agacttcccgatggcggcaacagta

SEQ ID NO: 105432 - DNA, 25 bp, Saccharomyces pastorianus
agcgacataagcctactgataacaa

SEQ ID NO: 105433 - DNA, 25 bp, Saccharomyces pastorianus
ctccgtatttgccagcttatttaat

SEQ ID NO: 105434 - DNA, 25 bp, Saccharomyces pastorianus
gaacggtcccagcaagtatatgaaa

SEQ ID NO: 105435 - DNA, 25 bp, Saccharomyces pastorianus
gtactgtttacagactcaaagagct

SEQ ID NO: 105436 - DNA, 25 bp, Saccharomyces pastorianus
acagtatgatcctagcttgagtgag

SEQ ID NO: 105437 - DNA, 25 bp, Saccharomyces pastorianus
aaatgtgggtttcactccgtatttg

SEQ ID NO: 105438 - DNA, 25 bp, Saccharomyces pastorianus
agatactggttctcgtttgcagaca

SEQ ID NO: 105439 - DNA, 25 bp, Saccharomyces pastorianus
gtttccatcttctcttagagccaag

SEQ ID NO: 105440 - DNA, 25 bp, Saccharomyces pastorianus
taatgccgtattaggctctaacgtt

SEQ ID NO: 105441 - DNA, 25 bp, Saccharomyces pastorianus
gatctcctggaaaatcctaatgccg

SEQ ID NO: 105442 - DNA, 25 bp, Saccharomyces pastorianus
ttaaaagtcgtcaccacgacggcag

SEQ ID NO: 105443 - DNA, 25 bp, Saccharomyces pastorianus
aagacggcgctactatcaaggaaaa

SEQ ID NO: 105444 - DNA, 25 bp, Saccharomyces pastorianus
gaacgaactgaaagacggcgctact

SEQ ID NO: 105445 - DNA, 25 bp, Saccharomyces pastorianus
acgacggcagacgatgcgtttccat

SEQ ID NO: 105446 - DNA, 25 bp, Saccharomyces pastorianus
tactgtcttctatacatgcacttcc

SEQ ID NO: 105447 - DNA, 25 bp, Saccharomyces pastorianus
ggaaaagtgtcctcaatgtggaaat

SEQ ID NO: 105448 - DNA, 25 bp, Saccharomyces pastorianus
tgtaggatcgttaattttttgcttg

SEQ ID NO: 105449 - DNA, 25 bp, Saccharomyces pastorianus
ctctaacgttgaatgcagccaatgt

SEQ ID NO: 105450 - DNA, 25 bp, Saccharomyces pastorianus
gaaaaacatccgctcataacaaaat

SEQ ID NO: 105451 - DNA, 25 bp, Saccharomyces pastorianus
atgtcgaatacttgggacgatgtat

SEQ ID NO: 105452 - DNA, 25 bp, Saccharomyces pastorianus
gatgtcgaaactgaacgatctccag

SEQ ID NO: 105453 - DNA, 25 bp, Saccharomyces pastorianus
acttagtaagtccatatttgatcca

SEQ ID NO: 105454 - DNA, 25 bp, Saccharomyces pastorianus
atttgatccaaactttgacttgcaa

SEQ ID NO: 105455 - DNA, 25 bp, Saccharomyces pastorianus
ggtttcaatgatggtttcccaacgg

SEQ ID NO: 105456 - DNA, 25 bp, Saccharomyces pastorianus
tacttggcctacgaacacgttttgg

SEQ ID NO: 105457 - DNA, 25 bp, Saccharomyces pastorianus
aaatggactgatattgtcaatacct

SEQ ID NO: 105458 - DNA, 25 bp, Saccharomyces pastorianus
cgatctccagatttagtgaagttaa

SEQ ID NO: 105459 - DNA, 25 bp, Saccharomyces pastorianus
gatggtttcccaacgggcgctaaat

SEQ ID NO: 105460 - DNA, 25 bp, Saccharomyces pastorianus
agatgaggacctcagtaaggcatat

SEQ ID NO: 105461 - DNA, 25 bp, Saccharomyces pastorianus
gtggtacctcatgacattctaatag

SEQ ID NO: 105462 - DNA, 25 bp, Saccharomyces pastorianus
tattacaatccgcttccaagagggc

SEQ ID NO: 105463 - DNA, 25 bp, Saccharomyces pastorianus
gattcaaagccctagacgcaagtaa

SEQ ID NO: 105464 - DNA, 25 bp, Saccharomyces pastorianus
aagtaatgccattgaccgtttgagg

SEQ ID NO: 105465 - DNA, 25 bp, Saccharomyces pastorianus
ctgctgcgtcagtagttaaccaact

SEQ ID NO: 105466 - DNA, 25 bp, Saccharomyces pastorianus
gatcttggacatttcggcaggtgac

SEQ ID NO: 105467 - DNA, 25 bp, Saccharomyces pastorianus
tagcgtcccgttgttccaaatttag

SEQ ID NO: 105468 - DNA, 25 bp, Saccharomyces pastorianus
aagaattattgacccgctagcgtcc

SEQ ID NO: 105469 - DNA, 25 bp, Saccharomyces pastorianus
gaacgaacgagcacatccaattatt

SEQ ID NO: 105470 - DNA, 25 bp, Saccharomyces pastorianus
gaaaagcggttggtctgctgcgtca

SEQ ID NO: 105471 - DNA, 25 bp, Saccharomyces pastorianus
ttggttgctgtttactacggattcc

SEQ ID NO: 105472 - DNA, 25 bp, Saccharomyces pastorianus
gaatttaacggtctaccaggtgctt

SEQ ID NO: 105473 - DNA, 25 bp, Saccharomyces pastorianus
tttctcatcgtggtaaagccttcgc

SEQ ID NO: 105474 - DNA, 25 bp, Saccharomyces pastorianus
acgctgaagcagttaccaccatttg

SEQ ID NO: 105475 - DNA, 25 bp, Saccharomyces pastorianus
gcaggacacggatctgaatgccatt

SEQ ID NO: 105476 - DNA, 25 bp, Saccharomyces pastorianus
agaggcaagatcgttccaagccggg

SEQ ID NO: 105477 - DNA, 25 bp, Saccharomyces pastorianus
accaccatttgttttgctgattctc

SEQ ID NO: 105478 - DNA, 25 bp, Saccharomyces pastorianus
ggaagtgcagtcgattttgactcaa

SEQ ID NO: 105479 - DNA, 25 bp, Saccharomyces pastorianus
aatgccattgcgttagctaagggaa

SEQ ID NO: 105480 - DNA, 25 bp, Saccharomyces pastorianus
gggtgaatatcacttctttcaagga

SEQ ID NO: 105481 - DNA, 25 bp, Saccharomyces pastorianus
aatcaatgaggccttagacctggaa

SEQ ID NO: 105482 - DNA, 25 bp, Saccharomyces pastorianus
gtcatggactgacttacgcagagat

SEQ ID NO: 105483 - DNA, 25 bp, Saccharomyces pastorianus
gaatgatcctaagcaacctttgttc

SEQ ID NO: 105484 - DNA, 25 bp, Saccharomyces pastorianus
gagaaacctgtgaactggccattaa

SEQ ID NO: 105485 - DNA, 25 bp, Saccharomyces pastorianus
catcccagaactacaggccttattg

SEQ ID NO: 105486 - DNA, 25 bp, Saccharomyces pastorianus
aaatcgcctacgtcttcggtcaaat

SEQ ID NO: 105487 - DNA, 25 bp, Saccharomyces pastorianus
aggaggatccacacgttgctgtgag

SEQ ID NO: 105488 - DNA, 25 bp, Saccharomyces pastorianus
tcaaataggtagtccggctgctgtc

SEQ ID NO: 105489 - DNA, 25 bp, Saccharomyces pastorianus
tgatgaagcaatcctggccttggcc

SEQ ID NO: 105490 - DNA, 25 bp, Saccharomyces pastorianus
gtgccattgcttctccagaagttgt

SEQ ID NO: 105491 - DNA, 25 bp, Saccharomyces pastorianus
agttgtcgacgtcttgaaatcttac

SEQ ID NO: 105492 - DNA, 25 bp, Saccharomyces pastorianus
gcatgaagctgctgaagccttgggt

SEQ ID NO: 105493 - DNA, 25 bp, Saccharomyces pastorianus
tggtttcagtgcagaatcctccctt

SEQ ID NO: 105494 - DNA, 25 bp, Saccharomyces pastorianus
gagtcagtccaagagatcatccagc

SEQ ID NO: 105495 - DNA, 25 bp, Saccharomyces pastorianus
attttcgctaggtatcgtcagagac

SEQ ID NO: 105496 - DNA, 25 bp, Saccharomyces pastorianus
actttgtccttcttgggcatagcgc

SEQ ID NO: 105497 - DNA, 25 bp, Saccharomyces pastorianus
ggaagaaccttttactgccatgatc

SEQ ID NO: 105498 - DNA, 25 bp, Saccharomyces pastorianus
gatttacagtcttccaagttccagc

SEQ ID NO: 105499 - DNA, 25 bp, Saccharomyces pastorianus
gttgtttctgccgtagtttacttca

SEQ ID NO: 105500 - DNA, 25 bp, Saccharomyces pastorianus
ggcaagtgcttgttttgagttccat

SEQ ID NO: 105501 - DNA, 25 bp, Saccharomyces pastorianus
ggctgttacatgttggcggcgacca

SEQ ID NO: 105502 - DNA, 25 bp, Saccharomyces pastorianus
ttgggtgactatttcggcatcctga

SEQ ID NO: 105503 - DNA, 25 bp, Saccharomyces pastorianus
ataccacaagcattctctaaccaag

SEQ ID NO: 105504 - DNA, 25 bp, Saccharomyces pastorianus
ttccagctggccattgtgtgcacga

SEQ ID NO: 105505 - DNA, 25 bp, Saccharomyces pastorianus
gtcatcggcgtagcgttgatcagat

SEQ ID NO: 105506 - DNA, 25 bp, Saccharomyces pastorianus
aagtcgaattatacggcggcgccat

SEQ ID NO: 105507 - DNA, 25 bp, Saccharomyces pastorianus
tgaaggaggcttggcagttccacgt

SEQ ID NO: 105508 - DNA, 25 bp, Saccharomyces pastorianus
gttgcctgcaagatgtcatgctgtt

SEQ ID NO: 105509 - DNA, 25 bp, Saccharomyces pastorianus
cgtcaattcccgtcgcgatgaagaa

SEQ ID NO: 105510 - DNA, 25 bp, Saccharomyces pastorianus
acacctaccctggtcatcaaggaag

SEQ ID NO: 105511 - DNA, 25 bp, Saccharomyces pastorianus
ccacctgggtttatagacgcttcta

SEQ ID NO: 105512 - DNA, 25 bp, Saccharomyces pastorianus
gtggtcatctccattaatgtacctt

SEQ ID NO: 105513 - DNA, 25 bp, Saccharomyces pastorianus
caagttcaccggactcgttatggaa

SEQ ID NO: 105514 - DNA, 25 bp, Saccharomyces pastorianus
tgacggagttgaacgggaccaccaa

SEQ ID NO: 105515 - DNA, 25 bp, Saccharomyces pastorianus
gaagtccccgatacacaggaggtgt

SEQ ID NO: 105516 - DNA, 25 bp, Saccharomyces pastorianus
accttgacctccttgcaatttggta

SEQ ID NO: 105517 - DNA, 25 bp, Saccharomyces pastorianus
gaaaaattgtcctctacttccacta

SEQ ID NO: 105518 - DNA, 25 bp, Saccharomyces pastorianus
atcggctctttctacagtgggttca

SEQ ID NO: 105519 - DNA, 25 bp, Saccharomyces pastorianus
catagtcggtttgttggctcagttg

SEQ ID NO: 105520 - DNA, 25 bp, Saccharomyces pastorianus
agaatcagattggtctcccaaccac

SEQ ID NO: 105521 - DNA, 25 bp, Saccharomyces pastorianus
taaagagcactttgggttgcccacc

SEQ ID NO: 105522 - DNA, 25 bp, Saccharomyces pastorianus
cctctcgctacaagaactctgttta

SEQ ID NO: 105523 - DNA, 25 bp, Saccharomyces pastorianus
aagaaggctcctggccaatccatag

SEQ ID NO: 105524 - DNA, 25 bp, Saccharomyces pastorianus
ttgtgtcccctagaagccactagaa

SEQ ID NO: 105525 - DNA, 25 bp, Saccharomyces pastorianus
actctgtttacatgggttctgctgc

SEQ ID NO: 105526 - DNA, 25 bp, Saccharomyces pastorianus
gacaacttgggttacgataccgcct

SEQ ID NO: 105527 - DNA, 25 bp, Saccharomyces pastorianus
gaaccaaacgctaaaatctgcttac

SEQ ID NO: 105528 - DNA, 25 bp, Saccharomyces pastorianus
aagggccacgttaagaagagcaccg

SEQ ID NO: 105529 - DNA, 25 bp, Saccharomyces pastorianus
agaccctcactgtttattgcgaccg

SEQ ID NO: 105530 - DNA, 25 bp, Saccharomyces pastorianus
tacggtggcacctaaattcattaag

SEQ ID NO: 105531 - DNA, 25 bp, Saccharomyces pastorianus
gaatgcgcagttggatccgtaacca

SEQ ID NO: 105532 - DNA, 25 bp, Saccharomyces pastorianus
gaaggcgcgtacgtcggagattcaa

SEQ ID NO: 105533 - DNA, 25 bp, Saccharomyces pastorianus
ggtgtcgactcgtactttatgaaga

SEQ ID NO: 105534 - DNA, 25 bp, Saccharomyces pastorianus
aatctgcttacggacatactgttca

SEQ ID NO: 105535 - DNA, 25 bp, Saccharomyces pastorianus
gatacatttatggtgtcgactcgta

SEQ ID NO: 105536 - DNA, 25 bp, Saccharomyces pastorianus
attgcgaccgtctcgcaagatggga

SEQ ID NO: 105537 - DNA, 25 bp, Saccharomyces pastorianus
gatcattgagcttgccaacagaccc

SEQ ID NO: 105538 - DNA, 25 bp, Saccharomyces pastorianus
gcctaatcggtcacaacgtatgcaa

SEQ ID NO: 105539 - DNA, 25 bp, Saccharomyces pastorianus
tcaaagatacactgccccgaaatgg

SEQ ID NO: 105540 - DNA, 25 bp, Saccharomyces pastorianus
ggacgaattcgatgaccttttggaa

SEQ ID NO: 105541 - DNA, 25 bp, Saccharomyces pastorianus
agaatcaactccaacatcgggtcct

SEQ ID NO: 105542 - DNA, 25 bp, Saccharomyces pastorianus
gaatgctaatacaacggcaactggt

SEQ ID NO: 105543 - DNA, 25 bp, Saccharomyces pastorianus
gggagaacacaccattcttacaaag

SEQ ID NO: 105544 - DNA, 25 bp, Saccharomyces pastorianus
gtaaccagaacccaagtgaatacct

SEQ ID NO: 105545 - DNA, 25 bp, Saccharomyces pastorianus
gaattcaacagacatttgtggacgt

SEQ ID NO: 105546 - DNA, 25 bp, Saccharomyces pastorianus
gtgaatacctctctacttttactaa

SEQ ID NO: 105547 - DNA, 25 bp, Saccharomyces pastorianus
ttgctccaagccgtagttcagaatc

SEQ ID NO: 105548 - DNA, 25 bp, Saccharomyces pastorianus
taacactctacccaatcgtaaaccg

SEQ ID NO: 105549 - DNA, 25 bp, Saccharomyces pastorianus
agccggtggccttatgggatactac

SEQ ID NO: 105550 - DNA, 25 bp, Saccharomyces pastorianus
taaacctgtccctgtcgttttgaca

SEQ ID NO: 105551 - DNA, 25 bp, Saccharomyces pastorianus
aagggctccattccatctctagtat

SEQ ID NO: 105552 - DNA, 25 bp, Saccharomyces pastorianus
gggtgcatcgaccttactacttggt

SEQ ID NO: 105553 - DNA, 25 bp, Saccharomyces pastorianus
ttactacttggtgctggtgtcataa

SEQ ID NO: 105554 - DNA, 25 bp, Saccharomyces pastorianus
ggattgccggttacttgctacatat

SEQ ID NO: 105555 - DNA, 25 bp, Saccharomyces pastorianus
gggatactaccgtaagggctccatt

SEQ ID NO: 105556 - DNA, 25 bp, Saccharomyces pastorianus
gtatctggcttagtattcggtagtg

SEQ ID NO: 105557 - DNA, 25 bp, Saccharomyces pastorianus
cgttttgacagctttgggtgggctc

SEQ ID NO: 105558 - DNA, 25 bp, Saccharomyces pastorianus
ctttgggtgggctcggcagttacta

SEQ ID NO: 105559 - DNA, 25 bp, Saccharomyces pastorianus
gagtcttttgactacagccggtggc

SEQ ID NO: 105560 - DNA, 25 bp, Saccharomyces pastorianus
gacatcagttcaaaactctccacgc

SEQ ID NO: 105561 - DNA, 25 bp, Saccharomyces pastorianus
ccccgtagcaggatcaaatcatttt

SEQ ID NO: 105562 - DNA, 25 bp, Saccharomyces pastorianus
ataaactatacctcgaatacaaaag

SEQ ID NO: 105563 - DNA, 25 bp, Saccharomyces pastorianus
gaattactgcttcaaatgcatgtct

SEQ ID NO: 105564 - DNA, 25 bp, Saccharomyces pastorianus
gggctaccccgtagcaggatcaaat

SEQ ID NO: 105565 - DNA, 25 bp, Saccharomyces pastorianus
agttcaaaactctccacgcttacaa

SEQ ID NO: 105566 - DNA, 25 bp, Saccharomyces pastorianus
ggaaagaactcagccgtgaaagaat

SEQ ID NO: 105567 - DNA, 25 bp, Saccharomyces pastorianus
gcttcaaatgcatgtcttacaataa

SEQ ID NO: 105568 - DNA, 25 bp, Saccharomyces pastorianus
agattatacattaccagaactatgg

SEQ ID NO: 105569 - DNA, 25 bp, Saccharomyces pastorianus
tccacgcttacaacaacctcaggaa

SEQ ID NO: 105570 - DNA, 25 bp, Saccharomyces pastorianus
aacagcaacagctttccttaaagat

SEQ ID NO: 105571 - DNA, 25 bp, Saccharomyces pastorianus
tacatgctttttcatatcctctctc

SEQ ID NO: 105572 - DNA, 25 bp, Saccharomyces pastorianus
tgcccacccttttaggtatagttcg

SEQ ID NO: 105573 - DNA, 25 bp, Saccharomyces pastorianus
atagttcgctaagttcaacgctcct

SEQ ID NO: 105574 - DNA, 25 bp, Saccharomyces pastorianus
gaaatttcatttagcttcgatgcag

SEQ ID NO: 105575 - DNA, 25 bp, Saccharomyces pastorianus
ggctccgttcatatcttattcaaaa

SEQ ID NO: 105576 - DNA, 25 bp, Saccharomyces pastorianus
tattacgtcccagttcgcgagaaat

SEQ ID NO: 105577 - DNA, 25 bp, Saccharomyces pastorianus
aattcagcggtaatcttatctttat

SEQ ID NO: 105578 - DNA, 25 bp, Saccharomyces pastorianus
agtcatttggtttattacgtcccag

SEQ ID NO: 105579 - DNA, 25 bp, Saccharomyces pastorianus
aatgatgttaaccaatgcccaccct

SEQ ID NO: 105580 - DNA, 25 bp, Saccharomyces pastorianus
tttcttctaattttggctccgttca

SEQ ID NO: 105581 - DNA, 25 bp, Saccharomyces pastorianus
caacgctcctcaaagcattctttaa

SEQ ID NO: 105582 - DNA, 25 bp, Saccharomyces pastorianus
ctccaaatgggacttcgtaatcaga

SEQ ID NO: 105583 - DNA, 25 bp, Saccharomyces pastorianus
aaacggttcaggaatcgggcaacat

SEQ ID NO: 105584 - DNA, 25 bp, Saccharomyces pastorianus
acctgaccagatgaggaatctccaa

SEQ ID NO: 105585 - DNA, 25 bp, Saccharomyces pastorianus
taatgacaatgacgccaaccggaac

SEQ ID NO: 105586 - DNA, 25 bp, Saccharomyces pastorianus
tgacgaatcaatgcctgacactgcc

SEQ ID NO: 105587 - DNA, 25 bp, Saccharomyces pastorianus
aagctctccaccgttgttttgagac

SEQ ID NO: 105588 - DNA, 25 bp, Saccharomyces pastorianus
aaccggaacgccaacaacatagtga

SEQ ID NO: 105589 - DNA, 25 bp, Saccharomyces pastorianus
taatagcccaccaaagatcagcatg

SEQ ID NO: 105590 - DNA, 25 bp, Saccharomyces pastorianus
tctggcgtcagtttggcaatagaat

SEQ ID NO: 105591 - DNA, 25 bp, Saccharomyces pastorianus
ggttcagaagtacaagctctccacc

SEQ ID NO: 105592 - DNA, 25 bp, Saccharomyces pastorianus
gaaaatccaaatttctggcgtcagt

SEQ ID NO: 105593 - DNA, 25 bp, Saccharomyces pastorianus
gtatccaataccatcacaaagacat

SEQ ID NO: 105594 - DNA, 25 bp, Saccharomyces pastorianus
tatgtttggtagctttccaccattc

SEQ ID NO: 105595 - DNA, 25 bp, Saccharomyces pastorianus
ccacccttacctatgtttggtagct

SEQ ID NO: 105596 - DNA, 25 bp, Saccharomyces pastorianus
gatacagactcaaacctcggtaata

SEQ ID NO: 105597 - DNA, 25 bp, Saccharomyces pastorianus
gaatctttgatagtgttggcataac

SEQ ID NO: 105598 - DNA, 25 bp, Saccharomyces pastorianus
tgtaccgaaagcaatgactggttct

SEQ ID NO: 105599 - DNA, 25 bp, Saccharomyces pastorianus
gaattccgcgaatgatacagactca

SEQ ID NO: 105600 - DNA, 25 bp, Saccharomyces pastorianus
ttttaacgaatttacctggatggag

SEQ ID NO: 105601 - DNA, 25 bp, Saccharomyces pastorianus
gcctattatccctccaacagcaagg

SEQ ID NO: 105602 - DNA, 25 bp, Saccharomyces pastorianus
ggaggatcctaatgggcctattatc

SEQ ID NO: 105603 - DNA, 25 bp, Saccharomyces pastorianus
gactggttctatagacctggataaa

SEQ ID NO: 105604 - DNA, 25 bp, Saccharomyces pastorianus
tataacaacgccattcatgcagcct

SEQ ID NO: 105605 - DNA, 25 bp, Saccharomyces pastorianus
gggctggtatcaccgaagctgttct

SEQ ID NO: 105606 - DNA, 25 bp, Saccharomyces pastorianus
aagctcagcatttaactccgagtga

SEQ ID NO: 105607 - DNA, 25 bp, Saccharomyces pastorianus
gagtgagccaaatgctggtcctaaa

SEQ ID NO: 105608 - DNA, 25 bp, Saccharomyces pastorianus
agaggcgtttccttaactgcggcaa

SEQ ID NO: 105609 - DNA, 25 bp, Saccharomyces pastorianus
aagctgttcttgtcgtgaacccgat

SEQ ID NO: 105610 - DNA, 25 bp, Saccharomyces pastorianus
gtttgatttcgggtgctattgggcc

SEQ ID NO: 105611 - DNA, 25 bp, Saccharomyces pastorianus
ggctgtcacctttaccgtttatgaa

SEQ ID NO: 105612 - DNA, 25 bp, Saccharomyces pastorianus
attcatgcagcctacactattgtca

SEQ ID NO: 105613 - DNA, 25 bp, Saccharomyces pastorianus
taaccattggtgctcaactactgaa

SEQ ID NO: 105614 - DNA, 25 bp, Saccharomyces pastorianus
gatggatgtcctaccttcatgggaa

SEQ ID NO: 105615 - DNA, 25 bp, Saccharomyces pastorianus
atgtagcgcatgcagcttatggctg

SEQ ID NO: 105616 - DNA, 25 bp, Saccharomyces pastorianus
tactaaatacgcaccccgataaact

SEQ ID NO: 105617 - DNA, 25 bp, Saccharomyces pastorianus
aattattaacccaatgtagcgcatg

SEQ ID NO: 105618 - DNA, 25 bp, Saccharomyces pastorianus
ggtgaattcgttaacacactatgaa

SEQ ID NO: 105619 - DNA, 25 bp, Saccharomyces pastorianus
gaattttccttagacgatttctcat

SEQ ID NO: 105620 - DNA, 25 bp, Saccharomyces pastorianus
actcgtcgcgaatatgataggttga

SEQ ID NO: 105621 - DNA, 25 bp, Saccharomyces pastorianus
acggagtcattctggttatcaatta

SEQ ID NO: 105622 - DNA, 25 bp, Saccharomyces pastorianus
tgtcctcgctgtcaatttgttggtg

SEQ ID NO: 105623 - DNA, 25 bp, Saccharomyces pastorianus
gatacggttagcaacgtcacaatca

SEQ ID NO: 105624 - DNA, 25 bp, Saccharomyces pastorianus
gaattccatcggatgcaacacaaga

SEQ ID NO: 105625 - DNA, 25 bp, Saccharomyces pastorianus
gacgctatggaacggagtcattctg

SEQ ID NO: 105626 - DNA, 25 bp, Saccharomyces pastorianus
gagagtcgcctcatatatggaaaat

SEQ ID NO: 105627 - DNA, 25 bp, Saccharomyces pastorianus
aaggccattgtactgctatttccga

SEQ ID NO: 105628 - DNA, 25 bp, Saccharomyces pastorianus
gggcgtatttcgatatctatagctt

SEQ ID NO: 105629 - DNA, 25 bp, Saccharomyces pastorianus
tagcattcttaccaaggccagtgaa

SEQ ID NO: 105630 - DNA, 25 bp, Saccharomyces pastorianus
gagcggacccctctatttgggaaag

SEQ ID NO: 105631 - DNA, 25 bp, Saccharomyces pastorianus
gaaggaatttgagcggacccctcta

SEQ ID NO: 105632 - DNA, 25 bp, Saccharomyces pastorianus
gatgatgttactaccgaccaattcg

SEQ ID NO: 105633 - DNA, 25 bp, Saccharomyces pastorianus
cagagccagagttactagcattctt

SEQ ID NO: 105634 - DNA, 25 bp, Saccharomyces pastorianus
acccaactgccaccgatttgattga

SEQ ID NO: 105635 - DNA, 25 bp, Saccharomyces pastorianus
atgcaattcttcattctttgagcaa

SEQ ID NO: 105636 - DNA, 25 bp, Saccharomyces pastorianus
taaccagtcattgttggagcccggc

SEQ ID NO: 105637 - DNA, 25 bp, Saccharomyces pastorianus
gaacattctaccttctgctgttgaa

SEQ ID NO: 105638 - DNA, 25 bp, Saccharomyces pastorianus
atggtactaactcgaacgccgttgt

SEQ ID NO: 105639 - DNA, 25 bp, Saccharomyces pastorianus
gcgtcctctatccataataaccatt

SEQ ID NO: 105640 - DNA, 25 bp, Saccharomyces pastorianus
actggaccatgcctataatctgtgt

SEQ ID NO: 105641 - DNA, 25 bp, Saccharomyces pastorianus
attttcccaggaaccagtcatttga

SEQ ID NO: 105642 - DNA, 25 bp, Saccharomyces pastorianus
atccatcgatgaatttgctaccttg

SEQ ID NO: 105643 - DNA, 25 bp, Saccharomyces pastorianus
gattatggcgttggtaaccggtcca

SEQ ID NO: 105644 - DNA, 25 bp, Saccharomyces pastorianus
aatctgtgtcaatctgtgggatcat

SEQ ID NO: 105645 - DNA, 25 bp, Saccharomyces pastorianus
gggacaaggctggttatttctagtt

SEQ ID NO: 105646 - DNA, 25 bp, Saccharomyces pastorianus
aaagattcattcaacggcagcgatt

SEQ ID NO: 105647 - DNA, 25 bp, Saccharomyces pastorianus
aacatcttcaatttggcgtcctcta

SEQ ID NO: 105648 - DNA, 25 bp, Saccharomyces pastorianus
gaatgaccagttagcccaggagttg

SEQ ID NO: 105649 - DNA, 25 bp, Saccharomyces pastorianus
atgcttcccgcaatatgtgaatagc

SEQ ID NO: 105650 - DNA, 25 bp, Saccharomyces pastorianus
ggacaaggtcagttcatgcttcccg

SEQ ID NO: 105651 - DNA, 25 bp, Saccharomyces pastorianus
gctgctggtacagagcctcaatgat

SEQ ID NO: 105652 - DNA, 25 bp, Saccharomyces pastorianus
aaccggtcaacgtgctgctggtaca

SEQ ID NO: 105653 - DNA, 25 bp, Saccharomyces pastorianus
tacagccaacggatgcatgccatac

SEQ ID NO: 105654 - DNA, 25 bp, Saccharomyces pastorianus
aattctggacggagctttgtcaacg

SEQ ID NO: 105655 - DNA, 25 bp, Saccharomyces pastorianus
atgtacgatgagtacctgggctccc

SEQ ID NO: 105656 - DNA, 25 bp, Saccharomyces pastorianus
tgtcagcgccaattaacggaattct

SEQ ID NO: 105657 - DNA, 25 bp, Saccharomyces pastorianus
aaagggcccgcgatcgatgagctct

SEQ ID NO: 105658 - DNA, 25 bp, Saccharomyces pastorianus
aatacggtacattcggttgaagcag

SEQ ID NO: 105659 - DNA, 25 bp, Saccharomyces pastorianus
ggacgactactgagtttgaagttct

SEQ ID NO: 105660 - DNA, 25 bp, Saccharomyces pastorianus
ggtgggccacaccaatattctggac

SEQ ID NO: 105661 - DNA, 25 bp, Saccharomyces pastorianus
aggtagtactgtgtgacgctgccga

SEQ ID NO: 105662 - DNA, 25 bp, Saccharomyces pastorianus
tgccgatggttcttctactgcagaa

SEQ ID NO: 105663 - DNA, 25 bp, Saccharomyces pastorianus
gtaaggtcatgaacacacacacaca

SEQ ID NO: 105664 - DNA, 25 bp, Saccharomyces pastorianus
aagcaagatacgttccaagctgtct

SEQ ID NO: 105665 - DNA, 25 bp, Saccharomyces pastorianus
gatctacgaaaaatggtgggccaca

SEQ ID NO: 105666 - DNA, 25 bp, Saccharomyces pastorianus
tcgacaccaccacagagaacttgat

SEQ ID NO: 105667 - DNA, 25 bp, Saccharomyces pastorianus
cgcttaacagcatgtctccgtacat

SEQ ID NO: 105668 - DNA, 25 bp, Saccharomyces pastorianus
tattctggacaggatcctcgacgaa

SEQ ID NO: 105669 - DNA, 25 bp, Saccharomyces pastorianus
cgtacatgaccatacctcagcaata

SEQ ID NO: 105670 - DNA, 25 bp, Saccharomyces pastorianus
gatgatccaggctgtcgtctcgaac

SEQ ID NO: 105671 - DNA, 25 bp, Saccharomyces pastorianus
acgccattggctccgtatatgtgat

SEQ ID NO: 105672 - DNA, 25 bp, Saccharomyces pastorianus
acagttcaatggtatcttccctcag

SEQ ID NO: 105673 - DNA, 25 bp, Saccharomyces pastorianus
gatgctgttgtccttaagaccgttc

SEQ ID NO: 105674 - DNA, 25 bp, Saccharomyces pastorianus
aagctttatggtctcgagttcacgg

SEQ ID NO: 105675 - DNA, 25 bp, Saccharomyces pastorianus
atccctctgtggtttaatgtcgtca

SEQ ID NO: 105676 - DNA, 25 bp, Saccharomyces pastorianus
gagttacccaagttttctgctgtca

SEQ ID NO: 105677 - DNA, 25 bp, Saccharomyces pastorianus
tgtgcgtgcgttacttcaagcttta

SEQ ID NO: 105678 - DNA, 25 bp, Saccharomyces pastorianus
atctgggacttgactatgtgcgtgc

SEQ ID NO: 105679 - DNA, 25 bp, Saccharomyces pastorianus
aatgtcgtcaatggccttttgctca

SEQ ID NO: 105680 - DNA, 25 bp, Saccharomyces pastorianus
atccgctctcttattcaggcagatg

SEQ ID NO: 105681 - DNA, 25 bp, Saccharomyces pastorianus
tacatcattttacaacaccttcggc

SEQ ID NO: 105682 - DNA, 25 bp, Saccharomyces pastorianus
ttcttagagaagtccactggcagtt

SEQ ID NO: 105683 - DNA, 25 bp, Saccharomyces pastorianus
tgaaattacggctgttttggcccat

SEQ ID NO: 105684 - DNA, 25 bp, Saccharomyces pastorianus
tctagctatcattattcccatccaa

SEQ ID NO: 105685 - DNA, 25 bp, Saccharomyces pastorianus
tttagtcaattgcacaccttcctca

SEQ ID NO: 105686 - DNA, 25 bp, Saccharomyces pastorianus
actggcagttttgttgatcccgtta

SEQ ID NO: 105687 - DNA, 25 bp, Saccharomyces pastorianus
gtagatcctctgtattctagctatc

SEQ ID NO: 105688 - DNA, 25 bp, Saccharomyces pastorianus
gtttgccattcacctccaagagaat

SEQ ID NO: 105689 - DNA, 25 bp, Saccharomyces pastorianus
gacttattaactccactcgaatgtg

SEQ ID NO: 105690 - DNA, 25 bp, Saccharomyces pastorianus
caacaccttcggctttttcttagag

SEQ ID NO: 105691 - DNA, 25 bp, Saccharomyces pastorianus
gacggctcaaaaagatcttctcatt

SEQ ID NO: 105692 - DNA, 25 bp, Saccharomyces pastorianus
cttccaatctgttgtgccagttaga

SEQ ID NO: 105693 - DNA, 25 bp, Saccharomyces pastorianus
ttaccgcagttaacactttcacgtt

SEQ ID NO: 105694 - DNA, 25 bp, Saccharomyces pastorianus
aagtatctcgtacctctgggagtca

SEQ ID NO: 105695 - DNA, 25 bp, Saccharomyces pastorianus
tcacgatcgccttcttttgtttaaa

SEQ ID NO: 105696 - DNA, 25 bp, Saccharomyces pastorianus
ccccaaccatttaccgtgaagactg

SEQ ID NO: 105697 - DNA, 25 bp, Saccharomyces pastorianus
aagccttgaactccaccaatattgc

SEQ ID NO: 105698 - DNA, 25 bp, Saccharomyces pastorianus
ttttcgctcttctgtttactcttaa

SEQ ID NO: 105699 - DNA, 25 bp, Saccharomyces pastorianus
tttcatagtcttaacgcaagcgatg

SEQ ID NO: 105700 - DNA, 25 bp, Saccharomyces pastorianus
tgttcatgatctaattcccctgtta

SEQ ID NO: 105701 - DNA, 25 bp, Saccharomyces pastorianus
gtggtcaattgggtcttttcgctct

SEQ ID NO: 105702 - DNA, 25 bp, Saccharomyces pastorianus
ggagtcaaacttttacgttcacaat

SEQ ID NO: 105703 - DNA, 25 bp, Saccharomyces pastorianus
gttcccaatgtaagactatatgttc

SEQ ID NO: 105704 - DNA, 25 bp, Saccharomyces pastorianus
aaattcaggccattgtaccacggac

SEQ ID NO: 105705 - DNA, 25 bp, Saccharomyces pastorianus
gaatgaactatccacgacggacagt

SEQ ID NO: 105706 - DNA, 25 bp, Saccharomyces pastorianus
aatacgatatattttgttcccaatg

SEQ ID NO: 105707 - DNA, 25 bp, Saccharomyces pastorianus
taccacggacaactcttttggaggt

SEQ ID NO: 105708 - DNA, 25 bp, Saccharomyces pastorianus
gttcaatagcctttgtattgcgaaa

SEQ ID NO: 105709 - DNA, 25 bp, Saccharomyces pastorianus
ggcaatgttactcttcattgatcgt

SEQ ID NO: 105710 - DNA, 25 bp, Saccharomyces pastorianus
tttactatagatttctggctaccat

SEQ ID NO: 105711 - DNA, 25 bp, Saccharomyces pastorianus
taaagtgagtatcctgtgtacgcag

SEQ ID NO: 105712 - DNA, 25 bp, Saccharomyces pastorianus
gaggtgcatactgatccaaacgatg

SEQ ID NO: 105713 - DNA, 25 bp, Saccharomyces pastorianus
aaacttgaacaatagcgacggtgaa

SEQ ID NO: 105714 - DNA, 25 bp, Saccharomyces pastorianus
atattcccatcttcgagctcttaga

SEQ ID NO: 105715 - DNA, 25 bp, Saccharomyces pastorianus
agcagcgcaaggatattcccatctt

SEQ ID NO: 105716 - DNA, 25 bp, Saccharomyces pastorianus
ctttatctctccaggacaggccaat

SEQ ID NO: 105717 - DNA, 25 bp, Saccharomyces pastorianus
attcgcgatatatagcggccaatca

SEQ ID NO: 105718 - DNA, 25 bp, Saccharomyces pastorianus
gagctcttagatacaacgcttataa

SEQ ID NO: 105719 - DNA, 25 bp, Saccharomyces pastorianus
ttatacgcaattagccgcccatatg

SEQ ID NO: 105720 - DNA, 25 bp, Saccharomyces pastorianus
taaactttctttatctctccaggac

SEQ ID NO: 105721 - DNA, 25 bp, Saccharomyces pastorianus
gggtgttatcatcttatacgcaatt

SEQ ID NO: 105722 - DNA, 25 bp, Saccharomyces pastorianus
gcattaacctcttttttgtattaca

SEQ ID NO: 105723 - DNA, 25 bp, Saccharomyces pastorianus
cgcactttttgcattaacctctttt

SEQ ID NO: 105724 - DNA, 25 bp, Saccharomyces pastorianus
aatcaacggcgacctccaagcgcgt

SEQ ID NO: 105725 - DNA, 25 bp, Saccharomyces pastorianus
ccgccgttgtcggtcaagaacatta

SEQ ID NO: 105726 - DNA, 25 bp, Saccharomyces pastorianus
tcgcctccaaggttcaagaaacttt

SEQ ID NO: 105727 - DNA, 25 bp, Saccharomyces pastorianus
atcaaggttattggatgccgccgtt

SEQ ID NO: 105728 - DNA, 25 bp, Saccharomyces pastorianus
ctgtcacttctgtgcaagccgttta

SEQ ID NO: 105729 - DNA, 25 bp, Saccharomyces pastorianus
gattaaaggacaccgttgcctcgtt

SEQ ID NO: 105730 - DNA, 25 bp, Saccharomyces pastorianus
ctttggccactgatatgggtctctt

SEQ ID NO: 105731 - DNA, 25 bp, Saccharomyces pastorianus
ttgcctcgttcaaagccgttttgga

SEQ ID NO: 105732 - DNA, 25 bp, Saccharomyces pastorianus
tctcaaccatttgctgtcgccgaag

SEQ ID NO: 105733 - DNA, 25 bp, Saccharomyces pastorianus
gaagggttctgtcacttctgtgcaa

SEQ ID NO: 105734 - DNA, 25 bp, Saccharomyces pastorianus
acattatgacgtcgcctccaaggtt

SEQ ID NO: 105735 - DNA, 25 bp, Saccharomyces pastorianus
tgtcgccgaagtctttactggtatc

SEQ ID NO: 105736 - DNA, 25 bp, Saccharomyces pastorianus
gctacaggcattctacggaaacgtt

SEQ ID NO: 105737 - DNA, 25 bp, Saccharomyces pastorianus
aaagagcttccgttcaagttagaga

SEQ ID NO: 105738 - DNA, 25 bp, Saccharomyces pastorianus
gaacagagcatttctctgctgcctt

SEQ ID NO: 105739 - DNA, 25 bp, Saccharomyces pastorianus
catatctgagactttgctacctttg

SEQ ID NO: 105740 - DNA, 25 bp, Saccharomyces pastorianus
gcagaattccatatcgacaacgttg

SEQ ID NO: 105741 - DNA, 25 bp, Saccharomyces pastorianus
gtggatgatctgtctaagctattta

SEQ ID NO: 105742 - DNA, 25 bp, Saccharomyces pastorianus
caaccctcaatccatttaccaataa

SEQ ID NO: 105743 - DNA, 25 bp, Saccharomyces pastorianus
gggctgtatggcgtagctttactta

SEQ ID NO: 105744 - DNA, 25 bp, Saccharomyces pastorianus
gagccttgcagagaacgagccaacc

SEQ ID NO: 105745 - DNA, 25 bp, Saccharomyces pastorianus
aggccggcaggcttattgatttcta

SEQ ID NO: 105746 - DNA, 25 bp, Saccharomyces pastorianus
gaaacgtttggtcccagttaagctg

SEQ ID NO: 105747 - DNA, 25 bp, Saccharomyces pastorianus
acggcggatctaatactggcatgca

SEQ ID NO: 105748 - DNA, 25 bp, Saccharomyces pastorianus
gttggtccaatattcacgggtatac

SEQ ID NO: 105749 - DNA, 25 bp, Saccharomyces pastorianus
aactggttatggcatcttccaccat

SEQ ID NO: 105750 - DNA, 25 bp, Saccharomyces pastorianus
agtaatcttcatggtcgactctctc

SEQ ID NO: 105751 - DNA, 25 bp, Saccharomyces pastorianus
atctctggcgttgggtactttattt

SEQ ID NO: 105752 - DNA, 25 bp, Saccharomyces pastorianus
gaattacttgcccttatctattttg

SEQ ID NO: 105753 - DNA, 25 bp, Saccharomyces pastorianus
agccacactattggtccagattcca

SEQ ID NO: 105754 - DNA, 25 bp, Saccharomyces pastorianus
tgcaacaactgccatggacgtcaca

SEQ ID NO: 105755 - DNA, 25 bp, Saccharomyces pastorianus
acatttgctcggtgtgttggtccaa

SEQ ID NO: 105756 - DNA, 25 bp, Saccharomyces pastorianus
ctattctcatccctatggccaagaa

SEQ ID NO: 105757 - DNA, 25 bp, Saccharomyces pastorianus
tctcgggtccgggtttatgacaagt

SEQ ID NO: 105758 - DNA, 25 bp, Saccharomyces pastorianus
tgcctttttataacagctccactac

SEQ ID NO: 105759 - DNA, 25 bp, Saccharomyces pastorianus
aagatcaccccagctattgcggaac

SEQ ID NO: 105760 - DNA, 25 bp, Saccharomyces pastorianus
gaaccagaggactttgttgactttt

SEQ ID NO: 105761 - DNA, 25 bp, Saccharomyces pastorianus
tgttaccaaccctgctaattcgttt

SEQ ID NO: 105762 - DNA, 25 bp, Saccharomyces pastorianus
aagtagatccttttagctctctctt

SEQ ID NO: 105763 - DNA, 25 bp, Saccharomyces pastorianus
gataatgcctcgagagccacatcta

SEQ ID NO: 105764 - DNA, 25 bp, Saccharomyces pastorianus
gccacatctactcctgggcaaggaa

SEQ ID NO: 105765 - DNA, 25 bp, Saccharomyces pastorianus
agctctctcttttcaactgcaaagg

SEQ ID NO: 105766 - DNA, 25 bp, Saccharomyces pastorianus
gctgcctctaatcctgtatctaata

SEQ ID NO: 105767 - DNA, 25 bp, Saccharomyces pastorianus
tagtgctcctaaagcatcccaagcg

SEQ ID NO: 105768 - DNA, 25 bp, Saccharomyces pastorianus
ggcatctgcagaagcacctagtgct

SEQ ID NO: 105769 - DNA, 25 bp, Saccharomyces pastorianus
gcaaacaacgagatccgcgcgatga

SEQ ID NO: 105770 - DNA, 25 bp, Saccharomyces pastorianus
tgtaccatagtcaccagcacagagt

SEQ ID NO: 105771 - DNA, 25 bp, Saccharomyces pastorianus
tagaagcgaatccactgtccaactg

SEQ ID NO: 105772 - DNA, 25 bp, Saccharomyces pastorianus
ggcagatgttacgtatgacccaact

SEQ ID NO: 105773 - DNA, 25 bp, Saccharomyces pastorianus
aaatgttcttgaggtcggcgctggc

SEQ ID NO: 105774 - DNA, 25 bp, Saccharomyces pastorianus
aagtgtctggccgaatgtcttgctt

SEQ ID NO: 105775 - DNA, 25 bp, Saccharomyces pastorianus
ggacatgggaagctgccttatacat

SEQ ID NO: 105776 - DNA, 25 bp, Saccharomyces pastorianus
gcccttacaagagttggcaccggta

SEQ ID NO: 105777 - DNA, 25 bp, Saccharomyces pastorianus
gaccgatgcaaactgtgtctcctat

SEQ ID NO: 105778 - DNA, 25 bp, Saccharomyces pastorianus
aactatccttcctgatctatgcaag

SEQ ID NO: 105779 - DNA, 25 bp, Saccharomyces pastorianus
aagccctgcaattcaaacctttgat

SEQ ID NO: 105780 - DNA, 25 bp, Saccharomyces pastorianus
gtgcgaagatgcgttatgcctggaa

SEQ ID NO: 105781 - DNA, 25 bp, Saccharomyces pastorianus
agcgacgttttatgcaatgtttttc

SEQ ID NO: 105782 - DNA, 25 bp, Saccharomyces pastorianus
gaatttcactttggcgtgtccatat

SEQ ID NO: 105783 - DNA, 25 bp, Saccharomyces pastorianus
gtccatatgctattattgcccacta

SEQ ID NO: 105784 - DNA, 25 bp, Saccharomyces pastorianus
attgcccactaccaggaattagacg

SEQ ID NO: 105785 - DNA, 25 bp, Saccharomyces pastorianus
agcggcgactcgaacgttattgcag

SEQ ID NO: 105786 - DNA, 25 bp, Saccharomyces pastorianus
aaaggtgttattgcctcaggtggga

SEQ ID NO: 105787 - DNA, 25 bp, Saccharomyces pastorianus
taacgaaaatcttcagcggcgactc

SEQ ID NO: 105788 - DNA, 25 bp, Saccharomyces pastorianus
caaaggaccttctctcggtacgaat

SEQ ID NO: 105789 - DNA, 25 bp, Saccharomyces pastorianus
accgtatgccgatattgtttgtagt

SEQ ID NO: 105790 - DNA, 25 bp, Saccharomyces pastorianus
aggtagctcaatatggtgtcgaaac

SEQ ID NO: 105791 - DNA, 25 bp, Saccharomyces pastorianus
gaatattccgattcaggccatcggc

SEQ ID NO: 105792 - DNA, 25 bp, Saccharomyces pastorianus
gactacctgactccatgatgaattc

SEQ ID NO: 105793 - DNA, 25 bp, Saccharomyces pastorianus
gaaccaacatttcgattccttaatt

SEQ ID NO: 105794 - DNA, 25 bp, Saccharomyces pastorianus
tggtggtatgatccccgcaagaatt

SEQ ID NO: 105795 - DNA, 25 bp, Saccharomyces pastorianus
gccatcggcctatctttgtatgaag

SEQ ID NO: 105796 - DNA, 25 bp, Saccharomyces pastorianus
atggctggacttcggtgctttgaac

SEQ ID NO: 105797 - DNA, 25 bp, Saccharomyces pastorianus
caagctttgtcagggagtggctaaa

SEQ ID NO: 105798 - DNA, 25 bp, Saccharomyces pastorianus
cactatgctgtttctgagctggaaa

SEQ ID NO: 105799 - DNA, 25 bp, Saccharomyces pastorianus
gttgtgttatccatgggacgctgaa

SEQ ID NO: 105800 - DNA, 25 bp, Saccharomyces pastorianus
ttgacgatactagaactaccctcca

SEQ ID NO: 105801 - DNA, 25 bp, Saccharomyces pastorianus
aattctggacgttacattgctgcgc

SEQ ID NO: 105802 - DNA, 25 bp, Saccharomyces pastorianus
tagcgtccagctatcgaattctaac

SEQ ID NO: 105803 - DNA, 25 bp, Saccharomyces pastorianus
agaagaggccgctgctttacaagca

SEQ ID NO: 105804 - DNA, 25 bp, Saccharomyces pastorianus
ttggaaacctccttacaactattag

SEQ ID NO: 105805 - DNA, 25 bp, Saccharomyces pastorianus
taccatacagaagagctagcgtcca

SEQ ID NO: 105806 - DNA, 25 bp, Saccharomyces pastorianus
gatccgtctctaaaacccatttaca

SEQ ID NO: 105807 - DNA, 25 bp, Saccharomyces pastorianus
gatttcagcattgacgatattccag

SEQ ID NO: 105808 - DNA, 25 bp, Saccharomyces pastorianus
gaatctcacgaaaccatatgtagcg

SEQ ID NO: 105809 - DNA, 25 bp, Saccharomyces pastorianus
ataagcgctcatctggtgaacaagt

SEQ ID NO: 105810 - DNA, 25 bp, Saccharomyces pastorianus
gcgaattaggaagcgatccgtctct

SEQ ID NO: 105811 - DNA, 25 bp, Saccharomyces pastorianus
aattctaacggccacataagcgctc

SEQ ID NO: 105812 - DNA, 25 bp, Saccharomyces pastorianus
gatattccagaagaggccgctgctt

SEQ ID NO: 105813 - DNA, 25 bp, Saccharomyces pastorianus
accggtcaattctgaggtctttaca

SEQ ID NO: 105814 - DNA, 25 bp, Saccharomyces pastorianus
tgagagcccaaagttccagtgaatg

SEQ ID NO: 105815 - DNA, 25 bp, Saccharomyces pastorianus
actggcggactttctcaagggttat

SEQ ID NO: 105816 - DNA, 25 bp, Saccharomyces pastorianus
gcttaacgaacgaagtcatgctgtt

SEQ ID NO: 105817 - DNA, 25 bp, Saccharomyces pastorianus
gagagagctgatcctattggtttca

SEQ ID NO: 105818 - DNA, 25 bp, Saccharomyces pastorianus
aagagctttgggactcactggcgga

SEQ ID NO: 105819 - DNA, 25 bp, Saccharomyces pastorianus
gaattttttgtctttgagagcccaa

SEQ ID NO: 105820 - DNA, 25 bp, Saccharomyces pastorianus
gagggctctacaaatccagggacta

SEQ ID NO: 105821 - DNA, 25 bp, Saccharomyces pastorianus
gaatggctctcgcttatgaatgatc

SEQ ID NO: 105822 - DNA, 25 bp, Saccharomyces pastorianus
aaaacccatgttcttttcagagaga

SEQ ID NO: 105823 - DNA, 25 bp, Saccharomyces pastorianus
agaagcaagatcacgcccatattag

SEQ ID NO: 105824 - DNA, 25 bp, Saccharomyces pastorianus
ttcccttgacgacacttccaaaaag

SEQ ID NO: 105825 - DNA, 25 bp, Saccharomyces pastorianus
gcaatgtttgtctaactgtgtgaat

SEQ ID NO: 105826 - DNA, 25 bp, Saccharomyces pastorianus
gtgttgagtctgtcaatgattctaa

SEQ ID NO: 105827 - DNA, 25 bp, Saccharomyces pastorianus
aatgattctaatttaagttcgcaag

SEQ ID NO: 105828 - DNA, 25 bp, Saccharomyces pastorianus
aaattgctactttcttggagggaga

SEQ ID NO: 105829 - DNA, 25 bp, Saccharomyces pastorianus
gtccagatgtcaatccatcagttca

SEQ ID NO: 105830 - DNA, 25 bp, Saccharomyces pastorianus
tcttctctatcaacgtctgatttgg

SEQ ID NO: 105831 - DNA, 25 bp, Saccharomyces pastorianus
atcagttcactaatatatgcttcaa

SEQ ID NO: 105832 - DNA, 25 bp, Saccharomyces pastorianus
ctgtgtgaatcggtttttggatact

SEQ ID NO: 105833 - DNA, 25 bp, Saccharomyces pastorianus
gttcgcaagaagagcaatgtttgtc

SEQ ID NO: 105834 - DNA, 25 bp, Saccharomyces pastorianus
aacgtctgatttggcttcccttgac

SEQ ID NO: 105835 - DNA, 25 bp, Saccharomyces pastorianus
actttgtactatcccttcggtcaat

SEQ ID NO: 105836 - DNA, 25 bp, Saccharomyces pastorianus
aaggtcaattttccttgacgcaaag

SEQ ID NO: 105837 - DNA, 25 bp, Saccharomyces pastorianus
gcaaattctactaccacgtttatct

SEQ ID NO: 105838 - DNA, 25 bp, Saccharomyces pastorianus
aatcaacttgcttggactatcagaa

SEQ ID NO: 105839 - DNA, 25 bp, Saccharomyces pastorianus
tggaatggttgactaccaccccaaa

SEQ ID NO: 105840 - DNA, 25 bp, Saccharomyces pastorianus
ggtcaatccatttcactcttttgtg

SEQ ID NO: 105841 - DNA, 25 bp, Saccharomyces pastorianus
catacgggtgcttacgttgcggaat

SEQ ID NO: 105842 - DNA, 25 bp, Saccharomyces pastorianus
atcgggaaaattcattctgcttcaa

SEQ ID NO: 105843 - DNA, 25 bp, Saccharomyces pastorianus
gacaatagggcatccaaatttttac

SEQ ID NO: 105844 - DNA, 25 bp, Saccharomyces pastorianus
atggctgcctatttttagctcctaa

SEQ ID NO: 105845 - DNA, 25 bp, Saccharomyces pastorianus
tctgcttcaagctcttcattagatg

SEQ ID NO: 105846 - DNA, 25 bp, Saccharomyces pastorianus
gactaagcgttacaccaatcctgtt

SEQ ID NO: 105847 - DNA, 25 bp, Saccharomyces pastorianus
ttccctgtccagtctttgattccaa

SEQ ID NO: 105848 - DNA, 25 bp, Saccharomyces pastorianus
aagtacgattactcacacccatttg

SEQ ID NO: 105849 - DNA, 25 bp, Saccharomyces pastorianus
aacgagttctccactagtcaagcta

SEQ ID NO: 105850 - DNA, 25 bp, Saccharomyces pastorianus
gttacaccaatcctgttgtcattca

SEQ ID NO: 105851 - DNA, 25 bp, Saccharomyces pastorianus
ttgtcattcaaggtgccggtgccgg

SEQ ID NO: 105852 - DNA, 25 bp, Saccharomyces pastorianus
ctgtcaagtctgctgatgaattctt

SEQ ID NO: 105853 - DNA, 25 bp, Saccharomyces pastorianus
gttgccaccaaatctgtgtctgtag

SEQ ID NO: 105854 - DNA, 25 bp, Saccharomyces pastorianus
ttgcctatcatcagtttcttaagag

SEQ ID NO: 105855 - DNA, 25 bp, Saccharomyces pastorianus
cattggtaaagtcgatgttgccacc

SEQ ID NO: 105856 - DNA, 25 bp, Saccharomyces pastorianus
ggatcagataacgttatttccatca

SEQ ID NO: 105857 - DNA, 25 bp, Saccharomyces pastorianus
gctaaggcgatttggttctggaact

SEQ ID NO: 105858 - DNA, 25 bp, Saccharomyces pastorianus
attttcctctagctcgacaggatca

SEQ ID NO: 105859 - DNA, 25 bp, Saccharomyces pastorianus
gaaaacaatccagcactaccgtcat

SEQ ID NO: 105860 - DNA, 25 bp, Saccharomyces pastorianus
cagcgtttgcttgggaatttatttc

SEQ ID NO: 105861 - DNA, 25 bp, Saccharomyces pastorianus
tggagcaaatccttccaaccttgaa

SEQ ID NO: 105862 - DNA, 25 bp, Saccharomyces pastorianus
taccgtcatcaggttctgtgacatc

SEQ ID NO: 105863 - DNA, 25 bp, Saccharomyces pastorianus
agaccctacttctaagccaagtgca

SEQ ID NO: 105864 - DNA, 25 bp, Saccharomyces pastorianus
gggaaacatttcatctatacttacc

SEQ ID NO: 105865 - DNA, 25 bp, Saccharomyces pastorianus
gtatttggatttactcttcgcaata

SEQ ID NO: 105866 - DNA, 25 bp, Saccharomyces pastorianus
agcggaattgcatttgacagcgttt

SEQ ID NO: 105867 - DNA, 25 bp, Saccharomyces pastorianus
aggatcaatccctcacagacgtgaa

SEQ ID NO: 105868 - DNA, 25 bp, Saccharomyces pastorianus
tggtataattacctacgggattcat

SEQ ID NO: 105869 - DNA, 25 bp, Saccharomyces pastorianus
aaacatggccgctaatgcttgacaa

SEQ ID NO: 105870 - DNA, 25 bp, Saccharomyces pastorianus
agcaactggttcagtttcctacctt

SEQ ID NO: 105871 - DNA, 25 bp, Saccharomyces pastorianus
aatgcttgacaacattatcgccggg

SEQ ID NO: 105872 - DNA, 25 bp, Saccharomyces pastorianus
aactcagcgaagacatcattccaaa

SEQ ID NO: 105873 - DNA, 25 bp, Saccharomyces pastorianus
gagtttcaatttattcagcctgcaa

SEQ ID NO: 105874 - DNA, 25 bp, Saccharomyces pastorianus
tgagcccaattatcttgaactagta

SEQ ID NO: 105875 - DNA, 25 bp, Saccharomyces pastorianus
accctatgtactggttgagcgtgca

SEQ ID NO: 105876 - DNA, 25 bp, Saccharomyces pastorianus
cgtgcagtagcaggtgttcttggta

SEQ ID NO: 105877 - DNA, 25 bp, Saccharomyces pastorianus
agacatggctacatcactccagaaa

SEQ ID NO: 105878 - DNA, 25 bp, Saccharomyces pastorianus
gtgtacgatctaaaactcagcgaag

SEQ ID NO: 105879 - DNA, 25 bp, Saccharomyces pastorianus
ggcattaactctaaactcggcggga

SEQ ID NO: 105880 - DNA, 25 bp, Saccharomyces pastorianus
taatcgagcctctggaccctaagga

SEQ ID NO: 105881 - DNA, 25 bp, Saccharomyces pastorianus
agctggtcactagggagtacggtct

SEQ ID NO: 105882 - DNA, 25 bp, Saccharomyces pastorianus
gactatttcaacgaagccggcatac

SEQ ID NO: 105883 - DNA, 25 bp, Saccharomyces pastorianus
agatggtttgatatacttgcctgaa

SEQ ID NO: 105884 - DNA, 25 bp, Saccharomyces pastorianus
tggcctaggtatgaagccctttgaa

SEQ ID NO: 105885 - DNA, 25 bp, Saccharomyces pastorianus
gccggcataccaactgctacagaag

SEQ ID NO: 105886 - DNA, 25 bp, Saccharomyces pastorianus
aaagatctcggcgtcggttctgaat

SEQ ID NO: 105887 - DNA, 25 bp, Saccharomyces pastorianus
agcaccgccgatgattctttgaaca

SEQ ID NO: 105888 - DNA, 25 bp, Saccharomyces pastorianus
gtacggtcttatttgccatggtcaa

SEQ ID NO: 105889 - DNA, 25 bp, Saccharomyces pastorianus
aacaaagcttttggcgcaggcggtt

SEQ ID NO: 105890 - DNA, 25 bp, Saccharomyces pastorianus
ctcctcttcacccaggtggtatata

SEQ ID NO: 105891 - DNA, 25 bp, Saccharomyces pastorianus
tctgcgcattgttctgtggccacgg

SEQ ID NO: 105892 - DNA, 25 bp, Saccharomyces pastorianus
gcgacatttgcggactgtatatatt

SEQ ID NO: 105893 - DNA, 25 bp, Saccharomyces pastorianus
atattgccagtcagggcagtcgcca

SEQ ID NO: 105894 - DNA, 25 bp, Saccharomyces pastorianus
taagtggacgcatcagtccgcgaca

SEQ ID NO: 105895 - DNA, 25 bp, Saccharomyces pastorianus
gcgacgcacgtcagacatggatgca

SEQ ID NO: 105896 - DNA, 25 bp, Saccharomyces pastorianus
aaactggatctgcaaatatttggac

SEQ ID NO: 105897 - DNA, 25 bp, Saccharomyces pastorianus
agggcagtcgccaagtgtgtctctt

SEQ ID NO: 105898 - DNA, 25 bp, Saccharomyces pastorianus
aactttgtcgcccaaaaggcatctc

SEQ ID NO: 105899 - DNA, 25 bp, Saccharomyces pastorianus
gaaaccggaaatcttctctgcgcat

SEQ ID NO: 105900 - DNA, 25 bp, Saccharomyces pastorianus
aagtgtgtctctttcgtgtagcgac

SEQ ID NO: 105901 - DNA, 25 bp, Saccharomyces pastorianus
tctcgctattatttccaccattttt

SEQ ID NO: 105902 - DNA, 25 bp, Saccharomyces pastorianus
tagccattattaacagacccgtctc

SEQ ID NO: 105903 - DNA, 25 bp, Saccharomyces pastorianus
acgctactcgttgctgttactaata

SEQ ID NO: 105904 - DNA, 25 bp, Saccharomyces pastorianus
ggttcagtgacatcctagttagccc

SEQ ID NO: 105905 - DNA, 25 bp, Saccharomyces pastorianus
tactcccaagctttcctgtaatagc

SEQ ID NO: 105906 - DNA, 25 bp, Saccharomyces pastorianus
agttgcatctcgaggcatacgacct

SEQ ID NO: 105907 - DNA, 25 bp, Saccharomyces pastorianus
tgttgacaggcttcagggcaatctt

SEQ ID NO: 105908 - DNA, 25 bp, Saccharomyces pastorianus
aaaaggttgtatgcccggactcttg

SEQ ID NO: 105909 - DNA, 25 bp, Saccharomyces pastorianus
aactgctctttggatacggccactc

SEQ ID NO: 105910 - DNA, 25 bp, Saccharomyces pastorianus
ttaacgccagcttacagacaatctc

SEQ ID NO: 105911 - DNA, 25 bp, Saccharomyces pastorianus
cagaaacacctttgatgcgcttcgc

SEQ ID NO: 105912 - DNA, 25 bp, Saccharomyces pastorianus
gaacggtgaactacttgaagccttt

SEQ ID NO: 105913 - DNA, 25 bp, Saccharomyces pastorianus
ggcggtcagactggaagccactgat

SEQ ID NO: 105914 - DNA, 25 bp, Saccharomyces pastorianus
gttctggtactgctgtgattgtttc

SEQ ID NO: 105915 - DNA, 25 bp, Saccharomyces pastorianus
gaaggaactagttactgctccacta

SEQ ID NO: 105916 - DNA, 25 bp, Saccharomyces pastorianus
taatattccgttgttgcccggcgaa

SEQ ID NO: 105917 - DNA, 25 bp, Saccharomyces pastorianus
tgctccactagacggtaccattttg

SEQ ID NO: 105918 - DNA, 25 bp, Saccharomyces pastorianus
tgccctgtgggtccttattacaaaa

SEQ ID NO: 105919 - DNA, 25 bp, Saccharomyces pastorianus
gaacaaaccggtccattggccaaag

SEQ ID NO: 105920 - DNA, 25 bp, Saccharomyces pastorianus
gctgtgattgtttctcccattaagg

SEQ ID NO: 105921 - DNA, 25 bp, Saccharomyces pastorianus
agtcggcaccatgaatgcttttttc

SEQ ID NO: 105922 - DNA, 25 bp, Saccharomyces pastorianus
gaaggtgttactagggattccattt

SEQ ID NO: 105923 - DNA, 25 bp, Saccharomyces pastorianus
tgcttttcttggttgcagtgaatcc

SEQ ID NO: 105924 - DNA, 25 bp, Saccharomyces pastorianus
agcacgtctcggcattaatggcata

SEQ ID NO: 105925 - DNA, 25 bp, Saccharomyces pastorianus
ggaaagcctgcaaggaccatctcta

SEQ ID NO: 105926 - DNA, 25 bp, Saccharomyces pastorianus
agaagttcgattgttagcacgtctc

SEQ ID NO: 105927 - DNA, 25 bp, Saccharomyces pastorianus
tccctttgtcattgcagcaggtggt

SEQ ID NO: 105928 - DNA, 25 bp, Saccharomyces pastorianus
gtgactgccacctctgtaagagaag

SEQ ID NO: 105929 - DNA, 25 bp, Saccharomyces pastorianus
ttttcaagccccttcactcgagaaa

SEQ ID NO: 105930 - DNA, 25 bp, Saccharomyces pastorianus
agcttcctccatatggctacatgta

SEQ ID NO: 105931 - DNA, 25 bp, Saccharomyces pastorianus
aggtcttatacatgctactcccttt

SEQ ID NO: 105932 - DNA, 25 bp, Saccharomyces pastorianus
ccatctctactccttttatcgaaaa

SEQ ID NO: 105933 - DNA, 25 bp, Saccharomyces pastorianus
ggatttcagaacgtccaatcaggaa

SEQ ID NO: 105934 - DNA, 25 bp, Saccharomyces pastorianus
agctctgctgtaagcaccattgcaa

SEQ ID NO: 105935 - DNA, 25 bp, Saccharomyces pastorianus
aagactcaagcttccactgttgaaa

SEQ ID NO: 105936 - DNA, 25 bp, Saccharomyces pastorianus
acatcgtcagcatctcgtgttattg

SEQ ID NO: 105937 - DNA, 25 bp, Saccharomyces pastorianus
gaaagttctgttgcaagctctgttg

SEQ ID NO: 105938 - DNA, 25 bp, Saccharomyces pastorianus
ctctgttgcaagctctgctagtttt

SEQ ID NO: 105939 - DNA, 25 bp, Saccharomyces pastorianus
gtttcatctgaatctagctctgctg

SEQ ID NO: 105940 - DNA, 25 bp, Saccharomyces pastorianus
gagtcttctagctcctctgaaagtt

SEQ ID NO: 105941 - DNA, 25 bp, Saccharomyces pastorianus
tagttttgccaataccacagctcca

SEQ ID NO: 105942 - DNA, 25 bp, Saccharomyces pastorianus
cggtgtgccatggtactctactaga

SEQ ID NO: 105943 - DNA, 25 bp, Saccharomyces pastorianus
aatggtactgacagcaccgtcacaa

SEQ ID NO: 105944 - DNA, 25 bp, Saccharomyces pastorianus
cacccaagctactgtttcatctgaa

SEQ ID NO: 105945 - DNA, 25 bp, Saccharomyces pastorianus
catccagagaaattcgtccgcacta

SEQ ID NO: 105946 - DNA, 25 bp, Saccharomyces pastorianus
gagactttgagggtccacacaataa

SEQ ID NO: 105947 - DNA, 25 bp, Saccharomyces pastorianus
tttgtgctttaatgtccttgagacc

SEQ ID NO: 105948 - DNA, 25 bp, Saccharomyces pastorianus
gtgccttctttgatacagctatttc

SEQ ID NO: 105949 - DNA, 25 bp, Saccharomyces pastorianus
gtccgcactaacttatcctatatgt

SEQ ID NO: 105950 - DNA, 25 bp, Saccharomyces pastorianus
tattaggttctccaagtgccttctt

SEQ ID NO: 105951 - DNA, 25 bp, Saccharomyces pastorianus
atggccccatttaaacaatgcgttg

SEQ ID NO: 105952 - DNA, 25 bp, Saccharomyces pastorianus
gaaacctcttactcaaatttggcaa

SEQ ID NO: 105953 - DNA, 25 bp, Saccharomyces pastorianus
atgcctctccaaaaaatggccccat

SEQ ID NO: 105954 - DNA, 25 bp, Saccharomyces pastorianus
aacgctttcagagcattaattcaaa

SEQ ID NO: 105955 - DNA, 25 bp, Saccharomyces pastorianus
atcttctaagtcattatgcctctcc

SEQ ID NO: 105956 - DNA, 25 bp, Saccharomyces pastorianus
aaatttggccactgcgatagctttt

SEQ ID NO: 105957 - DNA, 25 bp, Saccharomyces pastorianus
gcgtgaagcctattcagctgaccaa

SEQ ID NO: 105958 - DNA, 25 bp, Saccharomyces pastorianus
gtcttcaaaagcttcctggtacctt

SEQ ID NO: 105959 - DNA, 25 bp, Saccharomyces pastorianus
tgtccttttgtattccttgtctgat

SEQ ID NO: 105960 - DNA, 25 bp, Saccharomyces pastorianus
gtacctggatttttatggcggcttt

SEQ ID NO: 105961 - DNA, 25 bp, Saccharomyces pastorianus
tatcgtgcatggtgagtgtcggctc

SEQ ID NO: 105962 - DNA, 25 bp, Saccharomyces pastorianus
gttacacgcattgttggtcttcaaa

SEQ ID NO: 105963 - DNA, 25 bp, Saccharomyces pastorianus
ataatcggtctggaacttcgttcaa

SEQ ID NO: 105964 - DNA, 25 bp, Saccharomyces pastorianus
gatattgcaccttgtcatggccatc

SEQ ID NO: 105965 - DNA, 25 bp, Saccharomyces pastorianus
atattcgtgggttttgcgtactttg

SEQ ID NO: 105966 - DNA, 25 bp, Saccharomyces pastorianus
gccatcctttgttgggccatgtgga

SEQ ID NO: 105967 - DNA, 25 bp, Saccharomyces pastorianus
gtggagccctgataacttggaacat

SEQ ID NO: 105968 - DNA, 25 bp, Saccharomyces pastorianus
ctggcttgtatctacgtgtcatggg

SEQ ID NO: 105969 - DNA, 25 bp, Saccharomyces pastorianus
agacctctaaacgtggaactatggc

SEQ ID NO: 105970 - DNA, 25 bp, Saccharomyces pastorianus
ggaggttttctccttatggtaagag

SEQ ID NO: 105971 - DNA, 25 bp, Saccharomyces pastorianus
tgtcccctacatcgaagaggccttg

SEQ ID NO: 105972 - DNA, 25 bp, Saccharomyces pastorianus
aaatatgaggcccttttccatgcac

SEQ ID NO: 105973 - DNA, 25 bp, Saccharomyces pastorianus
gccttgcaggtctattccacagaat

SEQ ID NO: 105974 - DNA, 25 bp, Saccharomyces pastorianus
gcatttattctgtttctggcttgta

SEQ ID NO: 105975 - DNA, 25 bp, Saccharomyces pastorianus
tggaacatgttcagctccccaagaa

SEQ ID NO: 105976 - DNA, 25 bp, Saccharomyces pastorianus
agggccatctatttcgtatcttgtg

SEQ ID NO: 105977 - DNA, 25 bp, Saccharomyces pastorianus
gattttcaatctctggctttttcca

SEQ ID NO: 105978 - DNA, 25 bp, Saccharomyces pastorianus
ggacaacaatccttcagatcgggtt

SEQ ID NO: 105979 - DNA, 25 bp, Saccharomyces pastorianus
gattgggcgtcaactagcagccgaa

SEQ ID NO: 105980 - DNA, 25 bp, Saccharomyces pastorianus
atgcattatttgttcctttgggcgg

SEQ ID NO: 105981 - DNA, 25 bp, Saccharomyces pastorianus
aatgcatgcactttcttgcggaacg

SEQ ID NO: 105982 - DNA, 25 bp, Saccharomyces pastorianus
tcgcagatggcgctcaaacacaaca

SEQ ID NO: 105983 - DNA, 25 bp, Saccharomyces pastorianus
tcaggatctgcacttgccgctagaa

SEQ ID NO: 105984 - DNA, 25 bp, Saccharomyces pastorianus
gttgagcccacagcttgtttgggat

SEQ ID NO: 105985 - DNA, 25 bp, Saccharomyces pastorianus
atggttttgcattgattccgcccta

SEQ ID NO: 105986 - DNA, 25 bp, Saccharomyces pastorianus
tagaagcctttctccaggctgcaaa

SEQ ID NO: 105987 - DNA, 25 bp, Saccharomyces pastorianus
gatcgggttccattgttcatatcaa

SEQ ID NO: 105988 - DNA, 25 bp, Saccharomyces pastorianus
gtacacatttgccattattcgcgaa

SEQ ID NO: 105989 - DNA, 25 bp, Saccharomyces pastorianus
attaggtgccggtttcatgttatat

SEQ ID NO: 105990 - DNA, 25 bp, Saccharomyces pastorianus
gactggttctgttttcatcttcaca

SEQ ID NO: 105991 - DNA, 25 bp, Saccharomyces pastorianus
gttgccggtttatcttaccagctag

SEQ ID NO: 105992 - DNA, 25 bp, Saccharomyces pastorianus
gttatggctatcttgactggttctg

SEQ ID NO: 105993 - DNA, 25 bp, Saccharomyces pastorianus
gatttgtcctctcctgttatgaaga

SEQ ID NO: 105994 - DNA, 25 bp, Saccharomyces pastorianus
agagttggcccctgctgatgcaagg

SEQ ID NO: 105995 - DNA, 25 bp, Saccharomyces pastorianus
acaatgggtggttgcttcacctacc

SEQ ID NO: 105996 - DNA, 25 bp, Saccharomyces pastorianus
aggtaatctagcttctgcagcggct

SEQ ID NO: 105997 - DNA, 25 bp, Saccharomyces pastorianus
agatgcctctggtgctgtgattaaa

SEQ ID NO: 105998 - DNA, 25 bp, Saccharomyces pastorianus
agcggcttccacgattgagacacag

SEQ ID NO: 105999 - DNA, 25 bp, Saccharomyces pastorianus
ttcacctaccctgcatttatgttga

SEQ ID NO: 106000 - DNA, 25 bp, Saccharomyces pastorianus
gatagcgaattcaacggtattaccg

SEQ ID NO: 106001 - DNA, 25 bp, Saccharomyces pastorianus
gctcgccaatgttcgtgcattttac

SEQ ID NO: 106002 - DNA, 25 bp, Saccharomyces pastorianus
gaacgagttcccattagcttatgtc

SEQ ID NO: 106003 - DNA, 25 bp, Saccharomyces pastorianus
gaacatcttctatgtggtgcctcta

SEQ ID NO: 106004 - DNA, 25 bp, Saccharomyces pastorianus
taaacttgtcgtgtcctaatgtgcc

SEQ ID NO: 106005 - DNA, 25 bp, Saccharomyces pastorianus
gtgtcctaatgtgcctgggaaacca

SEQ ID NO: 106006 - DNA, 25 bp, Saccharomyces pastorianus
aaacctcttggtgtcaagttgcctc

SEQ ID NO: 106007 - DNA, 25 bp, Saccharomyces pastorianus
gttgcttatgactttgacttgacaa

SEQ ID NO: 106008 - DNA, 25 bp, Saccharomyces pastorianus
aatatgttaagccaaccgcgctcgc

SEQ ID NO: 106009 - DNA, 25 bp, Saccharomyces pastorianus
gggaaaccacaagttgcttatgact

SEQ ID NO: 106010 - DNA, 25 bp, Saccharomyces pastorianus
tctatgtggtgcctctatgctacag

SEQ ID NO: 106011 - DNA, 25 bp, Saccharomyces pastorianus
aaatcccactagacgtttctgacta

SEQ ID NO: 106012 - DNA, 25 bp, Saccharomyces pastorianus
aggccagggagccattatcgccaaa

SEQ ID NO: 106013 - DNA, 25 bp, Saccharomyces pastorianus
agggaagagcctcctttgcctaaga

SEQ ID NO: 106014 - DNA, 25 bp, Saccharomyces pastorianus
tctagaatgaatgcccacaaccgtc

SEQ ID NO: 106015 - DNA, 25 bp, Saccharomyces pastorianus
tggagatttaccaaccacagagaaa

SEQ ID NO: 106016 - DNA, 25 bp, Saccharomyces pastorianus
gccaaaggcctaacagagtctccaa

SEQ ID NO: 106017 - DNA, 25 bp, Saccharomyces pastorianus
tttgcgccttcggatgctgcatcaa

SEQ ID NO: 106018 - DNA, 25 bp, Saccharomyces pastorianus
tctgactacaccctcgatgatatga

SEQ ID NO: 106019 - DNA, 25 bp, Saccharomyces pastorianus
gtcacacagacagctcatctaatca

SEQ ID NO: 106020 - DNA, 25 bp, Saccharomyces pastorianus
gacctagactgggatttgcgccttc

SEQ ID NO: 106021 - DNA, 25 bp, Saccharomyces pastorianus
gaataacactcctacttctgtcgaa

SEQ ID NO: 106022 - DNA, 25 bp, Saccharomyces pastorianus
aactattcagctctcgtcacgaaag

SEQ ID NO: 106023 - DNA, 25 bp, Saccharomyces pastorianus
tagctgacgccatcaacaccaagta

SEQ ID NO: 106024 - DNA, 25 bp, Saccharomyces pastorianus
attaagactcctgcatacgacatag

SEQ ID NO: 106025 - DNA, 25 bp, Saccharomyces pastorianus
gggagttgctactttcatttgctaa

SEQ ID NO: 106026 - DNA, 25 bp, Saccharomyces pastorianus
tgaattttctcaggcatctgctaaa

SEQ ID NO: 106027 - DNA, 25 bp, Saccharomyces pastorianus
tctaaccatgttaactgtgcgtatt

SEQ ID NO: 106028 - DNA, 25 bp, Saccharomyces pastorianus
gaacttttgcctatcgtagctgacg

SEQ ID NO: 106029 - DNA, 25 bp, Saccharomyces pastorianus
gccgcatataggctaaccgtagctt

SEQ ID NO: 106030 - DNA, 25 bp, Saccharomyces pastorianus
aactccgtaacttggcttgcaaaca

SEQ ID NO: 106031 - DNA, 25 bp, Saccharomyces pastorianus
tggctattgcagtttccacactaat

SEQ ID NO: 106032 - DNA, 25 bp, Saccharomyces pastorianus
cttacggaaatttggctactgttga

SEQ ID NO: 106033 - DNA, 25 bp, Saccharomyces pastorianus
tagacgttgggttcttggtcgttca

SEQ ID NO: 106034 - DNA, 25 bp, Saccharomyces pastorianus
gcatattcgggcactggagctttga

SEQ ID NO: 106035 - DNA, 25 bp, Saccharomyces pastorianus
agcgtacacgtctaggtgcattcaa

SEQ ID NO: 106036 - DNA, 25 bp, Saccharomyces pastorianus
attgtcttggcgctctcaacgaaat

SEQ ID NO: 106037 - DNA, 25 bp, Saccharomyces pastorianus
caacgctccattgttaacttcttac

SEQ ID NO: 106038 - DNA, 25 bp, Saccharomyces pastorianus
caatgatcatttgcgcagccttgac

SEQ ID NO: 106039 - DNA, 25 bp, Saccharomyces pastorianus
cagccttgaccgttttaggtgctac

SEQ ID NO: 106040 - DNA, 25 bp, Saccharomyces pastorianus
agtgccgatgtcgttgctactggaa

SEQ ID NO: 106041 - DNA, 25 bp, Saccharomyces pastorianus
tggatttagaccacataccgcttct

SEQ ID NO: 106042 - DNA, 25 bp, Saccharomyces pastorianus
attccccgacagaagaccagtgtat

SEQ ID NO: 106043 - DNA, 25 bp, Saccharomyces pastorianus
gaattcagcatcacgttattaccag

SEQ ID NO: 106044 - DNA, 25 bp, Saccharomyces pastorianus
attaccaccagggacgatgctgaaa

SEQ ID NO: 106045 - DNA, 25 bp, Saccharomyces pastorianus
tttgaacatggaacctctcgttgag

SEQ ID NO: 106046 - DNA, 25 bp, Saccharomyces pastorianus
taatagggacctgcactcattcaac

SEQ ID NO: 106047 - DNA, 25 bp, Saccharomyces pastorianus
aatacgcagaggctggtgcatccgc

SEQ ID NO: 106048 - DNA, 25 bp, Saccharomyces pastorianus
attagctggagctgacactgtcctt

SEQ ID NO: 106049 - DNA, 25 bp, Saccharomyces pastorianus
gacactgtccttcttatagtcaaga

SEQ ID NO: 106050 - DNA, 25 bp, Saccharomyces pastorianus
tgttgctgctgaacaggctctcaaa

SEQ ID NO: 106051 - DNA, 25 bp, Saccharomyces pastorianus
atttccgtattgaccgaacctcatt

SEQ ID NO: 106052 - DNA, 25 bp, Saccharomyces pastorianus
tagatttgaaatttcctcccaagga

SEQ ID NO: 106053 - DNA, 25 bp, Saccharomyces pastorianus
ttgctctatcgggaattaccaccag

SEQ ID NO: 106054 - DNA, 25 bp, Saccharomyces pastorianus
ctcattggtttcacggttcgttaca

SEQ ID NO: 106055 - DNA, 25 bp, Saccharomyces pastorianus
aactggagcctgtagatttcgagaa

SEQ ID NO: 106056 - DNA, 25 bp, Saccharomyces pastorianus
ataacggcttgttctaactgtagag

SEQ ID NO: 106057 - DNA, 25 bp, Saccharomyces pastorianus
gtttctcttctttatgcctcatttt

SEQ ID NO: 106058 - DNA, 25 bp, Saccharomyces pastorianus
atgcctcatttttccctccaaagaa

SEQ ID NO: 106059 - DNA, 25 bp, Saccharomyces pastorianus
aataacaatgctttcttatggcgtt

SEQ ID NO: 106060 - DNA, 25 bp, Saccharomyces pastorianus
cgtattattcctgccatcgcaacaa

SEQ ID NO: 106061 - DNA, 25 bp, Saccharomyces pastorianus
accaaattcacagctggccgtatta

SEQ ID NO: 106062 - DNA, 25 bp, Saccharomyces pastorianus
ctttgttaatttagctttgccattt

SEQ ID NO: 106063 - DNA, 25 bp, Saccharomyces pastorianus
ttcatcgaaactgctgatcgccaaa

SEQ ID NO: 106064 - DNA, 25 bp, Saccharomyces pastorianus
agagctcaaaactacttcatcgaaa

SEQ ID NO: 106065 - DNA, 25 bp, Saccharomyces pastorianus
gcaacaaccacttctttggttactg

SEQ ID NO: 106066 - DNA, 25 bp, Saccharomyces pastorianus
atcaggcacaggaaagtctacactt

SEQ ID NO: 106067 - DNA, 25 bp, Saccharomyces pastorianus
acctcagggcttggatacacgtatt

SEQ ID NO: 106068 - DNA, 25 bp, Saccharomyces pastorianus
gtccacctgctctactaacaatggt

SEQ ID NO: 106069 - DNA, 25 bp, Saccharomyces pastorianus
tgagtgtacttcagccttggattct

SEQ ID NO: 106070 - DNA, 25 bp, Saccharomyces pastorianus
tgtcaggtggacaagcgcaaaggct

SEQ ID NO: 106071 - DNA, 25 bp, Saccharomyces pastorianus
acgtaggaatccatgactttgtaat

SEQ ID NO: 106072 - DNA, 25 bp, Saccharomyces pastorianus
gagatcgtcaaaaaaggtccacctg

SEQ ID NO: 106073 - DNA, 25 bp, Saccharomyces pastorianus
gctttgcatagccagagcacttctg

SEQ ID NO: 106074 - DNA, 25 bp, Saccharomyces pastorianus
tgatacaactttactgtcaggtgga

SEQ ID NO: 106075 - DNA, 25 bp, Saccharomyces pastorianus
ttgtaatttcatcacctcagggctt

SEQ ID NO: 106076 - DNA, 25 bp, Saccharomyces pastorianus
ttggattctgtcagctcctctatca

SEQ ID NO: 106077 - DNA, 25 bp, Saccharomyces pastorianus
gaatcctcgagaatgtaccgcaatt

SEQ ID NO: 106078 - DNA, 25 bp, Saccharomyces pastorianus
attggcgacgaaccgaattacctca

SEQ ID NO: 106079 - DNA, 25 bp, Saccharomyces pastorianus
acagcatgccaaacgttccagtaag

SEQ ID NO: 106080 - DNA, 25 bp, Saccharomyces pastorianus
agtcttgtcgattcttcctacaatc

SEQ ID NO: 106081 - DNA, 25 bp, Saccharomyces pastorianus
ggacttgatttcctgactgatccga

SEQ ID NO: 106082 - DNA, 25 bp, Saccharomyces pastorianus
gacaaactcagcgttgggtcactgt

SEQ ID NO: 106083 - DNA, 25 bp, Saccharomyces pastorianus
ggctgcaaacgttccctgataagca

SEQ ID NO: 106084 - DNA, 25 bp, Saccharomyces pastorianus
acagtggcgctggtagtcttgtcga

SEQ ID NO: 106085 - DNA, 25 bp, Saccharomyces pastorianus
gtttcagacagttcaggacatccca

SEQ ID NO: 106086 - DNA, 25 bp, Saccharomyces pastorianus
gaagcagtctcttatatccagcctt

SEQ ID NO: 106087 - DNA, 25 bp, Saccharomyces pastorianus
acaatctcccctctttatggaagga

SEQ ID NO: 106088 - DNA, 25 bp, Saccharomyces pastorianus
gaatgcgtcgcagaggcctaaagcc

SEQ ID NO: 106089 - DNA, 25 bp, Saccharomyces pastorianus
agagatcatcttgccgttcttgagc

SEQ ID NO: 106090 - DNA, 25 bp, Saccharomyces pastorianus
tagcagcgctttggaagttttctac

SEQ ID NO: 106091 - DNA, 25 bp, Saccharomyces pastorianus
gaagcgaggactttttgccatacag

SEQ ID NO: 106092 - DNA, 25 bp, Saccharomyces pastorianus
taaagccctccgcagcattaagtac

SEQ ID NO: 106093 - DNA, 25 bp, Saccharomyces pastorianus
gaaatatgcatttgggactctctat

SEQ ID NO: 106094 - DNA, 25 bp, Saccharomyces pastorianus
tacattttactcctaccagtttcca

SEQ ID NO: 106095 - DNA, 25 bp, Saccharomyces pastorianus
caagatatccgttgatcagccgatc

SEQ ID NO: 106096 - DNA, 25 bp, Saccharomyces pastorianus
aacgcgccaccaattgtaaagtttg

SEQ ID NO: 106097 - DNA, 25 bp, Saccharomyces pastorianus
cactcgtgtccgttaactatctgaa

SEQ ID NO: 106098 - DNA, 25 bp, Saccharomyces pastorianus
tgagcttttatcgaacctccatcta

SEQ ID NO: 106099 - DNA, 25 bp, Saccharomyces pastorianus
aaacgatttggtcacctatacgccg

SEQ ID NO: 106100 - DNA, 25 bp, Saccharomyces pastorianus
gaatatcgtggtcaccgattcgtat

SEQ ID NO: 106101 - DNA, 25 bp, Saccharomyces pastorianus
agcaaccccaccacaaatgagaatg

SEQ ID NO: 106102 - DNA, 25 bp, Saccharomyces pastorianus
cttccacaaatccaattaccacagg

SEQ ID NO: 106103 - DNA, 25 bp, Saccharomyces pastorianus
tagatggtctcaacgaatacttcat

SEQ ID NO: 106104 - DNA, 25 bp, Saccharomyces pastorianus
aatgttttgggaatgggacctgctt

SEQ ID NO: 106105 - DNA, 25 bp, Saccharomyces pastorianus
tatacgccgcaagagatccaggaaa

SEQ ID NO: 106106 - DNA, 25 bp, Saccharomyces pastorianus
gggagctatttatcgtcagcagcaa

SEQ ID NO: 106107 - DNA, 25 bp, Saccharomyces pastorianus
ggacctgcttggataatgacgacat

SEQ ID NO: 106108 - DNA, 25 bp, Saccharomyces pastorianus
gcaatcctgccggtcatattaaacg

SEQ ID NO: 106109 - DNA, 25 bp, Saccharomyces pastorianus
atttaactcagatctaccttccaca

SEQ ID NO: 106110 - DNA, 25 bp, Saccharomyces pastorianus
ttttggtagtaactcccctatgcca

SEQ ID NO: 106111 - DNA, 25 bp, Saccharomyces pastorianus
acctccagggttttttccaatgcat

SEQ ID NO: 106112 - DNA, 25 bp, Saccharomyces pastorianus
ggtaacaggacaacagccacagcca

SEQ ID NO: 106113 - DNA, 25 bp, Saccharomyces pastorianus
tgggtgtaccaccaaattttccaca

SEQ ID NO: 106114 - DNA, 25 bp, Saccharomyces pastorianus
actaattgctcatcagggtccacaa

SEQ ID NO: 106115 - DNA, 25 bp, Saccharomyces pastorianus
aatgcatcctaactttcctaacggc

SEQ ID NO: 106116 - DNA, 25 bp, Saccharomyces pastorianus
accaggtctcgttcaattccagaaa

SEQ ID NO: 106117 - DNA, 25 bp, Saccharomyces pastorianus
atctgcctcaacagcaatacatgcc

SEQ ID NO: 106118 - DNA, 25 bp, Saccharomyces pastorianus
gcatcctcctaataacaacgcattt

SEQ ID NO: 106119 - DNA, 25 bp, Saccharomyces pastorianus
gaggaaacagcaacgccagatctgc

SEQ ID NO: 106120 - DNA, 25 bp, Saccharomyces pastorianus
aattttccacaacgcatgatgccac

SEQ ID NO: 106121 - DNA, 25 bp, Saccharomyces pastorianus
gaaacgggcattcaacttcccgtga

SEQ ID NO: 106122 - DNA, 25 bp, Saccharomyces pastorianus
tgaccgccaccctagtaatttgatg

SEQ ID NO: 106123 - DNA, 25 bp, Saccharomyces pastorianus
aacttcccgtgatgaatgccaatga

SEQ ID NO: 106124 - DNA, 25 bp, Saccharomyces pastorianus
gaagcgcattactgacaaattaacg

SEQ ID NO: 106125 - DNA, 25 bp, Saccharomyces pastorianus
agccgtgatgtccatgaccggttat

SEQ ID NO: 106126 - DNA, 25 bp, Saccharomyces pastorianus
aacgagcacaagaatgccattcgaa

SEQ ID NO: 106127 - DNA, 25 bp, Saccharomyces pastorianus
gccattcgaaatgcaagggccatgt

SEQ ID NO: 106128 - DNA, 25 bp, Saccharomyces pastorianus
gcaatccttgaagcttttgctttcg

SEQ ID NO: 106129 - DNA, 25 bp, Saccharomyces pastorianus
aggtttaatgacttggacgttccag

SEQ ID NO: 106130 - DNA, 25 bp, Saccharomyces pastorianus
ggccatgttggtattgaagcgcatt

SEQ ID NO: 106131 - DNA, 25 bp, Saccharomyces pastorianus
aggtagcttccgtattacttgtgag

SEQ ID NO: 106132 - DNA, 25 bp, Saccharomyces pastorianus
cttcttcttcctatactattttctc

SEQ ID NO: 106133 - DNA, 25 bp, Saccharomyces pastorianus
atgaattttcagtcaggttctccga

SEQ ID NO: 106134 - DNA, 25 bp, Saccharomyces pastorianus
cttcttttcttcatcttcattcttc

SEQ ID NO: 106135 - DNA, 25 bp, Saccharomyces pastorianus
gacttttaattgctgtgcccctcct

SEQ ID NO: 106136 - DNA, 25 bp, Saccharomyces pastorianus
acctcttccttctatatcttttctt

SEQ ID NO: 106137 - DNA, 25 bp, Saccharomyces pastorianus
aggttctccgacttttaattgctgt

SEQ ID NO: 106138 - DNA, 25 bp, Saccharomyces pastorianus
atcttcattcttcttattttcttca

SEQ ID NO: 106139 - DNA, 25 bp, Saccharomyces pastorianus
atcttcattcttcttgttttcctct

SEQ ID NO: 106140 - DNA, 25 bp, Saccharomyces pastorianus
ttcttctcttactactatccttcta

SEQ ID NO: 106141 - DNA, 25 bp, Saccharomyces pastorianus
tattaactctactatacctcttcct

SEQ ID NO: 106142 - DNA, 25 bp, Saccharomyces pastorianus
tattttctctcttcttacttccttc

SEQ ID NO: 106143 - DNA, 25 bp, Saccharomyces pastorianus
atctgtacataggtggctgtctgct

SEQ ID NO: 106144 - DNA, 25 bp, Saccharomyces pastorianus
gactacggctaaagactctattgca

SEQ ID NO: 106145 - DNA, 25 bp, Saccharomyces pastorianus
ctggtttttcgggtgctgatttaca

SEQ ID NO: 106146 - DNA, 25 bp, Saccharomyces pastorianus
gtggtacccggcaatgataatatag

SEQ ID NO: 106147 - DNA, 25 bp, Saccharomyces pastorianus
aagcacttcagctgcttctgagctg

SEQ ID NO: 106148 - DNA, 25 bp, Saccharomyces pastorianus
gggctctgctacaatgcttatttga

SEQ ID NO: 106149 - DNA, 25 bp, Saccharomyces pastorianus
ctgagctgacagctgtggtcacaat

SEQ ID NO: 106150 - DNA, 25 bp, Saccharomyces pastorianus
gggcgatttacgataggttccagaa

SEQ ID NO: 106151 - DNA, 25 bp, Saccharomyces pastorianus
gatagcgcattgttaagaccgggaa

SEQ ID NO: 106152 - DNA, 25 bp, Saccharomyces pastorianus
ctgtctgctgcaggccaatcggaag

SEQ ID NO: 106153 - DNA, 25 bp, Saccharomyces pastorianus
ttcagtatcaatgagcacgggcgta

SEQ ID NO: 106154 - DNA, 25 bp, Saccharomyces pastorianus
aaattgggactgtccttgcttggga

SEQ ID NO: 106155 - DNA, 25 bp, Saccharomyces pastorianus
gaaaataccccgagcattatgcaga

SEQ ID NO: 106156 - DNA, 25 bp, Saccharomyces pastorianus
aggtgcttataacccagacactggt

SEQ ID NO: 106157 - DNA, 25 bp, Saccharomyces pastorianus
gacaacaatgctggatcttctgaaa

SEQ ID NO: 106158 - DNA, 25 bp, Saccharomyces pastorianus
tccttgcttgggaggtatggcccat

SEQ ID NO: 106159 - DNA, 25 bp, Saccharomyces pastorianus
agaggttcaacacgaaggtgcttat

SEQ ID NO: 106160 - DNA, 25 bp, Saccharomyces pastorianus
tatggcccatggaccctgtggtgaa

SEQ ID NO: 106161 - DNA, 25 bp, Saccharomyces pastorianus
gagttcaaatctgcattttcttgct

SEQ ID NO: 106162 - DNA, 25 bp, Saccharomyces pastorianus
agaatcagcgccaaatgtttcaagc

SEQ ID NO: 106163 - DNA, 25 bp, Saccharomyces pastorianus
aaagcaaatgggtcctactgaagaa

SEQ ID NO: 106164 - DNA, 25 bp, Saccharomyces pastorianus
cattttcttgcttcgtctattctga

SEQ ID NO: 106165 - DNA, 25 bp, Saccharomyces pastorianus
ttacggaccatttacgcaaaactca

SEQ ID NO: 106166 - DNA, 25 bp, Saccharomyces pastorianus
gtcgctaccattcagttggactttc

SEQ ID NO: 106167 - DNA, 25 bp, Saccharomyces pastorianus
tggactttcaactacctgagaggtt

SEQ ID NO: 106168 - DNA, 25 bp, Saccharomyces pastorianus
ggtataggatcaagtcggccatttt

SEQ ID NO: 106169 - DNA, 25 bp, Saccharomyces pastorianus
agattctaatgagggccgttggccg

SEQ ID NO: 106170 - DNA, 25 bp, Saccharomyces pastorianus
tagacatgtgcactgccttgcagaa

SEQ ID NO: 106171 - DNA, 25 bp, Saccharomyces pastorianus
gaagccgacgacatggaaccagttc

SEQ ID NO: 106172 - DNA, 25 bp, Saccharomyces pastorianus
gcaaaactcatcaagtcgctaccat

SEQ ID NO: 106173 - DNA, 25 bp, Saccharomyces pastorianus
gatggtgcgttctatggtccaaagc

SEQ ID NO: 106174 - DNA, 25 bp, Saccharomyces pastorianus
agagctacttttggttctatcgaaa

SEQ ID NO: 106175 - DNA, 25 bp, Saccharomyces pastorianus
accaagctgtaattattcccgtcaa

SEQ ID NO: 106176 - DNA, 25 bp, Saccharomyces pastorianus
ggaaaacttgaaccacctgtcaaat

SEQ ID NO: 106177 - DNA, 25 bp, Saccharomyces pastorianus
gtgacctccaacaaaattacctctc

SEQ ID NO: 106178 - DNA, 25 bp, Saccharomyces pastorianus
ggcctatcacgcttggagaccattt

SEQ ID NO: 106179 - DNA, 25 bp, Saccharomyces pastorianus
caatcctttgagagcttgggtgaaa

SEQ ID NO: 106180 - DNA, 25 bp, Saccharomyces pastorianus
tgaagagctctatctgtcacataat

SEQ ID NO: 106181 - DNA, 25 bp, Saccharomyces pastorianus
gaccatttatctggagggaaaccct

SEQ ID NO: 106182 - DNA, 25 bp, Saccharomyces pastorianus
ttgggtgaaaacctgtccggcctat

SEQ ID NO: 106183 - DNA, 25 bp, Saccharomyces pastorianus
ttaactgacatatgggcctccttta

SEQ ID NO: 106184 - DNA, 25 bp, Saccharomyces pastorianus
actgactatgaacttacctccatcc

SEQ ID NO: 106185 - DNA, 25 bp, Saccharomyces pastorianus
ctaactactttggacgtgacctcca

SEQ ID NO: 106186 - DNA, 25 bp, Saccharomyces pastorianus
tattgaacccgattccttcgaaggt

SEQ ID NO: 106187 - DNA, 25 bp, Saccharomyces pastorianus
gcgatacccaatttcacaaggattt

SEQ ID NO: 106188 - DNA, 25 bp, Saccharomyces pastorianus
tgcgtaccgcactataatgggccgt

SEQ ID NO: 106189 - DNA, 25 bp, Saccharomyces pastorianus
gctgctcgtagctattgaagaagaa

SEQ ID NO: 106190 - DNA, 25 bp, Saccharomyces pastorianus
ttatgtccaacaccatactcgcaca

SEQ ID NO: 106191 - DNA, 25 bp, Saccharomyces pastorianus
taatgggccgttccgttatgtccaa

SEQ ID NO: 106192 - DNA, 25 bp, Saccharomyces pastorianus
cttggacactgtcgagctgctcgta

SEQ ID NO: 106193 - DNA, 25 bp, Saccharomyces pastorianus
aggcgtttgataagaactctcccaa

SEQ ID NO: 106194 - DNA, 25 bp, Saccharomyces pastorianus
aagcaaatctccagcgatacccaat

SEQ ID NO: 106195 - DNA, 25 bp, Saccharomyces pastorianus
gaaatccctgacaaagtggctgatg

SEQ ID NO: 106196 - DNA, 25 bp, Saccharomyces pastorianus
atgtttagatccgtttgccgcattt

SEQ ID NO: 106197 - DNA, 25 bp, Saccharomyces pastorianus
agatcaggtttctcaaagggtcatt

SEQ ID NO: 106198 - DNA, 25 bp, Saccharomyces pastorianus
ggttgtggacttcagagacgccatt

SEQ ID NO: 106199 - DNA, 25 bp, Saccharomyces pastorianus
aggtactgtatccacttcagcatca

SEQ ID NO: 106200 - DNA, 25 bp, Saccharomyces pastorianus
gactacaagacatactgcctcaggt

SEQ ID NO: 106201 - DNA, 25 bp, Saccharomyces pastorianus
ttagaggcggccgacgacgacgatt

SEQ ID NO: 106202 - DNA, 25 bp, Saccharomyces pastorianus
tgggcggacaagataccatctctgc

SEQ ID NO: 106203 - DNA, 25 bp, Saccharomyces pastorianus
gaagcgatttcgactctactgaggt

SEQ ID NO: 106204 - DNA, 25 bp, Saccharomyces pastorianus
ggtgcattctcggttgtagccaaag

SEQ ID NO: 106205 - DNA, 25 bp, Saccharomyces pastorianus
cggtgtcgcacgtggttatggattt

SEQ ID NO: 106206 - DNA, 25 bp, Saccharomyces pastorianus
actgcctcaggtgccgtcattaaag

SEQ ID NO: 106207 - DNA, 25 bp, Saccharomyces pastorianus
gcatcagcactgcagaatcgttcgt

SEQ ID NO: 106208 - DNA, 25 bp, Saccharomyces pastorianus
acttcaagaccactgcgagcgctaa

SEQ ID NO: 106209 - DNA, 25 bp, Saccharomyces pastorianus
gaatatatatatcaactctccagaa

SEQ ID NO: 106210 - DNA, 25 bp, Saccharomyces pastorianus
gatggtagcaaacccaaggaagtca

SEQ ID NO: 106211 - DNA, 25 bp, Saccharomyces pastorianus
gagcactaaactgttggcgtcatta

SEQ ID NO: 106212 - DNA, 25 bp, Saccharomyces pastorianus
tgccgcatttactgcacatcctaaa

SEQ ID NO: 106213 - DNA, 25 bp, Saccharomyces pastorianus
atttcgtccacaacagaagtttcta

SEQ ID NO: 106214 - DNA, 25 bp, Saccharomyces pastorianus
aacaatgcatcctcaagtaacgccg

SEQ ID NO: 106215 - DNA, 25 bp, Saccharomyces pastorianus
gtataacttcgccatcatcagtaat

SEQ ID NO: 106216 - DNA, 25 bp, Saccharomyces pastorianus
ttgccgcgtataatttcgtccacaa

SEQ ID NO: 106217 - DNA, 25 bp, Saccharomyces pastorianus
agtaacgccgccagtataacttcgc

SEQ ID NO: 106218 - DNA, 25 bp, Saccharomyces pastorianus
gataagatctaacaacgcgttgatg

SEQ ID NO: 106219 - DNA, 25 bp, Saccharomyces pastorianus
caggattctacttttcttgatgaaa

SEQ ID NO: 106220 - DNA, 25 bp, Saccharomyces pastorianus
attatggctcattgccctagctcta

SEQ ID NO: 106221 - DNA, 25 bp, Saccharomyces pastorianus
acacgtttgcgttggtgtagccact

SEQ ID NO: 106222 - DNA, 25 bp, Saccharomyces pastorianus
ttggcagccattatcatatccgtta

SEQ ID NO: 106223 - DNA, 25 bp, Saccharomyces pastorianus
tagggatggttctgccatttctgca

SEQ ID NO: 106224 - DNA, 25 bp, Saccharomyces pastorianus
gtctgttttggctttgaacctctta

SEQ ID NO: 106225 - DNA, 25 bp, Saccharomyces pastorianus
tagaacagagctaagtcaccccgac

SEQ ID NO: 106226 - DNA, 25 bp, Saccharomyces pastorianus
gtcccgcctatacagggctgatatg

SEQ ID NO: 106227 - DNA, 25 bp, Saccharomyces pastorianus
gtttcggcgaccataacttgggtga

SEQ ID NO: 106228 - DNA, 25 bp, Saccharomyces pastorianus
tgcgttgtcttttatcgccacagga

SEQ ID NO: 106229 - DNA, 25 bp, Saccharomyces pastorianus
gagtggtcgttacatgtccggatct

SEQ ID NO: 106230 - DNA, 25 bp, Saccharomyces pastorianus
ttagcgatcatcttttccttcttta

SEQ ID NO: 106231 - DNA, 25 bp, Saccharomyces pastorianus
tccatattttggcatttccctgcag

SEQ ID NO: 106232 - DNA, 25 bp, Saccharomyces pastorianus
aataacggccacatttacgaagaag

SEQ ID NO: 106233 - DNA, 25 bp, Saccharomyces pastorianus
gatcatcgacgaccgcatatttaga

SEQ ID NO: 106234 - DNA, 25 bp, Saccharomyces pastorianus
gggatccggcacgttgatatgcaac

SEQ ID NO: 106235 - DNA, 25 bp, Saccharomyces pastorianus
tttccctgcagctgatcatcgacga

SEQ ID NO: 106236 - DNA, 25 bp, Saccharomyces pastorianus
gcgcatttggatgatccggactcca

SEQ ID NO: 106237 - DNA, 25 bp, Saccharomyces pastorianus
tggcccaattcgtacagctttttaa

SEQ ID NO: 106238 - DNA, 25 bp, Saccharomyces pastorianus
agactatcatgctattccgggatcc

SEQ ID NO: 106239 - DNA, 25 bp, Saccharomyces pastorianus
gcaagacgcgacagttcccattcaa

SEQ ID NO: 106240 - DNA, 25 bp, Saccharomyces pastorianus
ggtcgtacaaacacaacatgcccta

SEQ ID NO: 106241 - DNA, 25 bp, Saccharomyces pastorianus
cttcgcgcaagcaacagtttttctg

SEQ ID NO: 106242 - DNA, 25 bp, Saccharomyces pastorianus
gattggttttattttcctgccctgg

SEQ ID NO: 106243 - DNA, 25 bp, Saccharomyces pastorianus
ggtcctcgactctatcaacaaaaca

SEQ ID NO: 106244 - DNA, 25 bp, Saccharomyces pastorianus
ttattcgatcatcaagagccccatc

SEQ ID NO: 106245 - DNA, 25 bp, Saccharomyces pastorianus
ggtgcctacacatcatcggcggcta

SEQ ID NO: 106246 - DNA, 25 bp, Saccharomyces pastorianus
ggcggctactcaattcaacggtttt

SEQ ID NO: 106247 - DNA, 25 bp, Saccharomyces pastorianus
tgctgttttgcgtctagcgctagag

SEQ ID NO: 106248 - DNA, 25 bp, Saccharomyces pastorianus
gcgctagaggaatttttccccgtag

SEQ ID NO: 106249 - DNA, 25 bp, Saccharomyces pastorianus
gattttgaatccactactgcggtcc

SEQ ID NO: 106250 - DNA, 25 bp, Saccharomyces pastorianus
gctacagcgtttactttggcatctc

SEQ ID NO: 106251 - DNA, 25 bp, Saccharomyces pastorianus
ttccccgtaggttgtggtgttgata

SEQ ID NO: 106252 - DNA, 25 bp, Saccharomyces pastorianus
gctgctaacgaatacgggttgcccc

SEQ ID NO: 106253 - DNA, 25 bp, Saccharomyces pastorianus
gttctgttcatgaactttttctctg

SEQ ID NO: 106254 - DNA, 25 bp, Saccharomyces pastorianus
accgtagtaacgttctgttcatgaa

SEQ ID NO: 106255 - DNA, 25 bp, Saccharomyces pastorianus
tttctctgtttttgtatgtacaatt

SEQ ID NO: 106256 - DNA, 25 bp, Saccharomyces pastorianus
ttcttgcgtcggcatttttccaaag

SEQ ID NO: 106257 - DNA, 25 bp, Saccharomyces pastorianus
ggttttcgcagatgtctatgttctt

SEQ ID NO: 106258 - DNA, 25 bp, Saccharomyces pastorianus
tgcgtcggcatttttccaaagtaaa

SEQ ID NO: 106259 - DNA, 25 bp, Saccharomyces pastorianus
agatgtctatgttcttgcgtcggca

SEQ ID NO: 106260 - DNA, 25 bp, Saccharomyces pastorianus
gttcatgaactttttctctgttttt

SEQ ID NO: 106261 - DNA, 25 bp, Saccharomyces pastorianus
atgatcttgctataccgtagtaacg

SEQ ID NO: 106262 - DNA, 25 bp, Saccharomyces pastorianus
actttatttttggttttcgcagatg

SEQ ID NO: 106263 - DNA, 25 bp, Saccharomyces pastorianus
caaaatttaagcattttcactacca

SEQ ID NO: 106264 - DNA, 25 bp, Saccharomyces pastorianus
ggacctgcacggtgaggacgtacaa

SEQ ID NO: 106265 - DNA, 25 bp, Saccharomyces pastorianus
agaacgacgggctggcagacgatct

SEQ ID NO: 106266 - DNA, 25 bp, Saccharomyces pastorianus
gaagaagcacatgccttcaccgtgc

SEQ ID NO: 106267 - DNA, 25 bp, Saccharomyces pastorianus
ggatggcgacctcgttatggacaac

SEQ ID NO: 106268 - DNA, 25 bp, Saccharomyces pastorianus
acaggcctgcgaattcgacggcgaa

SEQ ID NO: 106269 - DNA, 25 bp, Saccharomyces pastorianus
gtggaattgaccatcaggcccaaat

SEQ ID NO: 106270 - DNA, 25 bp, Saccharomyces pastorianus
tggaaattccctacagcagcgtttt

SEQ ID NO: 106271 - DNA, 25 bp, Saccharomyces pastorianus
ttcaccgtgcgcagcgtggaattga

SEQ ID NO: 106272 - DNA, 25 bp, Saccharomyces pastorianus
agatctcaacgccacgtattctggg

SEQ ID NO: 106273 - DNA, 25 bp, Saccharomyces pastorianus
gcagcgttttgtaccatgcatcaag

SEQ ID NO: 106274 - DNA, 25 bp, Saccharomyces pastorianus
gggccgcccgtgtatcagaacgacg

SEQ ID NO: 106275 - DNA, 25 bp, Saccharomyces pastorianus
gtcgctctgccatcattctagatga

SEQ ID NO: 106276 - DNA, 25 bp, Saccharomyces pastorianus
tttcgcagaatgtatccgtcgtgat

SEQ ID NO: 106277 - DNA, 25 bp, Saccharomyces pastorianus
taacggccacgttatcggtgacgat

SEQ ID NO: 106278 - DNA, 25 bp, Saccharomyces pastorianus
ttgatggcttagactcgcatggctt

SEQ ID NO: 106279 - DNA, 25 bp, Saccharomyces pastorianus
tagcgctgctgaacatttggtgcaa

SEQ ID NO: 106280 - DNA, 25 bp, Saccharomyces pastorianus
gtttatgttgttgctactcacggta

SEQ ID NO: 106281 - DNA, 25 bp, Saccharomyces pastorianus
gtacatatgatgctgtcgactccga

SEQ ID NO: 106282 - DNA, 25 bp, Saccharomyces pastorianus
gaaaagtccgatgccattgacacaa

SEQ ID NO: 106283 - DNA, 25 bp, Saccharomyces pastorianus
ggttactatcgatgtttctccaatt

SEQ ID NO: 106284 - DNA, 25 bp, Saccharomyces pastorianus
ctggcgaacgcatagctgggtccaa

SEQ ID NO: 106285 - DNA, 25 bp, Saccharomyces pastorianus
gacctgggtcatttattagcgctgc

SEQ ID NO: 106286 - DNA, 25 bp, Saccharomyces pastorianus
acgagttctattattggtattccag

SEQ ID NO: 106287 - DNA, 25 bp, Saccharomyces pastorianus
ggaatcccaatactcaagggtgtat

SEQ ID NO: 106288 - DNA, 25 bp, Saccharomyces pastorianus
tagcggctacatgacacctgaggtt

SEQ ID NO: 106289 - DNA, 25 bp, Saccharomyces pastorianus
cggtttacacggactcgtattcatg

SEQ ID NO: 106290 - DNA, 25 bp, Saccharomyces pastorianus
gatgaatcgttgcatccaatggcaa

SEQ ID NO: 106291 - DNA, 25 bp, Saccharomyces pastorianus
gagggtattgacgtggaatcccaat

SEQ ID NO: 106292 - DNA, 25 bp, Saccharomyces pastorianus
gaacggattaggtatctgcaatcct

SEQ ID NO: 106293 - DNA, 25 bp, Saccharomyces pastorianus
tctggaaaccaatcaacccttttgc

SEQ ID NO: 106294 - DNA, 25 bp, Saccharomyces pastorianus
aacgctcccgttaatcaaagtacag

SEQ ID NO: 106295 - DNA, 25 bp, Saccharomyces pastorianus
gttactgtatcggtttacacggact

SEQ ID NO: 106296 - DNA, 25 bp, Saccharomyces pastorianus
ggatggtattcctctgttactgtat

SEQ ID NO: 106297 - DNA, 25 bp, Saccharomyces pastorianus
aattctgcaagctccaattttgaag

SEQ ID NO: 106298 - DNA, 25 bp, Saccharomyces pastorianus
gaaaactattctccctgtgtaggta

SEQ ID NO: 106299 - DNA, 25 bp, Saccharomyces pastorianus
gaactatatctccacgtgtacagaa

SEQ ID NO: 106300 - DNA, 25 bp, Saccharomyces pastorianus
taaacaagctgtcctcacgcaaaga

SEQ ID NO: 106301 - DNA, 25 bp, Saccharomyces pastorianus
caagcgcatttctatgtcgactata

SEQ ID NO: 106302 - DNA, 25 bp, Saccharomyces pastorianus
gggaaagtctttgctactctccagc

SEQ ID NO: 106303 - DNA, 25 bp, Saccharomyces pastorianus
agagccgtaacccattttctacaga

SEQ ID NO: 106304 - DNA, 25 bp, Saccharomyces pastorianus
gaaagtaggcacatcccttacgtca

SEQ ID NO: 106305 - DNA, 25 bp, Saccharomyces pastorianus
atgtactctaaattcctgcgttcca

SEQ ID NO: 106306 - DNA, 25 bp, Saccharomyces pastorianus
ggtacaccaatatcacaagcgcatt

SEQ ID NO: 106307 - DNA, 25 bp, Saccharomyces pastorianus
ggcttaggttctgatgctttgcata

SEQ ID NO: 106308 - DNA, 25 bp, Saccharomyces pastorianus
gttggtaacggcacatgatatgcca

SEQ ID NO: 106309 - DNA, 25 bp, Saccharomyces pastorianus
tttaccatcccatctcgtgaggaaa

SEQ ID NO: 106310 - DNA, 25 bp, Saccharomyces pastorianus
gcaccaacctgcaacttgatgacaa

SEQ ID NO: 106311 - DNA, 25 bp, Saccharomyces pastorianus
gggcgctaatagtatcacagctagc

SEQ ID NO: 106312 - DNA, 25 bp, Saccharomyces pastorianus
cttggtatgtgaatgccatgctaaa

SEQ ID NO: 106313 - DNA, 25 bp, Saccharomyces pastorianus
gtcactccatattgccgcatctaca

SEQ ID NO: 106314 - DNA, 25 bp, Saccharomyces pastorianus
atatgccaatattcgcaccaacctg

SEQ ID NO: 106315 - DNA, 25 bp, Saccharomyces pastorianus
gattgctggaatattcttggtatgt

SEQ ID NO: 106316 - DNA, 25 bp, Saccharomyces pastorianus
gaggaaatcgtcgtcactccatatt

SEQ ID NO: 106317 - DNA, 25 bp, Saccharomyces pastorianus
tcattgtaagaagccatgttatcaa

SEQ ID NO: 106318 - DNA, 25 bp, Saccharomyces pastorianus
cacagctagcaaacaaagccctatt

SEQ ID NO: 106319 - DNA, 25 bp, Saccharomyces pastorianus
ggctgaccttaattccacttacgaa

SEQ ID NO: 106320 - DNA, 25 bp, Saccharomyces pastorianus
aacctctggaactattgccgaaata

SEQ ID NO: 106321 - DNA, 25 bp, Saccharomyces pastorianus
aattttttccagttgcaagcatgtc

SEQ ID NO: 106322 - DNA, 25 bp, Saccharomyces pastorianus
agtatcgttacgttcaagggacatt

SEQ ID NO: 106323 - DNA, 25 bp, Saccharomyces pastorianus
gcaagcatgtcctgctggtcaagaa

SEQ ID NO: 106324 - DNA, 25 bp, Saccharomyces pastorianus
ggcggattacacaagaagtctatta

SEQ ID NO: 106325 - DNA, 25 bp, Saccharomyces pastorianus
tttccaggtaactcttcttatgcgg

SEQ ID NO: 106326 - DNA, 25 bp, Saccharomyces pastorianus
atggcttgatgaataaacctctgga

SEQ ID NO: 106327 - DNA, 25 bp, Saccharomyces pastorianus
aagaatatgtcagccctctttggct

SEQ ID NO: 106328 - DNA, 25 bp, Saccharomyces pastorianus
tttcctgtggcaagattggcaagct

SEQ ID NO: 106329 - DNA, 25 bp, Saccharomyces pastorianus
gcggatattttgactactgattctg

SEQ ID NO: 106330 - DNA, 25 bp, Saccharomyces pastorianus
agggatcacgaacccaacatggatt

SEQ ID NO: 106331 - DNA, 25 bp, Saccharomyces pastorianus
atgaaacagtcccatagctcaggca

SEQ ID NO: 106332 - DNA, 25 bp, Saccharomyces pastorianus
tgagcgttactgcagggttcctatt

SEQ ID NO: 106333 - DNA, 25 bp, Saccharomyces pastorianus
atcatcacttagagacccctttttc

SEQ ID NO: 106334 - DNA, 25 bp, Saccharomyces pastorianus
gcattacacaaatttcccgaagggt

SEQ ID NO: 106335 - DNA, 25 bp, Saccharomyces pastorianus
tagctcaggcacaacttgcttgaaa

SEQ ID NO: 106336 - DNA, 25 bp, Saccharomyces pastorianus
acttgtctagtccttgcattacaca

SEQ ID NO: 106337 - DNA, 25 bp, Saccharomyces pastorianus
tgccgttctcggtggtggatctcaa

SEQ ID NO: 106338 - DNA, 25 bp, Saccharomyces pastorianus
gacgttaccattctacactgttttc

SEQ ID NO: 106339 - DNA, 25 bp, Saccharomyces pastorianus
tgtaactgagaatccggccgcattg

SEQ ID NO: 106340 - DNA, 25 bp, Saccharomyces pastorianus
gtcaaagtccttgggattttccatt

SEQ ID NO: 106341 - DNA, 25 bp, Saccharomyces pastorianus
gattacccttggcagatgacatcaa

SEQ ID NO: 106342 - DNA, 25 bp, Saccharomyces pastorianus
tactttttaggactgctggctttga

SEQ ID NO: 106343 - DNA, 25 bp, Saccharomyces pastorianus
gaagagctatccgaagcgcgccagt

SEQ ID NO: 106344 - DNA, 25 bp, Saccharomyces pastorianus
atcactggtctttacttcaaatggg

SEQ ID NO: 106345 - DNA, 25 bp, Saccharomyces pastorianus
aaggctccaattcccagtgatgcgg

SEQ ID NO: 106346 - DNA, 25 bp, Saccharomyces pastorianus
gtggctcttgttatctatggtttct

SEQ ID NO: 106347 - DNA, 25 bp, Saccharomyces pastorianus
tgttctgcgacttttattccgttag

SEQ ID NO: 106348 - DNA, 25 bp, Saccharomyces pastorianus
tatggtttctgtttgcctaccaacg

SEQ ID NO: 106349 - DNA, 25 bp, Saccharomyces pastorianus
cattgtttctattgtgtggctcttg

SEQ ID NO: 106350 - DNA, 25 bp, Saccharomyces pastorianus
attccgttagtcttagtgctgttta

SEQ ID NO: 106351 - DNA, 25 bp, Saccharomyces pastorianus
gctttgatttcaacggccgcattta

SEQ ID NO: 106352 - DNA, 25 bp, Saccharomyces pastorianus
gtgtcaactgtacttttggcacaag

SEQ ID NO: 106353 - DNA, 25 bp, Saccharomyces pastorianus
gtaccttccgacgtaaacattgacg

SEQ ID NO: 106354 - DNA, 25 bp, Saccharomyces pastorianus
aaagtggcagggacaccattgttgg

SEQ ID NO: 106355 - DNA, 25 bp, Saccharomyces pastorianus
atgaagttgacatcacggtccacgc

SEQ ID NO: 106356 - DNA, 25 bp, Saccharomyces pastorianus
ggcttactgacagcaatcccaattt

SEQ ID NO: 106357 - DNA, 25 bp, Saccharomyces pastorianus
ttgttatcgatctcagtaccttccg

SEQ ID NO: 106358 - DNA, 25 bp, Saccharomyces pastorianus
aagcctgttacgttggcttactgac

SEQ ID NO: 106359 - DNA, 25 bp, Saccharomyces pastorianus
gtcaaatgatggtcctacgctagaa

SEQ ID NO: 106360 - DNA, 25 bp, Saccharomyces pastorianus
acccgcacctatcaacagtttaagt

SEQ ID NO: 106361 - DNA, 25 bp, Saccharomyces pastorianus
cgaatggtcttggtatgtgtcaact

SEQ ID NO: 106362 - DNA, 25 bp, Saccharomyces pastorianus
caagttccggttattgaatctgcag

SEQ ID NO: 106363 - DNA, 25 bp, Saccharomyces pastorianus
gctgttttagtagcacgtgacgaac

SEQ ID NO: 106364 - DNA, 25 bp, Saccharomyces pastorianus
gctacctcttctgctgatgtcagcg

SEQ ID NO: 106365 - DNA, 25 bp, Saccharomyces pastorianus
gtacccttcaaaagaccattggatt

SEQ ID NO: 106366 - DNA, 25 bp, Saccharomyces pastorianus
agcacaacgagatcgatcactccga

SEQ ID NO: 106367 - DNA, 25 bp, Saccharomyces pastorianus
aaacgctaagtatggccaaggaggc

SEQ ID NO: 106368 - DNA, 25 bp, Saccharomyces pastorianus
atcactccgagttcaacgtcggtgt

SEQ ID NO: 106369 - DNA, 25 bp, Saccharomyces pastorianus
atgtcagcggcttttcttccagaaa

SEQ ID NO: 106370 - DNA, 25 bp, Saccharomyces pastorianus
gagcaccaaagcgttacatcagaaa

SEQ ID NO: 106371 - DNA, 25 bp, Saccharomyces pastorianus
aaggttcgatagaggcaggcctaac

SEQ ID NO: 106372 - DNA, 25 bp, Saccharomyces pastorianus
gcaagtccaaaacgctaccttacag

SEQ ID NO: 106373 - DNA, 25 bp, Saccharomyces pastorianus
gcaatcactggacgctgttttagta

SEQ ID NO: 106374 - DNA, 25 bp, Saccharomyces pastorianus
aattagcgcagcatcatcatcttcc

SEQ ID NO: 106375 - DNA, 25 bp, Saccharomyces pastorianus
ttacgcttcgccagaacttctaaga

SEQ ID NO: 106376 - DNA, 25 bp, Saccharomyces pastorianus
taatttatcttctctgtcatcctct

SEQ ID NO: 106377 - DNA, 25 bp, Saccharomyces pastorianus
aatatatcggatctctgccttacgc

SEQ ID NO: 106378 - DNA, 25 bp, Saccharomyces pastorianus
ggttcatcgactgattttccatgta

SEQ ID NO: 106379 - DNA, 25 bp, Saccharomyces pastorianus
ccgattttctttagctcaggtctgt

SEQ ID NO: 106380 - DNA, 25 bp, Saccharomyces pastorianus
atttatgattcaccagactcctctc

SEQ ID NO: 106381 - DNA, 25 bp, Saccharomyces pastorianus
gtaactacaagttcaccgtctggtt

SEQ ID NO: 106382 - DNA, 25 bp, Saccharomyces pastorianus
ggaccagcatccgatatttgggcct

SEQ ID NO: 106383 - DNA, 25 bp, Saccharomyces pastorianus
gaacctaggttacgctctctgatta

SEQ ID NO: 106384 - DNA, 25 bp, Saccharomyces pastorianus
aaaggcatccgcagtcacgaattcc

SEQ ID NO: 106385 - DNA, 25 bp, Saccharomyces pastorianus
aaaattagcgccactaccagactac

SEQ ID NO: 106386 - DNA, 25 bp, Saccharomyces pastorianus
taccgcagattctagtcgatcctaa

SEQ ID NO: 106387 - DNA, 25 bp, Saccharomyces pastorianus
gcacgttcctcttcctgaaaatgag

SEQ ID NO: 106388 - DNA, 25 bp, Saccharomyces pastorianus
aaagcgttccatgcaaactggagat

SEQ ID NO: 106389 - DNA, 25 bp, Saccharomyces pastorianus
atggacatatgggtgctagagtttt

SEQ ID NO: 106390 - DNA, 25 bp, Saccharomyces pastorianus
aaggctccgttgtagagactattga

SEQ ID NO: 106391 - DNA, 25 bp, Saccharomyces pastorianus
tttttggcataactacctacccact

SEQ ID NO: 106392 - DNA, 25 bp, Saccharomyces pastorianus
cctacccactttgcagttctataat

SEQ ID NO: 106393 - DNA, 25 bp, Saccharomyces pastorianus
aaaatagagcacgttcctcttcctg

SEQ ID NO: 106394 - DNA, 25 bp, Saccharomyces pastorianus
gattttatctcatgaaggctccgtt

SEQ ID NO: 106395 - DNA, 25 bp, Saccharomyces pastorianus
ctcaggtcttagattgacttttcaa

SEQ ID NO: 106396 - DNA, 25 bp, Saccharomyces pastorianus
acgttcccgatgtcacatacacatt

SEQ ID NO: 106397 - DNA, 25 bp, Saccharomyces pastorianus
atagcgccggaagtggtcagtacaa

SEQ ID NO: 106398 - DNA, 25 bp, Saccharomyces pastorianus
aatacttgccggatacactccattt

SEQ ID NO: 106399 - DNA, 25 bp, Saccharomyces pastorianus
gaaccaccaatccaacagggccaag

SEQ ID NO: 106400 - DNA, 25 bp, Saccharomyces pastorianus
tagaaacgccgtacgaaccaccaat

SEQ ID NO: 106401 - DNA, 25 bp, Saccharomyces pastorianus
gataaccgactttggcttcgcaaaa

SEQ ID NO: 106402 - DNA, 25 bp, Saccharomyces pastorianus
agatgtcaagaaccatccgtggttt

SEQ ID NO: 106403 - DNA, 25 bp, Saccharomyces pastorianus
aacgccgaattgaagttcccaccat

SEQ ID NO: 106404 - DNA, 25 bp, Saccharomyces pastorianus
atttttccatccagacgcgcaggac

SEQ ID NO: 106405 - DNA, 25 bp, Saccharomyces pastorianus
ggcttcgcaaaatacgttcccgatg

SEQ ID NO: 106406 - DNA, 25 bp, Saccharomyces pastorianus
ggagttttggtgtgctaatctatga

SEQ ID NO: 106407 - DNA, 25 bp, Saccharomyces pastorianus
gaaaagacactttttaccagctgat

SEQ ID NO: 106408 - DNA, 25 bp, Saccharomyces pastorianus
ttgtctgctttattacttctatcgg

SEQ ID NO: 106409 - DNA, 25 bp, Saccharomyces pastorianus
cggtaagaaactcgagtggacatac

SEQ ID NO: 106410 - DNA, 25 bp, Saccharomyces pastorianus
tattttttttccgttgcttcagcta

SEQ ID NO: 106411 - DNA, 25 bp, Saccharomyces pastorianus
gtctgctttattacttctatcggta

SEQ ID NO: 106412 - DNA, 25 bp, Saccharomyces pastorianus
gtggacatacgagacactttgtgca

SEQ ID NO: 106413 - DNA, 25 bp, Saccharomyces pastorianus
acttctatcggtaagaaactcgagt

SEQ ID NO: 106414 - DNA, 25 bp, Saccharomyces pastorianus
atacgagacactttgtgcagtcgtc

SEQ ID NO: 106415 - DNA, 25 bp, Saccharomyces pastorianus
gctgatcttaaaagttttgtctgct

SEQ ID NO: 106416 - DNA, 25 bp, Saccharomyces pastorianus
acactttttaccagctgatcttaaa

SEQ ID NO: 106417 - DNA, 25 bp, Saccharomyces pastorianus
gagacactttgtgcagtcgtcggag

SEQ ID NO: 106418 - DNA, 25 bp, Saccharomyces pastorianus
gaaaagacactttttaccagctgat

SEQ ID NO: 106419 - DNA, 25 bp, Saccharomyces pastorianus
ttgtctgctttattacttctatcgg

SEQ ID NO: 106420 - DNA, 25 bp, Saccharomyces pastorianus
cggtaagaaactcgagtggacatac

SEQ ID NO: 106421 - DNA, 25 bp, Saccharomyces pastorianus
tattttttttccgttgcttcagcta

SEQ ID NO: 106422 - DNA, 25 bp, Saccharomyces pastorianus
gtctgctttattacttctatcggta

SEQ ID NO: 106423 - DNA, 25 bp, Saccharomyces pastorianus
gtggacatacgagacactttgtgca

SEQ ID NO: 106424 - DNA, 25 bp, Saccharomyces pastorianus
acttctatcggtaagaaactcgagt

SEQ ID NO: 106425 - DNA, 25 bp, Saccharomyces pastorianus
gctgatcttaaaagttttgtctgct

SEQ ID NO: 106426 - DNA, 25 bp, Saccharomyces pastorianus
acactttttaccagctgatcttaaa

SEQ ID NO: 106427 - DNA, 25 bp, Saccharomyces pastorianus
gagacactttgtgcagtcgtcggag

SEQ ID NO: 106428 - DNA, 25 bp, Saccharomyces pastorianus
tacgggatttcttcgatgccattga

SEQ ID NO: 106429 - DNA, 25 bp, Saccharomyces pastorianus
ggaaacttctacaacttatacgatg

SEQ ID NO: 106430 - DNA, 25 bp, Saccharomyces pastorianus
gggtggtatcctgactgacggtaaa

SEQ ID NO: 106431 - DNA, 25 bp, Saccharomyces pastorianus
ttctgcaaccattataccatctcca

SEQ ID NO: 106432 - DNA, 25 bp, Saccharomyces pastorianus
ggtactgacccagtaactgctgaaa

SEQ ID NO: 106433 - DNA, 25 bp, Saccharomyces pastorianus
ctgcagccgtctcccaaattggtga

SEQ ID NO: 106434 - DNA, 25 bp, Saccharomyces pastorianus
agccacaactttaacttctgcaacc

SEQ ID NO: 106435 - DNA, 25 bp, Saccharomyces pastorianus
accaatactactgttgctccagtct

SEQ ID NO: 106436 - DNA, 25 bp, Saccharomyces pastorianus
ttatacgatgagcacattggaactc

SEQ ID NO: 106437 - DNA, 25 bp, Saccharomyces pastorianus
gcagtggcactttagaaatgaactt

SEQ ID NO: 106438 - DNA, 25 bp, Saccharomyces pastorianus
gtctcccaaatcactgatggccaaa

SEQ ID NO: 106439 - DNA, 25 bp, Saccharomyces pastorianus
tccagctccaattactaatggtact

SEQ ID NO: 106440 - DNA, 25 bp, Saccharomyces pastorianus
aagtccaggctactgctgaagtgaa

SEQ ID NO: 106441 - DNA, 25 bp, Saccharomyces pastorianus
gtctggtgacttctataacttgtat

SEQ ID NO: 106442 - DNA, 25 bp, Saccharomyces pastorianus
gcatctaaaactaccagtggcgcta

SEQ ID NO: 106443 - DNA, 25 bp, Saccharomyces pastorianus
cgatccagtcgatgttgtttcctgt

SEQ ID NO: 106444 - DNA, 25 bp, Saccharomyces pastorianus
accagtggcgctagtcaagtaagtg

SEQ ID NO: 106445 - DNA, 25 bp, Saccharomyces pastorianus
agtgatggccaagtccaggctactg

SEQ ID NO: 106446 - DNA, 25 bp, Saccharomyces pastorianus
gaaagacgctaacgatccagtcgat

SEQ ID NO: 106447 - DNA, 25 bp, Saccharomyces pastorianus
ccgctgccgtttcccaaataactga

SEQ ID NO: 106448 - DNA, 25 bp, Saccharomyces pastorianus
gcacattggttctcagtgccatgaa

SEQ ID NO: 106449 - DNA, 25 bp, Saccharomyces pastorianus
aaggctgctgcatcccaaattacag

SEQ ID NO: 106450 - DNA, 25 bp, Saccharomyces pastorianus
gaagggtagaattggctctatcgtt

SEQ ID NO: 106451 - DNA, 25 bp, Saccharomyces pastorianus
gggatctgccccttagtggcgaaga

SEQ ID NO: 106452 - DNA, 25 bp, Saccharomyces pastorianus
tcttttatcaatactcgttcagcag

SEQ ID NO: 106453 - DNA, 25 bp, Saccharomyces pastorianus
gatctgccccttagtggcgaagata

SEQ ID NO: 106454 - DNA, 25 bp, Saccharomyces pastorianus
acaagttggtgttatctatgctcct

SEQ ID NO: 106455 - DNA, 25 bp, Saccharomyces pastorianus
atgaccctccaccacaagttggtgt

SEQ ID NO: 106456 - DNA, 25 bp, Saccharomyces pastorianus
gatatcttttatcaatactcgttca

SEQ ID NO: 106457 - DNA, 25 bp, Saccharomyces pastorianus
ccccttagtggcgaagatatctttt

SEQ ID NO: 106458 - DNA, 25 bp, Saccharomyces pastorianus
agttggtgttatctatgctcctggg

SEQ ID NO: 106459 - DNA, 25 bp, Saccharomyces pastorianus
tcaatactcgttcagcagtttttac

SEQ ID NO: 106460 - DNA, 25 bp, Saccharomyces pastorianus
ctgccccttagtggcgaagatatct

SEQ ID NO: 106461 - DNA, 25 bp, Saccharomyces pastorianus
tggggttgtctatcacaccagaagg

SEQ ID NO: 106462 - DNA, 25 bp, Saccharomyces pastorianus
gatcgagcccaacaatagtatcgtt

SEQ ID NO: 106463 - DNA, 25 bp, Saccharomyces pastorianus
ttttcattgtagacaccccgcaaag

SEQ ID NO: 106464 - DNA, 25 bp, Saccharomyces pastorianus
aatccaagagctttgatagcgccat

SEQ ID NO: 106465 - DNA, 25 bp, Saccharomyces pastorianus
aagaatatgcttcatgacggacttc

SEQ ID NO: 106466 - DNA, 25 bp, Saccharomyces pastorianus
acggccgacgggatctagccagata

SEQ ID NO: 106467 - DNA, 25 bp, Saccharomyces pastorianus
taacagttcttctagtagctgcgaa

SEQ ID NO: 106468 - DNA, 25 bp, Saccharomyces pastorianus
gatagtacagccatattcggattca

SEQ ID NO: 106469 - DNA, 25 bp, Saccharomyces pastorianus
gagaagcacactttcgtcgcagaat

SEQ ID NO: 106470 - DNA, 25 bp, Saccharomyces pastorianus
gtggcaacagtgctttgtggatatc

SEQ ID NO: 106471 - DNA, 25 bp, Saccharomyces pastorianus
atagcgccattgactactcatgtga

SEQ ID NO: 106472 - DNA, 25 bp, Saccharomyces pastorianus
aacgatcgatcccatgtaagtcctg

SEQ ID NO: 106473 - DNA, 25 bp, Saccharomyces pastorianus
atcacagcctgttgatgtatatagt

SEQ ID NO: 106474 - DNA, 25 bp, Saccharomyces pastorianus
caattctggccgtggaagtgacaca

SEQ ID NO: 106475 - DNA, 25 bp, Saccharomyces pastorianus
ataaattcattatcacagcctgttg

SEQ ID NO: 106476 - DNA, 25 bp, Saccharomyces pastorianus
gaaagtgattcagagcaagatgcta

SEQ ID NO: 106477 - DNA, 25 bp, Saccharomyces pastorianus
tgacgccgtcgaagaagtcaattct

SEQ ID NO: 106478 - DNA, 25 bp, Saccharomyces pastorianus
gagactggtccaaaaattagatacg

SEQ ID NO: 106479 - DNA, 25 bp, Saccharomyces pastorianus
gtgcaagatttgtgggcagtcgttc

SEQ ID NO: 106480 - DNA, 25 bp, Saccharomyces pastorianus
gtataggaactttatcgtgcaagat

SEQ ID NO: 106481 - DNA, 25 bp, Saccharomyces pastorianus
tagtgattggtttgacgccgtcgaa

SEQ ID NO: 106482 - DNA, 25 bp, Saccharomyces pastorianus
ggcagtcgttccaaacgcgcataaa

SEQ ID NO: 106483 - DNA, 25 bp, Saccharomyces pastorianus
atcagtttcatgcactctggacaaa

SEQ ID NO: 106484 - DNA, 25 bp, Saccharomyces pastorianus
ctcccgaattcgatttcagcaaatg

SEQ ID NO: 106485 - DNA, 25 bp, Saccharomyces pastorianus
ggaagctagccaactattgcctaat

SEQ ID NO: 106486 - DNA, 25 bp, Saccharomyces pastorianus
aaggtgggcgcaattaccattgata

SEQ ID NO: 106487 - DNA, 25 bp, Saccharomyces pastorianus
gaaaaaatgttcctgatatcgcccc

SEQ ID NO: 106488 - DNA, 25 bp, Saccharomyces pastorianus
tatggatgcgtctcgtgctttagaa

SEQ ID NO: 106489 - DNA, 25 bp, Saccharomyces pastorianus
tgccccagtcatgatatatctcagc

SEQ ID NO: 106490 - DNA, 25 bp, Saccharomyces pastorianus
cagatgcaattagcggaccacgtta

SEQ ID NO: 106491 - DNA, 25 bp, Saccharomyces pastorianus
cattgatagatgtcccacgaacgat

SEQ ID NO: 106492 - DNA, 25 bp, Saccharomyces pastorianus
ttataacctcggataagtgcgacat

SEQ ID NO: 106493 - DNA, 25 bp, Saccharomyces pastorianus
ttttaacttcagctactccttgcaa

SEQ ID NO: 106494 - DNA, 25 bp, Saccharomyces pastorianus
tacaacaggaccagcagcagcggtt

SEQ ID NO: 106495 - DNA, 25 bp, Saccharomyces pastorianus
agtcacgcctgtgcgaagtgccaaa

SEQ ID NO: 106496 - DNA, 25 bp, Saccharomyces pastorianus
caccagcaggcgtcagtagatcact

SEQ ID NO: 106497 - DNA, 25 bp, Saccharomyces pastorianus
tattgctgcacaccctagatattta

SEQ ID NO: 106498 - DNA, 25 bp, Saccharomyces pastorianus
aaaagcgcagttagaggttcttctc

SEQ ID NO: 106499 - DNA, 25 bp, Saccharomyces pastorianus
atctaatgtgtactcaccaccagca

SEQ ID NO: 106500 - DNA, 25 bp, Saccharomyces pastorianus
gaggttcttctctaataggcaaagc

SEQ ID NO: 106501 - DNA, 25 bp, Saccharomyces pastorianus
ccttgtttaaggtctattgctgcac

SEQ ID NO: 106502 - DNA, 25 bp, Saccharomyces pastorianus
agatcactgcgcatcaatgtaatgt

SEQ ID NO: 106503 - DNA, 25 bp, Saccharomyces pastorianus
taggcaaagctcacccttgtttaag

SEQ ID NO: 106504 - DNA, 25 bp, Saccharomyces pastorianus
tgttcacagaaactagtcacgcctg

SEQ ID NO: 106505 - DNA, 25 bp, Saccharomyces pastorianus
gatcatgaatagacgccctctgttc

SEQ ID NO: 106506 - DNA, 25 bp, Saccharomyces pastorianus
atgttcaaacaacctgggcacttaa

SEQ ID NO: 106507 - DNA, 25 bp, Saccharomyces pastorianus
tggaccttggactaatgtctttaat

SEQ ID NO: 106508 - DNA, 25 bp, Saccharomyces pastorianus
gatcttggaccttggactaatgtct

SEQ ID NO: 106509 - DNA, 25 bp, Saccharomyces pastorianus
tctaggaagtacgatcttggacctt

SEQ ID NO: 106510 - DNA, 25 bp, Saccharomyces pastorianus
gtacgatcttggaccttggactaat

SEQ ID NO: 106511 - DNA, 25 bp, Saccharomyces pastorianus
gaagtacgatcttggaccttggact

SEQ ID NO: 106512 - DNA, 25 bp, Saccharomyces pastorianus
acctgggcacttaacgtctaggaag

SEQ ID NO: 106513 - DNA, 25 bp, Saccharomyces pastorianus
ggactaatgtctttaatttgtgctt

SEQ ID NO: 106514 - DNA, 25 bp, Saccharomyces pastorianus
tgtctttaatttgtgctttcttgct

SEQ ID NO: 106515 - DNA, 25 bp, Saccharomyces pastorianus
tgggcacttaacgtctaggaagtac

SEQ ID NO: 106516 - DNA, 25 bp, Saccharomyces pastorianus
aacaacctgggcacttaacgtctag

SEQ ID NO: 106517 - DNA, 25 bp, Saccharomyces pastorianus
aaacttctcgctacttcatgggatg

SEQ ID NO: 106518 - DNA, 25 bp, Saccharomyces pastorianus
gatcactgggtgatgacacgcaaaa

SEQ ID NO: 106519 - DNA, 25 bp, Saccharomyces pastorianus
tgacacgcaaaattcctggcctaga

SEQ ID NO: 106520 - DNA, 25 bp, Saccharomyces pastorianus
gatgatcatcagttctcaaactttg

SEQ ID NO: 106521 - DNA, 25 bp, Saccharomyces pastorianus
aaggtgatttatgggcttcagcggc

SEQ ID NO: 106522 - DNA, 25 bp, Saccharomyces pastorianus
ttatgtgcgccatcaggagaacttg

SEQ ID NO: 106523 - DNA, 25 bp, Saccharomyces pastorianus
gaagaaattgtccactttccacggt

SEQ ID NO: 106524 - DNA, 25 bp, Saccharomyces pastorianus
tcgcggtcgttttctaaacaaacat

SEQ ID NO: 106525 - DNA, 25 bp, Saccharomyces pastorianus
gcttcagcggccaaaacacagatta

SEQ ID NO: 106526 - DNA, 25 bp, Saccharomyces pastorianus
aatgaattggaggactctcttcaat

SEQ ID NO: 106527 - DNA, 25 bp, Saccharomyces pastorianus
gatggttctcaaggaaatgcgtcga

SEQ ID NO: 106528 - DNA, 25 bp, Saccharomyces pastorianus
gaccaactgttgtttctcaagaacc

SEQ ID NO: 106529 - DNA, 25 bp, Saccharomyces pastorianus
ggcgtcacgttagtggacttcccag

SEQ ID NO: 106530 - DNA, 25 bp, Saccharomyces pastorianus
aaaacgagcttgcttacgctgctaa

SEQ ID NO: 106531 - DNA, 25 bp, Saccharomyces pastorianus
gtctaccgacgggttcaaatttgca

SEQ ID NO: 106532 - DNA, 25 bp, Saccharomyces pastorianus
ggattacgatggttccggcgtcacg

SEQ ID NO: 106533 - DNA, 25 bp, Saccharomyces pastorianus
gaatcgttcactgcaagaccaccat

SEQ ID NO: 106534 - DNA, 25 bp, Saccharomyces pastorianus
gttgcgttataaactctcagattat

SEQ ID NO: 106535 - DNA, 25 bp, Saccharomyces pastorianus
tcccaggccatgtcaagttgcgtta

SEQ ID NO: 106536 - DNA, 25 bp, Saccharomyces pastorianus
tacgctgctaaccacagattcagta

SEQ ID NO: 106537 - DNA, 25 bp, Saccharomyces pastorianus
tagacgttttacagtctaccgacgg

SEQ ID NO: 106538 - DNA, 25 bp, Saccharomyces pastorianus
gcatctgtagttgcttttgagggca

SEQ ID NO: 106539 - DNA, 25 bp, Saccharomyces pastorianus
gacttatttcttaccttggttggca

SEQ ID NO: 106540 - DNA, 25 bp, Saccharomyces pastorianus
gagataccttccaagtgcttaacca

SEQ ID NO: 106541 - DNA, 25 bp, Saccharomyces pastorianus
gtgttgaatttttcttcaccgaact

SEQ ID NO: 106542 - DNA, 25 bp, Saccharomyces pastorianus
tgggtcaacgtacttgtatctttca

SEQ ID NO: 106543 - DNA, 25 bp, Saccharomyces pastorianus
ggatgttcaacttagcaatgtcagc

SEQ ID NO: 106544 - DNA, 25 bp, Saccharomyces pastorianus
aaacctctcaaggagttaccgtgag

SEQ ID NO: 106545 - DNA, 25 bp, Saccharomyces pastorianus
ttggttggcaacagcagcggcacca

SEQ ID NO: 106546 - DNA, 25 bp, Saccharomyces pastorianus
tgagcggcgatcatgacggtcttac

SEQ ID NO: 106547 - DNA, 25 bp, Saccharomyces pastorianus
gatggcttcaagttttcgtccaatt

SEQ ID NO: 106548 - DNA, 25 bp, Saccharomyces pastorianus
cttaccactcaacaagtccttggca

SEQ ID NO: 106549 - DNA, 25 bp, Saccharomyces pastorianus
agcggcagcttctgggtccaagtag

SEQ ID NO: 106550 - DNA, 25 bp, Saccharomyces pastorianus
gatacaagtacgttgacccaaatgt

SEQ ID NO: 106551 - DNA, 25 bp, Saccharomyces pastorianus
gtaaggacaaggctgaaactttgaa

SEQ ID NO: 106552 - DNA, 25 bp, Saccharomyces pastorianus
cgcttcttctccattctctcaaaag

SEQ ID NO: 106553 - DNA, 25 bp, Saccharomyces pastorianus
agacgtcttgtacacttccaagttg

SEQ ID NO: 106554 - DNA, 25 bp, Saccharomyces pastorianus
tatggattccagtcaacagatcctg

SEQ ID NO: 106555 - DNA, 25 bp, Saccharomyces pastorianus
tcatgatcgccgctcacggtaactc

SEQ ID NO: 106556 - DNA, 25 bp, Saccharomyces pastorianus
agaaggtctacccagacgtcttgta

SEQ ID NO: 106557 - DNA, 25 bp, Saccharomyces pastorianus
cttccaagttgtccagagctatcca

SEQ ID NO: 106558 - DNA, 25 bp, Saccharomyces pastorianus
gtggtaagaccgtcatgatcgccgc

SEQ ID NO: 106559 - DNA, 25 bp, Saccharomyces pastorianus
tgtcattgccaaggacttgttgagt

SEQ ID NO: 106560 - DNA, 25 bp, Saccharomyces pastorianus
aagacattacggtgacttacaaggt

SEQ ID NO: 106561 - DNA, 25 bp, Saccharomyces pastorianus
acgcaggctgcacaattacacgaga

SEQ ID NO: 106562 - DNA, 25 bp, Saccharomyces pastorianus
atgcatgcttgcatttagtcgtgca

SEQ ID NO: 106563 - DNA, 25 bp, Saccharomyces pastorianus
gataagatattctcacccgatagtg

SEQ ID NO: 106564 - DNA, 25 bp, Saccharomyces pastorianus
ctacgctatgttgagttgctacgca

SEQ ID NO: 106565 - DNA, 25 bp, Saccharomyces pastorianus
gggcaagatcccgttagtaattgat

SEQ ID NO: 106566 - DNA, 25 bp, Saccharomyces pastorianus
gaagggagactctcactccgagatg

SEQ ID NO: 106567 - DNA, 25 bp, Saccharomyces pastorianus
aggaggccaaggtgatactttgaca

SEQ ID NO: 106568 - DNA, 25 bp, Saccharomyces pastorianus
agcttgatcgcccaggaattgaatt

SEQ ID NO: 106569 - DNA, 25 bp, Saccharomyces pastorianus
gaatgctcccgcctaggatttaagg

SEQ ID NO: 106570 - DNA, 25 bp, Saccharomyces pastorianus
gacaggagctatatcatgcatgctt

SEQ ID NO: 106571 - DNA, 25 bp, Saccharomyces pastorianus
gctgatggactgttcttagtaactc

SEQ ID NO: 106572 - DNA, 25 bp, Saccharomyces pastorianus
gtgacctggcaactactaagagatt

SEQ ID NO: 106573 - DNA, 25 bp, Saccharomyces pastorianus
agaagccacgaaccgcctaataagt

SEQ ID NO: 106574 - DNA, 25 bp, Saccharomyces pastorianus
atgtcaggttcatggcctccattaa

SEQ ID NO: 106575 - DNA, 25 bp, Saccharomyces pastorianus
cggatacatcgcatgcttcgtggaa

SEQ ID NO: 106576 - DNA, 25 bp, Saccharomyces pastorianus
atcaccgtatgttctgggatcctga

SEQ ID NO: 106577 - DNA, 25 bp, Saccharomyces pastorianus
gagatttgcagcctcaatggtggtt

SEQ ID NO: 106578 - DNA, 25 bp, Saccharomyces pastorianus
gcgttggacaagtgcctgccaagaa

SEQ ID NO: 106579 - DNA, 25 bp, Saccharomyces pastorianus
gagacacggttcttggcgttggaca

SEQ ID NO: 106580 - DNA, 25 bp, Saccharomyces pastorianus
tgagcgctcatttgcatgtcaggtt

SEQ ID NO: 106581 - DNA, 25 bp, Saccharomyces pastorianus
ccattcctgcatacaccttagatat

SEQ ID NO: 106582 - DNA, 25 bp, Saccharomyces pastorianus
gaaaactaggcagcccagtgacctg

SEQ ID NO: 106583 - DNA, 25 bp, Saccharomyces pastorianus
agaacttattaacctgtgcctccca

SEQ ID NO: 106584 - DNA, 25 bp, Saccharomyces pastorianus
tgcccatacggttgctgacacttta

SEQ ID NO: 106585 - DNA, 25 bp, Saccharomyces pastorianus
tgtgtttctgtccatggtgccaata

SEQ ID NO: 106586 - DNA, 25 bp, Saccharomyces pastorianus
caaaccactaccttctgatttgggt

SEQ ID NO: 106587 - DNA, 25 bp, Saccharomyces pastorianus
ggatgtttccgtctttagaacacaa

SEQ ID NO: 106588 - DNA, 25 bp, Saccharomyces pastorianus
gggttatcgatcacactttggacga

SEQ ID NO: 106589 - DNA, 25 bp, Saccharomyces pastorianus
gaagcatacattatcctggcaaaag

SEQ ID NO: 106590 - DNA, 25 bp, Saccharomyces pastorianus
aaacagctgtttccgctgctaatag

SEQ ID NO: 106591 - DNA, 25 bp, Saccharomyces pastorianus
aggtgccaattccttgttggatctt

SEQ ID NO: 106592 - DNA, 25 bp, Saccharomyces pastorianus
tttacagcctgggttgccacacaaa

SEQ ID NO: 106593 - DNA, 25 bp, Saccharomyces pastorianus
gtgttcggaacattactgcagtaga

SEQ ID NO: 106594 - DNA, 25 bp, Saccharomyces pastorianus
gtttggagttgctgtcatggcctac

SEQ ID NO: 106595 - DNA, 25 bp, Saccharomyces pastorianus
atttgtatcactggtaggctccttc

SEQ ID NO: 106596 - DNA, 25 bp, Saccharomyces pastorianus
gaaggtataggcctacttatcccca

SEQ ID NO: 106597 - DNA, 25 bp, Saccharomyces pastorianus
gtaccgccatattcacctttgaagg

SEQ ID NO: 106598 - DNA, 25 bp, Saccharomyces pastorianus
gagagccaggcttcttttagattta

SEQ ID NO: 106599 - DNA, 25 bp, Saccharomyces pastorianus
atacccgccattgttgcactataag

SEQ ID NO: 106600 - DNA, 25 bp, Saccharomyces pastorianus
attagccattttgttatccacgccg

SEQ ID NO: 106601 - DNA, 25 bp, Saccharomyces pastorianus
atgccgcttttggatctgacgtgaa

SEQ ID NO: 106602 - DNA, 25 bp, Saccharomyces pastorianus
ctatttcccgcgatacgtattttgg

SEQ ID NO: 106603 - DNA, 25 bp, Saccharomyces pastorianus
tgaattttccgcaggacacttccta

SEQ ID NO: 106604 - DNA, 25 bp, Saccharomyces pastorianus
aaggcgtccatcttatctggaacct

SEQ ID NO: 106605 - DNA, 25 bp, Saccharomyces pastorianus
aatatgtcggtgaaggtgctcgtat

SEQ ID NO: 106606 - DNA, 25 bp, Saccharomyces pastorianus
ggctcgtaccaaaaaggcttgcatt

SEQ ID NO: 106607 - DNA, 25 bp, Saccharomyces pastorianus
taggcccaacactttagatccagct

SEQ ID NO: 106608 - DNA, 25 bp, Saccharomyces pastorianus
atcttccgtattcactcgaaatcga

SEQ ID NO: 106609 - DNA, 25 bp, Saccharomyces pastorianus
gaccctcgtggtaacattaaagtga

SEQ ID NO: 106610 - DNA, 25 bp, Saccharomyces pastorianus
gagttttcattacctgacttggaag

SEQ ID NO: 106611 - DNA, 25 bp, Saccharomyces pastorianus
cagttagacgggtttgaccctcgtg

SEQ ID NO: 106612 - DNA, 25 bp, Saccharomyces pastorianus
atccagctttattgagacccggtag

SEQ ID NO: 106613 - DNA, 25 bp, Saccharomyces pastorianus
gtgatgtttgccaccaataggccca

SEQ ID NO: 106614 - DNA, 25 bp, Saccharomyces pastorianus
gaaggtcgtgcaaatatcttccgta

SEQ ID NO: 106615 - DNA, 25 bp, Saccharomyces pastorianus
tggtgctcgttttgatgatggtgct

SEQ ID NO: 106616 - DNA, 25 bp, Saccharomyces pastorianus
aagacattatgtgctcgtgctgttg

SEQ ID NO: 106617 - DNA, 25 bp, Saccharomyces pastorianus
ggccacctggtactggtaagacatt

SEQ ID NO: 106618 - DNA, 25 bp, Saccharomyces pastorianus
tactggtaagacattatgtgctcgt

SEQ ID NO: 106619 - DNA, 25 bp, Saccharomyces pastorianus
taagacattatgtgctcgtgctgtt

SEQ ID NO: 106620 - DNA, 25 bp, Saccharomyces pastorianus
ctggtaagacattatgtgctcgtgc

SEQ ID NO: 106621 - DNA, 25 bp, Saccharomyces pastorianus
tggtaagacattatgtgctcgtgct

SEQ ID NO: 106622 - DNA, 25 bp, Saccharomyces pastorianus
ggtactggtaagacattatgtgctc

SEQ ID NO: 106623 - DNA, 25 bp, Saccharomyces pastorianus
gacattatgtgctcgtgctgttgct

SEQ ID NO: 106624 - DNA, 25 bp, Saccharomyces pastorianus
agacattatgtgctcgtgctgttgc

SEQ ID NO: 106625 - DNA, 25 bp, Saccharomyces pastorianus
gctgttgctaatagaactgatgcaa

SEQ ID NO: 106626 - DNA, 25 bp, Saccharomyces pastorianus
tgctgttgctaatagaactgatgca

SEQ ID NO: 106627 - DNA, 25 bp, Saccharomyces pastorianus
gatggatcatcctatattaacgtta

SEQ ID NO: 106628 - DNA, 25 bp, Saccharomyces pastorianus
gttacatttcgagccgttgttttca

SEQ ID NO: 106629 - DNA, 25 bp, Saccharomyces pastorianus
atatcggcaatcacacatcagttaa

SEQ ID NO: 106630 - DNA, 25 bp, Saccharomyces pastorianus
tattaaccgtcgaggaaggccaatt

SEQ ID NO: 106631 - DNA, 25 bp, Saccharomyces pastorianus
gaagccaaagtcacccaaagaacga

SEQ ID NO: 106632 - DNA, 25 bp, Saccharomyces pastorianus
gattattcccaatgtcggtctatgt

SEQ ID NO: 106633 - DNA, 25 bp, Saccharomyces pastorianus
atttgatgacatttttatcccacaa

SEQ ID NO: 106634 - DNA, 25 bp, Saccharomyces pastorianus
aatcgctgacttggtacgaatcccg

SEQ ID NO: 106635 - DNA, 25 bp, Saccharomyces pastorianus
ggatgctattatacccctgaagaaa

SEQ ID NO: 106636 - DNA, 25 bp, Saccharomyces pastorianus
tgttttcaaaccgtttctaggtgag

SEQ ID NO: 106637 - DNA, 25 bp, Saccharomyces pastorianus
tgccctattaggtagttgtcaaact

SEQ ID NO: 106638 - DNA, 25 bp, Saccharomyces pastorianus
gaattgccctctatccaagacaaaa

SEQ ID NO: 106639 - DNA, 25 bp, Saccharomyces pastorianus
gatcagtacgatcaaatcatcaatg

SEQ ID NO: 106640 - DNA, 25 bp, Saccharomyces pastorianus
gaaagatctgattttgagtcaatgc

SEQ ID NO: 106641 - DNA, 25 bp, Saccharomyces pastorianus
attaccaaccatttgacatgtcagc

SEQ ID NO: 106642 - DNA, 25 bp, Saccharomyces pastorianus
gtttagacagtgtaaatccctctga

SEQ ID NO: 106643 - DNA, 25 bp, Saccharomyces pastorianus
agatgtatctggattttccatgagt

SEQ ID NO: 106644 - DNA, 25 bp, Saccharomyces pastorianus
atcaagctgatgttcgaagatttca

SEQ ID NO: 106645 - DNA, 25 bp, Saccharomyces pastorianus
aaagggtgccatgtcagatgtatct

SEQ ID NO: 106646 - DNA, 25 bp, Saccharomyces pastorianus
gatgtgctgggcgaattgccctcta

SEQ ID NO: 106647 - DNA, 25 bp, Saccharomyces pastorianus
tgcgcgtacagagacgatgacagta

SEQ ID NO: 106648 - DNA, 25 bp, Saccharomyces pastorianus
aactggagagtggtggccgtaaact

SEQ ID NO: 106649 - DNA, 25 bp, Saccharomyces pastorianus
ggtggaagcctttcacattaatgag

SEQ ID NO: 106650 - DNA, 25 bp, Saccharomyces pastorianus
tttaatgatgttgcccgctatctag

SEQ ID NO: 106651 - DNA, 25 bp, Saccharomyces pastorianus
tgctatttcagacggagtgttccct

SEQ ID NO: 106652 - DNA, 25 bp, Saccharomyces pastorianus
gaaagattgccaccaactctaaagg

SEQ ID NO: 106653 - DNA, 25 bp, Saccharomyces pastorianus
agcacgacgtaactgattttgattc

SEQ ID NO: 106654 - DNA, 25 bp, Saccharomyces pastorianus
gatggtgatattcctgctatttcag

SEQ ID NO: 106655 - DNA, 25 bp, Saccharomyces pastorianus
agcgccactgcctaatgcagatggt

SEQ ID NO: 106656 - DNA, 25 bp, Saccharomyces pastorianus
gctactcaattcgatgccactgatt

SEQ ID NO: 106657 - DNA, 25 bp, Saccharomyces pastorianus
gatgccactgattttgccacaaatg

SEQ ID NO: 106658 - DNA, 25 bp, Saccharomyces pastorianus
atgatgacgttatagcgccactgcc

SEQ ID NO: 106659 - DNA, 25 bp, Saccharomyces pastorianus
agaaatcaggatccgctactcaatt

SEQ ID NO: 106660 - DNA, 25 bp, Saccharomyces pastorianus
tacttgtttactatactcttcggag

SEQ ID NO: 106661 - DNA, 25 bp, Saccharomyces pastorianus
tttacagaactggttacgccctcat

SEQ ID NO: 106662 - DNA, 25 bp, Saccharomyces pastorianus
cggagtctctggtttattaggtctt

SEQ ID NO: 106663 - DNA, 25 bp, Saccharomyces pastorianus
ttgcaattcactatggtggcgccat

SEQ ID NO: 106664 - DNA, 25 bp, Saccharomyces pastorianus
attaacttggtacctgtcttctctt

SEQ ID NO: 106665 - DNA, 25 bp, Saccharomyces pastorianus
gtatttcgttggtgcttatgggact

SEQ ID NO: 106666 - DNA, 25 bp, Saccharomyces pastorianus
agtcggctctattactgaaaccctc

SEQ ID NO: 106667 - DNA, 25 bp, Saccharomyces pastorianus
aaagagacctatttctccacatctg

SEQ ID NO: 106668 - DNA, 25 bp, Saccharomyces pastorianus
ttcctttctacctcaccattgaaga

SEQ ID NO: 106669 - DNA, 25 bp, Saccharomyces pastorianus
ggtggcgccattagacacttgatct

SEQ ID NO: 106670 - DNA, 25 bp, Saccharomyces pastorianus
gacacttgatctgggataccgctaa

SEQ ID NO: 106671 - DNA, 25 bp, Saccharomyces pastorianus
ccttcaactccgtctttgatgttaa

SEQ ID NO: 106672 - DNA, 25 bp, Saccharomyces pastorianus
gttctccgttgtctgtacaagctga

SEQ ID NO: 106673 - DNA, 25 bp, Saccharomyces pastorianus
gaagacaactcatccaacgcatggt

SEQ ID NO: 106674 - DNA, 25 bp, Saccharomyces pastorianus
aagacggttaagtgcctatctggaa

SEQ ID NO: 106675 - DNA, 25 bp, Saccharomyces pastorianus
gacgagtgttttctactagtgccat

SEQ ID NO: 106676 - DNA, 25 bp, Saccharomyces pastorianus
gatgaggtccacaatgctgacaatt

SEQ ID NO: 106677 - DNA, 25 bp, Saccharomyces pastorianus
cttaactaggccttaccaaattgct

SEQ ID NO: 106678 - DNA, 25 bp, Saccharomyces pastorianus
gactaaccagttactaccatcagca

SEQ ID NO: 106679 - DNA, 25 bp, Saccharomyces pastorianus
gttatagaactcactcggcagaccg

SEQ ID NO: 106680 - DNA, 25 bp, Saccharomyces pastorianus
acaactagatgccaactcttcgaca

SEQ ID NO: 106681 - DNA, 25 bp, Saccharomyces pastorianus
gatgccgataccttggtcattgcta

SEQ ID NO: 106682 - DNA, 25 bp, Saccharomyces pastorianus
ggaaacgacaaaacaactagatatc

SEQ ID NO: 106683 - DNA, 25 bp, Saccharomyces pastorianus
caactagatatcatgtcgaaacaat

SEQ ID NO: 106684 - DNA, 25 bp, Saccharomyces pastorianus
tgtaacgaaaacttggtaggccaat

SEQ ID NO: 106685 - DNA, 25 bp, Saccharomyces pastorianus
gaagttggttgataggtagttacat

SEQ ID NO: 106686 - DNA, 25 bp, Saccharomyces pastorianus
gtaaggtacatggaagttggttgat

SEQ ID NO: 106687 - DNA, 25 bp, Saccharomyces pastorianus
ttgcacacgaacttagagagcttca

SEQ ID NO: 106688 - DNA, 25 bp, Saccharomyces pastorianus
ggtaggccaattgggtaaggtacat

SEQ ID NO: 106689 - DNA, 25 bp, Saccharomyces pastorianus
gtataatcagcttgcacacgaactt

SEQ ID NO: 106690 - DNA, 25 bp, Saccharomyces pastorianus
aaggcagtataatcagcttgcacac

SEQ ID NO: 106691 - DNA, 25 bp, Saccharomyces pastorianus
gagagcttcaaacgaatttacagga

SEQ ID NO: 106692 - DNA, 25 bp, Saccharomyces pastorianus
atcagcttgcacacgaacttagaga

SEQ ID NO: 106693 - DNA, 25 bp, Saccharomyces pastorianus
gcccattcaaattaacaagccccgt

SEQ ID NO: 106694 - DNA, 25 bp, Saccharomyces pastorianus
ggagaatcaaatgtcttctaaagat

SEQ ID NO: 106695 - DNA, 25 bp, Saccharomyces pastorianus
agcaattaactttaggtctccacgt

SEQ ID NO: 106696 - DNA, 25 bp, Saccharomyces pastorianus
ggtctccacgtccaaagatgtcagg

SEQ ID NO: 106697 - DNA, 25 bp, Saccharomyces pastorianus
gtcttacttatcaagaagccatgga

SEQ ID NO: 106698 - DNA, 25 bp, Saccharomyces pastorianus
gttgttaaacaaaccatcagtcttt

SEQ ID NO: 106699 - DNA, 25 bp, Saccharomyces pastorianus
atgtccacacatcaaaaaacccgtc

SEQ ID NO: 106700 - DNA, 25 bp, Saccharomyces pastorianus
gatgtcaggataaaggtcttactta

SEQ ID NO: 106701 - DNA, 25 bp, Saccharomyces pastorianus
gaaacgttgatcaagtcataaagca

SEQ ID NO: 106702 - DNA, 25 bp, Saccharomyces pastorianus
tcataaggtgcccaagtggacgaag

SEQ ID NO: 106703 - DNA, 25 bp, Saccharomyces pastorianus
ccatcagtctttccaaaggagaatc

SEQ ID NO: 106704 - DNA, 25 bp, Saccharomyces pastorianus
gcacatcatcgttagccttgctaga

SEQ ID NO: 106705 - DNA, 25 bp, Saccharomyces pastorianus
cagcattcctgcatttgtatttgtt

SEQ ID NO: 106706 - DNA, 25 bp, Saccharomyces pastorianus
gcatcctcagatggtccgaaatcaa

SEQ ID NO: 106707 - DNA, 25 bp, Saccharomyces pastorianus
aacccttgtacagccttggtatcat

SEQ ID NO: 106708 - DNA, 25 bp, Saccharomyces pastorianus
tgtgacactatattgccgcccgaaa

SEQ ID NO: 106709 - DNA, 25 bp, Saccharomyces pastorianus
tgttacatcatctctttcatcaaaa

SEQ ID NO: 106710 - DNA, 25 bp, Saccharomyces pastorianus
agatataccgtttgagtcgccacct

SEQ ID NO: 106711 - DNA, 25 bp, Saccharomyces pastorianus
gtatttatttgtgtggcatcctcag

SEQ ID NO: 106712 - DNA, 25 bp, Saccharomyces pastorianus
taagttcactacaacggacgtttat

SEQ ID NO: 106713 - DNA, 25 bp, Saccharomyces pastorianus
gggattgtttttaccaccagaagat

SEQ ID NO: 106714 - DNA, 25 bp, Saccharomyces pastorianus
attttttgccatgctttctaattcc

SEQ ID NO: 106715 - DNA, 25 bp, Saccharomyces pastorianus
tggtacgcccttttcgaggatgatc

SEQ ID NO: 106716 - DNA, 25 bp, Saccharomyces pastorianus
ggctatgctggatcaatcatttcat

SEQ ID NO: 106717 - DNA, 25 bp, Saccharomyces pastorianus
gggcaacttattacagctacttatt

SEQ ID NO: 106718 - DNA, 25 bp, Saccharomyces pastorianus
gaggatgatccgtacagtcgaaaaa

SEQ ID NO: 106719 - DNA, 25 bp, Saccharomyces pastorianus
gattggcaaacattacgggactgga

SEQ ID NO: 106720 - DNA, 25 bp, Saccharomyces pastorianus
gtcctagtggacgatcagagtaatt

SEQ ID NO: 106721 - DNA, 25 bp, Saccharomyces pastorianus
gtatcctgatggagcacttcgctaa

SEQ ID NO: 106722 - DNA, 25 bp, Saccharomyces pastorianus
ctgatatgttacagcgcttcatgaa

SEQ ID NO: 106723 - DNA, 25 bp, Saccharomyces pastorianus
gaaaagcactaacttccttcaaaat

SEQ ID NO: 106724 - DNA, 25 bp, Saccharomyces pastorianus
gatgttttagaatgccccatgctag

SEQ ID NO: 106725 - DNA, 25 bp, Saccharomyces pastorianus
agcttctaaaatctggtacgccctt

SEQ ID NO: 106726 - DNA, 25 bp, Saccharomyces pastorianus
gaaaaaggtgtctcccttacttgat

SEQ ID NO: 106727 - DNA, 25 bp, Saccharomyces pastorianus
gaaccggtgaatcttctcgcattta

SEQ ID NO: 106728 - DNA, 25 bp, Saccharomyces pastorianus
tggatccaatccctagaaccggtga

SEQ ID NO: 106729 - DNA, 25 bp, Saccharomyces pastorianus
agtgtctggaccttccttgaaacaa

SEQ ID NO: 106730 - DNA, 25 bp, Saccharomyces pastorianus
cggtgatacgccattaacatttgtc

SEQ ID NO: 106731 - DNA, 25 bp, Saccharomyces pastorianus
catgcagccggatcttcaaagtgtc

SEQ ID NO: 106732 - DNA, 25 bp, Saccharomyces pastorianus
gttgcgatagcggttttagactttt

SEQ ID NO: 106733 - DNA, 25 bp, Saccharomyces pastorianus
ttacttgatccgctaatacgtccac

SEQ ID NO: 106734 - DNA, 25 bp, Saccharomyces pastorianus
ctgccatttaaggaccacgtacggt

SEQ ID NO: 106735 - DNA, 25 bp, Saccharomyces pastorianus
actcttgaagtttgcctgccataca

SEQ ID NO: 106736 - DNA, 25 bp, Saccharomyces pastorianus
cagctcgaaatttagcctgccattt

SEQ ID NO: 106737 - DNA, 25 bp, Saccharomyces pastorianus
taaagtttgccttccgcttatatca

SEQ ID NO: 106738 - DNA, 25 bp, Saccharomyces pastorianus
gcttatatcatccatctgcttctta

SEQ ID NO: 106739 - DNA, 25 bp, Saccharomyces pastorianus
ttaccatttgttcccgctatatgta

SEQ ID NO: 106740 - DNA, 25 bp, Saccharomyces pastorianus
tcttatgtaatctgttgccggccaa

SEQ ID NO: 106741 - DNA, 25 bp, Saccharomyces pastorianus
aatatcctcttctttggcgtttagc

SEQ ID NO: 106742 - DNA, 25 bp, Saccharomyces pastorianus
atctgcttctataagttccttctcg

SEQ ID NO: 106743 - DNA, 25 bp, Saccharomyces pastorianus
gaaactggtcgacttgactcaagtt

SEQ ID NO: 106744 - DNA, 25 bp, Saccharomyces pastorianus
ctgttgctccggatgctgcaatatg

SEQ ID NO: 106745 - DNA, 25 bp, Saccharomyces pastorianus
agtatacctaccaatcaagaccctt

SEQ ID NO: 106746 - DNA, 25 bp, Saccharomyces pastorianus
caccattggcaatttttcttagcga

SEQ ID NO: 106747 - DNA, 25 bp, Saccharomyces pastorianus
gggatttccaacgtgctccaacaaa

SEQ ID NO: 106748 - DNA, 25 bp, Saccharomyces pastorianus
gtcgcagtaaagaaagcctcctcaa

SEQ ID NO: 106749 - DNA, 25 bp, Saccharomyces pastorianus
ggtatcgatgccaccttcaaaaggg

SEQ ID NO: 106750 - DNA, 25 bp, Saccharomyces pastorianus
gacggtttagcttctgcattggcag

SEQ ID NO: 106751 - DNA, 25 bp, Saccharomyces pastorianus
atgggccaaccaaaggatccgaaat

SEQ ID NO: 106752 - DNA, 25 bp, Saccharomyces pastorianus
gtgcaacagttggacccactagtga

SEQ ID NO: 106753 - DNA, 25 bp, Saccharomyces pastorianus
gttgggttcctactgcttatatgac

SEQ ID NO: 106754 - DNA, 25 bp, Saccharomyces pastorianus
aaatacggtgcctgttgcagcgaca

SEQ ID NO: 106755 - DNA, 25 bp, Saccharomyces pastorianus
ggatcatcttcggagttgccattaa

SEQ ID NO: 106756 - DNA, 25 bp, Saccharomyces pastorianus
gaagctgcatacgactttccaggtt

SEQ ID NO: 106757 - DNA, 25 bp, Saccharomyces pastorianus
gaacctagtggttggtctttagcaa

SEQ ID NO: 106758 - DNA, 25 bp, Saccharomyces pastorianus
gacaataccatttcaagtgcacaag

SEQ ID NO: 106759 - DNA, 25 bp, Saccharomyces pastorianus
agacgttgggctctcacacttgtga

SEQ ID NO: 106760 - DNA, 25 bp, Saccharomyces pastorianus
taaagtcgtcgctgtcgtcgtggaa

SEQ ID NO: 106761 - DNA, 25 bp, Saccharomyces pastorianus
tgtgtttttcagttctccgatgaga

SEQ ID NO: 106762 - DNA, 25 bp, Saccharomyces pastorianus
aggtatgctacctcatgtgtttttc

SEQ ID NO: 106763 - DNA, 25 bp, Saccharomyces pastorianus
ggaatcgggccacactgtacattgg

SEQ ID NO: 106764 - DNA, 25 bp, Saccharomyces pastorianus
ttgactctaaactgacacctctggg

SEQ ID NO: 106765 - DNA, 25 bp, Saccharomyces pastorianus
aaattcatctcgcttacttgtcact

SEQ ID NO: 106766 - DNA, 25 bp, Saccharomyces pastorianus
gaattgtggcttcctgatcatagag

SEQ ID NO: 106767 - DNA, 25 bp, Saccharomyces pastorianus
caggatcgaatgtcttgctaccaat

SEQ ID NO: 106768 - DNA, 25 bp, Saccharomyces pastorianus
gagtggctcactcaatggcagttga

SEQ ID NO: 106769 - DNA, 25 bp, Saccharomyces pastorianus
gaaacttacagcatcctccaattta

SEQ ID NO: 106770 - DNA, 25 bp, Saccharomyces pastorianus
tggaacgagtatggccgtactttct

SEQ ID NO: 106771 - DNA, 25 bp, Saccharomyces pastorianus
aaaggacggtctatgggccattatt

SEQ ID NO: 106772 - DNA, 25 bp, Saccharomyces pastorianus
tcttctgtgccttatttgatgctaa

SEQ ID NO: 106773 - DNA, 25 bp, Saccharomyces pastorianus
aggttatccggcacaggcagttctg

SEQ ID NO: 106774 - DNA, 25 bp, Saccharomyces pastorianus
cacttcccagctgatgagtctttaa

SEQ ID NO: 106775 - DNA, 25 bp, Saccharomyces pastorianus
gatggctccatctctgaaaatcaag

SEQ ID NO: 106776 - DNA, 25 bp, Saccharomyces pastorianus
atcttggctatctaccataggcgta

SEQ ID NO: 106777 - DNA, 25 bp, Saccharomyces pastorianus
gaatccttcggtacaggttccaatc

SEQ ID NO: 106778 - DNA, 25 bp, Saccharomyces pastorianus
aaacccgtcatcaactccattgtaa

SEQ ID NO: 106779 - DNA, 25 bp, Saccharomyces pastorianus
caaacagccgacgtcttcttgaaac

SEQ ID NO: 106780 - DNA, 25 bp, Saccharomyces pastorianus
caaggccaaacgtttgtggctccca

SEQ ID NO: 106781 - DNA, 25 bp, Saccharomyces pastorianus
gattatcaaggccacattgcccttt

SEQ ID NO: 106782 - DNA, 25 bp, Saccharomyces pastorianus
gatgaagggttatattccaccatat

SEQ ID NO: 106783 - DNA, 25 bp, Saccharomyces pastorianus
gcaatttggtggctggacatacgtt

SEQ ID NO: 106784 - DNA, 25 bp, Saccharomyces pastorianus
tcggaaccatccttttttcagtcaa

SEQ ID NO: 106785 - DNA, 25 bp, Saccharomyces pastorianus
aggtcttcctccttattatgatgaa

SEQ ID NO: 106786 - DNA, 25 bp, Saccharomyces pastorianus
cagatactttttgtgggaccccaga

SEQ ID NO: 106787 - DNA, 25 bp, Saccharomyces pastorianus
gtcaattatcatggaagcgcctgtt

SEQ ID NO: 106788 - DNA, 25 bp, Saccharomyces pastorianus
gattctacaggagccactagttttc

SEQ ID NO: 106789 - DNA, 25 bp, Saccharomyces pastorianus
atacgagatgctcacaggtcttcct

SEQ ID NO: 106790 - DNA, 25 bp, Saccharomyces pastorianus
ggaccccagaatacttggcaccaga

SEQ ID NO: 106791 - DNA, 25 bp, Saccharomyces pastorianus
gaagattgggctacaatggtgccga

SEQ ID NO: 106792 - DNA, 25 bp, Saccharomyces pastorianus
gaaaccgacgataacaacaccgata

SEQ ID NO: 106793 - DNA, 25 bp, Saccharomyces pastorianus
gaaacagaggcaaatcttctaaaaa

SEQ ID NO: 106794 - DNA, 25 bp, Saccharomyces pastorianus
accacgacagtcttgaaaccgacga

SEQ ID NO: 106795 - DNA, 25 bp, Saccharomyces pastorianus
gatggcaataaaagaccggaaaatt

SEQ ID NO: 106796 - DNA, 25 bp, Saccharomyces pastorianus
ccccgtgaagtatcagatggagcta

SEQ ID NO: 106797 - DNA, 25 bp, Saccharomyces pastorianus
gaaaattcgccattattggaagatg

SEQ ID NO: 106798 - DNA, 25 bp, Saccharomyces pastorianus
gatggagctatcaataagaacccta

SEQ ID NO: 106799 - DNA, 25 bp, Saccharomyces pastorianus
gacgataacaacaccgataacaatg

SEQ ID NO: 106800 - DNA, 25 bp, Saccharomyces pastorianus
acgctggttgcaatgaaaattcgcc

SEQ ID NO: 106801 - DNA, 25 bp, Saccharomyces pastorianus
ataatgtttaccacgacagtcttga

SEQ ID NO: 106802 - DNA, 25 bp, Saccharomyces pastorianus
acaacgatgagaacgctggttgcaa

SEQ ID NO: 106803 - DNA, 25 bp, Saccharomyces pastorianus
taactcgcatttatccttgaactat

SEQ ID NO: 106804 - DNA, 25 bp, Saccharomyces pastorianus
aaacgctcttctccatatcatataa

SEQ ID NO: 106805 - DNA, 25 bp, Saccharomyces pastorianus
ggtgaatccatctcaaacgctcttc

SEQ ID NO: 106806 - DNA, 25 bp, Saccharomyces pastorianus
gttggtttagccaccttaattgtca

SEQ ID NO: 106807 - DNA, 25 bp, Saccharomyces pastorianus
attaggcccacgaggcgtatctata

SEQ ID NO: 106808 - DNA, 25 bp, Saccharomyces pastorianus
aacagtgttcgcctttttgaggtga

SEQ ID NO: 106809 - DNA, 25 bp, Saccharomyces pastorianus
aggcgtatctataactccaggtaaa

SEQ ID NO: 106810 - DNA, 25 bp, Saccharomyces pastorianus
aacaatggcaactctgcagcttcaa

SEQ ID NO: 106811 - DNA, 25 bp, Saccharomyces pastorianus
aaaagagcgatcctgcggctgagaa

SEQ ID NO: 106812 - DNA, 25 bp, Saccharomyces pastorianus
agtgtcctttagaactcataactcg

SEQ ID NO: 106813 - DNA, 25 bp, Saccharomyces pastorianus
gattacttagtgcattaggcccacg

SEQ ID NO: 106814 - DNA, 25 bp, Saccharomyces pastorianus
taatgagtttagcacaaccccacca

SEQ ID NO: 106815 - DNA, 25 bp, Saccharomyces pastorianus
aatttattccacctcgaagctgctg

SEQ ID NO: 106816 - DNA, 25 bp, Saccharomyces pastorianus
cacgatttttgtgagctgcatccta

SEQ ID NO: 106817 - DNA, 25 bp, Saccharomyces pastorianus
gtgatttccggcatgccatcaagag

SEQ ID NO: 106818 - DNA, 25 bp, Saccharomyces pastorianus
ggaggattcagctcaaacctatcga

SEQ ID NO: 106819 - DNA, 25 bp, Saccharomyces pastorianus
gaaagtacgagctccacggtgtttg

SEQ ID NO: 106820 - DNA, 25 bp, Saccharomyces pastorianus
gaccgcatgatattccgagagtttc

SEQ ID NO: 106821 - DNA, 25 bp, Saccharomyces pastorianus
aaaaaccccattgctggcggcgata

SEQ ID NO: 106822 - DNA, 25 bp, Saccharomyces pastorianus
gtcaaggtctaatccgtgttttcag

SEQ ID NO: 106823 - DNA, 25 bp, Saccharomyces pastorianus
gcgatagcggtttcacgtgtgctga

SEQ ID NO: 106824 - DNA, 25 bp, Saccharomyces pastorianus
gagagtttctaccacttatccgaag

SEQ ID NO: 106825 - DNA, 25 bp, Saccharomyces pastorianus
agttaacgtcttttctggtgccgca

SEQ ID NO: 106826 - DNA, 25 bp, Saccharomyces pastorianus
aagacttcagtcatattccgagttt

SEQ ID NO: 106827 - DNA, 25 bp, Saccharomyces pastorianus
agtgttcagaatcgcacctcataca

SEQ ID NO: 106828 - DNA, 25 bp, Saccharomyces pastorianus
aactgctagtactatctctgggtta

SEQ ID NO: 106829 - DNA, 25 bp, Saccharomyces pastorianus
agatggcccagcattacatttaact

SEQ ID NO: 106830 - DNA, 25 bp, Saccharomyces pastorianus
gaatcgaaggtgtaaccgctttgta

SEQ ID NO: 106831 - DNA, 25 bp, Saccharomyces pastorianus
attggctctccattattcttggtga

SEQ ID NO: 106832 - DNA, 25 bp, Saccharomyces pastorianus
tggtgccgcatctggtataattggt

SEQ ID NO: 106833 - DNA, 25 bp, Saccharomyces pastorianus
gaacaaacgcactacaccggtgttt

SEQ ID NO: 106834 - DNA, 25 bp, Saccharomyces pastorianus
taattggtgcagtcattggctctcc

SEQ ID NO: 106835 - DNA, 25 bp, Saccharomyces pastorianus
ttcttcccagatcaagagccacata

SEQ ID NO: 106836 - DNA, 25 bp, Saccharomyces pastorianus
ggaacaagttaccactgtcttcaac

SEQ ID NO: 106837 - DNA, 25 bp, Saccharomyces pastorianus
gatttgttcctgaagcgacacgcaa

SEQ ID NO: 106838 - DNA, 25 bp, Saccharomyces pastorianus
atcggttgttgtggccatttggtac

SEQ ID NO: 106839 - DNA, 25 bp, Saccharomyces pastorianus
atacctatgcagtcacttctttttt

SEQ ID NO: 106840 - DNA, 25 bp, Saccharomyces pastorianus
aaaagacagtgatctcccatgctct

SEQ ID NO: 106841 - DNA, 25 bp, Saccharomyces pastorianus
ggtactggaccggatcttcaacaaa

SEQ ID NO: 106842 - DNA, 25 bp, Saccharomyces pastorianus
ggagttcgaattcaagcccaaggcc

SEQ ID NO: 106843 - DNA, 25 bp, Saccharomyces pastorianus
catgttcgtcttttgttgtgcttgt

SEQ ID NO: 106844 - DNA, 25 bp, Saccharomyces pastorianus
gcaagtctgtcttttcacttcaaga

SEQ ID NO: 106845 - DNA, 25 bp, Saccharomyces pastorianus
aaactttccgatccatgttcgtctt

SEQ ID NO: 106846 - DNA, 25 bp, Saccharomyces pastorianus
aaggccgtcagaggttcacactatt

SEQ ID NO: 106847 - DNA, 25 bp, Saccharomyces pastorianus
aatattcacacgtccgtcatgtcta

SEQ ID NO: 106848 - DNA, 25 bp, Saccharomyces pastorianus
atcctatcttaccttttcttcattt

SEQ ID NO: 106849 - DNA, 25 bp, Saccharomyces pastorianus
cgcttcctcgtttctcattttaaat

SEQ ID NO: 106850 - DNA, 25 bp, Saccharomyces pastorianus
gtccgtcatgtctattttgagtcag

SEQ ID NO: 106851 - DNA, 25 bp, Saccharomyces pastorianus
gagttcttttatgtgatgccaatcg

SEQ ID NO: 106852 - DNA, 25 bp, Saccharomyces pastorianus
gccaatcgtcaattatcctatctta

SEQ ID NO: 106853 - DNA, 25 bp, Saccharomyces pastorianus
tcttcatttctttcagcgttttcat

SEQ ID NO: 106854 - DNA, 25 bp, Saccharomyces pastorianus
gaaattcagttattctatcattcag

SEQ ID NO: 106855 - DNA, 25 bp, Saccharomyces pastorianus
atttcgcgctattcttgaactttcg

SEQ ID NO: 106856 - DNA, 25 bp, Saccharomyces pastorianus
aattccttcgtttgatttcgcgcta

SEQ ID NO: 106857 - DNA, 25 bp, Saccharomyces pastorianus
gatttgctttattttcgcttcctcg

SEQ ID NO: 106858 - DNA, 25 bp, Saccharomyces pastorianus
aatggccagcactactttttgaaat

SEQ ID NO: 106859 - DNA, 25 bp, Saccharomyces pastorianus
gatgccgctcaaggaatggatttca

SEQ ID NO: 106860 - DNA, 25 bp, Saccharomyces pastorianus
gctggaggcatggacttcagcaaaa

SEQ ID NO: 106861 - DNA, 25 bp, Saccharomyces pastorianus
ggtgaagtacccttacatcaaaact

SEQ ID NO: 106862 - DNA, 25 bp, Saccharomyces pastorianus
aattgcagactgtgatgcccctgag

SEQ ID NO: 106863 - DNA, 25 bp, Saccharomyces pastorianus
gtgatgcccctgagttaaccattaa

SEQ ID NO: 106864 - DNA, 25 bp, Saccharomyces pastorianus
taaccattaagccatcatacatcga

SEQ ID NO: 106865 - DNA, 25 bp, Saccharomyces pastorianus
gctggtggcgctggttctccagata

SEQ ID NO: 106866 - DNA, 25 bp, Saccharomyces pastorianus
aaggtctagtactactgatccagaa

SEQ ID NO: 106867 - DNA, 25 bp, Saccharomyces pastorianus
atgcataaggttgctaatggccagc

SEQ ID NO: 106868 - DNA, 25 bp, Saccharomyces pastorianus
atcaaagcctcatgttggcgatgaa

SEQ ID NO: 106869 - DNA, 25 bp, Saccharomyces pastorianus
gtgggccttaggtgtcatactatac

SEQ ID NO: 106870 - DNA, 25 bp, Saccharomyces pastorianus
tcctccaaacgcttcagcaagacag

SEQ ID NO: 106871 - DNA, 25 bp, Saccharomyces pastorianus
acgtcacatcgtattgccaggtttg

SEQ ID NO: 106872 - DNA, 25 bp, Saccharomyces pastorianus
atcaacagttttagggactcaccca

SEQ ID NO: 106873 - DNA, 25 bp, Saccharomyces pastorianus
aacagtattattcatcgggacctaa

SEQ ID NO: 106874 - DNA, 25 bp, Saccharomyces pastorianus
cagaggattatgtctcaccagaaat

SEQ ID NO: 106875 - DNA, 25 bp, Saccharomyces pastorianus
gagttccctacgatggccatttaag

SEQ ID NO: 106876 - DNA, 25 bp, Saccharomyces pastorianus
cagaaatcctgatgggagttcccta

SEQ ID NO: 106877 - DNA, 25 bp, Saccharomyces pastorianus
gccatttaagcgacacgtgggcctt

SEQ ID NO: 106878 - DNA, 25 bp, Saccharomyces pastorianus
aggacagattaccatttgaccctcc

SEQ ID NO: 106879 - DNA, 25 bp, Saccharomyces pastorianus
gactcacccatttactgcaagcaaa

SEQ ID NO: 106880 - DNA, 25 bp, Saccharomyces pastorianus
gcagggtatccctattgtcttggaa

SEQ ID NO: 106881 - DNA, 25 bp, Saccharomyces pastorianus
agcaggctacgatatcagcaccact

SEQ ID NO: 106882 - DNA, 25 bp, Saccharomyces pastorianus
gtgtttagaatgatcgcgcactctg

SEQ ID NO: 106883 - DNA, 25 bp, Saccharomyces pastorianus
cagcaccactgaaacgtttaacaat

SEQ ID NO: 106884 - DNA, 25 bp, Saccharomyces pastorianus
aagaatcggcgtttgcatagataca

SEQ ID NO: 106885 - DNA, 25 bp, Saccharomyces pastorianus
gaaagccactgcagagccaagcgat

SEQ ID NO: 106886 - DNA, 25 bp, Saccharomyces pastorianus
agatttgcatgaacgcttgggtcaa

SEQ ID NO: 106887 - DNA, 25 bp, Saccharomyces pastorianus
gcgcactctgaatacctgcagggta

SEQ ID NO: 106888 - DNA, 25 bp, Saccharomyces pastorianus
gtgctgttcacttaaatgattccaa

SEQ ID NO: 106889 - DNA, 25 bp, Saccharomyces pastorianus
gatacatgccatacatttgcagcag

SEQ ID NO: 106890 - DNA, 25 bp, Saccharomyces pastorianus
atgattccaaggctcctttaggagc

SEQ ID NO: 106891 - DNA, 25 bp, Saccharomyces pastorianus
atgggttcttccaagtggtgcctaa

SEQ ID NO: 106892 - DNA, 25 bp, Saccharomyces pastorianus
gagacatttgactttttcagaggcc

SEQ ID NO: 106893 - DNA, 25 bp, Saccharomyces pastorianus
gcataatgcttggttgtgactactg

SEQ ID NO: 106894 - DNA, 25 bp, Saccharomyces pastorianus
gaatgctgtttcttgaccctgaagt

SEQ ID NO: 106895 - DNA, 25 bp, Saccharomyces pastorianus
tgagaggactcgacttgacaataga

SEQ ID NO: 106896 - DNA, 25 bp, Saccharomyces pastorianus
gagcagtttgttgatctttgcataa

SEQ ID NO: 106897 - DNA, 25 bp, Saccharomyces pastorianus
gacacactctgttatagaacaccct

SEQ ID NO: 106898 - DNA, 25 bp, Saccharomyces pastorianus
gttggtccagtgacagccttaaaat

SEQ ID NO: 106899 - DNA, 25 bp, Saccharomyces pastorianus
gaagactggccttacaaacaagcaa

SEQ ID NO: 106900 - DNA, 25 bp, Saccharomyces pastorianus
acagctggctgctgcggcgaaaaga

SEQ ID NO: 106901 - DNA, 25 bp, Saccharomyces pastorianus
agaacacccttcttgttgagacatt

SEQ ID NO: 106902 - DNA, 25 bp, Saccharomyces pastorianus
tgctcagttagccatagacaagatc

SEQ ID NO: 106903 - DNA, 25 bp, Saccharomyces pastorianus
gaagacgacaaactaccacatgatg

SEQ ID NO: 106904 - DNA, 25 bp, Saccharomyces pastorianus
tggattcagaagatgctcacaagtt

SEQ ID NO: 106905 - DNA, 25 bp, Saccharomyces pastorianus
gttaaggttactgtcatcgcatttg

SEQ ID NO: 106906 - DNA, 25 bp, Saccharomyces pastorianus
caaccttggctgaagtagacgctca

SEQ ID NO: 106907 - DNA, 25 bp, Saccharomyces pastorianus
gtaatgaaaatgtccacccaacctt

SEQ ID NO: 106908 - DNA, 25 bp, Saccharomyces pastorianus
tcaacccaagaagatgccaagcgtc

SEQ ID NO: 106909 - DNA, 25 bp, Saccharomyces pastorianus
ggtgatggccataacaattcgtcga

SEQ ID NO: 106910 - DNA, 25 bp, Saccharomyces pastorianus
aaataactcattcagacgtgtccat

SEQ ID NO: 106911 - DNA, 25 bp, Saccharomyces pastorianus
agacgtgtccatggttggcctagat

SEQ ID NO: 106912 - DNA, 25 bp, Saccharomyces pastorianus
agaagctcgtgaaactgctcagtta

SEQ ID NO: 106913 - DNA, 25 bp, Saccharomyces pastorianus
agcaacatcttcttcatcgtgatga

SEQ ID NO: 106914 - DNA, 25 bp, Saccharomyces pastorianus
gagttgtgttcttattatactgcga

SEQ ID NO: 106915 - DNA, 25 bp, Saccharomyces pastorianus
tcaactgggtatctattgacctctt

SEQ ID NO: 106916 - DNA, 25 bp, Saccharomyces pastorianus
aaaatagctcgtcttctcaactggg

SEQ ID NO: 106917 - DNA, 25 bp, Saccharomyces pastorianus
tttccctattagtccagcaacatct

SEQ ID NO: 106918 - DNA, 25 bp, Saccharomyces pastorianus
ggtgtagattctctacctctttcaa

SEQ ID NO: 106919 - DNA, 25 bp, Saccharomyces pastorianus
agtaaccttaactgttccgccacat

SEQ ID NO: 106920 - DNA, 25 bp, Saccharomyces pastorianus
agaaaggtcttcttcatcatcggct

SEQ ID NO: 106921 - DNA, 25 bp, Saccharomyces pastorianus
gtcatcatcattattctggtgtaga

SEQ ID NO: 106922 - DNA, 25 bp, Saccharomyces pastorianus
cattacatcgtctacgtcatcatca

SEQ ID NO: 106923 - DNA, 25 bp, Saccharomyces pastorianus
tatactgcgattctacatccacgtc

SEQ ID NO: 106924 - DNA, 25 bp, Saccharomyces pastorianus
caaaagcctgacttctattggcggg

SEQ ID NO: 106925 - DNA, 25 bp, Saccharomyces pastorianus
atgggactctccactctttgctatt

SEQ ID NO: 106926 - DNA, 25 bp, Saccharomyces pastorianus
aaacactgtgtccaccagagactat

SEQ ID NO: 106927 - DNA, 25 bp, Saccharomyces pastorianus
gatgatggttgcttcttcgtagact

SEQ ID NO: 106928 - DNA, 25 bp, Saccharomyces pastorianus
ttgctattcttactcctcaggacaa

SEQ ID NO: 106929 - DNA, 25 bp, Saccharomyces pastorianus
aagagtcattgtttccgaagggatt

SEQ ID NO: 106930 - DNA, 25 bp, Saccharomyces pastorianus
aactcagccacggtactaaagcctg

SEQ ID NO: 106931 - DNA, 25 bp, Saccharomyces pastorianus
ttcatccaggttctcgacatcgaaa

SEQ ID NO: 106932 - DNA, 25 bp, Saccharomyces pastorianus
gacttgcccattggtaacgtcgtta

SEQ ID NO: 106933 - DNA, 25 bp, Saccharomyces pastorianus
taaagcctgcgtctcagtccaactt

SEQ ID NO: 106934 - DNA, 25 bp, Saccharomyces pastorianus
acgtcgttacgttggcgcaattgca

SEQ ID NO: 106935 - DNA, 25 bp, Saccharomyces pastorianus
gattcgcatcaccatgacgagttag

SEQ ID NO: 106936 - DNA, 25 bp, Saccharomyces pastorianus
gtcgaagtcgaacgctaacctttat

SEQ ID NO: 106937 - DNA, 25 bp, Saccharomyces pastorianus
atgaaagcgctgattcgcatcacca

SEQ ID NO: 106938 - DNA, 25 bp, Saccharomyces pastorianus
aacaatgatgcaactgccaccaatg

SEQ ID NO: 106939 - DNA, 25 bp, Saccharomyces pastorianus
gaagattcatcacgtgctttgaaaa

SEQ ID NO: 106940 - DNA, 25 bp, Saccharomyces pastorianus
tcatgttttccaacgataccggtat

SEQ ID NO: 106941 - DNA, 25 bp, Saccharomyces pastorianus
gaggaaaccgtatcttcagggcaag

SEQ ID NO: 106942 - DNA, 25 bp, Saccharomyces pastorianus
ggtagtgccggtactgatgacgact

SEQ ID NO: 106943 - DNA, 25 bp, Saccharomyces pastorianus
aaacctatctgtttcttcaggatca

SEQ ID NO: 106944 - DNA, 25 bp, Saccharomyces pastorianus
gatgacgactacaccaaagttctga

SEQ ID NO: 106945 - DNA, 25 bp, Saccharomyces pastorianus
aagcagtttcatcgacgaccttgac

SEQ ID NO: 106946 - DNA, 25 bp, Saccharomyces pastorianus
gctcagagcaaaagcctacggctaa

SEQ ID NO: 106947 - DNA, 25 bp, Saccharomyces pastorianus
ggatccacctcacaaatctctgata

SEQ ID NO: 106948 - DNA, 25 bp, Saccharomyces pastorianus
aatgatccagaaaccgagaccgcag

SEQ ID NO: 106949 - DNA, 25 bp, Saccharomyces pastorianus
gaagaccactgacgaaatccctgat

SEQ ID NO: 106950 - DNA, 25 bp, Saccharomyces pastorianus
aaccacgaagacgactttgggctag

SEQ ID NO: 106951 - DNA, 25 bp, Saccharomyces pastorianus
caagcagcggcgttgtaagctcaga

SEQ ID NO: 106952 - DNA, 25 bp, Saccharomyces pastorianus
atttgaacatgatccggaggcaagc

SEQ ID NO: 106953 - DNA, 25 bp, Saccharomyces pastorianus
ggatcaagcggatatttcaacttca

SEQ ID NO: 106954 - DNA, 25 bp, Saccharomyces pastorianus
tagtccgtctccactcattagaaga

SEQ ID NO: 106955 - DNA, 25 bp, Saccharomyces pastorianus
ttcaacttcatttagtccgtctcca

SEQ ID NO: 106956 - DNA, 25 bp, Saccharomyces pastorianus
acgaaatccctgatagagttggcca

SEQ ID NO: 106957 - DNA, 25 bp, Saccharomyces pastorianus
ctacctcagccgcattacagaatgg

SEQ ID NO: 106958 - DNA, 25 bp, Saccharomyces pastorianus
tcagctggacctgtcaaagcgcaga

SEQ ID NO: 106959 - DNA, 25 bp, Saccharomyces pastorianus
gtgggagacccagatgacttgaatt

SEQ ID NO: 106960 - DNA, 25 bp, Saccharomyces pastorianus
aagttttcatagcagggtttccagg

SEQ ID NO: 106961 - DNA, 25 bp, Saccharomyces pastorianus
aaacaatttgcaccctgattgcgag

SEQ ID NO: 106962 - DNA, 25 bp, Saccharomyces pastorianus
gaaccctgggctgatcaaaacgaac

SEQ ID NO: 106963 - DNA, 25 bp, Saccharomyces pastorianus
taatcttcttggcagtgacacctac

SEQ ID NO: 106964 - DNA, 25 bp, Saccharomyces pastorianus
gaagtatagtgcctacgctacacat

SEQ ID NO: 106965 - DNA, 25 bp, Saccharomyces pastorianus
taccttcgcctggtttgaccaaaga

SEQ ID NO: 106966 - DNA, 25 bp, Saccharomyces pastorianus
ggtatttttgcatcacgccagagac

SEQ ID NO: 106967 - DNA, 25 bp, Saccharomyces pastorianus
atcacgcagtggtacaatgttcagc

SEQ ID NO: 106968 - DNA, 25 bp, Saccharomyces pastorianus
gatatgcgagctatgactccaacaa

SEQ ID NO: 106969 - DNA, 25 bp, Saccharomyces pastorianus
ctgacaataggaagatatgcgagct

SEQ ID NO: 106970 - DNA, 25 bp, Saccharomyces pastorianus
gtcgatattacatctgacaatagga

SEQ ID NO: 106971 - DNA, 25 bp, Saccharomyces pastorianus
gctatgactccaacaatcacatgag

SEQ ID NO: 106972 - DNA, 25 bp, Saccharomyces pastorianus
atgcgagctatgactccaacaatca

SEQ ID NO: 106973 - DNA, 25 bp, Saccharomyces pastorianus
aatcacatgagacggcgtgcaaaac

SEQ ID NO: 106974 - DNA, 25 bp, Saccharomyces pastorianus
gagctatgactccaacaatcacatg

SEQ ID NO: 106975 - DNA, 25 bp, Saccharomyces pastorianus
aacaatcacatgagacggcgtgcaa

SEQ ID NO: 106976 - DNA, 25 bp, Saccharomyces pastorianus
gaagatatgcgagctatgactccaa

SEQ ID NO: 106977 - DNA, 25 bp, Saccharomyces pastorianus
tgactccaacaatcacatgagacgg

SEQ ID NO: 106978 - DNA, 25 bp, Saccharomyces pastorianus
ccgtcgatattacatctgacaatag

SEQ ID NO: 106979 - DNA, 25 bp, Saccharomyces pastorianus
tgtaaatttcgcacaacagcacggt

SEQ ID NO: 106980 - DNA, 25 bp, Saccharomyces pastorianus
ccaggatacggttctcgtgtggtaa

SEQ ID NO: 106981 - DNA, 25 bp, Saccharomyces pastorianus
gaaagttcaaccctctacaacagaa

SEQ ID NO: 106982 - DNA, 25 bp, Saccharomyces pastorianus
ggtatctttctttgtcaatcttttg

SEQ ID NO: 106983 - DNA, 25 bp, Saccharomyces pastorianus
tatgtattcttctccaccaggatac

SEQ ID NO: 106984 - DNA, 25 bp, Saccharomyces pastorianus
ctagggtggccggatcttgtaaatt

SEQ ID NO: 106985 - DNA, 25 bp, Saccharomyces pastorianus
ttatcacgccggcaactgcgaacaa

SEQ ID NO: 106986 - DNA, 25 bp, Saccharomyces pastorianus
agatgtttgaccgtctagggtggcc

SEQ ID NO: 106987 - DNA, 25 bp, Saccharomyces pastorianus
gttggttccttaagcgttatcacgc

SEQ ID NO: 106988 - DNA, 25 bp, Saccharomyces pastorianus
acatgggcctttatggtgaacgagt

SEQ ID NO: 106989 - DNA, 25 bp, Saccharomyces pastorianus
agagattgcatcacgtcagacagga

SEQ ID NO: 106990 - DNA, 25 bp, Saccharomyces pastorianus
taatcccgggccaaattaagcaagt

SEQ ID NO: 106991 - DNA, 25 bp, Saccharomyces pastorianus
taatgtttgctctatcgctgtcaga

SEQ ID NO: 106992 - DNA, 25 bp, Saccharomyces pastorianus
ttgcttttggtaccagagactctct

SEQ ID NO: 106993 - DNA, 25 bp, Saccharomyces pastorianus
aggttaccaatttgctgctgctctg

SEQ ID NO: 106994 - DNA, 25 bp, Saccharomyces pastorianus
aaatcaatcgacctgcaaactttag

SEQ ID NO: 106995 - DNA, 25 bp, Saccharomyces pastorianus
aaagtagtttcctctattgagcaag

SEQ ID NO: 106996 - DNA, 25 bp, Saccharomyces pastorianus
tgaaacacggtgtcttggccttggt

SEQ ID NO: 106997 - DNA, 25 bp, Saccharomyces pastorianus
ctgctgctctggaaggtgctttgaa

SEQ ID NO: 106998 - DNA, 25 bp, Saccharomyces pastorianus
aaaaagctctgtgcgactgaattaa

SEQ ID NO: 106999 - DNA, 25 bp, Saccharomyces pastorianus
ttggccttggtggacgaaaacttgc

SEQ ID NO: 107000 - DNA, 25 bp, Saccharomyces pastorianus
gagactctctattccctaaagtagt

SEQ ID NO: 107001 - DNA, 25 bp, Saccharomyces pastorianus
gtcgatttgcatacggtttgggcta

SEQ ID NO: 107002 - DNA, 25 bp, Saccharomyces pastorianus
attagcacgccgcaatggagacaaa

SEQ ID NO: 107003 - DNA, 25 bp, Saccharomyces pastorianus
taattccatcatcttgtccgcagac

SEQ ID NO: 107004 - DNA, 25 bp, Saccharomyces pastorianus
ttgcacagttgtccatgcacagcat

SEQ ID NO: 107005 - DNA, 25 bp, Saccharomyces pastorianus
ggtgctcgtaccatagacctgggaa

SEQ ID NO: 107006 - DNA, 25 bp, Saccharomyces pastorianus
ttggcttctcaaacaggtgctcgta

SEQ ID NO: 107007 - DNA, 25 bp, Saccharomyces pastorianus
gaacgcagttcttctgcattcacta

SEQ ID NO: 107008 - DNA, 25 bp, Saccharomyces pastorianus
atcaggtggtactatcggcccatca

SEQ ID NO: 107009 - DNA, 25 bp, Saccharomyces pastorianus
tgattgctttgatttgctacgctaa

SEQ ID NO: 107010 - DNA, 25 bp, Saccharomyces pastorianus
ggatcctaacggtcatatggccaca

SEQ ID NO: 107011 - DNA, 25 bp, Saccharomyces pastorianus
gaagaatcattttccagtgcctaat

SEQ ID NO: 107012 - DNA, 25 bp, Saccharomyces pastorianus
acattgtaatcccttatctcttgcg

SEQ ID NO: 107013 - DNA, 25 bp, Saccharomyces pastorianus
cactccttccttttctcatggataa

SEQ ID NO: 107014 - DNA, 25 bp, Saccharomyces pastorianus
gttcattcggttttctcttgtgcag

SEQ ID NO: 107015 - DNA, 25 bp, Saccharomyces pastorianus
agctgcagccagttgttcattcggt

SEQ ID NO: 107016 - DNA, 25 bp, Saccharomyces pastorianus
ttgtgcagcggctcaaattgtggca

SEQ ID NO: 107017 - DNA, 25 bp, Saccharomyces pastorianus
tgtaggctccgaacgccgtaaggta

SEQ ID NO: 107018 - DNA, 25 bp, Saccharomyces pastorianus
gtcatcctattactttctgaggcat

SEQ ID NO: 107019 - DNA, 25 bp, Saccharomyces pastorianus
attgtggcaggcttgtaggctccga

SEQ ID NO: 107020 - DNA, 25 bp, Saccharomyces pastorianus
ttatctcttgcgcttgttggtatca

SEQ ID NO: 107021 - DNA, 25 bp, Saccharomyces pastorianus
tgaggtttcatcgacagctgcagcc

SEQ ID NO: 107022 - DNA, 25 bp, Saccharomyces pastorianus
gtgtgctttattcgctgaggtttca

SEQ ID NO: 107023 - DNA, 25 bp, Saccharomyces pastorianus
gttacgaaggataccgctatggaat

SEQ ID NO: 107024 - DNA, 25 bp, Saccharomyces pastorianus
gaattggttcgtcaaactatttcaa

SEQ ID NO: 107025 - DNA, 25 bp, Saccharomyces pastorianus
agaacctagatcacaaatttgggag

SEQ ID NO: 107026 - DNA, 25 bp, Saccharomyces pastorianus
aagaagcgccttccagtgataaaaa

SEQ ID NO: 107027 - DNA, 25 bp, Saccharomyces pastorianus
gatgatgcgcatatgctaacattaa

SEQ ID NO: 107028 - DNA, 25 bp, Saccharomyces pastorianus
ttctcaacttgtgttgccggtggtt

SEQ ID NO: 107029 - DNA, 25 bp, Saccharomyces pastorianus
acacccaatgcatctacggtaatta

SEQ ID NO: 107030 - DNA, 25 bp, Saccharomyces pastorianus
gaagagcacaccaagctagacaata

SEQ ID NO: 107031 - DNA, 25 bp, Saccharomyces pastorianus
atcaagattactagcacacccaatg

SEQ ID NO: 107032 - DNA, 25 bp, Saccharomyces pastorianus
gctactaaggcatccaagaatcatg

SEQ ID NO: 107033 - DNA, 25 bp, Saccharomyces pastorianus
gaatatccgaggaatcttctcaact

SEQ ID NO: 107034 - DNA, 25 bp, Saccharomyces pastorianus
gtagctactaaccttgatattcccg

SEQ ID NO: 107035 - DNA, 25 bp, Saccharomyces pastorianus
tatgccttgcttggtgatgatgtaa

SEQ ID NO: 107036 - DNA, 25 bp, Saccharomyces pastorianus
ttgcttctttggtatctgccatggt

SEQ ID NO: 107037 - DNA, 25 bp, Saccharomyces pastorianus
atggtctccttgtccattttcaata

SEQ ID NO: 107038 - DNA, 25 bp, Saccharomyces pastorianus
ataacttattcgaccttcatcctat

SEQ ID NO: 107039 - DNA, 25 bp, Saccharomyces pastorianus
gccttgcctggtatgtttattgcga

SEQ ID NO: 107040 - DNA, 25 bp, Saccharomyces pastorianus
gatgacactgaattccactttttga

SEQ ID NO: 107041 - DNA, 25 bp, Saccharomyces pastorianus
tttcaatactgctcaaccggcttta

SEQ ID NO: 107042 - DNA, 25 bp, Saccharomyces pastorianus
atgacatctggaagtggcaccttga

SEQ ID NO: 107043 - DNA, 25 bp, Saccharomyces pastorianus
gctatggttagttacgttgcttctt

SEQ ID NO: 107044 - DNA, 25 bp, Saccharomyces pastorianus
tggtctgggtgatattgccttgcct

SEQ ID NO: 107045 - DNA, 25 bp, Saccharomyces pastorianus
gtgccacttccagatgtcatatttg

SEQ ID NO: 107046 - DNA, 25 bp, Saccharomyces pastorianus
tcaaggtgccacttccagatgtcat

SEQ ID NO: 107047 - DNA, 25 bp, Saccharomyces pastorianus
cttccagatgtcatatttgtagcac

SEQ ID NO: 107048 - DNA, 25 bp, Saccharomyces pastorianus
gccacttccagatgtcatatttgta

SEQ ID NO: 107049 - DNA, 25 bp, Saccharomyces pastorianus
atcaaggtgccacttccagatgtca

SEQ ID NO: 107050 - DNA, 25 bp, Saccharomyces pastorianus
atatttgtagcacatcgcaataaac

SEQ ID NO: 107051 - DNA, 25 bp, Saccharomyces pastorianus
aaggtgccacttccagatgtcatat

SEQ ID NO: 107052 - DNA, 25 bp, Saccharomyces pastorianus
gtcatatttgtagcacatcgcaata

SEQ ID NO: 107053 - DNA, 25 bp, Saccharomyces pastorianus
agcacatcgcaataaacataccagg

SEQ ID NO: 107054 - DNA, 25 bp, Saccharomyces pastorianus
aggtgccacttccagatgtcatatt

SEQ ID NO: 107055 - DNA, 25 bp, Saccharomyces pastorianus
atgtcatatttgtagcacatcgcaa

SEQ ID NO: 107056 - DNA, 25 bp, Saccharomyces pastorianus
tagcgaccccaacttggtggacgaa

SEQ ID NO: 107057 - DNA, 25 bp, Saccharomyces pastorianus
tattctcgatatcatggtccatttg

SEQ ID NO: 107058 - DNA, 25 bp, Saccharomyces pastorianus
atgagtttgagaatccccttttcct

SEQ ID NO: 107059 - DNA, 25 bp, Saccharomyces pastorianus
gtatgggcgcttggctcaaacacaa

SEQ ID NO: 107060 - DNA, 25 bp, Saccharomyces pastorianus
ccttttcctggaatctctcgtagtg

SEQ ID NO: 107061 - DNA, 25 bp, Saccharomyces pastorianus
gcgttcctccatggatagttcctta

SEQ ID NO: 107062 - DNA, 25 bp, Saccharomyces pastorianus
gcggcaagatgtttgtgtcaccttc

SEQ ID NO: 107063 - DNA, 25 bp, Saccharomyces pastorianus
gtacttccccatgcacttggaattg

SEQ ID NO: 107064 - DNA, 25 bp, Saccharomyces pastorianus
tagttccttattgtacggtagcgac

SEQ ID NO: 107065 - DNA, 25 bp, Saccharomyces pastorianus
ttggaattggttcagcgttcctcca

SEQ ID NO: 107066 - DNA, 25 bp, Saccharomyces pastorianus
tcacatgtcaaagaggcgtccaggt

SEQ ID NO: 107067 - DNA, 25 bp, Saccharomyces pastorianus
ttacgtttaccattcttgagagtga

SEQ ID NO: 107068 - DNA, 25 bp, Saccharomyces pastorianus
ctagcatatcagtggcgcagaacgc

SEQ ID NO: 107069 - DNA, 25 bp, Saccharomyces pastorianus
ggcagttcagttcgtgttgtttacc

SEQ ID NO: 107070 - DNA, 25 bp, Saccharomyces pastorianus
cataggttgctgctgcctagcatat

SEQ ID NO: 107071 - DNA, 25 bp, Saccharomyces pastorianus
gttgtttacctctgccgaaactgag

SEQ ID NO: 107072 - DNA, 25 bp, Saccharomyces pastorianus
cggcgatcgctgcattgtttcaagt

SEQ ID NO: 107073 - DNA, 25 bp, Saccharomyces pastorianus
gtttcaagtgccctggagacgtaaa

SEQ ID NO: 107074 - DNA, 25 bp, Saccharomyces pastorianus
tgttatggccccaaaacgcgcatat

SEQ ID NO: 107075 - DNA, 25 bp, Saccharomyces pastorianus
atattccacgccttttgggccttgg

SEQ ID NO: 107076 - DNA, 25 bp, Saccharomyces pastorianus
gcggagtgcctgtggaattgccctt

SEQ ID NO: 107077 - DNA, 25 bp, Saccharomyces pastorianus
attgcccttcggagctaaggcagtt

SEQ ID NO: 107078 - DNA, 25 bp, Saccharomyces pastorianus
gcctgatttatatacgattattgta

SEQ ID NO: 107079 - DNA, 25 bp, Saccharomyces pastorianus
gaagcctgatttatatacgattatt

SEQ ID NO: 107080 - DNA, 25 bp, Saccharomyces pastorianus
gaagttatttattcttgattatgag

SEQ ID NO: 107081 - DNA, 25 bp, Saccharomyces pastorianus
acaagaagcctgatttatatacgat

SEQ ID NO: 107082 - DNA, 25 bp, Saccharomyces pastorianus
agcctgatttatatacgattattgt

SEQ ID NO: 107083 - DNA, 25 bp, Saccharomyces pastorianus
caagaagcctgatttatatacgatt

SEQ ID NO: 107084 - DNA, 25 bp, Saccharomyces pastorianus
aagcctgatttatatacgattattg

SEQ ID NO: 107085 - DNA, 25 bp, Saccharomyces pastorianus
gaacaagaagcctgatttatatacg

SEQ ID NO: 107086 - DNA, 25 bp, Saccharomyces pastorianus
aagaagcctgatttatatacgatta

SEQ ID NO: 107087 - DNA, 25 bp, Saccharomyces pastorianus
acaaagataggaaaagggatggcaa

SEQ ID NO: 107088 - DNA, 25 bp, Saccharomyces pastorianus
agaagcctgatttatatacgattat

SEQ ID NO: 107089 - DNA, 25 bp, Saccharomyces pastorianus
tgtcgcttccgttgctttcgtcgct

SEQ ID NO: 107090 - DNA, 25 bp, Saccharomyces pastorianus
ccatccagcaccgttgaaactgttt

SEQ ID NO: 107091 - DNA, 25 bp, Saccharomyces pastorianus
gcaccgttgaaactgtttctccatc

SEQ ID NO: 107092 - DNA, 25 bp, Saccharomyces pastorianus
tccagcaccgttgaaactgtttctc

SEQ ID NO: 107093 - DNA, 25 bp, Saccharomyces pastorianus
gttgaaactgtttctccatccagca

SEQ ID NO: 107094 - DNA, 25 bp, Saccharomyces pastorianus
tgctttcgtcgctttggctaacttt

SEQ ID NO: 107095 - DNA, 25 bp, Saccharomyces pastorianus
ccgttgctttcgtcgctttggctaa

SEQ ID NO: 107096 - DNA, 25 bp, Saccharomyces pastorianus
gtttctccatccagcaccgaaacta

SEQ ID NO: 107097 - DNA, 25 bp, Saccharomyces pastorianus
catccagcaccgaaactatctctca

SEQ ID NO: 107098 - DNA, 25 bp, Saccharomyces pastorianus
accactgctaccaccgaagctacca

SEQ ID NO: 107099 - DNA, 25 bp, Saccharomyces pastorianus
aaactgtttctccatccagcaccga

SEQ ID NO: 107100 - DNA, 25 bp, Saccharomyces pastorianus
tgtcgcttccgttgctttcgtcgct

SEQ ID NO: 107101 - DNA, 25 bp, Saccharomyces pastorianus
ccatccagcaccgttgaaactgttt

SEQ ID NO: 107102 - DNA, 25 bp, Saccharomyces pastorianus
gttgaaactgtttctccatccagca

SEQ ID NO: 107103 - DNA, 25 bp, Saccharomyces pastorianus
tccagcaccgttgaaactgtttctc

SEQ ID NO: 107104 - DNA, 25 bp, Saccharomyces pastorianus
tgctttcgtcgctttggctaacttt

SEQ ID NO: 107105 - DNA, 25 bp, Saccharomyces pastorianus
ccgttgctttcgtcgctttggctaa

SEQ ID NO: 107106 - DNA, 25 bp, Saccharomyces pastorianus
gtttctccatccagcaccgaaacta

SEQ ID NO: 107107 - DNA, 25 bp, Saccharomyces pastorianus
tgccgccatttctcaaatcactgac

SEQ ID NO: 107108 - DNA, 25 bp, Saccharomyces pastorianus
aaactgtttctccatccagcaccga

SEQ ID NO: 107109 - DNA, 25 bp, Saccharomyces pastorianus
gctaactttgttgccgctgaatccg

SEQ ID NO: 107110 - DNA, 25 bp, Saccharomyces pastorianus
agcaccgaaactatctctcaacaaa

SEQ ID NO: 107111 - DNA, 25 bp, Saccharomyces pastorianus
gactaaccatttcatgtccacgttg

SEQ ID NO: 107112 - DNA, 25 bp, Saccharomyces pastorianus
gactgatgatctggacaacctcgta

SEQ ID NO: 107113 - DNA, 25 bp, Saccharomyces pastorianus
aaagctctgtgcgtacgaatccgtt

SEQ ID NO: 107114 - DNA, 25 bp, Saccharomyces pastorianus
ggcgtaagaaactatgtccctcaga

SEQ ID NO: 107115 - DNA, 25 bp, Saccharomyces pastorianus
attgcatttagaacagaccccggta

SEQ ID NO: 107116 - DNA, 25 bp, Saccharomyces pastorianus
actccgttgtttaatcctacatcca

SEQ ID NO: 107117 - DNA, 25 bp, Saccharomyces pastorianus
atagacgagacactgcaacgcttag

SEQ ID NO: 107118 - DNA, 25 bp, Saccharomyces pastorianus
atttgacaatcacaggcagcgtacc

SEQ ID NO: 107119 - DNA, 25 bp, Saccharomyces pastorianus
ggcagcgtaccaataaacctggcaa

SEQ ID NO: 107120 - DNA, 25 bp, Saccharomyces pastorianus
acagaccccggtaattcagattatg

SEQ ID NO: 107121 - DNA, 25 bp, Saccharomyces pastorianus
acgttgtgccaattccattgcattt

SEQ ID NO: 107122 - DNA, 25 bp, Saccharomyces pastorianus
aggactgtccttctgctgacaaaga

SEQ ID NO: 107123 - DNA, 25 bp, Saccharomyces pastorianus
aaagcctatcgtgctttcctcggaa

SEQ ID NO: 107124 - DNA, 25 bp, Saccharomyces pastorianus
gccgacccaaattattgctccatta

SEQ ID NO: 107125 - DNA, 25 bp, Saccharomyces pastorianus
gacaaacccgttattattatgcatg

SEQ ID NO: 107126 - DNA, 25 bp, Saccharomyces pastorianus
aggccaaaggcatacccttgttcat

SEQ ID NO: 107127 - DNA, 25 bp, Saccharomyces pastorianus
gtggtatctgcctaaactatgcctg

SEQ ID NO: 107128 - DNA, 25 bp, Saccharomyces pastorianus
gatcctatgtctgttccactatatg

SEQ ID NO: 107129 - DNA, 25 bp, Saccharomyces pastorianus
taagcggatatatcgggtcaggccc

SEQ ID NO: 107130 - DNA, 25 bp, Saccharomyces pastorianus
gaattaaagctgtatccgggcgcaa

SEQ ID NO: 107131 - DNA, 25 bp, Saccharomyces pastorianus
gatcctaagggctctgaaaagttca

SEQ ID NO: 107132 - DNA, 25 bp, Saccharomyces pastorianus
ccgggcgcaagacattcgattttct

SEQ ID NO: 107133 - DNA, 25 bp, Saccharomyces pastorianus
atcggccccgtgaaatatcatcgtg

SEQ ID NO: 107134 - DNA, 25 bp, Saccharomyces pastorianus
acctgggttggatactttgactgct

SEQ ID NO: 107135 - DNA, 25 bp, Saccharomyces pastorianus
gacagtctataccagagctctttag

SEQ ID NO: 107136 - DNA, 25 bp, Saccharomyces pastorianus
ttgcaactcaaggtcgttttctcta

SEQ ID NO: 107137 - DNA, 25 bp, Saccharomyces pastorianus
atggccttttagtgagctcaagctc

SEQ ID NO: 107138 - DNA, 25 bp, Saccharomyces pastorianus
acgtcgtactttacttcatcttcat

SEQ ID NO: 107139 - DNA, 25 bp, Saccharomyces pastorianus
gccattgccataccaacacatttgt

SEQ ID NO: 107140 - DNA, 25 bp, Saccharomyces pastorianus
agctctttagcggtgcgtgtactaa

SEQ ID NO: 107141 - DNA, 25 bp, Saccharomyces pastorianus
gttttctctacccaggtcaagatca

SEQ ID NO: 107142 - DNA, 25 bp, Saccharomyces pastorianus
aagatcaaggtcttctgccattgcc

SEQ ID NO: 107143 - DNA, 25 bp, Saccharomyces pastorianus
cgaacacttcctcatcactaaattt

SEQ ID NO: 107144 - DNA, 25 bp, Saccharomyces pastorianus
tgtgcttccagcactttgtttgaag

SEQ ID NO: 107145 - DNA, 25 bp, Saccharomyces pastorianus
atcggtacatggaacatcatcggaa

SEQ ID NO: 107146 - DNA, 25 bp, Saccharomyces pastorianus
gtcaggttatgaatgtgcttccagc

SEQ ID NO: 107147 - DNA, 25 bp, Saccharomyces pastorianus
tactccatttcactctcacataaaa

SEQ ID NO: 107148 - DNA, 25 bp, Saccharomyces pastorianus
tgacgcttccaaactcgcaaggtaa

SEQ ID NO: 107149 - DNA, 25 bp, Saccharomyces pastorianus
aaaattcccgtaagctgacaagatg

SEQ ID NO: 107150 - DNA, 25 bp, Saccharomyces pastorianus
gattttccccgacaaagttatctag

SEQ ID NO: 107151 - DNA, 25 bp, Saccharomyces pastorianus
aaggatgattacttgacgcttccaa

SEQ ID NO: 107152 - DNA, 25 bp, Saccharomyces pastorianus
gaggaaacctcctaacgcagatgtt

SEQ ID NO: 107153 - DNA, 25 bp, Saccharomyces pastorianus
aggtgtctctagtaaatccaataac

SEQ ID NO: 107154 - DNA, 25 bp, Saccharomyces pastorianus
ataatggcgctaattcaggcatcaa

SEQ ID NO: 107155 - DNA, 25 bp, Saccharomyces pastorianus
tggtggtacatctgtcttgcacaac

SEQ ID NO: 107156 - DNA, 25 bp, Saccharomyces pastorianus
gaagagctggctaccttattgaaac

SEQ ID NO: 107157 - DNA, 25 bp, Saccharomyces pastorianus
agtccatttggtttctcgacgatgt

SEQ ID NO: 107158 - DNA, 25 bp, Saccharomyces pastorianus
aatgtaccctcagtattaccatcac

SEQ ID NO: 107159 - DNA, 25 bp, Saccharomyces pastorianus
agggtatctcactttctaatgctta

SEQ ID NO: 107160 - DNA, 25 bp, Saccharomyces pastorianus
tattgaaacttcgtgcactgtgctg

SEQ ID NO: 107161 - DNA, 25 bp, Saccharomyces pastorianus
aatgcttatcatgtgctttcctata

SEQ ID NO: 107162 - DNA, 25 bp, Saccharomyces pastorianus
aaatctttattcttggctcttctta

SEQ ID NO: 107163 - DNA, 25 bp, Saccharomyces pastorianus
gagaccctagatacatcggaccaga

SEQ ID NO: 107164 - DNA, 25 bp, Saccharomyces pastorianus
gatggttaaacccttcttggatcca

SEQ ID NO: 107165 - DNA, 25 bp, Saccharomyces pastorianus
ctactattccgatattggtccctgg

SEQ ID NO: 107166 - DNA, 25 bp, Saccharomyces pastorianus
agaggtatccacagcatcggcggga

SEQ ID NO: 107167 - DNA, 25 bp, Saccharomyces pastorianus
ggtgttgaacatatcgtccttattg

SEQ ID NO: 107168 - DNA, 25 bp, Saccharomyces pastorianus
tttacccaaattttcaacaccgcag

SEQ ID NO: 107169 - DNA, 25 bp, Saccharomyces pastorianus
aggttttaccttgacatccagagat

SEQ ID NO: 107170 - DNA, 25 bp, Saccharomyces pastorianus
ataaattgccccttcatgacaaaga

SEQ ID NO: 107171 - DNA, 25 bp, Saccharomyces pastorianus
cgagggagctgtgccggttataaat

SEQ ID NO: 107172 - DNA, 25 bp, Saccharomyces pastorianus
gataatcgcgatctcaaagccataa

SEQ ID NO: 107173 - DNA, 25 bp, Saccharomyces pastorianus
gatctcaaaggttcgactgcaggtt

SEQ ID NO: 107174 - DNA, 25 bp, Saccharomyces pastorianus
gtacagtttgtaagcccgttaatcg

SEQ ID NO: 107175 - DNA, 25 bp, Saccharomyces pastorianus
aacaccgcagatttcccgcagaaat

SEQ ID NO: 107176 - DNA, 25 bp, Saccharomyces pastorianus
ttccatggttttcttcccagtgaag

SEQ ID NO: 107177 - DNA, 25 bp, Saccharomyces pastorianus
taccggcattcaacgagtacgcgat

SEQ ID NO: 107178 - DNA, 25 bp, Saccharomyces pastorianus
aggacatatattacgttccacgtga

SEQ ID NO: 107179 - DNA, 25 bp, Saccharomyces pastorianus
aattattgcattcgcgcccaatttg

SEQ ID NO: 107180 - DNA, 25 bp, Saccharomyces pastorianus
aagtgaccgtttcagaagacgctaa

SEQ ID NO: 107181 - DNA, 25 bp, Saccharomyces pastorianus
aacgagtacgcgattgccaatagag

SEQ ID NO: 107182 - DNA, 25 bp, Saccharomyces pastorianus
gttcttgagcgttaaaggttccact

SEQ ID NO: 107183 - DNA, 25 bp, Saccharomyces pastorianus
gcgcccaatttgtcgcaaactgaac

SEQ ID NO: 107184 - DNA, 25 bp, Saccharomyces pastorianus
cagaccttacaactacgtacctacg

SEQ ID NO: 107185 - DNA, 25 bp, Saccharomyces pastorianus
gttccactttccaaataccggcatt

SEQ ID NO: 107186 - DNA, 25 bp, Saccharomyces pastorianus
aaatgttcttcgtccaagtgaccgt

SEQ ID NO: 107187 - DNA, 25 bp, Saccharomyces pastorianus
aagaatactttgctagcggcatatt

SEQ ID NO: 107188 - DNA, 25 bp, Saccharomyces pastorianus
gaatgatactagcttgagtctgaac

SEQ ID NO: 107189 - DNA, 25 bp, Saccharomyces pastorianus
gagagattggtcaccactgacccca

SEQ ID NO: 107190 - DNA, 25 bp, Saccharomyces pastorianus
tgggctgatattttcctgattgcgc

SEQ ID NO: 107191 - DNA, 25 bp, Saccharomyces pastorianus
tgattgcgcctttgtcagctaacac

SEQ ID NO: 107192 - DNA, 25 bp, Saccharomyces pastorianus
aacacacttgctaaactggccaatg

SEQ ID NO: 107193 - DNA, 25 bp, Saccharomyces pastorianus
gagtctgaacttaatattgcaccat

SEQ ID NO: 107194 - DNA, 25 bp, Saccharomyces pastorianus
aagacgcttgggtattcgacgctgt

SEQ ID NO: 107195 - DNA, 25 bp, Saccharomyces pastorianus
actgaccccagtgttgattgcgcct

SEQ ID NO: 107196 - DNA, 25 bp, Saccharomyces pastorianus
gtaacaatttgctaacttctgtgat

SEQ ID NO: 107197 - DNA, 25 bp, Saccharomyces pastorianus
agtgcaagactatccgttcatccaa

SEQ ID NO: 107198 - DNA, 25 bp, Saccharomyces pastorianus
gaaacacctgacgagtttagtgcaa

SEQ ID NO: 107199 - DNA, 25 bp, Saccharomyces pastorianus
tagagtgctctgcaaacccacaaga

SEQ ID NO: 107200 - DNA, 25 bp, Saccharomyces pastorianus
attgggatccgaactcagatgacat

SEQ ID NO: 107201 - DNA, 25 bp, Saccharomyces pastorianus
atttctattccaccgatctgaacga

SEQ ID NO: 107202 - DNA, 25 bp, Saccharomyces pastorianus
aactgacaccaagggcctggttcag

SEQ ID NO: 107203 - DNA, 25 bp, Saccharomyces pastorianus
gcaacaaccacttatttatctcgat

SEQ ID NO: 107204 - DNA, 25 bp, Saccharomyces pastorianus
aacgaagcgcatcctggtgctactg

SEQ ID NO: 107205 - DNA, 25 bp, Saccharomyces pastorianus
aaggtggatctctctcagtccagag

SEQ ID NO: 107206 - DNA, 25 bp, Saccharomyces pastorianus
ggttgtgcctttacataactccatc

SEQ ID NO: 107207 - DNA, 25 bp, Saccharomyces pastorianus
gaaactggatatacccgtcggagaa

SEQ ID NO: 107208 - DNA, 25 bp, Saccharomyces pastorianus
gaggtttcgaccataccaaggacga

SEQ ID NO: 107209 - DNA, 25 bp, Saccharomyces pastorianus
gcacctggccaaaccttttgataga

SEQ ID NO: 107210 - DNA, 25 bp, Saccharomyces pastorianus
tctacaggcatacgaccgccgggct

SEQ ID NO: 107211 - DNA, 25 bp, Saccharomyces pastorianus
ggctacaatgaagggcattcccacc

SEQ ID NO: 107212 - DNA, 25 bp, Saccharomyces pastorianus
aaccaacagaaattcctctctcaga

SEQ ID NO: 107213 - DNA, 25 bp, Saccharomyces pastorianus
tagcgcctgtgttggatcctcaaaa

SEQ ID NO: 107214 - DNA, 25 bp, Saccharomyces pastorianus
agacatgctctctagaacaggctga

SEQ ID NO: 107215 - DNA, 25 bp, Saccharomyces pastorianus
attcccaccgctagcaagacatgct

SEQ ID NO: 107216 - DNA, 25 bp, Saccharomyces pastorianus
aagatcgacgcaatggtggctacaa

SEQ ID NO: 107217 - DNA, 25 bp, Saccharomyces pastorianus
tagaacaggctgaggcggctgcctc

SEQ ID NO: 107218 - DNA, 25 bp, Saccharomyces pastorianus
gggacagacgctatattatgccttc

SEQ ID NO: 107219 - DNA, 25 bp, Saccharomyces pastorianus
aattcctctctcagagatcagacgc

SEQ ID NO: 107220 - DNA, 25 bp, Saccharomyces pastorianus
tatattatgccttcggcggctgcca

SEQ ID NO: 107221 - DNA, 25 bp, Saccharomyces pastorianus
tcatcggtggacattctggtattac

SEQ ID NO: 107222 - DNA, 25 bp, Saccharomyces pastorianus
attcgctaatgctgttttgtccggt

SEQ ID NO: 107223 - DNA, 25 bp, Saccharomyces pastorianus
atgctgccattctggtcatttccaa

SEQ ID NO: 107224 - DNA, 25 bp, Saccharomyces pastorianus
ccaattgtcgcccaagtcttgaaaa

SEQ ID NO: 107225 - DNA, 25 bp, Saccharomyces pastorianus
tagagccgccagattcatctcagaa

SEQ ID NO: 107226 - DNA, 25 bp, Saccharomyces pastorianus
tctgctacgttgtcaatggcccatg

SEQ ID NO: 107227 - DNA, 25 bp, Saccharomyces pastorianus
aaagaacggtgctggctctgctacg

SEQ ID NO: 107228 - DNA, 25 bp, Saccharomyces pastorianus
gcccatgctggtgctaaattcgcta

SEQ ID NO: 107229 - DNA, 25 bp, Saccharomyces pastorianus
gactctcccttgttcaaatccgaag

SEQ ID NO: 107230 - DNA, 25 bp, Saccharomyces pastorianus
aattctttgcatctccggtcacttt

SEQ ID NO: 107231 - DNA, 25 bp, Saccharomyces pastorianus
ggtgtgactaccttggactctatta

SEQ ID NO: 107232 - DNA, 25 bp, Saccharomyces pastorianus
gattatttgcggagtttgccgtcat

SEQ ID NO: 107233 - DNA, 25 bp, Saccharomyces pastorianus
gtttgcagagtatcacgactacaat

SEQ ID NO: 107234 - DNA, 25 bp, Saccharomyces pastorianus
gtaattgccatcaggtttaaatgct

SEQ ID NO: 107235 - DNA, 25 bp, Saccharomyces pastorianus
aagagttaagttctcacccgctaga

SEQ ID NO: 107236 - DNA, 25 bp, Saccharomyces pastorianus
ggctgtaaattgcactaccatttgt

SEQ ID NO: 107237 - DNA, 25 bp, Saccharomyces pastorianus
tgctgtgataagtactatgcgtgct

SEQ ID NO: 107238 - DNA, 25 bp, Saccharomyces pastorianus
tgtccactggcatcttccaaaggat

SEQ ID NO: 107239 - DNA, 25 bp, Saccharomyces pastorianus
ttatttgtcccaattgcagatcccc

SEQ ID NO: 107240 - DNA, 25 bp, Saccharomyces pastorianus
aatatgatctccttgacgatgcaaa

SEQ ID NO: 107241 - DNA, 25 bp, Saccharomyces pastorianus
atgaccaatctcgatgtgtccactg

SEQ ID NO: 107242 - DNA, 25 bp, Saccharomyces pastorianus
tactatgcgtgctttgaatgccacc

SEQ ID NO: 107243 - DNA, 25 bp, Saccharomyces pastorianus
gaactgtttccactggagagccgat

SEQ ID NO: 107244 - DNA, 25 bp, Saccharomyces pastorianus
aagctgccccggtataatgtacacg

SEQ ID NO: 107245 - DNA, 25 bp, Saccharomyces pastorianus
atcgtctcttgccttagtgtggaaa

SEQ ID NO: 107246 - DNA, 25 bp, Saccharomyces pastorianus
gaagttgtcactaatgcagccgctg

SEQ ID NO: 107247 - DNA, 25 bp, Saccharomyces pastorianus
tatagggatgccagacaggtcttat

SEQ ID NO: 107248 - DNA, 25 bp, Saccharomyces pastorianus
gtttgtccttatgcaacgctggtaa

SEQ ID NO: 107249 - DNA, 25 bp, Saccharomyces pastorianus
gtaagcgtttgttttcttcaatcag

SEQ ID NO: 107250 - DNA, 25 bp, Saccharomyces pastorianus
ggtatggtgaccttatcatgctgaa

SEQ ID NO: 107251 - DNA, 25 bp, Saccharomyces pastorianus
gagccgataagcattcatccatcat

SEQ ID NO: 107252 - DNA, 25 bp, Saccharomyces pastorianus
aggtgaacgagcgtcgtttgtcctt

SEQ ID NO: 107253 - DNA, 25 bp, Saccharomyces pastorianus
aatttactgttgaatccgtcaccag

SEQ ID NO: 107254 - DNA, 25 bp, Saccharomyces pastorianus
gctgatgcattctctatttatctgg

SEQ ID NO: 107255 - DNA, 25 bp, Saccharomyces pastorianus
ttttcttttgaaccctggaggatgc

SEQ ID NO: 107256 - DNA, 25 bp, Saccharomyces pastorianus
gaagcaagatccagcattttctttt

SEQ ID NO: 107257 - DNA, 25 bp, Saccharomyces pastorianus
agcattttcttttgaaccctggagg

SEQ ID NO: 107258 - DNA, 25 bp, Saccharomyces pastorianus
gatgcattctctatttatctggtat

SEQ ID NO: 107259 - DNA, 25 bp, Saccharomyces pastorianus
cattttcttttgaaccctggaggat

SEQ ID NO: 107260 - DNA, 25 bp, Saccharomyces pastorianus
gatgctgatgcattctctatttatc

SEQ ID NO: 107261 - DNA, 25 bp, Saccharomyces pastorianus
ggaaaagaagcaagatccagcattt

SEQ ID NO: 107262 - DNA, 25 bp, Saccharomyces pastorianus
cttttgaaccctggaggatgctgat

SEQ ID NO: 107263 - DNA, 25 bp, Saccharomyces pastorianus
ggaggatgctgatgcattctctatt

SEQ ID NO: 107264 - DNA, 25 bp, Saccharomyces pastorianus
gaaccctggaggatgctgatgcatt

SEQ ID NO: 107265 - DNA, 25 bp, Saccharomyces pastorianus
gatgataacgtggttgagcgtcatt

SEQ ID NO: 107266 - DNA, 25 bp, Saccharomyces pastorianus
agcctgatccaagggtcattacact

SEQ ID NO: 107267 - DNA, 25 bp, Saccharomyces pastorianus
gagcgtcattttaagcctgatccaa

SEQ ID NO: 107268 - DNA, 25 bp, Saccharomyces pastorianus
atgtcttgtttgctaattgtggcac

SEQ ID NO: 107269 - DNA, 25 bp, Saccharomyces pastorianus
aaagcttacttagcaggaatgtgga

SEQ ID NO: 107270 - DNA, 25 bp, Saccharomyces pastorianus
tgttggaaccctttttctactacat

SEQ ID NO: 107271 - DNA, 25 bp, Saccharomyces pastorianus
attgtggcacgaacaacttctggaa

SEQ ID NO: 107272 - DNA, 25 bp, Saccharomyces pastorianus
ataatgtggacaatagcgagggcga

SEQ ID NO: 107273 - DNA, 25 bp, Saccharomyces pastorianus
aaatatgtgaagttgctgcaagaca

SEQ ID NO: 107274 - DNA, 25 bp, Saccharomyces pastorianus
tactacattgaagacgtcggcggag

SEQ ID NO: 107275 - DNA, 25 bp, Saccharomyces pastorianus
cgagggcgaggaagaaagcttactt

SEQ ID NO: 107276 - DNA, 25 bp, Saccharomyces pastorianus
gtattctacattatctgctgatgag

SEQ ID NO: 107277 - DNA, 25 bp, Saccharomyces pastorianus
aagaacggattcttgccttctctac

SEQ ID NO: 107278 - DNA, 25 bp, Saccharomyces pastorianus
gtctgtcagcaattatacaagccta

SEQ ID NO: 107279 - DNA, 25 bp, Saccharomyces pastorianus
acctgcccttgtagatgtcttgttt

SEQ ID NO: 107280 - DNA, 25 bp, Saccharomyces pastorianus
tgaattggaatacctacctgccctt

SEQ ID NO: 107281 - DNA, 25 bp, Saccharomyces pastorianus
tatggcaagctcgagaagatattcc

SEQ ID NO: 107282 - DNA, 25 bp, Saccharomyces pastorianus
tgaaaattatctccctctataacga

SEQ ID NO: 107283 - DNA, 25 bp, Saccharomyces pastorianus
gccttctctacaagactccgaaaat

SEQ ID NO: 107284 - DNA, 25 bp, Saccharomyces pastorianus
aaggatgatgccgttagccaagaaa

SEQ ID NO: 107285 - DNA, 25 bp, Saccharomyces pastorianus
agatgaatttgtttgttgcgcagag

SEQ ID NO: 107286 - DNA, 25 bp, Saccharomyces pastorianus
aagggcgcaaaagctgttatggcaa

SEQ ID NO: 107287 - DNA, 25 bp, Saccharomyces pastorianus
ggattacatttcaaagcctgccaaa

SEQ ID NO: 107288 - DNA, 25 bp, Saccharomyces pastorianus
ttaaaatatgccaacccggcgtcga

SEQ ID NO: 107289 - DNA, 25 bp, Saccharomyces pastorianus
ggtacgcaattcaacgatcgcactg

SEQ ID NO: 107290 - DNA, 25 bp, Saccharomyces pastorianus
ggttacccaatctgttcgtgttgaa

SEQ ID NO: 107291 - DNA, 25 bp, Saccharomyces pastorianus
tatcgtttgaagtcgtcactcagga

SEQ ID NO: 107292 - DNA, 25 bp, Saccharomyces pastorianus
tgaaaacttggcttccggagccggt

SEQ ID NO: 107293 - DNA, 25 bp, Saccharomyces pastorianus
acccggcgtcgattacagacttaat

SEQ ID NO: 107294 - DNA, 25 bp, Saccharomyces pastorianus
gttgctcttaaattgtcttgatcca

SEQ ID NO: 107295 - DNA, 25 bp, Saccharomyces pastorianus
aagcctgccaaatctggttacccaa

SEQ ID NO: 107296 - DNA, 25 bp, Saccharomyces pastorianus
gatcgcactgttctgtgtacttata

SEQ ID NO: 107297 - DNA, 25 bp, Saccharomyces pastorianus
gaccttggaggcagcaaaacacgca

SEQ ID NO: 107298 - DNA, 25 bp, Saccharomyces pastorianus
gacagtaatcaactcggctgacgat

SEQ ID NO: 107299 - DNA, 25 bp, Saccharomyces pastorianus
accagcgtatgtgtcgaaggcgtta

SEQ ID NO: 107300 - DNA, 25 bp, Saccharomyces pastorianus
gaagaccttcgtgaacatttatttg

SEQ ID NO: 107301 - DNA, 25 bp, Saccharomyces pastorianus
ttgaaaccgagtttgcggataccat

SEQ ID NO: 107302 - DNA, 25 bp, Saccharomyces pastorianus
gttacttcaggctatagaaacccat

SEQ ID NO: 107303 - DNA, 25 bp, Saccharomyces pastorianus
gaaggcgttatctacatgggaggaa

SEQ ID NO: 107304 - DNA, 25 bp, Saccharomyces pastorianus
acatggattctgcaaaggaaccttt

SEQ ID NO: 107305 - DNA, 25 bp, Saccharomyces pastorianus
aacctatttggcgaagaccttcgtg

SEQ ID NO: 107306 - DNA, 25 bp, Saccharomyces pastorianus
ggaacctttgaactctcaacaattt

SEQ ID NO: 107307 - DNA, 25 bp, Saccharomyces pastorianus
tacatttaagaaacttccgcctaca

SEQ ID NO: 107308 - DNA, 25 bp, Saccharomyces pastorianus
aagaccaccgagtcgaatccaagtt

SEQ ID NO: 107309 - DNA, 25 bp, Saccharomyces pastorianus
gaagccagcgtagatcattttgatc

SEQ ID NO: 107310 - DNA, 25 bp, Saccharomyces pastorianus
ataacgttcgtatcctagatagacg

SEQ ID NO: 107311 - DNA, 25 bp, Saccharomyces pastorianus
aaagtctaatgtcagttcaacgtca

SEQ ID NO: 107312 - DNA, 25 bp, Saccharomyces pastorianus
gaatttgacagttttatggactcta

SEQ ID NO: 107313 - DNA, 25 bp, Saccharomyces pastorianus
atgagatcactttcttcgaaactga

SEQ ID NO: 107314 - DNA, 25 bp, Saccharomyces pastorianus
ggagcacttggacattcgatacctt

SEQ ID NO: 107315 - DNA, 25 bp, Saccharomyces pastorianus
actctatagtgcagtcccaacagac

SEQ ID NO: 107316 - DNA, 25 bp, Saccharomyces pastorianus
aaatacgtgacggatatctgggaaa

SEQ ID NO: 107317 - DNA, 25 bp, Saccharomyces pastorianus
ggacattcgataccttcttatacaa

SEQ ID NO: 107318 - DNA, 25 bp, Saccharomyces pastorianus
tcgattcatcagtcatcagattagc

SEQ ID NO: 107319 - DNA, 25 bp, Saccharomyces pastorianus
gaggttctaacgaatttcactggga

SEQ ID NO: 107320 - DNA, 25 bp, Saccharomyces pastorianus
gctagcaggcaaggtttcttcggat

SEQ ID NO: 107321 - DNA, 25 bp, Saccharomyces pastorianus
tgtgcgcatcacatattccatttgt

SEQ ID NO: 107322 - DNA, 25 bp, Saccharomyces pastorianus
gtggtatttcagagcgtcgattcat

SEQ ID NO: 107323 - DNA, 25 bp, Saccharomyces pastorianus
gaccccgattttggtatgtgcgcat

SEQ ID NO: 107324 - DNA, 25 bp, Saccharomyces pastorianus
gtccatggaactctcaaggtacaaa

SEQ ID NO: 107325 - DNA, 25 bp, Saccharomyces pastorianus
aacatgggattttgccgctgtgcac

SEQ ID NO: 107326 - DNA, 25 bp, Saccharomyces pastorianus
attcatacatttctccggcgtggta

SEQ ID NO: 107327 - DNA, 25 bp, Saccharomyces pastorianus
atccgcgacgataaagactggctta

SEQ ID NO: 107328 - DNA, 25 bp, Saccharomyces pastorianus
gaacactattctcctctaaggctag

SEQ ID NO: 107329 - DNA, 25 bp, Saccharomyces pastorianus
gctgtgcacgtttacggtacaccaa

SEQ ID NO: 107330 - DNA, 25 bp, Saccharomyces pastorianus
ggacccataagttcgtaccaacatg

SEQ ID NO: 107331 - DNA, 25 bp, Saccharomyces pastorianus
aacgcagattgttccagatgtcaac

SEQ ID NO: 107332 - DNA, 25 bp, Saccharomyces pastorianus
gaacagcttctgctttcatacgagg

SEQ ID NO: 107333 - DNA, 25 bp, Saccharomyces pastorianus
gaaaggtcgcttgccaaatgattca

SEQ ID NO: 107334 - DNA, 25 bp, Saccharomyces pastorianus
aaacgcttcgtcattgatctggcat

SEQ ID NO: 107335 - DNA, 25 bp, Saccharomyces pastorianus
cggtcatattgcgtgcgacggtgaa

SEQ ID NO: 107336 - DNA, 25 bp, Saccharomyces pastorianus
attgggctggattttacgttactca

SEQ ID NO: 107337 - DNA, 25 bp, Saccharomyces pastorianus
atcaaccgggtttcatcatgccgat

SEQ ID NO: 107338 - DNA, 25 bp, Saccharomyces pastorianus
tgtcaacaagtatcccggtcatatt

SEQ ID NO: 107339 - DNA, 25 bp, Saccharomyces pastorianus
gaaggattcgaccacgtagacaaag

SEQ ID NO: 107340 - DNA, 25 bp, Saccharomyces pastorianus
aacacactgatattgggcccatttc

SEQ ID NO: 107341 - DNA, 25 bp, Saccharomyces pastorianus
gtttgcggaactgcagcctctacaa

SEQ ID NO: 107342 - DNA, 25 bp, Saccharomyces pastorianus
gatgaagacctgatggtagacctca

SEQ ID NO: 107343 - DNA, 25 bp, Saccharomyces pastorianus
aagaggtcaaatgggctcttttctc

SEQ ID NO: 107344 - DNA, 25 bp, Saccharomyces pastorianus
gtcagttacctttacgaatcaagta

SEQ ID NO: 107345 - DNA, 25 bp, Saccharomyces pastorianus
cattccgtcagttacctttacgaat

SEQ ID NO: 107346 - DNA, 25 bp, Saccharomyces pastorianus
aaagctttaagtcaaactcaggaag

SEQ ID NO: 107347 - DNA, 25 bp, Saccharomyces pastorianus
ctcaacacaggatctttaactcccg

SEQ ID NO: 107348 - DNA, 25 bp, Saccharomyces pastorianus
aggcaaaccattccgtcagttacct

SEQ ID NO: 107349 - DNA, 25 bp, Saccharomyces pastorianus
gaatcaagtacttcaaagaggtcaa

SEQ ID NO: 107350 - DNA, 25 bp, Saccharomyces pastorianus
gatggtagacctcaacacaggatct

SEQ ID NO: 107351 - DNA, 25 bp, Saccharomyces pastorianus
ggtagacctcaacacaggatcttta

SEQ ID NO: 107352 - DNA, 25 bp, Saccharomyces pastorianus
cacaggatctttaactcccgttaag

SEQ ID NO: 107353 - DNA, 25 bp, Saccharomyces pastorianus
gtatcctttatgaagtctggtccca

SEQ ID NO: 107354 - DNA, 25 bp, Saccharomyces pastorianus
actagagcaacattacgcagagcat

SEQ ID NO: 107355 - DNA, 25 bp, Saccharomyces pastorianus
cagaaacgtctgtcacggcagtgat

SEQ ID NO: 107356 - DNA, 25 bp, Saccharomyces pastorianus
aagtctggtcccattttggccacgg

SEQ ID NO: 107357 - DNA, 25 bp, Saccharomyces pastorianus
acgcagagcatgttggtaaaccatt

SEQ ID NO: 107358 - DNA, 25 bp, Saccharomyces pastorianus
tttcggtattgacctaggcagaaac

SEQ ID NO: 107359 - DNA, 25 bp, Saccharomyces pastorianus
ggccagtgcaccaggtaccattaga

SEQ ID NO: 107360 - DNA, 25 bp, Saccharomyces pastorianus
agtatctcaaattctgtctcgtttt

SEQ ID NO: 107361 - DNA, 25 bp, Saccharomyces pastorianus
attcttggtgctactaatcctttgg

SEQ ID NO: 107362 - DNA, 25 bp, Saccharomyces pastorianus
tgctactaatcctttggccagtgca

SEQ ID NO: 107363 - DNA, 25 bp, Saccharomyces pastorianus
cggcagtgattctgttgatagcgct

SEQ ID NO: 107364 - DNA, 25 bp, Saccharomyces pastorianus
tcgggtcatctgctgtaactccaat

SEQ ID NO: 107365 - DNA, 25 bp, Saccharomyces pastorianus
gcaaatttctctggagggcctacaa

SEQ ID NO: 107366 - DNA, 25 bp, Saccharomyces pastorianus
gctgattccaccaaacttcaagagg

SEQ ID NO: 107367 - DNA, 25 bp, Saccharomyces pastorianus
attgtacttttctatctgcatccca

SEQ ID NO: 107368 - DNA, 25 bp, Saccharomyces pastorianus
tatttccgggttcatattgtacttt

SEQ ID NO: 107369 - DNA, 25 bp, Saccharomyces pastorianus
acaacagtggctcaatcgggtcatc

SEQ ID NO: 107370 - DNA, 25 bp, Saccharomyces pastorianus
gaacaaaccttcctcaaacagcaag

SEQ ID NO: 107371 - DNA, 25 bp, Saccharomyces pastorianus
attatttttattgctcaccgttgag

SEQ ID NO: 107372 - DNA, 25 bp, Saccharomyces pastorianus
gttggcctgttgtttattgattcat

SEQ ID NO: 107373 - DNA, 25 bp, Saccharomyces pastorianus
aaaggtctcaaatccgtgtttcatt

SEQ ID NO: 107374 - DNA, 25 bp, Saccharomyces pastorianus
tataacgggttgtcttgttggcctg

SEQ ID NO: 107375 - DNA, 25 bp, Saccharomyces pastorianus
aaagacgtcctactctagtgcaaaa

SEQ ID NO: 107376 - DNA, 25 bp, Saccharomyces pastorianus
ggacaatacagggattcgttgacat

SEQ ID NO: 107377 - DNA, 25 bp, Saccharomyces pastorianus
tgtaaccatggtctcatcgctaaac

SEQ ID NO: 107378 - DNA, 25 bp, Saccharomyces pastorianus
gatgcatttccgttcgatgtctatt

SEQ ID NO: 107379 - DNA, 25 bp, Saccharomyces pastorianus
ccatactgggtactattgttctgcc

SEQ ID NO: 107380 - DNA, 25 bp, Saccharomyces pastorianus
tgccaatgaatgtgattacgggtct

SEQ ID NO: 107381 - DNA, 25 bp, Saccharomyces pastorianus
gagcacttctgaagcgtcattcaat

SEQ ID NO: 107382 - DNA, 25 bp, Saccharomyces pastorianus
gtgtatgctagcatgttctgcatat

SEQ ID NO: 107383 - DNA, 25 bp, Saccharomyces pastorianus
aagattgctaggatccaaggctgat

SEQ ID NO: 107384 - DNA, 25 bp, Saccharomyces pastorianus
gaatgttatcgtgcccggacaatac

SEQ ID NO: 107385 - DNA, 25 bp, Saccharomyces pastorianus
ggcgctagcgatgaggatgcatttc

SEQ ID NO: 107386 - DNA, 25 bp, Saccharomyces pastorianus
gcaacgacaacaagctaaagtacct

SEQ ID NO: 107387 - DNA, 25 bp, Saccharomyces pastorianus
taaaagttgcctattctgatctgaa

SEQ ID NO: 107388 - DNA, 25 bp, Saccharomyces pastorianus
gaaaccgagatcaagctagaaagcc

SEQ ID NO: 107389 - DNA, 25 bp, Saccharomyces pastorianus
ggcggtgtagctgatgcgactaaca

SEQ ID NO: 107390 - DNA, 25 bp, Saccharomyces pastorianus
taccaatattgcagccggcggtgta

SEQ ID NO: 107391 - DNA, 25 bp, Saccharomyces pastorianus
cggttatctgactacccctatgaaa

SEQ ID NO: 107392 - DNA, 25 bp, Saccharomyces pastorianus
tcttctgatgtttctgcaagtgcaa

SEQ ID NO: 107393 - DNA, 25 bp, Saccharomyces pastorianus
aagccattcttctgatgtttctgca

SEQ ID NO: 107394 - DNA, 25 bp, Saccharomyces pastorianus
aagtgcaagcgatcataccaatatt

SEQ ID NO: 107395 - DNA, 25 bp, Saccharomyces pastorianus
gatcttttacctcgttataaaacag

SEQ ID NO: 107396 - DNA, 25 bp, Saccharomyces pastorianus
gttatgtggcgtttatttcgttata

SEQ ID NO: 107397 - DNA, 25 bp, Saccharomyces pastorianus
atggtaaggttcctgtccaacctcg

SEQ ID NO: 107398 - DNA, 25 bp, Saccharomyces pastorianus
ggaacgcccttttgcttgtatgttc

SEQ ID NO: 107399 - DNA, 25 bp, Saccharomyces pastorianus
ggcattcagacgcagtgagcacttg

SEQ ID NO: 107400 - DNA, 25 bp, Saccharomyces pastorianus
aattggcgacttctggtgttgataa

SEQ ID NO: 107401 - DNA, 25 bp, Saccharomyces pastorianus
tgttgtcggataatgcctctgctgc

SEQ ID NO: 107402 - DNA, 25 bp, Saccharomyces pastorianus
caaaccctctatgatgttgtcggat

SEQ ID NO: 107403 - DNA, 25 bp, Saccharomyces pastorianus
ttcaacattctcaagtcatctccgg

SEQ ID NO: 107404 - DNA, 25 bp, Saccharomyces pastorianus
atctccggctcaggatcaacagttt

SEQ ID NO: 107405 - DNA, 25 bp, Saccharomyces pastorianus
aaatctattactaccattgacccca

SEQ ID NO: 107406 - DNA, 25 bp, Saccharomyces pastorianus
ttcgacaataacgtagaccccttca

SEQ ID NO: 107407 - DNA, 25 bp, Saccharomyces pastorianus
tgataatatcacacctacaccagct

SEQ ID NO: 107408 - DNA, 25 bp, Saccharomyces pastorianus
ttaagagccgaaattgacatgaagt

SEQ ID NO: 107409 - DNA, 25 bp, Saccharomyces pastorianus
atgatgttgaacttgatgatgtgga

SEQ ID NO: 107410 - DNA, 25 bp, Saccharomyces pastorianus
aagttttgacctggattgcgcgcaa

SEQ ID NO: 107411 - DNA, 25 bp, Saccharomyces pastorianus
ttttcaccagtaaatcaaggagcaa

SEQ ID NO: 107412 - DNA, 25 bp, Saccharomyces pastorianus
attctttgcaggaaagttttgacct

SEQ ID NO: 107413 - DNA, 25 bp, Saccharomyces pastorianus
agactttacaaagaactcgaagagt

SEQ ID NO: 107414 - DNA, 25 bp, Saccharomyces pastorianus
aactcgaagagttccagaatgaaat

SEQ ID NO: 107415 - DNA, 25 bp, Saccharomyces pastorianus
gaaattggtgaattctttgcaggaa

SEQ ID NO: 107416 - DNA, 25 bp, Saccharomyces pastorianus
gcaaagtgtatcacttttcaccagt

SEQ ID NO: 107417 - DNA, 25 bp, Saccharomyces pastorianus
caaattgtactatgatgtcgagaaa

SEQ ID NO: 107418 - DNA, 25 bp, Saccharomyces pastorianus
ggattgcgcgcaaagtgtatcactt

SEQ ID NO: 107419 - DNA, 25 bp, Saccharomyces pastorianus
gaagaaaacatctctacttgtgtca

SEQ ID NO: 107420 - DNA, 25 bp, Saccharomyces pastorianus
aacgctgacaaggaagacttgtaca

SEQ ID NO: 107421 - DNA, 25 bp, Saccharomyces pastorianus
aaaacatctctacttgtgtcaagta

SEQ ID NO: 107422 - DNA, 25 bp, Saccharomyces pastorianus
aaaagaccatgggtgctaagatcac

SEQ ID NO: 107423 - DNA, 25 bp, Saccharomyces pastorianus
gttgcaaggaagaaaagccattgtt

SEQ ID NO: 107424 - DNA, 25 bp, Saccharomyces pastorianus
accaaaagtacaccagagaacaaat

SEQ ID NO: 107425 - DNA, 25 bp, Saccharomyces pastorianus
aagaaaagccattgttcttggtctt

SEQ ID NO: 107426 - DNA, 25 bp, Saccharomyces pastorianus
agagaatggccgctatggaccaatg

SEQ ID NO: 107427 - DNA, 25 bp, Saccharomyces pastorianus
ccagagaacaaattggttgcaagga

SEQ ID NO: 107428 - DNA, 25 bp, Saccharomyces pastorianus
catgggtgctaagatcaccaagtct

SEQ ID NO: 107429 - DNA, 25 bp, Saccharomyces pastorianus
agaatggccgctatggaccaatggt

SEQ ID NO: 107430 - DNA, 25 bp, Saccharomyces pastorianus
actgactgtcaatacgcttacttga

SEQ ID NO: 107431 - DNA, 25 bp, Saccharomyces pastorianus
actacataatgtccccagtcggtaa

SEQ ID NO: 107432 - DNA, 25 bp, Saccharomyces pastorianus
tacaccaagccagaacaagtttaca

SEQ ID NO: 107433 - DNA, 25 bp, Saccharomyces pastorianus
caagtttacaacgtctacaaggctt

SEQ ID NO: 107434 - DNA, 25 bp, Saccharomyces pastorianus
attccacactggtattgacaacggt

SEQ ID NO: 107435 - DNA, 25 bp, Saccharomyces pastorianus
ttgctgctgctttcggtaactgtca

SEQ ID NO: 107436 - DNA, 25 bp, Saccharomyces pastorianus
aatctctccaaacttctccattgct

SEQ ID NO: 107437 - DNA, 25 bp, Saccharomyces pastorianus
acaacggtgttgtcaaggtcaactt

SEQ ID NO: 107438 - DNA, 25 bp, Saccharomyces pastorianus
taactgtcacggtttgtacgctggt

SEQ ID NO: 107439 - DNA, 25 bp, Saccharomyces pastorianus
aggtcaacttggacactgactgtca

SEQ ID NO: 107440 - DNA, 25 bp, Saccharomyces pastorianus
tacgctggtgacatcgctttgagac

SEQ ID NO: 107441 - DNA, 25 bp, Saccharomyces pastorianus
agagagcgactttgtatgccccaat

SEQ ID NO: 107442 - DNA, 25 bp, Saccharomyces pastorianus
aaataacggcggtacgccagtgcca

SEQ ID NO: 107443 - DNA, 25 bp, Saccharomyces pastorianus
ggcaccgctggcttgaacaacaata

SEQ ID NO: 107444 - DNA, 25 bp, Saccharomyces pastorianus
aaggccatttcaaagatcttcctga

SEQ ID NO: 107445 - DNA, 25 bp, Saccharomyces pastorianus
gtggtcttttgaggcagccggtaaa

SEQ ID NO: 107446 - DNA, 25 bp, Saccharomyces pastorianus
gcgatatccttctcgattctttagt

SEQ ID NO: 107447 - DNA, 25 bp, Saccharomyces pastorianus
gattctttagtacccgaccaggaca

SEQ ID NO: 107448 - DNA, 25 bp, Saccharomyces pastorianus
ggaactacacggaagctctaaagat

SEQ ID NO: 107449 - DNA, 25 bp, Saccharomyces pastorianus
ttgatggatccaactggcaccgctg

SEQ ID NO: 107450 - DNA, 25 bp, Saccharomyces pastorianus
aatgtcccttgacaggtggtctttt

SEQ ID NO: 107451 - DNA, 25 bp, Saccharomyces pastorianus
ataccagccttccaacttctgtaaa

SEQ ID NO: 107452 - DNA, 25 bp, Saccharomyces pastorianus
gacaatacccaatctaaattgactg

SEQ ID NO: 107453 - DNA, 25 bp, Saccharomyces pastorianus
aattgactgtgaaaggaaacctgga

SEQ ID NO: 107454 - DNA, 25 bp, Saccharomyces pastorianus
gagatagccaaagtgtaatttcggt

SEQ ID NO: 107455 - DNA, 25 bp, Saccharomyces pastorianus
gcgtcgttagctatgcgtgttttag

SEQ ID NO: 107456 - DNA, 25 bp, Saccharomyces pastorianus
catttgacaaagtggtggctgagac

SEQ ID NO: 107457 - DNA, 25 bp, Saccharomyces pastorianus
tactgttgaggacagccaccgcgac

SEQ ID NO: 107458 - DNA, 25 bp, Saccharomyces pastorianus
ggaaacctggacacatatggatttt

SEQ ID NO: 107459 - DNA, 25 bp, Saccharomyces pastorianus
gtggtggctgagactttaaaagaca

SEQ ID NO: 107460 - DNA, 25 bp, Saccharomyces pastorianus
gcgtgttttagagacatttgacaaa

SEQ ID NO: 107461 - DNA, 25 bp, Saccharomyces pastorianus
ggacacatatggattttgcgatgat

SEQ ID NO: 107462 - DNA, 25 bp, Saccharomyces pastorianus
atgggagaatagaagcgtcgttagc

SEQ ID NO: 107463 - DNA, 25 bp, Saccharomyces pastorianus
ttcagattgaagaaccgcaagactt

SEQ ID NO: 107464 - DNA, 25 bp, Saccharomyces pastorianus
attgggtcacgagtgtctttccgac

SEQ ID NO: 107465 - DNA, 25 bp, Saccharomyces pastorianus
acttctgcgcttgtgtaacgcacat

SEQ ID NO: 107466 - DNA, 25 bp, Saccharomyces pastorianus
tctagctttgatagtgcatacgatc

SEQ ID NO: 107467 - DNA, 25 bp, Saccharomyces pastorianus
caagctgatcttgatgttattcgaa

SEQ ID NO: 107468 - DNA, 25 bp, Saccharomyces pastorianus
tattctgtcacaaaatctacggagt

SEQ ID NO: 107469 - DNA, 25 bp, Saccharomyces pastorianus
gggctgctgcagaagtactgtacca

SEQ ID NO: 107470 - DNA, 25 bp, Saccharomyces pastorianus
ggcgagctatatcttcgtacagtag

SEQ ID NO: 107471 - DNA, 25 bp, Saccharomyces pastorianus
ggtcatcaacgttttatctagcttt

SEQ ID NO: 107472 - DNA, 25 bp, Saccharomyces pastorianus
agattttttcagcacacttctgcgc

SEQ ID NO: 107473 - DNA, 25 bp, Saccharomyces pastorianus
gcacattcagacaatggcgagctat

SEQ ID NO: 107474 - DNA, 25 bp, Saccharomyces pastorianus
aaggtggtgacgatgatgttgaaga

SEQ ID NO: 107475 - DNA, 25 bp, Saccharomyces pastorianus
gacgctaagttagttgatgacgtta

SEQ ID NO: 107476 - DNA, 25 bp, Saccharomyces pastorianus
cgctaagttagttgatgacgttatc

SEQ ID NO: 107477 - DNA, 25 bp, Saccharomyces pastorianus
tgatgcttacgacgctaagttagtt

SEQ ID NO: 107478 - DNA, 25 bp, Saccharomyces pastorianus
gcttacgacgctaagttagttgatg

SEQ ID NO: 107479 - DNA, 25 bp, Saccharomyces pastorianus
tctacaacaaaccgcttttgacaag

SEQ ID NO: 107480 - DNA, 25 bp, Saccharomyces pastorianus
tatggtcaatgtcggaggtgacaac

SEQ ID NO: 107481 - DNA, 25 bp, Saccharomyces pastorianus
taagttagttgatgacgttatctac

SEQ ID NO: 107482 - DNA, 25 bp, Saccharomyces pastorianus
tcaatgtcggaggtgacaacatcga

SEQ ID NO: 107483 - DNA, 25 bp, Saccharomyces pastorianus
ttcctaaattcgaaaagggtgctca

SEQ ID NO: 107484 - DNA, 25 bp, Saccharomyces pastorianus
atgcttacgacgctaagttagttga

SEQ ID NO: 107485 - DNA, 25 bp, Saccharomyces pastorianus
gtgaatccatggacccagatgccat

SEQ ID NO: 107486 - DNA, 25 bp, Saccharomyces pastorianus
atatcggtgctaacccatctgctga

SEQ ID NO: 107487 - DNA, 25 bp, Saccharomyces pastorianus
gaagtccttcttgacctacattaag

SEQ ID NO: 107488 - DNA, 25 bp, Saccharomyces pastorianus
tcttcactggtgaatccatggaccc

SEQ ID NO: 107489 - DNA, 25 bp, Saccharomyces pastorianus
tggtcaacaacgttgtccactcttt

SEQ ID NO: 107490 - DNA, 25 bp, Saccharomyces pastorianus
aattgttgtctgatgcttacgacgc

SEQ ID NO: 107491 - DNA, 25 bp, Saccharomyces pastorianus
gaaggtgctgaaatggtcaacaacg

SEQ ID NO: 107492 - DNA, 25 bp, Saccharomyces pastorianus
gtcatgttgaactaccgtgaagatg

SEQ ID NO: 107493 - DNA, 25 bp, Saccharomyces pastorianus
acatcgatatcggtgctaacccatc

SEQ ID NO: 107494 - DNA, 25 bp, Saccharomyces pastorianus
ggttattggttctttcaaggactgg

SEQ ID NO: 107495 - DNA, 25 bp, Saccharomyces pastorianus
aaggatatcttctctaacgacgaat

SEQ ID NO: 107496 - DNA, 25 bp, Saccharomyces pastorianus
aatggcctcactggcttgactatga

SEQ ID NO: 107497 - DNA, 25 bp, Saccharomyces pastorianus
aatattccacattgttcgacccatg

SEQ ID NO: 107498 - DNA, 25 bp, Saccharomyces pastorianus
gtgtaagaaccactgcatctcaaat

SEQ ID NO: 107499 - DNA, 25 bp, Saccharomyces pastorianus
ggtacaagcgcacccgctgaaatag

SEQ ID NO: 107500 - DNA, 25 bp, Saccharomyces pastorianus
taactgcgcaggcttgactcaagaa

SEQ ID NO: 107501 - DNA, 25 bp, Saccharomyces pastorianus
gttaactttatgagccctgtgacga

SEQ ID NO: 107502 - DNA, 25 bp, Saccharomyces pastorianus
atcgtaaatatttcctccatcctac

SEQ ID NO: 107503 - DNA, 25 bp, Saccharomyces pastorianus
gaacgccgctactacgtaaacttat

SEQ ID NO: 107504 - DNA, 25 bp, Saccharomyces pastorianus
gccggaactcggtggtcaatctgct

SEQ ID NO: 107505 - DNA, 25 bp, Saccharomyces pastorianus
aaggtgttttacgatatctccaggt

SEQ ID NO: 107506 - DNA, 25 bp, Saccharomyces pastorianus
taaagccgcactgtccagatttaca

SEQ ID NO: 107507 - DNA, 25 bp, Saccharomyces pastorianus
aatacggtgtagctggtcaatatcc

SEQ ID NO: 107508 - DNA, 25 bp, Saccharomyces pastorianus
tgcaaaatggccaacctgttaaccc

SEQ ID NO: 107509 - DNA, 25 bp, Saccharomyces pastorianus
gaacactgctgctgctaatttgact

SEQ ID NO: 107510 - DNA, 25 bp, Saccharomyces pastorianus
gtcaaccccaacctgaagttcaaat

SEQ ID NO: 107511 - DNA, 25 bp, Saccharomyces pastorianus
ttgcccagcattctgaagactctca

SEQ ID NO: 107512 - DNA, 25 bp, Saccharomyces pastorianus
acttttaccaacagtcattcccata

SEQ ID NO: 107513 - DNA, 25 bp, Saccharomyces pastorianus
tgctgcccaacaaggtgtaccatat

SEQ ID NO: 107514 - DNA, 25 bp, Saccharomyces pastorianus
ttatggtcaagcaggcgcgaacact

SEQ ID NO: 107515 - DNA, 25 bp, Saccharomyces pastorianus
gtccaaatcaaggtgttgcccagca

SEQ ID NO: 107516 - DNA, 25 bp, Saccharomyces pastorianus
gtcattcccatatggtcaacctcaa

SEQ ID NO: 107517 - DNA, 25 bp, Saccharomyces pastorianus
tacggtggctcattcatgccatact

SEQ ID NO: 107518 - DNA, 25 bp, Saccharomyces pastorianus
atgtgtcaacgcagctctcgtcaag

SEQ ID NO: 107519 - DNA, 25 bp, Saccharomyces pastorianus
gcaaggtattaagcctgctctagac

SEQ ID NO: 107520 - DNA, 25 bp, Saccharomyces pastorianus
atggtacgcttatactacatgtgtc

SEQ ID NO: 107521 - DNA, 25 bp, Saccharomyces pastorianus
tgcactgacctgaagacgaaatacg

SEQ ID NO: 107522 - DNA, 25 bp, Saccharomyces pastorianus
gcgcctgaatgcactgacctgaaga

SEQ ID NO: 107523 - DNA, 25 bp, Saccharomyces pastorianus
agcctgctctagacgaagctaggga

SEQ ID NO: 107524 - DNA, 25 bp, Saccharomyces pastorianus
aacgagtgctcaaaacaatggtacg

SEQ ID NO: 107525 - DNA, 25 bp, Saccharomyces pastorianus
tataatgtcagctagttttgcgcct

SEQ ID NO: 107526 - DNA, 25 bp, Saccharomyces pastorianus
tagttttgcgcctgaatgcactgac

SEQ ID NO: 107527 - DNA, 25 bp, Saccharomyces pastorianus
tactacatgtgtcaacgcagctctc

SEQ ID NO: 107528 - DNA, 25 bp, Saccharomyces pastorianus
aaaatccgttgagaacgagtgctca

SEQ ID NO: 107529 - DNA, 25 bp, Saccharomyces pastorianus
gtcgttatcgccgtcgttattaata

SEQ ID NO: 107530 - DNA, 25 bp, Saccharomyces pastorianus
ttggtacttctttcgtactctcttc

SEQ ID NO: 107531 - DNA, 25 bp, Saccharomyces pastorianus
tggctctccctttatcgaagaaaaa

SEQ ID NO: 107532 - DNA, 25 bp, Saccharomyces pastorianus
tatgttcttcatgagccagttgctt

SEQ ID NO: 107533 - DNA, 25 bp, Saccharomyces pastorianus
caatcggagacggtaccatgctgga

SEQ ID NO: 107534 - DNA, 25 bp, Saccharomyces pastorianus
ttaccctgcgttctgatattcatca

SEQ ID NO: 107535 - DNA, 25 bp, Saccharomyces pastorianus
attattgctgttctcatcgtcgtta

SEQ ID NO: 107536 - DNA, 25 bp, Saccharomyces pastorianus
gaggcgagctctctatattattgct

SEQ ID NO: 107537 - DNA, 25 bp, Saccharomyces pastorianus
gcttccgcattttattgggcacaat

SEQ ID NO: 107538 - DNA, 25 bp, Saccharomyces pastorianus
tcatcgggcccttcgttgttatcat

SEQ ID NO: 107539 - DNA, 25 bp, Saccharomyces pastorianus
aatgatggtcccaggctttggtact

SEQ ID NO: 107540 - DNA, 25 bp, Saccharomyces pastorianus
atatagagagctcgcctctgaagca

SEQ ID NO: 107541 - DNA, 25 bp, Saccharomyces pastorianus
gggagcaaacagaccttacaggcga

SEQ ID NO: 107542 - DNA, 25 bp, Saccharomyces pastorianus
agatactggctcagaggcggtgcct

SEQ ID NO: 107543 - DNA, 25 bp, Saccharomyces pastorianus
gtcaaccgggatgtccattctatgt

SEQ ID NO: 107544 - DNA, 25 bp, Saccharomyces pastorianus
agcagtacgggtctagttccagcat

SEQ ID NO: 107545 - DNA, 25 bp, Saccharomyces pastorianus
agcttcagctgtacatgtcaaccgg

SEQ ID NO: 107546 - DNA, 25 bp, Saccharomyces pastorianus
gaaacttccggactctagcgacgaa

SEQ ID NO: 107547 - DNA, 25 bp, Saccharomyces pastorianus
agcatggtaccgtctccgattgtgc

SEQ ID NO: 107548 - DNA, 25 bp, Saccharomyces pastorianus
gatttcgctacttttgcagcagcag

SEQ ID NO: 107549 - DNA, 25 bp, Saccharomyces pastorianus
agtatagatgatttccacacagcga

SEQ ID NO: 107550 - DNA, 25 bp, Saccharomyces pastorianus
tggtatatttcctacatccgctgaa

SEQ ID NO: 107551 - DNA, 25 bp, Saccharomyces pastorianus
tcgaaaataccaacgttccacggat

SEQ ID NO: 107552 - DNA, 25 bp, Saccharomyces pastorianus
cagtcaatggcgattatggcgttac

SEQ ID NO: 107553 - DNA, 25 bp, Saccharomyces pastorianus
aagagcgacaaagaacctgtttcca

SEQ ID NO: 107554 - DNA, 25 bp, Saccharomyces pastorianus
gcaagcgaagcgtatctggtaggat

SEQ ID NO: 107555 - DNA, 25 bp, Saccharomyces pastorianus
actcctagtgaattagctctgtacg

SEQ ID NO: 107556 - DNA, 25 bp, Saccharomyces pastorianus
ggaacatacaaacctcttggcgctg

SEQ ID NO: 107557 - DNA, 25 bp, Saccharomyces pastorianus
atcaggatttacgttggcagtcaat

SEQ ID NO: 107558 - DNA, 25 bp, Saccharomyces pastorianus
aacctcttggcgctgcatgcaaaaa

SEQ ID NO: 107559 - DNA, 25 bp, Saccharomyces pastorianus
gatcgtgcgttatcgttattgcaga

SEQ ID NO: 107560 - DNA, 25 bp, Saccharomyces pastorianus
actgaagtacctgcaccagtgcgaa

SEQ ID NO: 107561 - DNA, 25 bp, Saccharomyces pastorianus
gaactcattcatatgccttagacag

SEQ ID NO: 107562 - DNA, 25 bp, Saccharomyces pastorianus
tttcgactacggtccttagatcttc

SEQ ID NO: 107563 - DNA, 25 bp, Saccharomyces pastorianus
gaaagcttacctaatttgactgtga

SEQ ID NO: 107564 - DNA, 25 bp, Saccharomyces pastorianus
gtcatcctctcattcgtcattgaaa

SEQ ID NO: 107565 - DNA, 25 bp, Saccharomyces pastorianus
ggactgttggaaagcgcacggttaa

SEQ ID NO: 107566 - DNA, 25 bp, Saccharomyces pastorianus
aaccgagttccccactaatggatag

SEQ ID NO: 107567 - DNA, 25 bp, Saccharomyces pastorianus
gacagaagcgagtcatcctctcatt

SEQ ID NO: 107568 - DNA, 25 bp, Saccharomyces pastorianus
gacaaggtattggtatctgcaacta

SEQ ID NO: 107569 - DNA, 25 bp, Saccharomyces pastorianus
gaaaatcccaacacctatcaaagcc

SEQ ID NO: 107570 - DNA, 25 bp, Saccharomyces pastorianus
ttagatcttcgccagactcgagcga

SEQ ID NO: 107571 - DNA, 25 bp, Saccharomyces pastorianus
gaacccatattaattgctcacagga

SEQ ID NO: 107572 - DNA, 25 bp, Saccharomyces pastorianus
agccattcaggttacggatttctta

SEQ ID NO: 107573 - DNA, 25 bp, Saccharomyces pastorianus
atttagttcgctattttcaccgcag

SEQ ID NO: 107574 - DNA, 25 bp, Saccharomyces pastorianus
tcaagattccgaggcacgtttctgg

SEQ ID NO: 107575 - DNA, 25 bp, Saccharomyces pastorianus
gaggatgcctctacaaatgcgacat

SEQ ID NO: 107576 - DNA, 25 bp, Saccharomyces pastorianus
gaggtgacagaacccatatcatggc

SEQ ID NO: 107577 - DNA, 25 bp, Saccharomyces pastorianus
aaacaaagcaactcctcttgactta

SEQ ID NO: 107578 - DNA, 25 bp, Saccharomyces pastorianus
ttttcttttaactactgcaggctat

SEQ ID NO: 107579 - DNA, 25 bp, Saccharomyces pastorianus
gatatcgcccttaaatggttccaaa

SEQ ID NO: 107580 - DNA, 25 bp, Saccharomyces pastorianus
gtcaaacttacttcgagctcaacta

SEQ ID NO: 107581 - DNA, 25 bp, Saccharomyces pastorianus
tagcgccatatcaccttgcaaagaa

SEQ ID NO: 107582 - DNA, 25 bp, Saccharomyces pastorianus
tgcaggctatctggtagcgccatat

SEQ ID NO: 107583 - DNA, 25 bp, Saccharomyces pastorianus
agtggaaattcttaccgcatctggt

SEQ ID NO: 107584 - DNA, 25 bp, Saccharomyces pastorianus
aactttacgggatcagacctctggc

SEQ ID NO: 107585 - DNA, 25 bp, Saccharomyces pastorianus
atgtccgccttagaagtaatggtca

SEQ ID NO: 107586 - DNA, 25 bp, Saccharomyces pastorianus
gtactaaagcgcaacccacaaattt

SEQ ID NO: 107587 - DNA, 25 bp, Saccharomyces pastorianus
gatggtatcgtgtatgaagctgctt

SEQ ID NO: 107588 - DNA, 25 bp, Saccharomyces pastorianus
tctgcctacctttacaactttacgg

SEQ ID NO: 107589 - DNA, 25 bp, Saccharomyces pastorianus
gagggccttagataaacccgcacca

SEQ ID NO: 107590 - DNA, 25 bp, Saccharomyces pastorianus
atcaaggttttctgttggctggctc

SEQ ID NO: 107591 - DNA, 25 bp, Saccharomyces pastorianus
ttccttcaaagcctattttgcccgt

SEQ ID NO: 107592 - DNA, 25 bp, Saccharomyces pastorianus
gaatggtggttcatctgttggtgat

SEQ ID NO: 107593 - DNA, 25 bp, Saccharomyces pastorianus
attgcggccgcgaaatcatgttctg

SEQ ID NO: 107594 - DNA, 25 bp, Saccharomyces pastorianus
ggttgaatacatctgccattgcggc

SEQ ID NO: 107595 - DNA, 25 bp, Saccharomyces pastorianus
gttacacctggtgccatcactattg

SEQ ID NO: 107596 - DNA, 25 bp, Saccharomyces pastorianus
acgcgcttcctcttttgtttgggct

SEQ ID NO: 107597 - DNA, 25 bp, Saccharomyces pastorianus
tccggcgcttgcaaagtccaaagtt

SEQ ID NO: 107598 - DNA, 25 bp, Saccharomyces pastorianus
ttgttctcacacagatccctgtaca

SEQ ID NO: 107599 - DNA, 25 bp, Saccharomyces pastorianus
tgtacagcgtcttgtaacctgatcc

SEQ ID NO: 107600 - DNA, 25 bp, Saccharomyces pastorianus
actattgccattgccattgctacag

SEQ ID NO: 107601 - DNA, 25 bp, Saccharomyces pastorianus
tgctacagattcaattccggcgctt

SEQ ID NO: 107602 - DNA, 25 bp, Saccharomyces pastorianus
tttctttctcctacttttggcatac

SEQ ID NO: 107603 - DNA, 25 bp, Saccharomyces pastorianus
agcaccttcttctttcacagctaaa

SEQ ID NO: 107604 - DNA, 25 bp, Saccharomyces pastorianus
aagttctggtgtcggtttgttctca

SEQ ID NO: 107605 - DNA, 25 bp, Saccharomyces pastorianus
agaagtccttattacgcacgttgct

SEQ ID NO: 107606 - DNA, 25 bp, Saccharomyces pastorianus
aacttcaatctcatggtacctgctg

SEQ ID NO: 107607 - DNA, 25 bp, Saccharomyces pastorianus
gggatcaggttacaagacgctgtac

SEQ ID NO: 107608 - DNA, 25 bp, Saccharomyces pastorianus
tggtacctgctggaagaactttgtt

SEQ ID NO: 107609 - DNA, 25 bp, Saccharomyces pastorianus
tgaatctccaactcctaaaaccgta

SEQ ID NO: 107610 - DNA, 25 bp, Saccharomyces pastorianus
gccttttaacgttgctgatgtggaa

SEQ ID NO: 107611 - DNA, 25 bp, Saccharomyces pastorianus
ttatgttatgatacacttgctgtgg

SEQ ID NO: 107612 - DNA, 25 bp, Saccharomyces pastorianus
aaacaaaagaggaagcgcgtcaggc

SEQ ID NO: 107613 - DNA, 25 bp, Saccharomyces pastorianus
agacgctgtacagggatctgtgtga

SEQ ID NO: 107614 - DNA, 25 bp, Saccharomyces pastorianus
gttttggtgtgcttcttagtggaca

SEQ ID NO: 107615 - DNA, 25 bp, Saccharomyces pastorianus
tgagaacaaaccgacaccagaactt

SEQ ID NO: 107616 - DNA, 25 bp, Saccharomyces pastorianus
ggactaggccttttaacgttgctga

SEQ ID NO: 107617 - DNA, 25 bp, Saccharomyces pastorianus
gggtactgtcatcatcgtttgctcc

SEQ ID NO: 107618 - DNA, 25 bp, Saccharomyces pastorianus
tgttccgatttgttgctggttaaat

SEQ ID NO: 107619 - DNA, 25 bp, Saccharomyces pastorianus
tggttaaatcagatctattccgtct

SEQ ID NO: 107620 - DNA, 25 bp, Saccharomyces pastorianus
tattccgtctggaacacggttcttt

SEQ ID NO: 107621 - DNA, 25 bp, Saccharomyces pastorianus
ggcattttgatagtgctcacggtgt

SEQ ID NO: 107622 - DNA, 25 bp, Saccharomyces pastorianus
tgaagttagacccatcccgttttgg

SEQ ID NO: 107623 - DNA, 25 bp, Saccharomyces pastorianus
gtggtgctgctatcaggcattttga

SEQ ID NO: 107624 - DNA, 25 bp, Saccharomyces pastorianus
taaaatcgatattccaaacggctcc

SEQ ID NO: 107625 - DNA, 25 bp, Saccharomyces pastorianus
gagctagatcatttgaccatcactg

SEQ ID NO: 107626 - DNA, 25 bp, Saccharomyces pastorianus
accatcactggtaacgtctttttag

SEQ ID NO: 107627 - DNA, 25 bp, Saccharomyces pastorianus
atcgtttgctccgacggtcataaaa

SEQ ID NO: 107628 - DNA, 25 bp, Saccharomyces pastorianus
gaagccgttcctgccgatttaatga

SEQ ID NO: 107629 - DNA, 25 bp, Saccharomyces pastorianus
tagaccaatcattttcccattatcc

SEQ ID NO: 107630 - DNA, 25 bp, Saccharomyces pastorianus
aaacccacgtgtttggttggctgct

SEQ ID NO: 107631 - DNA, 25 bp, Saccharomyces pastorianus
gggaaccgcccgtatcgagcaagaa

SEQ ID NO: 107632 - DNA, 25 bp, Saccharomyces pastorianus
ttaggtgccgtactatcgcgtgcca

SEQ ID NO: 107633 - DNA, 25 bp, Saccharomyces pastorianus
aacaacgctcttgtagctaccggat

SEQ ID NO: 107634 - DNA, 25 bp, Saccharomyces pastorianus
agacaagatgatctccgctgcagtg

SEQ ID NO: 107635 - DNA, 25 bp, Saccharomyces pastorianus
caacaattgttactctttcccaggt

SEQ ID NO: 107636 - DNA, 25 bp, Saccharomyces pastorianus
tagctaccgctgtgatcttgcaagc

SEQ ID NO: 107637 - DNA, 25 bp, Saccharomyces pastorianus
ggcgaaactgtcaaggttcctcgtg

SEQ ID NO: 107638 - DNA, 25 bp, Saccharomyces pastorianus
acaagcaggcgcatttactcaagat

SEQ ID NO: 107639 - DNA, 25 bp, Saccharomyces pastorianus
tactagagctgcaaagtcaacccac

SEQ ID NO: 107640 - DNA, 25 bp, Saccharomyces pastorianus
tacgttaagcaatataagccggtca

SEQ ID NO: 107641 - DNA, 25 bp, Saccharomyces pastorianus
gtcaacccaccgaagtagatttcag

SEQ ID NO: 107642 - DNA, 25 bp, Saccharomyces pastorianus
aagccggtcaaaatcgatgcctcca

SEQ ID NO: 107643 - DNA, 25 bp, Saccharomyces pastorianus
gacctggcaaagatcaaacctgaaa

SEQ ID NO: 107644 - DNA, 25 bp, Saccharomyces pastorianus
gaattaactgttgacgacctggcaa

SEQ ID NO: 107645 - DNA, 25 bp, Saccharomyces pastorianus
caatctgcaagacctttcgatgaat

SEQ ID NO: 107646 - DNA, 25 bp, Saccharomyces pastorianus
ggtcgactgccactcaattatcgag

SEQ ID NO: 107647 - DNA, 25 bp, Saccharomyces pastorianus
cgatgaggcacgtagacaattacta

SEQ ID NO: 107648 - DNA, 25 bp, Saccharomyces pastorianus
ggagacagaatccttagtttccaag

SEQ ID NO: 107649 - DNA, 25 bp, Saccharomyces pastorianus
tcgatgcctccaaacaattacaagt

SEQ ID NO: 107650 - DNA, 25 bp, Saccharomyces pastorianus
gcatacttccggaaagcgcgaaacc

SEQ ID NO: 107651 - DNA, 25 bp, Saccharomyces pastorianus
aaagatggcgatcgcattgaccctt

SEQ ID NO: 107652 - DNA, 25 bp, Saccharomyces pastorianus
taacgtcaacaactcggaaccttct

SEQ ID NO: 107653 - DNA, 25 bp, Saccharomyces pastorianus
ttgatatcataactgcgagcttgga

SEQ ID NO: 107654 - DNA, 25 bp, Saccharomyces pastorianus
gcgcgaaaccaacgctgactgatta

SEQ ID NO: 107655 - DNA, 25 bp, Saccharomyces pastorianus
ttgacccttcaattatagactgtga

SEQ ID NO: 107656 - DNA, 25 bp, Saccharomyces pastorianus
gaacattgttagcatacttccggaa

SEQ ID NO: 107657 - DNA, 25 bp, Saccharomyces pastorianus
ggcaaatttggatttccacggcata

SEQ ID NO: 107658 - DNA, 25 bp, Saccharomyces pastorianus
aaccacgctaactgaaaagggctct

SEQ ID NO: 107659 - DNA, 25 bp, Saccharomyces pastorianus
actatggatccaactgcagctgctg

SEQ ID NO: 107660 - DNA, 25 bp, Saccharomyces pastorianus
aaaagggctctcaggtgatggaaaa

SEQ ID NO: 107661 - DNA, 25 bp, Saccharomyces pastorianus
gagcaatttctcttcgcaggaagtg

SEQ ID NO: 107662 - DNA, 25 bp, Saccharomyces pastorianus
acggctgttcgttattccctggaag

SEQ ID NO: 107663 - DNA, 25 bp, Saccharomyces pastorianus
acctggctacagtatttcttttcta

SEQ ID NO: 107664 - DNA, 25 bp, Saccharomyces pastorianus
tgaagtccctaacactagcgccgaa

SEQ ID NO: 107665 - DNA, 25 bp, Saccharomyces pastorianus
ttctgagacgtgtaccaatacctgg

SEQ ID NO: 107666 - DNA, 25 bp, Saccharomyces pastorianus
aaactgtttttgaatgccagagcaa

SEQ ID NO: 107667 - DNA, 25 bp, Saccharomyces pastorianus
tggagaggcacaacagaccggaagt

SEQ ID NO: 107668 - DNA, 25 bp, Saccharomyces pastorianus
gaagcattctacattctgagacgtg

SEQ ID NO: 107669 - DNA, 25 bp, Saccharomyces pastorianus
tccctggaagctgcgttgactttga

SEQ ID NO: 107670 - DNA, 25 bp, Saccharomyces pastorianus
agcccagtgtaaactcggtgcgtat

SEQ ID NO: 107671 - DNA, 25 bp, Saccharomyces pastorianus
ttacgtccgtatctaacggctgttc

SEQ ID NO: 107672 - DNA, 25 bp, Saccharomyces pastorianus
ataccgaatacgtccaagttgaggt

SEQ ID NO: 107673 - DNA, 25 bp, Saccharomyces pastorianus
atatggtatgttcgtccgatccaca

SEQ ID NO: 107674 - DNA, 25 bp, Saccharomyces pastorianus
gtaccagaactatgtcttcgaggca

SEQ ID NO: 107675 - DNA, 25 bp, Saccharomyces pastorianus
cacagttcggacaggtgtttgaatt

SEQ ID NO: 107676 - DNA, 25 bp, Saccharomyces pastorianus
gcagattcattcctccattgtttgt

SEQ ID NO: 107677 - DNA, 25 bp, Saccharomyces pastorianus
gttctacaaaactggtcgagttcat

SEQ ID NO: 107678 - DNA, 25 bp, Saccharomyces pastorianus
gatgacttcatattggtgcattcca

SEQ ID NO: 107679 - DNA, 25 bp, Saccharomyces pastorianus
agagaagagacaccgaccagttcaa

SEQ ID NO: 107680 - DNA, 25 bp, Saccharomyces pastorianus
aaaatactttcaacctcaatactag

SEQ ID NO: 107681 - DNA, 25 bp, Saccharomyces pastorianus
gaacagattcttttctctaacttgg

SEQ ID NO: 107682 - DNA, 25 bp, Saccharomyces pastorianus
gtcttcgaggcatattttagaccca

SEQ ID NO: 107683 - DNA, 25 bp, Saccharomyces pastorianus
ggtgtcggcctactatgacaacgat

SEQ ID NO: 107684 - DNA, 25 bp, Saccharomyces pastorianus
tatagatacgtctgggtcctacatc

SEQ ID NO: 107685 - DNA, 25 bp, Saccharomyces pastorianus
gaacacgaaagcaccactaacattt

SEQ ID NO: 107686 - DNA, 25 bp, Saccharomyces pastorianus
ttgacagtccatatttagtttgcac

SEQ ID NO: 107687 - DNA, 25 bp, Saccharomyces pastorianus
acgtggtggtcaaattccagctgag

SEQ ID NO: 107688 - DNA, 25 bp, Saccharomyces pastorianus
gggtcctacatcttgacgacgtaag

SEQ ID NO: 107689 - DNA, 25 bp, Saccharomyces pastorianus
agggcattgtctactcacgtggtgg

SEQ ID NO: 107690 - DNA, 25 bp, Saccharomyces pastorianus
tagcggtgtcactggtttattgttc

SEQ ID NO: 107691 - DNA, 25 bp, Saccharomyces pastorianus
taacatttacaattcctgagggcat

SEQ ID NO: 107692 - DNA, 25 bp, Saccharomyces pastorianus
tactttaagtcatacgttcgttcag

SEQ ID NO: 107693 - DNA, 25 bp, Saccharomyces pastorianus
gaattcaaagtcaaggtgtcggcct

SEQ ID NO: 107694 - DNA, 25 bp, Saccharomyces pastorianus
atttggactctggattggcattttt

SEQ ID NO: 107695 - DNA, 25 bp, Saccharomyces pastorianus
tttgctatctttgttgttgcgtgga

SEQ ID NO: 107696 - DNA, 25 bp, Saccharomyces pastorianus
gggactgccaatctatatcacaatg

SEQ ID NO: 107697 - DNA, 25 bp, Saccharomyces pastorianus
tccagatttcactaatcccttctta

SEQ ID NO: 107698 - DNA, 25 bp, Saccharomyces pastorianus
ttgggctcaacaagcctgcattctt

SEQ ID NO: 107699 - DNA, 25 bp, Saccharomyces pastorianus
gtgaatctttattggctgttcctta

SEQ ID NO: 107700 - DNA, 25 bp, Saccharomyces pastorianus
gttgcgtggatttatttgcgtcatt

SEQ ID NO: 107701 - DNA, 25 bp, Saccharomyces pastorianus
gttttaacgcaatttcgcacggaag

SEQ ID NO: 107702 - DNA, 25 bp, Saccharomyces pastorianus
atgtcttgaattttgccactcagca

SEQ ID NO: 107703 - DNA, 25 bp, Saccharomyces pastorianus
ggtattctatttgggtcaagctgca

SEQ ID NO: 107704 - DNA, 25 bp, Saccharomyces pastorianus
gatttggtcttcctacgtatttcat

SEQ ID NO: 107705 - DNA, 25 bp, Saccharomyces pastorianus
aaggaaatttcttgctctagagcta

SEQ ID NO: 107706 - DNA, 25 bp, Saccharomyces pastorianus
gtatcccggcttaggacttgagttt

SEQ ID NO: 107707 - DNA, 25 bp, Saccharomyces pastorianus
atatcgttccatcgaagggcggtga

SEQ ID NO: 107708 - DNA, 25 bp, Saccharomyces pastorianus
gtaagacaacttttgccgacgttgt

SEQ ID NO: 107709 - DNA, 25 bp, Saccharomyces pastorianus
ttcgaaagaacccagcccaagtaca

SEQ ID NO: 107710 - DNA, 25 bp, Saccharomyces pastorianus
taaactgcgcatttttgtatcccgg

SEQ ID NO: 107711 - DNA, 25 bp, Saccharomyces pastorianus
ccactgctgcaccatatcttaagga

SEQ ID NO: 107712 - DNA, 25 bp, Saccharomyces pastorianus
gaacagactcatgccatttcgaaag

SEQ ID NO: 107713 - DNA, 25 bp, Saccharomyces pastorianus
gtagaagggcgcttacctacaacca

SEQ ID NO: 107714 - DNA, 25 bp, Saccharomyces pastorianus
gacgttgtagactccctggaaaaca

SEQ ID NO: 107715 - DNA, 25 bp, Saccharomyces pastorianus
gtataccaattatttccttcgaatg

SEQ ID NO: 107716 - DNA, 25 bp, Saccharomyces pastorianus
tttcggtgcttttccttcactgcat

SEQ ID NO: 107717 - DNA, 25 bp, Saccharomyces pastorianus
ggttctgtgctgtcatacgttattt

SEQ ID NO: 107718 - DNA, 25 bp, Saccharomyces pastorianus
actgcattccgggtgtgctactatg

SEQ ID NO: 107719 - DNA, 25 bp, Saccharomyces pastorianus
tgatgaacccagtgtaagcccttcg

SEQ ID NO: 107720 - DNA, 25 bp, Saccharomyces pastorianus
actatgatatgcatggctcgcctgg

SEQ ID NO: 107721 - DNA, 25 bp, Saccharomyces pastorianus
gtgatccattggctgcagattcaaa

SEQ ID NO: 107722 - DNA, 25 bp, Saccharomyces pastorianus
actacagctttttcaaattcctccg

SEQ ID NO: 107723 - DNA, 25 bp, Saccharomyces pastorianus
gtgtgctactatggaagccctgttt

SEQ ID NO: 107724 - DNA, 25 bp, Saccharomyces pastorianus
atgcaaaatgtctttccagccgctc

SEQ ID NO: 107725 - DNA, 25 bp, Saccharomyces pastorianus
aaattcctccgtcattttcggtgct

SEQ ID NO: 107726 - DNA, 25 bp, Saccharomyces pastorianus
ctcgcctggtggattagctagaatt

SEQ ID NO: 107727 - DNA, 25 bp, Saccharomyces pastorianus
tgctttatgagctgatcggacttgt

SEQ ID NO: 107728 - DNA, 25 bp, Saccharomyces pastorianus
aagaattgtcttccacaatcgggaa

SEQ ID NO: 107729 - DNA, 25 bp, Saccharomyces pastorianus
gacattgtacccatgggcataaggt

SEQ ID NO: 107730 - DNA, 25 bp, Saccharomyces pastorianus
aagcagctggatagagcctcatcgt

SEQ ID NO: 107731 - DNA, 25 bp, Saccharomyces pastorianus
gatcggacttgttcgcataaccaac

SEQ ID NO: 107732 - DNA, 25 bp, Saccharomyces pastorianus
tttaaagaaagatccccgtgtcata

SEQ ID NO: 107733 - DNA, 25 bp, Saccharomyces pastorianus
gctgcggtacagtctgaaattctaa

SEQ ID NO: 107734 - DNA, 25 bp, Saccharomyces pastorianus
cctcatcgttacaccgttctttggg

SEQ ID NO: 107735 - DNA, 25 bp, Saccharomyces pastorianus
ataaccaactccaatgcgccaaagt

SEQ ID NO: 107736 - DNA, 25 bp, Saccharomyces pastorianus
gtttgattcatcagctgcggtacag

SEQ ID NO: 107737 - DNA, 25 bp, Saccharomyces pastorianus
ccgtgtcataagatcatccatcgtt

SEQ ID NO: 107738 - DNA, 25 bp, Saccharomyces pastorianus
gagctacatttgagaaccgaccaga

SEQ ID NO: 107739 - DNA, 25 bp, Saccharomyces pastorianus
ttctgccccatatgaagcgccaaaa

SEQ ID NO: 107740 - DNA, 25 bp, Saccharomyces pastorianus
tgaagcgccaaaagctccagagcta

SEQ ID NO: 107741 - DNA, 25 bp, Saccharomyces pastorianus
ttacttacgacgaacgcaaggcatt

SEQ ID NO: 107742 - DNA, 25 bp, Saccharomyces pastorianus
gtaaaagtacaatcgcctgtgcgct

SEQ ID NO: 107743 - DNA, 25 bp, Saccharomyces pastorianus
atttcaatcacctcatttatctctc

SEQ ID NO: 107744 - DNA, 25 bp, Saccharomyces pastorianus
gattggatggtgacaacattcgttt

SEQ ID NO: 107745 - DNA, 25 bp, Saccharomyces pastorianus
tgtgcgctagaacagttactgctcc

SEQ ID NO: 107746 - DNA, 25 bp, Saccharomyces pastorianus
gagatagagctcgtgaactacataa

SEQ ID NO: 107747 - DNA, 25 bp, Saccharomyces pastorianus
gagtttacaggtatttctgccccat

SEQ ID NO: 107748 - DNA, 25 bp, Saccharomyces pastorianus
ttgctgattcatgtgctatttcaat

SEQ ID NO: 107749 - DNA, 25 bp, Saccharomyces pastorianus
atctgtgtctcctgcaaattacgaa

SEQ ID NO: 107750 - DNA, 25 bp, Saccharomyces pastorianus
acagcctgcggatgcatttactcag

SEQ ID NO: 107751 - DNA, 25 bp, Saccharomyces pastorianus
atggactctgtcttattgacttgga

SEQ ID NO: 107752 - DNA, 25 bp, Saccharomyces pastorianus
gaacgtatgctgcagattggcctcc

SEQ ID NO: 107753 - DNA, 25 bp, Saccharomyces pastorianus
gtgaattttgcacattttggctata

SEQ ID NO: 107754 - DNA, 25 bp, Saccharomyces pastorianus
ggattgttcctcatggagcgcatta

SEQ ID NO: 107755 - DNA, 25 bp, Saccharomyces pastorianus
gaattttcaagtacagcctgcggat

SEQ ID NO: 107756 - DNA, 25 bp, Saccharomyces pastorianus
caagctcttttaatgttccgttcaa

SEQ ID NO: 107757 - DNA, 25 bp, Saccharomyces pastorianus
tctggatcccaacatttctctaatt

SEQ ID NO: 107758 - DNA, 25 bp, Saccharomyces pastorianus
gtatttcattcttctggatcccaac

SEQ ID NO: 107759 - DNA, 25 bp, Saccharomyces pastorianus
ttcaaacgatctcctaacttctgtg

SEQ ID NO: 107760 - DNA, 25 bp, Saccharomyces pastorianus
gatttcaggttaaccattactgcca

SEQ ID NO: 107761 - DNA, 25 bp, Saccharomyces pastorianus
ttaaccattactgccaatcaacctt

SEQ ID NO: 107762 - DNA, 25 bp, Saccharomyces pastorianus
aatcaaccttcaattactctccctt

SEQ ID NO: 107763 - DNA, 25 bp, Saccharomyces pastorianus
tactctcccttactacgtagacgaa

SEQ ID NO: 107764 - DNA, 25 bp, Saccharomyces pastorianus
tttccaagaagcacatacatatttt

SEQ ID NO: 107765 - DNA, 25 bp, Saccharomyces pastorianus
gattatcatgatttcaggttaacca

SEQ ID NO: 107766 - DNA, 25 bp, Saccharomyces pastorianus
aagcccattccatagaactaattat

SEQ ID NO: 107767 - DNA, 25 bp, Saccharomyces pastorianus
acaacatttttatctcttttccaag

SEQ ID NO: 107768 - DNA, 25 bp, Saccharomyces pastorianus
atgcaatcttctcttcccctttgca

SEQ ID NO: 107769 - DNA, 25 bp, Saccharomyces pastorianus
gtagacgaaaaagcccattccatag

SEQ ID NO: 107770 - DNA, 25 bp, Saccharomyces pastorianus
ctcttcccctttgcagagaattttt

SEQ ID NO: 107771 - DNA, 25 bp, Saccharomyces pastorianus
actttaagcacacccttgcagttta

SEQ ID NO: 107772 - DNA, 25 bp, Saccharomyces pastorianus
agaccaggacgtccaattctctgat

SEQ ID NO: 107773 - DNA, 25 bp, Saccharomyces pastorianus
ctctcaatcctcttccaataacaaa

SEQ ID NO: 107774 - DNA, 25 bp, Saccharomyces pastorianus
gccaacgatcctaaactcgcttata

SEQ ID NO: 107775 - DNA, 25 bp, Saccharomyces pastorianus
agaaggcactaacgaggcttcctct

SEQ ID NO: 107776 - DNA, 25 bp, Saccharomyces pastorianus
aaaattttgccatctgccaacgatc

SEQ ID NO: 107777 - DNA, 25 bp, Saccharomyces pastorianus
ctctgcgccattcaatcagtggtta

SEQ ID NO: 107778 - DNA, 25 bp, Saccharomyces pastorianus
ctaaatctggctatctaattcctga

SEQ ID NO: 107779 - DNA, 25 bp, Saccharomyces pastorianus
gagttgaagcttgcggtctcctctg

SEQ ID NO: 107780 - DNA, 25 bp, Saccharomyces pastorianus
atgctatccacccattttctgataa

SEQ ID NO: 107781 - DNA, 25 bp, Saccharomyces pastorianus
gataattacgcgtcaccaaacatat

SEQ ID NO: 107782 - DNA, 25 bp, Saccharomyces pastorianus
ggatttatgtcaagaaacgcctagc

SEQ ID NO: 107783 - DNA, 25 bp, Saccharomyces pastorianus
tgcttttttatctcaatcaatcact

SEQ ID NO: 107784 - DNA, 25 bp, Saccharomyces pastorianus
gacgaaattctctctaagcaaaata

SEQ ID NO: 107785 - DNA, 25 bp, Saccharomyces pastorianus
gaaagatacaagtcattggcaccaa

SEQ ID NO: 107786 - DNA, 25 bp, Saccharomyces pastorianus
gacattacgcaggaagattcactac

SEQ ID NO: 107787 - DNA, 25 bp, Saccharomyces pastorianus
aggtaggcgacgacgacttggttat

SEQ ID NO: 107788 - DNA, 25 bp, Saccharomyces pastorianus
gaaacgcctagcactgagacaagcc

SEQ ID NO: 107789 - DNA, 25 bp, Saccharomyces pastorianus
acaagggttgctgttccgagaagtt

SEQ ID NO: 107790 - DNA, 25 bp, Saccharomyces pastorianus
aatcggtggaggcaataacggacaa

SEQ ID NO: 107791 - DNA, 25 bp, Saccharomyces pastorianus
gagacaagcccagattcaaacgaag

SEQ ID NO: 107792 - DNA, 25 bp, Saccharomyces pastorianus
caatcactattcacccaaacgatgg

SEQ ID NO: 107793 - DNA, 25 bp, Saccharomyces pastorianus
aaatggccagctttttgtatcgaga

SEQ ID NO: 107794 - DNA, 25 bp, Saccharomyces pastorianus
acgatcgactataccgcccaagaat

SEQ ID NO: 107795 - DNA, 25 bp, Saccharomyces pastorianus
gggaaccagctatatactttacttg

SEQ ID NO: 107796 - DNA, 25 bp, Saccharomyces pastorianus
tcctttggattttacacgtcgtacg

SEQ ID NO: 107797 - DNA, 25 bp, Saccharomyces pastorianus
agaagatgcattgcgtgggcccacg

SEQ ID NO: 107798 - DNA, 25 bp, Saccharomyces pastorianus
gactcttattgtcgatagcgcggtt

SEQ ID NO: 107799 - DNA, 25 bp, Saccharomyces pastorianus
gttcgtatgtttccattgtcttcag

SEQ ID NO: 107800 - DNA, 25 bp, Saccharomyces pastorianus
aaatctcgtgggtacctattcagtg

SEQ ID NO: 107801 - DNA, 25 bp, Saccharomyces pastorianus
aagggcatacccgtgactcttattg

SEQ ID NO: 107802 - DNA, 25 bp, Saccharomyces pastorianus
ttcagatgatctacctatggccggc

SEQ ID NO: 107803 - DNA, 25 bp, Saccharomyces pastorianus
gaaaaccattctatgtggtcactga

SEQ ID NO: 107804 - DNA, 25 bp, Saccharomyces pastorianus
ttaatcatcctactgtgcctatact

SEQ ID NO: 107805 - DNA, 25 bp, Saccharomyces pastorianus
atacaaccagttgccattcttgaaa

SEQ ID NO: 107806 - DNA, 25 bp, Saccharomyces pastorianus
gcttattgtttcgacgttcattgta

SEQ ID NO: 107807 - DNA, 25 bp, Saccharomyces pastorianus
aactggatttccttactcattggta

SEQ ID NO: 107808 - DNA, 25 bp, Saccharomyces pastorianus
gtttttactactgcccataattaat

SEQ ID NO: 107809 - DNA, 25 bp, Saccharomyces pastorianus
cactcagttctattatttggtcgat

SEQ ID NO: 107810 - DNA, 25 bp, Saccharomyces pastorianus
aatagccttaatttcactcagttct

SEQ ID NO: 107811 - DNA, 25 bp, Saccharomyces pastorianus
gtgcctatacttcattcagttttta

SEQ ID NO: 107812 - DNA, 25 bp, Saccharomyces pastorianus
cttcctttttcatcttccaaatagc

SEQ ID NO: 107813 - DNA, 25 bp, Saccharomyces pastorianus
aatcagtttatttggcatcgactta

SEQ ID NO: 107814 - DNA, 25 bp, Saccharomyces pastorianus
gtgggcgagagatgatccttccttt

SEQ ID NO: 107815 - DNA, 25 bp, Saccharomyces pastorianus
tgtttgtgtcttttgttcaacccaa

SEQ ID NO: 107816 - DNA, 25 bp, Saccharomyces pastorianus
cagcgtcagcttgaatttggatgcg

SEQ ID NO: 107817 - DNA, 25 bp, Saccharomyces pastorianus
tactgttttttcgattttctcttgg

SEQ ID NO: 107818 - DNA, 25 bp, Saccharomyces pastorianus
ataacgagtttccaccttatcgctt

SEQ ID NO: 107819 - DNA, 25 bp, Saccharomyces pastorianus
gttcaacccaaagggctgtagcaat

SEQ ID NO: 107820 - DNA, 25 bp, Saccharomyces pastorianus
atatatatacatccagcgtcagctt

SEQ ID NO: 107821 - DNA, 25 bp, Saccharomyces pastorianus
ttatctcgctgcatcgtggcggcat

SEQ ID NO: 107822 - DNA, 25 bp, Saccharomyces pastorianus
ggcatccctggactgtaatcagcaa

SEQ ID NO: 107823 - DNA, 25 bp, Saccharomyces pastorianus
tttggatgcgttcacagttactgtt

SEQ ID NO: 107824 - DNA, 25 bp, Saccharomyces pastorianus
tagaaaccgatcctgggcttatctc

SEQ ID NO: 107825 - DNA, 25 bp, Saccharomyces pastorianus
gcgtattcatcgttatgtttgtgtc

SEQ ID NO: 107826 - DNA, 25 bp, Saccharomyces pastorianus
gcttccatcgatttacttgccaagg

SEQ ID NO: 107827 - DNA, 25 bp, Saccharomyces pastorianus
aacttggtagaacttccctatacag

SEQ ID NO: 107828 - DNA, 25 bp, Saccharomyces pastorianus
tgaagatacctaatgagccctcgcc

SEQ ID NO: 107829 - DNA, 25 bp, Saccharomyces pastorianus
gacttttctgaaactgttgttacgc

SEQ ID NO: 107830 - DNA, 25 bp, Saccharomyces pastorianus
gaacctattcgccatgctagttgaa

SEQ ID NO: 107831 - DNA, 25 bp, Saccharomyces pastorianus
ttgcccaagcaggactactagagta

SEQ ID NO: 107832 - DNA, 25 bp, Saccharomyces pastorianus
ataacggagttatgattgcccaagc

SEQ ID NO: 107833 - DNA, 25 bp, Saccharomyces pastorianus
gagtggtatattggcttccatcgat

SEQ ID NO: 107834 - DNA, 25 bp, Saccharomyces pastorianus
gaaacgcttgatattgctatcggta

SEQ ID NO: 107835 - DNA, 25 bp, Saccharomyces pastorianus
gagctatggctcacgttaactccaa

SEQ ID NO: 107836 - DNA, 25 bp, Saccharomyces pastorianus
taccgtatctttggtgaaacgcttg

SEQ ID NO: 107837 - DNA, 25 bp, Saccharomyces pastorianus
gtcgacggcttgctgtacaattgga

SEQ ID NO: 107838 - DNA, 25 bp, Saccharomyces pastorianus
taaagccattgtatccaccgggttg

SEQ ID NO: 107839 - DNA, 25 bp, Saccharomyces pastorianus
gttgtcttcaacgaccagaggtatg

SEQ ID NO: 107840 - DNA, 25 bp, Saccharomyces pastorianus
gaaatcacattccaacacgccaggg

SEQ ID NO: 107841 - DNA, 25 bp, Saccharomyces pastorianus
atcgaaggagatcggctcttccggt

SEQ ID NO: 107842 - DNA, 25 bp, Saccharomyces pastorianus
aacgcttcaccactgtctatgaaaa

SEQ ID NO: 107843 - DNA, 25 bp, Saccharomyces pastorianus
acgtcgccaacatttctaatactct

SEQ ID NO: 107844 - DNA, 25 bp, Saccharomyces pastorianus
aaggtcactgatgcttcttctttgc

SEQ ID NO: 107845 - DNA, 25 bp, Saccharomyces pastorianus
agggagttcctgatcaagccattgc

SEQ ID NO: 107846 - DNA, 25 bp, Saccharomyces pastorianus
atctgaaagcgtccctaaagccatt

SEQ ID NO: 107847 - DNA, 25 bp, Saccharomyces pastorianus
attgcacttgcaaggttctaccgca

SEQ ID NO: 107848 - DNA, 25 bp, Saccharomyces pastorianus
gtagacccggtttcaagctgttgtt

SEQ ID NO: 107849 - DNA, 25 bp, Saccharomyces pastorianus
tctagctttagactactccatcggg

SEQ ID NO: 107850 - DNA, 25 bp, Saccharomyces pastorianus
gatcactcccatagaatcctttttc

SEQ ID NO: 107851 - DNA, 25 bp, Saccharomyces pastorianus
ggaagttctggagtacctgcaagat

SEQ ID NO: 107852 - DNA, 25 bp, Saccharomyces pastorianus
gttcagatttgattcttccgccaac

SEQ ID NO: 107853 - DNA, 25 bp, Saccharomyces pastorianus
ggactttatctacgaccacgcagaa

SEQ ID NO: 107854 - DNA, 25 bp, Saccharomyces pastorianus
ggacctcgaggaacgtctagcttta

SEQ ID NO: 107855 - DNA, 25 bp, Saccharomyces pastorianus
aagctaattcctagagccgtggact

SEQ ID NO: 107856 - DNA, 25 bp, Saccharomyces pastorianus
ggcgcagccttggaattcgagttcg

SEQ ID NO: 107857 - DNA, 25 bp, Saccharomyces pastorianus
gtcactgtggacctagaaatgcgca

SEQ ID NO: 107858 - DNA, 25 bp, Saccharomyces pastorianus
cattctgtgcaagacctacttctac

SEQ ID NO: 107859 - DNA, 25 bp, Saccharomyces pastorianus
agatatcgattcttctactggagat

SEQ ID NO: 107860 - DNA, 25 bp, Saccharomyces pastorianus
tccaatcatgctagtcggccttaaa

SEQ ID NO: 107861 - DNA, 25 bp, Saccharomyces pastorianus
cagcgtctctatttccggaacgaaa

SEQ ID NO: 107862 - DNA, 25 bp, Saccharomyces pastorianus
tggcattatgggacactgccggcca

SEQ ID NO: 107863 - DNA, 25 bp, Saccharomyces pastorianus
atgtggaagatctctggttcccaga

SEQ ID NO: 107864 - DNA, 25 bp, Saccharomyces pastorianus
agtagacttagaccgctttcatata

SEQ ID NO: 107865 - DNA, 25 bp, Saccharomyces pastorianus
gtgcctgctgatatcttatgtccaa

SEQ ID NO: 107866 - DNA, 25 bp, Saccharomyces pastorianus
agttcagcagaatccttggccaggc

SEQ ID NO: 107867 - DNA, 25 bp, Saccharomyces pastorianus
taacctttcagatctggtggaacca

SEQ ID NO: 107868 - DNA, 25 bp, Saccharomyces pastorianus
tttccgattcattatatgctcccag

SEQ ID NO: 107869 - DNA, 25 bp, Saccharomyces pastorianus
ggttcccagaggttaagcatttttg

SEQ ID NO: 107870 - DNA, 25 bp, Saccharomyces pastorianus
acttccggaggttcttggtagcaga

SEQ ID NO: 107871 - DNA, 25 bp, Saccharomyces pastorianus
ggatccctctgccttgtatagagaa

SEQ ID NO: 107872 - DNA, 25 bp, Saccharomyces pastorianus
gtcgttgccgattacagagttcacc

SEQ ID NO: 107873 - DNA, 25 bp, Saccharomyces pastorianus
agtttgcctatatatcagttttcag

SEQ ID NO: 107874 - DNA, 25 bp, Saccharomyces pastorianus
catactactcattaccaaggatccc

SEQ ID NO: 107875 - DNA, 25 bp, Saccharomyces pastorianus
atgtgaccccatttacgtgagagca

SEQ ID NO: 107876 - DNA, 25 bp, Saccharomyces pastorianus
aaaattgccatacatgatccgcatg

SEQ ID NO: 107877 - DNA, 25 bp, Saccharomyces pastorianus
gaatacctcatacattcccaacaat

SEQ ID NO: 107878 - DNA, 25 bp, Saccharomyces pastorianus
agagttcaccacttacttccggagg

SEQ ID NO: 107879 - DNA, 25 bp, Saccharomyces pastorianus
actgcttaagcgtcagggtcggtta

SEQ ID NO: 107880 - DNA, 25 bp, Saccharomyces pastorianus
aagattttgacttggtcgttgccga

SEQ ID NO: 107881 - DNA, 25 bp, Saccharomyces pastorianus
gaacaagtagctgaaactccgcaaa

SEQ ID NO: 107882 - DNA, 25 bp, Saccharomyces pastorianus
aggacatctgtccaataatactaga

SEQ ID NO: 107883 - DNA, 25 bp, Saccharomyces pastorianus
tacaacaacctttagcacccgcttt

SEQ ID NO: 107884 - DNA, 25 bp, Saccharomyces pastorianus
atggagaaatattccgacaggttta

SEQ ID NO: 107885 - DNA, 25 bp, Saccharomyces pastorianus
gggtctcgtctgtgtattttaacga

SEQ ID NO: 107886 - DNA, 25 bp, Saccharomyces pastorianus
acccgctttgcctgttaatgattta

SEQ ID NO: 107887 - DNA, 25 bp, Saccharomyces pastorianus
aatgttcaccgctaaaattgcctac

SEQ ID NO: 107888 - DNA, 25 bp, Saccharomyces pastorianus
attgtctcagagtttgacgtgattg

SEQ ID NO: 107889 - DNA, 25 bp, Saccharomyces pastorianus
gttgataccaacataagcattacga

SEQ ID NO: 107890 - DNA, 25 bp, Saccharomyces pastorianus
tccttttatgatcacgccagttcac

SEQ ID NO: 107891 - DNA, 25 bp, Saccharomyces pastorianus
gaacaatgagttttatcccataggt

SEQ ID NO: 107892 - DNA, 25 bp, Saccharomyces pastorianus
taccagtgccattagattgtcatcg

SEQ ID NO: 107893 - DNA, 25 bp, Saccharomyces pastorianus
cgactgctacaaccttatccttaag

SEQ ID NO: 107894 - DNA, 25 bp, Saccharomyces pastorianus
gggataatagcctctggtgcactag

SEQ ID NO: 107895 - DNA, 25 bp, Saccharomyces pastorianus
aagactgttcgctagtcaaccttct

SEQ ID NO: 107896 - DNA, 25 bp, Saccharomyces pastorianus
gactccagtatcttgacatggtctg

SEQ ID NO: 107897 - DNA, 25 bp, Saccharomyces pastorianus
attcggattcgacccattaactgta

SEQ ID NO: 107898 - DNA, 25 bp, Saccharomyces pastorianus
aataacagggtcgatgcctcttctc

SEQ ID NO: 107899 - DNA, 25 bp, Saccharomyces pastorianus
atcaatgttggttcttcgctgttta

SEQ ID NO: 107900 - DNA, 25 bp, Saccharomyces pastorianus
tgggctgtaacgtttcatgggctta

SEQ ID NO: 107901 - DNA, 25 bp, Saccharomyces pastorianus
atgggcttacctttccacaatggaa

SEQ ID NO: 107902 - DNA, 25 bp, Saccharomyces pastorianus
actaggctacttgttgggtccgata

SEQ ID NO: 107903 - DNA, 25 bp, Saccharomyces pastorianus
atgcagggtcccaagattccatgga

SEQ ID NO: 107904 - DNA, 25 bp, Saccharomyces pastorianus
gagtcgacacgccagaggatactac

SEQ ID NO: 107905 - DNA, 25 bp, Saccharomyces pastorianus
agccgctaacaacgtctttaccaat

SEQ ID NO: 107906 - DNA, 25 bp, Saccharomyces pastorianus
atctcctcgggtgatctgttcagtc

SEQ ID NO: 107907 - DNA, 25 bp, Saccharomyces pastorianus
atgctgcccactgattattctttga

SEQ ID NO: 107908 - DNA, 25 bp, Saccharomyces pastorianus
gctttaagttcctggagcccattca

SEQ ID NO: 107909 - DNA, 25 bp, Saccharomyces pastorianus
agcccattcacaaagagtttccctg

SEQ ID NO: 107910 - DNA, 25 bp, Saccharomyces pastorianus
cggtatcactttccctaaagacgcg

SEQ ID NO: 107911 - DNA, 25 bp, Saccharomyces pastorianus
ggacgctggctatgtcagaacgttt

SEQ ID NO: 107912 - DNA, 25 bp, Saccharomyces pastorianus
ggatactacccctgacaacgggaga

SEQ ID NO: 107913 - DNA, 25 bp, Saccharomyces pastorianus
acgggagactgcctgacgctgataa

SEQ ID NO: 107914 - DNA, 25 bp, Saccharomyces pastorianus
gggatattccagatttaaccactaa

SEQ ID NO: 107915 - DNA, 25 bp, Saccharomyces pastorianus
gatttcgctcatcatgttctcattg

SEQ ID NO: 107916 - DNA, 25 bp, Saccharomyces pastorianus
ggtgccttccgcttactagttagaa

SEQ ID NO: 107917 - DNA, 25 bp, Saccharomyces pastorianus
aacttctccattccatgcggttttt

SEQ ID NO: 107918 - DNA, 25 bp, Saccharomyces pastorianus
gcaagtgacatcattggagctcaaa

SEQ ID NO: 107919 - DNA, 25 bp, Saccharomyces pastorianus
aaaactgccactcttaggcacgaaa

SEQ ID NO: 107920 - DNA, 25 bp, Saccharomyces pastorianus
atcctcatgattgggctgccgatat

SEQ ID NO: 107921 - DNA, 25 bp, Saccharomyces pastorianus
gtcttggtatttaacgatcctcatg

SEQ ID NO: 107922 - DNA, 25 bp, Saccharomyces pastorianus
cgaaccaggatttactgtgggccaa

SEQ ID NO: 107923 - DNA, 25 bp, Saccharomyces pastorianus
catccccatttacttttcgaaccag

SEQ ID NO: 107924 - DNA, 25 bp, Saccharomyces pastorianus
agcctaccttgatcgtgaatgatgt

SEQ ID NO: 107925 - DNA, 25 bp, Saccharomyces pastorianus
aaaatggcatcgatgcttttctggg

SEQ ID NO: 107926 - DNA, 25 bp, Saccharomyces pastorianus
atcacgatccctcacttgtacttgt

SEQ ID NO: 107927 - DNA, 25 bp, Saccharomyces pastorianus
agagatctttttttagcctggcctt

SEQ ID NO: 107928 - DNA, 25 bp, Saccharomyces pastorianus
tgggcagtgacgcacgcaacttttt

SEQ ID NO: 107929 - DNA, 25 bp, Saccharomyces pastorianus
atgatcgtctttgatgtatctctaa

SEQ ID NO: 107930 - DNA, 25 bp, Saccharomyces pastorianus
acagagtgctcttggatcacgatcc

SEQ ID NO: 107931 - DNA, 25 bp, Saccharomyces pastorianus
gatgtatctctaacgatcattatta

SEQ ID NO: 107932 - DNA, 25 bp, Saccharomyces pastorianus
atgttatataactcaccccatgtgc

SEQ ID NO: 107933 - DNA, 25 bp, Saccharomyces pastorianus
ttatcagcgccgtccagttacattt

SEQ ID NO: 107934 - DNA, 25 bp, Saccharomyces pastorianus
tttcttttgcttttaacatgagtca

SEQ ID NO: 107935 - DNA, 25 bp, Saccharomyces pastorianus
acttgtacttgtccacttatcagcg

SEQ ID NO: 107936 - DNA, 25 bp, Saccharomyces pastorianus
caagacggttaatctcgtgatcaat

SEQ ID NO: 107937 - DNA, 25 bp, Saccharomyces pastorianus
gccagaccactaaagaactccgtta

SEQ ID NO: 107938 - DNA, 25 bp, Saccharomyces pastorianus
gcacgcacatggttccaagacggtt

SEQ ID NO: 107939 - DNA, 25 bp, Saccharomyces pastorianus
gcaaaggacctgttcaatgacgttt

SEQ ID NO: 107940 - DNA, 25 bp, Saccharomyces pastorianus
cgacgacgactggactttagacata

SEQ ID NO: 107941 - DNA, 25 bp, Saccharomyces pastorianus
accgaaatttcgctgttcaacaaag

SEQ ID NO: 107942 - DNA, 25 bp, Saccharomyces pastorianus
tttaaagatatacacgcacgcacat

SEQ ID NO: 107943 - DNA, 25 bp, Saccharomyces pastorianus
gctgcacgattacgatcttgctgat

SEQ ID NO: 107944 - DNA, 25 bp, Saccharomyces pastorianus
aaacgtcaagaacatagtgctgcac

SEQ ID NO: 107945 - DNA, 25 bp, Saccharomyces pastorianus
aaagctgttcgagtatggcattgag

SEQ ID NO: 107946 - DNA, 25 bp, Saccharomyces pastorianus
gatcaattttgaccacgacgacgac

SEQ ID NO: 107947 - DNA, 25 bp, Saccharomyces pastorianus
aatccactgtccatcaactggaaca

SEQ ID NO: 107948 - DNA, 25 bp, Saccharomyces pastorianus
gaaatatcgccggtccagaaccaaa

SEQ ID NO: 107949 - DNA, 25 bp, Saccharomyces pastorianus
gttcagcaactatacatttggcact

SEQ ID NO: 107950 - DNA, 25 bp, Saccharomyces pastorianus
ttcgaccagcattctacatgcacta

SEQ ID NO: 107951 - DNA, 25 bp, Saccharomyces pastorianus
tgaagtttaaccaagccgtgatgaa

SEQ ID NO: 107952 - DNA, 25 bp, Saccharomyces pastorianus
acatcttccattttcgaccagcatt

SEQ ID NO: 107953 - DNA, 25 bp, Saccharomyces pastorianus
atgaacgatatccaacattcccgcc

SEQ ID NO: 107954 - DNA, 25 bp, Saccharomyces pastorianus
aagatatttcatgcccatcgtctgt

SEQ ID NO: 107955 - DNA, 25 bp, Saccharomyces pastorianus
atcgtctgttgattctcacacatct

SEQ ID NO: 107956 - DNA, 25 bp, Saccharomyces pastorianus
taacagtgttgtacggtccagattt

SEQ ID NO: 107957 - DNA, 25 bp, Saccharomyces pastorianus
gaatccctcatcaacatgaacgata

SEQ ID NO: 107958 - DNA, 25 bp, Saccharomyces pastorianus
tatcaagttacactacacgcgttcc

SEQ ID NO: 107959 - DNA, 25 bp, Saccharomyces pastorianus
gatgccttcaggtacacaacagatt

SEQ ID NO: 107960 - DNA, 25 bp, Saccharomyces pastorianus
acctctattagagccggatatccat

SEQ ID NO: 107961 - DNA, 25 bp, Saccharomyces pastorianus
aactctagtgcgttcgatgaatttg

SEQ ID NO: 107962 - DNA, 25 bp, Saccharomyces pastorianus
aagattcgatcctgtgtacgtccaa

SEQ ID NO: 107963 - DNA, 25 bp, Saccharomyces pastorianus
gagttcttcactgtgggtgatcaat

SEQ ID NO: 107964 - DNA, 25 bp, Saccharomyces pastorianus
aattcttgggtttacgacagcatca

SEQ ID NO: 107965 - DNA, 25 bp, Saccharomyces pastorianus
atacaagaccggattcgcagagaaa

SEQ ID NO: 107966 - DNA, 25 bp, Saccharomyces pastorianus
agatcgatgacttcaattcttgggt

SEQ ID NO: 107967 - DNA, 25 bp, Saccharomyces pastorianus
gaccttgttcctgctcagttgaaaa

SEQ ID NO: 107968 - DNA, 25 bp, Saccharomyces pastorianus
gccggatatccatttattcatttgt

SEQ ID NO: 107969 - DNA, 25 bp, Saccharomyces pastorianus
aaatcgtcggtagaccactggcggc

SEQ ID NO: 107970 - DNA, 25 bp, Saccharomyces pastorianus
gtatactctgtggacgttaacaaca

SEQ ID NO: 107971 - DNA, 25 bp, Saccharomyces pastorianus
gggagtactctgaagatctgttgaa

SEQ ID NO: 107972 - DNA, 25 bp, Saccharomyces pastorianus
ttgcacaccactagctatcgttaag

SEQ ID NO: 107973 - DNA, 25 bp, Saccharomyces pastorianus
aaggtgccgtctgcatcaattttgc

SEQ ID NO: 107974 - DNA, 25 bp, Saccharomyces pastorianus
ttgaaatccattctaccttgcacac

SEQ ID NO: 107975 - DNA, 25 bp, Saccharomyces pastorianus
actggtgtccctagtgaaaattaca

SEQ ID NO: 107976 - DNA, 25 bp, Saccharomyces pastorianus
atgacggtgccacagtatactctgt

SEQ ID NO: 107977 - DNA, 25 bp, Saccharomyces pastorianus
gctattagccaatgacggtgccaca

SEQ ID NO: 107978 - DNA, 25 bp, Saccharomyces pastorianus
aaaagtgttctcttgattcagatgt

SEQ ID NO: 107979 - DNA, 25 bp, Saccharomyces pastorianus
ttcagatgtggtcatcactggtgtc

SEQ ID NO: 107980 - DNA, 25 bp, Saccharomyces pastorianus
gggccacgtctagatttcaaaatcg

SEQ ID NO: 107981 - DNA, 25 bp, Saccharomyces pastorianus
gaagcgtcgtattcggatgatggac

SEQ ID NO: 107982 - DNA, 25 bp, Saccharomyces pastorianus
gagattgggccacgtctagatttca

SEQ ID NO: 107983 - DNA, 25 bp, Saccharomyces pastorianus
tatggtcactgaagctcacaagaag

SEQ ID NO: 107984 - DNA, 25 bp, Saccharomyces pastorianus
gatttacaggatgttgcgggattac

SEQ ID NO: 107985 - DNA, 25 bp, Saccharomyces pastorianus
tcggcagaattcatactccaagtcc

SEQ ID NO: 107986 - DNA, 25 bp, Saccharomyces pastorianus
tggtgagccattgccgaacgttcta

SEQ ID NO: 107987 - DNA, 25 bp, Saccharomyces pastorianus
actccaagtccagatatggtcactg

SEQ ID NO: 107988 - DNA, 25 bp, Saccharomyces pastorianus
gatacacatcccgtatacaagcaaa

SEQ ID NO: 107989 - DNA, 25 bp, Saccharomyces pastorianus
ttagaggcgaatctactgatttaca

SEQ ID NO: 107990 - DNA, 25 bp, Saccharomyces pastorianus
ggtttgaaatccaaattcgaccaag

SEQ ID NO: 107991 - DNA, 25 bp, Saccharomyces pastorianus
aatgaaacaggtcttgaagcccaag

SEQ ID NO: 107992 - DNA, 25 bp, Saccharomyces pastorianus
ctaacagagttgaatgagcagatca

SEQ ID NO: 107993 - DNA, 25 bp, Saccharomyces pastorianus
atatatcgcaagcaagtttgggatt

SEQ ID NO: 107994 - DNA, 25 bp, Saccharomyces pastorianus
gtttgggattattgcaatatgcaga

SEQ ID NO: 107995 - DNA, 25 bp, Saccharomyces pastorianus
attgcaatatgcagagggtgattat

SEQ ID NO: 107996 - DNA, 25 bp, Saccharomyces pastorianus
gaatgcggattcagtggcccaattg

SEQ ID NO: 107997 - DNA, 25 bp, Saccharomyces pastorianus
ttcagtggcccaattgatgaacaat

SEQ ID NO: 107998 - DNA, 25 bp, Saccharomyces pastorianus
gataaccagtttaacggatggctta

SEQ ID NO: 107999 - DNA, 25 bp, Saccharomyces pastorianus
gcgaaaagaacttcagtcattacaa

SEQ ID NO: 108000 - DNA, 25 bp, Saccharomyces pastorianus
gagataggaccgtggaaagattcta

SEQ ID NO: 108001 - DNA, 25 bp, Saccharomyces pastorianus
gatggcttaaaaattcagctaacag

SEQ ID NO: 108002 - DNA, 25 bp, Saccharomyces pastorianus
gtatccatggtctcgaaacctagtg

SEQ ID NO: 108003 - DNA, 25 bp, Saccharomyces pastorianus
tgagaccattccacgtagctttatg

SEQ ID NO: 108004 - DNA, 25 bp, Saccharomyces pastorianus
agatcgttccacactgctggatctg

SEQ ID NO: 108005 - DNA, 25 bp, Saccharomyces pastorianus
gacgctccaggaatgtactatcaac

SEQ ID NO: 108006 - DNA, 25 bp, Saccharomyces pastorianus
gaggtgtgtgctgtagatcgttcca

SEQ ID NO: 108007 - DNA, 25 bp, Saccharomyces pastorianus
gatccggaagttacgtcttgacaat

SEQ ID NO: 108008 - DNA, 25 bp, Saccharomyces pastorianus
aagcagtgtccaaatgttctcgtag

SEQ ID NO: 108009 - DNA, 25 bp, Saccharomyces pastorianus
gaatccatcgcaaccggatctgtta

SEQ ID NO: 108010 - DNA, 25 bp, Saccharomyces pastorianus
agagggcttgacatgcctgttcaaa

SEQ ID NO: 108011 - DNA, 25 bp, Saccharomyces pastorianus
ggcatttcgccattatttgtatcca

SEQ ID NO: 108012 - DNA, 25 bp, Saccharomyces pastorianus
atggcagccagtgaccctcgtagag

SEQ ID NO: 108013 - DNA, 25 bp, Saccharomyces pastorianus
cactatgaacatactctggacaagg

SEQ ID NO: 108014 - DNA, 25 bp, Saccharomyces pastorianus
agacagtgtgatacaggagctcaaa

SEQ ID NO: 108015 - DNA, 25 bp, Saccharomyces pastorianus
actacaccctacaagtgcattacac

SEQ ID NO: 108016 - DNA, 25 bp, Saccharomyces pastorianus
tcatttcctccggtaaggactggga

SEQ ID NO: 108017 - DNA, 25 bp, Saccharomyces pastorianus
acaactacaggcctctttggtgaac

SEQ ID NO: 108018 - DNA, 25 bp, Saccharomyces pastorianus
ggagctcaaaatgaccgacaattca

SEQ ID NO: 108019 - DNA, 25 bp, Saccharomyces pastorianus
ccccttacgtggtatatcatgaatt

SEQ ID NO: 108020 - DNA, 25 bp, Saccharomyces pastorianus
aaactggcgtaagtgttcaactaca

SEQ ID NO: 108021 - DNA, 25 bp, Saccharomyces pastorianus
aaatgatcaggaggccacaactaca

SEQ ID NO: 108022 - DNA, 25 bp, Saccharomyces pastorianus
gagacattcgagaccagttgctaac

SEQ ID NO: 108023 - DNA, 25 bp, Saccharomyces pastorianus
ggtgggttactctacgacatcaagc

SEQ ID NO: 108024 - DNA, 25 bp, Saccharomyces pastorianus
tacggtatctcggtacgcaactttt

SEQ ID NO: 108025 - DNA, 25 bp, Saccharomyces pastorianus
attgcctctttcgttgtgttcaaga

SEQ ID NO: 108026 - DNA, 25 bp, Saccharomyces pastorianus
atcctaagtcttacagcatggctct

SEQ ID NO: 108027 - DNA, 25 bp, Saccharomyces pastorianus
tcccttcccatattctttgactaat

SEQ ID NO: 108028 - DNA, 25 bp, Saccharomyces pastorianus
ggttacgctagctttgggatctgta

SEQ ID NO: 108029 - DNA, 25 bp, Saccharomyces pastorianus
tctactgagattatgtcccttccca

SEQ ID NO: 108030 - DNA, 25 bp, Saccharomyces pastorianus
attggctactccttattatccacca

SEQ ID NO: 108031 - DNA, 25 bp, Saccharomyces pastorianus
atctgtaacaggttccattgcctct

SEQ ID NO: 108032 - DNA, 25 bp, Saccharomyces pastorianus
gcatttcctcctatgattggctact

SEQ ID NO: 108033 - DNA, 25 bp, Saccharomyces pastorianus
aatggttctgatattctttgtcgca

SEQ ID NO: 108034 - DNA, 25 bp, Saccharomyces pastorianus
aaccacaccaaagctgttcatctat

SEQ ID NO: 108035 - DNA, 25 bp, Saccharomyces pastorianus
tatttcaacttcaaggcgaccagcc

SEQ ID NO: 108036 - DNA, 25 bp, Saccharomyces pastorianus
aaagagctcaccgtttcgatcgagg

SEQ ID NO: 108037 - DNA, 25 bp, Saccharomyces pastorianus
ttagaccgcggtattccattacgtc

SEQ ID NO: 108038 - DNA, 25 bp, Saccharomyces pastorianus
gaagaccatcctacattgagactga

SEQ ID NO: 108039 - DNA, 25 bp, Saccharomyces pastorianus
tgccagcattgaaacacctgccatg

SEQ ID NO: 108040 - DNA, 25 bp, Saccharomyces pastorianus
ttttcattttcagttgcttctccca

SEQ ID NO: 108041 - DNA, 25 bp, Saccharomyces pastorianus
aagtaacttcgattcagacgcaatg

SEQ ID NO: 108042 - DNA, 25 bp, Saccharomyces pastorianus
ggaaagccatgaacttatcccacat

SEQ ID NO: 108043 - DNA, 25 bp, Saccharomyces pastorianus
ggatgccaagacctatgacccggaa

SEQ ID NO: 108044 - DNA, 25 bp, Saccharomyces pastorianus
agcgggcaatttcaggcgtcatagc

SEQ ID NO: 108045 - DNA, 25 bp, Saccharomyces pastorianus
ggccggctaatgtttcctatggatg

SEQ ID NO: 108046 - DNA, 25 bp, Saccharomyces pastorianus
attccacgtggattgtctaaactgt

SEQ ID NO: 108047 - DNA, 25 bp, Saccharomyces pastorianus
aactgtcgggtcaatggcatcgtga

SEQ ID NO: 108048 - DNA, 25 bp, Saccharomyces pastorianus
gtaatcacgacatggaagctctctt

SEQ ID NO: 108049 - DNA, 25 bp, Saccharomyces pastorianus
cattgagtttaaatatccgcctggg

SEQ ID NO: 108050 - DNA, 25 bp, Saccharomyces pastorianus
tcatgtattatctaacggcggcact

SEQ ID NO: 108051 - DNA, 25 bp, Saccharomyces pastorianus
ggtgaaattccattgtgcggtaatc

SEQ ID NO: 108052 - DNA, 25 bp, Saccharomyces pastorianus
ggaaggtatcgacaatgctacatca

SEQ ID NO: 108053 - DNA, 25 bp, Saccharomyces pastorianus
ggcggcactacgagatacagctctg

SEQ ID NO: 108054 - DNA, 25 bp, Saccharomyces pastorianus
atgttccctgttatattctaggcga

SEQ ID NO: 108055 - DNA, 25 bp, Saccharomyces pastorianus
aactgtttcttatgcaagactgcca

SEQ ID NO: 108056 - DNA, 25 bp, Saccharomyces pastorianus
agggaccttgcagagcatgcggctt

SEQ ID NO: 108057 - DNA, 25 bp, Saccharomyces pastorianus
cccagtgaccgttgatcctaaattt

SEQ ID NO: 108058 - DNA, 25 bp, Saccharomyces pastorianus
ctttgcctctatcactgggttggaa

SEQ ID NO: 108059 - DNA, 25 bp, Saccharomyces pastorianus
tgttgcctgctttatttctggttgt

SEQ ID NO: 108060 - DNA, 25 bp, Saccharomyces pastorianus
ttgactaacgcctttggttctgcaa

SEQ ID NO: 108061 - DNA, 25 bp, Saccharomyces pastorianus
aatcggttgtgcattgtccccagtg

SEQ ID NO: 108062 - DNA, 25 bp, Saccharomyces pastorianus
cgtttgctggcaaatacccgcatat

SEQ ID NO: 108063 - DNA, 25 bp, Saccharomyces pastorianus
atgacatgggctgctgttctacaaa

SEQ ID NO: 108064 - DNA, 25 bp, Saccharomyces pastorianus
caatttccgcacctaaagctaacga

SEQ ID NO: 108065 - DNA, 25 bp, Saccharomyces pastorianus
aagccccagcttccatgaaatcgtt

SEQ ID NO: 108066 - DNA, 25 bp, Saccharomyces pastorianus
ttattcactggtttggctgttgcct

SEQ ID NO: 108067 - DNA, 25 bp, Saccharomyces pastorianus
tacccgcatatgtcttgatttcttt

SEQ ID NO: 108068 - DNA, 25 bp, Saccharomyces pastorianus
aaagtattacccctaagattcacag

SEQ ID NO: 108069 - DNA, 25 bp, Saccharomyces pastorianus
ctcgccgctttaactacgtagttct

SEQ ID NO: 108070 - DNA, 25 bp, Saccharomyces pastorianus
ttggctaagacattccgcacgcata

SEQ ID NO: 108071 - DNA, 25 bp, Saccharomyces pastorianus
gttctgatatctgacgacgacgcca

SEQ ID NO: 108072 - DNA, 25 bp, Saccharomyces pastorianus
actagagagtgccagcgaaccgcgt

SEQ ID NO: 108073 - DNA, 25 bp, Saccharomyces pastorianus
aaccacatactttgtctttgatgca

SEQ ID NO: 108074 - DNA, 25 bp, Saccharomyces pastorianus
aagatttgccatttgtttaaccaca

SEQ ID NO: 108075 - DNA, 25 bp, Saccharomyces pastorianus
gtctttgatgcaacttcttggctaa

SEQ ID NO: 108076 - DNA, 25 bp, Saccharomyces pastorianus
ttccgcacgcatattcaagctagct

SEQ ID NO: 108077 - DNA, 25 bp, Saccharomyces pastorianus
gtttaaccacattccaagagttgag

SEQ ID NO: 108078 - DNA, 25 bp, Saccharomyces pastorianus
tggaggctgccacaagaggtataat

SEQ ID NO: 108079 - DNA, 25 bp, Saccharomyces pastorianus
ggacactatacttctgttgtgaaca

SEQ ID NO: 108080 - DNA, 25 bp, Saccharomyces pastorianus
tttacctccgatacttgtcattcat

SEQ ID NO: 108081 - DNA, 25 bp, Saccharomyces pastorianus
gaacggtgaatcattccggtaacct

SEQ ID NO: 108082 - DNA, 25 bp, Saccharomyces pastorianus
ctgtctggcgacaatgcttgggatt

SEQ ID NO: 108083 - DNA, 25 bp, Saccharomyces pastorianus
ggtaaccttatcaatggacactata

SEQ ID NO: 108084 - DNA, 25 bp, Saccharomyces pastorianus
gcgatgaggtatacgtcttattcta

SEQ ID NO: 108085 - DNA, 25 bp, Saccharomyces pastorianus
tatacagcaacatcgcaaggatcgc

SEQ ID NO: 108086 - DNA, 25 bp, Saccharomyces pastorianus
gttttcattccagatcaaggtcaaa

SEQ ID NO: 108087 - DNA, 25 bp, Saccharomyces pastorianus
agcactgtaataacctatcctttga

SEQ ID NO: 108088 - DNA, 25 bp, Saccharomyces pastorianus
gatcgcaacaactttgaagccggca

SEQ ID NO: 108089 - DNA, 25 bp, Saccharomyces pastorianus
tagactttatagttttacctccgat

SEQ ID NO: 108090 - DNA, 25 bp, Saccharomyces pastorianus
tactacgaatccaaatcctccagtt

SEQ ID NO: 108091 - DNA, 25 bp, Saccharomyces pastorianus
aagatagcagcctaggttcccatag

SEQ ID NO: 108092 - DNA, 25 bp, Saccharomyces pastorianus
tatgacgtcaggaggttctaccgat

SEQ ID NO: 108093 - DNA, 25 bp, Saccharomyces pastorianus
gacggcatcatatacaacgagcggt

SEQ ID NO: 108094 - DNA, 25 bp, Saccharomyces pastorianus
gcgcatttcaactatttgccaccaa

SEQ ID NO: 108095 - DNA, 25 bp, Saccharomyces pastorianus
gttaagatccttggctactacgaat

SEQ ID NO: 108096 - DNA, 25 bp, Saccharomyces pastorianus
aatcatctcagcatcattctacatc

SEQ ID NO: 108097 - DNA, 25 bp, Saccharomyces pastorianus
tggtgccaagcctcaagtggtacat

SEQ ID NO: 108098 - DNA, 25 bp, Saccharomyces pastorianus
catccagatctgatactccattgag

SEQ ID NO: 108099 - DNA, 25 bp, Saccharomyces pastorianus
ggtacatcaagggattggctcacat

SEQ ID NO: 108100 - DNA, 25 bp, Saccharomyces pastorianus
gaaatgccacctgatgtaggtccta

SEQ ID NO: 108101 - DNA, 25 bp, Saccharomyces pastorianus
agttttgtgttcctgtgtccctatt

SEQ ID NO: 108102 - DNA, 25 bp, Saccharomyces pastorianus
ccgcgcttactgacactgctaaaag

SEQ ID NO: 108103 - DNA, 25 bp, Saccharomyces pastorianus
gagcctgacctcctttttcaagagg

SEQ ID NO: 108104 - DNA, 25 bp, Saccharomyces pastorianus
gacggatgcgacatttaactgctta

SEQ ID NO: 108105 - DNA, 25 bp, Saccharomyces pastorianus
aattcctacgaggtgcggacttcaa

SEQ ID NO: 108106 - DNA, 25 bp, Saccharomyces pastorianus
gtttcgccgaggtttttagtagcag

SEQ ID NO: 108107 - DNA, 25 bp, Saccharomyces pastorianus
aaatatcaagatcctatcccgctga

SEQ ID NO: 108108 - DNA, 25 bp, Saccharomyces pastorianus
gattaacccaaaggatccgcgctta

SEQ ID NO: 108109 - DNA, 25 bp, Saccharomyces pastorianus
aaatgtctttgcaaatggagcctga

SEQ ID NO: 108110 - DNA, 25 bp, Saccharomyces pastorianus
ggatttctaatcgacctagcagagg

SEQ ID NO: 108111 - DNA, 25 bp, Saccharomyces pastorianus
tcatcagcgtgccatgattgaccaa

SEQ ID NO: 108112 - DNA, 25 bp, Saccharomyces pastorianus
agatattatttcgaagcccttttat

SEQ ID NO: 108113 - DNA, 25 bp, Saccharomyces pastorianus
gtgtcagtttcaatcaatcggcatt

SEQ ID NO: 108114 - DNA, 25 bp, Saccharomyces pastorianus
atgcctctgctagtttacccaaaca

SEQ ID NO: 108115 - DNA, 25 bp, Saccharomyces pastorianus
tttctgtccatataaaaggcctcgg

SEQ ID NO: 108116 - DNA, 25 bp, Saccharomyces pastorianus
aatgttgcacgagcatctacctggc

SEQ ID NO: 108117 - DNA, 25 bp, Saccharomyces pastorianus
caatagtttgctgcgagacggtacc

SEQ ID NO: 108118 - DNA, 25 bp, Saccharomyces pastorianus
gaacgtctcctaaagatatcgccga

SEQ ID NO: 108119 - DNA, 25 bp, Saccharomyces pastorianus
atggcaccggccgactaataagttg

SEQ ID NO: 108120 - DNA, 25 bp, Saccharomyces pastorianus
ggctttttcaaaccccagctggaga

SEQ ID NO: 108121 - DNA, 25 bp, Saccharomyces pastorianus
catgggcagcacatgtatcctgtga

SEQ ID NO: 108122 - DNA, 25 bp, Saccharomyces pastorianus
tatggtccccatcctgagaatattg

SEQ ID NO: 108123 - DNA, 25 bp, Saccharomyces pastorianus
agcatgtccatatgtccatctagcg

SEQ ID NO: 108124 - DNA, 25 bp, Saccharomyces pastorianus
ggtactaactttaccttagcatgtc

SEQ ID NO: 108125 - DNA, 25 bp, Saccharomyces pastorianus
acgtccctgactaagcttttcaatg

SEQ ID NO: 108126 - DNA, 25 bp, Saccharomyces pastorianus
tggctatggatgcttgttctctgta

SEQ ID NO: 108127 - DNA, 25 bp, Saccharomyces pastorianus
gaatgatttgcttttacccgaggag

SEQ ID NO: 108128 - DNA, 25 bp, Saccharomyces pastorianus
ttgttctctgtagcctttttcaatg

SEQ ID NO: 108129 - DNA, 25 bp, Saccharomyces pastorianus
gggccgaccccaacattattagagt

SEQ ID NO: 108130 - DNA, 25 bp, Saccharomyces pastorianus
gagtacttcaggagcgctaatttcg

SEQ ID NO: 108131 - DNA, 25 bp, Saccharomyces pastorianus
catctagcgcaccactcagaattag

SEQ ID NO: 108132 - DNA, 25 bp, Saccharomyces pastorianus
atgggcggctctgtcgttttaaatc

SEQ ID NO: 108133 - DNA, 25 bp, Saccharomyces pastorianus
atcatctctgtatccatatgctcgt

SEQ ID NO: 108134 - DNA, 25 bp, Saccharomyces pastorianus
agagaattcacagcgccagggcggc

SEQ ID NO: 108135 - DNA, 25 bp, Saccharomyces pastorianus
ggtcagagttcatcctgtcttgaaa

SEQ ID NO: 108136 - DNA, 25 bp, Saccharomyces pastorianus
gcacacagacgtctcttacgagtta

SEQ ID NO: 108137 - DNA, 25 bp, Saccharomyces pastorianus
gcaagatttcttgagcacgcttcat

SEQ ID NO: 108138 - DNA, 25 bp, Saccharomyces pastorianus
tcgatatcatctggtggctggcaca

SEQ ID NO: 108139 - DNA, 25 bp, Saccharomyces pastorianus
agccaccttcttatactttctttag

SEQ ID NO: 108140 - DNA, 25 bp, Saccharomyces pastorianus
aagagcacctgtcacgcatattcat

SEQ ID NO: 108141 - DNA, 25 bp, Saccharomyces pastorianus
gacaggttgtcgaagcctttgcaag

SEQ ID NO: 108142 - DNA, 25 bp, Saccharomyces pastorianus
aaatgggaacctcattccgtcgtca

SEQ ID NO: 108143 - DNA, 25 bp, Saccharomyces pastorianus
atttgcggatacgatcgaggctttc

SEQ ID NO: 108144 - DNA, 25 bp, Saccharomyces pastorianus
cagacatgcgttcaggattactcca

SEQ ID NO: 108145 - DNA, 25 bp, Saccharomyces pastorianus
gaagttcggtgtccttatttgcgat

SEQ ID NO: 108146 - DNA, 25 bp, Saccharomyces pastorianus
tttgtgccttcatcgctacgttgat

SEQ ID NO: 108147 - DNA, 25 bp, Saccharomyces pastorianus
agagaaggactctcctcgcttttta

SEQ ID NO: 108148 - DNA, 25 bp, Saccharomyces pastorianus
agccatcttttggactttaccagca

SEQ ID NO: 108149 - DNA, 25 bp, Saccharomyces pastorianus
gcaccagccattttgttactgatcc

SEQ ID NO: 108150 - DNA, 25 bp, Saccharomyces pastorianus
gaaagcgaaaatccttcttccattg

SEQ ID NO: 108151 - DNA, 25 bp, Saccharomyces pastorianus
tttttacctgcctggattgttcaaa

SEQ ID NO: 108152 - DNA, 25 bp, Saccharomyces pastorianus
agcattggtgggatccatcgctgca

SEQ ID NO: 108153 - DNA, 25 bp, Saccharomyces pastorianus
tgcagctgctttaccatgggacaat

SEQ ID NO: 108154 - DNA, 25 bp, Saccharomyces pastorianus
gacattggtatcagttgccggtgct

SEQ ID NO: 108155 - DNA, 25 bp, Saccharomyces pastorianus
gttcaagtgcatctgggtacaccaa

SEQ ID NO: 108156 - DNA, 25 bp, Saccharomyces pastorianus
aagtattctcaagatctcctgcaac

SEQ ID NO: 108157 - DNA, 25 bp, Saccharomyces pastorianus
ataggcgccggatacagcgcgaatt

SEQ ID NO: 108158 - DNA, 25 bp, Saccharomyces pastorianus
gatctcctgcaactctttaatactt

SEQ ID NO: 108159 - DNA, 25 bp, Saccharomyces pastorianus
gaacgtgggagctcctgatgatatt

SEQ ID NO: 108160 - DNA, 25 bp, Saccharomyces pastorianus
catcgtctatatttccagggtctaa

SEQ ID NO: 108161 - DNA, 25 bp, Saccharomyces pastorianus
gcgaattccgatgtttcagtgcaat

SEQ ID NO: 108162 - DNA, 25 bp, Saccharomyces pastorianus
tttttgctagttgctttgacgatat

SEQ ID NO: 108163 - DNA, 25 bp, Saccharomyces pastorianus
gttaacggattcttccagttccaga

SEQ ID NO: 108164 - DNA, 25 bp, Saccharomyces pastorianus
ttctaaaccgtttcatcgactggaa

SEQ ID NO: 108165 - DNA, 25 bp, Saccharomyces pastorianus
atgcctggtcttaagcttgttgaag

SEQ ID NO: 108166 - DNA, 25 bp, Saccharomyces pastorianus
gttcgttggatcagatttccttcaa

SEQ ID NO: 108167 - DNA, 25 bp, Saccharomyces pastorianus
ggcagaggctatcttaaccaacaat

SEQ ID NO: 108168 - DNA, 25 bp, Saccharomyces pastorianus
acaatactctaccattacttgcctt

SEQ ID NO: 108169 - DNA, 25 bp, Saccharomyces pastorianus
ttttgaatactatctccagtcccca

SEQ ID NO: 108170 - DNA, 25 bp, Saccharomyces pastorianus
aaggcttcgccggtgtgaaactcgt

SEQ ID NO: 108171 - DNA, 25 bp, Saccharomyces pastorianus
atccaccaattctcttcttacaaag

SEQ ID NO: 108172 - DNA, 25 bp, Saccharomyces pastorianus
tttggcaaggtcttcatttgtcgat

SEQ ID NO: 108173 - DNA, 25 bp, Saccharomyces pastorianus
tcctccttcttgtttctgttcattt

SEQ ID NO: 108174 - DNA, 25 bp, Saccharomyces pastorianus
gttcatttttctaggcagaggctat

SEQ ID NO: 108175 - DNA, 25 bp, Saccharomyces pastorianus
cagtccccaggttgtcaaacttgat

SEQ ID NO: 108176 - DNA, 25 bp, Saccharomyces pastorianus
tgccttccgacctttaaattctcga

SEQ ID NO: 108177 - DNA, 25 bp, Saccharomyces pastorianus
tatttttgtattttctcctccttct

SEQ ID NO: 108178 - DNA, 25 bp, Saccharomyces pastorianus
atcgaatcgctgcttgatgttcaag

SEQ ID NO: 108179 - DNA, 25 bp, Saccharomyces pastorianus
ggccctttgccaagatgttcatttg

SEQ ID NO: 108180 - DNA, 25 bp, Saccharomyces pastorianus
tgcaatcgttgtatgactcccagat

SEQ ID NO: 108181 - DNA, 25 bp, Saccharomyces pastorianus
ttttgcgtttaatacctactcgaca

SEQ ID NO: 108182 - DNA, 25 bp, Saccharomyces pastorianus
gagcccttactacttttgcgaatat

SEQ ID NO: 108183 - DNA, 25 bp, Saccharomyces pastorianus
tttggtattctttccatccatgcga

SEQ ID NO: 108184 - DNA, 25 bp, Saccharomyces pastorianus
ggatactatcactaacctggaaggt

SEQ ID NO: 108185 - DNA, 25 bp, Saccharomyces pastorianus
atgctcccaactgatatcgaatcgc

SEQ ID NO: 108186 - DNA, 25 bp, Saccharomyces pastorianus
gatttttcataactgggccctttgc

SEQ ID NO: 108187 - DNA, 25 bp, Saccharomyces pastorianus
agtggcatagccaactgcaatcgtt

SEQ ID NO: 108188 - DNA, 25 bp, Saccharomyces pastorianus
gaccaggctgagttcatgtcaactt

SEQ ID NO: 108189 - DNA, 25 bp, Saccharomyces pastorianus
tccattaccccacatgtttattgtc

SEQ ID NO: 108190 - DNA, 25 bp, Saccharomyces pastorianus
atctgaatgactgtgggcccatggt

SEQ ID NO: 108191 - DNA, 25 bp, Saccharomyces pastorianus
gcccatggtacttgatgcgctgtta

SEQ ID NO: 108192 - DNA, 25 bp, Saccharomyces pastorianus
ggcggtagaaacacgctagcttgta

SEQ ID NO: 108193 - DNA, 25 bp, Saccharomyces pastorianus
aatgtattctgtgtgcatgctgctc

SEQ ID NO: 108194 - DNA, 25 bp, Saccharomyces pastorianus
gaaaggccatgctaaacaactccat

SEQ ID NO: 108195 - DNA, 25 bp, Saccharomyces pastorianus
aagaacagtatttgggccctgccgt

SEQ ID NO: 108196 - DNA, 25 bp, Saccharomyces pastorianus
gacgaacaggattctaccctaactt

SEQ ID NO: 108197 - DNA, 25 bp, Saccharomyces pastorianus
cctaccgttggctaattgactctag

SEQ ID NO: 108198 - DNA, 25 bp, Saccharomyces pastorianus
gaactgtactagaacttgtccaaag

SEQ ID NO: 108199 - DNA, 25 bp, Saccharomyces pastorianus
tgccgtgctaatgcaagcctaccgt

SEQ ID NO: 108200 - DNA, 25 bp, Saccharomyces pastorianus
tattattagccctttactctccgga

SEQ ID NO: 108201 - DNA, 25 bp, Saccharomyces pastorianus
caaactgtggtttgctttgacctaa

SEQ ID NO: 108202 - DNA, 25 bp, Saccharomyces pastorianus
tgttgagtacagcagcggtgcccta

SEQ ID NO: 108203 - DNA, 25 bp, Saccharomyces pastorianus
aggagagcgccctttgtttgcaaag

SEQ ID NO: 108204 - DNA, 25 bp, Saccharomyces pastorianus
aagctctagattccccgtagatgaa

SEQ ID NO: 108205 - DNA, 25 bp, Saccharomyces pastorianus
gtttacaacttgtcatcacctgacc

SEQ ID NO: 108206 - DNA, 25 bp, Saccharomyces pastorianus
atccaacttacacaatcccagaatt

SEQ ID NO: 108207 - DNA, 25 bp, Saccharomyces pastorianus
aaaggatgtcggcacgctagcgtat

SEQ ID NO: 108208 - DNA, 25 bp, Saccharomyces pastorianus
gacactgccgatttcactgatatgg

SEQ ID NO: 108209 - DNA, 25 bp, Saccharomyces pastorianus
ggtattgccgctattctgaagacaa

SEQ ID NO: 108210 - DNA, 25 bp, Saccharomyces pastorianus
gggcaccgttacctatgacattgac

SEQ ID NO: 108211 - DNA, 25 bp, Saccharomyces pastorianus
ggatctatcggttggcgtatctggc

SEQ ID NO: 108212 - DNA, 25 bp, Saccharomyces pastorianus
ttcaggcgctgacttggctgcttta

SEQ ID NO: 108213 - DNA, 25 bp, Saccharomyces pastorianus
gaactggacgctttggtgccaagaa

SEQ ID NO: 108214 - DNA, 25 bp, Saccharomyces pastorianus
gggagagttcagtcttggctctaaa

SEQ ID NO: 108215 - DNA, 25 bp, Saccharomyces pastorianus
aatcacacggaacacctctgagtag

SEQ ID NO: 108216 - DNA, 25 bp, Saccharomyces pastorianus
gattggcgccactaatagacctgat

SEQ ID NO: 108217 - DNA, 25 bp, Saccharomyces pastorianus
gaccgggcagattggataagacttt

SEQ ID NO: 108218 - DNA, 25 bp, Saccharomyces pastorianus
agtgcaacaatttttcaggcgctga

SEQ ID NO: 108219 - DNA, 25 bp, Saccharomyces pastorianus
gagatacttctttgtccgaatcctc

SEQ ID NO: 108220 - DNA, 25 bp, Saccharomyces pastorianus
gaatcctcctcaagagtcgtcaaca

SEQ ID NO: 108221 - DNA, 25 bp, Saccharomyces pastorianus
aagattaaaccctctgtgagcgata

SEQ ID NO: 108222 - DNA, 25 bp, Saccharomyces pastorianus
aagcttgagcttctcagcaacacga

SEQ ID NO: 108223 - DNA, 25 bp, Saccharomyces pastorianus
gaaaactacttctagtccgctaact

SEQ ID NO: 108224 - DNA, 25 bp, Saccharomyces pastorianus
gaggcttaagcctttcatatcgaat

SEQ ID NO: 108225 - DNA, 25 bp, Saccharomyces pastorianus
cttggtattcaatcctgatggcttg

SEQ ID NO: 108226 - DNA, 25 bp, Saccharomyces pastorianus
aagctagatgcagactcacctgaga

SEQ ID NO: 108227 - DNA, 25 bp, Saccharomyces pastorianus
gcattctaaataccaacttccttca

SEQ ID NO: 108228 - DNA, 25 bp, Saccharomyces pastorianus
gttgttaagctattttaccgccgat

SEQ ID NO: 108229 - DNA, 25 bp, Saccharomyces pastorianus
atactccccgtgactgagatgcaaa

SEQ ID NO: 108230 - DNA, 25 bp, Saccharomyces pastorianus
tgttgtgaaaggatactccccgtga

SEQ ID NO: 108231 - DNA, 25 bp, Saccharomyces pastorianus
gcttgacgtcaaattctctcatttg

SEQ ID NO: 108232 - DNA, 25 bp, Saccharomyces pastorianus
gaagagctgttcatacttgcccgaa

SEQ ID NO: 108233 - DNA, 25 bp, Saccharomyces pastorianus
agagccattctgtgcttccaaaggt

SEQ ID NO: 108234 - DNA, 25 bp, Saccharomyces pastorianus
aaatgaggttggtccgcttgtctga

SEQ ID NO: 108235 - DNA, 25 bp, Saccharomyces pastorianus
ggcttccataaaatcacgcgttgct

SEQ ID NO: 108236 - DNA, 25 bp, Saccharomyces pastorianus
gagctgcttattttcattttggtcc

SEQ ID NO: 108237 - DNA, 25 bp, Saccharomyces pastorianus
attttggtccttttcagagccattc

SEQ ID NO: 108238 - DNA, 25 bp, Saccharomyces pastorianus
atacttgttgtgtacgccatcttta

SEQ ID NO: 108239 - DNA, 25 bp, Saccharomyces pastorianus
aagtaagatcctcagcttcatcgac

SEQ ID NO: 108240 - DNA, 25 bp, Saccharomyces pastorianus
ttttcgcgtttgctgtattccatgt

SEQ ID NO: 108241 - DNA, 25 bp, Saccharomyces pastorianus
ttgtgcatgcactgggtcggtactg

SEQ ID NO: 108242 - DNA, 25 bp, Saccharomyces pastorianus
attcagcttaatcccatttttcgcg

SEQ ID NO: 108243 - DNA, 25 bp, Saccharomyces pastorianus
agccgcctttgctcaatggagagtt

SEQ ID NO: 108244 - DNA, 25 bp, Saccharomyces pastorianus
aacttcgcaagtctggtttccacat

SEQ ID NO: 108245 - DNA, 25 bp, Saccharomyces pastorianus
agcatgccaaggctctgcttgaaaa

SEQ ID NO: 108246 - DNA, 25 bp, Saccharomyces pastorianus
atcaggtgccggctaaggacaaact

SEQ ID NO: 108247 - DNA, 25 bp, Saccharomyces pastorianus
gaaaatcagcagcacggctccaaga

SEQ ID NO: 108248 - DNA, 25 bp, Saccharomyces pastorianus
tacttgaaggcgcttggctattaca

SEQ ID NO: 108249 - DNA, 25 bp, Saccharomyces pastorianus
aaagccccttggtgacttcaatgat

SEQ ID NO: 108250 - DNA, 25 bp, Saccharomyces pastorianus
ggcaaggctcgcacagattcaagac

SEQ ID NO: 108251 - DNA, 25 bp, Saccharomyces pastorianus
gcagatggccaatctctaaccgaga

SEQ ID NO: 108252 - DNA, 25 bp, Saccharomyces pastorianus
gagaatgctttggacctactggcgc

SEQ ID NO: 108253 - DNA, 25 bp, Saccharomyces pastorianus
tacaagaccttgaaacccgcagaac

SEQ ID NO: 108254 - DNA, 25 bp, Saccharomyces pastorianus
gaacagcagattgcgcatcggtgat

SEQ ID NO: 108255 - DNA, 25 bp, Saccharomyces pastorianus
gatagtgggtgttctcgttctactt

SEQ ID NO: 108256 - DNA, 25 bp, Saccharomyces pastorianus
tagtgggtgttctcgttctactttt

SEQ ID NO: 108257 - DNA, 25 bp, Saccharomyces pastorianus
tttcacatcttttactagttccgtt

SEQ ID NO: 108258 - DNA, 25 bp, Saccharomyces pastorianus
ggatagtgggtgttctcgttctact

SEQ ID NO: 108259 - DNA, 25 bp, Saccharomyces pastorianus
aggatagtgggtgttctcgttctac

SEQ ID NO: 108260 - DNA, 25 bp, Saccharomyces pastorianus
atagtgggtgttctcgttctacttt

SEQ ID NO: 108261 - DNA, 25 bp, Saccharomyces pastorianus
caaggatagtgggtgttctcgttct

SEQ ID NO: 108262 - DNA, 25 bp, Saccharomyces pastorianus
aaggatagtgggtgttctcgttcta

SEQ ID NO: 108263 - DNA, 25 bp, Saccharomyces pastorianus
ttcacatcttttactagttccgttt

SEQ ID NO: 108264 - DNA, 25 bp, Saccharomyces pastorianus
tttttcacatcttttactagttccg

SEQ ID NO: 108265 - DNA, 25 bp, Saccharomyces pastorianus
tcacatcttttactagttccgtttt

SEQ ID NO: 108266 - DNA, 25 bp, Saccharomyces pastorianus
gcaaaggacgctctggaccatgaat

SEQ ID NO: 108267 - DNA, 25 bp, Saccharomyces pastorianus
tgaactcgataaggaaactttcttg

SEQ ID NO: 108268 - DNA, 25 bp, Saccharomyces pastorianus
tgcaacttataataatacccaagga

SEQ ID NO: 108269 - DNA, 25 bp, Saccharomyces pastorianus
cgctctggaccatgaatggtttaat

SEQ ID NO: 108270 - DNA, 25 bp, Saccharomyces pastorianus
ggttcatcgatctactcaggaaaat

SEQ ID NO: 108271 - DNA, 25 bp, Saccharomyces pastorianus
atcgatctactcaggaaaatgtttg

SEQ ID NO: 108272 - DNA, 25 bp, Saccharomyces pastorianus
gtactggttcatcgatctactcagg

SEQ ID NO: 108273 - DNA, 25 bp, Saccharomyces pastorianus
tgagttcgacccaacaaaaaggatt

SEQ ID NO: 108274 - DNA, 25 bp, Saccharomyces pastorianus
gaaaatgtttgagttcgacccaaca

SEQ ID NO: 108275 - DNA, 25 bp, Saccharomyces pastorianus
actggatgatggtattgcaacttat

SEQ ID NO: 108276 - DNA, 25 bp, Saccharomyces pastorianus
aaggattaccgcaaaggacgctctg

SEQ ID NO: 108277 - DNA, 25 bp, Saccharomyces pastorianus
accaaacgtgccttggcccaatagg

SEQ ID NO: 108278 - DNA, 25 bp, Saccharomyces pastorianus
tggcccaataggtccttcacaacaa

SEQ ID NO: 108279 - DNA, 25 bp, Saccharomyces pastorianus
gcccaataggtccttcacaacaaag

SEQ ID NO: 108280 - DNA, 25 bp, Saccharomyces pastorianus
ggcccaataggtccttcacaacaaa

SEQ ID NO: 108281 - DNA, 25 bp, Saccharomyces pastorianus
ttggcccaataggtccttcacaaca

SEQ ID NO: 108282 - DNA, 25 bp, Saccharomyces pastorianus
aataggtccttcacaacaaagcggc

SEQ ID NO: 108283 - DNA, 25 bp, Saccharomyces pastorianus
taccaaacgtgccttggcccaatag

SEQ ID NO: 108284 - DNA, 25 bp, Saccharomyces pastorianus
taagtactttaccaaacgtgccttg

SEQ ID NO: 108285 - DNA, 25 bp, Saccharomyces pastorianus
taggtccttcacaacaaagcggccg

SEQ ID NO: 108286 - DNA, 25 bp, Saccharomyces pastorianus
caaacgtgccttggcccaataggtc

SEQ ID NO: 108287 - DNA, 25 bp, Saccharomyces pastorianus
tttaccaaacgtgccttggcccaat

SEQ ID NO: 108288 - DNA, 25 bp, Saccharomyces pastorianus
agggaacccaggaagctcgctgagc

SEQ ID NO: 108289 - DNA, 25 bp, Saccharomyces pastorianus
gagagaggttcgttcccgctagacc

SEQ ID NO: 108290 - DNA, 25 bp, Saccharomyces pastorianus
agacctactccacccgagagaggtt

SEQ ID NO: 108291 - DNA, 25 bp, Saccharomyces pastorianus
tcgctgagcgcattgagacctactc

SEQ ID NO: 108292 - DNA, 25 bp, Saccharomyces pastorianus
ctggcaaaggactacctgcggtgca

SEQ ID NO: 108293 - DNA, 25 bp, Saccharomyces pastorianus
ggaccaccaattgatggactacgat

SEQ ID NO: 108294 - DNA, 25 bp, Saccharomyces pastorianus
aatggtcacatttaggtcttcctga

SEQ ID NO: 108295 - DNA, 25 bp, Saccharomyces pastorianus
ctgcggtgcaggatggaccaccaat

SEQ ID NO: 108296 - DNA, 25 bp, Saccharomyces pastorianus
gtatctcaaatgtatgcagcttgtg

SEQ ID NO: 108297 - DNA, 25 bp, Saccharomyces pastorianus
gaccacgacggcgaatgcaccaagt

SEQ ID NO: 108298 - DNA, 25 bp, Saccharomyces pastorianus
tgaggatgctccaggcaacaacggt

SEQ ID NO: 108299 - DNA, 25 bp, Saccharomyces pastorianus
ttcttgggtaagttggttcgcgaca

SEQ ID NO: 108300 - DNA, 25 bp, Saccharomyces pastorianus
tccacgaccatgctctattacaaga

SEQ ID NO: 108301 - DNA, 25 bp, Saccharomyces pastorianus
gtttgtctcctgaagacccaggttt

SEQ ID NO: 108302 - DNA, 25 bp, Saccharomyces pastorianus
tttacatcctagacaagttcccctt

SEQ ID NO: 108303 - DNA, 25 bp, Saccharomyces pastorianus
gaagaaatcttgtccggtgcacaac

SEQ ID NO: 108304 - DNA, 25 bp, Saccharomyces pastorianus
gacggcttcagctatgggtgtcctc

SEQ ID NO: 108305 - DNA, 25 bp, Saccharomyces pastorianus
ttaaaggactactgtgacggcttca

SEQ ID NO: 108306 - DNA, 25 bp, Saccharomyces pastorianus
aatacgacaccgacttttacatcct

SEQ ID NO: 108307 - DNA, 25 bp, Saccharomyces pastorianus
cagccaaccctaagtattctaactc

SEQ ID NO: 108308 - DNA, 25 bp, Saccharomyces pastorianus
gatgaaagcccatggtttgtctcct

SEQ ID NO: 108309 - DNA, 25 bp, Saccharomyces pastorianus
gtacgtaagcaataccctgttgaag

SEQ ID NO: 108310 - DNA, 25 bp, Saccharomyces pastorianus
agaacaagaaaaccacgcggagtgc

SEQ ID NO: 108311 - DNA, 25 bp, Saccharomyces pastorianus
agccatgttgcgtctgtaagccaga

SEQ ID NO: 108312 - DNA, 25 bp, Saccharomyces pastorianus
aaacctaagccatgttgcgtctgta

SEQ ID NO: 108313 - DNA, 25 bp, Saccharomyces pastorianus
cttattcaatggacaagactctgaa

SEQ ID NO: 108314 - DNA, 25 bp, Saccharomyces pastorianus
gtgcgaggacaaacctaagccatgt

SEQ ID NO: 108315 - DNA, 25 bp, Saccharomyces pastorianus
aaaccacgcggagtgcgaggacaaa

SEQ ID NO: 108316 - DNA, 25 bp, Saccharomyces pastorianus
gttgcgtctgtaagccagaaaagga

SEQ ID NO: 108317 - DNA, 25 bp, Saccharomyces pastorianus
gcgggatacatgcatcttattcaat

SEQ ID NO: 108318 - DNA, 25 bp, Saccharomyces pastorianus
ggaggagcgggatacatgcatctta

SEQ ID NO: 108319 - DNA, 25 bp, Saccharomyces pastorianus
acatgcatcttattcaatggacaag

SEQ ID NO: 108320 - DNA, 25 bp, Saccharomyces pastorianus
agactctgaaaaatgcaaggaattc

SEQ ID NO: 108321 - DNA, 25 bp, Saccharomyces pastorianus
gtccaggttctgaggcattagctaa

SEQ ID NO: 108322 - DNA, 25 bp, Saccharomyces pastorianus
gagaacccactgaatcctgaagctg

SEQ ID NO: 108323 - DNA, 25 bp, Saccharomyces pastorianus
agaacttactacaccgagtcgtcgg

SEQ ID NO: 108324 - DNA, 25 bp, Saccharomyces pastorianus
atttgaacgttcgtcaggacatcat

SEQ ID NO: 108325 - DNA, 25 bp, Saccharomyces pastorianus
aagtctacttcctcatagtttcaga

SEQ ID NO: 108326 - DNA, 25 bp, Saccharomyces pastorianus
cgatttaccttatctattcgacaat

SEQ ID NO: 108327 - DNA, 25 bp, Saccharomyces pastorianus
aggacatcatagtgcctccacctga

SEQ ID NO: 108328 - DNA, 25 bp, Saccharomyces pastorianus
aaattgatatctccattccagcatg

SEQ ID NO: 108329 - DNA, 25 bp, Saccharomyces pastorianus
aagctggcacgcctaaagtctactt

SEQ ID NO: 108330 - DNA, 25 bp, Saccharomyces pastorianus
aaccacgcaaatttattagccagag

SEQ ID NO: 108331 - DNA, 25 bp, Saccharomyces pastorianus
gtcgtcggacgagcagtaatgttta

SEQ ID NO: 108332 - DNA, 25 bp, Saccharomyces pastorianus
gttgcatctcattttcgatggtttt

SEQ ID NO: 108333 - DNA, 25 bp, Saccharomyces pastorianus
tctaacagtaatcacgcacgccaaa

SEQ ID NO: 108334 - DNA, 25 bp, Saccharomyces pastorianus
tatcctatattctcagtgttgggct

SEQ ID NO: 108335 - DNA, 25 bp, Saccharomyces pastorianus
acaggcccttatgcaattgtacgcg

SEQ ID NO: 108336 - DNA, 25 bp, Saccharomyces pastorianus
ataatgcttgttgtctttgctctaa

SEQ ID NO: 108337 - DNA, 25 bp, Saccharomyces pastorianus
actcgggctgttcactctttttgat

SEQ ID NO: 108338 - DNA, 25 bp, Saccharomyces pastorianus
gtttccatgatattttctccatttg

SEQ ID NO: 108339 - DNA, 25 bp, Saccharomyces pastorianus
gtacgcgggcatttatttcatggaa

SEQ ID NO: 108340 - DNA, 25 bp, Saccharomyces pastorianus
gcctcaacgcataccaactttggaa

SEQ ID NO: 108341 - DNA, 25 bp, Saccharomyces pastorianus
tggagaagtcgtatcacctgaaatt

SEQ ID NO: 108342 - DNA, 25 bp, Saccharomyces pastorianus
atggaattttgtttactcgggctgt

SEQ ID NO: 108343 - DNA, 25 bp, Saccharomyces pastorianus
aagtttgttgctcgattcctcgaag

SEQ ID NO: 108344 - DNA, 25 bp, Saccharomyces pastorianus
ggatcggcttcattttgaacccatt

SEQ ID NO: 108345 - DNA, 25 bp, Saccharomyces pastorianus
aatggctccggtactgggtcagcta

SEQ ID NO: 108346 - DNA, 25 bp, Saccharomyces pastorianus
aaacaccggacgcatttgacaaagt

SEQ ID NO: 108347 - DNA, 25 bp, Saccharomyces pastorianus
gtcgattttcccttcttacaagtca

SEQ ID NO: 108348 - DNA, 25 bp, Saccharomyces pastorianus
tcctatctagatcgttggtcagcat

SEQ ID NO: 108349 - DNA, 25 bp, Saccharomyces pastorianus
aggtgctgccttcgcttgataaaga

SEQ ID NO: 108350 - DNA, 25 bp, Saccharomyces pastorianus
ataagaaaagatccctccaacacca

SEQ ID NO: 108351 - DNA, 25 bp, Saccharomyces pastorianus
tcttcgcctttgaaaacatgggtct

SEQ ID NO: 108352 - DNA, 25 bp, Saccharomyces pastorianus
gtggattacttactcagtcgatttt

SEQ ID NO: 108353 - DNA, 25 bp, Saccharomyces pastorianus
gcttattggcaaactagactcctat

SEQ ID NO: 108354 - DNA, 25 bp, Saccharomyces pastorianus
gtgtcacatcatctgtaatgggtat

SEQ ID NO: 108355 - DNA, 25 bp, Saccharomyces pastorianus
gtgccgatgttattgtaccgaagtc

SEQ ID NO: 108356 - DNA, 25 bp, Saccharomyces pastorianus
tattcgtgattttctattgctcaga

SEQ ID NO: 108357 - DNA, 25 bp, Saccharomyces pastorianus
gaaggcgcaatagaagctttcacca

SEQ ID NO: 108358 - DNA, 25 bp, Saccharomyces pastorianus
agtaagcttatcatccttctggatt

SEQ ID NO: 108359 - DNA, 25 bp, Saccharomyces pastorianus
ggtatttcgggatactctcttgcca

SEQ ID NO: 108360 - DNA, 25 bp, Saccharomyces pastorianus
agatcgcctcctcaaagtaagctta

SEQ ID NO: 108361 - DNA, 25 bp, Saccharomyces pastorianus
catctttatttccatctagtgccga

SEQ ID NO: 108362 - DNA, 25 bp, Saccharomyces pastorianus
gataccgggcgaagatcctgctcga

SEQ ID NO: 108363 - DNA, 25 bp, Saccharomyces pastorianus
gaaatcagccggttcctgcaagcaa

SEQ ID NO: 108364 - DNA, 25 bp, Saccharomyces pastorianus
tcctgctcgagtaagatcataccta

SEQ ID NO: 108365 - DNA, 25 bp, Saccharomyces pastorianus
aaattcgtcgatgggctttacgcgc

SEQ ID NO: 108366 - DNA, 25 bp, Saccharomyces pastorianus
tgctgaggtccgtaaggctttgctt

SEQ ID NO: 108367 - DNA, 25 bp, Saccharomyces pastorianus
ggagtaacccagaggcagcaacctt

SEQ ID NO: 108368 - DNA, 25 bp, Saccharomyces pastorianus
gaacttctgctaaaggctctggacc

SEQ ID NO: 108369 - DNA, 25 bp, Saccharomyces pastorianus
ttgtacatgtgcatcagccataccc

SEQ ID NO: 108370 - DNA, 25 bp, Saccharomyces pastorianus
taaggttggctgacccactcaataa

SEQ ID NO: 108371 - DNA, 25 bp, Saccharomyces pastorianus
ggctctggaccatatatttttccgc

SEQ ID NO: 108372 - DNA, 25 bp, Saccharomyces pastorianus
atttttccgctctaaatcagggact

SEQ ID NO: 108373 - DNA, 25 bp, Saccharomyces pastorianus
ggctacggcgtttaccaaaagattg

SEQ ID NO: 108374 - DNA, 25 bp, Saccharomyces pastorianus
tcaggcctttactcttccgaagata

SEQ ID NO: 108375 - DNA, 25 bp, Saccharomyces pastorianus
tgaattcgataacctttcctctgct

SEQ ID NO: 108376 - DNA, 25 bp, Saccharomyces pastorianus
taagggtttcacactcgtaaagatg

SEQ ID NO: 108377 - DNA, 25 bp, Saccharomyces pastorianus
gttgccagtcaagatttcccatact

SEQ ID NO: 108378 - DNA, 25 bp, Saccharomyces pastorianus
ctactgacaagttctcgctatcgtt

SEQ ID NO: 108379 - DNA, 25 bp, Saccharomyces pastorianus
ccacagtctgtccatgttgtgactt

SEQ ID NO: 108380 - DNA, 25 bp, Saccharomyces pastorianus
gtgacttgatgctaatcctttctac

SEQ ID NO: 108381 - DNA, 25 bp, Saccharomyces pastorianus
ggatacttctgtcccaattgtcata

SEQ ID NO: 108382 - DNA, 25 bp, Saccharomyces pastorianus
tactccaactttttgttcgtgccat

SEQ ID NO: 108383 - DNA, 25 bp, Saccharomyces pastorianus
tattcaacgaggctgttaccccttt

SEQ ID NO: 108384 - DNA, 25 bp, Saccharomyces pastorianus
tgtgttgactgcgatgtgttcatcc

SEQ ID NO: 108385 - DNA, 25 bp, Saccharomyces pastorianus
gatcatatcaccatctgatgccgtt

SEQ ID NO: 108386 - DNA, 25 bp, Saccharomyces pastorianus
gttcgtgccattccaagttagttta

SEQ ID NO: 108387 - DNA, 25 bp, Saccharomyces pastorianus
gttctgccgttctaaatgtcacaag

SEQ ID NO: 108388 - DNA, 25 bp, Saccharomyces pastorianus
aatagagagttagttgccacaactt

SEQ ID NO: 108389 - DNA, 25 bp, Saccharomyces pastorianus
aggttctgccgttctaaatgtcaca

SEQ ID NO: 108390 - DNA, 25 bp, Saccharomyces pastorianus
gaatcagggaagttgaaattgccag

SEQ ID NO: 108391 - DNA, 25 bp, Saccharomyces pastorianus
gtatccgaacaagaggaatctgaag

SEQ ID NO: 108392 - DNA, 25 bp, Saccharomyces pastorianus
gaaattgccagaaagttggctaaag

SEQ ID NO: 108393 - DNA, 25 bp, Saccharomyces pastorianus
tgtccctgttagatacaatagagag

SEQ ID NO: 108394 - DNA, 25 bp, Saccharomyces pastorianus
gaggatatggaaatcgacagtgacg

SEQ ID NO: 108395 - DNA, 25 bp, Saccharomyces pastorianus
ggctatggctagaatcgaagaaatt

SEQ ID NO: 108396 - DNA, 25 bp, Saccharomyces pastorianus
gagctgaatcagtatccgaacaaga

SEQ ID NO: 108397 - DNA, 25 bp, Saccharomyces pastorianus
taaagagtttaggttctgccgttct

SEQ ID NO: 108398 - DNA, 25 bp, Saccharomyces pastorianus
aaccaaacattattcatccgtccga

SEQ ID NO: 108399 - DNA, 25 bp, Saccharomyces pastorianus
atgagccagttagttctagacttaa

SEQ ID NO: 108400 - DNA, 25 bp, Saccharomyces pastorianus
gaaagattattctcagcccataaag

SEQ ID NO: 108401 - DNA, 25 bp, Saccharomyces pastorianus
attcaggatggttgttcgattagta

SEQ ID NO: 108402 - DNA, 25 bp, Saccharomyces pastorianus
atttcttgttctgtgaatcggatga

SEQ ID NO: 108403 - DNA, 25 bp, Saccharomyces pastorianus
tggaatacaccaaagtccgccaatt

SEQ ID NO: 108404 - DNA, 25 bp, Saccharomyces pastorianus
gaaatcttcattgcctcaattcaac

SEQ ID NO: 108405 - DNA, 25 bp, Saccharomyces pastorianus
tgggcaggtactggatgttcgcatt

SEQ ID NO: 108406 - DNA, 25 bp, Saccharomyces pastorianus
attcatccgtccgaaagattcagga

SEQ ID NO: 108407 - DNA, 25 bp, Saccharomyces pastorianus
gacgttcgtgatttctgtgaatttg

SEQ ID NO: 108408 - DNA, 25 bp, Saccharomyces pastorianus
tactatccaggaatgacgttcgtga

SEQ ID NO: 108409 - DNA, 25 bp, Saccharomyces pastorianus
aacagattgctcttcccttatatga

SEQ ID NO: 108410 - DNA, 25 bp, Saccharomyces pastorianus
gcaattgatcgtctttaccatgaat

SEQ ID NO: 108411 - DNA, 25 bp, Saccharomyces pastorianus
gggtatccagcagccttaaaaaatg

SEQ ID NO: 108412 - DNA, 25 bp, Saccharomyces pastorianus
aactcgatcgtggagtcgcatcgta

SEQ ID NO: 108413 - DNA, 25 bp, Saccharomyces pastorianus
gagggtatgcccagaaattgcagca

SEQ ID NO: 108414 - DNA, 25 bp, Saccharomyces pastorianus
atgcagacagcaaaactcgatcgtg

SEQ ID NO: 108415 - DNA, 25 bp, Saccharomyces pastorianus
gatgatgacgaactgatccctgcgc

SEQ ID NO: 108416 - DNA, 25 bp, Saccharomyces pastorianus
ggacattgtaccacaactcagcgtg

SEQ ID NO: 108417 - DNA, 25 bp, Saccharomyces pastorianus
tacgataccgttacccgaggacatt

SEQ ID NO: 108418 - DNA, 25 bp, Saccharomyces pastorianus
gaactgatccctgcgcaaataaaga

SEQ ID NO: 108419 - DNA, 25 bp, Saccharomyces pastorianus
gaaaacctgccctggtggtaagcta

SEQ ID NO: 108420 - DNA, 25 bp, Saccharomyces pastorianus
tagactgcgaaaaacctcactctca

SEQ ID NO: 108421 - DNA, 25 bp, Saccharomyces pastorianus
agatgtccacagtgtgcggtgataa

SEQ ID NO: 108422 - DNA, 25 bp, Saccharomyces pastorianus
ttggtttttggcaaggatctggcaa

SEQ ID NO: 108423 - DNA, 25 bp, Saccharomyces pastorianus
actgctaaacccattagtgcatctt

SEQ ID NO: 108424 - DNA, 25 bp, Saccharomyces pastorianus
aaaggcgtcaccaggagatgtccac

SEQ ID NO: 108425 - DNA, 25 bp, Saccharomyces pastorianus
agtgcatctttgtatgtcacaacga

SEQ ID NO: 108426 - DNA, 25 bp, Saccharomyces pastorianus
gctgttgttcagcacaatgtccaaa

SEQ ID NO: 108427 - DNA, 25 bp, Saccharomyces pastorianus
ggtgataaaaacttctccgcaatgg

SEQ ID NO: 108428 - DNA, 25 bp, Saccharomyces pastorianus
gaatctccgttgaatcgttattgaa

SEQ ID NO: 108429 - DNA, 25 bp, Saccharomyces pastorianus
gatctggcaaaacggtactttaacg

SEQ ID NO: 108430 - DNA, 25 bp, Saccharomyces pastorianus
agactttgtgtcatccagaatataa

SEQ ID NO: 108431 - DNA, 25 bp, Saccharomyces pastorianus
gaggcagaacctgttaccgtagaaa

SEQ ID NO: 108432 - DNA, 25 bp, Saccharomyces pastorianus
aagatcatcgtctcaatggccaagg

SEQ ID NO: 108433 - DNA, 25 bp, Saccharomyces pastorianus
taccgtaccagaggctatgtccaag

SEQ ID NO: 108434 - DNA, 25 bp, Saccharomyces pastorianus
acagccgttctctcaaaaattcgca

SEQ ID NO: 108435 - DNA, 25 bp, Saccharomyces pastorianus
taggtcacgttggtttcggacagcc

SEQ ID NO: 108436 - DNA, 25 bp, Saccharomyces pastorianus
agaaatctatctctaccgtaccaga

SEQ ID NO: 108437 - DNA, 25 bp, Saccharomyces pastorianus
aagcctagagattttgtgttaccac

SEQ ID NO: 108438 - DNA, 25 bp, Saccharomyces pastorianus
gaccgttgtgtgtatggaaggccca

SEQ ID NO: 108439 - DNA, 25 bp, Saccharomyces pastorianus
gaatccgaagaaccgtgccatttgc

SEQ ID NO: 108440 - DNA, 25 bp, Saccharomyces pastorianus
tgagctgccttaccagatgatttgt

SEQ ID NO: 108441 - DNA, 25 bp, Saccharomyces pastorianus
ttcatgcatactggcgatgggctgc

SEQ ID NO: 108442 - DNA, 25 bp, Saccharomyces pastorianus
ggcatagcggtatcagtagcacatt

SEQ ID NO: 108443 - DNA, 25 bp, Saccharomyces pastorianus
aagctcttatccaccgtcaaagtaa

SEQ ID NO: 108444 - DNA, 25 bp, Saccharomyces pastorianus
tgtatttggcacactgcagaggcat

SEQ ID NO: 108445 - DNA, 25 bp, Saccharomyces pastorianus
gccgcatacccctgtaactaggaag

SEQ ID NO: 108446 - DNA, 25 bp, Saccharomyces pastorianus
aatcatctgtcgatactgggttgca

SEQ ID NO: 108447 - DNA, 25 bp, Saccharomyces pastorianus
actgttttctctttggaagctctta

SEQ ID NO: 108448 - DNA, 25 bp, Saccharomyces pastorianus
aacttcttgactacttgttccacct

SEQ ID NO: 108449 - DNA, 25 bp, Saccharomyces pastorianus
tgttccacctattaatctcgctcaa

SEQ ID NO: 108450 - DNA, 25 bp, Saccharomyces pastorianus
tacaatctcaatccttacacacaaa

SEQ ID NO: 108451 - DNA, 25 bp, Saccharomyces pastorianus
acatcatatatcacaccacgttcag

SEQ ID NO: 108452 - DNA, 25 bp, Saccharomyces pastorianus
gagacagttttgcaaccggctatcc

SEQ ID NO: 108453 - DNA, 25 bp, Saccharomyces pastorianus
gccgatcctaaagtacccgtggtat

SEQ ID NO: 108454 - DNA, 25 bp, Saccharomyces pastorianus
gtgagcggtacgatggcccaagaca

SEQ ID NO: 108455 - DNA, 25 bp, Saccharomyces pastorianus
aagttgggagatagtgccgatccta

SEQ ID NO: 108456 - DNA, 25 bp, Saccharomyces pastorianus
aaggactaaacccaattctcgatat

SEQ ID NO: 108457 - DNA, 25 bp, Saccharomyces pastorianus
tcgatatcaacgtaccactggcagg

SEQ ID NO: 108458 - DNA, 25 bp, Saccharomyces pastorianus
tgaattccaaactcatccaccgaaa

SEQ ID NO: 108459 - DNA, 25 bp, Saccharomyces pastorianus
atagctcattgaacgcttcatccga

SEQ ID NO: 108460 - DNA, 25 bp, Saccharomyces pastorianus
gtatgcgtacagattgccgaactat

SEQ ID NO: 108461 - DNA, 25 bp, Saccharomyces pastorianus
ttgtatgtacaagccacgcacttta

SEQ ID NO: 108462 - DNA, 25 bp, Saccharomyces pastorianus
ggattccacctatgaggtatcttca

SEQ ID NO: 108463 - DNA, 25 bp, Saccharomyces pastorianus
attcagcttgctgatatccatgagc

SEQ ID NO: 108464 - DNA, 25 bp, Saccharomyces pastorianus
gacatgtacaggtcttatcgatcct

SEQ ID NO: 108465 - DNA, 25 bp, Saccharomyces pastorianus
gaagccggaattggatccttggaca

SEQ ID NO: 108466 - DNA, 25 bp, Saccharomyces pastorianus
aattgatagcttcatcgcctggaga

SEQ ID NO: 108467 - DNA, 25 bp, Saccharomyces pastorianus
gaagtgctgcagatacatcaagttt

SEQ ID NO: 108468 - DNA, 25 bp, Saccharomyces pastorianus
gtgtttcgggactacaaatgttgat

SEQ ID NO: 108469 - DNA, 25 bp, Saccharomyces pastorianus
agagatttgatgaccctatgtgata

SEQ ID NO: 108470 - DNA, 25 bp, Saccharomyces pastorianus
aagtgagccatctagacaacccgaa

SEQ ID NO: 108471 - DNA, 25 bp, Saccharomyces pastorianus
cgcccacaatgatccacaaagcttt

SEQ ID NO: 108472 - DNA, 25 bp, Saccharomyces pastorianus
aaatgcttaccatagttagcgctaa

SEQ ID NO: 108473 - DNA, 25 bp, Saccharomyces pastorianus
gaactgaagttcagccctgttatta

SEQ ID NO: 108474 - DNA, 25 bp, Saccharomyces pastorianus
gcctggagagtcaacgaagccggaa

SEQ ID NO: 108475 - DNA, 25 bp, Saccharomyces pastorianus
aaacgcaaagcaatcacgccgcgga

SEQ ID NO: 108476 - DNA, 25 bp, Saccharomyces pastorianus
ggacatgcaccagctgatgaccaaa

SEQ ID NO: 108477 - DNA, 25 bp, Saccharomyces pastorianus
gtataacaactccaacccattcatg

SEQ ID NO: 108478 - DNA, 25 bp, Saccharomyces pastorianus
ggaaatctcttccaacaactggcct

SEQ ID NO: 108479 - DNA, 25 bp, Saccharomyces pastorianus
aaactaaccaccgacactggacatg

SEQ ID NO: 108480 - DNA, 25 bp, Saccharomyces pastorianus
gccgcggacttgaccacgtataaca

SEQ ID NO: 108481 - DNA, 25 bp, Saccharomyces pastorianus
aacattagtggtgctcaaagggaac

SEQ ID NO: 108482 - DNA, 25 bp, Saccharomyces pastorianus
tttccctcaaaacgactctcaacta

SEQ ID NO: 108483 - DNA, 25 bp, Saccharomyces pastorianus
ccattcatgacctcactactagatg

SEQ ID NO: 108484 - DNA, 25 bp, Saccharomyces pastorianus
gaataacaactcgtccaaccaagga

SEQ ID NO: 108485 - DNA, 25 bp, Saccharomyces pastorianus
aagcaacctagtgccgtacagcact

SEQ ID NO: 108486 - DNA, 25 bp, Saccharomyces pastorianus
aaattcgatggacgtctctcattaa

SEQ ID NO: 108487 - DNA, 25 bp, Saccharomyces pastorianus
ttcggcaggcgaacaagttgtcatt

SEQ ID NO: 108488 - DNA, 25 bp, Saccharomyces pastorianus
gtcattttttcccaattttctacat

SEQ ID NO: 108489 - DNA, 25 bp, Saccharomyces pastorianus
tttctacatacttggatatcctgga

SEQ ID NO: 108490 - DNA, 25 bp, Saccharomyces pastorianus
gaattggccagacaaacagcgtcaa

SEQ ID NO: 108491 - DNA, 25 bp, Saccharomyces pastorianus
gtttgaatctaacgtgtgcttccca

SEQ ID NO: 108492 - DNA, 25 bp, Saccharomyces pastorianus
gtgcttcccacgcttatatgatgga

SEQ ID NO: 108493 - DNA, 25 bp, Saccharomyces pastorianus
attactctctctgaaggctggtggc

SEQ ID NO: 108494 - DNA, 25 bp, Saccharomyces pastorianus
aactatcggtgaggccatggacaca

SEQ ID NO: 108495 - DNA, 25 bp, Saccharomyces pastorianus
gcttgtcggttgttggcattggtac

SEQ ID NO: 108496 - DNA, 25 bp, Saccharomyces pastorianus
aattcaaaccatattcaccagcctc

SEQ ID NO: 108497 - DNA, 25 bp, Saccharomyces pastorianus
taaagttttgaagcctactacggag

SEQ ID NO: 108498 - DNA, 25 bp, Saccharomyces pastorianus
aaaagcaatggcgttcaggacgata

SEQ ID NO: 108499 - DNA, 25 bp, Saccharomyces pastorianus
gagaactttcgaaatggcacaccag

SEQ ID NO: 108500 - DNA, 25 bp, Saccharomyces pastorianus
tagcatacctgtggtaagggcgcaa

SEQ ID NO: 108501 - DNA, 25 bp, Saccharomyces pastorianus
gataagttggtttcagagtctctct

SEQ ID NO: 108502 - DNA, 25 bp, Saccharomyces pastorianus
gcgactatcgcttctgcaaattcag

SEQ ID NO: 108503 - DNA, 25 bp, Saccharomyces pastorianus
aacggcaccgttgtggattcgacaa

SEQ ID NO: 108504 - DNA, 25 bp, Saccharomyces pastorianus
tgtaagggcctttccagtattacaa

SEQ ID NO: 108505 - DNA, 25 bp, Saccharomyces pastorianus
ctacggaggaacgagaactatactt

SEQ ID NO: 108506 - DNA, 25 bp, Saccharomyces pastorianus
aattggacaccatctaattacattg

SEQ ID NO: 108507 - DNA, 25 bp, Saccharomyces pastorianus
gtttccaaggttcctataaacaatg

SEQ ID NO: 108508 - DNA, 25 bp, Saccharomyces pastorianus
atcgtatccgctcctttaatttatt

SEQ ID NO: 108509 - DNA, 25 bp, Saccharomyces pastorianus
ttatgttctggtcaatctgccggta

SEQ ID NO: 108510 - DNA, 25 bp, Saccharomyces pastorianus
tgtggtaagagcacctgccgatgtt

SEQ ID NO: 108511 - DNA, 25 bp, Saccharomyces pastorianus
tcgtttgttgacctatacctctgtt

SEQ ID NO: 108512 - DNA, 25 bp, Saccharomyces pastorianus
attgccacctttgtgaattccgcta

SEQ ID NO: 108513 - DNA, 25 bp, Saccharomyces pastorianus
tgccgatgttaacgccattgctgat

SEQ ID NO: 108514 - DNA, 25 bp, Saccharomyces pastorianus
gggttaatctttgcattggccatgt

SEQ ID NO: 108515 - DNA, 25 bp, Saccharomyces pastorianus
gcaggtgctactttatcaggccaac

SEQ ID NO: 108516 - DNA, 25 bp, Saccharomyces pastorianus
cctctgttttcgtatgggctttaat

SEQ ID NO: 108517 - DNA, 25 bp, Saccharomyces pastorianus
ttgccgggcaaatcgtttctgaggg

SEQ ID NO: 108518 - DNA, 25 bp, Saccharomyces pastorianus
aatctgccggtatcatctgtacact

SEQ ID NO: 108519 - DNA, 25 bp, Saccharomyces pastorianus
caacaactacgtctataccctgaag

SEQ ID NO: 108520 - DNA, 25 bp, Saccharomyces pastorianus
atgcatttttccgagtataccaaca

SEQ ID NO: 108521 - DNA, 25 bp, Saccharomyces pastorianus
acaaggccgaaactcatgcattttt

SEQ ID NO: 108522 - DNA, 25 bp, Saccharomyces pastorianus
gacgcttctatttctaatcctttta

SEQ ID NO: 108523 - DNA, 25 bp, Saccharomyces pastorianus
ttcttccagtcttttgcaagccttg

SEQ ID NO: 108524 - DNA, 25 bp, Saccharomyces pastorianus
ggacatggccattccacgaaattcg

SEQ ID NO: 108525 - DNA, 25 bp, Saccharomyces pastorianus
aaccgggacacattgaagccacgac

SEQ ID NO: 108526 - DNA, 25 bp, Saccharomyces pastorianus
tagcaggagctggatcctcaacatt

SEQ ID NO: 108527 - DNA, 25 bp, Saccharomyces pastorianus
acttgaggccaaacgtactagctgt

SEQ ID NO: 108528 - DNA, 25 bp, Saccharomyces pastorianus
taaagcttcagcaaacctacggtaa

SEQ ID NO: 108529 - DNA, 25 bp, Saccharomyces pastorianus
tcaacattaccctcgtcattaactt

SEQ ID NO: 108530 - DNA, 25 bp, Saccharomyces pastorianus
tattaatttacaccgactatcacag

SEQ ID NO: 108531 - DNA, 25 bp, Saccharomyces pastorianus
aagtatcctaaatggtttcagctaa

SEQ ID NO: 108532 - DNA, 25 bp, Saccharomyces pastorianus
gtaacaatttccctcgttattatag

SEQ ID NO: 108533 - DNA, 25 bp, Saccharomyces pastorianus
gtcccagctgtgctgccagaaaaaa

SEQ ID NO: 108534 - DNA, 25 bp, Saccharomyces pastorianus
gagatcccaaagtctaattccttat

SEQ ID NO: 108535 - DNA, 25 bp, Saccharomyces pastorianus
gctatttagattgcagctaggctgg

SEQ ID NO: 108536 - DNA, 25 bp, Saccharomyces pastorianus
taggctggatatgtactactgcatt

SEQ ID NO: 108537 - DNA, 25 bp, Saccharomyces pastorianus
gctttcagcttctacttttgtacca

SEQ ID NO: 108538 - DNA, 25 bp, Saccharomyces pastorianus
tgcgttgatattacatagcgggttc

SEQ ID NO: 108539 - DNA, 25 bp, Saccharomyces pastorianus
gaaggtagtatgtcccagctgtgct

SEQ ID NO: 108540 - DNA, 25 bp, Saccharomyces pastorianus
ttggtatcaatgactgctttcagct

SEQ ID NO: 108541 - DNA, 25 bp, Saccharomyces pastorianus
gaagacctataacgccttatgtccc

SEQ ID NO: 108542 - DNA, 25 bp, Saccharomyces pastorianus
tcttttggaagacctataacgcctt

SEQ ID NO: 108543 - DNA, 25 bp, Saccharomyces pastorianus
ggtttcgatgctagatttccccaac

SEQ ID NO: 108544 - DNA, 25 bp, Saccharomyces pastorianus
gatgctagatttccccaacaaaacc

SEQ ID NO: 108545 - DNA, 25 bp, Saccharomyces pastorianus
aactctccactacatacagttggtt

SEQ ID NO: 108546 - DNA, 25 bp, Saccharomyces pastorianus
ggctgatcaagaaaactctccacta

SEQ ID NO: 108547 - DNA, 25 bp, Saccharomyces pastorianus
ctataacgccttatgtcccctagac

SEQ ID NO: 108548 - DNA, 25 bp, Saccharomyces pastorianus
ggcaatcttatgtggattatcacaa

SEQ ID NO: 108549 - DNA, 25 bp, Saccharomyces pastorianus
aacaaagcattgttggcaatcttat

SEQ ID NO: 108550 - DNA, 25 bp, Saccharomyces pastorianus
aagggcgaagattttgctccgtgca

SEQ ID NO: 108551 - DNA, 25 bp, Saccharomyces pastorianus
tttgctccgtgcaaggtcttttgga

SEQ ID NO: 108552 - DNA, 25 bp, Saccharomyces pastorianus
gcaggccagtccatgatttccatga

SEQ ID NO: 108553 - DNA, 25 bp, Saccharomyces pastorianus
atttggcctcaacagcagatttaca

SEQ ID NO: 108554 - DNA, 25 bp, Saccharomyces pastorianus
acagcacttatatccgcatcaaact

SEQ ID NO: 108555 - DNA, 25 bp, Saccharomyces pastorianus
ttccaaacattcattacggcctttc

SEQ ID NO: 108556 - DNA, 25 bp, Saccharomyces pastorianus
attctgttcctttctcgacagcgaa

SEQ ID NO: 108557 - DNA, 25 bp, Saccharomyces pastorianus
caacctgttgctgactactactatc

SEQ ID NO: 108558 - DNA, 25 bp, Saccharomyces pastorianus
aatgacgatacacttgccaggtccg

SEQ ID NO: 108559 - DNA, 25 bp, Saccharomyces pastorianus
ttatgccagccaacaaaactccgtt

SEQ ID NO: 108560 - DNA, 25 bp, Saccharomyces pastorianus
agaagctaccatgactaactcctct

SEQ ID NO: 108561 - DNA, 25 bp, Saccharomyces pastorianus
aatggtgcccatgccaaaagcttat

SEQ ID NO: 108562 - DNA, 25 bp, Saccharomyces pastorianus
gagttttccgttcactcaattccaa

SEQ ID NO: 108563 - DNA, 25 bp, Saccharomyces pastorianus
tgcatctgcagctgcggacctggca

SEQ ID NO: 108564 - DNA, 25 bp, Saccharomyces pastorianus
ctagacgttaaagttttggcagcaa

SEQ ID NO: 108565 - DNA, 25 bp, Saccharomyces pastorianus
actgtggctgattagaaagcttacc

SEQ ID NO: 108566 - DNA, 25 bp, Saccharomyces pastorianus
gaaagcttaccaggagaatattttt

SEQ ID NO: 108567 - DNA, 25 bp, Saccharomyces pastorianus
cggacctggcaagtgtatcgtcatt

SEQ ID NO: 108568 - DNA, 25 bp, Saccharomyces pastorianus
gatacgcaatattttcaggaatgtt

SEQ ID NO: 108569 - DNA, 25 bp, Saccharomyces pastorianus
aactggatatcgaaatcacttgatt

SEQ ID NO: 108570 - DNA, 25 bp, Saccharomyces pastorianus
gtaaatggttcgtaactggatatcg

SEQ ID NO: 108571 - DNA, 25 bp, Saccharomyces pastorianus
aagaatgccatgtctgcatctgcag

SEQ ID NO: 108572 - DNA, 25 bp, Saccharomyces pastorianus
ggcaagtgtatcgtcattggaacta

SEQ ID NO: 108573 - DNA, 25 bp, Saccharomyces pastorianus
tggaaaagcggtgtcgaaatcgttt

SEQ ID NO: 108574 - DNA, 25 bp, Saccharomyces pastorianus
gtgtaggttcagtcaagccatgtct

SEQ ID NO: 108575 - DNA, 25 bp, Saccharomyces pastorianus
aactgttcattgttcaagcgcaact

SEQ ID NO: 108576 - DNA, 25 bp, Saccharomyces pastorianus
tttcgccccaattgtgctactacaa

SEQ ID NO: 108577 - DNA, 25 bp, Saccharomyces pastorianus
tgctgctaatttcaccggttcttca

SEQ ID NO: 108578 - DNA, 25 bp, Saccharomyces pastorianus
ggatttgaatactgcccttggacag

SEQ ID NO: 108579 - DNA, 25 bp, Saccharomyces pastorianus
aaagtcacttccagcgtcataacat

SEQ ID NO: 108580 - DNA, 25 bp, Saccharomyces pastorianus
tcttcatcatcgtcgtctataccaa

SEQ ID NO: 108581 - DNA, 25 bp, Saccharomyces pastorianus
caagccatgtctttacttcgtttta

SEQ ID NO: 108582 - DNA, 25 bp, Saccharomyces pastorianus
gccattgccttcttcgtcgagaaat

SEQ ID NO: 108583 - DNA, 25 bp, Saccharomyces pastorianus
aattctacggtagtcacccagttca

SEQ ID NO: 108584 - DNA, 25 bp, Saccharomyces pastorianus
attactggttcattagctgctgcta

SEQ ID NO: 108585 - DNA, 25 bp, Saccharomyces pastorianus
cgctatgccaactttgcttctattc

SEQ ID NO: 108586 - DNA, 25 bp, Saccharomyces pastorianus
atgtcgatgaattgggtgatgttgc

SEQ ID NO: 108587 - DNA, 25 bp, Saccharomyces pastorianus
aaattctctgaacaacacccacaag

SEQ ID NO: 108588 - DNA, 25 bp, Saccharomyces pastorianus
caacacccacaagctgatttctata

SEQ ID NO: 108589 - DNA, 25 bp, Saccharomyces pastorianus
tgcaaaggttgttggtgccaaccca

SEQ ID NO: 108590 - DNA, 25 bp, Saccharomyces pastorianus
atttctataaattggatgtcgatga

SEQ ID NO: 108591 - DNA, 25 bp, Saccharomyces pastorianus
aagttgcaaaggttgttggtgccaa

SEQ ID NO: 108592 - DNA, 25 bp, Saccharomyces pastorianus
gaagtttccgctatgccaactttgc

SEQ ID NO: 108593 - DNA, 25 bp, Saccharomyces pastorianus
aaaatgaagtttccgctatgccaac

SEQ ID NO: 108594 - DNA, 25 bp, Saccharomyces pastorianus
tgctcaagacaagctagttgtcgta

SEQ ID NO: 108595 - DNA, 25 bp, Saccharomyces pastorianus
caagctagttgtcgtagatttctac

SEQ ID NO: 108596 - DNA, 25 bp, Saccharomyces pastorianus
gtagtccttgagctagttctgcaac

SEQ ID NO: 108597 - DNA, 25 bp, Saccharomyces pastorianus
ggttattcccgctaaatggcaacta

SEQ ID NO: 108598 - DNA, 25 bp, Saccharomyces pastorianus
caattctacttgtggtacttcatcg

SEQ ID NO: 108599 - DNA, 25 bp, Saccharomyces pastorianus
atgcctctctaactaccttgatatg

SEQ ID NO: 108600 - DNA, 25 bp, Saccharomyces pastorianus
atcaccatattcatcgactcatcag

SEQ ID NO: 108601 - DNA, 25 bp, Saccharomyces pastorianus
gtatctatggctggaatgcctctct

SEQ ID NO: 108602 - DNA, 25 bp, Saccharomyces pastorianus
gcaacacgatttcctgctatcagag

SEQ ID NO: 108603 - DNA, 25 bp, Saccharomyces pastorianus
ggacatcgtgagcaacaattctact

SEQ ID NO: 108604 - DNA, 25 bp, Saccharomyces pastorianus
aacaagcttgtccatgacccagaag

SEQ ID NO: 108605 - DNA, 25 bp, Saccharomyces pastorianus
gactcatcagtggttattcccgcta

SEQ ID NO: 108606 - DNA, 25 bp, Saccharomyces pastorianus
gaagtgtcagttagcctcggtgtac

SEQ ID NO: 108607 - DNA, 25 bp, Saccharomyces pastorianus
aagcaccctcaagacaaggttgtac

SEQ ID NO: 108608 - DNA, 25 bp, Saccharomyces pastorianus
gaacgtcaatgcgaattcactagca

SEQ ID NO: 108609 - DNA, 25 bp, Saccharomyces pastorianus
gtggcaggaaggcaagccatccaat

SEQ ID NO: 108610 - DNA, 25 bp, Saccharomyces pastorianus
tcacacaaacaccacgacattcaaa

SEQ ID NO: 108611 - DNA, 25 bp, Saccharomyces pastorianus
gaccaagaaactgaggaccctgact

SEQ ID NO: 108612 - DNA, 25 bp, Saccharomyces pastorianus
ggacaatctttacgctatgaatgac

SEQ ID NO: 108613 - DNA, 25 bp, Saccharomyces pastorianus
taacgcagatggcttgaatcaacaa

SEQ ID NO: 108614 - DNA, 25 bp, Saccharomyces pastorianus
gaggaccctgacttatcagatgatg

SEQ ID NO: 108615 - DNA, 25 bp, Saccharomyces pastorianus
agtagccataccaacgaacgtcaat

SEQ ID NO: 108616 - DNA, 25 bp, Saccharomyces pastorianus
gaatcaacaaggttcttcgacccca

SEQ ID NO: 108617 - DNA, 25 bp, Saccharomyces pastorianus
agacacattgttgccgtagatgaca

SEQ ID NO: 108618 - DNA, 25 bp, Saccharomyces pastorianus
gcatagaggatttcttgttctttaa

SEQ ID NO: 108619 - DNA, 25 bp, Saccharomyces pastorianus
aaaaattgcaatacgatgacctcgg

SEQ ID NO: 108620 - DNA, 25 bp, Saccharomyces pastorianus
gatgacctcgggaacaccggatttt

SEQ ID NO: 108621 - DNA, 25 bp, Saccharomyces pastorianus
aagcacctccaatagcaatttgagt

SEQ ID NO: 108622 - DNA, 25 bp, Saccharomyces pastorianus
taacccattctatgtaccgtcagag

SEQ ID NO: 108623 - DNA, 25 bp, Saccharomyces pastorianus
gaaccaaagacaatatgagcacacg

SEQ ID NO: 108624 - DNA, 25 bp, Saccharomyces pastorianus
aaaagacaaagaagcataacccatt

SEQ ID NO: 108625 - DNA, 25 bp, Saccharomyces pastorianus
taccgtcagaggtagtgcgagagat

SEQ ID NO: 108626 - DNA, 25 bp, Saccharomyces pastorianus
gtgatgctatcaaaagcacctccaa

SEQ ID NO: 108627 - DNA, 25 bp, Saccharomyces pastorianus
taacccaggaggttgagttcgagaa

SEQ ID NO: 108628 - DNA, 25 bp, Saccharomyces pastorianus
ggaacaccggattttctgaactatt

SEQ ID NO: 108629 - DNA, 25 bp, Saccharomyces pastorianus
gaagacgacttttcttgccttggaa

SEQ ID NO: 108630 - DNA, 25 bp, Saccharomyces pastorianus
tttggagtggttgctgtgccacact

SEQ ID NO: 108631 - DNA, 25 bp, Saccharomyces pastorianus
gtatgattccatcttgagggaccaa

SEQ ID NO: 108632 - DNA, 25 bp, Saccharomyces pastorianus
tattcacctccagtactgttcgata

SEQ ID NO: 108633 - DNA, 25 bp, Saccharomyces pastorianus
gtatgagctattactggaccacatt

SEQ ID NO: 108634 - DNA, 25 bp, Saccharomyces pastorianus
aacaaagcccacaaagcctctagaa

SEQ ID NO: 108635 - DNA, 25 bp, Saccharomyces pastorianus
ggtcaaatcactttatgttcgccaa

SEQ ID NO: 108636 - DNA, 25 bp, Saccharomyces pastorianus
gagggaccaatccacgatcatggaa

SEQ ID NO: 108637 - DNA, 25 bp, Saccharomyces pastorianus
gtgccacacttcatcaggaggtttt

SEQ ID NO: 108638 - DNA, 25 bp, Saccharomyces pastorianus
tgatgttttgaaccgtggcaacact

SEQ ID NO: 108639 - DNA, 25 bp, Saccharomyces pastorianus
gataaacggtgtgcctattcacctc

SEQ ID NO: 108640 - DNA, 25 bp, Saccharomyces pastorianus
gccgggccatcacggtggtattata

SEQ ID NO: 108641 - DNA, 25 bp, Saccharomyces pastorianus
tgacctcagggttgaacggttccgt

SEQ ID NO: 108642 - DNA, 25 bp, Saccharomyces pastorianus
tcagggcctgtctcttgtgttaaag

SEQ ID NO: 108643 - DNA, 25 bp, Saccharomyces pastorianus
gaacggttccgtgcatatttgggac

SEQ ID NO: 108644 - DNA, 25 bp, Saccharomyces pastorianus
tgacttgaagatgccctcgaaacct

SEQ ID NO: 108645 - DNA, 25 bp, Saccharomyces pastorianus
tatttgggaccgacgcatgacgcag

SEQ ID NO: 108646 - DNA, 25 bp, Saccharomyces pastorianus
agtcgccagcattgtctctggagag

SEQ ID NO: 108647 - DNA, 25 bp, Saccharomyces pastorianus
catttactatgtgcatcgcgggata

SEQ ID NO: 108648 - DNA, 25 bp, Saccharomyces pastorianus
aagatgctggcaacgaacccgtcga

SEQ ID NO: 108649 - DNA, 25 bp, Saccharomyces pastorianus
gatgaatccgtttttatgacctcag

SEQ ID NO: 108650 - DNA, 25 bp, Saccharomyces pastorianus
accgtggtgtttgtccgcatgttgg

SEQ ID NO: 108651 - DNA, 25 bp, Saccharomyces pastorianus
ggtttccctggacaaacacatctta

SEQ ID NO: 108652 - DNA, 25 bp, Saccharomyces pastorianus
cgattgctgaaatagacggcgacga

SEQ ID NO: 108653 - DNA, 25 bp, Saccharomyces pastorianus
agcgatggtgacaaggtttccctgg

SEQ ID NO: 108654 - DNA, 25 bp, Saccharomyces pastorianus
ggccattttgggtcaacaaggtaga

SEQ ID NO: 108655 - DNA, 25 bp, Saccharomyces pastorianus
tacagttggaagctcgaaatcgatt

SEQ ID NO: 108656 - DNA, 25 bp, Saccharomyces pastorianus
tacaacggacgataccatgggttct

SEQ ID NO: 108657 - DNA, 25 bp, Saccharomyces pastorianus
gttctcagtggaaaaaccatccgga

SEQ ID NO: 108658 - DNA, 25 bp, Saccharomyces pastorianus
aaatgacctagatgtcgggatcaaa

SEQ ID NO: 108659 - DNA, 25 bp, Saccharomyces pastorianus
gatatcaaaccgcatattacaacgg

SEQ ID NO: 108660 - DNA, 25 bp, Saccharomyces pastorianus
tgggtaagcagtcttttggaatctt

SEQ ID NO: 108661 - DNA, 25 bp, Saccharomyces pastorianus
aatactatttgctactattcagcga

SEQ ID NO: 108662 - DNA, 25 bp, Saccharomyces pastorianus
gccacgtgggttgaggttttaccat

SEQ ID NO: 108663 - DNA, 25 bp, Saccharomyces pastorianus
aagcaaatcggccacttgggtgtct

SEQ ID NO: 108664 - DNA, 25 bp, Saccharomyces pastorianus
gttgttagaaccactttattgcctg

SEQ ID NO: 108665 - DNA, 25 bp, Saccharomyces pastorianus
attttcagagttgcatcctctcaag

SEQ ID NO: 108666 - DNA, 25 bp, Saccharomyces pastorianus
actgggctgccatctacgtgggtaa

SEQ ID NO: 108667 - DNA, 25 bp, Saccharomyces pastorianus
gattgcagactacggtgctgctgct

SEQ ID NO: 108668 - DNA, 25 bp, Saccharomyces pastorianus
ggtgccaaggtcatgttcagatcca

SEQ ID NO: 108669 - DNA, 25 bp, Saccharomyces pastorianus
tacttcccaggtagaggtgccaagg

SEQ ID NO: 108670 - DNA, 25 bp, Saccharomyces pastorianus
ttagctgtcaaattggccaacccaa

SEQ ID NO: 108671 - DNA, 25 bp, Saccharomyces pastorianus
aatttcgacgttccattcgctgcat

SEQ ID NO: 108672 - DNA, 25 bp, Saccharomyces pastorianus
gctgctgcttctggcagaggttact

SEQ ID NO: 108673 - DNA, 25 bp, Saccharomyces pastorianus
gaatggacccaaaactcgactactc

SEQ ID NO: 108674 - DNA, 25 bp, Saccharomyces pastorianus
gcctcgacctaataactctactttt

SEQ ID NO: 108675 - DNA, 25 bp, Saccharomyces pastorianus
gtccatggtcactagtatccgagaa

SEQ ID NO: 108676 - DNA, 25 bp, Saccharomyces pastorianus
gcgagcatattcactttatcgagag

SEQ ID NO: 108677 - DNA, 25 bp, Saccharomyces pastorianus
agttcccaatccaatttcttatcga

SEQ ID NO: 108678 - DNA, 25 bp, Saccharomyces pastorianus
tcgactactcgattccattggaaaa

SEQ ID NO: 108679 - DNA, 25 bp, Saccharomyces pastorianus
tagatatcgccgactggtccacagt

SEQ ID NO: 108680 - DNA, 25 bp, Saccharomyces pastorianus
gaagctattctcacattaccatcaa

SEQ ID NO: 108681 - DNA, 25 bp, Saccharomyces pastorianus
tttacccacaaggactgcctacaaa

SEQ ID NO: 108682 - DNA, 25 bp, Saccharomyces pastorianus
tcaagatatatcaaggcctcgacct

SEQ ID NO: 108683 - DNA, 25 bp, Saccharomyces pastorianus
gatttttcgtctaaatttgcctctg

SEQ ID NO: 108684 - DNA, 25 bp, Saccharomyces pastorianus
cttttcaatctttcacttcctgaac

SEQ ID NO: 108685 - DNA, 25 bp, Saccharomyces pastorianus
atatgccatcgttctttaccagttt

SEQ ID NO: 108686 - DNA, 25 bp, Saccharomyces pastorianus
tgccatttttgcctttgataccact

SEQ ID NO: 108687 - DNA, 25 bp, Saccharomyces pastorianus
ggatgcatatgtcagccgtactttg

SEQ ID NO: 108688 - DNA, 25 bp, Saccharomyces pastorianus
attcatactttttctcttatcacag

SEQ ID NO: 108689 - DNA, 25 bp, Saccharomyces pastorianus
atacagtcccgttatcttttcaatc

SEQ ID NO: 108690 - DNA, 25 bp, Saccharomyces pastorianus
attttacgcttttgcgccaagagat

SEQ ID NO: 108691 - DNA, 25 bp, Saccharomyces pastorianus
gtacaatgttggcagggctaaccta

SEQ ID NO: 108692 - DNA, 25 bp, Saccharomyces pastorianus
tttgagattatctgcggcctacgtg

SEQ ID NO: 108693 - DNA, 25 bp, Saccharomyces pastorianus
ctacgtgtgggcctcttcttagtgc

SEQ ID NO: 108694 - DNA, 25 bp, Saccharomyces pastorianus
agtgcccttcaattttttcttgttg

SEQ ID NO: 108695 - DNA, 25 bp, Saccharomyces pastorianus
gctggttacaagttatatggcctca

SEQ ID NO: 108696 - DNA, 25 bp, Saccharomyces pastorianus
tattgtgccccatctatgctggtta

SEQ ID NO: 108697 - DNA, 25 bp, Saccharomyces pastorianus
gttcctatgttcgttgctctgtata

SEQ ID NO: 108698 - DNA, 25 bp, Saccharomyces pastorianus
tttggtggtgtctactattgtgccc

SEQ ID NO: 108699 - DNA, 25 bp, Saccharomyces pastorianus
ggtattatagctttcaggacattca

SEQ ID NO: 108700 - DNA, 25 bp, Saccharomyces pastorianus
gctctgtatatcattgtgctatccg

SEQ ID NO: 108701 - DNA, 25 bp, Saccharomyces pastorianus
aaacatgttcatgcctggcgctcaa

SEQ ID NO: 108702 - DNA, 25 bp, Saccharomyces pastorianus
tgtgctatccggtaagcccaaatat

SEQ ID NO: 108703 - DNA, 25 bp, Saccharomyces pastorianus
taggaatggctatcgtacgtctatt

SEQ ID NO: 108704 - DNA, 25 bp, Saccharomyces pastorianus
aagctggtggctttgaacgttccta

SEQ ID NO: 108705 - DNA, 25 bp, Saccharomyces pastorianus
tggcgctcaacaaactcaggcagat

SEQ ID NO: 108706 - DNA, 25 bp, Saccharomyces pastorianus
gccagcccttgatgggccctaagat

SEQ ID NO: 108707 - DNA, 25 bp, Saccharomyces pastorianus
aaggacaggccagcccttgatgggc

SEQ ID NO: 108708 - DNA, 25 bp, Saccharomyces pastorianus
tgggccctaagatagaggatctttt

SEQ ID NO: 108709 - DNA, 25 bp, Saccharomyces pastorianus
gagtataaggttaaggagatccaaa

SEQ ID NO: 108710 - DNA, 25 bp, Saccharomyces pastorianus
gtatgccgtaccagaaaaggaacca

SEQ ID NO: 108711 - DNA, 25 bp, Saccharomyces pastorianus
ggagatccaaagaagtattacaaag

SEQ ID NO: 108712 - DNA, 25 bp, Saccharomyces pastorianus
aactagactgagaaaggaatacctt

SEQ ID NO: 108713 - DNA, 25 bp, Saccharomyces pastorianus
gaagattaaggaagccagggcaata

SEQ ID NO: 108714 - DNA, 25 bp, Saccharomyces pastorianus
aaaccgtggcaaaagaatctgtaag

SEQ ID NO: 108715 - DNA, 25 bp, Saccharomyces pastorianus
gatgaagggtatgccgtaccagaaa

SEQ ID NO: 108716 - DNA, 25 bp, Saccharomyces pastorianus
gactcaaagaacaaggacaggccag

SEQ ID NO: 108717 - DNA, 25 bp, Saccharomyces pastorianus
aggcaacatattcgagaccgctatt

SEQ ID NO: 108718 - DNA, 25 bp, Saccharomyces pastorianus
ggtttcgccacctcattaagagcct

SEQ ID NO: 108719 - DNA, 25 bp, Saccharomyces pastorianus
ttgagcacgatgttcggtttcgcca

SEQ ID NO: 108720 - DNA, 25 bp, Saccharomyces pastorianus
atctggtggcgctggtcaatatggt

SEQ ID NO: 108721 - DNA, 25 bp, Saccharomyces pastorianus
accgctattgttggtggccgtatac

SEQ ID NO: 108722 - DNA, 25 bp, Saccharomyces pastorianus
gcacagccggtgatcatggaaccta

SEQ ID NO: 108723 - DNA, 25 bp, Saccharomyces pastorianus
tatctcccgtggatgacattaccaa

SEQ ID NO: 108724 - DNA, 25 bp, Saccharomyces pastorianus
aaacagctactatgtcagccttccg

SEQ ID NO: 108725 - DNA, 25 bp, Saccharomyces pastorianus
agagttatcggtaccttatctcccg

SEQ ID NO: 108726 - DNA, 25 bp, Saccharomyces pastorianus
acagcgccccatgttcaaaaagaat

SEQ ID NO: 108727 - DNA, 25 bp, Saccharomyces pastorianus
cattgatcggtcatcgtgttttgga

SEQ ID NO: 108728 - DNA, 25 bp, Saccharomyces pastorianus
gcacgcgactctattggacatacca

SEQ ID NO: 108729 - DNA, 25 bp, Saccharomyces pastorianus
aaaagcagatacactcaagccgttg

SEQ ID NO: 108730 - DNA, 25 bp, Saccharomyces pastorianus
gttacatcttttggatcacctagga

SEQ ID NO: 108731 - DNA, 25 bp, Saccharomyces pastorianus
caaatgttcctagtggtaccagttt

SEQ ID NO: 108732 - DNA, 25 bp, Saccharomyces pastorianus
gataagctgacgaacctcatgaccc

SEQ ID NO: 108733 - DNA, 25 bp, Saccharomyces pastorianus
aagccgttgcccagtgttacatctt

SEQ ID NO: 108734 - DNA, 25 bp, Saccharomyces pastorianus
aattagcgccactaaggacttggta

SEQ ID NO: 108735 - DNA, 25 bp, Saccharomyces pastorianus
aacgaggtacatgttccgatgggat

SEQ ID NO: 108736 - DNA, 25 bp, Saccharomyces pastorianus
ggtgctcttggtgttaaatctgctg

SEQ ID NO: 108737 - DNA, 25 bp, Saccharomyces pastorianus
ggacgaagttgtagcgcacgcgact

SEQ ID NO: 108738 - DNA, 25 bp, Saccharomyces pastorianus
gtaccagtttcagcaccagaacgag

SEQ ID NO: 108739 - DNA, 25 bp, Saccharomyces pastorianus
agtcaggccactgcccgtgatgaag

SEQ ID NO: 108740 - DNA, 25 bp, Saccharomyces pastorianus
aaactatctagacaccctgagcttt

SEQ ID NO: 108741 - DNA, 25 bp, Saccharomyces pastorianus
aaagttggaagtgcctgcggtctgc

SEQ ID NO: 108742 - DNA, 25 bp, Saccharomyces pastorianus
tggagcaacaaccactgccgaagaa

SEQ ID NO: 108743 - DNA, 25 bp, Saccharomyces pastorianus
aggattatcgcttcaatccggcgat

SEQ ID NO: 108744 - DNA, 25 bp, Saccharomyces pastorianus
aatccggcgataccattgagaattt

SEQ ID NO: 108745 - DNA, 25 bp, Saccharomyces pastorianus
ggagcaagctctcagagtcaggcca

SEQ ID NO: 108746 - DNA, 25 bp, Saccharomyces pastorianus
accctgagcttttgcgcatggatgc

SEQ ID NO: 108747 - DNA, 25 bp, Saccharomyces pastorianus
aaggcacagtgtgcgttccaggcca

SEQ ID NO: 108748 - DNA, 25 bp, Saccharomyces pastorianus
ttcgacgagtacagcttcaaccaat

SEQ ID NO: 108749 - DNA, 25 bp, Saccharomyces pastorianus
gaaagcttacgcacccaaattgact

SEQ ID NO: 108750 - DNA, 25 bp, Saccharomyces pastorianus
aacagaacctactctaccgtgggcg

SEQ ID NO: 108751 - DNA, 25 bp, Saccharomyces pastorianus
gcatttggacagtaccttggcaaac

SEQ ID NO: 108752 - DNA, 25 bp, Saccharomyces pastorianus
aagaagtctctgatgctgctgcggg

SEQ ID NO: 108753 - DNA, 25 bp, Saccharomyces pastorianus
gggtgtcccttacacacaagaagtc

SEQ ID NO: 108754 - DNA, 25 bp, Saccharomyces pastorianus
gaacacgagacttggacctgatcta

SEQ ID NO: 108755 - DNA, 25 bp, Saccharomyces pastorianus
tggatgaaaccaaaccaggccttgg

SEQ ID NO: 108756 - DNA, 25 bp, Saccharomyces pastorianus
gatctataacgacttgtccaccaag

SEQ ID NO: 108757 - DNA, 25 bp, Saccharomyces pastorianus
tgctgatgccgaggcgaataccgct

SEQ ID NO: 108758 - DNA, 25 bp, Saccharomyces pastorianus
aggccttggtcagcactattgcata

SEQ ID NO: 108759 - DNA, 25 bp, Saccharomyces pastorianus
atcacgcaatcggtgggtccggaga

SEQ ID NO: 108760 - DNA, 25 bp, Saccharomyces pastorianus
caagttcttgaaccgtgtacaggag

SEQ ID NO: 108761 - DNA, 25 bp, Saccharomyces pastorianus
gggtcgtaccatacactggcaatag

SEQ ID NO: 108762 - DNA, 25 bp, Saccharomyces pastorianus
atcgtttgtgaccattcgtaagcct

SEQ ID NO: 108763 - DNA, 25 bp, Saccharomyces pastorianus
agttgcggctctcattgtgtgttca

SEQ ID NO: 108764 - DNA, 25 bp, Saccharomyces pastorianus
gctggaataggttcggccaattggc

SEQ ID NO: 108765 - DNA, 25 bp, Saccharomyces pastorianus
gctcaacgccagaccatcattattt

SEQ ID NO: 108766 - DNA, 25 bp, Saccharomyces pastorianus
gccaattggcactacctatttcgta

SEQ ID NO: 108767 - DNA, 25 bp, Saccharomyces pastorianus
aacattcccgaagttctcaaaccag

SEQ ID NO: 108768 - DNA, 25 bp, Saccharomyces pastorianus
gaatatgtttctttcccaagatcgg

SEQ ID NO: 108769 - DNA, 25 bp, Saccharomyces pastorianus
aagaactcgcaatgtgatcccataa

SEQ ID NO: 108770 - DNA, 25 bp, Saccharomyces pastorianus
gatcggtaacgcatgcatttaaacc

SEQ ID NO: 108771 - DNA, 25 bp, Saccharomyces pastorianus
aaaagatagcttgcgggtcgtacca

SEQ ID NO: 108772 - DNA, 25 bp, Saccharomyces pastorianus
aaatccctttgcatcagatgaactg

SEQ ID NO: 108773 - DNA, 25 bp, Saccharomyces pastorianus
taggatattgtttcccacgcagcaa

SEQ ID NO: 108774 - DNA, 25 bp, Saccharomyces pastorianus
gccaggcagttacatttatcacttg

SEQ ID NO: 108775 - DNA, 25 bp, Saccharomyces pastorianus
catcaatccagtgcgggtgggtaaa

SEQ ID NO: 108776 - DNA, 25 bp, Saccharomyces pastorianus
gaggacactattccaatttgaaagt

SEQ ID NO: 108777 - DNA, 25 bp, Saccharomyces pastorianus
gagatgagtttgatcagacacatag

SEQ ID NO: 108778 - DNA, 25 bp, Saccharomyces pastorianus
tcgccgtttccaaaatcttcagtga

SEQ ID NO: 108779 - DNA, 25 bp, Saccharomyces pastorianus
gacatcatcatcaatccagtgcggg

SEQ ID NO: 108780 - DNA, 25 bp, Saccharomyces pastorianus
gagcaggaaccattgggtcgtgtaa

SEQ ID NO: 108781 - DNA, 25 bp, Saccharomyces pastorianus
cagatgaactggtcactcaggaaat

SEQ ID NO: 108782 - DNA, 25 bp, Saccharomyces pastorianus
acaactctccgaaaaatgacgccag

SEQ ID NO: 108783 - DNA, 25 bp, Saccharomyces pastorianus
cattcatcacatctgccattaactt

SEQ ID NO: 108784 - DNA, 25 bp, Saccharomyces pastorianus
gttcttgattgcatttttcacccca

SEQ ID NO: 108785 - DNA, 25 bp, Saccharomyces pastorianus
tttgcctccactttctttagtttgt

SEQ ID NO: 108786 - DNA, 25 bp, Saccharomyces pastorianus
attttctgttatgccacaacctggg

SEQ ID NO: 108787 - DNA, 25 bp, Saccharomyces pastorianus
agccatcttctaaaggtgccggtaa

SEQ ID NO: 108788 - DNA, 25 bp, Saccharomyces pastorianus
aaatgtttacttttgggcgctgcca

SEQ ID NO: 108789 - DNA, 25 bp, Saccharomyces pastorianus
aaatgtatggcgttggcctctgctt

SEQ ID NO: 108790 - DNA, 25 bp, Saccharomyces pastorianus
gttgcctgggtcatcacagcagaat

SEQ ID NO: 108791 - DNA, 25 bp, Saccharomyces pastorianus
ttgtatggtcatctacgcctctgtt

SEQ ID NO: 108792 - DNA, 25 bp, Saccharomyces pastorianus
cattggtgtagtcaactttgcctcc

SEQ ID NO: 108793 - DNA, 25 bp, Saccharomyces pastorianus
agcagaatcattcccactgagagtc

SEQ ID NO: 108794 - DNA, 25 bp, Saccharomyces pastorianus
gacagtttctgtccttggtattgca

SEQ ID NO: 108795 - DNA, 25 bp, Saccharomyces pastorianus
atagctctattagctctgtttcagc

SEQ ID NO: 108796 - DNA, 25 bp, Saccharomyces pastorianus
gttacctggcaatgatagctctatt

SEQ ID NO: 108797 - DNA, 25 bp, Saccharomyces pastorianus
tgaattcaactctcagtcaccactt

SEQ ID NO: 108798 - DNA, 25 bp, Saccharomyces pastorianus
tataagcccattaaaccgcgaattg

SEQ ID NO: 108799 - DNA, 25 bp, Saccharomyces pastorianus
atggcagtatcctcttacttaatgg

SEQ ID NO: 108800 - DNA, 25 bp, Saccharomyces pastorianus
aatggaccccatattttatttcaga

SEQ ID NO: 108801 - DNA, 25 bp, Saccharomyces pastorianus
gaatattacctcgttacctggcaat

SEQ ID NO: 108802 - DNA, 25 bp, Saccharomyces pastorianus
gtcgttttaattggtcttgcactag

SEQ ID NO: 108803 - DNA, 25 bp, Saccharomyces pastorianus
gaacattactgtgacaagtcctctg

SEQ ID NO: 108804 - DNA, 25 bp, Saccharomyces pastorianus
atatttcgcaatacggatacctaca

SEQ ID NO: 108805 - DNA, 25 bp, Saccharomyces pastorianus
ttgcccgaaatagtgcgacctctta

SEQ ID NO: 108806 - DNA, 25 bp, Saccharomyces pastorianus
aaccaggcattgtggaggccatcct

SEQ ID NO: 108807 - DNA, 25 bp, Saccharomyces pastorianus
attggacttgtcatgtttcggtgcc

SEQ ID NO: 108808 - DNA, 25 bp, Saccharomyces pastorianus
gttagcccggtgtcttattttgata

SEQ ID NO: 108809 - DNA, 25 bp, Saccharomyces pastorianus
aacaatgcttgttcgttagcccggt

SEQ ID NO: 108810 - DNA, 25 bp, Saccharomyces pastorianus
gtttgcaaagacagactcctaccga

SEQ ID NO: 108811 - DNA, 25 bp, Saccharomyces pastorianus
aatatgtacttcctgacttccaaac

SEQ ID NO: 108812 - DNA, 25 bp, Saccharomyces pastorianus
ctatgagcatggtcccgattggtgt

SEQ ID NO: 108813 - DNA, 25 bp, Saccharomyces pastorianus
ggaggaaactttaatctgcccaatt

SEQ ID NO: 108814 - DNA, 25 bp, Saccharomyces pastorianus
atgtaccgttacctgaagatgcgca

SEQ ID NO: 108815 - DNA, 25 bp, Saccharomyces pastorianus
tagagagcctttccatgttgcccga

SEQ ID NO: 108816 - DNA, 25 bp, Saccharomyces pastorianus
gacggcgccggagaagatttgtata

SEQ ID NO: 108817 - DNA, 25 bp, Saccharomyces pastorianus
ttgtgcctcacatgcgactgtaaat

SEQ ID NO: 108818 - DNA, 25 bp, Saccharomyces pastorianus
attcacacggacgatcttccagaag

SEQ ID NO: 108819 - DNA, 25 bp, Saccharomyces pastorianus
ttggcccattctagataaccctcat

SEQ ID NO: 108820 - DNA, 25 bp, Saccharomyces pastorianus
gttcatattgagtttccaccagata

SEQ ID NO: 108821 - DNA, 25 bp, Saccharomyces pastorianus
aaaaacgaatctgccgtcatcttca

SEQ ID NO: 108822 - DNA, 25 bp, Saccharomyces pastorianus
ggtgacaccatcaaaatcgccaatg

SEQ ID NO: 108823 - DNA, 25 bp, Saccharomyces pastorianus
ttgaagaactttgacgacggcgccg

SEQ ID NO: 108824 - DNA, 25 bp, Saccharomyces pastorianus
ttaagcgaggccttgacgggatttg

SEQ ID NO: 108825 - DNA, 25 bp, Saccharomyces pastorianus
ccggtgcggcgatctgtatgttttc

SEQ ID NO: 108826 - DNA, 25 bp, Saccharomyces pastorianus
atcaaatttccggatcattcacacg

SEQ ID NO: 108827 - DNA, 25 bp, Saccharomyces pastorianus
ttctactgactcactggccatttga

SEQ ID NO: 108828 - DNA, 25 bp, Saccharomyces pastorianus
ggtagattccatcgctgtaaacaat

SEQ ID NO: 108829 - DNA, 25 bp, Saccharomyces pastorianus
ttcctatcaggaacgctcttggcga

SEQ ID NO: 108830 - DNA, 25 bp, Saccharomyces pastorianus
aacgtcttcaaggagcgtctggctg

SEQ ID NO: 108831 - DNA, 25 bp, Saccharomyces pastorianus
caacttttcgcaagacagctgtctc

SEQ ID NO: 108832 - DNA, 25 bp, Saccharomyces pastorianus
atgcgcatctcttccaaaaacacta

SEQ ID NO: 108833 - DNA, 25 bp, Saccharomyces pastorianus
attgactgccgtcttctatgacgag

SEQ ID NO: 108834 - DNA, 25 bp, Saccharomyces pastorianus
aaaacactaccactttctactgact

SEQ ID NO: 108835 - DNA, 25 bp, Saccharomyces pastorianus
tatacgactactaatgccgactcca

SEQ ID NO: 108836 - DNA, 25 bp, Saccharomyces pastorianus
gacgagactgtagagcgacgcctta

SEQ ID NO: 108837 - DNA, 25 bp, Saccharomyces pastorianus
agatcttgataccttcacaccagag

SEQ ID NO: 108838 - DNA, 25 bp, Saccharomyces pastorianus
ttcccacggcaatagaaggtcttct

SEQ ID NO: 108839 - DNA, 25 bp, Saccharomyces pastorianus
agggaactaaccgagtctgtctcac

SEQ ID NO: 108840 - DNA, 25 bp, Saccharomyces pastorianus
gataaacgcaaaccgctgtctgaat

SEQ ID NO: 108841 - DNA, 25 bp, Saccharomyces pastorianus
aaaacaaatccagccatcaatccag

SEQ ID NO: 108842 - DNA, 25 bp, Saccharomyces pastorianus
tcaccccataattacatactcgcag

SEQ ID NO: 108843 - DNA, 25 bp, Saccharomyces pastorianus
ttatctgcgcttggtgcatcaggga

SEQ ID NO: 108844 - DNA, 25 bp, Saccharomyces pastorianus
aacgcctaatatcgccgcttacgaa

SEQ ID NO: 108845 - DNA, 25 bp, Saccharomyces pastorianus
gctgcgcaacatttttgtgcctgaa

SEQ ID NO: 108846 - DNA, 25 bp, Saccharomyces pastorianus
tgaacccagcaccaagtcttcaaga

SEQ ID NO: 108847 - DNA, 25 bp, Saccharomyces pastorianus
tgtctgaatgctccacttttatctg

SEQ ID NO: 108848 - DNA, 25 bp, Saccharomyces pastorianus
tctgtctcacctccagtgtttaata

SEQ ID NO: 108849 - DNA, 25 bp, Saccharomyces pastorianus
atccggagggcaatggttcaatgtt

SEQ ID NO: 108850 - DNA, 25 bp, Saccharomyces pastorianus
gtcttgtgttccataaagtgggcca

SEQ ID NO: 108851 - DNA, 25 bp, Saccharomyces pastorianus
gacccgatattgacatcatgtgcgg

SEQ ID NO: 108852 - DNA, 25 bp, Saccharomyces pastorianus
tgaagagtaccttcttttgcaagaa

SEQ ID NO: 108853 - DNA, 25 bp, Saccharomyces pastorianus
aagtgggccatctagacggcataga

SEQ ID NO: 108854 - DNA, 25 bp, Saccharomyces pastorianus
tagagagtgtacctggatgcaacaa

SEQ ID NO: 108855 - DNA, 25 bp, Saccharomyces pastorianus
atatgacagtgcgaatccggagggc

SEQ ID NO: 108856 - DNA, 25 bp, Saccharomyces pastorianus
aaatgccatgacagagtgccaatag

SEQ ID NO: 108857 - DNA, 25 bp, Saccharomyces pastorianus
ctgaatactttgagccacatcgagg

SEQ ID NO: 108858 - DNA, 25 bp, Saccharomyces pastorianus
gattattcaccgctttgtgagcgca

SEQ ID NO: 108859 - DNA, 25 bp, Saccharomyces pastorianus
gcatagacagctatcgacccgatat

SEQ ID NO: 108860 - DNA, 25 bp, Saccharomyces pastorianus
agtatcgttctcatctttgcattgt

SEQ ID NO: 108861 - DNA, 25 bp, Saccharomyces pastorianus
gttgcacagcagaaagactgtcctt

SEQ ID NO: 108862 - DNA, 25 bp, Saccharomyces pastorianus
ttgtttatttttggcagcactggag

SEQ ID NO: 108863 - DNA, 25 bp, Saccharomyces pastorianus
tgatgggtatttgtgtccggacacc

SEQ ID NO: 108864 - DNA, 25 bp, Saccharomyces pastorianus
gatgaccctgtcaagggccccaaag

SEQ ID NO: 108865 - DNA, 25 bp, Saccharomyces pastorianus
gcactggagtgaatgccttcttcaa

SEQ ID NO: 108866 - DNA, 25 bp, Saccharomyces pastorianus
agttgaaatgtgtccttcctgataa

SEQ ID NO: 108867 - DNA, 25 bp, Saccharomyces pastorianus
tccaaaccagccacacacaatgaaa

SEQ ID NO: 108868 - DNA, 25 bp, Saccharomyces pastorianus
ggacaccctaacgtgcgttgcacag

SEQ ID NO: 108869 - DNA, 25 bp, Saccharomyces pastorianus
gtcaaagtcgttggagtatcgttct

SEQ ID NO: 108870 - DNA, 25 bp, Saccharomyces pastorianus
gagagcaatatatgatgaccctgtc

SEQ ID NO: 108871 - DNA, 25 bp, Saccharomyces pastorianus
tgcacttcctgttcttgacatatct

SEQ ID NO: 108872 - DNA, 25 bp, Saccharomyces pastorianus
gatctggtataaaattcggctgcga

SEQ ID NO: 108873 - DNA, 25 bp, Saccharomyces pastorianus
agaacggtgatcttttgccactcga

SEQ ID NO: 108874 - DNA, 25 bp, Saccharomyces pastorianus
atgtttttaacttttgcacttcctg

SEQ ID NO: 108875 - DNA, 25 bp, Saccharomyces pastorianus
gtggtattctagcatagcccgtgtt

SEQ ID NO: 108876 - DNA, 25 bp, Saccharomyces pastorianus
aagacgtgggcatcgttgcacaaca

SEQ ID NO: 108877 - DNA, 25 bp, Saccharomyces pastorianus
ttgccactcgagtcactagaactaa

SEQ ID NO: 108878 - DNA, 25 bp, Saccharomyces pastorianus
ggaaactgtttcaattcgatgccaa

SEQ ID NO: 108879 - DNA, 25 bp, Saccharomyces pastorianus
gatattcactcctttgtcagatcat

SEQ ID NO: 108880 - DNA, 25 bp, Saccharomyces pastorianus
catcactacagatcacacggttggt

SEQ ID NO: 108881 - DNA, 25 bp, Saccharomyces pastorianus
gtcttgaccacgacgtctctaaaga

SEQ ID NO: 108882 - DNA, 25 bp, Saccharomyces pastorianus
aatagccagcactcaaagcagttct

SEQ ID NO: 108883 - DNA, 25 bp, Saccharomyces pastorianus
ggcgcgcggcaaaggattcccaaaa

SEQ ID NO: 108884 - DNA, 25 bp, Saccharomyces pastorianus
tactcctgagaaatacttgtacggg

SEQ ID NO: 108885 - DNA, 25 bp, Saccharomyces pastorianus
aaagcagttctggacccattgcgat

SEQ ID NO: 108886 - DNA, 25 bp, Saccharomyces pastorianus
gaaatcagacgccaatagccagcac

SEQ ID NO: 108887 - DNA, 25 bp, Saccharomyces pastorianus
ctttctgggacttgtgcggagtttt

SEQ ID NO: 108888 - DNA, 25 bp, Saccharomyces pastorianus
tacgggataatccagggcctaccac

SEQ ID NO: 108889 - DNA, 25 bp, Saccharomyces pastorianus
cattgcgattttcccatttggttct

SEQ ID NO: 108890 - DNA, 25 bp, Saccharomyces pastorianus
tccgacacgcgcgtctataaatagc

SEQ ID NO: 108891 - DNA, 25 bp, Saccharomyces pastorianus
cacgcttcgaggattggcttttatt

SEQ ID NO: 108892 - DNA, 25 bp, Saccharomyces pastorianus
gttcttgcgcgtgctgattccgaca

SEQ ID NO: 108893 - DNA, 25 bp, Saccharomyces pastorianus
gagattatcgtttttggtagccctt

SEQ ID NO: 108894 - DNA, 25 bp, Saccharomyces pastorianus
gttttgtggcaaaagggtccgcatt

SEQ ID NO: 108895 - DNA, 25 bp, Saccharomyces pastorianus
agatacatcctcagggcaccagcat

SEQ ID NO: 108896 - DNA, 25 bp, Saccharomyces pastorianus
ttacatccggcggtagcgcatgatg

SEQ ID NO: 108897 - DNA, 25 bp, Saccharomyces pastorianus
atgatgccatggctggctccagata

SEQ ID NO: 108898 - DNA, 25 bp, Saccharomyces pastorianus
ggcgaagtgcgcaacctcgaaggtt

SEQ ID NO: 108899 - DNA, 25 bp, Saccharomyces pastorianus
tagattggcgcaacatggctggctg

SEQ ID NO: 108900 - DNA, 25 bp, Saccharomyces pastorianus
ggtccgcattgtacctgtttacagt

SEQ ID NO: 108901 - DNA, 25 bp, Saccharomyces pastorianus
cttctttctttttccggcaatgaat

SEQ ID NO: 108902 - DNA, 25 bp, Saccharomyces pastorianus
ggtagcccttcattacggcataacg

SEQ ID NO: 108903 - DNA, 25 bp, Saccharomyces pastorianus
gtttcttttattttgctttgccctg

SEQ ID NO: 108904 - DNA, 25 bp, Saccharomyces pastorianus
atctgccacgtttgatgaccaagtt

SEQ ID NO: 108905 - DNA, 25 bp, Saccharomyces pastorianus
cttcgttaccacacagagatccaat

SEQ ID NO: 108906 - DNA, 25 bp, Saccharomyces pastorianus
ctgtcgatacctggcgtgttatgat

SEQ ID NO: 108907 - DNA, 25 bp, Saccharomyces pastorianus
taatgacgctgatctgcctgtcgat

SEQ ID NO: 108908 - DNA, 25 bp, Saccharomyces pastorianus
gttcgattggcactttaatgacgct

SEQ ID NO: 108909 - DNA, 25 bp, Saccharomyces pastorianus
atggcgctggcactactggaaatga

SEQ ID NO: 108910 - DNA, 25 bp, Saccharomyces pastorianus
gatgaaccagtagccgatgccaagt

SEQ ID NO: 108911 - DNA, 25 bp, Saccharomyces pastorianus
gttaaacatggctgcgcattcgcat

SEQ ID NO: 108912 - DNA, 25 bp, Saccharomyces pastorianus
gagatccaattccattttctgaaag

SEQ ID NO: 108913 - DNA, 25 bp, Saccharomyces pastorianus
aagagaatcactgcggcggatgcct

SEQ ID NO: 108914 - DNA, 25 bp, Saccharomyces pastorianus
atcactgacttgttgggatctccgc

SEQ ID NO: 108915 - DNA, 25 bp, Saccharomyces pastorianus
atatccatggcacaagctcgctata

SEQ ID NO: 108916 - DNA, 25 bp, Saccharomyces pastorianus
gttggattccggtactactttgact

SEQ ID NO: 108917 - DNA, 25 bp, Saccharomyces pastorianus
gagtactggcactacatgtctttta

SEQ ID NO: 108918 - DNA, 25 bp, Saccharomyces pastorianus
gtgcatctattgttaccggtggtaa

SEQ ID NO: 108919 - DNA, 25 bp, Saccharomyces pastorianus
ggtaacctgacgaccagtactgcat

SEQ ID NO: 108920 - DNA, 25 bp, Saccharomyces pastorianus
acatcaatgcaccactttcgagttt

SEQ ID NO: 108921 - DNA, 25 bp, Saccharomyces pastorianus
actgcttcctttagcggtaacctga

SEQ ID NO: 108922 - DNA, 25 bp, Saccharomyces pastorianus
attattacatcctctgttccaagcg

SEQ ID NO: 108923 - DNA, 25 bp, Saccharomyces pastorianus
atcatatagttccatctttacccct

SEQ ID NO: 108924 - DNA, 25 bp, Saccharomyces pastorianus
gtaaattcctcacaaactgcttcct

SEQ ID NO: 108925 - DNA, 25 bp, Saccharomyces pastorianus
aggtgcgcaatactcttccaggata

SEQ ID NO: 108926 - DNA, 25 bp, Saccharomyces pastorianus
aaggatgttcatcttcaggtgagaa

SEQ ID NO: 108927 - DNA, 25 bp, Saccharomyces pastorianus
ttgaatggaacagcggcatggccag

SEQ ID NO: 108928 - DNA, 25 bp, Saccharomyces pastorianus
aataagaatttcatgagccacttga

SEQ ID NO: 108929 - DNA, 25 bp, Saccharomyces pastorianus
gagaattcaggcttatgttcagaag

SEQ ID NO: 108930 - DNA, 25 bp, Saccharomyces pastorianus
gataactatcctctattgaatggaa

SEQ ID NO: 108931 - DNA, 25 bp, Saccharomyces pastorianus
agaggaatctgcaagggcttttgga

SEQ ID NO: 108932 - DNA, 25 bp, Saccharomyces pastorianus
gacataacttcgcaagaatccttga

SEQ ID NO: 108933 - DNA, 25 bp, Saccharomyces pastorianus
gagttagttgcagtcttgcgggaca

SEQ ID NO: 108934 - DNA, 25 bp, Saccharomyces pastorianus
ttggacgaacctcagatgaaagatt

SEQ ID NO: 108935 - DNA, 25 bp, Saccharomyces pastorianus
gcgggacaaagacataccactgaat

SEQ ID NO: 108936 - DNA, 25 bp, Saccharomyces pastorianus
aaatggtgatgtcgctagcccgaaa

SEQ ID NO: 108937 - DNA, 25 bp, Saccharomyces pastorianus
aaacgtgttccctcaattgtcagat

SEQ ID NO: 108938 - DNA, 25 bp, Saccharomyces pastorianus
agcaagactgaatatccgcccgtag

SEQ ID NO: 108939 - DNA, 25 bp, Saccharomyces pastorianus
taggcatatacatcactggttcaaa

SEQ ID NO: 108940 - DNA, 25 bp, Saccharomyces pastorianus
ctaaaactgaactctgtgggtcaaa

SEQ ID NO: 108941 - DNA, 25 bp, Saccharomyces pastorianus
gaattcaatagtgatgtcgctcaga

SEQ ID NO: 108942 - DNA, 25 bp, Saccharomyces pastorianus
ttggtcatcaagttatcgcggctgc

SEQ ID NO: 108943 - DNA, 25 bp, Saccharomyces pastorianus
tatcgcggctgctctaggaagttca

SEQ ID NO: 108944 - DNA, 25 bp, Saccharomyces pastorianus
gaagtctcaagacaagcttaccctt

SEQ ID NO: 108945 - DNA, 25 bp, Saccharomyces pastorianus
ccgcccgtagctggaatatgttttg

SEQ ID NO: 108946 - DNA, 25 bp, Saccharomyces pastorianus
gagtgctgacgtttcaaggacaccc

SEQ ID NO: 108947 - DNA, 25 bp, Saccharomyces pastorianus
agtgactgcgtgttcgatgtcccag

SEQ ID NO: 108948 - DNA, 25 bp, Saccharomyces pastorianus
atctaaggcataactacgaattcgt

SEQ ID NO: 108949 - DNA, 25 bp, Saccharomyces pastorianus
gatctaggctttaatgttcaagggt

SEQ ID NO: 108950 - DNA, 25 bp, Saccharomyces pastorianus
gatgcactgatggttatgccattct

SEQ ID NO: 108951 - DNA, 25 bp, Saccharomyces pastorianus
atgccattctcatatgtcctcaaat

SEQ ID NO: 108952 - DNA, 25 bp, Saccharomyces pastorianus
gaatgtctcagttagaagatgcact

SEQ ID NO: 108953 - DNA, 25 bp, Saccharomyces pastorianus
gcaatatattatggataccctgtta

SEQ ID NO: 108954 - DNA, 25 bp, Saccharomyces pastorianus
gaaagacttatggaggcgctagatt

SEQ ID NO: 108955 - DNA, 25 bp, Saccharomyces pastorianus
tgcactctcacttaccattaatttg

SEQ ID NO: 108956 - DNA, 25 bp, Saccharomyces pastorianus
ggtaactctgttctaattgctgtga

SEQ ID NO: 108957 - DNA, 25 bp, Saccharomyces pastorianus
acaaaactttgctgcactctcactt

SEQ ID NO: 108958 - DNA, 25 bp, Saccharomyces pastorianus
gcatccggtgttcataaacagactt

SEQ ID NO: 108959 - DNA, 25 bp, Saccharomyces pastorianus
gggcgcttttactactcaataatga

SEQ ID NO: 108960 - DNA, 25 bp, Saccharomyces pastorianus
taaacttcaaatctgcccatatccg

SEQ ID NO: 108961 - DNA, 25 bp, Saccharomyces pastorianus
ggcacagatttctcctttcaaaacg

SEQ ID NO: 108962 - DNA, 25 bp, Saccharomyces pastorianus
ggtggattttgacccgttgttcatc

SEQ ID NO: 108963 - DNA, 25 bp, Saccharomyces pastorianus
gttgttcatctcacacttgggagcc

SEQ ID NO: 108964 - DNA, 25 bp, Saccharomyces pastorianus
tttacacgtttccttaactcgatcg

SEQ ID NO: 108965 - DNA, 25 bp, Saccharomyces pastorianus
ccctgtctcagaatgtcccaataag

SEQ ID NO: 108966 - DNA, 25 bp, Saccharomyces pastorianus
agcaacccttcaaaagccacattaa

SEQ ID NO: 108967 - DNA, 25 bp, Saccharomyces pastorianus
atatcagaacgagccaacaccttgt

SEQ ID NO: 108968 - DNA, 25 bp, Saccharomyces pastorianus
tacatgtttcaattgccatcgccag

SEQ ID NO: 108969 - DNA, 25 bp, Saccharomyces pastorianus
agcgattcaccgacaacttcagaaa

SEQ ID NO: 108970 - DNA, 25 bp, Saccharomyces pastorianus
gtacttactgtaacgtctcttcgac

SEQ ID NO: 108971 - DNA, 25 bp, Saccharomyces pastorianus
agagaagcaatggtcgcggctccgc

SEQ ID NO: 108972 - DNA, 25 bp, Saccharomyces pastorianus
gtctcttcgactagcaaacaatcag

SEQ ID NO: 108973 - DNA, 25 bp, Saccharomyces pastorianus
gtaagtgtcagtttgctcacggact

SEQ ID NO: 108974 - DNA, 25 bp, Saccharomyces pastorianus
actaggttattgtccttatggcaga

SEQ ID NO: 108975 - DNA, 25 bp, Saccharomyces pastorianus
ggactatgtcccaaaatcttcacaa

SEQ ID NO: 108976 - DNA, 25 bp, Saccharomyces pastorianus
tagcacggcacctactacttttaaa

SEQ ID NO: 108977 - DNA, 25 bp, Saccharomyces pastorianus
tttgctcacggactcggcgaattaa

SEQ ID NO: 108978 - DNA, 25 bp, Saccharomyces pastorianus
aaagccaagtgcaggaaactcccaa

SEQ ID NO: 108979 - DNA, 25 bp, Saccharomyces pastorianus
gagctgtgcgaatcattcactttaa

SEQ ID NO: 108980 - DNA, 25 bp, Saccharomyces pastorianus
gaatcctcagctcaacctaaggtga

SEQ ID NO: 108981 - DNA, 25 bp, Saccharomyces pastorianus
tgaggcacagggacatatcgtttct

SEQ ID NO: 108982 - DNA, 25 bp, Saccharomyces pastorianus
gatctcttaaagaatgcaccattat

SEQ ID NO: 108983 - DNA, 25 bp, Saccharomyces pastorianus
tacgtgggtcacagatcaaatttat

SEQ ID NO: 108984 - DNA, 25 bp, Saccharomyces pastorianus
atttatcgttgttccagatctctta

SEQ ID NO: 108985 - DNA, 25 bp, Saccharomyces pastorianus
agcgacttatcgtggtaaacttgtt

SEQ ID NO: 108986 - DNA, 25 bp, Saccharomyces pastorianus
agctaacaacgggagcgacttatcg

SEQ ID NO: 108987 - DNA, 25 bp, Saccharomyces pastorianus
gatgtaatagctacagagccccagg

SEQ ID NO: 108988 - DNA, 25 bp, Saccharomyces pastorianus
ggacatatcgtttctctggagctaa

SEQ ID NO: 108989 - DNA, 25 bp, Saccharomyces pastorianus
gatcaaatattcgtacgtgggtcac

SEQ ID NO: 108990 - DNA, 25 bp, Saccharomyces pastorianus
gcatgaacgtacagctaagagatgt

SEQ ID NO: 108991 - DNA, 25 bp, Saccharomyces pastorianus
gggctgtaacacacatggatcaaat

SEQ ID NO: 108992 - DNA, 25 bp, Saccharomyces pastorianus
tgtatgctttcttggtttatttcta

SEQ ID NO: 108993 - DNA, 25 bp, Saccharomyces pastorianus
gtatgctttcttggtttatttctac

SEQ ID NO: 108994 - DNA, 25 bp, Saccharomyces pastorianus
atttctacttcacctctaaaagaat

SEQ ID NO: 108995 - DNA, 25 bp, Saccharomyces pastorianus
acttcacctctaaaagaatactgtg

SEQ ID NO: 108996 - DNA, 25 bp, Saccharomyces pastorianus
tatttctacttcacctctaaaagaa

SEQ ID NO: 108997 - DNA, 25 bp, Saccharomyces pastorianus
gtgtatgctttcttggtttatttct

SEQ ID NO: 108998 - DNA, 25 bp, Saccharomyces pastorianus
tctacttcacctctaaaagaatact

SEQ ID NO: 108999 - DNA, 25 bp, Saccharomyces pastorianus
atgtgtatgctttcttggtttattt

SEQ ID NO: 109000 - DNA, 25 bp, Saccharomyces pastorianus
tgtgtatgctttcttggtttatttc

SEQ ID NO: 109001 - DNA, 25 bp, Saccharomyces pastorianus
tacttcacctctaaaagaatactgt

SEQ ID NO: 109002 - DNA, 25 bp, Saccharomyces pastorianus
tatgctttcttggtttatttctact

SEQ ID NO: 109003 - DNA, 25 bp, Saccharomyces pastorianus
gacgccttccagtagcgataacaca

SEQ ID NO: 109004 - DNA, 25 bp, Saccharomyces pastorianus
tcgcaacgaattggcgcgattgcaa

SEQ ID NO: 109005 - DNA, 25 bp, Saccharomyces pastorianus
gagagggcactgatcgcaacgaatt

SEQ ID NO: 109006 - DNA, 25 bp, Saccharomyces pastorianus
aataccttcagtaatggcgccatcc

SEQ ID NO: 109007 - DNA, 25 bp, Saccharomyces pastorianus
atcctctcgggaaacacaataactg

SEQ ID NO: 109008 - DNA, 25 bp, Saccharomyces pastorianus
gatgcttacaccgtgagcttcatgc

SEQ ID NO: 109009 - DNA, 25 bp, Saccharomyces pastorianus
cttcatgcctttctataccgagtat

SEQ ID NO: 109010 - DNA, 25 bp, Saccharomyces pastorianus
ataccgagtatcaaggaccaaccga

SEQ ID NO: 109011 - DNA, 25 bp, Saccharomyces pastorianus
gatgccgtgaatctagatgcttaca

SEQ ID NO: 109012 - DNA, 25 bp, Saccharomyces pastorianus
gagggaaaagtctgcgacgccttcc

SEQ ID NO: 109013 - DNA, 25 bp, Saccharomyces pastorianus
gatactatttactttcgtggcaagg

SEQ ID NO: 109014 - DNA, 25 bp, Saccharomyces pastorianus
ggaaatacatccactgtccctaatg

SEQ ID NO: 109015 - DNA, 25 bp, Saccharomyces pastorianus
agccattggcacaggtacaaactcc

SEQ ID NO: 109016 - DNA, 25 bp, Saccharomyces pastorianus
acctcttacgctgattcaggtctgt

SEQ ID NO: 109017 - DNA, 25 bp, Saccharomyces pastorianus
tatatgtcattttccacctcttacg

SEQ ID NO: 109018 - DNA, 25 bp, Saccharomyces pastorianus
agctctgttgctatcgttggatgga

SEQ ID NO: 109019 - DNA, 25 bp, Saccharomyces pastorianus
ggtctgcacctgattattttgtagc

SEQ ID NO: 109020 - DNA, 25 bp, Saccharomyces pastorianus
aagctcagctaaaggcagctctgtt

SEQ ID NO: 109021 - DNA, 25 bp, Saccharomyces pastorianus
ccagtttcaatggttgccctaggaa

SEQ ID NO: 109022 - DNA, 25 bp, Saccharomyces pastorianus
tgtagctctggcaacacaagcgatt

SEQ ID NO: 109023 - DNA, 25 bp, Saccharomyces pastorianus
atggttctttggctaattcttatat

SEQ ID NO: 109024 - DNA, 25 bp, Saccharomyces pastorianus
agaaggcgtgtcatggtctgcacct

SEQ ID NO: 109025 - DNA, 25 bp, Saccharomyces pastorianus
cctttctctctcaatagcactatta

SEQ ID NO: 109026 - DNA, 25 bp, Saccharomyces pastorianus
gacatccctttctctctcaatagca

SEQ ID NO: 109027 - DNA, 25 bp, Saccharomyces pastorianus
atgatgacatccctttctctctcaa

SEQ ID NO: 109028 - DNA, 25 bp, Saccharomyces pastorianus
attatctaaaactgacttagtcaaa

SEQ ID NO: 109029 - DNA, 25 bp, Saccharomyces pastorianus
agcactattatctaaaactgactta

SEQ ID NO: 109030 - DNA, 25 bp, Saccharomyces pastorianus
atgacatccctttctctctcaatag

SEQ ID NO: 109031 - DNA, 25 bp, Saccharomyces pastorianus
tgatgacatccctttctctctcaat

SEQ ID NO: 109032 - DNA, 25 bp, Saccharomyces pastorianus
ttctctctcaatagcactattatct

SEQ ID NO: 109033 - DNA, 25 bp, Saccharomyces pastorianus
ctttctctctcaatagcactattat

SEQ ID NO: 109034 - DNA, 25 bp, Saccharomyces pastorianus
aatatcacttagaatatcaacagcc

SEQ ID NO: 109035 - DNA, 25 bp, Saccharomyces pastorianus
atccctttctctctcaatagcacta

SEQ ID NO: 109036 - DNA, 25 bp, Saccharomyces pastorianus
acaaggtcgatgctgaaggtaaggt

SEQ ID NO: 109037 - DNA, 25 bp, Saccharomyces pastorianus
ctacaaggtcgatgctgaaggtaag

SEQ ID NO: 109038 - DNA, 25 bp, Saccharomyces pastorianus
tacaaggtcgatgctgaaggtaagg

SEQ ID NO: 109039 - DNA, 25 bp, Saccharomyces pastorianus
aggtctacaccaccccaaagaagat

SEQ ID NO: 109040 - DNA, 25 bp, Saccharomyces pastorianus
gaaggtctacaccaccccaaagaag

SEQ ID NO: 109041 - DNA, 25 bp, Saccharomyces pastorianus
ggtctacaccaccccaaagaagatc

SEQ ID NO: 109042 - DNA, 25 bp, Saccharomyces pastorianus
tgagaagagaatgtagcaacccaac

SEQ ID NO: 109043 - DNA, 25 bp, Saccharomyces pastorianus
tactacaaggtcgatgctgaaggta

SEQ ID NO: 109044 - DNA, 25 bp, Saccharomyces pastorianus
actacaaggtcgatgctgaaggtaa

SEQ ID NO: 109045 - DNA, 25 bp, Saccharomyces pastorianus
gaagaaggtctacaccaccccaaag

SEQ ID NO: 109046 - DNA, 25 bp, Saccharomyces pastorianus
gtctacaccaccccaaagaagatca

SEQ ID NO: 109047 - DNA, 25 bp, Saccharomyces pastorianus
agagaatgtagcaacccaacttgtg

SEQ ID NO: 109048 - DNA, 25 bp, Saccharomyces pastorianus
ccaacttgtggtgctggtgttttct

SEQ ID NO: 109049 - DNA, 25 bp, Saccharomyces pastorianus
tggtgttttcttggctaaccacaag

SEQ ID NO: 109050 - DNA, 25 bp, Saccharomyces pastorianus
tttcttggctaaccacaaggacaga

SEQ ID NO: 109051 - DNA, 25 bp, Saccharomyces pastorianus
gactattaccctggaagttgaatct

SEQ ID NO: 109052 - DNA, 25 bp, Saccharomyces pastorianus
tcaagttggctgtcttgtcctacta

SEQ ID NO: 109053 - DNA, 25 bp, Saccharomyces pastorianus
ttgtcctactacaaggtcgatgctg

SEQ ID NO: 109054 - DNA, 25 bp, Saccharomyces pastorianus
gttttcttggctaaccacaaggaca

SEQ ID NO: 109055 - DNA, 25 bp, Saccharomyces pastorianus
gtgttttcttggctaaccacaagga

SEQ ID NO: 109056 - DNA, 25 bp, Saccharomyces pastorianus
tacaccaccccaaagaagatcaagc

SEQ ID NO: 109057 - DNA, 25 bp, Saccharomyces pastorianus
aagcacaagcacaagaaggtcaagt

SEQ ID NO: 109058 - DNA, 25 bp, Saccharomyces pastorianus
atatggatccattagaaagctgtgt

SEQ ID NO: 109059 - DNA, 25 bp, Saccharomyces pastorianus
tatccgcaggtacgcttcttaaagg

SEQ ID NO: 109060 - DNA, 25 bp, Saccharomyces pastorianus
tcatgatgatgctaggagggaccaa

SEQ ID NO: 109061 - DNA, 25 bp, Saccharomyces pastorianus
gcaggaagcccaaattacagcatat

SEQ ID NO: 109062 - DNA, 25 bp, Saccharomyces pastorianus
aacacttttccagcaggaagcccaa

SEQ ID NO: 109063 - DNA, 25 bp, Saccharomyces pastorianus
cgcatcccgatgactcggctaataa

SEQ ID NO: 109064 - DNA, 25 bp, Saccharomyces pastorianus
gattggtcagttcaaaggttttgcg

SEQ ID NO: 109065 - DNA, 25 bp, Saccharomyces pastorianus
tacacatgtcatcgcagtggacgtt

SEQ ID NO: 109066 - DNA, 25 bp, Saccharomyces pastorianus
gacttgagcaatcaacttgtcagta

SEQ ID NO: 109067 - DNA, 25 bp, Saccharomyces pastorianus
gagcggcagaaccatcttacagcaa

SEQ ID NO: 109068 - DNA, 25 bp, Saccharomyces pastorianus
aggtcttagttactgaacggttgat

SEQ ID NO: 109069 - DNA, 25 bp, Saccharomyces pastorianus
tcaagattatcgttgctctccatgg

SEQ ID NO: 109070 - DNA, 25 bp, Saccharomyces pastorianus
agatatttttgtccgggcaacggct

SEQ ID NO: 109071 - DNA, 25 bp, Saccharomyces pastorianus
ttattcttctcctttcttcttcatt

SEQ ID NO: 109072 - DNA, 25 bp, Saccharomyces pastorianus
atggtgtccatcacggtcacatggt

SEQ ID NO: 109073 - DNA, 25 bp, Saccharomyces pastorianus
aacggcttttgcgacagacggtaat

SEQ ID NO: 109074 - DNA, 25 bp, Saccharomyces pastorianus
aacgttgtgccgatgctcgcaaaag

SEQ ID NO: 109075 - DNA, 25 bp, Saccharomyces pastorianus
acattcattgctttttaccgctctg

SEQ ID NO: 109076 - DNA, 25 bp, Saccharomyces pastorianus
taccgctctgaccaatcaacgttgt

SEQ ID NO: 109077 - DNA, 25 bp, Saccharomyces pastorianus
cctaactcagtaccctttcaagatt

SEQ ID NO: 109078 - DNA, 25 bp, Saccharomyces pastorianus
ttgttttttagtggccctaactcag

SEQ ID NO: 109079 - DNA, 25 bp, Saccharomyces pastorianus
ggtcacatggtgcagtacttccttc

SEQ ID NO: 109080 - DNA, 25 bp, Saccharomyces pastorianus
tacaagcgatatgctagtctatatt

SEQ ID NO: 109081 - DNA, 25 bp, Saccharomyces pastorianus
gcaatgtccgctggtgaaaaggcaa

SEQ ID NO: 109082 - DNA, 25 bp, Saccharomyces pastorianus
aatggtacacggcaatgtccgctgg

SEQ ID NO: 109083 - DNA, 25 bp, Saccharomyces pastorianus
ggacacatatttcggcaatgtttgt

SEQ ID NO: 109084 - DNA, 25 bp, Saccharomyces pastorianus
gaaagacttgacacctacgatatta

SEQ ID NO: 109085 - DNA, 25 bp, Saccharomyces pastorianus
gggtgacgcccgatgttgacaatga

SEQ ID NO: 109086 - DNA, 25 bp, Saccharomyces pastorianus
tgttgctggtttctaggcaaggaaa

SEQ ID NO: 109087 - DNA, 25 bp, Saccharomyces pastorianus
gacaatgaactgttgaccttggaaa

SEQ ID NO: 109088 - DNA, 25 bp, Saccharomyces pastorianus
gaagtactgcaccatgtgaccgtga

SEQ ID NO: 109089 - DNA, 25 bp, Saccharomyces pastorianus
acttcagtaaggtctacgatatctt

SEQ ID NO: 109090 - DNA, 25 bp, Saccharomyces pastorianus
tggaaattatccatcggtttgtcga

SEQ ID NO: 109091 - DNA, 25 bp, Saccharomyces pastorianus
gtgtccattgtttcgacaaaccgat

SEQ ID NO: 109092 - DNA, 25 bp, Saccharomyces pastorianus
tttgggttttcttgctaatatcgta

SEQ ID NO: 109093 - DNA, 25 bp, Saccharomyces pastorianus
cggacattgccgtgtaccatttctt

SEQ ID NO: 109094 - DNA, 25 bp, Saccharomyces pastorianus
gggcgtcaccccaacaataaaatat

SEQ ID NO: 109095 - DNA, 25 bp, Saccharomyces pastorianus
tgatttttccttgcctagaaaccag

SEQ ID NO: 109096 - DNA, 25 bp, Saccharomyces pastorianus
aattgcgtcatcttgtgtacctgtg

SEQ ID NO: 109097 - DNA, 25 bp, Saccharomyces pastorianus
ctagcatatcgcttgtatactactt

SEQ ID NO: 109098 - DNA, 25 bp, Saccharomyces pastorianus
agttcattgtcaacatcgggcgtca

SEQ ID NO: 109099 - DNA, 25 bp, Saccharomyces pastorianus
gtatccgtatataatctcctccagg

SEQ ID NO: 109100 - DNA, 25 bp, Saccharomyces pastorianus
acaatttttgccttttcaccagcgg

SEQ ID NO: 109101 - DNA, 25 bp, Saccharomyces pastorianus
actactttgtggtcattatactcga

SEQ ID NO: 109102 - DNA, 25 bp, Saccharomyces pastorianus
caattacgattcaggcgagccactt

SEQ ID NO: 109103 - DNA, 25 bp, Saccharomyces pastorianus
aaattggccttcatactttagtgtt

SEQ ID NO: 109104 - DNA, 25 bp, Saccharomyces pastorianus
catgtctatcgctcaatgttgtgaa

SEQ ID NO: 109105 - DNA, 25 bp, Saccharomyces pastorianus
gggcatgtggcctacaactatacaa

SEQ ID NO: 109106 - DNA, 25 bp, Saccharomyces pastorianus
tcccgatactccagcagttgcaatt

SEQ ID NO: 109107 - DNA, 25 bp, Saccharomyces pastorianus
atacctgctagagtttgccgacgac

SEQ ID NO: 109108 - DNA, 25 bp, Saccharomyces pastorianus
agtagattaggctcgagctcccaaa

SEQ ID NO: 109109 - DNA, 25 bp, Saccharomyces pastorianus
ggtacaaaggcatacactcccgata

SEQ ID NO: 109110 - DNA, 25 bp, Saccharomyces pastorianus
gtcatcctcggcagacaatgtcatg

SEQ ID NO: 109111 - DNA, 25 bp, Saccharomyces pastorianus
gtatttcaaacctgcggcatgggtc

SEQ ID NO: 109112 - DNA, 25 bp, Saccharomyces pastorianus
acgtgaggcaattcccgtcgaaatt

SEQ ID NO: 109113 - DNA, 25 bp, Saccharomyces pastorianus
tactaccgaggagttcattgacgcg

SEQ ID NO: 109114 - DNA, 25 bp, Saccharomyces pastorianus
tattgttgcacaaggatttggctcc

SEQ ID NO: 109115 - DNA, 25 bp, Saccharomyces pastorianus
agaagtttgaatcccttggcatctg

SEQ ID NO: 109116 - DNA, 25 bp, Saccharomyces pastorianus
gagacgtcaacaaattccattgcat

SEQ ID NO: 109117 - DNA, 25 bp, Saccharomyces pastorianus
agccgcccacggtacagtaacaaga

SEQ ID NO: 109118 - DNA, 25 bp, Saccharomyces pastorianus
aaagatttggcgctcattctcggta

SEQ ID NO: 109119 - DNA, 25 bp, Saccharomyces pastorianus
agatccgcttatgttactaccgagg

SEQ ID NO: 109120 - DNA, 25 bp, Saccharomyces pastorianus
ggcatctggtacgagcactgtttaa

SEQ ID NO: 109121 - DNA, 25 bp, Saccharomyces pastorianus
agatgtagttaagttcggccaaata

SEQ ID NO: 109122 - DNA, 25 bp, Saccharomyces pastorianus
ttgcatcaattttcgcgtggactag

SEQ ID NO: 109123 - DNA, 25 bp, Saccharomyces pastorianus
tgacatctgtgttgattaccccgga

SEQ ID NO: 109124 - DNA, 25 bp, Saccharomyces pastorianus
catttccccaatgaccagtttatca

SEQ ID NO: 109125 - DNA, 25 bp, Saccharomyces pastorianus
gactctggttgataccaccaatggt

SEQ ID NO: 109126 - DNA, 25 bp, Saccharomyces pastorianus
gaatgcagagttccaatttgacaga

SEQ ID NO: 109127 - DNA, 25 bp, Saccharomyces pastorianus
aatagtcaacagcatttccccaatg

SEQ ID NO: 109128 - DNA, 25 bp, Saccharomyces pastorianus
aaaggctcttcacattgcacagcta

SEQ ID NO: 109129 - DNA, 25 bp, Saccharomyces pastorianus
gtggcccctgaactgaatcgtttga

SEQ ID NO: 109130 - DNA, 25 bp, Saccharomyces pastorianus
aattgactttctactacatttgcca

SEQ ID NO: 109131 - DNA, 25 bp, Saccharomyces pastorianus
gtaagccggtcgctcatgagttgaa

SEQ ID NO: 109132 - DNA, 25 bp, Saccharomyces pastorianus
aagcaggttctgagatttgccaccc

SEQ ID NO: 109133 - DNA, 25 bp, Saccharomyces pastorianus
aacactggaattgtcgtggcccctg

SEQ ID NO: 109134 - DNA, 25 bp, Saccharomyces pastorianus
ctccggtggcgggttgaacatcaaa

SEQ ID NO: 109135 - DNA, 25 bp, Saccharomyces pastorianus
gtacgttccccaagacgacgatttg

SEQ ID NO: 109136 - DNA, 25 bp, Saccharomyces pastorianus
cccaattccagttcacgttcaataa

SEQ ID NO: 109137 - DNA, 25 bp, Saccharomyces pastorianus
gagtactcatcaagtgcacctgttg

SEQ ID NO: 109138 - DNA, 25 bp, Saccharomyces pastorianus
ggtccccacagatatgttttcttgt

SEQ ID NO: 109139 - DNA, 25 bp, Saccharomyces pastorianus
gagacctccggagcaaccgaatttt

SEQ ID NO: 109140 - DNA, 25 bp, Saccharomyces pastorianus
ggtctgaattctgccacttggtaga

SEQ ID NO: 109141 - DNA, 25 bp, Saccharomyces pastorianus
gtaatgaccgatccggatgttccct

SEQ ID NO: 109142 - DNA, 25 bp, Saccharomyces pastorianus
agcctaagggcgtggactcatctaa

SEQ ID NO: 109143 - DNA, 25 bp, Saccharomyces pastorianus
ggatgttccctctaagacagatcac

SEQ ID NO: 109144 - DNA, 25 bp, Saccharomyces pastorianus
agtgcacctgttgccatgggtaaca

SEQ ID NO: 109145 - DNA, 25 bp, Saccharomyces pastorianus
aaagcgtaccacaggcgaatgcgta

SEQ ID NO: 109146 - DNA, 25 bp, Saccharomyces pastorianus
gtgcgggtgcctatgactatatcaa

SEQ ID NO: 109147 - DNA, 25 bp, Saccharomyces pastorianus
gattcgtccacttttaccaaggttg

SEQ ID NO: 109148 - DNA, 25 bp, Saccharomyces pastorianus
gttgtcggtttcgtacgttgattct

SEQ ID NO: 109149 - DNA, 25 bp, Saccharomyces pastorianus
atacgtgttcttcctgtgcaagcaa

SEQ ID NO: 109150 - DNA, 25 bp, Saccharomyces pastorianus
tcgctttgttgatgactgacccgga

SEQ ID NO: 109151 - DNA, 25 bp, Saccharomyces pastorianus
aaaagccaattgtcagccgaggata

SEQ ID NO: 109152 - DNA, 25 bp, Saccharomyces pastorianus
gttcacgcccttcgataaaagccaa

SEQ ID NO: 109153 - DNA, 25 bp, Saccharomyces pastorianus
gatattcctgtcgagtacggacctg

SEQ ID NO: 109154 - DNA, 25 bp, Saccharomyces pastorianus
aacaatctgcaactggtcggtgcca

SEQ ID NO: 109155 - DNA, 25 bp, Saccharomyces pastorianus
atattgggcctggtccaccaaagaa

SEQ ID NO: 109156 - DNA, 25 bp, Saccharomyces pastorianus
ggtcggaggtttgtcactacatcat

SEQ ID NO: 109157 - DNA, 25 bp, Saccharomyces pastorianus
gcgaatatgatgcagatgaaccctt

SEQ ID NO: 109158 - DNA, 25 bp, Saccharomyces pastorianus
cccacaagacattgacactgacgaa

SEQ ID NO: 109159 - DNA, 25 bp, Saccharomyces pastorianus
gttacaggccatatcttctgaagac

SEQ ID NO: 109160 - DNA, 25 bp, Saccharomyces pastorianus
ttccaccaacggtcttattgaaggc

SEQ ID NO: 109161 - DNA, 25 bp, Saccharomyces pastorianus
tatcttctgaagacccacaagacat

SEQ ID NO: 109162 - DNA, 25 bp, Saccharomyces pastorianus
gtattgattgggactctggcgaata

SEQ ID NO: 109163 - DNA, 25 bp, Saccharomyces pastorianus
gcggaatgataaacacctaaccaat

SEQ ID NO: 109164 - DNA, 25 bp, Saccharomyces pastorianus
tgaacccttcaaagtagagttcctt

SEQ ID NO: 109165 - DNA, 25 bp, Saccharomyces pastorianus
gaaggcgatatttccaaactattag

SEQ ID NO: 109166 - DNA, 25 bp, Saccharomyces pastorianus
tatgcttgatggtttgttacaggcc

SEQ ID NO: 109167 - DNA, 25 bp, Saccharomyces pastorianus
ggatacaatcagcaccaaacaatca

SEQ ID NO: 109168 - DNA, 25 bp, Saccharomyces pastorianus
aattacccattgtctgcctcagttg

SEQ ID NO: 109169 - DNA, 25 bp, Saccharomyces pastorianus
ggtattagcgatggcatccctcgag

SEQ ID NO: 109170 - DNA, 25 bp, Saccharomyces pastorianus
atcacctacctactaagtgccgtaa

SEQ ID NO: 109171 - DNA, 25 bp, Saccharomyces pastorianus
gtccttttgaactgtgacgaccatc

SEQ ID NO: 109172 - DNA, 25 bp, Saccharomyces pastorianus
ggaattctgatcgaggttaacccca

SEQ ID NO: 109173 - DNA, 25 bp, Saccharomyces pastorianus
gttatccgcgttcaagattacatcg

SEQ ID NO: 109174 - DNA, 25 bp, Saccharomyces pastorianus
ttaagaacccaattaccgatcacct

SEQ ID NO: 109175 - DNA, 25 bp, Saccharomyces pastorianus
aaagtcggcttgtccaattacccat

SEQ ID NO: 109176 - DNA, 25 bp, Saccharomyces pastorianus
tgacattatcctttgacgcaccagt

SEQ ID NO: 109177 - DNA, 25 bp, Saccharomyces pastorianus
ttgacgttgctagattctccaatca

SEQ ID NO: 109178 - DNA, 25 bp, Saccharomyces pastorianus
acacaagatatcgtccaatgggcct

SEQ ID NO: 109179 - DNA, 25 bp, Saccharomyces pastorianus
caagaatcccatgccctaagactag

SEQ ID NO: 109180 - DNA, 25 bp, Saccharomyces pastorianus
tttcaatgcaaatggcctctatggc

SEQ ID NO: 109181 - DNA, 25 bp, Saccharomyces pastorianus
tatttccacaacagcatctgtgcag

SEQ ID NO: 109182 - DNA, 25 bp, Saccharomyces pastorianus
gaacagccagattcttcttcgggaa

SEQ ID NO: 109183 - DNA, 25 bp, Saccharomyces pastorianus
actggcacgcgtttctgttttagac

SEQ ID NO: 109184 - DNA, 25 bp, Saccharomyces pastorianus
agaggagccaacttctgctatttcc

SEQ ID NO: 109185 - DNA, 25 bp, Saccharomyces pastorianus
tcttcgggaacttcgtccgaggaag

SEQ ID NO: 109186 - DNA, 25 bp, Saccharomyces pastorianus
aaaattagtgcattccatgacgacg

SEQ ID NO: 109187 - DNA, 25 bp, Saccharomyces pastorianus
ctaagactagactggcacgcgtttc

SEQ ID NO: 109188 - DNA, 25 bp, Saccharomyces pastorianus
gaaattgactgaatcctccgcagta

SEQ ID NO: 109189 - DNA, 25 bp, Saccharomyces pastorianus
gaaggatcctagtatacaggctcaa

SEQ ID NO: 109190 - DNA, 25 bp, Saccharomyces pastorianus
ggagtctgacttaaacaatgctgca

SEQ ID NO: 109191 - DNA, 25 bp, Saccharomyces pastorianus
gacagagccctattggatattgaca

SEQ ID NO: 109192 - DNA, 25 bp, Saccharomyces pastorianus
agaccaatttgggtggcgcatttaa

SEQ ID NO: 109193 - DNA, 25 bp, Saccharomyces pastorianus
aagatttcgacctagatggccccga

SEQ ID NO: 109194 - DNA, 25 bp, Saccharomyces pastorianus
gaaacacatcctttgtttaacgccg

SEQ ID NO: 109195 - DNA, 25 bp, Saccharomyces pastorianus
aaaaaatctccgctgaactactcct

SEQ ID NO: 109196 - DNA, 25 bp, Saccharomyces pastorianus
tctggcccgtgttagaggtggtact

SEQ ID NO: 109197 - DNA, 25 bp, Saccharomyces pastorianus
gaactactcctcatcgttagcgatt

SEQ ID NO: 109198 - DNA, 25 bp, Saccharomyces pastorianus
ggaaagaatcctccgctgacagagc

SEQ ID NO: 109199 - DNA, 25 bp, Saccharomyces pastorianus
gaaaggctcttactgctgctattac

SEQ ID NO: 109200 - DNA, 25 bp, Saccharomyces pastorianus
cgaagaacatccaagggctcgtgct

SEQ ID NO: 109201 - DNA, 25 bp, Saccharomyces pastorianus
tcatcttcgggatcctcatcaaaag

SEQ ID NO: 109202 - DNA, 25 bp, Saccharomyces pastorianus
gtggccgaaagcaactctgccgtaa

SEQ ID NO: 109203 - DNA, 25 bp, Saccharomyces pastorianus
taagcacaacttcaactgcctctgt

SEQ ID NO: 109204 - DNA, 25 bp, Saccharomyces pastorianus
ataccactacgtcaggttctacagt

SEQ ID NO: 109205 - DNA, 25 bp, Saccharomyces pastorianus
acatctactgtttggtggctaccgt

SEQ ID NO: 109206 - DNA, 25 bp, Saccharomyces pastorianus
gcaaaaccacgacacagtacctatg

SEQ ID NO: 109207 - DNA, 25 bp, Saccharomyces pastorianus
aacacctatgctgtggctccaagta

SEQ ID NO: 109208 - DNA, 25 bp, Saccharomyces pastorianus
ggtagcgtccgtaatgtccaattct

SEQ ID NO: 109209 - DNA, 25 bp, Saccharomyces pastorianus
ttgccggcactcacatagcttatgg

SEQ ID NO: 109210 - DNA, 25 bp, Saccharomyces pastorianus
acaactgacaacacggcttcatcaa

SEQ ID NO: 109211 - DNA, 25 bp, Saccharomyces pastorianus
gagagacgtcaagcggaatcaccaa

SEQ ID NO: 109212 - DNA, 25 bp, Saccharomyces pastorianus
aaattccccttggatgatgctacga

SEQ ID NO: 109213 - DNA, 25 bp, Saccharomyces pastorianus
gttctgtctcgtgatttcgatgtcg

SEQ ID NO: 109214 - DNA, 25 bp, Saccharomyces pastorianus
gtaaatactggtctgccatggcagg

SEQ ID NO: 109215 - DNA, 25 bp, Saccharomyces pastorianus
aagggcccaagcatggttctgtctc

SEQ ID NO: 109216 - DNA, 25 bp, Saccharomyces pastorianus
gtattgacatcgtcattcgctccag

SEQ ID NO: 109217 - DNA, 25 bp, Saccharomyces pastorianus
gctggtatctccacattatgttcaa

SEQ ID NO: 109218 - DNA, 25 bp, Saccharomyces pastorianus
tcattcgctccagacatcgaggtag

SEQ ID NO: 109219 - DNA, 25 bp, Saccharomyces pastorianus
gatgctacgaacactaagggcccaa

SEQ ID NO: 109220 - DNA, 25 bp, Saccharomyces pastorianus
gaatcgccagaaaatacaccagtaa

SEQ ID NO: 109221 - DNA, 25 bp, Saccharomyces pastorianus
cgaggtagcgggtaccatggtcatt

SEQ ID NO: 109222 - DNA, 25 bp, Saccharomyces pastorianus
ttggacattgaaggcacacgatgct

SEQ ID NO: 109223 - DNA, 25 bp, Saccharomyces pastorianus
catcatcttctaattttctcttctt

SEQ ID NO: 109224 - DNA, 25 bp, Saccharomyces pastorianus
gtagaattctaatctttgctcaact

SEQ ID NO: 109225 - DNA, 25 bp, Saccharomyces pastorianus
cattcttcaaagttggcttaccagt

SEQ ID NO: 109226 - DNA, 25 bp, Saccharomyces pastorianus
acttctgcagctggtttatctttgt

SEQ ID NO: 109227 - DNA, 25 bp, Saccharomyces pastorianus
ttttccttggtttcttccacttctg

SEQ ID NO: 109228 - DNA, 25 bp, Saccharomyces pastorianus
aaagttccatggcttcttgaatggc

SEQ ID NO: 109229 - DNA, 25 bp, Saccharomyces pastorianus
actttatttcgattcattgttcctt

SEQ ID NO: 109230 - DNA, 25 bp, Saccharomyces pastorianus
tcattgttccttttaatccttactt

SEQ ID NO: 109231 - DNA, 25 bp, Saccharomyces pastorianus
ggcttaccagtgttgtagaattcta

SEQ ID NO: 109232 - DNA, 25 bp, Saccharomyces pastorianus
ttctcttctttgaggattccttttc

SEQ ID NO: 109233 - DNA, 25 bp, Saccharomyces pastorianus
atggctaattcattcttcaaagttg

SEQ ID NO: 109234 - DNA, 25 bp, Saccharomyces pastorianus
cacaattgattgtcggtcccagtaa

SEQ ID NO: 109235 - DNA, 25 bp, Saccharomyces pastorianus
agaaactttcgttgtctgacatggg

SEQ ID NO: 109236 - DNA, 25 bp, Saccharomyces pastorianus
atatggcttttctttcccgatttat

SEQ ID NO: 109237 - DNA, 25 bp, Saccharomyces pastorianus
gtcttccccaatcttcaggtaaaca

SEQ ID NO: 109238 - DNA, 25 bp, Saccharomyces pastorianus
cccagttctcccctgatataatagt

SEQ ID NO: 109239 - DNA, 25 bp, Saccharomyces pastorianus
aatggcttggttttgagccttcaag

SEQ ID NO: 109240 - DNA, 25 bp, Saccharomyces pastorianus
gtgaaaagtccaagtcttccccaat

SEQ ID NO: 109241 - DNA, 25 bp, Saccharomyces pastorianus
tcatatcacagttagcccagttctc

SEQ ID NO: 109242 - DNA, 25 bp, Saccharomyces pastorianus
aaatgtcttgtagcgcctagtgagg

SEQ ID NO: 109243 - DNA, 25 bp, Saccharomyces pastorianus
taattggcacctctgataaaatcgc

SEQ ID NO: 109244 - DNA, 25 bp, Saccharomyces pastorianus
gtatatcgccgatttttggtaacat

SEQ ID NO: 109245 - DNA, 25 bp, Saccharomyces pastorianus
gtaatgtccttttaccagttgaaca

SEQ ID NO: 109246 - DNA, 25 bp, Saccharomyces pastorianus
gatacacctgtgtacaaattgacag

SEQ ID NO: 109247 - DNA, 25 bp, Saccharomyces pastorianus
ggtgccaaatatcaacagttgcaaa

SEQ ID NO: 109248 - DNA, 25 bp, Saccharomyces pastorianus
gagaagcgagctaattaaactgaac

SEQ ID NO: 109249 - DNA, 25 bp, Saccharomyces pastorianus
ccagttgaacaaagtgaggcacgta

SEQ ID NO: 109250 - DNA, 25 bp, Saccharomyces pastorianus
aacataagggacaagcaggaagaac

SEQ ID NO: 109251 - DNA, 25 bp, Saccharomyces pastorianus
ggccagacaaaaattagagacacaa

SEQ ID NO: 109252 - DNA, 25 bp, Saccharomyces pastorianus
gagtttgaccaattagaagaagata

SEQ ID NO: 109253 - DNA, 25 bp, Saccharomyces pastorianus
atgtctgaattaggtgccaaatatc

SEQ ID NO: 109254 - DNA, 25 bp, Saccharomyces pastorianus
gtgaggcacgtaccaacgtggacaa

SEQ ID NO: 109255 - DNA, 25 bp, Saccharomyces pastorianus
ttgacaggtaatgtccttttaccag

SEQ ID NO: 109256 - DNA, 25 bp, Saccharomyces pastorianus
gaatctttaaatgagctcggctatc

SEQ ID NO: 109257 - DNA, 25 bp, Saccharomyces pastorianus
aggaatcaaccctgacgtaactcca

SEQ ID NO: 109258 - DNA, 25 bp, Saccharomyces pastorianus
gaactacacagattgtccgatgata

SEQ ID NO: 109259 - DNA, 25 bp, Saccharomyces pastorianus
gtttcgagcacctacatcggttcaa

SEQ ID NO: 109260 - DNA, 25 bp, Saccharomyces pastorianus
tcccgagcacggtttctctgaaaga

SEQ ID NO: 109261 - DNA, 25 bp, Saccharomyces pastorianus
tccaccgctgtcatggaactgataa

SEQ ID NO: 109262 - DNA, 25 bp, Saccharomyces pastorianus
gaagagtttgcctggtacacgttaa

SEQ ID NO: 109263 - DNA, 25 bp, Saccharomyces pastorianus
ggtcatgcgtttgggtgagtactac

SEQ ID NO: 109264 - DNA, 25 bp, Saccharomyces pastorianus
attccaagcgcctttctctttgaaa

SEQ ID NO: 109265 - DNA, 25 bp, Saccharomyces pastorianus
atgatctcttcaataggtgctccca

SEQ ID NO: 109266 - DNA, 25 bp, Saccharomyces pastorianus
aatcggtgggcatttgtcggaacta

SEQ ID NO: 109267 - DNA, 25 bp, Saccharomyces pastorianus
tgaagaaaccaagttgcgggtccta

SEQ ID NO: 109268 - DNA, 25 bp, Saccharomyces pastorianus
gtcagtgagccattaaacggttcaa

SEQ ID NO: 109269 - DNA, 25 bp, Saccharomyces pastorianus
gatgaagaaacacaaactgcggaaa

SEQ ID NO: 109270 - DNA, 25 bp, Saccharomyces pastorianus
aattaacactacaatgcctcccatg

SEQ ID NO: 109271 - DNA, 25 bp, Saccharomyces pastorianus
tagtgatgcaactcgattcagtgat

SEQ ID NO: 109272 - DNA, 25 bp, Saccharomyces pastorianus
aagagggcatgctgagtacaatgat

SEQ ID NO: 109273 - DNA, 25 bp, Saccharomyces pastorianus
tgatgacggctacggcaacaaggat

SEQ ID NO: 109274 - DNA, 25 bp, Saccharomyces pastorianus
tgcgggtcctactttaacagaacct

SEQ ID NO: 109275 - DNA, 25 bp, Saccharomyces pastorianus
aatgcctcccatgcaagagggcatg

SEQ ID NO: 109276 - DNA, 25 bp, Saccharomyces pastorianus
ggcaacaaggatcactggcacagtc

SEQ ID NO: 109277 - DNA, 25 bp, Saccharomyces pastorianus
gaacctttcaaacagcaattaacac

SEQ ID NO: 109278 - DNA, 25 bp, Saccharomyces pastorianus
aaggccattccagttatgacgtcat

SEQ ID NO: 109279 - DNA, 25 bp, Saccharomyces pastorianus
gtagaacctcgtcagatatcgcgtg

SEQ ID NO: 109280 - DNA, 25 bp, Saccharomyces pastorianus
aattctcttgtctctaccgcgatga

SEQ ID NO: 109281 - DNA, 25 bp, Saccharomyces pastorianus
ttacaacaacgcatcaaattcccct

SEQ ID NO: 109282 - DNA, 25 bp, Saccharomyces pastorianus
gtctaccgtggtgaacgtctttgag

SEQ ID NO: 109283 - DNA, 25 bp, Saccharomyces pastorianus
gttcaagatgaattcgccgagtcaa

SEQ ID NO: 109284 - DNA, 25 bp, Saccharomyces pastorianus
gatatcgcgtgctatgaccaaatta

SEQ ID NO: 109285 - DNA, 25 bp, Saccharomyces pastorianus
atggtcctcttctgcgatgcacgtt

SEQ ID NO: 109286 - DNA, 25 bp, Saccharomyces pastorianus
aagccctagtttcactccatttaca

SEQ ID NO: 109287 - DNA, 25 bp, Saccharomyces pastorianus
ttattagacccttccaattctcttg

SEQ ID NO: 109288 - DNA, 25 bp, Saccharomyces pastorianus
aagatcgccatacttgcctttacaa

SEQ ID NO: 109289 - DNA, 25 bp, Saccharomyces pastorianus
gggcctcagccattaaaggtagtga

SEQ ID NO: 109290 - DNA, 25 bp, Saccharomyces pastorianus
gagaatatccaagaccggatgctac

SEQ ID NO: 109291 - DNA, 25 bp, Saccharomyces pastorianus
agctctggcaggctaaaactggcag

SEQ ID NO: 109292 - DNA, 25 bp, Saccharomyces pastorianus
tgtgccatgccgaaacaggtgactg

SEQ ID NO: 109293 - DNA, 25 bp, Saccharomyces pastorianus
atgtgtgggacacgagaatatccaa

SEQ ID NO: 109294 - DNA, 25 bp, Saccharomyces pastorianus
caggtgactggaggcagtgcttcaa

SEQ ID NO: 109295 - DNA, 25 bp, Saccharomyces pastorianus
aaggcacttctaagagttgcgccaa

SEQ ID NO: 109296 - DNA, 25 bp, Saccharomyces pastorianus
ttttttctcacaacaaatgtccgaa

SEQ ID NO: 109297 - DNA, 25 bp, Saccharomyces pastorianus
tcatgagtgaaactggcgaaacttc

SEQ ID NO: 109298 - DNA, 25 bp, Saccharomyces pastorianus
tagagagcgcgtaagcacagtggac

SEQ ID NO: 109299 - DNA, 25 bp, Saccharomyces pastorianus
aaactggcagactggtcatgagtga

SEQ ID NO: 109300 - DNA, 25 bp, Saccharomyces pastorianus
tacgagcccattccattgcagaaga

SEQ ID NO: 109301 - DNA, 25 bp, Saccharomyces pastorianus
taaagtgctgcaattctctcaagaa

SEQ ID NO: 109302 - DNA, 25 bp, Saccharomyces pastorianus
gtgtgacaaccgcaaagccatcttc

SEQ ID NO: 109303 - DNA, 25 bp, Saccharomyces pastorianus
agtagttacagattcaccttcaccc

SEQ ID NO: 109304 - DNA, 25 bp, Saccharomyces pastorianus
cccagcagcgtctatttcggaaggt

SEQ ID NO: 109305 - DNA, 25 bp, Saccharomyces pastorianus
gaatgaattatctgccgctgagcca

SEQ ID NO: 109306 - DNA, 25 bp, Saccharomyces pastorianus
aagtcagggcaatgtacctacctcc

SEQ ID NO: 109307 - DNA, 25 bp, Saccharomyces pastorianus
aactactgcgtcctcgaatgggcaa

SEQ ID NO: 109308 - DNA, 25 bp, Saccharomyces pastorianus
acaatggtcacttcgacacatgcca

SEQ ID NO: 109309 - DNA, 25 bp, Saccharomyces pastorianus
gatcctcccacgaagcacaagaagt

SEQ ID NO: 109310 - DNA, 25 bp, Saccharomyces pastorianus
aaagtcttcttcttcgcttttacag

SEQ ID NO: 109311 - DNA, 25 bp, Saccharomyces pastorianus
tgcagtcactatcggtggcggttat

SEQ ID NO: 109312 - DNA, 25 bp, Saccharomyces pastorianus
gtgggcacaggtctcatttattcta

SEQ ID NO: 109313 - DNA, 25 bp, Saccharomyces pastorianus
tggcggttatctacttggtgggcta

SEQ ID NO: 109314 - DNA, 25 bp, Saccharomyces pastorianus
attaccggtggctttgctgagttga

SEQ ID NO: 109315 - DNA, 25 bp, Saccharomyces pastorianus
gggtctagacgaacctgccgagaat

SEQ ID NO: 109316 - DNA, 25 bp, Saccharomyces pastorianus
gagattaaccctaatttctcggacg

SEQ ID NO: 109317 - DNA, 25 bp, Saccharomyces pastorianus
atctcaggtgcgatttctatgggcc

SEQ ID NO: 109318 - DNA, 25 bp, Saccharomyces pastorianus
taacagctggtctatcttcacttgg

SEQ ID NO: 109319 - DNA, 25 bp, Saccharomyces pastorianus
ttttttgtctcagatgtgggcacag

SEQ ID NO: 109320 - DNA, 25 bp, Saccharomyces pastorianus
acacctgagctaatggttgacttca

SEQ ID NO: 109321 - DNA, 25 bp, Saccharomyces pastorianus
atgggtagtggcagttcgacttcaa

SEQ ID NO: 109322 - DNA, 25 bp, Saccharomyces pastorianus
aagtgatcatgttttctcaaaaggt

SEQ ID NO: 109323 - DNA, 25 bp, Saccharomyces pastorianus
aaatcactatccattttggcagatg

SEQ ID NO: 109324 - DNA, 25 bp, Saccharomyces pastorianus
gtttcggatgtcgagcttacagacg

SEQ ID NO: 109325 - DNA, 25 bp, Saccharomyces pastorianus
gattcttcatcatcggatccatcat

SEQ ID NO: 109326 - DNA, 25 bp, Saccharomyces pastorianus
gggccatcgaagaacacgttggaga

SEQ ID NO: 109327 - DNA, 25 bp, Saccharomyces pastorianus
gctgccccggatttcacgaataaat

SEQ ID NO: 109328 - DNA, 25 bp, Saccharomyces pastorianus
tgagcaagatcccagagcctacgaa

SEQ ID NO: 109329 - DNA, 25 bp, Saccharomyces pastorianus
ggacattgcaatagaagtttcggat

SEQ ID NO: 109330 - DNA, 25 bp, Saccharomyces pastorianus
atcaatcgtcttagagctgccccgg

SEQ ID NO: 109331 - DNA, 25 bp, Saccharomyces pastorianus
attgccgaaaatatcaagcttgcga

SEQ ID NO: 109332 - DNA, 25 bp, Saccharomyces pastorianus
ggcagatgctctgcaggaaggcata

SEQ ID NO: 109333 - DNA, 25 bp, Saccharomyces pastorianus
gaggtttttgcaatggtaccatctc

SEQ ID NO: 109334 - DNA, 25 bp, Saccharomyces pastorianus
aagccattcatttaccaattctgcc

SEQ ID NO: 109335 - DNA, 25 bp, Saccharomyces pastorianus
gatcatgctgttaaatttccatcta

SEQ ID NO: 109336 - DNA, 25 bp, Saccharomyces pastorianus
gggctaatacccaataaggcggcta

SEQ ID NO: 109337 - DNA, 25 bp, Saccharomyces pastorianus
tggacttgaaggacacgcctatgtt

SEQ ID NO: 109338 - DNA, 25 bp, Saccharomyces pastorianus
aagagactcttctagtacgtccaga

SEQ ID NO: 109339 - DNA, 25 bp, Saccharomyces pastorianus
gatataatgagtgagctgcccgctt

SEQ ID NO: 109340 - DNA, 25 bp, Saccharomyces pastorianus
gataaacctgtgaagctggacttga

SEQ ID NO: 109341 - DNA, 25 bp, Saccharomyces pastorianus
tcatttccgcgtggttttgaagaat

SEQ ID NO: 109342 - DNA, 25 bp, Saccharomyces pastorianus
tgcccgctttcattaggtctattgc

SEQ ID NO: 109343 - DNA, 25 bp, Saccharomyces pastorianus
actacagtgactatatgggcggtta

SEQ ID NO: 109344 - DNA, 25 bp, Saccharomyces pastorianus
aacttcttcaaggatagattcccta

SEQ ID NO: 109345 - DNA, 25 bp, Saccharomyces pastorianus
tgccaatatctttaccgattacaag

SEQ ID NO: 109346 - DNA, 25 bp, Saccharomyces pastorianus
gaaatctctgatccgtttaactacg

SEQ ID NO: 109347 - DNA, 25 bp, Saccharomyces pastorianus
taacgccggaaaattttgccaatat

SEQ ID NO: 109348 - DNA, 25 bp, Saccharomyces pastorianus
attgtgcgacggttatacgttcatt

SEQ ID NO: 109349 - DNA, 25 bp, Saccharomyces pastorianus
aagcatgattgattcggtgattgac

SEQ ID NO: 109350 - DNA, 25 bp, Saccharomyces pastorianus
agattccctatcgaagtaacgccgg

SEQ ID NO: 109351 - DNA, 25 bp, Saccharomyces pastorianus
aacagggatcacaatctgccagaaa

SEQ ID NO: 109352 - DNA, 25 bp, Saccharomyces pastorianus
ttttatggtccaagctgtcacccag

SEQ ID NO: 109353 - DNA, 25 bp, Saccharomyces pastorianus
cccagccagtttctttattgtgcga

SEQ ID NO: 109354 - DNA, 25 bp, Saccharomyces pastorianus
acgttcattgtactatctctcatat

SEQ ID NO: 109355 - DNA, 25 bp, Saccharomyces pastorianus
cactgttggaacatagtcggctgga

SEQ ID NO: 109356 - DNA, 25 bp, Saccharomyces pastorianus
accgcatagttatcgaacactgttg

SEQ ID NO: 109357 - DNA, 25 bp, Saccharomyces pastorianus
gtcggctggaaattgattcgttgta

SEQ ID NO: 109358 - DNA, 25 bp, Saccharomyces pastorianus
gacaagggtctcaatcgatcgtaat

SEQ ID NO: 109359 - DNA, 25 bp, Saccharomyces pastorianus
actttagcgtttgcattttgtggaa

SEQ ID NO: 109360 - DNA, 25 bp, Saccharomyces pastorianus
atcaccgacaacaacacactttagc

SEQ ID NO: 109361 - DNA, 25 bp, Saccharomyces pastorianus
tataagttttgcttctctaattcgt

SEQ ID NO: 109362 - DNA, 25 bp, Saccharomyces pastorianus
tcatcacagtcaccgcatagttatc

SEQ ID NO: 109363 - DNA, 25 bp, Saccharomyces pastorianus
atcgtaatcttcttgaccggccgta

SEQ ID NO: 109364 - DNA, 25 bp, Saccharomyces pastorianus
ttagaaggcacgttttcccaacagc

SEQ ID NO: 109365 - DNA, 25 bp, Saccharomyces pastorianus
atggttcatcaccaatcatcacagt

SEQ ID NO: 109366 - DNA, 25 bp, Saccharomyces pastorianus
ttatttgtccactcgaagcatacta

SEQ ID NO: 109367 - DNA, 25 bp, Saccharomyces pastorianus
gggcaatgatcctgctaagcgattt

SEQ ID NO: 109368 - DNA, 25 bp, Saccharomyces pastorianus
atgacggaactgttggaagcctcca

SEQ ID NO: 109369 - DNA, 25 bp, Saccharomyces pastorianus
gctcctgctcccttatataatacat

SEQ ID NO: 109370 - DNA, 25 bp, Saccharomyces pastorianus
acaagtacttgaatgccgggcctgg

SEQ ID NO: 109371 - DNA, 25 bp, Saccharomyces pastorianus
acgtaattagattggctcctgctcc

SEQ ID NO: 109372 - DNA, 25 bp, Saccharomyces pastorianus
atggcgcccaattgtcactttactt

SEQ ID NO: 109373 - DNA, 25 bp, Saccharomyces pastorianus
actttacttcgattctgacactgga

SEQ ID NO: 109374 - DNA, 25 bp, Saccharomyces pastorianus
tattcgagccgattccaggagcatt

SEQ ID NO: 109375 - DNA, 25 bp, Saccharomyces pastorianus
attcaggcaatctaatccaagcgtt

SEQ ID NO: 109376 - DNA, 25 bp, Saccharomyces pastorianus
tttgcctgttggtgttcttacaagt

SEQ ID NO: 109377 - DNA, 25 bp, Saccharomyces pastorianus
agtcaatgctgacccaaggcacctt

SEQ ID NO: 109378 - DNA, 25 bp, Saccharomyces pastorianus
gaaatgcgattccacagcacagtcg

SEQ ID NO: 109379 - DNA, 25 bp, Saccharomyces pastorianus
tatcgtcggacgatagtcccatgga

SEQ ID NO: 109380 - DNA, 25 bp, Saccharomyces pastorianus
cggatattctccgtctaattccaaa

SEQ ID NO: 109381 - DNA, 25 bp, Saccharomyces pastorianus
gtctaattccaaagctttctccata

SEQ ID NO: 109382 - DNA, 25 bp, Saccharomyces pastorianus
gaattcccgcataagtacgtcacag

SEQ ID NO: 109383 - DNA, 25 bp, Saccharomyces pastorianus
cctctggcttcttcaggatgtttga

SEQ ID NO: 109384 - DNA, 25 bp, Saccharomyces pastorianus
tccacgcatctagctcagcattaat

SEQ ID NO: 109385 - DNA, 25 bp, Saccharomyces pastorianus
gtacgtcacaggcttatcgtcggac

SEQ ID NO: 109386 - DNA, 25 bp, Saccharomyces pastorianus
gaattcatccctcagagattccgga

SEQ ID NO: 109387 - DNA, 25 bp, Saccharomyces pastorianus
gaattcctagttgacttcggcatca

SEQ ID NO: 109388 - DNA, 25 bp, Saccharomyces pastorianus
acatacatcttaggtgtcggcgata

SEQ ID NO: 109389 - DNA, 25 bp, Saccharomyces pastorianus
tcggcgataggcacttagacaactt

SEQ ID NO: 109390 - DNA, 25 bp, Saccharomyces pastorianus
gaaggtgccattgaatttatcccta

SEQ ID NO: 109391 - DNA, 25 bp, Saccharomyces pastorianus
taccttaaactccactatcctgatg

SEQ ID NO: 109392 - DNA, 25 bp, Saccharomyces pastorianus
accagatgggcacttttttcacgca

SEQ ID NO: 109393 - DNA, 25 bp, Saccharomyces pastorianus
atcacggtattcttggctaccttaa

SEQ ID NO: 109394 - DNA, 25 bp, Saccharomyces pastorianus
cttgtgctggctattgtgttattac

SEQ ID NO: 109395 - DNA, 25 bp, Saccharomyces pastorianus
tcgcagctactgttttgtggcatat

SEQ ID NO: 109396 - DNA, 25 bp, Saccharomyces pastorianus
gatcccaatggtgctatattacgtg

SEQ ID NO: 109397 - DNA, 25 bp, Saccharomyces pastorianus
aaatgctttgctgcctatcgtgatt

SEQ ID NO: 109398 - DNA, 25 bp, Saccharomyces pastorianus
gccacagtgcattttcagaatctaa

SEQ ID NO: 109399 - DNA, 25 bp, Saccharomyces pastorianus
ggccttatgatactctaatttcgat

SEQ ID NO: 109400 - DNA, 25 bp, Saccharomyces pastorianus
tacctggagcccaccaatacaatat

SEQ ID NO: 109401 - DNA, 25 bp, Saccharomyces pastorianus
taattttcgtggcaaagttcaactt

SEQ ID NO: 109402 - DNA, 25 bp, Saccharomyces pastorianus
gatggtaagctcatcatgctttcaa

SEQ ID NO: 109403 - DNA, 25 bp, Saccharomyces pastorianus
aagcactattccgtttcttcaaagg

SEQ ID NO: 109404 - DNA, 25 bp, Saccharomyces pastorianus
ttacgatatttcatggttaagccaa

SEQ ID NO: 109405 - DNA, 25 bp, Saccharomyces pastorianus
gatcttattatcgtacggtgccaaa

SEQ ID NO: 109406 - DNA, 25 bp, Saccharomyces pastorianus
cacacctttacccagtatttcatac

SEQ ID NO: 109407 - DNA, 25 bp, Saccharomyces pastorianus
atgggactcggcaatcatgcgcaat

SEQ ID NO: 109408 - DNA, 25 bp, Saccharomyces pastorianus
ttgacgtttctttattccacacctt

SEQ ID NO: 109409 - DNA, 25 bp, Saccharomyces pastorianus
attgtaactaatctttcctattgga

SEQ ID NO: 109410 - DNA, 25 bp, Saccharomyces pastorianus
ggaactaccccatatcaatgtgttg

SEQ ID NO: 109411 - DNA, 25 bp, Saccharomyces pastorianus
ttagcggtgcactatctgctatgtc

SEQ ID NO: 109412 - DNA, 25 bp, Saccharomyces pastorianus
aacatagtgcgccatttaactcaac

SEQ ID NO: 109413 - DNA, 25 bp, Saccharomyces pastorianus
cgtcgatgatttcggtatggttcaa

SEQ ID NO: 109414 - DNA, 25 bp, Saccharomyces pastorianus
tctgctatgtctgcgatgattctat

SEQ ID NO: 109415 - DNA, 25 bp, Saccharomyces pastorianus
tcaagcatccaaccctaaatttcta

SEQ ID NO: 109416 - DNA, 25 bp, Saccharomyces pastorianus
gatgattctattggaactaccccat

SEQ ID NO: 109417 - DNA, 25 bp, Saccharomyces pastorianus
gtgcatagccaacctcgtcgatgat

SEQ ID NO: 109418 - DNA, 25 bp, Saccharomyces pastorianus
aaaaatctagactggcttgacgaag

SEQ ID NO: 109419 - DNA, 25 bp, Saccharomyces pastorianus
tatccctgtcttaccgaacatagtg

SEQ ID NO: 109420 - DNA, 25 bp, Saccharomyces pastorianus
aattgaactctacacgcatatccct

SEQ ID NO: 109421 - DNA, 25 bp, Saccharomyces pastorianus
caggtaccaccttccaagagttagg

SEQ ID NO: 109422 - DNA, 25 bp, Saccharomyces pastorianus
cccaagacggtaaactgagtgctca

SEQ ID NO: 109423 - DNA, 25 bp, Saccharomyces pastorianus
ttagatgtttccttatactaccaag

SEQ ID NO: 109424 - DNA, 25 bp, Saccharomyces pastorianus
gaacatacactgttggttaccgaac

SEQ ID NO: 109425 - DNA, 25 bp, Saccharomyces pastorianus
aaatattccccactacgccaagaat

SEQ ID NO: 109426 - DNA, 25 bp, Saccharomyces pastorianus
agttatttgtcacggtgtgcccgat

SEQ ID NO: 109427 - DNA, 25 bp, Saccharomyces pastorianus
gaagctcttaatactactgagacct

SEQ ID NO: 109428 - DNA, 25 bp, Saccharomyces pastorianus
gatcatattgaaaaacacgctaccg

SEQ ID NO: 109429 - DNA, 25 bp, Saccharomyces pastorianus
tgtgcccgataaaactgtcttgaag

SEQ ID NO: 109430 - DNA, 25 bp, Saccharomyces pastorianus
tttcaccatcgaacctatgattaat

SEQ ID NO: 109431 - DNA, 25 bp, Saccharomyces pastorianus
acgctaccgaaaataagtgcagtgt

SEQ ID NO: 109432 - DNA, 25 bp, Saccharomyces pastorianus
accagctgctgttgctatgcgtgac

SEQ ID NO: 109433 - DNA, 25 bp, Saccharomyces pastorianus
gatacgtccacgattctgcaaagaa

SEQ ID NO: 109434 - DNA, 25 bp, Saccharomyces pastorianus
ttgaccagtttttggacgacccatg

SEQ ID NO: 109435 - DNA, 25 bp, Saccharomyces pastorianus
aggtacttccgaaagacgccatccg

SEQ ID NO: 109436 - DNA, 25 bp, Saccharomyces pastorianus
gcgtgacgcctttgatattggtaat

SEQ ID NO: 109437 - DNA, 25 bp, Saccharomyces pastorianus
gagtatacctttctgaaaccttggt

SEQ ID NO: 109438 - DNA, 25 bp, Saccharomyces pastorianus
aagatagttacagtggcgcccaagg

SEQ ID NO: 109439 - DNA, 25 bp, Saccharomyces pastorianus
aacacgtggaggattaggctcgctt

SEQ ID NO: 109440 - DNA, 25 bp, Saccharomyces pastorianus
ggctcgcttgctgaggacgaagaat

SEQ ID NO: 109441 - DNA, 25 bp, Saccharomyces pastorianus
aaatcagcgccggtgccaagaatgc

SEQ ID NO: 109442 - DNA, 25 bp, Saccharomyces pastorianus
aaagagactcctcgctactgttttc

SEQ ID NO: 109443 - DNA, 25 bp, Saccharomyces pastorianus
ggcagagagcagaccaacttcataa

SEQ ID NO: 109444 - DNA, 25 bp, Saccharomyces pastorianus
cccgtggtcgaataactggataaga

SEQ ID NO: 109445 - DNA, 25 bp, Saccharomyces pastorianus
atttgagtcaccaaagttggctagc

SEQ ID NO: 109446 - DNA, 25 bp, Saccharomyces pastorianus
gggtactggaacagcatatacctaa

SEQ ID NO: 109447 - DNA, 25 bp, Saccharomyces pastorianus
tatttatcagaccttgttccttggg

SEQ ID NO: 109448 - DNA, 25 bp, Saccharomyces pastorianus
tttcggcagagagcagaccaacttc

SEQ ID NO: 109449 - DNA, 25 bp, Saccharomyces pastorianus
tatacctaatagactttcggcagag

SEQ ID NO: 109450 - DNA, 25 bp, Saccharomyces pastorianus
accaaagttggctagcaatctgctt

SEQ ID NO: 109451 - DNA, 25 bp, Saccharomyces pastorianus
aactagcatatttatcagaccttgt

SEQ ID NO: 109452 - DNA, 25 bp, Saccharomyces pastorianus
gagcagaccaacttcataaaaattt

SEQ ID NO: 109453 - DNA, 25 bp, Saccharomyces pastorianus
tggctagcaatctgcttttccttta

SEQ ID NO: 109454 - DNA, 25 bp, Saccharomyces pastorianus
aaggattcgcaaacatcaccgacga

SEQ ID NO: 109455 - DNA, 25 bp, Saccharomyces pastorianus
aatccctcgtgtggtgcttttgata

SEQ ID NO: 109456 - DNA, 25 bp, Saccharomyces pastorianus
agtttccccttttagcggctgcaat

SEQ ID NO: 109457 - DNA, 25 bp, Saccharomyces pastorianus
agcattttgtctagaatccctcgtg

SEQ ID NO: 109458 - DNA, 25 bp, Saccharomyces pastorianus
gaatgtctacagaatccactcgggc

SEQ ID NO: 109459 - DNA, 25 bp, Saccharomyces pastorianus
caaattttggttgtcgctcctattc

SEQ ID NO: 109460 - DNA, 25 bp, Saccharomyces pastorianus
attacgggccgtagcattgatgctg

SEQ ID NO: 109461 - DNA, 25 bp, Saccharomyces pastorianus
aggaacgttactgagcgacttgatg

SEQ ID NO: 109462 - DNA, 25 bp, Saccharomyces pastorianus
gaggactttcctgatcatgacgcaa

SEQ ID NO: 109463 - DNA, 25 bp, Saccharomyces pastorianus
aatactgcgccaagacggtctacga

SEQ ID NO: 109464 - DNA, 25 bp, Saccharomyces pastorianus
gttttatttgaccacggactctata

SEQ ID NO: 109465 - DNA, 25 bp, Saccharomyces pastorianus
tttatacggtcttgccttgtaaggc

SEQ ID NO: 109466 - DNA, 25 bp, Saccharomyces pastorianus
actgtggtttgctaatgcgctgggc

SEQ ID NO: 109467 - DNA, 25 bp, Saccharomyces pastorianus
cacacgaaattcaggatacggcgga

SEQ ID NO: 109468 - DNA, 25 bp, Saccharomyces pastorianus
atacggcggaggagttatctttatt

SEQ ID NO: 109469 - DNA, 25 bp, Saccharomyces pastorianus
gaggattgtatcgtttagacagccg

SEQ ID NO: 109470 - DNA, 25 bp, Saccharomyces pastorianus
ttgtaaggccctactcaagctggaa

SEQ ID NO: 109471 - DNA, 25 bp, Saccharomyces pastorianus
agacaggtgcagtggctcagccgta

SEQ ID NO: 109472 - DNA, 25 bp, Saccharomyces pastorianus
ggccctactcaagctggaacaagaa

SEQ ID NO: 109473 - DNA, 25 bp, Saccharomyces pastorianus
gttgtagcttccacaagatgttggc

SEQ ID NO: 109474 - DNA, 25 bp, Saccharomyces pastorianus
agccgtacagctcgtactgtggttt

SEQ ID NO: 109475 - DNA, 25 bp, Saccharomyces pastorianus
tagacagccgaattattacccggtt

SEQ ID NO: 109476 - DNA, 25 bp, Saccharomyces pastorianus
agtaagtactcttcatcaggcaccc

SEQ ID NO: 109477 - DNA, 25 bp, Saccharomyces pastorianus
aaacaattccaacaggccacatttg

SEQ ID NO: 109478 - DNA, 25 bp, Saccharomyces pastorianus
atattacaggtgaggcagacgacga

SEQ ID NO: 109479 - DNA, 25 bp, Saccharomyces pastorianus
aagggtgaatcgtaccagtccgcgg

SEQ ID NO: 109480 - DNA, 25 bp, Saccharomyces pastorianus
gacaaaaatcttcggctgagtttct

SEQ ID NO: 109481 - DNA, 25 bp, Saccharomyces pastorianus
gattacatcaactgatcctgtcgaa

SEQ ID NO: 109482 - DNA, 25 bp, Saccharomyces pastorianus
atcctgtcgaagatcacatcagtaa

SEQ ID NO: 109483 - DNA, 25 bp, Saccharomyces pastorianus
tctctgcgtgcttccaaatctaatt

SEQ ID NO: 109484 - DNA, 25 bp, Saccharomyces pastorianus
gtttctaagatccttatcgaggtca

SEQ ID NO: 109485 - DNA, 25 bp, Saccharomyces pastorianus
ggaaatagatcatacggcgcctgaa

SEQ ID NO: 109486 - DNA, 25 bp, Saccharomyces pastorianus
ggaaagtttttcctctccttctctg

SEQ ID NO: 109487 - DNA, 25 bp, Saccharomyces pastorianus
gtgttgcctcactattagctactac

SEQ ID NO: 109488 - DNA, 25 bp, Saccharomyces pastorianus
aagggttacgatgcctctaagtcag

SEQ ID NO: 109489 - DNA, 25 bp, Saccharomyces pastorianus
tagctactaccgaagttgccattgt

SEQ ID NO: 109490 - DNA, 25 bp, Saccharomyces pastorianus
cagaatacaccgacatgttagccac

SEQ ID NO: 109491 - DNA, 25 bp, Saccharomyces pastorianus
gaaggttcagttatcatcggcaaat

SEQ ID NO: 109492 - DNA, 25 bp, Saccharomyces pastorianus
aaatcaagggctccatcgacattac

SEQ ID NO: 109493 - DNA, 25 bp, Saccharomyces pastorianus
catcgacattaccaccacaaattca

SEQ ID NO: 109494 - DNA, 25 bp, Saccharomyces pastorianus
agttgccattgttgatgccccagaa

SEQ ID NO: 109495 - DNA, 25 bp, Saccharomyces pastorianus
aactgcaagagcgtttggccaaatt

SEQ ID NO: 109496 - DNA, 25 bp, Saccharomyces pastorianus
gccattacaagaccagccaagcaga

SEQ ID NO: 109497 - DNA, 25 bp, Saccharomyces pastorianus
ctgtcatcagggtcggtggtgcatc

SEQ ID NO: 109498 - DNA, 25 bp, Saccharomyces pastorianus
tagatcctgaagacattgccttcaa

SEQ ID NO: 109499 - DNA, 25 bp, Saccharomyces pastorianus
atgtctagtcgccaaggtggtaaga

SEQ ID NO: 109500 - DNA, 25 bp, Saccharomyces pastorianus
gacttagatcctgaagacattgcct

SEQ ID NO: 109501 - DNA, 25 bp, Saccharomyces pastorianus
acttagatcctgaagacattgcctt

SEQ ID NO: 109502 - DNA, 25 bp, Saccharomyces pastorianus
gatcctgaagacattgccttcaaag

SEQ ID NO: 109503 - DNA, 25 bp, Saccharomyces pastorianus
gacattgccttcaaagagaagcaaa

SEQ ID NO: 109504 - DNA, 25 bp, Saccharomyces pastorianus
tggctaatatgaaaagtggtaaacc

SEQ ID NO: 109505 - DNA, 25 bp, Saccharomyces pastorianus
aaaaggccgatgctgctgctaagaa

SEQ ID NO: 109506 - DNA, 25 bp, Saccharomyces pastorianus
gaagcaacaacaggacttagatcct

SEQ ID NO: 109507 - DNA, 25 bp, Saccharomyces pastorianus
cctgaagacattgccttcaaagaga

SEQ ID NO: 109508 - DNA, 25 bp, Saccharomyces pastorianus
tatgaaaagtggtaaacctttagtg

SEQ ID NO: 109509 - DNA, 25 bp, Saccharomyces pastorianus
tctcccggaagatcagctagttcat

SEQ ID NO: 109510 - DNA, 25 bp, Saccharomyces pastorianus
ttgcactcaccccatggattatctg

SEQ ID NO: 109511 - DNA, 25 bp, Saccharomyces pastorianus
gacgctaaagtatctctcgagtcca

SEQ ID NO: 109512 - DNA, 25 bp, Saccharomyces pastorianus
aaagacatgatgaatctcccggaag

SEQ ID NO: 109513 - DNA, 25 bp, Saccharomyces pastorianus
gaacaagcagtgagcagagcaacta

SEQ ID NO: 109514 - DNA, 25 bp, Saccharomyces pastorianus
gctcctggtcagaatactttcacaa

SEQ ID NO: 109515 - DNA, 25 bp, Saccharomyces pastorianus
tgcttaaattcatgggcgagatcaa

SEQ ID NO: 109516 - DNA, 25 bp, Saccharomyces pastorianus
aaaagcgctttccagatgtcaatga

SEQ ID NO: 109517 - DNA, 25 bp, Saccharomyces pastorianus
tgatcagactgtgcgtagcaacgat

SEQ ID NO: 109518 - DNA, 25 bp, Saccharomyces pastorianus
gaatctaccactgttatcgacttgc

SEQ ID NO: 109519 - DNA, 25 bp, Saccharomyces pastorianus
atggattatctgctcctggtcagaa

SEQ ID NO: 109520 - DNA, 25 bp, Saccharomyces pastorianus
tgtcagaaatgtcaagggtccagtc

SEQ ID NO: 109521 - DNA, 25 bp, Saccharomyces pastorianus
cccgtaccattgtcagaaatgtcaa

SEQ ID NO: 109522 - DNA, 25 bp, Saccharomyces pastorianus
gtcagaaatgtcaagggtccagtca

SEQ ID NO: 109523 - DNA, 25 bp, Saccharomyces pastorianus
aaatgtcaagggtccagtcagagaa

SEQ ID NO: 109524 - DNA, 25 bp, Saccharomyces pastorianus
tgtcaagggtccagtcagagaaaac

SEQ ID NO: 109525 - DNA, 25 bp, Saccharomyces pastorianus
ttcccgtaccattgtcagaaatgtc

SEQ ID NO: 109526 - DNA, 25 bp, Saccharomyces pastorianus
acttcccgtaccattgtcagaaatg

SEQ ID NO: 109527 - DNA, 25 bp, Saccharomyces pastorianus
gaaatgtcaagggtccagtcagaga

SEQ ID NO: 109528 - DNA, 25 bp, Saccharomyces pastorianus
aatgtcaagggtccagtcagagaaa

SEQ ID NO: 109529 - DNA, 25 bp, Saccharomyces pastorianus
cacttcccgtaccattgtcagaaat

SEQ ID NO: 109530 - DNA, 25 bp, Saccharomyces pastorianus
cagaaatgtcaagggtccagtcaga

SEQ ID NO: 109531 - DNA, 25 bp, Saccharomyces pastorianus
cccgtaccattgtcagaaatgtcaa

SEQ ID NO: 109532 - DNA, 25 bp, Saccharomyces pastorianus
gtcagaaatgtcaagggtccagtca

SEQ ID NO: 109533 - DNA, 25 bp, Saccharomyces pastorianus
taagaccccagtcaccttagctaaa

SEQ ID NO: 109534 - DNA, 25 bp, Saccharomyces pastorianus
tgtcaagggtccagtcagagaaaac

SEQ ID NO: 109535 - DNA, 25 bp, Saccharomyces pastorianus
ttcccgtaccattgtcagaaatgtc

SEQ ID NO: 109536 - DNA, 25 bp, Saccharomyces pastorianus
acttcccgtaccattgtcagaaatg

SEQ ID NO: 109537 - DNA, 25 bp, Saccharomyces pastorianus
ggtgttacccaagttcgtgttgagt

SEQ ID NO: 109538 - DNA, 25 bp, Saccharomyces pastorianus
gaaatgtcaagggtccagtcagaga

SEQ ID NO: 109539 - DNA, 25 bp, Saccharomyces pastorianus
aatgtcaagggtccagtcagagaaa

SEQ ID NO: 109540 - DNA, 25 bp, Saccharomyces pastorianus
cacttcccgtaccattgtcagaaat

SEQ ID NO: 109541 - DNA, 25 bp, Saccharomyces pastorianus
cagaaatgtcaagggtccagtcaga

SEQ ID NO: 109542 - DNA, 25 bp, Saccharomyces pastorianus
aaaaagagcgcgtcagatttcctgc

SEQ ID NO: 109543 - DNA, 25 bp, Saccharomyces pastorianus
gcaacttcgcctggagaatttttct

SEQ ID NO: 109544 - DNA, 25 bp, Saccharomyces pastorianus
gtcaatgggctcctgaaaattctaa

SEQ ID NO: 109545 - DNA, 25 bp, Saccharomyces pastorianus
gaggctcgatcaaatagctgcggta

SEQ ID NO: 109546 - DNA, 25 bp, Saccharomyces pastorianus
atcaagaatttctggcggactcatt

SEQ ID NO: 109547 - DNA, 25 bp, Saccharomyces pastorianus
gtagaccctacaaatgaggctcgat

SEQ ID NO: 109548 - DNA, 25 bp, Saccharomyces pastorianus
gaactatgaatctctgcagcaatgc

SEQ ID NO: 109549 - DNA, 25 bp, Saccharomyces pastorianus
caaatttcaagatgtgtcgcggttt

SEQ ID NO: 109550 - DNA, 25 bp, Saccharomyces pastorianus
atttttctgaatctgaggctacacc

SEQ ID NO: 109551 - DNA, 25 bp, Saccharomyces pastorianus
gatttcctgcggtgaatcattttta

SEQ ID NO: 109552 - DNA, 25 bp, Saccharomyces pastorianus
aagtagtaccagttcgcaacttcgc

SEQ ID NO: 109553 - DNA, 25 bp, Saccharomyces pastorianus
gagaacgtgttaactgaagggctaa

SEQ ID NO: 109554 - DNA, 25 bp, Saccharomyces pastorianus
agacctttggtccattgacaaaaag

SEQ ID NO: 109555 - DNA, 25 bp, Saccharomyces pastorianus
gattccttttccttattgaccttga

SEQ ID NO: 109556 - DNA, 25 bp, Saccharomyces pastorianus
gataaatttctctcattttcaggaa

SEQ ID NO: 109557 - DNA, 25 bp, Saccharomyces pastorianus
tttattcgataaagcgtcccaagca

SEQ ID NO: 109558 - DNA, 25 bp, Saccharomyces pastorianus
gtatcgcaagtgtacagtttagcat

SEQ ID NO: 109559 - DNA, 25 bp, Saccharomyces pastorianus
gggctaaaactgtctattattctaa

SEQ ID NO: 109560 - DNA, 25 bp, Saccharomyces pastorianus
gaacttttgacaggattcgatgtta

SEQ ID NO: 109561 - DNA, 25 bp, Saccharomyces pastorianus
cagttaacttcaactttggcgtttg

SEQ ID NO: 109562 - DNA, 25 bp, Saccharomyces pastorianus
agagcctatcaacgaccaggagaac

SEQ ID NO: 109563 - DNA, 25 bp, Saccharomyces pastorianus
tatggagcacttcagtgatctcatg

SEQ ID NO: 109564 - DNA, 25 bp, Saccharomyces pastorianus
cccctttacttcttcatttagcgat

SEQ ID NO: 109565 - DNA, 25 bp, Saccharomyces pastorianus
aactctttaagatcgctcactgtca

SEQ ID NO: 109566 - DNA, 25 bp, Saccharomyces pastorianus
gggattttacctaccaaatctgcag

SEQ ID NO: 109567 - DNA, 25 bp, Saccharomyces pastorianus
gaggacgactctaactacgttctta

SEQ ID NO: 109568 - DNA, 25 bp, Saccharomyces pastorianus
ataatcaactggatcccctttactt

SEQ ID NO: 109569 - DNA, 25 bp, Saccharomyces pastorianus
atcaacaataccctttgcgacacca

SEQ ID NO: 109570 - DNA, 25 bp, Saccharomyces pastorianus
taccaaatctggacctgcgggagag

SEQ ID NO: 109571 - DNA, 25 bp, Saccharomyces pastorianus
gaggccaatgatttgcttgaagaac

SEQ ID NO: 109572 - DNA, 25 bp, Saccharomyces pastorianus
aaatgttcatccatccgaatccagg

SEQ ID NO: 109573 - DNA, 25 bp, Saccharomyces pastorianus
aacaacattttcaggttcaccagaa

SEQ ID NO: 109574 - DNA, 25 bp, Saccharomyces pastorianus
ggaatgaactaccacaatgcaagaa

SEQ ID NO: 109575 - DNA, 25 bp, Saccharomyces pastorianus
gagtgacatgagttcttctttgaaa

SEQ ID NO: 109576 - DNA, 25 bp, Saccharomyces pastorianus
gtaggtgtcaagcaaatcatgtcca

SEQ ID NO: 109577 - DNA, 25 bp, Saccharomyces pastorianus
aagcctaccgtaagaccataccagt

SEQ ID NO: 109578 - DNA, 25 bp, Saccharomyces pastorianus
ttgctaatgagtaccccaagcctac

SEQ ID NO: 109579 - DNA, 25 bp, Saccharomyces pastorianus
atggtgtactacttcgtcatttgcg

SEQ ID NO: 109580 - DNA, 25 bp, Saccharomyces pastorianus
aagtggctcttttgagatccattat

SEQ ID NO: 109581 - DNA, 25 bp, Saccharomyces pastorianus
tgccacggaggccactttggaaagt

SEQ ID NO: 109582 - DNA, 25 bp, Saccharomyces pastorianus
atatgctcctattgtcattgtcgct

SEQ ID NO: 109583 - DNA, 25 bp, Saccharomyces pastorianus
attgacaccacagtctgccacggag

SEQ ID NO: 109584 - DNA, 25 bp, Saccharomyces pastorianus
gtcatttgcgaatctggatacccaa

SEQ ID NO: 109585 - DNA, 25 bp, Saccharomyces pastorianus
aatcgtcgtttccagattgacacca

SEQ ID NO: 109586 - DNA, 25 bp, Saccharomyces pastorianus
gactctttatatctagttgcgatcg

SEQ ID NO: 109587 - DNA, 25 bp, Saccharomyces pastorianus
taaagcatcccggtttaggtaatag

SEQ ID NO: 109588 - DNA, 25 bp, Saccharomyces pastorianus
aaggccatcttgttggaagacatca

SEQ ID NO: 109589 - DNA, 25 bp, Saccharomyces pastorianus
gggatggcatgaacttagactcttt

SEQ ID NO: 109590 - DNA, 25 bp, Saccharomyces pastorianus
gacggcttcctaattttacctgata

SEQ ID NO: 109591 - DNA, 25 bp, Saccharomyces pastorianus
cattctttatgaaggcgctgagtca

SEQ ID NO: 109592 - DNA, 25 bp, Saccharomyces pastorianus
aagaattgttcagccttacatcgaa

SEQ ID NO: 109593 - DNA, 25 bp, Saccharomyces pastorianus
gttgcgatcgtctacaggaccgata

SEQ ID NO: 109594 - DNA, 25 bp, Saccharomyces pastorianus
taggtaatagtattgccgcgggcaa

SEQ ID NO: 109595 - DNA, 25 bp, Saccharomyces pastorianus
aactatgctgtccatccggatgagt

SEQ ID NO: 109596 - DNA, 25 bp, Saccharomyces pastorianus
tttggttcactaccaaccttcttat

SEQ ID NO: 109597 - DNA, 25 bp, Saccharomyces pastorianus
gtacaactacggcatgaacccactg

SEQ ID NO: 109598 - DNA, 25 bp, Saccharomyces pastorianus
aaatcgaaagcttgcccggcttaag

SEQ ID NO: 109599 - DNA, 25 bp, Saccharomyces pastorianus
agaggaggcgcttctacagtggcac

SEQ ID NO: 109600 - DNA, 25 bp, Saccharomyces pastorianus
gtacgacacgatgccgtccagagag

SEQ ID NO: 109601 - DNA, 25 bp, Saccharomyces pastorianus
gtggcaccgtcaacagaaacgctcg

SEQ ID NO: 109602 - DNA, 25 bp, Saccharomyces pastorianus
cagagggcccggtggccaaaagatt

SEQ ID NO: 109603 - DNA, 25 bp, Saccharomyces pastorianus
tgaagaggccgctcgagtcgaaaaa

SEQ ID NO: 109604 - DNA, 25 bp, Saccharomyces pastorianus
gaacttgcggcgtcgtacgacacga

SEQ ID NO: 109605 - DNA, 25 bp, Saccharomyces pastorianus
gaacccactgggatcgttgtcgagt

SEQ ID NO: 109606 - DNA, 25 bp, Saccharomyces pastorianus
cgcagcgtcgcgaagtacgagcagc

SEQ ID NO: 109607 - DNA, 25 bp, Saccharomyces pastorianus
aaagaggaacgcgaggcccgagaca

SEQ ID NO: 109608 - DNA, 25 bp, Saccharomyces pastorianus
agcacaatgcactgagaaattcctt

SEQ ID NO: 109609 - DNA, 25 bp, Saccharomyces pastorianus
cgcgaccaaagttcacgccagagat

SEQ ID NO: 109610 - DNA, 25 bp, Saccharomyces pastorianus
aggtcaatcagcagtgccgcagtgc

SEQ ID NO: 109611 - DNA, 25 bp, Saccharomyces pastorianus
aaattccttcatggtggcagagggc

SEQ ID NO: 109612 - DNA, 25 bp, Saccharomyces pastorianus
gttcacgccagagatggaagcacaa

SEQ ID NO: 109613 - DNA, 25 bp, Saccharomyces pastorianus
aacaagctaccaccgcgaccaaagt

SEQ ID NO: 109614 - DNA, 25 bp, Saccharomyces pastorianus
gccgcagtgctgctgattaaaaaga

SEQ ID NO: 109615 - DNA, 25 bp, Saccharomyces pastorianus
cagtgccgcagtgctgctgattaaa

SEQ ID NO: 109616 - DNA, 25 bp, Saccharomyces pastorianus
ggagcgagtaagaggtcaatcagca

SEQ ID NO: 109617 - DNA, 25 bp, Saccharomyces pastorianus
gagaaattccttcatggtggcagag

SEQ ID NO: 109618 - DNA, 25 bp, Saccharomyces pastorianus
taaaaagaacaagctaccaccgcga

SEQ ID NO: 109619 - DNA, 25 bp, Saccharomyces pastorianus
tatacataaacctcttccattcttc

SEQ ID NO: 109620 - DNA, 25 bp, Saccharomyces pastorianus
atggagtgctttccttcgttttcct

SEQ ID NO: 109621 - DNA, 25 bp, Saccharomyces pastorianus
catcgaagcggtaatgtacgtatta

SEQ ID NO: 109622 - DNA, 25 bp, Saccharomyces pastorianus
ttcttccttcatcgataaagttact

SEQ ID NO: 109623 - DNA, 25 bp, Saccharomyces pastorianus
ccttgttcttggataatggcgatga

SEQ ID NO: 109624 - DNA, 25 bp, Saccharomyces pastorianus
tttgaatacgaactaaagcaccgca

SEQ ID NO: 109625 - DNA, 25 bp, Saccharomyces pastorianus
ctgcttctccttgttcttggataat

SEQ ID NO: 109626 - DNA, 25 bp, Saccharomyces pastorianus
accgcaaacacaacaacgagccttg

SEQ ID NO: 109627 - DNA, 25 bp, Saccharomyces pastorianus
ggcgatgaggataggtctgataact

SEQ ID NO: 109628 - DNA, 25 bp, Saccharomyces pastorianus
cttgccgccgtattctagttttgaa

SEQ ID NO: 109629 - DNA, 25 bp, Saccharomyces pastorianus
acgtattaaccgtatcattagtcta

SEQ ID NO: 109630 - DNA, 25 bp, Saccharomyces pastorianus
gattatgatcggtgtaagcgcatct

SEQ ID NO: 109631 - DNA, 25 bp, Saccharomyces pastorianus
catctaagaaggaacgcccaggttt

SEQ ID NO: 109632 - DNA, 25 bp, Saccharomyces pastorianus
aaagaggcaatttttccgatgaaca

SEQ ID NO: 109633 - DNA, 25 bp, Saccharomyces pastorianus
attcaaaactctagggacacgcaac

SEQ ID NO: 109634 - DNA, 25 bp, Saccharomyces pastorianus
gcggtcttttggtaatattagtcct

SEQ ID NO: 109635 - DNA, 25 bp, Saccharomyces pastorianus
gacacgcaactaaatgagcaccact

SEQ ID NO: 109636 - DNA, 25 bp, Saccharomyces pastorianus
ggcagacaaccagaagcggtctttt

SEQ ID NO: 109637 - DNA, 25 bp, Saccharomyces pastorianus
gaaaacacccttttgtatcgacaat

SEQ ID NO: 109638 - DNA, 25 bp, Saccharomyces pastorianus
aatcacatttgttcagctcgctaga

SEQ ID NO: 109639 - DNA, 25 bp, Saccharomyces pastorianus
gaggaacctgaaattttagcaccaa

SEQ ID NO: 109640 - DNA, 25 bp, Saccharomyces pastorianus
atcatagctctattgttgcaactac

SEQ ID NO: 109641 - DNA, 25 bp, Saccharomyces pastorianus
aaatgtttatgtcactgatgccttc

SEQ ID NO: 109642 - DNA, 25 bp, Saccharomyces pastorianus
gatgccttcatcaagcattccaaag

SEQ ID NO: 109643 - DNA, 25 bp, Saccharomyces pastorianus
tatacctgcccagttgcttagggat

SEQ ID NO: 109644 - DNA, 25 bp, Saccharomyces pastorianus
caacatgccatcttcaaacgctgaa

SEQ ID NO: 109645 - DNA, 25 bp, Saccharomyces pastorianus
cagcaatagggttgagcgcggcact

SEQ ID NO: 109646 - DNA, 25 bp, Saccharomyces pastorianus
acgacgtatgaatgcctcatgttca

SEQ ID NO: 109647 - DNA, 25 bp, Saccharomyces pastorianus
gacaaggtttatttgctatacccct

SEQ ID NO: 109648 - DNA, 25 bp, Saccharomyces pastorianus
gcggcactggtagcgttatgtgaca

SEQ ID NO: 109649 - DNA, 25 bp, Saccharomyces pastorianus
tacaacggtctctttgccattgaag

SEQ ID NO: 109650 - DNA, 25 bp, Saccharomyces pastorianus
gctatacccctttgctaacttagga

SEQ ID NO: 109651 - DNA, 25 bp, Saccharomyces pastorianus
aagtgggtgtcgaattttgttgcta

SEQ ID NO: 109652 - DNA, 25 bp, Saccharomyces pastorianus
tgccttccgttatttgtgctttgaa

SEQ ID NO: 109653 - DNA, 25 bp, Saccharomyces pastorianus
ggtcaggcattggtagtattttcac

SEQ ID NO: 109654 - DNA, 25 bp, Saccharomyces pastorianus
aatgtcactacggagggttatattt

SEQ ID NO: 109655 - DNA, 25 bp, Saccharomyces pastorianus
gcaggaatatacaccgcaaatcact

SEQ ID NO: 109656 - DNA, 25 bp, Saccharomyces pastorianus
gcaaatcacttggattctcatccag

SEQ ID NO: 109657 - DNA, 25 bp, Saccharomyces pastorianus
gaaaccgatgtttgacgaagacgag

SEQ ID NO: 109658 - DNA, 25 bp, Saccharomyces pastorianus
agttccatttggttcctcagctaat

SEQ ID NO: 109659 - DNA, 25 bp, Saccharomyces pastorianus
attctccattgttggcacatatcga

SEQ ID NO: 109660 - DNA, 25 bp, Saccharomyces pastorianus
ggtcatctcttgtggaatgcaggaa

SEQ ID NO: 109661 - DNA, 25 bp, Saccharomyces pastorianus
ataaagtctaacgttcctgaaggat

SEQ ID NO: 109662 - DNA, 25 bp, Saccharomyces pastorianus
tcaactgattatccagatcctgatt

SEQ ID NO: 109663 - DNA, 25 bp, Saccharomyces pastorianus
cgatttactgtgtttctgccatttt

SEQ ID NO: 109664 - DNA, 25 bp, Saccharomyces pastorianus
ttctgccattttgcgaattcgtgcc

SEQ ID NO: 109665 - DNA, 25 bp, Saccharomyces pastorianus
atttaattttcttcgatttactgtg

SEQ ID NO: 109666 - DNA, 25 bp, Saccharomyces pastorianus
tcttcgatttactgtgtttctgcca

SEQ ID NO: 109667 - DNA, 25 bp, Saccharomyces pastorianus
gaattcgtgccccatcatgtcttat

SEQ ID NO: 109668 - DNA, 25 bp, Saccharomyces pastorianus
gccccatcatgtcttattttattta

SEQ ID NO: 109669 - DNA, 25 bp, Saccharomyces pastorianus
attttgcgaattcgtgccccatcat

SEQ ID NO: 109670 - DNA, 25 bp, Saccharomyces pastorianus
tactgtgtttctgccattttgcgaa

SEQ ID NO: 109671 - DNA, 25 bp, Saccharomyces pastorianus
tcgtgccccatcatgtcttatttta

SEQ ID NO: 109672 - DNA, 25 bp, Saccharomyces pastorianus
gtgtttctgccattttgcgaattcg

SEQ ID NO: 109673 - DNA, 25 bp, Saccharomyces pastorianus
aatcgactactttatatctataacg

SEQ ID NO: 109674 - DNA, 25 bp, Saccharomyces pastorianus
gatttaccgttcaatttaccagccg

SEQ ID NO: 109675 - DNA, 25 bp, Saccharomyces pastorianus
gaacttcccatcagcagaacatgca

SEQ ID NO: 109676 - DNA, 25 bp, Saccharomyces pastorianus
accagccgcatattgagcattcaat

SEQ ID NO: 109677 - DNA, 25 bp, Saccharomyces pastorianus
gcaatttcaccttcagtacaggtag

SEQ ID NO: 109678 - DNA, 25 bp, Saccharomyces pastorianus
gcagaacatgcaatttcaccttcag

SEQ ID NO: 109679 - DNA, 25 bp, Saccharomyces pastorianus
ccttcagtacaggtagatttaccgt

SEQ ID NO: 109680 - DNA, 25 bp, Saccharomyces pastorianus
atttaccagccgcatattgagcatt

SEQ ID NO: 109681 - DNA, 25 bp, Saccharomyces pastorianus
aacggcgaacttcccatcagcagaa

SEQ ID NO: 109682 - DNA, 25 bp, Saccharomyces pastorianus
attacaaacggcgaacttcccatca

SEQ ID NO: 109683 - DNA, 25 bp, Saccharomyces pastorianus
acatgcaatttcaccttcagtacag

SEQ ID NO: 109684 - DNA, 25 bp, Saccharomyces pastorianus
accgttcaatttaccagccgcatat

SEQ ID NO: 109685 - DNA, 25 bp, Saccharomyces pastorianus
aatgcgtgcgattctctctctaatt

SEQ ID NO: 109686 - DNA, 25 bp, Saccharomyces pastorianus
gatttttcagcaaactcggacgata

SEQ ID NO: 109687 - DNA, 25 bp, Saccharomyces pastorianus
ggtgtcaaaagattttactcctaag

SEQ ID NO: 109688 - DNA, 25 bp, Saccharomyces pastorianus
aactttcaggaaaactctggtgtca

SEQ ID NO: 109689 - DNA, 25 bp, Saccharomyces pastorianus
gtatccactgtacaatttgagccga

SEQ ID NO: 109690 - DNA, 25 bp, Saccharomyces pastorianus
gtggcttgaggaacccgatttttca

SEQ ID NO: 109691 - DNA, 25 bp, Saccharomyces pastorianus
ctctaattgttccaaggctggacct

SEQ ID NO: 109692 - DNA, 25 bp, Saccharomyces pastorianus
tttgagccgaagaactttaccaatg

SEQ ID NO: 109693 - DNA, 25 bp, Saccharomyces pastorianus
atgggatcctagcaaacatcttaaa

SEQ ID NO: 109694 - DNA, 25 bp, Saccharomyces pastorianus
ggctggaccttatgggatcctagca

SEQ ID NO: 109695 - DNA, 25 bp, Saccharomyces pastorianus
agaagaacaggctgcattagttgca

SEQ ID NO: 109696 - DNA, 25 bp, Saccharomyces pastorianus
gctgctttccatgaaccgtttatag

SEQ ID NO: 109697 - DNA, 25 bp, Saccharomyces pastorianus
aggtagtgtcatacgcttatgcgat

SEQ ID NO: 109698 - DNA, 25 bp, Saccharomyces pastorianus
aatcggtgtccagaggatttgcctc

SEQ ID NO: 109699 - DNA, 25 bp, Saccharomyces pastorianus
aggtcgttatacaggcccgagctaa

SEQ ID NO: 109700 - DNA, 25 bp, Saccharomyces pastorianus
aaatgcgattgatgccttgtcaaga

SEQ ID NO: 109701 - DNA, 25 bp, Saccharomyces pastorianus
aaatattaccttccgctatcgcatc

SEQ ID NO: 109702 - DNA, 25 bp, Saccharomyces pastorianus
gctatcgcatctagtcgatgacttt

SEQ ID NO: 109703 - DNA, 25 bp, Saccharomyces pastorianus
ctgcatgcttctgatgtctcacgaa

SEQ ID NO: 109704 - DNA, 25 bp, Saccharomyces pastorianus
ggatgctggctatagaatttctgat

SEQ ID NO: 109705 - DNA, 25 bp, Saccharomyces pastorianus
agagggtgaacgttgctgctttcca

SEQ ID NO: 109706 - DNA, 25 bp, Saccharomyces pastorianus
gatgttctccaaaagctgcatgctt

SEQ ID NO: 109707 - DNA, 25 bp, Saccharomyces pastorianus
ggcctattattgtgagacccggttt

SEQ ID NO: 109708 - DNA, 25 bp, Saccharomyces pastorianus
gcacttgaactactttactgcggta

SEQ ID NO: 109709 - DNA, 25 bp, Saccharomyces pastorianus
cccggttttatgttcgatgagcaca

SEQ ID NO: 109710 - DNA, 25 bp, Saccharomyces pastorianus
agttcattctttgggaatcctccta

SEQ ID NO: 109711 - DNA, 25 bp, Saccharomyces pastorianus
agctgcagcttttgaacgacttgat

SEQ ID NO: 109712 - DNA, 25 bp, Saccharomyces pastorianus
aaaatcacgccttctatcttttggt

SEQ ID NO: 109713 - DNA, 25 bp, Saccharomyces pastorianus
ttccgccgataaaggttttccattg

SEQ ID NO: 109714 - DNA, 25 bp, Saccharomyces pastorianus
gttttccattgattcctagtggcta

SEQ ID NO: 109715 - DNA, 25 bp, Saccharomyces pastorianus
gatcttttacgtatatttccgccga

SEQ ID NO: 109716 - DNA, 25 bp, Saccharomyces pastorianus
gattaggccaacagtatccactcag

SEQ ID NO: 109717 - DNA, 25 bp, Saccharomyces pastorianus
ggaccacggtcttttattcatactg

SEQ ID NO: 109718 - DNA, 25 bp, Saccharomyces pastorianus
gcgagagaggtttagctttagcccc

SEQ ID NO: 109719 - DNA, 25 bp, Saccharomyces pastorianus
tcactgcgagtgatgctgttgttgc

SEQ ID NO: 109720 - DNA, 25 bp, Saccharomyces pastorianus
attcagctaccagagctacacttta

SEQ ID NO: 109721 - DNA, 25 bp, Saccharomyces pastorianus
tgttctcactacatctttgattgga

SEQ ID NO: 109722 - DNA, 25 bp, Saccharomyces pastorianus
gggacttatccaaccagacgtattt

SEQ ID NO: 109723 - DNA, 25 bp, Saccharomyces pastorianus
ttttacaccacaaccgaatgaagct

SEQ ID NO: 109724 - DNA, 25 bp, Saccharomyces pastorianus
gctgttgttgcactatctaccgaaa

SEQ ID NO: 109725 - DNA, 25 bp, Saccharomyces pastorianus
ttagaggcgttgcaagacttggatt

SEQ ID NO: 109726 - DNA, 25 bp, Saccharomyces pastorianus
gagctacactttatgcttcgtagta

SEQ ID NO: 109727 - DNA, 25 bp, Saccharomyces pastorianus
gaaggcggactgtttgctaaaattg

SEQ ID NO: 109728 - DNA, 25 bp, Saccharomyces pastorianus
gacttggatttcttacttggtacgg

SEQ ID NO: 109729 - DNA, 25 bp, Saccharomyces pastorianus
aaagcaaaatacactacgcactctt

SEQ ID NO: 109730 - DNA, 25 bp, Saccharomyces pastorianus
aacagaaccacaagctgaacaagat

SEQ ID NO: 109731 - DNA, 25 bp, Saccharomyces pastorianus
attatttttggctttcttcctctca

SEQ ID NO: 109732 - DNA, 25 bp, Saccharomyces pastorianus
ctttcttcctctcatctttttatat

SEQ ID NO: 109733 - DNA, 25 bp, Saccharomyces pastorianus
atcagccacacaaaatgcagaattt

SEQ ID NO: 109734 - DNA, 25 bp, Saccharomyces pastorianus
acttttcatagcattttccttgtcg

SEQ ID NO: 109735 - DNA, 25 bp, Saccharomyces pastorianus
gaacaagatcattatttttggcttt

SEQ ID NO: 109736 - DNA, 25 bp, Saccharomyces pastorianus
atctttttatattcgaatccagtac

SEQ ID NO: 109737 - DNA, 25 bp, Saccharomyces pastorianus
gaaagtcattgaacttttcatagca

SEQ ID NO: 109738 - DNA, 25 bp, Saccharomyces pastorianus
cactctttgtaatcagccacacaaa

SEQ ID NO: 109739 - DNA, 25 bp, Saccharomyces pastorianus
tcatagcattttccttgtcgaagaa

SEQ ID NO: 109740 - DNA, 25 bp, Saccharomyces pastorianus
tcctcaatgcttcagttctgccatt

SEQ ID NO: 109741 - DNA, 25 bp, Saccharomyces pastorianus
gtgcaatagaaatttcactaccaca

SEQ ID NO: 109742 - DNA, 25 bp, Saccharomyces pastorianus
actggctccaagtaccttgcaagat

SEQ ID NO: 109743 - DNA, 25 bp, Saccharomyces pastorianus
acttcaaggcccagaggctttaaag

SEQ ID NO: 109744 - DNA, 25 bp, Saccharomyces pastorianus
gtagaaactgctcatgttgctaaag

SEQ ID NO: 109745 - DNA, 25 bp, Saccharomyces pastorianus
taatgttaagccttggaacccacca

SEQ ID NO: 109746 - DNA, 25 bp, Saccharomyces pastorianus
aaaagacaccaaactggctccaagt

SEQ ID NO: 109747 - DNA, 25 bp, Saccharomyces pastorianus
agagggtgagtcagagccaattgaa

SEQ ID NO: 109748 - DNA, 25 bp, Saccharomyces pastorianus
agttctgccattgagactgtgcaat

SEQ ID NO: 109749 - DNA, 25 bp, Saccharomyces pastorianus
ggctttaaaggcttacaccgagcaa

SEQ ID NO: 109750 - DNA, 25 bp, Saccharomyces pastorianus
tcactaccacaagaatatcctacaa

SEQ ID NO: 109751 - DNA, 25 bp, Saccharomyces pastorianus
tactacttgggttgattggcatgat

SEQ ID NO: 109752 - DNA, 25 bp, Saccharomyces pastorianus
taagctccaaatccatgtgtggtga

SEQ ID NO: 109753 - DNA, 25 bp, Saccharomyces pastorianus
cgaacattgccttactaagctccaa

SEQ ID NO: 109754 - DNA, 25 bp, Saccharomyces pastorianus
tgggaccccggatctctcaaatttt

SEQ ID NO: 109755 - DNA, 25 bp, Saccharomyces pastorianus
gaaccactggaaaacatactcgctg

SEQ ID NO: 109756 - DNA, 25 bp, Saccharomyces pastorianus
tctccgttcaggcagcagtaatgat

SEQ ID NO: 109757 - DNA, 25 bp, Saccharomyces pastorianus
tttaacctcgataatgaaccactgg

SEQ ID NO: 109758 - DNA, 25 bp, Saccharomyces pastorianus
atactcgctgttttcataatatctt

SEQ ID NO: 109759 - DNA, 25 bp, Saccharomyces pastorianus
gtggtgatcatcatagcgtcaagaa

SEQ ID NO: 109760 - DNA, 25 bp, Saccharomyces pastorianus
atgtgcacacactcgtttctgggac

SEQ ID NO: 109761 - DNA, 25 bp, Saccharomyces pastorianus
gatattcatatctctccgttcaggc

SEQ ID NO: 109762 - DNA, 25 bp, Saccharomyces pastorianus
gcaaaccacgatcaaggagtccaag

SEQ ID NO: 109763 - DNA, 25 bp, Saccharomyces pastorianus
tggcacaaacctcaatagatacctt

SEQ ID NO: 109764 - DNA, 25 bp, Saccharomyces pastorianus
gaagcggatgcattccgacggcata

SEQ ID NO: 109765 - DNA, 25 bp, Saccharomyces pastorianus
caccattccttcaagcaaacttcaa

SEQ ID NO: 109766 - DNA, 25 bp, Saccharomyces pastorianus
tgaaaaatctgcacaccattccttc

SEQ ID NO: 109767 - DNA, 25 bp, Saccharomyces pastorianus
aaattgttatacgatggctcaccag

SEQ ID NO: 109768 - DNA, 25 bp, Saccharomyces pastorianus
gcgagagcaatccatttcctaggtt

SEQ ID NO: 109769 - DNA, 25 bp, Saccharomyces pastorianus
gatggctcaccaggatattccaaag

SEQ ID NO: 109770 - DNA, 25 bp, Saccharomyces pastorianus
gcacttggtcggtaagaatcacctt

SEQ ID NO: 109771 - DNA, 25 bp, Saccharomyces pastorianus
taaagccagcaaattaccccaaaga

SEQ ID NO: 109772 - DNA, 25 bp, Saccharomyces pastorianus
gaatcaccttcgtataacagctgac

SEQ ID NO: 109773 - DNA, 25 bp, Saccharomyces pastorianus
ggtcaattgtcctcaaagttactga

SEQ ID NO: 109774 - DNA, 25 bp, Saccharomyces pastorianus
aggagacaggcgctgtttacccatt

SEQ ID NO: 109775 - DNA, 25 bp, Saccharomyces pastorianus
agaagatctagtcatcgtctcacca

SEQ ID NO: 109776 - DNA, 25 bp, Saccharomyces pastorianus
gttctcgtcgaatgctaggtcaatt

SEQ ID NO: 109777 - DNA, 25 bp, Saccharomyces pastorianus
gaaaggttccactgtaaccagcaat

SEQ ID NO: 109778 - DNA, 25 bp, Saccharomyces pastorianus
tgagaccatttgttaagccaagcgg

SEQ ID NO: 109779 - DNA, 25 bp, Saccharomyces pastorianus
gtttacccatttggtgccgacaaag

SEQ ID NO: 109780 - DNA, 25 bp, Saccharomyces pastorianus
aacggtgtcgttactcaagatttca

SEQ ID NO: 109781 - DNA, 25 bp, Saccharomyces pastorianus
aaacacccatcgtggcgaagtgaac

SEQ ID NO: 109782 - DNA, 25 bp, Saccharomyces pastorianus
tatcttttcctttcgaatgggcctt

SEQ ID NO: 109783 - DNA, 25 bp, Saccharomyces pastorianus
gtacttgaacgttccaaacacccat

SEQ ID NO: 109784 - DNA, 25 bp, Saccharomyces pastorianus
gctagtactactcaatgtcgcagaa

SEQ ID NO: 109785 - DNA, 25 bp, Saccharomyces pastorianus
aactgccaagtgttatgtcccaaaa

SEQ ID NO: 109786 - DNA, 25 bp, Saccharomyces pastorianus
agaacagttcatgataagccaattg

SEQ ID NO: 109787 - DNA, 25 bp, Saccharomyces pastorianus
ctacatcaacaactattccggttat

SEQ ID NO: 109788 - DNA, 25 bp, Saccharomyces pastorianus
ggatattctccatctccaagaacag

SEQ ID NO: 109789 - DNA, 25 bp, Saccharomyces pastorianus
aagccaattgttatttgcactgaca

SEQ ID NO: 109790 - DNA, 25 bp, Saccharomyces pastorianus
gagtctgaaaggatattctccatct

SEQ ID NO: 109791 - DNA, 25 bp, Saccharomyces pastorianus
gtcccaaaaagttcacctacatcaa

SEQ ID NO: 109792 - DNA, 25 bp, Saccharomyces pastorianus
taccgtcatcaatattacgagtctg

SEQ ID NO: 109793 - DNA, 25 bp, Saccharomyces pastorianus
ccggttataagggatgctagtacta

SEQ ID NO: 109794 - DNA, 25 bp, Saccharomyces pastorianus
gtcgcagaataactaccgtcatcaa

SEQ ID NO: 109795 - DNA, 25 bp, Saccharomyces pastorianus
aatagtgcttctcccaatgttaacc

SEQ ID NO: 109796 - DNA, 25 bp, Saccharomyces pastorianus
tcagttttcaaagagttcgatccaa

SEQ ID NO: 109797 - DNA, 25 bp, Saccharomyces pastorianus
gtaatcaagtgagaggccgttccta

SEQ ID NO: 109798 - DNA, 25 bp, Saccharomyces pastorianus
cttatgctgttattggttccaacga

SEQ ID NO: 109799 - DNA, 25 bp, Saccharomyces pastorianus
atcgagctgttcaagcctccaattt

SEQ ID NO: 109800 - DNA, 25 bp, Saccharomyces pastorianus
tggacaatgacaaccactctgattt

SEQ ID NO: 109801 - DNA, 25 bp, Saccharomyces pastorianus
agccatttatccgaaagactattta

SEQ ID NO: 109802 - DNA, 25 bp, Saccharomyces pastorianus
caagcctccaatttattccaacgat

SEQ ID NO: 109803 - DNA, 25 bp, Saccharomyces pastorianus
aactacaggtcttctaaattggcaa

SEQ ID NO: 109804 - DNA, 25 bp, Saccharomyces pastorianus
ttagtagtttaccttatgctgttat

SEQ ID NO: 109805 - DNA, 25 bp, Saccharomyces pastorianus
caaccactctgatttcaaccttttg

SEQ ID NO: 109806 - DNA, 25 bp, Saccharomyces pastorianus
aaatatggttcgctcaccgagtgca

SEQ ID NO: 109807 - DNA, 25 bp, Saccharomyces pastorianus
atgaactctgaacagctgctgcata

SEQ ID NO: 109808 - DNA, 25 bp, Saccharomyces pastorianus
agcagcaactacagtcgtacacgag

SEQ ID NO: 109809 - DNA, 25 bp, Saccharomyces pastorianus
gagacactgatcgacgcgctgtaca

SEQ ID NO: 109810 - DNA, 25 bp, Saccharomyces pastorianus
gtacgaattgcttcaggccagggat

SEQ ID NO: 109811 - DNA, 25 bp, Saccharomyces pastorianus
actatgtttcggattcgctactcac

SEQ ID NO: 109812 - DNA, 25 bp, Saccharomyces pastorianus
ataacgttgcgctctagattactgc

SEQ ID NO: 109813 - DNA, 25 bp, Saccharomyces pastorianus
aaagacctcggaactagcagaattt

SEQ ID NO: 109814 - DNA, 25 bp, Saccharomyces pastorianus
attcgctactcactactctgataag

SEQ ID NO: 109815 - DNA, 25 bp, Saccharomyces pastorianus
gatgcgcgagtgacctctgagttag

SEQ ID NO: 109816 - DNA, 25 bp, Saccharomyces pastorianus
gccattcctggcctattacaaatta

SEQ ID NO: 109817 - DNA, 25 bp, Saccharomyces pastorianus
aagctgagctcgataaggtctgtga

SEQ ID NO: 109818 - DNA, 25 bp, Saccharomyces pastorianus
tatggtggccgtccaatctttaaac

SEQ ID NO: 109819 - DNA, 25 bp, Saccharomyces pastorianus
aacagtttctcacgttgcaggaaga

SEQ ID NO: 109820 - DNA, 25 bp, Saccharomyces pastorianus
aatgcccaagcagatgtacttaaac

SEQ ID NO: 109821 - DNA, 25 bp, Saccharomyces pastorianus
gagcaagttatggtggccgtccaat

SEQ ID NO: 109822 - DNA, 25 bp, Saccharomyces pastorianus
tcctattttgcctattatgagaccg

SEQ ID NO: 109823 - DNA, 25 bp, Saccharomyces pastorianus
ggtctcagcccgctaaaaagaagct

SEQ ID NO: 109824 - DNA, 25 bp, Saccharomyces pastorianus
agctagaaaccgtatccaaggattt

SEQ ID NO: 109825 - DNA, 25 bp, Saccharomyces pastorianus
atgagaccgggcacatttaatcagg

SEQ ID NO: 109826 - DNA, 25 bp, Saccharomyces pastorianus
tagggtcgaagctattgacaaggct

SEQ ID NO: 109827 - DNA, 25 bp, Saccharomyces pastorianus
ggtaaggcattagaaactttcgatc

SEQ ID NO: 109828 - DNA, 25 bp, Saccharomyces pastorianus
gatgaactgggctccaattggtgcc

SEQ ID NO: 109829 - DNA, 25 bp, Saccharomyces pastorianus
aacgatgccgcatttgggtacttat

SEQ ID NO: 109830 - DNA, 25 bp, Saccharomyces pastorianus
gttcatccctttaatatctcaatcg

SEQ ID NO: 109831 - DNA, 25 bp, Saccharomyces pastorianus
taatgtctgacctccacgtgataat

SEQ ID NO: 109832 - DNA, 25 bp, Saccharomyces pastorianus
ttccgctaccttacaaactcaaatt

SEQ ID NO: 109833 - DNA, 25 bp, Saccharomyces pastorianus
agatcttgatatgacttccgctacc

SEQ ID NO: 109834 - DNA, 25 bp, Saccharomyces pastorianus
gaacgacaaatcacttactccagaa

SEQ ID NO: 109835 - DNA, 25 bp, Saccharomyces pastorianus
aggaatttgcctctatatactgtaa

SEQ ID NO: 109836 - DNA, 25 bp, Saccharomyces pastorianus
gtagatggccacttgattcaggacc

SEQ ID NO: 109837 - DNA, 25 bp, Saccharomyces pastorianus
tgacgactccatatctccggaggaa

SEQ ID NO: 109838 - DNA, 25 bp, Saccharomyces pastorianus
atcaacctaacctgcaacttacaag

SEQ ID NO: 109839 - DNA, 25 bp, Saccharomyces pastorianus
agattacaagtctccagtggtcaca

SEQ ID NO: 109840 - DNA, 25 bp, Saccharomyces pastorianus
agaggcgacctagtgatgacaatga

SEQ ID NO: 109841 - DNA, 25 bp, Saccharomyces pastorianus
gatagctgcaagttcttacactcga

SEQ ID NO: 109842 - DNA, 25 bp, Saccharomyces pastorianus
caagactggctggaagctgaaccaa

SEQ ID NO: 109843 - DNA, 25 bp, Saccharomyces pastorianus
gataccgtttaagtgcactctttgt

SEQ ID NO: 109844 - DNA, 25 bp, Saccharomyces pastorianus
agcaggacacttcaactttcacatg

SEQ ID NO: 109845 - DNA, 25 bp, Saccharomyces pastorianus
acaaggagacccacggcagtgcaaa

SEQ ID NO: 109846 - DNA, 25 bp, Saccharomyces pastorianus
gtcacaaactgtggccattattttt

SEQ ID NO: 109847 - DNA, 25 bp, Saccharomyces pastorianus
ccggaccacggtgctgatggatttt

SEQ ID NO: 109848 - DNA, 25 bp, Saccharomyces pastorianus
gactccaaagcggttactctagact

SEQ ID NO: 109849 - DNA, 25 bp, Saccharomyces pastorianus
ttaacggtcaacgacgacagcacta

SEQ ID NO: 109850 - DNA, 25 bp, Saccharomyces pastorianus
caacgatgctggtaaggctaagaaa

SEQ ID NO: 109851 - DNA, 25 bp, Saccharomyces pastorianus
aaattgaacaaggccggtaagccat

SEQ ID NO: 109852 - DNA, 25 bp, Saccharomyces pastorianus
ggctaagaaattgatccaatctttg

SEQ ID NO: 109853 - DNA, 25 bp, Saccharomyces pastorianus
gttatcaacgatgctggtaaggcta

SEQ ID NO: 109854 - DNA, 25 bp, Saccharomyces pastorianus
tgtacactttggttatcaacgatgc

SEQ ID NO: 109855 - DNA, 25 bp, Saccharomyces pastorianus
tgctggtaaggctaagaaattgatc

SEQ ID NO: 109856 - DNA, 25 bp, Saccharomyces pastorianus
acgatgctggtaaggctaagaaatt

SEQ ID NO: 109857 - DNA, 25 bp, Saccharomyces pastorianus
gtaaggctaagaaattgatccaatc

SEQ ID NO: 109858 - DNA, 25 bp, Saccharomyces pastorianus
ttatcaacgatgctggtaaggctaa

SEQ ID NO: 109859 - DNA, 25 bp, Saccharomyces pastorianus
ctttgtacactttggttatcaacga

SEQ ID NO: 109860 - DNA, 25 bp, Saccharomyces pastorianus
atcaacgatgctggtaaggctaaga

SEQ ID NO: 109861 - DNA, 25 bp, Saccharomyces pastorianus
aggctcttcttctttgtacactttg

SEQ ID NO: 109862 - DNA, 25 bp, Saccharomyces pastorianus
tgaacaaggccggtaagccattcag

SEQ ID NO: 109863 - DNA, 25 bp, Saccharomyces pastorianus
ggctaagaaattgatccaatctttg

SEQ ID NO: 109864 - DNA, 25 bp, Saccharomyces pastorianus
gttaagaccgccactgttaagatta

SEQ ID NO: 109865 - DNA, 25 bp, Saccharomyces pastorianus
gttatcaacgatgctggtaaggcta

SEQ ID NO: 109866 - DNA, 25 bp, Saccharomyces pastorianus
tgtacactttggttatcaacgatgc

SEQ ID NO: 109867 - DNA, 25 bp, Saccharomyces pastorianus
aacgatgctggtaaggctaagaaat

SEQ ID NO: 109868 - DNA, 25 bp, Saccharomyces pastorianus
gtaagccattcagacaaaccaagtt

SEQ ID NO: 109869 - DNA, 25 bp, Saccharomyces pastorianus
ttagaggctcttcttctttgtacac

SEQ ID NO: 109870 - DNA, 25 bp, Saccharomyces pastorianus
ctttgtacactttggttatcaacga

SEQ ID NO: 109871 - DNA, 25 bp, Saccharomyces pastorianus
accaagttcaaggttagaggctctt

SEQ ID NO: 109872 - DNA, 25 bp, Saccharomyces pastorianus
gtaagatgtacaacagaccgcctgt

SEQ ID NO: 109873 - DNA, 25 bp, Saccharomyces pastorianus
aagcaagcggagctcatgcatcaaa

SEQ ID NO: 109874 - DNA, 25 bp, Saccharomyces pastorianus
atggtaaaaagcaccgccgcagact

SEQ ID NO: 109875 - DNA, 25 bp, Saccharomyces pastorianus
gcctggctgcatgacaaatcactgt

SEQ ID NO: 109876 - DNA, 25 bp, Saccharomyces pastorianus
tacttgcacttctaccggttatagg

SEQ ID NO: 109877 - DNA, 25 bp, Saccharomyces pastorianus
tttgcatggttgcacgcatgttcca

SEQ ID NO: 109878 - DNA, 25 bp, Saccharomyces pastorianus
ggtccaaaacaaagcctggctgcat

SEQ ID NO: 109879 - DNA, 25 bp, Saccharomyces pastorianus
gccgcagactgccatattattgcac

SEQ ID NO: 109880 - DNA, 25 bp, Saccharomyces pastorianus
acattccaatgccaatactgcacct

SEQ ID NO: 109881 - DNA, 25 bp, Saccharomyces pastorianus
ggatgggcaccattacttgcacttc

SEQ ID NO: 109882 - DNA, 25 bp, Saccharomyces pastorianus
actgcacctccagtagttggtggca

SEQ ID NO: 109883 - DNA, 25 bp, Saccharomyces pastorianus
gacttaatcgattctggcgaaatta

SEQ ID NO: 109884 - DNA, 25 bp, Saccharomyces pastorianus
gtatttcacccataacggcaacttt

SEQ ID NO: 109885 - DNA, 25 bp, Saccharomyces pastorianus
gtctaacccaaagtatttcacccat

SEQ ID NO: 109886 - DNA, 25 bp, Saccharomyces pastorianus
ggctctaactcccaaaacaatgaaa

SEQ ID NO: 109887 - DNA, 25 bp, Saccharomyces pastorianus
cgaagcaaagtctaacccaaagtat

SEQ ID NO: 109888 - DNA, 25 bp, Saccharomyces pastorianus
ggcaagcctggcgatgagattaatg

SEQ ID NO: 109889 - DNA, 25 bp, Saccharomyces pastorianus
atttcacccataacggcaactttgg

SEQ ID NO: 109890 - DNA, 25 bp, Saccharomyces pastorianus
caagcctggcgatgagattaatgac

SEQ ID NO: 109891 - DNA, 25 bp, Saccharomyces pastorianus
aaccacgtcaagagaggaggctatg

SEQ ID NO: 109892 - DNA, 25 bp, Saccharomyces pastorianus
gacagtcttcaacaagaccagaagg

SEQ ID NO: 109893 - DNA, 25 bp, Saccharomyces pastorianus
tctggcgaaattaagacagtcttca

SEQ ID NO: 109894 - DNA, 25 bp, Saccharomyces pastorianus
gccgaacctaaagatgctaccgaaa

SEQ ID NO: 109895 - DNA, 25 bp, Saccharomyces pastorianus
gacgttttgtccactaaagaagcta

SEQ ID NO: 109896 - DNA, 25 bp, Saccharomyces pastorianus
aaaaactgaggcctctgcttctctt

SEQ ID NO: 109897 - DNA, 25 bp, Saccharomyces pastorianus
aacgagtttactaccgacattgcct

SEQ ID NO: 109898 - DNA, 25 bp, Saccharomyces pastorianus
gaggctgcctctggtgagagtacta

SEQ ID NO: 109899 - DNA, 25 bp, Saccharomyces pastorianus
aaagtgttgcagtcgagccatccaa

SEQ ID NO: 109900 - DNA, 25 bp, Saccharomyces pastorianus
ttctcttgaaagcagtgccgtcacg

SEQ ID NO: 109901 - DNA, 25 bp, Saccharomyces pastorianus
cattgcctctccaagacatcaagaa

SEQ ID NO: 109902 - DNA, 25 bp, Saccharomyces pastorianus
aacaacgtttccaaggaggctgcct

SEQ ID NO: 109903 - DNA, 25 bp, Saccharomyces pastorianus
gtgaacctgtggaggatgccaacaa

SEQ ID NO: 109904 - DNA, 25 bp, Saccharomyces pastorianus
ggaagataccagtgagcctgcgaaa

SEQ ID NO: 109905 - DNA, 25 bp, Saccharomyces pastorianus
atgtgaacgatatggaggcaatgct

SEQ ID NO: 109906 - DNA, 25 bp, Saccharomyces pastorianus
ggcaatgctggtagacgaactcgta

SEQ ID NO: 109907 - DNA, 25 bp, Saccharomyces pastorianus
gagtcagcacttgaggaagaaacca

SEQ ID NO: 109908 - DNA, 25 bp, Saccharomyces pastorianus
agagctgctggtgcttgaatctgat

SEQ ID NO: 109909 - DNA, 25 bp, Saccharomyces pastorianus
cgtatgtgacacgagggacctactt

SEQ ID NO: 109910 - DNA, 25 bp, Saccharomyces pastorianus
gagggacctacttaatgtcgatgaa

SEQ ID NO: 109911 - DNA, 25 bp, Saccharomyces pastorianus
tcgtcgatatgcatgacagtattaa

SEQ ID NO: 109912 - DNA, 25 bp, Saccharomyces pastorianus
gaagaactaactctacttacggaag

SEQ ID NO: 109913 - DNA, 25 bp, Saccharomyces pastorianus
agtagatactgctgaagaattcgaa

SEQ ID NO: 109914 - DNA, 25 bp, Saccharomyces pastorianus
acggaagaacgtgcagtagatactg

SEQ ID NO: 109915 - DNA, 25 bp, Saccharomyces pastorianus
aattgtgcacgtatcgtcgatatgc

SEQ ID NO: 109916 - DNA, 25 bp, Saccharomyces pastorianus
caccgccgaccataataataccaat

SEQ ID NO: 109917 - DNA, 25 bp, Saccharomyces pastorianus
ataccactccgattcaccattaggt

SEQ ID NO: 109918 - DNA, 25 bp, Saccharomyces pastorianus
atcgtccgcaggtggtttagaccta

SEQ ID NO: 109919 - DNA, 25 bp, Saccharomyces pastorianus
agctcccttttcgacgtcagaataa

SEQ ID NO: 109920 - DNA, 25 bp, Saccharomyces pastorianus
actgattctggtgatactggcttta

SEQ ID NO: 109921 - DNA, 25 bp, Saccharomyces pastorianus
tcaaggaaccactatcaccagtatt

SEQ ID NO: 109922 - DNA, 25 bp, Saccharomyces pastorianus
aaggacggactttattgactcagat

SEQ ID NO: 109923 - DNA, 25 bp, Saccharomyces pastorianus
attaggtggtagtgcatcgtccgca

SEQ ID NO: 109924 - DNA, 25 bp, Saccharomyces pastorianus
aggtcgttacggcatatagagctaa

SEQ ID NO: 109925 - DNA, 25 bp, Saccharomyces pastorianus
tatactaccgttacgtacacaccat

SEQ ID NO: 109926 - DNA, 25 bp, Saccharomyces pastorianus
catcgtcattggttgtgtggttggt

SEQ ID NO: 109927 - DNA, 25 bp, Saccharomyces pastorianus
ggtggttctcttgccagaattgctt

SEQ ID NO: 109928 - DNA, 25 bp, Saccharomyces pastorianus
ggttctcttgccagaattgctttga

SEQ ID NO: 109929 - DNA, 25 bp, Saccharomyces pastorianus
agctcaacacgctgttattttggat

SEQ ID NO: 109930 - DNA, 25 bp, Saccharomyces pastorianus
ttctcttgccagaattgctttgagg

SEQ ID NO: 109931 - DNA, 25 bp, Saccharomyces pastorianus
aagattggtggttctcttgccagaa

SEQ ID NO: 109932 - DNA, 25 bp, Saccharomyces pastorianus
tcaacacgctgttattttggatcaa

SEQ ID NO: 109933 - DNA, 25 bp, Saccharomyces pastorianus
gattggtggttctcttgccagaatt

SEQ ID NO: 109934 - DNA, 25 bp, Saccharomyces pastorianus
ttggtggttctcttgccagaattgc

SEQ ID NO: 109935 - DNA, 25 bp, Saccharomyces pastorianus
cacgctgttattttggatcaagaaa

SEQ ID NO: 109936 - DNA, 25 bp, Saccharomyces pastorianus
aacacgctgttattttggatcaaga

SEQ ID NO: 109937 - DNA, 25 bp, Saccharomyces pastorianus
tgccagaattgctttgaggcacttg

SEQ ID NO: 109938 - DNA, 25 bp, Saccharomyces pastorianus
agatacgtctctgtttccgttttgg

SEQ ID NO: 109939 - DNA, 25 bp, Saccharomyces pastorianus
ggtggttctcttgccagaattgctt

SEQ ID NO: 109940 - DNA, 25 bp, Saccharomyces pastorianus
ggttctcttgccagaattgctttga

SEQ ID NO: 109941 - DNA, 25 bp, Saccharomyces pastorianus
agctcaacacgctgttattttggat

SEQ ID NO: 109942 - DNA, 25 bp, Saccharomyces pastorianus
ttctcttgccagaattgctttgagg

SEQ ID NO: 109943 - DNA, 25 bp, Saccharomyces pastorianus
aagattggtggttctcttgccagaa

SEQ ID NO: 109944 - DNA, 25 bp, Saccharomyces pastorianus
gattggtggttctcttgccagaatt

SEQ ID NO: 109945 - DNA, 25 bp, Saccharomyces pastorianus
tcaagccaatctcgaagcattccaa

SEQ ID NO: 109946 - DNA, 25 bp, Saccharomyces pastorianus
cacgctgttattttggatcaagaaa

SEQ ID NO: 109947 - DNA, 25 bp, Saccharomyces pastorianus
aacacgctgttattttggatcaaga

SEQ ID NO: 109948 - DNA, 25 bp, Saccharomyces pastorianus
tgccagaattgctttgaggcacttg

SEQ ID NO: 109949 - DNA, 25 bp, Saccharomyces pastorianus
aaatccctatttttacataatgcta

SEQ ID NO: 109950 - DNA, 25 bp, Saccharomyces pastorianus
taggaatcctcaaatccctattttt

SEQ ID NO: 109951 - DNA, 25 bp, Saccharomyces pastorianus
aattgctgggattttattgttgatc

SEQ ID NO: 109952 - DNA, 25 bp, Saccharomyces pastorianus
gatatactaataacacggatactta

SEQ ID NO: 109953 - DNA, 25 bp, Saccharomyces pastorianus
gtttcatccaatacgaacgattatc

SEQ ID NO: 109954 - DNA, 25 bp, Saccharomyces pastorianus
caaattattgcaacatttcccagtg

SEQ ID NO: 109955 - DNA, 25 bp, Saccharomyces pastorianus
acagatgatgttacagtttcatcca

SEQ ID NO: 109956 - DNA, 25 bp, Saccharomyces pastorianus
ctgggattttattgttgatcaaggc

SEQ ID NO: 109957 - DNA, 25 bp, Saccharomyces pastorianus
gttacagtttcatccaatacgaacg

SEQ ID NO: 109958 - DNA, 25 bp, Saccharomyces pastorianus
gaatcctcaaatccctatttttaca

SEQ ID NO: 109959 - DNA, 25 bp, Saccharomyces pastorianus
ggctatgatattctgtatagttaat

SEQ ID NO: 109960 - DNA, 25 bp, Saccharomyces pastorianus
cggagcagctttcggtgtcagtaat

SEQ ID NO: 109961 - DNA, 25 bp, Saccharomyces pastorianus
gggtttttttgtacagttatgtgat

SEQ ID NO: 109962 - DNA, 25 bp, Saccharomyces pastorianus
ttttttcaccagtatcggcctctat

SEQ ID NO: 109963 - DNA, 25 bp, Saccharomyces pastorianus
tttcaccagtatcggcctctattta

SEQ ID NO: 109964 - DNA, 25 bp, Saccharomyces pastorianus
ccagtatcggcctctatttataaaa

SEQ ID NO: 109965 - DNA, 25 bp, Saccharomyces pastorianus
agcagctttcggtgtcagtaattct

SEQ ID NO: 109966 - DNA, 25 bp, Saccharomyces pastorianus
ttataaaaaacggagcagctttcgg

SEQ ID NO: 109967 - DNA, 25 bp, Saccharomyces pastorianus
aacggagcagctttcggtgtcagta

SEQ ID NO: 109968 - DNA, 25 bp, Saccharomyces pastorianus
gattataaacagtcttttgtctagt

SEQ ID NO: 109969 - DNA, 25 bp, Saccharomyces pastorianus
atgtgtttatgccaataagggtttt

SEQ ID NO: 109970 - DNA, 25 bp, Saccharomyces pastorianus
gctttcggtgtcagtaattctgaaa

SEQ ID NO: 109971 - DNA, 25 bp, Saccharomyces pastorianus
gagttcttaccatgcatatggccac

SEQ ID NO: 109972 - DNA, 25 bp, Saccharomyces pastorianus
agcatcggaaggtccatcttttcga

SEQ ID NO: 109973 - DNA, 25 bp, Saccharomyces pastorianus
aggtttccggaactcgcaatgctaa

SEQ ID NO: 109974 - DNA, 25 bp, Saccharomyces pastorianus
aaagtgaaaccttgagccctggaga

SEQ ID NO: 109975 - DNA, 25 bp, Saccharomyces pastorianus
tacgtgatgttatgttctcccgcaa

SEQ ID NO: 109976 - DNA, 25 bp, Saccharomyces pastorianus
gtcatttagacaagcggtaccctta

SEQ ID NO: 109977 - DNA, 25 bp, Saccharomyces pastorianus
ggtggaccccagaggcaagattgta

SEQ ID NO: 109978 - DNA, 25 bp, Saccharomyces pastorianus
ttagatcccgaagtcattgagtcat

SEQ ID NO: 109979 - DNA, 25 bp, Saccharomyces pastorianus
catgatctaccctagtgcattcaac

SEQ ID NO: 109980 - DNA, 25 bp, Saccharomyces pastorianus
cacagggcccttgcattggcattta

SEQ ID NO: 109981 - DNA, 25 bp, Saccharomyces pastorianus
caagggtgcgtttgccatgatctac

SEQ ID NO: 109982 - DNA, 25 bp, Saccharomyces pastorianus
gacgaatatttgcacgatcccgact

SEQ ID NO: 109983 - DNA, 25 bp, Saccharomyces pastorianus
ggagaaggtcccaacttcacttatt

SEQ ID NO: 109984 - DNA, 25 bp, Saccharomyces pastorianus
gaattctctgttgagcagacccact

SEQ ID NO: 109985 - DNA, 25 bp, Saccharomyces pastorianus
aaaggatcctctgacgactcaaaga

SEQ ID NO: 109986 - DNA, 25 bp, Saccharomyces pastorianus
ggtcggtccatgatttacgtgagct

SEQ ID NO: 109987 - DNA, 25 bp, Saccharomyces pastorianus
tttaactggtgaacactcgtcctcg

SEQ ID NO: 109988 - DNA, 25 bp, Saccharomyces pastorianus
gaattattatttcacgcatcccgat

SEQ ID NO: 109989 - DNA, 25 bp, Saccharomyces pastorianus
aatgtttctcctgcatctcaaatca

SEQ ID NO: 109990 - DNA, 25 bp, Saccharomyces pastorianus
aatcacgtgaatgccatcccaagaa

SEQ ID NO: 109991 - DNA, 25 bp, Saccharomyces pastorianus
aaagttcgcgctcacgttcaggaaa

SEQ ID NO: 109992 - DNA, 25 bp, Saccharomyces pastorianus
aacccctttgctatcaatgtttctc

SEQ ID NO: 109993 - DNA, 25 bp, Saccharomyces pastorianus
gaagcctgttttccaagacttgtac

SEQ ID NO: 109994 - DNA, 25 bp, Saccharomyces pastorianus
tggactggtacccaatcttcaagaa

SEQ ID NO: 109995 - DNA, 25 bp, Saccharomyces pastorianus
tggttgctccaaagggttccggtag

SEQ ID NO: 109996 - DNA, 25 bp, Saccharomyces pastorianus
aagaggtgctttggactggtaccca

SEQ ID NO: 109997 - DNA, 25 bp, Saccharomyces pastorianus
gtcaactctgacttgtacggtgaaa

SEQ ID NO: 109998 - DNA, 25 bp, Saccharomyces pastorianus
gtaaggctcacgaaaaggcccaagc

SEQ ID NO: 109999 - DNA, 25 bp, Saccharomyces pastorianus
aatctctatacccattgatcggtaa

SEQ ID NO: 110000 - DNA, 25 bp, Saccharomyces pastorianus
tgagagaaaacggtcactccccatc

SEQ ID NO: 110001 - DNA, 25 bp, Saccharomyces pastorianus
gtatccacggtatgttcttggctca

SEQ ID NO: 110002 - DNA, 25 bp, Saccharomyces pastorianus
gtcagatctttgttcaaggaaggtc

SEQ ID NO: 110003 - DNA, 25 bp, Saccharomyces pastorianus
gaacggtaccgaaaccaagagatct

SEQ ID NO: 110004 - DNA, 25 bp, Saccharomyces pastorianus
ggtatcgcagtttcttctataggcc

SEQ ID NO: 110005 - DNA, 25 bp, Saccharomyces pastorianus
tttggcttccgcttcattgattaca

SEQ ID NO: 110006 - DNA, 25 bp, Saccharomyces pastorianus
ataggcctctactctggtcttttgg

SEQ ID NO: 110007 - DNA, 25 bp, Saccharomyces pastorianus
accgccttgggagcgtttgcgtcaa

SEQ ID NO: 110008 - DNA, 25 bp, Saccharomyces pastorianus
gtttgcgtcaactttcttttgtgtg

SEQ ID NO: 110009 - DNA, 25 bp, Saccharomyces pastorianus
cttgcagctccattatcttcatttg

SEQ ID NO: 110010 - DNA, 25 bp, Saccharomyces pastorianus
gctgcttccgaactgagcgattcta

SEQ ID NO: 110011 - DNA, 25 bp, Saccharomyces pastorianus
ttactctatggtatgcttgcagctc

SEQ ID NO: 110012 - DNA, 25 bp, Saccharomyces pastorianus
aatacacctcgagacgggaagcctg

SEQ ID NO: 110013 - DNA, 25 bp, Saccharomyces pastorianus
attgattacatctactactccacta

SEQ ID NO: 110014 - DNA, 25 bp, Saccharomyces pastorianus
tgtgcctccaactatcagtctagaa

SEQ ID NO: 110015 - DNA, 25 bp, Saccharomyces pastorianus
ggttctaagccatcatcatctttgt

SEQ ID NO: 110016 - DNA, 25 bp, Saccharomyces pastorianus
tctttctcattttcaacatccggtt

SEQ ID NO: 110017 - DNA, 25 bp, Saccharomyces pastorianus
ttactatcacactaggtcctctgaa

SEQ ID NO: 110018 - DNA, 25 bp, Saccharomyces pastorianus
gaggaggctgcatcgatcattatat

SEQ ID NO: 110019 - DNA, 25 bp, Saccharomyces pastorianus
aatgggcctggcaaggactctttct

SEQ ID NO: 110020 - DNA, 25 bp, Saccharomyces pastorianus
catagagagtctgtgcgccgtgaac

SEQ ID NO: 110021 - DNA, 25 bp, Saccharomyces pastorianus
gtcacatcttccatggtttcttcaa

SEQ ID NO: 110022 - DNA, 25 bp, Saccharomyces pastorianus
agatctcttggtttggctgtgcaga

SEQ ID NO: 110023 - DNA, 25 bp, Saccharomyces pastorianus
caaattacctcttgatgcctgcgat

SEQ ID NO: 110024 - DNA, 25 bp, Saccharomyces pastorianus
tattatgctgccattgcttttacaa

SEQ ID NO: 110025 - DNA, 25 bp, Saccharomyces pastorianus
gaacttagccgagggtcttaatcca

SEQ ID NO: 110026 - DNA, 25 bp, Saccharomyces pastorianus
actggaaccatccacttttgttggt

SEQ ID NO: 110027 - DNA, 25 bp, Saccharomyces pastorianus
agagagtgtgctccttggctagaca

SEQ ID NO: 110028 - DNA, 25 bp, Saccharomyces pastorianus
atctcatccggtttagttgtgtatc

SEQ ID NO: 110029 - DNA, 25 bp, Saccharomyces pastorianus
atcaagccgcagcagtagtcaagga

SEQ ID NO: 110030 - DNA, 25 bp, Saccharomyces pastorianus
tggctagacacttaggttccttgtt

SEQ ID NO: 110031 - DNA, 25 bp, Saccharomyces pastorianus
gccgttcaaactgcatccgttcaat

SEQ ID NO: 110032 - DNA, 25 bp, Saccharomyces pastorianus
ttccttgtttagtgacgccgttcaa

SEQ ID NO: 110033 - DNA, 25 bp, Saccharomyces pastorianus
atgaatttttcaagcctatctggga

SEQ ID NO: 110034 - DNA, 25 bp, Saccharomyces pastorianus
attagagtgctctctcatcaagccg

SEQ ID NO: 110035 - DNA, 25 bp, Saccharomyces pastorianus
aaatcggatcctctgctatggctta

SEQ ID NO: 110036 - DNA, 25 bp, Saccharomyces pastorianus
actttgttgaacatctcatccggtt

SEQ ID NO: 110037 - DNA, 25 bp, Saccharomyces pastorianus
aagccggcgaatccacaaagcacag

SEQ ID NO: 110038 - DNA, 25 bp, Saccharomyces pastorianus
agaaatggcgcaactcgagagtaat

SEQ ID NO: 110039 - DNA, 25 bp, Saccharomyces pastorianus
atatccgttgtatttcactgatcaa

SEQ ID NO: 110040 - DNA, 25 bp, Saccharomyces pastorianus
ggctcctttaccctatagactaatg

SEQ ID NO: 110041 - DNA, 25 bp, Saccharomyces pastorianus
agaactgtctctgatgtcgcaggac

SEQ ID NO: 110042 - DNA, 25 bp, Saccharomyces pastorianus
gatattacttagacaagccggcgaa

SEQ ID NO: 110043 - DNA, 25 bp, Saccharomyces pastorianus
gtatcagctgatagggatcttccat

SEQ ID NO: 110044 - DNA, 25 bp, Saccharomyces pastorianus
ccatccaaattttcaaggctccttt

SEQ ID NO: 110045 - DNA, 25 bp, Saccharomyces pastorianus
gggatcttccattcaacggatttat

SEQ ID NO: 110046 - DNA, 25 bp, Saccharomyces pastorianus
atttctccatttgacagccatccaa

SEQ ID NO: 110047 - DNA, 25 bp, Saccharomyces pastorianus
gtgatcgacagtcaatatccgttgt

SEQ ID NO: 110048 - DNA, 25 bp, Saccharomyces pastorianus
gggcgagaatccaaagattacttta

SEQ ID NO: 110049 - DNA, 25 bp, Saccharomyces pastorianus
tagtaatagtaaagaacgcacccaa

SEQ ID NO: 110050 - DNA, 25 bp, Saccharomyces pastorianus
aggcccagtgcaagatttccagttg

SEQ ID NO: 110051 - DNA, 25 bp, Saccharomyces pastorianus
gaacgcacccaaaatataaaagaag

SEQ ID NO: 110052 - DNA, 25 bp, Saccharomyces pastorianus
aagccccattgcgtaaggcccagtg

SEQ ID NO: 110053 - DNA, 25 bp, Saccharomyces pastorianus
tttgaacagttacgcaagccccatt

SEQ ID NO: 110054 - DNA, 25 bp, Saccharomyces pastorianus
acaggcctcagctaagtgatgaaga

SEQ ID NO: 110055 - DNA, 25 bp, Saccharomyces pastorianus
ggtttattgagaacgggtggccaca

SEQ ID NO: 110056 - DNA, 25 bp, Saccharomyces pastorianus
tgatgaagaagtctctaaaaggcac

SEQ ID NO: 110057 - DNA, 25 bp, Saccharomyces pastorianus
gtggccacaggcctcagctaagtga

SEQ ID NO: 110058 - DNA, 25 bp, Saccharomyces pastorianus
gttgaagatactgccggtggtttat

SEQ ID NO: 110059 - DNA, 25 bp, Saccharomyces pastorianus
aaggcgtaaaagttttgcagctcga

SEQ ID NO: 110060 - DNA, 25 bp, Saccharomyces pastorianus
ggtgctcggactgtacagaagctgt

SEQ ID NO: 110061 - DNA, 25 bp, Saccharomyces pastorianus
tgcaatgcaatattccttcctgttc

SEQ ID NO: 110062 - DNA, 25 bp, Saccharomyces pastorianus
aacatcaagaggtggtgctcggact

SEQ ID NO: 110063 - DNA, 25 bp, Saccharomyces pastorianus
aatccgggaaatggccatgcaatgc

SEQ ID NO: 110064 - DNA, 25 bp, Saccharomyces pastorianus
tattccttcctgttcaattgttgat

SEQ ID NO: 110065 - DNA, 25 bp, Saccharomyces pastorianus
tgcagctcgagaatccttgaagttt

SEQ ID NO: 110066 - DNA, 25 bp, Saccharomyces pastorianus
tgtagattcaatcttgtccaaggac

SEQ ID NO: 110067 - DNA, 25 bp, Saccharomyces pastorianus
tagtgaagatcctcaaatccgggaa

SEQ ID NO: 110068 - DNA, 25 bp, Saccharomyces pastorianus
gaagctgtgactttgaacttttata

SEQ ID NO: 110069 - DNA, 25 bp, Saccharomyces pastorianus
ttggatttccttcaacaaaggcgta

SEQ ID NO: 110070 - DNA, 25 bp, Saccharomyces pastorianus
ttagttgcgagtaaagtcgggcatt

SEQ ID NO: 110071 - DNA, 25 bp, Saccharomyces pastorianus
aaagaaatctttgcaacatctgaag

SEQ ID NO: 110072 - DNA, 25 bp, Saccharomyces pastorianus
aaagtcgggcatttggagttgttga

SEQ ID NO: 110073 - DNA, 25 bp, Saccharomyces pastorianus
aaaatttgagaaaagctgccccatt

SEQ ID NO: 110074 - DNA, 25 bp, Saccharomyces pastorianus
gctgccccattgcaattgaaatcaa

SEQ ID NO: 110075 - DNA, 25 bp, Saccharomyces pastorianus
gaaaccactgaaagattagttgcga

SEQ ID NO: 110076 - DNA, 25 bp, Saccharomyces pastorianus
tgaaaaagagctcttcccttaccga

SEQ ID NO: 110077 - DNA, 25 bp, Saccharomyces pastorianus
atttgagaaaagctgccccattgca

SEQ ID NO: 110078 - DNA, 25 bp, Saccharomyces pastorianus
gaaaagctgccccattgcaattgaa

SEQ ID NO: 110079 - DNA, 25 bp, Saccharomyces pastorianus
tcccttaccgaaaccactgaaagat

SEQ ID NO: 110080 - DNA, 25 bp, Saccharomyces pastorianus
gcatttggagttgttgagaggtact

SEQ ID NO: 110081 - DNA, 25 bp, Saccharomyces pastorianus
aaagtcgccgtcagccatgcgtttt

SEQ ID NO: 110082 - DNA, 25 bp, Saccharomyces pastorianus
catgcgttttactttcgtttgcaaa

SEQ ID NO: 110083 - DNA, 25 bp, Saccharomyces pastorianus
aaggtcaactggatcgttgctcgaa

SEQ ID NO: 110084 - DNA, 25 bp, Saccharomyces pastorianus
caatctttcatttacatggctcaag

SEQ ID NO: 110085 - DNA, 25 bp, Saccharomyces pastorianus
gatcgttgctcgaaagtcgccgtca

SEQ ID NO: 110086 - DNA, 25 bp, Saccharomyces pastorianus
gaccaagattcttaagcttcatcaa

SEQ ID NO: 110087 - DNA, 25 bp, Saccharomyces pastorianus
ttacgtaatgcttcgttgttacaaa

SEQ ID NO: 110088 - DNA, 25 bp, Saccharomyces pastorianus
ggctcaagaagtgttgctgctcaaa

SEQ ID NO: 110089 - DNA, 25 bp, Saccharomyces pastorianus
gtgtatcgtatttagcccgaaatta

SEQ ID NO: 110090 - DNA, 25 bp, Saccharomyces pastorianus
aaaactccttctcttgtgtatcgta

SEQ ID NO: 110091 - DNA, 25 bp, Saccharomyces pastorianus
gcttcatcaatcctttggaactgca

SEQ ID NO: 110092 - DNA, 25 bp, Saccharomyces pastorianus
gtcttactggcacttctcgagcact

SEQ ID NO: 110093 - DNA, 25 bp, Saccharomyces pastorianus
ggaagtcttccaatgctggacttga

SEQ ID NO: 110094 - DNA, 25 bp, Saccharomyces pastorianus
aatagggtgtcgtcttactggcact

SEQ ID NO: 110095 - DNA, 25 bp, Saccharomyces pastorianus
aagagtgttcattggaagtcttcca

SEQ ID NO: 110096 - DNA, 25 bp, Saccharomyces pastorianus
agggtgtcgtcttactggcacttct

SEQ ID NO: 110097 - DNA, 25 bp, Saccharomyces pastorianus
aatgctggacttgaaaaatagggtg

SEQ ID NO: 110098 - DNA, 25 bp, Saccharomyces pastorianus
tgtcgtcttactggcacttctcgag

SEQ ID NO: 110099 - DNA, 25 bp, Saccharomyces pastorianus
tggcacttctcgagcactccggttg

SEQ ID NO: 110100 - DNA, 25 bp, Saccharomyces pastorianus
agtcttccaatgctggacttgaaaa

SEQ ID NO: 110101 - DNA, 25 bp, Saccharomyces pastorianus
aaaatagggtgtcgtcttactggca

SEQ ID NO: 110102 - DNA, 25 bp, Saccharomyces pastorianus
gcacttctcgagcactccggttgcg

SEQ ID NO: 110103 - DNA, 25 bp, Saccharomyces pastorianus
aagttttctacgctggataaattgt

SEQ ID NO: 110104 - DNA, 25 bp, Saccharomyces pastorianus
gacggacgcaacttttctcagaaat

SEQ ID NO: 110105 - DNA, 25 bp, Saccharomyces pastorianus
attctttatgcattacgtttcgcag

SEQ ID NO: 110106 - DNA, 25 bp, Saccharomyces pastorianus
ggaagacttccaatgaacactctta

SEQ ID NO: 110107 - DNA, 25 bp, Saccharomyces pastorianus
cggagtgctcgagaagtgccagtaa

SEQ ID NO: 110108 - DNA, 25 bp, Saccharomyces pastorianus
ggataaattgttctcttccctttga

SEQ ID NO: 110109 - DNA, 25 bp, Saccharomyces pastorianus
gttctcttccctttgaaatatggag

SEQ ID NO: 110110 - DNA, 25 bp, Saccharomyces pastorianus
acaccctatttttcaagtccagcat

SEQ ID NO: 110111 - DNA, 25 bp, Saccharomyces pastorianus
tgccagtaagacgacaccctatttt

SEQ ID NO: 110112 - DNA, 25 bp, Saccharomyces pastorianus
ttattcttctcgcaaccggagtgct

SEQ ID NO: 110113 - DNA, 25 bp, Saccharomyces pastorianus
gtttcgcagtaatcctagaacccta

SEQ ID NO: 110114 - DNA, 25 bp, Saccharomyces pastorianus
acttatattcagcagttccgtcaag

SEQ ID NO: 110115 - DNA, 25 bp, Saccharomyces pastorianus
atcgacgagtgcttggacctatttc

SEQ ID NO: 110116 - DNA, 25 bp, Saccharomyces pastorianus
agtgctcatctacggaattctcttt

SEQ ID NO: 110117 - DNA, 25 bp, Saccharomyces pastorianus
atgtggccttggacaactttacttt

SEQ ID NO: 110118 - DNA, 25 bp, Saccharomyces pastorianus
aacactgaccgcatggtagggaact

SEQ ID NO: 110119 - DNA, 25 bp, Saccharomyces pastorianus
ctcaaagttttggttggcgttcaca

SEQ ID NO: 110120 - DNA, 25 bp, Saccharomyces pastorianus
gaaattaaatcacccgccgacagag

SEQ ID NO: 110121 - DNA, 25 bp, Saccharomyces pastorianus
tacaccgggtttccctctgaataat

SEQ ID NO: 110122 - DNA, 25 bp, Saccharomyces pastorianus
accccagcaattccgattacgatat

SEQ ID NO: 110123 - DNA, 25 bp, Saccharomyces pastorianus
ttcgtgccaattccttcttcaagaa

SEQ ID NO: 110124 - DNA, 25 bp, Saccharomyces pastorianus
caatgattgcctagcccatttgaaa

SEQ ID NO: 110125 - DNA, 25 bp, Saccharomyces pastorianus
atattaggcagtgtcggatgtgtcg

SEQ ID NO: 110126 - DNA, 25 bp, Saccharomyces pastorianus
atgcagcgcttaccaacagtctgtc

SEQ ID NO: 110127 - DNA, 25 bp, Saccharomyces pastorianus
agatggtactgccatgcttccaacg

SEQ ID NO: 110128 - DNA, 25 bp, Saccharomyces pastorianus
acagtctgtcttctttataccgttg

SEQ ID NO: 110129 - DNA, 25 bp, Saccharomyces pastorianus
gaagcctcgccattatattgtctct

SEQ ID NO: 110130 - DNA, 25 bp, Saccharomyces pastorianus
caacgtgatgtggttcatagcacta

SEQ ID NO: 110131 - DNA, 25 bp, Saccharomyces pastorianus
tttttgtcaccaacatgcagcgctt

SEQ ID NO: 110132 - DNA, 25 bp, Saccharomyces pastorianus
tggcgcaattattcaccgtgtagtc

SEQ ID NO: 110133 - DNA, 25 bp, Saccharomyces pastorianus
tgatttctcgaaaccaactttttgt

SEQ ID NO: 110134 - DNA, 25 bp, Saccharomyces pastorianus
attatattgtctctcggctgccttg

SEQ ID NO: 110135 - DNA, 25 bp, Saccharomyces pastorianus
ttataccgttgctttgttccagatg

SEQ ID NO: 110136 - DNA, 25 bp, Saccharomyces pastorianus
gatctacatgaattcgctatcttgc

SEQ ID NO: 110137 - DNA, 25 bp, Saccharomyces pastorianus
gactctcccatggatgcgttaagga

SEQ ID NO: 110138 - DNA, 25 bp, Saccharomyces pastorianus
gtaaactagggttcttgcacatcat

SEQ ID NO: 110139 - DNA, 25 bp, Saccharomyces pastorianus
gctatcttgcataaacatcacggga

SEQ ID NO: 110140 - DNA, 25 bp, Saccharomyces pastorianus
caaaggcagcatggcgcgatctaca

SEQ ID NO: 110141 - DNA, 25 bp, Saccharomyces pastorianus
cagagaagttgttgacggcaggcca

SEQ ID NO: 110142 - DNA, 25 bp, Saccharomyces pastorianus
taaaccttcggtagcgctgcaaaag

SEQ ID NO: 110143 - DNA, 25 bp, Saccharomyces pastorianus
agttactgtatgactctcccatgga

SEQ ID NO: 110144 - DNA, 25 bp, Saccharomyces pastorianus
atttttgggctgctggatcatcacc

SEQ ID NO: 110145 - DNA, 25 bp, Saccharomyces pastorianus
taccccacaaaactacctgattcat

SEQ ID NO: 110146 - DNA, 25 bp, Saccharomyces pastorianus
agttttcccacagacttctataatg

SEQ ID NO: 110147 - DNA, 25 bp, Saccharomyces pastorianus
aggccttcccaatggctttcttaat

SEQ ID NO: 110148 - DNA, 25 bp, Saccharomyces pastorianus
aacaagcctttctcggctaggtatg

SEQ ID NO: 110149 - DNA, 25 bp, Saccharomyces pastorianus
gcctcaaaaggccatctactcaatt

SEQ ID NO: 110150 - DNA, 25 bp, Saccharomyces pastorianus
tcctctacgcacctagtattgacat

SEQ ID NO: 110151 - DNA, 25 bp, Saccharomyces pastorianus
ggatccatggttgctgatgttcaca

SEQ ID NO: 110152 - DNA, 25 bp, Saccharomyces pastorianus
gatgttcacaggacgtttctttacg

SEQ ID NO: 110153 - DNA, 25 bp, Saccharomyces pastorianus
ttccgttggaactatcgcgtctata

SEQ ID NO: 110154 - DNA, 25 bp, Saccharomyces pastorianus
taacaccctttactggaacgagact

SEQ ID NO: 110155 - DNA, 25 bp, Saccharomyces pastorianus
ggcgaattcatcttgactcatccta

SEQ ID NO: 110156 - DNA, 25 bp, Saccharomyces pastorianus
catcctaacttaagaattccgcctc

SEQ ID NO: 110157 - DNA, 25 bp, Saccharomyces pastorianus
tattcagactgctaccagactcatc

SEQ ID NO: 110158 - DNA, 25 bp, Saccharomyces pastorianus
accccaatcatgttgcagagtgcat

SEQ ID NO: 110159 - DNA, 25 bp, Saccharomyces pastorianus
tatctaccccatcaaactcttttat

SEQ ID NO: 110160 - DNA, 25 bp, Saccharomyces pastorianus
atcacatttgttctcggttcatgcg

SEQ ID NO: 110161 - DNA, 25 bp, Saccharomyces pastorianus
agaagatcattccaactgctgctgc

SEQ ID NO: 110162 - DNA, 25 bp, Saccharomyces pastorianus
tgatctctcaaatccttttccagaa

SEQ ID NO: 110163 - DNA, 25 bp, Saccharomyces pastorianus
ggttcatgcgcagtattttccaaga

SEQ ID NO: 110164 - DNA, 25 bp, Saccharomyces pastorianus
ggctccgacctactaggtactttag

SEQ ID NO: 110165 - DNA, 25 bp, Saccharomyces pastorianus
ggcctactacatccaaccattaatg

SEQ ID NO: 110166 - DNA, 25 bp, Saccharomyces pastorianus
aagaccatcgtctacatcacatttg

SEQ ID NO: 110167 - DNA, 25 bp, Saccharomyces pastorianus
gacgtggatcgaaatctccggcact

SEQ ID NO: 110168 - DNA, 25 bp, Saccharomyces pastorianus
tgaagctcttctggaccctatcaag

SEQ ID NO: 110169 - DNA, 25 bp, Saccharomyces pastorianus
tactgccgcgacatatctctgagag

SEQ ID NO: 110170 - DNA, 25 bp, Saccharomyces pastorianus
agtgactgtagtggacctggccaat

SEQ ID NO: 110171 - DNA, 25 bp, Saccharomyces pastorianus
cgctgttaaaagatcccgtcattga

SEQ ID NO: 110172 - DNA, 25 bp, Saccharomyces pastorianus
gtcggttgatttgcaaacgctgtta

SEQ ID NO: 110173 - DNA, 25 bp, Saccharomyces pastorianus
aaaatgcgcaatcttcagggaatga

SEQ ID NO: 110174 - DNA, 25 bp, Saccharomyces pastorianus
gttttgcagcgccaacaaactctag

SEQ ID NO: 110175 - DNA, 25 bp, Saccharomyces pastorianus
aaacgttgtgttattgttgctgcaa

SEQ ID NO: 110176 - DNA, 25 bp, Saccharomyces pastorianus
ggtgcaattatatggccctcaatac

SEQ ID NO: 110177 - DNA, 25 bp, Saccharomyces pastorianus
agggaatgatcaaccagtgactgta

SEQ ID NO: 110178 - DNA, 25 bp, Saccharomyces pastorianus
ggacctggccaattactactacatg

SEQ ID NO: 110179 - DNA, 25 bp, Saccharomyces pastorianus
atggattgcccctcaaacgttgtgt

SEQ ID NO: 110180 - DNA, 25 bp, Saccharomyces pastorianus
gacaaaatttaccttcgcagccaaa

SEQ ID NO: 110181 - DNA, 25 bp, Saccharomyces pastorianus
ttaatacgcagatccgtcgcgaaat

SEQ ID NO: 110182 - DNA, 25 bp, Saccharomyces pastorianus
gagcgcatatggcttctaagcgtca

SEQ ID NO: 110183 - DNA, 25 bp, Saccharomyces pastorianus
atatcacgttggtctcatccgaaaa

SEQ ID NO: 110184 - DNA, 25 bp, Saccharomyces pastorianus
aaaggaggagcgtcagcttttcgcc

SEQ ID NO: 110185 - DNA, 25 bp, Saccharomyces pastorianus
gccaacaggcgctaggctaggtcat

SEQ ID NO: 110186 - DNA, 25 bp, Saccharomyces pastorianus
ttacttccaagctttcatctgtcta

SEQ ID NO: 110187 - DNA, 25 bp, Saccharomyces pastorianus
taactttcatggctccggtttggaa

SEQ ID NO: 110188 - DNA, 25 bp, Saccharomyces pastorianus
catcgtgcgggccagaggtactata

SEQ ID NO: 110189 - DNA, 25 bp, Saccharomyces pastorianus
ctaagcgtcattgcaggctgccata

SEQ ID NO: 110190 - DNA, 25 bp, Saccharomyces pastorianus
ggtttagaacttaccttgccaacag

SEQ ID NO: 110191 - DNA, 25 bp, Saccharomyces pastorianus
cttcccacaccggtttgatcagaaa

SEQ ID NO: 110192 - DNA, 25 bp, Saccharomyces pastorianus
tcgtgtttgttcttcccacaccggt

SEQ ID NO: 110193 - DNA, 25 bp, Saccharomyces pastorianus
gtcgtgtttgttcttcccacaccgg

SEQ ID NO: 110194 - DNA, 25 bp, Saccharomyces pastorianus
ttcttcccacaccggtttgatcaga

SEQ ID NO: 110195 - DNA, 25 bp, Saccharomyces pastorianus
cggtttgatcagaaagtacggctta

SEQ ID NO: 110196 - DNA, 25 bp, Saccharomyces pastorianus
gtacggcttaaacatctgtcgtcaa

SEQ ID NO: 110197 - DNA, 25 bp, Saccharomyces pastorianus
ttgttcttcccacaccggtttgatc

SEQ ID NO: 110198 - DNA, 25 bp, Saccharomyces pastorianus
tgttcttcccacaccggtttgatca

SEQ ID NO: 110199 - DNA, 25 bp, Saccharomyces pastorianus
gttcttcccacaccggtttgatcag

SEQ ID NO: 110200 - DNA, 25 bp, Saccharomyces pastorianus
aaaggctcccgtcaatgtcgtgttt

SEQ ID NO: 110201 - DNA, 25 bp, Saccharomyces pastorianus
tttgttcttcccacaccggtttgat

SEQ ID NO: 110202 - DNA, 25 bp, Saccharomyces pastorianus
atcgcatgccttgtgggagtctaca

SEQ ID NO: 110203 - DNA, 25 bp, Saccharomyces pastorianus
attcccatcccagaatacgacgagg

SEQ ID NO: 110204 - DNA, 25 bp, Saccharomyces pastorianus
gaaacttgagaacggacattcccat

SEQ ID NO: 110205 - DNA, 25 bp, Saccharomyces pastorianus
atggtcactataggtatcgcatgcc

SEQ ID NO: 110206 - DNA, 25 bp, Saccharomyces pastorianus
gaaacgtcaagtccagtgcaatatg

SEQ ID NO: 110207 - DNA, 25 bp, Saccharomyces pastorianus
tgtagtgttattcagtcattcaact

SEQ ID NO: 110208 - DNA, 25 bp, Saccharomyces pastorianus
gtctacacgggcacgagatttttcg

SEQ ID NO: 110209 - DNA, 25 bp, Saccharomyces pastorianus
aagttcacgccatctttatcatcca

SEQ ID NO: 110210 - DNA, 25 bp, Saccharomyces pastorianus
cgagatttttcgagcccattgttat

SEQ ID NO: 110211 - DNA, 25 bp, Saccharomyces pastorianus
ggaaatctgttaaagttcacgccat

SEQ ID NO: 110212 - DNA, 25 bp, Saccharomyces pastorianus
gcccattgttatcgatagattgcgt

SEQ ID NO: 110213 - DNA, 25 bp, Saccharomyces pastorianus
aagctttgttttttcctcatttgat

SEQ ID NO: 110214 - DNA, 25 bp, Saccharomyces pastorianus
tgctctagtgaaaacgcttgctcgt

SEQ ID NO: 110215 - DNA, 25 bp, Saccharomyces pastorianus
aagagttggccgttgaattcagcaa

SEQ ID NO: 110216 - DNA, 25 bp, Saccharomyces pastorianus
caaatctggactttatgacgtgcaa

SEQ ID NO: 110217 - DNA, 25 bp, Saccharomyces pastorianus
tcgaatgttctagaggccaatggcc

SEQ ID NO: 110218 - DNA, 25 bp, Saccharomyces pastorianus
ccaatggccattttccgtcagggaa

SEQ ID NO: 110219 - DNA, 25 bp, Saccharomyces pastorianus
ctggcgccagccattttatttcgaa

SEQ ID NO: 110220 - DNA, 25 bp, Saccharomyces pastorianus
acttgactgaagctgatgcgcgttt

SEQ ID NO: 110221 - DNA, 25 bp, Saccharomyces pastorianus
aattgtttatagctccagtttcata

SEQ ID NO: 110222 - DNA, 25 bp, Saccharomyces pastorianus
gatacgtctttcttgtggaccagca

SEQ ID NO: 110223 - DNA, 25 bp, Saccharomyces pastorianus
gtaacgtccaaatcatcgaggtcaa

SEQ ID NO: 110224 - DNA, 25 bp, Saccharomyces pastorianus
gtagcaatatcatgaccagacctat

SEQ ID NO: 110225 - DNA, 25 bp, Saccharomyces pastorianus
tgtgccaacagatgattagaacgac

SEQ ID NO: 110226 - DNA, 25 bp, Saccharomyces pastorianus
ttacgccttatctcatttcgggttc

SEQ ID NO: 110227 - DNA, 25 bp, Saccharomyces pastorianus
aaagacaccttacgccttatctcat

SEQ ID NO: 110228 - DNA, 25 bp, Saccharomyces pastorianus
ggtcagtacacttcaaagacggtgt

SEQ ID NO: 110229 - DNA, 25 bp, Saccharomyces pastorianus
ttatcatgaagaggtcagtacactt

SEQ ID NO: 110230 - DNA, 25 bp, Saccharomyces pastorianus
gacggtgtgtatgaaaatatcccat

SEQ ID NO: 110231 - DNA, 25 bp, Saccharomyces pastorianus
tggatttgctgttccatttgttgcc

SEQ ID NO: 110232 - DNA, 25 bp, Saccharomyces pastorianus
ggttcttcgctattggatttgctgt

SEQ ID NO: 110233 - DNA, 25 bp, Saccharomyces pastorianus
tgaccagacctattatcatgaagag

SEQ ID NO: 110234 - DNA, 25 bp, Saccharomyces pastorianus
tcatttcgggttcttcgctattgga

SEQ ID NO: 110235 - DNA, 25 bp, Saccharomyces pastorianus
atagagacgggagttccacctctgc

SEQ ID NO: 110236 - DNA, 25 bp, Saccharomyces pastorianus
aagaagcgggcttggctgccataat

SEQ ID NO: 110237 - DNA, 25 bp, Saccharomyces pastorianus
agacacatttacgttggccctccag

SEQ ID NO: 110238 - DNA, 25 bp, Saccharomyces pastorianus
tgtagcggcgacgaatagacctgat

SEQ ID NO: 110239 - DNA, 25 bp, Saccharomyces pastorianus
tccagacgtaaacgcccgcttggaa

SEQ ID NO: 110240 - DNA, 25 bp, Saccharomyces pastorianus
agctgaagttgtgctgctttgtcaa

SEQ ID NO: 110241 - DNA, 25 bp, Saccharomyces pastorianus
atgctgctcttctaaggcctggtag

SEQ ID NO: 110242 - DNA, 25 bp, Saccharomyces pastorianus
agctaatcacgtgctcacatcttta

SEQ ID NO: 110243 - DNA, 25 bp, Saccharomyces pastorianus
gctctgcagctccaagtattatctt

SEQ ID NO: 110244 - DNA, 25 bp, Saccharomyces pastorianus
gagtctggagtcgatcttcatgaat

SEQ ID NO: 110245 - DNA, 25 bp, Saccharomyces pastorianus
agaaattttccgcaaagcacgctct

SEQ ID NO: 110246 - DNA, 25 bp, Saccharomyces pastorianus
aatactgttgttaaccatgagattg

SEQ ID NO: 110247 - DNA, 25 bp, Saccharomyces pastorianus
gccatttgtgatatgcccgcatttg

SEQ ID NO: 110248 - DNA, 25 bp, Saccharomyces pastorianus
ttgccatttgtgatatgcccgcatt

SEQ ID NO: 110249 - DNA, 25 bp, Saccharomyces pastorianus
atatgcccgcatttggaccgttgaa

SEQ ID NO: 110250 - DNA, 25 bp, Saccharomyces pastorianus
gcatttggaccgttgaatttaatac

SEQ ID NO: 110251 - DNA, 25 bp, Saccharomyces pastorianus
gtgatatgcccgcatttggaccgtt

SEQ ID NO: 110252 - DNA, 25 bp, Saccharomyces pastorianus
gcccgcatttggaccgttgaattta

SEQ ID NO: 110253 - DNA, 25 bp, Saccharomyces pastorianus
atgtttcttgccatttgtgatatgc

SEQ ID NO: 110254 - DNA, 25 bp, Saccharomyces pastorianus
ttggaccgttgaatttaatactgtt

SEQ ID NO: 110255 - DNA, 25 bp, Saccharomyces pastorianus
ttcttgccatttgtgatatgcccgc

SEQ ID NO: 110256 - DNA, 25 bp, Saccharomyces pastorianus
atgcccgcatttggaccgttgaatt

SEQ ID NO: 110257 - DNA, 25 bp, Saccharomyces pastorianus
ggattacgattcatggccgaacacg

SEQ ID NO: 110258 - DNA, 25 bp, Saccharomyces pastorianus
gtagaactaggtcatcgcagccggc

SEQ ID NO: 110259 - DNA, 25 bp, Saccharomyces pastorianus
gcaccatctgtactgtatgcttgaa

SEQ ID NO: 110260 - DNA, 25 bp, Saccharomyces pastorianus
ggttgttaagcaatccagcgttatt

SEQ ID NO: 110261 - DNA, 25 bp, Saccharomyces pastorianus
ttttcaattggctcagcaccatctg

SEQ ID NO: 110262 - DNA, 25 bp, Saccharomyces pastorianus
acactggtgcacatggtgtcatggc

SEQ ID NO: 110263 - DNA, 25 bp, Saccharomyces pastorianus
cctttgagttcaagcgttacggcga

SEQ ID NO: 110264 - DNA, 25 bp, Saccharomyces pastorianus
tttggcatgggcgttgaaattcctt

SEQ ID NO: 110265 - DNA, 25 bp, Saccharomyces pastorianus
agccggctaacctggatgcgataaa

SEQ ID NO: 110266 - DNA, 25 bp, Saccharomyces pastorianus
gagtttggtggcttgccttttcaat

SEQ ID NO: 110267 - DNA, 25 bp, Saccharomyces pastorianus
atttgctggatatactacctgccct

SEQ ID NO: 110268 - DNA, 25 bp, Saccharomyces pastorianus
attgtcttgacctttgtgaatctag

SEQ ID NO: 110269 - DNA, 25 bp, Saccharomyces pastorianus
aacgtattgcgctggatcatccaca

SEQ ID NO: 110270 - DNA, 25 bp, Saccharomyces pastorianus
gtggactcctcgcataacatacaat

SEQ ID NO: 110271 - DNA, 25 bp, Saccharomyces pastorianus
tcgtgtttgggcacttactcataca

SEQ ID NO: 110272 - DNA, 25 bp, Saccharomyces pastorianus
ctttgccgccctattagtcagtata

SEQ ID NO: 110273 - DNA, 25 bp, Saccharomyces pastorianus
acatacaatcatgttcttcgcctca

SEQ ID NO: 110274 - DNA, 25 bp, Saccharomyces pastorianus
ttcgcctcacggtatccagaatttt

SEQ ID NO: 110275 - DNA, 25 bp, Saccharomyces pastorianus
ttctttgagttctgctacgctatct

SEQ ID NO: 110276 - DNA, 25 bp, Saccharomyces pastorianus
atcatccacataaggccgctaacgt

SEQ ID NO: 110277 - DNA, 25 bp, Saccharomyces pastorianus
atagggctttggtcgtactgtacag

SEQ ID NO: 110278 - DNA, 25 bp, Saccharomyces pastorianus
gggcctgccctcatatataaatata

SEQ ID NO: 110279 - DNA, 25 bp, Saccharomyces pastorianus
ctcggtatttttagcgcttctcgca

SEQ ID NO: 110280 - DNA, 25 bp, Saccharomyces pastorianus
gctcttccatgtctcagtagtcaat

SEQ ID NO: 110281 - DNA, 25 bp, Saccharomyces pastorianus
agtagtcaatgagtgtccagtggtg

SEQ ID NO: 110282 - DNA, 25 bp, Saccharomyces pastorianus
acgcctcgagcgttatttccaaatc

SEQ ID NO: 110283 - DNA, 25 bp, Saccharomyces pastorianus
aatcgggcgtactatcagccaagcc

SEQ ID NO: 110284 - DNA, 25 bp, Saccharomyces pastorianus
aaaaaaggacgcagcacgcctcgag

SEQ ID NO: 110285 - DNA, 25 bp, Saccharomyces pastorianus
tagcgcttctcgcaggaaaattggc

SEQ ID NO: 110286 - DNA, 25 bp, Saccharomyces pastorianus
gttatttccaaatcgggcgtactat

SEQ ID NO: 110287 - DNA, 25 bp, Saccharomyces pastorianus
cagatagccgccgttgaatggtgcg

SEQ ID NO: 110288 - DNA, 25 bp, Saccharomyces pastorianus
gaatgttgctcttccatgtctcagt

SEQ ID NO: 110289 - DNA, 25 bp, Saccharomyces pastorianus
tgaatggtgcgggacaacccggcct

SEQ ID NO: 110290 - DNA, 25 bp, Saccharomyces pastorianus
ggacagagttgtcgctatcttcact

SEQ ID NO: 110291 - DNA, 25 bp, Saccharomyces pastorianus
acaaatggttcatcaggtggccctc

SEQ ID NO: 110292 - DNA, 25 bp, Saccharomyces pastorianus
aattattttgattccttcggctgcg

SEQ ID NO: 110293 - DNA, 25 bp, Saccharomyces pastorianus
ggccctcgcaaagatccaattattt

SEQ ID NO: 110294 - DNA, 25 bp, Saccharomyces pastorianus
caacgctgcaaaggctactatttcc

SEQ ID NO: 110295 - DNA, 25 bp, Saccharomyces pastorianus
gctatcttcactactggtcatacgt

SEQ ID NO: 110296 - DNA, 25 bp, Saccharomyces pastorianus
tgaatcctcgtaacttaccgtcagt

SEQ ID NO: 110297 - DNA, 25 bp, Saccharomyces pastorianus
gcgcacggtcgtatttccaaaacaa

SEQ ID NO: 110298 - DNA, 25 bp, Saccharomyces pastorianus
tactatttccatttcgccggtgatt

SEQ ID NO: 110299 - DNA, 25 bp, Saccharomyces pastorianus
gatctaaattgcctcccggtcataa

SEQ ID NO: 110300 - DNA, 25 bp, Saccharomyces pastorianus
ttcggctgcgtcatcaattttaact

SEQ ID NO: 110301 - DNA, 25 bp, Saccharomyces pastorianus
ggaagcctttttgccagccttgaaa

SEQ ID NO: 110302 - DNA, 25 bp, Saccharomyces pastorianus
aattctggaacactgcactagcgag

SEQ ID NO: 110303 - DNA, 25 bp, Saccharomyces pastorianus
tcacaatcttttgcgatcccttata

SEQ ID NO: 110304 - DNA, 25 bp, Saccharomyces pastorianus
aagggccctagtcaaagctgctgta

SEQ ID NO: 110305 - DNA, 25 bp, Saccharomyces pastorianus
gatcccttatatcgcccaagttttt

SEQ ID NO: 110306 - DNA, 25 bp, Saccharomyces pastorianus
aacggctcatcacttatttttaaca

SEQ ID NO: 110307 - DNA, 25 bp, Saccharomyces pastorianus
gccactgacgtaaaggttgctgcca

SEQ ID NO: 110308 - DNA, 25 bp, Saccharomyces pastorianus
tatccctcaggttatcagcgatggc

SEQ ID NO: 110309 - DNA, 25 bp, Saccharomyces pastorianus
ttcagcacctcatcctgtacaaaat

SEQ ID NO: 110310 - DNA, 25 bp, Saccharomyces pastorianus
ggttgctgccacattaacggctcat

SEQ ID NO: 110311 - DNA, 25 bp, Saccharomyces pastorianus
gggtgtttgcgcaggagtttactca

SEQ ID NO: 110312 - DNA, 25 bp, Saccharomyces pastorianus
aattcctggagagactatgtgggtt

SEQ ID NO: 110313 - DNA, 25 bp, Saccharomyces pastorianus
attttgggatttcgagtggcgtcca

SEQ ID NO: 110314 - DNA, 25 bp, Saccharomyces pastorianus
tacgccaattccagttcagggtgaa

SEQ ID NO: 110315 - DNA, 25 bp, Saccharomyces pastorianus
gaagattcacgtctatgtacgccaa

SEQ ID NO: 110316 - DNA, 25 bp, Saccharomyces pastorianus
tttgcccttaaatgaattgagtgcg

SEQ ID NO: 110317 - DNA, 25 bp, Saccharomyces pastorianus
tcagggctggtgtttgtgaatacaa

SEQ ID NO: 110318 - DNA, 25 bp, Saccharomyces pastorianus
cggtcgggagggaacttgattctat

SEQ ID NO: 110319 - DNA, 25 bp, Saccharomyces pastorianus
gaagaactcaggtaatttgccctta

SEQ ID NO: 110320 - DNA, 25 bp, Saccharomyces pastorianus
tggcgtccaacggaaaagccggtcg

SEQ ID NO: 110321 - DNA, 25 bp, Saccharomyces pastorianus
aaggtacttcttttggctgcaagag

SEQ ID NO: 110322 - DNA, 25 bp, Saccharomyces pastorianus
tgctttagttttttcatccaacgaa

SEQ ID NO: 110323 - DNA, 25 bp, Saccharomyces pastorianus
gttcctttatttgagatccgaaacg

SEQ ID NO: 110324 - DNA, 25 bp, Saccharomyces pastorianus
aatggcatctttatagtacagtgga

SEQ ID NO: 110325 - DNA, 25 bp, Saccharomyces pastorianus
gctatgtctcataggtaccaccttg

SEQ ID NO: 110326 - DNA, 25 bp, Saccharomyces pastorianus
gaaacacaagtgaccgacgatatta

SEQ ID NO: 110327 - DNA, 25 bp, Saccharomyces pastorianus
taggtacactcaactgccatatgga

SEQ ID NO: 110328 - DNA, 25 bp, Saccharomyces pastorianus
gaatacggtatttgagcactcttta

SEQ ID NO: 110329 - DNA, 25 bp, Saccharomyces pastorianus
gagaccaagattgtatagttccttt

SEQ ID NO: 110330 - DNA, 25 bp, Saccharomyces pastorianus
aagttagcagctctttcaaggatgt

SEQ ID NO: 110331 - DNA, 25 bp, Saccharomyces pastorianus
tactgtacaaaatattccgcttgga

SEQ ID NO: 110332 - DNA, 25 bp, Saccharomyces pastorianus
agcgaacaagaacctacctatactg

SEQ ID NO: 110333 - DNA, 25 bp, Saccharomyces pastorianus
ggtaccaccttgataaatctacatt

SEQ ID NO: 110334 - DNA, 25 bp, Saccharomyces pastorianus
tgtcacagattcgacggattctcct

SEQ ID NO: 110335 - DNA, 25 bp, Saccharomyces pastorianus
gagattgcccttttagacttggact

SEQ ID NO: 110336 - DNA, 25 bp, Saccharomyces pastorianus
ggaaaatggcaattctctcaagttt

SEQ ID NO: 110337 - DNA, 25 bp, Saccharomyces pastorianus
gtcaccttccaatcggcactgagat

SEQ ID NO: 110338 - DNA, 25 bp, Saccharomyces pastorianus
aatccattgtaagctcttccatacc

SEQ ID NO: 110339 - DNA, 25 bp, Saccharomyces pastorianus
aacggagcaattgattcgccgctac

SEQ ID NO: 110340 - DNA, 25 bp, Saccharomyces pastorianus
ggaatttctatgctgggtccaccga

SEQ ID NO: 110341 - DNA, 25 bp, Saccharomyces pastorianus
ttacgaacagtttgctcatgagcta

SEQ ID NO: 110342 - DNA, 25 bp, Saccharomyces pastorianus
ggattctcctcctacaagtaatggt

SEQ ID NO: 110343 - DNA, 25 bp, Saccharomyces pastorianus
catacctctcaactccttaggaatt

SEQ ID NO: 110344 - DNA, 25 bp, Saccharomyces pastorianus
aaattcctgctctactcctcaaaag

SEQ ID NO: 110345 - DNA, 25 bp, Saccharomyces pastorianus
gccgcttggccaaagacgtgtctat

SEQ ID NO: 110346 - DNA, 25 bp, Saccharomyces pastorianus
gagtgtatcttttatccctttttca

SEQ ID NO: 110347 - DNA, 25 bp, Saccharomyces pastorianus
tccctttttcactgtactcttttga

SEQ ID NO: 110348 - DNA, 25 bp, Saccharomyces pastorianus
aacaaattttccactcatcttgcgc

SEQ ID NO: 110349 - DNA, 25 bp, Saccharomyces pastorianus
tccagaggcattccaattcacagca

SEQ ID NO: 110350 - DNA, 25 bp, Saccharomyces pastorianus
catgcattgttggtcactttgagtt

SEQ ID NO: 110351 - DNA, 25 bp, Saccharomyces pastorianus
tgcagttcctttttggccgcttggc

SEQ ID NO: 110352 - DNA, 25 bp, Saccharomyces pastorianus
gcaagttggagtcccatgcattgtt

SEQ ID NO: 110353 - DNA, 25 bp, Saccharomyces pastorianus
cttgcgcccttctaagtggagtgta

SEQ ID NO: 110354 - DNA, 25 bp, Saccharomyces pastorianus
gagtttttcatactgcagttccttt

SEQ ID NO: 110355 - DNA, 25 bp, Saccharomyces pastorianus
tttaccattcgtttttagcaagttg

SEQ ID NO: 110356 - DNA, 25 bp, Saccharomyces pastorianus
atccgcggcaaagacatcacctaag

SEQ ID NO: 110357 - DNA, 25 bp, Saccharomyces pastorianus
gttaacaacgccgaagatccgtcta

SEQ ID NO: 110358 - DNA, 25 bp, Saccharomyces pastorianus
cattgggtctaaaacagtctgtcga

SEQ ID NO: 110359 - DNA, 25 bp, Saccharomyces pastorianus
aagacagccattactgccagcagta

SEQ ID NO: 110360 - DNA, 25 bp, Saccharomyces pastorianus
gctcctatcaaaatcgaaaccccag

SEQ ID NO: 110361 - DNA, 25 bp, Saccharomyces pastorianus
tccttcttcaattacggctgctaag

SEQ ID NO: 110362 - DNA, 25 bp, Saccharomyces pastorianus
aagatccgtctagggatacctccgg

SEQ ID NO: 110363 - DNA, 25 bp, Saccharomyces pastorianus
tgagaaaacaaagtcccctgagcag

SEQ ID NO: 110364 - DNA, 25 bp, Saccharomyces pastorianus
tcctcatcttctacaatcaaccatg

SEQ ID NO: 110365 - DNA, 25 bp, Saccharomyces pastorianus
aaaggatcgcacacctaaggtcgaa

SEQ ID NO: 110366 - DNA, 25 bp, Saccharomyces pastorianus
gaagccagagccagtgtctatcgca

SEQ ID NO: 110367 - DNA, 25 bp, Saccharomyces pastorianus
aagatgggtcaagcgcactaccttc

SEQ ID NO: 110368 - DNA, 25 bp, Saccharomyces pastorianus
gaaagtaccactccacaagatgggt

SEQ ID NO: 110369 - DNA, 25 bp, Saccharomyces pastorianus
aatgagtcttctaccgtactaacgc

SEQ ID NO: 110370 - DNA, 25 bp, Saccharomyces pastorianus
aaccaaacttcggagcagcagcaac

SEQ ID NO: 110371 - DNA, 25 bp, Saccharomyces pastorianus
gcgcactaccttctaaaccaattga

SEQ ID NO: 110372 - DNA, 25 bp, Saccharomyces pastorianus
agcagcaactccaaaatacctccaa

SEQ ID NO: 110373 - DNA, 25 bp, Saccharomyces pastorianus
tccctcattcttggttgctagcaaa

SEQ ID NO: 110374 - DNA, 25 bp, Saccharomyces pastorianus
gttgctagcaaatcgccaccaaaga

SEQ ID NO: 110375 - DNA, 25 bp, Saccharomyces pastorianus
agggacgtactttcgaaagcttgtg

SEQ ID NO: 110376 - DNA, 25 bp, Saccharomyces pastorianus
ataaccttcttgactcttctgatga

SEQ ID NO: 110377 - DNA, 25 bp, Saccharomyces pastorianus
tattcaatttaaggctgtccagcgc

SEQ ID NO: 110378 - DNA, 25 bp, Saccharomyces pastorianus
aatgcatctacctcccgttactttt

SEQ ID NO: 110379 - DNA, 25 bp, Saccharomyces pastorianus
ccgaatcagacagtgttttggtcgc

SEQ ID NO: 110380 - DNA, 25 bp, Saccharomyces pastorianus
ttccgaatcagacagtgttttggtc

SEQ ID NO: 110381 - DNA, 25 bp, Saccharomyces pastorianus
ggtaatgcatctacctcccgttact

SEQ ID NO: 110382 - DNA, 25 bp, Saccharomyces pastorianus
taatgcatctacctcccgttacttt

SEQ ID NO: 110383 - DNA, 25 bp, Saccharomyces pastorianus
aaggtaatgcatctacctcccgtta

SEQ ID NO: 110384 - DNA, 25 bp, Saccharomyces pastorianus
aaaggtaatgcatctacctcccgtt

SEQ ID NO: 110385 - DNA, 25 bp, Saccharomyces pastorianus
aggtaatgcatctacctcccgttac

SEQ ID NO: 110386 - DNA, 25 bp, Saccharomyces pastorianus
gtaatgcatctacctcccgttactt

SEQ ID NO: 110387 - DNA, 25 bp, Saccharomyces pastorianus
cgaatcagacagtgttttggtcgca

SEQ ID NO: 110388 - DNA, 25 bp, Saccharomyces pastorianus
atgcatctacctcccgttacttttc

SEQ ID NO: 110389 - DNA, 25 bp, Saccharomyces pastorianus
gacattggttacaagtccctaactt

SEQ ID NO: 110390 - DNA, 25 bp, Saccharomyces pastorianus
agacattggttacaagtccctaact

SEQ ID NO: 110391 - DNA, 25 bp, Saccharomyces pastorianus
tactgaatctcctggtgaatatttc

SEQ ID NO: 110392 - DNA, 25 bp, Saccharomyces pastorianus
gtcaagacattggttacaagtccct

SEQ ID NO: 110393 - DNA, 25 bp, Saccharomyces pastorianus
ctgaatctcctggtgaatatttcta

SEQ ID NO: 110394 - DNA, 25 bp, Saccharomyces pastorianus
gttagctggtactactgaatctcct

SEQ ID NO: 110395 - DNA, 25 bp, Saccharomyces pastorianus
caagacattggttacaagtccctaa

SEQ ID NO: 110396 - DNA, 25 bp, Saccharomyces pastorianus
gttcaggctctatttgtatcactca

SEQ ID NO: 110397 - DNA, 25 bp, Saccharomyces pastorianus
attggtatgggttcaggctctattt

SEQ ID NO: 110398 - DNA, 25 bp, Saccharomyces pastorianus
actgaatctcctggtgaatatttct

SEQ ID NO: 110399 - DNA, 25 bp, Saccharomyces pastorianus
tgaatctcctggtgaatatttctat

SEQ ID NO: 110400 - DNA, 25 bp, Saccharomyces pastorianus
tggtgctctagctcgtgggactgaa

SEQ ID NO: 110401 - DNA, 25 bp, Saccharomyces pastorianus
aaattaccaccatctttatcggagg

SEQ ID NO: 110402 - DNA, 25 bp, Saccharomyces pastorianus
gttgcctgattttatggacgtcttc

SEQ ID NO: 110403 - DNA, 25 bp, Saccharomyces pastorianus
accccatctggtgaaaaggcgtcat

SEQ ID NO: 110404 - DNA, 25 bp, Saccharomyces pastorianus
gagcaggaacttgacccagaatcgg

SEQ ID NO: 110405 - DNA, 25 bp, Saccharomyces pastorianus
gcaactaaggagaccggcaccccat

SEQ ID NO: 110406 - DNA, 25 bp, Saccharomyces pastorianus
ggtgtcttacctcgtggtgctctag

SEQ ID NO: 110407 - DNA, 25 bp, Saccharomyces pastorianus
aaaactatgaatgccggtgtcttac

SEQ ID NO: 110408 - DNA, 25 bp, Saccharomyces pastorianus
gaatcggaacccaaagctgcggagg

SEQ ID NO: 110409 - DNA, 25 bp, Saccharomyces pastorianus
tggtcactaccttttgttggcgaaa

SEQ ID NO: 110410 - DNA, 25 bp, Saccharomyces pastorianus
acatcaggcagtttcacatgtctcc

SEQ ID NO: 110411 - DNA, 25 bp, Saccharomyces pastorianus
agaaatgggacgtcgcggaacctgc

SEQ ID NO: 110412 - DNA, 25 bp, Saccharomyces pastorianus
ttccgcaatttacaaggtcgccctt

SEQ ID NO: 110413 - DNA, 25 bp, Saccharomyces pastorianus
tatgcgaatcagacagcgggtcgac

SEQ ID NO: 110414 - DNA, 25 bp, Saccharomyces pastorianus
gacgcacaactggaatgggcaagca

SEQ ID NO: 110415 - DNA, 25 bp, Saccharomyces pastorianus
gctaccacctatgctgataaaccag

SEQ ID NO: 110416 - DNA, 25 bp, Saccharomyces pastorianus
gttatgcatcgaggacgccgagcac

SEQ ID NO: 110417 - DNA, 25 bp, Saccharomyces pastorianus
aagcagcctcgtcccaaagagacag

SEQ ID NO: 110418 - DNA, 25 bp, Saccharomyces pastorianus
agcgggtcgaccagggttatgcatc

SEQ ID NO: 110419 - DNA, 25 bp, Saccharomyces pastorianus
gcttcactacatccgggtgtcatta

SEQ ID NO: 110420 - DNA, 25 bp, Saccharomyces pastorianus
aggatttccacaaggaccagttgat

SEQ ID NO: 110421 - DNA, 25 bp, Saccharomyces pastorianus
actcgagcgttattgttccgcaatt

SEQ ID NO: 110422 - DNA, 25 bp, Saccharomyces pastorianus
tttccttggaggagagggtagcttc

SEQ ID NO: 110423 - DNA, 25 bp, Saccharomyces pastorianus
tagccttgtgaaaaacgacgggcaa

SEQ ID NO: 110424 - DNA, 25 bp, Saccharomyces pastorianus
ttgttttcccattcaatggtttcct

SEQ ID NO: 110425 - DNA, 25 bp, Saccharomyces pastorianus
gggtcccacacatgtgcgcccttag

SEQ ID NO: 110426 - DNA, 25 bp, Saccharomyces pastorianus
tcgaggtacagcttaccctccgggt

SEQ ID NO: 110427 - DNA, 25 bp, Saccharomyces pastorianus
gaagtcgaggtacagcttaccctcc

SEQ ID NO: 110428 - DNA, 25 bp, Saccharomyces pastorianus
gcaatggccctggttgacggcagaa

SEQ ID NO: 110429 - DNA, 25 bp, Saccharomyces pastorianus
tgcgcccttagccttgtgaaaaacg

SEQ ID NO: 110430 - DNA, 25 bp, Saccharomyces pastorianus
taagcgctcaggaagtcgaggtaca

SEQ ID NO: 110431 - DNA, 25 bp, Saccharomyces pastorianus
ggttgacggcagaataagcgctcag

SEQ ID NO: 110432 - DNA, 25 bp, Saccharomyces pastorianus
tagcttcggacattggtgttgtggt

SEQ ID NO: 110433 - DNA, 25 bp, Saccharomyces pastorianus
tcacggttctactttcggcggtaat

SEQ ID NO: 110434 - DNA, 25 bp, Saccharomyces pastorianus
gatgaaggatcacggcctcttggct

SEQ ID NO: 110435 - DNA, 25 bp, Saccharomyces pastorianus
atgccgtaagcacaacgtcctattg

SEQ ID NO: 110436 - DNA, 25 bp, Saccharomyces pastorianus
agaccgcttgggacttgtgtctatt

SEQ ID NO: 110437 - DNA, 25 bp, Saccharomyces pastorianus
tagaaccggtgagttgctttgctac

SEQ ID NO: 110438 - DNA, 25 bp, Saccharomyces pastorianus
aaaggtctccgcattatgccgtaag

SEQ ID NO: 110439 - DNA, 25 bp, Saccharomyces pastorianus
atcgcccaattgaaagctctccaag

SEQ ID NO: 110440 - DNA, 25 bp, Saccharomyces pastorianus
ggtaaggctctctcaggtggtgttc

SEQ ID NO: 110441 - DNA, 25 bp, Saccharomyces pastorianus
tcatgtgttctgtcttctcacgaca

SEQ ID NO: 110442 - DNA, 25 bp, Saccharomyces pastorianus
atcatgtcttgctttaccccaggat

SEQ ID NO: 110443 - DNA, 25 bp, Saccharomyces pastorianus
gtggtatgggactgcttaccgccat

SEQ ID NO: 110444 - DNA, 25 bp, Saccharomyces pastorianus
actcaatctcgatgagagggtgtac

SEQ ID NO: 110445 - DNA, 25 bp, Saccharomyces pastorianus
agtgactctaatcagcacgccctct

SEQ ID NO: 110446 - DNA, 25 bp, Saccharomyces pastorianus
aacgaagagttgagtgagtccgaaa

SEQ ID NO: 110447 - DNA, 25 bp, Saccharomyces pastorianus
gagaccatataccaattaaacaacg

SEQ ID NO: 110448 - DNA, 25 bp, Saccharomyces pastorianus
tggtgggcacactgcaagcgttcga

SEQ ID NO: 110449 - DNA, 25 bp, Saccharomyces pastorianus
actgcaagcgttcgactcacactgc

SEQ ID NO: 110450 - DNA, 25 bp, Saccharomyces pastorianus
gaaatggtgttcatcagaggagaca

SEQ ID NO: 110451 - DNA, 25 bp, Saccharomyces pastorianus
gagacacctttggatttattgaaac

SEQ ID NO: 110452 - DNA, 25 bp, Saccharomyces pastorianus
ggagacacagtgactctaatcagca

SEQ ID NO: 110453 - DNA, 25 bp, Saccharomyces pastorianus
tgctgagtgatgcagtagagaccat

SEQ ID NO: 110454 - DNA, 25 bp, Saccharomyces pastorianus
caggacgctggtgggcacactgcaa

SEQ ID NO: 110455 - DNA, 25 bp, Saccharomyces pastorianus
tactttggccaacgattacttcttg

SEQ ID NO: 110456 - DNA, 25 bp, Saccharomyces pastorianus
ttgctcgcgaaaaccatctcttgaa

SEQ ID NO: 110457 - DNA, 25 bp, Saccharomyces pastorianus
agcgcttcacgcgaatttttacagg

SEQ ID NO: 110458 - DNA, 25 bp, Saccharomyces pastorianus
gacattaacttcatcgacgggatca

SEQ ID NO: 110459 - DNA, 25 bp, Saccharomyces pastorianus
aagagagctggcctatagcgcttca

SEQ ID NO: 110460 - DNA, 25 bp, Saccharomyces pastorianus
aagaggcttgtgtcgccatcaaaga

SEQ ID NO: 110461 - DNA, 25 bp, Saccharomyces pastorianus
ttggctccacgcatgacgaattcag

SEQ ID NO: 110462 - DNA, 25 bp, Saccharomyces pastorianus
attccagttggccattttcggcata

SEQ ID NO: 110463 - DNA, 25 bp, Saccharomyces pastorianus
gtgagctctctaactctatcagaac

SEQ ID NO: 110464 - DNA, 25 bp, Saccharomyces pastorianus
actacagcggttcaaggactccaac

SEQ ID NO: 110465 - DNA, 25 bp, Saccharomyces pastorianus
gatatccctgatgacgaagtcgcct

SEQ ID NO: 110466 - DNA, 25 bp, Saccharomyces pastorianus
agaagcgggccaacatatgatgaag

SEQ ID NO: 110467 - DNA, 25 bp, Saccharomyces pastorianus
cgggatttacgatagcttatccatt

SEQ ID NO: 110468 - DNA, 25 bp, Saccharomyces pastorianus
tacgaattgggcaagcaagcgtttg

SEQ ID NO: 110469 - DNA, 25 bp, Saccharomyces pastorianus
gaacccgcgattgtataaggatctg

SEQ ID NO: 110470 - DNA, 25 bp, Saccharomyces pastorianus
aacttattagagctgaacccgcgat

SEQ ID NO: 110471 - DNA, 25 bp, Saccharomyces pastorianus
ggcgcaagggataccgctttcaaac

SEQ ID NO: 110472 - DNA, 25 bp, Saccharomyces pastorianus
gattttggcacagcatacgaattgg

SEQ ID NO: 110473 - DNA, 25 bp, Saccharomyces pastorianus
catattgactatgccttggtgaatt

SEQ ID NO: 110474 - DNA, 25 bp, Saccharomyces pastorianus
ggatctgccaactacaaaaagcttg

SEQ ID NO: 110475 - DNA, 25 bp, Saccharomyces pastorianus
tatccattaatagagagggccaaac

SEQ ID NO: 110476 - DNA, 25 bp, Saccharomyces pastorianus
taagtcgcacaatggcgcaagggat

SEQ ID NO: 110477 - DNA, 25 bp, Saccharomyces pastorianus
cttggctgacttacagggttctgaa

SEQ ID NO: 110478 - DNA, 25 bp, Saccharomyces pastorianus
attgaaaacgccaccaaggacattt

SEQ ID NO: 110479 - DNA, 25 bp, Saccharomyces pastorianus
gaagagtgcttcagatgctttgaaa

SEQ ID NO: 110480 - DNA, 25 bp, Saccharomyces pastorianus
cgaagtttgcttggctgacttacag

SEQ ID NO: 110481 - DNA, 25 bp, Saccharomyces pastorianus
gttatttccgaaatcttgactaagg

SEQ ID NO: 110482 - DNA, 25 bp, Saccharomyces pastorianus
tttgcttggctgacttacagggttc

SEQ ID NO: 110483 - DNA, 25 bp, Saccharomyces pastorianus
agtgcttcagatgctttgaaaggta

SEQ ID NO: 110484 - DNA, 25 bp, Saccharomyces pastorianus
cgaagtccaaggtaagaatttattg

SEQ ID NO: 110485 - DNA, 25 bp, Saccharomyces pastorianus
tgaaaacgccaccaaggacattttc

SEQ ID NO: 110486 - DNA, 25 bp, Saccharomyces pastorianus
tccgaaatcttgactaaggaagttc

SEQ ID NO: 110487 - DNA, 25 bp, Saccharomyces pastorianus
gactaaggaagttcaaggatctacc

SEQ ID NO: 110488 - DNA, 25 bp, Saccharomyces pastorianus
aattagttgttgtggtgctcgagga

SEQ ID NO: 110489 - DNA, 25 bp, Saccharomyces pastorianus
gacaacccagggtacaaggcgtcaa

SEQ ID NO: 110490 - DNA, 25 bp, Saccharomyces pastorianus
aacatttttatataccctggcgcaa

SEQ ID NO: 110491 - DNA, 25 bp, Saccharomyces pastorianus
cctgggagcccgcaataactataga

SEQ ID NO: 110492 - DNA, 25 bp, Saccharomyces pastorianus
aatcgtcatacgcttgctctggaga

SEQ ID NO: 110493 - DNA, 25 bp, Saccharomyces pastorianus
gctctggagaccgtcctgattaaga

SEQ ID NO: 110494 - DNA, 25 bp, Saccharomyces pastorianus
aataaattacgccttttcgatggat

SEQ ID NO: 110495 - DNA, 25 bp, Saccharomyces pastorianus
tcgaggagcccagtgcaagcattat

SEQ ID NO: 110496 - DNA, 25 bp, Saccharomyces pastorianus
atggtaccacgctatttctcagaag

SEQ ID NO: 110497 - DNA, 25 bp, Saccharomyces pastorianus
gtgaagctgccgtagaaatttctaa

SEQ ID NO: 110498 - DNA, 25 bp, Saccharomyces pastorianus
gaaaccgaaggcacgaatcgtcata

SEQ ID NO: 110499 - DNA, 25 bp, Saccharomyces pastorianus
gaaatcactcatttgatccgggaat

SEQ ID NO: 110500 - DNA, 25 bp, Saccharomyces pastorianus
ggacgtgaccaacaatataccaagt

SEQ ID NO: 110501 - DNA, 25 bp, Saccharomyces pastorianus
tccgggaatcgtacaaagacctctc

SEQ ID NO: 110502 - DNA, 25 bp, Saccharomyces pastorianus
ttagccgccgaatggcaaatcaaca

SEQ ID NO: 110503 - DNA, 25 bp, Saccharomyces pastorianus
aagacctctccagtcaagatgggat

SEQ ID NO: 110504 - DNA, 25 bp, Saccharomyces pastorianus
aactcatcaaaaagtccggacgtga

SEQ ID NO: 110505 - DNA, 25 bp, Saccharomyces pastorianus
gaaaccttccaaaaccatatcctgg

SEQ ID NO: 110506 - DNA, 25 bp, Saccharomyces pastorianus
gtgatactacggaagtccctaggca

SEQ ID NO: 110507 - DNA, 25 bp, Saccharomyces pastorianus
gaagtccctaggcaatcatctgaga

SEQ ID NO: 110508 - DNA, 25 bp, Saccharomyces pastorianus
gttttgtactgttcctgtaaacatt

SEQ ID NO: 110509 - DNA, 25 bp, Saccharomyces pastorianus
aagtcttgtcaaattagccgccgaa

SEQ ID NO: 110510 - DNA, 25 bp, Saccharomyces pastorianus
tcatattggctacgttggatccttt

SEQ ID NO: 110511 - DNA, 25 bp, Saccharomyces pastorianus
gactctactaatgcttggttcgaaa

SEQ ID NO: 110512 - DNA, 25 bp, Saccharomyces pastorianus
gcaaccgtttgacattcatggagca

SEQ ID NO: 110513 - DNA, 25 bp, Saccharomyces pastorianus
acggatatttaccacctttcaagag

SEQ ID NO: 110514 - DNA, 25 bp, Saccharomyces pastorianus
taatttgtcagatcgcacggctatt

SEQ ID NO: 110515 - DNA, 25 bp, Saccharomyces pastorianus
gagccgcattttatgttgctgcaat

SEQ ID NO: 110516 - DNA, 25 bp, Saccharomyces pastorianus
ttacttctggtaaatggcttcccct

SEQ ID NO: 110517 - DNA, 25 bp, Saccharomyces pastorianus
ggatcctttctccacaattcaaatt

SEQ ID NO: 110518 - DNA, 25 bp, Saccharomyces pastorianus
gccagctggcagaagactctactaa

SEQ ID NO: 110519 - DNA, 25 bp, Saccharomyces pastorianus
tgccactagagtgcgttacttctgg

SEQ ID NO: 110520 - DNA, 25 bp, Saccharomyces pastorianus
agtaatcttctaggcgctgcaatag

SEQ ID NO: 110521 - DNA, 25 bp, Saccharomyces pastorianus
actggcaccttacttcaaaaactgt

SEQ ID NO: 110522 - DNA, 25 bp, Saccharomyces pastorianus
tcttgcaacgtttcacttggcgcaa

SEQ ID NO: 110523 - DNA, 25 bp, Saccharomyces pastorianus
aaaactgttttgacacggcagagga

SEQ ID NO: 110524 - DNA, 25 bp, Saccharomyces pastorianus
gtattggtggataccccactggcac

SEQ ID NO: 110525 - DNA, 25 bp, Saccharomyces pastorianus
ttgcccacgttaagtgttgctactg

SEQ ID NO: 110526 - DNA, 25 bp, Saccharomyces pastorianus
gaagatcacttttaccaattggaaa

SEQ ID NO: 110527 - DNA, 25 bp, Saccharomyces pastorianus
ggcgcaagcccaagatttcgaagga

SEQ ID NO: 110528 - DNA, 25 bp, Saccharomyces pastorianus
gaagaaattccggaacctgctaaag

SEQ ID NO: 110529 - DNA, 25 bp, Saccharomyces pastorianus
gcaacaatttgccatcagcactgtt

SEQ ID NO: 110530 - DNA, 25 bp, Saccharomyces pastorianus
aactatgtagagatgctttcacgca

SEQ ID NO: 110531 - DNA, 25 bp, Saccharomyces pastorianus
aggtaagttgtaccctcttgcaacg

SEQ ID NO: 110532 - DNA, 25 bp, Saccharomyces pastorianus
cgtatgcctacggtaaacaagcttt

SEQ ID NO: 110533 - DNA, 25 bp, Saccharomyces pastorianus
gaaagtcgtcttgatgaattagtcg

SEQ ID NO: 110534 - DNA, 25 bp, Saccharomyces pastorianus
gacgaagctactggaaggcggtatt

SEQ ID NO: 110535 - DNA, 25 bp, Saccharomyces pastorianus
gaaagtgctaaacctgccgagaaaa

SEQ ID NO: 110536 - DNA, 25 bp, Saccharomyces pastorianus
gcgtcacaggaaaaggcccacatgc

SEQ ID NO: 110537 - DNA, 25 bp, Saccharomyces pastorianus
tagaattgtcattcctgctccgtat

SEQ ID NO: 110538 - DNA, 25 bp, Saccharomyces pastorianus
aagttccggtgatgacgatcttgat

SEQ ID NO: 110539 - DNA, 25 bp, Saccharomyces pastorianus
taaacaagctttgcccggtattcct

SEQ ID NO: 110540 - DNA, 25 bp, Saccharomyces pastorianus
tatcattgaagaccgcgtcacagga

SEQ ID NO: 110541 - DNA, 25 bp, Saccharomyces pastorianus
ccggtattcctgctaactctgaatt

SEQ ID NO: 110542 - DNA, 25 bp, Saccharomyces pastorianus
ttgggccaaggcgaagtaattaaag

SEQ ID NO: 110543 - DNA, 25 bp, Saccharomyces pastorianus
gaatcacccaattccatcatggcag

SEQ ID NO: 110544 - DNA, 25 bp, Saccharomyces pastorianus
aatgcaggctctatcagcagtggaa

SEQ ID NO: 110545 - DNA, 25 bp, Saccharomyces pastorianus
ggaagctcattaacgaccccaaata

SEQ ID NO: 110546 - DNA, 25 bp, Saccharomyces pastorianus
attagaaacgtatcccattgttcaa

SEQ ID NO: 110547 - DNA, 25 bp, Saccharomyces pastorianus
attgttcaatcaaaccccgttgcaa

SEQ ID NO: 110548 - DNA, 25 bp, Saccharomyces pastorianus
gaaaacacactacctgcgacacaag

SEQ ID NO: 110549 - DNA, 25 bp, Saccharomyces pastorianus
gaatgctgaacatccggcaaatcaa

SEQ ID NO: 110550 - DNA, 25 bp, Saccharomyces pastorianus
gaagctgtcaatgaacctctgccaa

SEQ ID NO: 110551 - DNA, 25 bp, Saccharomyces pastorianus
ttccagtgtttctacagacatcaag

SEQ ID NO: 110552 - DNA, 25 bp, Saccharomyces pastorianus
gtcacctagggaacaactgaatcat

SEQ ID NO: 110553 - DNA, 25 bp, Saccharomyces pastorianus
gaaacaattccgctagacccaaatc

SEQ ID NO: 110554 - DNA, 25 bp, Saccharomyces pastorianus
gttcgttatggcatggacaacaccc

SEQ ID NO: 110555 - DNA, 25 bp, Saccharomyces pastorianus
cattcgcctaatgcatcggtagaaa

SEQ ID NO: 110556 - DNA, 25 bp, Saccharomyces pastorianus
actctggcagaaacgcattcgccta

SEQ ID NO: 110557 - DNA, 25 bp, Saccharomyces pastorianus
tctgacatcatgttacaccctcatt

SEQ ID NO: 110558 - DNA, 25 bp, Saccharomyces pastorianus
ttccagcaactttgaaggtcctcag

SEQ ID NO: 110559 - DNA, 25 bp, Saccharomyces pastorianus
ttagctcaacggaggctgacacgtt

SEQ ID NO: 110560 - DNA, 25 bp, Saccharomyces pastorianus
ggaacactttcctactaatctatac

SEQ ID NO: 110561 - DNA, 25 bp, Saccharomyces pastorianus
gcatccgcggaatcagcagcttcat

SEQ ID NO: 110562 - DNA, 25 bp, Saccharomyces pastorianus
aaatcggttgattcatttccagcaa

SEQ ID NO: 110563 - DNA, 25 bp, Saccharomyces pastorianus
aggaaattatatcccctcttcgaga

SEQ ID NO: 110564 - DNA, 25 bp, Saccharomyces pastorianus
ggcatatcacatttattcgtcctat

SEQ ID NO: 110565 - DNA, 25 bp, Saccharomyces pastorianus
actcgcttgtcacatgccagttgaa

SEQ ID NO: 110566 - DNA, 25 bp, Saccharomyces pastorianus
ttgtttaacgcttacactgagatta

SEQ ID NO: 110567 - DNA, 25 bp, Saccharomyces pastorianus
tatactgtgtttgagatgccgatat

SEQ ID NO: 110568 - DNA, 25 bp, Saccharomyces pastorianus
ctcctatcgacatccctcaaaaaga

SEQ ID NO: 110569 - DNA, 25 bp, Saccharomyces pastorianus
tgccgatattaacatgcgcccaaga

SEQ ID NO: 110570 - DNA, 25 bp, Saccharomyces pastorianus
taacgttagcatttcgtctctccta

SEQ ID NO: 110571 - DNA, 25 bp, Saccharomyces pastorianus
atccaacttagcaatctttttcgaa

SEQ ID NO: 110572 - DNA, 25 bp, Saccharomyces pastorianus
tcgaatttttgaaggtctttccgca

SEQ ID NO: 110573 - DNA, 25 bp, Saccharomyces pastorianus
gcatttaaggtcctcatttattcaa

SEQ ID NO: 110574 - DNA, 25 bp, Saccharomyces pastorianus
tattacagtcttacaactcgcttgt

SEQ ID NO: 110575 - DNA, 25 bp, Saccharomyces pastorianus
gtatcgatcatattgtctacttcaa

SEQ ID NO: 110576 - DNA, 25 bp, Saccharomyces pastorianus
gcaaaccgaacatcaaaccgtccaa

SEQ ID NO: 110577 - DNA, 25 bp, Saccharomyces pastorianus
gcgaatttcacccactttgtaaaga

SEQ ID NO: 110578 - DNA, 25 bp, Saccharomyces pastorianus
gaagatccctttgtaggtcgaacaa

SEQ ID NO: 110579 - DNA, 25 bp, Saccharomyces pastorianus
gagaattctgacaccaaacggccct

SEQ ID NO: 110580 - DNA, 25 bp, Saccharomyces pastorianus
aacacctcctactgagcatgagaag

SEQ ID NO: 110581 - DNA, 25 bp, Saccharomyces pastorianus
ttttttgatttgaaggccctgcgcg

SEQ ID NO: 110582 - DNA, 25 bp, Saccharomyces pastorianus
atttcacagttatttcgccgcagga

SEQ ID NO: 110583 - DNA, 25 bp, Saccharomyces pastorianus
gaaggttctaaaatcgttgccggag

SEQ ID NO: 110584 - DNA, 25 bp, Saccharomyces pastorianus
aattttactgtcctgggcagaccta

SEQ ID NO: 110585 - DNA, 25 bp, Saccharomyces pastorianus
gagacccacagctaattcgggagga

SEQ ID NO: 110586 - DNA, 25 bp, Saccharomyces pastorianus
aatgatcctgacttaagcgaatttc

SEQ ID NO: 110587 - DNA, 25 bp, Saccharomyces pastorianus
gttgcattgctatttcacgattgga

SEQ ID NO: 110588 - DNA, 25 bp, Saccharomyces pastorianus
cagtcaatccagacgcagatatttt

SEQ ID NO: 110589 - DNA, 25 bp, Saccharomyces pastorianus
aagtgagcgctactatcaatggtat

SEQ ID NO: 110590 - DNA, 25 bp, Saccharomyces pastorianus
accatctgtttcgttgatgcattac

SEQ ID NO: 110591 - DNA, 25 bp, Saccharomyces pastorianus
gtattgctgatattgtgaaccctaa

SEQ ID NO: 110592 - DNA, 25 bp, Saccharomyces pastorianus
ttacatatttgtttcatccgcggaa

SEQ ID NO: 110593 - DNA, 25 bp, Saccharomyces pastorianus
atcagtaacctttcgtaatgtcatg

SEQ ID NO: 110594 - DNA, 25 bp, Saccharomyces pastorianus
ttcatttgttgagtcagagtccaca

SEQ ID NO: 110595 - DNA, 25 bp, Saccharomyces pastorianus
gtggcgacatgctcgtcaaattgta

SEQ ID NO: 110596 - DNA, 25 bp, Saccharomyces pastorianus
taccaaaagacctgttacgcctgat

SEQ ID NO: 110597 - DNA, 25 bp, Saccharomyces pastorianus
taatgtcatgagcaacccaaacgtt

SEQ ID NO: 110598 - DNA, 25 bp, Saccharomyces pastorianus
tctttccccgtctccaataagaaga

SEQ ID NO: 110599 - DNA, 25 bp, Saccharomyces pastorianus
ttgaaaattgatctttccccgtctc

SEQ ID NO: 110600 - DNA, 25 bp, Saccharomyces pastorianus
gaattcattattcacttccagaccc

SEQ ID NO: 110601 - DNA, 25 bp, Saccharomyces pastorianus
gagatcccagggaagaccttcttat

SEQ ID NO: 110602 - DNA, 25 bp, Saccharomyces pastorianus
gatacagccaaatctaggatcctaa

SEQ ID NO: 110603 - DNA, 25 bp, Saccharomyces pastorianus
ggagaaccatgtctaatctagctag

SEQ ID NO: 110604 - DNA, 25 bp, Saccharomyces pastorianus
aatataccagagatgcagccgttac

SEQ ID NO: 110605 - DNA, 25 bp, Saccharomyces pastorianus
gaaaacgatgagattaagcccttga

SEQ ID NO: 110606 - DNA, 25 bp, Saccharomyces pastorianus
ttacaggaaaacatatctcccgcct

SEQ ID NO: 110607 - DNA, 25 bp, Saccharomyces pastorianus
cactccaccctatcgttcaagggaa

SEQ ID NO: 110608 - DNA, 25 bp, Saccharomyces pastorianus
gagaaattcttctacagcggcaaat

SEQ ID NO: 110609 - DNA, 25 bp, Saccharomyces pastorianus
gaatatctttgttaaccttcgtttg

SEQ ID NO: 110610 - DNA, 25 bp, Saccharomyces pastorianus
ctgccatcatctcgtattccaaaaa

SEQ ID NO: 110611 - DNA, 25 bp, Saccharomyces pastorianus
agttttcctatctgtcacctttcta

SEQ ID NO: 110612 - DNA, 25 bp, Saccharomyces pastorianus
tccctgtacggattttagcatatta

SEQ ID NO: 110613 - DNA, 25 bp, Saccharomyces pastorianus
atctgctttcttctgctccttaagg

SEQ ID NO: 110614 - DNA, 25 bp, Saccharomyces pastorianus
aaggcagatcgttttctcacttcat

SEQ ID NO: 110615 - DNA, 25 bp, Saccharomyces pastorianus
ttttacccgtaggacgcatctgctt

SEQ ID NO: 110616 - DNA, 25 bp, Saccharomyces pastorianus
aaaatctttccacagtccctgtacg

SEQ ID NO: 110617 - DNA, 25 bp, Saccharomyces pastorianus
aaaacatctctgattgtctggaata

SEQ ID NO: 110618 - DNA, 25 bp, Saccharomyces pastorianus
gtgttttcctcctgttactacgaat

SEQ ID NO: 110619 - DNA, 25 bp, Saccharomyces pastorianus
tctcacttcatcaagggacccgtat

SEQ ID NO: 110620 - DNA, 25 bp, Saccharomyces pastorianus
aaagccatatccctcactaggtgac

SEQ ID NO: 110621 - DNA, 25 bp, Saccharomyces pastorianus
cttcataccgttcttcaaggctgta

SEQ ID NO: 110622 - DNA, 25 bp, Saccharomyces pastorianus
ataccccatcatatcagcattactg

SEQ ID NO: 110623 - DNA, 25 bp, Saccharomyces pastorianus
tacaccatttactttgcgctatcat

SEQ ID NO: 110624 - DNA, 25 bp, Saccharomyces pastorianus
gggtggattgtccttacaaagccat

SEQ ID NO: 110625 - DNA, 25 bp, Saccharomyces pastorianus
tacacgcaattgttttggcgccaat

SEQ ID NO: 110626 - DNA, 25 bp, Saccharomyces pastorianus
aatctgggtttgtggtggtacttct

SEQ ID NO: 110627 - DNA, 25 bp, Saccharomyces pastorianus
attatctgccattgtttccatacta

SEQ ID NO: 110628 - DNA, 25 bp, Saccharomyces pastorianus
gttgacttgaactgggcgatgctga

SEQ ID NO: 110629 - DNA, 25 bp, Saccharomyces pastorianus
tggcgccaattttctatcatctttg

SEQ ID NO: 110630 - DNA, 25 bp, Saccharomyces pastorianus
ctaggtgacgctggttttttcttca

SEQ ID NO: 110631 - DNA, 25 bp, Saccharomyces pastorianus
gattgcactattacaaactttcggt

SEQ ID NO: 110632 - DNA, 25 bp, Saccharomyces pastorianus
aacaaccggttacgcaactgccttg

SEQ ID NO: 110633 - DNA, 25 bp, Saccharomyces pastorianus
aacgacgctgatgaattcaccaaac

SEQ ID NO: 110634 - DNA, 25 bp, Saccharomyces pastorianus
ggaggcaggcaagtcgattcgttac

SEQ ID NO: 110635 - DNA, 25 bp, Saccharomyces pastorianus
aacaggttaagctcattcttccaaa

SEQ ID NO: 110636 - DNA, 25 bp, Saccharomyces pastorianus
tccaaggccctctaacggtacagta

SEQ ID NO: 110637 - DNA, 25 bp, Saccharomyces pastorianus
aagtcgattcgttacaccatagaga

SEQ ID NO: 110638 - DNA, 25 bp, Saccharomyces pastorianus
gcagaaatagttccaaggccctcta

SEQ ID NO: 110639 - DNA, 25 bp, Saccharomyces pastorianus
agctatttggatttacccaggaaca

SEQ ID NO: 110640 - DNA, 25 bp, Saccharomyces pastorianus
aggaacatctgggaattatctttga

SEQ ID NO: 110641 - DNA, 25 bp, Saccharomyces pastorianus
aattcatcggtgttgctgattacgt

SEQ ID NO: 110642 - DNA, 25 bp, Saccharomyces pastorianus
tactgacgttggttggtggtacgtt

SEQ ID NO: 110643 - DNA, 25 bp, Saccharomyces pastorianus
ttaacggtactgacgttggttggtg

SEQ ID NO: 110644 - DNA, 25 bp, Saccharomyces pastorianus
tataccagagttacagatacattac

SEQ ID NO: 110645 - DNA, 25 bp, Saccharomyces pastorianus
gacccaacaaaaggcacttgaagaa

SEQ ID NO: 110646 - DNA, 25 bp, Saccharomyces pastorianus
cagatacattacatcgtttaacggt

SEQ ID NO: 110647 - DNA, 25 bp, Saccharomyces pastorianus
gcacttgaagaagacaaccaacaac

SEQ ID NO: 110648 - DNA, 25 bp, Saccharomyces pastorianus
gagttacagatacattacatcgttt

SEQ ID NO: 110649 - DNA, 25 bp, Saccharomyces pastorianus
catcgtttaacggtactgacgttgg

SEQ ID NO: 110650 - DNA, 25 bp, Saccharomyces pastorianus
gtgacccaacaaaaggcacttgaag

SEQ ID NO: 110651 - DNA, 25 bp, Saccharomyces pastorianus
gatacattacatcgtttaacggtac

SEQ ID NO: 110652 - DNA, 25 bp, Saccharomyces pastorianus
ttacatcgtttaacggtactgacgt

SEQ ID NO: 110653 - DNA, 25 bp, Saccharomyces pastorianus
tactgacgttggttggtggtacgtt

SEQ ID NO: 110654 - DNA, 25 bp, Saccharomyces pastorianus
gtcgggtggcttagcttacacttta

SEQ ID NO: 110655 - DNA, 25 bp, Saccharomyces pastorianus
ttaacggtactgacgttggttggtg

SEQ ID NO: 110656 - DNA, 25 bp, Saccharomyces pastorianus
tataccagagttacagatacattac

SEQ ID NO: 110657 - DNA, 25 bp, Saccharomyces pastorianus
gcacttgaagaagacaaccaacaac

SEQ ID NO: 110658 - DNA, 25 bp, Saccharomyces pastorianus
gagttacagatacattacatcgttt

SEQ ID NO: 110659 - DNA, 25 bp, Saccharomyces pastorianus
catcgtttaacggtactgacgttgg

SEQ ID NO: 110660 - DNA, 25 bp, Saccharomyces pastorianus
gtacgttatacatgtcgggtggctt

SEQ ID NO: 110661 - DNA, 25 bp, Saccharomyces pastorianus
gtgacccaacaaaaggcacttgaag

SEQ ID NO: 110662 - DNA, 25 bp, Saccharomyces pastorianus
agatacattacatcgtttaacggta

SEQ ID NO: 110663 - DNA, 25 bp, Saccharomyces pastorianus
ttacatcgtttaacggtactgacgt

SEQ ID NO: 110664 - DNA, 25 bp, Saccharomyces pastorianus
gaaggacgacttaatcaacttggcc

SEQ ID NO: 110665 - DNA, 25 bp, Saccharomyces pastorianus
aagattctcagacttactccacaat

SEQ ID NO: 110666 - DNA, 25 bp, Saccharomyces pastorianus
gcctgcttacaagaggtacctacat

SEQ ID NO: 110667 - DNA, 25 bp, Saccharomyces pastorianus
ggcactgttaaggagcctgcttaca

SEQ ID NO: 110668 - DNA, 25 bp, Saccharomyces pastorianus
acgcaatggttgttcggcactgtta

SEQ ID NO: 110669 - DNA, 25 bp, Saccharomyces pastorianus
aaatacctttcagagctggtctcaa

SEQ ID NO: 110670 - DNA, 25 bp, Saccharomyces pastorianus
gcctagactcttggccaaaggacaa

SEQ ID NO: 110671 - DNA, 25 bp, Saccharomyces pastorianus
gatacttttttggttggcctagact

SEQ ID NO: 110672 - DNA, 25 bp, Saccharomyces pastorianus
gaagacctattgcagtacctaaaat

SEQ ID NO: 110673 - DNA, 25 bp, Saccharomyces pastorianus
atcattcggtgttccggttaaacag

SEQ ID NO: 110674 - DNA, 25 bp, Saccharomyces pastorianus
gtactcaatgctgtctactgaacat

SEQ ID NO: 110675 - DNA, 25 bp, Saccharomyces pastorianus
gctatcgtaatcactgacccggtaa

SEQ ID NO: 110676 - DNA, 25 bp, Saccharomyces pastorianus
gtcaaattccctcaagaactctcag

SEQ ID NO: 110677 - DNA, 25 bp, Saccharomyces pastorianus
aagagaatcccaggtacccatttcg

SEQ ID NO: 110678 - DNA, 25 bp, Saccharomyces pastorianus
taaagtggcctgtacgtttttgtgc

SEQ ID NO: 110679 - DNA, 25 bp, Saccharomyces pastorianus
gctggttccgcattttgtcaacgca

SEQ ID NO: 110680 - DNA, 25 bp, Saccharomyces pastorianus
gaatgctttcaataacgccgctgct

SEQ ID NO: 110681 - DNA, 25 bp, Saccharomyces pastorianus
aacgcatcaggccactggttttaca

SEQ ID NO: 110682 - DNA, 25 bp, Saccharomyces pastorianus
ggacgcaaattgttacctgccgtgg

SEQ ID NO: 110683 - DNA, 25 bp, Saccharomyces pastorianus
caaatttggtcagcctgttcgcgaa

SEQ ID NO: 110684 - DNA, 25 bp, Saccharomyces pastorianus
aaaggagcctcccaatttatctgag

SEQ ID NO: 110685 - DNA, 25 bp, Saccharomyces pastorianus
ttgtgccttttatccaacgacacgg

SEQ ID NO: 110686 - DNA, 25 bp, Saccharomyces pastorianus
aactatgttggatctgacgacttac

SEQ ID NO: 110687 - DNA, 25 bp, Saccharomyces pastorianus
ggtttagctgcatctctatattctt

SEQ ID NO: 110688 - DNA, 25 bp, Saccharomyces pastorianus
aatcctcaattgttcccagaagttg

SEQ ID NO: 110689 - DNA, 25 bp, Saccharomyces pastorianus
atgtacaccgcatctgtttatgccg

SEQ ID NO: 110690 - DNA, 25 bp, Saccharomyces pastorianus
tgtttatgccgcctttgcatctcta

SEQ ID NO: 110691 - DNA, 25 bp, Saccharomyces pastorianus
aaggattacgaagctgccatcgaat

SEQ ID NO: 110692 - DNA, 25 bp, Saccharomyces pastorianus
gactacaacgttttccatgttccaa

SEQ ID NO: 110693 - DNA, 25 bp, Saccharomyces pastorianus
aacgatttcagagccaatcctcaat

SEQ ID NO: 110694 - DNA, 25 bp, Saccharomyces pastorianus
acgccgaattagctactcgcgatta

SEQ ID NO: 110695 - DNA, 25 bp, Saccharomyces pastorianus
gttgctaagccattccacaaagaga

SEQ ID NO: 110696 - DNA, 25 bp, Saccharomyces pastorianus
gcaagcgtgttggtttattttctta

SEQ ID NO: 110697 - DNA, 25 bp, Saccharomyces pastorianus
aacttggcccttcaatacgctaaag

SEQ ID NO: 110698 - DNA, 25 bp, Saccharomyces pastorianus
tggtcatcatattgccgtacgcgtt

SEQ ID NO: 110699 - DNA, 25 bp, Saccharomyces pastorianus
ttccaggtccattacgtggtacact

SEQ ID NO: 110700 - DNA, 25 bp, Saccharomyces pastorianus
aaaatacccacatttccaggtccat

SEQ ID NO: 110701 - DNA, 25 bp, Saccharomyces pastorianus
taacgaaagtctccctgctatatgc

SEQ ID NO: 110702 - DNA, 25 bp, Saccharomyces pastorianus
gtggtacactatccatccgacagat

SEQ ID NO: 110703 - DNA, 25 bp, Saccharomyces pastorianus
gtctctaaatattttgccggcttaa

SEQ ID NO: 110704 - DNA, 25 bp, Saccharomyces pastorianus
gaatgaagtcataaccgttcctgaa

SEQ ID NO: 110705 - DNA, 25 bp, Saccharomyces pastorianus
gtacgcgttccaattgacggcaaag

SEQ ID NO: 110706 - DNA, 25 bp, Saccharomyces pastorianus
gtatcacaccagttctgcagatctt

SEQ ID NO: 110707 - DNA, 25 bp, Saccharomyces pastorianus
ctcctccaagcacttaggcattgta

SEQ ID NO: 110708 - DNA, 25 bp, Saccharomyces pastorianus
attagccggtttcatcatcttgacc

SEQ ID NO: 110709 - DNA, 25 bp, Saccharomyces pastorianus
gtgctggttcattacctggttactg

SEQ ID NO: 110710 - DNA, 25 bp, Saccharomyces pastorianus
actgctgtcggtaatctgattttga

SEQ ID NO: 110711 - DNA, 25 bp, Saccharomyces pastorianus
ttgggtatcttcacaaccttgttga

SEQ ID NO: 110712 - DNA, 25 bp, Saccharomyces pastorianus
gatgaaatcgatcctgctaccctaa

SEQ ID NO: 110713 - DNA, 25 bp, Saccharomyces pastorianus
gtgtcatcggtttcgcataccataa

SEQ ID NO: 110714 - DNA, 25 bp, Saccharomyces pastorianus
aacacaaccacctttattgttcctg

SEQ ID NO: 110715 - DNA, 25 bp, Saccharomyces pastorianus
cgctttgggtactctaatcgaccat

SEQ ID NO: 110716 - DNA, 25 bp, Saccharomyces pastorianus
atttctgctgcatctggtaaggtcg

SEQ ID NO: 110717 - DNA, 25 bp, Saccharomyces pastorianus
gttggttacctcacgtcatggaaat

SEQ ID NO: 110718 - DNA, 25 bp, Saccharomyces pastorianus
gtatccgtcttcaccgtcgatataa

SEQ ID NO: 110719 - DNA, 25 bp, Saccharomyces pastorianus
acaccgcccgatgccaatttaatag

SEQ ID NO: 110720 - DNA, 25 bp, Saccharomyces pastorianus
gtaagggccctttcaactcatctag

SEQ ID NO: 110721 - DNA, 25 bp, Saccharomyces pastorianus
atgttgcccggctgaaaaacacccg

SEQ ID NO: 110722 - DNA, 25 bp, Saccharomyces pastorianus
gttggtgctgttataggcgccctat

SEQ ID NO: 110723 - DNA, 25 bp, Saccharomyces pastorianus
aattgattatggttcgccgcagtcc

SEQ ID NO: 110724 - DNA, 25 bp, Saccharomyces pastorianus
tcccgttttgcctgcttattagcta

SEQ ID NO: 110725 - DNA, 25 bp, Saccharomyces pastorianus
cacgtggacgtgttatttccagcac

SEQ ID NO: 110726 - DNA, 25 bp, Saccharomyces pastorianus
gcagcatttgctcgtaagggccctt

SEQ ID NO: 110727 - DNA, 25 bp, Saccharomyces pastorianus
gccgcagtccatcgaaatcagtgag

SEQ ID NO: 110728 - DNA, 25 bp, Saccharomyces pastorianus
aggcgccctatacgtgcagcatttg

SEQ ID NO: 110729 - DNA, 25 bp, Saccharomyces pastorianus
gtgaaaggctttccttatccctctt

SEQ ID NO: 110730 - DNA, 25 bp, Saccharomyces pastorianus
aggagattatgaacgcccttgaaat

SEQ ID NO: 110731 - DNA, 25 bp, Saccharomyces pastorianus
aacaacatctacgtcagcgagttat

SEQ ID NO: 110732 - DNA, 25 bp, Saccharomyces pastorianus
atgtcttgctagacccgaagcgatt

SEQ ID NO: 110733 - DNA, 25 bp, Saccharomyces pastorianus
ctttcttagtgatatgctccagtaa

SEQ ID NO: 110734 - DNA, 25 bp, Saccharomyces pastorianus
aacctgagtgaaacgtcttcggaat

SEQ ID NO: 110735 - DNA, 25 bp, Saccharomyces pastorianus
ttgggtttcccaatctgataggttt

SEQ ID NO: 110736 - DNA, 25 bp, Saccharomyces pastorianus
ggttttcctacttcgatttgggatg

SEQ ID NO: 110737 - DNA, 25 bp, Saccharomyces pastorianus
agcgagttatcgtccaatatggtgt

SEQ ID NO: 110738 - DNA, 25 bp, Saccharomyces pastorianus
taaggaagtattctcccgacgccaa

SEQ ID NO: 110739 - DNA, 25 bp, Saccharomyces pastorianus
atggtcgcagattgtatgctcgcta

SEQ ID NO: 110740 - DNA, 25 bp, Saccharomyces pastorianus
tgctcgctaatacccaatatgtcca

SEQ ID NO: 110741 - DNA, 25 bp, Saccharomyces pastorianus
aaagggccattgcaaccatacgttc

SEQ ID NO: 110742 - DNA, 25 bp, Saccharomyces pastorianus
gtagcgcaccaagaggccgaatatt

SEQ ID NO: 110743 - DNA, 25 bp, Saccharomyces pastorianus
aatgcatttgctgggttgccaccaa

SEQ ID NO: 110744 - DNA, 25 bp, Saccharomyces pastorianus
gtggcttaatgaccttctacttatg

SEQ ID NO: 110745 - DNA, 25 bp, Saccharomyces pastorianus
agagaacattttacaccggtggtgg

SEQ ID NO: 110746 - DNA, 25 bp, Saccharomyces pastorianus
ggcagcaacaacattttcgccattg

SEQ ID NO: 110747 - DNA, 25 bp, Saccharomyces pastorianus
agaccggtaatcacagaccttttca

SEQ ID NO: 110748 - DNA, 25 bp, Saccharomyces pastorianus
tacggtactttgatttgggccacgg

SEQ ID NO: 110749 - DNA, 25 bp, Saccharomyces pastorianus
gtacttgtccatgattctatctgca

SEQ ID NO: 110750 - DNA, 25 bp, Saccharomyces pastorianus
tgccttagcatacctgggatccgaa

SEQ ID NO: 110751 - DNA, 25 bp, Saccharomyces pastorianus
aatacaacgatttaggtgccttagc

SEQ ID NO: 110752 - DNA, 25 bp, Saccharomyces pastorianus
gggccagtgtttccacaaatgccaa

SEQ ID NO: 110753 - DNA, 25 bp, Saccharomyces pastorianus
gattcttttagcatcgccatttcag

SEQ ID NO: 110754 - DNA, 25 bp, Saccharomyces pastorianus
agcaagcccgtaaagaatctcccta

SEQ ID NO: 110755 - DNA, 25 bp, Saccharomyces pastorianus
gaatctccctaattccaacgcgaag

SEQ ID NO: 110756 - DNA, 25 bp, Saccharomyces pastorianus
gttgacgaattctcccacgaaatca

SEQ ID NO: 110757 - DNA, 25 bp, Saccharomyces pastorianus
taaattaccatctccagtgcacgaa

SEQ ID NO: 110758 - DNA, 25 bp, Saccharomyces pastorianus
agtgtggcacctaagttgacgaatt

SEQ ID NO: 110759 - DNA, 25 bp, Saccharomyces pastorianus
aactatcacttcttgcaacctattc

SEQ ID NO: 110760 - DNA, 25 bp, Saccharomyces pastorianus
agaagtgcatcttacctaggtccgt

SEQ ID NO: 110761 - DNA, 25 bp, Saccharomyces pastorianus
ctaggtccgtcgttaccacatataa

SEQ ID NO: 110762 - DNA, 25 bp, Saccharomyces pastorianus
gcggagtgcagctgacatcaacgtt

SEQ ID NO: 110763 - DNA, 25 bp, Saccharomyces pastorianus
gaagctcgagtcagaccgtcattaa

SEQ ID NO: 110764 - DNA, 25 bp, Saccharomyces pastorianus
gctgtggcgagctctgacgtcaaac

SEQ ID NO: 110765 - DNA, 25 bp, Saccharomyces pastorianus
ggatcttccgactcgtcatcagacg

SEQ ID NO: 110766 - DNA, 25 bp, Saccharomyces pastorianus
tgacgtcaaacgtgcgacatcggat

SEQ ID NO: 110767 - DNA, 25 bp, Saccharomyces pastorianus
aagtttcggtggactgggtctcgct

SEQ ID NO: 110768 - DNA, 25 bp, Saccharomyces pastorianus
gagctccctcaactttgtcatataa

SEQ ID NO: 110769 - DNA, 25 bp, Saccharomyces pastorianus
cgtcattaagacaagctcctccaag

SEQ ID NO: 110770 - DNA, 25 bp, Saccharomyces pastorianus
gacgtcgaggtcattatgcactccc

SEQ ID NO: 110771 - DNA, 25 bp, Saccharomyces pastorianus
gtcacagctcaattataggtcgtca

SEQ ID NO: 110772 - DNA, 25 bp, Saccharomyces pastorianus
tttaacaagtcatcgggatcttccg

SEQ ID NO: 110773 - DNA, 25 bp, Saccharomyces pastorianus
gaagccgtaggaatgtcacagctca

SEQ ID NO: 110774 - DNA, 25 bp, Saccharomyces pastorianus
gcatatccatcggactatttagaca

SEQ ID NO: 110775 - DNA, 25 bp, Saccharomyces pastorianus
acgcatcctgacgagtaatatagct

SEQ ID NO: 110776 - DNA, 25 bp, Saccharomyces pastorianus
aaggaagcctaaggcggcctgccaa

SEQ ID NO: 110777 - DNA, 25 bp, Saccharomyces pastorianus
gctgtgctgagcctgaagtataatg

SEQ ID NO: 110778 - DNA, 25 bp, Saccharomyces pastorianus
aaggcggcctgccaaggtgtttctc

SEQ ID NO: 110779 - DNA, 25 bp, Saccharomyces pastorianus
gagcctgaagtataatgcatatcca

SEQ ID NO: 110780 - DNA, 25 bp, Saccharomyces pastorianus
gacaaagcccaaggaagcctaaggc

SEQ ID NO: 110781 - DNA, 25 bp, Saccharomyces pastorianus
tcctgacgagtaatatagctgtgct

SEQ ID NO: 110782 - DNA, 25 bp, Saccharomyces pastorianus
gtataatgcatatccatcggactat

SEQ ID NO: 110783 - DNA, 25 bp, Saccharomyces pastorianus
cggactatttagacaaagcccaagg

SEQ ID NO: 110784 - DNA, 25 bp, Saccharomyces pastorianus
gtaatatagctgtgctgagcctgaa

SEQ ID NO: 110785 - DNA, 25 bp, Saccharomyces pastorianus
aggatctgacgtcatggcccaatac

SEQ ID NO: 110786 - DNA, 25 bp, Saccharomyces pastorianus
tgcacaagtgcaacattcgacattt

SEQ ID NO: 110787 - DNA, 25 bp, Saccharomyces pastorianus
attcgacatttatgtatgcagccaa

SEQ ID NO: 110788 - DNA, 25 bp, Saccharomyces pastorianus
gagaggatcttttccaaggcataga

SEQ ID NO: 110789 - DNA, 25 bp, Saccharomyces pastorianus
ttgggtgcctctgcggaagacaaca

SEQ ID NO: 110790 - DNA, 25 bp, Saccharomyces pastorianus
caatattttgggtgcctctgcggaa

SEQ ID NO: 110791 - DNA, 25 bp, Saccharomyces pastorianus
cggaagacaacacgcatcctgacga

SEQ ID NO: 110792 - DNA, 25 bp, Saccharomyces pastorianus
aacgataccaggatctgacgtcatg

SEQ ID NO: 110793 - DNA, 25 bp, Saccharomyces pastorianus
atgcagccaatattttgggtgcctc

SEQ ID NO: 110794 - DNA, 25 bp, Saccharomyces pastorianus
gaagagaggatcttttccaaggcat

SEQ ID NO: 110795 - DNA, 25 bp, Saccharomyces pastorianus
cgtcatggcccaataccttgcacaa

SEQ ID NO: 110796 - DNA, 25 bp, Saccharomyces pastorianus
aatggcaagcgttacaccggttcac

SEQ ID NO: 110797 - DNA, 25 bp, Saccharomyces pastorianus
gagacatactttcgtactcagttag

SEQ ID NO: 110798 - DNA, 25 bp, Saccharomyces pastorianus
gtaccaaggcatggctgggtcattg

SEQ ID NO: 110799 - DNA, 25 bp, Saccharomyces pastorianus
ggcattatgggctggtggaacttac

SEQ ID NO: 110800 - DNA, 25 bp, Saccharomyces pastorianus
tcctgcttcttccattatctttagt

SEQ ID NO: 110801 - DNA, 25 bp, Saccharomyces pastorianus
tattgccgccttactggtaggattt

SEQ ID NO: 110802 - DNA, 25 bp, Saccharomyces pastorianus
ggatggatctttcatttcctgcttc

SEQ ID NO: 110803 - DNA, 25 bp, Saccharomyces pastorianus
atgtgtctccatcagtgtttttgtt

SEQ ID NO: 110804 - DNA, 25 bp, Saccharomyces pastorianus
gctcttttggcatcttcacgtttta

SEQ ID NO: 110805 - DNA, 25 bp, Saccharomyces pastorianus
gtagcattcaatgtgggctcaataa

SEQ ID NO: 110806 - DNA, 25 bp, Saccharomyces pastorianus
tgtcaattactccatgtccttgtgt

SEQ ID NO: 110807 - DNA, 25 bp, Saccharomyces pastorianus
tgctttgaaaccttaccactcatgg

SEQ ID NO: 110808 - DNA, 25 bp, Saccharomyces pastorianus
gatgtagagctgtgccctggttcag

SEQ ID NO: 110809 - DNA, 25 bp, Saccharomyces pastorianus
aatctcaggaggcactagcattggc

SEQ ID NO: 110810 - DNA, 25 bp, Saccharomyces pastorianus
gagggttcacttagcctatatcaga

SEQ ID NO: 110811 - DNA, 25 bp, Saccharomyces pastorianus
gccctggttcagtcattcaagattt

SEQ ID NO: 110812 - DNA, 25 bp, Saccharomyces pastorianus
gaatatcctacgtggagggttcact

SEQ ID NO: 110813 - DNA, 25 bp, Saccharomyces pastorianus
ggagtttctatcttggcgaaggcca

SEQ ID NO: 110814 - DNA, 25 bp, Saccharomyces pastorianus
gtacagggttggtggtttaccgcat

SEQ ID NO: 110815 - DNA, 25 bp, Saccharomyces pastorianus
ggagaccactacctacatttttggg

SEQ ID NO: 110816 - DNA, 25 bp, Saccharomyces pastorianus
aacggtgtacagtttcctgcattta

SEQ ID NO: 110817 - DNA, 25 bp, Saccharomyces pastorianus
atgttatcgtccctaacgtttggag

SEQ ID NO: 110818 - DNA, 25 bp, Saccharomyces pastorianus
tgtcgagtatgcctgcggagaacct

SEQ ID NO: 110819 - DNA, 25 bp, Saccharomyces pastorianus
caagggacgctgcagacgacacgac

SEQ ID NO: 110820 - DNA, 25 bp, Saccharomyces pastorianus
tatcgatgctactacaagccactct

SEQ ID NO: 110821 - DNA, 25 bp, Saccharomyces pastorianus
agttatcaacacaaacgccgaggat

SEQ ID NO: 110822 - DNA, 25 bp, Saccharomyces pastorianus
aggccatgatcttgagcttctacta

SEQ ID NO: 110823 - DNA, 25 bp, Saccharomyces pastorianus
tcatgcacaatttacctaaggtcca

SEQ ID NO: 110824 - DNA, 25 bp, Saccharomyces pastorianus
gaccacccctaatgcattaaacaac

SEQ ID NO: 110825 - DNA, 25 bp, Saccharomyces pastorianus
aatttctgaaactctctaccttcca

SEQ ID NO: 110826 - DNA, 25 bp, Saccharomyces pastorianus
aatcggaaccgccaacaatgacagc

SEQ ID NO: 110827 - DNA, 25 bp, Saccharomyces pastorianus
ttcgacgcctaatgaaaacgccccg

SEQ ID NO: 110828 - DNA, 25 bp, Saccharomyces pastorianus
gagagtcctcaccagtctcacaaaa

SEQ ID NO: 110829 - DNA, 25 bp, Saccharomyces pastorianus
agcagcatcaaatcagccacggacg

SEQ ID NO: 110830 - DNA, 25 bp, Saccharomyces pastorianus
gtttatcacccacaagatcctgtta

SEQ ID NO: 110831 - DNA, 25 bp, Saccharomyces pastorianus
gaaaccatatcttgatctgtccaca

SEQ ID NO: 110832 - DNA, 25 bp, Saccharomyces pastorianus
atcttcaacgggaaactctggcggc

SEQ ID NO: 110833 - DNA, 25 bp, Saccharomyces pastorianus
acttacagcggcctttcattgtgaa

SEQ ID NO: 110834 - DNA, 25 bp, Saccharomyces pastorianus
agagagtggacgtcgttccgcccaa

SEQ ID NO: 110835 - DNA, 25 bp, Saccharomyces pastorianus
acgccgaccacagcattaatcataa

SEQ ID NO: 110836 - DNA, 25 bp, Saccharomyces pastorianus
ctctggcggccatgtgaattcaaat

SEQ ID NO: 110837 - DNA, 25 bp, Saccharomyces pastorianus
gagtcgcgtcttattagttccaggg

SEQ ID NO: 110838 - DNA, 25 bp, Saccharomyces pastorianus
cgccggcagcacatatcactaagaa

SEQ ID NO: 110839 - DNA, 25 bp, Saccharomyces pastorianus
gaccgacgggtctcagcaagatcag

SEQ ID NO: 110840 - DNA, 25 bp, Saccharomyces pastorianus
cattaaagaaacgttagtgcccaat

SEQ ID NO: 110841 - DNA, 25 bp, Saccharomyces pastorianus
agtttactcagcaaattgtgcatga

SEQ ID NO: 110842 - DNA, 25 bp, Saccharomyces pastorianus
atccaccgctactaagtttactcag

SEQ ID NO: 110843 - DNA, 25 bp, Saccharomyces pastorianus
agtgcccaattttgaaacgtgtttg

SEQ ID NO: 110844 - DNA, 25 bp, Saccharomyces pastorianus
aggaagttccaatcctccttccgcg

SEQ ID NO: 110845 - DNA, 25 bp, Saccharomyces pastorianus
taaccacttgggttctatgaaagtt

SEQ ID NO: 110846 - DNA, 25 bp, Saccharomyces pastorianus
tttagcaatggtgcatccaccgcta

SEQ ID NO: 110847 - DNA, 25 bp, Saccharomyces pastorianus
gaagctcaaccccaacattaaagaa

SEQ ID NO: 110848 - DNA, 25 bp, Saccharomyces pastorianus
gatcatttcactccaaaagagcttt

SEQ ID NO: 110849 - DNA, 25 bp, Saccharomyces pastorianus
gaaaaccatgcgaagctaaacgagc

SEQ ID NO: 110850 - DNA, 25 bp, Saccharomyces pastorianus
ccttccgcgtcatccagtaataata

SEQ ID NO: 110851 - DNA, 25 bp, Saccharomyces pastorianus
gatgcgggaaaaaggccaaactcta

SEQ ID NO: 110852 - DNA, 25 bp, Saccharomyces pastorianus
atatttcaaggatcctcgtgtgaga

SEQ ID NO: 110853 - DNA, 25 bp, Saccharomyces pastorianus
gattgattctgattccaaggacatc

SEQ ID NO: 110854 - DNA, 25 bp, Saccharomyces pastorianus
gggctcgatgattgctaatgactac

SEQ ID NO: 110855 - DNA, 25 bp, Saccharomyces pastorianus
acgactcttaccagtatttggtgga

SEQ ID NO: 110856 - DNA, 25 bp, Saccharomyces pastorianus
ctctacgactcctttgaacttcata

SEQ ID NO: 110857 - DNA, 25 bp, Saccharomyces pastorianus
ccaacagtgggctaaggtcctacct

SEQ ID NO: 110858 - DNA, 25 bp, Saccharomyces pastorianus
tacacagtctccttcggtatcagaa

SEQ ID NO: 110859 - DNA, 25 bp, Saccharomyces pastorianus
tggactttgcttaccaacagtgggc

SEQ ID NO: 110860 - DNA, 25 bp, Saccharomyces pastorianus
aggtcctacctgtaatgggctcgat

SEQ ID NO: 110861 - DNA, 25 bp, Saccharomyces pastorianus
gagaatcccctaatggactttgctt

SEQ ID NO: 110862 - DNA, 25 bp, Saccharomyces pastorianus
catttaatgttgacgaactggacga

SEQ ID NO: 110863 - DNA, 25 bp, Saccharomyces pastorianus
aatgcatgaatttgttgacgagttg

SEQ ID NO: 110864 - DNA, 25 bp, Saccharomyces pastorianus
tacctggtttgataagttcgatgcc

SEQ ID NO: 110865 - DNA, 25 bp, Saccharomyces pastorianus
gttcgatgccgaaatatgtataccg

SEQ ID NO: 110866 - DNA, 25 bp, Saccharomyces pastorianus
atacgaaattagtagcgatggttta

SEQ ID NO: 110867 - DNA, 25 bp, Saccharomyces pastorianus
tacttataggatgctcgtcttacta

SEQ ID NO: 110868 - DNA, 25 bp, Saccharomyces pastorianus
gaactggacgaattaaatacctggt

SEQ ID NO: 110869 - DNA, 25 bp, Saccharomyces pastorianus
tttgttgacgagttggtacttccat

SEQ ID NO: 110870 - DNA, 25 bp, Saccharomyces pastorianus
gacgagttggtacttccatttaatg

SEQ ID NO: 110871 - DNA, 25 bp, Saccharomyces pastorianus
tgccgaaatatgtataccgaacgaa

SEQ ID NO: 110872 - DNA, 25 bp, Saccharomyces pastorianus
gtaatacttataggatgctcgtctt

SEQ ID NO: 110873 - DNA, 25 bp, Saccharomyces pastorianus
gaatttaacggacacgctctatggt

SEQ ID NO: 110874 - DNA, 25 bp, Saccharomyces pastorianus
gctttcatcgagcatccctgaagaa

SEQ ID NO: 110875 - DNA, 25 bp, Saccharomyces pastorianus
acgctctatggtgtcggtattacaa

SEQ ID NO: 110876 - DNA, 25 bp, Saccharomyces pastorianus
ggatgatctggttcaatgcacggct

SEQ ID NO: 110877 - DNA, 25 bp, Saccharomyces pastorianus
aatgcacggcttgctttcatcgagc

SEQ ID NO: 110878 - DNA, 25 bp, Saccharomyces pastorianus
taagtgctgttgttgccatgccatt

SEQ ID NO: 110879 - DNA, 25 bp, Saccharomyces pastorianus
aagactattctctcgtaggtctgtt

SEQ ID NO: 110880 - DNA, 25 bp, Saccharomyces pastorianus
gatgatgtcgccgattacaacatga

SEQ ID NO: 110881 - DNA, 25 bp, Saccharomyces pastorianus
tcccagtcgcaagtgccatttaagt

SEQ ID NO: 110882 - DNA, 25 bp, Saccharomyces pastorianus
agttgttgcccacaatgttgctgga

SEQ ID NO: 110883 - DNA, 25 bp, Saccharomyces pastorianus
taggtctgttgcttctcggctacac

SEQ ID NO: 110884 - DNA, 25 bp, Saccharomyces pastorianus
gatcatcagtaacgccaagggtcag

SEQ ID NO: 110885 - DNA, 25 bp, Saccharomyces pastorianus
aaagaaggactcagcgccactcaaa

SEQ ID NO: 110886 - DNA, 25 bp, Saccharomyces pastorianus
gagcattgtctccttaattcacata

SEQ ID NO: 110887 - DNA, 25 bp, Saccharomyces pastorianus
gactgctggtactgccattaacgag

SEQ ID NO: 110888 - DNA, 25 bp, Saccharomyces pastorianus
caggctctaagatttggttcattca

SEQ ID NO: 110889 - DNA, 25 bp, Saccharomyces pastorianus
atttgatgtgattttcggtcctgcc

SEQ ID NO: 110890 - DNA, 25 bp, Saccharomyces pastorianus
caagggtcaggtagttggctccata

SEQ ID NO: 110891 - DNA, 25 bp, Saccharomyces pastorianus
atacggtatcccagtcttgagcatt

SEQ ID NO: 110892 - DNA, 25 bp, Saccharomyces pastorianus
atcgacgacgtcatgactgctggta

SEQ ID NO: 110893 - DNA, 25 bp, Saccharomyces pastorianus
gtcggctctgccctagaaaacaaga

SEQ ID NO: 110894 - DNA, 25 bp, Saccharomyces pastorianus
ttaacgaggcctttgagatcatcag

SEQ ID NO: 110895 - DNA, 25 bp, Saccharomyces pastorianus
gttgaacgttcggaggctatttcga

SEQ ID NO: 110896 - DNA, 25 bp, Saccharomyces pastorianus
atgggccacccaatgacaaaatctg

SEQ ID NO: 110897 - DNA, 25 bp, Saccharomyces pastorianus
aactatggcagatgctgtccgtgaa

SEQ ID NO: 110898 - DNA, 25 bp, Saccharomyces pastorianus
atggccctgatttcgacaatattga

SEQ ID NO: 110899 - DNA, 25 bp, Saccharomyces pastorianus
gaaactcctaagattacagcggcag

SEQ ID NO: 110900 - DNA, 25 bp, Saccharomyces pastorianus
aatgagattgttccgctgcatagtc

SEQ ID NO: 110901 - DNA, 25 bp, Saccharomyces pastorianus
gattccaagtactctatccatgtta

SEQ ID NO: 110902 - DNA, 25 bp, Saccharomyces pastorianus
ttggcgcagccactaaattcaaagg

SEQ ID NO: 110903 - DNA, 25 bp, Saccharomyces pastorianus
gggagattccatatggccctgattt

SEQ ID NO: 110904 - DNA, 25 bp, Saccharomyces pastorianus
tgcatagtccgttcttgatgggcca

SEQ ID NO: 110905 - DNA, 25 bp, Saccharomyces pastorianus
ttggctgttgaaaatcctttggcta

SEQ ID NO: 110906 - DNA, 25 bp, Saccharomyces pastorianus
taagtcagttcggtatcaaggtttt

SEQ ID NO: 110907 - DNA, 25 bp, Saccharomyces pastorianus
aagttagcagtgtcaagttcgttga

SEQ ID NO: 110908 - DNA, 25 bp, Saccharomyces pastorianus
attggagttcgtcaagggtatcagc

SEQ ID NO: 110909 - DNA, 25 bp, Saccharomyces pastorianus
accaagaattgtttatccagcctaa

SEQ ID NO: 110910 - DNA, 25 bp, Saccharomyces pastorianus
ggtttgttatccattgttctactac

SEQ ID NO: 110911 - DNA, 25 bp, Saccharomyces pastorianus
ggttaagcgctgcattaagcaagtt

SEQ ID NO: 110912 - DNA, 25 bp, Saccharomyces pastorianus
ctccgaattgtgttctattgagcca

SEQ ID NO: 110913 - DNA, 25 bp, Saccharomyces pastorianus
gaattttcgcctagattgcacaaga

SEQ ID NO: 110914 - DNA, 25 bp, Saccharomyces pastorianus
gaaagtccactatctgttgcaatac

SEQ ID NO: 110915 - DNA, 25 bp, Saccharomyces pastorianus
tacctgagacatgcctatttgtttc

SEQ ID NO: 110916 - DNA, 25 bp, Saccharomyces pastorianus
tatagcgttctattggaaagtccac

SEQ ID NO: 110917 - DNA, 25 bp, Saccharomyces pastorianus
gatgcatgcagagccactagacact

SEQ ID NO: 110918 - DNA, 25 bp, Saccharomyces pastorianus
ggatcgtgaacatgctgccggtgaa

SEQ ID NO: 110919 - DNA, 25 bp, Saccharomyces pastorianus
gaagatcccctgcaatagtagcgat

SEQ ID NO: 110920 - DNA, 25 bp, Saccharomyces pastorianus
gttcaaggatagagccgccagcgat

SEQ ID NO: 110921 - DNA, 25 bp, Saccharomyces pastorianus
gcagcatatcgcctcgtggtggttt

SEQ ID NO: 110922 - DNA, 25 bp, Saccharomyces pastorianus
gagccgttatgcgttgtgggaaata

SEQ ID NO: 110923 - DNA, 25 bp, Saccharomyces pastorianus
aagagtgtgcttaagctgccctata

SEQ ID NO: 110924 - DNA, 25 bp, Saccharomyces pastorianus
tgaggatggctcgaccctactaatc

SEQ ID NO: 110925 - DNA, 25 bp, Saccharomyces pastorianus
gacacagatgtattggagccgttat

SEQ ID NO: 110926 - DNA, 25 bp, Saccharomyces pastorianus
aaaccggcctgcgattagaatccca

SEQ ID NO: 110927 - DNA, 25 bp, Saccharomyces pastorianus
agaaaccagcgctgatggcggcttt

SEQ ID NO: 110928 - DNA, 25 bp, Saccharomyces pastorianus
taccgcgctctcgtcagtgtctagt

SEQ ID NO: 110929 - DNA, 25 bp, Saccharomyces pastorianus
attgcgtttctgtgtcgatcgatac

SEQ ID NO: 110930 - DNA, 25 bp, Saccharomyces pastorianus
cagaatccgtctgttgatgagatta

SEQ ID NO: 110931 - DNA, 25 bp, Saccharomyces pastorianus
ggcagcatgttcacgatcccacctg

SEQ ID NO: 110932 - DNA, 25 bp, Saccharomyces pastorianus
gctctatccttgaaccgaattgcgt

SEQ ID NO: 110933 - DNA, 25 bp, Saccharomyces pastorianus
agtgtctagtggctctgcatgcatc

SEQ ID NO: 110934 - DNA, 25 bp, Saccharomyces pastorianus
gggatcttcttcaccggcagcatgt

SEQ ID NO: 110935 - DNA, 25 bp, Saccharomyces pastorianus
gattagtagggtcgagccatcctca

SEQ ID NO: 110936 - DNA, 25 bp, Saccharomyces pastorianus
gatgtatgcgcctctttttactatc

SEQ ID NO: 110937 - DNA, 25 bp, Saccharomyces pastorianus
aatcgactggcgtaggatgtatgcg

SEQ ID NO: 110938 - DNA, 25 bp, Saccharomyces pastorianus
tgcatgcatcgctggcggctctatc

SEQ ID NO: 110939 - DNA, 25 bp, Saccharomyces pastorianus
ggcgccacatgtgcctcaggaaaaa

SEQ ID NO: 110940 - DNA, 25 bp, Saccharomyces pastorianus
gtgcttgtttgtttacaccgtgaaa

SEQ ID NO: 110941 - DNA, 25 bp, Saccharomyces pastorianus
agtaccatcggctccggaggaacgc

SEQ ID NO: 110942 - DNA, 25 bp, Saccharomyces pastorianus
aaagtcgtgcaagatctcaggaaca

SEQ ID NO: 110943 - DNA, 25 bp, Saccharomyces pastorianus
ctcgcgaaccgtacaggatgccaaa

SEQ ID NO: 110944 - DNA, 25 bp, Saccharomyces pastorianus
gaacacagggtccattgagcacaca

SEQ ID NO: 110945 - DNA, 25 bp, Saccharomyces pastorianus
gggcgccaagcaagtaccctcgcga

SEQ ID NO: 110946 - DNA, 25 bp, Saccharomyces pastorianus
tatactgacgatggtgtgcttgttt

SEQ ID NO: 110947 - DNA, 25 bp, Saccharomyces pastorianus
gaggaacgcgttgctcggttaaaca

SEQ ID NO: 110948 - DNA, 25 bp, Saccharomyces pastorianus
tcgtgatgacgatggcgccacatgt

SEQ ID NO: 110949 - DNA, 25 bp, Saccharomyces pastorianus
gagagccgttaatagtgacatggtt

SEQ ID NO: 110950 - DNA, 25 bp, Saccharomyces pastorianus
agaggtattcatgcctacgtttaca

SEQ ID NO: 110951 - DNA, 25 bp, Saccharomyces pastorianus
aaaagccggacacgccattgtttat

SEQ ID NO: 110952 - DNA, 25 bp, Saccharomyces pastorianus
tataattctgcttcggatccactgg

SEQ ID NO: 110953 - DNA, 25 bp, Saccharomyces pastorianus
aagtgggactttccttatcggcagc

SEQ ID NO: 110954 - DNA, 25 bp, Saccharomyces pastorianus
tgatgctacttctacttatgccaaa

SEQ ID NO: 110955 - DNA, 25 bp, Saccharomyces pastorianus
tatcggcagctcaatttcttttcag

SEQ ID NO: 110956 - DNA, 25 bp, Saccharomyces pastorianus
ttacctggctcgtactacaagataa

SEQ ID NO: 110957 - DNA, 25 bp, Saccharomyces pastorianus
attgatttcgcatgtgtctctggtt

SEQ ID NO: 110958 - DNA, 25 bp, Saccharomyces pastorianus
tctcccactgtgtcgatgaaccata

SEQ ID NO: 110959 - DNA, 25 bp, Saccharomyces pastorianus
acgagttccggccaaatcacaaata

SEQ ID NO: 110960 - DNA, 25 bp, Saccharomyces pastorianus
gtctcctgtgcttgaaccattgttc

SEQ ID NO: 110961 - DNA, 25 bp, Saccharomyces pastorianus
aatttggcaaggtttcatggcagga

SEQ ID NO: 110962 - DNA, 25 bp, Saccharomyces pastorianus
gtgcttgcacagatgaaaacagaca

SEQ ID NO: 110963 - DNA, 25 bp, Saccharomyces pastorianus
tttcatggcaggatgtgcttgcaca

SEQ ID NO: 110964 - DNA, 25 bp, Saccharomyces pastorianus
tgaaaattgtccctttaatttggca

SEQ ID NO: 110965 - DNA, 25 bp, Saccharomyces pastorianus
aacggctgaagcactatatcaccat

SEQ ID NO: 110966 - DNA, 25 bp, Saccharomyces pastorianus
aaagcttcataaactcaacggctga

SEQ ID NO: 110967 - DNA, 25 bp, Saccharomyces pastorianus
aacataattggtacagattcactct

SEQ ID NO: 110968 - DNA, 25 bp, Saccharomyces pastorianus
gattcactctatggattgcctaatt

SEQ ID NO: 110969 - DNA, 25 bp, Saccharomyces pastorianus
gagccgggcgataattggtattcta

SEQ ID NO: 110970 - DNA, 25 bp, Saccharomyces pastorianus
atattactattttcagactgtgtta

SEQ ID NO: 110971 - DNA, 25 bp, Saccharomyces pastorianus
ttagctgaaagtggagtgggctcct

SEQ ID NO: 110972 - DNA, 25 bp, Saccharomyces pastorianus
gcagccactacaagctactgtgcag

SEQ ID NO: 110973 - DNA, 25 bp, Saccharomyces pastorianus
taacgcattccatacagcccagaat

SEQ ID NO: 110974 - DNA, 25 bp, Saccharomyces pastorianus
tgccctccgtaaagacccgataaag

SEQ ID NO: 110975 - DNA, 25 bp, Saccharomyces pastorianus
tcagcgcaataagctccgattggaa

SEQ ID NO: 110976 - DNA, 25 bp, Saccharomyces pastorianus
gaagatttcaagtttgccctccgta

SEQ ID NO: 110977 - DNA, 25 bp, Saccharomyces pastorianus
aagcagcgggccgtaatagcgctaa

SEQ ID NO: 110978 - DNA, 25 bp, Saccharomyces pastorianus
ttacggcgatgtgccgcagccacta

SEQ ID NO: 110979 - DNA, 25 bp, Saccharomyces pastorianus
taagttccttgctttacgcttacgg

SEQ ID NO: 110980 - DNA, 25 bp, Saccharomyces pastorianus
gctactgtgcagtgtttggatgaat

SEQ ID NO: 110981 - DNA, 25 bp, Saccharomyces pastorianus
tacagcccagaattctcagcgcaat

SEQ ID NO: 110982 - DNA, 25 bp, Saccharomyces pastorianus
gtggatgtttgtactaacgcattcc

SEQ ID NO: 110983 - DNA, 25 bp, Saccharomyces pastorianus
ggcactttactgaaacccttagacg

SEQ ID NO: 110984 - DNA, 25 bp, Saccharomyces pastorianus
tcaggctgctcttaacttcattatg

SEQ ID NO: 110985 - DNA, 25 bp, Saccharomyces pastorianus
ggcgctgacagctttatacctgtgc

SEQ ID NO: 110986 - DNA, 25 bp, Saccharomyces pastorianus
gagattccggatgagttacagccaa

SEQ ID NO: 110987 - DNA, 25 bp, Saccharomyces pastorianus
aatgaactgttttctccaattggag

SEQ ID NO: 110988 - DNA, 25 bp, Saccharomyces pastorianus
gactgaacgttctttaactatcgaa

SEQ ID NO: 110989 - DNA, 25 bp, Saccharomyces pastorianus
gattcagatcaccagacttcattcg

SEQ ID NO: 110990 - DNA, 25 bp, Saccharomyces pastorianus
taaaaaatcgcgtattgggccctgt

SEQ ID NO: 110991 - DNA, 25 bp, Saccharomyces pastorianus
ggacacgttgaacacattacagaat

SEQ ID NO: 110992 - DNA, 25 bp, Saccharomyces pastorianus
tattacttgagcagtcttcaggctg

SEQ ID NO: 110993 - DNA, 25 bp, Saccharomyces pastorianus
tatgtttccagatatggacccaagc

SEQ ID NO: 110994 - DNA, 25 bp, Saccharomyces pastorianus
taatccttcgaaaagttgcctcgca

SEQ ID NO: 110995 - DNA, 25 bp, Saccharomyces pastorianus
aaaccaccccatgaacttgtggagg

SEQ ID NO: 110996 - DNA, 25 bp, Saccharomyces pastorianus
agttgcctcgcagtatttgaagttg

SEQ ID NO: 110997 - DNA, 25 bp, Saccharomyces pastorianus
aaagggccattcaattcggtgctaa

SEQ ID NO: 110998 - DNA, 25 bp, Saccharomyces pastorianus
gaagttgacgttccttatgatgagt

SEQ ID NO: 110999 - DNA, 25 bp, Saccharomyces pastorianus
cagcgccatgggatagtgttattca

SEQ ID NO: 111000 - DNA, 25 bp, Saccharomyces pastorianus
gaaagaacgccatatcagcgccatg

SEQ ID NO: 111001 - DNA, 25 bp, Saccharomyces pastorianus
ggacttgtctatagccattgctttt

SEQ ID NO: 111002 - DNA, 25 bp, Saccharomyces pastorianus
gagcagacgaactctacggtggata

SEQ ID NO: 111003 - DNA, 25 bp, Saccharomyces pastorianus
gaggtttcttaacttctctgaatgg

SEQ ID NO: 111004 - DNA, 25 bp, Saccharomyces pastorianus
tatgatcgcaacctgaatcgtgatg

SEQ ID NO: 111005 - DNA, 25 bp, Saccharomyces pastorianus
gtgtactgttcttaactttgactta

SEQ ID NO: 111006 - DNA, 25 bp, Saccharomyces pastorianus
gatactaccggatctcaatcgttag

SEQ ID NO: 111007 - DNA, 25 bp, Saccharomyces pastorianus
ggaaccgcaaacatcaagacgcata

SEQ ID NO: 111008 - DNA, 25 bp, Saccharomyces pastorianus
gatgcatcaaaactccagcagcagg

SEQ ID NO: 111009 - DNA, 25 bp, Saccharomyces pastorianus
atactgatcctacttcatttgaaag

SEQ ID NO: 111010 - DNA, 25 bp, Saccharomyces pastorianus
tatctctaggagaatgcagccctta

SEQ ID NO: 111011 - DNA, 25 bp, Saccharomyces pastorianus
aacgccttcaatcagcaaaaaccgg

SEQ ID NO: 111012 - DNA, 25 bp, Saccharomyces pastorianus
aacggatttactctacttttagcat

SEQ ID NO: 111013 - DNA, 25 bp, Saccharomyces pastorianus
gcagcccttatctagaaacgaaaat

SEQ ID NO: 111014 - DNA, 25 bp, Saccharomyces pastorianus
agagacccttcaggagtactcgacc

SEQ ID NO: 111015 - DNA, 25 bp, Saccharomyces pastorianus
gaatggaccgactcaaaggctacag

SEQ ID NO: 111016 - DNA, 25 bp, Saccharomyces pastorianus
cttcatttcctgcttgggagactgt

SEQ ID NO: 111017 - DNA, 25 bp, Saccharomyces pastorianus
aacttgcccttagccatggttaatg

SEQ ID NO: 111018 - DNA, 25 bp, Saccharomyces pastorianus
cagctgctcgggatttagtttagtt

SEQ ID NO: 111019 - DNA, 25 bp, Saccharomyces pastorianus
gtgtctgtacggtggcaacaacgaa

SEQ ID NO: 111020 - DNA, 25 bp, Saccharomyces pastorianus
ggcttgatttttacagtgctctttc

SEQ ID NO: 111021 - DNA, 25 bp, Saccharomyces pastorianus
tattgtctacaatcttacctgggat

SEQ ID NO: 111022 - DNA, 25 bp, Saccharomyces pastorianus
ggtgctattcatttacatacttttt

SEQ ID NO: 111023 - DNA, 25 bp, Saccharomyces pastorianus
atacattctgtgaacttgcccttag

SEQ ID NO: 111024 - DNA, 25 bp, Saccharomyces pastorianus
ttcttggtcgaattgctgttttaca

SEQ ID NO: 111025 - DNA, 25 bp, Saccharomyces pastorianus
tggaaccagtagtttttgcccttca

SEQ ID NO: 111026 - DNA, 25 bp, Saccharomyces pastorianus
tttacagcattcagctgctcgggat

SEQ ID NO: 111027 - DNA, 25 bp, Saccharomyces pastorianus
gttgataccactttacctggttggg

SEQ ID NO: 111028 - DNA, 25 bp, Saccharomyces pastorianus
ataccaatcttcagcggtaccattc

SEQ ID NO: 111029 - DNA, 25 bp, Saccharomyces pastorianus
tgaagatctcttgttgacggcggat

SEQ ID NO: 111030 - DNA, 25 bp, Saccharomyces pastorianus
gacggcggatgattctacacggcta

SEQ ID NO: 111031 - DNA, 25 bp, Saccharomyces pastorianus
gatctttacgtatgccgataggtca

SEQ ID NO: 111032 - DNA, 25 bp, Saccharomyces pastorianus
tcatgttcaagcagcaagacgtcat

SEQ ID NO: 111033 - DNA, 25 bp, Saccharomyces pastorianus
gagaatcatgactaagccaggccaa

SEQ ID NO: 111034 - DNA, 25 bp, Saccharomyces pastorianus
gacgtcattgcggaagcctttgctg

SEQ ID NO: 111035 - DNA, 25 bp, Saccharomyces pastorianus
cgatccatatggtggttctgatgac

SEQ ID NO: 111036 - DNA, 25 bp, Saccharomyces pastorianus
ggcgacgacgtggtagcagaatttc

SEQ ID NO: 111037 - DNA, 25 bp, Saccharomyces pastorianus
gaatgggccggtgcaggttctaaac

SEQ ID NO: 111038 - DNA, 25 bp, Saccharomyces pastorianus
gaagaaagcttcatcactagtggaa

SEQ ID NO: 111039 - DNA, 25 bp, Saccharomyces pastorianus
gaccttggtttcagtcgagtctttt

SEQ ID NO: 111040 - DNA, 25 bp, Saccharomyces pastorianus
gatcacctcatgaacttcaacgtcg

SEQ ID NO: 111041 - DNA, 25 bp, Saccharomyces pastorianus
tttaaatcctttcactccttcaatg

SEQ ID NO: 111042 - DNA, 25 bp, Saccharomyces pastorianus
gaactactgcagattcaaagcttat

SEQ ID NO: 111043 - DNA, 25 bp, Saccharomyces pastorianus
tcaacgtcggtggaatggcagcaaa

SEQ ID NO: 111044 - DNA, 25 bp, Saccharomyces pastorianus
taaacgaacacgcttcctcgttagt

SEQ ID NO: 111045 - DNA, 25 bp, Saccharomyces pastorianus
tcctcgttagtccttcagaatgggt

SEQ ID NO: 111046 - DNA, 25 bp, Saccharomyces pastorianus
agactattgtctcccagcattgaaa

SEQ ID NO: 111047 - DNA, 25 bp, Saccharomyces pastorianus
gacgtacaacttaattgcccattca

SEQ ID NO: 111048 - DNA, 25 bp, Saccharomyces pastorianus
gaatgggttgatctattcactccaa

SEQ ID NO: 111049 - DNA, 25 bp, Saccharomyces pastorianus
tcttttctgtttgttgtagtctcta

SEQ ID NO: 111050 - DNA, 25 bp, Saccharomyces pastorianus
aaatgcacttatctttttatgcaaa

SEQ ID NO: 111051 - DNA, 25 bp, Saccharomyces pastorianus
acaatcctgttgtcttggtttatta

SEQ ID NO: 111052 - DNA, 25 bp, Saccharomyces pastorianus
tgtcttggttctttgggtgcgatat

SEQ ID NO: 111053 - DNA, 25 bp, Saccharomyces pastorianus
acgcacagcaaattttcttctgctt

SEQ ID NO: 111054 - DNA, 25 bp, Saccharomyces pastorianus
gatattagggaaacaacgcacagca

SEQ ID NO: 111055 - DNA, 25 bp, Saccharomyces pastorianus
ttcacggatcaattttataaagcat

SEQ ID NO: 111056 - DNA, 25 bp, Saccharomyces pastorianus
gtcagagttgaagctatagctcctt

SEQ ID NO: 111057 - DNA, 25 bp, Saccharomyces pastorianus
tttcttctgctttcttataacgtta

SEQ ID NO: 111058 - DNA, 25 bp, Saccharomyces pastorianus
atagctccttttatgatgtgtcttg

SEQ ID NO: 111059 - DNA, 25 bp, Saccharomyces pastorianus
aagctgggcgagttatttgtttcta

SEQ ID NO: 111060 - DNA, 25 bp, Saccharomyces pastorianus
agctgtatatttgactcttttagta

SEQ ID NO: 111061 - DNA, 25 bp, Saccharomyces pastorianus
tggattaagttgtctctcgttcgtc

SEQ ID NO: 111062 - DNA, 25 bp, Saccharomyces pastorianus
atttgtagagcttttcctggcatac

SEQ ID NO: 111063 - DNA, 25 bp, Saccharomyces pastorianus
agtttccctcgaatcatacacacgt

SEQ ID NO: 111064 - DNA, 25 bp, Saccharomyces pastorianus
aagactttatttccgctcgagtccg

SEQ ID NO: 111065 - DNA, 25 bp, Saccharomyces pastorianus
gaattcctccggctaaccaatgaaa

SEQ ID NO: 111066 - DNA, 25 bp, Saccharomyces pastorianus
gagactcggtgtgccttacaattcc

SEQ ID NO: 111067 - DNA, 25 bp, Saccharomyces pastorianus
aaactgtcagtttccctcgaatcat

SEQ ID NO: 111068 - DNA, 25 bp, Saccharomyces pastorianus
ccgcacgcttggcaaagctgtatat

SEQ ID NO: 111069 - DNA, 25 bp, Saccharomyces pastorianus
tcgtccatactacacttttctcttt

SEQ ID NO: 111070 - DNA, 25 bp, Saccharomyces pastorianus
gctcgagtccgcttttaaccgccga

SEQ ID NO: 111071 - DNA, 25 bp, Saccharomyces pastorianus
tagaatcacaggaggcgcaagcacg

SEQ ID NO: 111072 - DNA, 25 bp, Saccharomyces pastorianus
gggcgctggaggaatctcaactgat

SEQ ID NO: 111073 - DNA, 25 bp, Saccharomyces pastorianus
ctacaggtcgacgaaatgggccctt

SEQ ID NO: 111074 - DNA, 25 bp, Saccharomyces pastorianus
gaagagtttctcagagccatcagac

SEQ ID NO: 111075 - DNA, 25 bp, Saccharomyces pastorianus
gaatagctctgcgaatcatggtaat

SEQ ID NO: 111076 - DNA, 25 bp, Saccharomyces pastorianus
tgatcgatgcgtatggtggagacct

SEQ ID NO: 111077 - DNA, 25 bp, Saccharomyces pastorianus
ggtgcagcagagtcatccgaacgaa

SEQ ID NO: 111078 - DNA, 25 bp, Saccharomyces pastorianus
gaaactttgaacacggagctgcaat

SEQ ID NO: 111079 - DNA, 25 bp, Saccharomyces pastorianus
aatgggcccttgagcgacgataatt

SEQ ID NO: 111080 - DNA, 25 bp, Saccharomyces pastorianus
gagaccttgaactttcaggcgacac

SEQ ID NO: 111081 - DNA, 25 bp, Saccharomyces pastorianus
cactatcggtagttctgttggcgtt

SEQ ID NO: 111082 - DNA, 25 bp, Saccharomyces pastorianus
ctctccagaagacctaacacacatt

SEQ ID NO: 111083 - DNA, 25 bp, Saccharomyces pastorianus
gtgctgcaagaaatcataccctctc

SEQ ID NO: 111084 - DNA, 25 bp, Saccharomyces pastorianus
acatggtgtcgtttctaagtatttt

SEQ ID NO: 111085 - DNA, 25 bp, Saccharomyces pastorianus
ccatgggataccacctggcagtaag

SEQ ID NO: 111086 - DNA, 25 bp, Saccharomyces pastorianus
ataacccctgtattgcaagtgctgc

SEQ ID NO: 111087 - DNA, 25 bp, Saccharomyces pastorianus
aagatacctgcctaaacaagcggag

SEQ ID NO: 111088 - DNA, 25 bp, Saccharomyces pastorianus
tatgatcaggacaccgcaacagagt

SEQ ID NO: 111089 - DNA, 25 bp, Saccharomyces pastorianus
cggtgatgttgggtacgtaactcta

SEQ ID NO: 111090 - DNA, 25 bp, Saccharomyces pastorianus
ctaatacggagggtcacttggaatt

SEQ ID NO: 111091 - DNA, 25 bp, Saccharomyces pastorianus
agcggaggaccatcgtttattgatt

SEQ ID NO: 111092 - DNA, 25 bp, Saccharomyces pastorianus
atggctaaggagtacccgcatttta

SEQ ID NO: 111093 - DNA, 25 bp, Saccharomyces pastorianus
accttctgaacccttggatactagc

SEQ ID NO: 111094 - DNA, 25 bp, Saccharomyces pastorianus
aatactacattaccttctgaaccct

SEQ ID NO: 111095 - DNA, 25 bp, Saccharomyces pastorianus
tggatcattctattgcgcaggctgc

SEQ ID NO: 111096 - DNA, 25 bp, Saccharomyces pastorianus
gataacacaccatcccattgcagat

SEQ ID NO: 111097 - DNA, 25 bp, Saccharomyces pastorianus
ccggtcccgtttatggcaatgtgtg

SEQ ID NO: 111098 - DNA, 25 bp, Saccharomyces pastorianus
cattgcagatttgctccgttggaaa

SEQ ID NO: 111099 - DNA, 25 bp, Saccharomyces pastorianus
gtgcctatggaagtccgttgctcaa

SEQ ID NO: 111100 - DNA, 25 bp, Saccharomyces pastorianus
aggccgtttggctgtaatactccaa

SEQ ID NO: 111101 - DNA, 25 bp, Saccharomyces pastorianus
agaattttatgtccacgtgcctatg

SEQ ID NO: 111102 - DNA, 25 bp, Saccharomyces pastorianus
ggaagtcttacgttcattggatcat

SEQ ID NO: 111103 - DNA, 25 bp, Saccharomyces pastorianus
atgtgtgccgcccattcctggataa

SEQ ID NO: 111104 - DNA, 25 bp, Saccharomyces pastorianus
aatactttctattgcagaatctgaa

SEQ ID NO: 111105 - DNA, 25 bp, Saccharomyces pastorianus
actatcgtctggcatatatatatat

SEQ ID NO: 111106 - DNA, 25 bp, Saccharomyces pastorianus
taacccggccggaaactacagtgat

SEQ ID NO: 111107 - DNA, 25 bp, Saccharomyces pastorianus
tattaatagtttccgatcgtcttat

SEQ ID NO: 111108 - DNA, 25 bp, Saccharomyces pastorianus
ctcgaggcgttttcgcgtggcataa

SEQ ID NO: 111109 - DNA, 25 bp, Saccharomyces pastorianus
tttcgcgtggcataacccggccgga

SEQ ID NO: 111110 - DNA, 25 bp, Saccharomyces pastorianus
cagtgatactatcgtctggcatata

SEQ ID NO: 111111 - DNA, 25 bp, Saccharomyces pastorianus
cgtcttattactcacttactatcaa

SEQ ID NO: 111112 - DNA, 25 bp, Saccharomyces pastorianus
ttagtttttcccttggctcgaggcg

SEQ ID NO: 111113 - DNA, 25 bp, Saccharomyces pastorianus
gaaagcactatttcattacttaaaa

SEQ ID NO: 111114 - DNA, 25 bp, Saccharomyces pastorianus
tttccgatcgtcttattactcactt

SEQ ID NO: 111115 - DNA, 25 bp, Saccharomyces pastorianus
gggactttattttcaagcatccaaa

SEQ ID NO: 111116 - DNA, 25 bp, Saccharomyces pastorianus
ctatgtaccctgtcgtttgagcagt

SEQ ID NO: 111117 - DNA, 25 bp, Saccharomyces pastorianus
gaatgccagcgccacattgaagaaa

SEQ ID NO: 111118 - DNA, 25 bp, Saccharomyces pastorianus
cttccttacccactgcattaataaa

SEQ ID NO: 111119 - DNA, 25 bp, Saccharomyces pastorianus
aggagacatttcaagcgctcacacc

SEQ ID NO: 111120 - DNA, 25 bp, Saccharomyces pastorianus
tgagtctatcaatggcgggcactgc

SEQ ID NO: 111121 - DNA, 25 bp, Saccharomyces pastorianus
tactgaccttcaaccactgtacgaa

SEQ ID NO: 111122 - DNA, 25 bp, Saccharomyces pastorianus
gtgtcagaccctaccgatttgaaat

SEQ ID NO: 111123 - DNA, 25 bp, Saccharomyces pastorianus
gagagacgccttagaagcccttgat

SEQ ID NO: 111124 - DNA, 25 bp, Saccharomyces pastorianus
aatcctccttcgagttcctatgtac

SEQ ID NO: 111125 - DNA, 25 bp, Saccharomyces pastorianus
ataaatgccaccagaccgtgtcaga

SEQ ID NO: 111126 - DNA, 25 bp, Saccharomyces pastorianus
tgggcacaaatttcacactcgcatt

SEQ ID NO: 111127 - DNA, 25 bp, Saccharomyces pastorianus
gctgcggccttttatgacaatctaa

SEQ ID NO: 111128 - DNA, 25 bp, Saccharomyces pastorianus
gactctaacgtcattggtggctcta

SEQ ID NO: 111129 - DNA, 25 bp, Saccharomyces pastorianus
tgacgaagatcatgctgcggccttt

SEQ ID NO: 111130 - DNA, 25 bp, Saccharomyces pastorianus
gatacggcgggctcttttcactaac

SEQ ID NO: 111131 - DNA, 25 bp, Saccharomyces pastorianus
gtaggcctcgaaagtcagtcaatat

SEQ ID NO: 111132 - DNA, 25 bp, Saccharomyces pastorianus
ttctcagaatcagcgtaggcctcga

SEQ ID NO: 111133 - DNA, 25 bp, Saccharomyces pastorianus
tgaacaagggtccttccttgggcac

SEQ ID NO: 111134 - DNA, 25 bp, Saccharomyces pastorianus
gtttgcctcccgttttatgcaatta

SEQ ID NO: 111135 - DNA, 25 bp, Saccharomyces pastorianus
tacagcaccgaatacctcttagata

SEQ ID NO: 111136 - DNA, 25 bp, Saccharomyces pastorianus
atacgctcatgacatactaccacga

SEQ ID NO: 111137 - DNA, 25 bp, Saccharomyces pastorianus
gtaaagctgccgacctttcttctaa

SEQ ID NO: 111138 - DNA, 25 bp, Saccharomyces pastorianus
tgaaaagattccctacccctatcct

SEQ ID NO: 111139 - DNA, 25 bp, Saccharomyces pastorianus
agtatactggcctttctttgtggct

SEQ ID NO: 111140 - DNA, 25 bp, Saccharomyces pastorianus
tatgagtaaagctgccgacctttct

SEQ ID NO: 111141 - DNA, 25 bp, Saccharomyces pastorianus
tgatccaagaaatcccagattcgca

SEQ ID NO: 111142 - DNA, 25 bp, Saccharomyces pastorianus
atactggcctttctttgtggctggc

SEQ ID NO: 111143 - DNA, 25 bp, Saccharomyces pastorianus
ctggcgccgcagtgtattatggtat

SEQ ID NO: 111144 - DNA, 25 bp, Saccharomyces pastorianus
tacccctatccttaaagtatactgg

SEQ ID NO: 111145 - DNA, 25 bp, Saccharomyces pastorianus
tgccgacctttcttctaacacgaag

SEQ ID NO: 111146 - DNA, 25 bp, Saccharomyces pastorianus
tttctttgtggctggcgccgcagtg

SEQ ID NO: 111147 - DNA, 25 bp, Saccharomyces pastorianus
gccgcagtgtattatggtatgagta

SEQ ID NO: 111148 - DNA, 25 bp, Saccharomyces pastorianus
ctttctggattgatactgtctctgt

SEQ ID NO: 111149 - DNA, 25 bp, Saccharomyces pastorianus
tctgttgtttgctcatgccttacaa

SEQ ID NO: 111150 - DNA, 25 bp, Saccharomyces pastorianus
attcttggcgatacaccagtctggc

SEQ ID NO: 111151 - DNA, 25 bp, Saccharomyces pastorianus
agtctggcccgtatctctgttgttt

SEQ ID NO: 111152 - DNA, 25 bp, Saccharomyces pastorianus
gctgtatccgttatcactttctgga

SEQ ID NO: 111153 - DNA, 25 bp, Saccharomyces pastorianus
agcgctggacataatcacgagaaca

SEQ ID NO: 111154 - DNA, 25 bp, Saccharomyces pastorianus
gtattgcggtgctagaattcttggc

SEQ ID NO: 111155 - DNA, 25 bp, Saccharomyces pastorianus
gactccaatcttcaccattacttgt

SEQ ID NO: 111156 - DNA, 25 bp, Saccharomyces pastorianus
gaggccacagagtacgctgtatccg

SEQ ID NO: 111157 - DNA, 25 bp, Saccharomyces pastorianus
tgatgttaccaatcaagcgctggac

SEQ ID NO: 111158 - DNA, 25 bp, Saccharomyces pastorianus
gggtaaatcgacacagactccaatc

SEQ ID NO: 111159 - DNA, 25 bp, Saccharomyces pastorianus
gtggtaccaggttttgactttgagg

SEQ ID NO: 111160 - DNA, 25 bp, Saccharomyces pastorianus
gtttcgttaaagtcccaatgcctga

SEQ ID NO: 111161 - DNA, 25 bp, Saccharomyces pastorianus
aaggcaagtttccttctgccaaacg

SEQ ID NO: 111162 - DNA, 25 bp, Saccharomyces pastorianus
tgaactgaaacaccttgtgggacct

SEQ ID NO: 111163 - DNA, 25 bp, Saccharomyces pastorianus
gactttgaggaccataccttcttga

SEQ ID NO: 111164 - DNA, 25 bp, Saccharomyces pastorianus
agccaccaagtagtttgcaacaatt

SEQ ID NO: 111165 - DNA, 25 bp, Saccharomyces pastorianus
gaggcaagggtcaatacgttctagt

SEQ ID NO: 111166 - DNA, 25 bp, Saccharomyces pastorianus
tatagagccggccagtttcgttaaa

SEQ ID NO: 111167 - DNA, 25 bp, Saccharomyces pastorianus
gcaaatgcagctatagagccggcca

SEQ ID NO: 111168 - DNA, 25 bp, Saccharomyces pastorianus
tacgttctagtatatcctgatggtc

SEQ ID NO: 111169 - DNA, 25 bp, Saccharomyces pastorianus
taggtctccctacaccatggaagta

SEQ ID NO: 111170 - DNA, 25 bp, Saccharomyces pastorianus
atggtgtgactaactctgctgactc

SEQ ID NO: 111171 - DNA, 25 bp, Saccharomyces pastorianus
tgaatccccacatgaacaccgagag

SEQ ID NO: 111172 - DNA, 25 bp, Saccharomyces pastorianus
acgatactgtcgcaatgaacctgaa

SEQ ID NO: 111173 - DNA, 25 bp, Saccharomyces pastorianus
ctattaccaccaccatttatttcta

SEQ ID NO: 111174 - DNA, 25 bp, Saccharomyces pastorianus
atgctgccagtatactcaagagttc

SEQ ID NO: 111175 - DNA, 25 bp, Saccharomyces pastorianus
cgctgtacctgatgaaatgctgcca

SEQ ID NO: 111176 - DNA, 25 bp, Saccharomyces pastorianus
aaacatcagagttgtatcccttcaa

SEQ ID NO: 111177 - DNA, 25 bp, Saccharomyces pastorianus
atgacaggcacaactctattaccac

SEQ ID NO: 111178 - DNA, 25 bp, Saccharomyces pastorianus
aaccatcacctagttcatcggtaga

SEQ ID NO: 111179 - DNA, 25 bp, Saccharomyces pastorianus
gttattgatgttgctgatcgctaca

SEQ ID NO: 111180 - DNA, 25 bp, Saccharomyces pastorianus
taagcaatggccacgatggtacgaa

SEQ ID NO: 111181 - DNA, 25 bp, Saccharomyces pastorianus
gcagtcatgttgcaattcgttgata

SEQ ID NO: 111182 - DNA, 25 bp, Saccharomyces pastorianus
gtattaaaagacctcactcgtgggt

SEQ ID NO: 111183 - DNA, 25 bp, Saccharomyces pastorianus
ttgcctgcagttggtgtactgttca

SEQ ID NO: 111184 - DNA, 25 bp, Saccharomyces pastorianus
gctcgcccgggcaattgacaagaga

SEQ ID NO: 111185 - DNA, 25 bp, Saccharomyces pastorianus
tcactcgtgggttaaatagcatcaa

SEQ ID NO: 111186 - DNA, 25 bp, Saccharomyces pastorianus
atagcatcaagctgagtgactccgt

SEQ ID NO: 111187 - DNA, 25 bp, Saccharomyces pastorianus
aggagccaagcaaaaagattcggac

SEQ ID NO: 111188 - DNA, 25 bp, Saccharomyces pastorianus
tgacactagcttgtttacgaccgag

SEQ ID NO: 111189 - DNA, 25 bp, Saccharomyces pastorianus
gtactgttcattccgtctttgcgac

SEQ ID NO: 111190 - DNA, 25 bp, Saccharomyces pastorianus
tgagtgactccgtttgcctgcagtt

SEQ ID NO: 111191 - DNA, 25 bp, Saccharomyces pastorianus
tccgtctttgcgacctgaatcgaaa

SEQ ID NO: 111192 - DNA, 25 bp, Saccharomyces pastorianus
gcagtttcatgttctttcaaagcaa

SEQ ID NO: 111193 - DNA, 25 bp, Saccharomyces pastorianus
gaggattttcaggtcagctctgata

SEQ ID NO: 111194 - DNA, 25 bp, Saccharomyces pastorianus
gtatccattagataacgcgttcttc

SEQ ID NO: 111195 - DNA, 25 bp, Saccharomyces pastorianus
ggacaaacttctacgtcatcgagga

SEQ ID NO: 111196 - DNA, 25 bp, Saccharomyces pastorianus
actgtagagtcattgttcctggaga

SEQ ID NO: 111197 - DNA, 25 bp, Saccharomyces pastorianus
taccacttttgccaacatcagtaag

SEQ ID NO: 111198 - DNA, 25 bp, Saccharomyces pastorianus
tatgggttccgctggtgaagatgat

SEQ ID NO: 111199 - DNA, 25 bp, Saccharomyces pastorianus
ggtactgcgttcaaatagaggttct

SEQ ID NO: 111200 - DNA, 25 bp, Saccharomyces pastorianus
taagccaactttgtacataccattc

SEQ ID NO: 111201 - DNA, 25 bp, Saccharomyces pastorianus
gagtttgattcagatgcggctttaa

SEQ ID NO: 111202 - DNA, 25 bp, Saccharomyces pastorianus
ggttgcaaaccgctttaggttcaga

SEQ ID NO: 111203 - DNA, 25 bp, Saccharomyces pastorianus
ccgtatgcttgtgtgacttgtcgaa

SEQ ID NO: 111204 - DNA, 25 bp, Saccharomyces pastorianus
cctgaggacccttatgaacatttta

SEQ ID NO: 111205 - DNA, 25 bp, Saccharomyces pastorianus
caggcggctacaagactctcaaaat

SEQ ID NO: 111206 - DNA, 25 bp, Saccharomyces pastorianus
gaaagtttcgttatcgaccgatatt

SEQ ID NO: 111207 - DNA, 25 bp, Saccharomyces pastorianus
gggttcgaatttgcagcgatgtcca

SEQ ID NO: 111208 - DNA, 25 bp, Saccharomyces pastorianus
ctttgattccagtgtccttcttaaa

SEQ ID NO: 111209 - DNA, 25 bp, Saccharomyces pastorianus
tgataccgttacttcatatgagaga

SEQ ID NO: 111210 - DNA, 25 bp, Saccharomyces pastorianus
aaaatgttctacaaccaggcggcta

SEQ ID NO: 111211 - DNA, 25 bp, Saccharomyces pastorianus
atgcgggatgctgttctgttttata

SEQ ID NO: 111212 - DNA, 25 bp, Saccharomyces pastorianus
gaagtcaatgattaccttgctgaaa

SEQ ID NO: 111213 - DNA, 25 bp, Saccharomyces pastorianus
ggtattactttatcctgaggaccct

SEQ ID NO: 111214 - DNA, 25 bp, Saccharomyces pastorianus
taggatctgacaacgctgctgtaca

SEQ ID NO: 111215 - DNA, 25 bp, Saccharomyces pastorianus
gtgtcaacctggcatttatactgat

SEQ ID NO: 111216 - DNA, 25 bp, Saccharomyces pastorianus
tgttgggaaacgacaccgcttattt

SEQ ID NO: 111217 - DNA, 25 bp, Saccharomyces pastorianus
tgacctaccgtttggcattgacatc

SEQ ID NO: 111218 - DNA, 25 bp, Saccharomyces pastorianus
ggcagtcctgatccaaatgtaaaag

SEQ ID NO: 111219 - DNA, 25 bp, Saccharomyces pastorianus
ggaaatgccctatcaaaggccttga

SEQ ID NO: 111220 - DNA, 25 bp, Saccharomyces pastorianus
gatgttcaacggcatggttttttac

SEQ ID NO: 111221 - DNA, 25 bp, Saccharomyces pastorianus
acaccgcttatttcctatacttttg

SEQ ID NO: 111222 - DNA, 25 bp, Saccharomyces pastorianus
cagtgggtcctattggtactcgcat

SEQ ID NO: 111223 - DNA, 25 bp, Saccharomyces pastorianus
aggtatgccatccagtgggtcctat

SEQ ID NO: 111224 - DNA, 25 bp, Saccharomyces pastorianus
gtactcgcatttcttgcagcaaatc

SEQ ID NO: 111225 - DNA, 25 bp, Saccharomyces pastorianus
gggatttcgttctcaatcagttact

SEQ ID NO: 111226 - DNA, 25 bp, Saccharomyces pastorianus
tcagttacttgacgcgggaatattg

SEQ ID NO: 111227 - DNA, 25 bp, Saccharomyces pastorianus
aacagttcacatcacgcacgttatg

SEQ ID NO: 111228 - DNA, 25 bp, Saccharomyces pastorianus
atcacgcacgttatgaaagccttaa

SEQ ID NO: 111229 - DNA, 25 bp, Saccharomyces pastorianus
catgtaattacgtttatgacgcgac

SEQ ID NO: 111230 - DNA, 25 bp, Saccharomyces pastorianus
aaaacactatatggctaagcatggt

SEQ ID NO: 111231 - DNA, 25 bp, Saccharomyces pastorianus
gatctcaagagcaagaactgggcga

SEQ ID NO: 111232 - DNA, 25 bp, Saccharomyces pastorianus
aagaactgggcgatattgtcgatga

SEQ ID NO: 111233 - DNA, 25 bp, Saccharomyces pastorianus
ttatgacgcgactttcatttacagc

SEQ ID NO: 111234 - DNA, 25 bp, Saccharomyces pastorianus
tagccaaaacattgttccaacaggg

SEQ ID NO: 111235 - DNA, 25 bp, Saccharomyces pastorianus
aataagtttgtcatggagatagcca

SEQ ID NO: 111236 - DNA, 25 bp, Saccharomyces pastorianus
gtataggcaggcgtacgggctaaat

SEQ ID NO: 111237 - DNA, 25 bp, Saccharomyces pastorianus
gacggtagggtcttcagtgatcata

SEQ ID NO: 111238 - DNA, 25 bp, Saccharomyces pastorianus
gaaatcggcgatcctcttttgatat

SEQ ID NO: 111239 - DNA, 25 bp, Saccharomyces pastorianus
agtaagcatacgctccacggatatt

SEQ ID NO: 111240 - DNA, 25 bp, Saccharomyces pastorianus
gcaattcctattttggtgggcacaa

SEQ ID NO: 111241 - DNA, 25 bp, Saccharomyces pastorianus
gaattcatcaacatgctcccaattg

SEQ ID NO: 111242 - DNA, 25 bp, Saccharomyces pastorianus
atttctgtttgacctgacacgtcca

SEQ ID NO: 111243 - DNA, 25 bp, Saccharomyces pastorianus
aatgctcctcttatattctgctcta

SEQ ID NO: 111244 - DNA, 25 bp, Saccharomyces pastorianus
ataatatcaggaagccctcctcgtc

SEQ ID NO: 111245 - DNA, 25 bp, Saccharomyces pastorianus
gtggccagcaacatcgacatcataa

SEQ ID NO: 111246 - DNA, 25 bp, Saccharomyces pastorianus
gggctaaatgattcggcaattccta

SEQ ID NO: 111247 - DNA, 25 bp, Saccharomyces pastorianus
aaggcaggaggtatcgtcttacaaa

SEQ ID NO: 111248 - DNA, 25 bp, Saccharomyces pastorianus
gaagagccagatgcggttaatgacg

SEQ ID NO: 111249 - DNA, 25 bp, Saccharomyces pastorianus
agacagcgatcactcaagcaggaaa

SEQ ID NO: 111250 - DNA, 25 bp, Saccharomyces pastorianus
atttatgacgatttctctaagggcc

SEQ ID NO: 111251 - DNA, 25 bp, Saccharomyces pastorianus
aacttctgaagagagatggcctgct

SEQ ID NO: 111252 - DNA, 25 bp, Saccharomyces pastorianus
agatggcctgctcaatgaggcagaa

SEQ ID NO: 111253 - DNA, 25 bp, Saccharomyces pastorianus
aagcaggaaacttggaggcactaca

SEQ ID NO: 111254 - DNA, 25 bp, Saccharomyces pastorianus
gtatcaacgcctcaatgaaatcgga

SEQ ID NO: 111255 - DNA, 25 bp, Saccharomyces pastorianus
gcagaggaggcagacagcgatcact

SEQ ID NO: 111256 - DNA, 25 bp, Saccharomyces pastorianus
gaagataatagtcgccagggtaata

SEQ ID NO: 111257 - DNA, 25 bp, Saccharomyces pastorianus
ttggaggcactacaagcgattttag

SEQ ID NO: 111258 - DNA, 25 bp, Saccharomyces pastorianus
ggatcatacgctggttgggcccaag

SEQ ID NO: 111259 - DNA, 25 bp, Saccharomyces pastorianus
tacaacgccttacctatctcaagaa

SEQ ID NO: 111260 - DNA, 25 bp, Saccharomyces pastorianus
gagggactaccaaatatctgcgaac

SEQ ID NO: 111261 - DNA, 25 bp, Saccharomyces pastorianus
gctgattgcgtttgtctaatgggac

SEQ ID NO: 111262 - DNA, 25 bp, Saccharomyces pastorianus
agtgaggagctcacttctcgagcca

SEQ ID NO: 111263 - DNA, 25 bp, Saccharomyces pastorianus
gcccaaggtgtcctattctctaaag

SEQ ID NO: 111264 - DNA, 25 bp, Saccharomyces pastorianus
atattacttctgacaccacatacct

SEQ ID NO: 111265 - DNA, 25 bp, Saccharomyces pastorianus
aacccagagctcgaccatattagat

SEQ ID NO: 111266 - DNA, 25 bp, Saccharomyces pastorianus
tcgagccactgaagccaagttgcgt

SEQ ID NO: 111267 - DNA, 25 bp, Saccharomyces pastorianus
gtccccgtagatgtccatgttagta

SEQ ID NO: 111268 - DNA, 25 bp, Saccharomyces pastorianus
tgggacttcacatggatggcatcgt

SEQ ID NO: 111269 - DNA, 25 bp, Saccharomyces pastorianus
gtacatcagagcttcgatgtctctt

SEQ ID NO: 111270 - DNA, 25 bp, Saccharomyces pastorianus
gatgccatatatacctggttcacaa

SEQ ID NO: 111271 - DNA, 25 bp, Saccharomyces pastorianus
gaacgggtctatgttactggatggt

SEQ ID NO: 111272 - DNA, 25 bp, Saccharomyces pastorianus
tggcgactccctaaatgggttttgg

SEQ ID NO: 111273 - DNA, 25 bp, Saccharomyces pastorianus
gtgtcgtttatgtgagaccacctat

SEQ ID NO: 111274 - DNA, 25 bp, Saccharomyces pastorianus
tgcaaaggcttattgacgacgacaa

SEQ ID NO: 111275 - DNA, 25 bp, Saccharomyces pastorianus
agttagattgggttacgtcgcatca

SEQ ID NO: 111276 - DNA, 25 bp, Saccharomyces pastorianus
tggtcttttacctcctttggaagag

SEQ ID NO: 111277 - DNA, 25 bp, Saccharomyces pastorianus
gactatggtcgtatctttttgcaaa

SEQ ID NO: 111278 - DNA, 25 bp, Saccharomyces pastorianus
ggaatccattttcttctcatccaaa

SEQ ID NO: 111279 - DNA, 25 bp, Saccharomyces pastorianus
agatgagagcgcgtggttgccaaac

SEQ ID NO: 111280 - DNA, 25 bp, Saccharomyces pastorianus
aagacactttgtgctcgatgagcaa

SEQ ID NO: 111281 - DNA, 25 bp, Saccharomyces pastorianus
atcattgccgtcgaacgtcgcggcg

SEQ ID NO: 111282 - DNA, 25 bp, Saccharomyces pastorianus
ttctgccaacatcattgccgtcgaa

SEQ ID NO: 111283 - DNA, 25 bp, Saccharomyces pastorianus
gaccggctacttattccccaaggat

SEQ ID NO: 111284 - DNA, 25 bp, Saccharomyces pastorianus
aagagtgtcaagaccggctacttat

SEQ ID NO: 111285 - DNA, 25 bp, Saccharomyces pastorianus
gcaaccgtgtcaacaagagtgtcaa

SEQ ID NO: 111286 - DNA, 25 bp, Saccharomyces pastorianus
aaggatcacgttccttctgccaaca

SEQ ID NO: 111287 - DNA, 25 bp, Saccharomyces pastorianus
atgaccatggaccaaggccttaacc

SEQ ID NO: 111288 - DNA, 25 bp, Saccharomyces pastorianus
aagcaattcttccttgacgatgtcg

SEQ ID NO: 111289 - DNA, 25 bp, Saccharomyces pastorianus
gacgatgtcgtcctacaagacactt

SEQ ID NO: 111290 - DNA, 25 bp, Saccharomyces pastorianus
tacttattccccaaggatcacgttc

SEQ ID NO: 111291 - DNA, 25 bp, Saccharomyces pastorianus
gagactcaactctatcgatcatgac

SEQ ID NO: 111292 - DNA, 25 bp, Saccharomyces pastorianus
ttgcgtaccgtgaccatggcggaat

SEQ ID NO: 111293 - DNA, 25 bp, Saccharomyces pastorianus
tgccacctatggctgaggttcctat

SEQ ID NO: 111294 - DNA, 25 bp, Saccharomyces pastorianus
ttagaagggtgcctttgccacctat

SEQ ID NO: 111295 - DNA, 25 bp, Saccharomyces pastorianus
gaggttcctatgttgtctactcaaa

SEQ ID NO: 111296 - DNA, 25 bp, Saccharomyces pastorianus
attcccaagactacttttacgctca

SEQ ID NO: 111297 - DNA, 25 bp, Saccharomyces pastorianus
ggttctggcgaactaaaatctatgt

SEQ ID NO: 111298 - DNA, 25 bp, Saccharomyces pastorianus
tttacgctcaaaatcgctcccaaca

SEQ ID NO: 111299 - DNA, 25 bp, Saccharomyces pastorianus
gcctccgcttcttcgttagaaatgt

SEQ ID NO: 111300 - DNA, 25 bp, Saccharomyces pastorianus
gtctactcaaaactccatgggcagc

SEQ ID NO: 111301 - DNA, 25 bp, Saccharomyces pastorianus
acaacaaatttggttctggcgaact

SEQ ID NO: 111302 - DNA, 25 bp, Saccharomyces pastorianus
ggacgctctgttttgttttctataa

SEQ ID NO: 111303 - DNA, 25 bp, Saccharomyces pastorianus
gactcttccgtcatctagggtatat

SEQ ID NO: 111304 - DNA, 25 bp, Saccharomyces pastorianus
aatagcggcgtttatctgctcagta

SEQ ID NO: 111305 - DNA, 25 bp, Saccharomyces pastorianus
gaatatctccttttgtttgtatcgt

SEQ ID NO: 111306 - DNA, 25 bp, Saccharomyces pastorianus
agcagcaactgtactagccttcgaa

SEQ ID NO: 111307 - DNA, 25 bp, Saccharomyces pastorianus
ttgtggacgattgcggacgctctgt

SEQ ID NO: 111308 - DNA, 25 bp, Saccharomyces pastorianus
aagaagtactggctcctgtgtgact

SEQ ID NO: 111309 - DNA, 25 bp, Saccharomyces pastorianus
tattctgcggtttgtcgatacgact

SEQ ID NO: 111310 - DNA, 25 bp, Saccharomyces pastorianus
gtggccgtggaattagcagcagcaa

SEQ ID NO: 111311 - DNA, 25 bp, Saccharomyces pastorianus
gcaattggcttaatactgttccagt

SEQ ID NO: 111312 - DNA, 25 bp, Saccharomyces pastorianus
aggtctctggaagtttctgtggccg

SEQ ID NO: 111313 - DNA, 25 bp, Saccharomyces pastorianus
aagtcggaagcaactccacaaccag

SEQ ID NO: 111314 - DNA, 25 bp, Saccharomyces pastorianus
gccacgtggcgctttatctaatggt

SEQ ID NO: 111315 - DNA, 25 bp, Saccharomyces pastorianus
gccgtcgccaaagtttccagaatgt

SEQ ID NO: 111316 - DNA, 25 bp, Saccharomyces pastorianus
attgccacaagctggtaagtcggaa

SEQ ID NO: 111317 - DNA, 25 bp, Saccharomyces pastorianus
gttacagagatgcttgtcgcaattc

SEQ ID NO: 111318 - DNA, 25 bp, Saccharomyces pastorianus
ttaccgccttcactagacgaactga

SEQ ID NO: 111319 - DNA, 25 bp, Saccharomyces pastorianus
agatcacaattcaggcgtgttgcca

SEQ ID NO: 111320 - DNA, 25 bp, Saccharomyces pastorianus
gtcgcctaaacatgcttccatttta

SEQ ID NO: 111321 - DNA, 25 bp, Saccharomyces pastorianus
gtcgcaattctaaacatctgtactg

SEQ ID NO: 111322 - DNA, 25 bp, Saccharomyces pastorianus
gaaataagattctggccgtcgccaa

SEQ ID NO: 111323 - DNA, 25 bp, Saccharomyces pastorianus
atgaagccctgtctacctttgaaag

SEQ ID NO: 111324 - DNA, 25 bp, Saccharomyces pastorianus
cattatatctggttgagcttgttca

SEQ ID NO: 111325 - DNA, 25 bp, Saccharomyces pastorianus
ctaccttctgttttcgcgagattaa

SEQ ID NO: 111326 - DNA, 25 bp, Saccharomyces pastorianus
tgttctctcgctacttttctggtat

SEQ ID NO: 111327 - DNA, 25 bp, Saccharomyces pastorianus
gatcatacgctttactcgatgctaa

SEQ ID NO: 111328 - DNA, 25 bp, Saccharomyces pastorianus
gctttagatgaagccctaccttctg

SEQ ID NO: 111329 - DNA, 25 bp, Saccharomyces pastorianus
gcgtattttaagtggttctctgaac

SEQ ID NO: 111330 - DNA, 25 bp, Saccharomyces pastorianus
tggtaggcgcatattttgttctctc

SEQ ID NO: 111331 - DNA, 25 bp, Saccharomyces pastorianus
attaatgtatattcaatcccggagt

SEQ ID NO: 111332 - DNA, 25 bp, Saccharomyces pastorianus
agctggtttgagtttcttcttggat

SEQ ID NO: 111333 - DNA, 25 bp, Saccharomyces pastorianus
atcccggagttgaaccaagctttag

SEQ ID NO: 111334 - DNA, 25 bp, Saccharomyces pastorianus
ttctggtatttctctcgttttattg

SEQ ID NO: 111335 - DNA, 25 bp, Saccharomyces pastorianus
caaggtgcttcgagagcgttatcaa

SEQ ID NO: 111336 - DNA, 25 bp, Saccharomyces pastorianus
aagggctcccattgaagtcctggct

SEQ ID NO: 111337 - DNA, 25 bp, Saccharomyces pastorianus
gttggagtaccaaacgacgtgctgt

SEQ ID NO: 111338 - DNA, 25 bp, Saccharomyces pastorianus
gtggttctatccaatcatggtggta

SEQ ID NO: 111339 - DNA, 25 bp, Saccharomyces pastorianus
ggctgaaaccatgccaatcctggaa

SEQ ID NO: 111340 - DNA, 25 bp, Saccharomyces pastorianus
aaagcgttatgtctaggtgctaaag

SEQ ID NO: 111341 - DNA, 25 bp, Saccharomyces pastorianus
cattgcggaattgaagcctgatctt

SEQ ID NO: 111342 - DNA, 25 bp, Saccharomyces pastorianus
aggtgttcaacgtaccgaagatgtt

SEQ ID NO: 111343 - DNA, 25 bp, Saccharomyces pastorianus
ggtagaccattcttgtatgcgaact

SEQ ID NO: 111344 - DNA, 25 bp, Saccharomyces pastorianus
gtgttcgtcgtggtacagatgtctt

SEQ ID NO: 111345 - DNA, 25 bp, Saccharomyces pastorianus
attaggtgttactagcattgcggaa

SEQ ID NO: 111346 - DNA, 25 bp, Saccharomyces pastorianus
taattgcatcacaagcacccggtac

SEQ ID NO: 111347 - DNA, 25 bp, Saccharomyces pastorianus
ggttagcatgcaccacactatgaac

SEQ ID NO: 111348 - DNA, 25 bp, Saccharomyces pastorianus
ggttccgggtgtgctaatcttaata

SEQ ID NO: 111349 - DNA, 25 bp, Saccharomyces pastorianus
cactacatacaacagcgacgccaat

SEQ ID NO: 111350 - DNA, 25 bp, Saccharomyces pastorianus
tatcatcttctaccatcccaaagta

SEQ ID NO: 111351 - DNA, 25 bp, Saccharomyces pastorianus
aattccggtagcaatgccgccacta

SEQ ID NO: 111352 - DNA, 25 bp, Saccharomyces pastorianus
tgccatggccgcgttgactaacaac

SEQ ID NO: 111353 - DNA, 25 bp, Saccharomyces pastorianus
acatgattcatggttatttcggtaa

SEQ ID NO: 111354 - DNA, 25 bp, Saccharomyces pastorianus
aacaggcacgagtcctactggaagt

SEQ ID NO: 111355 - DNA, 25 bp, Saccharomyces pastorianus
atatgtcccctgaaaccggttagca

SEQ ID NO: 111356 - DNA, 25 bp, Saccharomyces pastorianus
ggtaacactaatcgcgacataacag

SEQ ID NO: 111357 - DNA, 25 bp, Saccharomyces pastorianus
aatattgactgccactggacctgaa

SEQ ID NO: 111358 - DNA, 25 bp, Saccharomyces pastorianus
gacgctttttactacctgactagat

SEQ ID NO: 111359 - DNA, 25 bp, Saccharomyces pastorianus
tccctcaccagtttatttccaaaag

SEQ ID NO: 111360 - DNA, 25 bp, Saccharomyces pastorianus
tagggcaaggttggcctctacttac

SEQ ID NO: 111361 - DNA, 25 bp, Saccharomyces pastorianus
aagaatgctttccacgacgatcatc

SEQ ID NO: 111362 - DNA, 25 bp, Saccharomyces pastorianus
agagatggtgcttatcctcatgtct

SEQ ID NO: 111363 - DNA, 25 bp, Saccharomyces pastorianus
gtttgtcttcaatacggcagccgtt

SEQ ID NO: 111364 - DNA, 25 bp, Saccharomyces pastorianus
cgtggaatttatcctgctggtcttc

SEQ ID NO: 111365 - DNA, 25 bp, Saccharomyces pastorianus
tttacgttttgacttggtgctcgaa

SEQ ID NO: 111366 - DNA, 25 bp, Saccharomyces pastorianus
gacgatcatcgtagtgcccaattgg

SEQ ID NO: 111367 - DNA, 25 bp, Saccharomyces pastorianus
ctggtcttctggtctgttagggcaa

SEQ ID NO: 111368 - DNA, 25 bp, Saccharomyces pastorianus
aaattgcgctcccatttaggtggtt

SEQ ID NO: 111369 - DNA, 25 bp, Saccharomyces pastorianus
agcaccaaagctatccttccaggat

SEQ ID NO: 111370 - DNA, 25 bp, Saccharomyces pastorianus
tctagccttaatttctcatatcggg

SEQ ID NO: 111371 - DNA, 25 bp, Saccharomyces pastorianus
gttattcctgacatgaagctctatg

SEQ ID NO: 111372 - DNA, 25 bp, Saccharomyces pastorianus
gggacccgacataattgcagcattt

SEQ ID NO: 111373 - DNA, 25 bp, Saccharomyces pastorianus
gtttacccacacaacttgaagctgt

SEQ ID NO: 111374 - DNA, 25 bp, Saccharomyces pastorianus
taggtggttctccaggaatactaat

SEQ ID NO: 111375 - DNA, 25 bp, Saccharomyces pastorianus
caaggcttcccaacaggttcatgaa

SEQ ID NO: 111376 - DNA, 25 bp, Saccharomyces pastorianus
gtggtaaggccaaggcttcccaaca

SEQ ID NO: 111377 - DNA, 25 bp, Saccharomyces pastorianus
ggtcatatttttgctggtaatgtca

SEQ ID NO: 111378 - DNA, 25 bp, Saccharomyces pastorianus
acggacatcgaggaatttgcatctt

SEQ ID NO: 111379 - DNA, 25 bp, Saccharomyces pastorianus
gagagctacttacgacgattaccag

SEQ ID NO: 111380 - DNA, 25 bp, Saccharomyces pastorianus
gcggcaataacaacactactgactt

SEQ ID NO: 111381 - DNA, 25 bp, Saccharomyces pastorianus
taaagacacgtttgcgctctctggg

SEQ ID NO: 111382 - DNA, 25 bp, Saccharomyces pastorianus
aaactggcctcgctagttaagctca

SEQ ID NO: 111383 - DNA, 25 bp, Saccharomyces pastorianus
gaaagctgcagcaccaggtatccaa

SEQ ID NO: 111384 - DNA, 25 bp, Saccharomyces pastorianus
gctctctgggctggattggtgctaa

SEQ ID NO: 111385 - DNA, 25 bp, Saccharomyces pastorianus
ttgctgcttatagagcgggcgcgat

SEQ ID NO: 111386 - DNA, 25 bp, Saccharomyces pastorianus
aaattaggcattgccaaccccatca

SEQ ID NO: 111387 - DNA, 25 bp, Saccharomyces pastorianus
agatttaacttctccttctgctaac

SEQ ID NO: 111388 - DNA, 25 bp, Saccharomyces pastorianus
gcttccactttcacggctattaaaa

SEQ ID NO: 111389 - DNA, 25 bp, Saccharomyces pastorianus
gggtttccaaagtcctctagaagat

SEQ ID NO: 111390 - DNA, 25 bp, Saccharomyces pastorianus
gacccctccgtttatggaagacgct

SEQ ID NO: 111391 - DNA, 25 bp, Saccharomyces pastorianus
gcagctgatggatttatcgccggag

SEQ ID NO: 111392 - DNA, 25 bp, Saccharomyces pastorianus
aactcttttggagacgtgtatgaaa

SEQ ID NO: 111393 - DNA, 25 bp, Saccharomyces pastorianus
gtttgccgtccctagcagattaatt

SEQ ID NO: 111394 - DNA, 25 bp, Saccharomyces pastorianus
gaaggccgatacattgtcgaggcaa

SEQ ID NO: 111395 - DNA, 25 bp, Saccharomyces pastorianus
gagggatgtagccaacgtatatgat

SEQ ID NO: 111396 - DNA, 25 bp, Saccharomyces pastorianus
ggttcatttatgcatcttgtcattt

SEQ ID NO: 111397 - DNA, 25 bp, Saccharomyces pastorianus
cgagtcaagactgtacggcgaagca

SEQ ID NO: 111398 - DNA, 25 bp, Saccharomyces pastorianus
agaatttctagatacgcagctgatg

SEQ ID NO: 111399 - DNA, 25 bp, Saccharomyces pastorianus
tcacgtacctttggtcttctttaat

SEQ ID NO: 111400 - DNA, 25 bp, Saccharomyces pastorianus
tgcgaaatttgctatcacgtacctt

SEQ ID NO: 111401 - DNA, 25 bp, Saccharomyces pastorianus
ttacgaggctgcttccacgagaaaa

SEQ ID NO: 111402 - DNA, 25 bp, Saccharomyces pastorianus
taatgatgaccaaattccgcccctt

SEQ ID NO: 111403 - DNA, 25 bp, Saccharomyces pastorianus
aaaacgccatggcatgtcacctgat

SEQ ID NO: 111404 - DNA, 25 bp, Saccharomyces pastorianus
caagttatccaactggcggttttca

SEQ ID NO: 111405 - DNA, 25 bp, Saccharomyces pastorianus
gacaacgggtttggactggcataca

SEQ ID NO: 111406 - DNA, 25 bp, Saccharomyces pastorianus
aaaagagcattctacgtacctgaga

SEQ ID NO: 111407 - DNA, 25 bp, Saccharomyces pastorianus
tcgatcgtcatttcttcggtctaaa

SEQ ID NO: 111408 - DNA, 25 bp, Saccharomyces pastorianus
gtccaccgcttccttagaatttgtt

SEQ ID NO: 111409 - DNA, 25 bp, Saccharomyces pastorianus
ccacatctcaactatcttcggaata

SEQ ID NO: 111410 - DNA, 25 bp, Saccharomyces pastorianus
aactggtagatctgtgtccaccgct

SEQ ID NO: 111411 - DNA, 25 bp, Saccharomyces pastorianus
aaatggcgatgttcctactgcagaa

SEQ ID NO: 111412 - DNA, 25 bp, Saccharomyces pastorianus
aagtgatctcacaggcgtaccacga

SEQ ID NO: 111413 - DNA, 25 bp, Saccharomyces pastorianus
acctctgatggtctctctgcattaa

SEQ ID NO: 111414 - DNA, 25 bp, Saccharomyces pastorianus
gatacttcaaagttgtacccctaat

SEQ ID NO: 111415 - DNA, 25 bp, Saccharomyces pastorianus
gattctgcgctgctaaacttgatgg

SEQ ID NO: 111416 - DNA, 25 bp, Saccharomyces pastorianus
agatttgccaaatgtaccgacttta

SEQ ID NO: 111417 - DNA, 25 bp, Saccharomyces pastorianus
aaaccgatctcacagacctctgatg

SEQ ID NO: 111418 - DNA, 25 bp, Saccharomyces pastorianus
catgctctatttgcggtggctacga

SEQ ID NO: 111419 - DNA, 25 bp, Saccharomyces pastorianus
ctgcattaatgggtggttcttcttt

SEQ ID NO: 111420 - DNA, 25 bp, Saccharomyces pastorianus
caagagattctccagtcggacagga

SEQ ID NO: 111421 - DNA, 25 bp, Saccharomyces pastorianus
gtatggtcatggttgggtgcttaaa

SEQ ID NO: 111422 - DNA, 25 bp, Saccharomyces pastorianus
tacccctaattacgacatgctctat

SEQ ID NO: 111423 - DNA, 25 bp, Saccharomyces pastorianus
agttagctcctataatgggcattac

SEQ ID NO: 111424 - DNA, 25 bp, Saccharomyces pastorianus
tttacctggttttgcagtctttttg

SEQ ID NO: 111425 - DNA, 25 bp, Saccharomyces pastorianus
atgggcattactctgttgcttacct

SEQ ID NO: 111426 - DNA, 25 bp, Saccharomyces pastorianus
gaaaatcgcaccatattctattagt

SEQ ID NO: 111427 - DNA, 25 bp, Saccharomyces pastorianus
aaactaccgtcctatccattgtgag

SEQ ID NO: 111428 - DNA, 25 bp, Saccharomyces pastorianus
gcttacctcgctacttgtggaaaaa

SEQ ID NO: 111429 - DNA, 25 bp, Saccharomyces pastorianus
tggagaatccaagcctcacccaatt

SEQ ID NO: 111430 - DNA, 25 bp, Saccharomyces pastorianus
atacaatccaccagttagctcctat

SEQ ID NO: 111431 - DNA, 25 bp, Saccharomyces pastorianus
tcctggtatattcagctctagcata

SEQ ID NO: 111432 - DNA, 25 bp, Saccharomyces pastorianus
ccgtgctgaccgtatctattgtggg

SEQ ID NO: 111433 - DNA, 25 bp, Saccharomyces pastorianus
gtattttggagcaaacgcccgtgct

SEQ ID NO: 111434 - DNA, 25 bp, Saccharomyces pastorianus
acaggtacctgcacaatctagttat

SEQ ID NO: 111435 - DNA, 25 bp, Saccharomyces pastorianus
ggcaagaaaccttctacgtgggcta

SEQ ID NO: 111436 - DNA, 25 bp, Saccharomyces pastorianus
gcactccttcattaactctagattc

SEQ ID NO: 111437 - DNA, 25 bp, Saccharomyces pastorianus
agtggacccgctacagaaattcgtt

SEQ ID NO: 111438 - DNA, 25 bp, Saccharomyces pastorianus
gagcccgcagttactaacactggat

SEQ ID NO: 111439 - DNA, 25 bp, Saccharomyces pastorianus
ctacgtgggctaattccgatttcaa

SEQ ID NO: 111440 - DNA, 25 bp, Saccharomyces pastorianus
tgaacccaaagtacacgagcccgca

SEQ ID NO: 111441 - DNA, 25 bp, Saccharomyces pastorianus
atctagttatcatccatccagcgag

SEQ ID NO: 111442 - DNA, 25 bp, Saccharomyces pastorianus
aaaaatctggcctatcacctgacga

SEQ ID NO: 111443 - DNA, 25 bp, Saccharomyces pastorianus
atgaggcacatacagctgatggcaa

SEQ ID NO: 111444 - DNA, 25 bp, Saccharomyces pastorianus
gggccattctggttctaaatcaggt

SEQ ID NO: 111445 - DNA, 25 bp, Saccharomyces pastorianus
cagcctcaccagaaacacattgtac

SEQ ID NO: 111446 - DNA, 25 bp, Saccharomyces pastorianus
agttccatactaatactgacgatgt

SEQ ID NO: 111447 - DNA, 25 bp, Saccharomyces pastorianus
gtatccatcataccacaatttcctg

SEQ ID NO: 111448 - DNA, 25 bp, Saccharomyces pastorianus
tttcctgacatcaaggtttcactag

SEQ ID NO: 111449 - DNA, 25 bp, Saccharomyces pastorianus
tgtcgacatcctttgcctttattga

SEQ ID NO: 111450 - DNA, 25 bp, Saccharomyces pastorianus
gaaatttgaattccgagtgcgtact

SEQ ID NO: 111451 - DNA, 25 bp, Saccharomyces pastorianus
cgagattttatgacgaagcgctcat

SEQ ID NO: 111452 - DNA, 25 bp, Saccharomyces pastorianus
gattcgtcacagttaatatgcctta

SEQ ID NO: 111453 - DNA, 25 bp, Saccharomyces pastorianus
ttagtgatgctttcctcaaattcgg

SEQ ID NO: 111454 - DNA, 25 bp, Saccharomyces pastorianus
gagtgcgtactatgtctttcaccca

SEQ ID NO: 111455 - DNA, 25 bp, Saccharomyces pastorianus
acacattgtactaacttcacctttg

SEQ ID NO: 111456 - DNA, 25 bp, Saccharomyces pastorianus
agaaattccgtgttgcaaagtgggt

SEQ ID NO: 111457 - DNA, 25 bp, Saccharomyces pastorianus
gataaaaacccatttccgagatact

SEQ ID NO: 111458 - DNA, 25 bp, Saccharomyces pastorianus
aggttggtatcgcaatgtcacccct

SEQ ID NO: 111459 - DNA, 25 bp, Saccharomyces pastorianus
gatcctttacaattctcatatacca

SEQ ID NO: 111460 - DNA, 25 bp, Saccharomyces pastorianus
cagcatatctattggcacatggtat

SEQ ID NO: 111461 - DNA, 25 bp, Saccharomyces pastorianus
tggtgaagccggtgaccccgagcat

SEQ ID NO: 111462 - DNA, 25 bp, Saccharomyces pastorianus
gtcacccctttctaataacgcatta

SEQ ID NO: 111463 - DNA, 25 bp, Saccharomyces pastorianus
aaatgtcgcgtctttgaatcaatgg

SEQ ID NO: 111464 - DNA, 25 bp, Saccharomyces pastorianus
gaatgtctcactatctactgatgat

SEQ ID NO: 111465 - DNA, 25 bp, Saccharomyces pastorianus
gaagaatactcagttgcagcacaaa

SEQ ID NO: 111466 - DNA, 25 bp, Saccharomyces pastorianus
gagcatctcgtttcagcatatctat

SEQ ID NO: 111467 - DNA, 25 bp, Saccharomyces pastorianus
ttaaccttttcatcgaacagcccca

SEQ ID NO: 111468 - DNA, 25 bp, Saccharomyces pastorianus
ccagcgcatttttcctagcattaga

SEQ ID NO: 111469 - DNA, 25 bp, Saccharomyces pastorianus
gagctcgtctacttctacgaggtga

SEQ ID NO: 111470 - DNA, 25 bp, Saccharomyces pastorianus
ttattttctaccaatatcctcctca

SEQ ID NO: 111471 - DNA, 25 bp, Saccharomyces pastorianus
gatacattttccgtaactgcgggat

SEQ ID NO: 111472 - DNA, 25 bp, Saccharomyces pastorianus
gaattcggatcaaaaccgtcctcta

SEQ ID NO: 111473 - DNA, 25 bp, Saccharomyces pastorianus
gagggacggtccattttcacaatac

SEQ ID NO: 111474 - DNA, 25 bp, Saccharomyces pastorianus
ttttcacaataccttcatcgctggg

SEQ ID NO: 111475 - DNA, 25 bp, Saccharomyces pastorianus
atcgctgggccgaacgttcagatac

SEQ ID NO: 111476 - DNA, 25 bp, Saccharomyces pastorianus
gggaagcagatttctccctgcgagc

SEQ ID NO: 111477 - DNA, 25 bp, Saccharomyces pastorianus
aactgcgggatctgcggtttaacct

SEQ ID NO: 111478 - DNA, 25 bp, Saccharomyces pastorianus
atgccaatgccagtttccataacgg

SEQ ID NO: 111479 - DNA, 25 bp, Saccharomyces pastorianus
tgtaatgtcctttcgtcttctcaat

SEQ ID NO: 111480 - DNA, 25 bp, Saccharomyces pastorianus
gtatcatctgcttgccctgtaatgt

SEQ ID NO: 111481 - DNA, 25 bp, Saccharomyces pastorianus
ggcaacgccagcagtgaaatcacca

SEQ ID NO: 111482 - DNA, 25 bp, Saccharomyces pastorianus
tgcacacgtcgctaaagatggtatg

SEQ ID NO: 111483 - DNA, 25 bp, Saccharomyces pastorianus
actcccttggcgtctgtatcatctg

SEQ ID NO: 111484 - DNA, 25 bp, Saccharomyces pastorianus
gcagtgaaatcaccacagtttggat

SEQ ID NO: 111485 - DNA, 25 bp, Saccharomyces pastorianus
cataacggtgagtgtggcaacgcca

SEQ ID NO: 111486 - DNA, 25 bp, Saccharomyces pastorianus
aactaaatggttgaatcgggtcttg

SEQ ID NO: 111487 - DNA, 25 bp, Saccharomyces pastorianus
tcttctcaatcacacttactcatcg

SEQ ID NO: 111488 - DNA, 25 bp, Saccharomyces pastorianus
tactcatcgccaaagagtctgctct

SEQ ID NO: 111489 - DNA, 25 bp, Saccharomyces pastorianus
gtaagaaacagccattggtacccat

SEQ ID NO: 111490 - DNA, 25 bp, Saccharomyces pastorianus
tcgcactagtcgcaggttcatttat

SEQ ID NO: 111491 - DNA, 25 bp, Saccharomyces pastorianus
aggagctgtcattctggctgctcaa

SEQ ID NO: 111492 - DNA, 25 bp, Saccharomyces pastorianus
atttatctatgggacttctggtaag

SEQ ID NO: 111493 - DNA, 25 bp, Saccharomyces pastorianus
acgcatgccatctagtttcgatgtt

SEQ ID NO: 111494 - DNA, 25 bp, Saccharomyces pastorianus
gaatgaagacccttgagaacgaaga

SEQ ID NO: 111495 - DNA, 25 bp, Saccharomyces pastorianus
ggctgctcaaaatgttcgtcttggt

SEQ ID NO: 111496 - DNA, 25 bp, Saccharomyces pastorianus
gaaagctcagtactacttccgttgg

SEQ ID NO: 111497 - DNA, 25 bp, Saccharomyces pastorianus
gtgcttgctgactacaggagctgtc

SEQ ID NO: 111498 - DNA, 25 bp, Saccharomyces pastorianus
gtacccattgggtgcttgctgacta

SEQ ID NO: 111499 - DNA, 25 bp, Saccharomyces pastorianus
gtgggtctacaagcggccacactag

SEQ ID NO: 111500 - DNA, 25 bp, Saccharomyces pastorianus
atggttccaaaccttgtgctcgcaa

SEQ ID NO: 111501 - DNA, 25 bp, Saccharomyces pastorianus
aggacgcgctagatgagttgttcaa

SEQ ID NO: 111502 - DNA, 25 bp, Saccharomyces pastorianus
aaaggctatcggtctattccaagta

SEQ ID NO: 111503 - DNA, 25 bp, Saccharomyces pastorianus
aacacccctgacgttggacaattga

SEQ ID NO: 111504 - DNA, 25 bp, Saccharomyces pastorianus
ggttacactactcccctatgtgaag

SEQ ID NO: 111505 - DNA, 25 bp, Saccharomyces pastorianus
gaacttcgtgctcttttgggttaca

SEQ ID NO: 111506 - DNA, 25 bp, Saccharomyces pastorianus
gactctttgaacgaattgctgctga

SEQ ID NO: 111507 - DNA, 25 bp, Saccharomyces pastorianus
atagcggagcataacgtccttgacg

SEQ ID NO: 111508 - DNA, 25 bp, Saccharomyces pastorianus
gtccttgacgtcgtactcaggtaca

SEQ ID NO: 111509 - DNA, 25 bp, Saccharomyces pastorianus
gaacacactatatcctcaagactct

SEQ ID NO: 111510 - DNA, 25 bp, Saccharomyces pastorianus
caggtacataattccagacccggta

SEQ ID NO: 111511 - DNA, 25 bp, Saccharomyces pastorianus
aaggcctcatcattccctaaatagg

SEQ ID NO: 111512 - DNA, 25 bp, Saccharomyces pastorianus
gagtcaaggcggacatacttcgtga

SEQ ID NO: 111513 - DNA, 25 bp, Saccharomyces pastorianus
gaaaaatgtcctgctccatcgaagg

SEQ ID NO: 111514 - DNA, 25 bp, Saccharomyces pastorianus
agccaggctttaacattccatctaa

SEQ ID NO: 111515 - DNA, 25 bp, Saccharomyces pastorianus
gaagaagaacctcgtcccaggaact

SEQ ID NO: 111516 - DNA, 25 bp, Saccharomyces pastorianus
gatggaagctcatgttctcgttctt

SEQ ID NO: 111517 - DNA, 25 bp, Saccharomyces pastorianus
ggaactatctattcttcaggctgaa

SEQ ID NO: 111518 - DNA, 25 bp, Saccharomyces pastorianus
aaagccaagcgtccggtaagcaatc

SEQ ID NO: 111519 - DNA, 25 bp, Saccharomyces pastorianus
gttagctgaatcttgccatatgact

SEQ ID NO: 111520 - DNA, 25 bp, Saccharomyces pastorianus
ttcttcaccgctggaaaatacgccg

SEQ ID NO: 111521 - DNA, 25 bp, Saccharomyces pastorianus
gcatagatcattctccatccaaagc

SEQ ID NO: 111522 - DNA, 25 bp, Saccharomyces pastorianus
tcttctgcatttgatcgggaccgaa

SEQ ID NO: 111523 - DNA, 25 bp, Saccharomyces pastorianus
gcttttaccgagcaatgtagccaag

SEQ ID NO: 111524 - DNA, 25 bp, Saccharomyces pastorianus
cacggacgttggcttcttttaatga

SEQ ID NO: 111525 - DNA, 25 bp, Saccharomyces pastorianus
atcagatggcgtttcattttgcaac

SEQ ID NO: 111526 - DNA, 25 bp, Saccharomyces pastorianus
cctactggtcctactacgatatctt

SEQ ID NO: 111527 - DNA, 25 bp, Saccharomyces pastorianus
aaaagtgtgacgtctgcctactggt

SEQ ID NO: 111528 - DNA, 25 bp, Saccharomyces pastorianus
gaaggtaccctttctgagatactca

SEQ ID NO: 111529 - DNA, 25 bp, Saccharomyces pastorianus
gtcttattttatacccctattagct

SEQ ID NO: 111530 - DNA, 25 bp, Saccharomyces pastorianus
ggaatgtgtcgctattttaacgcta

SEQ ID NO: 111531 - DNA, 25 bp, Saccharomyces pastorianus
gacagtgggccaaagcgcttaactt

SEQ ID NO: 111532 - DNA, 25 bp, Saccharomyces pastorianus
ttattgtatcccatagtctcccaaa

SEQ ID NO: 111533 - DNA, 25 bp, Saccharomyces pastorianus
ggtaagctacctggcgaatgtttta

SEQ ID NO: 111534 - DNA, 25 bp, Saccharomyces pastorianus
gaacccaggtcttttccagaagttg

SEQ ID NO: 111535 - DNA, 25 bp, Saccharomyces pastorianus
attccagcaggttccaacgttatca

SEQ ID NO: 111536 - DNA, 25 bp, Saccharomyces pastorianus
gaacaactcgaagccaaccttttgg

SEQ ID NO: 111537 - DNA, 25 bp, Saccharomyces pastorianus
ttcttacccattttcaggaacccag

SEQ ID NO: 111538 - DNA, 25 bp, Saccharomyces pastorianus
aggagtacggttctgatctttttga

SEQ ID NO: 111539 - DNA, 25 bp, Saccharomyces pastorianus
gcagccggcggattagttgaacaac

SEQ ID NO: 111540 - DNA, 25 bp, Saccharomyces pastorianus
gtgttggtttcgttccagtcaggaa

SEQ ID NO: 111541 - DNA, 25 bp, Saccharomyces pastorianus
ttagctttggccctaggtgttggtt

SEQ ID NO: 111542 - DNA, 25 bp, Saccharomyces pastorianus
gttcttgttcggaccaactttagct

SEQ ID NO: 111543 - DNA, 25 bp, Saccharomyces pastorianus
gaatgctccagtgttcactttactg

SEQ ID NO: 111544 - DNA, 25 bp, Saccharomyces pastorianus
gattatcggtcaagatccctaccac

SEQ ID NO: 111545 - DNA, 25 bp, Saccharomyces pastorianus
gcatggcttggcttttagcgtcaaa

SEQ ID NO: 111546 - DNA, 25 bp, Saccharomyces pastorianus
ttggctatacaatacccgcggagag

SEQ ID NO: 111547 - DNA, 25 bp, Saccharomyces pastorianus
agagtctctgttgggatctacttcc

SEQ ID NO: 111548 - DNA, 25 bp, Saccharomyces pastorianus
gactggagtgttgttcctggaacgt

SEQ ID NO: 111549 - DNA, 25 bp, Saccharomyces pastorianus
atgaagtcagtgcatccgtctccat

SEQ ID NO: 111550 - DNA, 25 bp, Saccharomyces pastorianus
gtagttcagttgttgatccaggaca

SEQ ID NO: 111551 - DNA, 25 bp, Saccharomyces pastorianus
atccaggacagagaggccgacggta

SEQ ID NO: 111552 - DNA, 25 bp, Saccharomyces pastorianus
gcatccgtctccattaagtgcaagt

SEQ ID NO: 111553 - DNA, 25 bp, Saccharomyces pastorianus
acaactttaatcaggcgcatggctt

SEQ ID NO: 111554 - DNA, 25 bp, Saccharomyces pastorianus
ccagcaccaccgtcattaaagaaca

SEQ ID NO: 111555 - DNA, 25 bp, Saccharomyces pastorianus
tttcgataacggttcctcaagcctt

SEQ ID NO: 111556 - DNA, 25 bp, Saccharomyces pastorianus
tcatcttgtggtatatccgccagca

SEQ ID NO: 111557 - DNA, 25 bp, Saccharomyces pastorianus
gaagcttttctccatgatattgtca

SEQ ID NO: 111558 - DNA, 25 bp, Saccharomyces pastorianus
atgctatccctttcattgcacgtga

SEQ ID NO: 111559 - DNA, 25 bp, Saccharomyces pastorianus
gtcattaggcatacttctaccaagt

SEQ ID NO: 111560 - DNA, 25 bp, Saccharomyces pastorianus
acaatttggcgattttctggctaaa

SEQ ID NO: 111561 - DNA, 25 bp, Saccharomyces pastorianus
ggcatgtgttctattctacttcttt

SEQ ID NO: 111562 - DNA, 25 bp, Saccharomyces pastorianus
tacattgtgatgtccgcactgtctg

SEQ ID NO: 111563 - DNA, 25 bp, Saccharomyces pastorianus
aagccttcaacgttcaggaatttgt

SEQ ID NO: 111564 - DNA, 25 bp, Saccharomyces pastorianus
ctgtgcttttaatttatgtgcccaa

SEQ ID NO: 111565 - DNA, 25 bp, Saccharomyces pastorianus
ggactattgtcgtcatttttggcat

SEQ ID NO: 111566 - DNA, 25 bp, Saccharomyces pastorianus
gtcgttcatttcctttgtgggcata

SEQ ID NO: 111567 - DNA, 25 bp, Saccharomyces pastorianus
attgagcataacgatacccctagca

SEQ ID NO: 111568 - DNA, 25 bp, Saccharomyces pastorianus
gcgctctatttatttggtgctaccc

SEQ ID NO: 111569 - DNA, 25 bp, Saccharomyces pastorianus
ggctttgttggtctctttaatttgc

SEQ ID NO: 111570 - DNA, 25 bp, Saccharomyces pastorianus
taaccgtcaccgtaggattgagcat

SEQ ID NO: 111571 - DNA, 25 bp, Saccharomyces pastorianus
ttctctctgcccaaagatcctaaag

SEQ ID NO: 111572 - DNA, 25 bp, Saccharomyces pastorianus
ttttttggctgggaaccattctctc

SEQ ID NO: 111573 - DNA, 25 bp, Saccharomyces pastorianus
aaatcagattctcatcagcgctacc

SEQ ID NO: 111574 - DNA, 25 bp, Saccharomyces pastorianus
aatcttcgtcaattgtctcatcaca

SEQ ID NO: 111575 - DNA, 25 bp, Saccharomyces pastorianus
acaaaaccatgtctgcgctctattt

SEQ ID NO: 111576 - DNA, 25 bp, Saccharomyces pastorianus
taacgatgccgtgcgagttctgata

SEQ ID NO: 111577 - DNA, 25 bp, Saccharomyces pastorianus
ggccccaacggcagcagttataaag

SEQ ID NO: 111578 - DNA, 25 bp, Saccharomyces pastorianus
ggatatcgcagtggcagctcataca

SEQ ID NO: 111579 - DNA, 25 bp, Saccharomyces pastorianus
gtaatagatatcgtggaggccccaa

SEQ ID NO: 111580 - DNA, 25 bp, Saccharomyces pastorianus
accagcaagtgggttccttggccaa

SEQ ID NO: 111581 - DNA, 25 bp, Saccharomyces pastorianus
gaagcagcggtaactactccaacta

SEQ ID NO: 111582 - DNA, 25 bp, Saccharomyces pastorianus
gcggtaactataacagcagcggtac

SEQ ID NO: 111583 - DNA, 25 bp, Saccharomyces pastorianus
aatattccattttcaaaccagcaag

SEQ ID NO: 111584 - DNA, 25 bp, Saccharomyces pastorianus
aagggttaacctcagattcatcttt

SEQ ID NO: 111585 - DNA, 25 bp, Saccharomyces pastorianus
tcatctttagatgcctcaggaaata

SEQ ID NO: 111586 - DNA, 25 bp, Saccharomyces pastorianus
aacaatcgtggtaatcgcggcggat

SEQ ID NO: 111587 - DNA, 25 bp, Saccharomyces pastorianus
gatttcacgaactcaacatccaata

SEQ ID NO: 111588 - DNA, 25 bp, Saccharomyces pastorianus
gatctggaagacattcatcgatact

SEQ ID NO: 111589 - DNA, 25 bp, Saccharomyces pastorianus
aatgatcttttgtggtccgatccca

SEQ ID NO: 111590 - DNA, 25 bp, Saccharomyces pastorianus
gatccactagatagtgcagctttga

SEQ ID NO: 111591 - DNA, 25 bp, Saccharomyces pastorianus
gctaacgtcacaagggtttatggat

SEQ ID NO: 111592 - DNA, 25 bp, Saccharomyces pastorianus
atgatagaagtctcgttacggtgtt

SEQ ID NO: 111593 - DNA, 25 bp, Saccharomyces pastorianus
gtggattgtcgccagttttaaattc

SEQ ID NO: 111594 - DNA, 25 bp, Saccharomyces pastorianus
aatacattaccattagctgctatcg

SEQ ID NO: 111595 - DNA, 25 bp, Saccharomyces pastorianus
gttttccgcgccaaattattgtggt

SEQ ID NO: 111596 - DNA, 25 bp, Saccharomyces pastorianus
tgtagttaggcctactgatgtgcca

SEQ ID NO: 111597 - DNA, 25 bp, Saccharomyces pastorianus
tagctgctatcgtagccggaaagat

SEQ ID NO: 111598 - DNA, 25 bp, Saccharomyces pastorianus
aacgtcgttgtaacatcaagatctg

SEQ ID NO: 111599 - DNA, 25 bp, Saccharomyces pastorianus
ttattgcccgaacacatccgtgagg

SEQ ID NO: 111600 - DNA, 25 bp, Saccharomyces pastorianus
tataacaacagtcccttattgcccg

SEQ ID NO: 111601 - DNA, 25 bp, Saccharomyces pastorianus
agtacaataagctcgtcctccaatt

SEQ ID NO: 111602 - DNA, 25 bp, Saccharomyces pastorianus
ggcaactcgttgctacagtccaaat

SEQ ID NO: 111603 - DNA, 25 bp, Saccharomyces pastorianus
gaacctgatttctacttcgacgatg

SEQ ID NO: 111604 - DNA, 25 bp, Saccharomyces pastorianus
atattcgtgtttttctgcaagcggt

SEQ ID NO: 111605 - DNA, 25 bp, Saccharomyces pastorianus
tatcaatccgatagcgttcccgaag

SEQ ID NO: 111606 - DNA, 25 bp, Saccharomyces pastorianus
atccgtgaggcgtggagactctacc

SEQ ID NO: 111607 - DNA, 25 bp, Saccharomyces pastorianus
gtctgcagtcggacactttgcctaa

SEQ ID NO: 111608 - DNA, 25 bp, Saccharomyces pastorianus
tttgcctaacgcttactggagaact

SEQ ID NO: 111609 - DNA, 25 bp, Saccharomyces pastorianus
aagcgcgaatctacgctgggcaact

SEQ ID NO: 111610 - DNA, 25 bp, Saccharomyces pastorianus
aacgccgccttctaaagtcaagaca

SEQ ID NO: 111611 - DNA, 25 bp, Saccharomyces pastorianus
agatggtcttattgagtgcgccaga

SEQ ID NO: 111612 - DNA, 25 bp, Saccharomyces pastorianus
tggagcaagatgtctttgtcccctg

SEQ ID NO: 111613 - DNA, 25 bp, Saccharomyces pastorianus
gacgggctgaacttaccacacaaaa

SEQ ID NO: 111614 - DNA, 25 bp, Saccharomyces pastorianus
actatcacttataccgagagggcga

SEQ ID NO: 111615 - DNA, 25 bp, Saccharomyces pastorianus
aggtgatcaggcacgttctatcgaa

SEQ ID NO: 111616 - DNA, 25 bp, Saccharomyces pastorianus
agtgcatcactggtctacaagggag

SEQ ID NO: 111617 - DNA, 25 bp, Saccharomyces pastorianus
ttcgccatctcaattgctgtagtgc

SEQ ID NO: 111618 - DNA, 25 bp, Saccharomyces pastorianus
gcagctcccgtagaggttaccatga

SEQ ID NO: 111619 - DNA, 25 bp, Saccharomyces pastorianus
ttctatcgaaactacgtcagggcgg

SEQ ID NO: 111620 - DNA, 25 bp, Saccharomyces pastorianus
aggagcgttccgaatacttgcagcg

SEQ ID NO: 111621 - DNA, 25 bp, Saccharomyces pastorianus
atccacttgggcgtcgggtggtgaa

SEQ ID NO: 111622 - DNA, 25 bp, Saccharomyces pastorianus
gtggtaccggtgataggtcagccta

SEQ ID NO: 111623 - DNA, 25 bp, Saccharomyces pastorianus
gtggtgaatctaatggtgccatgtc

SEQ ID NO: 111624 - DNA, 25 bp, Saccharomyces pastorianus
aaataggtctgcttggaacaaccaa

SEQ ID NO: 111625 - DNA, 25 bp, Saccharomyces pastorianus
aaggtaatggaggtgcatccgcttg

SEQ ID NO: 111626 - DNA, 25 bp, Saccharomyces pastorianus
ataagtcaaactatggtggtaacag

SEQ ID NO: 111627 - DNA, 25 bp, Saccharomyces pastorianus
ggtactggtgctacttctacttggg

SEQ ID NO: 111628 - DNA, 25 bp, Saccharomyces pastorianus
taaaagtacaagagatggcggagct

SEQ ID NO: 111629 - DNA, 25 bp, Saccharomyces pastorianus
cgatggaaataggtctgcttggaac

SEQ ID NO: 111630 - DNA, 25 bp, Saccharomyces pastorianus
accggtgataggtcagcctacggcg

SEQ ID NO: 111631 - DNA, 25 bp, Saccharomyces pastorianus
ggcggccaaggtactggtgctactt

SEQ ID NO: 111632 - DNA, 25 bp, Saccharomyces pastorianus
tgacttatttccttggttgttccaa

SEQ ID NO: 111633 - DNA, 25 bp, Saccharomyces pastorianus
cgagattcagtatttcatcgaaaca

SEQ ID NO: 111634 - DNA, 25 bp, Saccharomyces pastorianus
ttattattgttatttcctccccagg

SEQ ID NO: 111635 - DNA, 25 bp, Saccharomyces pastorianus
tccgccatctcttgtacttttatta

SEQ ID NO: 111636 - DNA, 25 bp, Saccharomyces pastorianus
ttcttcttgggtgatattggttctc

SEQ ID NO: 111637 - DNA, 25 bp, Saccharomyces pastorianus
tggtgattaatgacctccccatgta

SEQ ID NO: 111638 - DNA, 25 bp, Saccharomyces pastorianus
gtactgttaccaccatagtttgact

SEQ ID NO: 111639 - DNA, 25 bp, Saccharomyces pastorianus
attggttctccttttggtgattaat

SEQ ID NO: 111640 - DNA, 25 bp, Saccharomyces pastorianus
gacctatttccatcgtcttggttac

SEQ ID NO: 111641 - DNA, 25 bp, Saccharomyces pastorianus
ttggttaccccatgcagaagctccg

SEQ ID NO: 111642 - DNA, 25 bp, Saccharomyces pastorianus
ggttgttccaagcagacctatttcc

SEQ ID NO: 111643 - DNA, 25 bp, Saccharomyces pastorianus
gcacctttggttactcaggtcagat

SEQ ID NO: 111644 - DNA, 25 bp, Saccharomyces pastorianus
ataaagctattgtctacagcggcaa

SEQ ID NO: 111645 - DNA, 25 bp, Saccharomyces pastorianus
ggttactcaggtcagatacgatcct

SEQ ID NO: 111646 - DNA, 25 bp, Saccharomyces pastorianus
aaaggtgcacctttggttactcagg

SEQ ID NO: 111647 - DNA, 25 bp, Saccharomyces pastorianus
gaaacggcatgtgcttttcaaagaa

SEQ ID NO: 111648 - DNA, 25 bp, Saccharomyces pastorianus
tacagcggcaagtggatactctcgt

SEQ ID NO: 111649 - DNA, 25 bp, Saccharomyces pastorianus
ggatactctcgttacatctcgatta

SEQ ID NO: 111650 - DNA, 25 bp, Saccharomyces pastorianus
tacgatcctgtggtgaaacggcatg

SEQ ID NO: 111651 - DNA, 25 bp, Saccharomyces pastorianus
aagtggatactctcgttacatctcg

SEQ ID NO: 111652 - DNA, 25 bp, Saccharomyces pastorianus
catctcgattaagaaaggtgcacct

SEQ ID NO: 111653 - DNA, 25 bp, Saccharomyces pastorianus
cctgtggtgaaacggcatgtgcttt

SEQ ID NO: 111654 - DNA, 25 bp, Saccharomyces pastorianus
aaaacttagctaatttggccacatt

SEQ ID NO: 111655 - DNA, 25 bp, Saccharomyces pastorianus
aagtcctcgttagcgaagacctggc

SEQ ID NO: 111656 - DNA, 25 bp, Saccharomyces pastorianus
aaatgctgcggttggtttagttgct

SEQ ID NO: 111657 - DNA, 25 bp, Saccharomyces pastorianus
aaggaagttactgctgctctagaaa

SEQ ID NO: 111658 - DNA, 25 bp, Saccharomyces pastorianus
atgttccatgtcgacgtggctagga

SEQ ID NO: 111659 - DNA, 25 bp, Saccharomyces pastorianus
aagacctggcggacaatgatgatga

SEQ ID NO: 111660 - DNA, 25 bp, Saccharomyces pastorianus
tgaaaccgggtggtacctttgctgt

SEQ ID NO: 111661 - DNA, 25 bp, Saccharomyces pastorianus
gaaaaagtaggtctagccccagaag

SEQ ID NO: 111662 - DNA, 25 bp, Saccharomyces pastorianus
tgcaattgaggccacatgtcacgct

SEQ ID NO: 111663 - DNA, 25 bp, Saccharomyces pastorianus
ccaatgatgcttttcgtcgctagga

SEQ ID NO: 111664 - DNA, 25 bp, Saccharomyces pastorianus
agaactgtggtttcgaagtcctcgt

SEQ ID NO: 111665 - DNA, 25 bp, Saccharomyces pastorianus
acttcatttttatcgccttacgaag

SEQ ID NO: 111666 - DNA, 25 bp, Saccharomyces pastorianus
ggtacacttcatttttatcgcctta

SEQ ID NO: 111667 - DNA, 25 bp, Saccharomyces pastorianus
tacacttcatttttatcgccttacg

SEQ ID NO: 111668 - DNA, 25 bp, Saccharomyces pastorianus
acacttcatttttatcgccttacga

SEQ ID NO: 111669 - DNA, 25 bp, Saccharomyces pastorianus
cgttttatgcgaagattggtgagaa

SEQ ID NO: 111670 - DNA, 25 bp, Saccharomyces pastorianus
tggtacacttcatttttatcgcctt

SEQ ID NO: 111671 - DNA, 25 bp, Saccharomyces pastorianus
tcatttttatcgccttacgaagcat

SEQ ID NO: 111672 - DNA, 25 bp, Saccharomyces pastorianus
cttcatttttatcgccttacgaagc

SEQ ID NO: 111673 - DNA, 25 bp, Saccharomyces pastorianus
tggtgagaaacctccaatacttgct

SEQ ID NO: 111674 - DNA, 25 bp, Saccharomyces pastorianus
ggtgagaaacctccaatacttgctg

SEQ ID NO: 111675 - DNA, 25 bp, Saccharomyces pastorianus
tgcgaagattggtgagaaacctcca

SEQ ID NO: 111676 - DNA, 25 bp, Saccharomyces pastorianus
aaagccgctaatatgtcagacgatg

SEQ ID NO: 111677 - DNA, 25 bp, Saccharomyces pastorianus
ggtttatgttccgagctaatggcaa

SEQ ID NO: 111678 - DNA, 25 bp, Saccharomyces pastorianus
aatcccagcctactgcaaagcagca

SEQ ID NO: 111679 - DNA, 25 bp, Saccharomyces pastorianus
aatcacaacctttctctgaatctca

SEQ ID NO: 111680 - DNA, 25 bp, Saccharomyces pastorianus
gagctcccgaaacaatatctacaat

SEQ ID NO: 111681 - DNA, 25 bp, Saccharomyces pastorianus
gtcgttccatctaaggaaggctctt

SEQ ID NO: 111682 - DNA, 25 bp, Saccharomyces pastorianus
aataatgctgcctctaacaccaatc

SEQ ID NO: 111683 - DNA, 25 bp, Saccharomyces pastorianus
acctttctctgaatctcaatctcaa

SEQ ID NO: 111684 - DNA, 25 bp, Saccharomyces pastorianus
attaacgaagaaccagagctcccga

SEQ ID NO: 111685 - DNA, 25 bp, Saccharomyces pastorianus
tatctacaatcggtaccaggaaatg

SEQ ID NO: 111686 - DNA, 25 bp, Saccharomyces pastorianus
gaggatataccttttatcaacgcaa

SEQ ID NO: 111687 - DNA, 25 bp, Saccharomyces pastorianus
taaagagttccatcaatgctatgag

SEQ ID NO: 111688 - DNA, 25 bp, Saccharomyces pastorianus
tacgacttcctcgaattttagccat

SEQ ID NO: 111689 - DNA, 25 bp, Saccharomyces pastorianus
gtcaggcccacaaatgtacatacca

SEQ ID NO: 111690 - DNA, 25 bp, Saccharomyces pastorianus
cgttactacagcacatcgttctatt

SEQ ID NO: 111691 - DNA, 25 bp, Saccharomyces pastorianus
ctttatcagaacagtcaggcccaca

SEQ ID NO: 111692 - DNA, 25 bp, Saccharomyces pastorianus
gatggtgacgatgcttctttatcag

SEQ ID NO: 111693 - DNA, 25 bp, Saccharomyces pastorianus
gtctttaagcggcatagataaccct

SEQ ID NO: 111694 - DNA, 25 bp, Saccharomyces pastorianus
gacacaactgtcgaactctaatacg

SEQ ID NO: 111695 - DNA, 25 bp, Saccharomyces pastorianus
gttttatcaagtgaacctcatccaa

SEQ ID NO: 111696 - DNA, 25 bp, Saccharomyces pastorianus
aattctcacaaacctaattccaagg

SEQ ID NO: 111697 - DNA, 25 bp, Saccharomyces pastorianus
tagataaccctactcatgccactaa

SEQ ID NO: 111698 - DNA, 25 bp, Saccharomyces pastorianus
gagaatgatccaaacttccactatc

SEQ ID NO: 111699 - DNA, 25 bp, Saccharomyces pastorianus
agatccaatggtctcctaaatttaa

SEQ ID NO: 111700 - DNA, 25 bp, Saccharomyces pastorianus
tatggcgttccaaagaccgacagcg

SEQ ID NO: 111701 - DNA, 25 bp, Saccharomyces pastorianus
ataagttgcgatgacgctggcgccc

SEQ ID NO: 111702 - DNA, 25 bp, Saccharomyces pastorianus
ataacggtaactcagagccccaggg

SEQ ID NO: 111703 - DNA, 25 bp, Saccharomyces pastorianus
cacatctgtttttctgtatccgata

SEQ ID NO: 111704 - DNA, 25 bp, Saccharomyces pastorianus
gggctcagtaggtaacaagttcaat

SEQ ID NO: 111705 - DNA, 25 bp, Saccharomyces pastorianus
agccccagggttatggtcacatctg

SEQ ID NO: 111706 - DNA, 25 bp, Saccharomyces pastorianus
gaccgacagcgttttttcatgtgaa

SEQ ID NO: 111707 - DNA, 25 bp, Saccharomyces pastorianus
acattgcgtttgctttagaccctga

SEQ ID NO: 111708 - DNA, 25 bp, Saccharomyces pastorianus
tatactttcttggttatggcgttcc

SEQ ID NO: 111709 - DNA, 25 bp, Saccharomyces pastorianus
taatgatgccatcaatattcgccta

SEQ ID NO: 111710 - DNA, 25 bp, Saccharomyces pastorianus
gttgggaagacctccttgatgcacc

SEQ ID NO: 111711 - DNA, 25 bp, Saccharomyces pastorianus
aatcatcctaggtgactctggtgtt

SEQ ID NO: 111712 - DNA, 25 bp, Saccharomyces pastorianus
gcatgcgaacgtaaactcaccagaa

SEQ ID NO: 111713 - DNA, 25 bp, Saccharomyces pastorianus
gtgaccaatgccagttcctttgaga

SEQ ID NO: 111714 - DNA, 25 bp, Saccharomyces pastorianus
gatgaatttctagtgcatgcgaacg

SEQ ID NO: 111715 - DNA, 25 bp, Saccharomyces pastorianus
caaggagtgctttacaacagaatca

SEQ ID NO: 111716 - DNA, 25 bp, Saccharomyces pastorianus
tgtatcagaaaagtccgctcaggag

SEQ ID NO: 111717 - DNA, 25 bp, Saccharomyces pastorianus
tccgctcaggagcttgctaaatcat

SEQ ID NO: 111718 - DNA, 25 bp, Saccharomyces pastorianus
cggtgataaagttgccaccatgcaa

SEQ ID NO: 111719 - DNA, 25 bp, Saccharomyces pastorianus
gccataaacgttgataccgcatttg

SEQ ID NO: 111720 - DNA, 25 bp, Saccharomyces pastorianus
gaacagttactcttgtgctactcaa

SEQ ID NO: 111721 - DNA, 25 bp, Saccharomyces pastorianus
gtgtcaaattctgattctgcttttt

SEQ ID NO: 111722 - DNA, 25 bp, Saccharomyces pastorianus
gaacaataagccttttgtgtcaaat

SEQ ID NO: 111723 - DNA, 25 bp, Saccharomyces pastorianus
gatagtaaatcccattcaagcggca

SEQ ID NO: 111724 - DNA, 25 bp, Saccharomyces pastorianus
gtgctactcaactttcgtacaatac

SEQ ID NO: 111725 - DNA, 25 bp, Saccharomyces pastorianus
aaggcatatcttgaacagttactct

SEQ ID NO: 111726 - DNA, 25 bp, Saccharomyces pastorianus
tcaagcggcagtttcaaagaacaat

SEQ ID NO: 111727 - DNA, 25 bp, Saccharomyces pastorianus
aaatcccattcaagcggcagtttca

SEQ ID NO: 111728 - DNA, 25 bp, Saccharomyces pastorianus
gtacatcctttgaaacaaggcatat

SEQ ID NO: 111729 - DNA, 25 bp, Saccharomyces pastorianus
tattttttcatccttcaattttgtg

SEQ ID NO: 111730 - DNA, 25 bp, Saccharomyces pastorianus
gatctttgaatgtacatcctttgaa

SEQ ID NO: 111731 - DNA, 25 bp, Saccharomyces pastorianus
aaaatatagccaacacctccggcca

SEQ ID NO: 111732 - DNA, 25 bp, Saccharomyces pastorianus
agacaaggtccgcttctaccatggc

SEQ ID NO: 111733 - DNA, 25 bp, Saccharomyces pastorianus
ggtgcccaaacgagacagccaggta

SEQ ID NO: 111734 - DNA, 25 bp, Saccharomyces pastorianus
caacggcaacttccagatatgtgat

SEQ ID NO: 111735 - DNA, 25 bp, Saccharomyces pastorianus
ttggacacaccctaggtgcaggtat

SEQ ID NO: 111736 - DNA, 25 bp, Saccharomyces pastorianus
ggctccagttcatccacaacaacaa

SEQ ID NO: 111737 - DNA, 25 bp, Saccharomyces pastorianus
agatggcctccactgctgcaggtgt

SEQ ID NO: 111738 - DNA, 25 bp, Saccharomyces pastorianus
gaggatcatcaagacctatatcgag

SEQ ID NO: 111739 - DNA, 25 bp, Saccharomyces pastorianus
ggccaaacccaaacggaccagcagt

SEQ ID NO: 111740 - DNA, 25 bp, Saccharomyces pastorianus
gttgccgttggtagcaccattggac

SEQ ID NO: 111741 - DNA, 25 bp, Saccharomyces pastorianus
atcgagatcgagacctactcagaca

SEQ ID NO: 111742 - DNA, 25 bp, Saccharomyces pastorianus
atttcttcactgcagaacacacctg

SEQ ID NO: 111743 - DNA, 25 bp, Saccharomyces pastorianus
ttactattgaaacagcccggtgctt

SEQ ID NO: 111744 - DNA, 25 bp, Saccharomyces pastorianus
gacgttcattcacacttgcaaccaa

SEQ ID NO: 111745 - DNA, 25 bp, Saccharomyces pastorianus
tagtacccaaacgaagagccacttg

SEQ ID NO: 111746 - DNA, 25 bp, Saccharomyces pastorianus
aacacacctgttatcgaaactccct

SEQ ID NO: 111747 - DNA, 25 bp, Saccharomyces pastorianus
gcccggtgcttacaaggtgagccta

SEQ ID NO: 111748 - DNA, 25 bp, Saccharomyces pastorianus
gagatctctatatttaccgtttacc

SEQ ID NO: 111749 - DNA, 25 bp, Saccharomyces pastorianus
atttttcatgttatcgtgtctttgg

SEQ ID NO: 111750 - DNA, 25 bp, Saccharomyces pastorianus
ggctgggccagggagatctctatat

SEQ ID NO: 111751 - DNA, 25 bp, Saccharomyces pastorianus
gacttatcacgcacgattcatgttc

SEQ ID NO: 111752 - DNA, 25 bp, Saccharomyces pastorianus
tgtttcacaacaattctccggcata

SEQ ID NO: 111753 - DNA, 25 bp, Saccharomyces pastorianus
aaactacgagtagtatctgcaaaca

SEQ ID NO: 111754 - DNA, 25 bp, Saccharomyces pastorianus
aaccatgccggtctcaaactgaatg

SEQ ID NO: 111755 - DNA, 25 bp, Saccharomyces pastorianus
aacacgtgccttccaggattgggca

SEQ ID NO: 111756 - DNA, 25 bp, Saccharomyces pastorianus
agtgactccaaaactatatccggta

SEQ ID NO: 111757 - DNA, 25 bp, Saccharomyces pastorianus
tagagcaatcaaacagagcttggtt

SEQ ID NO: 111758 - DNA, 25 bp, Saccharomyces pastorianus
aaaattgaactccaaccatgccggt

SEQ ID NO: 111759 - DNA, 25 bp, Saccharomyces pastorianus
tgagtgggaaaagctcgtcacaagc

SEQ ID NO: 111760 - DNA, 25 bp, Saccharomyces pastorianus
gaaatatcgggaacgttatcgccaa

SEQ ID NO: 111761 - DNA, 25 bp, Saccharomyces pastorianus
ggaagagtttacaatctttcaggaa

SEQ ID NO: 111762 - DNA, 25 bp, Saccharomyces pastorianus
aattttcacggacatcttactttct

SEQ ID NO: 111763 - DNA, 25 bp, Saccharomyces pastorianus
tcagtggagcagagtacgacaggat

SEQ ID NO: 111764 - DNA, 25 bp, Saccharomyces pastorianus
ggatttactctttgctctcgaaaat

SEQ ID NO: 111765 - DNA, 25 bp, Saccharomyces pastorianus
gacatgatgtcaagtgcctgcgaaa

SEQ ID NO: 111766 - DNA, 25 bp, Saccharomyces pastorianus
aaatcttcaggcaaagtcgcctccg

SEQ ID NO: 111767 - DNA, 25 bp, Saccharomyces pastorianus
gtatggttggctaacttcatcagta

SEQ ID NO: 111768 - DNA, 25 bp, Saccharomyces pastorianus
gcgcaacggcgttcagactattatt

SEQ ID NO: 111769 - DNA, 25 bp, Saccharomyces pastorianus
gaagtgaagtttctgcggctttaag

SEQ ID NO: 111770 - DNA, 25 bp, Saccharomyces pastorianus
aataagccaacgtccttgggagcaa

SEQ ID NO: 111771 - DNA, 25 bp, Saccharomyces pastorianus
ggctttaagagccattgcactaatt

SEQ ID NO: 111772 - DNA, 25 bp, Saccharomyces pastorianus
ttaccattccttcatccggaacaag

SEQ ID NO: 111773 - DNA, 25 bp, Saccharomyces pastorianus
aagagacgttacacagagcatcgaa

SEQ ID NO: 111774 - DNA, 25 bp, Saccharomyces pastorianus
gcatcgaacgttacggctggcctta

SEQ ID NO: 111775 - DNA, 25 bp, Saccharomyces pastorianus
ggattactgctggaacggcacacta

SEQ ID NO: 111776 - DNA, 25 bp, Saccharomyces pastorianus
aaagcggtgctattgcctctgcaat

SEQ ID NO: 111777 - DNA, 25 bp, Saccharomyces pastorianus
ttcttcttcctctacggcaaacaaa

SEQ ID NO: 111778 - DNA, 25 bp, Saccharomyces pastorianus
aaagcgaatgctgcggctatttcct

SEQ ID NO: 111779 - DNA, 25 bp, Saccharomyces pastorianus
aagaaagcctaaatgccaccttgcc

SEQ ID NO: 111780 - DNA, 25 bp, Saccharomyces pastorianus
ggcacactaagtacctcagctaatc

SEQ ID NO: 111781 - DNA, 25 bp, Saccharomyces pastorianus
atgggcaactttacggatgactcta

SEQ ID NO: 111782 - DNA, 25 bp, Saccharomyces pastorianus
ggtattccaataacggctctcttag

SEQ ID NO: 111783 - DNA, 25 bp, Saccharomyces pastorianus
ggttcatcaacctccggaaatacta

SEQ ID NO: 111784 - DNA, 25 bp, Saccharomyces pastorianus
caatctctgaggctactgacggtat

SEQ ID NO: 111785 - DNA, 25 bp, Saccharomyces pastorianus
atgtcacttctaactcaaactcttc

SEQ ID NO: 111786 - DNA, 25 bp, Saccharomyces pastorianus
tgatttactgattcttccaccaggc

SEQ ID NO: 111787 - DNA, 25 bp, Saccharomyces pastorianus
gtcaacatctgcgaaggttccttca

SEQ ID NO: 111788 - DNA, 25 bp, Saccharomyces pastorianus
ggcatttatcatcgtttcaccttga

SEQ ID NO: 111789 - DNA, 25 bp, Saccharomyces pastorianus
aatggcaagctatcaacaggtcaaa

SEQ ID NO: 111790 - DNA, 25 bp, Saccharomyces pastorianus
gaacagaactttccctggatgaatt

SEQ ID NO: 111791 - DNA, 25 bp, Saccharomyces pastorianus
aaggttgactccgattatcgcgcac

SEQ ID NO: 111792 - DNA, 25 bp, Saccharomyces pastorianus
ggatgcttccacaccagagaactgg

SEQ ID NO: 111793 - DNA, 25 bp, Saccharomyces pastorianus
ggctgattcattgcctgtacgcaag

SEQ ID NO: 111794 - DNA, 25 bp, Saccharomyces pastorianus
gagactgtttaaggacgagcccaaa

SEQ ID NO: 111795 - DNA, 25 bp, Saccharomyces pastorianus
atactttgacgtcagggatgcttcc

SEQ ID NO: 111796 - DNA, 25 bp, Saccharomyces pastorianus
gatactgtctcgagggtgctggata

SEQ ID NO: 111797 - DNA, 25 bp, Saccharomyces pastorianus
aatattggtcacatttttcatctct

SEQ ID NO: 111798 - DNA, 25 bp, Saccharomyces pastorianus
gtcattagacttttacatcggtggt

SEQ ID NO: 111799 - DNA, 25 bp, Saccharomyces pastorianus
ttattggtggagtcgcttttgccgt

SEQ ID NO: 111800 - DNA, 25 bp, Saccharomyces pastorianus
actgggactcattagctcaaggact

SEQ ID NO: 111801 - DNA, 25 bp, Saccharomyces pastorianus
gttaccacaaatcgccattctttat

SEQ ID NO: 111802 - DNA, 25 bp, Saccharomyces pastorianus
aaggcatcaacatcaccctaatgac

SEQ ID NO: 111803 - DNA, 25 bp, Saccharomyces pastorianus
gatccttttggtaagctggctttgt

SEQ ID NO: 111804 - DNA, 25 bp, Saccharomyces pastorianus
gaggtttttagctctttttgcaact

SEQ ID NO: 111805 - DNA, 25 bp, Saccharomyces pastorianus
atgacagtaattcgccatcagatga

SEQ ID NO: 111806 - DNA, 25 bp, Saccharomyces pastorianus
caaggactgggctctatcatagggt

SEQ ID NO: 111807 - DNA, 25 bp, Saccharomyces pastorianus
aatgatacgtcagattcacctcaag

SEQ ID NO: 111808 - DNA, 25 bp, Saccharomyces pastorianus
gaatcctatcctttgcgtgtcaaaa

SEQ ID NO: 111809 - DNA, 25 bp, Saccharomyces pastorianus
gctgccggtaacgtcatgattgtct

SEQ ID NO: 111810 - DNA, 25 bp, Saccharomyces pastorianus
gtcggtgtcacaagcttatatccaa

SEQ ID NO: 111811 - DNA, 25 bp, Saccharomyces pastorianus
ttttgttatcttctctactgtcggt

SEQ ID NO: 111812 - DNA, 25 bp, Saccharomyces pastorianus
tgcttccatggccatttgttttgtt

SEQ ID NO: 111813 - DNA, 25 bp, Saccharomyces pastorianus
actttcgtggccttatacactgttg

SEQ ID NO: 111814 - DNA, 25 bp, Saccharomyces pastorianus
aatcgcctacgttattgttgccgaa

SEQ ID NO: 111815 - DNA, 25 bp, Saccharomyces pastorianus
ttcttcgctattagttgggccccaa

SEQ ID NO: 111816 - DNA, 25 bp, Saccharomyces pastorianus
gggctgtttggtattttcattcttc

SEQ ID NO: 111817 - DNA, 25 bp, Saccharomyces pastorianus
agtgtctattgggtggttctgcttc

SEQ ID NO: 111818 - DNA, 25 bp, Saccharomyces pastorianus
tactactattttcaacgccgtcggt

SEQ ID NO: 111819 - DNA, 25 bp, Saccharomyces pastorianus
caaactgttatattgttgggcactt

SEQ ID NO: 111820 - DNA, 25 bp, Saccharomyces pastorianus
gtgcttttattcgaattttgttcaa

SEQ ID NO: 111821 - DNA, 25 bp, Saccharomyces pastorianus
tattgttgggcacttttttttactg

SEQ ID NO: 111822 - DNA, 25 bp, Saccharomyces pastorianus
actgttatattgttgggcacttttt

SEQ ID NO: 111823 - DNA, 25 bp, Saccharomyces pastorianus
attcgaattttgttcaaactgttat

SEQ ID NO: 111824 - DNA, 25 bp, Saccharomyces pastorianus
ttttttactgtgttgaaaggcttca

SEQ ID NO: 111825 - DNA, 25 bp, Saccharomyces pastorianus
ttttactgtgttgaaaggcttcagc

SEQ ID NO: 111826 - DNA, 25 bp, Saccharomyces pastorianus
atgtgggcgggaattctcgagattt

SEQ ID NO: 111827 - DNA, 25 bp, Saccharomyces pastorianus
ggaattctcgagattttgagtgctt

SEQ ID NO: 111828 - DNA, 25 bp, Saccharomyces pastorianus
tgtgggcgggaattctcgagatttt

SEQ ID NO: 111829 - DNA, 25 bp, Saccharomyces pastorianus
gagattttgagtgcttttattcgaa

SEQ ID NO: 111830 - DNA, 25 bp, Saccharomyces pastorianus
cggtcaactgtgtttttcgaatgtt

SEQ ID NO: 111831 - DNA, 25 bp, Saccharomyces pastorianus
gatttccacatttcacgacggtcaa

SEQ ID NO: 111832 - DNA, 25 bp, Saccharomyces pastorianus
tcaactgtgtttttcgaatgtttat

SEQ ID NO: 111833 - DNA, 25 bp, Saccharomyces pastorianus
ttcacgacggtcaactgtgtttttc

SEQ ID NO: 111834 - DNA, 25 bp, Saccharomyces pastorianus
cgacggtcaactgtgtttttcgaat

SEQ ID NO: 111835 - DNA, 25 bp, Saccharomyces pastorianus
tccacatttcacgacggtcaactgt

SEQ ID NO: 111836 - DNA, 25 bp, Saccharomyces pastorianus
atgatttccacatttcacgacggtc

SEQ ID NO: 111837 - DNA, 25 bp, Saccharomyces pastorianus
cacgacggtcaactgtgtttttcga

SEQ ID NO: 111838 - DNA, 25 bp, Saccharomyces pastorianus
gacggtcaactgtgtttttcgaatg

SEQ ID NO: 111839 - DNA, 25 bp, Saccharomyces pastorianus
catttcacgacggtcaactgtgttt

SEQ ID NO: 111840 - DNA, 25 bp, Saccharomyces pastorianus
atttcacgacggtcaactgtgtttt

SEQ ID NO: 111841 - DNA, 25 bp, Saccharomyces pastorianus
aaagcagaggcaaatcgagtacgaa

SEQ ID NO: 111842 - DNA, 25 bp, Saccharomyces pastorianus
aaacagcagaagaccgtacggccag

SEQ ID NO: 111843 - DNA, 25 bp, Saccharomyces pastorianus
atgaagaatctagcgaagcgtcatc

SEQ ID NO: 111844 - DNA, 25 bp, Saccharomyces pastorianus
aaaagaaactgcatccactggagaa

SEQ ID NO: 111845 - DNA, 25 bp, Saccharomyces pastorianus
tgacagtgacgaacgcttcagcgac

SEQ ID NO: 111846 - DNA, 25 bp, Saccharomyces pastorianus
gtacggccagagagcagatgtcaaa

SEQ ID NO: 111847 - DNA, 25 bp, Saccharomyces pastorianus
aagcagcatcattagaggcctctag

SEQ ID NO: 111848 - DNA, 25 bp, Saccharomyces pastorianus
gaagaacatccttcttggattgcaa

SEQ ID NO: 111849 - DNA, 25 bp, Saccharomyces pastorianus
gggaacgcgaagacagacgtactga

SEQ ID NO: 111850 - DNA, 25 bp, Saccharomyces pastorianus
ataatttacctgaactaatggctgg

SEQ ID NO: 111851 - DNA, 25 bp, Saccharomyces pastorianus
ggctcacaagccaagcacgttcaaa

SEQ ID NO: 111852 - DNA, 25 bp, Saccharomyces pastorianus
agaaactttgcgttacagacctcct

SEQ ID NO: 111853 - DNA, 25 bp, Saccharomyces pastorianus
acctcctgtcttgatggttccatat

SEQ ID NO: 111854 - DNA, 25 bp, Saccharomyces pastorianus
gatttccatcatacagtgactccat

SEQ ID NO: 111855 - DNA, 25 bp, Saccharomyces pastorianus
atatgtcatgattaccttcgccgct

SEQ ID NO: 111856 - DNA, 25 bp, Saccharomyces pastorianus
ggtccacacgtttgcttaggtcaaa

SEQ ID NO: 111857 - DNA, 25 bp, Saccharomyces pastorianus
cttatacccagctttacatgatcct

SEQ ID NO: 111858 - DNA, 25 bp, Saccharomyces pastorianus
atgcctcttcttctttagcttgttg

SEQ ID NO: 111859 - DNA, 25 bp, Saccharomyces pastorianus
gggcgctatgttaattccaacctta

SEQ ID NO: 111860 - DNA, 25 bp, Saccharomyces pastorianus
ttatttgcttctcaagatgcctctt

SEQ ID NO: 111861 - DNA, 25 bp, Saccharomyces pastorianus
tcgccgctttgttgggtaaatttgc

SEQ ID NO: 111862 - DNA, 25 bp, Saccharomyces pastorianus
accgtccagatgtctcagctaagat

SEQ ID NO: 111863 - DNA, 25 bp, Saccharomyces pastorianus
gtggaatctgaatcggcatcacatt

SEQ ID NO: 111864 - DNA, 25 bp, Saccharomyces pastorianus
tagtcaattaccaatctccgctttg

SEQ ID NO: 111865 - DNA, 25 bp, Saccharomyces pastorianus
tcaaagtctttgacaccttctccaa

SEQ ID NO: 111866 - DNA, 25 bp, Saccharomyces pastorianus
gctgtaagtacaatcgctgcgggtg

SEQ ID NO: 111867 - DNA, 25 bp, Saccharomyces pastorianus
tataactaacctacagaccctttcg

SEQ ID NO: 111868 - DNA, 25 bp, Saccharomyces pastorianus
ttaggcattacaccagcagattcaa

SEQ ID NO: 111869 - DNA, 25 bp, Saccharomyces pastorianus
gagctggcgatgtctccaacgaaga

SEQ ID NO: 111870 - DNA, 25 bp, Saccharomyces pastorianus
gagtcagagtcatccaaatcacaag

SEQ ID NO: 111871 - DNA, 25 bp, Saccharomyces pastorianus
atgcacaatgcctaactctaaccaa

SEQ ID NO: 111872 - DNA, 25 bp, Saccharomyces pastorianus
atgggcaacatagcttcacccttat

SEQ ID NO: 111873 - DNA, 25 bp, Saccharomyces pastorianus
gctttgacttcgacggatactgaca

SEQ ID NO: 111874 - DNA, 25 bp, Saccharomyces pastorianus
gacagcgtattcttagagatgccca

SEQ ID NO: 111875 - DNA, 25 bp, Saccharomyces pastorianus
gaaatcgacttgtacggaaacctag

SEQ ID NO: 111876 - DNA, 25 bp, Saccharomyces pastorianus
gttaaagcatcgtcacttacagcaa

SEQ ID NO: 111877 - DNA, 25 bp, Saccharomyces pastorianus
agattgacgaacttgcccatgaaaa

SEQ ID NO: 111878 - DNA, 25 bp, Saccharomyces pastorianus
attcaatctaacgtagccgaccgaa

SEQ ID NO: 111879 - DNA, 25 bp, Saccharomyces pastorianus
ctatagaggctcgatgtactggaaa

SEQ ID NO: 111880 - DNA, 25 bp, Saccharomyces pastorianus
gagatgcccagaagtatcagtttga

SEQ ID NO: 111881 - DNA, 25 bp, Saccharomyces pastorianus
aaattatggctcacgcttttggcag

SEQ ID NO: 111882 - DNA, 25 bp, Saccharomyces pastorianus
gagcaaccaactcaccaagatcgag

SEQ ID NO: 111883 - DNA, 25 bp, Saccharomyces pastorianus
agcctgcttgcattaaaatcaccca

SEQ ID NO: 111884 - DNA, 25 bp, Saccharomyces pastorianus
gataatgctttacaggccaagcgat

SEQ ID NO: 111885 - DNA, 25 bp, Saccharomyces pastorianus
aacatactatcatggacggcgccgg

SEQ ID NO: 111886 - DNA, 25 bp, Saccharomyces pastorianus
catacgagtgttacttgttggagcc

SEQ ID NO: 111887 - DNA, 25 bp, Saccharomyces pastorianus
tggagccagcctttatttttcgtaa

SEQ ID NO: 111888 - DNA, 25 bp, Saccharomyces pastorianus
tttatgatgttgatgcaggcaccgc

SEQ ID NO: 111889 - DNA, 25 bp, Saccharomyces pastorianus
gatccttactcacgcggtgcttatt

SEQ ID NO: 111890 - DNA, 25 bp, Saccharomyces pastorianus
ttagcaactggacacgcgatcctta

SEQ ID NO: 111891 - DNA, 25 bp, Saccharomyces pastorianus
ctgtgcctatggtgcttgggaaagc

SEQ ID NO: 111892 - DNA, 25 bp, Saccharomyces pastorianus
aggcaccgcttacaaatcacataga

SEQ ID NO: 111893 - DNA, 25 bp, Saccharomyces pastorianus
aatggtcaagactcccgcataagat

SEQ ID NO: 111894 - DNA, 25 bp, Saccharomyces pastorianus
agttttttccaacctgtgctgaaca

SEQ ID NO: 111895 - DNA, 25 bp, Saccharomyces pastorianus
gtaactttggctaactctaccaatg

SEQ ID NO: 111896 - DNA, 25 bp, Saccharomyces pastorianus
acaatagttctgttcctggtgcgca

SEQ ID NO: 111897 - DNA, 25 bp, Saccharomyces pastorianus
tacttgacattcatgcgtggtttca

SEQ ID NO: 111898 - DNA, 25 bp, Saccharomyces pastorianus
aagctgcccatgtgttaattgtcta

SEQ ID NO: 111899 - DNA, 25 bp, Saccharomyces pastorianus
gaagtcctgactcataagggcattt

SEQ ID NO: 111900 - DNA, 25 bp, Saccharomyces pastorianus
aagcacgcagtgctcttgtgaagat

SEQ ID NO: 111901 - DNA, 25 bp, Saccharomyces pastorianus
ttcctggtgcgcatgacagttcaga

SEQ ID NO: 111902 - DNA, 25 bp, Saccharomyces pastorianus
gtgccattgatgacagatgctcagt

SEQ ID NO: 111903 - DNA, 25 bp, Saccharomyces pastorianus
gatggatgtttttctcactctacaa

SEQ ID NO: 111904 - DNA, 25 bp, Saccharomyces pastorianus
tgctcctcattcaagcgacgttgct

SEQ ID NO: 111905 - DNA, 25 bp, Saccharomyces pastorianus
agtacaacaacgattgctgctcctc

SEQ ID NO: 111906 - DNA, 25 bp, Saccharomyces pastorianus
gtcctccggataactgcacttgtga

SEQ ID NO: 111907 - DNA, 25 bp, Saccharomyces pastorianus
acatattcatttgggactgcctaat

SEQ ID NO: 111908 - DNA, 25 bp, Saccharomyces pastorianus
tacgccatacgctgatggtgttttt

SEQ ID NO: 111909 - DNA, 25 bp, Saccharomyces pastorianus
acctggtatagtggctggtcccaaa

SEQ ID NO: 111910 - DNA, 25 bp, Saccharomyces pastorianus
tatccgttatctccacctaaactta

SEQ ID NO: 111911 - DNA, 25 bp, Saccharomyces pastorianus
aattaaagattctccacctggtata

SEQ ID NO: 111912 - DNA, 25 bp, Saccharomyces pastorianus
ggtgccaacattgatgcttgcatct

SEQ ID NO: 111913 - DNA, 25 bp, Saccharomyces pastorianus
taaacttactttcacacccagcata

SEQ ID NO: 111914 - DNA, 25 bp, Saccharomyces pastorianus
actgcctaattcaagggcctccaga

SEQ ID NO: 111915 - DNA, 25 bp, Saccharomyces pastorianus
gagtttcctaaagactatccgttat

SEQ ID NO: 111916 - DNA, 25 bp, Saccharomyces pastorianus
gatggtcgccagtgcaaagtgtaga

SEQ ID NO: 111917 - DNA, 25 bp, Saccharomyces pastorianus
cgctcagaaacgtctcctcaaggag

SEQ ID NO: 111918 - DNA, 25 bp, Saccharomyces pastorianus
gaaactacgtctgttttatcacgct

SEQ ID NO: 111919 - DNA, 25 bp, Saccharomyces pastorianus
gaaatcacctgtctttattgtgcat

SEQ ID NO: 111920 - DNA, 25 bp, Saccharomyces pastorianus
tgccatctgggcagtaacggagcaa

SEQ ID NO: 111921 - DNA, 25 bp, Saccharomyces pastorianus
gcggtactggcgcacattgctaaat

SEQ ID NO: 111922 - DNA, 25 bp, Saccharomyces pastorianus
attgtgcatgtattttcaggcgaag

SEQ ID NO: 111923 - DNA, 25 bp, Saccharomyces pastorianus
gaaccattcgaattcactttgggaa

SEQ ID NO: 111924 - DNA, 25 bp, Saccharomyces pastorianus
gagccgctactgatgctttgatgaa

SEQ ID NO: 111925 - DNA, 25 bp, Saccharomyces pastorianus
acttttcagaaacaagcgctcttgc

SEQ ID NO: 111926 - DNA, 25 bp, Saccharomyces pastorianus
aatggtattgctacgagcctcttgc

SEQ ID NO: 111927 - DNA, 25 bp, Saccharomyces pastorianus
gaattggctatgctatgtcgtagag

SEQ ID NO: 111928 - DNA, 25 bp, Saccharomyces pastorianus
aggtgaaggttatggttcctcatta

SEQ ID NO: 111929 - DNA, 25 bp, Saccharomyces pastorianus
aggcgcggaaattatccttgatttt

SEQ ID NO: 111930 - DNA, 25 bp, Saccharomyces pastorianus
gtagacccaggttttgatgagtttc

SEQ ID NO: 111931 - DNA, 25 bp, Saccharomyces pastorianus
aagtgacatgaattacctgctggat

SEQ ID NO: 111932 - DNA, 25 bp, Saccharomyces pastorianus
ataccaaattcccacacctaataat

SEQ ID NO: 111933 - DNA, 25 bp, Saccharomyces pastorianus
tataacgtgtttcgccaacatacct

SEQ ID NO: 111934 - DNA, 25 bp, Saccharomyces pastorianus
gaccgccttggcattgaaatatctg

SEQ ID NO: 111935 - DNA, 25 bp, Saccharomyces pastorianus
tatgatgccactgacaagcctttct

SEQ ID NO: 111936 - DNA, 25 bp, Saccharomyces pastorianus
aagcctttctcttccacgcaagatg

SEQ ID NO: 111937 - DNA, 25 bp, Saccharomyces pastorianus
aatagtgtacagataggcgcggaaa

SEQ ID NO: 111938 - DNA, 25 bp, Saccharomyces pastorianus
gagaaagtgctcacccaattgaccg

SEQ ID NO: 111939 - DNA, 25 bp, Saccharomyces pastorianus
aacatacctccttccaagaagctgt

SEQ ID NO: 111940 - DNA, 25 bp, Saccharomyces pastorianus
tgatttcgagggtaagcttctacaa

SEQ ID NO: 111941 - DNA, 25 bp, Saccharomyces pastorianus
ttgtagattctacgccggtgttaat

SEQ ID NO: 111942 - DNA, 25 bp, Saccharomyces pastorianus
gaaggaacaattgactccatcgtca

SEQ ID NO: 111943 - DNA, 25 bp, Saccharomyces pastorianus
accagcttaccatatatgatttcga

SEQ ID NO: 111944 - DNA, 25 bp, Saccharomyces pastorianus
gtcgtagcagacatcaacttctcgg

SEQ ID NO: 111945 - DNA, 25 bp, Saccharomyces pastorianus
gagcctgtggtattttcttcaaatc

SEQ ID NO: 111946 - DNA, 25 bp, Saccharomyces pastorianus
aggctcctgaggatgtcccaattaa

SEQ ID NO: 111947 - DNA, 25 bp, Saccharomyces pastorianus
gaaaacctaaaaccatccatcgacg

SEQ ID NO: 111948 - DNA, 25 bp, Saccharomyces pastorianus
tcgtcaacactaccaatacaactcg

SEQ ID NO: 111949 - DNA, 25 bp, Saccharomyces pastorianus
tgtcttcaaatccataccagcttac

SEQ ID NO: 111950 - DNA, 25 bp, Saccharomyces pastorianus
aacgacagcataatcgccgtatcat

SEQ ID NO: 111951 - DNA, 25 bp, Saccharomyces pastorianus
atttcaacagatactttgccggatg

SEQ ID NO: 111952 - DNA, 25 bp, Saccharomyces pastorianus
gtatacttcaaaactgatccaggcg

SEQ ID NO: 111953 - DNA, 25 bp, Saccharomyces pastorianus
ctgaaaccggatcgagcctcatcaa

SEQ ID NO: 111954 - DNA, 25 bp, Saccharomyces pastorianus
aaccaccaggtccaacagcaaaatg

SEQ ID NO: 111955 - DNA, 25 bp, Saccharomyces pastorianus
aaatcacctctaactatcaacacat

SEQ ID NO: 111956 - DNA, 25 bp, Saccharomyces pastorianus
aagttcacgatgtccagctaacacc

SEQ ID NO: 111957 - DNA, 25 bp, Saccharomyces pastorianus
gatgcgtgatttacttgttgaacca

SEQ ID NO: 111958 - DNA, 25 bp, Saccharomyces pastorianus
gccaattttatgaccgtagaaccaa

SEQ ID NO: 111959 - DNA, 25 bp, Saccharomyces pastorianus
acaatagcaataccggtactcctca

SEQ ID NO: 111960 - DNA, 25 bp, Saccharomyces pastorianus
cttttccaggaatgctatgactatc

SEQ ID NO: 111961 - DNA, 25 bp, Saccharomyces pastorianus
gatcataattctccacttttccagg

SEQ ID NO: 111962 - DNA, 25 bp, Saccharomyces pastorianus
gagtgcactattttgcttcttgtca

SEQ ID NO: 111963 - DNA, 25 bp, Saccharomyces pastorianus
gtagttgccaaagagctgaaccttt

SEQ ID NO: 111964 - DNA, 25 bp, Saccharomyces pastorianus
ggttccctatatgcaaagctattta

SEQ ID NO: 111965 - DNA, 25 bp, Saccharomyces pastorianus
acattggtgatatactgcaagcaac

SEQ ID NO: 111966 - DNA, 25 bp, Saccharomyces pastorianus
gtgcccctttcggtagtttgcgatt

SEQ ID NO: 111967 - DNA, 25 bp, Saccharomyces pastorianus
tggttattttgcgttggttccctat

SEQ ID NO: 111968 - DNA, 25 bp, Saccharomyces pastorianus
aagcaacaaggagttctccccatcg

SEQ ID NO: 111969 - DNA, 25 bp, Saccharomyces pastorianus
gactgtgtaatcgtcagagtgcact

SEQ ID NO: 111970 - DNA, 25 bp, Saccharomyces pastorianus
gctgaacctttaggatccaccgaat

SEQ ID NO: 111971 - DNA, 25 bp, Saccharomyces pastorianus
ggatccaccgaattaataaacattg

SEQ ID NO: 111972 - DNA, 25 bp, Saccharomyces pastorianus
ttgcttcttgtcaaagtagttgcca

SEQ ID NO: 111973 - DNA, 25 bp, Saccharomyces pastorianus
aagcttttccctcatgaaccaatag

SEQ ID NO: 111974 - DNA, 25 bp, Saccharomyces pastorianus
gtttagttcattctcaactgccttt

SEQ ID NO: 111975 - DNA, 25 bp, Saccharomyces pastorianus
gacggaagcgagtcatcttgtgcaa

SEQ ID NO: 111976 - DNA, 25 bp, Saccharomyces pastorianus
aaggccatggttcatcctcaagctt

SEQ ID NO: 111977 - DNA, 25 bp, Saccharomyces pastorianus
ggatgcgtttactagcgtttctcat

SEQ ID NO: 111978 - DNA, 25 bp, Saccharomyces pastorianus
cattatgttttgtggcccggctaaa

SEQ ID NO: 111979 - DNA, 25 bp, Saccharomyces pastorianus
tacaagattgtaccgctattcgtat

SEQ ID NO: 111980 - DNA, 25 bp, Saccharomyces pastorianus
aactgccttttatcaggatgcgttt

SEQ ID NO: 111981 - DNA, 25 bp, Saccharomyces pastorianus
attcttcacgggtctgtcatactta

SEQ ID NO: 111982 - DNA, 25 bp, Saccharomyces pastorianus
gtcatacttatgtgcaaggccatgg

SEQ ID NO: 111983 - DNA, 25 bp, Saccharomyces pastorianus
aactgcagcactgggtgtatcacta

SEQ ID NO: 111984 - DNA, 25 bp, Saccharomyces pastorianus
gatagcaatacttttggccccattt

SEQ ID NO: 111985 - DNA, 25 bp, Saccharomyces pastorianus
taaaggtacctctatgcagcctacg

SEQ ID NO: 111986 - DNA, 25 bp, Saccharomyces pastorianus
aatgtggtccatattgcgcaagtta

SEQ ID NO: 111987 - DNA, 25 bp, Saccharomyces pastorianus
aatagcaatttcatgggttccggta

SEQ ID NO: 111988 - DNA, 25 bp, Saccharomyces pastorianus
gctataacgattgtttggccaccct

SEQ ID NO: 111989 - DNA, 25 bp, Saccharomyces pastorianus
tgggttccggtacttctaacaatca

SEQ ID NO: 111990 - DNA, 25 bp, Saccharomyces pastorianus
gtttaccgtttgataccattgacac

SEQ ID NO: 111991 - DNA, 25 bp, Saccharomyces pastorianus
taccctaaacctcaagtgaacctgc

SEQ ID NO: 111992 - DNA, 25 bp, Saccharomyces pastorianus
tgacacgaagtttccataccctaaa

SEQ ID NO: 111993 - DNA, 25 bp, Saccharomyces pastorianus
ctggcaacagattgggtgctgcttt

SEQ ID NO: 111994 - DNA, 25 bp, Saccharomyces pastorianus
gacattatccttttcaaagctccta

SEQ ID NO: 111995 - DNA, 25 bp, Saccharomyces pastorianus
tatgctactaatggacggactggat

SEQ ID NO: 111996 - DNA, 25 bp, Saccharomyces pastorianus
acaatggcatcttctgcactatcgt

SEQ ID NO: 111997 - DNA, 25 bp, Saccharomyces pastorianus
gaccgagaagatttacccaggcccg

SEQ ID NO: 111998 - DNA, 25 bp, Saccharomyces pastorianus
gcactatcgttcaggtttgagccgc

SEQ ID NO: 111999 - DNA, 25 bp, Saccharomyces pastorianus
gaactatgttatccacgtcagtacg

SEQ ID NO: 112000 - DNA, 25 bp, Saccharomyces pastorianus
ggcgacgaaaatttcttccccatct

SEQ ID NO: 112001 - DNA, 25 bp, Saccharomyces pastorianus
aagagtctctagtggttcatcatta

SEQ ID NO: 112002 - DNA, 25 bp, Saccharomyces pastorianus
ccaggcccgcaagaagatcgttatt

SEQ ID NO: 112003 - DNA, 25 bp, Saccharomyces pastorianus
aagctgtttttgacaattttcctga

SEQ ID NO: 112004 - DNA, 25 bp, Saccharomyces pastorianus
atcccaaattattctatcccgacat

SEQ ID NO: 112005 - DNA, 25 bp, Saccharomyces pastorianus
gactggataccccatcatattttag

SEQ ID NO: 112006 - DNA, 25 bp, Saccharomyces pastorianus
agaaaggcgacgtctccaagggcgt

SEQ ID NO: 112007 - DNA, 25 bp, Saccharomyces pastorianus
agaggcgccgggaagccgaattctt

SEQ ID NO: 112008 - DNA, 25 bp, Saccharomyces pastorianus
agtgggaagacctttctgagcgctc

SEQ ID NO: 112009 - DNA, 25 bp, Saccharomyces pastorianus
ttaccacgccagcattcacgagaaa

SEQ ID NO: 112010 - DNA, 25 bp, Saccharomyces pastorianus
gacatcactgtaaatggcgtcccag

SEQ ID NO: 112011 - DNA, 25 bp, Saccharomyces pastorianus
aaacaagtgtgtgcgtgtaccggaa

SEQ ID NO: 112012 - DNA, 25 bp, Saccharomyces pastorianus
cgttaaggactactcatttctggga

SEQ ID NO: 112013 - DNA, 25 bp, Saccharomyces pastorianus
aacatggcaacttatcggccgcagc

SEQ ID NO: 112014 - DNA, 25 bp, Saccharomyces pastorianus
gtggaaagctcagtagccccttcaa

SEQ ID NO: 112015 - DNA, 25 bp, Saccharomyces pastorianus
agctttgtcatttccaagtctctga

SEQ ID NO: 112016 - DNA, 25 bp, Saccharomyces pastorianus
gttcgacgagcccattgaatgcttc

SEQ ID NO: 112017 - DNA, 25 bp, Saccharomyces pastorianus
ggtatttcgttgacagaagatctat

SEQ ID NO: 112018 - DNA, 25 bp, Saccharomyces pastorianus
gaatttgctcaaagcttggaagctg

SEQ ID NO: 112019 - DNA, 25 bp, Saccharomyces pastorianus
ttgatcatcccaggccaggcaggta

SEQ ID NO: 112020 - DNA, 25 bp, Saccharomyces pastorianus
gaagatattgtctccaacataaacg

SEQ ID NO: 112021 - DNA, 25 bp, Saccharomyces pastorianus
gacttggagccacgttcaaagaaga

SEQ ID NO: 112022 - DNA, 25 bp, Saccharomyces pastorianus
agccaatgctactttgatcatccca

SEQ ID NO: 112023 - DNA, 25 bp, Saccharomyces pastorianus
gagagtcatgacttggagccacgtt

SEQ ID NO: 112024 - DNA, 25 bp, Saccharomyces pastorianus
gttagactattgtccgacgacgaat

SEQ ID NO: 112025 - DNA, 25 bp, Saccharomyces pastorianus
ccactctacttccacacgaggaaaa

SEQ ID NO: 112026 - DNA, 25 bp, Saccharomyces pastorianus
tctatacgacgaattgcttaagcac

SEQ ID NO: 112027 - DNA, 25 bp, Saccharomyces pastorianus
aaagatagctgaacctgtacccaca

SEQ ID NO: 112028 - DNA, 25 bp, Saccharomyces pastorianus
gatttggccacaagatacgcgattt

SEQ ID NO: 112029 - DNA, 25 bp, Saccharomyces pastorianus
agaatgcgcatctcaggctgccaaa

SEQ ID NO: 112030 - DNA, 25 bp, Saccharomyces pastorianus
gtttcacccgtgttctcatgaattg

SEQ ID NO: 112031 - DNA, 25 bp, Saccharomyces pastorianus
tgctgagtactgctctaccgaggaa

SEQ ID NO: 112032 - DNA, 25 bp, Saccharomyces pastorianus
gagcatgtcgctactaaggtcacag

SEQ ID NO: 112033 - DNA, 25 bp, Saccharomyces pastorianus
tatcaggctacccaatcgactttat

SEQ ID NO: 112034 - DNA, 25 bp, Saccharomyces pastorianus
gatgcagtattgtcctattgtaact

SEQ ID NO: 112035 - DNA, 25 bp, Saccharomyces pastorianus
ctttcgagaaagactgctacgcaat

SEQ ID NO: 112036 - DNA, 25 bp, Saccharomyces pastorianus
actttatcacctggcttgctgagta

SEQ ID NO: 112037 - DNA, 25 bp, Saccharomyces pastorianus
gagacaagacagtttcacccgtgtt

SEQ ID NO: 112038 - DNA, 25 bp, Saccharomyces pastorianus
aaatgtcgacttagccgatttggcc

SEQ ID NO: 112039 - DNA, 25 bp, Saccharomyces pastorianus
aaaagcatatgagctctccgtccta

SEQ ID NO: 112040 - DNA, 25 bp, Saccharomyces pastorianus
taagagcctcatcagggcatgcatc

SEQ ID NO: 112041 - DNA, 25 bp, Saccharomyces pastorianus
aacgcctaagctcgagccggtggta

SEQ ID NO: 112042 - DNA, 25 bp, Saccharomyces pastorianus
tggtctacactttcacaacgcctaa

SEQ ID NO: 112043 - DNA, 25 bp, Saccharomyces pastorianus
atgtcaccttctcgaagaggcggca

SEQ ID NO: 112044 - DNA, 25 bp, Saccharomyces pastorianus
atgcatcaatgcttcagacactcct

SEQ ID NO: 112045 - DNA, 25 bp, Saccharomyces pastorianus
gacggttcaagtaccagtccagttg

SEQ ID NO: 112046 - DNA, 25 bp, Saccharomyces pastorianus
taccaaaccaatacggcggctttca

SEQ ID NO: 112047 - DNA, 25 bp, Saccharomyces pastorianus
gcgccaatattctgcttctaattct

SEQ ID NO: 112048 - DNA, 25 bp, Saccharomyces pastorianus
taattctggcaaactctggcctggt

SEQ ID NO: 112049 - DNA, 25 bp, Saccharomyces pastorianus
ataagacccggagacatgtcacctt

SEQ ID NO: 112050 - DNA, 25 bp, Saccharomyces pastorianus
gtagaaacctgatccaggcctgtct

SEQ ID NO: 112051 - DNA, 25 bp, Saccharomyces pastorianus
aagtcacaattgctaggtggtgcca

SEQ ID NO: 112052 - DNA, 25 bp, Saccharomyces pastorianus
tgcacacgcgaatagcttaggccat

SEQ ID NO: 112053 - DNA, 25 bp, Saccharomyces pastorianus
gtttgaacctatagtcacgcagcag

SEQ ID NO: 112054 - DNA, 25 bp, Saccharomyces pastorianus
atcaagatcaggtaccggcaggcgc

SEQ ID NO: 112055 - DNA, 25 bp, Saccharomyces pastorianus
cagcagcaacatcacacgcagaatt

SEQ ID NO: 112056 - DNA, 25 bp, Saccharomyces pastorianus
aggcctgtcttaacgcccctgatga

SEQ ID NO: 112057 - DNA, 25 bp, Saccharomyces pastorianus
ggtggtgccaatcctaatcaaaact

SEQ ID NO: 112058 - DNA, 25 bp, Saccharomyces pastorianus
aatgatatgcaacgccagcaaccac

SEQ ID NO: 112059 - DNA, 25 bp, Saccharomyces pastorianus
tgaacagaatgctgcctaccaacaa

SEQ ID NO: 112060 - DNA, 25 bp, Saccharomyces pastorianus
gcaacaaatgtcacagcatcctcga

SEQ ID NO: 112061 - DNA, 25 bp, Saccharomyces pastorianus
gaattgcagattgcccttgacacca

SEQ ID NO: 112062 - DNA, 25 bp, Saccharomyces pastorianus
gatctgtgggatcgtttccaggata

SEQ ID NO: 112063 - DNA, 25 bp, Saccharomyces pastorianus
cctaaaccacctaagccaatcaaat

SEQ ID NO: 112064 - DNA, 25 bp, Saccharomyces pastorianus
agctcctctgtgatgtcttatgttc

SEQ ID NO: 112065 - DNA, 25 bp, Saccharomyces pastorianus
ggttgggcccacaagatctatcaat

SEQ ID NO: 112066 - DNA, 25 bp, Saccharomyces pastorianus
gatctcgaggataaactagcaggca

SEQ ID NO: 112067 - DNA, 25 bp, Saccharomyces pastorianus
aaccaggctgtttcgataaaggatg

SEQ ID NO: 112068 - DNA, 25 bp, Saccharomyces pastorianus
gagcattgttgggttgggcccacaa

SEQ ID NO: 112069 - DNA, 25 bp, Saccharomyces pastorianus
atacctgatacggaagattggcaac

SEQ ID NO: 112070 - DNA, 25 bp, Saccharomyces pastorianus
ctagcaggcatcaacaagctcctct

SEQ ID NO: 112071 - DNA, 25 bp, Saccharomyces pastorianus
aagcatatttattcctaccagttta

SEQ ID NO: 112072 - DNA, 25 bp, Saccharomyces pastorianus
aagcgccttgccaaacagtcaggaa

SEQ ID NO: 112073 - DNA, 25 bp, Saccharomyces pastorianus
aatattgccacatttacatcagaaa

SEQ ID NO: 112074 - DNA, 25 bp, Saccharomyces pastorianus
gcggtggtagtgatagtttcgatta

SEQ ID NO: 112075 - DNA, 25 bp, Saccharomyces pastorianus
ggctaacagacaagagaccgatcga

SEQ ID NO: 112076 - DNA, 25 bp, Saccharomyces pastorianus
gattccagagattacagccgcttta

SEQ ID NO: 112077 - DNA, 25 bp, Saccharomyces pastorianus
tacaaaggctgttgcgctaattaac

SEQ ID NO: 112078 - DNA, 25 bp, Saccharomyces pastorianus
aagtggattgggatcgtatatctaa

SEQ ID NO: 112079 - DNA, 25 bp, Saccharomyces pastorianus
gaggcacagaaacttatcagcgaaa

SEQ ID NO: 112080 - DNA, 25 bp, Saccharomyces pastorianus
gtttcgattatcttcttcaattaac

SEQ ID NO: 112081 - DNA, 25 bp, Saccharomyces pastorianus
agaactattgttaaagcgccttgcc

SEQ ID NO: 112082 - DNA, 25 bp, Saccharomyces pastorianus
tttaagtgcagagtgtcgggctaac

SEQ ID NO: 112083 - DNA, 25 bp, Saccharomyces pastorianus
aagcgcagcaacacatacaagaaat

SEQ ID NO: 112084 - DNA, 25 bp, Saccharomyces pastorianus
gaaatacgacatccaagcgcagcaa

SEQ ID NO: 112085 - DNA, 25 bp, Saccharomyces pastorianus
tgttgctcagtttgattccaaatta

SEQ ID NO: 112086 - DNA, 25 bp, Saccharomyces pastorianus
gatttgatgaccactaacaacccca

SEQ ID NO: 112087 - DNA, 25 bp, Saccharomyces pastorianus
gatccatctgttgttcgaatagcta

SEQ ID NO: 112088 - DNA, 25 bp, Saccharomyces pastorianus
tgctctgcaatagatcccaatagtg

SEQ ID NO: 112089 - DNA, 25 bp, Saccharomyces pastorianus
tttaaagatgctgagccgccgttat

SEQ ID NO: 112090 - DNA, 25 bp, Saccharomyces pastorianus
ggtaaaactggaatatgctctgcaa

SEQ ID NO: 112091 - DNA, 25 bp, Saccharomyces pastorianus
gggaactgttggtcagtactctaaa

SEQ ID NO: 112092 - DNA, 25 bp, Saccharomyces pastorianus
gcaacaacttcttctccatgagatg

SEQ ID NO: 112093 - DNA, 25 bp, Saccharomyces pastorianus
aaagctctcttcagggacagggtaa

SEQ ID NO: 112094 - DNA, 25 bp, Saccharomyces pastorianus
gggtcattaccatgggtgcttccac

SEQ ID NO: 112095 - DNA, 25 bp, Saccharomyces pastorianus
atgatgatgacttcgggccagacca

SEQ ID NO: 112096 - DNA, 25 bp, Saccharomyces pastorianus
aaagagggcgcgtattccttgttca

SEQ ID NO: 112097 - DNA, 25 bp, Saccharomyces pastorianus
tacgattctttcaagcctgtactgt

SEQ ID NO: 112098 - DNA, 25 bp, Saccharomyces pastorianus
tgttcaagggctgtggtgccaacat

SEQ ID NO: 112099 - DNA, 25 bp, Saccharomyces pastorianus
tacgacggtgctctggactgtttga

SEQ ID NO: 112100 - DNA, 25 bp, Saccharomyces pastorianus
cctctttcctattgggttgggtcat

SEQ ID NO: 112101 - DNA, 25 bp, Saccharomyces pastorianus
gtggtttgtcgcttctatttgtata

SEQ ID NO: 112102 - DNA, 25 bp, Saccharomyces pastorianus
cctcagttctgggtatcattgtcta

SEQ ID NO: 112103 - DNA, 25 bp, Saccharomyces pastorianus
aaatctgttttctggtggagcggct

SEQ ID NO: 112104 - DNA, 25 bp, Saccharomyces pastorianus
cagctggtgtcatctcattgtacga

SEQ ID NO: 112105 - DNA, 25 bp, Saccharomyces pastorianus
attacccatcaatatgtcacagtac

SEQ ID NO: 112106 - DNA, 25 bp, Saccharomyces pastorianus
caagctgagcaacgatgtagacaca

SEQ ID NO: 112107 - DNA, 25 bp, Saccharomyces pastorianus
tgaaaatagcttgtcatcgccacgc

SEQ ID NO: 112108 - DNA, 25 bp, Saccharomyces pastorianus
gcccgctagagttcatattacccat

SEQ ID NO: 112109 - DNA, 25 bp, Saccharomyces pastorianus
gaattttctcactttggaatgcttg

SEQ ID NO: 112110 - DNA, 25 bp, Saccharomyces pastorianus
tggtacaattgtttactacttcgtt

SEQ ID NO: 112111 - DNA, 25 bp, Saccharomyces pastorianus
gaatgcttgagccagacatttactc

SEQ ID NO: 112112 - DNA, 25 bp, Saccharomyces pastorianus
aatactgctggccataattaacgat

SEQ ID NO: 112113 - DNA, 25 bp, Saccharomyces pastorianus
ctgagattactgagaggtcgtcccc

SEQ ID NO: 112114 - DNA, 25 bp, Saccharomyces pastorianus
tctactgaaagaatactgctggcca

SEQ ID NO: 112115 - DNA, 25 bp, Saccharomyces pastorianus
ttactcacttatgtagtccatctac

SEQ ID NO: 112116 - DNA, 25 bp, Saccharomyces pastorianus
aaagagactcagagcttccaacaga

SEQ ID NO: 112117 - DNA, 25 bp, Saccharomyces pastorianus
gtgcaagatttaacccagttgaagg

SEQ ID NO: 112118 - DNA, 25 bp, Saccharomyces pastorianus
taaacaacgtttattctctagagaa

SEQ ID NO: 112119 - DNA, 25 bp, Saccharomyces pastorianus
tcttgatttattgagcgttatacca

SEQ ID NO: 112120 - DNA, 25 bp, Saccharomyces pastorianus
ggattcgcagatcaaaaccttattt

SEQ ID NO: 112121 - DNA, 25 bp, Saccharomyces pastorianus
gctcttacaatatgagttcgtcaga

SEQ ID NO: 112122 - DNA, 25 bp, Saccharomyces pastorianus
aatacaaatttactcgatgcgcaga

SEQ ID NO: 112123 - DNA, 25 bp, Saccharomyces pastorianus
ctcgatgcgcagaaattggtgaatt

SEQ ID NO: 112124 - DNA, 25 bp, Saccharomyces pastorianus
gggatggccatcatggctcttacaa

SEQ ID NO: 112125 - DNA, 25 bp, Saccharomyces pastorianus
gacagttacttttcttctggaaacg

SEQ ID NO: 112126 - DNA, 25 bp, Saccharomyces pastorianus
gagcttccaacagaggttcttgatt

SEQ ID NO: 112127 - DNA, 25 bp, Saccharomyces pastorianus
tacctatcgctatcgtcattcagaa

SEQ ID NO: 112128 - DNA, 25 bp, Saccharomyces pastorianus
acagtacagatgtcgactcctccgg

SEQ ID NO: 112129 - DNA, 25 bp, Saccharomyces pastorianus
agtcaattgcgcatgcgtgctcaat

SEQ ID NO: 112130 - DNA, 25 bp, Saccharomyces pastorianus
aaccactattatggcctgtttggct

SEQ ID NO: 112131 - DNA, 25 bp, Saccharomyces pastorianus
gaagtggccccaacacatacagata

SEQ ID NO: 112132 - DNA, 25 bp, Saccharomyces pastorianus
gaactcaaaagtggtcgtctccaat

SEQ ID NO: 112133 - DNA, 25 bp, Saccharomyces pastorianus
gatattcttctgttcatctccaaac

SEQ ID NO: 112134 - DNA, 25 bp, Saccharomyces pastorianus
acagcactcaatttccgacatttac

SEQ ID NO: 112135 - DNA, 25 bp, Saccharomyces pastorianus
gccaacgttcatgctatgtctttta

SEQ ID NO: 112136 - DNA, 25 bp, Saccharomyces pastorianus
tgagatgttattgttcacggccctt

SEQ ID NO: 112137 - DNA, 25 bp, Saccharomyces pastorianus
tagcgtagcactttgttgttccatg

SEQ ID NO: 112138 - DNA, 25 bp, Saccharomyces pastorianus
agcagatcttgcacccataatagaa

SEQ ID NO: 112139 - DNA, 25 bp, Saccharomyces pastorianus
tatactgtcttttgcacttcaagga

SEQ ID NO: 112140 - DNA, 25 bp, Saccharomyces pastorianus
cgacgaattgtgttctctgctaaat

SEQ ID NO: 112141 - DNA, 25 bp, Saccharomyces pastorianus
aatttttgatacctatgtgccggca

SEQ ID NO: 112142 - DNA, 25 bp, Saccharomyces pastorianus
gggctgtggatagcaccttacctat

SEQ ID NO: 112143 - DNA, 25 bp, Saccharomyces pastorianus
gaatacgggcgctgtaggttataat

SEQ ID NO: 112144 - DNA, 25 bp, Saccharomyces pastorianus
gggtattttaccagaggctactatc

SEQ ID NO: 112145 - DNA, 25 bp, Saccharomyces pastorianus
ctccggaaatctatccactgttttc

SEQ ID NO: 112146 - DNA, 25 bp, Saccharomyces pastorianus
aaatcacgcgcttaagaatacgggc

SEQ ID NO: 112147 - DNA, 25 bp, Saccharomyces pastorianus
aaaacgtgcccagcgaattcgtgga

SEQ ID NO: 112148 - DNA, 25 bp, Saccharomyces pastorianus
atgtgccggcatttcgacgaattgt

SEQ ID NO: 112149 - DNA, 25 bp, Saccharomyces pastorianus
gagctcttgcaagggttcaattcca

SEQ ID NO: 112150 - DNA, 25 bp, Saccharomyces pastorianus
tagtacctgagatgacgaacttcaa

SEQ ID NO: 112151 - DNA, 25 bp, Saccharomyces pastorianus
gctccgttgtgtggatttggtcaaa

SEQ ID NO: 112152 - DNA, 25 bp, Saccharomyces pastorianus
agatgtgggtaccttgcagtcaaga

SEQ ID NO: 112153 - DNA, 25 bp, Saccharomyces pastorianus
gagttggaaaacttctcgatgggtt

SEQ ID NO: 112154 - DNA, 25 bp, Saccharomyces pastorianus
acgctattaccaatgggcagctctt

SEQ ID NO: 112155 - DNA, 25 bp, Saccharomyces pastorianus
aatactactggttactgtgctccgt

SEQ ID NO: 112156 - DNA, 25 bp, Saccharomyces pastorianus
ggcagctcttctactttcaatttat

SEQ ID NO: 112157 - DNA, 25 bp, Saccharomyces pastorianus
ggtcaaaataccgtacgtctcgagt

SEQ ID NO: 112158 - DNA, 25 bp, Saccharomyces pastorianus
aatcagagtctcacttgtccataaa

SEQ ID NO: 112159 - DNA, 25 bp, Saccharomyces pastorianus
ggacagctataacatctacactaaa

SEQ ID NO: 112160 - DNA, 25 bp, Saccharomyces pastorianus
aataaatccaatccacagggccctt

SEQ ID NO: 112161 - DNA, 25 bp, Saccharomyces pastorianus
gtttgctgagagtcaagttccccga

SEQ ID NO: 112162 - DNA, 25 bp, Saccharomyces pastorianus
tacgttaaaccaatctcatcctttc

SEQ ID NO: 112163 - DNA, 25 bp, Saccharomyces pastorianus
gaaacgaggacaaccccatcagtta

SEQ ID NO: 112164 - DNA, 25 bp, Saccharomyces pastorianus
gatgacctggaatttggctctaaaa

SEQ ID NO: 112165 - DNA, 25 bp, Saccharomyces pastorianus
agttccccgatagaagccatattca

SEQ ID NO: 112166 - DNA, 25 bp, Saccharomyces pastorianus
tataacgtcgtgtcgcagttcctga

SEQ ID NO: 112167 - DNA, 25 bp, Saccharomyces pastorianus
aaggctcatcttttggaagacgcac

SEQ ID NO: 112168 - DNA, 25 bp, Saccharomyces pastorianus
agggcccttctgataacgctacaag

SEQ ID NO: 112169 - DNA, 25 bp, Saccharomyces pastorianus
tttcaaacccttggccaaagacgat

SEQ ID NO: 112170 - DNA, 25 bp, Saccharomyces pastorianus
tttgccctcggatgagccattagca

SEQ ID NO: 112171 - DNA, 25 bp, Saccharomyces pastorianus
gtgaactccatcaacgtcaagactc

SEQ ID NO: 112172 - DNA, 25 bp, Saccharomyces pastorianus
aatgcgaaggccactttcgaggacg

SEQ ID NO: 112173 - DNA, 25 bp, Saccharomyces pastorianus
gcatgaattcgccatattcgctcta

SEQ ID NO: 112174 - DNA, 25 bp, Saccharomyces pastorianus
ggccttccccagttttaagcatgaa

SEQ ID NO: 112175 - DNA, 25 bp, Saccharomyces pastorianus
gaaaaccaaccttgtctacggacag

SEQ ID NO: 112176 - DNA, 25 bp, Saccharomyces pastorianus
gaggagactcacagacagctacaat

SEQ ID NO: 112177 - DNA, 25 bp, Saccharomyces pastorianus
taatagtccgttgccggtattacca

SEQ ID NO: 112178 - DNA, 25 bp, Saccharomyces pastorianus
gagtgtcacttctgaacatacccat

SEQ ID NO: 112179 - DNA, 25 bp, Saccharomyces pastorianus
aagtccgcacaacaacatcgcgttg

SEQ ID NO: 112180 - DNA, 25 bp, Saccharomyces pastorianus
ggacagtttttcgtcaagctcaaat

SEQ ID NO: 112181 - DNA, 25 bp, Saccharomyces pastorianus
aagactccagtaggtgtgtcgccca

SEQ ID NO: 112182 - DNA, 25 bp, Saccharomyces pastorianus
agtattgacagcgttgacagcctca

SEQ ID NO: 112183 - DNA, 25 bp, Saccharomyces pastorianus
gggcctcgcgcattatgtacggcaa

SEQ ID NO: 112184 - DNA, 25 bp, Saccharomyces pastorianus
aaaagcgccggccttgtgtatgtct

SEQ ID NO: 112185 - DNA, 25 bp, Saccharomyces pastorianus
gtgctaggtgcatttacttcattca

SEQ ID NO: 112186 - DNA, 25 bp, Saccharomyces pastorianus
ttagcgtgcccgtgatataccttta

SEQ ID NO: 112187 - DNA, 25 bp, Saccharomyces pastorianus
ttgatagacaagcacctgggcgcca

SEQ ID NO: 112188 - DNA, 25 bp, Saccharomyces pastorianus
aagtacatgtagctagcgcgcaccg

SEQ ID NO: 112189 - DNA, 25 bp, Saccharomyces pastorianus
gcgacaatttcttcggtgtagcact

SEQ ID NO: 112190 - DNA, 25 bp, Saccharomyces pastorianus
tatatgaggcgcttgggttctaccg

SEQ ID NO: 112191 - DNA, 25 bp, Saccharomyces pastorianus
gctactggagcatgcactgtgcgat

SEQ ID NO: 112192 - DNA, 25 bp, Saccharomyces pastorianus
gctggacgcctgtgtgcaattgata

SEQ ID NO: 112193 - DNA, 25 bp, Saccharomyces pastorianus
aatccagtatatttccattgcagtg

SEQ ID NO: 112194 - DNA, 25 bp, Saccharomyces pastorianus
tgcagtgatggctacgagtctaatt

SEQ ID NO: 112195 - DNA, 25 bp, Saccharomyces pastorianus
atccaagggttagtgatcctattca

SEQ ID NO: 112196 - DNA, 25 bp, Saccharomyces pastorianus
gatagcgaatctgttccacgttagt

SEQ ID NO: 112197 - DNA, 25 bp, Saccharomyces pastorianus
gctgtcgggctaacgatatcgtcaa

SEQ ID NO: 112198 - DNA, 25 bp, Saccharomyces pastorianus
tctagcaatggcgataatccagtat

SEQ ID NO: 112199 - DNA, 25 bp, Saccharomyces pastorianus
gacagttcatcaatgtgggtggtat

SEQ ID NO: 112200 - DNA, 25 bp, Saccharomyces pastorianus
atcgtcaatcagttatgcggtagca

SEQ ID NO: 112201 - DNA, 25 bp, Saccharomyces pastorianus
ttgtgtattgcactcgggatagcga

SEQ ID NO: 112202 - DNA, 25 bp, Saccharomyces pastorianus
ggagatgtcttttctatctagcaat

SEQ ID NO: 112203 - DNA, 25 bp, Saccharomyces pastorianus
gtctaattgtggtagctgtcgggct

SEQ ID NO: 112204 - DNA, 25 bp, Saccharomyces pastorianus
agtttttgcacaacatcctgacaag

SEQ ID NO: 112205 - DNA, 25 bp, Saccharomyces pastorianus
tcttctaagccccttttcaatttgg

SEQ ID NO: 112206 - DNA, 25 bp, Saccharomyces pastorianus
caatttggctagcaccttgttgaag

SEQ ID NO: 112207 - DNA, 25 bp, Saccharomyces pastorianus
taaaaggcccacatctgcttatttc

SEQ ID NO: 112208 - DNA, 25 bp, Saccharomyces pastorianus
gatctttccacgaatcttctaagcc

SEQ ID NO: 112209 - DNA, 25 bp, Saccharomyces pastorianus
tcctgacaagtctcaattggatcta

SEQ ID NO: 112210 - DNA, 25 bp, Saccharomyces pastorianus
aggacccttcattaagtatgccaat

SEQ ID NO: 112211 - DNA, 25 bp, Saccharomyces pastorianus
gccaatgaagttcgttcgcaagttt

SEQ ID NO: 112212 - DNA, 25 bp, Saccharomyces pastorianus
gaaggcttccaagagaacgcagctt

SEQ ID NO: 112213 - DNA, 25 bp, Saccharomyces pastorianus
caaagaaaccagcaggacccttcat

SEQ ID NO: 112214 - DNA, 25 bp, Saccharomyces pastorianus
aaccttacgtcctgctgaaatcagc

SEQ ID NO: 112215 - DNA, 25 bp, Saccharomyces pastorianus
taagcgttgctcatcctaccatatc

SEQ ID NO: 112216 - DNA, 25 bp, Saccharomyces pastorianus
ctaacctccaatccagcgaattatt

SEQ ID NO: 112217 - DNA, 25 bp, Saccharomyces pastorianus
gttccatccaggtggtacggacatc

SEQ ID NO: 112218 - DNA, 25 bp, Saccharomyces pastorianus
ttcgctacagcttatccaggattta

SEQ ID NO: 112219 - DNA, 25 bp, Saccharomyces pastorianus
gctgcatatgcccatgtcgaagtca

SEQ ID NO: 112220 - DNA, 25 bp, Saccharomyces pastorianus
tacaaaattcgtttcgctacagctt

SEQ ID NO: 112221 - DNA, 25 bp, Saccharomyces pastorianus
gatttactcgatgatccggtatttc

SEQ ID NO: 112222 - DNA, 25 bp, Saccharomyces pastorianus
agactagatcctgggcacagtgctc

SEQ ID NO: 112223 - DNA, 25 bp, Saccharomyces pastorianus
cttcaagttttcaccttcacaactg

SEQ ID NO: 112224 - DNA, 25 bp, Saccharomyces pastorianus
aaatgtcagattcgctgctcctcag

SEQ ID NO: 112225 - DNA, 25 bp, Saccharomyces pastorianus
attgcttgtccaaaagatacccctt

SEQ ID NO: 112226 - DNA, 25 bp, Saccharomyces pastorianus
acggcgatagaaatagcggtgctaa

SEQ ID NO: 112227 - DNA, 25 bp, Saccharomyces pastorianus
gccagattggctcagttgaaaaaca

SEQ ID NO: 112228 - DNA, 25 bp, Saccharomyces pastorianus
gcaaatttcttggagccacaagctt

SEQ ID NO: 112229 - DNA, 25 bp, Saccharomyces pastorianus
cttggtccgtagagacagggcccaa

SEQ ID NO: 112230 - DNA, 25 bp, Saccharomyces pastorianus
gaagatctgaattcatttgacaagc

SEQ ID NO: 112231 - DNA, 25 bp, Saccharomyces pastorianus
gaggtgaaaattccgctcccgttgg

SEQ ID NO: 112232 - DNA, 25 bp, Saccharomyces pastorianus
atggacccagagttacaagctatta

SEQ ID NO: 112233 - DNA, 25 bp, Saccharomyces pastorianus
agattatctcgagtggccttggtcc

SEQ ID NO: 112234 - DNA, 25 bp, Saccharomyces pastorianus
ctcccgttggtgcagctattgcaaa

SEQ ID NO: 112235 - DNA, 25 bp, Saccharomyces pastorianus
gacagggcccaagcagtagagacat

SEQ ID NO: 112236 - DNA, 25 bp, Saccharomyces pastorianus
gattgctacaaacaacgtcactcat

SEQ ID NO: 112237 - DNA, 25 bp, Saccharomyces pastorianus
atagcctcgttaatatatttccaag

SEQ ID NO: 112238 - DNA, 25 bp, Saccharomyces pastorianus
gtgtcgaacgaactagattctatac

SEQ ID NO: 112239 - DNA, 25 bp, Saccharomyces pastorianus
aattcaatgacttttccaacgatga

SEQ ID NO: 112240 - DNA, 25 bp, Saccharomyces pastorianus
ataccaacaactagtcatgcagatt

SEQ ID NO: 112241 - DNA, 25 bp, Saccharomyces pastorianus
gactaacgtagtcgtgtcgaacgaa

SEQ ID NO: 112242 - DNA, 25 bp, Saccharomyces pastorianus
tatttccaagttagcaacaacgaca

SEQ ID NO: 112243 - DNA, 25 bp, Saccharomyces pastorianus
tggtcaaagacatagcctcgttaat

SEQ ID NO: 112244 - DNA, 25 bp, Saccharomyces pastorianus
ggatcccaaaatggcaatagcgagg

SEQ ID NO: 112245 - DNA, 25 bp, Saccharomyces pastorianus
aagttagtatcaaatggatcccaaa

SEQ ID NO: 112246 - DNA, 25 bp, Saccharomyces pastorianus
gtagtaacaataaatcggcttccaa

SEQ ID NO: 112247 - DNA, 25 bp, Saccharomyces pastorianus
aaagatacaccattgtcaagaagat

SEQ ID NO: 112248 - DNA, 25 bp, Saccharomyces pastorianus
attcgcgacggaggagagatcagac

SEQ ID NO: 112249 - DNA, 25 bp, Saccharomyces pastorianus
ggatgctctagaaagtgaactcaat

SEQ ID NO: 112250 - DNA, 25 bp, Saccharomyces pastorianus
cattatctagaagcttagtcggaac

SEQ ID NO: 112251 - DNA, 25 bp, Saccharomyces pastorianus
gcaggcttcggatcagcttattaat

SEQ ID NO: 112252 - DNA, 25 bp, Saccharomyces pastorianus
atggtgtcaacacttgagttcaaaa

SEQ ID NO: 112253 - DNA, 25 bp, Saccharomyces pastorianus
gcatttgttgcagcaggcttcggat

SEQ ID NO: 112254 - DNA, 25 bp, Saccharomyces pastorianus
gccatcaacagaaggtttgccatca

SEQ ID NO: 112255 - DNA, 25 bp, Saccharomyces pastorianus
attcattatcaggagcatttgttgc

SEQ ID NO: 112256 - DNA, 25 bp, Saccharomyces pastorianus
gtttgccatcattgcctcaaggaga

SEQ ID NO: 112257 - DNA, 25 bp, Saccharomyces pastorianus
aaagtagctaacatgccatcaacag

SEQ ID NO: 112258 - DNA, 25 bp, Saccharomyces pastorianus
gatgaactgatggacgatgtacaag

SEQ ID NO: 112259 - DNA, 25 bp, Saccharomyces pastorianus
cgaagtccaacataaacgggctaat

SEQ ID NO: 112260 - DNA, 25 bp, Saccharomyces pastorianus
aaaggcatatagaccaagtgactga

SEQ ID NO: 112261 - DNA, 25 bp, Saccharomyces pastorianus
tgggttaaattcttcctcaagtaca

SEQ ID NO: 112262 - DNA, 25 bp, Saccharomyces pastorianus
gcagatgactgcaatcaaacggtta

SEQ ID NO: 112263 - DNA, 25 bp, Saccharomyces pastorianus
agccatcatggaggaattagttcaa

SEQ ID NO: 112264 - DNA, 25 bp, Saccharomyces pastorianus
gttcagtccccactaatggcaagtt

SEQ ID NO: 112265 - DNA, 25 bp, Saccharomyces pastorianus
agtacaatcgactttttcaagaatc

SEQ ID NO: 112266 - DNA, 25 bp, Saccharomyces pastorianus
gattcgatgatctcttccgatttta

SEQ ID NO: 112267 - DNA, 25 bp, Saccharomyces pastorianus
gaatctaatccaaaatcggtcagaa

SEQ ID NO: 112268 - DNA, 25 bp, Saccharomyces pastorianus
tagactacagtcacaggaaatgcat

SEQ ID NO: 112269 - DNA, 25 bp, Saccharomyces pastorianus
ggaacctgaaactcaaacaagccat

SEQ ID NO: 112270 - DNA, 25 bp, Saccharomyces pastorianus
ataccaacacatctatacggccttg

SEQ ID NO: 112271 - DNA, 25 bp, Saccharomyces pastorianus
aatctattcctcacacttctaattg

SEQ ID NO: 112272 - DNA, 25 bp, Saccharomyces pastorianus
gaagagaatccttttcgcttctttc

SEQ ID NO: 112273 - DNA, 25 bp, Saccharomyces pastorianus
ggcggattcctgttttgaccacaaa

SEQ ID NO: 112274 - DNA, 25 bp, Saccharomyces pastorianus
gcattcttcctgttacggtatacca

SEQ ID NO: 112275 - DNA, 25 bp, Saccharomyces pastorianus
ataacgtcccaggtcacagtggaaa

SEQ ID NO: 112276 - DNA, 25 bp, Saccharomyces pastorianus
tactagtgtggcttcttctaacgaa

SEQ ID NO: 112277 - DNA, 25 bp, Saccharomyces pastorianus
aatacgtttcatccgagctagactc

SEQ ID NO: 112278 - DNA, 25 bp, Saccharomyces pastorianus
ccaactctttggtgaaatctccttc

SEQ ID NO: 112279 - DNA, 25 bp, Saccharomyces pastorianus
aagacagtcttccttgggcgacgcg

SEQ ID NO: 112280 - DNA, 25 bp, Saccharomyces pastorianus
gaaacaactcgtattccaactcttt

SEQ ID NO: 112281 - DNA, 25 bp, Saccharomyces pastorianus
acgtgacaacgaaattccccgcaca

SEQ ID NO: 112282 - DNA, 25 bp, Saccharomyces pastorianus
tcttacccctttttatttggcaatg

SEQ ID NO: 112283 - DNA, 25 bp, Saccharomyces pastorianus
aatgttttaggtcatccgtggccaa

SEQ ID NO: 112284 - DNA, 25 bp, Saccharomyces pastorianus
gaaaacagcgcgaggcagatgccac

SEQ ID NO: 112285 - DNA, 25 bp, Saccharomyces pastorianus
cgcacacgcgcattagaaacatatc

SEQ ID NO: 112286 - DNA, 25 bp, Saccharomyces pastorianus
taggtcatccgtggccaagaaatgt

SEQ ID NO: 112287 - DNA, 25 bp, Saccharomyces pastorianus
aatgcttttatttcgaaccgcaaat

SEQ ID NO: 112288 - DNA, 25 bp, Saccharomyces pastorianus
tacgggttttctctgccgctagaaa

SEQ ID NO: 112289 - DNA, 25 bp, Saccharomyces pastorianus
tttctctgccgctagaaaacagcgc

SEQ ID NO: 112290 - DNA, 25 bp, Saccharomyces pastorianus
tcgttctggcggctcgtaacatctg

SEQ ID NO: 112291 - DNA, 25 bp, Saccharomyces pastorianus
tcgtaacatctgcttcgagaagcca

SEQ ID NO: 112292 - DNA, 25 bp, Saccharomyces pastorianus
atttgccaggtgatatcttcttact

SEQ ID NO: 112293 - DNA, 25 bp, Saccharomyces pastorianus
gcgcccttggttatgcacagtattt

SEQ ID NO: 112294 - DNA, 25 bp, Saccharomyces pastorianus
acttgaaatacgcagatcctcttct

SEQ ID NO: 112295 - DNA, 25 bp, Saccharomyces pastorianus
aatgaccatggctctgggtggaaga

SEQ ID NO: 112296 - DNA, 25 bp, Saccharomyces pastorianus
tacagaatcgtccaagaatgccatg

SEQ ID NO: 112297 - DNA, 25 bp, Saccharomyces pastorianus
aattacatttcccatcagttacaag

SEQ ID NO: 112298 - DNA, 25 bp, Saccharomyces pastorianus
caagtggcgcatctgatgacttcaa

SEQ ID NO: 112299 - DNA, 25 bp, Saccharomyces pastorianus
agtattattccacgtggccagggcg

SEQ ID NO: 112300 - DNA, 25 bp, Saccharomyces pastorianus
taagcgccctttcccagaaaggaat

SEQ ID NO: 112301 - DNA, 25 bp, Saccharomyces pastorianus
gaagattgctcaagtactactgaaa

SEQ ID NO: 112302 - DNA, 25 bp, Saccharomyces pastorianus
atggccacggcaatggtcacagaat

SEQ ID NO: 112303 - DNA, 25 bp, Saccharomyces pastorianus
ggccaacgatagtttctcaacacca

SEQ ID NO: 112304 - DNA, 25 bp, Saccharomyces pastorianus
ttatgatgccgtggtctttagcgcc

SEQ ID NO: 112305 - DNA, 25 bp, Saccharomyces pastorianus
gtttcagcgctcaaggcggaggata

SEQ ID NO: 112306 - DNA, 25 bp, Saccharomyces pastorianus
ggtcttttgcaaccccttgacaaat

SEQ ID NO: 112307 - DNA, 25 bp, Saccharomyces pastorianus
aaaggttcgttgttgtttcagcgct

SEQ ID NO: 112308 - DNA, 25 bp, Saccharomyces pastorianus
ggattacactattttacagcctgga

SEQ ID NO: 112309 - DNA, 25 bp, Saccharomyces pastorianus
ttacagcctggatcgttggaactaa

SEQ ID NO: 112310 - DNA, 25 bp, Saccharomyces pastorianus
gaaagcttctgttaactactccatt

SEQ ID NO: 112311 - DNA, 25 bp, Saccharomyces pastorianus
agggcttgcgtgaatactatattgc

SEQ ID NO: 112312 - DNA, 25 bp, Saccharomyces pastorianus
attttcacggttgatctggatggct

SEQ ID NO: 112313 - DNA, 25 bp, Saccharomyces pastorianus
aacgcgtccgttagtgagatcacag

SEQ ID NO: 112314 - DNA, 25 bp, Saccharomyces pastorianus
gagcgaagcactcgacaatgccttt

SEQ ID NO: 112315 - DNA, 25 bp, Saccharomyces pastorianus
atgcctttgtaccaggtatggccaa

SEQ ID NO: 112316 - DNA, 25 bp, Saccharomyces pastorianus
gtggcaaagttcgtgtagcgctata

SEQ ID NO: 112317 - DNA, 25 bp, Saccharomyces pastorianus
gcgaggctcggaataccaaggtgat

SEQ ID NO: 112318 - DNA, 25 bp, Saccharomyces pastorianus
agcaggtttatcatcaggactacta

SEQ ID NO: 112319 - DNA, 25 bp, Saccharomyces pastorianus
gattgggtcgccgtggttttagaat

SEQ ID NO: 112320 - DNA, 25 bp, Saccharomyces pastorianus
cgcacccgccagttttaataagaat

SEQ ID NO: 112321 - DNA, 25 bp, Saccharomyces pastorianus
gagatcagcatctattgtagcggat

SEQ ID NO: 112322 - DNA, 25 bp, Saccharomyces pastorianus
attagagccgctactgaattggtgc

SEQ ID NO: 112323 - DNA, 25 bp, Saccharomyces pastorianus
agaaagctctccagttcttcaagaa

SEQ ID NO: 112324 - DNA, 25 bp, Saccharomyces pastorianus
ggccaaagagttgacacttactgtt

SEQ ID NO: 112325 - DNA, 25 bp, Saccharomyces pastorianus
ctggctgtgataattttcctgctac

SEQ ID NO: 112326 - DNA, 25 bp, Saccharomyces pastorianus
tgcgacgccttaattattcccggag

SEQ ID NO: 112327 - DNA, 25 bp, Saccharomyces pastorianus
gagaatctacgtcgatgtccctcat

SEQ ID NO: 112328 - DNA, 25 bp, Saccharomyces pastorianus
gagaattcttgatcctatcgcagtt

SEQ ID NO: 112329 - DNA, 25 bp, Saccharomyces pastorianus
gggtacttgtgctggtctcatcttt

SEQ ID NO: 112330 - DNA, 25 bp, Saccharomyces pastorianus
aaactcctgaggatctagcccagtg

SEQ ID NO: 112331 - DNA, 25 bp, Saccharomyces pastorianus
tttccaatttcatacctggctgtga

SEQ ID NO: 112332 - DNA, 25 bp, Saccharomyces pastorianus
attcgcgcacccgtgatcgagagaa

SEQ ID NO: 112333 - DNA, 25 bp, Saccharomyces pastorianus
ggtctcatctttttaagcgcgcaat

SEQ ID NO: 112334 - DNA, 25 bp, Saccharomyces pastorianus
tgtccctcatcgctcaaagaacagg

SEQ ID NO: 112335 - DNA, 25 bp, Saccharomyces pastorianus
ttttcatccagagcttgctgacagt

SEQ ID NO: 112336 - DNA, 25 bp, Saccharomyces pastorianus
atggtgtgtttgttggctcaggaat

SEQ ID NO: 112337 - DNA, 25 bp, Saccharomyces pastorianus
gggcgatgtctctgaagccgtcaag

SEQ ID NO: 112338 - DNA, 25 bp, Saccharomyces pastorianus
gttccatttgtttgtggcgctaaag

SEQ ID NO: 112339 - DNA, 25 bp, Saccharomyces pastorianus
aatcctgtaaggttggccactgcag

SEQ ID NO: 112340 - DNA, 25 bp, Saccharomyces pastorianus
aggtggtgtagcaacgccagccgat

SEQ ID NO: 112341 - DNA, 25 bp, Saccharomyces pastorianus
cactcactttgacaatcccagcaaa

SEQ ID NO: 112342 - DNA, 25 bp, Saccharomyces pastorianus
gagggtaccagtttctttgctgaaa

SEQ ID NO: 112343 - DNA, 25 bp, Saccharomyces pastorianus
cagccgatgccgcattgttaatgca

SEQ ID NO: 112344 - DNA, 25 bp, Saccharomyces pastorianus
gggtggtgtatcaatcgaatctatt

SEQ ID NO: 112345 - DNA, 25 bp, Saccharomyces pastorianus
tagtagaggctaccactcactttga

SEQ ID NO: 112346 - DNA, 25 bp, Saccharomyces pastorianus
aggcgtgccaacaattgaagagcga

SEQ ID NO: 112347 - DNA, 25 bp, Saccharomyces pastorianus
agcaccaattctcccacaaatgata

SEQ ID NO: 112348 - DNA, 25 bp, Saccharomyces pastorianus
gaacagagctttaccctggaagcac

SEQ ID NO: 112349 - DNA, 25 bp, Saccharomyces pastorianus
tgaccctgaggtactgttgaataat

SEQ ID NO: 112350 - DNA, 25 bp, Saccharomyces pastorianus
gaagctggtgttactagagccacaa

SEQ ID NO: 112351 - DNA, 25 bp, Saccharomyces pastorianus
tcaacggctatcgagtggactaaca

SEQ ID NO: 112352 - DNA, 25 bp, Saccharomyces pastorianus
cccggtcgcgtttcagatcataata

SEQ ID NO: 112353 - DNA, 25 bp, Saccharomyces pastorianus
tagaatgctaggactggcgttgtgt

SEQ ID NO: 112354 - DNA, 25 bp, Saccharomyces pastorianus
gagccacaagcgaggttattagagt

SEQ ID NO: 112355 - DNA, 25 bp, Saccharomyces pastorianus
atactccaggaatcggtgttcccgg

SEQ ID NO: 112356 - DNA, 25 bp, Saccharomyces pastorianus
agcggattaccttttatacctaatg

SEQ ID NO: 112357 - DNA, 25 bp, Saccharomyces pastorianus
tctttcgtatgagggattgtctaac

SEQ ID NO: 112358 - DNA, 25 bp, Saccharomyces pastorianus
ttatcagaatgtcagcgccgaacgg

SEQ ID NO: 112359 - DNA, 25 bp, Saccharomyces pastorianus
ggaacaatggtctctaatttagctg

SEQ ID NO: 112360 - DNA, 25 bp, Saccharomyces pastorianus
acccagtcgttaccttcaatcaaga

SEQ ID NO: 112361 - DNA, 25 bp, Saccharomyces pastorianus
aacttgcccgacactgttgtttgga

SEQ ID NO: 112362 - DNA, 25 bp, Saccharomyces pastorianus
gactgttgaattaggctccgattat

SEQ ID NO: 112363 - DNA, 25 bp, Saccharomyces pastorianus
atgattttatttccttggctcctgg

SEQ ID NO: 112364 - DNA, 25 bp, Saccharomyces pastorianus
cgccgaacgggccattcaaatagtt

SEQ ID NO: 112365 - DNA, 25 bp, Saccharomyces pastorianus
gaaggaatcctacgtcgacaagcac

SEQ ID NO: 112366 - DNA, 25 bp, Saccharomyces pastorianus
aagggcgttcaaattcacactctaa

SEQ ID NO: 112367 - DNA, 25 bp, Saccharomyces pastorianus
ggttgttccatacatacttccgtat

SEQ ID NO: 112368 - DNA, 25 bp, Saccharomyces pastorianus
caccgaccgtacaatttggcttgaa

SEQ ID NO: 112369 - DNA, 25 bp, Saccharomyces pastorianus
gagcctagttctttaaatgccactg

SEQ ID NO: 112370 - DNA, 25 bp, Saccharomyces pastorianus
agtgtgccaatttttcgtgcggaaa

SEQ ID NO: 112371 - DNA, 25 bp, Saccharomyces pastorianus
gtgtcaataccccaaatgagcctag

SEQ ID NO: 112372 - DNA, 25 bp, Saccharomyces pastorianus
gagatccacgaatactaccacaggt

SEQ ID NO: 112373 - DNA, 25 bp, Saccharomyces pastorianus
agcagctgatgtttcgaattctacc

SEQ ID NO: 112374 - DNA, 25 bp, Saccharomyces pastorianus
tcttaggtgtgcgtcagtgtgccaa

SEQ ID NO: 112375 - DNA, 25 bp, Saccharomyces pastorianus
gtttgagcgctaccgtgtaccgaaa

SEQ ID NO: 112376 - DNA, 25 bp, Saccharomyces pastorianus
gaaacctagcgacgacaatgcctat

SEQ ID NO: 112377 - DNA, 25 bp, Saccharomyces pastorianus
atgttgtaaacatcttccccttagt

SEQ ID NO: 112378 - DNA, 25 bp, Saccharomyces pastorianus
agtacgttcactcctaatatatcca

SEQ ID NO: 112379 - DNA, 25 bp, Saccharomyces pastorianus
tatccaccaccgtacctgatgaaat

SEQ ID NO: 112380 - DNA, 25 bp, Saccharomyces pastorianus
accggcagcggcgtatactaatact

SEQ ID NO: 112381 - DNA, 25 bp, Saccharomyces pastorianus
attttctccaatgcacatgggccta

SEQ ID NO: 112382 - DNA, 25 bp, Saccharomyces pastorianus
gcgaaatcaaacttggctggccaac

SEQ ID NO: 112383 - DNA, 25 bp, Saccharomyces pastorianus
gctatcccagatgttgttgacgcaa

SEQ ID NO: 112384 - DNA, 25 bp, Saccharomyces pastorianus
gcaacgggacgtggatactctaata

SEQ ID NO: 112385 - DNA, 25 bp, Saccharomyces pastorianus
aacagttctgattctttgcattctt

SEQ ID NO: 112386 - DNA, 25 bp, Saccharomyces pastorianus
gaatttacctatccgttgcaatgtt

SEQ ID NO: 112387 - DNA, 25 bp, Saccharomyces pastorianus
agagtcgtctttgggctacaattct

SEQ ID NO: 112388 - DNA, 25 bp, Saccharomyces pastorianus
ggtttgaggctttttctggtgctaa

SEQ ID NO: 112389 - DNA, 25 bp, Saccharomyces pastorianus
tatgtcccaaaagcagtacctcact

SEQ ID NO: 112390 - DNA, 25 bp, Saccharomyces pastorianus
aaccaggctcgatttctaatgcttc

SEQ ID NO: 112391 - DNA, 25 bp, Saccharomyces pastorianus
ggcgcaagtcgaggttaccggaatt

SEQ ID NO: 112392 - DNA, 25 bp, Saccharomyces pastorianus
aggacggacgcttatacccgcggat

SEQ ID NO: 112393 - DNA, 25 bp, Saccharomyces pastorianus
ttgagatcaaagaccgacctgttgt

SEQ ID NO: 112394 - DNA, 25 bp, Saccharomyces pastorianus
agaggctgcgctcttcttttagcaa

SEQ ID NO: 112395 - DNA, 25 bp, Saccharomyces pastorianus
ttatcagaattcttccgtctacgga

SEQ ID NO: 112396 - DNA, 25 bp, Saccharomyces pastorianus
ttttagcaactctcacacgacttat

SEQ ID NO: 112397 - DNA, 25 bp, Saccharomyces pastorianus
agcagcttatttcttccgcggatga

SEQ ID NO: 112398 - DNA, 25 bp, Saccharomyces pastorianus
cgcggatgatcctggatttccttgc

SEQ ID NO: 112399 - DNA, 25 bp, Saccharomyces pastorianus
aaagattcgcttttctgtctgttgc

SEQ ID NO: 112400 - DNA, 25 bp, Saccharomyces pastorianus
ttcttacatagtctgggccgggagc

SEQ ID NO: 112401 - DNA, 25 bp, Saccharomyces pastorianus
tgtctgttgccacttttcttacata

SEQ ID NO: 112402 - DNA, 25 bp, Saccharomyces pastorianus
attctgggcaaagtacggccgtact

SEQ ID NO: 112403 - DNA, 25 bp, Saccharomyces pastorianus
aaaggacggtgtttgggccattatg

SEQ ID NO: 112404 - DNA, 25 bp, Saccharomyces pastorianus
gatgagtctcttaaggtcaccgatt

SEQ ID NO: 112405 - DNA, 25 bp, Saccharomyces pastorianus
gaagccaattattaactcggtcatc

SEQ ID NO: 112406 - DNA, 25 bp, Saccharomyces pastorianus
gagagcatatgttaccaaatcgggt

SEQ ID NO: 112407 - DNA, 25 bp, Saccharomyces pastorianus
atttacaacaagcatcatccggaga

SEQ ID NO: 112408 - DNA, 25 bp, Saccharomyces pastorianus
ggtgttgttaattccgccttcccag

SEQ ID NO: 112409 - DNA, 25 bp, Saccharomyces pastorianus
tcgtttggtactggttccaaccacg

SEQ ID NO: 112410 - DNA, 25 bp, Saccharomyces pastorianus
atatgtcaagctttccaatggtgca

SEQ ID NO: 112411 - DNA, 25 bp, Saccharomyces pastorianus
gtacaggttcttcaggtgctaccat

SEQ ID NO: 112412 - DNA, 25 bp, Saccharomyces pastorianus
ctgtgctttgttcgacgctaaaaaa

SEQ ID NO: 112413 - DNA, 25 bp, Saccharomyces pastorianus
tctacccacgttttattgttgttgc

SEQ ID NO: 112414 - DNA, 25 bp, Saccharomyces pastorianus
gctagtgttcaaagttacaaggtaa

SEQ ID NO: 112415 - DNA, 25 bp, Saccharomyces pastorianus
ggaggaaaagcaacctgcatggcta

SEQ ID NO: 112416 - DNA, 25 bp, Saccharomyces pastorianus
gtcctctacccacgttttattgttg

SEQ ID NO: 112417 - DNA, 25 bp, Saccharomyces pastorianus
acctgcatggctagtgttcaaagtt

SEQ ID NO: 112418 - DNA, 25 bp, Saccharomyces pastorianus
gcatttacttttgaacagcgacagg

SEQ ID NO: 112419 - DNA, 25 bp, Saccharomyces pastorianus
gtacatacagggaacgtcctctacc

SEQ ID NO: 112420 - DNA, 25 bp, Saccharomyces pastorianus
caaggtaacaatgcaaatcagtagt

SEQ ID NO: 112421 - DNA, 25 bp, Saccharomyces pastorianus
aagcaacctgcatggctagtgttca

SEQ ID NO: 112422 - DNA, 25 bp, Saccharomyces pastorianus
gcatggctagtgttcaaagttacaa

SEQ ID NO: 112423 - DNA, 25 bp, Saccharomyces pastorianus
ttttagtacatacagggaacgtcct

SEQ ID NO: 112424 - DNA, 25 bp, Saccharomyces pastorianus
gtgctactggaatggattcaccaac

SEQ ID NO: 112425 - DNA, 25 bp, Saccharomyces pastorianus
ccacggtttttgtctacaggcaaca

SEQ ID NO: 112426 - DNA, 25 bp, Saccharomyces pastorianus
gattccgttaggcaactactatcaa

SEQ ID NO: 112427 - DNA, 25 bp, Saccharomyces pastorianus
gttaagagccttaccttgtgtagat

SEQ ID NO: 112428 - DNA, 25 bp, Saccharomyces pastorianus
gtgtagattaccattcgcggaagac

SEQ ID NO: 112429 - DNA, 25 bp, Saccharomyces pastorianus
aaataagtccttacacgcacaagaa

SEQ ID NO: 112430 - DNA, 25 bp, Saccharomyces pastorianus
aggatcctcttagaatacccacggt

SEQ ID NO: 112431 - DNA, 25 bp, Saccharomyces pastorianus
agatcccggacctagaaacgctatt

SEQ ID NO: 112432 - DNA, 25 bp, Saccharomyces pastorianus
cagagcttcctgactcattgaaaaa

SEQ ID NO: 112433 - DNA, 25 bp, Saccharomyces pastorianus
aaattggttgaagtgctcggcatca

SEQ ID NO: 112434 - DNA, 25 bp, Saccharomyces pastorianus
agatgagctaccagagattccgtta

SEQ ID NO: 112435 - DNA, 25 bp, Saccharomyces pastorianus
aacgcaggttatgttttcgaaagag

SEQ ID NO: 112436 - DNA, 25 bp, Saccharomyces pastorianus
aagcacgcagatccaagtgtatatg

SEQ ID NO: 112437 - DNA, 25 bp, Saccharomyces pastorianus
tgggtagtttttgggacgcattcgc

SEQ ID NO: 112438 - DNA, 25 bp, Saccharomyces pastorianus
tacgacaagaaaaagcacgcagatc

SEQ ID NO: 112439 - DNA, 25 bp, Saccharomyces pastorianus
gcacgcagatccaagtgtatatgga

SEQ ID NO: 112440 - DNA, 25 bp, Saccharomyces pastorianus
tccaagtgtatatggaggaaaccat

SEQ ID NO: 112441 - DNA, 25 bp, Saccharomyces pastorianus
gaaaaagcacgcagatccaagtgta

SEQ ID NO: 112442 - DNA, 25 bp, Saccharomyces pastorianus
tagtttttgggacgcattcgcagta

SEQ ID NO: 112443 - DNA, 25 bp, Saccharomyces pastorianus
ggtagtttttgggacgcattcgcag

SEQ ID NO: 112444 - DNA, 25 bp, Saccharomyces pastorianus
aaaagcacgcagatccaagtgtata

SEQ ID NO: 112445 - DNA, 25 bp, Saccharomyces pastorianus
gtagtttttgggacgcattcgcagt

SEQ ID NO: 112446 - DNA, 25 bp, Saccharomyces pastorianus
ggagattacccgcagaagtagaaat

SEQ ID NO: 112447 - DNA, 25 bp, Saccharomyces pastorianus
taggacacatcagcaagagaacttg

SEQ ID NO: 112448 - DNA, 25 bp, Saccharomyces pastorianus
gaatgttgacatctctaacatgtcg

SEQ ID NO: 112449 - DNA, 25 bp, Saccharomyces pastorianus
cttgcagagcatgagaagatcttcc

SEQ ID NO: 112450 - DNA, 25 bp, Saccharomyces pastorianus
gtaccgtcaacctaggacacatcag

SEQ ID NO: 112451 - DNA, 25 bp, Saccharomyces pastorianus
gaagatcttccataggatcacagga

SEQ ID NO: 112452 - DNA, 25 bp, Saccharomyces pastorianus
gacagttccgatgttgaggacgtta

SEQ ID NO: 112453 - DNA, 25 bp, Saccharomyces pastorianus
gtcgcaaggtgagtttttaagactt

SEQ ID NO: 112454 - DNA, 25 bp, Saccharomyces pastorianus
tctctaacatgtcgcaaggtgagtt

SEQ ID NO: 112455 - DNA, 25 bp, Saccharomyces pastorianus
taggatcacaggacagttccgatgt

SEQ ID NO: 112456 - DNA, 25 bp, Saccharomyces pastorianus
tttcgaaagagtaccgtcaacctag

SEQ ID NO: 112457 - DNA, 25 bp, Saccharomyces pastorianus
atggcaatccctgttctacgaacat

SEQ ID NO: 112458 - DNA, 25 bp, Saccharomyces pastorianus
cgccatcggtgctcaagttgcaaag

SEQ ID NO: 112459 - DNA, 25 bp, Saccharomyces pastorianus
ggtacgatgggttacggtctccctg

SEQ ID NO: 112460 - DNA, 25 bp, Saccharomyces pastorianus
ccaagggcccagttttgcttgaagt

SEQ ID NO: 112461 - DNA, 25 bp, Saccharomyces pastorianus
gaattcgtttctaccaagggcccag

SEQ ID NO: 112462 - DNA, 25 bp, Saccharomyces pastorianus
aagaaactatccaaggttgccaacg

SEQ ID NO: 112463 - DNA, 25 bp, Saccharomyces pastorianus
atggtgacgcatcctttaacatgac

SEQ ID NO: 112464 - DNA, 25 bp, Saccharomyces pastorianus
tatggtcactcaatggcaatccctg

SEQ ID NO: 112465 - DNA, 25 bp, Saccharomyces pastorianus
gtggtagcggtctagacgagttcat

SEQ ID NO: 112466 - DNA, 25 bp, Saccharomyces pastorianus
tacgaacatcgttattcccacacac

SEQ ID NO: 112467 - DNA, 25 bp, Saccharomyces pastorianus
acccacatactttcatcacatcagg

SEQ ID NO: 112468 - DNA, 25 bp, Saccharomyces pastorianus
taggaattaccgacgctccatttgg

SEQ ID NO: 112469 - DNA, 25 bp, Saccharomyces pastorianus
cggctccaagattgtgccttcaaaa

SEQ ID NO: 112470 - DNA, 25 bp, Saccharomyces pastorianus
gaggatctatgccttgtaccaccaa

SEQ ID NO: 112471 - DNA, 25 bp, Saccharomyces pastorianus
aatatttttcattatctgccgccgt

SEQ ID NO: 112472 - DNA, 25 bp, Saccharomyces pastorianus
tgagataccctccaaatagcgcaca

SEQ ID NO: 112473 - DNA, 25 bp, Saccharomyces pastorianus
ggaatgattttaccctttttatgag

SEQ ID NO: 112474 - DNA, 25 bp, Saccharomyces pastorianus
gtataaactcaactaacggctccaa

SEQ ID NO: 112475 - DNA, 25 bp, Saccharomyces pastorianus
tggagggatcggtacttcaggttat

SEQ ID NO: 112476 - DNA, 25 bp, Saccharomyces pastorianus
aggaaaagctcgtccgttttgcgat

SEQ ID NO: 112477 - DNA, 25 bp, Saccharomyces pastorianus
aaaactttgctcctgtattacccat

SEQ ID NO: 112478 - DNA, 25 bp, Saccharomyces pastorianus
gacgcgcttaagatctggtgactgt

SEQ ID NO: 112479 - DNA, 25 bp, Saccharomyces pastorianus
ttgccgattatcaatgtcccagtta

SEQ ID NO: 112480 - DNA, 25 bp, Saccharomyces pastorianus
accccgattctgttagcaatgccga

SEQ ID NO: 112481 - DNA, 25 bp, Saccharomyces pastorianus
agaacgttacagatgcggcccgtga

SEQ ID NO: 112482 - DNA, 25 bp, Saccharomyces pastorianus
aaatatggtttgtcgctacctgaga

SEQ ID NO: 112483 - DNA, 25 bp, Saccharomyces pastorianus
gaagactattcacttactctaaaga

SEQ ID NO: 112484 - DNA, 25 bp, Saccharomyces pastorianus
atatgggtccacttggaggcgatct

SEQ ID NO: 112485 - DNA, 25 bp, Saccharomyces pastorianus
tagattatcattacagcagccacat

SEQ ID NO: 112486 - DNA, 25 bp, Saccharomyces pastorianus
taccttcaaaggacatcattgccga

SEQ ID NO: 112487 - DNA, 25 bp, Saccharomyces pastorianus
tttgaaggcttaccgggccaaccat

SEQ ID NO: 112488 - DNA, 25 bp, Saccharomyces pastorianus
ccatcagttctttcccttgagagga

SEQ ID NO: 112489 - DNA, 25 bp, Saccharomyces pastorianus
gatgcggcccgtgaatactttgaag

SEQ ID NO: 112490 - DNA, 25 bp, Saccharomyces pastorianus
aaccccaattcgaaaatcatgtcaa

SEQ ID NO: 112491 - DNA, 25 bp, Saccharomyces pastorianus
atgcaggttctcaatacgaaaagtg

SEQ ID NO: 112492 - DNA, 25 bp, Saccharomyces pastorianus
gaacgttggaacacgactactgccc

SEQ ID NO: 112493 - DNA, 25 bp, Saccharomyces pastorianus
gataaatcaaccacacagctacgta

SEQ ID NO: 112494 - DNA, 25 bp, Saccharomyces pastorianus
gactactgcccatcaatgtcaacaa

SEQ ID NO: 112495 - DNA, 25 bp, Saccharomyces pastorianus
agagacccagttatgctccatgttg

SEQ ID NO: 112496 - DNA, 25 bp, Saccharomyces pastorianus
gtaatgaatcagtgaaaccccaatt

SEQ ID NO: 112497 - DNA, 25 bp, Saccharomyces pastorianus
aggcgtctcaagtcacgttcatatt

SEQ ID NO: 112498 - DNA, 25 bp, Saccharomyces pastorianus
gcagccaccatatatacaagaacgt

SEQ ID NO: 112499 - DNA, 25 bp, Saccharomyces pastorianus
tccatgttgcaggaggcgtctcaag

SEQ ID NO: 112500 - DNA, 25 bp, Saccharomyces pastorianus
gaaaacgaaacaatgcagccaccat

SEQ ID NO: 112501 - DNA, 25 bp, Saccharomyces pastorianus
cttctctggcgcatgtatcagacga

SEQ ID NO: 112502 - DNA, 25 bp, Saccharomyces pastorianus
tgctccagccattattgaggcctat

SEQ ID NO: 112503 - DNA, 25 bp, Saccharomyces pastorianus
tgggaaaaacttggagccgctgctc

SEQ ID NO: 112504 - DNA, 25 bp, Saccharomyces pastorianus
gtggccatgggtatgttagactact

SEQ ID NO: 112505 - DNA, 25 bp, Saccharomyces pastorianus
gacctttgtgatggcagtaacgcat

SEQ ID NO: 112506 - DNA, 25 bp, Saccharomyces pastorianus
gatatttaatctcagggtggccatg

SEQ ID NO: 112507 - DNA, 25 bp, Saccharomyces pastorianus
ttaatggacggtgcccacaatggct

SEQ ID NO: 112508 - DNA, 25 bp, Saccharomyces pastorianus
tacatcaggtattgccttctctggc

SEQ ID NO: 112509 - DNA, 25 bp, Saccharomyces pastorianus
gaaaccagcctttgacctttgtgat

SEQ ID NO: 112510 - DNA, 25 bp, Saccharomyces pastorianus
ggattcatgccactgatcctgaaga

SEQ ID NO: 112511 - DNA, 25 bp, Saccharomyces pastorianus
acaatggctcagctgcagtagagtt

SEQ ID NO: 112512 - DNA, 25 bp, Saccharomyces pastorianus
aaccaggcaccgaaagttgggatgc

SEQ ID NO: 112513 - DNA, 25 bp, Saccharomyces pastorianus
agaatgccttgcgtgctggaaccag

SEQ ID NO: 112514 - DNA, 25 bp, Saccharomyces pastorianus
aaacgacatggagcactgaagaact

SEQ ID NO: 112515 - DNA, 25 bp, Saccharomyces pastorianus
ataactgcacaaggccccagagagt

SEQ ID NO: 112516 - DNA, 25 bp, Saccharomyces pastorianus
gaatggctccacgaaagaatgcctt

SEQ ID NO: 112517 - DNA, 25 bp, Saccharomyces pastorianus
agaagccttgctcgaaaatgataac

SEQ ID NO: 112518 - DNA, 25 bp, Saccharomyces pastorianus
agaagaagctaatttgtcacccaaa

SEQ ID NO: 112519 - DNA, 25 bp, Saccharomyces pastorianus
ggaagatttatatacgttcaccata

SEQ ID NO: 112520 - DNA, 25 bp, Saccharomyces pastorianus
agaggattcggacatgttcagcgta

SEQ ID NO: 112521 - DNA, 25 bp, Saccharomyces pastorianus
taccaacactggagagcggctgata

SEQ ID NO: 112522 - DNA, 25 bp, Saccharomyces pastorianus
aaagctgctgaagccggactacgat

SEQ ID NO: 112523 - DNA, 25 bp, Saccharomyces pastorianus
tccgacacgatcttgatgttataaa

SEQ ID NO: 112524 - DNA, 25 bp, Saccharomyces pastorianus
gaatattgatattttacccttggac

SEQ ID NO: 112525 - DNA, 25 bp, Saccharomyces pastorianus
gtaattgaacctgagctggaagaac

SEQ ID NO: 112526 - DNA, 25 bp, Saccharomyces pastorianus
gaacaaagtgcggtcaccccggaag

SEQ ID NO: 112527 - DNA, 25 bp, Saccharomyces pastorianus
ttacccttggacaataacctcagcg

SEQ ID NO: 112528 - DNA, 25 bp, Saccharomyces pastorianus
ggacaataacctcagcgatttctat

SEQ ID NO: 112529 - DNA, 25 bp, Saccharomyces pastorianus
ggataacctactcgacaatccggtt

SEQ ID NO: 112530 - DNA, 25 bp, Saccharomyces pastorianus
gaagctatacagatctttaggagtt

SEQ ID NO: 112531 - DNA, 25 bp, Saccharomyces pastorianus
gaaataatatccacaccgaacggtt

SEQ ID NO: 112532 - DNA, 25 bp, Saccharomyces pastorianus
ggaacgtaatattgtgtcacttcga

SEQ ID NO: 112533 - DNA, 25 bp, Saccharomyces pastorianus
ctactcgacaatccggttgaatttt

SEQ ID NO: 112534 - DNA, 25 bp, Saccharomyces pastorianus
gtatatctggcgttttactggctct

SEQ ID NO: 112535 - DNA, 25 bp, Saccharomyces pastorianus
cgatctctcctcatttaactgttta

SEQ ID NO: 112536 - DNA, 25 bp, Saccharomyces pastorianus
acatctctatttggagttccccgag

SEQ ID NO: 112537 - DNA, 25 bp, Saccharomyces pastorianus
aaggctctgcagcatatctgtttgc

SEQ ID NO: 112538 - DNA, 25 bp, Saccharomyces pastorianus
aatggccgcgtatccaaatctgatc

SEQ ID NO: 112539 - DNA, 25 bp, Saccharomyces pastorianus
acggtataaggcatctcatctggga

SEQ ID NO: 112540 - DNA, 25 bp, Saccharomyces pastorianus
ggcagaatggtccttttttccaaag

SEQ ID NO: 112541 - DNA, 25 bp, Saccharomyces pastorianus
tggtatctttcctctttacatcgta

SEQ ID NO: 112542 - DNA, 25 bp, Saccharomyces pastorianus
cgagcatctgtattcgtgccaagaa

SEQ ID NO: 112543 - DNA, 25 bp, Saccharomyces pastorianus
ggctcttggattctatgctttcaca

SEQ ID NO: 112544 - DNA, 25 bp, Saccharomyces pastorianus
aaagatgcctaagtggtcccaatgg

SEQ ID NO: 112545 - DNA, 25 bp, Saccharomyces pastorianus
aacaaggacgaggacatccccgaca

SEQ ID NO: 112546 - DNA, 25 bp, Saccharomyces pastorianus
gagccttctgaagttgagtcactgg

SEQ ID NO: 112547 - DNA, 25 bp, Saccharomyces pastorianus
gagtattctgaagattacgagcctt

SEQ ID NO: 112548 - DNA, 25 bp, Saccharomyces pastorianus
gataactaaaacgaactctctcaat

SEQ ID NO: 112549 - DNA, 25 bp, Saccharomyces pastorianus
cgggatgccctactggatttatttt

SEQ ID NO: 112550 - DNA, 25 bp, Saccharomyces pastorianus
gatcatgtcaactagccgtatcctt

SEQ ID NO: 112551 - DNA, 25 bp, Saccharomyces pastorianus
gtattctttggcttcagagataaca

SEQ ID NO: 112552 - DNA, 25 bp, Saccharomyces pastorianus
tctctcaataatagtgccggccaca

SEQ ID NO: 112553 - DNA, 25 bp, Saccharomyces pastorianus
tgattttcaacgaaacccgggatgc

SEQ ID NO: 112554 - DNA, 25 bp, Saccharomyces pastorianus
aagctcgtaggccaagtattctttg

SEQ ID NO: 112555 - DNA, 25 bp, Saccharomyces pastorianus
aaactttgacaagggcatctatctt

SEQ ID NO: 112556 - DNA, 25 bp, Saccharomyces pastorianus
ttcgtttgggagctctagcattaat

SEQ ID NO: 112557 - DNA, 25 bp, Saccharomyces pastorianus
gtttaagaacttttgcatggtatct

SEQ ID NO: 112558 - DNA, 25 bp, Saccharomyces pastorianus
gctagagctttctgtgttggacata

SEQ ID NO: 112559 - DNA, 25 bp, Saccharomyces pastorianus
tttttcgtttgggagctctagcatt

SEQ ID NO: 112560 - DNA, 25 bp, Saccharomyces pastorianus
gagctttctgtgttggacatataaa

SEQ ID NO: 112561 - DNA, 25 bp, Saccharomyces pastorianus
gcatggtatctaaaagaggtttttc

SEQ ID NO: 112562 - DNA, 25 bp, Saccharomyces pastorianus
gcattaattactatagctagagctt

SEQ ID NO: 112563 - DNA, 25 bp, Saccharomyces pastorianus
gggagctctagcattaattactata

SEQ ID NO: 112564 - DNA, 25 bp, Saccharomyces pastorianus
ggtttttcgtttgggagctctagca

SEQ ID NO: 112565 - DNA, 25 bp, Saccharomyces pastorianus
atagctagagctttctgtgttggac

SEQ ID NO: 112566 - DNA, 25 bp, Saccharomyces pastorianus
tctgtgttggacatataaacatcat

SEQ ID NO: 112567 - DNA, 25 bp, Saccharomyces pastorianus
tcagcacttgcgtatgttgtaggag

SEQ ID NO: 112568 - DNA, 25 bp, Saccharomyces pastorianus
ccgatgttttgccatttgcgaggat

SEQ ID NO: 112569 - DNA, 25 bp, Saccharomyces pastorianus
ttacgtgggttcagcacttgcgtat

SEQ ID NO: 112570 - DNA, 25 bp, Saccharomyces pastorianus
ttttgatctatcttgcgccgtatgc

SEQ ID NO: 112571 - DNA, 25 bp, Saccharomyces pastorianus
gtaaggttcatcctgtttcagatag

SEQ ID NO: 112572 - DNA, 25 bp, Saccharomyces pastorianus
gcgccgtatgcaaagtcaatgaaag

SEQ ID NO: 112573 - DNA, 25 bp, Saccharomyces pastorianus
tctttgggtttacgtgggttcagca

SEQ ID NO: 112574 - DNA, 25 bp, Saccharomyces pastorianus
aatacagtattatggccctgccgat

SEQ ID NO: 112575 - DNA, 25 bp, Saccharomyces pastorianus
cgaggattgcagaatttctttgggt

SEQ ID NO: 112576 - DNA, 25 bp, Saccharomyces pastorianus
tattatggccctgccgatgttttgc

SEQ ID NO: 112577 - DNA, 25 bp, Saccharomyces pastorianus
agtgattttgatctatcttgcgccg

SEQ ID NO: 112578 - DNA, 25 bp, Saccharomyces pastorianus
aaccaacgtttctttgtcatcggat

SEQ ID NO: 112579 - DNA, 25 bp, Saccharomyces pastorianus
gtaaccggccaaattccaacagaag

SEQ ID NO: 112580 - DNA, 25 bp, Saccharomyces pastorianus
gagcagttaaatccggtgtcaaata

SEQ ID NO: 112581 - DNA, 25 bp, Saccharomyces pastorianus
gcaggtcaacaatctagaatccatt

SEQ ID NO: 112582 - DNA, 25 bp, Saccharomyces pastorianus
acggttgccaccattgctattaaat

SEQ ID NO: 112583 - DNA, 25 bp, Saccharomyces pastorianus
caaggttgtattttcagctgccgat

SEQ ID NO: 112584 - DNA, 25 bp, Saccharomyces pastorianus
gacaacaccctagagttttggagat

SEQ ID NO: 112585 - DNA, 25 bp, Saccharomyces pastorianus
gtcatcggatgcatttttcccattc

SEQ ID NO: 112586 - DNA, 25 bp, Saccharomyces pastorianus
gctatcgatttattcgtaaccggcc

SEQ ID NO: 112587 - DNA, 25 bp, Saccharomyces pastorianus
atacattgccgctccatctggttct

SEQ ID NO: 112588 - DNA, 25 bp, Saccharomyces pastorianus
aatctaattccgtatgttatgctag

SEQ ID NO: 112589 - DNA, 25 bp, Saccharomyces pastorianus
gagactaggctacaaagccaagcaa

SEQ ID NO: 112590 - DNA, 25 bp, Saccharomyces pastorianus
gaagttatattggttgatcctcaac

SEQ ID NO: 112591 - DNA, 25 bp, Saccharomyces pastorianus
ggtacaactggatctgcaatcccgt

SEQ ID NO: 112592 - DNA, 25 bp, Saccharomyces pastorianus
acttcgaagttatattggttgatcc

SEQ ID NO: 112593 - DNA, 25 bp, Saccharomyces pastorianus
gacaaggctaggagactaggctaca

SEQ ID NO: 112594 - DNA, 25 bp, Saccharomyces pastorianus
gctcggtacaactggatctgcaatc

SEQ ID NO: 112595 - DNA, 25 bp, Saccharomyces pastorianus
ccgtccataagcatcgtgaagctag

SEQ ID NO: 112596 - DNA, 25 bp, Saccharomyces pastorianus
taagcatcgtgaagctagaggcttg

SEQ ID NO: 112597 - DNA, 25 bp, Saccharomyces pastorianus
attggttgatcctcaacacaaggct

SEQ ID NO: 112598 - DNA, 25 bp, Saccharomyces pastorianus
aactggatctgcaatcccgtccata

SEQ ID NO: 112599 - DNA, 25 bp, Saccharomyces pastorianus
aatcccgtccataagcatcgtgaag

SEQ ID NO: 112600 - DNA, 25 bp, Saccharomyces pastorianus
acattctggccaacgtgtattcgac

SEQ ID NO: 112601 - DNA, 25 bp, Saccharomyces pastorianus
aatttgcatcattacggtggctcgc

SEQ ID NO: 112602 - DNA, 25 bp, Saccharomyces pastorianus
tttcgcaatcttcgcgttccagaac

SEQ ID NO: 112603 - DNA, 25 bp, Saccharomyces pastorianus
tgggcgtactggtttgtggcaaaaa

SEQ ID NO: 112604 - DNA, 25 bp, Saccharomyces pastorianus
acgcgttgttatttgcgcagcacaa

SEQ ID NO: 112605 - DNA, 25 bp, Saccharomyces pastorianus
gatgcgcaactttccttagtaggga

SEQ ID NO: 112606 - DNA, 25 bp, Saccharomyces pastorianus
aagcgctgctttactgcaatttgca

SEQ ID NO: 112607 - DNA, 25 bp, Saccharomyces pastorianus
ttatttgccagccaaccgcatattc

SEQ ID NO: 112608 - DNA, 25 bp, Saccharomyces pastorianus
aaatgtttcctattggatgcgcaac

SEQ ID NO: 112609 - DNA, 25 bp, Saccharomyces pastorianus
atgctatgtcagttcggaggcgtgt

SEQ ID NO: 112610 - DNA, 25 bp, Saccharomyces pastorianus
atttcggctggaggctaagcgctgc

SEQ ID NO: 112611 - DNA, 25 bp, Saccharomyces pastorianus
tgctccaggcatggttgcaaaccct

SEQ ID NO: 112612 - DNA, 25 bp, Saccharomyces pastorianus
ctgctagttccagtgccgctaagaa

SEQ ID NO: 112613 - DNA, 25 bp, Saccharomyces pastorianus
gtctctgctacttctactgctagtt

SEQ ID NO: 112614 - DNA, 25 bp, Saccharomyces pastorianus
aacagtgccttagtttccaacaatg

SEQ ID NO: 112615 - DNA, 25 bp, Saccharomyces pastorianus
gttcaaagaacgctgctccaggcat

SEQ ID NO: 112616 - DNA, 25 bp, Saccharomyces pastorianus
ttgcaaaccctgtttcctcgaagta

SEQ ID NO: 112617 - DNA, 25 bp, Saccharomyces pastorianus
agtttccaacaatgtcgttgccgcc

SEQ ID NO: 112618 - DNA, 25 bp, Saccharomyces pastorianus
acggtatcatcatggccgcatttgc

SEQ ID NO: 112619 - DNA, 25 bp, Saccharomyces pastorianus
gccgctaagaacactacttccagtt

SEQ ID NO: 112620 - DNA, 25 bp, Saccharomyces pastorianus
gtttcctcgaagtacggtatcatca

SEQ ID NO: 112621 - DNA, 25 bp, Saccharomyces pastorianus
tcctccatcaaaactaacagtgcct

SEQ ID NO: 112622 - DNA, 25 bp, Saccharomyces pastorianus
tcacttttactatggattacggtta

SEQ ID NO: 112623 - DNA, 25 bp, Saccharomyces pastorianus
tgctcttttctgtatatcactttta

SEQ ID NO: 112624 - DNA, 25 bp, Saccharomyces pastorianus
aaaggacgacagtgccatcaaggaa

SEQ ID NO: 112625 - DNA, 25 bp, Saccharomyces pastorianus
gaaatccactagtactgccagacgg

SEQ ID NO: 112626 - DNA, 25 bp, Saccharomyces pastorianus
acgggaatatccacttctatgctct

SEQ ID NO: 112627 - DNA, 25 bp, Saccharomyces pastorianus
atcgccacacacgtatcttttgttg

SEQ ID NO: 112628 - DNA, 25 bp, Saccharomyces pastorianus
gctcatctatgccacaaacgggaat

SEQ ID NO: 112629 - DNA, 25 bp, Saccharomyces pastorianus
ccacttctatgctcttttctgtata

SEQ ID NO: 112630 - DNA, 25 bp, Saccharomyces pastorianus
tcttttgttgcactactactgaccc

SEQ ID NO: 112631 - DNA, 25 bp, Saccharomyces pastorianus
gaaagtgtatttgaaccagggacct

SEQ ID NO: 112632 - DNA, 25 bp, Saccharomyces pastorianus
tactgaccctcatctggctcatcta

SEQ ID NO: 112633 - DNA, 25 bp, Saccharomyces pastorianus
aatctagaagatacgtttgccgacg

SEQ ID NO: 112634 - DNA, 25 bp, Saccharomyces pastorianus
aagagacacttcatttgcaaattta

SEQ ID NO: 112635 - DNA, 25 bp, Saccharomyces pastorianus
caggtgtagatctgactaattctga

SEQ ID NO: 112636 - DNA, 25 bp, Saccharomyces pastorianus
gggaaggacgttactagagaccagt

SEQ ID NO: 112637 - DNA, 25 bp, Saccharomyces pastorianus
acggattctgattgtaacgcccttc

SEQ ID NO: 112638 - DNA, 25 bp, Saccharomyces pastorianus
cgcaaggcatgtttcatcaggtgta

SEQ ID NO: 112639 - DNA, 25 bp, Saccharomyces pastorianus
gaacatcctttggatacggattctg

SEQ ID NO: 112640 - DNA, 25 bp, Saccharomyces pastorianus
gccgacgtggtgaactcacaatttg

SEQ ID NO: 112641 - DNA, 25 bp, Saccharomyces pastorianus
tgtaacgcccttcgtctcaaacttt

SEQ ID NO: 112642 - DNA, 25 bp, Saccharomyces pastorianus
aagttttgtctctatttcggtgaag

SEQ ID NO: 112643 - DNA, 25 bp, Saccharomyces pastorianus
tagcataagtactgtcgcaaggcat

SEQ ID NO: 112644 - DNA, 25 bp, Saccharomyces pastorianus
gatgttattttgaccttgaagcact

SEQ ID NO: 112645 - DNA, 25 bp, Saccharomyces pastorianus
ggaggatctttccatcgtgactgga

SEQ ID NO: 112646 - DNA, 25 bp, Saccharomyces pastorianus
caaagccgatgggattcttttcgaa

SEQ ID NO: 112647 - DNA, 25 bp, Saccharomyces pastorianus
gttatcaccttttggactaatcggg

SEQ ID NO: 112648 - DNA, 25 bp, Saccharomyces pastorianus
atcaacgacgcggattaggcctttt

SEQ ID NO: 112649 - DNA, 25 bp, Saccharomyces pastorianus
ggtgacctcgcccattatgataaag

SEQ ID NO: 112650 - DNA, 25 bp, Saccharomyces pastorianus
acagatactctgttggcaccttatt

SEQ ID NO: 112651 - DNA, 25 bp, Saccharomyces pastorianus
ggccttttacttatcgagttttcat

SEQ ID NO: 112652 - DNA, 25 bp, Saccharomyces pastorianus
aagtgaccctggaggatctttccat

SEQ ID NO: 112653 - DNA, 25 bp, Saccharomyces pastorianus
atgtctttgtcttttcactaagcta

SEQ ID NO: 112654 - DNA, 25 bp, Saccharomyces pastorianus
gggccagaagtaccgttatcacctt

SEQ ID NO: 112655 - DNA, 25 bp, Saccharomyces pastorianus
aatgccacccaaatacatgctctat

SEQ ID NO: 112656 - DNA, 25 bp, Saccharomyces pastorianus
gaaagggtcttcttttgacatacag

SEQ ID NO: 112657 - DNA, 25 bp, Saccharomyces pastorianus
acggtattgttatgtggttcctaga

SEQ ID NO: 112658 - DNA, 25 bp, Saccharomyces pastorianus
ggttcctagatttggatccacagtt

SEQ ID NO: 112659 - DNA, 25 bp, Saccharomyces pastorianus
tgctttgtctatatccatccgactt

SEQ ID NO: 112660 - DNA, 25 bp, Saccharomyces pastorianus
gtaaacctctgactggtcaaggctt

SEQ ID NO: 112661 - DNA, 25 bp, Saccharomyces pastorianus
gtttatcaccagaaagggcttccag

SEQ ID NO: 112662 - DNA, 25 bp, Saccharomyces pastorianus
atgatttgcgctggttttgtcgacc

SEQ ID NO: 112663 - DNA, 25 bp, Saccharomyces pastorianus
ctattattccttgcaccttggtgga

SEQ ID NO: 112664 - DNA, 25 bp, Saccharomyces pastorianus
gagcagatgttttatttccagatga

SEQ ID NO: 112665 - DNA, 25 bp, Saccharomyces pastorianus
ttatattcctgttttggccacgaga

SEQ ID NO: 112666 - DNA, 25 bp, Saccharomyces pastorianus
ttaggaacgtcttcgcaccaaacga

SEQ ID NO: 112667 - DNA, 25 bp, Saccharomyces pastorianus
ttccggtcacgtttatttatcatat

SEQ ID NO: 112668 - DNA, 25 bp, Saccharomyces pastorianus
ttgggaagccagtactaagcaaact

SEQ ID NO: 112669 - DNA, 25 bp, Saccharomyces pastorianus
atgcgggacgaatacaagctgtcaa

SEQ ID NO: 112670 - DNA, 25 bp, Saccharomyces pastorianus
gagggcttcgattcgtattttgttt

SEQ ID NO: 112671 - DNA, 25 bp, Saccharomyces pastorianus
gtgaggaaattctacagcattgctt

SEQ ID NO: 112672 - DNA, 25 bp, Saccharomyces pastorianus
atttgagacattttccggtcacgtt

SEQ ID NO: 112673 - DNA, 25 bp, Saccharomyces pastorianus
taatgcggtttgagggcttcgattc

SEQ ID NO: 112674 - DNA, 25 bp, Saccharomyces pastorianus
acagcattgctttcacatcggagat

SEQ ID NO: 112675 - DNA, 25 bp, Saccharomyces pastorianus
aagctgccggttggactggtatact

SEQ ID NO: 112676 - DNA, 25 bp, Saccharomyces pastorianus
atgagcttaatctcgccaaacctga

SEQ ID NO: 112677 - DNA, 25 bp, Saccharomyces pastorianus
aactatgtttggtttcacgcggata

SEQ ID NO: 112678 - DNA, 25 bp, Saccharomyces pastorianus
gatatgtgactgtctgcagctatgt

SEQ ID NO: 112679 - DNA, 25 bp, Saccharomyces pastorianus
aacaggtatatgaatcccggtgaag

SEQ ID NO: 112680 - DNA, 25 bp, Saccharomyces pastorianus
tgagtattcaacaccttaccaaatt

SEQ ID NO: 112681 - DNA, 25 bp, Saccharomyces pastorianus
aatcgatgacataccgcaagaagtg

SEQ ID NO: 112682 - DNA, 25 bp, Saccharomyces pastorianus
gtactcaagtggtcatgtttattta

SEQ ID NO: 112683 - DNA, 25 bp, Saccharomyces pastorianus
aaacagactggccaagacaagggta

SEQ ID NO: 112684 - DNA, 25 bp, Saccharomyces pastorianus
tgataacaccatggcataacttgag

SEQ ID NO: 112685 - DNA, 25 bp, Saccharomyces pastorianus
atgccacaatgcaccatcttgataa

SEQ ID NO: 112686 - DNA, 25 bp, Saccharomyces pastorianus
gtttcacgcggataagtactcaagt

SEQ ID NO: 112687 - DNA, 25 bp, Saccharomyces pastorianus
ggtgaagtatcatttaagtctctaa

SEQ ID NO: 112688 - DNA, 25 bp, Saccharomyces pastorianus
caaacttctgaattgctttcctctt

SEQ ID NO: 112689 - DNA, 25 bp, Saccharomyces pastorianus
gcggcgacaacttttcataacttag

SEQ ID NO: 112690 - DNA, 25 bp, Saccharomyces pastorianus
gttggtgcgaaaatcagcttcatca

SEQ ID NO: 112691 - DNA, 25 bp, Saccharomyces pastorianus
aattacgcagaacttcacggtgtat

SEQ ID NO: 112692 - DNA, 25 bp, Saccharomyces pastorianus
gttggcataggttcagcggcgacaa

SEQ ID NO: 112693 - DNA, 25 bp, Saccharomyces pastorianus
attcggcggacagcggcagcattaa

SEQ ID NO: 112694 - DNA, 25 bp, Saccharomyces pastorianus
ataactcacatttcgtctgaccaac

SEQ ID NO: 112695 - DNA, 25 bp, Saccharomyces pastorianus
aggtcacggctgctgctaattcagt

SEQ ID NO: 112696 - DNA, 25 bp, Saccharomyces pastorianus
cagcattaagctgcccaaatcgtta

SEQ ID NO: 112697 - DNA, 25 bp, Saccharomyces pastorianus
ttttccccttgtcagattcggcgga

SEQ ID NO: 112698 - DNA, 25 bp, Saccharomyces pastorianus
tactcttccgaatttccctatgaac

SEQ ID NO: 112699 - DNA, 25 bp, Saccharomyces pastorianus
tcatcatctcccttcaattcaataa

SEQ ID NO: 112700 - DNA, 25 bp, Saccharomyces pastorianus
gtgctgctgcagtttcaacgacaac

SEQ ID NO: 112701 - DNA, 25 bp, Saccharomyces pastorianus
ttaaccacttctaacctcaacacga

SEQ ID NO: 112702 - DNA, 25 bp, Saccharomyces pastorianus
gggaccatatggcacaagaactttg

SEQ ID NO: 112703 - DNA, 25 bp, Saccharomyces pastorianus
ataattccaatcctggtgctgctgc

SEQ ID NO: 112704 - DNA, 25 bp, Saccharomyces pastorianus
cactacgttatctccaatggtgcaa

SEQ ID NO: 112705 - DNA, 25 bp, Saccharomyces pastorianus
gttacaggttccaagacaagacgat

SEQ ID NO: 112706 - DNA, 25 bp, Saccharomyces pastorianus
gttccgtgcctcttcaaaagttaca

SEQ ID NO: 112707 - DNA, 25 bp, Saccharomyces pastorianus
agagctattcagagacaacccacgc

SEQ ID NO: 112708 - DNA, 25 bp, Saccharomyces pastorianus
aactcccgccgctaatagcgatgaa

SEQ ID NO: 112709 - DNA, 25 bp, Saccharomyces pastorianus
ccacttccagccatttcatcaataa

SEQ ID NO: 112710 - DNA, 25 bp, Saccharomyces pastorianus
ttaacgtaccatattctgaacacag

SEQ ID NO: 112711 - DNA, 25 bp, Saccharomyces pastorianus
tacctaccgggtggagtcacaattt

SEQ ID NO: 112712 - DNA, 25 bp, Saccharomyces pastorianus
gaatcatccgtacatttggtaccta

SEQ ID NO: 112713 - DNA, 25 bp, Saccharomyces pastorianus
attatttgttatgccgaattccgtt

SEQ ID NO: 112714 - DNA, 25 bp, Saccharomyces pastorianus
gaagtcattcccacagtgaatctaa

SEQ ID NO: 112715 - DNA, 25 bp, Saccharomyces pastorianus
gcttactcaccagcaatttacatga

SEQ ID NO: 112716 - DNA, 25 bp, Saccharomyces pastorianus
gatgttgtcgggtttatacctaccg

SEQ ID NO: 112717 - DNA, 25 bp, Saccharomyces pastorianus
gacatgtgggacgaaagcttactca

SEQ ID NO: 112718 - DNA, 25 bp, Saccharomyces pastorianus
gaatgggtttgaaatctcgagtata

SEQ ID NO: 112719 - DNA, 25 bp, Saccharomyces pastorianus
gccgaattccgttaaattttcaatg

SEQ ID NO: 112720 - DNA, 25 bp, Saccharomyces pastorianus
gaagtgttctgaagtcattcccaca

SEQ ID NO: 112721 - DNA, 25 bp, Saccharomyces pastorianus
tagagctcgtcaaatgtagtggcat

SEQ ID NO: 112722 - DNA, 25 bp, Saccharomyces pastorianus
gaaattcgctgtctgattctaggac

SEQ ID NO: 112723 - DNA, 25 bp, Saccharomyces pastorianus
gatgtgagcctttcaatgcggtttg

SEQ ID NO: 112724 - DNA, 25 bp, Saccharomyces pastorianus
gagtgtgctgttatcgttgtgttga

SEQ ID NO: 112725 - DNA, 25 bp, Saccharomyces pastorianus
tgtgacaatatctctatgggacatt

SEQ ID NO: 112726 - DNA, 25 bp, Saccharomyces pastorianus
aacgcacattaaggccattttggga

SEQ ID NO: 112727 - DNA, 25 bp, Saccharomyces pastorianus
gcttcatcggaggtgtttactggta

SEQ ID NO: 112728 - DNA, 25 bp, Saccharomyces pastorianus
aatgcctactgtgggttttcaaata

SEQ ID NO: 112729 - DNA, 25 bp, Saccharomyces pastorianus
gccggacatccgaatagagctcgtc

SEQ ID NO: 112730 - DNA, 25 bp, Saccharomyces pastorianus
aggtattgatgacctgcgtgaccgt

SEQ ID NO: 112731 - DNA, 25 bp, Saccharomyces pastorianus
gtggaggacaagtccgagcttcatc

SEQ ID NO: 112732 - DNA, 25 bp, Saccharomyces pastorianus
gattaagagagctgaccctcacttc

SEQ ID NO: 112733 - DNA, 25 bp, Saccharomyces pastorianus
caagtcacagtataacccctattca

SEQ ID NO: 112734 - DNA, 25 bp, Saccharomyces pastorianus
ggttgatcgatccaagccatagcac

SEQ ID NO: 112735 - DNA, 25 bp, Saccharomyces pastorianus
tcagccattacttcggataccattc

SEQ ID NO: 112736 - DNA, 25 bp, Saccharomyces pastorianus
gccagccgactcatacgtgtataag

SEQ ID NO: 112737 - DNA, 25 bp, Saccharomyces pastorianus
aagtacgtcagcttcaagatctcct

SEQ ID NO: 112738 - DNA, 25 bp, Saccharomyces pastorianus
gataccattcgtcctgattgggaga

SEQ ID NO: 112739 - DNA, 25 bp, Saccharomyces pastorianus
cagcctatttgtaccgagtgttttg

SEQ ID NO: 112740 - DNA, 25 bp, Saccharomyces pastorianus
taaggacgccgccatatcaagagct

SEQ ID NO: 112741 - DNA, 25 bp, Saccharomyces pastorianus
gcggtcagccaaacatatcagccat

SEQ ID NO: 112742 - DNA, 25 bp, Saccharomyces pastorianus
aaatcttcttacctctgagccagca

SEQ ID NO: 112743 - DNA, 25 bp, Saccharomyces pastorianus
ttcgaacacgccaaaaagtcattgt

SEQ ID NO: 112744 - DNA, 25 bp, Saccharomyces pastorianus
tttcagcactagcaattacctcaaa

SEQ ID NO: 112745 - DNA, 25 bp, Saccharomyces pastorianus
ttcagtcggatttctgtgtttcttc

SEQ ID NO: 112746 - DNA, 25 bp, Saccharomyces pastorianus
tgtttcttcctttcagcactagcaa

SEQ ID NO: 112747 - DNA, 25 bp, Saccharomyces pastorianus
aaagtcattgttcagtcggatttct

SEQ ID NO: 112748 - DNA, 25 bp, Saccharomyces pastorianus
gagtttgaatatatacctatgcgta

SEQ ID NO: 112749 - DNA, 25 bp, Saccharomyces pastorianus
gcatttgatttcttcgaacacgcca

SEQ ID NO: 112750 - DNA, 25 bp, Saccharomyces pastorianus
atacctatgcgtacgtttatatata

SEQ ID NO: 112751 - DNA, 25 bp, Saccharomyces pastorianus
aatgacacattgatggtatcgccca

SEQ ID NO: 112752 - DNA, 25 bp, Saccharomyces pastorianus
tggtatcgcccaaaactgaaaaatt

SEQ ID NO: 112753 - DNA, 25 bp, Saccharomyces pastorianus
atgtcacgcactgacacaagtgaga

SEQ ID NO: 112754 - DNA, 25 bp, Saccharomyces pastorianus
tgatcttgatttttgcaacgtttca

SEQ ID NO: 112755 - DNA, 25 bp, Saccharomyces pastorianus
tattccacggttcctactgttaatt

SEQ ID NO: 112756 - DNA, 25 bp, Saccharomyces pastorianus
gcaacgtttcaaagacagcgggatc

SEQ ID NO: 112757 - DNA, 25 bp, Saccharomyces pastorianus
ctctaaatatctcaaggcatccttt

SEQ ID NO: 112758 - DNA, 25 bp, Saccharomyces pastorianus
aaggcatccttttagtgcaacccgc

SEQ ID NO: 112759 - DNA, 25 bp, Saccharomyces pastorianus
cagcgggatctaattattccacggt

SEQ ID NO: 112760 - DNA, 25 bp, Saccharomyces pastorianus
gattcttttgatcttgatttttgca

SEQ ID NO: 112761 - DNA, 25 bp, Saccharomyces pastorianus
ggtcaaagtgccaattatctcaaag

SEQ ID NO: 112762 - DNA, 25 bp, Saccharomyces pastorianus
gtgcaacccgcctatttataaactg

SEQ ID NO: 112763 - DNA, 25 bp, Saccharomyces pastorianus
acaatttacattgcctcgccatgct

SEQ ID NO: 112764 - DNA, 25 bp, Saccharomyces pastorianus
tcgccatgctgattcctctaaatat

SEQ ID NO: 112765 - DNA, 25 bp, Saccharomyces pastorianus
gtcgatgtatcgactctacaagttc

SEQ ID NO: 112766 - DNA, 25 bp, Saccharomyces pastorianus
gtgacatgcaattttctcctgattt

SEQ ID NO: 112767 - DNA, 25 bp, Saccharomyces pastorianus
acacagttgccattagcccacaggg

SEQ ID NO: 112768 - DNA, 25 bp, Saccharomyces pastorianus
ccaccgtggctggatggtcgactaa

SEQ ID NO: 112769 - DNA, 25 bp, Saccharomyces pastorianus
aagtttgaagctaggttctaccaca

SEQ ID NO: 112770 - DNA, 25 bp, Saccharomyces pastorianus
gatactaactcgttcttggtcgatg

SEQ ID NO: 112771 - DNA, 25 bp, Saccharomyces pastorianus
ctcatgaaggtttagacgctgccac

SEQ ID NO: 112772 - DNA, 25 bp, Saccharomyces pastorianus
attttggtcccttgaacacagttgc

SEQ ID NO: 112773 - DNA, 25 bp, Saccharomyces pastorianus
gaaacagactgtcctctaaacaccg

SEQ ID NO: 112774 - DNA, 25 bp, Saccharomyces pastorianus
gggcacaagttatgcctccggtggt

SEQ ID NO: 112775 - DNA, 25 bp, Saccharomyces pastorianus
ggtctccgaagagccaatccataaa

SEQ ID NO: 112776 - DNA, 25 bp, Saccharomyces pastorianus
atgcgacgtatgtgctcgttgcaga

SEQ ID NO: 112777 - DNA, 25 bp, Saccharomyces pastorianus
gcaaacaggttttctacaacttcag

SEQ ID NO: 112778 - DNA, 25 bp, Saccharomyces pastorianus
ttttggtaacgagtgccgctcaaga

SEQ ID NO: 112779 - DNA, 25 bp, Saccharomyces pastorianus
aggtatgtctgtcgtagcttctcgc

SEQ ID NO: 112780 - DNA, 25 bp, Saccharomyces pastorianus
tttgtccgcctattttcaatccttc

SEQ ID NO: 112781 - DNA, 25 bp, Saccharomyces pastorianus
ggctgaagttcaaaagctgctccta

SEQ ID NO: 112782 - DNA, 25 bp, Saccharomyces pastorianus
aagaatcgcgtcactatcctattaa

SEQ ID NO: 112783 - DNA, 25 bp, Saccharomyces pastorianus
cgcgccataacgaaattgcccaatt

SEQ ID NO: 112784 - DNA, 25 bp, Saccharomyces pastorianus
aaccacgagaatcctataccagcga

SEQ ID NO: 112785 - DNA, 25 bp, Saccharomyces pastorianus
ttaaactactggttccccaatgtgg

SEQ ID NO: 112786 - DNA, 25 bp, Saccharomyces pastorianus
agctatgccttcacaagtgctgcaa

SEQ ID NO: 112787 - DNA, 25 bp, Saccharomyces pastorianus
tacaggaaccacaggagccactttc

SEQ ID NO: 112788 - DNA, 25 bp, Saccharomyces pastorianus
ggtttcttctcctcattattcataa

SEQ ID NO: 112789 - DNA, 25 bp, Saccharomyces pastorianus
gccattgcccgttcattagagacta

SEQ ID NO: 112790 - DNA, 25 bp, Saccharomyces pastorianus
aagtcctcgacaaaatggccctaca

SEQ ID NO: 112791 - DNA, 25 bp, Saccharomyces pastorianus
attggcgtggtatcatttggcttct

SEQ ID NO: 112792 - DNA, 25 bp, Saccharomyces pastorianus
atggcccaactcatttatgtccgag

SEQ ID NO: 112793 - DNA, 25 bp, Saccharomyces pastorianus
atccaactattccaagcccattaag

SEQ ID NO: 112794 - DNA, 25 bp, Saccharomyces pastorianus
ccgagctgacgccttcttgaaaaaa

SEQ ID NO: 112795 - DNA, 25 bp, Saccharomyces pastorianus
tcgaacctgttagtgctcaaagcgc

SEQ ID NO: 112796 - DNA, 25 bp, Saccharomyces pastorianus
gccactttccacattaaggccagta

SEQ ID NO: 112797 - DNA, 25 bp, Saccharomyces pastorianus
atttcctttgtgtttgccattggcg

SEQ ID NO: 112798 - DNA, 25 bp, Saccharomyces pastorianus
gctgctttgttgcaagaggcttcca

SEQ ID NO: 112799 - DNA, 25 bp, Saccharomyces pastorianus
gagagttgccaaaccaattgctgtg

SEQ ID NO: 112800 - DNA, 25 bp, Saccharomyces pastorianus
gaggcttccagatcaccggaactaa

SEQ ID NO: 112801 - DNA, 25 bp, Saccharomyces pastorianus
tatttcctaggattcatcgccacga

SEQ ID NO: 112802 - DNA, 25 bp, Saccharomyces pastorianus
tccaggcttactgacatctaccaag

SEQ ID NO: 112803 - DNA, 25 bp, Saccharomyces pastorianus
ggtgtcactgctgtatatttcctag

SEQ ID NO: 112804 - DNA, 25 bp, Saccharomyces pastorianus
gttatcttcgctaggtactacttgg

SEQ ID NO: 112805 - DNA, 25 bp, Saccharomyces pastorianus
atttcatgccgagccaaagagagtt

SEQ ID NO: 112806 - DNA, 25 bp, Saccharomyces pastorianus
aaggccactttgattctagcgtcat

SEQ ID NO: 112807 - DNA, 25 bp, Saccharomyces pastorianus
gggaaattctgcaactcaacctgaa

SEQ ID NO: 112808 - DNA, 25 bp, Saccharomyces pastorianus
tggttgaattcttgtgccgccgcat

SEQ ID NO: 112809 - DNA, 25 bp, Saccharomyces pastorianus
cttctgggacggttcgatacgcaat

SEQ ID NO: 112810 - DNA, 25 bp, Saccharomyces pastorianus
aattaggtcattatgcttcttgcat

SEQ ID NO: 112811 - DNA, 25 bp, Saccharomyces pastorianus
ggtaaccggagataatttgtcacat

SEQ ID NO: 112812 - DNA, 25 bp, Saccharomyces pastorianus
tagcactgaaacctactgaccctaa

SEQ ID NO: 112813 - DNA, 25 bp, Saccharomyces pastorianus
ggtacacttcccatctggtcaaaaa

SEQ ID NO: 112814 - DNA, 25 bp, Saccharomyces pastorianus
ttatgtcggcgatgtgcttgttgat

SEQ ID NO: 112815 - DNA, 25 bp, Saccharomyces pastorianus
caattttgacaagcccttctgggac

SEQ ID NO: 112816 - DNA, 25 bp, Saccharomyces pastorianus
ttgccaacactgtcagcgaccaatg

SEQ ID NO: 112817 - DNA, 25 bp, Saccharomyces pastorianus
ttacgggtatgcctggtgatctcgt

SEQ ID NO: 112818 - DNA, 25 bp, Saccharomyces pastorianus
ggtacctatattaaagtccctgaag

SEQ ID NO: 112819 - DNA, 25 bp, Saccharomyces pastorianus
gtgctcgtggatcccagtacgatag

SEQ ID NO: 112820 - DNA, 25 bp, Saccharomyces pastorianus
taatttatcaactgggctcacgaca

SEQ ID NO: 112821 - DNA, 25 bp, Saccharomyces pastorianus
actcttcttttcctttgtactgtcg

SEQ ID NO: 112822 - DNA, 25 bp, Saccharomyces pastorianus
tgattcactgtcttattggtccgtt

SEQ ID NO: 112823 - DNA, 25 bp, Saccharomyces pastorianus
tgggctcacgacacaagatcaacag

SEQ ID NO: 112824 - DNA, 25 bp, Saccharomyces pastorianus
tttgctgtgcggttcaaaccaacag

SEQ ID NO: 112825 - DNA, 25 bp, Saccharomyces pastorianus
aacgacctactgtgtaatttatgca

SEQ ID NO: 112826 - DNA, 25 bp, Saccharomyces pastorianus
gtcatccctggtattgtacactgtt

SEQ ID NO: 112827 - DNA, 25 bp, Saccharomyces pastorianus
ttggtccgtttttgtttgcaataat

SEQ ID NO: 112828 - DNA, 25 bp, Saccharomyces pastorianus
gtgaatttaacaccctactcttaat

SEQ ID NO: 112829 - DNA, 25 bp, Saccharomyces pastorianus
gaaggaatgctttttccccagaaat

SEQ ID NO: 112830 - DNA, 25 bp, Saccharomyces pastorianus
ggaagtgtaccaaccgtcatccctg

SEQ ID NO: 112831 - DNA, 25 bp, Saccharomyces pastorianus
ttgacttacaaatccgaactttcca

SEQ ID NO: 112832 - DNA, 25 bp, Saccharomyces pastorianus
gtttccaagaattctacttccttca

SEQ ID NO: 112833 - DNA, 25 bp, Saccharomyces pastorianus
agatccacagtggtgtcctgagctc

SEQ ID NO: 112834 - DNA, 25 bp, Saccharomyces pastorianus
aaaagtccgtcattgactgctcaaa

SEQ ID NO: 112835 - DNA, 25 bp, Saccharomyces pastorianus
gttacttcaatagtgcgcaatgcag

SEQ ID NO: 112836 - DNA, 25 bp, Saccharomyces pastorianus
gaactttccaaatctcgtgctttac

SEQ ID NO: 112837 - DNA, 25 bp, Saccharomyces pastorianus
agtccggctgctctcaaacaattag

SEQ ID NO: 112838 - DNA, 25 bp, Saccharomyces pastorianus
atactccattttgctaatttcggtg

SEQ ID NO: 112839 - DNA, 25 bp, Saccharomyces pastorianus
tcctgagctcgatcgagtctgactt

SEQ ID NO: 112840 - DNA, 25 bp, Saccharomyces pastorianus
aattggctgtgtttcgtatagtccg

SEQ ID NO: 112841 - DNA, 25 bp, Saccharomyces pastorianus
tccttcaaaaatccacgcaggcttg

SEQ ID NO: 112842 - DNA, 25 bp, Saccharomyces pastorianus
gagctcaggacaccactgtggatct

SEQ ID NO: 112843 - DNA, 25 bp, Saccharomyces pastorianus
ggtttttcattacaaatcattccat

SEQ ID NO: 112844 - DNA, 25 bp, Saccharomyces pastorianus
tgcattgcgcactattgaagtaact

SEQ ID NO: 112845 - DNA, 25 bp, Saccharomyces pastorianus
taaccaacttttcttactcttgctc

SEQ ID NO: 112846 - DNA, 25 bp, Saccharomyces pastorianus
ttgttcccttttcttcaagtcagac

SEQ ID NO: 112847 - DNA, 25 bp, Saccharomyces pastorianus
gaacgaccatcctttatttcaagcc

SEQ ID NO: 112848 - DNA, 25 bp, Saccharomyces pastorianus
aagtcagactcgatcgagctcagga

SEQ ID NO: 112849 - DNA, 25 bp, Saccharomyces pastorianus
tatttcaagcctgcgtggatttttg

SEQ ID NO: 112850 - DNA, 25 bp, Saccharomyces pastorianus
aaaccttgaattctgcattgcgcac

SEQ ID NO: 112851 - DNA, 25 bp, Saccharomyces pastorianus
ggaatcgcaccaaagcactacattt

SEQ ID NO: 112852 - DNA, 25 bp, Saccharomyces pastorianus
gatcttccctctgtttctcaaaaat

SEQ ID NO: 112853 - DNA, 25 bp, Saccharomyces pastorianus
cattgtcgcaacaggttccattgga

SEQ ID NO: 112854 - DNA, 25 bp, Saccharomyces pastorianus
agcctgaatcagctctctgtgttta

SEQ ID NO: 112855 - DNA, 25 bp, Saccharomyces pastorianus
gaagtgtacctatttccagttgttt

SEQ ID NO: 112856 - DNA, 25 bp, Saccharomyces pastorianus
gtgtagtacccgtggaatcatcagc

SEQ ID NO: 112857 - DNA, 25 bp, Saccharomyces pastorianus
gtttgataaccactatcagcccggg

SEQ ID NO: 112858 - DNA, 25 bp, Saccharomyces pastorianus
ggtacttatccatatcattgtcgca

SEQ ID NO: 112859 - DNA, 25 bp, Saccharomyces pastorianus
aattcagatgactttgccaaccaaa

SEQ ID NO: 112860 - DNA, 25 bp, Saccharomyces pastorianus
tgattgtttgctcaacttacggccc

SEQ ID NO: 112861 - DNA, 25 bp, Saccharomyces pastorianus
gatctggaagtctctcgtattaaca

SEQ ID NO: 112862 - DNA, 25 bp, Saccharomyces pastorianus
atttgaattacttgcctcgatacgg

SEQ ID NO: 112863 - DNA, 25 bp, Saccharomyces pastorianus
gggcatcgttatacctgatctggaa

SEQ ID NO: 112864 - DNA, 25 bp, Saccharomyces pastorianus
gtctcttctttcattttgcggcaga

SEQ ID NO: 112865 - DNA, 25 bp, Saccharomyces pastorianus
ttgtgccgcttttaatcttttgttc

SEQ ID NO: 112866 - DNA, 25 bp, Saccharomyces pastorianus
ttctactccacccttaaatcaatta

SEQ ID NO: 112867 - DNA, 25 bp, Saccharomyces pastorianus
ctttcccctccatagtagcagatag

SEQ ID NO: 112868 - DNA, 25 bp, Saccharomyces pastorianus
agcgatcttcggttattcttttggc

SEQ ID NO: 112869 - DNA, 25 bp, Saccharomyces pastorianus
attacaagtaactctcctgtctctt

SEQ ID NO: 112870 - DNA, 25 bp, Saccharomyces pastorianus
gggagtgctttgctacagctatact

SEQ ID NO: 112871 - DNA, 25 bp, Saccharomyces pastorianus
gaagatccttctttaagagcctcca

SEQ ID NO: 112872 - DNA, 25 bp, Saccharomyces pastorianus
atagcatcgcttttggtatttcttg

SEQ ID NO: 112873 - DNA, 25 bp, Saccharomyces pastorianus
atatcccatgacttcagcagcattg

SEQ ID NO: 112874 - DNA, 25 bp, Saccharomyces pastorianus
atggtacaagcccaggtttctactc

SEQ ID NO: 112875 - DNA, 25 bp, Saccharomyces pastorianus
aaagcgcatacagggtttcagaaca

SEQ ID NO: 112876 - DNA, 25 bp, Saccharomyces pastorianus
ggttatggctatatgcagcacctaa

SEQ ID NO: 112877 - DNA, 25 bp, Saccharomyces pastorianus
aaacgtttatgcctttgatctggac

SEQ ID NO: 112878 - DNA, 25 bp, Saccharomyces pastorianus
acgttatcacacaggttatggctat

SEQ ID NO: 112879 - DNA, 25 bp, Saccharomyces pastorianus
cacggccgtcatagtcatattttct

SEQ ID NO: 112880 - DNA, 25 bp, Saccharomyces pastorianus
atccaccctggattacctgtgtaat

SEQ ID NO: 112881 - DNA, 25 bp, Saccharomyces pastorianus
tcattgataatgatcccacggccgt

SEQ ID NO: 112882 - DNA, 25 bp, Saccharomyces pastorianus
ttttaactccaagaaatccaccctg

SEQ ID NO: 112883 - DNA, 25 bp, Saccharomyces pastorianus
tattattgcggtgacgccgctggga

SEQ ID NO: 112884 - DNA, 25 bp, Saccharomyces pastorianus
gaacaaatttctcccatcaagttga

SEQ ID NO: 112885 - DNA, 25 bp, Saccharomyces pastorianus
aaggtggtgtcatcaccgtcccaag

SEQ ID NO: 112886 - DNA, 25 bp, Saccharomyces pastorianus
aaacttgcgaatacgtgtgctcatt

SEQ ID NO: 112887 - DNA, 25 bp, Saccharomyces pastorianus
gaaactatgctctggcgtaactatt

SEQ ID NO: 112888 - DNA, 25 bp, Saccharomyces pastorianus
agataacaaacctgtcctcagcagc

SEQ ID NO: 112889 - DNA, 25 bp, Saccharomyces pastorianus
attcaagaatacacctgccaatgga

SEQ ID NO: 112890 - DNA, 25 bp, Saccharomyces pastorianus
caagggttcttatcgtctttacaga

SEQ ID NO: 112891 - DNA, 25 bp, Saccharomyces pastorianus
gtgtgctcatttacagaactgctcg

SEQ ID NO: 112892 - DNA, 25 bp, Saccharomyces pastorianus
cgatcccatatacgaaattgcagct

SEQ ID NO: 112893 - DNA, 25 bp, Saccharomyces pastorianus
actgattctagttcgagctcataat

SEQ ID NO: 112894 - DNA, 25 bp, Saccharomyces pastorianus
gcagctacagtttgcgtataacctt

SEQ ID NO: 112895 - DNA, 25 bp, Saccharomyces pastorianus
tagagttgccttaacatcgatccca

SEQ ID NO: 112896 - DNA, 25 bp, Saccharomyces pastorianus
aagggatcgactatgggaccagaca

SEQ ID NO: 112897 - DNA, 25 bp, Saccharomyces pastorianus
ttgctccttacttttcagttccttt

SEQ ID NO: 112898 - DNA, 25 bp, Saccharomyces pastorianus
cagttccttttgtagtattgccagt

SEQ ID NO: 112899 - DNA, 25 bp, Saccharomyces pastorianus
tagccatctcgcaactagctgggaa

SEQ ID NO: 112900 - DNA, 25 bp, Saccharomyces pastorianus
gaatgttcttttttcagatccgaga

SEQ ID NO: 112901 - DNA, 25 bp, Saccharomyces pastorianus
tttctctgtcttttttagccatctc

SEQ ID NO: 112902 - DNA, 25 bp, Saccharomyces pastorianus
gtcattcaacctttccgtattctta

SEQ ID NO: 112903 - DNA, 25 bp, Saccharomyces pastorianus
tgcatcatttcgttccatctatttc

SEQ ID NO: 112904 - DNA, 25 bp, Saccharomyces pastorianus
acgcaataacttctttcaatcttcg

SEQ ID NO: 112905 - DNA, 25 bp, Saccharomyces pastorianus
ggttccactaatcaattcgtcattc

SEQ ID NO: 112906 - DNA, 25 bp, Saccharomyces pastorianus
caatcttcgtatttcttgctcctta

SEQ ID NO: 112907 - DNA, 25 bp, Saccharomyces pastorianus
atctatttcgctgttcatggcttct

SEQ ID NO: 112908 - DNA, 25 bp, Saccharomyces pastorianus
tacaacaaaaactctcggatctgaa

SEQ ID NO: 112909 - DNA, 25 bp, Saccharomyces pastorianus
gaggcccatttaaatgagttgtttc

SEQ ID NO: 112910 - DNA, 25 bp, Saccharomyces pastorianus
gtttcaagataatagtggcgccatt

SEQ ID NO: 112911 - DNA, 25 bp, Saccharomyces pastorianus
gatcgaaacgacaaggaggcccatt

SEQ ID NO: 112912 - DNA, 25 bp, Saccharomyces pastorianus
gaacattcccagctagttgcgagat

SEQ ID NO: 112913 - DNA, 25 bp, Saccharomyces pastorianus
gatgctttattgaatacactggcaa

SEQ ID NO: 112914 - DNA, 25 bp, Saccharomyces pastorianus
tgacgaattgattagtggaaccatt

SEQ ID NO: 112915 - DNA, 25 bp, Saccharomyces pastorianus
cgccattggtggcaacattgtcagc

SEQ ID NO: 112916 - DNA, 25 bp, Saccharomyces pastorianus
gaagcaatccacaaacggatagcat

SEQ ID NO: 112917 - DNA, 25 bp, Saccharomyces pastorianus
acattgtcagccatgacgatgcttt

SEQ ID NO: 112918 - DNA, 25 bp, Saccharomyces pastorianus
ggatgatttgttaattcgtagacta

SEQ ID NO: 112919 - DNA, 25 bp, Saccharomyces pastorianus
ttacgtttaaacatcgacctcgaca

SEQ ID NO: 112920 - DNA, 25 bp, Saccharomyces pastorianus
agggacaccgtggaagctttgagaa

SEQ ID NO: 112921 - DNA, 25 bp, Saccharomyces pastorianus
cctcgacactcctacaagcatattg

SEQ ID NO: 112922 - DNA, 25 bp, Saccharomyces pastorianus
atagtaccacgagtacttctggccc

SEQ ID NO: 112923 - DNA, 25 bp, Saccharomyces pastorianus
gttgaggctctccatctcattaaac

SEQ ID NO: 112924 - DNA, 25 bp, Saccharomyces pastorianus
ttaccgcagcgagagataccacatg

SEQ ID NO: 112925 - DNA, 25 bp, Saccharomyces pastorianus
gagataccacatgcgttgaggctct

SEQ ID NO: 112926 - DNA, 25 bp, Saccharomyces pastorianus
gaaagtctcggttcatcatcggaat

SEQ ID NO: 112927 - DNA, 25 bp, Saccharomyces pastorianus
aactgcttcttggatagtaccacga

SEQ ID NO: 112928 - DNA, 25 bp, Saccharomyces pastorianus
cttctggccctgtttttcagaggga

SEQ ID NO: 112929 - DNA, 25 bp, Saccharomyces pastorianus
aacacctacgtgatatcctgagcgt

SEQ ID NO: 112930 - DNA, 25 bp, Saccharomyces pastorianus
tggtggctcaccgttcatgcgtcaa

SEQ ID NO: 112931 - DNA, 25 bp, Saccharomyces pastorianus
gctcgttcttttcatcatctttatt

SEQ ID NO: 112932 - DNA, 25 bp, Saccharomyces pastorianus
ctttttgttcaacgcaggcggcagc

SEQ ID NO: 112933 - DNA, 25 bp, Saccharomyces pastorianus
aaatgccatccagaggtgctgcttc

SEQ ID NO: 112934 - DNA, 25 bp, Saccharomyces pastorianus
aaaagcgcagtatttatgacaggat

SEQ ID NO: 112935 - DNA, 25 bp, Saccharomyces pastorianus
aggtagggatcctgacgatagacaa

SEQ ID NO: 112936 - DNA, 25 bp, Saccharomyces pastorianus
attcggcgcttcaccatttgggcct

SEQ ID NO: 112937 - DNA, 25 bp, Saccharomyces pastorianus
tgctgcttcagggttccgaggaagt

SEQ ID NO: 112938 - DNA, 25 bp, Saccharomyces pastorianus
tgcttccactttttcattcggaggc

SEQ ID NO: 112939 - DNA, 25 bp, Saccharomyces pastorianus
gaccaccagaggacatattcgactt

SEQ ID NO: 112940 - DNA, 25 bp, Saccharomyces pastorianus
ataaaaactctcatccaaaagcggg

SEQ ID NO: 112941 - DNA, 25 bp, Saccharomyces pastorianus
gattctgatatttttgctgagctgg

SEQ ID NO: 112942 - DNA, 25 bp, Saccharomyces pastorianus
tgtgcccttcctattttaaataata

SEQ ID NO: 112943 - DNA, 25 bp, Saccharomyces pastorianus
aagatcccagtactttcacaaggta

SEQ ID NO: 112944 - DNA, 25 bp, Saccharomyces pastorianus
tagcttggtgttggcactgttacct

SEQ ID NO: 112945 - DNA, 25 bp, Saccharomyces pastorianus
ggccaagaactaattcacgtgcaag

SEQ ID NO: 112946 - DNA, 25 bp, Saccharomyces pastorianus
atgatatggccatcagattctgata

SEQ ID NO: 112947 - DNA, 25 bp, Saccharomyces pastorianus
gaggtattacctagtggcaagttaa

SEQ ID NO: 112948 - DNA, 25 bp, Saccharomyces pastorianus
ggcactgttacctatcactttggat

SEQ ID NO: 112949 - DNA, 25 bp, Saccharomyces pastorianus
aactgaagcttccatcgaggaatgt

SEQ ID NO: 112950 - DNA, 25 bp, Saccharomyces pastorianus
ggcaagttaatcaagcgaccatcct

SEQ ID NO: 112951 - DNA, 25 bp, Saccharomyces pastorianus
agacaaagttctttcaaggccaaga

SEQ ID NO: 112952 - DNA, 25 bp, Saccharomyces pastorianus
tttccatctggatatcctcaaaggc

SEQ ID NO: 112953 - DNA, 25 bp, Saccharomyces pastorianus
atgactcttttgaaaacgacaccga

SEQ ID NO: 112954 - DNA, 25 bp, Saccharomyces pastorianus
ggaggagctcattactttctggaaa

SEQ ID NO: 112955 - DNA, 25 bp, Saccharomyces pastorianus
agagacgatgcctttcttgagagca

SEQ ID NO: 112956 - DNA, 25 bp, Saccharomyces pastorianus
tcaaaggcagaaagtcaccccgttc

SEQ ID NO: 112957 - DNA, 25 bp, Saccharomyces pastorianus
ccgttcttcgtcagtacaaggtctt

SEQ ID NO: 112958 - DNA, 25 bp, Saccharomyces pastorianus
atgttctgccggttcacgccaaaat

SEQ ID NO: 112959 - DNA, 25 bp, Saccharomyces pastorianus
aatcaccgcgtagattttatcggaa

SEQ ID NO: 112960 - DNA, 25 bp, Saccharomyces pastorianus
gttgctgaatcggtgaatgactctt

SEQ ID NO: 112961 - DNA, 25 bp, Saccharomyces pastorianus
tcaggcttccatgtccgtaaagttt

SEQ ID NO: 112962 - DNA, 25 bp, Saccharomyces pastorianus
agagcaggcctctcagcaaatgcaa

SEQ ID NO: 112963 - DNA, 25 bp, Saccharomyces pastorianus
aaatggctctttttctatggataca

SEQ ID NO: 112964 - DNA, 25 bp, Saccharomyces pastorianus
tgaggcagactaatccatccggaca

SEQ ID NO: 112965 - DNA, 25 bp, Saccharomyces pastorianus
agctccagcacaactcctaatataa

SEQ ID NO: 112966 - DNA, 25 bp, Saccharomyces pastorianus
aagttgctgccgctcagaaagttat

SEQ ID NO: 112967 - DNA, 25 bp, Saccharomyces pastorianus
atcaaaacgtacttctagctccagc

SEQ ID NO: 112968 - DNA, 25 bp, Saccharomyces pastorianus
gattcagctgctacaaacttcatca

SEQ ID NO: 112969 - DNA, 25 bp, Saccharomyces pastorianus
gtttcttctgcaatgcatgcgttcg

SEQ ID NO: 112970 - DNA, 25 bp, Saccharomyces pastorianus
acaaaatgattctacctccgtcttt

SEQ ID NO: 112971 - DNA, 25 bp, Saccharomyces pastorianus
atccatccggacaaaaccctatgat

SEQ ID NO: 112972 - DNA, 25 bp, Saccharomyces pastorianus
accctatgatcaatatgcagccctt

SEQ ID NO: 112973 - DNA, 25 bp, Saccharomyces pastorianus
caacaacaatttcatctaccacaac

SEQ ID NO: 112974 - DNA, 25 bp, Saccharomyces pastorianus
gtttatgttccatcagaggtcctaa

SEQ ID NO: 112975 - DNA, 25 bp, Saccharomyces pastorianus
gttgcttctgtatcaaatgacccta

SEQ ID NO: 112976 - DNA, 25 bp, Saccharomyces pastorianus
gaagggtttcgctcattattttttg

SEQ ID NO: 112977 - DNA, 25 bp, Saccharomyces pastorianus
tcggacggtctaccaatctgaaggt

SEQ ID NO: 112978 - DNA, 25 bp, Saccharomyces pastorianus
gttggccctagattcctctggacaa

SEQ ID NO: 112979 - DNA, 25 bp, Saccharomyces pastorianus
aactcgatttcgctcagccttcgga

SEQ ID NO: 112980 - DNA, 25 bp, Saccharomyces pastorianus
ggactggcgggaatcattaccacac

SEQ ID NO: 112981 - DNA, 25 bp, Saccharomyces pastorianus
atgaaatattgactggcgcctgtgc

SEQ ID NO: 112982 - DNA, 25 bp, Saccharomyces pastorianus
atcctttctttcaatctggctataa

SEQ ID NO: 112983 - DNA, 25 bp, Saccharomyces pastorianus
taacaaacggcagaccggctgcact

SEQ ID NO: 112984 - DNA, 25 bp, Saccharomyces pastorianus
aaagccactttagccagagatttgc

SEQ ID NO: 112985 - DNA, 25 bp, Saccharomyces pastorianus
aggtgattcgttttaccatcctgtt

SEQ ID NO: 112986 - DNA, 25 bp, Saccharomyces pastorianus
atttttgtggaatcggctgctgtca

SEQ ID NO: 112987 - DNA, 25 bp, Saccharomyces pastorianus
aaggtacagcttctagattcaggtg

SEQ ID NO: 112988 - DNA, 25 bp, Saccharomyces pastorianus
tgaacttactgcaaatctgcccaca

SEQ ID NO: 112989 - DNA, 25 bp, Saccharomyces pastorianus
gataccgcagattcactactaaagg

SEQ ID NO: 112990 - DNA, 25 bp, Saccharomyces pastorianus
ggtgatgcaaaccattacgcgcgtg

SEQ ID NO: 112991 - DNA, 25 bp, Saccharomyces pastorianus
tagtttacttgaccgaaaggctcag

SEQ ID NO: 112992 - DNA, 25 bp, Saccharomyces pastorianus
gtttttcaacagacatccgatggtg

SEQ ID NO: 112993 - DNA, 25 bp, Saccharomyces pastorianus
tctctttcatctccttttaccaaat

SEQ ID NO: 112994 - DNA, 25 bp, Saccharomyces pastorianus
aatctgcccacaatattcggttcaa

SEQ ID NO: 112995 - DNA, 25 bp, Saccharomyces pastorianus
tttctctcataaaaggactcgggtc

SEQ ID NO: 112996 - DNA, 25 bp, Saccharomyces pastorianus
gcgtgatgaaatatttggcccggtt

SEQ ID NO: 112997 - DNA, 25 bp, Saccharomyces pastorianus
agagaatcaggcgacaccggcgttg

SEQ ID NO: 112998 - DNA, 25 bp, Saccharomyces pastorianus
atcttcactgatgtaccagaaacat

SEQ ID NO: 112999 - DNA, 25 bp, Saccharomyces pastorianus
gaagctaaagttccttttggcggat

SEQ ID NO: 113000 - DNA, 25 bp, Saccharomyces pastorianus
acctctgaatttcctgttagcggag

SEQ ID NO: 113001 - DNA, 25 bp, Saccharomyces pastorianus
gcgacaccggcgttgataactattt

SEQ ID NO: 113002 - DNA, 25 bp, Saccharomyces pastorianus
tggatcaatcaaaccaatcaagaag

SEQ ID NO: 113003 - DNA, 25 bp, Saccharomyces pastorianus
tcctgttagcggagctaaaggctac

SEQ ID NO: 113004 - DNA, 25 bp, Saccharomyces pastorianus
ttggcggatttaagatgagcggtat

SEQ ID NO: 113005 - DNA, 25 bp, Saccharomyces pastorianus
gaaacatctaagttgctgcgtgatg

SEQ ID NO: 113006 - DNA, 25 bp, Saccharomyces pastorianus
tcgggacaaatctgcactgcaaact

SEQ ID NO: 113007 - DNA, 25 bp, Saccharomyces pastorianus
ggacagaattgtaccgcaaactcaa

SEQ ID NO: 113008 - DNA, 25 bp, Saccharomyces pastorianus
atcttcactgatgtcccgcaaacat

SEQ ID NO: 113009 - DNA, 25 bp, Saccharomyces pastorianus
acaggatgagatatttggcccggtt

SEQ ID NO: 113010 - DNA, 25 bp, Saccharomyces pastorianus
acctctgaatttcctattggtggag

SEQ ID NO: 113011 - DNA, 25 bp, Saccharomyces pastorianus
gcaaacatcgaaactgttacaggat

SEQ ID NO: 113012 - DNA, 25 bp, Saccharomyces pastorianus
atgtcccgcaaacatcgaaactgtt

SEQ ID NO: 113013 - DNA, 25 bp, Saccharomyces pastorianus
tcaggacagaattgtaccgcaaact

SEQ ID NO: 113014 - DNA, 25 bp, Saccharomyces pastorianus
tcctattggtggagctaaaggctac

SEQ ID NO: 113015 - DNA, 25 bp, Saccharomyces pastorianus
cgatgaagatgttaccgttcctttt

SEQ ID NO: 113016 - DNA, 25 bp, Saccharomyces pastorianus
ctgaatttcctattggtggagctaa

SEQ ID NO: 113017 - DNA, 25 bp, Saccharomyces pastorianus
agaattgtaccgcaaactcaagagt

SEQ ID NO: 113018 - DNA, 25 bp, Saccharomyces pastorianus
ggagctaaaggctacttcattcccc

SEQ ID NO: 113019 - DNA, 25 bp, Saccharomyces pastorianus
gcaggaaaatttgatccgtttgatg

SEQ ID NO: 113020 - DNA, 25 bp, Saccharomyces pastorianus
gagaaatgcatcgttggtccagtta

SEQ ID NO: 113021 - DNA, 25 bp, Saccharomyces pastorianus
tgatgacgctctgaagctggctaat

SEQ ID NO: 113022 - DNA, 25 bp, Saccharomyces pastorianus
gaaagcgcacatgtttgctcgcgat

SEQ ID NO: 113023 - DNA, 25 bp, Saccharomyces pastorianus
ggtccagttatatcaagtacacagt

SEQ ID NO: 113024 - DNA, 25 bp, Saccharomyces pastorianus
ttggcccggttgtggttgttagcaa

SEQ ID NO: 113025 - DNA, 25 bp, Saccharomyces pastorianus
aagtacacagtatgatcgcatcaaa

SEQ ID NO: 113026 - DNA, 25 bp, Saccharomyces pastorianus
gttggacatgttccagacctctgaa

SEQ ID NO: 113027 - DNA, 25 bp, Saccharomyces pastorianus
ttatgttcaaagttcgatctacgac

SEQ ID NO: 113028 - DNA, 25 bp, Saccharomyces pastorianus
taatgatacttgctacgggctcgcc

SEQ ID NO: 113029 - DNA, 25 bp, Saccharomyces pastorianus
gaatttcggcacttatggctttgtt

SEQ ID NO: 113030 - DNA, 25 bp, Saccharomyces pastorianus
tatgctaccaccaagttactcggac

SEQ ID NO: 113031 - DNA, 25 bp, Saccharomyces pastorianus
gagagatcccgaacaattttcagaa

SEQ ID NO: 113032 - DNA, 25 bp, Saccharomyces pastorianus
gaaatattaccgacaccacctggat

SEQ ID NO: 113033 - DNA, 25 bp, Saccharomyces pastorianus
ttggtggtcatatccgcggctggaa

SEQ ID NO: 113034 - DNA, 25 bp, Saccharomyces pastorianus
gaaattccaatacctatacccgatc

SEQ ID NO: 113035 - DNA, 25 bp, Saccharomyces pastorianus
gatttgaattcactatgtcccctcc

SEQ ID NO: 113036 - DNA, 25 bp, Saccharomyces pastorianus
aatattgcggctggtagtactacaa

SEQ ID NO: 113037 - DNA, 25 bp, Saccharomyces pastorianus
gatcattggctccaacgtaccttgt

SEQ ID NO: 113038 - DNA, 25 bp, Saccharomyces pastorianus
tgtcccctcccactggaaagaagat

SEQ ID NO: 113039 - DNA, 25 bp, Saccharomyces pastorianus
tctagattccttacctatgctacca

SEQ ID NO: 113040 - DNA, 25 bp, Saccharomyces pastorianus
cgactcttacggttcctctaataga

SEQ ID NO: 113041 - DNA, 25 bp, Saccharomyces pastorianus
aacaatgacttttacggctccagca

SEQ ID NO: 113042 - DNA, 25 bp, Saccharomyces pastorianus
tacggttccaacaaagacgactctt

SEQ ID NO: 113043 - DNA, 25 bp, Saccharomyces pastorianus
tacggttccaacaatgacgactctt

SEQ ID NO: 113044 - DNA, 25 bp, Saccharomyces pastorianus
tatgggtcttccaactacggttcat

SEQ ID NO: 113045 - DNA, 25 bp, Saccharomyces pastorianus
cgatgattcttacggatcttccaat

SEQ ID NO: 113046 - DNA, 25 bp, Saccharomyces pastorianus
aacgatgattcctacggttcttcca

SEQ ID NO: 113047 - DNA, 25 bp, Saccharomyces pastorianus
aacaacaatgactcttacggctcca

SEQ ID NO: 113048 - DNA, 25 bp, Saccharomyces pastorianus
atggttccagcaacaacgattcgta

SEQ ID NO: 113049 - DNA, 25 bp, Saccharomyces pastorianus
acgatgattcatacggctccagcaa

SEQ ID NO: 113050 - DNA, 25 bp, Saccharomyces pastorianus
agaagagctcttatggttccaacaa

SEQ ID NO: 113051 - DNA, 25 bp, Saccharomyces pastorianus
acggcaagactaccgatgctgatga

SEQ ID NO: 113052 - DNA, 25 bp, Saccharomyces pastorianus
ggacggcaagactaccgatgctgat

SEQ ID NO: 113053 - DNA, 25 bp, Saccharomyces pastorianus
caagactaccgatgctgatgaaagt

SEQ ID NO: 113054 - DNA, 25 bp, Saccharomyces pastorianus
ggtagtgagtgacgcttttaagaaa

SEQ ID NO: 113055 - DNA, 25 bp, Saccharomyces pastorianus
caactatcaagagcaatacaacaag

SEQ ID NO: 113056 - DNA, 25 bp, Saccharomyces pastorianus
aattgcagggcgatgcaaaggtagt

SEQ ID NO: 113057 - DNA, 25 bp, Saccharomyces pastorianus
cgcttttaagaaaatggctagtcaa

SEQ ID NO: 113058 - DNA, 25 bp, Saccharomyces pastorianus
cgatgcaaaggtagtgagtgacgct

SEQ ID NO: 113059 - DNA, 25 bp, Saccharomyces pastorianus
gaaaaacacaactatcaagagcaat

SEQ ID NO: 113060 - DNA, 25 bp, Saccharomyces pastorianus
ctaccgatgctgatgaaagtgaaaa

SEQ ID NO: 113061 - DNA, 25 bp, Saccharomyces pastorianus
tggctagtcaagacaaggacggcaa

SEQ ID NO: 113062 - DNA, 25 bp, Saccharomyces pastorianus
gaagatgggccatgatcaatctgga

SEQ ID NO: 113063 - DNA, 25 bp, Saccharomyces pastorianus
taagttcgctgaaaaattacaaggt

SEQ ID NO: 113064 - DNA, 25 bp, Saccharomyces pastorianus
gaacgccaaatcctccaacaaggaa

SEQ ID NO: 113065 - DNA, 25 bp, Saccharomyces pastorianus
gaacatggacatgggtatgggtcat

SEQ ID NO: 113066 - DNA, 25 bp, Saccharomyces pastorianus
gaacgctggcagaggaattgcgaac

SEQ ID NO: 113067 - DNA, 25 bp, Saccharomyces pastorianus
ttacaaggtaacgatgattcccatc

SEQ ID NO: 113068 - DNA, 25 bp, Saccharomyces pastorianus
gaaagaacgccaaatcctccaacaa

SEQ ID NO: 113069 - DNA, 25 bp, Saccharomyces pastorianus
gggtatgggtcatgatcagtccgaa

SEQ ID NO: 113070 - DNA, 25 bp, Saccharomyces pastorianus
tggaacaaagatgaacgctggcaga

SEQ ID NO: 113071 - DNA, 25 bp, Saccharomyces pastorianus
tatgggtcatgatcagtccgaaggg

SEQ ID NO: 113072 - DNA, 25 bp, Saccharomyces pastorianus
tgggccatgatcaatctggaacaaa

SEQ ID NO: 113073 - DNA, 25 bp, Saccharomyces pastorianus
aagggtcacaatgcggctttactaa

SEQ ID NO: 113074 - DNA, 25 bp, Saccharomyces pastorianus
gaaagtagttctaagcgccaaacga

SEQ ID NO: 113075 - DNA, 25 bp, Saccharomyces pastorianus
gagtgggttccacctgatgatccaa

SEQ ID NO: 113076 - DNA, 25 bp, Saccharomyces pastorianus
gctttactaatctgacggatccctt

SEQ ID NO: 113077 - DNA, 25 bp, Saccharomyces pastorianus
gagatactgccgtcgatttttagat

SEQ ID NO: 113078 - DNA, 25 bp, Saccharomyces pastorianus
gtaaatcaattgtcctctacgcaca

SEQ ID NO: 113079 - DNA, 25 bp, Saccharomyces pastorianus
gtgacttttgagcttgacgacttga

SEQ ID NO: 113080 - DNA, 25 bp, Saccharomyces pastorianus
ccctgtatggccgttgacaatatcg

SEQ ID NO: 113081 - DNA, 25 bp, Saccharomyces pastorianus
aaacgttttatttgtctgctcgata

SEQ ID NO: 113082 - DNA, 25 bp, Saccharomyces pastorianus
tcgatatgtacaccaccctgtatgg

SEQ ID NO: 113083 - DNA, 25 bp, Saccharomyces pastorianus
gacgtttttgcgtttgctttgaact

SEQ ID NO: 113084 - DNA, 25 bp, Saccharomyces pastorianus
cacgattggtggtttaattgtttct

SEQ ID NO: 113085 - DNA, 25 bp, Saccharomyces pastorianus
agaactgacgttactgtcctcagga

SEQ ID NO: 113086 - DNA, 25 bp, Saccharomyces pastorianus
atttacgtaatgtgctaaccaatga

SEQ ID NO: 113087 - DNA, 25 bp, Saccharomyces pastorianus
cagtcagtttctcgtgatgatccac

SEQ ID NO: 113088 - DNA, 25 bp, Saccharomyces pastorianus
gatgatccacgctacctagagatag

SEQ ID NO: 113089 - DNA, 25 bp, Saccharomyces pastorianus
ggcgagggtatgtgcatcgcaataa

SEQ ID NO: 113090 - DNA, 25 bp, Saccharomyces pastorianus
gtcctcaggaccgaatttacgcgga

SEQ ID NO: 113091 - DNA, 25 bp, Saccharomyces pastorianus
gctctggttgcaatcagtactggtt

SEQ ID NO: 113092 - DNA, 25 bp, Saccharomyces pastorianus
tacgcggacatttaaccttggaagt

SEQ ID NO: 113093 - DNA, 25 bp, Saccharomyces pastorianus
taattctcagaaaccctatggattg

SEQ ID NO: 113094 - DNA, 25 bp, Saccharomyces pastorianus
ggagttaatcgatcagtcagtttct

SEQ ID NO: 113095 - DNA, 25 bp, Saccharomyces pastorianus
ggtatccctcaactatttgcaagga

SEQ ID NO: 113096 - DNA, 25 bp, Saccharomyces pastorianus
atcagtacaggtggaatcggcccca

SEQ ID NO: 113097 - DNA, 25 bp, Saccharomyces pastorianus
atgtatatactacccggtatccctc

SEQ ID NO: 113098 - DNA, 25 bp, Saccharomyces pastorianus
gaacacacctaactgagtctcaaat

SEQ ID NO: 113099 - DNA, 25 bp, Saccharomyces pastorianus
gcaaggcttgatgcagatgctctaa

SEQ ID NO: 113100 - DNA, 25 bp, Saccharomyces pastorianus
aggatgctgaaagcgttcactccca

SEQ ID NO: 113101 - DNA, 25 bp, Saccharomyces pastorianus
gtgtgatgacttgtgggtacctatt

SEQ ID NO: 113102 - DNA, 25 bp, Saccharomyces pastorianus
ggcataaatctgaccctgaagcaag

SEQ ID NO: 113103 - DNA, 25 bp, Saccharomyces pastorianus
ggcgcattaccaaatggcaaccatg

SEQ ID NO: 113104 - DNA, 25 bp, Saccharomyces pastorianus
ggtacctatttgttctatatctcac

SEQ ID NO: 113105 - DNA, 25 bp, Saccharomyces pastorianus
aaataggctcatacccacattttgg

SEQ ID NO: 113106 - DNA, 25 bp, Saccharomyces pastorianus
aataccgtcttcaccatgtgggatg

SEQ ID NO: 113107 - DNA, 25 bp, Saccharomyces pastorianus
tttattctcaacattcgtccattcc

SEQ ID NO: 113108 - DNA, 25 bp, Saccharomyces pastorianus
gggcttataaatttctctactccag

SEQ ID NO: 113109 - DNA, 25 bp, Saccharomyces pastorianus
gaacttacacattcaagctcgacaa

SEQ ID NO: 113110 - DNA, 25 bp, Saccharomyces pastorianus
atacaaaacctcaggcagggcttat

SEQ ID NO: 113111 - DNA, 25 bp, Saccharomyces pastorianus
gctgaccagccagcttctgataata

SEQ ID NO: 113112 - DNA, 25 bp, Saccharomyces pastorianus
atatctttgcctagcgatgttgaca

SEQ ID NO: 113113 - DNA, 25 bp, Saccharomyces pastorianus
gatagtaataatgccaccccatgtg

SEQ ID NO: 113114 - DNA, 25 bp, Saccharomyces pastorianus
tgttgacaaaacctccccaatagac

SEQ ID NO: 113115 - DNA, 25 bp, Saccharomyces pastorianus
gcaaggacacaatatcggcgatgat

SEQ ID NO: 113116 - DNA, 25 bp, Saccharomyces pastorianus
gactcgttgtctatacctttaattg

SEQ ID NO: 113117 - DNA, 25 bp, Saccharomyces pastorianus
gaatccaagtaaatgtgccccaaga

SEQ ID NO: 113118 - DNA, 25 bp, Saccharomyces pastorianus
gaaggaactcccatcaatacacgtc

SEQ ID NO: 113119 - DNA, 25 bp, Saccharomyces pastorianus
cgttccacctacacctttaatgata

SEQ ID NO: 113120 - DNA, 25 bp, Saccharomyces pastorianus
tttctcattcgctatcctcaaagtt

SEQ ID NO: 113121 - DNA, 25 bp, Saccharomyces pastorianus
atatgtgctcgtttttgaatgccag

SEQ ID NO: 113122 - DNA, 25 bp, Saccharomyces pastorianus
aaggtcactaccacgcgaaggaact

SEQ ID NO: 113123 - DNA, 25 bp, Saccharomyces pastorianus
gagcaaatgttctcgagtttccagg

SEQ ID NO: 113124 - DNA, 25 bp, Saccharomyces pastorianus
gaatgccagcgaccttatacgtgag

SEQ ID NO: 113125 - DNA, 25 bp, Saccharomyces pastorianus
aaacttctgccgctttcaggaatgg

SEQ ID NO: 113126 - DNA, 25 bp, Saccharomyces pastorianus
gtgtctaacgttcctgagcaaatgt

SEQ ID NO: 113127 - DNA, 25 bp, Saccharomyces pastorianus
agaaatggccgcttagtgtctaacg

SEQ ID NO: 113128 - DNA, 25 bp, Saccharomyces pastorianus
ggaacaagcactattgacccagtta

SEQ ID NO: 113129 - DNA, 25 bp, Saccharomyces pastorianus
tgccaacaacagtagggtgagttct

SEQ ID NO: 113130 - DNA, 25 bp, Saccharomyces pastorianus
attgtccaagaagtttgctcacccc

SEQ ID NO: 113131 - DNA, 25 bp, Saccharomyces pastorianus
aataactcgggcattttcagctata

SEQ ID NO: 113132 - DNA, 25 bp, Saccharomyces pastorianus
aacgtattcctccactcctaaagag

SEQ ID NO: 113133 - DNA, 25 bp, Saccharomyces pastorianus
ttgacccagttacaaatctcccaaa

SEQ ID NO: 113134 - DNA, 25 bp, Saccharomyces pastorianus
aagcctctaccttacggaaagcatc

SEQ ID NO: 113135 - DNA, 25 bp, Saccharomyces pastorianus
agccctcagtcattctattcttctc

SEQ ID NO: 113136 - DNA, 25 bp, Saccharomyces pastorianus
agttaagttcaatccctacacttcg

SEQ ID NO: 113137 - DNA, 25 bp, Saccharomyces pastorianus
actccacttttgcaggcggaagcaa

SEQ ID NO: 113138 - DNA, 25 bp, Saccharomyces pastorianus
gtttgctcaccccagaagaacaagt

SEQ ID NO: 113139 - DNA, 25 bp, Saccharomyces pastorianus
tagagctccctccagatagcagtga

SEQ ID NO: 113140 - DNA, 25 bp, Saccharomyces pastorianus
aaatagcactgcgaacgaccctaac

SEQ ID NO: 113141 - DNA, 25 bp, Saccharomyces pastorianus
atatggaattgttgtccagcccgcg

SEQ ID NO: 113142 - DNA, 25 bp, Saccharomyces pastorianus
tgttccatacaatctgcccatatca

SEQ ID NO: 113143 - DNA, 25 bp, Saccharomyces pastorianus
cagcatcgccgtctaaggtgcaaag

SEQ ID NO: 113144 - DNA, 25 bp, Saccharomyces pastorianus
gatagcagtgacactccagcatcgc

SEQ ID NO: 113145 - DNA, 25 bp, Saccharomyces pastorianus
gactgcagcagtccgcaaatagcac

SEQ ID NO: 113146 - DNA, 25 bp, Saccharomyces pastorianus
gctatatgcaaccactcttcctgaa

SEQ ID NO: 113147 - DNA, 25 bp, Saccharomyces pastorianus
atcttctgttcactcggacgttgat

SEQ ID NO: 113148 - DNA, 25 bp, Saccharomyces pastorianus
aaacactatatctctttacgcacca

SEQ ID NO: 113149 - DNA, 25 bp, Saccharomyces pastorianus
agaatgttcccgcaattacgcccat

SEQ ID NO: 113150 - DNA, 25 bp, Saccharomyces pastorianus
gtgacatgatatttcttcccctcgt

SEQ ID NO: 113151 - DNA, 25 bp, Saccharomyces pastorianus
atgtgacatgatatttcttcccctc

SEQ ID NO: 113152 - DNA, 25 bp, Saccharomyces pastorianus
gcatgtgacatgatatttcttcccc

SEQ ID NO: 113153 - DNA, 25 bp, Saccharomyces pastorianus
gtgcgtttcatgcatgtgacatgat

SEQ ID NO: 113154 - DNA, 25 bp, Saccharomyces pastorianus
aaccgagtgcgtttcatgcatgtga

SEQ ID NO: 113155 - DNA, 25 bp, Saccharomyces pastorianus
tgacatgatatttcttcccctcgtt

SEQ ID NO: 113156 - DNA, 25 bp, Saccharomyces pastorianus
tgtgacatgatatttcttcccctcg

SEQ ID NO: 113157 - DNA, 25 bp, Saccharomyces pastorianus
cgagtgcgtttcatgcatgtgacat

SEQ ID NO: 113158 - DNA, 25 bp, Saccharomyces pastorianus
gagaaaaccgagtgcgtttcatgca

SEQ ID NO: 113159 - DNA, 25 bp, Saccharomyces pastorianus
accgagtgcgtttcatgcatgtgac

SEQ ID NO: 113160 - DNA, 25 bp, Saccharomyces pastorianus
aaaaccgagtgcgtttcatgcatgt

SEQ ID NO: 113161 - DNA, 25 bp, Saccharomyces pastorianus
atgtgctagcggcagacttgccaca

SEQ ID NO: 113162 - DNA, 25 bp, Saccharomyces pastorianus
gtgcctggttataacgactgtccga

SEQ ID NO: 113163 - DNA, 25 bp, Saccharomyces pastorianus
gaagaggccatctgtaactgctgct

SEQ ID NO: 113164 - DNA, 25 bp, Saccharomyces pastorianus
aatctgcctgtgaaggtgtgctcgt

SEQ ID NO: 113165 - DNA, 25 bp, Saccharomyces pastorianus
tacgccgccaccagttttgaagagg

SEQ ID NO: 113166 - DNA, 25 bp, Saccharomyces pastorianus
gtgactaagatcaacgacctctgtg

SEQ ID NO: 113167 - DNA, 25 bp, Saccharomyces pastorianus
gaccaaggcgatagacagctccagc

SEQ ID NO: 113168 - DNA, 25 bp, Saccharomyces pastorianus
cagctccagccgatattatgcagta

SEQ ID NO: 113169 - DNA, 25 bp, Saccharomyces pastorianus
actgtccgacagttttgttttctat

SEQ ID NO: 113170 - DNA, 25 bp, Saccharomyces pastorianus
ctgctgctcaacaagaatctgcctg

SEQ ID NO: 113171 - DNA, 25 bp, Saccharomyces pastorianus
gacctctgtgtgtgtggctcgaagc

SEQ ID NO: 113172 - DNA, 25 bp, Saccharomyces pastorianus
tattaagcattcctttaacctcctc

SEQ ID NO: 113173 - DNA, 25 bp, Saccharomyces pastorianus
gaattgctccccttcggaatttaga

SEQ ID NO: 113174 - DNA, 25 bp, Saccharomyces pastorianus
ggtactgctgctataggctggtcaa

SEQ ID NO: 113175 - DNA, 25 bp, Saccharomyces pastorianus
gtactctaacttggctacattttgc

SEQ ID NO: 113176 - DNA, 25 bp, Saccharomyces pastorianus
aaattgaatggacgccgaattgctc

SEQ ID NO: 113177 - DNA, 25 bp, Saccharomyces pastorianus
caacatttctaacgtcagtgctaat

SEQ ID NO: 113178 - DNA, 25 bp, Saccharomyces pastorianus
actctagtaatagcgttccagctga

SEQ ID NO: 113179 - DNA, 25 bp, Saccharomyces pastorianus
ggaggtcttctattggatgcttttc

SEQ ID NO: 113180 - DNA, 25 bp, Saccharomyces pastorianus
gtcaagtctgaagctctatgccagt

SEQ ID NO: 113181 - DNA, 25 bp, Saccharomyces pastorianus
ctctttaagtgggtgtatctcagta

SEQ ID NO: 113182 - DNA, 25 bp, Saccharomyces pastorianus
cctttaacctcctcgatcataatat

SEQ ID NO: 113183 - DNA, 25 bp, Saccharomyces pastorianus
aaggtacggcattcaagatttttca

SEQ ID NO: 113184 - DNA, 25 bp, Saccharomyces pastorianus
gaaacagtgaggcaacttttacagt

SEQ ID NO: 113185 - DNA, 25 bp, Saccharomyces pastorianus
aaacgcgattatccgaattgttgtc

SEQ ID NO: 113186 - DNA, 25 bp, Saccharomyces pastorianus
ttttacgtgatattaggaccatcca

SEQ ID NO: 113187 - DNA, 25 bp, Saccharomyces pastorianus
gtctcattgatcgtattcaaacgcg

SEQ ID NO: 113188 - DNA, 25 bp, Saccharomyces pastorianus
ggtgttgaggatcctttgaccttga

SEQ ID NO: 113189 - DNA, 25 bp, Saccharomyces pastorianus
ggaccatccaagatgctttatctag

SEQ ID NO: 113190 - DNA, 25 bp, Saccharomyces pastorianus
tcagaagctcagttaagcgttgcaa

SEQ ID NO: 113191 - DNA, 25 bp, Saccharomyces pastorianus
gaggaagttttttgccattgcagaa

SEQ ID NO: 113192 - DNA, 25 bp, Saccharomyces pastorianus
tttatctagcgggtcaacgccgaaa

SEQ ID NO: 113193 - DNA, 25 bp, Saccharomyces pastorianus
cgacgaggccgctttcaaagaggaa

SEQ ID NO: 113194 - DNA, 25 bp, Saccharomyces pastorianus
gagcgctttttcacctattttatca

SEQ ID NO: 113195 - DNA, 25 bp, Saccharomyces pastorianus
ttctccgtacctttgtcatttttag

SEQ ID NO: 113196 - DNA, 25 bp, Saccharomyces pastorianus
ggtcttttgttaatgagccctcgtt

SEQ ID NO: 113197 - DNA, 25 bp, Saccharomyces pastorianus
agaatgcgtctaatgttacctctaa

SEQ ID NO: 113198 - DNA, 25 bp, Saccharomyces pastorianus
acgtctcccgatatcagtctagaag

SEQ ID NO: 113199 - DNA, 25 bp, Saccharomyces pastorianus
aacagaatcacgtccaaccagttgc

SEQ ID NO: 113200 - DNA, 25 bp, Saccharomyces pastorianus
gttaatgggacattctccgtacctt

SEQ ID NO: 113201 - DNA, 25 bp, Saccharomyces pastorianus
gttatttacgcagatacgtctcccg

SEQ ID NO: 113202 - DNA, 25 bp, Saccharomyces pastorianus
tttttagatccttctttgttagcgg

SEQ ID NO: 113203 - DNA, 25 bp, Saccharomyces pastorianus
aggtctgaatattgctacgggtgtt

SEQ ID NO: 113204 - DNA, 25 bp, Saccharomyces pastorianus
ggatcattgccgataacttttcatc

SEQ ID NO: 113205 - DNA, 25 bp, Saccharomyces pastorianus
aggtgtatatgtgcccaatgattta

SEQ ID NO: 113206 - DNA, 25 bp, Saccharomyces pastorianus
ggtgacactcttctctcaaatgaat

SEQ ID NO: 113207 - DNA, 25 bp, Saccharomyces pastorianus
atcggcttaatatcgagtctgtatt

SEQ ID NO: 113208 - DNA, 25 bp, Saccharomyces pastorianus
aattgcaggataggatttcagaact

SEQ ID NO: 113209 - DNA, 25 bp, Saccharomyces pastorianus
gaggaaattcacagattggacaatg

SEQ ID NO: 113210 - DNA, 25 bp, Saccharomyces pastorianus
aatggtacgttattcgaatattcta

SEQ ID NO: 113211 - DNA, 25 bp, Saccharomyces pastorianus
ggataaattactacaagactctatg

SEQ ID NO: 113212 - DNA, 25 bp, Saccharomyces pastorianus
gcatgtgacaattgcgaacgagtta

SEQ ID NO: 113213 - DNA, 25 bp, Saccharomyces pastorianus
aatgatggtacacgcggtgacactc

SEQ ID NO: 113214 - DNA, 25 bp, Saccharomyces pastorianus
gatgaaagtagcaataaccccaaag

SEQ ID NO: 113215 - DNA, 25 bp, Saccharomyces pastorianus
gaaaacgactacacatctttaaata

SEQ ID NO: 113216 - DNA, 25 bp, Saccharomyces pastorianus
agtatcaaaatgaccgctaaagttt

SEQ ID NO: 113217 - DNA, 25 bp, Saccharomyces pastorianus
ggccgaccggatggaagcttcgtta

SEQ ID NO: 113218 - DNA, 25 bp, Saccharomyces pastorianus
gagttatttgccgacgttccagtca

SEQ ID NO: 113219 - DNA, 25 bp, Saccharomyces pastorianus
tctctggagtgagactctgaacaga

SEQ ID NO: 113220 - DNA, 25 bp, Saccharomyces pastorianus
cagtagggaaggacctgaaccacaa

SEQ ID NO: 113221 - DNA, 25 bp, Saccharomyces pastorianus
gtggatctttcgttcagtttggtaa

SEQ ID NO: 113222 - DNA, 25 bp, Saccharomyces pastorianus
gacgttccagtcaaggatatcctag

SEQ ID NO: 113223 - DNA, 25 bp, Saccharomyces pastorianus
ggatgcacctatcatagaaatggct

SEQ ID NO: 113224 - DNA, 25 bp, Saccharomyces pastorianus
tgttgtcaaaaaaggtctctggagt

SEQ ID NO: 113225 - DNA, 25 bp, Saccharomyces pastorianus
aagtggttgccaaatgttgtcaaaa

SEQ ID NO: 113226 - DNA, 25 bp, Saccharomyces pastorianus
tgaaatagtaaacggctcaccaaga

SEQ ID NO: 113227 - DNA, 25 bp, Saccharomyces pastorianus
tggcgacttttgcacgtgaacgacg

SEQ ID NO: 113228 - DNA, 25 bp, Saccharomyces pastorianus
tgttgcccgtcgctaatatttggcg

SEQ ID NO: 113229 - DNA, 25 bp, Saccharomyces pastorianus
acgtcatccgttagcgagactttta

SEQ ID NO: 113230 - DNA, 25 bp, Saccharomyces pastorianus
gagagacagaatattactgttcttt

SEQ ID NO: 113231 - DNA, 25 bp, Saccharomyces pastorianus
atatttggcgacttttgcacgtgaa

SEQ ID NO: 113232 - DNA, 25 bp, Saccharomyces pastorianus
taaatttcgcaaggagcgggcgtgc

SEQ ID NO: 113233 - DNA, 25 bp, Saccharomyces pastorianus
ttttgcacgtgaacgacgtccccac

SEQ ID NO: 113234 - DNA, 25 bp, Saccharomyces pastorianus
acggatattacttttcacccatggg

SEQ ID NO: 113235 - DNA, 25 bp, Saccharomyces pastorianus
gacgtccccacaataaatttcgcaa

SEQ ID NO: 113236 - DNA, 25 bp, Saccharomyces pastorianus
gcgtgcgttgttaacgtcatccgtt

SEQ ID NO: 113237 - DNA, 25 bp, Saccharomyces pastorianus
agcgggcgtgcgttgttaacgtcat

SEQ ID NO: 113238 - DNA, 25 bp, Saccharomyces pastorianus
ttgaccgatctttatgccaatgccg

SEQ ID NO: 113239 - DNA, 25 bp, Saccharomyces pastorianus
tcaatttaccgagcatgtgtcactt

SEQ ID NO: 113240 - DNA, 25 bp, Saccharomyces pastorianus
aaactatgccactcctttagacgat

SEQ ID NO: 113241 - DNA, 25 bp, Saccharomyces pastorianus
gaatggtcctttcgtggtaccgaga

SEQ ID NO: 113242 - DNA, 25 bp, Saccharomyces pastorianus
gccaaaactacccagtcgtgtgata

SEQ ID NO: 113243 - DNA, 25 bp, Saccharomyces pastorianus
tgaacacaagttctgcctcggacga

SEQ ID NO: 113244 - DNA, 25 bp, Saccharomyces pastorianus
gtttcccttatcttttgccaattat

SEQ ID NO: 113245 - DNA, 25 bp, Saccharomyces pastorianus
gagcattattcactcaatacttcgg

SEQ ID NO: 113246 - DNA, 25 bp, Saccharomyces pastorianus
gactgtgttctcgttagataaccct

SEQ ID NO: 113247 - DNA, 25 bp, Saccharomyces pastorianus
atgtccaggattgtcgcatgaccgt

SEQ ID NO: 113248 - DNA, 25 bp, Saccharomyces pastorianus
tagacgatgaggtgtttcccttatc

SEQ ID NO: 113249 - DNA, 25 bp, Saccharomyces pastorianus
gggttgacaccacaaagcagcaatt

SEQ ID NO: 113250 - DNA, 25 bp, Saccharomyces pastorianus
tgtgtaagactacctcgtacgccaa

SEQ ID NO: 113251 - DNA, 25 bp, Saccharomyces pastorianus
tggcaacgaccgcttcaacagagag

SEQ ID NO: 113252 - DNA, 25 bp, Saccharomyces pastorianus
aagagggcttggtgcttcacaccaa

SEQ ID NO: 113253 - DNA, 25 bp, Saccharomyces pastorianus
gatcactctaagtttctgtcttctg

SEQ ID NO: 113254 - DNA, 25 bp, Saccharomyces pastorianus
ggagcgcgccattcattatggtgat

SEQ ID NO: 113255 - DNA, 25 bp, Saccharomyces pastorianus
aagatcatctgtggcaacgaccgct

SEQ ID NO: 113256 - DNA, 25 bp, Saccharomyces pastorianus
ggtacctgaagatcgtcacaacttt

SEQ ID NO: 113257 - DNA, 25 bp, Saccharomyces pastorianus
gtattcacgaaactgtggtacctga

SEQ ID NO: 113258 - DNA, 25 bp, Saccharomyces pastorianus
agagctctgagcaaggtcccaaaat

SEQ ID NO: 113259 - DNA, 25 bp, Saccharomyces pastorianus
tgaggctatagacccaatggacccg

SEQ ID NO: 113260 - DNA, 25 bp, Saccharomyces pastorianus
gactttttggagatcttaacgcatc

SEQ ID NO: 113261 - DNA, 25 bp, Saccharomyces pastorianus
agctatgccattatcgcagtcctta

SEQ ID NO: 113262 - DNA, 25 bp, Saccharomyces pastorianus
agacagaccttgtttcaagcggatt

SEQ ID NO: 113263 - DNA, 25 bp, Saccharomyces pastorianus
cataggcgatgcctcagaacgtgct

SEQ ID NO: 113264 - DNA, 25 bp, Saccharomyces pastorianus
ccaaagcgagcttagcagaggcccc

SEQ ID NO: 113265 - DNA, 25 bp, Saccharomyces pastorianus
ctcaggcgatcgtgatagacttttt

SEQ ID NO: 113266 - DNA, 25 bp, Saccharomyces pastorianus
aacgtgctacgtacaaggcgaagtt

SEQ ID NO: 113267 - DNA, 25 bp, Saccharomyces pastorianus
atatcaaacgaccactgcaatcctt

SEQ ID NO: 113268 - DNA, 25 bp, Saccharomyces pastorianus
gagcaaccatgcaatcttacagaaa

SEQ ID NO: 113269 - DNA, 25 bp, Saccharomyces pastorianus
gcaatccttagtagactcaggcgat

SEQ ID NO: 113270 - DNA, 25 bp, Saccharomyces pastorianus
agatgagttgtttgacctgctagat

SEQ ID NO: 113271 - DNA, 25 bp, Saccharomyces pastorianus
gagagcttgatgatgctccctcagt

SEQ ID NO: 113272 - DNA, 25 bp, Saccharomyces pastorianus
agcaacccacagcaccaatgaaaaa

SEQ ID NO: 113273 - DNA, 25 bp, Saccharomyces pastorianus
aacgaatgcattccgttcctggaaa

SEQ ID NO: 113274 - DNA, 25 bp, Saccharomyces pastorianus
aactatgtggatcggtgcatttgcg

SEQ ID NO: 113275 - DNA, 25 bp, Saccharomyces pastorianus
atcggtagtatgtccacggtacagc

SEQ ID NO: 113276 - DNA, 25 bp, Saccharomyces pastorianus
gtcctttcgcatattctcactaaaa

SEQ ID NO: 113277 - DNA, 25 bp, Saccharomyces pastorianus
gacaaatgcctgatgaattccatat

SEQ ID NO: 113278 - DNA, 25 bp, Saccharomyces pastorianus
cagcattatagtggtttcgcagcaa

SEQ ID NO: 113279 - DNA, 25 bp, Saccharomyces pastorianus
aggctctagccttagcgggaaagct

SEQ ID NO: 113280 - DNA, 25 bp, Saccharomyces pastorianus
acattttgcatcttgacggaagtat

SEQ ID NO: 113281 - DNA, 25 bp, Saccharomyces pastorianus
aaagcagtgctttgtcttcaagatt

SEQ ID NO: 113282 - DNA, 25 bp, Saccharomyces pastorianus
aaatgcctcttcatcatcagtttct

SEQ ID NO: 113283 - DNA, 25 bp, Saccharomyces pastorianus
actgcaactggcctctacaatagac

SEQ ID NO: 113284 - DNA, 25 bp, Saccharomyces pastorianus
gaaagtgcttgtgacagtgccataa

SEQ ID NO: 113285 - DNA, 25 bp, Saccharomyces pastorianus
aagcgtaagcagtctacctaatcaa

SEQ ID NO: 113286 - DNA, 25 bp, Saccharomyces pastorianus
atcaatggcatagtcaattctcccc

SEQ ID NO: 113287 - DNA, 25 bp, Saccharomyces pastorianus
acccctcacatgtacacttttaatc

SEQ ID NO: 113288 - DNA, 25 bp, Saccharomyces pastorianus
gaatagaattcccaactcatcatcc

SEQ ID NO: 113289 - DNA, 25 bp, Saccharomyces pastorianus
tttcagtactaccaacatcgaccat

SEQ ID NO: 113290 - DNA, 25 bp, Saccharomyces pastorianus
aagcacatattcttcgggaaccaat

SEQ ID NO: 113291 - DNA, 25 bp, Saccharomyces pastorianus
tagagcgtcttcgatatcgctatcg

SEQ ID NO: 113292 - DNA, 25 bp, Saccharomyces pastorianus
atcagtttcttctccaagcacatat

SEQ ID NO: 113293 - DNA, 25 bp, Saccharomyces pastorianus
accatggtatttacaccttgcaatt

SEQ ID NO: 113294 - DNA, 25 bp, Saccharomyces pastorianus
gtagacaactattcagcgacccatg

SEQ ID NO: 113295 - DNA, 25 bp, Saccharomyces pastorianus
gacggagtttcgacttattctagat

SEQ ID NO: 113296 - DNA, 25 bp, Saccharomyces pastorianus
aaactttgaacccaacatcgtcagc

SEQ ID NO: 113297 - DNA, 25 bp, Saccharomyces pastorianus
atagaccaccaatgatgcttccaac

SEQ ID NO: 113298 - DNA, 25 bp, Saccharomyces pastorianus
cactgacgacacatcctctaataag

SEQ ID NO: 113299 - DNA, 25 bp, Saccharomyces pastorianus
ccccatggcttcgttgatttatcag

SEQ ID NO: 113300 - DNA, 25 bp, Saccharomyces pastorianus
gcgacccatgcaatgatgacggagt

SEQ ID NO: 113301 - DNA, 25 bp, Saccharomyces pastorianus
attgatagaaccttcattgcccggg

SEQ ID NO: 113302 - DNA, 25 bp, Saccharomyces pastorianus
gtaagtggcaatcctcgtaacccaa

SEQ ID NO: 113303 - DNA, 25 bp, Saccharomyces pastorianus
cgggcttagctattcgttcactgaa

SEQ ID NO: 113304 - DNA, 25 bp, Saccharomyces pastorianus
atgaggaatggcaacgtcgtgaaga

SEQ ID NO: 113305 - DNA, 25 bp, Saccharomyces pastorianus
aaggcgccgaaatgtattgaatgtc

SEQ ID NO: 113306 - DNA, 25 bp, Saccharomyces pastorianus
aaacagtgttctaaggagcatccag

SEQ ID NO: 113307 - DNA, 25 bp, Saccharomyces pastorianus
tgtacgaaaatgcacctcctccaga

SEQ ID NO: 113308 - DNA, 25 bp, Saccharomyces pastorianus
ccagagcatatttcaaaggcgccga

SEQ ID NO: 113309 - DNA, 25 bp, Saccharomyces pastorianus
tagactagaaaagccgaaccctcat

SEQ ID NO: 113310 - DNA, 25 bp, Saccharomyces pastorianus
tgaggatctctttcatagactagaa

SEQ ID NO: 113311 - DNA, 25 bp, Saccharomyces pastorianus
aacagaccccgaattgaatgatgag

SEQ ID NO: 113312 - DNA, 25 bp, Saccharomyces pastorianus
tgggaaagcccatattcatcatttt

SEQ ID NO: 113313 - DNA, 25 bp, Saccharomyces pastorianus
ggatcctgtgctacatgatgtgttc

SEQ ID NO: 113314 - DNA, 25 bp, Saccharomyces pastorianus
aagtggaagcctttgcgttcaagaa

SEQ ID NO: 113315 - DNA, 25 bp, Saccharomyces pastorianus
gtttatccactgaagacctgttaca

SEQ ID NO: 113316 - DNA, 25 bp, Saccharomyces pastorianus
gtattgttcactacctggttgccaa

SEQ ID NO: 113317 - DNA, 25 bp, Saccharomyces pastorianus
aggtgttcactttgctgacgactat

SEQ ID NO: 113318 - DNA, 25 bp, Saccharomyces pastorianus
attgccatatgccactgaagccgaa

SEQ ID NO: 113319 - DNA, 25 bp, Saccharomyces pastorianus
aatacagcatgccaggtggttcctt

SEQ ID NO: 113320 - DNA, 25 bp, Saccharomyces pastorianus
gacgactattttaccatcttacatg

SEQ ID NO: 113321 - DNA, 25 bp, Saccharomyces pastorianus
ttcctttgcccttgaattggctcaa

SEQ ID NO: 113322 - DNA, 25 bp, Saccharomyces pastorianus
tattcggaaccgctgttggtactga

SEQ ID NO: 113323 - DNA, 25 bp, Saccharomyces pastorianus
gaagccgaagtttacactcctggta

SEQ ID NO: 113324 - DNA, 25 bp, Saccharomyces pastorianus
gttgccattcgggtttttggacact

SEQ ID NO: 113325 - DNA, 25 bp, Saccharomyces pastorianus
acgcttccgtatccgagtacttaat

SEQ ID NO: 113326 - DNA, 25 bp, Saccharomyces pastorianus
gaatattccaatagcagccccaagt

SEQ ID NO: 113327 - DNA, 25 bp, Saccharomyces pastorianus
gatatcgaacacttgctctaatcta

SEQ ID NO: 113328 - DNA, 25 bp, Saccharomyces pastorianus
aaatgcaagctttctctatccgagg

SEQ ID NO: 113329 - DNA, 25 bp, Saccharomyces pastorianus
aaccgctcctgtactgaatattcca

SEQ ID NO: 113330 - DNA, 25 bp, Saccharomyces pastorianus
gatgccgtgtcaatctccataaatg

SEQ ID NO: 113331 - DNA, 25 bp, Saccharomyces pastorianus
tgatgacgaccttaattacttgctg

SEQ ID NO: 113332 - DNA, 25 bp, Saccharomyces pastorianus
agcagccccaagtattcattcgaaa

SEQ ID NO: 113333 - DNA, 25 bp, Saccharomyces pastorianus
gataaattcaaactgccgcctactt

SEQ ID NO: 113334 - DNA, 25 bp, Saccharomyces pastorianus
acagataatagcttctccgtgatat

SEQ ID NO: 113335 - DNA, 25 bp, Saccharomyces pastorianus
agttcatacccttttatcgactctc

SEQ ID NO: 113336 - DNA, 25 bp, Saccharomyces pastorianus
aaatgctatcagacgaaccgctcct

SEQ ID NO: 113337 - DNA, 25 bp, Saccharomyces pastorianus
cattgctgaagctcgtgctgccgaa

SEQ ID NO: 113338 - DNA, 25 bp, Saccharomyces pastorianus
ggttcacatgtcgtttacaactcca

SEQ ID NO: 113339 - DNA, 25 bp, Saccharomyces pastorianus
aagaccatttctgacactgctgctg

SEQ ID NO: 113340 - DNA, 25 bp, Saccharomyces pastorianus
gcagatttgacgctaagccagctta

SEQ ID NO: 113341 - DNA, 25 bp, Saccharomyces pastorianus
actgctgctgtcgttggtgttaagg

SEQ ID NO: 113342 - DNA, 25 bp, Saccharomyces pastorianus
ggtaactcaggctatttggccactt

SEQ ID NO: 113343 - DNA, 25 bp, Saccharomyces pastorianus
agacaaccaagctgccattgctgaa

SEQ ID NO: 113344 - DNA, 25 bp, Saccharomyces pastorianus
agccagcttatccaggtcatgtaca

SEQ ID NO: 113345 - DNA, 25 bp, Saccharomyces pastorianus
gtagagccttcgttgtcgattgtca

SEQ ID NO: 113346 - DNA, 25 bp, Saccharomyces pastorianus
acaacaaggtggtttgccatctcca

SEQ ID NO: 113347 - DNA, 25 bp, Saccharomyces pastorianus
tgttggtgctcaagtctcttatgtc

SEQ ID NO: 113348 - DNA, 25 bp, Saccharomyces pastorianus
agtgtgtacataacctgtcgcctag

SEQ ID NO: 113349 - DNA, 25 bp, Saccharomyces pastorianus
taaaattgcaactctcgtcacccaa

SEQ ID NO: 113350 - DNA, 25 bp, Saccharomyces pastorianus
actgcactgtctgcggctgaatcga

SEQ ID NO: 113351 - DNA, 25 bp, Saccharomyces pastorianus
atgttcatccgtttccatctcagat

SEQ ID NO: 113352 - DNA, 25 bp, Saccharomyces pastorianus
ctttgtacagcccacgaaggacatt

SEQ ID NO: 113353 - DNA, 25 bp, Saccharomyces pastorianus
tccccagtaaccagccattagatat

SEQ ID NO: 113354 - DNA, 25 bp, Saccharomyces pastorianus
tagatatttctagtccttgtgcaag

SEQ ID NO: 113355 - DNA, 25 bp, Saccharomyces pastorianus
gtacgctgcggattcggaccagaga

SEQ ID NO: 113356 - DNA, 25 bp, Saccharomyces pastorianus
aaggttcagtggttctcatattccc

SEQ ID NO: 113357 - DNA, 25 bp, Saccharomyces pastorianus
aaaggatcgcctcgtacgctgcgga

SEQ ID NO: 113358 - DNA, 25 bp, Saccharomyces pastorianus
ggctgtaccaagaaagctccctgac

SEQ ID NO: 113359 - DNA, 25 bp, Saccharomyces pastorianus
gcgttcgtgtgttggtcaccgagaa

SEQ ID NO: 113360 - DNA, 25 bp, Saccharomyces pastorianus
gatgccatgggtgaatgtgccctac

SEQ ID NO: 113361 - DNA, 25 bp, Saccharomyces pastorianus
ctcaatcggtgtttctcatcctgga

SEQ ID NO: 113362 - DNA, 25 bp, Saccharomyces pastorianus
gccattccaatgatcctaacctata

SEQ ID NO: 113363 - DNA, 25 bp, Saccharomyces pastorianus
attggctccacaaaacttaccggtg

SEQ ID NO: 113364 - DNA, 25 bp, Saccharomyces pastorianus
aaaagatcttgttgctcgcgttcgt

SEQ ID NO: 113365 - DNA, 25 bp, Saccharomyces pastorianus
tcatggactgcttgtctcaatcggt

SEQ ID NO: 113366 - DNA, 25 bp, Saccharomyces pastorianus
gactggctgctgtttgttaagcgca

SEQ ID NO: 113367 - DNA, 25 bp, Saccharomyces pastorianus
tgtgccctacaaggcttagagatca

SEQ ID NO: 113368 - DNA, 25 bp, Saccharomyces pastorianus
taaaggcaccgatgacgaggctgta

SEQ ID NO: 113369 - DNA, 25 bp, Saccharomyces pastorianus
ggttgctctttgactttgttacgaa

SEQ ID NO: 113370 - DNA, 25 bp, Saccharomyces pastorianus
gcattgggtcaatgtaggtccatta

SEQ ID NO: 113371 - DNA, 25 bp, Saccharomyces pastorianus
gctggtgtgggtggcctatcccata

SEQ ID NO: 113372 - DNA, 25 bp, Saccharomyces pastorianus
acgatattctcccatttccaaagac

SEQ ID NO: 113373 - DNA, 25 bp, Saccharomyces pastorianus
aagatacgtccttttgtacaacaat

SEQ ID NO: 113374 - DNA, 25 bp, Saccharomyces pastorianus
accgcagtaatctggacccactatg

SEQ ID NO: 113375 - DNA, 25 bp, Saccharomyces pastorianus
gaaaattcttatcgtgaccccaggg

SEQ ID NO: 113376 - DNA, 25 bp, Saccharomyces pastorianus
agtcggctgcgtaaaattcgcgggt

SEQ ID NO: 113377 - DNA, 25 bp, Saccharomyces pastorianus
ttgagcaaagttggccaccgcagta

SEQ ID NO: 113378 - DNA, 25 bp, Saccharomyces pastorianus
atatgtaacctatttgcactcgaat

SEQ ID NO: 113379 - DNA, 25 bp, Saccharomyces pastorianus
gtggactccatcgaattatcagcct

SEQ ID NO: 113380 - DNA, 25 bp, Saccharomyces pastorianus
gtatggcaccaaacccttggtccaa

SEQ ID NO: 113381 - DNA, 25 bp, Saccharomyces pastorianus
ggtggtacgcagaacccttatgcag

SEQ ID NO: 113382 - DNA, 25 bp, Saccharomyces pastorianus
gaaaccatctctctactctggaaga

SEQ ID NO: 113383 - DNA, 25 bp, Saccharomyces pastorianus
cacgattttattcacctgctttggg

SEQ ID NO: 113384 - DNA, 25 bp, Saccharomyces pastorianus
aaatgttcaactcccagatcctaat

SEQ ID NO: 113385 - DNA, 25 bp, Saccharomyces pastorianus
gataacttgttgacaggcccaatgt

SEQ ID NO: 113386 - DNA, 25 bp, Saccharomyces pastorianus
gctttgcatgctcaggatgacccaa

SEQ ID NO: 113387 - DNA, 25 bp, Saccharomyces pastorianus
ggaggtgatcttcctatagaccaaa

SEQ ID NO: 113388 - DNA, 25 bp, Saccharomyces pastorianus
tgggtcacaacttactacgcatggt

SEQ ID NO: 113389 - DNA, 25 bp, Saccharomyces pastorianus
atccaatccatacactttgcttcta

SEQ ID NO: 113390 - DNA, 25 bp, Saccharomyces pastorianus
gaatacccgggatcagaactccttt

SEQ ID NO: 113391 - DNA, 25 bp, Saccharomyces pastorianus
gaactccttttatagctttgcatgc

SEQ ID NO: 113392 - DNA, 25 bp, Saccharomyces pastorianus
tgttctcgagtacttcctttcaaga

SEQ ID NO: 113393 - DNA, 25 bp, Saccharomyces pastorianus
acatcattccgaacctgattcacgg

SEQ ID NO: 113394 - DNA, 25 bp, Saccharomyces pastorianus
aatgaactttccgattacgcctcag

SEQ ID NO: 113395 - DNA, 25 bp, Saccharomyces pastorianus
ggattatctaacaactgccattacc

SEQ ID NO: 113396 - DNA, 25 bp, Saccharomyces pastorianus
gtgacaccgattactcattctgttc

SEQ ID NO: 113397 - DNA, 25 bp, Saccharomyces pastorianus
tcgtcgcgaaatatggtcactggca

SEQ ID NO: 113398 - DNA, 25 bp, Saccharomyces pastorianus
aagaatccgatctttacttcccatt

SEQ ID NO: 113399 - DNA, 25 bp, Saccharomyces pastorianus
gtatgctgctcctggactaactaat

SEQ ID NO: 113400 - DNA, 25 bp, Saccharomyces pastorianus
attaccttaggatattcgtcgcgaa

SEQ ID NO: 113401 - DNA, 25 bp, Saccharomyces pastorianus
gccacaaaccaaattctactcacat

SEQ ID NO: 113402 - DNA, 25 bp, Saccharomyces pastorianus
cactggcatggttatcggtgacacc

SEQ ID NO: 113403 - DNA, 25 bp, Saccharomyces pastorianus
ataacaacgattttgcggccaagca

SEQ ID NO: 113404 - DNA, 25 bp, Saccharomyces pastorianus
tagtctttctgatcgcagtagcatt

SEQ ID NO: 113405 - DNA, 25 bp, Saccharomyces pastorianus
ggcttggataaaatcgacgttgcta

SEQ ID NO: 113406 - DNA, 25 bp, Saccharomyces pastorianus
gaaaactttttcagatgacgcgaat

SEQ ID NO: 113407 - DNA, 25 bp, Saccharomyces pastorianus
tctataggtttgttgctgaggacgc

SEQ ID NO: 113408 - DNA, 25 bp, Saccharomyces pastorianus
tgagagccaccgcaccaaaagttag

SEQ ID NO: 113409 - DNA, 25 bp, Saccharomyces pastorianus
tgctagatcaaattctctgcgactt

SEQ ID NO: 113410 - DNA, 25 bp, Saccharomyces pastorianus
ggttctcaatcagtgaaatctcgtg

SEQ ID NO: 113411 - DNA, 25 bp, Saccharomyces pastorianus
aagttcgtactacacctctggagta

SEQ ID NO: 113412 - DNA, 25 bp, Saccharomyces pastorianus
cttgcaccaatatctagtctttctg

SEQ ID NO: 113413 - DNA, 25 bp, Saccharomyces pastorianus
gaatgtccctaatgctattttttca

SEQ ID NO: 113414 - DNA, 25 bp, Saccharomyces pastorianus
ccaagggcgcacttccatgaaaata

SEQ ID NO: 113415 - DNA, 25 bp, Saccharomyces pastorianus
ggacaacttcatagaaccaccatct

SEQ ID NO: 113416 - DNA, 25 bp, Saccharomyces pastorianus
ataacgagatgtgcagtaccctctg

SEQ ID NO: 113417 - DNA, 25 bp, Saccharomyces pastorianus
tgattactacgcctaccgacaagag

SEQ ID NO: 113418 - DNA, 25 bp, Saccharomyces pastorianus
acagcctgcccgctttgattgaagg

SEQ ID NO: 113419 - DNA, 25 bp, Saccharomyces pastorianus
ggtggagtcgcgtatgcagcatata

SEQ ID NO: 113420 - DNA, 25 bp, Saccharomyces pastorianus
attcaaaaacaatccgcagtccgcg

SEQ ID NO: 113421 - DNA, 25 bp, Saccharomyces pastorianus
agtacaacttgctagtcgcgaacgc

SEQ ID NO: 113422 - DNA, 25 bp, Saccharomyces pastorianus
gagatacgatcgcttgagggtcata

SEQ ID NO: 113423 - DNA, 25 bp, Saccharomyces pastorianus
gtctcattagtagccgttccattag

SEQ ID NO: 113424 - DNA, 25 bp, Saccharomyces pastorianus
gggcaacgcaagtactacgctgatt

SEQ ID NO: 113425 - DNA, 25 bp, Saccharomyces pastorianus
cgctcatgtagttgtctccaatggc

SEQ ID NO: 113426 - DNA, 25 bp, Saccharomyces pastorianus
catggtagtggctctgcagatggta

SEQ ID NO: 113427 - DNA, 25 bp, Saccharomyces pastorianus
agaacaagttcttccacgttgacgt

SEQ ID NO: 113428 - DNA, 25 bp, Saccharomyces pastorianus
caatgtcccgattgtcaaggtcgtg

SEQ ID NO: 113429 - DNA, 25 bp, Saccharomyces pastorianus
agatggtaagctggcccaatgtccc

SEQ ID NO: 113430 - DNA, 25 bp, Saccharomyces pastorianus
taagttatctagacccgctcatgta

SEQ ID NO: 113431 - DNA, 25 bp, Saccharomyces pastorianus
aaagggcctgactttgacgccggtg

SEQ ID NO: 113432 - DNA, 25 bp, Saccharomyces pastorianus
gttataatacaagtgctgcgcatgg

SEQ ID NO: 113433 - DNA, 25 bp, Saccharomyces pastorianus
actacgtcgttgtcatgccaaagac

SEQ ID NO: 113434 - DNA, 25 bp, Saccharomyces pastorianus
gacgccggtgacttggtcatagaat

SEQ ID NO: 113435 - DNA, 25 bp, Saccharomyces pastorianus
agaagttctttctgctgcggaagcg

SEQ ID NO: 113436 - DNA, 25 bp, Saccharomyces pastorianus
gttaatggcaccaacaccggtaaga

SEQ ID NO: 113437 - DNA, 25 bp, Saccharomyces pastorianus
gaacaatttcactttgccttctcaa

SEQ ID NO: 113438 - DNA, 25 bp, Saccharomyces pastorianus
ttcaagcactggctcatcttcaagc

SEQ ID NO: 113439 - DNA, 25 bp, Saccharomyces pastorianus
gactgattatgctgttccaactact

SEQ ID NO: 113440 - DNA, 25 bp, Saccharomyces pastorianus
ttaacttcaagcaccagtccatctt

SEQ ID NO: 113441 - DNA, 25 bp, Saccharomyces pastorianus
tagtcagtctggataccttgcatta

SEQ ID NO: 113442 - DNA, 25 bp, Saccharomyces pastorianus
gttaatgtttcctttagtcagtctg

SEQ ID NO: 113443 - DNA, 25 bp, Saccharomyces pastorianus
ggttcatcttcagcttcaagcagct

SEQ ID NO: 113444 - DNA, 25 bp, Saccharomyces pastorianus
gtgcgataacagtgccatcaccaat

SEQ ID NO: 113445 - DNA, 25 bp, Saccharomyces pastorianus
gcgaaatatcttctgactctatcta

SEQ ID NO: 113446 - DNA, 25 bp, Saccharomyces pastorianus
acaacggtcgcaaagtcagcttcca

SEQ ID NO: 113447 - DNA, 25 bp, Saccharomyces pastorianus
gggagtggttccgatatccccggat

SEQ ID NO: 113448 - DNA, 25 bp, Saccharomyces pastorianus
gatatatggtctactgcttgtctaa

SEQ ID NO: 113449 - DNA, 25 bp, Saccharomyces pastorianus
aagagattcgggtacctgatagaga

SEQ ID NO: 113450 - DNA, 25 bp, Saccharomyces pastorianus
gggagaattaccatcataccttttg

SEQ ID NO: 113451 - DNA, 25 bp, Saccharomyces pastorianus
gaaccggacgaaggtcattcctaca

SEQ ID NO: 113452 - DNA, 25 bp, Saccharomyces pastorianus
tgattaccggagattttcttttcga

SEQ ID NO: 113453 - DNA, 25 bp, Saccharomyces pastorianus
tcaccagaggtgttactaggcgccc

SEQ ID NO: 113454 - DNA, 25 bp, Saccharomyces pastorianus
atgcaggtggcttggttaaccatcc

SEQ ID NO: 113455 - DNA, 25 bp, Saccharomyces pastorianus
taccgatatcaactccccagaaaat

SEQ ID NO: 113456 - DNA, 25 bp, Saccharomyces pastorianus
atctgattttttgtcgcctatgtta

SEQ ID NO: 113457 - DNA, 25 bp, Saccharomyces pastorianus
ggatgatgaccatattgcacaaatc

SEQ ID NO: 113458 - DNA, 25 bp, Saccharomyces pastorianus
gaaagtcgcctcaagaattgtcaat

SEQ ID NO: 113459 - DNA, 25 bp, Saccharomyces pastorianus
gaaggccggcttatacaaccaaatt

SEQ ID NO: 113460 - DNA, 25 bp, Saccharomyces pastorianus
ggtactctttatccagatgtcatcg

SEQ ID NO: 113461 - DNA, 25 bp, Saccharomyces pastorianus
tgcctgtttgttgcccgttaaatcc

SEQ ID NO: 113462 - DNA, 25 bp, Saccharomyces pastorianus
aatttcccaagcctttgcctgtttg

SEQ ID NO: 113463 - DNA, 25 bp, Saccharomyces pastorianus
aggaatccctcatgatctagtctgg

SEQ ID NO: 113464 - DNA, 25 bp, Saccharomyces pastorianus
gacgaagtcaggcatctaggtgaat

SEQ ID NO: 113465 - DNA, 25 bp, Saccharomyces pastorianus
gtcatcgaatccatttctttcaaag

SEQ ID NO: 113466 - DNA, 25 bp, Saccharomyces pastorianus
gatttcatgactgctgactggttcc

SEQ ID NO: 113467 - DNA, 25 bp, Saccharomyces pastorianus
gactggttcccattcgaacacagtt

SEQ ID NO: 113468 - DNA, 25 bp, Saccharomyces pastorianus
gggttgctagggtcacttacgatat

SEQ ID NO: 113469 - DNA, 25 bp, Saccharomyces pastorianus
atagctaccataggcaatcctcttt

SEQ ID NO: 113470 - DNA, 25 bp, Saccharomyces pastorianus
ggctacttaaattttccgcgtgttg

SEQ ID NO: 113471 - DNA, 25 bp, Saccharomyces pastorianus
gtttgaagtccatttgattccttta

SEQ ID NO: 113472 - DNA, 25 bp, Saccharomyces pastorianus
gagccaatggaaactagccacgatg

SEQ ID NO: 113473 - DNA, 25 bp, Saccharomyces pastorianus
gccacgatgcgctacacgatactat

SEQ ID NO: 113474 - DNA, 25 bp, Saccharomyces pastorianus
taactgttccggtacaactaccagg

SEQ ID NO: 113475 - DNA, 25 bp, Saccharomyces pastorianus
gcaatcctctttcctatactgtaat

SEQ ID NO: 113476 - DNA, 25 bp, Saccharomyces pastorianus
ctatgcattgaaaaagcggtccttg

SEQ ID NO: 113477 - DNA, 25 bp, Saccharomyces pastorianus
attctttcatgtacaattcgagcca

SEQ ID NO: 113478 - DNA, 25 bp, Saccharomyces pastorianus
gtcgaagatacgtaacctatgcatt

SEQ ID NO: 113479 - DNA, 25 bp, Saccharomyces pastorianus
ttcatggccagaaacgttgcgcaat

SEQ ID NO: 113480 - DNA, 25 bp, Saccharomyces pastorianus
gttgccacaattagacgttccttta

SEQ ID NO: 113481 - DNA, 25 bp, Saccharomyces pastorianus
agatcgcttacacgagactcatgac

SEQ ID NO: 113482 - DNA, 25 bp, Saccharomyces pastorianus
ggagttcttacttgcttaatacctg

SEQ ID NO: 113483 - DNA, 25 bp, Saccharomyces pastorianus
taccttcgggattaactttatggat

SEQ ID NO: 113484 - DNA, 25 bp, Saccharomyces pastorianus
gactgtacctgtcaaaagtatcctg

SEQ ID NO: 113485 - DNA, 25 bp, Saccharomyces pastorianus
tgatcttagggctcaaaccgctaat

SEQ ID NO: 113486 - DNA, 25 bp, Saccharomyces pastorianus
tggctggatgtaactcaggctgact

SEQ ID NO: 113487 - DNA, 25 bp, Saccharomyces pastorianus
atgacgccattgcagtgattactaa

SEQ ID NO: 113488 - DNA, 25 bp, Saccharomyces pastorianus
gaatctggtgccgatatcgaacctc

SEQ ID NO: 113489 - DNA, 25 bp, Saccharomyces pastorianus
gactcatgacgattacagcgatcag

SEQ ID NO: 113490 - DNA, 25 bp, Saccharomyces pastorianus
gatatcgaacctcccgtacaaacta

SEQ ID NO: 113491 - DNA, 25 bp, Saccharomyces pastorianus
atttattgggctgctcttggaccat

SEQ ID NO: 113492 - DNA, 25 bp, Saccharomyces pastorianus
aatcctcacagtcgttttttcacta

SEQ ID NO: 113493 - DNA, 25 bp, Saccharomyces pastorianus
ccgctataggtgtttttggcttgat

SEQ ID NO: 113494 - DNA, 25 bp, Saccharomyces pastorianus
gggttattgtcctgcatttgtggta

SEQ ID NO: 113495 - DNA, 25 bp, Saccharomyces pastorianus
aaccttacactggtaatcctcacag

SEQ ID NO: 113496 - DNA, 25 bp, Saccharomyces pastorianus
gcgcttgttgccatgctgaggataa

SEQ ID NO: 113497 - DNA, 25 bp, Saccharomyces pastorianus
gattttgcccaagcccgtgaatgaa

SEQ ID NO: 113498 - DNA, 25 bp, Saccharomyces pastorianus
atacagatactttgtccactctcac

SEQ ID NO: 113499 - DNA, 25 bp, Saccharomyces pastorianus
gcggtgctgtttccataccatttat

SEQ ID NO: 113500 - DNA, 25 bp, Saccharomyces pastorianus
tgatatgttacttccacttggcggt

SEQ ID NO: 113501 - DNA, 25 bp, Saccharomyces pastorianus
acaatattgttcaccacttctaccg

SEQ ID NO: 113502 - DNA, 25 bp, Saccharomyces pastorianus
acagccgccgctagaatttttcatg

SEQ ID NO: 113503 - DNA, 25 bp, Saccharomyces pastorianus
ttgtacggaagactctcgcacttta

SEQ ID NO: 113504 - DNA, 25 bp, Saccharomyces pastorianus
ggtgactactttgcctctaagacaa

SEQ ID NO: 113505 - DNA, 25 bp, Saccharomyces pastorianus
gggccactttgtgccgaactcaaga

SEQ ID NO: 113506 - DNA, 25 bp, Saccharomyces pastorianus
agctgatgttcctgatttcttgggt

SEQ ID NO: 113507 - DNA, 25 bp, Saccharomyces pastorianus
gaacagtacgacctgcatccaatat

SEQ ID NO: 113508 - DNA, 25 bp, Saccharomyces pastorianus
gcggtcagtggtttcaggttccaac

SEQ ID NO: 113509 - DNA, 25 bp, Saccharomyces pastorianus
tgcgtggctagagaatgacccttcc

SEQ ID NO: 113510 - DNA, 25 bp, Saccharomyces pastorianus
gtggctatttcataccgcagacgac

SEQ ID NO: 113511 - DNA, 25 bp, Saccharomyces pastorianus
gaataccggtgtgcttgcgtggcta

SEQ ID NO: 113512 - DNA, 25 bp, Saccharomyces pastorianus
ggtcccatctctacatgttcaagga

SEQ ID NO: 113513 - DNA, 25 bp, Saccharomyces pastorianus
ggcatacacaaattaccatcggttt

SEQ ID NO: 113514 - DNA, 25 bp, Saccharomyces pastorianus
gtgcatactgtgtttgagggctcct

SEQ ID NO: 113515 - DNA, 25 bp, Saccharomyces pastorianus
ttcttggacctttctctggatatca

SEQ ID NO: 113516 - DNA, 25 bp, Saccharomyces pastorianus
attcaatgattccatggtctcctct

SEQ ID NO: 113517 - DNA, 25 bp, Saccharomyces pastorianus
taatcggtattgtttcccacaaggg

SEQ ID NO: 113518 - DNA, 25 bp, Saccharomyces pastorianus
gacaaccattgatccattcttggac

SEQ ID NO: 113519 - DNA, 25 bp, Saccharomyces pastorianus
agttctattgtgtgtccaggctgtc

SEQ ID NO: 113520 - DNA, 25 bp, Saccharomyces pastorianus
gcaaggttccagacattatttacga

SEQ ID NO: 113521 - DNA, 25 bp, Saccharomyces pastorianus
aagattcgaacacctacttaatgga

SEQ ID NO: 113522 - DNA, 25 bp, Saccharomyces pastorianus
tggtctcctctatatctcaagcaga

SEQ ID NO: 113523 - DNA, 25 bp, Saccharomyces pastorianus
gagggctccttggaaagttctattg

SEQ ID NO: 113524 - DNA, 25 bp, Saccharomyces pastorianus
tgctaacagtgttaggccgactccc

SEQ ID NO: 113525 - DNA, 25 bp, Saccharomyces pastorianus
aaacccaaacgagtgcgaactgcaa

SEQ ID NO: 113526 - DNA, 25 bp, Saccharomyces pastorianus
gattccttccggtctagcaatagag

SEQ ID NO: 113527 - DNA, 25 bp, Saccharomyces pastorianus
tgcgagcacaaaaaccgcttccaga

SEQ ID NO: 113528 - DNA, 25 bp, Saccharomyces pastorianus
aaagactcgttctgctgcgagcaca

SEQ ID NO: 113529 - DNA, 25 bp, Saccharomyces pastorianus
aaaattcctgctttttcagactcaa

SEQ ID NO: 113530 - DNA, 25 bp, Saccharomyces pastorianus
gactcaactgtcatatccgatgcag

SEQ ID NO: 113531 - DNA, 25 bp, Saccharomyces pastorianus
gaggacgctagttatggtttactta

SEQ ID NO: 113532 - DNA, 25 bp, Saccharomyces pastorianus
ggatcttcagacattacccaatcac

SEQ ID NO: 113533 - DNA, 25 bp, Saccharomyces pastorianus
gagcatcaaggacgccaaagacgga

SEQ ID NO: 113534 - DNA, 25 bp, Saccharomyces pastorianus
tggtaatgggctagattccttccgg

SEQ ID NO: 113535 - DNA, 25 bp, Saccharomyces pastorianus
ggttctatctattgtgcctctaagt

SEQ ID NO: 113536 - DNA, 25 bp, Saccharomyces pastorianus
gatctgatcgtctatgcaacttcca

SEQ ID NO: 113537 - DNA, 25 bp, Saccharomyces pastorianus
gagacgcatacccaacaggttctat

SEQ ID NO: 113538 - DNA, 25 bp, Saccharomyces pastorianus
ccaacgtcacggctttaatcaatat

SEQ ID NO: 113539 - DNA, 25 bp, Saccharomyces pastorianus
ggctgatgacgtggctgatctgatc

SEQ ID NO: 113540 - DNA, 25 bp, Saccharomyces pastorianus
gagtcattctaattgcaccagggct

SEQ ID NO: 113541 - DNA, 25 bp, Saccharomyces pastorianus
tactgcccatattccaagccaagaa

SEQ ID NO: 113542 - DNA, 25 bp, Saccharomyces pastorianus
atttgggttcaatcgctggcagaga

SEQ ID NO: 113543 - DNA, 25 bp, Saccharomyces pastorianus
gcaaaagttcatgtggcccagctgg

SEQ ID NO: 113544 - DNA, 25 bp, Saccharomyces pastorianus
ggatactaccccattgatggctgat

SEQ ID NO: 113545 - DNA, 25 bp, Saccharomyces pastorianus
atatcacacaagctgtactgcccat

SEQ ID NO: 113546 - DNA, 25 bp, Saccharomyces pastorianus
gaaactgcaaataacgtcgaggaag

SEQ ID NO: 113547 - DNA, 25 bp, Saccharomyces pastorianus
acatcaacatcgctctgacgcagaa

SEQ ID NO: 113548 - DNA, 25 bp, Saccharomyces pastorianus
aacaaaccgaagattctgtccagaa

SEQ ID NO: 113549 - DNA, 25 bp, Saccharomyces pastorianus
gtaaagccacgaatcctcttttgaa

SEQ ID NO: 113550 - DNA, 25 bp, Saccharomyces pastorianus
gacgacggtgacattgaagctgctg

SEQ ID NO: 113551 - DNA, 25 bp, Saccharomyces pastorianus
gaaacactcgaccagaacgatctcg

SEQ ID NO: 113552 - DNA, 25 bp, Saccharomyces pastorianus
tggcccataccaagcataaattaag

SEQ ID NO: 113553 - DNA, 25 bp, Saccharomyces pastorianus
aagagaacaaggtggtgcgcgaact

SEQ ID NO: 113554 - DNA, 25 bp, Saccharomyces pastorianus
cacactgaattacttgcggacgaat

SEQ ID NO: 113555 - DNA, 25 bp, Saccharomyces pastorianus
tggtgcgcgaacttgatgaagcccc

SEQ ID NO: 113556 - DNA, 25 bp, Saccharomyces pastorianus
gtgcatgaacgggaacacatacaag

SEQ ID NO: 113557 - DNA, 25 bp, Saccharomyces pastorianus
actaaactcattgccatatcagacg

SEQ ID NO: 113558 - DNA, 25 bp, Saccharomyces pastorianus
aaattattcatggagtggcctttca

SEQ ID NO: 113559 - DNA, 25 bp, Saccharomyces pastorianus
atggatgccaagcacaacagctaga

SEQ ID NO: 113560 - DNA, 25 bp, Saccharomyces pastorianus
gggatcccattttatttagtgctgc

SEQ ID NO: 113561 - DNA, 25 bp, Saccharomyces pastorianus
atgcagtggctgtcctgtattggaa

SEQ ID NO: 113562 - DNA, 25 bp, Saccharomyces pastorianus
agtgctgcggaaatatggcctacaa

SEQ ID NO: 113563 - DNA, 25 bp, Saccharomyces pastorianus
gaacacccttgaatactgtcatgga

SEQ ID NO: 113564 - DNA, 25 bp, Saccharomyces pastorianus
gaaaacttctagctaggccaggcat

SEQ ID NO: 113565 - DNA, 25 bp, Saccharomyces pastorianus
gaaatggacccaattgacttcgatt

SEQ ID NO: 113566 - DNA, 25 bp, Saccharomyces pastorianus
ctcgctgggacatggtggccaacaa

SEQ ID NO: 113567 - DNA, 25 bp, Saccharomyces pastorianus
gccaggcatgcattctagatccaaa

SEQ ID NO: 113568 - DNA, 25 bp, Saccharomyces pastorianus
gttgtgcattttagattgtcgtcgt

SEQ ID NO: 113569 - DNA, 25 bp, Saccharomyces pastorianus
gacatgttttgtgcatgctctttag

SEQ ID NO: 113570 - DNA, 25 bp, Saccharomyces pastorianus
gctctttagtattgttgtgcatttt

SEQ ID NO: 113571 - DNA, 25 bp, Saccharomyces pastorianus
gtgcatgctctttagtattgttgtg

SEQ ID NO: 113572 - DNA, 25 bp, Saccharomyces pastorianus
tacggattatgtgtaactgtattaa

SEQ ID NO: 113573 - DNA, 25 bp, Saccharomyces pastorianus
tttcaggatgtgttacgatgcagac

SEQ ID NO: 113574 - DNA, 25 bp, Saccharomyces pastorianus
cacaatgtaatctattttttcagga

SEQ ID NO: 113575 - DNA, 25 bp, Saccharomyces pastorianus
atgtggtgtacggattatgtgtaac

SEQ ID NO: 113576 - DNA, 25 bp, Saccharomyces pastorianus
attgtcgtcgtttgtttctgtatgt

SEQ ID NO: 113577 - DNA, 25 bp, Saccharomyces pastorianus
gtgttacgatgcagacatgttttgt

SEQ ID NO: 113578 - DNA, 25 bp, Saccharomyces pastorianus
gtcgtttgtttctgtatgtggtgta

SEQ ID NO: 113579 - DNA, 25 bp, Saccharomyces pastorianus
ggtctttattactttgatccacgat

SEQ ID NO: 113580 - DNA, 25 bp, Saccharomyces pastorianus
tttccctggagaccctagtggaagc

SEQ ID NO: 113581 - DNA, 25 bp, Saccharomyces pastorianus
gaacgcccttctggtgcattttttg

SEQ ID NO: 113582 - DNA, 25 bp, Saccharomyces pastorianus
atcgaccatgtgttcttcgtacata

SEQ ID NO: 113583 - DNA, 25 bp, Saccharomyces pastorianus
aaactcacagagctcgaaacagatg

SEQ ID NO: 113584 - DNA, 25 bp, Saccharomyces pastorianus
aaggtgatcgagtgcgaacgccctt

SEQ ID NO: 113585 - DNA, 25 bp, Saccharomyces pastorianus
gcattttttgcgcacgataacttaa

SEQ ID NO: 113586 - DNA, 25 bp, Saccharomyces pastorianus
gcatttccaaaacctgcaaaaccag

SEQ ID NO: 113587 - DNA, 25 bp, Saccharomyces pastorianus
gaaaagattggcctttccctggaga

SEQ ID NO: 113588 - DNA, 25 bp, Saccharomyces pastorianus
ttaatgactctatagctaccggcca

SEQ ID NO: 113589 - DNA, 25 bp, Saccharomyces pastorianus
atcatagcccattgtactaccgtta

SEQ ID NO: 113590 - DNA, 25 bp, Saccharomyces pastorianus
tagtcgggatcaagaactatctttg

SEQ ID NO: 113591 - DNA, 25 bp, Saccharomyces pastorianus
gagcatgatcttcaaaacccaaaag

SEQ ID NO: 113592 - DNA, 25 bp, Saccharomyces pastorianus
attcttgagaggttcggcgatatac

SEQ ID NO: 113593 - DNA, 25 bp, Saccharomyces pastorianus
gacccttgaggtctacgaggaaaag

SEQ ID NO: 113594 - DNA, 25 bp, Saccharomyces pastorianus
gaactgccacgaacgcaagtagtga

SEQ ID NO: 113595 - DNA, 25 bp, Saccharomyces pastorianus
aattccgaagaacgacctcattagt

SEQ ID NO: 113596 - DNA, 25 bp, Saccharomyces pastorianus
atttccgtccgcaaagttctgttgt

SEQ ID NO: 113597 - DNA, 25 bp, Saccharomyces pastorianus
ggatctgaagaactgccacgaacgc

SEQ ID NO: 113598 - DNA, 25 bp, Saccharomyces pastorianus
gatagtcctgattccaacagcattt

SEQ ID NO: 113599 - DNA, 25 bp, Saccharomyces pastorianus
gttctgttgtcagctcctttacaaa

SEQ ID NO: 113600 - DNA, 25 bp, Saccharomyces pastorianus
gaggaaagccctgcaaattctctat

SEQ ID NO: 113601 - DNA, 25 bp, Saccharomyces pastorianus
ggcacctaaggagctcatgttacag

SEQ ID NO: 113602 - DNA, 25 bp, Saccharomyces pastorianus
agatgtccgtcttttgcatctgctc

SEQ ID NO: 113603 - DNA, 25 bp, Saccharomyces pastorianus
gtatcagaagttggtccggactcaa

SEQ ID NO: 113604 - DNA, 25 bp, Saccharomyces pastorianus
gtccttaaggatgcgttggtttaca

SEQ ID NO: 113605 - DNA, 25 bp, Saccharomyces pastorianus
gtttacaacgactacgctggcagtg

SEQ ID NO: 113606 - DNA, 25 bp, Saccharomyces pastorianus
aactcagtgggctcagtatcagaag

SEQ ID NO: 113607 - DNA, 25 bp, Saccharomyces pastorianus
ctcgcatcacagtcgattcatcaat

SEQ ID NO: 113608 - DNA, 25 bp, Saccharomyces pastorianus
atacggcttgccattgcagcgagaa

SEQ ID NO: 113609 - DNA, 25 bp, Saccharomyces pastorianus
ttctgccggcagtggattaggagta

SEQ ID NO: 113610 - DNA, 25 bp, Saccharomyces pastorianus
gaggaccaagtaccgctacaattga

SEQ ID NO: 113611 - DNA, 25 bp, Saccharomyces pastorianus
aggaaacgccacgagatgtccgtct

SEQ ID NO: 113612 - DNA, 25 bp, Saccharomyces pastorianus
taagaaaggtgatcgcgctggtgcc

SEQ ID NO: 113613 - DNA, 25 bp, Saccharomyces pastorianus
tggtcttacaagtgtcatggctccc

SEQ ID NO: 113614 - DNA, 25 bp, Saccharomyces pastorianus
gaactcatcgaccactaacgtgcta

SEQ ID NO: 113615 - DNA, 25 bp, Saccharomyces pastorianus
acgcgaatgccggtatgaactcatc

SEQ ID NO: 113616 - DNA, 25 bp, Saccharomyces pastorianus
ttcatgacaggccagctccatataa

SEQ ID NO: 113617 - DNA, 25 bp, Saccharomyces pastorianus
gaggccgctgcaaaatcatgtaatg

SEQ ID NO: 113618 - DNA, 25 bp, Saccharomyces pastorianus
tatcgtgcttggtggtcttgcatac

SEQ ID NO: 113619 - DNA, 25 bp, Saccharomyces pastorianus
gctatcatcacagcagtcatactga

SEQ ID NO: 113620 - DNA, 25 bp, Saccharomyces pastorianus
aaacaagtgctgaggccgctgcaaa

SEQ ID NO: 113621 - DNA, 25 bp, Saccharomyces pastorianus
atggacttataatcacggtatcgtg

SEQ ID NO: 113622 - DNA, 25 bp, Saccharomyces pastorianus
atggctccctttactagggacacaa

SEQ ID NO: 113623 - DNA, 25 bp, Saccharomyces pastorianus
gaaagcttgccaaacctgtcattga

SEQ ID NO: 113624 - DNA, 25 bp, Saccharomyces pastorianus
aaacccactgcagttgatcctaatt

SEQ ID NO: 113625 - DNA, 25 bp, Saccharomyces pastorianus
ctgtatgcagatgtgttcgaagctt

SEQ ID NO: 113626 - DNA, 25 bp, Saccharomyces pastorianus
gctacccgtaatcaagttgccttgg

SEQ ID NO: 113627 - DNA, 25 bp, Saccharomyces pastorianus
aaagagctgccattcctaggagtga

SEQ ID NO: 113628 - DNA, 25 bp, Saccharomyces pastorianus
ttcgaagcttacattggcggcttga

SEQ ID NO: 113629 - DNA, 25 bp, Saccharomyces pastorianus
gatcctaattccatagttgagtgca

SEQ ID NO: 113630 - DNA, 25 bp, Saccharomyces pastorianus
tcaaaattgcgggtattagggctgc

SEQ ID NO: 113631 - DNA, 25 bp, Saccharomyces pastorianus
gaatctgtgttaaaagatccctcac

SEQ ID NO: 113632 - DNA, 25 bp, Saccharomyces pastorianus
tagggctgcagaaaatgctcttcgt

SEQ ID NO: 113633 - DNA, 25 bp, Saccharomyces pastorianus
tgtcattgaggaggctacccgtaat

SEQ ID NO: 113634 - DNA, 25 bp, Saccharomyces pastorianus
cctgatctgaaaattgccggcttga

SEQ ID NO: 113635 - DNA, 25 bp, Saccharomyces pastorianus
aatgggcgccttggatttggattac

SEQ ID NO: 113636 - DNA, 25 bp, Saccharomyces pastorianus
ttagccaagagcttcgtgccataat

SEQ ID NO: 113637 - DNA, 25 bp, Saccharomyces pastorianus
actattttggcgcattgatctcatt

SEQ ID NO: 113638 - DNA, 25 bp, Saccharomyces pastorianus
tatgcttcggtgacgtctattatga

SEQ ID NO: 113639 - DNA, 25 bp, Saccharomyces pastorianus
aacctgaccatttgttatgcttcgg

SEQ ID NO: 113640 - DNA, 25 bp, Saccharomyces pastorianus
gaaggtcaactaccaccatggtgta

SEQ ID NO: 113641 - DNA, 25 bp, Saccharomyces pastorianus
ttacctacgggatatcctgatctga

SEQ ID NO: 113642 - DNA, 25 bp, Saccharomyces pastorianus
gatctcatttgaaacccctgaattt

SEQ ID NO: 113643 - DNA, 25 bp, Saccharomyces pastorianus
ggagccaactggaaacctgaccatt

SEQ ID NO: 113644 - DNA, 25 bp, Saccharomyces pastorianus
aatccctaatcaccattcaaggtcc

SEQ ID NO: 113645 - DNA, 25 bp, Saccharomyces pastorianus
gacgacaagttgaatccgttcgaga

SEQ ID NO: 113646 - DNA, 25 bp, Saccharomyces pastorianus
gttctcgttttggtttgtccagact

SEQ ID NO: 113647 - DNA, 25 bp, Saccharomyces pastorianus
gtggtgtcaccccaagaattggttt

SEQ ID NO: 113648 - DNA, 25 bp, Saccharomyces pastorianus
aattggtgccagtgctttaggtggt

SEQ ID NO: 113649 - DNA, 25 bp, Saccharomyces pastorianus
gggttctgtacctgtatgaaaacgg

SEQ ID NO: 113650 - DNA, 25 bp, Saccharomyces pastorianus
taagggtgttaatgctgttgctatt

SEQ ID NO: 113651 - DNA, 25 bp, Saccharomyces pastorianus
tcactcaagcctacttaaccatggg

SEQ ID NO: 113652 - DNA, 25 bp, Saccharomyces pastorianus
aatccgttcgagaaaattggtgcca

SEQ ID NO: 113653 - DNA, 25 bp, Saccharomyces pastorianus
acaagacataaatctgcctccgcag

SEQ ID NO: 113654 - DNA, 25 bp, Saccharomyces pastorianus
gggttgaacaactttgcctcaggta

SEQ ID NO: 113655 - DNA, 25 bp, Saccharomyces pastorianus
tggcaaactgtcttcatggttggtt

SEQ ID NO: 113656 - DNA, 25 bp, Saccharomyces pastorianus
ccttgttattttatcagtggctcac

SEQ ID NO: 113657 - DNA, 25 bp, Saccharomyces pastorianus
tgttattttatcagtggctcacttt

SEQ ID NO: 113658 - DNA, 25 bp, Saccharomyces pastorianus
agttattggccgtcgtttgccaact

SEQ ID NO: 113659 - DNA, 25 bp, Saccharomyces pastorianus
gaaaatccttgttattttatcagtg

SEQ ID NO: 113660 - DNA, 25 bp, Saccharomyces pastorianus
ataccaagttattggccgtcgtttg

SEQ ID NO: 113661 - DNA, 25 bp, Saccharomyces pastorianus
ccgtcgtttgccaactgaatctgtt

SEQ ID NO: 113662 - DNA, 25 bp, Saccharomyces pastorianus
tattggccgtcgtttgccaactgaa

SEQ ID NO: 113663 - DNA, 25 bp, Saccharomyces pastorianus
ggctcactttaaagaataccaagtt

SEQ ID NO: 113664 - DNA, 25 bp, Saccharomyces pastorianus
taccaagttattggccgtcgtttgc

SEQ ID NO: 113665 - DNA, 25 bp, Saccharomyces pastorianus
ttatcagtggctcactttaaagaat

SEQ ID NO: 113666 - DNA, 25 bp, Saccharomyces pastorianus
tggccgtcgtttgccaactgaatct

SEQ ID NO: 113667 - DNA, 25 bp, Saccharomyces pastorianus
taccttgccacggtcagattttggt

SEQ ID NO: 113668 - DNA, 25 bp, Saccharomyces pastorianus
gccacggtcagattttggtacagga

SEQ ID NO: 113669 - DNA, 25 bp, Saccharomyces pastorianus
ttggcgataccttgccacggtcaga

SEQ ID NO: 113670 - DNA, 25 bp, Saccharomyces pastorianus
cttgccacggtcagattttggtaca

SEQ ID NO: 113671 - DNA, 25 bp, Saccharomyces pastorianus
atttggcgataccttgccacggtca

SEQ ID NO: 113672 - DNA, 25 bp, Saccharomyces pastorianus
aaaatgaaatttggcgataccttgc

SEQ ID NO: 113673 - DNA, 25 bp, Saccharomyces pastorianus
gataccttgccacggtcagattttg

SEQ ID NO: 113674 - DNA, 25 bp, Saccharomyces pastorianus
cacggtcagattttggtacaggagg

SEQ ID NO: 113675 - DNA, 25 bp, Saccharomyces pastorianus
aaatttggcgataccttgccacggt

SEQ ID NO: 113676 - DNA, 25 bp, Saccharomyces pastorianus
gcgataccttgccacggtcagattt

SEQ ID NO: 113677 - DNA, 25 bp, Saccharomyces pastorianus
gtcagattttggtacaggagggaac

SEQ ID NO: 113678 - DNA, 25 bp, Saccharomyces pastorianus
atagcaggtggttcaccatcttcgt

SEQ ID NO: 113679 - DNA, 25 bp, Saccharomyces pastorianus
acggtattcattctgcaactgttca

SEQ ID NO: 113680 - DNA, 25 bp, Saccharomyces pastorianus
actccttctacaatttctgctgatc

SEQ ID NO: 113681 - DNA, 25 bp, Saccharomyces pastorianus
agaattttactacaggctactcctt

SEQ ID NO: 113682 - DNA, 25 bp, Saccharomyces pastorianus
aagaagcctttgacagccatggaaa

SEQ ID NO: 113683 - DNA, 25 bp, Saccharomyces pastorianus
attgcagctgctttgtttatttgga

SEQ ID NO: 113684 - DNA, 25 bp, Saccharomyces pastorianus
tactcggatccaatcgtttctttaa

SEQ ID NO: 113685 - DNA, 25 bp, Saccharomyces pastorianus
agattttggcagtacctggcgtgat

SEQ ID NO: 113686 - DNA, 25 bp, Saccharomyces pastorianus
gtgatagcggtccatgacttccacg

SEQ ID NO: 113687 - DNA, 25 bp, Saccharomyces pastorianus
gataaattcatgagctccgccaagc

SEQ ID NO: 113688 - DNA, 25 bp, Saccharomyces pastorianus
aaaaaagcgttcacctactgcctat

SEQ ID NO: 113689 - DNA, 25 bp, Saccharomyces pastorianus
aatgtgaaggcctaccatgctccat

SEQ ID NO: 113690 - DNA, 25 bp, Saccharomyces pastorianus
aaccttagtcggctctgggtcaaag

SEQ ID NO: 113691 - DNA, 25 bp, Saccharomyces pastorianus
gaacgttaagccttcattcggtatt

SEQ ID NO: 113692 - DNA, 25 bp, Saccharomyces pastorianus
gaaacttttgtgttgtcaccgccag

SEQ ID NO: 113693 - DNA, 25 bp, Saccharomyces pastorianus
gtgacgttgcattttgccagaccgt

SEQ ID NO: 113694 - DNA, 25 bp, Saccharomyces pastorianus
gaatccgctagacgttattaccaca

SEQ ID NO: 113695 - DNA, 25 bp, Saccharomyces pastorianus
gaagctatgctgatcccaaccttag

SEQ ID NO: 113696 - DNA, 25 bp, Saccharomyces pastorianus
acctggaatcttcatgtccgttcaa

SEQ ID NO: 113697 - DNA, 25 bp, Saccharomyces pastorianus
attactacgtaaatgctcccggtgt

SEQ ID NO: 113698 - DNA, 25 bp, Saccharomyces pastorianus
gtagcggctcatcttctaaaggcaa

SEQ ID NO: 113699 - DNA, 25 bp, Saccharomyces pastorianus
aactgggccccatttgtagctggtt

SEQ ID NO: 113700 - DNA, 25 bp, Saccharomyces pastorianus
agagtataaagtcgcactgcaaggt

SEQ ID NO: 113701 - DNA, 25 bp, Saccharomyces pastorianus
agacatcttggacgcaatggacccc

SEQ ID NO: 113702 - DNA, 25 bp, Saccharomyces pastorianus
ggacgcattcttccagtgtttggac

SEQ ID NO: 113703 - DNA, 25 bp, Saccharomyces pastorianus
gcgcccatagctggatcaagtactt

SEQ ID NO: 113704 - DNA, 25 bp, Saccharomyces pastorianus
atttgaggagaattgcgcccatagc

SEQ ID NO: 113705 - DNA, 25 bp, Saccharomyces pastorianus
ttcaaggagaagagggtcatcgact

SEQ ID NO: 113706 - DNA, 25 bp, Saccharomyces pastorianus
gagaggagaccatcaagagaatcga

SEQ ID NO: 113707 - DNA, 25 bp, Saccharomyces pastorianus
ggcttattttcatttgatggtggca

SEQ ID NO: 113708 - DNA, 25 bp, Saccharomyces pastorianus
aatggaccccaagaatagcaagagt

SEQ ID NO: 113709 - DNA, 25 bp, Saccharomyces pastorianus
cagagaaagttgtgctgggagtcca

SEQ ID NO: 113710 - DNA, 25 bp, Saccharomyces pastorianus
cctaatacccgttcacagagaaagt

SEQ ID NO: 113711 - DNA, 25 bp, Saccharomyces pastorianus
agcccggttttgttggatttgctca

SEQ ID NO: 113712 - DNA, 25 bp, Saccharomyces pastorianus
gtctcctctctcttaaagtcgatga

SEQ ID NO: 113713 - DNA, 25 bp, Saccharomyces pastorianus
gggttgtgattcctttttgccacca

SEQ ID NO: 113714 - DNA, 25 bp, Saccharomyces pastorianus
gggtccattgcgtccaagatgtctg

SEQ ID NO: 113715 - DNA, 25 bp, Saccharomyces pastorianus
ggcgcaattctcctcaaatttttca

SEQ ID NO: 113716 - DNA, 25 bp, Saccharomyces pastorianus
gtacttgatccagctatgggcgcaa

SEQ ID NO: 113717 - DNA, 25 bp, Saccharomyces pastorianus
aagatgtctgccttgtccaaacact

SEQ ID NO: 113718 - DNA, 25 bp, Saccharomyces pastorianus
ttcagctcagctacaatcgtcaatc

SEQ ID NO: 113719 - DNA, 25 bp, Saccharomyces pastorianus
gtgcgactttatactcttgctattc

SEQ ID NO: 113720 - DNA, 25 bp, Saccharomyces pastorianus
atgtccgtctcttttgttcagctca

SEQ ID NO: 113721 - DNA, 25 bp, Saccharomyces pastorianus
attcgtgtatctatgttcctgcaca

SEQ ID NO: 113722 - DNA, 25 bp, Saccharomyces pastorianus
gtccaaaacatctgtgtctacgctg

SEQ ID NO: 113723 - DNA, 25 bp, Saccharomyces pastorianus
gacgcttgtctaagctggctatcga

SEQ ID NO: 113724 - DNA, 25 bp, Saccharomyces pastorianus
taccgatgatggctggttccgtacc

SEQ ID NO: 113725 - DNA, 25 bp, Saccharomyces pastorianus
aaatggccttgttacatccgcccaa

SEQ ID NO: 113726 - DNA, 25 bp, Saccharomyces pastorianus
agaagctacaggatgccgtttgcaa

SEQ ID NO: 113727 - DNA, 25 bp, Saccharomyces pastorianus
gttccgtaccggtgatatcgctgaa

SEQ ID NO: 113728 - DNA, 25 bp, Saccharomyces pastorianus
aagcctgtcggtattgtggtcccta

SEQ ID NO: 113729 - DNA, 25 bp, Saccharomyces pastorianus
gaagaaactgctgcggcctttaccg

SEQ ID NO: 113730 - DNA, 25 bp, Saccharomyces pastorianus
atgctgtcaactgccaaatctcaag

SEQ ID NO: 113731 - DNA, 25 bp, Saccharomyces pastorianus
gtgcacccatctgttctgaatacta

SEQ ID NO: 113732 - DNA, 25 bp, Saccharomyces pastorianus
gtggtccctaacttaggacgcttgt

SEQ ID NO: 113733 - DNA, 25 bp, Saccharomyces pastorianus
acaatgactcgccatctgtgttcgg

SEQ ID NO: 113734 - DNA, 25 bp, Saccharomyces pastorianus
cttcttcgcacagcttcgataagga

SEQ ID NO: 113735 - DNA, 25 bp, Saccharomyces pastorianus
ctgagtattggcatggacgagcaca

SEQ ID NO: 113736 - DNA, 25 bp, Saccharomyces pastorianus
tgggttcaaacctttaagcacgata

SEQ ID NO: 113737 - DNA, 25 bp, Saccharomyces pastorianus
agttctaagaccaatgtttcgctga

SEQ ID NO: 113738 - DNA, 25 bp, Saccharomyces pastorianus
gaaatcgggtagtaggttcagtcac

SEQ ID NO: 113739 - DNA, 25 bp, Saccharomyces pastorianus
caggcaccaatacccaagttctaag

SEQ ID NO: 113740 - DNA, 25 bp, Saccharomyces pastorianus
aagcacgatatacacgcctgtttct

SEQ ID NO: 113741 - DNA, 25 bp, Saccharomyces pastorianus
aaatggcacgaactgaatatgtccc

SEQ ID NO: 113742 - DNA, 25 bp, Saccharomyces pastorianus
gataaggaggcatgtttccccttta

SEQ ID NO: 113743 - DNA, 25 bp, Saccharomyces pastorianus
agagtttattcagcgttttgtcaaa

SEQ ID NO: 113744 - DNA, 25 bp, Saccharomyces pastorianus
gagttgcgtctacatcattattcgt

SEQ ID NO: 113745 - DNA, 25 bp, Saccharomyces pastorianus
tttggaactcccgaattgaccgact

SEQ ID NO: 113746 - DNA, 25 bp, Saccharomyces pastorianus
gttttctgggacgttgcactgtaca

SEQ ID NO: 113747 - DNA, 25 bp, Saccharomyces pastorianus
ggctttatcttccagctgctattaa

SEQ ID NO: 113748 - DNA, 25 bp, Saccharomyces pastorianus
gatcacagcgatagtgtccttcatt

SEQ ID NO: 113749 - DNA, 25 bp, Saccharomyces pastorianus
gagttatttttctttgatcacagcg

SEQ ID NO: 113750 - DNA, 25 bp, Saccharomyces pastorianus
gattaacactatcccttcaatgaaa

SEQ ID NO: 113751 - DNA, 25 bp, Saccharomyces pastorianus
taatctaggtgtgtccggctttatc

SEQ ID NO: 113752 - DNA, 25 bp, Saccharomyces pastorianus
ccgactcttcctctcaaatagtaga

SEQ ID NO: 113753 - DNA, 25 bp, Saccharomyces pastorianus
gataatcatcataagtgccacgttg

SEQ ID NO: 113754 - DNA, 25 bp, Saccharomyces pastorianus
atcgagattgattgccactttggtt

SEQ ID NO: 113755 - DNA, 25 bp, Saccharomyces pastorianus
acaagtgttgatggattttctgaac

SEQ ID NO: 113756 - DNA, 25 bp, Saccharomyces pastorianus
aacagagatatctcctccaccagtt

SEQ ID NO: 113757 - DNA, 25 bp, Saccharomyces pastorianus
atatcgcctgtaagtgaatcattgg

SEQ ID NO: 113758 - DNA, 25 bp, Saccharomyces pastorianus
catatgggccgatgcccctgacgaa

SEQ ID NO: 113759 - DNA, 25 bp, Saccharomyces pastorianus
gcagaaaccaagtcacaagcggagt

SEQ ID NO: 113760 - DNA, 25 bp, Saccharomyces pastorianus
ggagctccaactgggttgacgatga

SEQ ID NO: 113761 - DNA, 25 bp, Saccharomyces pastorianus
ttctgaacgatgaagggagctccaa

SEQ ID NO: 113762 - DNA, 25 bp, Saccharomyces pastorianus
atccaaacaggataccgcttctaag

SEQ ID NO: 113763 - DNA, 25 bp, Saccharomyces pastorianus
gaagccgcctcatagtcagggcaaa

SEQ ID NO: 113764 - DNA, 25 bp, Saccharomyces pastorianus
tccaccagtttcacctagcaagatg

SEQ ID NO: 113765 - DNA, 25 bp, Saccharomyces pastorianus
tggcgataaatcctttctcccaaaa

SEQ ID NO: 113766 - DNA, 25 bp, Saccharomyces pastorianus
tatgctatttttgcggtagccgtcg

SEQ ID NO: 113767 - DNA, 25 bp, Saccharomyces pastorianus
gtggagacatccaaggtcagcttta

SEQ ID NO: 113768 - DNA, 25 bp, Saccharomyces pastorianus
ttatacctgtatccattttatgcta

SEQ ID NO: 113769 - DNA, 25 bp, Saccharomyces pastorianus
tttgcggtagccgtcgttacaccac

SEQ ID NO: 113770 - DNA, 25 bp, Saccharomyces pastorianus
gtcgttacaccacttctatacattc

SEQ ID NO: 113771 - DNA, 25 bp, Saccharomyces pastorianus
ggctaataaagttattcaactacag

SEQ ID NO: 113772 - DNA, 25 bp, Saccharomyces pastorianus
gaaaatcttccaatcttccactaaa

SEQ ID NO: 113773 - DNA, 25 bp, Saccharomyces pastorianus
aatcttccactaaacctctatggtg

SEQ ID NO: 113774 - DNA, 25 bp, Saccharomyces pastorianus
cgttacaccacttctatacattcca

SEQ ID NO: 113775 - DNA, 25 bp, Saccharomyces pastorianus
ggtcagctttatacctgtatccatt

SEQ ID NO: 113776 - DNA, 25 bp, Saccharomyces pastorianus
tatttttgcggtagccgtcgttaca

SEQ ID NO: 113777 - DNA, 25 bp, Saccharomyces pastorianus
attgcagtccatcacctcatatgaa

SEQ ID NO: 113778 - DNA, 25 bp, Saccharomyces pastorianus
ttaagcatacgacatgacccacctt

SEQ ID NO: 113779 - DNA, 25 bp, Saccharomyces pastorianus
tggatttgctacagtatgcccctga

SEQ ID NO: 113780 - DNA, 25 bp, Saccharomyces pastorianus
gatgggaacttgcttcgccgtaaaa

SEQ ID NO: 113781 - DNA, 25 bp, Saccharomyces pastorianus
aagatattgccaaaccttcgccaaa

SEQ ID NO: 113782 - DNA, 25 bp, Saccharomyces pastorianus
ttcgaccccggatgcaagatacttg

SEQ ID NO: 113783 - DNA, 25 bp, Saccharomyces pastorianus
tgacgaatcctcatttgagccctta

SEQ ID NO: 113784 - DNA, 25 bp, Saccharomyces pastorianus
atgtgcgttctgctccaaatactta

SEQ ID NO: 113785 - DNA, 25 bp, Saccharomyces pastorianus
tgagcccttagccactattatatcg

SEQ ID NO: 113786 - DNA, 25 bp, Saccharomyces pastorianus
atgcccctgaggatacgacgtggaa

SEQ ID NO: 113787 - DNA, 25 bp, Saccharomyces pastorianus
tgtgaccttttgtggaacggctgca

SEQ ID NO: 113788 - DNA, 25 bp, Saccharomyces pastorianus
gtgaacttcctgaaaacgccaaaat

SEQ ID NO: 113789 - DNA, 25 bp, Saccharomyces pastorianus
cggtccaaagcgtgaacttatttat

SEQ ID NO: 113790 - DNA, 25 bp, Saccharomyces pastorianus
cttaagagatttccaagatgaccaa

SEQ ID NO: 113791 - DNA, 25 bp, Saccharomyces pastorianus
tgtttccttaagagatttccaagat

SEQ ID NO: 113792 - DNA, 25 bp, Saccharomyces pastorianus
tggcttcgaatctgatgaagacgtt

SEQ ID NO: 113793 - DNA, 25 bp, Saccharomyces pastorianus
caactttggcttcgaatctgatgaa

SEQ ID NO: 113794 - DNA, 25 bp, Saccharomyces pastorianus
tggtaataagagaatggcccatatt

SEQ ID NO: 113795 - DNA, 25 bp, Saccharomyces pastorianus
gacaactttggcttcgaatctgatg

SEQ ID NO: 113796 - DNA, 25 bp, Saccharomyces pastorianus
cgaagccagttgctttgatggtaat

SEQ ID NO: 113797 - DNA, 25 bp, Saccharomyces pastorianus
gaaacagacaactttggcttcgaat

SEQ ID NO: 113798 - DNA, 25 bp, Saccharomyces pastorianus
gatgaagccagaacactgaaaaacc

SEQ ID NO: 113799 - DNA, 25 bp, Saccharomyces pastorianus
caggtagatttcgtttgcgtttccg

SEQ ID NO: 113800 - DNA, 25 bp, Saccharomyces pastorianus
cgccgctgagtttttgatgaaattt

SEQ ID NO: 113801 - DNA, 25 bp, Saccharomyces pastorianus
cagggatattcacgcttatgtgcat

SEQ ID NO: 113802 - DNA, 25 bp, Saccharomyces pastorianus
ggttacaccattctttacggtagct

SEQ ID NO: 113803 - DNA, 25 bp, Saccharomyces pastorianus
ggtagctcaagatccacttatgcca

SEQ ID NO: 113804 - DNA, 25 bp, Saccharomyces pastorianus
gatcaagatcgagtcccaactgtta

SEQ ID NO: 113805 - DNA, 25 bp, Saccharomyces pastorianus
ttttacaacagtggcgtcagtccta

SEQ ID NO: 113806 - DNA, 25 bp, Saccharomyces pastorianus
tttccggttcgacatcacctattat

SEQ ID NO: 113807 - DNA, 25 bp, Saccharomyces pastorianus
tcctcttcgatgtccgtcggtaata

SEQ ID NO: 113808 - DNA, 25 bp, Saccharomyces pastorianus
gggaagccattacgcacataaacac

SEQ ID NO: 113809 - DNA, 25 bp, Saccharomyces pastorianus
aagtcgagagattacctggttcata

SEQ ID NO: 113810 - DNA, 25 bp, Saccharomyces pastorianus
aaaggcccttacagagcagctgcag

SEQ ID NO: 113811 - DNA, 25 bp, Saccharomyces pastorianus
attcaggcgattttgccgactggca

SEQ ID NO: 113812 - DNA, 25 bp, Saccharomyces pastorianus
aagcaagcccatctctatacacgat

SEQ ID NO: 113813 - DNA, 25 bp, Saccharomyces pastorianus
ggacgagacactggatgcctcacaa

SEQ ID NO: 113814 - DNA, 25 bp, Saccharomyces pastorianus
gccctcaacttgcatacttactgaa

SEQ ID NO: 113815 - DNA, 25 bp, Saccharomyces pastorianus
caaggaaacgcttctgggccaatgg

SEQ ID NO: 113816 - DNA, 25 bp, Saccharomyces pastorianus
agagctcttgacgtatcactctgtc

SEQ ID NO: 113817 - DNA, 25 bp, Saccharomyces pastorianus
tttacattcgtacacaggctccaag

SEQ ID NO: 113818 - DNA, 25 bp, Saccharomyces pastorianus
agatccgtcataccaaaaggccctt

SEQ ID NO: 113819 - DNA, 25 bp, Saccharomyces pastorianus
agctcttcagacttcctgcaaatgg

SEQ ID NO: 113820 - DNA, 25 bp, Saccharomyces pastorianus
aaatcggtcttgataagctcttcag

SEQ ID NO: 113821 - DNA, 25 bp, Saccharomyces pastorianus
tagagtcaatggaggtcaccccgtg

SEQ ID NO: 113822 - DNA, 25 bp, Saccharomyces pastorianus
aacgcttatccgctacaggtgtaaa

SEQ ID NO: 113823 - DNA, 25 bp, Saccharomyces pastorianus
cccctaacttacatcctgagcaaat

SEQ ID NO: 113824 - DNA, 25 bp, Saccharomyces pastorianus
gtttggaaaacacaggctcagtcga

SEQ ID NO: 113825 - DNA, 25 bp, Saccharomyces pastorianus
gggccaatgcggctgttgataataa

SEQ ID NO: 113826 - DNA, 25 bp, Saccharomyces pastorianus
gatttgcgctgagaatctactcgat

SEQ ID NO: 113827 - DNA, 25 bp, Saccharomyces pastorianus
tgatgaattcagctttccacctggg

SEQ ID NO: 113828 - DNA, 25 bp, Saccharomyces pastorianus
aaggtacttgcgtggtgatgaattc

SEQ ID NO: 113829 - DNA, 25 bp, Saccharomyces pastorianus
acagtgcaaaatctagcccctaact

SEQ ID NO: 113830 - DNA, 25 bp, Saccharomyces pastorianus
ggctccacgcagaatgccttgagaa

SEQ ID NO: 113831 - DNA, 25 bp, Saccharomyces pastorianus
aggtgtaaacgcacacggacgtcct

SEQ ID NO: 113832 - DNA, 25 bp, Saccharomyces pastorianus
gaaaataatccatttgcggacccaa

SEQ ID NO: 113833 - DNA, 25 bp, Saccharomyces pastorianus
tgaaacctcacatttactactccta

SEQ ID NO: 113834 - DNA, 25 bp, Saccharomyces pastorianus
aatgccccgaattgtggattcctcg

SEQ ID NO: 113835 - DNA, 25 bp, Saccharomyces pastorianus
gcagactgccagaaatatacggttt

SEQ ID NO: 113836 - DNA, 25 bp, Saccharomyces pastorianus
agaattcactctgcgtgacgtacca

SEQ ID NO: 113837 - DNA, 25 bp, Saccharomyces pastorianus
tacaatgaaaattcctccggctcca

SEQ ID NO: 113838 - DNA, 25 bp, Saccharomyces pastorianus
gatttcgatatctctcatgcttacg

SEQ ID NO: 113839 - DNA, 25 bp, Saccharomyces pastorianus
gattcctcgcgatccttatggattt

SEQ ID NO: 113840 - DNA, 25 bp, Saccharomyces pastorianus
atgcttacgattatccagctgttag

SEQ ID NO: 113841 - DNA, 25 bp, Saccharomyces pastorianus
agctgttagtgcacaatgccccgaa

SEQ ID NO: 113842 - DNA, 25 bp, Saccharomyces pastorianus
gcgtgacgtaccaccatcatataat

SEQ ID NO: 113843 - DNA, 25 bp, Saccharomyces pastorianus
aatggcaagcttaggttcgtgaaca

SEQ ID NO: 113844 - DNA, 25 bp, Saccharomyces pastorianus
gagaagtatgacaacctgcctaata

SEQ ID NO: 113845 - DNA, 25 bp, Saccharomyces pastorianus
gggaagaccccacaattgagcataa

SEQ ID NO: 113846 - DNA, 25 bp, Saccharomyces pastorianus
actttcctgggattctagatacgac

SEQ ID NO: 113847 - DNA, 25 bp, Saccharomyces pastorianus
gacgtaaatgatcctttatcctcta

SEQ ID NO: 113848 - DNA, 25 bp, Saccharomyces pastorianus
aaggtattaggatcactcgctttaa

SEQ ID NO: 113849 - DNA, 25 bp, Saccharomyces pastorianus
aatagtttcgcctttcatgaacagt

SEQ ID NO: 113850 - DNA, 25 bp, Saccharomyces pastorianus
aaacctcatttcaggatcactccag

SEQ ID NO: 113851 - DNA, 25 bp, Saccharomyces pastorianus
tatggtgctattcctcaaacatggg

SEQ ID NO: 113852 - DNA, 25 bp, Saccharomyces pastorianus
aaagggctggtaatggtgtcacact

SEQ ID NO: 113853 - DNA, 25 bp, Saccharomyces pastorianus
aatatttttccctatcacggctata

SEQ ID NO: 113854 - DNA, 25 bp, Saccharomyces pastorianus
gaaatttccgtttccttggctgata

SEQ ID NO: 113855 - DNA, 25 bp, Saccharomyces pastorianus
gaaaggtgatacgttcaggtactat

SEQ ID NO: 113856 - DNA, 25 bp, Saccharomyces pastorianus
agattctgctgaaagggcacttcaa

SEQ ID NO: 113857 - DNA, 25 bp, Saccharomyces pastorianus
ggtgtcaccaagcttaatctgccaa

SEQ ID NO: 113858 - DNA, 25 bp, Saccharomyces pastorianus
aaaatcaacatacctgctggacaga

SEQ ID NO: 113859 - DNA, 25 bp, Saccharomyces pastorianus
ttagcgacttcaatggcgccattat

SEQ ID NO: 113860 - DNA, 25 bp, Saccharomyces pastorianus
gcttaatctgccaatttcttcagga

SEQ ID NO: 113861 - DNA, 25 bp, Saccharomyces pastorianus
tcaaaagacttctcgcatcgcgtaa

SEQ ID NO: 113862 - DNA, 25 bp, Saccharomyces pastorianus
atatgcttatttccactttcagata

SEQ ID NO: 113863 - DNA, 25 bp, Saccharomyces pastorianus
gaaacacgtcaaacctagttgtata

SEQ ID NO: 113864 - DNA, 25 bp, Saccharomyces pastorianus
ggaaaatacttctcgttagcgactt

SEQ ID NO: 113865 - DNA, 25 bp, Saccharomyces pastorianus
ggacagcttattcgaagggttgcat

SEQ ID NO: 113866 - DNA, 25 bp, Saccharomyces pastorianus
aagagaagatttcatacctgtggaa

SEQ ID NO: 113867 - DNA, 25 bp, Saccharomyces pastorianus
gtatcaccagccaaaaaagaccagt

SEQ ID NO: 113868 - DNA, 25 bp, Saccharomyces pastorianus
gatctctgattacgagttggacgac

SEQ ID NO: 113869 - DNA, 25 bp, Saccharomyces pastorianus
tatcccggaatatcttagttaaact

SEQ ID NO: 113870 - DNA, 25 bp, Saccharomyces pastorianus
gaacattccaaacgaaatatcccgg

SEQ ID NO: 113871 - DNA, 25 bp, Saccharomyces pastorianus
attcagactgcccaaacaaattcta

SEQ ID NO: 113872 - DNA, 25 bp, Saccharomyces pastorianus
gagctatataacgatatcccagaaa

SEQ ID NO: 113873 - DNA, 25 bp, Saccharomyces pastorianus
gccttggaccatgatgtaactctag

SEQ ID NO: 113874 - DNA, 25 bp, Saccharomyces pastorianus
acacatatcatgacttggtttcaag

SEQ ID NO: 113875 - DNA, 25 bp, Saccharomyces pastorianus
gaccagttcatacttaaaggagcta

SEQ ID NO: 113876 - DNA, 25 bp, Saccharomyces pastorianus
gtattattgttggagcatcgcttga

SEQ ID NO: 113877 - DNA, 25 bp, Saccharomyces pastorianus
ctgaattcaggcaggcagtcgccat

SEQ ID NO: 113878 - DNA, 25 bp, Saccharomyces pastorianus
accgcgtatgcaactgctatcattc

SEQ ID NO: 113879 - DNA, 25 bp, Saccharomyces pastorianus
attatcgacgatgtcatgactgcag

SEQ ID NO: 113880 - DNA, 25 bp, Saccharomyces pastorianus
gttattttcggacctgcttacaaag

SEQ ID NO: 113881 - DNA, 25 bp, Saccharomyces pastorianus
gagatacaacgttcctgtgctaagt

SEQ ID NO: 113882 - DNA, 25 bp, Saccharomyces pastorianus
ctggaaagctgttggcaaaccttgc

SEQ ID NO: 113883 - DNA, 25 bp, Saccharomyces pastorianus
caagtgctacccaatctgtttcaaa

SEQ ID NO: 113884 - DNA, 25 bp, Saccharomyces pastorianus
gcagtcgccatattttttcaatctt

SEQ ID NO: 113885 - DNA, 25 bp, Saccharomyces pastorianus
aaagggatccctttggctgctattg

SEQ ID NO: 113886 - DNA, 25 bp, Saccharomyces pastorianus
ggctgctattgtatgcgttaaacta

SEQ ID NO: 113887 - DNA, 25 bp, Saccharomyces pastorianus
ctttccctgttgtcctgggaaatat

SEQ ID NO: 113888 - DNA, 25 bp, Saccharomyces pastorianus
tggtgtttgtccaactttccctgtt

SEQ ID NO: 113889 - DNA, 25 bp, Saccharomyces pastorianus
gttgtcctgggaaatattctgtggg

SEQ ID NO: 113890 - DNA, 25 bp, Saccharomyces pastorianus
tccaactttccctgttgtcctggga

SEQ ID NO: 113891 - DNA, 25 bp, Saccharomyces pastorianus
tgtttgtccaactttccctgttgtc

SEQ ID NO: 113892 - DNA, 25 bp, Saccharomyces pastorianus
ctgttgtcctgggaaatattctgtg

SEQ ID NO: 113893 - DNA, 25 bp, Saccharomyces pastorianus
ttgtccaactttccctgttgtcctg

SEQ ID NO: 113894 - DNA, 25 bp, Saccharomyces pastorianus
tttggtgtttgtccaactttccctg

SEQ ID NO: 113895 - DNA, 25 bp, Saccharomyces pastorianus
tccctgttgtcctgggaaatattct

SEQ ID NO: 113896 - DNA, 25 bp, Saccharomyces pastorianus
attctgtggggaacgtagctttgtg

SEQ ID NO: 113897 - DNA, 25 bp, Saccharomyces pastorianus
gtgtttgtccaactttccctgttgt

SEQ ID NO: 113898 - DNA, 25 bp, Saccharomyces pastorianus
aagggccatataccggctgagtcac

SEQ ID NO: 113899 - DNA, 25 bp, Saccharomyces pastorianus
gaagcttcagctcaaactcaggctc

SEQ ID NO: 113900 - DNA, 25 bp, Saccharomyces pastorianus
tctacggttatcatgttcgaccacc

SEQ ID NO: 113901 - DNA, 25 bp, Saccharomyces pastorianus
gaacttggttaatcacactctgtac

SEQ ID NO: 113902 - DNA, 25 bp, Saccharomyces pastorianus
gaaagcttacatttgcagacgtcaa

SEQ ID NO: 113903 - DNA, 25 bp, Saccharomyces pastorianus
acatggagcaggtagcccacgacaa

SEQ ID NO: 113904 - DNA, 25 bp, Saccharomyces pastorianus
tccccggttcaattcacagacagtg

SEQ ID NO: 113905 - DNA, 25 bp, Saccharomyces pastorianus
acagacagtgcctttgggttcccac

SEQ ID NO: 113906 - DNA, 25 bp, Saccharomyces pastorianus
gcctttgctgacagtgtctacggtt

SEQ ID NO: 113907 - DNA, 25 bp, Saccharomyces pastorianus
cagccggccgttagtgtaagtagta

SEQ ID NO: 113908 - DNA, 25 bp, Saccharomyces pastorianus
gaacaagtccaaacttcagtcccag

SEQ ID NO: 113909 - DNA, 25 bp, Saccharomyces pastorianus
gtctcttctgaaccctgcattaaac

SEQ ID NO: 113910 - DNA, 25 bp, Saccharomyces pastorianus
tgcattaaacccctttgctaacgcg

SEQ ID NO: 113911 - DNA, 25 bp, Saccharomyces pastorianus
aatgatggaccctaatgccggtatg

SEQ ID NO: 113912 - DNA, 25 bp, Saccharomyces pastorianus
tgcattgctagcgtctatgttccaa

SEQ ID NO: 113913 - DNA, 25 bp, Saccharomyces pastorianus
agaagacaccagaccaccggaagaa

SEQ ID NO: 113914 - DNA, 25 bp, Saccharomyces pastorianus
gacagatgctcaccaatcctgatat

SEQ ID NO: 113915 - DNA, 25 bp, Saccharomyces pastorianus
gaggaaggctccaacacgaacacta

SEQ ID NO: 113916 - DNA, 25 bp, Saccharomyces pastorianus
gagtaaccctcagatgttggacttt

SEQ ID NO: 113917 - DNA, 25 bp, Saccharomyces pastorianus
gacaactaaacgacatgggcttctt

SEQ ID NO: 113918 - DNA, 25 bp, Saccharomyces pastorianus
taatgcaggtaccaacgcaggcgct

SEQ ID NO: 113919 - DNA, 25 bp, Saccharomyces pastorianus
gctaacacagctgcaaacccatttg

SEQ ID NO: 113920 - DNA, 25 bp, Saccharomyces pastorianus
agatgacgaccacgacgacgaaagt

SEQ ID NO: 113921 - DNA, 25 bp, Saccharomyces pastorianus
ggacgagtacatttggtgccacttc

SEQ ID NO: 113922 - DNA, 25 bp, Saccharomyces pastorianus
gatatagattacctgacgacacatt

SEQ ID NO: 113923 - DNA, 25 bp, Saccharomyces pastorianus
aatcaccaagaaccctagcacttat

SEQ ID NO: 113924 - DNA, 25 bp, Saccharomyces pastorianus
agcacttataaagcgcgtctagcga

SEQ ID NO: 113925 - DNA, 25 bp, Saccharomyces pastorianus
acgttaatcgtggacagccccatct

SEQ ID NO: 113926 - DNA, 25 bp, Saccharomyces pastorianus
gatattccggacacagctagcgacg

SEQ ID NO: 113927 - DNA, 25 bp, Saccharomyces pastorianus
ttcgctgctggtacttcatggttaa

SEQ ID NO: 113928 - DNA, 25 bp, Saccharomyces pastorianus
gccacttccactccagatatagatt

SEQ ID NO: 113929 - DNA, 25 bp, Saccharomyces pastorianus
ggagacccaggaacaacagcatatg

SEQ ID NO: 113930 - DNA, 25 bp, Saccharomyces pastorianus
aaggcggaaccttctcaagatcgtc

SEQ ID NO: 113931 - DNA, 25 bp, Saccharomyces pastorianus
gcgtcatatccttcatctattggtg

SEQ ID NO: 113932 - DNA, 25 bp, Saccharomyces pastorianus
agaccacaatttggacccgctaaat

SEQ ID NO: 113933 - DNA, 25 bp, Saccharomyces pastorianus
gaatgagcatatccgcttcactatt

SEQ ID NO: 113934 - DNA, 25 bp, Saccharomyces pastorianus
ggctattacgttccttttggattcg

SEQ ID NO: 113935 - DNA, 25 bp, Saccharomyces pastorianus
tgtcttcttgcaagcctactgtaag

SEQ ID NO: 113936 - DNA, 25 bp, Saccharomyces pastorianus
ggctattatgtcgttccaaatccaa

SEQ ID NO: 113937 - DNA, 25 bp, Saccharomyces pastorianus
cactattcgcgggtccggaacagaa

SEQ ID NO: 113938 - DNA, 25 bp, Saccharomyces pastorianus
gaatgtctacactcctgagggcgcg

SEQ ID NO: 113939 - DNA, 25 bp, Saccharomyces pastorianus
tatcagtgcatccattgtcttcttg

SEQ ID NO: 113940 - DNA, 25 bp, Saccharomyces pastorianus
caaagagcctctttcttggcgaaat

SEQ ID NO: 113941 - DNA, 25 bp, Saccharomyces pastorianus
ccgtcgatcctacatcacaaatgat

SEQ ID NO: 113942 - DNA, 25 bp, Saccharomyces pastorianus
gcgctattttggagaaggctgtttc

SEQ ID NO: 113943 - DNA, 25 bp, Saccharomyces pastorianus
cggacgtgaaattggatgcgctatt

SEQ ID NO: 113944 - DNA, 25 bp, Saccharomyces pastorianus
gcagtggtatgcatctaagcggcta

SEQ ID NO: 113945 - DNA, 25 bp, Saccharomyces pastorianus
gaaagccacttctgttgttagatgt

SEQ ID NO: 113946 - DNA, 25 bp, Saccharomyces pastorianus
gcggctagatagtttcgatgacgat

SEQ ID NO: 113947 - DNA, 25 bp, Saccharomyces pastorianus
aatgaccacgatcttcacagaggcc

SEQ ID NO: 113948 - DNA, 25 bp, Saccharomyces pastorianus
ggctgtttcagctaagtcattttgc

SEQ ID NO: 113949 - DNA, 25 bp, Saccharomyces pastorianus
aagtcattttgcttggacaccagca

SEQ ID NO: 113950 - DNA, 25 bp, Saccharomyces pastorianus
cattcataaagcactatccggacgt

SEQ ID NO: 113951 - DNA, 25 bp, Saccharomyces pastorianus
agcggctaaggccttcagttgatta

SEQ ID NO: 113952 - DNA, 25 bp, Saccharomyces pastorianus
gaaaacaggcaatttcccgcttgga

SEQ ID NO: 113953 - DNA, 25 bp, Saccharomyces pastorianus
aaaagctttacgatccacattccct

SEQ ID NO: 113954 - DNA, 25 bp, Saccharomyces pastorianus
ggacgcaacgttaacccttcaagag

SEQ ID NO: 113955 - DNA, 25 bp, Saccharomyces pastorianus
tgatttcccacttgaaaggacgcaa

SEQ ID NO: 113956 - DNA, 25 bp, Saccharomyces pastorianus
gatccacattccctagaatccatgg

SEQ ID NO: 113957 - DNA, 25 bp, Saccharomyces pastorianus
ggtactgatatgtcaatcggtgtca

SEQ ID NO: 113958 - DNA, 25 bp, Saccharomyces pastorianus
tacgtcggagttaccggacatcagt

SEQ ID NO: 113959 - DNA, 25 bp, Saccharomyces pastorianus
tacatcatggatttggctgctgcaa

SEQ ID NO: 113960 - DNA, 25 bp, Saccharomyces pastorianus
tcggtgtcatcttaagtatcctttg

SEQ ID NO: 113961 - DNA, 25 bp, Saccharomyces pastorianus
gcaagttattcagacgaccagttac

SEQ ID NO: 113962 - DNA, 25 bp, Saccharomyces pastorianus
gggacagatccgtttatttcaatat

SEQ ID NO: 113963 - DNA, 25 bp, Saccharomyces pastorianus
gtgagttcaggcttaaccatcaata

SEQ ID NO: 113964 - DNA, 25 bp, Saccharomyces pastorianus
agttttacatgattacctgttgcaa

SEQ ID NO: 113965 - DNA, 25 bp, Saccharomyces pastorianus
gttcgataagaaccttggcttcttt

SEQ ID NO: 113966 - DNA, 25 bp, Saccharomyces pastorianus
ccatccgatttcaaaaacccactat

SEQ ID NO: 113967 - DNA, 25 bp, Saccharomyces pastorianus
ttcacatccttcactatatacgtta

SEQ ID NO: 113968 - DNA, 25 bp, Saccharomyces pastorianus
acagggttccattcctagacgaaat

SEQ ID NO: 113969 - DNA, 25 bp, Saccharomyces pastorianus
gaagtcagaagatccaatcatccaa

SEQ ID NO: 113970 - DNA, 25 bp, Saccharomyces pastorianus
gattttatctctacagggttccatt

SEQ ID NO: 113971 - DNA, 25 bp, Saccharomyces pastorianus
gaaggactacaacgaaggattttat

SEQ ID NO: 113972 - DNA, 25 bp, Saccharomyces pastorianus
tactatcctatgatgatggctctga

SEQ ID NO: 113973 - DNA, 25 bp, Saccharomyces pastorianus
tgcgtgaggacgattctttaaggaa

SEQ ID NO: 113974 - DNA, 25 bp, Saccharomyces pastorianus
atatacgttatcaccctcaagcgtg

SEQ ID NO: 113975 - DNA, 25 bp, Saccharomyces pastorianus
agttttccaaggtccgtgatggcga

SEQ ID NO: 113976 - DNA, 25 bp, Saccharomyces pastorianus
acacttggcgtggtttattagacta

SEQ ID NO: 113977 - DNA, 25 bp, Saccharomyces pastorianus
gagccccgttccagaaaaatttcat

SEQ ID NO: 113978 - DNA, 25 bp, Saccharomyces pastorianus
gaagtggaaacccttggcgattttg

SEQ ID NO: 113979 - DNA, 25 bp, Saccharomyces pastorianus
gaggttttttgagaatgccgcccgg

SEQ ID NO: 113980 - DNA, 25 bp, Saccharomyces pastorianus
agccgttcgacacaccatatttatc

SEQ ID NO: 113981 - DNA, 25 bp, Saccharomyces pastorianus
gtgattttaattcccagccgttcga

SEQ ID NO: 113982 - DNA, 25 bp, Saccharomyces pastorianus
atgccgcccggtaatgaaatgacaa

SEQ ID NO: 113983 - DNA, 25 bp, Saccharomyces pastorianus
gggctatttcactatactctgttgg

SEQ ID NO: 113984 - DNA, 25 bp, Saccharomyces pastorianus
gacatccaaaccagtgcactataga

SEQ ID NO: 113985 - DNA, 25 bp, Saccharomyces pastorianus
aagaccgtcattgggtgcagcactt

SEQ ID NO: 113986 - DNA, 25 bp, Saccharomyces pastorianus
tgtgccacacacaacgaagagcatt

SEQ ID NO: 113987 - DNA, 25 bp, Saccharomyces pastorianus
ggtaaaagagggtccatagtctaca

SEQ ID NO: 113988 - DNA, 25 bp, Saccharomyces pastorianus
acaccatcgcagcaacgagagttga

SEQ ID NO: 113989 - DNA, 25 bp, Saccharomyces pastorianus
agtcacgttgagtaggtcgcttatc

SEQ ID NO: 113990 - DNA, 25 bp, Saccharomyces pastorianus
gaagagcattgtcaaaagtttgggt

SEQ ID NO: 113991 - DNA, 25 bp, Saccharomyces pastorianus
taggtcgcttatcggtgtgccacac

SEQ ID NO: 113992 - DNA, 25 bp, Saccharomyces pastorianus
tgaattaacaccatcgcagcaacga

SEQ ID NO: 113993 - DNA, 25 bp, Saccharomyces pastorianus
agctggctccctagctaaagtgaaa

SEQ ID NO: 113994 - DNA, 25 bp, Saccharomyces pastorianus
gtgttttacaaagtcacgttgagta

SEQ ID NO: 113995 - DNA, 25 bp, Saccharomyces pastorianus
agagggtccatagtctacaaaaaag

SEQ ID NO: 113996 - DNA, 25 bp, Saccharomyces pastorianus
agtaaacccggccatagctggctcc

SEQ ID NO: 113997 - DNA, 25 bp, Saccharomyces pastorianus
tttttccagacttatcgttcgctag

SEQ ID NO: 113998 - DNA, 25 bp, Saccharomyces pastorianus
attcgtcgacgtactggacactgaa

SEQ ID NO: 113999 - DNA, 25 bp, Saccharomyces pastorianus
ttaccactgggcgaagtagcacaac

SEQ ID NO: 114000 - DNA, 25 bp, Saccharomyces pastorianus
atcgacagtttgatctggccaattc

SEQ ID NO: 114001 - DNA, 25 bp, Saccharomyces pastorianus
aaattcaccgtcatttgcagaaaaa

SEQ ID NO: 114002 - DNA, 25 bp, Saccharomyces pastorianus
aagctttcttcattgttgaactcga

SEQ ID NO: 114003 - DNA, 25 bp, Saccharomyces pastorianus
aagggctagccgtaattcgtcgacg

SEQ ID NO: 114004 - DNA, 25 bp, Saccharomyces pastorianus
tatttgacagtaacatcccctcttc

SEQ ID NO: 114005 - DNA, 25 bp, Saccharomyces pastorianus
tacaggtcgaccttttagacatgaa

SEQ ID NO: 114006 - DNA, 25 bp, Saccharomyces pastorianus
tccaagttctatgcattatccgatg

SEQ ID NO: 114007 - DNA, 25 bp, Saccharomyces pastorianus
tcttcgtcgttttccagacttgata

SEQ ID NO: 114008 - DNA, 25 bp, Saccharomyces pastorianus
tagttcatcgtcagacagcgtcgaa

SEQ ID NO: 114009 - DNA, 25 bp, Saccharomyces pastorianus
aaacggtgttctcaaggccatgtca

SEQ ID NO: 114010 - DNA, 25 bp, Saccharomyces pastorianus
ttggccctggactattcatgaacta

SEQ ID NO: 114011 - DNA, 25 bp, Saccharomyces pastorianus
agaagatgcactcaccgatagggat

SEQ ID NO: 114012 - DNA, 25 bp, Saccharomyces pastorianus
gcgtcgaacgtaataacccacttag

SEQ ID NO: 114013 - DNA, 25 bp, Saccharomyces pastorianus
tgaaacttcaccacatgctattatg

SEQ ID NO: 114014 - DNA, 25 bp, Saccharomyces pastorianus
gtacgtaatgtaccaggacgccatg

SEQ ID NO: 114015 - DNA, 25 bp, Saccharomyces pastorianus
aagtgtgtggtccttacaacgtgct

SEQ ID NO: 114016 - DNA, 25 bp, Saccharomyces pastorianus
gggcaggattgttccatccagcgaa

SEQ ID NO: 114017 - DNA, 25 bp, Saccharomyces pastorianus
ggaggcactgagtcaagctcttggc

SEQ ID NO: 114018 - DNA, 25 bp, Saccharomyces pastorianus
tatgcacggctgttgctatcggtat

SEQ ID NO: 114019 - DNA, 25 bp, Saccharomyces pastorianus
gtcattatttattgcggctcggcct

SEQ ID NO: 114020 - DNA, 25 bp, Saccharomyces pastorianus
gaagttttgcttttcaatggcgtca

SEQ ID NO: 114021 - DNA, 25 bp, Saccharomyces pastorianus
aaatgcgggtacttgtctctaagac

SEQ ID NO: 114022 - DNA, 25 bp, Saccharomyces pastorianus
gaggttcagaacctacttcttctgt

SEQ ID NO: 114023 - DNA, 25 bp, Saccharomyces pastorianus
acgcatcagctttcaccagttttaa

SEQ ID NO: 114024 - DNA, 25 bp, Saccharomyces pastorianus
caatgcctatggagcctatcctaaa

SEQ ID NO: 114025 - DNA, 25 bp, Saccharomyces pastorianus
attttccaacaaatctggcctgctg

SEQ ID NO: 114026 - DNA, 25 bp, Saccharomyces pastorianus
taggaagccttaccgttggcaacga

SEQ ID NO: 114027 - DNA, 25 bp, Saccharomyces pastorianus
gagagttcgcatgcaaactgctata

SEQ ID NO: 114028 - DNA, 25 bp, Saccharomyces pastorianus
acttcttctgtctcgcaatgcgaaa

SEQ ID NO: 114029 - DNA, 25 bp, Saccharomyces pastorianus
tcaagagatcattacgctagggcga

SEQ ID NO: 114030 - DNA, 25 bp, Saccharomyces pastorianus
gatttgtacagatgtcgcagctaga

SEQ ID NO: 114031 - DNA, 25 bp, Saccharomyces pastorianus
actggatttagccaaagtagcaaag

SEQ ID NO: 114032 - DNA, 25 bp, Saccharomyces pastorianus
ttccagtccctccaaaggttaacat

SEQ ID NO: 114033 - DNA, 25 bp, Saccharomyces pastorianus
cagccaaggatggttatagatctta

SEQ ID NO: 114034 - DNA, 25 bp, Saccharomyces pastorianus
tatttacaagcgtacgcttcccact

SEQ ID NO: 114035 - DNA, 25 bp, Saccharomyces pastorianus
tagcaaagtcttacggttttccagt

SEQ ID NO: 114036 - DNA, 25 bp, Saccharomyces pastorianus
cattcaattcgaccctcctgatgat

SEQ ID NO: 114037 - DNA, 25 bp, Saccharomyces pastorianus
ctatattgatttgccagtcctcgaa

SEQ ID NO: 114038 - DNA, 25 bp, Saccharomyces pastorianus
gctgtggattggatcattcaattcg

SEQ ID NO: 114039 - DNA, 25 bp, Saccharomyces pastorianus
ttgccagtcctcgaattacacggta

SEQ ID NO: 114040 - DNA, 25 bp, Saccharomyces pastorianus
gcttcccactctttgaaaactgtct

SEQ ID NO: 114041 - DNA, 25 bp, Saccharomyces pastorianus
gcaaggttcctctactagcgtgaag

SEQ ID NO: 114042 - DNA, 25 bp, Saccharomyces pastorianus
gaattctacttttgtcttggaccct

SEQ ID NO: 114043 - DNA, 25 bp, Saccharomyces pastorianus
acagcgtccatgcacacattgaggt

SEQ ID NO: 114044 - DNA, 25 bp, Saccharomyces pastorianus
tgaggtctccttccaaatcaagaaa

SEQ ID NO: 114045 - DNA, 25 bp, Saccharomyces pastorianus
acgtacggcctcgatgagcagcaat

SEQ ID NO: 114046 - DNA, 25 bp, Saccharomyces pastorianus
atgacatctcttaagcctgcaggca

SEQ ID NO: 114047 - DNA, 25 bp, Saccharomyces pastorianus
atcatccaagtcaggcctcgtgaaa

SEQ ID NO: 114048 - DNA, 25 bp, Saccharomyces pastorianus
attcgactatcttcacgctaacaaa

SEQ ID NO: 114049 - DNA, 25 bp, Saccharomyces pastorianus
tatggatggcgggtcctctgaaact

SEQ ID NO: 114050 - DNA, 25 bp, Saccharomyces pastorianus
acggtacttctttatcatcatccaa

SEQ ID NO: 114051 - DNA, 25 bp, Saccharomyces pastorianus
gatgaacggttgtttcagcaccact

SEQ ID NO: 114052 - DNA, 25 bp, Saccharomyces pastorianus
gagaagaccccgattggcttacagg

SEQ ID NO: 114053 - DNA, 25 bp, Saccharomyces pastorianus
gtccaagcttcctggatccataagg

SEQ ID NO: 114054 - DNA, 25 bp, Saccharomyces pastorianus
gatatactgatagttcccacatcgt

SEQ ID NO: 114055 - DNA, 25 bp, Saccharomyces pastorianus
gtattttattcgcacctaccaggtc

SEQ ID NO: 114056 - DNA, 25 bp, Saccharomyces pastorianus
caaatctccggctaactcgtatata

SEQ ID NO: 114057 - DNA, 25 bp, Saccharomyces pastorianus
tgacgggatcttcagatttccaaat

SEQ ID NO: 114058 - DNA, 25 bp, Saccharomyces pastorianus
gaagcggcttccaatttatcaaggt

SEQ ID NO: 114059 - DNA, 25 bp, Saccharomyces pastorianus
ttattatacgctatcacccgctgaa

SEQ ID NO: 114060 - DNA, 25 bp, Saccharomyces pastorianus
aaacgatgtctttactgtcccaatg

SEQ ID NO: 114061 - DNA, 25 bp, Saccharomyces pastorianus
agggaaatccagacggcctagatat

SEQ ID NO: 114062 - DNA, 25 bp, Saccharomyces pastorianus
ggcttgaaatataccctgtgtccat

SEQ ID NO: 114063 - DNA, 25 bp, Saccharomyces pastorianus
ataccgttcgcatcgtaagtcacag

SEQ ID NO: 114064 - DNA, 25 bp, Saccharomyces pastorianus
acttgctgtggcataccgttcgcat

SEQ ID NO: 114065 - DNA, 25 bp, Saccharomyces pastorianus
atttgactggaagcaccacccactt

SEQ ID NO: 114066 - DNA, 25 bp, Saccharomyces pastorianus
gaaatcaggccttacgcggaacccg

SEQ ID NO: 114067 - DNA, 25 bp, Saccharomyces pastorianus
gcttgttcaccatacatttgactgg

SEQ ID NO: 114068 - DNA, 25 bp, Saccharomyces pastorianus
gtcacagcagcaccaaacacaggga

SEQ ID NO: 114069 - DNA, 25 bp, Saccharomyces pastorianus
ttcttcattctaccaaacaatccct

SEQ ID NO: 114070 - DNA, 25 bp, Saccharomyces pastorianus
tggctgatacactgcttgttcacca

SEQ ID NO: 114071 - DNA, 25 bp, Saccharomyces pastorianus
aaagggtatcaagcgcttatttctt

SEQ ID NO: 114072 - DNA, 25 bp, Saccharomyces pastorianus
ttcttttgcttttcctcagtctgta

SEQ ID NO: 114073 - DNA, 25 bp, Saccharomyces pastorianus
tcagtctgtacgtgttgttgtggct

SEQ ID NO: 114074 - DNA, 25 bp, Saccharomyces pastorianus
ttggtgctgctgtgacttacgatgc

SEQ ID NO: 114075 - DNA, 25 bp, Saccharomyces pastorianus
tgtgtgatgttttcggtcaacccat

SEQ ID NO: 114076 - DNA, 25 bp, Saccharomyces pastorianus
gaaccgtgcctcagatgtcaagatt

SEQ ID NO: 114077 - DNA, 25 bp, Saccharomyces pastorianus
caagtgggtggtgcttccagtcaaa

SEQ ID NO: 114078 - DNA, 25 bp, Saccharomyces pastorianus
gaagcccaaccttttgaacaagctg

SEQ ID NO: 114079 - DNA, 25 bp, Saccharomyces pastorianus
ttctagacgctgtgcaggaagccca

SEQ ID NO: 114080 - DNA, 25 bp, Saccharomyces pastorianus
tggagactccaacttacgggttccg

SEQ ID NO: 114081 - DNA, 25 bp, Saccharomyces pastorianus
ttacgatgcgaacggtatgccacag

SEQ ID NO: 114082 - DNA, 25 bp, Saccharomyces pastorianus
tgaagatgcgtactgcttccgttgc

SEQ ID NO: 114083 - DNA, 25 bp, Saccharomyces pastorianus
cttccgttgctgatcctattctaga

SEQ ID NO: 114084 - DNA, 25 bp, Saccharomyces pastorianus
aaggcctgatttccctgtgtttggt

SEQ ID NO: 114085 - DNA, 25 bp, Saccharomyces pastorianus
attcgaaaccatgtcagctttgcaa

SEQ ID NO: 114086 - DNA, 25 bp, Saccharomyces pastorianus
ataggtctcgcaagttcggatacac

SEQ ID NO: 114087 - DNA, 25 bp, Saccharomyces pastorianus
agtgtctgctgtcctacatctgcaa

SEQ ID NO: 114088 - DNA, 25 bp, Saccharomyces pastorianus
cacatccgtctccaaagtcttgaaa

SEQ ID NO: 114089 - DNA, 25 bp, Saccharomyces pastorianus
gactccttgcgttcatacgtaatcg

SEQ ID NO: 114090 - DNA, 25 bp, Saccharomyces pastorianus
catattgtttttctgcctgtttgcc

SEQ ID NO: 114091 - DNA, 25 bp, Saccharomyces pastorianus
taccaatcgtccctagcttgaaaat

SEQ ID NO: 114092 - DNA, 25 bp, Saccharomyces pastorianus
gcatgattcctttgcatctgacgac

SEQ ID NO: 114093 - DNA, 25 bp, Saccharomyces pastorianus
tcggatacacctgcgaacagctatt

SEQ ID NO: 114094 - DNA, 25 bp, Saccharomyces pastorianus
gtttgcaccagcgtattggttccaa

SEQ ID NO: 114095 - DNA, 25 bp, Saccharomyces pastorianus
aactgactcccgcatataggtctcg

SEQ ID NO: 114096 - DNA, 25 bp, Saccharomyces pastorianus
gaggttgaccactacgaatcctgta

SEQ ID NO: 114097 - DNA, 25 bp, Saccharomyces pastorianus
agtcgtgctatgactcgcaatccgt

SEQ ID NO: 114098 - DNA, 25 bp, Saccharomyces pastorianus
tgtaataacgcccaattggttcctt

SEQ ID NO: 114099 - DNA, 25 bp, Saccharomyces pastorianus
ctgtgttccagctaccatttattgt

SEQ ID NO: 114100 - DNA, 25 bp, Saccharomyces pastorianus
ttgtttgggcttgatcgagtcgtgc

SEQ ID NO: 114101 - DNA, 25 bp, Saccharomyces pastorianus
gtgctacccaacgttacaagatatc

SEQ ID NO: 114102 - DNA, 25 bp, Saccharomyces pastorianus
ttgaatcaagacctacccattctgg

SEQ ID NO: 114103 - DNA, 25 bp, Saccharomyces pastorianus
tgagagtcttcaatggtggccacat

SEQ ID NO: 114104 - DNA, 25 bp, Saccharomyces pastorianus
aatcctacaagcacttcacctattt

SEQ ID NO: 114105 - DNA, 25 bp, Saccharomyces pastorianus
aaggcgtggacggatgtcttgccat

SEQ ID NO: 114106 - DNA, 25 bp, Saccharomyces pastorianus
tatcgacgactacttaaaccaggac

SEQ ID NO: 114107 - DNA, 25 bp, Saccharomyces pastorianus
tttcattattgctgattgctgcggt

SEQ ID NO: 114108 - DNA, 25 bp, Saccharomyces pastorianus
aacatctctcgttctgtatcatcga

SEQ ID NO: 114109 - DNA, 25 bp, Saccharomyces pastorianus
tccgcgtttgcttcatttcattatt

SEQ ID NO: 114110 - DNA, 25 bp, Saccharomyces pastorianus
agaatgataatgttccacccgtcca

SEQ ID NO: 114111 - DNA, 25 bp, Saccharomyces pastorianus
agtaatcaagctttgggcacgtggt

SEQ ID NO: 114112 - DNA, 25 bp, Saccharomyces pastorianus
atggttccattgtaccccaatcaaa

SEQ ID NO: 114113 - DNA, 25 bp, Saccharomyces pastorianus
gtccactacccaattcacgaagata

SEQ ID NO: 114114 - DNA, 25 bp, Saccharomyces pastorianus
ctgattgctgcggttgaatacttca

SEQ ID NO: 114115 - DNA, 25 bp, Saccharomyces pastorianus
ctacgtagcttatgtcgggtacgac

SEQ ID NO: 114116 - DNA, 25 bp, Saccharomyces pastorianus
tcgggtacgacacagactctgagct

SEQ ID NO: 114117 - DNA, 25 bp, Saccharomyces pastorianus
aaagaaccccagtctggctcagtaa

SEQ ID NO: 114118 - DNA, 25 bp, Saccharomyces pastorianus
agagcaacactttttggcccgatat

SEQ ID NO: 114119 - DNA, 25 bp, Saccharomyces pastorianus
gttcgctggctcatattattagatt

SEQ ID NO: 114120 - DNA, 25 bp, Saccharomyces pastorianus
agctcactattctatatatgcgaag

SEQ ID NO: 114121 - DNA, 25 bp, Saccharomyces pastorianus
gtggctgaatgaactatcctacgca

SEQ ID NO: 114122 - DNA, 25 bp, Saccharomyces pastorianus
tgaattttctgtatggtgcttaaac

SEQ ID NO: 114123 - DNA, 25 bp, Saccharomyces pastorianus
aggcttaaataccaagagcttctaa

SEQ ID NO: 114124 - DNA, 25 bp, Saccharomyces pastorianus
tggacactgaacgaccaaaagttgt

SEQ ID NO: 114125 - DNA, 25 bp, Saccharomyces pastorianus
ggcccgatatatggactttatacca

SEQ ID NO: 114126 - DNA, 25 bp, Saccharomyces pastorianus
aacaacctctggtatcgaccttgat

SEQ ID NO: 114127 - DNA, 25 bp, Saccharomyces pastorianus
gggtgcgattctattggattgataa

SEQ ID NO: 114128 - DNA, 25 bp, Saccharomyces pastorianus
gaaacactacagtatggcagtcagt

SEQ ID NO: 114129 - DNA, 25 bp, Saccharomyces pastorianus
gattctattgtcagaggtactactt

SEQ ID NO: 114130 - DNA, 25 bp, Saccharomyces pastorianus
ggacatttatcatgccaaaccagag

SEQ ID NO: 114131 - DNA, 25 bp, Saccharomyces pastorianus
aaacagatacgtgggcaggacattt

SEQ ID NO: 114132 - DNA, 25 bp, Saccharomyces pastorianus
cccagccattcgttacaaccatatt

SEQ ID NO: 114133 - DNA, 25 bp, Saccharomyces pastorianus
ttaacatggccaaggaatccggtgc

SEQ ID NO: 114134 - DNA, 25 bp, Saccharomyces pastorianus
cttgattgcttataacagaaccgat

SEQ ID NO: 114135 - DNA, 25 bp, Saccharomyces pastorianus
ccggaaattatgtcactggtgttga

SEQ ID NO: 114136 - DNA, 25 bp, Saccharomyces pastorianus
gaatccggtgcaacaaaggtttact

SEQ ID NO: 114137 - DNA, 25 bp, Saccharomyces pastorianus
gcttaaccctatggagtctgaattt

SEQ ID NO: 114138 - DNA, 25 bp, Saccharomyces pastorianus
gaaagagtcatttaccaatcattgg

SEQ ID NO: 114139 - DNA, 25 bp, Saccharomyces pastorianus
aaaggtttacttcgcttcagctgcc

SEQ ID NO: 114140 - DNA, 25 bp, Saccharomyces pastorianus
aagcgccttggacacacacacagaa

SEQ ID NO: 114141 - DNA, 25 bp, Saccharomyces pastorianus
aggacacaccacttttcaatgacac

SEQ ID NO: 114142 - DNA, 25 bp, Saccharomyces pastorianus
gagtgtatacatcgcacatagactg

SEQ ID NO: 114143 - DNA, 25 bp, Saccharomyces pastorianus
tgttttttgacgaggccacaagcgc

SEQ ID NO: 114144 - DNA, 25 bp, Saccharomyces pastorianus
gaacaagctctcttacgaaccatta

SEQ ID NO: 114145 - DNA, 25 bp, Saccharomyces pastorianus
ttggctatgccagggtcattgtacc

SEQ ID NO: 114146 - DNA, 25 bp, Saccharomyces pastorianus
acaaggttttgacaccatcgtcggg

SEQ ID NO: 114147 - DNA, 25 bp, Saccharomyces pastorianus
attgtaccgcgaactttggaccata

SEQ ID NO: 114148 - DNA, 25 bp, Saccharomyces pastorianus
gttgaaaaagcccagctagcaccct

SEQ ID NO: 114149 - DNA, 25 bp, Saccharomyces pastorianus
taaagttcggtcgtattgacgcaac

SEQ ID NO: 114150 - DNA, 25 bp, Saccharomyces pastorianus
gagataactttacttcgggttcgag

SEQ ID NO: 114151 - DNA, 25 bp, Saccharomyces pastorianus
aattattgagttcccatccagtgct

SEQ ID NO: 114152 - DNA, 25 bp, Saccharomyces pastorianus
gagcctaccgaagcgctagacaaga

SEQ ID NO: 114153 - DNA, 25 bp, Saccharomyces pastorianus
gtcaaatcaggagaagagcctaccg

SEQ ID NO: 114154 - DNA, 25 bp, Saccharomyces pastorianus
cccaagcttgggaactgatcgaatt

SEQ ID NO: 114155 - DNA, 25 bp, Saccharomyces pastorianus
aatatgccattattcaaggcggctc

SEQ ID NO: 114156 - DNA, 25 bp, Saccharomyces pastorianus
ttccacgaagttgttaatatgccat

SEQ ID NO: 114157 - DNA, 25 bp, Saccharomyces pastorianus
atggtacaaagagtgcccaagcttg

SEQ ID NO: 114158 - DNA, 25 bp, Saccharomyces pastorianus
caatgggttaatcactgtgtccagg

SEQ ID NO: 114159 - DNA, 25 bp, Saccharomyces pastorianus
aggcggctccagaaacagggatcat

SEQ ID NO: 114160 - DNA, 25 bp, Saccharomyces pastorianus
tgacgcttccttagaaccattgggc

SEQ ID NO: 114161 - DNA, 25 bp, Saccharomyces pastorianus
atccagtgcttccattccacgaagt

SEQ ID NO: 114162 - DNA, 25 bp, Saccharomyces pastorianus
agttggcttatccagtttaccagaa

SEQ ID NO: 114163 - DNA, 25 bp, Saccharomyces pastorianus
ttgtcaagtctatctccattgtcgg

SEQ ID NO: 114164 - DNA, 25 bp, Saccharomyces pastorianus
gtattcatcgacttcaccaaagaga

SEQ ID NO: 114165 - DNA, 25 bp, Saccharomyces pastorianus
acattgttagcgcagtcgttaaggc

SEQ ID NO: 114166 - DNA, 25 bp, Saccharomyces pastorianus
cctcgctcggtggtgaagtattcat

SEQ ID NO: 114167 - DNA, 25 bp, Saccharomyces pastorianus
aaagtgctcctctgatgtcttcaac

SEQ ID NO: 114168 - DNA, 25 bp, Saccharomyces pastorianus
ggctttgaagtctgccaacttgaga

SEQ ID NO: 114169 - DNA, 25 bp, Saccharomyces pastorianus
gtagggcgaacggtactgttgtctt

SEQ ID NO: 114170 - DNA, 25 bp, Saccharomyces pastorianus
aagtcgcgccaatcttgtgtgctgg

SEQ ID NO: 114171 - DNA, 25 bp, Saccharomyces pastorianus
ggaagaattgtttacctcgctcggt

SEQ ID NO: 114172 - DNA, 25 bp, Saccharomyces pastorianus
aggtctagtcaagtctccaataaag

SEQ ID NO: 114173 - DNA, 25 bp, Saccharomyces pastorianus
aagtattggttactccactgaagaa

SEQ ID NO: 114174 - DNA, 25 bp, Saccharomyces pastorianus
ggatagattgagatcgcattcttcc

SEQ ID NO: 114175 - DNA, 25 bp, Saccharomyces pastorianus
tttcagggcttattatcggaccaaa

SEQ ID NO: 114176 - DNA, 25 bp, Saccharomyces pastorianus
ttacccgaggagtctaaattgttca

SEQ ID NO: 114177 - DNA, 25 bp, Saccharomyces pastorianus
gacacggaatatccttcttatttaa

SEQ ID NO: 114178 - DNA, 25 bp, Saccharomyces pastorianus
acacaaatttccagtttcagggctt

SEQ ID NO: 114179 - DNA, 25 bp, Saccharomyces pastorianus
tcggaccaaaacaccttcaaagatg

SEQ ID NO: 114180 - DNA, 25 bp, Saccharomyces pastorianus
gatgaaaacgcgactgacagaccaa

SEQ ID NO: 114181 - DNA, 25 bp, Saccharomyces pastorianus
gatcgtcttcatgcaaaatttggtc

SEQ ID NO: 114182 - DNA, 25 bp, Saccharomyces pastorianus
gaacatcttactctggaccaacaca

SEQ ID NO: 114183 - DNA, 25 bp, Saccharomyces pastorianus
aagggcgtatagtggttgttcaaca

SEQ ID NO: 114184 - DNA, 25 bp, Saccharomyces pastorianus
gctctcctattcttatcacgttatt

SEQ ID NO: 114185 - DNA, 25 bp, Saccharomyces pastorianus
tatattctatactcatttgtgaaag

SEQ ID NO: 114186 - DNA, 25 bp, Saccharomyces pastorianus
gtgattaaaccactgaaacttcatt

SEQ ID NO: 114187 - DNA, 25 bp, Saccharomyces pastorianus
tgtcttccttttagctacgggtcct

SEQ ID NO: 114188 - DNA, 25 bp, Saccharomyces pastorianus
tacgggtcctcgctgctctatagtt

SEQ ID NO: 114189 - DNA, 25 bp, Saccharomyces pastorianus
catatttgctctcctattcttatca

SEQ ID NO: 114190 - DNA, 25 bp, Saccharomyces pastorianus
tactttatgatcattctttttccct

SEQ ID NO: 114191 - DNA, 25 bp, Saccharomyces pastorianus
cttatcacgttattgtttacttatg

SEQ ID NO: 114192 - DNA, 25 bp, Saccharomyces pastorianus
gctgctctatagtttgtgttctaac

SEQ ID NO: 114193 - DNA, 25 bp, Saccharomyces pastorianus
tcaatttgtcttccttttagctacg

SEQ ID NO: 114194 - DNA, 25 bp, Saccharomyces pastorianus
gaataagccctttcccatatttgct

SEQ ID NO: 114195 - DNA, 25 bp, Saccharomyces pastorianus
gatacttacggcgaagctgtcccat

SEQ ID NO: 114196 - DNA, 25 bp, Saccharomyces pastorianus
aagccgccatttcttctatcaaaag

SEQ ID NO: 114197 - DNA, 25 bp, Saccharomyces pastorianus
attcaccgccttcaatgatctatgg

SEQ ID NO: 114198 - DNA, 25 bp, Saccharomyces pastorianus
gatgatattaccactgtttctgtcg

SEQ ID NO: 114199 - DNA, 25 bp, Saccharomyces pastorianus
agtcgtttccgttgataccttcatt

SEQ ID NO: 114200 - DNA, 25 bp, Saccharomyces pastorianus
aagtcagctttaacctctgctggtt

SEQ ID NO: 114201 - DNA, 25 bp, Saccharomyces pastorianus
ggttatacaggctcagtcgtttccg

SEQ ID NO: 114202 - DNA, 25 bp, Saccharomyces pastorianus
aacgcccatgcatacttcgatgaaa

SEQ ID NO: 114203 - DNA, 25 bp, Saccharomyces pastorianus
tgcggctcttcagcttacttattca

SEQ ID NO: 114204 - DNA, 25 bp, Saccharomyces pastorianus
aaccctgacctgtgtaattattctg

SEQ ID NO: 114205 - DNA, 25 bp, Saccharomyces pastorianus
ggtgaatacgtttccacggccaagt

SEQ ID NO: 114206 - DNA, 25 bp, Saccharomyces pastorianus
gatactggtccaaatgctccatcga

SEQ ID NO: 114207 - DNA, 25 bp, Saccharomyces pastorianus
acaatacgggcatgggctggtctat

SEQ ID NO: 114208 - DNA, 25 bp, Saccharomyces pastorianus
atcgcgccattctttgctggtgatt

SEQ ID NO: 114209 - DNA, 25 bp, Saccharomyces pastorianus
cagatttctttcttggtcacttcct

SEQ ID NO: 114210 - DNA, 25 bp, Saccharomyces pastorianus
ggtgatttcgtatctagtccgcaag

SEQ ID NO: 114211 - DNA, 25 bp, Saccharomyces pastorianus
attgctggaaggcacccttttcgaa

SEQ ID NO: 114212 - DNA, 25 bp, Saccharomyces pastorianus
gttggaactttacccgtacattgat

SEQ ID NO: 114213 - DNA, 25 bp, Saccharomyces pastorianus
ggtctatcattttacagcccatacg

SEQ ID NO: 114214 - DNA, 25 bp, Saccharomyces pastorianus
ggtcacttcctcttatttatacaaa

SEQ ID NO: 114215 - DNA, 25 bp, Saccharomyces pastorianus
atgcatctgattcttttcaaggtct

SEQ ID NO: 114216 - DNA, 25 bp, Saccharomyces pastorianus
taggtgtgctcctttttatgctcat

SEQ ID NO: 114217 - DNA, 25 bp, Saccharomyces pastorianus
tagcacaagtggtctttacctccat

SEQ ID NO: 114218 - DNA, 25 bp, Saccharomyces pastorianus
ttacctccattatttccttatccat

SEQ ID NO: 114219 - DNA, 25 bp, Saccharomyces pastorianus
gttgctcctccgctttgaaagagat

SEQ ID NO: 114220 - DNA, 25 bp, Saccharomyces pastorianus
gtatgggtaccaactctgcatcagg

SEQ ID NO: 114221 - DNA, 25 bp, Saccharomyces pastorianus
actggtaagtactggtccgctgcaa

SEQ ID NO: 114222 - DNA, 25 bp, Saccharomyces pastorianus
tagtgttgatctgggttccggaact

SEQ ID NO: 114223 - DNA, 25 bp, Saccharomyces pastorianus
ggaactgaatccagtactgcctctt

SEQ ID NO: 114224 - DNA, 25 bp, Saccharomyces pastorianus
aagaatgctgccaccaacgttaaag

SEQ ID NO: 114225 - DNA, 25 bp, Saccharomyces pastorianus
gtatttcagcaaacggtaccgccgg

SEQ ID NO: 114226 - DNA, 25 bp, Saccharomyces pastorianus
atctgactgtagcttcagcggttct

SEQ ID NO: 114227 - DNA, 25 bp, Saccharomyces pastorianus
gtatggtgcttactctttctgtaca

SEQ ID NO: 114228 - DNA, 25 bp, Saccharomyces pastorianus
agtctcttcgaagtacatgtatacg

SEQ ID NO: 114229 - DNA, 25 bp, Saccharomyces pastorianus
agaaccgtacaaggcttcaacctca

SEQ ID NO: 114230 - DNA, 25 bp, Saccharomyces pastorianus
ggcttcaacctcagtaaatagtctt

SEQ ID NO: 114231 - DNA, 25 bp, Saccharomyces pastorianus
atgctaactaaaccgtatttgttag

SEQ ID NO: 114232 - DNA, 25 bp, Saccharomyces pastorianus
atagtcttggtgttacttcgttaca

SEQ ID NO: 114233 - DNA, 25 bp, Saccharomyces pastorianus
tgtatacgataccaccagaccagac

SEQ ID NO: 114234 - DNA, 25 bp, Saccharomyces pastorianus
gacatctgtcatattagaaccgtac

SEQ ID NO: 114235 - DNA, 25 bp, Saccharomyces pastorianus
gataccaccagaccagacatctgtc

SEQ ID NO: 114236 - DNA, 25 bp, Saccharomyces pastorianus
acttcgttacaaccgtattcagaga

SEQ ID NO: 114237 - DNA, 25 bp, Saccharomyces pastorianus
tggtgttacttcgttacaaccgtat

SEQ ID NO: 114238 - DNA, 25 bp, Saccharomyces pastorianus
atttgttagtctcttcgaagtacat

SEQ ID NO: 114239 - DNA, 25 bp, Saccharomyces pastorianus
taattcgccaattgtgtgtgctcaa

SEQ ID NO: 114240 - DNA, 25 bp, Saccharomyces pastorianus
ggatttttgccttctagtgatgcta

SEQ ID NO: 114241 - DNA, 25 bp, Saccharomyces pastorianus
gtattcgccaagctgcttcttatat

SEQ ID NO: 114242 - DNA, 25 bp, Saccharomyces pastorianus
agattgtcgattttccaggctccaa

SEQ ID NO: 114243 - DNA, 25 bp, Saccharomyces pastorianus
atacgctccatctacatatgctgac

SEQ ID NO: 114244 - DNA, 25 bp, Saccharomyces pastorianus
taatcggtgtttgtgcccaatacgc

SEQ ID NO: 114245 - DNA, 25 bp, Saccharomyces pastorianus
tgctcaatctaatatctccgctgta

SEQ ID NO: 114246 - DNA, 25 bp, Saccharomyces pastorianus
acacgtacacggctaattggttcaa

SEQ ID NO: 114247 - DNA, 25 bp, Saccharomyces pastorianus
gctgacgtttgcataccgactttag

SEQ ID NO: 114248 - DNA, 25 bp, Saccharomyces pastorianus
ttaccgagtgcttgatttctcctga

SEQ ID NO: 114249 - DNA, 25 bp, Saccharomyces pastorianus
gaagctgcctcattcaactatcaat

SEQ ID NO: 114250 - DNA, 25 bp, Saccharomyces pastorianus
gtcgtcttcttaacatgttccttat

SEQ ID NO: 114251 - DNA, 25 bp, Saccharomyces pastorianus
gagattatgtcttgtttgctgccaa

SEQ ID NO: 114252 - DNA, 25 bp, Saccharomyces pastorianus
aatccattcgtcgttccttagaaca

SEQ ID NO: 114253 - DNA, 25 bp, Saccharomyces pastorianus
gaagttttgcaatctgttatcgcag

SEQ ID NO: 114254 - DNA, 25 bp, Saccharomyces pastorianus
gagaagaccatctttgttgtcgaaa

SEQ ID NO: 114255 - DNA, 25 bp, Saccharomyces pastorianus
atgactgccttctattccggtatta

SEQ ID NO: 114256 - DNA, 25 bp, Saccharomyces pastorianus
gtttgccatatcaccaacacatcaa

SEQ ID NO: 114257 - DNA, 25 bp, Saccharomyces pastorianus
gatttaatcgatgtcgtcttcttaa

SEQ ID NO: 114258 - DNA, 25 bp, Saccharomyces pastorianus
gaggttctattcaagtttttctgtt

SEQ ID NO: 114259 - DNA, 25 bp, Saccharomyces pastorianus
aattccttactctccaaaatccatt

SEQ ID NO: 114260 - DNA, 25 bp, Saccharomyces pastorianus
agccgaattatttgatcttccagaa

SEQ ID NO: 114261 - DNA, 25 bp, Saccharomyces pastorianus
gtatatgttcccttaaccacgagag

SEQ ID NO: 114262 - DNA, 25 bp, Saccharomyces pastorianus
gagagacacctctattcccgagtta

SEQ ID NO: 114263 - DNA, 25 bp, Saccharomyces pastorianus
gtgatttcaccggattggactcgca

SEQ ID NO: 114264 - DNA, 25 bp, Saccharomyces pastorianus
atctcctcaggaagcttacggtgat

SEQ ID NO: 114265 - DNA, 25 bp, Saccharomyces pastorianus
agaaggcctcactatcaagatgcag

SEQ ID NO: 114266 - DNA, 25 bp, Saccharomyces pastorianus
tggtattctcaacgtgggacactct

SEQ ID NO: 114267 - DNA, 25 bp, Saccharomyces pastorianus
gattggactcgcagtatggctacta

SEQ ID NO: 114268 - DNA, 25 bp, Saccharomyces pastorianus
gagttctttgatgctcagctaccat

SEQ ID NO: 114269 - DNA, 25 bp, Saccharomyces pastorianus
tagcgtcatcgttcacagacttgtt

SEQ ID NO: 114270 - DNA, 25 bp, Saccharomyces pastorianus
ggacactcttgctcgagcattcaaa

SEQ ID NO: 114271 - DNA, 25 bp, Saccharomyces pastorianus
aaagtcagctggtgccgataaacgc

SEQ ID NO: 114272 - DNA, 25 bp, Saccharomyces pastorianus
caaccggattttgagaccaacgacg

SEQ ID NO: 114273 - DNA, 25 bp, Saccharomyces pastorianus
ggacacactgtcactgaaacatgag

SEQ ID NO: 114274 - DNA, 25 bp, Saccharomyces pastorianus
caaaaagtcccgtgaagcgctaaag

SEQ ID NO: 114275 - DNA, 25 bp, Saccharomyces pastorianus
gaagactcaccggaggctagacata

SEQ ID NO: 114276 - DNA, 25 bp, Saccharomyces pastorianus
taccaaggtgctgtggaccctcacg

SEQ ID NO: 114277 - DNA, 25 bp, Saccharomyces pastorianus
ggaacatcgagtaccttccttccaa

SEQ ID NO: 114278 - DNA, 25 bp, Saccharomyces pastorianus
acatcgacgatttgtccctgggcga

SEQ ID NO: 114279 - DNA, 25 bp, Saccharomyces pastorianus
tgccaggtggcaaacgatgacatcg

SEQ ID NO: 114280 - DNA, 25 bp, Saccharomyces pastorianus
gatattcacatagacgagcccaaga

SEQ ID NO: 114281 - DNA, 25 bp, Saccharomyces pastorianus
tgtccctgggcgaaccggaatttga

SEQ ID NO: 114282 - DNA, 25 bp, Saccharomyces pastorianus
gacatgttggccaagatgacaccag

SEQ ID NO: 114283 - DNA, 25 bp, Saccharomyces pastorianus
gaatcctctgaagaccggttttgca

SEQ ID NO: 114284 - DNA, 25 bp, Saccharomyces pastorianus
taagttcatcacacctcttttgagg

SEQ ID NO: 114285 - DNA, 25 bp, Saccharomyces pastorianus
ttcctgtccgacttcatcgttaata

SEQ ID NO: 114286 - DNA, 25 bp, Saccharomyces pastorianus
tagtaagcggcctaacttgttcaga

SEQ ID NO: 114287 - DNA, 25 bp, Saccharomyces pastorianus
cgatgcttctgttaattcctcgaat

SEQ ID NO: 114288 - DNA, 25 bp, Saccharomyces pastorianus
agtccttgcgtcgtttatccacgaa

SEQ ID NO: 114289 - DNA, 25 bp, Saccharomyces pastorianus
aagtgacgtactcgcaaagttctcc

SEQ ID NO: 114290 - DNA, 25 bp, Saccharomyces pastorianus
aaagttctccgctgctatacaaaat

SEQ ID NO: 114291 - DNA, 25 bp, Saccharomyces pastorianus
aatgttttagacttcctgtccgact

SEQ ID NO: 114292 - DNA, 25 bp, Saccharomyces pastorianus
aaacacaagcctacacgtcgttgaa

SEQ ID NO: 114293 - DNA, 25 bp, Saccharomyces pastorianus
gtaaccggctcattgcacgtttgca

SEQ ID NO: 114294 - DNA, 25 bp, Saccharomyces pastorianus
gaactgtcgaggatcttgagccaga

SEQ ID NO: 114295 - DNA, 25 bp, Saccharomyces pastorianus
gaccatacttggcaccattggtggt

SEQ ID NO: 114296 - DNA, 25 bp, Saccharomyces pastorianus
gttcggcagtcaacgattcagcaga

SEQ ID NO: 114297 - DNA, 25 bp, Saccharomyces pastorianus
aaatatgcctcctataaacgcgaat

SEQ ID NO: 114298 - DNA, 25 bp, Saccharomyces pastorianus
gaaaagactcccagatcagctacgg

SEQ ID NO: 114299 - DNA, 25 bp, Saccharomyces pastorianus
actgagatggaaccgctggcgttta

SEQ ID NO: 114300 - DNA, 25 bp, Saccharomyces pastorianus
atggcccgcactagctttaattaag

SEQ ID NO: 114301 - DNA, 25 bp, Saccharomyces pastorianus
tgaacgaagtacatggcccgcacta

SEQ ID NO: 114302 - DNA, 25 bp, Saccharomyces pastorianus
tgagccagaacctttaatgagccct

SEQ ID NO: 114303 - DNA, 25 bp, Saccharomyces pastorianus
aatttaggcctgttgtgctcattaa

SEQ ID NO: 114304 - DNA, 25 bp, Saccharomyces pastorianus
ccagaattgggcataccgcagttga

SEQ ID NO: 114305 - DNA, 25 bp, Saccharomyces pastorianus
atatggtacagctattggcgcaaga

SEQ ID NO: 114306 - DNA, 25 bp, Saccharomyces pastorianus
gggttacgttcgaacactcatgctg

SEQ ID NO: 114307 - DNA, 25 bp, Saccharomyces pastorianus
agccgggttggctccagatgctaga

SEQ ID NO: 114308 - DNA, 25 bp, Saccharomyces pastorianus
gggacgaatccttgacggtagacaa

SEQ ID NO: 114309 - DNA, 25 bp, Saccharomyces pastorianus
gagcaggtcatttgctttgcgataa

SEQ ID NO: 114310 - DNA, 25 bp, Saccharomyces pastorianus
gagcggtgctcatcttttagaattc

SEQ ID NO: 114311 - DNA, 25 bp, Saccharomyces pastorianus
agacaatctttcaatcgccatcgtg

SEQ ID NO: 114312 - DNA, 25 bp, Saccharomyces pastorianus
atcaaagctggcgtcgaggctatca

SEQ ID NO: 114313 - DNA, 25 bp, Saccharomyces pastorianus
gtttttaacagaaagcttgccgtcg

SEQ ID NO: 114314 - DNA, 25 bp, Saccharomyces pastorianus
ccctacggtgttggtttgttgatca

SEQ ID NO: 114315 - DNA, 25 bp, Saccharomyces pastorianus
aggctatcagccagtctctaaggga

SEQ ID NO: 114316 - DNA, 25 bp, Saccharomyces pastorianus
gatattgtctttgctactgtccagt

SEQ ID NO: 114317 - DNA, 25 bp, Saccharomyces pastorianus
gaactgcatttcaccatttggcttg

SEQ ID NO: 114318 - DNA, 25 bp, Saccharomyces pastorianus
tctaccggtccatttgttactcaaa

SEQ ID NO: 114319 - DNA, 25 bp, Saccharomyces pastorianus
tcgttatttccctactcggtgaatt

SEQ ID NO: 114320 - DNA, 25 bp, Saccharomyces pastorianus
ggtctgcctttggtgctaccgaaaa

SEQ ID NO: 114321 - DNA, 25 bp, Saccharomyces pastorianus
gtagtagcattcacccacaattcta

SEQ ID NO: 114322 - DNA, 25 bp, Saccharomyces pastorianus
acaggtgcgtgaacgttccggtgca

SEQ ID NO: 114323 - DNA, 25 bp, Saccharomyces pastorianus
gtaccgttaccgttgacttatcaga

SEQ ID NO: 114324 - DNA, 25 bp, Saccharomyces pastorianus
gcacattggcggatttctatctgat

SEQ ID NO: 114325 - DNA, 25 bp, Saccharomyces pastorianus
ttggcttgtgtggacgcgtttttaa

SEQ ID NO: 114326 - DNA, 25 bp, Saccharomyces pastorianus
tgtccaccaattagctctcgttatt

SEQ ID NO: 114327 - DNA, 25 bp, Saccharomyces pastorianus
acatctctttttaggtgggtcgctc

SEQ ID NO: 114328 - DNA, 25 bp, Saccharomyces pastorianus
gtaacttacagcttcgtagggacta

SEQ ID NO: 114329 - DNA, 25 bp, Saccharomyces pastorianus
gggtcgctcaagagggccacttaat

SEQ ID NO: 114330 - DNA, 25 bp, Saccharomyces pastorianus
tacggagcccaacttactagcaatg

SEQ ID NO: 114331 - DNA, 25 bp, Saccharomyces pastorianus
tcaggtggcatgtcacttattcgcc

SEQ ID NO: 114332 - DNA, 25 bp, Saccharomyces pastorianus
aagaactcgggtgtcagagcctgct

SEQ ID NO: 114333 - DNA, 25 bp, Saccharomyces pastorianus
ggttcgtggcagctcattatactag

SEQ ID NO: 114334 - DNA, 25 bp, Saccharomyces pastorianus
ttattcgcccgtagttaccaacgat

SEQ ID NO: 114335 - DNA, 25 bp, Saccharomyces pastorianus
tagggactacgtctacggagcccaa

SEQ ID NO: 114336 - DNA, 25 bp, Saccharomyces pastorianus
agagcctgctcatacattacataga

SEQ ID NO: 114337 - DNA, 25 bp, Saccharomyces pastorianus
aaagtgcctctttacgacatatata

SEQ ID NO: 114338 - DNA, 25 bp, Saccharomyces pastorianus
taggcgtagttgtactggtcgtgct

SEQ ID NO: 114339 - DNA, 25 bp, Saccharomyces pastorianus
gtagtggctgtggtcgattttgaac

SEQ ID NO: 114340 - DNA, 25 bp, Saccharomyces pastorianus
accagatgaacccattttgatacgg

SEQ ID NO: 114341 - DNA, 25 bp, Saccharomyces pastorianus
tagtcgtgctactatgcgatgtggt

SEQ ID NO: 114342 - DNA, 25 bp, Saccharomyces pastorianus
gtcgattttgaaccagatgaaccca

SEQ ID NO: 114343 - DNA, 25 bp, Saccharomyces pastorianus
aactttagtgcttgtcgtgcttgtc

SEQ ID NO: 114344 - DNA, 25 bp, Saccharomyces pastorianus
gaaactaatgtgctagaactactga

SEQ ID NO: 114345 - DNA, 25 bp, Saccharomyces pastorianus
gtactggtcgtgctactagtagtag

SEQ ID NO: 114346 - DNA, 25 bp, Saccharomyces pastorianus
taatttctgggctagttgtaacttt

SEQ ID NO: 114347 - DNA, 25 bp, Saccharomyces pastorianus
aactactgacaataatttctgggct

SEQ ID NO: 114348 - DNA, 25 bp, Saccharomyces pastorianus
gctagaagtaaactcgggtacaaca

SEQ ID NO: 114349 - DNA, 25 bp, Saccharomyces pastorianus
atcacatttggctgctccactatta

SEQ ID NO: 114350 - DNA, 25 bp, Saccharomyces pastorianus
aaagtactttgacaccttcgacctg

SEQ ID NO: 114351 - DNA, 25 bp, Saccharomyces pastorianus
aagatgggcgccgatcactacattg

SEQ ID NO: 114352 - DNA, 25 bp, Saccharomyces pastorianus
ttggtcttggtggtatcggcagtat

SEQ ID NO: 114353 - DNA, 25 bp, Saccharomyces pastorianus
gtggtggtttgactgtgtactctcc

SEQ ID NO: 114354 - DNA, 25 bp, Saccharomyces pastorianus
gaattgtctcaatctctataccaga

SEQ ID NO: 114355 - DNA, 25 bp, Saccharomyces pastorianus
gtactctccattggttcgtaacggt

SEQ ID NO: 114356 - DNA, 25 bp, Saccharomyces pastorianus
aaaggctgtctccatttcttacagt

SEQ ID NO: 114357 - DNA, 25 bp, Saccharomyces pastorianus
tgattgtaatctgtgcttcctccct

SEQ ID NO: 114358 - DNA, 25 bp, Saccharomyces pastorianus
cttacagtgctttaggttccatcaa

SEQ ID NO: 114359 - DNA, 25 bp, Saccharomyces pastorianus
attacctgttggtgaagccggcgtc

SEQ ID NO: 114360 - DNA, 25 bp, Saccharomyces pastorianus
aggttaccgctttgtacgcacgtag

SEQ ID NO: 114361 - DNA, 25 bp, Saccharomyces pastorianus
agtgttcttgtatccgtcatcatca

SEQ ID NO: 114362 - DNA, 25 bp, Saccharomyces pastorianus
tgtggcagtgttcgctacatggatt

SEQ ID NO: 114363 - DNA, 25 bp, Saccharomyces pastorianus
tattggtgtcctgatcggtgtggca

SEQ ID NO: 114364 - DNA, 25 bp, Saccharomyces pastorianus
ttgctaacacgccaactatgattat

SEQ ID NO: 114365 - DNA, 25 bp, Saccharomyces pastorianus
agaagtgtacttccgaatcgttcaa

SEQ ID NO: 114366 - DNA, 25 bp, Saccharomyces pastorianus
acatggattggtattggttcgccaa

SEQ ID NO: 114367 - DNA, 25 bp, Saccharomyces pastorianus
taggatctgctcaactccatggagt

SEQ ID NO: 114368 - DNA, 25 bp, Saccharomyces pastorianus
aatttgtattgcttccggtttgcgt

SEQ ID NO: 114369 - DNA, 25 bp, Saccharomyces pastorianus
gtaggcgcatacttctatcatacgt

SEQ ID NO: 114370 - DNA, 25 bp, Saccharomyces pastorianus
aagcacataattgggccgatcgtca

SEQ ID NO: 114371 - DNA, 25 bp, Saccharomyces pastorianus
ttgccttcatgtaaacttgatccag

SEQ ID NO: 114372 - DNA, 25 bp, Saccharomyces pastorianus
aaacccattgagttattgcaccttc

SEQ ID NO: 114373 - DNA, 25 bp, Saccharomyces pastorianus
gaaaatatccaagggcacctgcttc

SEQ ID NO: 114374 - DNA, 25 bp, Saccharomyces pastorianus
ataagttgtcatatatttctcgaaa

SEQ ID NO: 114375 - DNA, 25 bp, Saccharomyces pastorianus
gagttattgcaccttcaagagttaa

SEQ ID NO: 114376 - DNA, 25 bp, Saccharomyces pastorianus
tcacatgaaatttcggccaggcctc

SEQ ID NO: 114377 - DNA, 25 bp, Saccharomyces pastorianus
tggaaagccatgtattgtttcacat

SEQ ID NO: 114378 - DNA, 25 bp, Saccharomyces pastorianus
acctgcttctatcagctgcgacaat

SEQ ID NO: 114379 - DNA, 25 bp, Saccharomyces pastorianus
ggcctcacatattacagccttgtaa

SEQ ID NO: 114380 - DNA, 25 bp, Saccharomyces pastorianus
gagttaatactttacacttttatga

SEQ ID NO: 114381 - DNA, 25 bp, Saccharomyces pastorianus
tgcgacaatagagccacggagccaa

SEQ ID NO: 114382 - DNA, 25 bp, Saccharomyces pastorianus
ggattcttttcatgttggtacaagg

SEQ ID NO: 114383 - DNA, 25 bp, Saccharomyces pastorianus
tatctcgggtggattcttttcatgt

SEQ ID NO: 114384 - DNA, 25 bp, Saccharomyces pastorianus
attccttaattttttgtgctgcata

SEQ ID NO: 114385 - DNA, 25 bp, Saccharomyces pastorianus
gggaatgtgccttctattacgcacc

SEQ ID NO: 114386 - DNA, 25 bp, Saccharomyces pastorianus
aagaggatttccaatatttttatgt

SEQ ID NO: 114387 - DNA, 25 bp, Saccharomyces pastorianus
atttttatgttgataccattcctta

SEQ ID NO: 114388 - DNA, 25 bp, Saccharomyces pastorianus
gataccattccttaattttttgtgc

SEQ ID NO: 114389 - DNA, 25 bp, Saccharomyces pastorianus
cgggtggattcttttcatgttggta

SEQ ID NO: 114390 - DNA, 25 bp, Saccharomyces pastorianus
gaatgtgccttctattacgcacctt

SEQ ID NO: 114391 - DNA, 25 bp, Saccharomyces pastorianus
ttgtgctgcatatatgtgtcacggg

SEQ ID NO: 114392 - DNA, 25 bp, Saccharomyces pastorianus
gtggattcttttcatgttggtacaa

SEQ ID NO: 114393 - DNA, 25 bp, Saccharomyces pastorianus
tcttgcgacatcatttcatccggaa

SEQ ID NO: 114394 - DNA, 25 bp, Saccharomyces pastorianus
gcattcgtacacaacccaagcaagg

SEQ ID NO: 114395 - DNA, 25 bp, Saccharomyces pastorianus
ggattttacgacgatctctacgcat

SEQ ID NO: 114396 - DNA, 25 bp, Saccharomyces pastorianus
aactggtcaagacgctgaatttact

SEQ ID NO: 114397 - DNA, 25 bp, Saccharomyces pastorianus
ggatttgcgacttttcaaactttat

SEQ ID NO: 114398 - DNA, 25 bp, Saccharomyces pastorianus
gagagtcgactgcaatgtcccttat

SEQ ID NO: 114399 - DNA, 25 bp, Saccharomyces pastorianus
gttcattgaacatgtgcgacacgta

SEQ ID NO: 114400 - DNA, 25 bp, Saccharomyces pastorianus
tatacggtttcacgactggttcatc

SEQ ID NO: 114401 - DNA, 25 bp, Saccharomyces pastorianus
catttgggagacaagctcagtcttc

SEQ ID NO: 114402 - DNA, 25 bp, Saccharomyces pastorianus
actgcaatgattttcctgctacttt

SEQ ID NO: 114403 - DNA, 25 bp, Saccharomyces pastorianus
aggtgctggatcctgaacatgtgca

SEQ ID NO: 114404 - DNA, 25 bp, Saccharomyces pastorianus
ttgaagccacgactcactacgataa

SEQ ID NO: 114405 - DNA, 25 bp, Saccharomyces pastorianus
accgaatccgattttgcagctaagg

SEQ ID NO: 114406 - DNA, 25 bp, Saccharomyces pastorianus
gctaaggccacagaattacgcgtcc

SEQ ID NO: 114407 - DNA, 25 bp, Saccharomyces pastorianus
agcaggtaccggtgacgtttccgag

SEQ ID NO: 114408 - DNA, 25 bp, Saccharomyces pastorianus
acttcaaggtgccatttgtttgcgg

SEQ ID NO: 114409 - DNA, 25 bp, Saccharomyces pastorianus
agtgaggttttgactccagctgatt

SEQ ID NO: 114410 - DNA, 25 bp, Saccharomyces pastorianus
ttgtgaaggtgttttcgtcggctca

SEQ ID NO: 114411 - DNA, 25 bp, Saccharomyces pastorianus
tttgctgctggtggagttgctactc

SEQ ID NO: 114412 - DNA, 25 bp, Saccharomyces pastorianus
gctacctgtagtcaattttgctgct

SEQ ID NO: 114413 - DNA, 25 bp, Saccharomyces pastorianus
agcagacgctgctctattgatgcaa

SEQ ID NO: 114414 - DNA, 25 bp, Saccharomyces pastorianus
aggtgctgcaatgatccgtaccaaa

SEQ ID NO: 114415 - DNA, 25 bp, Saccharomyces pastorianus
tgatgttggctttcccaaaagttta

SEQ ID NO: 114416 - DNA, 25 bp, Saccharomyces pastorianus
tccttttgatgttggctttcccaaa

SEQ ID NO: 114417 - DNA, 25 bp, Saccharomyces pastorianus
gtaaccaagaagctttcacccctca

SEQ ID NO: 114418 - DNA, 25 bp, Saccharomyces pastorianus
ttaataggagatgacccagcggtaa

SEQ ID NO: 114419 - DNA, 25 bp, Saccharomyces pastorianus
cctatatttaggagtatctgataca

SEQ ID NO: 114420 - DNA, 25 bp, Saccharomyces pastorianus
tgggtggccccgaacaaacagaatt

SEQ ID NO: 114421 - DNA, 25 bp, Saccharomyces pastorianus
agaatacctggaaagtattgttcct

SEQ ID NO: 114422 - DNA, 25 bp, Saccharomyces pastorianus
cattgactaaaattgctgaggaaca

SEQ ID NO: 114423 - DNA, 25 bp, Saccharomyces pastorianus
gcagggcaaggtcctatatttagga

SEQ ID NO: 114424 - DNA, 25 bp, Saccharomyces pastorianus
gacccagcggtaaccaagaagcttt

SEQ ID NO: 114425 - DNA, 25 bp, Saccharomyces pastorianus
gtctgcgtacttttgtgggtggccc

SEQ ID NO: 114426 - DNA, 25 bp, Saccharomyces pastorianus
gtatcaaccttctgctgtcgtgtta

SEQ ID NO: 114427 - DNA, 25 bp, Saccharomyces pastorianus
aactacgcggtcaatgtgccattaa

SEQ ID NO: 114428 - DNA, 25 bp, Saccharomyces pastorianus
gaaggccatgctaattgtgtaaact

SEQ ID NO: 114429 - DNA, 25 bp, Saccharomyces pastorianus
gtatgcccctagtgttcagttgaat

SEQ ID NO: 114430 - DNA, 25 bp, Saccharomyces pastorianus
tgaagaagattctgccgaggctaaa

SEQ ID NO: 114431 - DNA, 25 bp, Saccharomyces pastorianus
atggtgctttgaaacaggtctacta

SEQ ID NO: 114432 - DNA, 25 bp, Saccharomyces pastorianus
cacacacctagggatgccgaagatt

SEQ ID NO: 114433 - DNA, 25 bp, Saccharomyces pastorianus
cagatctgtgtttgaacctgtgata

SEQ ID NO: 114434 - DNA, 25 bp, Saccharomyces pastorianus
gacgatgctacgtacagatctgtgt

SEQ ID NO: 114435 - DNA, 25 bp, Saccharomyces pastorianus
ttgctttaatctttccatggaaggc

SEQ ID NO: 114436 - DNA, 25 bp, Saccharomyces pastorianus
aatactcccgaatatcttgacaagg

SEQ ID NO: 114437 - DNA, 25 bp, Saccharomyces pastorianus
ccgacgctgacggtgtattcgttat

SEQ ID NO: 114438 - DNA, 25 bp, Saccharomyces pastorianus
gaggctaaaccttgtgtcatatttt

SEQ ID NO: 114439 - DNA, 25 bp, Saccharomyces pastorianus
gtgtcgcgggctgaactgaatcatt

SEQ ID NO: 114440 - DNA, 25 bp, Saccharomyces pastorianus
gagaatatttctacacgtcgctggt

SEQ ID NO: 114441 - DNA, 25 bp, Saccharomyces pastorianus
gctatgtccatttaattacaccggg

SEQ ID NO: 114442 - DNA, 25 bp, Saccharomyces pastorianus
gatgcaatgcttaacgccatgtcaa

SEQ ID NO: 114443 - DNA, 25 bp, Saccharomyces pastorianus
gaagcactactaagaccaggacgat

SEQ ID NO: 114444 - DNA, 25 bp, Saccharomyces pastorianus
ggatcgtatcgtttcacagttacta

SEQ ID NO: 114445 - DNA, 25 bp, Saccharomyces pastorianus
agaggctctgactcgcaaattcgtg

SEQ ID NO: 114446 - DNA, 25 bp, Saccharomyces pastorianus
aaattcgtgctcgacaacgacgtaa

SEQ ID NO: 114447 - DNA, 25 bp, Saccharomyces pastorianus
atcgattcagtagcacccaaacgtg

SEQ ID NO: 114448 - DNA, 25 bp, Saccharomyces pastorianus
gggaggctttgcaccgcgaatgaca

SEQ ID NO: 114449 - DNA, 25 bp, Saccharomyces pastorianus
gcgaatgacagagcccgaagccttg

SEQ ID NO: 114450 - DNA, 25 bp, Saccharomyces pastorianus
aaaccagtaccagggaggctttgca

SEQ ID NO: 114451 - DNA, 25 bp, Saccharomyces pastorianus
gtcaggtctggtctcaatgcatgga

SEQ ID NO: 114452 - DNA, 25 bp, Saccharomyces pastorianus
gcacaggaaggctatggttcgtaac

SEQ ID NO: 114453 - DNA, 25 bp, Saccharomyces pastorianus
ttgggcgtgacaatggttgctctaa

SEQ ID NO: 114454 - DNA, 25 bp, Saccharomyces pastorianus
tgtcccctttaactattgcaaaact

SEQ ID NO: 114455 - DNA, 25 bp, Saccharomyces pastorianus
gggctaccgcgatgcacttaagttc

SEQ ID NO: 114456 - DNA, 25 bp, Saccharomyces pastorianus
gagggagtccctacatggcggccaa

SEQ ID NO: 114457 - DNA, 25 bp, Saccharomyces pastorianus
gttgctctaagtgtcaggtctggtc

SEQ ID NO: 114458 - DNA, 25 bp, Saccharomyces pastorianus
ggttcgtaaccacccagacagagga

SEQ ID NO: 114459 - DNA, 25 bp, Saccharomyces pastorianus
gtatgcttccaatttctacgctgga

SEQ ID NO: 114460 - DNA, 25 bp, Saccharomyces pastorianus
ggtagtctgattccaatttccacac

SEQ ID NO: 114461 - DNA, 25 bp, Saccharomyces pastorianus
aattacctggtattcctcatctact

SEQ ID NO: 114462 - DNA, 25 bp, Saccharomyces pastorianus
gtaccacagtagattctgcccaata

SEQ ID NO: 114463 - DNA, 25 bp, Saccharomyces pastorianus
tccttcaatttctacatactcgggc

SEQ ID NO: 114464 - DNA, 25 bp, Saccharomyces pastorianus
ttccagcacatctctatctacaata

SEQ ID NO: 114465 - DNA, 25 bp, Saccharomyces pastorianus
ttcccctcattctgcaactttagat

SEQ ID NO: 114466 - DNA, 25 bp, Saccharomyces pastorianus
acatgtactgagtctgggcaagcta

SEQ ID NO: 114467 - DNA, 25 bp, Saccharomyces pastorianus
aggtactactatttcattgccaaca

SEQ ID NO: 114468 - DNA, 25 bp, Saccharomyces pastorianus
gtttagtcccagtatctaccatcaa

SEQ ID NO: 114469 - DNA, 25 bp, Saccharomyces pastorianus
gaggtttgtgtcacatgtaccgccc

SEQ ID NO: 114470 - DNA, 25 bp, Saccharomyces pastorianus
tgtttcagcatttatcaggtttgta

SEQ ID NO: 114471 - DNA, 25 bp, Saccharomyces pastorianus
agagtaacaccaagaccctcattag

SEQ ID NO: 114472 - DNA, 25 bp, Saccharomyces pastorianus
aaactactatcgaggtacacggaat

SEQ ID NO: 114473 - DNA, 25 bp, Saccharomyces pastorianus
attggcggttgctgttttcatttct

SEQ ID NO: 114474 - DNA, 25 bp, Saccharomyces pastorianus
gaatgcactggttttaggaatcaaa

SEQ ID NO: 114475 - DNA, 25 bp, Saccharomyces pastorianus
gttttagcatttacctgtttcagca

SEQ ID NO: 114476 - DNA, 25 bp, Saccharomyces pastorianus
acattatacgcgttcttagtcctaa

SEQ ID NO: 114477 - DNA, 25 bp, Saccharomyces pastorianus
ttgctatgagcttgggacgtggttt

SEQ ID NO: 114478 - DNA, 25 bp, Saccharomyces pastorianus
gtggatacttcctattgagaccttc

SEQ ID NO: 114479 - DNA, 25 bp, Saccharomyces pastorianus
gacctcaagtacaagaccgactgct

SEQ ID NO: 114480 - DNA, 25 bp, Saccharomyces pastorianus
gggttcttcaatggccaactggcaa

SEQ ID NO: 114481 - DNA, 25 bp, Saccharomyces pastorianus
aagacaaggctatgtcgccgttcac

SEQ ID NO: 114482 - DNA, 25 bp, Saccharomyces pastorianus
gaaaaagtcctcaatgtcgatgatt

SEQ ID NO: 114483 - DNA, 25 bp, Saccharomyces pastorianus
gatatcataatgctttgtccaaaca

SEQ ID NO: 114484 - DNA, 25 bp, Saccharomyces pastorianus
gctcctgatcatgtgtctgttgacg

SEQ ID NO: 114485 - DNA, 25 bp, Saccharomyces pastorianus
gtcgatgattataaacctgctcttg

SEQ ID NO: 114486 - DNA, 25 bp, Saccharomyces pastorianus
gaagcacttcttattgctcctgatc

SEQ ID NO: 114487 - DNA, 25 bp, Saccharomyces pastorianus
gacaatttgcagctttacagggatt

SEQ ID NO: 114488 - DNA, 25 bp, Saccharomyces pastorianus
gtcgccgttcacttctaggaagcaa

SEQ ID NO: 114489 - DNA, 25 bp, Saccharomyces pastorianus
gttatacacattaagcccgacaatt

SEQ ID NO: 114490 - DNA, 25 bp, Saccharomyces pastorianus
gatgactattctgctgttatacaca

SEQ ID NO: 114491 - DNA, 25 bp, Saccharomyces pastorianus
aacctgctcttgatgactattctgc

SEQ ID NO: 114492 - DNA, 25 bp, Saccharomyces pastorianus
tccaacacagttaattctccacggg

SEQ ID NO: 114493 - DNA, 25 bp, Saccharomyces pastorianus
gaagacattatcctccaacacagtt

SEQ ID NO: 114494 - DNA, 25 bp, Saccharomyces pastorianus
gttgcttcttctaaacttgctagta

SEQ ID NO: 114495 - DNA, 25 bp, Saccharomyces pastorianus
tccaccaagggtatgctccattgca

SEQ ID NO: 114496 - DNA, 25 bp, Saccharomyces pastorianus
attgcatcattgttcatccttgtcc

SEQ ID NO: 114497 - DNA, 25 bp, Saccharomyces pastorianus
tcctgtttcttttttgctttgcgtt

SEQ ID NO: 114498 - DNA, 25 bp, Saccharomyces pastorianus
gatgtggtaagtatacctccaccaa

SEQ ID NO: 114499 - DNA, 25 bp, Saccharomyces pastorianus
tgtagaccatcttcagttgcttctt

SEQ ID NO: 114500 - DNA, 25 bp, Saccharomyces pastorianus
atacattcgatctttggtttcgtat

SEQ ID NO: 114501 - DNA, 25 bp, Saccharomyces pastorianus
ttctctgcttagacccagatgtggt

SEQ ID NO: 114502 - DNA, 25 bp, Saccharomyces pastorianus
gaccgtatcctgtaattttcttatg

SEQ ID NO: 114503 - DNA, 25 bp, Saccharomyces pastorianus
ggatatcggtctgcattggccagta

SEQ ID NO: 114504 - DNA, 25 bp, Saccharomyces pastorianus
atccatgtggcctaattgcgaactc

SEQ ID NO: 114505 - DNA, 25 bp, Saccharomyces pastorianus
gatagcacctccaccatattgggaa

SEQ ID NO: 114506 - DNA, 25 bp, Saccharomyces pastorianus
aaaacgatactttgccagcgggtga

SEQ ID NO: 114507 - DNA, 25 bp, Saccharomyces pastorianus
gggaatctacttgactcacggttct

SEQ ID NO: 114508 - DNA, 25 bp, Saccharomyces pastorianus
atgaggccaggtgcttttgataaaa

SEQ ID NO: 114509 - DNA, 25 bp, Saccharomyces pastorianus
ggctgtatttgtgctgccatggcat

SEQ ID NO: 114510 - DNA, 25 bp, Saccharomyces pastorianus
gggatacgtctaacaactattcatt

SEQ ID NO: 114511 - DNA, 25 bp, Saccharomyces pastorianus
aactcaatgttcaacgacacgttcc

SEQ ID NO: 114512 - DNA, 25 bp, Saccharomyces pastorianus
aagccactatctaagaacgccgatg

SEQ ID NO: 114513 - DNA, 25 bp, Saccharomyces pastorianus
ttattaacgttttggctcttcggcg

SEQ ID NO: 114514 - DNA, 25 bp, Saccharomyces pastorianus
gattgtgtcatatcgcatttgtcaa

SEQ ID NO: 114515 - DNA, 25 bp, Saccharomyces pastorianus
gtacgaaacatgtcctagttccaac

SEQ ID NO: 114516 - DNA, 25 bp, Saccharomyces pastorianus
aaacgctttacgcttttatgtcacg

SEQ ID NO: 114517 - DNA, 25 bp, Saccharomyces pastorianus
gacattttctatcgtcagtttggaa

SEQ ID NO: 114518 - DNA, 25 bp, Saccharomyces pastorianus
atctctaggtggtgctaatgctctt

SEQ ID NO: 114519 - DNA, 25 bp, Saccharomyces pastorianus
gttcagagacgccattcttgttttt

SEQ ID NO: 114520 - DNA, 25 bp, Saccharomyces pastorianus
gggatctatgcgatggcgttatact

SEQ ID NO: 114521 - DNA, 25 bp, Saccharomyces pastorianus
gtaactcagaaggttcacccagcga

SEQ ID NO: 114522 - DNA, 25 bp, Saccharomyces pastorianus
gatcttatgtcccaatgccggtaat

SEQ ID NO: 114523 - DNA, 25 bp, Saccharomyces pastorianus
aagatgaaatcgttccacccttcca

SEQ ID NO: 114524 - DNA, 25 bp, Saccharomyces pastorianus
gattttcgaatttccacttggttca

SEQ ID NO: 114525 - DNA, 25 bp, Saccharomyces pastorianus
tgtaatatctactccggttcaaata

SEQ ID NO: 114526 - DNA, 25 bp, Saccharomyces pastorianus
gggcccaatgttattgcaaaccaaa

SEQ ID NO: 114527 - DNA, 25 bp, Saccharomyces pastorianus
tctttttcctcgtttcaggtactag

SEQ ID NO: 114528 - DNA, 25 bp, Saccharomyces pastorianus
aattttggatacaatcatcggtgtt

SEQ ID NO: 114529 - DNA, 25 bp, Saccharomyces pastorianus
aaactgcactttgctacttcttcta

SEQ ID NO: 114530 - DNA, 25 bp, Saccharomyces pastorianus
gcaagcagcaaatatgtatcctagt

SEQ ID NO: 114531 - DNA, 25 bp, Saccharomyces pastorianus
gtacaaatgtaactgggcccaatgt

SEQ ID NO: 114532 - DNA, 25 bp, Saccharomyces pastorianus
tgagaagtccgtttctcttccaaat

SEQ ID NO: 114533 - DNA, 25 bp, Saccharomyces pastorianus
gggaacaattcggacactagtacaa

SEQ ID NO: 114534 - DNA, 25 bp, Saccharomyces pastorianus
attgatctcttgctcattctttttc

SEQ ID NO: 114535 - DNA, 25 bp, Saccharomyces pastorianus
attgatatggccctcgttcttagag

SEQ ID NO: 114536 - DNA, 25 bp, Saccharomyces pastorianus
ggatccttatattacttcaatcata

SEQ ID NO: 114537 - DNA, 25 bp, Saccharomyces pastorianus
gttacatttgtactagtgtccgaat

SEQ ID NO: 114538 - DNA, 25 bp, Saccharomyces pastorianus
acatttcaacagctgtccggaataa

SEQ ID NO: 114539 - DNA, 25 bp, Saccharomyces pastorianus
gctgcttgcctattagcgttgataa

SEQ ID NO: 114540 - DNA, 25 bp, Saccharomyces pastorianus
ggatgctcaatttcttaatatcact

SEQ ID NO: 114541 - DNA, 25 bp, Saccharomyces pastorianus
gtgtccgaattgttccctctaagaa

SEQ ID NO: 114542 - DNA, 25 bp, Saccharomyces pastorianus
ggatacatatttgctgcttgcctat

SEQ ID NO: 114543 - DNA, 25 bp, Saccharomyces pastorianus
aacaccgatgattgtatccaaaatt

SEQ ID NO: 114544 - DNA, 25 bp, Saccharomyces pastorianus
agtgttaacttcctttctacgatat

SEQ ID NO: 114545 - DNA, 25 bp, Saccharomyces pastorianus
gggccgcaagacatgtttattatat

SEQ ID NO: 114546 - DNA, 25 bp, Saccharomyces pastorianus
ttctgttttcaaaggtgtcgggatt

SEQ ID NO: 114547 - DNA, 25 bp, Saccharomyces pastorianus
ttatatgacactagaatggcaccca

SEQ ID NO: 114548 - DNA, 25 bp, Saccharomyces pastorianus
agaagagtgaattcggtgcggcccc

SEQ ID NO: 114549 - DNA, 25 bp, Saccharomyces pastorianus
aaccgcgtcaagaaatcccaggcat

SEQ ID NO: 114550 - DNA, 25 bp, Saccharomyces pastorianus
acttgaaccacatgcgttaccaaac

SEQ ID NO: 114551 - DNA, 25 bp, Saccharomyces pastorianus
tggcgtgctatgacggctcgctaaa

SEQ ID NO: 114552 - DNA, 25 bp, Saccharomyces pastorianus
ggacatatatttgccacagcagcta

SEQ ID NO: 114553 - DNA, 25 bp, Saccharomyces pastorianus
tgaagacgcgatttcaacccaccaa

SEQ ID NO: 114554 - DNA, 25 bp, Saccharomyces pastorianus
gagcgaggccaattgatcctaatgc

SEQ ID NO: 114555 - DNA, 25 bp, Saccharomyces pastorianus
ggattcatcaacaagaaaccgcgtc

SEQ ID NO: 114556 - DNA, 25 bp, Saccharomyces pastorianus
attttgactattccatacgcccatg

SEQ ID NO: 114557 - DNA, 25 bp, Saccharomyces pastorianus
atcccaggcatcgattcaaacatca

SEQ ID NO: 114558 - DNA, 25 bp, Saccharomyces pastorianus
taaccctatattcgtgttgccactt

SEQ ID NO: 114559 - DNA, 25 bp, Saccharomyces pastorianus
aagagatttctctaaggcctctccg

SEQ ID NO: 114560 - DNA, 25 bp, Saccharomyces pastorianus
caatggcagtttgtcggaccccaaa

SEQ ID NO: 114561 - DNA, 25 bp, Saccharomyces pastorianus
aggccacatactactttgcagttcc

SEQ ID NO: 114562 - DNA, 25 bp, Saccharomyces pastorianus
gatgacttcccttgcagaatacaaa

SEQ ID NO: 114563 - DNA, 25 bp, Saccharomyces pastorianus
tgattcctgtctccgtttatgataa

SEQ ID NO: 114564 - DNA, 25 bp, Saccharomyces pastorianus
gaatggccatgttgaaccggataca

SEQ ID NO: 114565 - DNA, 25 bp, Saccharomyces pastorianus
tgcagttccattctgatttggtcaa

SEQ ID NO: 114566 - DNA, 25 bp, Saccharomyces pastorianus
gtgttgccacttcctagacaagttc

SEQ ID NO: 114567 - DNA, 25 bp, Saccharomyces pastorianus
acattatgcgccgtgattcctgtct

SEQ ID NO: 114568 - DNA, 25 bp, Saccharomyces pastorianus
gatccaagtgctcctaaagttccct

SEQ ID NO: 114569 - DNA, 25 bp, Saccharomyces pastorianus
gagcaatcgtggtcggactctaata

SEQ ID NO: 114570 - DNA, 25 bp, Saccharomyces pastorianus
taacgattggaattccgcctactct

SEQ ID NO: 114571 - DNA, 25 bp, Saccharomyces pastorianus
gattatcttcacaacgaactcgagg

SEQ ID NO: 114572 - DNA, 25 bp, Saccharomyces pastorianus
gctgcccctggattcaataacgatt

SEQ ID NO: 114573 - DNA, 25 bp, Saccharomyces pastorianus
atgggagcactcttggacgaagcac

SEQ ID NO: 114574 - DNA, 25 bp, Saccharomyces pastorianus
aggttcagcgagacagtactgcctc

SEQ ID NO: 114575 - DNA, 25 bp, Saccharomyces pastorianus
acacaatccccatgattctgtctaa

SEQ ID NO: 114576 - DNA, 25 bp, Saccharomyces pastorianus
gaaggacctcttcagcgcagatcga

SEQ ID NO: 114577 - DNA, 25 bp, Saccharomyces pastorianus
taattgaggctctcctttcacagat

SEQ ID NO: 114578 - DNA, 25 bp, Saccharomyces pastorianus
gaataaccacagctccgacgatgag

SEQ ID NO: 114579 - DNA, 25 bp, Saccharomyces pastorianus
attatcatccgctgaacatccgaat

SEQ ID NO: 114580 - DNA, 25 bp, Saccharomyces pastorianus
gggccgccctagaatgccacgagaa

SEQ ID NO: 114581 - DNA, 25 bp, Saccharomyces pastorianus
ggagccgcagcaattatcttatttt

SEQ ID NO: 114582 - DNA, 25 bp, Saccharomyces pastorianus
gcttgtgaagatttggtggctgcct

SEQ ID NO: 114583 - DNA, 25 bp, Saccharomyces pastorianus
atctggcgaaggttccatcgactta

SEQ ID NO: 114584 - DNA, 25 bp, Saccharomyces pastorianus
ggtggctgcctatgaatcacttggt

SEQ ID NO: 114585 - DNA, 25 bp, Saccharomyces pastorianus
gcagatgggatgactctcctggttg

SEQ ID NO: 114586 - DNA, 25 bp, Saccharomyces pastorianus
gcttatagggccatttctcacaatc

SEQ ID NO: 114587 - DNA, 25 bp, Saccharomyces pastorianus
agccatttcatgtgacgctcaaaag

SEQ ID NO: 114588 - DNA, 25 bp, Saccharomyces pastorianus
gggaggatgtcttaactgcatgtaa

SEQ ID NO: 114589 - DNA, 25 bp, Saccharomyces pastorianus
atgggccaggcagtctggtttgcaa

SEQ ID NO: 114590 - DNA, 25 bp, Saccharomyces pastorianus
gcgactggtcgcaagagtagaactt

SEQ ID NO: 114591 - DNA, 25 bp, Saccharomyces pastorianus
gtacagtaatgagccctgaatcaga

SEQ ID NO: 114592 - DNA, 25 bp, Saccharomyces pastorianus
aatcaatatcccctttaccaatgtg

SEQ ID NO: 114593 - DNA, 25 bp, Saccharomyces pastorianus
gatgttggcgacgagaacgatcaag

SEQ ID NO: 114594 - DNA, 25 bp, Saccharomyces pastorianus
gtactgcgtgtaaatgttcccattg

SEQ ID NO: 114595 - DNA, 25 bp, Saccharomyces pastorianus
taacctctggtgtttcctgagaaat

SEQ ID NO: 114596 - DNA, 25 bp, Saccharomyces pastorianus
tcagacattcaccacacttactatt

SEQ ID NO: 114597 - DNA, 25 bp, Saccharomyces pastorianus
gaacaactctgtaaggcgttgccta

SEQ ID NO: 114598 - DNA, 25 bp, Saccharomyces pastorianus
tcattatgtacacctagaaccagat

SEQ ID NO: 114599 - DNA, 25 bp, Saccharomyces pastorianus
taccaatgtgtatcctttatcccct

SEQ ID NO: 114600 - DNA, 25 bp, Saccharomyces pastorianus
ttattgaagcccgtactgcgtgtaa

SEQ ID NO: 114601 - DNA, 25 bp, Saccharomyces pastorianus
tatcccctctatcgttttgggaaca

SEQ ID NO: 114602 - DNA, 25 bp, Saccharomyces pastorianus
gtttgaagacatcccagattcgcta

SEQ ID NO: 114603 - DNA, 25 bp, Saccharomyces pastorianus
tcagcgatactaaagcagcaccggt

SEQ ID NO: 114604 - DNA, 25 bp, Saccharomyces pastorianus
acgctacaacgtgtgccgtactcta

SEQ ID NO: 114605 - DNA, 25 bp, Saccharomyces pastorianus
gtactttgccagatgttgggcgcct

SEQ ID NO: 114606 - DNA, 25 bp, Saccharomyces pastorianus
agcaccggtgcaactggaatatcaa

SEQ ID NO: 114607 - DNA, 25 bp, Saccharomyces pastorianus
acacaatgtccaagcaggcgtacga

SEQ ID NO: 114608 - DNA, 25 bp, Saccharomyces pastorianus
atctcttgtccgcactgcaaagtga

SEQ ID NO: 114609 - DNA, 25 bp, Saccharomyces pastorianus
aaggtactgtcttgatctcttgtcc

SEQ ID NO: 114610 - DNA, 25 bp, Saccharomyces pastorianus
catgatcatcatgttaccgtggaac

SEQ ID NO: 114611 - DNA, 25 bp, Saccharomyces pastorianus
aaagagcgtcatgttggcttcaggg

SEQ ID NO: 114612 - DNA, 25 bp, Saccharomyces pastorianus
gcagcgttgcataccaatatcatcg

SEQ ID NO: 114613 - DNA, 25 bp, Saccharomyces pastorianus
atgggtgacttctatgcagacgccg

SEQ ID NO: 114614 - DNA, 25 bp, Saccharomyces pastorianus
gaaatttgcaccttatcgttccaag

SEQ ID NO: 114615 - DNA, 25 bp, Saccharomyces pastorianus
tttcgccgccgatgatactgattta

SEQ ID NO: 114616 - DNA, 25 bp, Saccharomyces pastorianus
gaggacaccatactgatacctgtag

SEQ ID NO: 114617 - DNA, 25 bp, Saccharomyces pastorianus
ttagctccagtcgaagcagaggcag

SEQ ID NO: 114618 - DNA, 25 bp, Saccharomyces pastorianus
gaccgcaagagagattttcgccgcc

SEQ ID NO: 114619 - DNA, 25 bp, Saccharomyces pastorianus
gatttgaagtttcgttaccgtgaag

SEQ ID NO: 114620 - DNA, 25 bp, Saccharomyces pastorianus
aaatgggttagctccagtcgaagca

SEQ ID NO: 114621 - DNA, 25 bp, Saccharomyces pastorianus
ttctcctgagagttttggtttgacc

SEQ ID NO: 114622 - DNA, 25 bp, Saccharomyces pastorianus
atgcagacgccgatggtgatgacca

SEQ ID NO: 114623 - DNA, 25 bp, Saccharomyces pastorianus
gaaagcctctaaaagcaaacacaag

SEQ ID NO: 114624 - DNA, 25 bp, Saccharomyces pastorianus
aatctgcgattttgggtctgccaaa

SEQ ID NO: 114625 - DNA, 25 bp, Saccharomyces pastorianus
tcattttcttttcgaatccggccta

SEQ ID NO: 114626 - DNA, 25 bp, Saccharomyces pastorianus
tcaagaaccccttctacagctaagg

SEQ ID NO: 114627 - DNA, 25 bp, Saccharomyces pastorianus
aatccttgcccatcagttctttaat

SEQ ID NO: 114628 - DNA, 25 bp, Saccharomyces pastorianus
atgatgacactttcttaccaagagg

SEQ ID NO: 114629 - DNA, 25 bp, Saccharomyces pastorianus
ttgttaggtcctcccgataaaagat

SEQ ID NO: 114630 - DNA, 25 bp, Saccharomyces pastorianus
gttgtacccaatataccacccagat

SEQ ID NO: 114631 - DNA, 25 bp, Saccharomyces pastorianus
accatccaatgttcttgtagacccg

SEQ ID NO: 114632 - DNA, 25 bp, Saccharomyces pastorianus
catgggcgagatgcttatcggcaaa

SEQ ID NO: 114633 - DNA, 25 bp, Saccharomyces pastorianus
aagtattttggccattccggtccag

SEQ ID NO: 114634 - DNA, 25 bp, Saccharomyces pastorianus
tacgatggccctctattttccaaac

SEQ ID NO: 114635 - DNA, 25 bp, Saccharomyces pastorianus
ggctgccgatggacacagtttgtca

SEQ ID NO: 114636 - DNA, 25 bp, Saccharomyces pastorianus
gctgtactatttgaacttaccccag

SEQ ID NO: 114637 - DNA, 25 bp, Saccharomyces pastorianus
agccgcttttatttctgctcttgtt

SEQ ID NO: 114638 - DNA, 25 bp, Saccharomyces pastorianus
gtcctctgacccagttttgacaaag

SEQ ID NO: 114639 - DNA, 25 bp, Saccharomyces pastorianus
gaatatctcgtatccttcgtcctct

SEQ ID NO: 114640 - DNA, 25 bp, Saccharomyces pastorianus
gaagatggaattctaccggcacgaa

SEQ ID NO: 114641 - DNA, 25 bp, Saccharomyces pastorianus
gatttcgctatctacaggttgttta

SEQ ID NO: 114642 - DNA, 25 bp, Saccharomyces pastorianus
cgcatttgacgttttcaagcgttgt

SEQ ID NO: 114643 - DNA, 25 bp, Saccharomyces pastorianus
gaagatcagcgatgccaccaaattg

SEQ ID NO: 114644 - DNA, 25 bp, Saccharomyces pastorianus
ccggcacgaatagaggagttccttt

SEQ ID NO: 114645 - DNA, 25 bp, Saccharomyces pastorianus
gaagctgcatttcaaaccagtggta

SEQ ID NO: 114646 - DNA, 25 bp, Saccharomyces pastorianus
atcgctagtatcgtgcatttggctg

SEQ ID NO: 114647 - DNA, 25 bp, Saccharomyces pastorianus
tttccttgaccgcactatcagagag

SEQ ID NO: 114648 - DNA, 25 bp, Saccharomyces pastorianus
atttggctggcagtaagtcctcgtc

SEQ ID NO: 114649 - DNA, 25 bp, Saccharomyces pastorianus
gtgccattttatttaccgcgtatct

SEQ ID NO: 114650 - DNA, 25 bp, Saccharomyces pastorianus
tagatgcgccatgatgctttacctg

SEQ ID NO: 114651 - DNA, 25 bp, Saccharomyces pastorianus
agtttaatctgctttacggctggct

SEQ ID NO: 114652 - DNA, 25 bp, Saccharomyces pastorianus
tactgtctgtcgctggtaaccttag

SEQ ID NO: 114653 - DNA, 25 bp, Saccharomyces pastorianus
gaatacccactcttccaagtttaat

SEQ ID NO: 114654 - DNA, 25 bp, Saccharomyces pastorianus
acatctgcatggtggtatcgctagt

SEQ ID NO: 114655 - DNA, 25 bp, Saccharomyces pastorianus
agactacgaggccagtgttcccgaa

SEQ ID NO: 114656 - DNA, 25 bp, Saccharomyces pastorianus
gatacagtactttcggctctgctga

SEQ ID NO: 114657 - DNA, 25 bp, Saccharomyces pastorianus
tcgcaggcagccattgtccaatacg

SEQ ID NO: 114658 - DNA, 25 bp, Saccharomyces pastorianus
ttatttactaccacttattcttcaa

SEQ ID NO: 114659 - DNA, 25 bp, Saccharomyces pastorianus
atctatttattttggtttcggctat

SEQ ID NO: 114660 - DNA, 25 bp, Saccharomyces pastorianus
aatttgttgcgtttagtcttcgaca

SEQ ID NO: 114661 - DNA, 25 bp, Saccharomyces pastorianus
gacgcattatacaatcctacaattt

SEQ ID NO: 114662 - DNA, 25 bp, Saccharomyces pastorianus
gtccaatacgccaatgtcattatat

SEQ ID NO: 114663 - DNA, 25 bp, Saccharomyces pastorianus
tattcttcaatggtgtttttaacgt

SEQ ID NO: 114664 - DNA, 25 bp, Saccharomyces pastorianus
ttcagatcgcaatccatggtttgac

SEQ ID NO: 114665 - DNA, 25 bp, Saccharomyces pastorianus
atggtttgacacattctatcttaaa

SEQ ID NO: 114666 - DNA, 25 bp, Saccharomyces pastorianus
aaagttgccatttttattcagatcg

SEQ ID NO: 114667 - DNA, 25 bp, Saccharomyces pastorianus
atacaacaagattcgcaggcagcca

SEQ ID NO: 114668 - DNA, 25 bp, Saccharomyces pastorianus
ggcgctgccgttaaaggctccgttg

SEQ ID NO: 114669 - DNA, 25 bp, Saccharomyces pastorianus
gcagattccacctctgatggtgtca

SEQ ID NO: 114670 - DNA, 25 bp, Saccharomyces pastorianus
tacatctatggtctccaccgtgaaa

SEQ ID NO: 114671 - DNA, 25 bp, Saccharomyces pastorianus
gatggtgtcacttacgtagatgtta

SEQ ID NO: 114672 - DNA, 25 bp, Saccharomyces pastorianus
ttgccactctatccactaaatctat

SEQ ID NO: 114673 - DNA, 25 bp, Saccharomyces pastorianus
atgagatcagcacatacgtcggcgc

SEQ ID NO: 114674 - DNA, 25 bp, Saccharomyces pastorianus
attgccgcatttgcttccgcagatt

SEQ ID NO: 114675 - DNA, 25 bp, Saccharomyces pastorianus
ctccgttgcgggtatgggtgccatc

SEQ ID NO: 114676 - DNA, 25 bp, Saccharomyces pastorianus
tctatcagcagccaagctaacacca

SEQ ID NO: 114677 - DNA, 25 bp, Saccharomyces pastorianus
ttacgtagatgttaccaccacccca

SEQ ID NO: 114678 - DNA, 25 bp, Saccharomyces pastorianus
gtgaaaactacttccactccataca

SEQ ID NO: 114679 - DNA, 25 bp, Saccharomyces pastorianus
gggtcgtcattttagcattccttga

SEQ ID NO: 114680 - DNA, 25 bp, Saccharomyces pastorianus
gaatttcttcttttcgattcggaag

SEQ ID NO: 114681 - DNA, 25 bp, Saccharomyces pastorianus
gatggaacggttgacagtccctgta

SEQ ID NO: 114682 - DNA, 25 bp, Saccharomyces pastorianus
agacagccggcttcgaggaatagat

SEQ ID NO: 114683 - DNA, 25 bp, Saccharomyces pastorianus
gtctttctagctcctcaaaactatg

SEQ ID NO: 114684 - DNA, 25 bp, Saccharomyces pastorianus
tccaaaatttcagacagccggcttc

SEQ ID NO: 114685 - DNA, 25 bp, Saccharomyces pastorianus
gcattgcattgccagggtcgtcatt

SEQ ID NO: 114686 - DNA, 25 bp, Saccharomyces pastorianus
tgtactcttttcaatatctcaatgg

SEQ ID NO: 114687 - DNA, 25 bp, Saccharomyces pastorianus
gcattccttgattggcaagccaaca

SEQ ID NO: 114688 - DNA, 25 bp, Saccharomyces pastorianus
tgacagtccctgtaggcattgcatt

SEQ ID NO: 114689 - DNA, 25 bp, Saccharomyces pastorianus
gtgcgaaatccggatgtctttctag

SEQ ID NO: 114690 - DNA, 25 bp, Saccharomyces pastorianus
tgtagtgccgatagagaccacgctt

SEQ ID NO: 114691 - DNA, 25 bp, Saccharomyces pastorianus
tcaaagtttcgttggctgtcttaaa

SEQ ID NO: 114692 - DNA, 25 bp, Saccharomyces pastorianus
tgagttgctttgtcggtgtagtgcc

SEQ ID NO: 114693 - DNA, 25 bp, Saccharomyces pastorianus
tttgtgcacggcgagctggttcatg

SEQ ID NO: 114694 - DNA, 25 bp, Saccharomyces pastorianus
atgggattgtctgttttacgaggaa

SEQ ID NO: 114695 - DNA, 25 bp, Saccharomyces pastorianus
attcaacatcagaggcagatttgcc

SEQ ID NO: 114696 - DNA, 25 bp, Saccharomyces pastorianus
tcatacagacattccctaagacatt

SEQ ID NO: 114697 - DNA, 25 bp, Saccharomyces pastorianus
gtcgaaaatttgttgccgctcagcg

SEQ ID NO: 114698 - DNA, 25 bp, Saccharomyces pastorianus
gccgctcagcgtctcaaatttaaga

SEQ ID NO: 114699 - DNA, 25 bp, Saccharomyces pastorianus
gaggaatcacattttctattcaaag

SEQ ID NO: 114700 - DNA, 25 bp, Saccharomyces pastorianus
aattgagcgagcatgacctttcgaa

SEQ ID NO: 114701 - DNA, 25 bp, Saccharomyces pastorianus
ggtccttagtgagcgacatcggtaa

SEQ ID NO: 114702 - DNA, 25 bp, Saccharomyces pastorianus
tagtttcgagtgatcaacctggtga

SEQ ID NO: 114703 - DNA, 25 bp, Saccharomyces pastorianus
gaagaaccatttccgctgagtgaac

SEQ ID NO: 114704 - DNA, 25 bp, Saccharomyces pastorianus
atagggctccaaaattgcacttcaa

SEQ ID NO: 114705 - DNA, 25 bp, Saccharomyces pastorianus
aacctggtgatgaggctacagctga

SEQ ID NO: 114706 - DNA, 25 bp, Saccharomyces pastorianus
acgtttgcaacagcaggactggtct

SEQ ID NO: 114707 - DNA, 25 bp, Saccharomyces pastorianus
acggccttgattctgaggtggcaaa

SEQ ID NO: 114708 - DNA, 25 bp, Saccharomyces pastorianus
ttgaggcccactacagaagaagctg

SEQ ID NO: 114709 - DNA, 25 bp, Saccharomyces pastorianus
caaagctaatgtgtcttctggaaca

SEQ ID NO: 114710 - DNA, 25 bp, Saccharomyces pastorianus
gaatatacagagaagcacggccttg

SEQ ID NO: 114711 - DNA, 25 bp, Saccharomyces pastorianus
atgactatcccttattgaggcccac

SEQ ID NO: 114712 - DNA, 25 bp, Saccharomyces pastorianus
aagggtctcgcgttgatcgacctaa

SEQ ID NO: 114713 - DNA, 25 bp, Saccharomyces pastorianus
cagattcagggcagcgcggtcattg

SEQ ID NO: 114714 - DNA, 25 bp, Saccharomyces pastorianus
agctgaagttgtctccgaatgcgga

SEQ ID NO: 114715 - DNA, 25 bp, Saccharomyces pastorianus
agagtactcgatatccaagggtggc

SEQ ID NO: 114716 - DNA, 25 bp, Saccharomyces pastorianus
tacgcggttctgtgtattggccaat

SEQ ID NO: 114717 - DNA, 25 bp, Saccharomyces pastorianus
taaggtacgcagtgccaagggtctc

SEQ ID NO: 114718 - DNA, 25 bp, Saccharomyces pastorianus
gcatttgcttaccaaactggccgat

SEQ ID NO: 114719 - DNA, 25 bp, Saccharomyces pastorianus
gcgcataaacttacacctgcgttat

SEQ ID NO: 114720 - DNA, 25 bp, Saccharomyces pastorianus
aggccattgagcgtcggatagccaa

SEQ ID NO: 114721 - DNA, 25 bp, Saccharomyces pastorianus
acgagattcagatttcagcccttgc

SEQ ID NO: 114722 - DNA, 25 bp, Saccharomyces pastorianus
aagctactttagacaatcccgacga

SEQ ID NO: 114723 - DNA, 25 bp, Saccharomyces pastorianus
caccgctgcgtgctatttgaacaaa

SEQ ID NO: 114724 - DNA, 25 bp, Saccharomyces pastorianus
aagcactgggctaggtacaccgatg

SEQ ID NO: 114725 - DNA, 25 bp, Saccharomyces pastorianus
gctggcacgagtcctatcagatcaa

SEQ ID NO: 114726 - DNA, 25 bp, Saccharomyces pastorianus
tacaccgatggtctctttacactag

SEQ ID NO: 114727 - DNA, 25 bp, Saccharomyces pastorianus
gttctgctactctagtcgacagttg

SEQ ID NO: 114728 - DNA, 25 bp, Saccharomyces pastorianus
tttcacaatgactcttctcctttaa

SEQ ID NO: 114729 - DNA, 25 bp, Saccharomyces pastorianus
aattaaagcgtattctgcccaggga

SEQ ID NO: 114730 - DNA, 25 bp, Saccharomyces pastorianus
aagacttggcaagatccagcgacca

SEQ ID NO: 114731 - DNA, 25 bp, Saccharomyces pastorianus
ttgatcctagatctgcagcctctat

SEQ ID NO: 114732 - DNA, 25 bp, Saccharomyces pastorianus
gaaacgtgtcgatagcatccgattt

SEQ ID NO: 114733 - DNA, 25 bp, Saccharomyces pastorianus
gttacagctgttgaactgggacctc

SEQ ID NO: 114734 - DNA, 25 bp, Saccharomyces pastorianus
gatatcgtgccgttatgcctaagga

SEQ ID NO: 114735 - DNA, 25 bp, Saccharomyces pastorianus
acatctctttttacaggcccatatt

SEQ ID NO: 114736 - DNA, 25 bp, Saccharomyces pastorianus
gacgatctcgaagcacgcaggctat

SEQ ID NO: 114737 - DNA, 25 bp, Saccharomyces pastorianus
tacatctgtgccaccttggaaaggt

SEQ ID NO: 114738 - DNA, 25 bp, Saccharomyces pastorianus
tacagtgtgttgcatctcacccaga

SEQ ID NO: 114739 - DNA, 25 bp, Saccharomyces pastorianus
aacgctctagttcttctacagtgtg

SEQ ID NO: 114740 - DNA, 25 bp, Saccharomyces pastorianus
ggttgagcacttgaccgtgagcaca

SEQ ID NO: 114741 - DNA, 25 bp, Saccharomyces pastorianus
ggaatcttcttctgagctttccaag

SEQ ID NO: 114742 - DNA, 25 bp, Saccharomyces pastorianus
gacagtcgccattttcattttacag

SEQ ID NO: 114743 - DNA, 25 bp, Saccharomyces pastorianus
gttctacgccgtaactaatgtctta

SEQ ID NO: 114744 - DNA, 25 bp, Saccharomyces pastorianus
atagtcttacctgccaaactgagag

SEQ ID NO: 114745 - DNA, 25 bp, Saccharomyces pastorianus
agttgcttgctttcatttctggaga

SEQ ID NO: 114746 - DNA, 25 bp, Saccharomyces pastorianus
atcagggtcgaaagagcccaatttc

SEQ ID NO: 114747 - DNA, 25 bp, Saccharomyces pastorianus
tgttgcaaaatcatgaccggacgtt

SEQ ID NO: 114748 - DNA, 25 bp, Saccharomyces pastorianus
agcgacggtcgtctttaagaacaat

SEQ ID NO: 114749 - DNA, 25 bp, Saccharomyces pastorianus
gatcgaacggtgatatttgccaacg

SEQ ID NO: 114750 - DNA, 25 bp, Saccharomyces pastorianus
gggaacccctttgcaagctatatgt

SEQ ID NO: 114751 - DNA, 25 bp, Saccharomyces pastorianus
gggatgctttgatcacttattccaa

SEQ ID NO: 114752 - DNA, 25 bp, Saccharomyces pastorianus
gaacgagtcgatcttcctgggaaaa

SEQ ID NO: 114753 - DNA, 25 bp, Saccharomyces pastorianus
gaccggacgttattttgatgggcaa

SEQ ID NO: 114754 - DNA, 25 bp, Saccharomyces pastorianus
gagttcaacggacctgagcctccaa

SEQ ID NO: 114755 - DNA, 25 bp, Saccharomyces pastorianus
gtatatctgtatctcccaataaggg

SEQ ID NO: 114756 - DNA, 25 bp, Saccharomyces pastorianus
accgttgggtctaagggcacatctc

SEQ ID NO: 114757 - DNA, 25 bp, Saccharomyces pastorianus
gctaaggctattgcggctattgaaa

SEQ ID NO: 114758 - DNA, 25 bp, Saccharomyces pastorianus
gaaagttccactacaatctaccgat

SEQ ID NO: 114759 - DNA, 25 bp, Saccharomyces pastorianus
aagcttggtctggtaactggtccca

SEQ ID NO: 114760 - DNA, 25 bp, Saccharomyces pastorianus
agagtaccactacaggctagaccca

SEQ ID NO: 114761 - DNA, 25 bp, Saccharomyces pastorianus
agtttacagctcgttactacacacc

SEQ ID NO: 114762 - DNA, 25 bp, Saccharomyces pastorianus
ggaggcttctagagcatccgctaag

SEQ ID NO: 114763 - DNA, 25 bp, Saccharomyces pastorianus
ttgggtgccagttgtgtctaattct

SEQ ID NO: 114764 - DNA, 25 bp, Saccharomyces pastorianus
tctaccgattgctttggaggcttct

SEQ ID NO: 114765 - DNA, 25 bp, Saccharomyces pastorianus
ggctacatttgcaaccaggcgaggt

SEQ ID NO: 114766 - DNA, 25 bp, Saccharomyces pastorianus
tggatttaccaacgttggcgccaaa

SEQ ID NO: 114767 - DNA, 25 bp, Saccharomyces pastorianus
atctgcttcagtttccctggttaaa

SEQ ID NO: 114768 - DNA, 25 bp, Saccharomyces pastorianus
aatgctatcaagtatcggcccacat

SEQ ID NO: 114769 - DNA, 25 bp, Saccharomyces pastorianus
ggcccacatctgtcaagctgttgaa

SEQ ID NO: 114770 - DNA, 25 bp, Saccharomyces pastorianus
attgtgcagtatttgagcggcgctc

SEQ ID NO: 114771 - DNA, 25 bp, Saccharomyces pastorianus
actacccttgggagctgtatacaga

SEQ ID NO: 114772 - DNA, 25 bp, Saccharomyces pastorianus
ataaggaccctgatgtaccgcttgt

SEQ ID NO: 114773 - DNA, 25 bp, Saccharomyces pastorianus
ataagcccgtgctagacaatccgtt

SEQ ID NO: 114774 - DNA, 25 bp, Saccharomyces pastorianus
gctgctgcaatcctctatcataaat

SEQ ID NO: 114775 - DNA, 25 bp, Saccharomyces pastorianus
atatggcgcccatgacggttaaact

SEQ ID NO: 114776 - DNA, 25 bp, Saccharomyces pastorianus
gagtgccatggataccttcaagtcg

SEQ ID NO: 114777 - DNA, 25 bp, Saccharomyces pastorianus
gcgcgtgcatgatcagccattgatt

SEQ ID NO: 114778 - DNA, 25 bp, Saccharomyces pastorianus
agccgatttgctactttgacttaca

SEQ ID NO: 114779 - DNA, 25 bp, Saccharomyces pastorianus
acttacagttgtcgatgaacgtcaa

SEQ ID NO: 114780 - DNA, 25 bp, Saccharomyces pastorianus
ttaacgagtttgtccactgtttcct

SEQ ID NO: 114781 - DNA, 25 bp, Saccharomyces pastorianus
aattccagagtttatgcatgacgag

SEQ ID NO: 114782 - DNA, 25 bp, Saccharomyces pastorianus
gcatgacgagtctgatattccgatt

SEQ ID NO: 114783 - DNA, 25 bp, Saccharomyces pastorianus
ggtgactccaacgtatctcaaagga

SEQ ID NO: 114784 - DNA, 25 bp, Saccharomyces pastorianus
gtccactgtttcctctgatgggaag

SEQ ID NO: 114785 - DNA, 25 bp, Saccharomyces pastorianus
gagttaacccaggtgagtagcatca

SEQ ID NO: 114786 - DNA, 25 bp, Saccharomyces pastorianus
gatattccgattttgtcgcaagggt

SEQ ID NO: 114787 - DNA, 25 bp, Saccharomyces pastorianus
gtcgcaagggtttgatgcttttgat

SEQ ID NO: 114788 - DNA, 25 bp, Saccharomyces pastorianus
ggcatacttgcggacgggaaactag

SEQ ID NO: 114789 - DNA, 25 bp, Saccharomyces pastorianus
tactttggcgattggctgatttcat

SEQ ID NO: 114790 - DNA, 25 bp, Saccharomyces pastorianus
gatgagcacaagtgccgcctgaaat

SEQ ID NO: 114791 - DNA, 25 bp, Saccharomyces pastorianus
tattactactcgttgtacttcgcca

SEQ ID NO: 114792 - DNA, 25 bp, Saccharomyces pastorianus
catgctagcgtttggtgacttaagt

SEQ ID NO: 114793 - DNA, 25 bp, Saccharomyces pastorianus
tgtctgcatcaccattacctgaaga

SEQ ID NO: 114794 - DNA, 25 bp, Saccharomyces pastorianus
gatgggtttggtttcatgctagcgt

SEQ ID NO: 114795 - DNA, 25 bp, Saccharomyces pastorianus
ttacttgagtgtttcccctgtggaa

SEQ ID NO: 114796 - DNA, 25 bp, Saccharomyces pastorianus
gtacttcgccacgttgttattacac

SEQ ID NO: 114797 - DNA, 25 bp, Saccharomyces pastorianus
cattggtcttggttaatttcttgca

SEQ ID NO: 114798 - DNA, 25 bp, Saccharomyces pastorianus
tacctactcattacaagcgcgttac

SEQ ID NO: 114799 - DNA, 25 bp, Saccharomyces pastorianus
actcccttgacatattactactcgt

SEQ ID NO: 114800 - DNA, 25 bp, Saccharomyces pastorianus
gcagactactcataatcacgtgata

SEQ ID NO: 114801 - DNA, 25 bp, Saccharomyces pastorianus
cacttgcctattatggacagccagt

SEQ ID NO: 114802 - DNA, 25 bp, Saccharomyces pastorianus
tgatatttcttttcactctcttcat

SEQ ID NO: 114803 - DNA, 25 bp, Saccharomyces pastorianus
aaatcgcagactactcataatcacg

SEQ ID NO: 114804 - DNA, 25 bp, Saccharomyces pastorianus
atgacacttgcctattatggacagc

SEQ ID NO: 114805 - DNA, 25 bp, Saccharomyces pastorianus
ctttacgctctctgccagtattagt

SEQ ID NO: 114806 - DNA, 25 bp, Saccharomyces pastorianus
tgtgccatatattgccccctttacg

SEQ ID NO: 114807 - DNA, 25 bp, Saccharomyces pastorianus
gacagccagtaaagatgtgccatat

SEQ ID NO: 114808 - DNA, 25 bp, Saccharomyces pastorianus
aatcacgtgatatttcttttcactc

SEQ ID NO: 114809 - DNA, 25 bp, Saccharomyces pastorianus
tacgctctctgccagtattagtgga

SEQ ID NO: 114810 - DNA, 25 bp, Saccharomyces pastorianus
atttcttttcactctcttcataaag

SEQ ID NO: 114811 - DNA, 25 bp, Saccharomyces pastorianus
gtttgcttatattttcccgactgaa

SEQ ID NO: 114812 - DNA, 25 bp, Saccharomyces pastorianus
ttgattcctcaagcaccattacaca

SEQ ID NO: 114813 - DNA, 25 bp, Saccharomyces pastorianus
ttacgatttcgcactattgggactt

SEQ ID NO: 114814 - DNA, 25 bp, Saccharomyces pastorianus
atcggctttcccttagtattgcttt

SEQ ID NO: 114815 - DNA, 25 bp, Saccharomyces pastorianus
attgggacttaccacttgcatcagc

SEQ ID NO: 114816 - DNA, 25 bp, Saccharomyces pastorianus
tcacaaatactatagcggccatcgg

SEQ ID NO: 114817 - DNA, 25 bp, Saccharomyces pastorianus
gatatttctttcctttagcctgacg

SEQ ID NO: 114818 - DNA, 25 bp, Saccharomyces pastorianus
aggagaaatccctcaggcagtactt

SEQ ID NO: 114819 - DNA, 25 bp, Saccharomyces pastorianus
ggcgcccaatggtttgattcctcaa

SEQ ID NO: 114820 - DNA, 25 bp, Saccharomyces pastorianus
gttagtttctttctcgtttgcttat

SEQ ID NO: 114821 - DNA, 25 bp, Saccharomyces pastorianus
ttacaaatacgtttcagggcctgat

SEQ ID NO: 114822 - DNA, 25 bp, Saccharomyces pastorianus
aagagcgacgcttttgactttgaaa

SEQ ID NO: 114823 - DNA, 25 bp, Saccharomyces pastorianus
aatcctcttcagatgggtcatccac

SEQ ID NO: 114824 - DNA, 25 bp, Saccharomyces pastorianus
ttgacgataggcgacaaaacccaag

SEQ ID NO: 114825 - DNA, 25 bp, Saccharomyces pastorianus
gtcatccacagataattcaaccgca

SEQ ID NO: 114826 - DNA, 25 bp, Saccharomyces pastorianus
gaaagcgcaattgttcagactgaat

SEQ ID NO: 114827 - DNA, 25 bp, Saccharomyces pastorianus
agtagcggattgcatgcgtcttcaa

SEQ ID NO: 114828 - DNA, 25 bp, Saccharomyces pastorianus
aaaggctcctcaacgcaagatacaa

SEQ ID NO: 114829 - DNA, 25 bp, Saccharomyces pastorianus
tcttctctagcagattctactacaa

SEQ ID NO: 114830 - DNA, 25 bp, Saccharomyces pastorianus
gtagcgcggattctagttcaccaga

SEQ ID NO: 114831 - DNA, 25 bp, Saccharomyces pastorianus
attcaaccgcagatagttcatcaga

SEQ ID NO: 114832 - DNA, 25 bp, Saccharomyces pastorianus
gggcatcttctggagacgagaactc

SEQ ID NO: 114833 - DNA, 25 bp, Saccharomyces pastorianus
cagacagggtgttccatatctcggt

SEQ ID NO: 114834 - DNA, 25 bp, Saccharomyces pastorianus
atatctcggtgttgtttgcactgct

SEQ ID NO: 114835 - DNA, 25 bp, Saccharomyces pastorianus
tacatctccttgattcttttagccg

SEQ ID NO: 114836 - DNA, 25 bp, Saccharomyces pastorianus
cgtgttctttactctttagctagga

SEQ ID NO: 114837 - DNA, 25 bp, Saccharomyces pastorianus
gattactgttgtatctgccgctaat

SEQ ID NO: 114838 - DNA, 25 bp, Saccharomyces pastorianus
attgatgccttatggtgcctactac

SEQ ID NO: 114839 - DNA, 25 bp, Saccharomyces pastorianus
cgttatgttcatcggttgccagata

SEQ ID NO: 114840 - DNA, 25 bp, Saccharomyces pastorianus
attcatccaagggttccaagcgttc

SEQ ID NO: 114841 - DNA, 25 bp, Saccharomyces pastorianus
caagcgttctgtccgttcaaagttt

SEQ ID NO: 114842 - DNA, 25 bp, Saccharomyces pastorianus
ctggttattcatctctttggcacat

SEQ ID NO: 114843 - DNA, 25 bp, Saccharomyces pastorianus
gcagccttttttgtcaccgtgatca

SEQ ID NO: 114844 - DNA, 25 bp, Saccharomyces pastorianus
tacaaactgtcttctactctggcgt

SEQ ID NO: 114845 - DNA, 25 bp, Saccharomyces pastorianus
tcatcctagttccttttcttaacgg

SEQ ID NO: 114846 - DNA, 25 bp, Saccharomyces pastorianus
tgaccaacgtgaccatgccatttaa

SEQ ID NO: 114847 - DNA, 25 bp, Saccharomyces pastorianus
gaattatggactctggcaacttttt

SEQ ID NO: 114848 - DNA, 25 bp, Saccharomyces pastorianus
cattcaaccccgaagacttgtacta

SEQ ID NO: 114849 - DNA, 25 bp, Saccharomyces pastorianus
gaagcttggcttgtatcttttgatc

SEQ ID NO: 114850 - DNA, 25 bp, Saccharomyces pastorianus
gcaattacttcctattcgtctatgg

SEQ ID NO: 114851 - DNA, 25 bp, Saccharomyces pastorianus
gtattttcaagtcagcacccgttat

SEQ ID NO: 114852 - DNA, 25 bp, Saccharomyces pastorianus
gaactgttgtgctatgtcggctaca

SEQ ID NO: 114853 - DNA, 25 bp, Saccharomyces pastorianus
tttccatcagcaaatcgaccgtcaa

SEQ ID NO: 114854 - DNA, 25 bp, Saccharomyces pastorianus
agttcaatttactaagccgctccgg

SEQ ID NO: 114855 - DNA, 25 bp, Saccharomyces pastorianus
ttccctatctgcacttcgtgaggaa

SEQ ID NO: 114856 - DNA, 25 bp, Saccharomyces pastorianus
acgatgcgagtattttctctaggaa

SEQ ID NO: 114857 - DNA, 25 bp, Saccharomyces pastorianus
gacttttggctattttccaagctat

SEQ ID NO: 114858 - DNA, 25 bp, Saccharomyces pastorianus
taaggcggagagtggttccctatct

SEQ ID NO: 114859 - DNA, 25 bp, Saccharomyces pastorianus
tacagccttctttatttgctattga

SEQ ID NO: 114860 - DNA, 25 bp, Saccharomyces pastorianus
gttaaccctagatatttacagcctt

SEQ ID NO: 114861 - DNA, 25 bp, Saccharomyces pastorianus
gctcatagcctcatatatttgttca

SEQ ID NO: 114862 - DNA, 25 bp, Saccharomyces pastorianus
aaatcgtgatgaccttgagaacagt

SEQ ID NO: 114863 - DNA, 25 bp, Saccharomyces pastorianus
atttcgaagtatctgctcatagcct

SEQ ID NO: 114864 - DNA, 25 bp, Saccharomyces pastorianus
tccaagctatattccctattcaagg

SEQ ID NO: 114865 - DNA, 25 bp, Saccharomyces pastorianus
tgaaccactggctctttacaaaagt

SEQ ID NO: 114866 - DNA, 25 bp, Saccharomyces pastorianus
tgctcgggatgttctggtgcagtca

SEQ ID NO: 114867 - DNA, 25 bp, Saccharomyces pastorianus
gaaccagacgtttccaaaatagata

SEQ ID NO: 114868 - DNA, 25 bp, Saccharomyces pastorianus
gatatatcccttgaaaagcaattag

SEQ ID NO: 114869 - DNA, 25 bp, Saccharomyces pastorianus
gtcatgacctgctcgggatgttctg

SEQ ID NO: 114870 - DNA, 25 bp, Saccharomyces pastorianus
ttgacgaaattagaaccagacgttt

SEQ ID NO: 114871 - DNA, 25 bp, Saccharomyces pastorianus
gacctgctcgggatgttctggtgca

SEQ ID NO: 114872 - DNA, 25 bp, Saccharomyces pastorianus
gttctggtgcagtcaataaagtttt

SEQ ID NO: 114873 - DNA, 25 bp, Saccharomyces pastorianus
tatactacacttccttacgatttta

SEQ ID NO: 114874 - DNA, 25 bp, Saccharomyces pastorianus
gatgtatatactacacttccttacg

SEQ ID NO: 114875 - DNA, 25 bp, Saccharomyces pastorianus
gacgtttccaaaatagatatatccc

SEQ ID NO: 114876 - DNA, 25 bp, Saccharomyces pastorianus
cgggatgttctggtgcagtcaataa

SEQ ID NO: 114877 - DNA, 25 bp, Saccharomyces pastorianus
gaaattgttcgtccactgcagaaaa

SEQ ID NO: 114878 - DNA, 25 bp, Saccharomyces pastorianus
gagaaatccatcgtgggacgccacc

SEQ ID NO: 114879 - DNA, 25 bp, Saccharomyces pastorianus
gggatttttatctttttgcgacaga

SEQ ID NO: 114880 - DNA, 25 bp, Saccharomyces pastorianus
ggacgccaccattgagaaactgcta

SEQ ID NO: 114881 - DNA, 25 bp, Saccharomyces pastorianus
agagttattgtttgccgacactccc

SEQ ID NO: 114882 - DNA, 25 bp, Saccharomyces pastorianus
actcccctgcgaaggaatgccattg

SEQ ID NO: 114883 - DNA, 25 bp, Saccharomyces pastorianus
gaaactgctaccttatatcttgaag

SEQ ID NO: 114884 - DNA, 25 bp, Saccharomyces pastorianus
gaaatatcgtattgtctgtcaacta

SEQ ID NO: 114885 - DNA, 25 bp, Saccharomyces pastorianus
ggcatcaattgaccgaatttcgtga

SEQ ID NO: 114886 - DNA, 25 bp, Saccharomyces pastorianus
aatttgggtgagctcgtatctttat

SEQ ID NO: 114887 - DNA, 25 bp, Saccharomyces pastorianus
gaacctgctggaaactaaactgaac

SEQ ID NO: 114888 - DNA, 25 bp, Saccharomyces pastorianus
gaccctggacttggttttgctaaga

SEQ ID NO: 114889 - DNA, 25 bp, Saccharomyces pastorianus
taataccgacattcagcagctagac

SEQ ID NO: 114890 - DNA, 25 bp, Saccharomyces pastorianus
agactttgctactggagcggtggta

SEQ ID NO: 114891 - DNA, 25 bp, Saccharomyces pastorianus
ttcggcagcgacatggttagggtcc

SEQ ID NO: 114892 - DNA, 25 bp, Saccharomyces pastorianus
agcgtcgtgtattggtttcggcagc

SEQ ID NO: 114893 - DNA, 25 bp, Saccharomyces pastorianus
attcgcaagtgtatgttaacctcag

SEQ ID NO: 114894 - DNA, 25 bp, Saccharomyces pastorianus
gttaacctcagaaatatgcccgttt

SEQ ID NO: 114895 - DNA, 25 bp, Saccharomyces pastorianus
ggcaaattctaatcgaccctggact

SEQ ID NO: 114896 - DNA, 25 bp, Saccharomyces pastorianus
taggctggcgcattacgaaaatttt

SEQ ID NO: 114897 - DNA, 25 bp, Saccharomyces pastorianus
gtttgccgtaattgcagagaaccca

SEQ ID NO: 114898 - DNA, 25 bp, Saccharomyces pastorianus
gttttattgggtccatcgcgcaaaa

SEQ ID NO: 114899 - DNA, 25 bp, Saccharomyces pastorianus
gatatcgtctgcatactattttgaa

SEQ ID NO: 114900 - DNA, 25 bp, Saccharomyces pastorianus
aaaggcttacttgtccgtagatgag

SEQ ID NO: 114901 - DNA, 25 bp, Saccharomyces pastorianus
tagtagccgactctgatccaattga

SEQ ID NO: 114902 - DNA, 25 bp, Saccharomyces pastorianus
gcctatgacttactcgaggatacag

SEQ ID NO: 114903 - DNA, 25 bp, Saccharomyces pastorianus
tgtaactacgttttggctccagaaa

SEQ ID NO: 114904 - DNA, 25 bp, Saccharomyces pastorianus
agaacccttcatgcccattgtaatg

SEQ ID NO: 114905 - DNA, 25 bp, Saccharomyces pastorianus
taaaagggcactcacgcacaatcag

SEQ ID NO: 114906 - DNA, 25 bp, Saccharomyces pastorianus
tactgctggattttacggcctgaaa

SEQ ID NO: 114907 - DNA, 25 bp, Saccharomyces pastorianus
aaatcttgctcgtcgaagacaccga

SEQ ID NO: 114908 - DNA, 25 bp, Saccharomyces pastorianus
taccacccatgttgttttcggatga

SEQ ID NO: 114909 - DNA, 25 bp, Saccharomyces pastorianus
gaccgtctgcgggaactgaaactcg

SEQ ID NO: 114910 - DNA, 25 bp, Saccharomyces pastorianus
aaattaaagcacatactggtcctat

SEQ ID NO: 114911 - DNA, 25 bp, Saccharomyces pastorianus
ttagccaattacaaaaccgatcccg

SEQ ID NO: 114912 - DNA, 25 bp, Saccharomyces pastorianus
acgatttgaactctgcggtaacaac

SEQ ID NO: 114913 - DNA, 25 bp, Saccharomyces pastorianus
ggtaacaacactagacgtctgtcat

SEQ ID NO: 114914 - DNA, 25 bp, Saccharomyces pastorianus
atcgatgggaattgctacgtatgga

SEQ ID NO: 114915 - DNA, 25 bp, Saccharomyces pastorianus
gatcccgttttgaagttttatcctg

SEQ ID NO: 114916 - DNA, 25 bp, Saccharomyces pastorianus
acatggcatattggaggtttgtacc

SEQ ID NO: 114917 - DNA, 25 bp, Saccharomyces pastorianus
atggtatatcatgtcaggcaagaat

SEQ ID NO: 114918 - DNA, 25 bp, Saccharomyces pastorianus
gaagaagcttcattactgggagtat

SEQ ID NO: 114919 - DNA, 25 bp, Saccharomyces pastorianus
gtggtaatttactccactctaaatc

SEQ ID NO: 114920 - DNA, 25 bp, Saccharomyces pastorianus
atactggtcctataaccgggatcaa

SEQ ID NO: 114921 - DNA, 25 bp, Saccharomyces pastorianus
tggtcaacctctcgttaccggtatt

SEQ ID NO: 114922 - DNA, 25 bp, Saccharomyces pastorianus
aagatgcctactgattctggcagaa

SEQ ID NO: 114923 - DNA, 25 bp, Saccharomyces pastorianus
aacaaatctggtagcatatcgtcga

SEQ ID NO: 114924 - DNA, 25 bp, Saccharomyces pastorianus
agatggagccctgccattgagaact

SEQ ID NO: 114925 - DNA, 25 bp, Saccharomyces pastorianus
atttgaccccactgctcaattgaat

SEQ ID NO: 114926 - DNA, 25 bp, Saccharomyces pastorianus
ttgtgactatcaacacggttacagt

SEQ ID NO: 114927 - DNA, 25 bp, Saccharomyces pastorianus
atatcgtcgatatctccagtaccct

SEQ ID NO: 114928 - DNA, 25 bp, Saccharomyces pastorianus
caaccaaccattaccttctcaggga

SEQ ID NO: 114929 - DNA, 25 bp, Saccharomyces pastorianus
agtaccctacggcaatgcaccattg

SEQ ID NO: 114930 - DNA, 25 bp, Saccharomyces pastorianus
tattattcctatgcacaggctcacg

SEQ ID NO: 114931 - DNA, 25 bp, Saccharomyces pastorianus
gcaacctatgatgcagcaaccgtat

SEQ ID NO: 114932 - DNA, 25 bp, Saccharomyces pastorianus
gggttgaattacagacaagatcctt

SEQ ID NO: 114933 - DNA, 25 bp, Saccharomyces pastorianus
gaatttccagctaatcgtgatcact

SEQ ID NO: 114934 - DNA, 25 bp, Saccharomyces pastorianus
gtaattgcactagacgaacctacca

SEQ ID NO: 114935 - DNA, 25 bp, Saccharomyces pastorianus
caagatcctttgttactgacgacat

SEQ ID NO: 114936 - DNA, 25 bp, Saccharomyces pastorianus
agctctatctgaaacatttggcgca

SEQ ID NO: 114937 - DNA, 25 bp, Saccharomyces pastorianus
gcgggtcaaaaagttcttgcatcga

SEQ ID NO: 114938 - DNA, 25 bp, Saccharomyces pastorianus
tcgattattatcaggctagctctat

SEQ ID NO: 114939 - DNA, 25 bp, Saccharomyces pastorianus
agaggacgatgttccgcgggtcaaa

SEQ ID NO: 114940 - DNA, 25 bp, Saccharomyces pastorianus
catttggcgcaaattgtggcgtaat

SEQ ID NO: 114941 - DNA, 25 bp, Saccharomyces pastorianus
gggaaaatcatacaactatcgtgtt

SEQ ID NO: 114942 - DNA, 25 bp, Saccharomyces pastorianus
agcggcatttactgatcacttcttc

SEQ ID NO: 114943 - DNA, 25 bp, Saccharomyces pastorianus
gggtgaccaaagagcaaaggtttgc

SEQ ID NO: 114944 - DNA, 25 bp, Saccharomyces pastorianus
aaaaaggactttgcatgtaatggta

SEQ ID NO: 114945 - DNA, 25 bp, Saccharomyces pastorianus
ctacggtgcaaggtgtcccagagga

SEQ ID NO: 114946 - DNA, 25 bp, Saccharomyces pastorianus
aggtttgcgaatttatgatctccca

SEQ ID NO: 114947 - DNA, 25 bp, Saccharomyces pastorianus
gattattcaattgcagggtgaccaa

SEQ ID NO: 114948 - DNA, 25 bp, Saccharomyces pastorianus
ggtaacattgtcaaggatccagaaa

SEQ ID NO: 114949 - DNA, 25 bp, Saccharomyces pastorianus
ggactttgcatgtaatggtaacatt

SEQ ID NO: 114950 - DNA, 25 bp, Saccharomyces pastorianus
tttaactacggtgcaaggtgtccca

SEQ ID NO: 114951 - DNA, 25 bp, Saccharomyces pastorianus
ggtgtcccagaggagtatgatttaa

SEQ ID NO: 114952 - DNA, 25 bp, Saccharomyces pastorianus
gcgaatttatgatctcccaactggg

SEQ ID NO: 114953 - DNA, 25 bp, Saccharomyces pastorianus
gaatttatgatctcccaactgggat

SEQ ID NO: 114954 - DNA, 25 bp, Saccharomyces pastorianus
gaagcacatagagcgtccggacggt

SEQ ID NO: 114955 - DNA, 25 bp, Saccharomyces pastorianus
tactgggtgaccattccaactttgt

SEQ ID NO: 114956 - DNA, 25 bp, Saccharomyces pastorianus
aagacccctggtctgtcaaatgcta

SEQ ID NO: 114957 - DNA, 25 bp, Saccharomyces pastorianus
aactggtcatcagagtgcagcccga

SEQ ID NO: 114958 - DNA, 25 bp, Saccharomyces pastorianus
gatgccgctgtgtacctaaagttta

SEQ ID NO: 114959 - DNA, 25 bp, Saccharomyces pastorianus
gaaatttacccctacggatcaagag

SEQ ID NO: 114960 - DNA, 25 bp, Saccharomyces pastorianus
aatgctacccaagtcacagatctga

SEQ ID NO: 114961 - DNA, 25 bp, Saccharomyces pastorianus
taagcccgcctacgtggatgatgac

SEQ ID NO: 114962 - DNA, 25 bp, Saccharomyces pastorianus
aaagcggtcgcatcgggtgtcttca

SEQ ID NO: 114963 - DNA, 25 bp, Saccharomyces pastorianus
catcatgatgcgtgccggtaaggct

SEQ ID NO: 114964 - DNA, 25 bp, Saccharomyces pastorianus
gttgataagagacgccctactgggt

SEQ ID NO: 114965 - DNA, 25 bp, Saccharomyces pastorianus
gcatgaacggtggtggcctactcaa

SEQ ID NO: 114966 - DNA, 25 bp, Saccharomyces pastorianus
gatgatcgcataatagccgccgcca

SEQ ID NO: 114967 - DNA, 25 bp, Saccharomyces pastorianus
aatggtagatcctctaaccctggga

SEQ ID NO: 114968 - DNA, 25 bp, Saccharomyces pastorianus
aagaggaacatcaccgctctgcgga

SEQ ID NO: 114969 - DNA, 25 bp, Saccharomyces pastorianus
tgtcgagtaccgattgctgcacgat

SEQ ID NO: 114970 - DNA, 25 bp, Saccharomyces pastorianus
gccagcgagctttccgggtttagaa

SEQ ID NO: 114971 - DNA, 25 bp, Saccharomyces pastorianus
acgcgtgtccgggtgcatgcatgaa

SEQ ID NO: 114972 - DNA, 25 bp, Saccharomyces pastorianus
aatctggtgcgtaaactgacctcgg

SEQ ID NO: 114973 - DNA, 25 bp, Saccharomyces pastorianus
ggtggctatgcctaccagtacgtaa

SEQ ID NO: 114974 - DNA, 25 bp, Saccharomyces pastorianus
agtccactgggcgtcgaatctggga

SEQ ID NO: 114975 - DNA, 25 bp, Saccharomyces pastorianus
gtacgtaacggctgtccaacgacta

SEQ ID NO: 114976 - DNA, 25 bp, Saccharomyces pastorianus
attccccaaacgactactgcgagta

SEQ ID NO: 114977 - DNA, 25 bp, Saccharomyces pastorianus
ctgattctgatccaaacactcctaa

SEQ ID NO: 114978 - DNA, 25 bp, Saccharomyces pastorianus
agttcaacttctatttccatcagcg

SEQ ID NO: 114979 - DNA, 25 bp, Saccharomyces pastorianus
gattggcgccacatttttggtgtta

SEQ ID NO: 114980 - DNA, 25 bp, Saccharomyces pastorianus
atcagcgctacttctacatcttcta

SEQ ID NO: 114981 - DNA, 25 bp, Saccharomyces pastorianus
ggaggttgaaccagctgctacagaa

SEQ ID NO: 114982 - DNA, 25 bp, Saccharomyces pastorianus
gtaccgtatcacaatattctgccag

SEQ ID NO: 114983 - DNA, 25 bp, Saccharomyces pastorianus
catcttctatctcaattggtgtgga

SEQ ID NO: 114984 - DNA, 25 bp, Saccharomyces pastorianus
tgcgagtaccgatcctgattctgat

SEQ ID NO: 114985 - DNA, 25 bp, Saccharomyces pastorianus
aagttcccaaatgacgccaacgcag

SEQ ID NO: 114986 - DNA, 25 bp, Saccharomyces pastorianus
catcttgcaagtttgtcttcatcag

SEQ ID NO: 114987 - DNA, 25 bp, Saccharomyces pastorianus
ggaggcgaccatagtgcgtacgttc

SEQ ID NO: 114988 - DNA, 25 bp, Saccharomyces pastorianus
tgagcacgcccagcacttgataatt

SEQ ID NO: 114989 - DNA, 25 bp, Saccharomyces pastorianus
ttattttcaccggatgggccatgtc

SEQ ID NO: 114990 - DNA, 25 bp, Saccharomyces pastorianus
caggtctcctatttatgggcgcaaa

SEQ ID NO: 114991 - DNA, 25 bp, Saccharomyces pastorianus
gaatactcgggattttcctttccag

SEQ ID NO: 114992 - DNA, 25 bp, Saccharomyces pastorianus
gattgcatgtttggaattctaccta

SEQ ID NO: 114993 - DNA, 25 bp, Saccharomyces pastorianus
atcaggcgcatttttggtctacttc

SEQ ID NO: 114994 - DNA, 25 bp, Saccharomyces pastorianus
aggattccttccgaaatcatacgaa

SEQ ID NO: 114995 - DNA, 25 bp, Saccharomyces pastorianus
accttgctcccttttgtttagtatg

SEQ ID NO: 114996 - DNA, 25 bp, Saccharomyces pastorianus
ggtctacttctggatgattgcatgt

SEQ ID NO: 114997 - DNA, 25 bp, Saccharomyces pastorianus
tatctggtggactggtggaatactc

SEQ ID NO: 114998 - DNA, 25 bp, Saccharomyces pastorianus
tggccaaccatgtatacaagactgt

SEQ ID NO: 114999 - DNA, 25 bp, Saccharomyces pastorianus
gcagtgatttcccatgcgaatgcgg

SEQ ID NO: 115000 - DNA, 25 bp, Saccharomyces pastorianus
gaaactagtcttatctgaatcacca

SEQ ID NO: 115001 - DNA, 25 bp, Saccharomyces pastorianus
agatgcagtaggtgcggttccgtca

SEQ ID NO: 115002 - DNA, 25 bp, Saccharomyces pastorianus
atgcgaacaacagccatcacaggaa

SEQ ID NO: 115003 - DNA, 25 bp, Saccharomyces pastorianus
atgcgaatgcggctgcggtatattt

SEQ ID NO: 115004 - DNA, 25 bp, Saccharomyces pastorianus
gtacgacgatgtaacctgtgacaaa

SEQ ID NO: 115005 - DNA, 25 bp, Saccharomyces pastorianus
tgcggttccgtcacaagagcaggaa

SEQ ID NO: 115006 - DNA, 25 bp, Saccharomyces pastorianus
gagatttcctcctgcagtatgctaa

SEQ ID NO: 115007 - DNA, 25 bp, Saccharomyces pastorianus
acaacaaatttatcgcgctatgcga

SEQ ID NO: 115008 - DNA, 25 bp, Saccharomyces pastorianus
aagactattgtacccactagcatcc

SEQ ID NO: 115009 - DNA, 25 bp, Saccharomyces pastorianus
gtatgattactgcagggaaggaccc

SEQ ID NO: 115010 - DNA, 25 bp, Saccharomyces pastorianus
gatcttttctcacactggaactcaa

SEQ ID NO: 115011 - DNA, 25 bp, Saccharomyces pastorianus
gacaggtttggatcttttctcacac

SEQ ID NO: 115012 - DNA, 25 bp, Saccharomyces pastorianus
aaaacgccattccagaattctcggc

SEQ ID NO: 115013 - DNA, 25 bp, Saccharomyces pastorianus
gtagcagtaccgtcgtggaaagtaa

SEQ ID NO: 115014 - DNA, 25 bp, Saccharomyces pastorianus
tctcggcatcaaaaccgttggtttc

SEQ ID NO: 115015 - DNA, 25 bp, Saccharomyces pastorianus
aaaagcgaccgtgaatcgacgcctc

SEQ ID NO: 115016 - DNA, 25 bp, Saccharomyces pastorianus
gggacaactttactcatatttggca

SEQ ID NO: 115017 - DNA, 25 bp, Saccharomyces pastorianus
tatgactacattgcaggacaggttt

SEQ ID NO: 115018 - DNA, 25 bp, Saccharomyces pastorianus
tttttccattcccaaacttgcgatg

SEQ ID NO: 115019 - DNA, 25 bp, Saccharomyces pastorianus
aatctcaccaaagggctctggaagt

SEQ ID NO: 115020 - DNA, 25 bp, Saccharomyces pastorianus
gaaacccctgaacctgttggaaatg

SEQ ID NO: 115021 - DNA, 25 bp, Saccharomyces pastorianus
gaaactcaatcttattccgctgctg

SEQ ID NO: 115022 - DNA, 25 bp, Saccharomyces pastorianus
cgctgctggagctactacatacgga

SEQ ID NO: 115023 - DNA, 25 bp, Saccharomyces pastorianus
gacctgtttcaatgtcctttaaagg

SEQ ID NO: 115024 - DNA, 25 bp, Saccharomyces pastorianus
ttttattgactccatgacgcctgat

SEQ ID NO: 115025 - DNA, 25 bp, Saccharomyces pastorianus
taatgaccagggtgtccggttttcg

SEQ ID NO: 115026 - DNA, 25 bp, Saccharomyces pastorianus
tccggttttcgtcccagataatact

SEQ ID NO: 115027 - DNA, 25 bp, Saccharomyces pastorianus
gaaatttccacttgtaaccagctta

SEQ ID NO: 115028 - DNA, 25 bp, Saccharomyces pastorianus
aatcgctctggtacttttgatacac

SEQ ID NO: 115029 - DNA, 25 bp, Saccharomyces pastorianus
gaattcgaacccaatagacctgttt

SEQ ID NO: 115030 - DNA, 25 bp, Saccharomyces pastorianus
atgacgcctgattctcccgtaaaat

SEQ ID NO: 115031 - DNA, 25 bp, Saccharomyces pastorianus
ggaaccaactactatttgaccactg

SEQ ID NO: 115032 - DNA, 25 bp, Saccharomyces pastorianus
tcaggtctcaggatgtacggtctac

SEQ ID NO: 115033 - DNA, 25 bp, Saccharomyces pastorianus
tttcgttgcaacgagccagtgtcga

SEQ ID NO: 115034 - DNA, 25 bp, Saccharomyces pastorianus
atgacttcaccggttacaggcgcta

SEQ ID NO: 115035 - DNA, 25 bp, Saccharomyces pastorianus
gttagggcgcaagttttatcattag

SEQ ID NO: 115036 - DNA, 25 bp, Saccharomyces pastorianus
ttctggagcagctacgttctctgtt

SEQ ID NO: 115037 - DNA, 25 bp, Saccharomyces pastorianus
ggtcgtgttcgccagagctgctaat

SEQ ID NO: 115038 - DNA, 25 bp, Saccharomyces pastorianus
ggtttcagtgcttcctgggacagaa

SEQ ID NO: 115039 - DNA, 25 bp, Saccharomyces pastorianus
tgattttgccaataacctaccgaag

SEQ ID NO: 115040 - DNA, 25 bp, Saccharomyces pastorianus
tgaccagggtgacaaggctttcgtt

SEQ ID NO: 115041 - DNA, 25 bp, Saccharomyces pastorianus
gttctctgtttctcaagcatcatca

SEQ ID NO: 115042 - DNA, 25 bp, Saccharomyces pastorianus
gtgctgcatattctacaaactcatt

SEQ ID NO: 115043 - DNA, 25 bp, Saccharomyces pastorianus
tattgacccactgacccgtgaaaag

SEQ ID NO: 115044 - DNA, 25 bp, Saccharomyces pastorianus
aagattaccctgatgttcctaaagt

SEQ ID NO: 115045 - DNA, 25 bp, Saccharomyces pastorianus
gttatcgattttatgccagctggtc

SEQ ID NO: 115046 - DNA, 25 bp, Saccharomyces pastorianus
taattcacccttttattgacccact

SEQ ID NO: 115047 - DNA, 25 bp, Saccharomyces pastorianus
acaggtacagcacttggtcttcatg

SEQ ID NO: 115048 - DNA, 25 bp, Saccharomyces pastorianus
ccttggttagcatggactttcttga

SEQ ID NO: 115049 - DNA, 25 bp, Saccharomyces pastorianus
tggtcaagactctctagctttgcta

SEQ ID NO: 115050 - DNA, 25 bp, Saccharomyces pastorianus
agaggtttcaaagcttcggtggtat

SEQ ID NO: 115051 - DNA, 25 bp, Saccharomyces pastorianus
catgatgtttattggccagctctgg

SEQ ID NO: 115052 - DNA, 25 bp, Saccharomyces pastorianus
gctctggtggaaaccgcgcgtgaaa

SEQ ID NO: 115053 - DNA, 25 bp, Saccharomyces pastorianus
ggagatagttttccgcacgtgaccg

SEQ ID NO: 115054 - DNA, 25 bp, Saccharomyces pastorianus
ttgtccatcaaaccggagcctgtta

SEQ ID NO: 115055 - DNA, 25 bp, Saccharomyces pastorianus
ttttcgtacgaaatgccggatctga

SEQ ID NO: 115056 - DNA, 25 bp, Saccharomyces pastorianus
ccaagaaaggcccattgtccatcaa

SEQ ID NO: 115057 - DNA, 25 bp, Saccharomyces pastorianus
tattcaggcctactccgaagacaaa

SEQ ID NO: 115058 - DNA, 25 bp, Saccharomyces pastorianus
gcatgcgcaacgtgtggcctttggt

SEQ ID NO: 115059 - DNA, 25 bp, Saccharomyces pastorianus
caccgtcaatctttctcaatcgtaa

SEQ ID NO: 115060 - DNA, 25 bp, Saccharomyces pastorianus
aagacaaacgctgcaggttctcgac

SEQ ID NO: 115061 - DNA, 25 bp, Saccharomyces pastorianus
aaagatgttacgcagcccatcacgc

SEQ ID NO: 115062 - DNA, 25 bp, Saccharomyces pastorianus
gagaagatccgaatcaccgtcaatc

SEQ ID NO: 115063 - DNA, 25 bp, Saccharomyces pastorianus
gtcaccgcaaatcccgtaacaaagg

SEQ ID NO: 115064 - DNA, 25 bp, Saccharomyces pastorianus
gagattatccaacccaagcgttatg

SEQ ID NO: 115065 - DNA, 25 bp, Saccharomyces pastorianus
gagattgtcatcttcactttcgtct

SEQ ID NO: 115066 - DNA, 25 bp, Saccharomyces pastorianus
gcgagttcagcttgcaatgcttgca

SEQ ID NO: 115067 - DNA, 25 bp, Saccharomyces pastorianus
ttttcatccgaactgacgtcttcta

SEQ ID NO: 115068 - DNA, 25 bp, Saccharomyces pastorianus
tcttctacctctatatccatttcta

SEQ ID NO: 115069 - DNA, 25 bp, Saccharomyces pastorianus
agtagaccaatcttcatcgtcatcc

SEQ ID NO: 115070 - DNA, 25 bp, Saccharomyces pastorianus
agattcctctgtttctgtgtcaacc

SEQ ID NO: 115071 - DNA, 25 bp, Saccharomyces pastorianus
caactcattactccgtttgtcttta

SEQ ID NO: 115072 - DNA, 25 bp, Saccharomyces pastorianus
gattctgccagttttctttcaattt

SEQ ID NO: 115073 - DNA, 25 bp, Saccharomyces pastorianus
gcccttgtctcctagtgatgctaaa

SEQ ID NO: 115074 - DNA, 25 bp, Saccharomyces pastorianus
atcgtcatccgtttgtaagcccttg

SEQ ID NO: 115075 - DNA, 25 bp, Saccharomyces pastorianus
atagtagcaggtcttcatccgttat

SEQ ID NO: 115076 - DNA, 25 bp, Saccharomyces pastorianus
ggctggtcagacttttactatgtaa

SEQ ID NO: 115077 - DNA, 25 bp, Saccharomyces pastorianus
cattatctgggtttttatctgggtg

SEQ ID NO: 115078 - DNA, 25 bp, Saccharomyces pastorianus
gatattaactcttggctggtcagac

SEQ ID NO: 115079 - DNA, 25 bp, Saccharomyces pastorianus
gtggcttcttcaacattatctgggt

SEQ ID NO: 115080 - DNA, 25 bp, Saccharomyces pastorianus
gacagtacttcataagcggctcgaa

SEQ ID NO: 115081 - DNA, 25 bp, Saccharomyces pastorianus
aagagctactttgcgatgacttcaa

SEQ ID NO: 115082 - DNA, 25 bp, Saccharomyces pastorianus
gatcagaagcatgcgtttcgacccc

SEQ ID NO: 115083 - DNA, 25 bp, Saccharomyces pastorianus
gcggctcgaatcacagcaaattttt

SEQ ID NO: 115084 - DNA, 25 bp, Saccharomyces pastorianus
aaatgttggccgcttaagccctcca

SEQ ID NO: 115085 - DNA, 25 bp, Saccharomyces pastorianus
gtttcgacccctaaaagctcatagt

SEQ ID NO: 115086 - DNA, 25 bp, Saccharomyces pastorianus
gtcaaggcccgatatttcggcagaa

SEQ ID NO: 115087 - DNA, 25 bp, Saccharomyces pastorianus
aattttgctcaacgtctgcatagac

SEQ ID NO: 115088 - DNA, 25 bp, Saccharomyces pastorianus
aaatatcttacagtcaaggcccgat

SEQ ID NO: 115089 - DNA, 25 bp, Saccharomyces pastorianus
gttttggctgttggtattccttatc

SEQ ID NO: 115090 - DNA, 25 bp, Saccharomyces pastorianus
aacatcatgctgtccaattttgctc

SEQ ID NO: 115091 - DNA, 25 bp, Saccharomyces pastorianus
gaaatttacggatcaagcatactat

SEQ ID NO: 115092 - DNA, 25 bp, Saccharomyces pastorianus
aggatggattccatagatcaccatt

SEQ ID NO: 115093 - DNA, 25 bp, Saccharomyces pastorianus
tatgtcaacgcgcaggatggattcc

SEQ ID NO: 115094 - DNA, 25 bp, Saccharomyces pastorianus
tgaggtcgcgatttggaaacttaga

SEQ ID NO: 115095 - DNA, 25 bp, Saccharomyces pastorianus
gaaagattccgttgctggctatcaa

SEQ ID NO: 115096 - DNA, 25 bp, Saccharomyces pastorianus
gaactggataatttgaggtcgcgat

SEQ ID NO: 115097 - DNA, 25 bp, Saccharomyces pastorianus
agaaatacccatatggtctccatat

SEQ ID NO: 115098 - DNA, 25 bp, Saccharomyces pastorianus
tgggaaagcaaatcatacgtcggtt

SEQ ID NO: 115099 - DNA, 25 bp, Saccharomyces pastorianus
gtcttctccgaattatagtctcatt

SEQ ID NO: 115100 - DNA, 25 bp, Saccharomyces pastorianus
gaaaacgaaatggtcttctccgaat

SEQ ID NO: 115101 - DNA, 25 bp, Saccharomyces pastorianus
gaggcagaggccagtattcatgaga

SEQ ID NO: 115102 - DNA, 25 bp, Saccharomyces pastorianus
tttgagtcctttttgtctaggaaca

SEQ ID NO: 115103 - DNA, 25 bp, Saccharomyces pastorianus
tagactgactttccctccattagat

SEQ ID NO: 115104 - DNA, 25 bp, Saccharomyces pastorianus
ttgttggtcaaaacgctccagagat

SEQ ID NO: 115105 - DNA, 25 bp, Saccharomyces pastorianus
acaatgatagactgactttccctcc

SEQ ID NO: 115106 - DNA, 25 bp, Saccharomyces pastorianus
gaccgagggaggaacaagctgcttt

SEQ ID NO: 115107 - DNA, 25 bp, Saccharomyces pastorianus
ttgaccaattgatgaggcagaggcc

SEQ ID NO: 115108 - DNA, 25 bp, Saccharomyces pastorianus
catattcctcaaccggcagtagaag

SEQ ID NO: 115109 - DNA, 25 bp, Saccharomyces pastorianus
ttacatttcgatcctcatattcctc

SEQ ID NO: 115110 - DNA, 25 bp, Saccharomyces pastorianus
aacacagtcagtaggcattgccggc

SEQ ID NO: 115111 - DNA, 25 bp, Saccharomyces pastorianus
aatctgctattatcaatgttcttgc

SEQ ID NO: 115112 - DNA, 25 bp, Saccharomyces pastorianus
gagactacgtagatattggtgcaat

SEQ ID NO: 115113 - DNA, 25 bp, Saccharomyces pastorianus
gatccctcgatgctcattggtattt

SEQ ID NO: 115114 - DNA, 25 bp, Saccharomyces pastorianus
gattcatttgtagagtcgtgccata

SEQ ID NO: 115115 - DNA, 25 bp, Saccharomyces pastorianus
gagtcgtgccataccagtaaatttg

SEQ ID NO: 115116 - DNA, 25 bp, Saccharomyces pastorianus
caactatcggaaatggatccctcga

SEQ ID NO: 115117 - DNA, 25 bp, Saccharomyces pastorianus
tgcaatattcccacacacaacaaat

SEQ ID NO: 115118 - DNA, 25 bp, Saccharomyces pastorianus
taggccgtcttcatcgttgtatttt

SEQ ID NO: 115119 - DNA, 25 bp, Saccharomyces pastorianus
ggtttattgcaaatgctggatcgta

SEQ ID NO: 115120 - DNA, 25 bp, Saccharomyces pastorianus
ggaattagctgatatgctcaatgat

SEQ ID NO: 115121 - DNA, 25 bp, Saccharomyces pastorianus
gctggatcgtaatagaagactcaaa

SEQ ID NO: 115122 - DNA, 25 bp, Saccharomyces pastorianus
tagtcatcgcaattcaaacttgaag

SEQ ID NO: 115123 - DNA, 25 bp, Saccharomyces pastorianus
gttacaagtcgaacggtttattgca

SEQ ID NO: 115124 - DNA, 25 bp, Saccharomyces pastorianus
gagtggcaaagctcacattctcaac

SEQ ID NO: 115125 - DNA, 25 bp, Saccharomyces pastorianus
atcacaatcagcagaccgttacaag

SEQ ID NO: 115126 - DNA, 25 bp, Saccharomyces pastorianus
tcttcgacttcgttttcacttgtga

SEQ ID NO: 115127 - DNA, 25 bp, Saccharomyces pastorianus
gataagcctaatgtgtactcatttg

SEQ ID NO: 115128 - DNA, 25 bp, Saccharomyces pastorianus
gatgacattccctttgaagattgta

SEQ ID NO: 115129 - DNA, 25 bp, Saccharomyces pastorianus
gcctggtctatcgatagataagcct

SEQ ID NO: 115130 - DNA, 25 bp, Saccharomyces pastorianus
gaccaaggctatgtcgttgtcgatt

SEQ ID NO: 115131 - DNA, 25 bp, Saccharomyces pastorianus
agcggcacctaccacttaaattgtg

SEQ ID NO: 115132 - DNA, 25 bp, Saccharomyces pastorianus
aagaccgggcaatttaacgctcagg

SEQ ID NO: 115133 - DNA, 25 bp, Saccharomyces pastorianus
atttcgcactcctgatagcattagc

SEQ ID NO: 115134 - DNA, 25 bp, Saccharomyces pastorianus
atcttgcacactactcgaacgaggt

SEQ ID NO: 115135 - DNA, 25 bp, Saccharomyces pastorianus
ttatagatcatcatgcggccatccg

SEQ ID NO: 115136 - DNA, 25 bp, Saccharomyces pastorianus
acatccttcccatgttgtatcattg

SEQ ID NO: 115137 - DNA, 25 bp, Saccharomyces pastorianus
gtatcattgctgtatcttgcacact

SEQ ID NO: 115138 - DNA, 25 bp, Saccharomyces pastorianus
gtcaatagttcttcattctccctta

SEQ ID NO: 115139 - DNA, 25 bp, Saccharomyces pastorianus
attggttttattaccagcggcacct

SEQ ID NO: 115140 - DNA, 25 bp, Saccharomyces pastorianus
gaaaattccacttccagaggtacat

SEQ ID NO: 115141 - DNA, 25 bp, Saccharomyces pastorianus
gaaaaactgcagaccattggtgctg

SEQ ID NO: 115142 - DNA, 25 bp, Saccharomyces pastorianus
tgtcctcaccggtttaggtattcct

SEQ ID NO: 115143 - DNA, 25 bp, Saccharomyces pastorianus
tgaatgggttggtaccggccccgca

SEQ ID NO: 115144 - DNA, 25 bp, Saccharomyces pastorianus
tagagttggtgaaggtcctttccca

SEQ ID NO: 115145 - DNA, 25 bp, Saccharomyces pastorianus
caaagttttgccaggttgggatcaa

SEQ ID NO: 115146 - DNA, 25 bp, Saccharomyces pastorianus
gaagctagatttgttccctgaagac

SEQ ID NO: 115147 - DNA, 25 bp, Saccharomyces pastorianus
ggtgctgaatttggtgtcactactg

SEQ ID NO: 115148 - DNA, 25 bp, Saccharomyces pastorianus
agcgtcgttgcggttggctagactt

SEQ ID NO: 115149 - DNA, 25 bp, Saccharomyces pastorianus
atcccagtgggtatttcatattcta

SEQ ID NO: 115150 - DNA, 25 bp, Saccharomyces pastorianus
tatgtgacttcttccaatactggta

SEQ ID NO: 115151 - DNA, 25 bp, Saccharomyces pastorianus
ttagacgtcctcgatactttcaaag

SEQ ID NO: 115152 - DNA, 25 bp, Saccharomyces pastorianus
actgacttaaagttcctggacggca

SEQ ID NO: 115153 - DNA, 25 bp, Saccharomyces pastorianus
agaagtgctcgagaaatgtccaaat

SEQ ID NO: 115154 - DNA, 25 bp, Saccharomyces pastorianus
ttgtgttgctttggctagggcacca

SEQ ID NO: 115155 - DNA, 25 bp, Saccharomyces pastorianus
tttgccagaggcagaccttgcactg

SEQ ID NO: 115156 - DNA, 25 bp, Saccharomyces pastorianus
aggctacaagtacaatcccgattat

SEQ ID NO: 115157 - DNA, 25 bp, Saccharomyces pastorianus
tgcactggcgcaatgttgtgttgct

SEQ ID NO: 115158 - DNA, 25 bp, Saccharomyces pastorianus
gtccaacaagactactttcccaaag

SEQ ID NO: 115159 - DNA, 25 bp, Saccharomyces pastorianus
gaggacccattgtatgttgcccgaa

SEQ ID NO: 115160 - DNA, 25 bp, Saccharomyces pastorianus
gatacaatctctgcgtttcataaat

SEQ ID NO: 115161 - DNA, 25 bp, Saccharomyces pastorianus
cgaaaacgcctcactgtactattta

SEQ ID NO: 115162 - DNA, 25 bp, Saccharomyces pastorianus
gtcgccgcacatgacgcagtaatga

SEQ ID NO: 115163 - DNA, 25 bp, Saccharomyces pastorianus
gatcctgataccataagctttccac

SEQ ID NO: 115164 - DNA, 25 bp, Saccharomyces pastorianus
atcttttcctgccattgttctttca

SEQ ID NO: 115165 - DNA, 25 bp, Saccharomyces pastorianus
caacgttcctggtatttggacacat

SEQ ID NO: 115166 - DNA, 25 bp, Saccharomyces pastorianus
aaggacaatgttaatcctcctccca

SEQ ID NO: 115167 - DNA, 25 bp, Saccharomyces pastorianus
gagcatattgacgtgtttatccggg

SEQ ID NO: 115168 - DNA, 25 bp, Saccharomyces pastorianus
tttgagtatccacacgagattgcgg

SEQ ID NO: 115169 - DNA, 25 bp, Saccharomyces pastorianus
gggatctgatggtctttcctcgcta

SEQ ID NO: 115170 - DNA, 25 bp, Saccharomyces pastorianus
aaactggtacaggatctttgcgatg

SEQ ID NO: 115171 - DNA, 25 bp, Saccharomyces pastorianus
ggacacatgatgacgacgaatcgct

SEQ ID NO: 115172 - DNA, 25 bp, Saccharomyces pastorianus
tgttctttcattttggcagtacgag

SEQ ID NO: 115173 - DNA, 25 bp, Saccharomyces pastorianus
tttcctcgctatttcttgaacatgt

SEQ ID NO: 115174 - DNA, 25 bp, Saccharomyces pastorianus
gcaggacacaatcaataagcttttg

SEQ ID NO: 115175 - DNA, 25 bp, Saccharomyces pastorianus
ggccggtaagtctaggagccactta

SEQ ID NO: 115176 - DNA, 25 bp, Saccharomyces pastorianus
gacgaattggtctctgtggtaaacg

SEQ ID NO: 115177 - DNA, 25 bp, Saccharomyces pastorianus
gcaggccttacaatagcgagggtat

SEQ ID NO: 115178 - DNA, 25 bp, Saccharomyces pastorianus
agaaatccagctgcgaagagccgaa

SEQ ID NO: 115179 - DNA, 25 bp, Saccharomyces pastorianus
tcttacgacgcccaaaacgatgttg

SEQ ID NO: 115180 - DNA, 25 bp, Saccharomyces pastorianus
ggagccacttaccaaatgatgatga

SEQ ID NO: 115181 - DNA, 25 bp, Saccharomyces pastorianus
agtgaagaatcttacgacgcccaaa

SEQ ID NO: 115182 - DNA, 25 bp, Saccharomyces pastorianus
tactacgactcgaagcaagatgctg

SEQ ID NO: 115183 - DNA, 25 bp, Saccharomyces pastorianus
agtttcgtgaaaccacgcaggcctt

SEQ ID NO: 115184 - DNA, 25 bp, Saccharomyces pastorianus
aatgatggctcttcaagtttcgtga

SEQ ID NO: 115185 - DNA, 25 bp, Saccharomyces pastorianus
aatccaacggtgaatgccatcaagg

SEQ ID NO: 115186 - DNA, 25 bp, Saccharomyces pastorianus
ataggtcccgagctttctcaaataa

SEQ ID NO: 115187 - DNA, 25 bp, Saccharomyces pastorianus
attgctatgtttgttgaaccaacgc

SEQ ID NO: 115188 - DNA, 25 bp, Saccharomyces pastorianus
tggagaggtccactcaaacttcaga

SEQ ID NO: 115189 - DNA, 25 bp, Saccharomyces pastorianus
acatcgattaacagttttcccagga

SEQ ID NO: 115190 - DNA, 25 bp, Saccharomyces pastorianus
gtattttaacagatcctcaggccaa

SEQ ID NO: 115191 - DNA, 25 bp, Saccharomyces pastorianus
atattgactggccttccaacatagg

SEQ ID NO: 115192 - DNA, 25 bp, Saccharomyces pastorianus
tggtgatgaccccagtatcctcgtt

SEQ ID NO: 115193 - DNA, 25 bp, Saccharomyces pastorianus
ttccttgtttgttttgttgcgtttg

SEQ ID NO: 115194 - DNA, 25 bp, Saccharomyces pastorianus
tgagttaacagataggtcccgagct

SEQ ID NO: 115195 - DNA, 25 bp, Saccharomyces pastorianus
tagcgcaattgcaaaaacgactggt

SEQ ID NO: 115196 - DNA, 25 bp, Saccharomyces pastorianus
gtccaactggaagcgtactgatgag

SEQ ID NO: 115197 - DNA, 25 bp, Saccharomyces pastorianus
tcaagcctaacaacagtacacctgg

SEQ ID NO: 115198 - DNA, 25 bp, Saccharomyces pastorianus
tgcagaccggttcaaaatttctccc

SEQ ID NO: 115199 - DNA, 25 bp, Saccharomyces pastorianus
gaggatgccgattttgtatccaatc

SEQ ID NO: 115200 - DNA, 25 bp, Saccharomyces pastorianus
ttcaactttcctgaactgacagcat

SEQ ID NO: 115201 - DNA, 25 bp, Saccharomyces pastorianus
tgcgctgcggtccattactcaatga

SEQ ID NO: 115202 - DNA, 25 bp, Saccharomyces pastorianus
gacagcatctgatcttgcagaccgg

SEQ ID NO: 115203 - DNA, 25 bp, Saccharomyces pastorianus
ggtccaactcaaattcacctgaatt

SEQ ID NO: 115204 - DNA, 25 bp, Saccharomyces pastorianus
aatttctcccgaggctgttcgaaga

SEQ ID NO: 115205 - DNA, 25 bp, Saccharomyces pastorianus
tgttcgcacttttaaacctttcaag

SEQ ID NO: 115206 - DNA, 25 bp, Saccharomyces pastorianus
gaaagattatacttgggtccaactc

SEQ ID NO: 115207 - DNA, 25 bp, Saccharomyces pastorianus
gaatggttttactacaagttactga

SEQ ID NO: 115208 - DNA, 25 bp, Saccharomyces pastorianus
aatgagatctacttttgggttcaga

SEQ ID NO: 115209 - DNA, 25 bp, Saccharomyces pastorianus
atgcctccaagaagtatagaagaat

SEQ ID NO: 115210 - DNA, 25 bp, Saccharomyces pastorianus
ccaggtttccatagatttgtacgca

SEQ ID NO: 115211 - DNA, 25 bp, Saccharomyces pastorianus
tacaagttactgagtagtccaggtt

SEQ ID NO: 115212 - DNA, 25 bp, Saccharomyces pastorianus
ccatagatttgtacgcaaggtatat

SEQ ID NO: 115213 - DNA, 25 bp, Saccharomyces pastorianus
ttcactgaccaatcaactgcttttc

SEQ ID NO: 115214 - DNA, 25 bp, Saccharomyces pastorianus
gaagatcctttcactgaccaatcaa

SEQ ID NO: 115215 - DNA, 25 bp, Saccharomyces pastorianus
atctttataagccaactccacgaca

SEQ ID NO: 115216 - DNA, 25 bp, Saccharomyces pastorianus
ctccacgacagaaatttaaggcttt

SEQ ID NO: 115217 - DNA, 25 bp, Saccharomyces pastorianus
caactgcttttcaatatctttataa

SEQ ID NO: 115218 - DNA, 25 bp, Saccharomyces pastorianus
taaccgcctacgtattctccaagaa

SEQ ID NO: 115219 - DNA, 25 bp, Saccharomyces pastorianus
aaggaaccaccctgaatctgttcaa

SEQ ID NO: 115220 - DNA, 25 bp, Saccharomyces pastorianus
gcctgttggaggtggatctcctcaa

SEQ ID NO: 115221 - DNA, 25 bp, Saccharomyces pastorianus
actaaggcttctgtactatgtttta

SEQ ID NO: 115222 - DNA, 25 bp, Saccharomyces pastorianus
tcaattgcattagccgtcaccagta

SEQ ID NO: 115223 - DNA, 25 bp, Saccharomyces pastorianus
gatctcctcaatctggtatttaccg

SEQ ID NO: 115224 - DNA, 25 bp, Saccharomyces pastorianus
acacaaatcactttcctcattggag

SEQ ID NO: 115225 - DNA, 25 bp, Saccharomyces pastorianus
cggcacgatttcatagtcactctag

SEQ ID NO: 115226 - DNA, 25 bp, Saccharomyces pastorianus
gtacagacaaatgggccgcaacggc

SEQ ID NO: 115227 - DNA, 25 bp, Saccharomyces pastorianus
atatgtttgcccaggtttgtttcaa

SEQ ID NO: 115228 - DNA, 25 bp, Saccharomyces pastorianus
tcgggtgacttatactcaattgcat

SEQ ID NO: 115229 - DNA, 25 bp, Saccharomyces pastorianus
gacaaagactagaatcctacgtcgc

SEQ ID NO: 115230 - DNA, 25 bp, Saccharomyces pastorianus
aaagactagaatcctacgtcgcttc

SEQ ID NO: 115231 - DNA, 25 bp, Saccharomyces pastorianus
acaactgtcagtgacaaccaaacca

SEQ ID NO: 115232 - DNA, 25 bp, Saccharomyces pastorianus
gaagaaccttcacaactgtcagtga

SEQ ID NO: 115233 - DNA, 25 bp, Saccharomyces pastorianus
gagaagaaccttcacaactgtcagt

SEQ ID NO: 115234 - DNA, 25 bp, Saccharomyces pastorianus
agaatcctacgtcgcttccatcgaa

SEQ ID NO: 115235 - DNA, 25 bp, Saccharomyces pastorianus
tagaatcctacgtcgcttccatcga

SEQ ID NO: 115236 - DNA, 25 bp, Saccharomyces pastorianus
gaaccttcacaactgtcagtgacaa

SEQ ID NO: 115237 - DNA, 25 bp, Saccharomyces pastorianus
aagactagaatcctacgtcgcttcc

SEQ ID NO: 115238 - DNA, 25 bp, Saccharomyces pastorianus
gactagaatcctacgtcgcttccat

SEQ ID NO: 115239 - DNA, 25 bp, Saccharomyces pastorianus
ttcacaactgtcagtgacaaccaaa

SEQ ID NO: 115240 - DNA, 25 bp, Saccharomyces pastorianus
atcgaagctgctttgtccgatgctt

SEQ ID NO: 115241 - DNA, 25 bp, Saccharomyces pastorianus
gatgctttggctgctttgcaaatcg

SEQ ID NO: 115242 - DNA, 25 bp, Saccharomyces pastorianus
aaagactagaatcctacgtcgcttc

SEQ ID NO: 115243 - DNA, 25 bp, Saccharomyces pastorianus
acaactgtcagtgacaaccaaacca

SEQ ID NO: 115244 - DNA, 25 bp, Saccharomyces pastorianus
gaagaaccttcacaactgtcagtga

SEQ ID NO: 115245 - DNA, 25 bp, Saccharomyces pastorianus
ttgcaaatcgaagacccatccgctg

SEQ ID NO: 115246 - DNA, 25 bp, Saccharomyces pastorianus
gagaagaaccttcacaactgtcagt

SEQ ID NO: 115247 - DNA, 25 bp, Saccharomyces pastorianus
agaatcctacgtcgcttccatcgaa

SEQ ID NO: 115248 - DNA, 25 bp, Saccharomyces pastorianus
atccgctgatgagttgagaaaggca

SEQ ID NO: 115249 - DNA, 25 bp, Saccharomyces pastorianus
gaaccttcacaactgtcagtgacaa

SEQ ID NO: 115250 - DNA, 25 bp, Saccharomyces pastorianus
gactagaatcctacgtcgcttccat

SEQ ID NO: 115251 - DNA, 25 bp, Saccharomyces pastorianus
gactgtattcgtcgtttcttcaaaa

SEQ ID NO: 115252 - DNA, 25 bp, Saccharomyces pastorianus
gacactgaaggttttggcgatggtt

SEQ ID NO: 115253 - DNA, 25 bp, Saccharomyces pastorianus
cctgattcatcaatgctcgacactg

SEQ ID NO: 115254 - DNA, 25 bp, Saccharomyces pastorianus
gtagttatcgattttccacaatgta

SEQ ID NO: 115255 - DNA, 25 bp, Saccharomyces pastorianus
atgaattggtgcaggcttccggatt

SEQ ID NO: 115256 - DNA, 25 bp, Saccharomyces pastorianus
gggtgaatactatgactccgaactt

SEQ ID NO: 115257 - DNA, 25 bp, Saccharomyces pastorianus
agacgccgactattatttccaaagg

SEQ ID NO: 115258 - DNA, 25 bp, Saccharomyces pastorianus
atatgtctaatgacgaggccgaaga

SEQ ID NO: 115259 - DNA, 25 bp, Saccharomyces pastorianus
aaatagcgggcttatccattgtgat

SEQ ID NO: 115260 - DNA, 25 bp, Saccharomyces pastorianus
gggcctggaaactgccgttgaaagc

SEQ ID NO: 115261 - DNA, 25 bp, Saccharomyces pastorianus
gaggcgctttccagtggtgttgaaa

SEQ ID NO: 115262 - DNA, 25 bp, Saccharomyces pastorianus
gacgcttctgacatcgagtctataa

SEQ ID NO: 115263 - DNA, 25 bp, Saccharomyces pastorianus
gatcagccatctattctacaggaag

SEQ ID NO: 115264 - DNA, 25 bp, Saccharomyces pastorianus
cccattttgttattcgacgcttctg

SEQ ID NO: 115265 - DNA, 25 bp, Saccharomyces pastorianus
gagtctataacctattcgtctatta

SEQ ID NO: 115266 - DNA, 25 bp, Saccharomyces pastorianus
gtggccaagaatcctcagacggtgc

SEQ ID NO: 115267 - DNA, 25 bp, Saccharomyces pastorianus
ccaagcaactgatggcacagccgat

SEQ ID NO: 115268 - DNA, 25 bp, Saccharomyces pastorianus
aaaggcaggtatgttttcagacgat

SEQ ID NO: 115269 - DNA, 25 bp, Saccharomyces pastorianus
tttcgaagctgagagcgacctttcc

SEQ ID NO: 115270 - DNA, 25 bp, Saccharomyces pastorianus
atacgagttttccatgatagaccaa

SEQ ID NO: 115271 - DNA, 25 bp, Saccharomyces pastorianus
cgacctttccgatgggagtggccaa

SEQ ID NO: 115272 - DNA, 25 bp, Saccharomyces pastorianus
aggaagctacccgtcaaatgcaaga

SEQ ID NO: 115273 - DNA, 25 bp, Saccharomyces pastorianus
gggattcaataatttccagcagtat

SEQ ID NO: 115274 - DNA, 25 bp, Saccharomyces pastorianus
gtatacaaacggtgcgacgagccaa

SEQ ID NO: 115275 - DNA, 25 bp, Saccharomyces pastorianus
ggtgttaggctctgacaattttcaa

SEQ ID NO: 115276 - DNA, 25 bp, Saccharomyces pastorianus
tgggtgttgctttcagatgcattat

SEQ ID NO: 115277 - DNA, 25 bp, Saccharomyces pastorianus
ggctggccaatgaagtgcgcagtaa

SEQ ID NO: 115278 - DNA, 25 bp, Saccharomyces pastorianus
atgaccccataggaaccatttctag

SEQ ID NO: 115279 - DNA, 25 bp, Saccharomyces pastorianus
ttcccgcttgtttgagttccgaaag

SEQ ID NO: 115280 - DNA, 25 bp, Saccharomyces pastorianus
agactgcgaaagatttcccgcttgt

SEQ ID NO: 115281 - DNA, 25 bp, Saccharomyces pastorianus
cgttacaagtgctacgagtacgtta

SEQ ID NO: 115282 - DNA, 25 bp, Saccharomyces pastorianus
gcagaacgggattccattgcgtgaa

SEQ ID NO: 115283 - DNA, 25 bp, Saccharomyces pastorianus
gggcggaatttgtactacctgagaa

SEQ ID NO: 115284 - DNA, 25 bp, Saccharomyces pastorianus
gagaggttcgcaaaatcgcacacaa

SEQ ID NO: 115285 - DNA, 25 bp, Saccharomyces pastorianus
atttgccgtccaaagtgtttgctgt

SEQ ID NO: 115286 - DNA, 25 bp, Saccharomyces pastorianus
agaaccctcagtaacgaatttgccg

SEQ ID NO: 115287 - DNA, 25 bp, Saccharomyces pastorianus
tacgacctcccaaactctaaaagtg

SEQ ID NO: 115288 - DNA, 25 bp, Saccharomyces pastorianus
tagccaagactgcatctttgtcctt

SEQ ID NO: 115289 - DNA, 25 bp, Saccharomyces pastorianus
tgacaaatgccactttacccttaaa

SEQ ID NO: 115290 - DNA, 25 bp, Saccharomyces pastorianus
gaagaaccaaggcttctgtctgcac

SEQ ID NO: 115291 - DNA, 25 bp, Saccharomyces pastorianus
aaaatttccagcagcaccggcaatg

SEQ ID NO: 115292 - DNA, 25 bp, Saccharomyces pastorianus
aactgcgaaataccttttgctgcct

SEQ ID NO: 115293 - DNA, 25 bp, Saccharomyces pastorianus
ttttaactccttcaagcatgccttg

SEQ ID NO: 115294 - DNA, 25 bp, Saccharomyces pastorianus
tctttgtcctttgctaactgcgaaa

SEQ ID NO: 115295 - DNA, 25 bp, Saccharomyces pastorianus
ttatggtgtgccgtttcaaggacat

SEQ ID NO: 115296 - DNA, 25 bp, Saccharomyces pastorianus
tgctccaggtgctatcgataatacg

SEQ ID NO: 115297 - DNA, 25 bp, Saccharomyces pastorianus
tcaaggacatgtgggcgctgctaaa

SEQ ID NO: 115298 - DNA, 25 bp, Saccharomyces pastorianus
tagggacctattttggacatgagtt

SEQ ID NO: 115299 - DNA, 25 bp, Saccharomyces pastorianus
ttgtgtgcgattttgcgaacctctc

SEQ ID NO: 115300 - DNA, 25 bp, Saccharomyces pastorianus
gggcctctgggtatacgttcgaatt

SEQ ID NO: 115301 - DNA, 25 bp, Saccharomyces pastorianus
ggaagttttaataccgccaaggcat

SEQ ID NO: 115302 - DNA, 25 bp, Saccharomyces pastorianus
atgtcaccggtactgtcttagttgt

SEQ ID NO: 115303 - DNA, 25 bp, Saccharomyces pastorianus
gtcattgccggtgctgctggaaatt

SEQ ID NO: 115304 - DNA, 25 bp, Saccharomyces pastorianus
gggatatagccgaatctactgttta

SEQ ID NO: 115305 - DNA, 25 bp, Saccharomyces pastorianus
tatacgttcgaattgcattgctcca

SEQ ID NO: 115306 - DNA, 25 bp, Saccharomyces pastorianus
gcattcaagattttttccgcattat

SEQ ID NO: 115307 - DNA, 25 bp, Saccharomyces pastorianus
gattgaacactttgaaaatgacccc

SEQ ID NO: 115308 - DNA, 25 bp, Saccharomyces pastorianus
aaaaaccttatgtgtctcgatgata

SEQ ID NO: 115309 - DNA, 25 bp, Saccharomyces pastorianus
atccctttcatccaggatatgctag

SEQ ID NO: 115310 - DNA, 25 bp, Saccharomyces pastorianus
aaccaatggttcttatgatggcaac

SEQ ID NO: 115311 - DNA, 25 bp, Saccharomyces pastorianus
aaaccaacccgatcattctagcttt

SEQ ID NO: 115312 - DNA, 25 bp, Saccharomyces pastorianus
gcgccagtttttaaactcttccagg

SEQ ID NO: 115313 - DNA, 25 bp, Saccharomyces pastorianus
gtcaacagatggatttgcttcgaat

SEQ ID NO: 115314 - DNA, 25 bp, Saccharomyces pastorianus
ccccattattctggtgatcagttag

SEQ ID NO: 115315 - DNA, 25 bp, Saccharomyces pastorianus
aaagctactgatatccctttcatcc

SEQ ID NO: 115316 - DNA, 25 bp, Saccharomyces pastorianus
gatggcaacggtaatgacgtcaaaa

SEQ ID NO: 115317 - DNA, 25 bp, Saccharomyces pastorianus
gtatgtcgccagtttccactgagag

SEQ ID NO: 115318 - DNA, 25 bp, Saccharomyces pastorianus
ttttagtttcaagcctcccatgaga

SEQ ID NO: 115319 - DNA, 25 bp, Saccharomyces pastorianus
gatggtctcgtgtgcgcaagacatt

SEQ ID NO: 115320 - DNA, 25 bp, Saccharomyces pastorianus
gttgacaaaggtccgatctcgcagc

SEQ ID NO: 115321 - DNA, 25 bp, Saccharomyces pastorianus
gattgtttcggtggacgtccccaca

SEQ ID NO: 115322 - DNA, 25 bp, Saccharomyces pastorianus
gatttcgccaataaattcggctttg

SEQ ID NO: 115323 - DNA, 25 bp, Saccharomyces pastorianus
aaagttcctgtcctgtctcaagatg

SEQ ID NO: 115324 - DNA, 25 bp, Saccharomyces pastorianus
acatgtatttgttattgctgggcca

SEQ ID NO: 115325 - DNA, 25 bp, Saccharomyces pastorianus
ctgttgttttctaccccaagagaag

SEQ ID NO: 115326 - DNA, 25 bp, Saccharomyces pastorianus
aagccatgcagctctcacataaggg

SEQ ID NO: 115327 - DNA, 25 bp, Saccharomyces pastorianus
attaatcctgctgttcttgtatctc

SEQ ID NO: 115328 - DNA, 25 bp, Saccharomyces pastorianus
ccttcaaacagcatgggacctatag

SEQ ID NO: 115329 - DNA, 25 bp, Saccharomyces pastorianus
gctttttgatccatcattgtctcaa

SEQ ID NO: 115330 - DNA, 25 bp, Saccharomyces pastorianus
acaagatgtcaattctcgttcgttg

SEQ ID NO: 115331 - DNA, 25 bp, Saccharomyces pastorianus
aaacgactgcaaacgctatcacaag

SEQ ID NO: 115332 - DNA, 25 bp, Saccharomyces pastorianus
gaaggtcactgggatcgttagatgt

SEQ ID NO: 115333 - DNA, 25 bp, Saccharomyces pastorianus
aggccgatgacaactgcagcagagg

SEQ ID NO: 115334 - DNA, 25 bp, Saccharomyces pastorianus
gagtcatgcagatctgaaccccaat

SEQ ID NO: 115335 - DNA, 25 bp, Saccharomyces pastorianus
cagcgccaagagacgcagtggttaa

SEQ ID NO: 115336 - DNA, 25 bp, Saccharomyces pastorianus
tgaaccccaatgcttccagtaatac

SEQ ID NO: 115337 - DNA, 25 bp, Saccharomyces pastorianus
tggtccggacactaatttaaacgcg

SEQ ID NO: 115338 - DNA, 25 bp, Saccharomyces pastorianus
agaagccgtgatacgcccattgaaa

SEQ ID NO: 115339 - DNA, 25 bp, Saccharomyces pastorianus
cgggtaataacgtcatatttcttat

SEQ ID NO: 115340 - DNA, 25 bp, Saccharomyces pastorianus
acttctgcgatagttgtccgttaga

SEQ ID NO: 115341 - DNA, 25 bp, Saccharomyces pastorianus
ttgactttcttcacattcttacgcc

SEQ ID NO: 115342 - DNA, 25 bp, Saccharomyces pastorianus
ggaacctgagaacacaaagagtatt

SEQ ID NO: 115343 - DNA, 25 bp, Saccharomyces pastorianus
atccataaggtgcttgcggtctgta

SEQ ID NO: 115344 - DNA, 25 bp, Saccharomyces pastorianus
ttaatggaacctcaatacgggtaat

SEQ ID NO: 115345 - DNA, 25 bp, Saccharomyces pastorianus
ttcaagtaccgcgacttctgcgata

SEQ ID NO: 115346 - DNA, 25 bp, Saccharomyces pastorianus
tttcacgacttttctccttcaagta

SEQ ID NO: 115347 - DNA, 25 bp, Saccharomyces pastorianus
taatcattaacgcatccataaggtg

SEQ ID NO: 115348 - DNA, 25 bp, Saccharomyces pastorianus
gcttgcggtctgtatttgactttct

SEQ ID NO: 115349 - DNA, 25 bp, Saccharomyces pastorianus
ttcttacgcctagactgaatgggaa

SEQ ID NO: 115350 - DNA, 25 bp, Saccharomyces pastorianus
aagatagtcagtttgtccttcaaga

SEQ ID NO: 115351 - DNA, 25 bp, Saccharomyces pastorianus
tagtcctcttaatgtccaactcacg

SEQ ID NO: 115352 - DNA, 25 bp, Saccharomyces pastorianus
aacgtcctcgacgtctcgaaagata

SEQ ID NO: 115353 - DNA, 25 bp, Saccharomyces pastorianus
ggctattcaaacatctagtcctctt

SEQ ID NO: 115354 - DNA, 25 bp, Saccharomyces pastorianus
agacatggagttcacctcctgggaa

SEQ ID NO: 115355 - DNA, 25 bp, Saccharomyces pastorianus
ataaccatgcaacaagcgtcgcgct

SEQ ID NO: 115356 - DNA, 25 bp, Saccharomyces pastorianus
tcctgggaacgacgctggtcaaact

SEQ ID NO: 115357 - DNA, 25 bp, Saccharomyces pastorianus
gatgaaaaaccagtcccagatgcag

SEQ ID NO: 115358 - DNA, 25 bp, Saccharomyces pastorianus
aaaatgtcaccatcgggcttgaaag

SEQ ID NO: 115359 - DNA, 25 bp, Saccharomyces pastorianus
ataacctccttcaattcagtagcgc

SEQ ID NO: 115360 - DNA, 25 bp, Saccharomyces pastorianus
gtaatgcgactacggtctcatcagt

SEQ ID NO: 115361 - DNA, 25 bp, Saccharomyces pastorianus
gtaaacgccatttgctgtactatca

SEQ ID NO: 115362 - DNA, 25 bp, Saccharomyces pastorianus
ggtgcctgtaactgaggtccaacaa

SEQ ID NO: 115363 - DNA, 25 bp, Saccharomyces pastorianus
agctggatcacgcttttcttcataa

SEQ ID NO: 115364 - DNA, 25 bp, Saccharomyces pastorianus
atcacgttagtttcggttattgcca

SEQ ID NO: 115365 - DNA, 25 bp, Saccharomyces pastorianus
atctcaatcccaccagaatcatagg

SEQ ID NO: 115366 - DNA, 25 bp, Saccharomyces pastorianus
ctatccgcttgtctgtacacaggat

SEQ ID NO: 115367 - DNA, 25 bp, Saccharomyces pastorianus
tgtactatcatggtggctactcata

SEQ ID NO: 115368 - DNA, 25 bp, Saccharomyces pastorianus
tgggcaatgcttctaatcgggcttt

SEQ ID NO: 115369 - DNA, 25 bp, Saccharomyces pastorianus
gcagtttcgcttctaccaagacagt

SEQ ID NO: 115370 - DNA, 25 bp, Saccharomyces pastorianus
ggcagtaaaggcgtttcaccatgag

SEQ ID NO: 115371 - DNA, 25 bp, Saccharomyces pastorianus
agatacaatagacgtaccgccgctc

SEQ ID NO: 115372 - DNA, 25 bp, Saccharomyces pastorianus
ctcctttaccgatctgcttgatgaa

SEQ ID NO: 115373 - DNA, 25 bp, Saccharomyces pastorianus
aatgctgtcgctatctcatcaaaac

SEQ ID NO: 115374 - DNA, 25 bp, Saccharomyces pastorianus
gaggatgacggtacttctgcttcgc

SEQ ID NO: 115375 - DNA, 25 bp, Saccharomyces pastorianus
gcctaccgcaatgacgttcgatatg

SEQ ID NO: 115376 - DNA, 25 bp, Saccharomyces pastorianus
gaccaaagttcttacagaggctaga

SEQ ID NO: 115377 - DNA, 25 bp, Saccharomyces pastorianus
gatgtcttagtaaattcctccgata

SEQ ID NO: 115378 - DNA, 25 bp, Saccharomyces pastorianus
gactacttttcttacagaggctgga

SEQ ID NO: 115379 - DNA, 25 bp, Saccharomyces pastorianus
gaaactctctgggttattgaccaaa

SEQ ID NO: 115380 - DNA, 25 bp, Saccharomyces pastorianus
aagattttgttctgcaaaccgcctc

SEQ ID NO: 115381 - DNA, 25 bp, Saccharomyces pastorianus
gatgcatcttggaaactctctgggt

SEQ ID NO: 115382 - DNA, 25 bp, Saccharomyces pastorianus
aacgctaacgtttttctgaataatg

SEQ ID NO: 115383 - DNA, 25 bp, Saccharomyces pastorianus
ttttgctgtaactgacggatccacc

SEQ ID NO: 115384 - DNA, 25 bp, Saccharomyces pastorianus
ggacgaggcagcatctttgcatttc

SEQ ID NO: 115385 - DNA, 25 bp, Saccharomyces pastorianus
acggcgatttcggtaatgttgcact

SEQ ID NO: 115386 - DNA, 25 bp, Saccharomyces pastorianus
gatccaccgttgttgtttccaggta

SEQ ID NO: 115387 - DNA, 25 bp, Saccharomyces pastorianus
actccgagtgcgcatttgcattatt

SEQ ID NO: 115388 - DNA, 25 bp, Saccharomyces pastorianus
gaagttcaaccctcgcagaaagcaa

SEQ ID NO: 115389 - DNA, 25 bp, Saccharomyces pastorianus
gtgattggactgcagtacccaccaa

SEQ ID NO: 115390 - DNA, 25 bp, Saccharomyces pastorianus
tgcatttcagttgtggttccagctt

SEQ ID NO: 115391 - DNA, 25 bp, Saccharomyces pastorianus
gcacatgtggaaccatctctcttaa

SEQ ID NO: 115392 - DNA, 25 bp, Saccharomyces pastorianus
gggctcatgggttctataccactag

SEQ ID NO: 115393 - DNA, 25 bp, Saccharomyces pastorianus
gcatcggaacctttgactttcgaaa

SEQ ID NO: 115394 - DNA, 25 bp, Saccharomyces pastorianus
tatggtcctggtgaaaaggcccgta

SEQ ID NO: 115395 - DNA, 25 bp, Saccharomyces pastorianus
atgacactaccacttatggtcctgg

SEQ ID NO: 115396 - DNA, 25 bp, Saccharomyces pastorianus
tagtttaactactaccacctctact

SEQ ID NO: 115397 - DNA, 25 bp, Saccharomyces pastorianus
ggtccatctaatttcaactccataa

SEQ ID NO: 115398 - DNA, 25 bp, Saccharomyces pastorianus
aagttctcttctgttactgctatta

SEQ ID NO: 115399 - DNA, 25 bp, Saccharomyces pastorianus
gaacatgatttcactaccactttaa

SEQ ID NO: 115400 - DNA, 25 bp, Saccharomyces pastorianus
tgccaccgttgccactgctaagaag

SEQ ID NO: 115401 - DNA, 25 bp, Saccharomyces pastorianus
aagtccaagactccaaaccataccg

SEQ ID NO: 115402 - DNA, 25 bp, Saccharomyces pastorianus
accactttaactttgtcatcggacg

SEQ ID NO: 115403 - DNA, 25 bp, Saccharomyces pastorianus
aaattgtttggtgtcaccgctggta

SEQ ID NO: 115404 - DNA, 25 bp, Saccharomyces pastorianus
tactgctattactctagccaccgtt

SEQ ID NO: 115405 - DNA, 25 bp, Saccharomyces pastorianus
gaactgatgtttctagctctgagca

SEQ ID NO: 115406 - DNA, 25 bp, Saccharomyces pastorianus
agctctgagcaggacaattctttca

SEQ ID NO: 115407 - DNA, 25 bp, Saccharomyces pastorianus
agttccaagcgcaacgagatccatt

SEQ ID NO: 115408 - DNA, 25 bp, Saccharomyces pastorianus
ggcatagacttctctttcatgacaa

SEQ ID NO: 115409 - DNA, 25 bp, Saccharomyces pastorianus
gaatgcctccacgaggaactgatgt

SEQ ID NO: 115410 - DNA, 25 bp, Saccharomyces pastorianus
gtctgagatcgaaatgcatactaag

SEQ ID NO: 115411 - DNA, 25 bp, Saccharomyces pastorianus
aaaatcgtatgtttctttggagcaa

SEQ ID NO: 115412 - DNA, 25 bp, Saccharomyces pastorianus
gcagcgcctgaacaaatggtcaaca

SEQ ID NO: 115413 - DNA, 25 bp, Saccharomyces pastorianus
gatccattacaaatactacagtctg

SEQ ID NO: 115414 - DNA, 25 bp, Saccharomyces pastorianus
ccttaccaaatctctctgctataaa

SEQ ID NO: 115415 - DNA, 25 bp, Saccharomyces pastorianus
gtaactaatgacaacgcagcgcctg

SEQ ID NO: 115416 - DNA, 25 bp, Saccharomyces pastorianus
gagctacctgtcaaataccaactat

SEQ ID NO: 115417 - DNA, 25 bp, Saccharomyces pastorianus
gaggctaactccaaaatcggttcca

SEQ ID NO: 115418 - DNA, 25 bp, Saccharomyces pastorianus
aatcggttccattgccattggcgaa

SEQ ID NO: 115419 - DNA, 25 bp, Saccharomyces pastorianus
attcagattcaatggcacgtcctca

SEQ ID NO: 115420 - DNA, 25 bp, Saccharomyces pastorianus
agggctcctgaaactttacttgtgc

SEQ ID NO: 115421 - DNA, 25 bp, Saccharomyces pastorianus
taacgaaccaaataaccgcccattg

SEQ ID NO: 115422 - DNA, 25 bp, Saccharomyces pastorianus
tttcttcaggtcactacattgccca

SEQ ID NO: 115423 - DNA, 25 bp, Saccharomyces pastorianus
tagctgggccacttacgacgacgag

SEQ ID NO: 115424 - DNA, 25 bp, Saccharomyces pastorianus
gaagcaagctgtttcttatcctatg

SEQ ID NO: 115425 - DNA, 25 bp, Saccharomyces pastorianus
gaaatctgccatggccactggtaat

SEQ ID NO: 115426 - DNA, 25 bp, Saccharomyces pastorianus
gaacccaacgcatattatctcctat

SEQ ID NO: 115427 - DNA, 25 bp, Saccharomyces pastorianus
atcagcaaactatcagccaggtgta

SEQ ID NO: 115428 - DNA, 25 bp, Saccharomyces pastorianus
gggaccaacccgtgctttaggagag

SEQ ID NO: 115429 - DNA, 25 bp, Saccharomyces pastorianus
gccaggtgtaccagttccagtatta

SEQ ID NO: 115430 - DNA, 25 bp, Saccharomyces pastorianus
gggacaatgttaggcagtgcacctg

SEQ ID NO: 115431 - DNA, 25 bp, Saccharomyces pastorianus
acccgtgctttaggagagttatcgc

SEQ ID NO: 115432 - DNA, 25 bp, Saccharomyces pastorianus
ggacaagggacatggacaaccgaat

SEQ ID NO: 115433 - DNA, 25 bp, Saccharomyces pastorianus
ccaccaaccggatatttgctgctaa

SEQ ID NO: 115434 - DNA, 25 bp, Saccharomyces pastorianus
ggcagtgcacctgcgaagggaccaa

SEQ ID NO: 115435 - DNA, 25 bp, Saccharomyces pastorianus
gtaccagttccagtattaatcacaa

SEQ ID NO: 115436 - DNA, 25 bp, Saccharomyces pastorianus
gagttatcgctgaagcacgtttacg

SEQ ID NO: 115437 - DNA, 25 bp, Saccharomyces pastorianus
gaaatctccaccaaccggatatttg

SEQ ID NO: 115438 - DNA, 25 bp, Saccharomyces pastorianus
gagaagaccatcatcacacacaagt

SEQ ID NO: 115439 - DNA, 25 bp, Saccharomyces pastorianus
agatccttggatccgtagcattgat

SEQ ID NO: 115440 - DNA, 25 bp, Saccharomyces pastorianus
tatttgcgaagtatgacccacgtcc

SEQ ID NO: 115441 - DNA, 25 bp, Saccharomyces pastorianus
tgatccaccttcctacgatgaatcg

SEQ ID NO: 115442 - DNA, 25 bp, Saccharomyces pastorianus
agattgttgcactcattaccagaag

SEQ ID NO: 115443 - DNA, 25 bp, Saccharomyces pastorianus
gatatttggtcttctgcaatcattt

SEQ ID NO: 115444 - DNA, 25 bp, Saccharomyces pastorianus
gagactcagcatattgttggacgca

SEQ ID NO: 115445 - DNA, 25 bp, Saccharomyces pastorianus
gacgcatgattgatttggcacccgc

SEQ ID NO: 115446 - DNA, 25 bp, Saccharomyces pastorianus
tttggcacccgcatgcagaggaaat

SEQ ID NO: 115447 - DNA, 25 bp, Saccharomyces pastorianus
ttgcgactccttaagtagcttggtt

SEQ ID NO: 115448 - DNA, 25 bp, Saccharomyces pastorianus
ttttgttccggacgtgattgcgact

SEQ ID NO: 115449 - DNA, 25 bp, Saccharomyces pastorianus
taaaatcgacgccacttcatcttta

SEQ ID NO: 115450 - DNA, 25 bp, Saccharomyces pastorianus
gcctacaaggagttacgtgacatgc

SEQ ID NO: 115451 - DNA, 25 bp, Saccharomyces pastorianus
agagacagatcctaacctcgcatta

SEQ ID NO: 115452 - DNA, 25 bp, Saccharomyces pastorianus
gaagtgaccaatctcttaaccaacc

SEQ ID NO: 115453 - DNA, 25 bp, Saccharomyces pastorianus
agaactatccagactttaactacat

SEQ ID NO: 115454 - DNA, 25 bp, Saccharomyces pastorianus
actacatcacaggattcagttggag

SEQ ID NO: 115455 - DNA, 25 bp, Saccharomyces pastorianus
taatgcctatttggagcaggtcaaa

SEQ ID NO: 115456 - DNA, 25 bp, Saccharomyces pastorianus
ccttacaggctcgaacgtggaaatt

SEQ ID NO: 115457 - DNA, 25 bp, Saccharomyces pastorianus
aacaaaggccatttacacgatattt

SEQ ID NO: 115458 - DNA, 25 bp, Saccharomyces pastorianus
ttcatctttagacagcaatgccgct

SEQ ID NO: 115459 - DNA, 25 bp, Saccharomyces pastorianus
tcgcattaccacttaacgactttaa

SEQ ID NO: 115460 - DNA, 25 bp, Saccharomyces pastorianus
gaagatccgttgtggcaaaatgcca

SEQ ID NO: 115461 - DNA, 25 bp, Saccharomyces pastorianus
agaataattcttgccacctgctggt

SEQ ID NO: 115462 - DNA, 25 bp, Saccharomyces pastorianus
taccccatattgtggctgtttatca

SEQ ID NO: 115463 - DNA, 25 bp, Saccharomyces pastorianus
gctgtttatcaagagtggtcgtcgt

SEQ ID NO: 115464 - DNA, 25 bp, Saccharomyces pastorianus
ttgccacctgctggttacaagttgt

SEQ ID NO: 115465 - DNA, 25 bp, Saccharomyces pastorianus
aagcgccttgaagtttttcgcaagc

SEQ ID NO: 115466 - DNA, 25 bp, Saccharomyces pastorianus
tgagatcaaatagcctacgccgcgt

SEQ ID NO: 115467 - DNA, 25 bp, Saccharomyces pastorianus
gtacgctttaatgacaccggaattg

SEQ ID NO: 115468 - DNA, 25 bp, Saccharomyces pastorianus
cctacgccgcgtcattagtaatggt

SEQ ID NO: 115469 - DNA, 25 bp, Saccharomyces pastorianus
tactgtattctgttgtaccccatat

SEQ ID NO: 115470 - DNA, 25 bp, Saccharomyces pastorianus
ggtgatcaaagtttcttgtacgctt

SEQ ID NO: 115471 - DNA, 25 bp, Saccharomyces pastorianus
tgtcgtttccggtaaactaagagct

SEQ ID NO: 115472 - DNA, 25 bp, Saccharomyces pastorianus
gttaagatcatgagagacccagcta

SEQ ID NO: 115473 - DNA, 25 bp, Saccharomyces pastorianus
tgttgaagtccgtgtcactccaacc

SEQ ID NO: 115474 - DNA, 25 bp, Saccharomyces pastorianus
aaaggctttgccagatgctgtcacc

SEQ ID NO: 115475 - DNA, 25 bp, Saccharomyces pastorianus
caacgacttcattgacactgctact

SEQ ID NO: 115476 - DNA, 25 bp, Saccharomyces pastorianus
aagaaccaattcttgctccatctgt

SEQ ID NO: 115477 - DNA, 25 bp, Saccharomyces pastorianus
aaggctatgaaatttgctgacggtt

SEQ ID NO: 115478 - DNA, 25 bp, Saccharomyces pastorianus
atgctgtcaccatcattgaaccaaa

SEQ ID NO: 115479 - DNA, 25 bp, Saccharomyces pastorianus
gacactgctactagacacgtcttga

SEQ ID NO: 115480 - DNA, 25 bp, Saccharomyces pastorianus
agagcagaactggtccaaaggcttt

SEQ ID NO: 115481 - DNA, 25 bp, Saccharomyces pastorianus
gtcactccaaccaagaccgaagtta

SEQ ID NO: 115482 - DNA, 25 bp, Saccharomyces pastorianus
acaaaggatacgatcgtgcgggaca

SEQ ID NO: 115483 - DNA, 25 bp, Saccharomyces pastorianus
caccgtcaaggattctatttgtcgg

SEQ ID NO: 115484 - DNA, 25 bp, Saccharomyces pastorianus
gctatgtccaaaaatccaccgtcaa

SEQ ID NO: 115485 - DNA, 25 bp, Saccharomyces pastorianus
aaattgccggaaggccattgcgaat

SEQ ID NO: 115486 - DNA, 25 bp, Saccharomyces pastorianus
gaaaatccgcatggcaacattcgaa

SEQ ID NO: 115487 - DNA, 25 bp, Saccharomyces pastorianus
tgctcagagaggttctgcagctatt

SEQ ID NO: 115488 - DNA, 25 bp, Saccharomyces pastorianus
tgtagctttagccactgctcagaga

SEQ ID NO: 115489 - DNA, 25 bp, Saccharomyces pastorianus
ggattcgcatttatcgacttcaaga

SEQ ID NO: 115490 - DNA, 25 bp, Saccharomyces pastorianus
gaatacaagcggtccaacgccaaca

SEQ ID NO: 115491 - DNA, 25 bp, Saccharomyces pastorianus
caggtaggccagacaaggacgattt

SEQ ID NO: 115492 - DNA, 25 bp, Saccharomyces pastorianus
cagacgtccacctgtagattccaat

SEQ ID NO: 115493 - DNA, 25 bp, Saccharomyces pastorianus
gggcatctttctcagaagcaccaga

SEQ ID NO: 115494 - DNA, 25 bp, Saccharomyces pastorianus
tgttgcttgtagattcttcaccctg

SEQ ID NO: 115495 - DNA, 25 bp, Saccharomyces pastorianus
tttcagcatcttctttgtattcctc

SEQ ID NO: 115496 - DNA, 25 bp, Saccharomyces pastorianus
tcatcctcgttgtcttttgttttag

SEQ ID NO: 115497 - DNA, 25 bp, Saccharomyces pastorianus
ttatgtcttgttcggtgactctgct

SEQ ID NO: 115498 - DNA, 25 bp, Saccharomyces pastorianus
gtaaagccttcttgacttgttcctc

SEQ ID NO: 115499 - DNA, 25 bp, Saccharomyces pastorianus
aacagcatcttctttcgacagttct

SEQ ID NO: 115500 - DNA, 25 bp, Saccharomyces pastorianus
gagtaactttgcctcttctcaagag

SEQ ID NO: 115501 - DNA, 25 bp, Saccharomyces pastorianus
ttcgcgttcaactcctctagagtaa

SEQ ID NO: 115502 - DNA, 25 bp, Saccharomyces pastorianus
ttttttacaacctcgccagattcat

SEQ ID NO: 115503 - DNA, 25 bp, Saccharomyces pastorianus
tactaaatcgtcctttgtggtgtcg

SEQ ID NO: 115504 - DNA, 25 bp, Saccharomyces pastorianus
gagtatcgagttctaccattgtcaa

SEQ ID NO: 115505 - DNA, 25 bp, Saccharomyces pastorianus
ggtccaaagcttttgtaccacaatt

SEQ ID NO: 115506 - DNA, 25 bp, Saccharomyces pastorianus
accacaattcgagttggcaatccaa

SEQ ID NO: 115507 - DNA, 25 bp, Saccharomyces pastorianus
tacacaaagattacaccttacccca

SEQ ID NO: 115508 - DNA, 25 bp, Saccharomyces pastorianus
ggcaatccaaaatatctccactgtt

SEQ ID NO: 115509 - DNA, 25 bp, Saccharomyces pastorianus
atacccaaactttcaaccagttgcg

SEQ ID NO: 115510 - DNA, 25 bp, Saccharomyces pastorianus
gcattattcatcatgtggtccaaag

SEQ ID NO: 115511 - DNA, 25 bp, Saccharomyces pastorianus
gattctgaatctgttaatgctgtat

SEQ ID NO: 115512 - DNA, 25 bp, Saccharomyces pastorianus
taaagctagtcttaggtacccaaat

SEQ ID NO: 115513 - DNA, 25 bp, Saccharomyces pastorianus
gtattatttcctgcactcaaaagag

SEQ ID NO: 115514 - DNA, 25 bp, Saccharomyces pastorianus
gtcatgtacccctttcataaaccaa

SEQ ID NO: 115515 - DNA, 25 bp, Saccharomyces pastorianus
aaccaaaggcatccctcccaatatt

SEQ ID NO: 115516 - DNA, 25 bp, Saccharomyces pastorianus
aattatgcctaatttctgtcccatc

SEQ ID NO: 115517 - DNA, 25 bp, Saccharomyces pastorianus
ttcttcacccttaaccaaaggcatc

SEQ ID NO: 115518 - DNA, 25 bp, Saccharomyces pastorianus
gtttacatctaacaagtccaatctg

SEQ ID NO: 115519 - DNA, 25 bp, Saccharomyces pastorianus
aatttctgtcccatcttaaccttat

SEQ ID NO: 115520 - DNA, 25 bp, Saccharomyces pastorianus
taaattcggtgggagcttcaaaaca

SEQ ID NO: 115521 - DNA, 25 bp, Saccharomyces pastorianus
gacatggctaaaattcttcagacga

SEQ ID NO: 115522 - DNA, 25 bp, Saccharomyces pastorianus
gtacaacagtgctacccaattcaaa

SEQ ID NO: 115523 - DNA, 25 bp, Saccharomyces pastorianus
tatcaccaaccctaacatcgaattt

SEQ ID NO: 115524 - DNA, 25 bp, Saccharomyces pastorianus
aaatcattctttccaattatgccta

SEQ ID NO: 115525 - DNA, 25 bp, Saccharomyces pastorianus
ttcttcagacgaacatctttaatct

SEQ ID NO: 115526 - DNA, 25 bp, Saccharomyces pastorianus
ttggaaccacatacctgctaccagg

SEQ ID NO: 115527 - DNA, 25 bp, Saccharomyces pastorianus
tctaatgggttttcgtgctctgagc

SEQ ID NO: 115528 - DNA, 25 bp, Saccharomyces pastorianus
gtgatttattctccgtggcacctta

SEQ ID NO: 115529 - DNA, 25 bp, Saccharomyces pastorianus
aagagttcaaaccaagtgtgtccaa

SEQ ID NO: 115530 - DNA, 25 bp, Saccharomyces pastorianus
tggcaccttatttccagcgtaactt

SEQ ID NO: 115531 - DNA, 25 bp, Saccharomyces pastorianus
gagggcgatcaatctgttcaagagt

SEQ ID NO: 115532 - DNA, 25 bp, Saccharomyces pastorianus
tcatttatttggctcccggtgatta

SEQ ID NO: 115533 - DNA, 25 bp, Saccharomyces pastorianus
ctgggtttgtaaggttcgccgccat

SEQ ID NO: 115534 - DNA, 25 bp, Saccharomyces pastorianus
gattttttagcatgactcctgttgg

SEQ ID NO: 115535 - DNA, 25 bp, Saccharomyces pastorianus
tactttgttttgaagctcccaccga

SEQ ID NO: 115536 - DNA, 25 bp, Saccharomyces pastorianus
gatacggaacttttctttgccgtca

SEQ ID NO: 115537 - DNA, 25 bp, Saccharomyces pastorianus
gagtcaagtgctctgttaacggaca

SEQ ID NO: 115538 - DNA, 25 bp, Saccharomyces pastorianus
aaagcctggtgaccatgttcactgt

SEQ ID NO: 115539 - DNA, 25 bp, Saccharomyces pastorianus
gagaagttctcatcctacaaatcaa

SEQ ID NO: 115540 - DNA, 25 bp, Saccharomyces pastorianus
gttgcacccactccataaaatactg

SEQ ID NO: 115541 - DNA, 25 bp, Saccharomyces pastorianus
ttcatgccaatctctgctatagtct

SEQ ID NO: 115542 - DNA, 25 bp, Saccharomyces pastorianus
catttttatcccacgcggtgtgaag

SEQ ID NO: 115543 - DNA, 25 bp, Saccharomyces pastorianus
catgatatctctggaaccgggtgat

SEQ ID NO: 115544 - DNA, 25 bp, Saccharomyces pastorianus
tggtactaacctcatgttgcaccca

SEQ ID NO: 115545 - DNA, 25 bp, Saccharomyces pastorianus
tagacctgcaaactcgactttcaat

SEQ ID NO: 115546 - DNA, 25 bp, Saccharomyces pastorianus
atatcattttgactggtacgcctgc

SEQ ID NO: 115547 - DNA, 25 bp, Saccharomyces pastorianus
aagggttttgacaccttcatgccaa

SEQ ID NO: 115548 - DNA, 25 bp, Saccharomyces pastorianus
gaatttcgagacacgacgccctaca

SEQ ID NO: 115549 - DNA, 25 bp, Saccharomyces pastorianus
cgccctacaaatccgttcagagtta

SEQ ID NO: 115550 - DNA, 25 bp, Saccharomyces pastorianus
aatgcacagggttctttatctatgg

SEQ ID NO: 115551 - DNA, 25 bp, Saccharomyces pastorianus
tctcctatcacatcagcgtctgagc

SEQ ID NO: 115552 - DNA, 25 bp, Saccharomyces pastorianus
tacatagagccgtagtgaagcttca

SEQ ID NO: 115553 - DNA, 25 bp, Saccharomyces pastorianus
ttcagagttatctcggtgagcagca

SEQ ID NO: 115554 - DNA, 25 bp, Saccharomyces pastorianus
gatggtaccaatataagtcacttta

SEQ ID NO: 115555 - DNA, 25 bp, Saccharomyces pastorianus
ataagtatgattcgccagtctcctc

SEQ ID NO: 115556 - DNA, 25 bp, Saccharomyces pastorianus
agcgtctgagctgggcagtattgcc

SEQ ID NO: 115557 - DNA, 25 bp, Saccharomyces pastorianus
acggaagtcgtaagtcttcactata

SEQ ID NO: 115558 - DNA, 25 bp, Saccharomyces pastorianus
ggtgagcagcaattccaattcaaga

SEQ ID NO: 115559 - DNA, 25 bp, Saccharomyces pastorianus
gagagtagctaccttgtacttacaa

SEQ ID NO: 115560 - DNA, 25 bp, Saccharomyces pastorianus
aagccataatttttcgagcagggta

SEQ ID NO: 115561 - DNA, 25 bp, Saccharomyces pastorianus
aaggagaaacgccacaccgcatggg

SEQ ID NO: 115562 - DNA, 25 bp, Saccharomyces pastorianus
gtcagatacttacttgcatgtgcat

SEQ ID NO: 115563 - DNA, 25 bp, Saccharomyces pastorianus
agtttagcttcaccttttggctcaa

SEQ ID NO: 115564 - DNA, 25 bp, Saccharomyces pastorianus
aagaccgctgggttatctcccagta

SEQ ID NO: 115565 - DNA, 25 bp, Saccharomyces pastorianus
gaacctgatgttcatatccccatga

SEQ ID NO: 115566 - DNA, 25 bp, Saccharomyces pastorianus
tagcatcaacctacttgtactcgat

SEQ ID NO: 115567 - DNA, 25 bp, Saccharomyces pastorianus
gagtttgattcttacagccgttccc

SEQ ID NO: 115568 - DNA, 25 bp, Saccharomyces pastorianus
gattcgtttgatgatggctctagtt

SEQ ID NO: 115569 - DNA, 25 bp, Saccharomyces pastorianus
atgtgccgtgggatagtcagatact

SEQ ID NO: 115570 - DNA, 25 bp, Saccharomyces pastorianus
gggtcccaaccacagaagaagaatt

SEQ ID NO: 115571 - DNA, 25 bp, Saccharomyces pastorianus
gtgtatgccgttattctacagaggc

SEQ ID NO: 115572 - DNA, 25 bp, Saccharomyces pastorianus
aaacctctgtcgatgtacttggaaa

SEQ ID NO: 115573 - DNA, 25 bp, Saccharomyces pastorianus
ggacgctatacatgaggccttttta

SEQ ID NO: 115574 - DNA, 25 bp, Saccharomyces pastorianus
aggacctctggcaaatgagcccgta

SEQ ID NO: 115575 - DNA, 25 bp, Saccharomyces pastorianus
atctattgaagatccgcgctaccaa

SEQ ID NO: 115576 - DNA, 25 bp, Saccharomyces pastorianus
ttagatccattttgggtcccaacca

SEQ ID NO: 115577 - DNA, 25 bp, Saccharomyces pastorianus
tgaggcctttttagactggtcccca

SEQ ID NO: 115578 - DNA, 25 bp, Saccharomyces pastorianus
gcacatgtgcccgttgtggaagcat

SEQ ID NO: 115579 - DNA, 25 bp, Saccharomyces pastorianus
caattggtattttccggattcgagt

SEQ ID NO: 115580 - DNA, 25 bp, Saccharomyces pastorianus
gcccgtacagggaatgtgtgttctt

SEQ ID NO: 115581 - DNA, 25 bp, Saccharomyces pastorianus
ctaacgtatgtagacgataatgacg

SEQ ID NO: 115582 - DNA, 25 bp, Saccharomyces pastorianus
ttagtctgcggctacccattcaatc

SEQ ID NO: 115583 - DNA, 25 bp, Saccharomyces pastorianus
aatatgtcccagcttagtctgcggc

SEQ ID NO: 115584 - DNA, 25 bp, Saccharomyces pastorianus
gcggctacccattcaatcaaagaga

SEQ ID NO: 115585 - DNA, 25 bp, Saccharomyces pastorianus
tccagattgcaatgaaagacttcaa

SEQ ID NO: 115586 - DNA, 25 bp, Saccharomyces pastorianus
ccaagtattttgtccagattgcaat

SEQ ID NO: 115587 - DNA, 25 bp, Saccharomyces pastorianus
gccattataatatgtcccagcttag

SEQ ID NO: 115588 - DNA, 25 bp, Saccharomyces pastorianus
tgataagcccgactcccaagtattt

SEQ ID NO: 115589 - DNA, 25 bp, Saccharomyces pastorianus
acgataatgacgtcttaaaagttgc

SEQ ID NO: 115590 - DNA, 25 bp, Saccharomyces pastorianus
ccgactcccaagtattttgtccaga

SEQ ID NO: 115591 - DNA, 25 bp, Saccharomyces pastorianus
gaagtactcgaaaatctaacgtatg

SEQ ID NO: 115592 - DNA, 25 bp, Saccharomyces pastorianus
ttgttgtttcttctggttctaccaa

SEQ ID NO: 115593 - DNA, 25 bp, Saccharomyces pastorianus
ttgttgtcactgaagatcccgctta

SEQ ID NO: 115594 - DNA, 25 bp, Saccharomyces pastorianus
ctactgcttgttcttacggtgctgg

SEQ ID NO: 115595 - DNA, 25 bp, Saccharomyces pastorianus
agccaactttaatctcttctgactc

SEQ ID NO: 115596 - DNA, 25 bp, Saccharomyces pastorianus
aaacgtggtgtcttgtccgtcactt

SEQ ID NO: 115597 - DNA, 25 bp, Saccharomyces pastorianus
aattagtgtactccggtgtcttcac

SEQ ID NO: 115598 - DNA, 25 bp, Saccharomyces pastorianus
tatgacggtggttactcttccagtt

SEQ ID NO: 115599 - DNA, 25 bp, Saccharomyces pastorianus
cttatgccattccagtcgctaataa

SEQ ID NO: 115600 - DNA, 25 bp, Saccharomyces pastorianus
taacttcactactccttatggtcta

SEQ ID NO: 115601 - DNA, 25 bp, Saccharomyces pastorianus
gaaatcccagtcgtatatgctcaag

SEQ ID NO: 115602 - DNA, 25 bp, Saccharomyces pastorianus
aacgctgtgggtgctggttacctat

SEQ ID NO: 115603 - DNA, 25 bp, Saccharomyces pastorianus
gatatttggttctggtggcacgaca

SEQ ID NO: 115604 - DNA, 25 bp, Saccharomyces pastorianus
atggcgtgagtggtaccgtttacat

SEQ ID NO: 115605 - DNA, 25 bp, Saccharomyces pastorianus
gagcgggttcaattcaatgaccttt

SEQ ID NO: 115606 - DNA, 25 bp, Saccharomyces pastorianus
gatggcaatgaacccaacttaaatt

SEQ ID NO: 115607 - DNA, 25 bp, Saccharomyces pastorianus
gggtttttcttcgtattgtgtctat

SEQ ID NO: 115608 - DNA, 25 bp, Saccharomyces pastorianus
gattccccattcacagcaaggcagc

SEQ ID NO: 115609 - DNA, 25 bp, Saccharomyces pastorianus
aatgttcgctaaagctttcgagcta

SEQ ID NO: 115610 - DNA, 25 bp, Saccharomyces pastorianus
tataagagccaccaacgccaatacg

SEQ ID NO: 115611 - DNA, 25 bp, Saccharomyces pastorianus
aagtctctaccattctgatctattt

SEQ ID NO: 115612 - DNA, 25 bp, Saccharomyces pastorianus
gagccctctcagaacttttcttaga

SEQ ID NO: 115613 - DNA, 25 bp, Saccharomyces pastorianus
tacatggttactgctgggtttttct

SEQ ID NO: 115614 - DNA, 25 bp, Saccharomyces pastorianus
tggcggacttacagcgagacgaaac

SEQ ID NO: 115615 - DNA, 25 bp, Saccharomyces pastorianus
actatcacaataccacgtttcactg

SEQ ID NO: 115616 - DNA, 25 bp, Saccharomyces pastorianus
tatcgaggccaataccactgacttg

SEQ ID NO: 115617 - DNA, 25 bp, Saccharomyces pastorianus
tatccccgtggatatttacccaaca

SEQ ID NO: 115618 - DNA, 25 bp, Saccharomyces pastorianus
tttcatcggatttgtacacgctaat

SEQ ID NO: 115619 - DNA, 25 bp, Saccharomyces pastorianus
gttcactggtttatcgctacaattg

SEQ ID NO: 115620 - DNA, 25 bp, Saccharomyces pastorianus
attaatcaccactcggctaggtatc

SEQ ID NO: 115621 - DNA, 25 bp, Saccharomyces pastorianus
gtctgactcgtatcctagtgagcat

SEQ ID NO: 115622 - DNA, 25 bp, Saccharomyces pastorianus
tagtgactttccaggtcttgtctga

SEQ ID NO: 115623 - DNA, 25 bp, Saccharomyces pastorianus
atggtccggcctcagaatgttcact

SEQ ID NO: 115624 - DNA, 25 bp, Saccharomyces pastorianus
gagcatgccatggttccaatacaag

SEQ ID NO: 115625 - DNA, 25 bp, Saccharomyces pastorianus
agttgggaaccacagctcttcgtcg

SEQ ID NO: 115626 - DNA, 25 bp, Saccharomyces pastorianus
ggataagcacttgtccgtcaactgc

SEQ ID NO: 115627 - DNA, 25 bp, Saccharomyces pastorianus
ataccagcaaattctcgcccaacga

SEQ ID NO: 115628 - DNA, 25 bp, Saccharomyces pastorianus
ggtagtacaagttcaacgccagttg

SEQ ID NO: 115629 - DNA, 25 bp, Saccharomyces pastorianus
gaataacctgccattgacaaatccc

SEQ ID NO: 115630 - DNA, 25 bp, Saccharomyces pastorianus
gcctcaaccgctggtgtagtagata

SEQ ID NO: 115631 - DNA, 25 bp, Saccharomyces pastorianus
accaccatcgtctaataacggtact

SEQ ID NO: 115632 - DNA, 25 bp, Saccharomyces pastorianus
gacaaatcccagcaaactacgagaa

SEQ ID NO: 115633 - DNA, 25 bp, Saccharomyces pastorianus
gatatttttaagcatgccatgcaga

SEQ ID NO: 115634 - DNA, 25 bp, Saccharomyces pastorianus
aaatgtacggaaagctgccatcaaa

SEQ ID NO: 115635 - DNA, 25 bp, Saccharomyces pastorianus
gaaagcggaactattgataccagca

SEQ ID NO: 115636 - DNA, 25 bp, Saccharomyces pastorianus
gagaccccttctactgggtgtcaaa

SEQ ID NO: 115637 - DNA, 25 bp, Saccharomyces pastorianus
gtcaaactttgtaactggctatcca

SEQ ID NO: 115638 - DNA, 25 bp, Saccharomyces pastorianus
gagcggtttcgcatatcatgaactg

SEQ ID NO: 115639 - DNA, 25 bp, Saccharomyces pastorianus
gttgttaagagctctgtccaccatg

SEQ ID NO: 115640 - DNA, 25 bp, Saccharomyces pastorianus
acagtggaactcctctttgcaggcg

SEQ ID NO: 115641 - DNA, 25 bp, Saccharomyces pastorianus
atccagattttgcatcgagacccct

SEQ ID NO: 115642 - DNA, 25 bp, Saccharomyces pastorianus
atttccttggttctctaatgtttgg

SEQ ID NO: 115643 - DNA, 25 bp, Saccharomyces pastorianus
gtgggttgttgtatctcttgctaca

SEQ ID NO: 115644 - DNA, 25 bp, Saccharomyces pastorianus
aatatccttcattacctgcaagctg

SEQ ID NO: 115645 - DNA, 25 bp, Saccharomyces pastorianus
aagatattatcgacggttcccaatt

SEQ ID NO: 115646 - DNA, 25 bp, Saccharomyces pastorianus
gtccaccatgacagtttgacctctg

SEQ ID NO: 115647 - DNA, 25 bp, Saccharomyces pastorianus
ggcaatgttttctccatgtcatcta

SEQ ID NO: 115648 - DNA, 25 bp, Saccharomyces pastorianus
tgtccaattattcaagttcgcgcaa

SEQ ID NO: 115649 - DNA, 25 bp, Saccharomyces pastorianus
tagagtctcccacaactataaccaa
